United States Patent Application Publication US 2019/0048337 A1 - sequence listing, part 8

SEQ ID NO: 239317 - RNA, 22 nt, Artificial Sequence
  Synthetic
uaaucuugcaaauccucaacua

SEQ ID NO: 239318 - RNA, 23 nt, Artificial Sequence
  Synthetic
auaaucuugcaaauccucaacua

SEQ ID NO: 239319 - RNA, 24 nt, Artificial Sequence
  Synthetic
cauaaucuugcaaauccucaacua

SEQ ID NO: 239320 - RNA, 18 nt, Artificial Sequence
  Synthetic
gccaacuucagucaacua

SEQ ID NO: 239321 - RNA, 19 nt, Artificial Sequence
  Synthetic
ggccaacuucagucaacua

SEQ ID NO: 239322 - RNA, 20 nt, Artificial Sequence
  Synthetic
uggccaacuucagucaacua

SEQ ID NO: 239323 - RNA, 21 nt, Artificial Sequence
  Synthetic
auggccaacuucagucaacua

SEQ ID NO: 239324 - RNA, 22 nt, Artificial Sequence
  Synthetic
aauggccaacuucagucaacua

SEQ ID NO: 239325 - RNA, 23 nt, Artificial Sequence
  Synthetic
caauggccaacuucagucaacua

SEQ ID NO: 239326 - RNA, 24 nt, Artificial Sequence
  Synthetic
acaauggccaacuucagucaacua

SEQ ID NO: 239327 - RNA, 18 nt, Artificial Sequence
  Synthetic
aaaagguuuacagaacua

SEQ ID NO: 239328 - RNA, 19 nt, Artificial Sequence
  Synthetic
caaaagguuuacagaacua

SEQ ID NO: 239329 - RNA, 20 nt, Artificial Sequence
  Synthetic
ucaaaagguuuacagaacua

SEQ ID NO: 239330 - RNA, 21 nt, Artificial Sequence
  Synthetic
uucaaaagguuuacagaacua

SEQ ID NO: 239331 - RNA, 22 nt, Artificial Sequence
  Synthetic
uuucaaaagguuuacagaacua

SEQ ID NO: 239332 - RNA, 23 nt, Artificial Sequence
  Synthetic
cuuucaaaagguuuacagaacua

SEQ ID NO: 239333 - RNA, 24 nt, Artificial Sequence
  Synthetic
acuuucaaaagguuuacagaacua

SEQ ID NO: 239334 - RNA, 18 nt, Artificial Sequence
  Synthetic
aaauuucccugagaacua

SEQ ID NO: 239335 - RNA, 19 nt, Artificial Sequence
  Synthetic
caaauuucccugagaacua

SEQ ID NO: 239336 - RNA, 20 nt, Artificial Sequence
  Synthetic
ucaaauuucccugagaacua

SEQ ID NO: 239337 - RNA, 21 nt, Artificial Sequence
  Synthetic
uucaaauuucccugagaacua

SEQ ID NO: 239338 - RNA, 22 nt, Artificial Sequence
  Synthetic
uuucaaauuucccugagaacua

SEQ ID NO: 239339 - RNA, 23 nt, Artificial Sequence
  Synthetic
cuuucaaauuucccugagaacua

SEQ ID NO: 239340 - RNA, 24 nt, Artificial Sequence
  Synthetic
gcuuucaaauuucccugagaacua

SEQ ID NO: 239341 - RNA, 18 nt, Artificial Sequence
  Synthetic
agaacaugaguagaacua

SEQ ID NO: 239342 - RNA, 19 nt, Artificial Sequence
  Synthetic
cagaacaugaguagaacua

SEQ ID NO: 239343 - RNA, 20 nt, Artificial Sequence
  Synthetic
acagaacaugaguagaacua

SEQ ID NO: 239344 - RNA, 21 nt, Artificial Sequence
  Synthetic
gacagaacaugaguagaacua

SEQ ID NO: 239345 - RNA, 22 nt, Artificial Sequence
  Synthetic
ugacagaacaugaguagaacua

SEQ ID NO: 239346 - RNA, 23 nt, Artificial Sequence
  Synthetic
uugacagaacaugaguagaacua

SEQ ID NO: 239347 - RNA, 24 nt, Artificial Sequence
  Synthetic
uuugacagaacaugaguagaacua

SEQ ID NO: 239348 - RNA, 18 nt, Artificial Sequence
  Synthetic
aaauccauuuuagaacua

SEQ ID NO: 239349 - RNA, 19 nt, Artificial Sequence
  Synthetic
aaaauccauuuuagaacua

SEQ ID NO: 239350 - RNA, 20 nt, Artificial Sequence
  Synthetic
uaaaauccauuuuagaacua

SEQ ID NO: 239351 - RNA, 21 nt, Artificial Sequence
  Synthetic
auaaaauccauuuuagaacua

SEQ ID NO: 239352 - RNA, 22 nt, Artificial Sequence
  Synthetic
uauaaaauccauuuuagaacua

SEQ ID NO: 239353 - RNA, 23 nt, Artificial Sequence
  Synthetic
cuauaaaauccauuuuagaacua

SEQ ID NO: 239354 - RNA, 24 nt, Artificial Sequence
  Synthetic
ccuauaaaauccauuuuagaacua

SEQ ID NO: 239355 - RNA, 18 nt, Artificial Sequence
  Synthetic
ggcagaaauccugaacua

SEQ ID NO: 239356 - RNA, 19 nt, Artificial Sequence
  Synthetic
aggcagaaauccugaacua

SEQ ID NO: 239357 - RNA, 20 nt, Artificial Sequence
  Synthetic
uaggcagaaauccugaacua

SEQ ID NO: 239358 - RNA, 21 nt, Artificial Sequence
  Synthetic
auaggcagaaauccugaacua

SEQ ID NO: 239359 - RNA, 22 nt, Artificial Sequence
  Synthetic
aauaggcagaaauccugaacua

SEQ ID NO: 239360 - RNA, 23 nt, Artificial Sequence
  Synthetic
aaauaggcagaaauccugaacua

SEQ ID NO: 239361 - RNA, 24 nt, Artificial Sequence
  Synthetic
uaaauaggcagaaauccugaacua

SEQ ID NO: 239362 - RNA, 18 nt, Artificial Sequence
  Synthetic
uuguguuccgcugaacua

SEQ ID NO: 239363 - RNA, 19 nt, Artificial Sequence
  Synthetic
guuguguuccgcugaacua

SEQ ID NO: 239364 - RNA, 20 nt, Artificial Sequence
  Synthetic
gguuguguuccgcugaacua

SEQ ID NO: 239365 - RNA, 21 nt, Artificial Sequence
  Synthetic
agguuguguuccgcugaacua

SEQ ID NO: 239366 - RNA, 22 nt, Artificial Sequence
  Synthetic
aagguuguguuccgcugaacua

SEQ ID NO: 239367 - RNA, 23 nt, Artificial Sequence
  Synthetic
caagguuguguuccgcugaacua

SEQ ID NO: 239368 - RNA, 24 nt, Artificial Sequence
  Synthetic
acaagguuguguuccgcugaacua

SEQ ID NO: 239369 - RNA, 18 nt, Artificial Sequence
  Synthetic
ugguaaaacggugaacua

SEQ ID NO: 239370 - RNA, 19 nt, Artificial Sequence
  Synthetic
augguaaaacggugaacua

SEQ ID NO: 239371 - RNA, 20 nt, Artificial Sequence
  Synthetic
caugguaaaacggugaacua

SEQ ID NO: 239372 - RNA, 21 nt, Artificial Sequence
  Synthetic
ucaugguaaaacggugaacua

SEQ ID NO: 239373 - RNA, 22 nt, Artificial Sequence
  Synthetic
gucaugguaaaacggugaacua

SEQ ID NO: 239374 - RNA, 23 nt, Artificial Sequence
  Synthetic
ugucaugguaaaacggugaacua

SEQ ID NO: 239375 - RNA, 24 nt, Artificial Sequence
  Synthetic
augucaugguaaaacggugaacua

SEQ ID NO: 239376 - RNA, 18 nt, Artificial Sequence
  Synthetic
uacauuuaaaaauaacua

SEQ ID NO: 239377 - RNA, 19 nt, Artificial Sequence
  Synthetic
guacauuuaaaaauaacua

SEQ ID NO: 239378 - RNA, 20 nt, Artificial Sequence
  Synthetic
uguacauuuaaaaauaacua

SEQ ID NO: 239379 - RNA, 21 nt, Artificial Sequence
  Synthetic
uuguacauuuaaaaauaacua

SEQ ID NO: 239380 - RNA, 22 nt, Artificial Sequence
  Synthetic
cuuguacauuuaaaaauaacua

SEQ ID NO: 239381 - RNA, 23 nt, Artificial Sequence
  Synthetic
acuuguacauuuaaaaauaacua

SEQ ID NO: 239382 - RNA, 24 nt, Artificial Sequence
  Synthetic
uacuuguacauuuaaaaauaacua

SEQ ID NO: 239383 - RNA, 18 nt, Artificial Sequence
  Synthetic
uacucacacaaauaacua

SEQ ID NO: 239384 - RNA, 19 nt, Artificial Sequence
  Synthetic
guacucacacaaauaacua

SEQ ID NO: 239385 - RNA, 20 nt, Artificial Sequence
  Synthetic
uguacucacacaaauaacua

SEQ ID NO: 239386 - RNA, 21 nt, Artificial Sequence
  Synthetic
uuguacucacacaaauaacua

SEQ ID NO: 239387 - RNA, 22 nt, Artificial Sequence
  Synthetic
auuguacucacacaaauaacua

SEQ ID NO: 239388 - RNA, 23 nt, Artificial Sequence
  Synthetic
gauuguacucacacaaauaacua

SEQ ID NO: 239389 - RNA, 24 nt, Artificial Sequence
  Synthetic
agauuguacucacacaaauaacua

SEQ ID NO: 239390 - RNA, 18 nt, Artificial Sequence
  Synthetic
uaaacaaguauauaacua

SEQ ID NO: 239391 - RNA, 19 nt, Artificial Sequence
  Synthetic
uuaaacaaguauauaacua

SEQ ID NO: 239392 - RNA, 20 nt, Artificial Sequence
  Synthetic
uuuaaacaaguauauaacua

SEQ ID NO: 239393 - RNA, 21 nt, Artificial Sequence
  Synthetic
uuuuaaacaaguauauaacua

SEQ ID NO: 239394 - RNA, 22 nt, Artificial Sequence
  Synthetic
uuuuuaaacaaguauauaacua

SEQ ID NO: 239395 - RNA, 23 nt, Artificial Sequence
  Synthetic
guuuuuaaacaaguauauaacua

SEQ ID NO: 239396 - RNA, 24 nt, Artificial Sequence
  Synthetic
gguuuuuaaacaaguauauaacua

SEQ ID NO: 239397 - RNA, 18 nt, Artificial Sequence
  Synthetic
auaucacucugguaacua

SEQ ID NO: 239398 - RNA, 19 nt, Artificial Sequence
  Synthetic
uauaucacucugguaacua

SEQ ID NO: 239399 - RNA, 20 nt, Artificial Sequence
  Synthetic
auauaucacucugguaacua

SEQ ID NO: 239400 - RNA, 21 nt, Artificial Sequence
  Synthetic
aauauaucacucugguaacua

SEQ ID NO: 239401 - RNA, 22 nt, Artificial Sequence
  Synthetic
aaauauaucacucugguaacua

SEQ ID NO: 239402 - RNA, 23 nt, Artificial Sequence
  Synthetic
caaauauaucacucugguaacua

SEQ ID NO: 239403 - RNA, 24 nt, Artificial Sequence
  Synthetic
ucaaauauaucacucugguaacua

SEQ ID NO: 239404 - RNA, 18 nt, Artificial Sequence
  Synthetic
auuacuuggugguaacua

SEQ ID NO: 239405 - RNA, 19 nt, Artificial Sequence
  Synthetic
aauuacuuggugguaacua

SEQ ID NO: 239406 - RNA, 20 nt, Artificial Sequence
  Synthetic
uaauuacuuggugguaacua

SEQ ID NO: 239407 - RNA, 21 nt, Artificial Sequence
  Synthetic
guaauuacuuggugguaacua

SEQ ID NO: 239408 - RNA, 22 nt, Artificial Sequence
  Synthetic
aguaauuacuuggugguaacua

SEQ ID NO: 239409 - RNA, 23 nt, Artificial Sequence
  Synthetic
caguaauuacuuggugguaacua

SEQ ID NO: 239410 - RNA, 24 nt, Artificial Sequence
  Synthetic
ucaguaauuacuuggugguaacua

SEQ ID NO: 239411 - RNA, 18 nt, Artificial Sequence
  Synthetic
uuucugucugcuuaacua

SEQ ID NO: 239412 - RNA, 19 nt, Artificial Sequence
  Synthetic
uuuucugucugcuuaacua

SEQ ID NO: 239413 - RNA, 20 nt, Artificial Sequence
  Synthetic
auuuucugucugcuuaacua

SEQ ID NO: 239414 - RNA, 21 nt, Artificial Sequence
  Synthetic
gauuuucugucugcuuaacua

SEQ ID NO: 239415 - RNA, 22 nt, Artificial Sequence
  Synthetic
ugauuuucugucugcuuaacua

SEQ ID NO: 239416 - RNA, 23 nt, Artificial Sequence
  Synthetic
uugauuuucugucugcuuaacua

SEQ ID NO: 239417 - RNA, 24 nt, Artificial Sequence
  Synthetic
cuugauuuucugucugcuuaacua

SEQ ID NO: 239418 - RNA, 18 nt, Artificial Sequence
  Synthetic
aaagguacauuuuaacua

SEQ ID NO: 239419 - RNA, 19 nt, Artificial Sequence
  Synthetic
aaaagguacauuuuaacua

SEQ ID NO: 239420 - RNA, 20 nt, Artificial Sequence
  Synthetic
gaaaagguacauuuuaacua

SEQ ID NO: 239421 - RNA, 21 nt, Artificial Sequence
  Synthetic
ugaaaagguacauuuuaacua

SEQ ID NO: 239422 - RNA, 22 nt, Artificial Sequence
  Synthetic
gugaaaagguacauuuuaacua

SEQ ID NO: 239423 - RNA, 23 nt, Artificial Sequence
  Synthetic
agugaaaagguacauuuuaacua

SEQ ID NO: 239424 - RNA, 24 nt, Artificial Sequence
  Synthetic
aagugaaaagguacauuuuaacua

SEQ ID NO: 239425 - RNA, 18 nt, Artificial Sequence
  Synthetic
ucaauuuuuaaaacacua

SEQ ID NO: 239426 - RNA, 19 nt, Artificial Sequence
  Synthetic
uucaauuuuuaaaacacua

SEQ ID NO: 239427 - RNA, 20 nt, Artificial Sequence
  Synthetic
guucaauuuuuaaaacacua

SEQ ID NO: 239428 - RNA, 21 nt, Artificial Sequence
  Synthetic
uguucaauuuuuaaaacacua

SEQ ID NO: 239429 - RNA, 22 nt, Artificial Sequence
  Synthetic
guguucaauuuuuaaaacacua

SEQ ID NO: 239430 - RNA, 23 nt, Artificial Sequence
  Synthetic
uguguucaauuuuuaaaacacua

SEQ ID NO: 239431 - RNA, 24 nt, Artificial Sequence
  Synthetic
guguguucaauuuuuaaaacacua

SEQ ID NO: 239432 - RNA, 18 nt, Artificial Sequence
  Synthetic
cuuuggcuuuuaacacua

SEQ ID NO: 239433 - RNA, 19 nt, Artificial Sequence
  Synthetic
ccuuuggcuuuuaacacua

SEQ ID NO: 239434 - RNA, 20 nt, Artificial Sequence
  Synthetic
uccuuuggcuuuuaacacua

SEQ ID NO: 239435 - RNA, 21 nt, Artificial Sequence
  Synthetic
uuccuuuggcuuuuaacacua

SEQ ID NO: 239436 - RNA, 22 nt, Artificial Sequence
  Synthetic
uuuccuuuggcuuuuaacacua

SEQ ID NO: 239437 - RNA, 23 nt, Artificial Sequence
  Synthetic
cuuuccuuuggcuuuuaacacua

SEQ ID NO: 239438 - RNA, 24 nt, Artificial Sequence
  Synthetic
gcuuuccuuuggcuuuuaacacua

SEQ ID NO: 239439 - RNA, 18 nt, Artificial Sequence
  Synthetic
gauagcuucagcacacua

SEQ ID NO: 239440 - RNA, 19 nt, Artificial Sequence
  Synthetic
agauagcuucagcacacua

SEQ ID NO: 239441 - RNA, 20 nt, Artificial Sequence
  Synthetic
aagauagcuucagcacacua

SEQ ID NO: 239442 - RNA, 21 nt, Artificial Sequence
  Synthetic
gaagauagcuucagcacacua

SEQ ID NO: 239443 - RNA, 22 nt, Artificial Sequence
  Synthetic
agaagauagcuucagcacacua

SEQ ID NO: 239444 - RNA, 23 nt, Artificial Sequence
  Synthetic
aagaagauagcuucagcacacua

SEQ ID NO: 239445 - RNA, 24 nt, Artificial Sequence
  Synthetic
caagaagauagcuucagcacacua

SEQ ID NO: 239446 - RNA, 18 nt, Artificial Sequence
  Synthetic
uuggagucagucacacua

SEQ ID NO: 239447 - RNA, 19 nt, Artificial Sequence
  Synthetic
guuggagucagucacacua

SEQ ID NO: 239448 - RNA, 20 nt, Artificial Sequence
  Synthetic
uguuggagucagucacacua

SEQ ID NO: 239449 - RNA, 21 nt, Artificial Sequence
  Synthetic
uuguuggagucagucacacua

SEQ ID NO: 239450 - RNA, 22 nt, Artificial Sequence
  Synthetic
uuuguuggagucagucacacua

SEQ ID NO: 239451 - RNA, 23 nt, Artificial Sequence
  Synthetic
auuuguuggagucagucacacua

SEQ ID NO: 239452 - RNA, 24 nt, Artificial Sequence
  Synthetic
uauuuguuggagucagucacacua

SEQ ID NO: 239453 - RNA, 18 nt, Artificial Sequence
  Synthetic
auauggccagggacacua

SEQ ID NO: 239454 - RNA, 19 nt, Artificial Sequence
  Synthetic
aauauggccagggacacua

SEQ ID NO: 239455 - RNA, 20 nt, Artificial Sequence
  Synthetic
uaauauggccagggacacua

SEQ ID NO: 239456 - RNA, 21 nt, Artificial Sequence
  Synthetic
guaauauggccagggacacua

SEQ ID NO: 239457 - RNA, 22 nt, Artificial Sequence
  Synthetic
gguaauauggccagggacacua

SEQ ID NO: 239458 - RNA, 23 nt, Artificial Sequence
  Synthetic
ugguaauauggccagggacacua

SEQ ID NO: 239459 - RNA, 24 nt, Artificial Sequence
  Synthetic
augguaauauggccagggacacua

SEQ ID NO: 239460 - RNA, 18 nt, Artificial Sequence
  Synthetic
ggggauauaggaccacua

SEQ ID NO: 239461 - RNA, 19 nt, Artificial Sequence
  Synthetic
aggggauauaggaccacua

SEQ ID NO: 239462 - RNA, 20 nt, Artificial Sequence
  Synthetic
aaggggauauaggaccacua

SEQ ID NO: 239463 - RNA, 21 nt, Artificial Sequence
  Synthetic
uaaggggauauaggaccacua

SEQ ID NO: 239464 - RNA, 22 nt, Artificial Sequence
  Synthetic
uuaaggggauauaggaccacua

SEQ ID NO: 239465 - RNA, 23 nt, Artificial Sequence
  Synthetic
guuaaggggauauaggaccacua

SEQ ID NO: 239466 - RNA, 24 nt, Artificial Sequence
  Synthetic
uguuaaggggauauaggaccacua

SEQ ID NO: 239467 - RNA, 18 nt, Artificial Sequence
  Synthetic
cccaggaggggaccacua

SEQ ID NO: 239468 - RNA, 19 nt, Artificial Sequence
  Synthetic
gcccaggaggggaccacua

SEQ ID NO: 239469 - RNA, 20 nt, Artificial Sequence
  Synthetic
ugcccaggaggggaccacua

SEQ ID NO: 239470 - RNA, 21 nt, Artificial Sequence
  Synthetic
cugcccaggaggggaccacua

SEQ ID NO: 239471 - RNA, 22 nt, Artificial Sequence
  Synthetic
ucugcccaggaggggaccacua

SEQ ID NO: 239472 - RNA, 23 nt, Artificial Sequence
  Synthetic
aucugcccaggaggggaccacua

SEQ ID NO: 239473 - RNA, 24 nt, Artificial Sequence
  Synthetic
gaucugcccaggaggggaccacua

SEQ ID NO: 239474 - RNA, 18 nt, Artificial Sequence
  Synthetic
cuccuggacugaccacua

SEQ ID NO: 239475 - RNA, 19 nt, Artificial Sequence
  Synthetic
gcuccuggacugaccacua

SEQ ID NO: 239476 - RNA, 20 nt, Artificial Sequence
  Synthetic
agcuccuggacugaccacua

SEQ ID NO: 239477 - RNA, 21 nt, Artificial Sequence
  Synthetic
uagcuccuggacugaccacua

SEQ ID NO: 239478 - RNA, 22 nt, Artificial Sequence
  Synthetic
cuagcuccuggacugaccacua

SEQ ID NO: 239479 - RNA, 23 nt, Artificial Sequence
  Synthetic
ccuagcuccuggacugaccacua

SEQ ID NO: 239480 - RNA, 24 nt, Artificial Sequence
  Synthetic
accuagcuccuggacugaccacua

SEQ ID NO: 239481 - RNA, 18 nt, Artificial Sequence
  Synthetic
gcuacuuuuuccccacua

SEQ ID NO: 239482 - RNA, 19 nt, Artificial Sequence
  Synthetic
ggcuacuuuuuccccacua

SEQ ID NO: 239483 - RNA, 20 nt, Artificial Sequence
  Synthetic
gggcuacuuuuuccccacua

SEQ ID NO: 239484 - RNA, 21 nt, Artificial Sequence
  Synthetic
agggcuacuuuuuccccacua

SEQ ID NO: 239485 - RNA, 22 nt, Artificial Sequence
  Synthetic
uagggcuacuuuuuccccacua

SEQ ID NO: 239486 - RNA, 23 nt, Artificial Sequence
  Synthetic
uuagggcuacuuuuuccccacua

SEQ ID NO: 239487 - RNA, 24 nt, Artificial Sequence
  Synthetic
uuuagggcuacuuuuuccccacua

SEQ ID NO: 239488 - RNA, 18 nt, Artificial Sequence
  Synthetic
gauccagcaaucccacua

SEQ ID NO: 239489 - RNA, 19 nt, Artificial Sequence
  Synthetic
ugauccagcaaucccacua

SEQ ID NO: 239490 - RNA, 20 nt, Artificial Sequence
  Synthetic
augauccagcaaucccacua

SEQ ID NO: 239491 - RNA, 21 nt, Artificial Sequence
  Synthetic
gaugauccagcaaucccacua

SEQ ID NO: 239492 - RNA, 22 nt, Artificial Sequence
  Synthetic
agaugauccagcaaucccacua

SEQ ID NO: 239493 - RNA, 23 nt, Artificial Sequence
  Synthetic
cagaugauccagcaaucccacua

SEQ ID NO: 239494 - RNA, 24 nt, Artificial Sequence
  Synthetic
ccagaugauccagcaaucccacua

SEQ ID NO: 239495 - RNA, 18 nt, Artificial Sequence
  Synthetic
ugcucauaguagccacua

SEQ ID NO: 239496 - RNA, 19 nt, Artificial Sequence
  Synthetic
uugcucauaguagccacua

SEQ ID NO: 239497 - RNA, 20 nt, Artificial Sequence
  Synthetic
guugcucauaguagccacua

SEQ ID NO: 239498 - RNA, 21 nt, Artificial Sequence
  Synthetic
aguugcucauaguagccacua

SEQ ID NO: 239499 - RNA, 22 nt, Artificial Sequence
  Synthetic
uaguugcucauaguagccacua

SEQ ID NO: 239500 - RNA, 23 nt, Artificial Sequence
  Synthetic
auaguugcucauaguagccacua

SEQ ID NO: 239501 - RNA, 24 nt, Artificial Sequence
  Synthetic
uauaguugcucauaguagccacua

SEQ ID NO: 239502 - RNA, 18 nt, Artificial Sequence
  Synthetic
caauauaccaugccacua

SEQ ID NO: 239503 - RNA, 19 nt, Artificial Sequence
  Synthetic
gcaauauaccaugccacua

SEQ ID NO: 239504 - RNA, 20 nt, Artificial Sequence
  Synthetic
agcaauauaccaugccacua

SEQ ID NO: 239505 - RNA, 21 nt, Artificial Sequence
  Synthetic
gagcaauauaccaugccacua

SEQ ID NO: 239506 - RNA, 22 nt, Artificial Sequence
  Synthetic
agagcaauauaccaugccacua

SEQ ID NO: 239507 - RNA, 23 nt, Artificial Sequence
  Synthetic
cagagcaauauaccaugccacua

SEQ ID NO: 239508 - RNA, 24 nt, Artificial Sequence
  Synthetic
ccagagcaauauaccaugccacua

SEQ ID NO: 239509 - RNA, 18 nt, Artificial Sequence
  Synthetic
gcauuacaguauccacua

SEQ ID NO: 239510 - RNA, 19 nt, Artificial Sequence
  Synthetic
agcauuacaguauccacua

SEQ ID NO: 239511 - RNA, 20 nt, Artificial Sequence
  Synthetic
aagcauuacaguauccacua

SEQ ID NO: 239512 - RNA, 21 nt, Artificial Sequence
  Synthetic
gaagcauuacaguauccacua

SEQ ID NO: 239513 - RNA, 22 nt, Artificial Sequence
  Synthetic
ugaagcauuacaguauccacua

SEQ ID NO: 239514 - RNA, 23 nt, Artificial Sequence
  Synthetic
augaagcauuacaguauccacua

SEQ ID NO: 239515 - RNA, 24 nt, Artificial Sequence
  Synthetic
gaugaagcauuacaguauccacua

SEQ ID NO: 239516 - RNA, 18 nt, Artificial Sequence
  Synthetic
aauuuaaaaaaaucacua

SEQ ID NO: 239517 - RNA, 19 nt, Artificial Sequence
  Synthetic
aaauuuaaaaaaaucacua

SEQ ID NO: 239518 - RNA, 20 nt, Artificial Sequence
  Synthetic
aaaauuuaaaaaaaucacua

SEQ ID NO: 239519 - RNA, 21 nt, Artificial Sequence
  Synthetic
caaaauuuaaaaaaaucacua

SEQ ID NO: 239520 - RNA, 22 nt, Artificial Sequence
  Synthetic
ccaaaauuuaaaaaaaucacua

SEQ ID NO: 239521 - RNA, 23 nt, Artificial Sequence
  Synthetic
accaaaauuuaaaaaaaucacua

SEQ ID NO: 239522 - RNA, 24 nt, Artificial Sequence
  Synthetic
aaccaaaauuuaaaaaaaucacua

SEQ ID NO: 239523 - RNA, 18 nt, Artificial Sequence
  Synthetic
ugcacguuagaaucacua

SEQ ID NO: 239524 - RNA, 19 nt, Artificial Sequence
  Synthetic
cugcacguuagaaucacua

SEQ ID NO: 239525 - RNA, 20 nt, Artificial Sequence
  Synthetic
gcugcacguuagaaucacua

SEQ ID NO: 239526 - RNA, 21 nt, Artificial Sequence
  Synthetic
ggcugcacguuagaaucacua

SEQ ID NO: 239527 - RNA, 22 nt, Artificial Sequence
  Synthetic
uggcugcacguuagaaucacua

SEQ ID NO: 239528 - RNA, 23 nt, Artificial Sequence
  Synthetic
cuggcugcacguuagaaucacua

SEQ ID NO: 239529 - RNA, 24 nt, Artificial Sequence
  Synthetic
ccuggcugcacguuagaaucacua

SEQ ID NO: 239530 - RNA, 18 nt, Artificial Sequence
  Synthetic
cagaaaaaggaaucacua

SEQ ID NO: 239531 - RNA, 19 nt, Artificial Sequence
  Synthetic
acagaaaaaggaaucacua

SEQ ID NO: 239532 - RNA, 20 nt, Artificial Sequence
  Synthetic
cacagaaaaaggaaucacua

SEQ ID NO: 239533 - RNA, 21 nt, Artificial Sequence
  Synthetic
acacagaaaaaggaaucacua

SEQ ID NO: 239534 - RNA, 22 nt, Artificial Sequence
  Synthetic
aacacagaaaaaggaaucacua

SEQ ID NO: 239535 - RNA, 23 nt, Artificial Sequence
  Synthetic
aaacacagaaaaaggaaucacua

SEQ ID NO: 239536 - RNA, 24 nt, Artificial Sequence
  Synthetic
aaaacacagaaaaaggaaucacua

SEQ ID NO: 239537 - RNA, 18 nt, Artificial Sequence
  Synthetic
uaucagauuguaucacua

SEQ ID NO: 239538 - RNA, 19 nt, Artificial Sequence
  Synthetic
auaucagauuguaucacua

SEQ ID NO: 239539 - RNA, 20 nt, Artificial Sequence
  Synthetic
gauaucagauuguaucacua

SEQ ID NO: 239540 - RNA, 21 nt, Artificial Sequence
  Synthetic
ugauaucagauuguaucacua

SEQ ID NO: 239541 - RNA, 22 nt, Artificial Sequence
  Synthetic
gugauaucagauuguaucacua

SEQ ID NO: 239542 - RNA, 23 nt, Artificial Sequence
  Synthetic
ugugauaucagauuguaucacua

SEQ ID NO: 239543 - RNA, 24 nt, Artificial Sequence
  Synthetic
cugugauaucagauuguaucacua

SEQ ID NO: 239544 - RNA, 18 nt, Artificial Sequence
  Synthetic
gguagcuaccacucacua

SEQ ID NO: 239545 - RNA, 19 nt, Artificial Sequence
  Synthetic
agguagcuaccacucacua

SEQ ID NO: 239546 - RNA, 20 nt, Artificial Sequence
  Synthetic
cagguagcuaccacucacua

SEQ ID NO: 239547 - RNA, 21 nt, Artificial Sequence
  Synthetic
ccagguagcuaccacucacua

SEQ ID NO: 239548 - RNA, 22 nt, Artificial Sequence
  Synthetic
uccagguagcuaccacucacua

SEQ ID NO: 239549 - RNA, 23 nt, Artificial Sequence
  Synthetic
cuccagguagcuaccacucacua

SEQ ID NO: 239550 - RNA, 24 nt, Artificial Sequence
  Synthetic
gcuccagguagcuaccacucacua

SEQ ID NO: 239551 - RNA, 18 nt, Artificial Sequence
  Synthetic
cuacacuaacucucacua

SEQ ID NO: 239552 - RNA, 19 nt, Artificial Sequence
  Synthetic
acuacacuaacucucacua

SEQ ID NO: 239553 - RNA, 20 nt, Artificial Sequence
  Synthetic
gacuacacuaacucucacua

SEQ ID NO: 239554 - RNA, 21 nt, Artificial Sequence
  Synthetic
ugacuacacuaacucucacua

SEQ ID NO: 239555 - RNA, 22 nt, Artificial Sequence
  Synthetic
augacuacacuaacucucacua

SEQ ID NO: 239556 - RNA, 23 nt, Artificial Sequence
  Synthetic
gaugacuacacuaacucucacua

SEQ ID NO: 239557 - RNA, 24 nt, Artificial Sequence
  Synthetic
ugaugacuacacuaacucucacua

SEQ ID NO: 239558 - RNA, 18 nt, Artificial Sequence
  Synthetic
auuguguagaugucacua

SEQ ID NO: 239559 - RNA, 19 nt, Artificial Sequence
  Synthetic
uauuguguagaugucacua

SEQ ID NO: 239560 - RNA, 20 nt, Artificial Sequence
  Synthetic
uuauuguguagaugucacua

SEQ ID NO: 239561 - RNA, 21 nt, Artificial Sequence
  Synthetic
guuauuguguagaugucacua

SEQ ID NO: 239562 - RNA, 22 nt, Artificial Sequence
  Synthetic
gguuauuguguagaugucacua

SEQ ID NO: 239563 - RNA, 23 nt, Artificial Sequence
  Synthetic
ugguuauuguguagaugucacua

SEQ ID NO: 239564 - RNA, 24 nt, Artificial Sequence
  Synthetic
augguuauuguguagaugucacua

SEQ ID NO: 239565 - RNA, 18 nt, Artificial Sequence
  Synthetic
uguuccagcucuucacua

SEQ ID NO: 239566 - RNA, 19 nt, Artificial Sequence
  Synthetic
uuguuccagcucuucacua

SEQ ID NO: 239567 - RNA, 20 nt, Artificial Sequence
  Synthetic
auuguuccagcucuucacua

SEQ ID NO: 239568 - RNA, 21 nt, Artificial Sequence
  Synthetic
gauuguuccagcucuucacua

SEQ ID NO: 239569 - RNA, 22 nt, Artificial Sequence
  Synthetic
agauuguuccagcucuucacua

SEQ ID NO: 239570 - RNA, 23 nt, Artificial Sequence
  Synthetic
cagauuguuccagcucuucacua

SEQ ID NO: 239571 - RNA, 24 nt, Artificial Sequence
  Synthetic
ucagauuguuccagcucuucacua

SEQ ID NO: 239572 - RNA, 18 nt, Artificial Sequence
  Synthetic
agaccucuaaguucacua

SEQ ID NO: 239573 - RNA, 19 nt, Artificial Sequence
  Synthetic
aagaccucuaaguucacua

SEQ ID NO: 239574 - RNA, 20 nt, Artificial Sequence
  Synthetic
gaagaccucuaaguucacua

SEQ ID NO: 239575 - RNA, 21 nt, Artificial Sequence
  Synthetic
agaagaccucuaaguucacua

SEQ ID NO: 239576 - RNA, 22 nt, Artificial Sequence
  Synthetic
uagaagaccucuaaguucacua

SEQ ID NO: 239577 - RNA, 23 nt, Artificial Sequence
  Synthetic
guagaagaccucuaaguucacua

SEQ ID NO: 239578 - RNA, 24 nt, Artificial Sequence
  Synthetic
uguagaagaccucuaaguucacua

SEQ ID NO: 239579 - RNA, 18 nt, Artificial Sequence
  Synthetic
ucaacuuaaaaaagacua

SEQ ID NO: 239580 - RNA, 19 nt, Artificial Sequence
  Synthetic
uucaacuuaaaaaagacua

SEQ ID NO: 239581 - RNA, 20 nt, Artificial Sequence
  Synthetic
uuucaacuuaaaaaagacua

SEQ ID NO: 239582 - RNA, 21 nt, Artificial Sequence
  Synthetic
auuucaacuuaaaaaagacua

SEQ ID NO: 239583 - RNA, 22 nt, Artificial Sequence
  Synthetic
uauuucaacuuaaaaaagacua

SEQ ID NO: 239584 - RNA, 23 nt, Artificial Sequence
  Synthetic
cuauuucaacuuaaaaaagacua

SEQ ID NO: 239585 - RNA, 24 nt, Artificial Sequence
  Synthetic
acuauuucaacuuaaaaaagacua

SEQ ID NO: 239586 - RNA, 18 nt, Artificial Sequence
  Synthetic
uguuaguaauuaagacua

SEQ ID NO: 239587 - RNA, 19 nt, Artificial Sequence
  Synthetic
auguuaguaauuaagacua

SEQ ID NO: 239588 - RNA, 20 nt, Artificial Sequence
  Synthetic
aauguuaguaauuaagacua

SEQ ID NO: 239589 - RNA, 21 nt, Artificial Sequence
  Synthetic
aaauguuaguaauuaagacua

SEQ ID NO: 239590 - RNA, 22 nt, Artificial Sequence
  Synthetic
aaaauguuaguaauuaagacua

SEQ ID NO: 239591 - RNA, 23 nt, Artificial Sequence
  Synthetic
uaaaauguuaguaauuaagacua

SEQ ID NO: 239592 - RNA, 24 nt, Artificial Sequence
  Synthetic
guaaaauguuaguaauuaagacua

SEQ ID NO: 239593 - RNA, 18 nt, Artificial Sequence
  Synthetic
aaucuaagauuaagacua

SEQ ID NO: 239594 - RNA, 19 nt, Artificial Sequence
  Synthetic
gaaucuaagauuaagacua

SEQ ID NO: 239595 - RNA, 20 nt, Artificial Sequence
  Synthetic
agaaucuaagauuaagacua

SEQ ID NO: 239596 - RNA, 21 nt, Artificial Sequence
  Synthetic
gagaaucuaagauuaagacua

SEQ ID NO: 239597 - RNA, 22 nt, Artificial Sequence
  Synthetic
agagaaucuaagauuaagacua

SEQ ID NO: 239598 - RNA, 23 nt, Artificial Sequence
  Synthetic
uagagaaucuaagauuaagacua

SEQ ID NO: 239599 - RNA, 24 nt, Artificial Sequence
  Synthetic
uuagagaaucuaagauuaagacua

SEQ ID NO: 239600 - RNA, 18 nt, Artificial Sequence
  Synthetic
agagacugucacagacua

SEQ ID NO: 239601 - RNA, 19 nt, Artificial Sequence
  Synthetic
gagagacugucacagacua

SEQ ID NO: 239602 - RNA, 20 nt, Artificial Sequence
  Synthetic
ugagagacugucacagacua

SEQ ID NO: 239603 - RNA, 21 nt, Artificial Sequence
  Synthetic
cugagagacugucacagacua

SEQ ID NO: 239604 - RNA, 22 nt, Artificial Sequence
  Synthetic
acugagagacugucacagacua

SEQ ID NO: 239605 - RNA, 23 nt, Artificial Sequence
  Synthetic
aacugagagacugucacagacua

SEQ ID NO: 239606 - RNA, 24 nt, Artificial Sequence
  Synthetic
aaacugagagacugucacagacua

SEQ ID NO: 239607 - RNA, 18 nt, Artificial Sequence
  Synthetic
uuggagauguacagacua

SEQ ID NO: 239608 - RNA, 19 nt, Artificial Sequence
  Synthetic
guuggagauguacagacua

SEQ ID NO: 239609 - RNA, 20 nt, Artificial Sequence
  Synthetic
uguuggagauguacagacua

SEQ ID NO: 239610 - RNA, 21 nt, Artificial Sequence
  Synthetic
guguuggagauguacagacua

SEQ ID NO: 239611 - RNA, 22 nt, Artificial Sequence
  Synthetic
uguguuggagauguacagacua

SEQ ID NO: 239612 - RNA, 23 nt, Artificial Sequence
  Synthetic
auguguuggagauguacagacua

SEQ ID NO: 239613 - RNA, 24 nt, Artificial Sequence
  Synthetic
cauguguuggagauguacagacua

SEQ ID NO: 239614 - RNA, 18 nt, Artificial Sequence
  Synthetic
uaccagagaggcagacua

SEQ ID NO: 239615 - RNA, 19 nt, Artificial Sequence
  Synthetic
auaccagagaggcagacua

SEQ ID NO: 239616 - RNA, 20 nt, Artificial Sequence
  Synthetic
cauaccagagaggcagacua

SEQ ID NO: 239617 - RNA, 21 nt, Artificial Sequence
  Synthetic
gcauaccagagaggcagacua

SEQ ID NO: 239618 - RNA, 22 nt, Artificial Sequence
  Synthetic
ugcauaccagagaggcagacua

SEQ ID NO: 239619 - RNA, 23 nt, Artificial Sequence
  Synthetic
augcauaccagagaggcagacua

SEQ ID NO: 239620 - RNA, 24 nt, Artificial Sequence
  Synthetic
aaugcauaccagagaggcagacua

SEQ ID NO: 239621 - RNA, 18 nt, Artificial Sequence
  Synthetic
accuaauccugcagacua

SEQ ID NO: 239622 - RNA, 19 nt, Artificial Sequence
  Synthetic
uaccuaauccugcagacua

SEQ ID NO: 239623 - RNA, 20 nt, Artificial Sequence
  Synthetic
cuaccuaauccugcagacua

SEQ ID NO: 239624 - RNA, 21 nt, Artificial Sequence
  Synthetic
ccuaccuaauccugcagacua

SEQ ID NO: 239625 - RNA, 22 nt, Artificial Sequence
  Synthetic
uccuaccuaauccugcagacua

SEQ ID NO: 239626 - RNA, 23 nt, Artificial Sequence
  Synthetic
cuccuaccuaauccugcagacua

SEQ ID NO: 239627 - RNA, 24 nt, Artificial Sequence
  Synthetic
ucuccuaccuaauccugcagacua

SEQ ID NO: 239628 - RNA, 18 nt, Artificial Sequence
  Synthetic
aauuaaauuuucagacua

SEQ ID NO: 239629 - RNA, 19 nt, Artificial Sequence
  Synthetic
caauuaaauuuucagacua

SEQ ID NO: 239630 - RNA, 20 nt, Artificial Sequence
  Synthetic
ccaauuaaauuuucagacua

SEQ ID NO: 239631 - RNA, 21 nt, Artificial Sequence
  Synthetic
accaauuaaauuuucagacua

SEQ ID NO: 239632 - RNA, 22 nt, Artificial Sequence
  Synthetic
aaccaauuaaauuuucagacua

SEQ ID NO: 239633 - RNA, 23 nt, Artificial Sequence
  Synthetic
aaaccaauuaaauuuucagacua

SEQ ID NO: 239634 - RNA, 24 nt, Artificial Sequence
  Synthetic
gaaaccaauuaaauuuucagacua

SEQ ID NO: 239635 - RNA, 18 nt, Artificial Sequence
  Synthetic
agaaagaacaagagacua

SEQ ID NO: 239636 - RNA, 19 nt, Artificial Sequence
  Synthetic
aagaaagaacaagagacua

SEQ ID NO: 239637 - RNA, 20 nt, Artificial Sequence
  Synthetic
uaagaaagaacaagagacua

SEQ ID NO: 239638 - RNA, 21 nt, Artificial Sequence
  Synthetic
auaagaaagaacaagagacua

SEQ ID NO: 239639 - RNA, 22 nt, Artificial Sequence
  Synthetic
cauaagaaagaacaagagacua

SEQ ID NO: 239640 - RNA, 23 nt, Artificial Sequence
  Synthetic
ucauaagaaagaacaagagacua

SEQ ID NO: 239641 - RNA, 24 nt, Artificial Sequence
  Synthetic
uucauaagaaagaacaagagacua

SEQ ID NO: 239642 - RNA, 18 nt, Artificial Sequence
  Synthetic
ugacuuuucaggagacua

SEQ ID NO: 239643 - RNA, 19 nt, Artificial Sequence
  Synthetic
uugacuuuucaggagacua

SEQ ID NO: 239644 - RNA, 20 nt, Artificial Sequence
  Synthetic
guugacuuuucaggagacua

SEQ ID NO: 239645 - RNA, 21 nt, Artificial Sequence
  Synthetic
cguugacuuuucaggagacua

SEQ ID NO: 239646 - RNA, 22 nt, Artificial Sequence
  Synthetic
ucguugacuuuucaggagacua

SEQ ID NO: 239647 - RNA, 23 nt, Artificial Sequence
  Synthetic
aucguugacuuuucaggagacua

SEQ ID NO: 239648 - RNA, 24 nt, Artificial Sequence
  Synthetic
uaucguugacuuuucaggagacua

SEQ ID NO: 239649 - RNA, 18 nt, Artificial Sequence
  Synthetic
gcaccaacccugagacua

SEQ ID NO: 239650 - RNA, 19 nt, Artificial Sequence
  Synthetic
agcaccaacccugagacua

SEQ ID NO: 239651 - RNA, 20 nt, Artificial Sequence
  Synthetic
uagcaccaacccugagacua

SEQ ID NO: 239652 - RNA, 21 nt, Artificial Sequence
  Synthetic
auagcaccaacccugagacua

SEQ ID NO: 239653 - RNA, 22 nt, Artificial Sequence
  Synthetic
cauagcaccaacccugagacua

SEQ ID NO: 239654 - RNA, 23 nt, Artificial Sequence
  Synthetic
acauagcaccaacccugagacua

SEQ ID NO: 239655 - RNA, 24 nt, Artificial Sequence
  Synthetic
uacauagcaccaacccugagacua

SEQ ID NO: 239656 - RNA, 18 nt, Artificial Sequence
  Synthetic
ccucuuccucugagacua

SEQ ID NO: 239657 - RNA, 19 nt, Artificial Sequence
  Synthetic
gccucuuccucugagacua

SEQ ID NO: 239658 - RNA, 20 nt, Artificial Sequence
  Synthetic
cgccucuuccucugagacua

SEQ ID NO: 239659 - RNA, 21 nt, Artificial Sequence
  Synthetic
ucgccucuuccucugagacua

SEQ ID NO: 239660 - RNA, 22 nt, Artificial Sequence
  Synthetic
gucgccucuuccucugagacua

SEQ ID NO: 239661 - RNA, 23 nt, Artificial Sequence
  Synthetic
agucgccucuuccucugagacua

SEQ ID NO: 239662 - RNA, 24 nt, Artificial Sequence
  Synthetic
aagucgccucuuccucugagacua

SEQ ID NO: 239663 - RNA, 18 nt, Artificial Sequence
  Synthetic
aggagaucagugagacua

SEQ ID NO: 239664 - RNA, 19 nt, Artificial Sequence
  Synthetic
aaggagaucagugagacua

SEQ ID NO: 239665 - RNA, 20 nt, Artificial Sequence
  Synthetic
uaaggagaucagugagacua

SEQ ID NO: 239666 - RNA, 21 nt, Artificial Sequence
  Synthetic
uuaaggagaucagugagacua

SEQ ID NO: 239667 - RNA, 22 nt, Artificial Sequence
  Synthetic
auuaaggagaucagugagacua

SEQ ID NO: 239668 - RNA, 23 nt, Artificial Sequence
  Synthetic
uauuaaggagaucagugagacua

SEQ ID NO: 239669 - RNA, 24 nt, Artificial Sequence
  Synthetic
auauuaaggagaucagugagacua

SEQ ID NO: 239670 - RNA, 18 nt, Artificial Sequence
  Synthetic
cagauauaucauagacua

SEQ ID NO: 239671 - RNA, 19 nt, Artificial Sequence
  Synthetic
gcagauauaucauagacua

SEQ ID NO: 239672 - RNA, 20 nt, Artificial Sequence
  Synthetic
ugcagauauaucauagacua

SEQ ID NO: 239673 - RNA, 21 nt, Artificial Sequence
  Synthetic
augcagauauaucauagacua

SEQ ID NO: 239674 - RNA, 22 nt, Artificial Sequence
  Synthetic
aaugcagauauaucauagacua

SEQ ID NO: 239675 - RNA, 23 nt, Artificial Sequence
  Synthetic
aaaugcagauauaucauagacua

SEQ ID NO: 239676 - RNA, 24 nt, Artificial Sequence
  Synthetic
aaaaugcagauauaucauagacua

SEQ ID NO: 239677 - RNA, 18 nt, Artificial Sequence
  Synthetic
cagccuuuggaaggacua

SEQ ID NO: 239678 - RNA, 19 nt, Artificial Sequence
  Synthetic
gcagccuuuggaaggacua

SEQ ID NO: 239679 - RNA, 20 nt, Artificial Sequence
  Synthetic
agcagccuuuggaaggacua

SEQ ID NO: 239680 - RNA, 21 nt, Artificial Sequence
  Synthetic
gagcagccuuuggaaggacua

SEQ ID NO: 239681 - RNA, 22 nt, Artificial Sequence
  Synthetic
agagcagccuuuggaaggacua

SEQ ID NO: 239682 - RNA, 23 nt, Artificial Sequence
  Synthetic
cagagcagccuuuggaaggacua

SEQ ID NO: 239683 - RNA, 24 nt, Artificial Sequence
  Synthetic
acagagcagccuuuggaaggacua

SEQ ID NO: 239684 - RNA, 18 nt, Artificial Sequence
  Synthetic
uguuauuucaagggacua

SEQ ID NO: 239685 - RNA, 19 nt, Artificial Sequence
  Synthetic
auguuauuucaagggacua

SEQ ID NO: 239686 - RNA, 20 nt, Artificial Sequence
  Synthetic
cauguuauuucaagggacua

SEQ ID NO: 239687 - RNA, 21 nt, Artificial Sequence
  Synthetic
ucauguuauuucaagggacua

SEQ ID NO: 239688 - RNA, 22 nt, Artificial Sequence
  Synthetic
gucauguuauuucaagggacua

SEQ ID NO: 239689 - RNA, 23 nt, Artificial Sequence
  Synthetic
ugucauguuauuucaagggacua

SEQ ID NO: 239690 - RNA, 24 nt, Artificial Sequence
  Synthetic
augucauguuauuucaagggacua

SEQ ID NO: 239691 - RNA, 18 nt, Artificial Sequence
  Synthetic
agauuuuuuuaaugacua

SEQ ID NO: 239692 - RNA, 19 nt, Artificial Sequence
  Synthetic
uagauuuuuuuaaugacua

SEQ ID NO: 239693 - RNA, 20 nt, Artificial Sequence
  Synthetic
guagauuuuuuuaaugacua

SEQ ID NO: 239694 - RNA, 21 nt, Artificial Sequence
  Synthetic
uguagauuuuuuuaaugacua

SEQ ID NO: 239695 - RNA, 22 nt, Artificial Sequence
  Synthetic
uuguagauuuuuuuaaugacua

SEQ ID NO: 239696 - RNA, 23 nt, Artificial Sequence
  Synthetic
uuuguagauuuuuuuaaugacua

SEQ ID NO: 239697 - RNA, 24 nt, Artificial Sequence
  Synthetic
guuuguagauuuuuuuaaugacua

SEQ ID NO: 239698 - RNA, 18 nt, Artificial Sequence
  Synthetic
acuagauacacaugacua

SEQ ID NO: 239699 - RNA, 19 nt, Artificial Sequence
  Synthetic
cacuagauacacaugacua

SEQ ID NO: 239700 - RNA, 20 nt, Artificial Sequence
  Synthetic
ccacuagauacacaugacua

SEQ ID NO: 239701 - RNA, 21 nt, Artificial Sequence
  Synthetic
gccacuagauacacaugacua

SEQ ID NO: 239702 - RNA, 22 nt, Artificial Sequence
  Synthetic
agccacuagauacacaugacua

SEQ ID NO: 239703 - RNA, 23 nt, Artificial Sequence
  Synthetic
cagccacuagauacacaugacua

SEQ ID NO: 239704 - RNA, 24 nt, Artificial Sequence
  Synthetic
acagccacuagauacacaugacua

SEQ ID NO: 239705 - RNA, 18 nt, Artificial Sequence
  Synthetic
cacagucucacaugacua

SEQ ID NO: 239706 - RNA, 19 nt, Artificial Sequence
  Synthetic
ucacagucucacaugacua

SEQ ID NO: 239707 - RNA, 20 nt, Artificial Sequence
  Synthetic
cucacagucucacaugacua

SEQ ID NO: 239708 - RNA, 21 nt, Artificial Sequence
  Synthetic
acucacagucucacaugacua

SEQ ID NO: 239709 - RNA, 22 nt, Artificial Sequence
  Synthetic
gacucacagucucacaugacua

SEQ ID NO: 239710 - RNA, 23 nt, Artificial Sequence
  Synthetic
ggacucacagucucacaugacua

SEQ ID NO: 239711 - RNA, 24 nt, Artificial Sequence
  Synthetic
uggacucacagucucacaugacua

SEQ ID NO: 239712 - RNA, 18 nt, Artificial Sequence
  Synthetic
uacaaaaauauaugacua

SEQ ID NO: 239713 - RNA, 19 nt, Artificial Sequence
  Synthetic
uuacaaaaauauaugacua

SEQ ID NO: 239714 - RNA, 20 nt, Artificial Sequence
  Synthetic
uuuacaaaaauauaugacua

SEQ ID NO: 239715 - RNA, 21 nt, Artificial Sequence
  Synthetic
auuuacaaaaauauaugacua

SEQ ID NO: 239716 - RNA, 22 nt, Artificial Sequence
  Synthetic
uauuuacaaaaauauaugacua

SEQ ID NO: 239717 - RNA, 23 nt, Artificial Sequence
  Synthetic
guauuuacaaaaauauaugacua

SEQ ID NO: 239718 - RNA, 24 nt, Artificial Sequence
  Synthetic
gguauuuacaaaaauauaugacua

SEQ ID NO: 239719 - RNA, 18 nt, Artificial Sequence
  Synthetic
gaauaauaccacugacua

SEQ ID NO: 239720 - RNA, 19 nt, Artificial Sequence
  Synthetic
agaauaauaccacugacua

SEQ ID NO: 239721 - RNA, 20 nt, Artificial Sequence
  Synthetic
aagaauaauaccacugacua

SEQ ID NO: 239722 - RNA, 21 nt, Artificial Sequence
  Synthetic
aaagaauaauaccacugacua

SEQ ID NO: 239723 - RNA, 22 nt, Artificial Sequence
  Synthetic
aaaagaauaauaccacugacua

SEQ ID NO: 239724 - RNA, 23 nt, Artificial Sequence
  Synthetic
aaaaagaauaauaccacugacua

SEQ ID NO: 239725 - RNA, 24 nt, Artificial Sequence
  Synthetic
uaaaaagaauaauaccacugacua

SEQ ID NO: 239726 - RNA, 18 nt, Artificial Sequence
  Synthetic
uguuucuuagggugacua

SEQ ID NO: 239727 - RNA, 19 nt, Artificial Sequence
  Synthetic
cuguuucuuagggugacua

SEQ ID NO: 239728 - RNA, 20 nt, Artificial Sequence
  Synthetic
ucuguuucuuagggugacua

SEQ ID NO: 239729 - RNA, 21 nt, Artificial Sequence
  Synthetic
uucuguuucuuagggugacua

SEQ ID NO: 239730 - RNA, 22 nt, Artificial Sequence
  Synthetic
uuucuguuucuuagggugacua

SEQ ID NO: 239731 - RNA, 23 nt, Artificial Sequence
  Synthetic
uuuucuguuucuuagggugacua

SEQ ID NO: 239732 - RNA, 24 nt, Artificial Sequence
  Synthetic
guuuucuguuucuuagggugacua

SEQ ID NO: 239733 - RNA, 18 nt, Artificial Sequence
  Synthetic
uauuagaacaaaauacua

SEQ ID NO: 239734 - RNA, 19 nt, Artificial Sequence
  Synthetic
guauuagaacaaaauacua

SEQ ID NO: 239735 - RNA, 20 nt, Artificial Sequence
  Synthetic
uguauuagaacaaaauacua

SEQ ID NO: 239736 - RNA, 21 nt, Artificial Sequence
  Synthetic
uuguauuagaacaaaauacua

SEQ ID NO: 239737 - RNA, 22 nt, Artificial Sequence
  Synthetic
uuuguauuagaacaaaauacua

SEQ ID NO: 239738 - RNA, 23 nt, Artificial Sequence
  Synthetic
auuuguauuagaacaaaauacua

SEQ ID NO: 239739 - RNA, 24 nt, Artificial Sequence
  Synthetic
cauuuguauuagaacaaaauacua

SEQ ID NO: 239740 - RNA, 18 nt, Artificial Sequence
  Synthetic
uucugagaaucaauacua

SEQ ID NO: 239741 - RNA, 19 nt, Artificial Sequence
  Synthetic
uuucugagaaucaauacua

SEQ ID NO: 239742 - RNA, 20 nt, Artificial Sequence
  Synthetic
auuucugagaaucaauacua

SEQ ID NO: 239743 - RNA, 21 nt, Artificial Sequence
  Synthetic
cauuucugagaaucaauacua

SEQ ID NO: 239744 - RNA, 22 nt, Artificial Sequence
  Synthetic
ccauuucugagaaucaauacua

SEQ ID NO: 239745 - RNA, 23 nt, Artificial Sequence
  Synthetic
uccauuucugagaaucaauacua

SEQ ID NO: 239746 - RNA, 24 nt, Artificial Sequence
  Synthetic
cuccauuucugagaaucaauacua

SEQ ID NO: 239747 - RNA, 18 nt, Artificial Sequence
  Synthetic
cuaggauguagaauacua

SEQ ID NO: 239748 - RNA, 19 nt, Artificial Sequence
  Synthetic
acuaggauguagaauacua

SEQ ID NO: 239749 - RNA, 20 nt, Artificial Sequence
  Synthetic
uacuaggauguagaauacua

SEQ ID NO: 239750 - RNA, 21 nt, Artificial Sequence
  Synthetic
auacuaggauguagaauacua

SEQ ID NO: 239751 - RNA, 22 nt, Artificial Sequence
  Synthetic
aauacuaggauguagaauacua

SEQ ID NO: 239752 - RNA, 23 nt, Artificial Sequence
  Synthetic
aaauacuaggauguagaauacua

SEQ ID NO: 239753 - RNA, 24 nt, Artificial Sequence
  Synthetic
caaauacuaggauguagaauacua

SEQ ID NO: 239754 - RNA, 18 nt, Artificial Sequence
  Synthetic
accacaugagacauacua

SEQ ID NO: 239755 - RNA, 19 nt, Artificial Sequence
  Synthetic
aaccacaugagacauacua

SEQ ID NO: 239756 - RNA, 20 nt, Artificial Sequence
  Synthetic
aaaccacaugagacauacua

SEQ ID NO: 239757 - RNA, 21 nt, Artificial Sequence
  Synthetic
uaaaccacaugagacauacua

SEQ ID NO: 239758 - RNA, 22 nt, Artificial Sequence
  Synthetic
auaaaccacaugagacauacua

SEQ ID NO: 239759 - RNA, 23 nt, Artificial Sequence
  Synthetic
aauaaaccacaugagacauacua

SEQ ID NO: 239760 - RNA, 24 nt, Artificial Sequence
  Synthetic
caauaaaccacaugagacauacua

SEQ ID NO: 239761 - RNA, 18 nt, Artificial Sequence
  Synthetic
cuagaaguaggcauacua

SEQ ID NO: 239762 - RNA, 19 nt, Artificial Sequence
  Synthetic
ucuagaaguaggcauacua

SEQ ID NO: 239763 - RNA, 20 nt, Artificial Sequence
  Synthetic
uucuagaaguaggcauacua

SEQ ID NO: 239764 - RNA, 21 nt, Artificial Sequence
  Synthetic
cuucuagaaguaggcauacua

SEQ ID NO: 239765 - RNA, 22 nt, Artificial Sequence
  Synthetic
acuucuagaaguaggcauacua

SEQ ID NO: 239766 - RNA, 23 nt, Artificial Sequence
  Synthetic
uacuucuagaaguaggcauacua

SEQ ID NO: 239767 - RNA, 24 nt, Artificial Sequence
  Synthetic
uuacuucuagaaguaggcauacua

SEQ ID NO: 239768 - RNA, 18 nt, Artificial Sequence
  Synthetic
aggcacuuugugauacua

SEQ ID NO: 239769 - RNA, 19 nt, Artificial Sequence
  Synthetic
caggcacuuugugauacua

SEQ ID NO: 239770 - RNA, 20 nt, Artificial Sequence
  Synthetic
gcaggcacuuugugauacua

SEQ ID NO: 239771 - RNA, 21 nt, Artificial Sequence
  Synthetic
ggcaggcacuuugugauacua

SEQ ID NO: 239772 - RNA, 22 nt, Artificial Sequence
  Synthetic
cggcaggcacuuugugauacua

SEQ ID NO: 239773 - RNA, 23 nt, Artificial Sequence
  Synthetic
acggcaggcacuuugugauacua

SEQ ID NO: 239774 - RNA, 24 nt, Artificial Sequence
  Synthetic
uacggcaggcacuuugugauacua

SEQ ID NO: 239775 - RNA, 18 nt, Artificial Sequence
  Synthetic
aggaaucaaaguauacua

SEQ ID NO: 239776 - RNA, 19 nt, Artificial Sequence
  Synthetic
aaggaaucaaaguauacua

SEQ ID NO: 239777 - RNA, 20 nt, Artificial Sequence
  Synthetic
uaaggaaucaaaguauacua

SEQ ID NO: 239778 - RNA, 21 nt, Artificial Sequence
  Synthetic
guaaggaaucaaaguauacua

SEQ ID NO: 239779 - RNA, 22 nt, Artificial Sequence
  Synthetic
aguaaggaaucaaaguauacua

SEQ ID NO: 239780 - RNA, 23 nt, Artificial Sequence
  Synthetic
aaguaaggaaucaaaguauacua

SEQ ID NO: 239781 - RNA, 24 nt, Artificial Sequence
  Synthetic
aaaguaaggaaucaaaguauacua

SEQ ID NO: 239782 - RNA, 18 nt, Artificial Sequence
  Synthetic
uuuugaguccuuauacua

SEQ ID NO: 239783 - RNA, 19 nt, Artificial Sequence
  Synthetic
uuuuugaguccuuauacua

SEQ ID NO: 239784 - RNA, 20 nt, Artificial Sequence
  Synthetic
auuuuugaguccuuauacua

SEQ ID NO: 239785 - RNA, 21 nt, Artificial Sequence
  Synthetic
uauuuuugaguccuuauacua

SEQ ID NO: 239786 - RNA, 22 nt, Artificial Sequence
  Synthetic
guauuuuugaguccuuauacua

SEQ ID NO: 239787 - RNA, 23 nt, Artificial Sequence
  Synthetic
uguauuuuugaguccuuauacua

SEQ ID NO: 239788 - RNA, 24 nt, Artificial Sequence
  Synthetic
cuguauuuuugaguccuuauacua

SEQ ID NO: 239789 - RNA, 18 nt, Artificial Sequence
  Synthetic
ugaucuaguaaacuacua

SEQ ID NO: 239790 - RNA, 19 nt, Artificial Sequence
  Synthetic
uugaucuaguaaacuacua

SEQ ID NO: 239791 - RNA, 20 nt, Artificial Sequence
  Synthetic
guugaucuaguaaacuacua

SEQ ID NO: 239792 - RNA, 21 nt, Artificial Sequence
  Synthetic
uguugaucuaguaaacuacua

SEQ ID NO: 239793 - RNA, 22 nt, Artificial Sequence
  Synthetic
guguugaucuaguaaacuacua

SEQ ID NO: 239794 - RNA, 23 nt, Artificial Sequence
  Synthetic
uguguugaucuaguaaacuacua

SEQ ID NO: 239795 - RNA, 24 nt, Artificial Sequence
  Synthetic
cuguguugaucuaguaaacuacua

SEQ ID NO: 239796 - RNA, 18 nt, Artificial Sequence
  Synthetic
cuucuuaauuaacuacua

SEQ ID NO: 239797 - RNA, 19 nt, Artificial Sequence
  Synthetic
gcuucuuaauuaacuacua

SEQ ID NO: 239798 - RNA, 20 nt, Artificial Sequence
  Synthetic
ugcuucuuaauuaacuacua

SEQ ID NO: 239799 - RNA, 21 nt, Artificial Sequence
  Synthetic
augcuucuuaauuaacuacua

SEQ ID NO: 239800 - RNA, 22 nt, Artificial Sequence
  Synthetic
aaugcuucuuaauuaacuacua

SEQ ID NO: 239801 - RNA, 23 nt, Artificial Sequence
  Synthetic
uaaugcuucuuaauuaacuacua

SEQ ID NO: 239802 - RNA, 24 nt, Artificial Sequence
  Synthetic
auaaugcuucuuaauuaacuacua

SEQ ID NO: 239803 - RNA, 18 nt, Artificial Sequence
  Synthetic
gagaaauauuuacuacua

SEQ ID NO: 239804 - RNA, 19 nt, Artificial Sequence
  Synthetic
cgagaaauauuuacuacua

SEQ ID NO: 239805 - RNA, 20 nt, Artificial Sequence
  Synthetic
ccgagaaauauuuacuacua

SEQ ID NO: 239806 - RNA, 21 nt, Artificial Sequence
  Synthetic
cccgagaaauauuuacuacua

SEQ ID NO: 239807 - RNA, 22 nt, Artificial Sequence
  Synthetic
ccccgagaaauauuuacuacua

SEQ ID NO: 239808 - RNA, 23 nt, Artificial Sequence
  Synthetic
accccgagaaauauuuacuacua

SEQ ID NO: 239809 - RNA, 24 nt, Artificial Sequence
  Synthetic
caccccgagaaauauuuacuacua

SEQ ID NO: 239810 - RNA, 18 nt, Artificial Sequence
  Synthetic
uuuuuacugugccuacua

SEQ ID NO: 239811 - RNA, 19 nt, Artificial Sequence
  Synthetic
uuuuuuacugugccuacua

SEQ ID NO: 239812 - RNA, 20 nt, Artificial Sequence
  Synthetic
uuuuuuuacugugccuacua

SEQ ID NO: 239813 - RNA, 21 nt, Artificial Sequence
  Synthetic
uuuuuuuuacugugccuacua

SEQ ID NO: 239814 - RNA, 22 nt, Artificial Sequence
  Synthetic
uuuuuuuuuacugugccuacua

SEQ ID NO: 239815 - RNA, 23 nt, Artificial Sequence
  Synthetic
cuuuuuuuuuacugugccuacua

SEQ ID NO: 239816 - RNA, 24 nt, Artificial Sequence
  Synthetic
acuuuuuuuuuacugugccuacua

SEQ ID NO: 239817 - RNA, 18 nt, Artificial Sequence
  Synthetic
auuugggauuuccuacua

SEQ ID NO: 239818 - RNA, 19 nt, Artificial Sequence
  Synthetic
aauuugggauuuccuacua

SEQ ID NO: 239819 - RNA, 20 nt, Artificial Sequence
  Synthetic
uaauuugggauuuccuacua

SEQ ID NO: 239820 - RNA, 21 nt, Artificial Sequence
  Synthetic
guaauuugggauuuccuacua

SEQ ID NO: 239821 - RNA, 22 nt, Artificial Sequence
  Synthetic
aguaauuugggauuuccuacua

SEQ ID NO: 239822 - RNA, 23 nt, Artificial Sequence
  Synthetic
uaguaauuugggauuuccuacua

SEQ ID NO: 239823 - RNA, 24 nt, Artificial Sequence
  Synthetic
auaguaauuugggauuuccuacua

SEQ ID NO: 239824 - RNA, 18 nt, Artificial Sequence
  Synthetic
caugcaucaaagcuacua

SEQ ID NO: 239825 - RNA, 19 nt, Artificial Sequence
  Synthetic
acaugcaucaaagcuacua

SEQ ID NO: 239826 - RNA, 20 nt, Artificial Sequence
  Synthetic
aacaugcaucaaagcuacua

SEQ ID NO: 239827 - RNA, 21 nt, Artificial Sequence
  Synthetic
gaacaugcaucaaagcuacua

SEQ ID NO: 239828 - RNA, 22 nt, Artificial Sequence
  Synthetic
ugaacaugcaucaaagcuacua

SEQ ID NO: 239829 - RNA, 23 nt, Artificial Sequence
  Synthetic
uugaacaugcaucaaagcuacua

SEQ ID NO: 239830 - RNA, 24 nt, Artificial Sequence
  Synthetic
cuugaacaugcaucaaagcuacua

SEQ ID NO: 239831 - RNA, 18 nt, Artificial Sequence
  Synthetic
cuauaaucccagcuacua

SEQ ID NO: 239832 - RNA, 19 nt, Artificial Sequence
  Synthetic
ccuauaaucccagcuacua

SEQ ID NO: 239833 - RNA, 20 nt, Artificial Sequence
  Synthetic
gccuauaaucccagcuacua

SEQ ID NO: 239834 - RNA, 21 nt, Artificial Sequence
  Synthetic
ugccuauaaucccagcuacua

SEQ ID NO: 239835 - RNA, 22 nt, Artificial Sequence
  Synthetic
augccuauaaucccagcuacua

SEQ ID NO: 239836 - RNA, 23 nt, Artificial Sequence
  Synthetic
caugccuauaaucccagcuacua

SEQ ID NO: 239837 - RNA, 24 nt, Artificial Sequence
  Synthetic
ccaugccuauaaucccagcuacua

SEQ ID NO: 239838 - RNA, 18 nt, Artificial Sequence
  Synthetic
agaaaacugaugcuacua

SEQ ID NO: 239839 - RNA, 19 nt, Artificial Sequence
  Synthetic
uagaaaacugaugcuacua

SEQ ID NO: 239840 - RNA, 20 nt, Artificial Sequence
  Synthetic
auagaaaacugaugcuacua

SEQ ID NO: 239841 - RNA, 21 nt, Artificial Sequence
  Synthetic
cauagaaaacugaugcuacua

SEQ ID NO: 239842 - RNA, 22 nt, Artificial Sequence
  Synthetic
acauagaaaacugaugcuacua

SEQ ID NO: 239843 - RNA, 23 nt, Artificial Sequence
  Synthetic
aacauagaaaacugaugcuacua

SEQ ID NO: 239844 - RNA, 24 nt, Artificial Sequence
  Synthetic
aaacauagaaaacugaugcuacua

SEQ ID NO: 239845 - RNA, 18 nt, Artificial Sequence
  Synthetic
gaguuauuuuaucuacua

SEQ ID NO: 239846 - RNA, 19 nt, Artificial Sequence
  Synthetic
agaguuauuuuaucuacua

SEQ ID NO: 239847 - RNA, 20 nt, Artificial Sequence
  Synthetic
gagaguuauuuuaucuacua

SEQ ID NO: 239848 - RNA, 21 nt, Artificial Sequence
  Synthetic
ggagaguuauuuuaucuacua

SEQ ID NO: 239849 - RNA, 22 nt, Artificial Sequence
  Synthetic
aggagaguuauuuuaucuacua

SEQ ID NO: 239850 - RNA, 23 nt, Artificial Sequence
  Synthetic
gaggagaguuauuuuaucuacua

SEQ ID NO: 239851 - RNA, 24 nt, Artificial Sequence
  Synthetic
ggaggagaguuauuuuaucuacua

SEQ ID NO: 239852 - RNA, 18 nt, Artificial Sequence
  Synthetic
auauuguuuguucuacua

SEQ ID NO: 239853 - RNA, 19 nt, Artificial Sequence
  Synthetic
aauauuguuuguucuacua

SEQ ID NO: 239854 - RNA, 20 nt, Artificial Sequence
  Synthetic
aaauauuguuuguucuacua

SEQ ID NO: 239855 - RNA, 21 nt, Artificial Sequence
  Synthetic
uaaauauuguuuguucuacua

SEQ ID NO: 239856 - RNA, 22 nt, Artificial Sequence
  Synthetic
guaaauauuguuuguucuacua

SEQ ID NO: 239857 - RNA, 23 nt, Artificial Sequence
  Synthetic
uguaaauauuguuuguucuacua

SEQ ID NO: 239858 - RNA, 24 nt, Artificial Sequence
  Synthetic
guguaaauauuguuuguucuacua

SEQ ID NO: 239859 - RNA, 18 nt, Artificial Sequence
  Synthetic
auuauuauuuuucuacua

SEQ ID NO: 239860 - RNA, 19 nt, Artificial Sequence
  Synthetic
gauuauuauuuuucuacua

SEQ ID NO: 239861 - RNA, 20 nt, Artificial Sequence
  Synthetic
ggauuauuauuuuucuacua

SEQ ID NO: 239862 - RNA, 21 nt, Artificial Sequence
  Synthetic
aggauuauuauuuuucuacua

SEQ ID NO: 239863 - RNA, 22 nt, Artificial Sequence
  Synthetic
aaggauuauuauuuuucuacua

SEQ ID NO: 239864 - RNA, 23 nt, Artificial Sequence
  Synthetic
uaaggauuauuauuuuucuacua

SEQ ID NO: 239865 - RNA, 24 nt, Artificial Sequence
  Synthetic
uuaaggauuauuauuuuucuacua

SEQ ID NO: 239866 - RNA, 18 nt, Artificial Sequence
  Synthetic
ggugagaaaacuguacua

SEQ ID NO: 239867 - RNA, 19 nt, Artificial Sequence
  Synthetic
aggugagaaaacuguacua

SEQ ID NO: 239868 - RNA, 20 nt, Artificial Sequence
  Synthetic
caggugagaaaacuguacua

SEQ ID NO: 239869 - RNA, 21 nt, Artificial Sequence
  Synthetic
ucaggugagaaaacuguacua

SEQ ID NO: 239870 - RNA, 22 nt, Artificial Sequence
  Synthetic
aucaggugagaaaacuguacua

SEQ ID NO: 239871 - RNA, 23 nt, Artificial Sequence
  Synthetic
uaucaggugagaaaacuguacua

SEQ ID NO: 239872 - RNA, 24 nt, Artificial Sequence
  Synthetic
uuaucaggugagaaaacuguacua

SEQ ID NO: 239873 - RNA, 18 nt, Artificial Sequence
  Synthetic
uugagaaccacuguacua

SEQ ID NO: 239874 - RNA, 19 nt, Artificial Sequence
  Synthetic
uuugagaaccacuguacua

SEQ ID NO: 239875 - RNA, 20 nt, Artificial Sequence
  Synthetic
guuugagaaccacuguacua

SEQ ID NO: 239876 - RNA, 21 nt, Artificial Sequence
  Synthetic
aguuugagaaccacuguacua

SEQ ID NO: 239877 - RNA, 22 nt, Artificial Sequence
  Synthetic
aaguuugagaaccacuguacua

SEQ ID NO: 239878 - RNA, 23 nt, Artificial Sequence
  Synthetic
caaguuugagaaccacuguacua

SEQ ID NO: 239879 - RNA, 24 nt, Artificial Sequence
  Synthetic
ucaaguuugagaaccacuguacua

SEQ ID NO: 239880 - RNA, 18 nt, Artificial Sequence
  Synthetic
caggaacuaccuguacua

SEQ ID NO: 239881 - RNA, 19 nt, Artificial Sequence
  Synthetic
ucaggaacuaccuguacua

SEQ ID NO: 239882 - RNA, 20 nt, Artificial Sequence
  Synthetic
uucaggaacuaccuguacua

SEQ ID NO: 239883 - RNA, 21 nt, Artificial Sequence
  Synthetic
guucaggaacuaccuguacua

SEQ ID NO: 239884 - RNA, 22 nt, Artificial Sequence
  Synthetic
uguucaggaacuaccuguacua

SEQ ID NO: 239885 - RNA, 23 nt, Artificial Sequence
  Synthetic
auguucaggaacuaccuguacua

SEQ ID NO: 239886 - RNA, 24 nt, Artificial Sequence
  Synthetic
aauguucaggaacuaccuguacua

SEQ ID NO: 239887 - RNA, 18 nt, Artificial Sequence
  Synthetic
augaaaagauuuguacua

SEQ ID NO: 239888 - RNA, 19 nt, Artificial Sequence
  Synthetic
uaugaaaagauuuguacua

SEQ ID NO: 239889 - RNA, 20 nt, Artificial Sequence
  Synthetic
auaugaaaagauuuguacua

SEQ ID NO: 239890 - RNA, 21 nt, Artificial Sequence
  Synthetic
uauaugaaaagauuuguacua

SEQ ID NO: 239891 - RNA, 22 nt, Artificial Sequence
  Synthetic
uuauaugaaaagauuuguacua

SEQ ID NO: 239892 - RNA, 23 nt, Artificial Sequence
  Synthetic
auuauaugaaaagauuuguacua

SEQ ID NO: 239893 - RNA, 24 nt, Artificial Sequence
  Synthetic
uauuauaugaaaagauuuguacua

SEQ ID NO: 239894 - RNA, 18 nt, Artificial Sequence
  Synthetic
ugacuauaucaguuacua

SEQ ID NO: 239895 - RNA, 19 nt, Artificial Sequence
  Synthetic
cugacuauaucaguuacua

SEQ ID NO: 239896 - RNA, 20 nt, Artificial Sequence
  Synthetic
gcugacuauaucaguuacua

SEQ ID NO: 239897 - RNA, 21 nt, Artificial Sequence
  Synthetic
ugcugacuauaucaguuacua

SEQ ID NO: 239898 - RNA, 22 nt, Artificial Sequence
  Synthetic
cugcugacuauaucaguuacua

SEQ ID NO: 239899 - RNA, 23 nt, Artificial Sequence
  Synthetic
ucugcugacuauaucaguuacua

SEQ ID NO: 239900 - RNA, 24 nt, Artificial Sequence
  Synthetic
cucugcugacuauaucaguuacua

SEQ ID NO: 239901 - RNA, 18 nt, Artificial Sequence
  Synthetic
cucuuguuuucguuacua

SEQ ID NO: 239902 - RNA, 19 nt, Artificial Sequence
  Synthetic
gcucuuguuuucguuacua

SEQ ID NO: 239903 - RNA, 20 nt, Artificial Sequence
  Synthetic
ggcucuuguuuucguuacua

SEQ ID NO: 239904 - RNA, 21 nt, Artificial Sequence
  Synthetic
uggcucuuguuuucguuacua

SEQ ID NO: 239905 - RNA, 22 nt, Artificial Sequence
  Synthetic
uuggcucuuguuuucguuacua

SEQ ID NO: 239906 - RNA, 23 nt, Artificial Sequence
  Synthetic
guuggcucuuguuuucguuacua

SEQ ID NO: 239907 - RNA, 24 nt, Artificial Sequence
  Synthetic
uguuggcucuuguuuucguuacua

SEQ ID NO: 239908 - RNA, 18 nt, Artificial Sequence
  Synthetic
cacaaccugugguuacua

SEQ ID NO: 239909 - RNA, 19 nt, Artificial Sequence
  Synthetic
acacaaccugugguuacua

SEQ ID NO: 239910 - RNA, 20 nt, Artificial Sequence
  Synthetic
gacacaaccugugguuacua

SEQ ID NO: 239911 - RNA, 21 nt, Artificial Sequence
  Synthetic
ugacacaaccugugguuacua

SEQ ID NO: 239912 - RNA, 22 nt, Artificial Sequence
  Synthetic
gugacacaaccugugguuacua

SEQ ID NO: 239913 - RNA, 23 nt, Artificial Sequence
  Synthetic
ggugacacaaccugugguuacua

SEQ ID NO: 239914 - RNA, 24 nt, Artificial Sequence
  Synthetic
uggugacacaaccugugguuacua

SEQ ID NO: 239915 - RNA, 18 nt, Artificial Sequence
  Synthetic
uccuaacuauauuuacua

SEQ ID NO: 239916 - RNA, 19 nt, Artificial Sequence
  Synthetic
guccuaacuauauuuacua

SEQ ID NO: 239917 - RNA, 20 nt, Artificial Sequence
  Synthetic
uguccuaacuauauuuacua

SEQ ID NO: 239918 - RNA, 21 nt, Artificial Sequence
  Synthetic
guguccuaacuauauuuacua

SEQ ID NO: 239919 - RNA, 22 nt, Artificial Sequence
  Synthetic
uguguccuaacuauauuuacua

SEQ ID NO: 239920 - RNA, 23 nt, Artificial Sequence
  Synthetic
auguguccuaacuauauuuacua

SEQ ID NO: 239921 - RNA, 24 nt, Artificial Sequence
  Synthetic
cauguguccuaacuauauuuacua

SEQ ID NO: 239922 - RNA, 18 nt, Artificial Sequence
  Synthetic
ucauuuguuauuuuacua

SEQ ID NO: 239923 - RNA, 19 nt, Artificial Sequence
  Synthetic
gucauuuguuauuuuacua

SEQ ID NO: 239924 - RNA, 20 nt, Artificial Sequence
  Synthetic
agucauuuguuauuuuacua

SEQ ID NO: 239925 - RNA, 21 nt, Artificial Sequence
  Synthetic
gagucauuuguuauuuuacua

SEQ ID NO: 239926 - RNA, 22 nt, Artificial Sequence
  Synthetic
agagucauuuguuauuuuacua

SEQ ID NO: 239927 - RNA, 23 nt, Artificial Sequence
  Synthetic
gagagucauuuguuauuuuacua

SEQ ID NO: 239928 - RNA, 24 nt, Artificial Sequence
  Synthetic
agagagucauuuguuauuuuacua

SEQ ID NO: 239929 - RNA, 18 nt, Artificial Sequence
  Synthetic
uuuuuuuuccuuuuacua

SEQ ID NO: 239930 - RNA, 19 nt, Artificial Sequence
  Synthetic
auuuuuuuuccuuuuacua

SEQ ID NO: 239931 - RNA, 20 nt, Artificial Sequence
  Synthetic
aauuuuuuuuccuuuuacua

SEQ ID NO: 239932 - RNA, 21 nt, Artificial Sequence
  Synthetic
caauuuuuuuuccuuuuacua

SEQ ID NO: 239933 - RNA, 22 nt, Artificial Sequence
  Synthetic
ucaauuuuuuuuccuuuuacua

SEQ ID NO: 239934 - RNA, 23 nt, Artificial Sequence
  Synthetic
cucaauuuuuuuuccuuuuacua

SEQ ID NO: 239935 - RNA, 24 nt, Artificial Sequence
  Synthetic
ccucaauuuuuuuuccuuuuacua

SEQ ID NO: 239936 - RNA, 18 nt, Artificial Sequence
  Synthetic
uuguuugccuuuuuacua

SEQ ID NO: 239937 - RNA, 19 nt, Artificial Sequence
  Synthetic
uuuguuugccuuuuuacua

SEQ ID NO: 239938 - RNA, 20 nt, Artificial Sequence
  Synthetic
uuuuguuugccuuuuuacua

SEQ ID NO: 239939 - RNA, 21 nt, Artificial Sequence
  Synthetic
uuuuuguuugccuuuuuacua

SEQ ID NO: 239940 - RNA, 22 nt, Artificial Sequence
  Synthetic
cuuuuuguuugccuuuuuacua

SEQ ID NO: 239941 - RNA, 23 nt, Artificial Sequence
  Synthetic
acuuuuuguuugccuuuuuacua

SEQ ID NO: 239942 - RNA, 24 nt, Artificial Sequence
  Synthetic
gacuuuuuguuugccuuuuuacua

SEQ ID NO: 239943 - RNA, 18 nt, Artificial Sequence
  Synthetic
aguaaugcaauaaaccua

SEQ ID NO: 239944 - RNA, 19 nt, Artificial Sequence
  Synthetic
aaguaaugcaauaaaccua

SEQ ID NO: 239945 - RNA, 20 nt, Artificial Sequence
  Synthetic
caaguaaugcaauaaaccua

SEQ ID NO: 239946 - RNA, 21 nt, Artificial Sequence
  Synthetic
ucaaguaaugcaauaaaccua

SEQ ID NO: 239947 - RNA, 22 nt, Artificial Sequence
  Synthetic
cucaaguaaugcaauaaaccua

SEQ ID NO: 239948 - RNA, 23 nt, Artificial Sequence
  Synthetic
acucaaguaaugcaauaaaccua

SEQ ID NO: 239949 - RNA, 24 nt, Artificial Sequence
  Synthetic
uacucaaguaaugcaauaaaccua

SEQ ID NO: 239950 - RNA, 18 nt, Artificial Sequence
  Synthetic
aacaaggcucacaaccua

SEQ ID NO: 239951 - RNA, 19 nt, Artificial Sequence
  Synthetic
gaacaaggcucacaaccua

SEQ ID NO: 239952 - RNA, 20 nt, Artificial Sequence
  Synthetic
agaacaaggcucacaaccua

SEQ ID NO: 239953 - RNA, 21 nt, Artificial Sequence
  Synthetic
gagaacaaggcucacaaccua

SEQ ID NO: 239954 - RNA, 22 nt, Artificial Sequence
  Synthetic
ugagaacaaggcucacaaccua

SEQ ID NO: 239955 - RNA, 23 nt, Artificial Sequence
  Synthetic
cugagaacaaggcucacaaccua

SEQ ID NO: 239956 - RNA, 24 nt, Artificial Sequence
  Synthetic
ccugagaacaaggcucacaaccua

SEQ ID NO: 239957 - RNA, 18 nt, Artificial Sequence
  Synthetic
cagcuauaagacaaccua

SEQ ID NO: 239958 - RNA, 19 nt, Artificial Sequence
  Synthetic
gcagcuauaagacaaccua

SEQ ID NO: 239959 - RNA, 20 nt, Artificial Sequence
  Synthetic
ggcagcuauaagacaaccua

SEQ ID NO: 239960 - RNA, 21 nt, Artificial Sequence
  Synthetic
uggcagcuauaagacaaccua

SEQ ID NO: 239961 - RNA, 22 nt, Artificial Sequence
  Synthetic
auggcagcuauaagacaaccua

SEQ ID NO: 239962 - RNA, 23 nt, Artificial Sequence
  Synthetic
aauggcagcuauaagacaaccua

SEQ ID NO: 239963 - RNA, 24 nt, Artificial Sequence
  Synthetic
aaauggcagcuauaagacaaccua

SEQ ID NO: 239964 - RNA, 18 nt, Artificial Sequence
  Synthetic
uuucauauuggcaaccua

SEQ ID NO: 239965 - RNA, 19 nt, Artificial Sequence
  Synthetic
auuucauauuggcaaccua

SEQ ID NO: 239966 - RNA, 20 nt, Artificial Sequence
  Synthetic
cauuucauauuggcaaccua

SEQ ID NO: 239967 - RNA, 21 nt, Artificial Sequence
  Synthetic
ucauuucauauuggcaaccua

SEQ ID NO: 239968 - RNA, 22 nt, Artificial Sequence
  Synthetic
uucauuucauauuggcaaccua

SEQ ID NO: 239969 - RNA, 23 nt, Artificial Sequence
  Synthetic
uuucauuucauauuggcaaccua

SEQ ID NO: 239970 - RNA, 24 nt, Artificial Sequence
  Synthetic
uuuucauuucauauuggcaaccua

SEQ ID NO: 239971 - RNA, 18 nt, Artificial Sequence
  Synthetic
ucucuguccaagaaccua

SEQ ID NO: 239972 - RNA, 19 nt, Artificial Sequence
  Synthetic
cucucuguccaagaaccua

SEQ ID NO: 239973 - RNA, 20 nt, Artificial Sequence
  Synthetic
ucucucuguccaagaaccua

SEQ ID NO: 239974 - RNA, 21 nt, Artificial Sequence
  Synthetic
aucucucuguccaagaaccua

SEQ ID NO: 239975 - RNA, 22 nt, Artificial Sequence
  Synthetic
uaucucucuguccaagaaccua

SEQ ID NO: 239976 - RNA, 23 nt, Artificial Sequence
  Synthetic
cuaucucucuguccaagaaccua

SEQ ID NO: 239977 - RNA, 24 nt, Artificial Sequence
  Synthetic
acuaucucucuguccaagaaccua

SEQ ID NO: 239978 - RNA, 18 nt, Artificial Sequence
  Synthetic
auuuguucaacgaaccua

SEQ ID NO: 239979 - RNA, 19 nt, Artificial Sequence
  Synthetic
uauuuguucaacgaaccua

SEQ ID NO: 239980 - RNA, 20 nt, Artificial Sequence
  Synthetic
auauuuguucaacgaaccua

SEQ ID NO: 239981 - RNA, 21 nt, Artificial Sequence
  Synthetic
aauauuuguucaacgaaccua

SEQ ID NO: 239982 - RNA, 22 nt, Artificial Sequence
  Synthetic
uaauauuuguucaacgaaccua

SEQ ID NO: 239983 - RNA, 23 nt, Artificial Sequence
  Synthetic
uuaauauuuguucaacgaaccua

SEQ ID NO: 239984 - RNA, 24 nt, Artificial Sequence
  Synthetic
guuaauauuuguucaacgaaccua

SEQ ID NO: 239985 - RNA, 18 nt, Artificial Sequence
  Synthetic
guaugugagcugaaccua

SEQ ID NO: 239986 - RNA, 19 nt, Artificial Sequence
  Synthetic
gguaugugagcugaaccua

SEQ ID NO: 239987 - RNA, 20 nt, Artificial Sequence
  Synthetic
agguaugugagcugaaccua

SEQ ID NO: 239988 - RNA, 21 nt, Artificial Sequence
  Synthetic
uagguaugugagcugaaccua

SEQ ID NO: 239989 - RNA, 22 nt, Artificial Sequence
  Synthetic
cuagguaugugagcugaaccua

SEQ ID NO: 239990 - RNA, 23 nt, Artificial Sequence
  Synthetic
ccuagguaugugagcugaaccua

SEQ ID NO: 239991 - RNA, 24 nt, Artificial Sequence
  Synthetic
accuagguaugugagcugaaccua

SEQ ID NO: 239992 - RNA, 18 nt, Artificial Sequence
  Synthetic
agugggugcaauaaccua

SEQ ID NO: 239993 - RNA, 19 nt, Artificial Sequence
  Synthetic
gagugggugcaauaaccua

SEQ ID NO: 239994 - RNA, 20 nt, Artificial Sequence
  Synthetic
ugagugggugcaauaaccua

SEQ ID NO: 239995 - RNA, 21 nt, Artificial Sequence
  Synthetic
gugagugggugcaauaaccua

SEQ ID NO: 239996 - RNA, 22 nt, Artificial Sequence
  Synthetic
ugugagugggugcaauaaccua

SEQ ID NO: 239997 - RNA, 23 nt, Artificial Sequence
  Synthetic
augugagugggugcaauaaccua

SEQ ID NO: 239998 - RNA, 24 nt, Artificial Sequence
  Synthetic
uaugugagugggugcaauaaccua

SEQ ID NO: 239999 - RNA, 18 nt, Artificial Sequence
  Synthetic
cacuauuaguauaaccua

SEQ ID NO: 240000 - RNA, 19 nt, Artificial Sequence
  Synthetic
ucacuauuaguauaaccua

SEQ ID NO: 240001 - RNA, 20 nt, Artificial Sequence
  Synthetic
aucacuauuaguauaaccua

SEQ ID NO: 240002 - RNA, 21 nt, Artificial Sequence
  Synthetic
caucacuauuaguauaaccua

SEQ ID NO: 240003 - RNA, 22 nt, Artificial Sequence
  Synthetic
gcaucacuauuaguauaaccua

SEQ ID NO: 240004 - RNA, 23 nt, Artificial Sequence
  Synthetic
ugcaucacuauuaguauaaccua

SEQ ID NO: 240005 - RNA, 24 nt, Artificial Sequence
  Synthetic
uugcaucacuauuaguauaaccua

SEQ ID NO: 240006 - RNA, 18 nt, Artificial Sequence
  Synthetic
acuucugugauuaaccua

SEQ ID NO: 240007 - RNA, 19 nt, Artificial Sequence
  Synthetic
uacuucugugauuaaccua

SEQ ID NO: 240008 - RNA, 20 nt, Artificial Sequence
  Synthetic
cuacuucugugauuaaccua

SEQ ID NO: 240009 - RNA, 21 nt, Artificial Sequence
  Synthetic
ucuacuucugugauuaaccua

SEQ ID NO: 240010 - RNA, 22 nt, Artificial Sequence
  Synthetic
gucuacuucugugauuaaccua

SEQ ID NO: 240011 - RNA, 23 nt, Artificial Sequence
  Synthetic
ugucuacuucugugauuaaccua

SEQ ID NO: 240012 - RNA, 24 nt, Artificial Sequence
  Synthetic
uugucuacuucugugauuaaccua

SEQ ID NO: 240013 - RNA, 18 nt, Artificial Sequence
  Synthetic
uaguucuagauacaccua

SEQ ID NO: 240014 - RNA, 19 nt, Artificial Sequence
  Synthetic
cuaguucuagauacaccua

SEQ ID NO: 240015 - RNA, 20 nt, Artificial Sequence
  Synthetic
ucuaguucuagauacaccua

SEQ ID NO: 240016 - RNA, 21 nt, Artificial Sequence
  Synthetic
cucuaguucuagauacaccua

SEQ ID NO: 240017 - RNA, 22 nt, Artificial Sequence
  Synthetic
ucucuaguucuagauacaccua

SEQ ID NO: 240018 - RNA, 23 nt, Artificial Sequence
  Synthetic
uucucuaguucuagauacaccua

SEQ ID NO: 240019 - RNA, 24 nt, Artificial Sequence
  Synthetic
guucucuaguucuagauacaccua

SEQ ID NO: 240020 - RNA, 18 nt, Artificial Sequence
  Synthetic
uacuacaucaggcaccua

SEQ ID NO: 240021 - RNA, 19 nt, Artificial Sequence
  Synthetic
uuacuacaucaggcaccua

SEQ ID NO: 240022 - RNA, 20 nt, Artificial Sequence
  Synthetic
uuuacuacaucaggcaccua

SEQ ID NO: 240023 - RNA, 21 nt, Artificial Sequence
  Synthetic
guuuacuacaucaggcaccua

SEQ ID NO: 240024 - RNA, 22 nt, Artificial Sequence
  Synthetic
gguuuacuacaucaggcaccua

SEQ ID NO: 240025 - RNA, 23 nt, Artificial Sequence
  Synthetic
ugguuuacuacaucaggcaccua

SEQ ID NO: 240026 - RNA, 24 nt, Artificial Sequence
  Synthetic
uugguuuacuacaucaggcaccua

SEQ ID NO: 240027 - RNA, 18 nt, Artificial Sequence
  Synthetic
uguacauugugucaccua

SEQ ID NO: 240028 - RNA, 19 nt, Artificial Sequence
  Synthetic
auguacauugugucaccua

SEQ ID NO: 240029 - RNA, 20 nt, Artificial Sequence
  Synthetic
aauguacauugugucaccua

SEQ ID NO: 240030 - RNA, 21 nt, Artificial Sequence
  Synthetic
aaauguacauugugucaccua

SEQ ID NO: 240031 - RNA, 22 nt, Artificial Sequence
  Synthetic
aaaauguacauugugucaccua

SEQ ID NO: 240032 - RNA, 23 nt, Artificial Sequence
  Synthetic
gaaaauguacauugugucaccua

SEQ ID NO: 240033 - RNA, 24 nt, Artificial Sequence
  Synthetic
ugaaaauguacauugugucaccua

SEQ ID NO: 240034 - RNA, 18 nt, Artificial Sequence
  Synthetic
agccucacaacagaccua

SEQ ID NO: 240035 - RNA, 19 nt, Artificial Sequence
  Synthetic
gagccucacaacagaccua

SEQ ID NO: 240036 - RNA, 20 nt, Artificial Sequence
  Synthetic
ugagccucacaacagaccua

SEQ ID NO: 240037 - RNA, 21 nt, Artificial Sequence
  Synthetic
uugagccucacaacagaccua

SEQ ID NO: 240038 - RNA, 22 nt, Artificial Sequence
  Synthetic
cuugagccucacaacagaccua

SEQ ID NO: 240039 - RNA, 23 nt, Artificial Sequence
  Synthetic
ucuugagccucacaacagaccua

SEQ ID NO: 240040 - RNA, 24 nt, Artificial Sequence
  Synthetic
uucuugagccucacaacagaccua

SEQ ID NO: 240041 - RNA, 18 nt, Artificial Sequence
  Synthetic
ucucucuuaggggaccua

SEQ ID NO: 240042 - RNA, 19 nt, Artificial Sequence
  Synthetic
cucucucuuaggggaccua

SEQ ID NO: 240043 - RNA, 20 nt, Artificial Sequence
  Synthetic
gcucucucuuaggggaccua

SEQ ID NO: 240044 - RNA, 21 nt, Artificial Sequence
  Synthetic
ugcucucucuuaggggaccua

SEQ ID NO: 240045 - RNA, 22 nt, Artificial Sequence
  Synthetic
uugcucucucuuaggggaccua

SEQ ID NO: 240046 - RNA, 23 nt, Artificial Sequence
  Synthetic
uuugcucucucuuaggggaccua

SEQ ID NO: 240047 - RNA, 24 nt, Artificial Sequence
  Synthetic
uuuugcucucucuuaggggaccua

SEQ ID NO: 240048 - RNA, 18 nt, Artificial Sequence
  Synthetic
gauucugauaaugaccua

SEQ ID NO: 240049 - RNA, 19 nt, Artificial Sequence
  Synthetic
ugauucugauaaugaccua

SEQ ID NO: 240050 - RNA, 20 nt, Artificial Sequence
  Synthetic
cugauucugauaaugaccua

SEQ ID NO: 240051 - RNA, 21 nt, Artificial Sequence
  Synthetic
ucugauucugauaaugaccua

SEQ ID NO: 240052 - RNA, 22 nt, Artificial Sequence
  Synthetic
uucugauucugauaaugaccua

SEQ ID NO: 240053 - RNA, 23 nt, Artificial Sequence
  Synthetic
guucugauucugauaaugaccua

SEQ ID NO: 240054 - RNA, 24 nt, Artificial Sequence
  Synthetic
gguucugauucugauaaugaccua

SEQ ID NO: 240055 - RNA, 18 nt, Artificial Sequence
  Synthetic
agcguaauuaaugaccua

SEQ ID NO: 240056 - RNA, 19 nt, Artificial Sequence
  Synthetic
aagcguaauuaaugaccua

SEQ ID NO: 240057 - RNA, 20 nt, Artificial Sequence
  Synthetic
aaagcguaauuaaugaccua

SEQ ID NO: 240058 - RNA, 21 nt, Artificial Sequence
  Synthetic
uaaagcguaauuaaugaccua

SEQ ID NO: 240059 - RNA, 22 nt, Artificial Sequence
  Synthetic
uuaaagcguaauuaaugaccua

SEQ ID NO: 240060 - RNA, 23 nt, Artificial Sequence
  Synthetic
uuuaaagcguaauuaaugaccua

SEQ ID NO: 240061 - RNA, 24 nt, Artificial Sequence
  Synthetic
uuuuaaagcguaauuaaugaccua

SEQ ID NO: 240062 - RNA, 18 nt, Artificial Sequence
  Synthetic
cugaauacguaauaccua

SEQ ID NO: 240063 - RNA, 19 nt, Artificial Sequence
  Synthetic
acugaauacguaauaccua

SEQ ID NO: 240064 - RNA, 20 nt, Artificial Sequence
  Synthetic
cacugaauacguaauaccua

SEQ ID NO: 240065 - RNA, 21 nt, Artificial Sequence
  Synthetic
ccacugaauacguaauaccua

SEQ ID NO: 240066 - RNA, 22 nt, Artificial Sequence
  Synthetic
uccacugaauacguaauaccua

SEQ ID NO: 240067 - RNA, 23 nt, Artificial Sequence
  Synthetic
uuccacugaauacguaauaccua

SEQ ID NO: 240068 - RNA, 24 nt, Artificial Sequence
  Synthetic
uuuccacugaauacguaauaccua

SEQ ID NO: 240069 - RNA, 18 nt, Artificial Sequence
  Synthetic
gcuuauaaaauauaccua

SEQ ID NO: 240070 - RNA, 19 nt, Artificial Sequence
  Synthetic
ugcuuauaaaauauaccua

SEQ ID NO: 240071 - RNA, 20 nt, Artificial Sequence
  Synthetic
cugcuuauaaaauauaccua

SEQ ID NO: 240072 - RNA, 21 nt, Artificial Sequence
  Synthetic
acugcuuauaaaauauaccua

SEQ ID NO: 240073 - RNA, 22 nt, Artificial Sequence
  Synthetic
aacugcuuauaaaauauaccua

SEQ ID NO: 240074 - RNA, 23 nt, Artificial Sequence
  Synthetic
uaacugcuuauaaaauauaccua

SEQ ID NO: 240075 - RNA, 24 nt, Artificial Sequence
  Synthetic
cuaacugcuuauaaaauauaccua

SEQ ID NO: 240076 - RNA, 18 nt, Artificial Sequence
  Synthetic
aagcuguuccacuaccua

SEQ ID NO: 240077 - RNA, 19 nt, Artificial Sequence
  Synthetic
aaagcuguuccacuaccua

SEQ ID NO: 240078 - RNA, 20 nt, Artificial Sequence
  Synthetic
gaaagcuguuccacuaccua

SEQ ID NO: 240079 - RNA, 21 nt, Artificial Sequence
  Synthetic
cgaaagcuguuccacuaccua

SEQ ID NO: 240080 - RNA, 22 nt, Artificial Sequence
  Synthetic
acgaaagcuguuccacuaccua

SEQ ID NO: 240081 - RNA, 23 nt, Artificial Sequence
  Synthetic
uacgaaagcuguuccacuaccua

SEQ ID NO: 240082 - RNA, 24 nt, Artificial Sequence
  Synthetic
cuacgaaagcuguuccacuaccua

SEQ ID NO: 240083 - RNA, 18 nt, Artificial Sequence
  Synthetic
agcuccagucaguaccua

SEQ ID NO: 240084 - RNA, 19 nt, Artificial Sequence
  Synthetic
aagcuccagucaguaccua

SEQ ID NO: 240085 - RNA, 20 nt, Artificial Sequence
  Synthetic
uaagcuccagucaguaccua

SEQ ID NO: 240086 - RNA, 21 nt, Artificial Sequence
  Synthetic
guaagcuccagucaguaccua

SEQ ID NO: 240087 - RNA, 22 nt, Artificial Sequence
  Synthetic
aguaagcuccagucaguaccua

SEQ ID NO: 240088 - RNA, 23 nt, Artificial Sequence
  Synthetic
uaguaagcuccagucaguaccua

SEQ ID NO: 240089 - RNA, 24 nt, Artificial Sequence
  Synthetic
guaguaagcuccagucaguaccua

SEQ ID NO: 240090 - RNA, 18 nt, Artificial Sequence
  Synthetic
agagaguaagaguaccua

SEQ ID NO: 240091 - RNA, 19 nt, Artificial Sequence
  Synthetic
cagagaguaagaguaccua

SEQ ID NO: 240092 - RNA, 20 nt, Artificial Sequence
  Synthetic
acagagaguaagaguaccua

SEQ ID NO: 240093 - RNA, 21 nt, Artificial Sequence
  Synthetic
aacagagaguaagaguaccua

SEQ ID NO: 240094 - RNA, 22 nt, Artificial Sequence
  Synthetic
gaacagagaguaagaguaccua

SEQ ID NO: 240095 - RNA, 23 nt, Artificial Sequence
  Synthetic
agaacagagaguaagaguaccua

SEQ ID NO: 240096 - RNA, 24 nt, Artificial Sequence
  Synthetic
gagaacagagaguaagaguaccua

SEQ ID NO: 240097 - RNA, 18 nt, Artificial Sequence
  Synthetic
uggcugagcugguaccua

SEQ ID NO: 240098 - RNA, 19 nt, Artificial Sequence
  Synthetic
guggcugagcugguaccua

SEQ ID NO: 240099 - RNA, 20 nt, Artificial Sequence
  Synthetic
uguggcugagcugguaccua

SEQ ID NO: 240100 - RNA, 21 nt, Artificial Sequence
  Synthetic
cuguggcugagcugguaccua

SEQ ID NO: 240101 - RNA, 22 nt, Artificial Sequence
  Synthetic
ucuguggcugagcugguaccua

SEQ ID NO: 240102 - RNA, 23 nt, Artificial Sequence
  Synthetic
uucuguggcugagcugguaccua

SEQ ID NO: 240103 - RNA, 24 nt, Artificial Sequence
  Synthetic
uuucuguggcugagcugguaccua

SEQ ID NO: 240104 - RNA, 18 nt, Artificial Sequence
  Synthetic
cuaccgauuauguaccua

SEQ ID NO: 240105 - RNA, 19 nt, Artificial Sequence
  Synthetic
acuaccgauuauguaccua

SEQ ID NO: 240106 - RNA, 20 nt, Artificial Sequence
  Synthetic
cacuaccgauuauguaccua

SEQ ID NO: 240107 - RNA, 21 nt, Artificial Sequence
  Synthetic
ucacuaccgauuauguaccua

SEQ ID NO: 240108 - RNA, 22 nt, Artificial Sequence
  Synthetic
cucacuaccgauuauguaccua

SEQ ID NO: 240109 - RNA, 23 nt, Artificial Sequence
  Synthetic
ucucacuaccgauuauguaccua

SEQ ID NO: 240110 - RNA, 24 nt, Artificial Sequence
  Synthetic
aucucacuaccgauuauguaccua

SEQ ID NO: 240111 - RNA, 18 nt, Artificial Sequence
  Synthetic
uucaaaauacauuaccua

SEQ ID NO: 240112 - RNA, 19 nt, Artificial Sequence
  Synthetic
uuucaaaauacauuaccua

SEQ ID NO: 240113 - RNA, 20 nt, Artificial Sequence
  Synthetic
cuuucaaaauacauuaccua

SEQ ID NO: 240114 - RNA, 21 nt, Artificial Sequence
  Synthetic
ucuuucaaaauacauuaccua

SEQ ID NO: 240115 - RNA, 22 nt, Artificial Sequence
  Synthetic
uucuuucaaaauacauuaccua

SEQ ID NO: 240116 - RNA, 23 nt, Artificial Sequence
  Synthetic
auucuuucaaaauacauuaccua

SEQ ID NO: 240117 - RNA, 24 nt, Artificial Sequence
  Synthetic
cauucuuucaaaauacauuaccua

SEQ ID NO: 240118 - RNA, 18 nt, Artificial Sequence
  Synthetic
auuuucuuucuuuaccua

SEQ ID NO: 240119 - RNA, 19 nt, Artificial Sequence
  Synthetic
aauuuucuuucuuuaccua

SEQ ID NO: 240120 - RNA, 20 nt, Artificial Sequence
  Synthetic
uaauuuucuuucuuuaccua

SEQ ID NO: 240121 - RNA, 21 nt, Artificial Sequence
  Synthetic
auaauuuucuuucuuuaccua

SEQ ID NO: 240122 - RNA, 22 nt, Artificial Sequence
  Synthetic
uauaauuuucuuucuuuaccua

SEQ ID NO: 240123 - RNA, 23 nt, Artificial Sequence
  Synthetic
auauaauuuucuuucuuuaccua

SEQ ID NO: 240124 - RNA, 24 nt, Artificial Sequence
  Synthetic
uauauaauuuucuuucuuuaccua

SEQ ID NO: 240125 - RNA, 18 nt, Artificial Sequence
  Synthetic
uaauuacuaccaacccua

SEQ ID NO: 240126 - RNA, 19 nt, Artificial Sequence
  Synthetic
guaauuacuaccaacccua

SEQ ID NO: 240127 - RNA, 20 nt, Artificial Sequence
  Synthetic
gguaauuacuaccaacccua

SEQ ID NO: 240128 - RNA, 21 nt, Artificial Sequence
  Synthetic
ggguaauuacuaccaacccua

SEQ ID NO: 240129 - RNA, 22 nt, Artificial Sequence
  Synthetic
gggguaauuacuaccaacccua

SEQ ID NO: 240130 - RNA, 23 nt, Artificial Sequence
  Synthetic
agggguaauuacuaccaacccua

SEQ ID NO: 240131 - RNA, 24 nt, Artificial Sequence
  Synthetic
aagggguaauuacuaccaacccua

SEQ ID NO: 240132 - RNA, 18 nt, Artificial Sequence
  Synthetic
uuuauuuggggcacccua

SEQ ID NO: 240133 - RNA, 19 nt, Artificial Sequence
  Synthetic
uuuuauuuggggcacccua

SEQ ID NO: 240134 - RNA, 20 nt, Artificial Sequence
  Synthetic
uuuuuauuuggggcacccua

SEQ ID NO: 240135 - RNA, 21 nt, Artificial Sequence
  Synthetic
cuuuuuauuuggggcacccua

SEQ ID NO: 240136 - RNA, 22 nt, Artificial Sequence
  Synthetic
ccuuuuuauuuggggcacccua

SEQ ID NO: 240137 - RNA, 23 nt, Artificial Sequence
  Synthetic
cccuuuuuauuuggggcacccua

SEQ ID NO: 240138 - RNA, 24 nt, Artificial Sequence
  Synthetic
gcccuuuuuauuuggggcacccua

SEQ ID NO: 240139 - RNA, 18 nt, Artificial Sequence
  Synthetic
uacuggcacugcacccua

SEQ ID NO: 240140 - RNA, 19 nt, Artificial Sequence
  Synthetic
uuacuggcacugcacccua

SEQ ID NO: 240141 - RNA, 20 nt, Artificial Sequence
  Synthetic
auuacuggcacugcacccua

SEQ ID NO: 240142 - RNA, 21 nt, Artificial Sequence
  Synthetic
cauuacuggcacugcacccua

SEQ ID NO: 240143 - RNA, 22 nt, Artificial Sequence
  Synthetic
acauuacuggcacugcacccua

SEQ ID NO: 240144 - RNA, 23 nt, Artificial Sequence
  Synthetic
aacauuacuggcacugcacccua

SEQ ID NO: 240145 - RNA, 24 nt, Artificial Sequence
  Synthetic
aaacauuacuggcacugcacccua

SEQ ID NO: 240146 - RNA, 18 nt, Artificial Sequence
  Synthetic
ucucaucccaggacccua

SEQ ID NO: 240147 - RNA, 19 nt, Artificial Sequence
  Synthetic
uucucaucccaggacccua

SEQ ID NO: 240148 - RNA, 20 nt, Artificial Sequence
  Synthetic
cuucucaucccaggacccua

SEQ ID NO: 240149 - RNA, 21 nt, Artificial Sequence
  Synthetic
ucuucucaucccaggacccua

SEQ ID NO: 240150 - RNA, 22 nt, Artificial Sequence
  Synthetic
gucuucucaucccaggacccua

SEQ ID NO: 240151 - RNA, 23 nt, Artificial Sequence
  Synthetic
ugucuucucaucccaggacccua

SEQ ID NO: 240152 - RNA, 24 nt, Artificial Sequence
  Synthetic
augucuucucaucccaggacccua

SEQ ID NO: 240153 - RNA, 18 nt, Artificial Sequence
  Synthetic
aucacuggaauuacccua

SEQ ID NO: 240154 - RNA, 19 nt, Artificial Sequence
  Synthetic
caucacuggaauuacccua

SEQ ID NO: 240155 - RNA, 20 nt, Artificial Sequence
  Synthetic
ucaucacuggaauuacccua

SEQ ID NO: 240156 - RNA, 21 nt, Artificial Sequence
  Synthetic
gucaucacuggaauuacccua

SEQ ID NO: 240157 - RNA, 22 nt, Artificial Sequence
  Synthetic
agucaucacuggaauuacccua

SEQ ID NO: 240158 - RNA, 23 nt, Artificial Sequence
  Synthetic
gagucaucacuggaauuacccua

SEQ ID NO: 240159 - RNA, 24 nt, Artificial Sequence
  Synthetic
ugagucaucacuggaauuacccua

SEQ ID NO: 240160 - RNA, 18 nt, Artificial Sequence
  Synthetic
guauucuuggcaccccua

SEQ ID NO: 240161 - RNA, 19 nt, Artificial Sequence
  Synthetic
uguauucuuggcaccccua

SEQ ID NO: 240162 - RNA, 20 nt, Artificial Sequence
  Synthetic
guguauucuuggcaccccua

SEQ ID NO: 240163 - RNA, 21 nt, Artificial Sequence
  Synthetic
uguguauucuuggcaccccua

SEQ ID NO: 240164 - RNA, 22 nt, Artificial Sequence
  Synthetic
uuguguauucuuggcaccccua

SEQ ID NO: 240165 - RNA, 23 nt, Artificial Sequence
  Synthetic
guuguguauucuuggcaccccua

SEQ ID NO: 240166 - RNA, 24 nt, Artificial Sequence
  Synthetic
aguuguguauucuuggcaccccua

SEQ ID NO: 240167 - RNA, 18 nt, Artificial Sequence
  Synthetic
ucaggugcgcagccccua

SEQ ID NO: 240168 - RNA, 19 nt, Artificial Sequence
  Synthetic
cucaggugcgcagccccua

SEQ ID NO: 240169 - RNA, 20 nt, Artificial Sequence
  Synthetic
gcucaggugcgcagccccua

SEQ ID NO: 240170 - RNA, 21 nt, Artificial Sequence
  Synthetic
agcucaggugcgcagccccua

SEQ ID NO: 240171 - RNA, 22 nt, Artificial Sequence
  Synthetic
cagcucaggugcgcagccccua

SEQ ID NO: 240172 - RNA, 23 nt, Artificial Sequence
  Synthetic
acagcucaggugcgcagccccua

SEQ ID NO: 240173 - RNA, 24 nt, Artificial Sequence
  Synthetic
aacagcucaggugcgcagccccua

SEQ ID NO: 240174 - RNA, 18 nt, Artificial Sequence
  Synthetic
auugugaaguaagcccua

SEQ ID NO: 240175 - RNA, 19 nt, Artificial Sequence
  Synthetic
uauugugaaguaagcccua

SEQ ID NO: 240176 - RNA, 20 nt, Artificial Sequence
  Synthetic
cuauugugaaguaagcccua

SEQ ID NO: 240177 - RNA, 21 nt, Artificial Sequence
  Synthetic
ccuauugugaaguaagcccua

SEQ ID NO: 240178 - RNA, 22 nt, Artificial Sequence
  Synthetic
accuauugugaaguaagcccua

SEQ ID NO: 240179 - RNA, 23 nt, Artificial Sequence
  Synthetic
gaccuauugugaaguaagcccua

SEQ ID NO: 240180 - RNA, 24 nt, Artificial Sequence
  Synthetic
agaccuauugugaaguaagcccua

SEQ ID NO: 240181 - RNA, 18 nt, Artificial Sequence
  Synthetic
augucaugagcagcccua

SEQ ID NO: 240182 - RNA, 19 nt, Artificial Sequence
  Synthetic
caugucaugagcagcccua

SEQ ID NO: 240183 - RNA, 20 nt, Artificial Sequence
  Synthetic
acaugucaugagcagcccua

SEQ ID NO: 240184 - RNA, 21 nt, Artificial Sequence
  Synthetic
cacaugucaugagcagcccua

SEQ ID NO: 240185 - RNA, 22 nt, Artificial Sequence
  Synthetic
acacaugucaugagcagcccua

SEQ ID NO: 240186 - RNA, 23 nt, Artificial Sequence
  Synthetic
aacacaugucaugagcagcccua

SEQ ID NO: 240187 - RNA, 24 nt, Artificial Sequence
  Synthetic
gaacacaugucaugagcagcccua

SEQ ID NO: 240188 - RNA, 18 nt, Artificial Sequence
  Synthetic
uugccaaaugacgcccua

SEQ ID NO: 240189 - RNA, 19 nt, Artificial Sequence
  Synthetic
uuugccaaaugacgcccua

SEQ ID NO: 240190 - RNA, 20 nt, Artificial Sequence
  Synthetic
auuugccaaaugacgcccua

SEQ ID NO: 240191 - RNA, 21 nt, Artificial Sequence
  Synthetic
aauuugccaaaugacgcccua

SEQ ID NO: 240192 - RNA, 22 nt, Artificial Sequence
  Synthetic
uaauuugccaaaugacgcccua

SEQ ID NO: 240193 - RNA, 23 nt, Artificial Sequence
  Synthetic
guaauuugccaaaugacgcccua

SEQ ID NO: 240194 - RNA, 24 nt, Artificial Sequence
  Synthetic
aguaauuugccaaaugacgcccua

SEQ ID NO: 240195 - RNA, 18 nt, Artificial Sequence
  Synthetic
cucccuagauuugcccua

SEQ ID NO: 240196 - RNA, 19 nt, Artificial Sequence
  Synthetic
ccucccuagauuugcccua

SEQ ID NO: 240197 - RNA, 20 nt, Artificial Sequence
  Synthetic
uccucccuagauuugcccua

SEQ ID NO: 240198 - RNA, 21 nt, Artificial Sequence
  Synthetic
uuccucccuagauuugcccua

SEQ ID NO: 240199 - RNA, 22 nt, Artificial Sequence
  Synthetic
auuccucccuagauuugcccua

SEQ ID NO: 240200 - RNA, 23 nt, Artificial Sequence
  Synthetic
aauuccucccuagauuugcccua

SEQ ID NO: 240201 - RNA, 24 nt, Artificial Sequence
  Synthetic
gaauuccucccuagauuugcccua

SEQ ID NO: 240202 - RNA, 18 nt, Artificial Sequence
  Synthetic
auucuugaaauaucccua

SEQ ID NO: 240203 - RNA, 19 nt, Artificial Sequence
  Synthetic
aauucuugaaauaucccua

SEQ ID NO: 240204 - RNA, 20 nt, Artificial Sequence
  Synthetic
caauucuugaaauaucccua

SEQ ID NO: 240205 - RNA, 21 nt, Artificial Sequence
  Synthetic
acaauucuugaaauaucccua

SEQ ID NO: 240206 - RNA, 22 nt, Artificial Sequence
  Synthetic
uacaauucuugaaauaucccua

SEQ ID NO: 240207 - RNA, 23 nt, Artificial Sequence
  Synthetic
guacaauucuugaaauaucccua

SEQ ID NO: 240208 - RNA, 24 nt, Artificial Sequence
  Synthetic
aguacaauucuugaaauaucccua

SEQ ID NO: 240209 - RNA, 18 nt, Artificial Sequence
  Synthetic
cauauauuggccucccua

SEQ ID NO: 240210 - RNA, 19 nt, Artificial Sequence
  Synthetic
ucauauauuggccucccua

SEQ ID NO: 240211 - RNA, 20 nt, Artificial Sequence
  Synthetic
uucauauauuggccucccua

SEQ ID NO: 240212 - RNA, 21 nt, Artificial Sequence
  Synthetic
cuucauauauuggccucccua

SEQ ID NO: 240213 - RNA, 22 nt, Artificial Sequence
  Synthetic
ucuucauauauuggccucccua

SEQ ID NO: 240214 - RNA, 23 nt, Artificial Sequence
  Synthetic
cucuucauauauuggccucccua

SEQ ID NO: 240215 - RNA, 24 nt, Artificial Sequence
  Synthetic
ccucuucauauauuggccucccua

SEQ ID NO: 240216 - RNA, 18 nt, Artificial Sequence
  Synthetic
guuacaaccuagucccua

SEQ ID NO: 240217 - RNA, 19 nt, Artificial Sequence
  Synthetic
uguuacaaccuagucccua

SEQ ID NO: 240218 - RNA, 20 nt, Artificial Sequence
  Synthetic
uuguuacaaccuagucccua

SEQ ID NO: 240219 - RNA, 21 nt, Artificial Sequence
  Synthetic
uuuguuacaaccuagucccua

SEQ ID NO: 240220 - RNA, 22 nt, Artificial Sequence
  Synthetic
cuuuguuacaaccuagucccua

SEQ ID NO: 240221 - RNA, 23 nt, Artificial Sequence
  Synthetic
ccuuuguuacaaccuagucccua

SEQ ID NO: 240222 - RNA, 24 nt, Artificial Sequence
  Synthetic
cccuuuguuacaaccuagucccua

SEQ ID NO: 240223 - RNA, 18 nt, Artificial Sequence
  Synthetic
uauguuaacccuucccua

SEQ ID NO: 240224 - RNA, 19 nt, Artificial Sequence
  Synthetic
cuauguuaacccuucccua

SEQ ID NO: 240225 - RNA, 20 nt, Artificial Sequence
  Synthetic
gcuauguuaacccuucccua

SEQ ID NO: 240226 - RNA, 21 nt, Artificial Sequence
  Synthetic
ugcuauguuaacccuucccua

SEQ ID NO: 240227 - RNA, 22 nt, Artificial Sequence
  Synthetic
cugcuauguuaacccuucccua

SEQ ID NO: 240228 - RNA, 23 nt, Artificial Sequence
  Synthetic
ucugcuauguuaacccuucccua

SEQ ID NO: 240229 - RNA, 24 nt, Artificial Sequence
  Synthetic
uucugcuauguuaacccuucccua

SEQ ID NO: 240230 - RNA, 18 nt, Artificial Sequence
  Synthetic
uauagacuguuuucccua

SEQ ID NO: 240231 - RNA, 19 nt, Artificial Sequence
  Synthetic
auauagacuguuuucccua

SEQ ID NO: 240232 - RNA, 20 nt, Artificial Sequence
  Synthetic
aauauagacuguuuucccua

SEQ ID NO: 240233 - RNA, 21 nt, Artificial Sequence
  Synthetic
aaauauagacuguuuucccua

SEQ ID NO: 240234 - RNA, 22 nt, Artificial Sequence
  Synthetic
aaaauauagacuguuuucccua

SEQ ID NO: 240235 - RNA, 23 nt, Artificial Sequence
  Synthetic
aaaaauauagacuguuuucccua

SEQ ID NO: 240236 - RNA, 24 nt, Artificial Sequence
  Synthetic
uaaaaauauagacuguuuucccua

SEQ ID NO: 240237 - RNA, 18 nt, Artificial Sequence
  Synthetic
agaggaaaugaaagccua

SEQ ID NO: 240238 - RNA, 19 nt, Artificial Sequence
  Synthetic
gagaggaaaugaaagccua

SEQ ID NO: 240239 - RNA, 20 nt, Artificial Sequence
  Synthetic
ugagaggaaaugaaagccua

SEQ ID NO: 240240 - RNA, 21 nt, Artificial Sequence
  Synthetic
augagaggaaaugaaagccua

SEQ ID NO: 240241 - RNA, 22 nt, Artificial Sequence
  Synthetic
caugagaggaaaugaaagccua

SEQ ID NO: 240242 - RNA, 23 nt, Artificial Sequence
  Synthetic
ccaugagaggaaaugaaagccua

SEQ ID NO: 240243 - RNA, 24 nt, Artificial Sequence
  Synthetic
accaugagaggaaaugaaagccua

SEQ ID NO: 240244 - RNA, 18 nt, Artificial Sequence
  Synthetic
acugcucacuacagccua

SEQ ID NO: 240245 - RNA, 19 nt, Artificial Sequence
  Synthetic
uacugcucacuacagccua

SEQ ID NO: 240246 - RNA, 20 nt, Artificial Sequence
  Synthetic
uuacugcucacuacagccua

SEQ ID NO: 240247 - RNA, 21 nt, Artificial Sequence
  Synthetic
auuacugcucacuacagccua

SEQ ID NO: 240248 - RNA, 22 nt, Artificial Sequence
  Synthetic
uauuacugcucacuacagccua

SEQ ID NO: 240249 - RNA, 23 nt, Artificial Sequence
  Synthetic
uuauuacugcucacuacagccua

SEQ ID NO: 240250 - RNA, 24 nt, Artificial Sequence
  Synthetic
guuauuacugcucacuacagccua

SEQ ID NO: 240251 - RNA, 18 nt, Artificial Sequence
  Synthetic
ccacuucacuccagccua

SEQ ID NO: 240252 - RNA, 19 nt, Artificial Sequence
  Synthetic
accacuucacuccagccua

SEQ ID NO: 240253 - RNA, 20 nt, Artificial Sequence
  Synthetic
caccacuucacuccagccua

SEQ ID NO: 240254 - RNA, 21 nt, Artificial Sequence
  Synthetic
gcaccacuucacuccagccua

SEQ ID NO: 240255 - RNA, 22 nt, Artificial Sequence
  Synthetic
cgcaccacuucacuccagccua

SEQ ID NO: 240256 - RNA, 23 nt, Artificial Sequence
  Synthetic
ucgcaccacuucacuccagccua

SEQ ID NO: 240257 - RNA, 24 nt, Artificial Sequence
  Synthetic
aucgcaccacuucacuccagccua

SEQ ID NO: 240258 - RNA, 18 nt, Artificial Sequence
  Synthetic
auuugccgcagcagccua

SEQ ID NO: 240259 - RNA, 19 nt, Artificial Sequence
  Synthetic
gauuugccgcagcagccua

SEQ ID NO: 240260 - RNA, 20 nt, Artificial Sequence
  Synthetic
ugauuugccgcagcagccua

SEQ ID NO: 240261 - RNA, 21 nt, Artificial Sequence
  Synthetic
uugauuugccgcagcagccua

SEQ ID NO: 240262 - RNA, 22 nt, Artificial Sequence
  Synthetic
uuugauuugccgcagcagccua

SEQ ID NO: 240263 - RNA, 23 nt, Artificial Sequence
  Synthetic
uuuugauuugccgcagcagccua

SEQ ID NO: 240264 - RNA, 24 nt, Artificial Sequence
  Synthetic
auuuugauuugccgcagcagccua

SEQ ID NO: 240265 - RNA, 18 nt, Artificial Sequence
  Synthetic
augaauauuugcagccua

SEQ ID NO: 240266 - RNA, 19 nt, Artificial Sequence
  Synthetic
uaugaauauuugcagccua

SEQ ID NO: 240267 - RNA, 20 nt, Artificial Sequence
  Synthetic
uuaugaauauuugcagccua

SEQ ID NO: 240268 - RNA, 21 nt, Artificial Sequence
  Synthetic
uuuaugaauauuugcagccua

SEQ ID NO: 240269 - RNA, 22 nt, Artificial Sequence
  Synthetic
cuuuaugaauauuugcagccua

SEQ ID NO: 240270 - RNA, 23 nt, Artificial Sequence
  Synthetic
ccuuuaugaauauuugcagccua

SEQ ID NO: 240271 - RNA, 24 nt, Artificial Sequence
  Synthetic
accuuuaugaauauuugcagccua

SEQ ID NO: 240272 - RNA, 18 nt, Artificial Sequence
  Synthetic
aacacacacuggggccua

SEQ ID NO: 240273 - RNA, 19 nt, Artificial Sequence
  Synthetic
uaacacacacuggggccua

SEQ ID NO: 240274 - RNA, 20 nt, Artificial Sequence
  Synthetic
auaacacacacuggggccua

SEQ ID NO: 240275 - RNA, 21 nt, Artificial Sequence
  Synthetic
aauaacacacacuggggccua

SEQ ID NO: 240276 - RNA, 22 nt, Artificial Sequence
  Synthetic
gaauaacacacacuggggccua

SEQ ID NO: 240277 - RNA, 23 nt, Artificial Sequence
  Synthetic
ggaauaacacacacuggggccua

SEQ ID NO: 240278 - RNA, 24 nt, Artificial Sequence
  Synthetic
gggaauaacacacacuggggccua

SEQ ID NO: 240279 - RNA, 18 nt, Artificial Sequence
  Synthetic
gaggacuacucuggccua

SEQ ID NO: 240280 - RNA, 19 nt, Artificial Sequence
  Synthetic
agaggacuacucuggccua

SEQ ID NO: 240281 - RNA, 20 nt, Artificial Sequence
  Synthetic
gagaggacuacucuggccua

SEQ ID NO: 240282 - RNA, 21 nt, Artificial Sequence
  Synthetic
agagaggacuacucuggccua

SEQ ID NO: 240283 - RNA, 22 nt, Artificial Sequence
  Synthetic
gagagaggacuacucuggccua

SEQ ID NO: 240284 - RNA, 23 nt, Artificial Sequence
  Synthetic
ggagagaggacuacucuggccua

SEQ ID NO: 240285 - RNA, 24 nt, Artificial Sequence
  Synthetic
gggagagaggacuacucuggccua

SEQ ID NO: 240286 - RNA, 18 nt, Artificial Sequence
  Synthetic
acuguauaagaaugccua

SEQ ID NO: 240287 - RNA, 19 nt, Artificial Sequence
  Synthetic
gacuguauaagaaugccua

SEQ ID NO: 240288 - RNA, 20 nt, Artificial Sequence
  Synthetic
ugacuguauaagaaugccua

SEQ ID NO: 240289 - RNA, 21 nt, Artificial Sequence
  Synthetic
cugacuguauaagaaugccua

SEQ ID NO: 240290 - RNA, 22 nt, Artificial Sequence
  Synthetic
ucugacuguauaagaaugccua

SEQ ID NO: 240291 - RNA, 23 nt, Artificial Sequence
  Synthetic
gucugacuguauaagaaugccua

SEQ ID NO: 240292 - RNA, 24 nt, Artificial Sequence
  Synthetic
ggucugacuguauaagaaugccua

SEQ ID NO: 240293 - RNA, 18 nt, Artificial Sequence
  Synthetic
ucuuaucuuggaugccua

SEQ ID NO: 240294 - RNA, 19 nt, Artificial Sequence
  Synthetic
cucuuaucuuggaugccua

SEQ ID NO: 240295 - RNA, 20 nt, Artificial Sequence
  Synthetic
ucucuuaucuuggaugccua

SEQ ID NO: 240296 - RNA, 21 nt, Artificial Sequence
  Synthetic
gucucuuaucuuggaugccua

SEQ ID NO: 240297 - RNA, 22 nt, Artificial Sequence
  Synthetic
agucucuuaucuuggaugccua

SEQ ID NO: 240298 - RNA, 23 nt, Artificial Sequence
  Synthetic
cagucucuuaucuuggaugccua

SEQ ID NO: 240299 - RNA, 24 nt, Artificial Sequence
  Synthetic
acagucucuuaucuuggaugccua

SEQ ID NO: 240300 - RNA, 18 nt, Artificial Sequence
  Synthetic
ccacuggggcacugccua

SEQ ID NO: 240301 - RNA, 19 nt, Artificial Sequence
  Synthetic
cccacuggggcacugccua

SEQ ID NO: 240302 - RNA, 20 nt, Artificial Sequence
  Synthetic
ccccacuggggcacugccua

SEQ ID NO: 240303 - RNA, 21 nt, Artificial Sequence
  Synthetic
uccccacuggggcacugccua

SEQ ID NO: 240304 - RNA, 22 nt, Artificial Sequence
  Synthetic
guccccacuggggcacugccua

SEQ ID NO: 240305 - RNA, 23 nt, Artificial Sequence
  Synthetic
aguccccacuggggcacugccua

SEQ ID NO: 240306 - RNA, 24 nt, Artificial Sequence
  Synthetic
gaguccccacuggggcacugccua

SEQ ID NO: 240307 - RNA, 18 nt, Artificial Sequence
  Synthetic
auagucuugauuugccua

SEQ ID NO: 240308 - RNA, 19 nt, Artificial Sequence
  Synthetic
cauagucuugauuugccua

SEQ ID NO: 240309 - RNA, 20 nt, Artificial Sequence
  Synthetic
ucauagucuugauuugccua

SEQ ID NO: 240310 - RNA, 21 nt, Artificial Sequence
  Synthetic
aucauagucuugauuugccua

SEQ ID NO: 240311 - RNA, 22 nt, Artificial Sequence
  Synthetic
gaucauagucuugauuugccua

SEQ ID NO: 240312 - RNA, 23 nt, Artificial Sequence
  Synthetic
ugaucauagucuugauuugccua

SEQ ID NO: 240313 - RNA, 24 nt, Artificial Sequence
  Synthetic
augaucauagucuugauuugccua

SEQ ID NO: 240314 - RNA, 18 nt, Artificial Sequence
  Synthetic
aauuguuuacaaauccua

SEQ ID NO: 240315 - RNA, 19 nt, Artificial Sequence
  Synthetic
caauuguuuacaaauccua

SEQ ID NO: 240316 - RNA, 20 nt, Artificial Sequence
  Synthetic
ucaauuguuuacaaauccua

SEQ ID NO: 240317 - RNA, 21 nt, Artificial Sequence
  Synthetic
uucaauuguuuacaaauccua

SEQ ID NO: 240318 - RNA, 22 nt, Artificial Sequence
  Synthetic
uuucaauuguuuacaaauccua

SEQ ID NO: 240319 - RNA, 23 nt, Artificial Sequence
  Synthetic
uuuucaauuguuuacaaauccua

SEQ ID NO: 240320 - RNA, 24 nt, Artificial Sequence
  Synthetic
cuuuucaauuguuuacaaauccua

SEQ ID NO: 240321 - RNA, 18 nt, Artificial Sequence
  Synthetic
caagaggaugaaauccua

SEQ ID NO: 240322 - RNA, 19 nt, Artificial Sequence
  Synthetic
gcaagaggaugaaauccua

SEQ ID NO: 240323 - RNA, 20 nt, Artificial Sequence
  Synthetic
cgcaagaggaugaaauccua

SEQ ID NO: 240324 - RNA, 21 nt, Artificial Sequence
  Synthetic
ucgcaagaggaugaaauccua

SEQ ID NO: 240325 - RNA, 22 nt, Artificial Sequence
  Synthetic
uucgcaagaggaugaaauccua

SEQ ID NO: 240326 - RNA, 23 nt, Artificial Sequence
  Synthetic
uuucgcaagaggaugaaauccua

SEQ ID NO: 240327 - RNA, 24 nt, Artificial Sequence
  Synthetic
guuucgcaagaggaugaaauccua

SEQ ID NO: 240328 - RNA, 18 nt, Artificial Sequence
  Synthetic
uuuuuuaaaacaauccua

SEQ ID NO: 240329 - RNA, 19 nt, Artificial Sequence
  Synthetic
uuuuuuuaaaacaauccua

SEQ ID NO: 240330 - RNA, 20 nt, Artificial Sequence
  Synthetic
uuuuuuuuaaaacaauccua

SEQ ID NO: 240331 - RNA, 21 nt, Artificial Sequence
  Synthetic
cuuuuuuuuaaaacaauccua

SEQ ID NO: 240332 - RNA, 22 nt, Artificial Sequence
  Synthetic
ucuuuuuuuuaaaacaauccua

SEQ ID NO: 240333 - RNA, 23 nt, Artificial Sequence
  Synthetic
aucuuuuuuuuaaaacaauccua

SEQ ID NO: 240334 - RNA, 24 nt, Artificial Sequence
  Synthetic
aaucuuuuuuuuaaaacaauccua

SEQ ID NO: 240335 - RNA, 18 nt, Artificial Sequence
  Synthetic
caaucacuacccauccua

SEQ ID NO: 240336 - RNA, 19 nt, Artificial Sequence
  Synthetic
acaaucacuacccauccua

SEQ ID NO: 240337 - RNA, 20 nt, Artificial Sequence
  Synthetic
aacaaucacuacccauccua

SEQ ID NO: 240338 - RNA, 21 nt, Artificial Sequence
  Synthetic
uaacaaucacuacccauccua

SEQ ID NO: 240339 - RNA, 22 nt, Artificial Sequence
  Synthetic
guaacaaucacuacccauccua

SEQ ID NO: 240340 - RNA, 23 nt, Artificial Sequence
  Synthetic
gguaacaaucacuacccauccua

SEQ ID NO: 240341 - RNA, 24 nt, Artificial Sequence
  Synthetic
agguaacaaucacuacccauccua

SEQ ID NO: 240342 - RNA, 18 nt, Artificial Sequence
  Synthetic
cgugcaucuuccauccua

SEQ ID NO: 240343 - RNA, 19 nt, Artificial Sequence
  Synthetic
acgugcaucuuccauccua

SEQ ID NO: 240344 - RNA, 20 nt, Artificial Sequence
  Synthetic
aacgugcaucuuccauccua

SEQ ID NO: 240345 - RNA, 21 nt, Artificial Sequence
  Synthetic
gaacgugcaucuuccauccua

SEQ ID NO: 240346 - RNA, 22 nt, Artificial Sequence
  Synthetic
agaacgugcaucuuccauccua

SEQ ID NO: 240347 - RNA, 23 nt, Artificial Sequence
  Synthetic
uagaacgugcaucuuccauccua

SEQ ID NO: 240348 - RNA, 24 nt, Artificial Sequence
  Synthetic
auagaacgugcaucuuccauccua

SEQ ID NO: 240349 - RNA, 18 nt, Artificial Sequence
  Synthetic
acuuguuagaauauccua

SEQ ID NO: 240350 - RNA, 19 nt, Artificial Sequence
  Synthetic
uacuuguuagaauauccua

SEQ ID NO: 240351 - RNA, 20 nt, Artificial Sequence
  Synthetic
uuacuuguuagaauauccua

SEQ ID NO: 240352 - RNA, 21 nt, Artificial Sequence
  Synthetic
uuuacuuguuagaauauccua

SEQ ID NO: 240353 - RNA, 22 nt, Artificial Sequence
  Synthetic
uuuuacuuguuagaauauccua

SEQ ID NO: 240354 - RNA, 23 nt, Artificial Sequence
  Synthetic
uuuuuacuuguuagaauauccua

SEQ ID NO: 240355 - RNA, 24 nt, Artificial Sequence
  Synthetic
auuuuuacuuguuagaauauccua

SEQ ID NO: 240356 - RNA, 18 nt, Artificial Sequence
  Synthetic
ccaagagcaauuauccua

SEQ ID NO: 240357 - RNA, 19 nt, Artificial Sequence
  Synthetic
cccaagagcaauuauccua

SEQ ID NO: 240358 - RNA, 20 nt, Artificial Sequence
  Synthetic
ucccaagagcaauuauccua

SEQ ID NO: 240359 - RNA, 21 nt, Artificial Sequence
  Synthetic
gucccaagagcaauuauccua

SEQ ID NO: 240360 - RNA, 22 nt, Artificial Sequence
  Synthetic
ggucccaagagcaauuauccua

SEQ ID NO: 240361 - RNA, 23 nt, Artificial Sequence
  Synthetic
gggucccaagagcaauuauccua

SEQ ID NO: 240362 - RNA, 24 nt, Artificial Sequence
  Synthetic
ugggucccaagagcaauuauccua

SEQ ID NO: 240363 - RNA, 18 nt, Artificial Sequence
  Synthetic
caaucuaggcuuauccua

SEQ ID NO: 240364 - RNA, 19 nt, Artificial Sequence
  Synthetic
acaaucuaggcuuauccua

SEQ ID NO: 240365 - RNA, 20 nt, Artificial Sequence
  Synthetic
gacaaucuaggcuuauccua

SEQ ID NO: 240366 - RNA, 21 nt, Artificial Sequence
  Synthetic
agacaaucuaggcuuauccua

SEQ ID NO: 240367 - RNA, 22 nt, Artificial Sequence
  Synthetic
uagacaaucuaggcuuauccua

SEQ ID NO: 240368 - RNA, 23 nt, Artificial Sequence
  Synthetic
uuagacaaucuaggcuuauccua

SEQ ID NO: 240369 - RNA, 24 nt, Artificial Sequence
  Synthetic
uuuagacaaucuaggcuuauccua

SEQ ID NO: 240370 - RNA, 18 nt, Artificial Sequence
  Synthetic
aaaauaaaugaccuccua

SEQ ID NO: 240371 - RNA, 19 nt, Artificial Sequence
  Synthetic
gaaaauaaaugaccuccua

SEQ ID NO: 240372 - RNA, 20 nt, Artificial Sequence
  Synthetic
agaaaauaaaugaccuccua

SEQ ID NO: 240373 - RNA, 21 nt, Artificial Sequence
  Synthetic
aagaaaauaaaugaccuccua

SEQ ID NO: 240374 - RNA, 22 nt, Artificial Sequence
  Synthetic
aaagaaaauaaaugaccuccua

SEQ ID NO: 240375 - RNA, 23 nt, Artificial Sequence
  Synthetic
gaaagaaaauaaaugaccuccua

SEQ ID NO: 240376 - RNA, 24 nt, Artificial Sequence
  Synthetic
ggaaagaaaauaaaugaccuccua

SEQ ID NO: 240377 - RNA, 18 nt, Artificial Sequence
  Synthetic
ggaaauucugaccuccua

SEQ ID NO: 240378 - RNA, 19 nt, Artificial Sequence
  Synthetic
aggaaauucugaccuccua

SEQ ID NO: 240379 - RNA, 20 nt, Artificial Sequence
  Synthetic
caggaaauucugaccuccua

SEQ ID NO: 240380 - RNA, 21 nt, Artificial Sequence
  Synthetic
ccaggaaauucugaccuccua

SEQ ID NO: 240381 - RNA, 22 nt, Artificial Sequence
  Synthetic
cccaggaaauucugaccuccua

SEQ ID NO: 240382 - RNA, 23 nt, Artificial Sequence
  Synthetic
ucccaggaaauucugaccuccua

SEQ ID NO: 240383 - RNA, 24 nt, Artificial Sequence
  Synthetic
aucccaggaaauucugaccuccua

SEQ ID NO: 240384 - RNA, 18 nt, Artificial Sequence
  Synthetic
auucuaacuccccuccua

SEQ ID NO: 240385 - RNA, 19 nt, Artificial Sequence
  Synthetic
uauucuaacuccccuccua

SEQ ID NO: 240386 - RNA, 20 nt, Artificial Sequence
  Synthetic
guauucuaacuccccuccua

SEQ ID NO: 240387 - RNA, 21 nt, Artificial Sequence
  Synthetic
gguauucuaacuccccuccua

SEQ ID NO: 240388 - RNA, 22 nt, Artificial Sequence
  Synthetic
agguauucuaacuccccuccua

SEQ ID NO: 240389 - RNA, 23 nt, Artificial Sequence
  Synthetic
aagguauucuaacuccccuccua

SEQ ID NO: 240390 - RNA, 24 nt, Artificial Sequence
  Synthetic
gaagguauucuaacuccccuccua

SEQ ID NO: 240391 - RNA, 18 nt, Artificial Sequence
  Synthetic
aaggccacugugcuccua

SEQ ID NO: 240392 - RNA, 19 nt, Artificial Sequence
  Synthetic
aaaggccacugugcuccua

SEQ ID NO: 240393 - RNA, 20 nt, Artificial Sequence
  Synthetic
uaaaggccacugugcuccua

SEQ ID NO: 240394 - RNA, 21 nt, Artificial Sequence
  Synthetic
uuaaaggccacugugcuccua

SEQ ID NO: 240395 - RNA, 22 nt, Artificial Sequence
  Synthetic
guuaaaggccacugugcuccua

SEQ ID NO: 240396 - RNA, 23 nt, Artificial Sequence
  Synthetic
aguuaaaggccacugugcuccua

SEQ ID NO: 240397 - RNA, 24 nt, Artificial Sequence
  Synthetic
gaguuaaaggccacugugcuccua

SEQ ID NO: 240398 - RNA, 18 nt, Artificial Sequence
  Synthetic
cuccaucagaaucuccua

SEQ ID NO: 240399 - RNA, 19 nt, Artificial Sequence
  Synthetic
ccuccaucagaaucuccua

SEQ ID NO: 240400 - RNA, 20 nt, Artificial Sequence
  Synthetic
cccuccaucagaaucuccua

SEQ ID NO: 240401 - RNA, 21 nt, Artificial Sequence
  Synthetic
ccccuccaucagaaucuccua

SEQ ID NO: 240402 - RNA, 22 nt, Artificial Sequence
  Synthetic
accccuccaucagaaucuccua

SEQ ID NO: 240403 - RNA, 23 nt, Artificial Sequence
  Synthetic
aaccccuccaucagaaucuccua

SEQ ID NO: 240404 - RNA, 24 nt, Artificial Sequence
  Synthetic
gaaccccuccaucagaaucuccua

SEQ ID NO: 240405 - RNA, 18 nt, Artificial Sequence
  Synthetic
uaauagcugcuucuccua

SEQ ID NO: 240406 - RNA, 19 nt, Artificial Sequence
  Synthetic
auaauagcugcuucuccua

SEQ ID NO: 240407 - RNA, 20 nt, Artificial Sequence
  Synthetic
gauaauagcugcuucuccua

SEQ ID NO: 240408 - RNA, 21 nt, Artificial Sequence
  Synthetic
agauaauagcugcuucuccua

SEQ ID NO: 240409 - RNA, 22 nt, Artificial Sequence
  Synthetic
aagauaauagcugcuucuccua

SEQ ID NO: 240410 - RNA, 23 nt, Artificial Sequence
  Synthetic
caagauaauagcugcuucuccua

SEQ ID NO: 240411 - RNA, 24 nt, Artificial Sequence
  Synthetic
ccaagauaauagcugcuucuccua

SEQ ID NO: 240412 - RNA, 18 nt, Artificial Sequence
  Synthetic
aguauuuuaaauguccua

SEQ ID NO: 240413 - RNA, 19 nt, Artificial Sequence
  Synthetic
caguauuuuaaauguccua

SEQ ID NO: 240414 - RNA, 20 nt, Artificial Sequence
  Synthetic
ccaguauuuuaaauguccua

SEQ ID NO: 240415 - RNA, 21 nt, Artificial Sequence
  Synthetic
gccaguauuuuaaauguccua

SEQ ID NO: 240416 - RNA, 22 nt, Artificial Sequence
  Synthetic
ugccaguauuuuaaauguccua

SEQ ID NO: 240417 - RNA, 23 nt, Artificial Sequence
  Synthetic
uugccaguauuuuaaauguccua

SEQ ID NO: 240418 - RNA, 24 nt, Artificial Sequence
  Synthetic
auugccaguauuuuaaauguccua

SEQ ID NO: 240419 - RNA, 18 nt, Artificial Sequence
  Synthetic
uagauuagcacuguccua

SEQ ID NO: 240420 - RNA, 19 nt, Artificial Sequence
  Synthetic
cuagauuagcacuguccua

SEQ ID NO: 240421 - RNA, 20 nt, Artificial Sequence
  Synthetic
ucuagauuagcacuguccua

SEQ ID NO: 240422 - RNA, 21 nt, Artificial Sequence
  Synthetic
cucuagauuagcacuguccua

SEQ ID NO: 240423 - RNA, 22 nt, Artificial Sequence
  Synthetic
ucucuagauuagcacuguccua

SEQ ID NO: 240424 - RNA, 23 nt, Artificial Sequence
  Synthetic
uucucuagauuagcacuguccua

SEQ ID NO: 240425 - RNA, 24 nt, Artificial Sequence
  Synthetic
auucucuagauuagcacuguccua

SEQ ID NO: 240426 - RNA, 18 nt, Artificial Sequence
  Synthetic
auuuccaaaauuguccua

SEQ ID NO: 240427 - RNA, 19 nt, Artificial Sequence
  Synthetic
cauuuccaaaauuguccua

SEQ ID NO: 240428 - RNA, 20 nt, Artificial Sequence
  Synthetic
acauuuccaaaauuguccua

SEQ ID NO: 240429 - RNA, 21 nt, Artificial Sequence
  Synthetic
aacauuuccaaaauuguccua

SEQ ID NO: 240430 - RNA, 22 nt, Artificial Sequence
  Synthetic
caacauuuccaaaauuguccua

SEQ ID NO: 240431 - RNA, 23 nt, Artificial Sequence
  Synthetic
ucaacauuuccaaaauuguccua

SEQ ID NO: 240432 - RNA, 24 nt, Artificial Sequence
  Synthetic
cucaacauuuccaaaauuguccua

SEQ ID NO: 240433 - RNA, 18 nt, Artificial Sequence
  Synthetic
cuugcaguaaaauuccua

SEQ ID NO: 240434 - RNA, 19 nt, Artificial Sequence
  Synthetic
gcuugcaguaaaauuccua

SEQ ID NO: 240435 - RNA, 20 nt, Artificial Sequence
  Synthetic
ggcuugcaguaaaauuccua

SEQ ID NO: 240436 - RNA, 21 nt, Artificial Sequence
  Synthetic
uggcuugcaguaaaauuccua

SEQ ID NO: 240437 - RNA, 22 nt, Artificial Sequence
  Synthetic
guggcuugcaguaaaauuccua

SEQ ID NO: 240438 - RNA, 23 nt, Artificial Sequence
  Synthetic
uguggcuugcaguaaaauuccua

SEQ ID NO: 240439 - RNA, 24 nt, Artificial Sequence
  Synthetic
uuguggcuugcaguaaaauuccua

SEQ ID NO: 240440 - RNA, 18 nt, Artificial Sequence
  Synthetic
ucaugaguguuauuccua

SEQ ID NO: 240441 - RNA, 19 nt, Artificial Sequence
  Synthetic
aucaugaguguuauuccua

SEQ ID NO: 240442 - RNA, 20 nt, Artificial Sequence
  Synthetic
caucaugaguguuauuccua

SEQ ID NO: 240443 - RNA, 21 nt, Artificial Sequence
  Synthetic
acaucaugaguguuauuccua

SEQ ID NO: 240444 - RNA, 22 nt, Artificial Sequence
  Synthetic
cacaucaugaguguuauuccua

SEQ ID NO: 240445 - RNA, 23 nt, Artificial Sequence
  Synthetic
ccacaucaugaguguuauuccua

SEQ ID NO: 240446 - RNA, 24 nt, Artificial Sequence
  Synthetic
accacaucaugaguguuauuccua

SEQ ID NO: 240447 - RNA, 18 nt, Artificial Sequence
  Synthetic
uccuggauggccuuccua

SEQ ID NO: 240448 - RNA, 19 nt, Artificial Sequence
  Synthetic
auccuggauggccuuccua

SEQ ID NO: 240449 - RNA, 20 nt, Artificial Sequence
  Synthetic
cauccuggauggccuuccua

SEQ ID NO: 240450 - RNA, 21 nt, Artificial Sequence
  Synthetic
acauccuggauggccuuccua

SEQ ID NO: 240451 - RNA, 22 nt, Artificial Sequence
  Synthetic
aacauccuggauggccuuccua

SEQ ID NO: 240452 - RNA, 23 nt, Artificial Sequence
  Synthetic
caacauccuggauggccuuccua

SEQ ID NO: 240453 - RNA, 24 nt, Artificial Sequence
  Synthetic
ucaacauccuggauggccuuccua

SEQ ID NO: 240454 - RNA, 18 nt, Artificial Sequence
  Synthetic
auucucgguggcuuccua

SEQ ID NO: 240455 - RNA, 19 nt, Artificial Sequence
  Synthetic
uauucucgguggcuuccua

SEQ ID NO: 240456 - RNA, 20 nt, Artificial Sequence
  Synthetic
uuauucucgguggcuuccua

SEQ ID NO: 240457 - RNA, 21 nt, Artificial Sequence
  Synthetic
uuuauucucgguggcuuccua

SEQ ID NO: 240458 - RNA, 22 nt, Artificial Sequence
  Synthetic
uuuuauucucgguggcuuccua

SEQ ID NO: 240459 - RNA, 23 nt, Artificial Sequence
  Synthetic
cuuuuauucucgguggcuuccua

SEQ ID NO: 240460 - RNA, 24 nt, Artificial Sequence
  Synthetic
acuuuuauucucgguggcuuccua

SEQ ID NO: 240461 - RNA, 18 nt, Artificial Sequence
  Synthetic
aagaaggaagcguuccua

SEQ ID NO: 240462 - RNA, 19 nt, Artificial Sequence
  Synthetic
uaagaaggaagcguuccua

SEQ ID NO: 240463 - RNA, 20 nt, Artificial Sequence
  Synthetic
cuaagaaggaagcguuccua

SEQ ID NO: 240464 - RNA, 21 nt, Artificial Sequence
  Synthetic
ccuaagaaggaagcguuccua

SEQ ID NO: 240465 - RNA, 22 nt, Artificial Sequence
  Synthetic
gccuaagaaggaagcguuccua

SEQ ID NO: 240466 - RNA, 23 nt, Artificial Sequence
  Synthetic
agccuaagaaggaagcguuccua

SEQ ID NO: 240467 - RNA, 24 nt, Artificial Sequence
  Synthetic
uagccuaagaaggaagcguuccua

SEQ ID NO: 240468 - RNA, 18 nt, Artificial Sequence
  Synthetic
uugaugucauuguuccua

SEQ ID NO: 240469 - RNA, 19 nt, Artificial Sequence
  Synthetic
cuugaugucauuguuccua

SEQ ID NO: 240470 - RNA, 20 nt, Artificial Sequence
  Synthetic
ucuugaugucauuguuccua

SEQ ID NO: 240471 - RNA, 21 nt, Artificial Sequence
  Synthetic
uucuugaugucauuguuccua

SEQ ID NO: 240472 - RNA, 22 nt, Artificial Sequence
  Synthetic
cuucuugaugucauuguuccua

SEQ ID NO: 240473 - RNA, 23 nt, Artificial Sequence
  Synthetic
gcuucuugaugucauuguuccua

SEQ ID NO: 240474 - RNA, 24 nt, Artificial Sequence
  Synthetic
ggcuucuugaugucauuguuccua

SEQ ID NO: 240475 - RNA, 18 nt, Artificial Sequence
  Synthetic
ccuguuugaauuuuccua

SEQ ID NO: 240476 - RNA, 19 nt, Artificial Sequence
  Synthetic
cccuguuugaauuuuccua

SEQ ID NO: 240477 - RNA, 20 nt, Artificial Sequence
  Synthetic
ucccuguuugaauuuuccua

SEQ ID NO: 240478 - RNA, 21 nt, Artificial Sequence
  Synthetic
cucccuguuugaauuuuccua

SEQ ID NO: 240479 - RNA, 22 nt, Artificial Sequence
  Synthetic
ccucccuguuugaauuuuccua

SEQ ID NO: 240480 - RNA, 23 nt, Artificial Sequence
  Synthetic
accucccuguuugaauuuuccua

SEQ ID NO: 240481 - RNA, 24 nt, Artificial Sequence
  Synthetic
caccucccuguuugaauuuuccua

SEQ ID NO: 240482 - RNA, 18 nt, Artificial Sequence
  Synthetic
uuuuuaguaauuuuccua

SEQ ID NO: 240483 - RNA, 19 nt, Artificial Sequence
  Synthetic
uuuuuuaguaauuuuccua

SEQ ID NO: 240484 - RNA, 20 nt, Artificial Sequence
  Synthetic
uuuuuuuaguaauuuuccua

SEQ ID NO: 240485 - RNA, 21 nt, Artificial Sequence
  Synthetic
auuuuuuuaguaauuuuccua

SEQ ID NO: 240486 - RNA, 22 nt, Artificial Sequence
  Synthetic
aauuuuuuuaguaauuuuccua

SEQ ID NO: 240487 - RNA, 23 nt, Artificial Sequence
  Synthetic
uaauuuuuuuaguaauuuuccua

SEQ ID NO: 240488 - RNA, 24 nt, Artificial Sequence
  Synthetic
auaauuuuuuuaguaauuuuccua

SEQ ID NO: 240489 - RNA, 18 nt, Artificial Sequence
  Synthetic
guggaguacuuuuuccua

SEQ ID NO: 240490 - RNA, 19 nt, Artificial Sequence
  Synthetic
aguggaguacuuuuuccua

SEQ ID NO: 240491 - RNA, 20 nt, Artificial Sequence
  Synthetic
caguggaguacuuuuuccua

SEQ ID NO: 240492 - RNA, 21 nt, Artificial Sequence
  Synthetic
ucaguggaguacuuuuuccua

SEQ ID NO: 240493 - RNA, 22 nt, Artificial Sequence
  Synthetic
uucaguggaguacuuuuuccua

SEQ ID NO: 240494 - RNA, 23 nt, Artificial Sequence
  Synthetic
auucaguggaguacuuuuuccua

SEQ ID NO: 240495 - RNA, 24 nt, Artificial Sequence
  Synthetic
cauucaguggaguacuuuuuccua

SEQ ID NO: 240496 - RNA, 18 nt, Artificial Sequence
  Synthetic
uuugaacucuuuuuccua

SEQ ID NO: 240497 - RNA, 19 nt, Artificial Sequence
  Synthetic
uuuugaacucuuuuuccua

SEQ ID NO: 240498 - RNA, 20 nt, Artificial Sequence
  Synthetic
guuuugaacucuuuuuccua

SEQ ID NO: 240499 - RNA, 21 nt, Artificial Sequence
  Synthetic
aguuuugaacucuuuuuccua

SEQ ID NO: 240500 - RNA, 22 nt, Artificial Sequence
  Synthetic
gaguuuugaacucuuuuuccua

SEQ ID NO: 240501 - RNA, 23 nt, Artificial Sequence
  Synthetic
agaguuuugaacucuuuuuccua

SEQ ID NO: 240502 - RNA, 24 nt, Artificial Sequence
  Synthetic
aagaguuuugaacucuuuuuccua

SEQ ID NO: 240503 - RNA, 18 nt, Artificial Sequence
  Synthetic
acaguggaagaaaagcua

SEQ ID NO: 240504 - RNA, 19 nt, Artificial Sequence
  Synthetic
gacaguggaagaaaagcua

SEQ ID NO: 240505 - RNA, 20 nt, Artificial Sequence
  Synthetic
ugacaguggaagaaaagcua

SEQ ID NO: 240506 - RNA, 21 nt, Artificial Sequence
  Synthetic
cugacaguggaagaaaagcua

SEQ ID NO: 240507 - RNA, 22 nt, Artificial Sequence
  Synthetic
ucugacaguggaagaaaagcua

SEQ ID NO: 240508 - RNA, 23 nt, Artificial Sequence
  Synthetic
cucugacaguggaagaaaagcua

SEQ ID NO: 240509 - RNA, 24 nt, Artificial Sequence
  Synthetic
ucucugacaguggaagaaaagcua

SEQ ID NO: 240510 - RNA, 18 nt, Artificial Sequence
  Synthetic
aggguuuugggaaagcua

SEQ ID NO: 240511 - RNA, 19 nt, Artificial Sequence
  Synthetic
caggguuuugggaaagcua

SEQ ID NO: 240512 - RNA, 20 nt, Artificial Sequence
  Synthetic
acaggguuuugggaaagcua

SEQ ID NO: 240513 - RNA, 21 nt, Artificial Sequence
  Synthetic
cacaggguuuugggaaagcua

SEQ ID NO: 240514 - RNA, 22 nt, Artificial Sequence
  Synthetic
acacaggguuuugggaaagcua

SEQ ID NO: 240515 - RNA, 23 nt, Artificial Sequence
  Synthetic
aacacaggguuuugggaaagcua

SEQ ID NO: 240516 - RNA, 24 nt, Artificial Sequence
  Synthetic
aaacacaggguuuugggaaagcua

SEQ ID NO: 240517 - RNA, 18 nt, Artificial Sequence
  Synthetic
cccacaaaguuaaagcua

SEQ ID NO: 240518 - RNA, 19 nt, Artificial Sequence
  Synthetic
ucccacaaaguuaaagcua

SEQ ID NO: 240519 - RNA, 20 nt, Artificial Sequence
  Synthetic
uucccacaaaguuaaagcua

SEQ ID NO: 240520 - RNA, 21 nt, Artificial Sequence
  Synthetic
cuucccacaaaguuaaagcua

SEQ ID NO: 240521 - RNA, 22 nt, Artificial Sequence
  Synthetic
ucuucccacaaaguuaaagcua

SEQ ID NO: 240522 - RNA, 23 nt, Artificial Sequence
  Synthetic
aucuucccacaaaguuaaagcua

SEQ ID NO: 240523 - RNA, 24 nt, Artificial Sequence
  Synthetic
uaucuucccacaaaguuaaagcua

SEQ ID NO: 240524 - RNA, 18 nt, Artificial Sequence
  Synthetic
ucacaagaaaacaagcua

SEQ ID NO: 240525 - RNA, 19 nt, Artificial Sequence
  Synthetic
aucacaagaaaacaagcua

SEQ ID NO: 240526 - RNA, 20 nt, Artificial Sequence
  Synthetic
uaucacaagaaaacaagcua

SEQ ID NO: 240527 - RNA, 21 nt, Artificial Sequence
  Synthetic
auaucacaagaaaacaagcua

SEQ ID NO: 240528 - RNA, 22 nt, Artificial Sequence
  Synthetic
gauaucacaagaaaacaagcua

SEQ ID NO: 240529 - RNA, 23 nt, Artificial Sequence
  Synthetic
agauaucacaagaaaacaagcua

SEQ ID NO: 240530 - RNA, 24 nt, Artificial Sequence
  Synthetic
aagauaucacaagaaaacaagcua

SEQ ID NO: 240531 - RNA, 18 nt, Artificial Sequence
  Synthetic
gccauuguaaacaagcua

SEQ ID NO: 240532 - RNA, 19 nt, Artificial Sequence
  Synthetic
ugccauuguaaacaagcua

SEQ ID NO: 240533 - RNA, 20 nt, Artificial Sequence
  Synthetic
augccauuguaaacaagcua

SEQ ID NO: 240534 - RNA, 21 nt, Artificial Sequence
  Synthetic
gaugccauuguaaacaagcua

SEQ ID NO: 240535 - RNA, 22 nt, Artificial Sequence
  Synthetic
ggaugccauuguaaacaagcua

SEQ ID NO: 240536 - RNA, 23 nt, Artificial Sequence
  Synthetic
uggaugccauuguaaacaagcua

SEQ ID NO: 240537 - RNA, 24 nt, Artificial Sequence
  Synthetic
uuggaugccauuguaaacaagcua

SEQ ID NO: 240538 - RNA, 18 nt, Artificial Sequence
  Synthetic
guucaagagaccaagcua

SEQ ID NO: 240539 - RNA, 19 nt, Artificial Sequence
  Synthetic
uguucaagagaccaagcua

SEQ ID NO: 240540 - RNA, 20 nt, Artificial Sequence
  Synthetic
auguucaagagaccaagcua

SEQ ID NO: 240541 - RNA, 21 nt, Artificial Sequence
  Synthetic
gauguucaagagaccaagcua

SEQ ID NO: 240542 - RNA, 22 nt, Artificial Sequence
  Synthetic
agauguucaagagaccaagcua

SEQ ID NO: 240543 - RNA, 23 nt, Artificial Sequence
  Synthetic
aagauguucaagagaccaagcua

SEQ ID NO: 240544 - RNA, 24 nt, Artificial Sequence
  Synthetic
aaagauguucaagagaccaagcua

SEQ ID NO: 240545 - RNA, 18 nt, Artificial Sequence
  Synthetic
aaugacuaaaucaagcua

SEQ ID NO: 240546 - RNA, 19 nt, Artificial Sequence
  Synthetic
gaaugacuaaaucaagcua

SEQ ID NO: 240547 - RNA, 20 nt, Artificial Sequence
  Synthetic
ggaaugacuaaaucaagcua

SEQ ID NO: 240548 - RNA, 21 nt, Artificial Sequence
  Synthetic
cggaaugacuaaaucaagcua

SEQ ID NO: 240549 - RNA, 22 nt, Artificial Sequence
  Synthetic
gcggaaugacuaaaucaagcua

SEQ ID NO: 240550 - RNA, 23 nt, Artificial Sequence
  Synthetic
ugcggaaugacuaaaucaagcua

SEQ ID NO: 240551 - RNA, 24 nt, Artificial Sequence
  Synthetic
uugcggaaugacuaaaucaagcua

SEQ ID NO: 240552 - RNA, 18 nt, Artificial Sequence
  Synthetic
cuuuuaaaguggaagcua

SEQ ID NO: 240553 - RNA, 19 nt, Artificial Sequence
  Synthetic
ucuuuuaaaguggaagcua

SEQ ID NO: 240554 - RNA, 20 nt, Artificial Sequence
  Synthetic
aucuuuuaaaguggaagcua

SEQ ID NO: 240555 - RNA, 21 nt, Artificial Sequence
  Synthetic
uaucuuuuaaaguggaagcua

SEQ ID NO: 240556 - RNA, 22 nt, Artificial Sequence
  Synthetic
uuaucuuuuaaaguggaagcua

SEQ ID NO: 240557 - RNA, 23 nt, Artificial Sequence
  Synthetic
uuuaucuuuuaaaguggaagcua

SEQ ID NO: 240558 - RNA, 24 nt, Artificial Sequence
  Synthetic
uuuuaucuuuuaaaguggaagcua

SEQ ID NO: 240559 - RNA, 18 nt, Artificial Sequence
  Synthetic
acaccauccagacagcua

SEQ ID NO: 240560 - RNA, 19 nt, Artificial Sequence
  Synthetic
gacaccauccagacagcua

SEQ ID NO: 240561 - RNA, 20 nt, Artificial Sequence
  Synthetic
ugacaccauccagacagcua

SEQ ID NO: 240562 - RNA, 21 nt, Artificial Sequence
  Synthetic
uugacaccauccagacagcua

SEQ ID NO: 240563 - RNA, 22 nt, Artificial Sequence
  Synthetic
guugacaccauccagacagcua

SEQ ID NO: 240564 - RNA, 23 nt, Artificial Sequence
  Synthetic
gguugacaccauccagacagcua

SEQ ID NO: 240565 - RNA, 24 nt, Artificial Sequence
  Synthetic
ugguugacaccauccagacagcua

SEQ ID NO: 240566 - RNA, 18 nt, Artificial Sequence
  Synthetic
cauaauaugugacagcua

SEQ ID NO: 240567 - RNA, 19 nt, Artificial Sequence
  Synthetic
ucauaauaugugacagcua

SEQ ID NO: 240568 - RNA, 20 nt, Artificial Sequence
  Synthetic
gucauaauaugugacagcua

SEQ ID NO: 240569 - RNA, 21 nt, Artificial Sequence
  Synthetic
ggucauaauaugugacagcua

SEQ ID NO: 240570 - RNA, 22 nt, Artificial Sequence
  Synthetic
aggucauaauaugugacagcua

SEQ ID NO: 240571 - RNA, 23 nt, Artificial Sequence
  Synthetic
caggucauaauaugugacagcua

SEQ ID NO: 240572 - RNA, 24 nt, Artificial Sequence
  Synthetic
ccaggucauaauaugugacagcua

SEQ ID NO: 240573 - RNA, 18 nt, Artificial Sequence
  Synthetic
agccuguaaucccagcua

SEQ ID NO: 240574 - RNA, 19 nt, Artificial Sequence
  Synthetic
gagccuguaaucccagcua

SEQ ID NO: 240575 - RNA, 20 nt, Artificial Sequence
  Synthetic
cgagccuguaaucccagcua

SEQ ID NO: 240576 - RNA, 21 nt, Artificial Sequence
  Synthetic
gcgagccuguaaucccagcua

SEQ ID NO: 240577 - RNA, 22 nt, Artificial Sequence
  Synthetic
ugcgagccuguaaucccagcua

SEQ ID NO: 240578 - RNA, 23 nt, Artificial Sequence
  Synthetic
gugcgagccuguaaucccagcua

SEQ ID NO: 240579 - RNA, 24 nt, Artificial Sequence
  Synthetic
ggugcgagccuguaaucccagcua

SEQ ID NO: 240580 - RNA, 18 nt, Artificial Sequence
  Synthetic
gucaccuaaggccagcua

SEQ ID NO: 240581 - RNA, 19 nt, Artificial Sequence
  Synthetic
agucaccuaaggccagcua

SEQ ID NO: 240582 - RNA, 20 nt, Artificial Sequence
  Synthetic
aagucaccuaaggccagcua

SEQ ID NO: 240583 - RNA, 21 nt, Artificial Sequence
  Synthetic
gaagucaccuaaggccagcua

SEQ ID NO: 240584 - RNA, 22 nt, Artificial Sequence
  Synthetic
agaagucaccuaaggccagcua

SEQ ID NO: 240585 - RNA, 23 nt, Artificial Sequence
  Synthetic
gagaagucaccuaaggccagcua

SEQ ID NO: 240586 - RNA, 24 nt, Artificial Sequence
  Synthetic
ggagaagucaccuaaggccagcua

SEQ ID NO: 240587 - RNA, 18 nt, Artificial Sequence
  Synthetic
gaagcugcuugccagcua

SEQ ID NO: 240588 - RNA, 19 nt, Artificial Sequence
  Synthetic
ugaagcugcuugccagcua

SEQ ID NO: 240589 - RNA, 20 nt, Artificial Sequence
  Synthetic
augaagcugcuugccagcua

SEQ ID NO: 240590 - RNA, 21 nt, Artificial Sequence
  Synthetic
caugaagcugcuugccagcua

SEQ ID NO: 240591 - RNA, 22 nt, Artificial Sequence
  Synthetic
ucaugaagcugcuugccagcua

SEQ ID NO: 240592 - RNA, 23 nt, Artificial Sequence
  Synthetic
uucaugaagcugcuugccagcua

SEQ ID NO: 240593 - RNA, 24 nt, Artificial Sequence
  Synthetic
uuucaugaagcugcuugccagcua

SEQ ID NO: 240594 - RNA, 18 nt, Artificial Sequence
  Synthetic
gcgcuuuuucugcagcua

SEQ ID NO: 240595 - RNA, 19 nt, Artificial Sequence
  Synthetic
agcgcuuuuucugcagcua

SEQ ID NO: 240596 - RNA, 20 nt, Artificial Sequence
  Synthetic
aagcgcuuuuucugcagcua

SEQ ID NO: 240597 - RNA, 21 nt, Artificial Sequence
  Synthetic
uaagcgcuuuuucugcagcua

SEQ ID NO: 240598 - RNA, 22 nt, Artificial Sequence
  Synthetic
uuaagcgcuuuuucugcagcua

SEQ ID NO: 240599 - RNA, 23 nt, Artificial Sequence
  Synthetic
guuaagcgcuuuuucugcagcua

SEQ ID NO: 240600 - RNA, 24 nt, Artificial Sequence
  Synthetic
uguuaagcgcuuuuucugcagcua

SEQ ID NO: 240601 - RNA, 18 nt, Artificial Sequence
  Synthetic
uccaucuuugcucagcua

SEQ ID NO: 240602 - RNA, 19 nt, Artificial Sequence
  Synthetic
cuccaucuuugcucagcua

SEQ ID NO: 240603 - RNA, 20 nt, Artificial Sequence
  Synthetic
ccuccaucuuugcucagcua

SEQ ID NO: 240604 - RNA, 21 nt, Artificial Sequence
  Synthetic
uccuccaucuuugcucagcua

SEQ ID NO: 240605 - RNA, 22 nt, Artificial Sequence
  Synthetic
uuccuccaucuuugcucagcua

SEQ ID NO: 240606 - RNA, 23 nt, Artificial Sequence
  Synthetic
uuuccuccaucuuugcucagcua

SEQ ID NO: 240607 - RNA, 24 nt, Artificial Sequence
  Synthetic
uuuuccuccaucuuugcucagcua

SEQ ID NO: 240608 - RNA, 18 nt, Artificial Sequence
  Synthetic
aaaacuguaucucagcua

SEQ ID NO: 240609 - RNA, 19 nt, Artificial Sequence
  Synthetic
aaaaacuguaucucagcua

SEQ ID NO: 240610 - RNA, 20 nt, Artificial Sequence
  Synthetic
aaaaaacuguaucucagcua

SEQ ID NO: 240611 - RNA, 21 nt, Artificial Sequence
  Synthetic
gaaaaaacuguaucucagcua

SEQ ID NO: 240612 - RNA, 22 nt, Artificial Sequence
  Synthetic
ggaaaaaacuguaucucagcua

SEQ ID NO: 240613 - RNA, 23 nt, Artificial Sequence
  Synthetic
gggaaaaaacuguaucucagcua

SEQ ID NO: 240614 - RNA, 24 nt, Artificial Sequence
  Synthetic
agggaaaaaacuguaucucagcua

SEQ ID NO: 240615 - RNA, 18 nt, Artificial Sequence
  Synthetic
cccugugucauucagcua

SEQ ID NO: 240616 - RNA, 19 nt, Artificial Sequence
  Synthetic
ccccugugucauucagcua

SEQ ID NO: 240617 - RNA, 20 nt, Artificial Sequence
  Synthetic
accccugugucauucagcua

SEQ ID NO: 240618 - RNA, 21 nt, Artificial Sequence
  Synthetic
aaccccugugucauucagcua

SEQ ID NO: 240619 - RNA, 22 nt, Artificial Sequence
  Synthetic
caaccccugugucauucagcua

SEQ ID NO: 240620 - RNA, 23 nt, Artificial Sequence
  Synthetic
ccaaccccugugucauucagcua

SEQ ID NO: 240621 - RNA, 24 nt, Artificial Sequence
  Synthetic
uccaaccccugugucauucagcua

SEQ ID NO: 240622 - RNA, 18 nt, Artificial Sequence
  Synthetic
cuagcuaaggcagagcua

SEQ ID NO: 240623 - RNA, 19 nt, Artificial Sequence
  Synthetic
acuagcuaaggcagagcua

SEQ ID NO: 240624 - RNA, 20 nt, Artificial Sequence
  Synthetic
cacuagcuaaggcagagcua

SEQ ID NO: 240625 - RNA, 21 nt, Artificial Sequence
  Synthetic
acacuagcuaaggcagagcua

SEQ ID NO: 240626 - RNA, 22 nt, Artificial Sequence
  Synthetic
aacacuagcuaaggcagagcua

SEQ ID NO: 240627 - RNA, 23 nt, Artificial Sequence
  Synthetic
aaacacuagcuaaggcagagcua

SEQ ID NO: 240628 - RNA, 24 nt, Artificial Sequence
  Synthetic
aaaacacuagcuaaggcagagcua

SEQ ID NO: 240629 - RNA, 18 nt, Artificial Sequence
  Synthetic
cuguaaccgauagagcua

SEQ ID NO: 240630 - RNA, 19 nt, Artificial Sequence
  Synthetic
gcuguaaccgauagagcua

SEQ ID NO: 240631 - RNA, 20 nt, Artificial Sequence
  Synthetic
ugcuguaaccgauagagcua

SEQ ID NO: 240632 - RNA, 21 nt, Artificial Sequence
  Synthetic
cugcuguaaccgauagagcua

SEQ ID NO: 240633 - RNA, 22 nt, Artificial Sequence
  Synthetic
acugcuguaaccgauagagcua

SEQ ID NO: 240634 - RNA, 23 nt, Artificial Sequence
  Synthetic
uacugcuguaaccgauagagcua

SEQ ID NO: 240635 - RNA, 24 nt, Artificial Sequence
  Synthetic
uuacugcuguaaccgauagagcua

SEQ ID NO: 240636 - RNA, 18 nt, Artificial Sequence
  Synthetic
acaaacucuuacgagcua

SEQ ID NO: 240637 - RNA, 19 nt, Artificial Sequence
  Synthetic
aacaaacucuuacgagcua

SEQ ID NO: 240638 - RNA, 20 nt, Artificial Sequence
  Synthetic
uaacaaacucuuacgagcua

SEQ ID NO: 240639 - RNA, 21 nt, Artificial Sequence
  Synthetic
auaacaaacucuuacgagcua

SEQ ID NO: 240640 - RNA, 22 nt, Artificial Sequence
  Synthetic
aauaacaaacucuuacgagcua

SEQ ID NO: 240641 - RNA, 23 nt, Artificial Sequence
  Synthetic
uaauaacaaacucuuacgagcua

SEQ ID NO: 240642 - RNA, 24 nt, Artificial Sequence
  Synthetic
guaauaacaaacucuuacgagcua

SEQ ID NO: 240643 - RNA, 18 nt, Artificial Sequence
  Synthetic
aaggauuuaagggagcua

SEQ ID NO: 240644 - RNA, 19 nt, Artificial Sequence
  Synthetic
gaaggauuuaagggagcua

SEQ ID NO: 240645 - RNA, 20 nt, Artificial Sequence
  Synthetic
ugaaggauuuaagggagcua

SEQ ID NO: 240646 - RNA, 21 nt, Artificial Sequence
  Synthetic
cugaaggauuuaagggagcua

SEQ ID NO: 240647 - RNA, 22 nt, Artificial Sequence
  Synthetic
gcugaaggauuuaagggagcua

SEQ ID NO: 240648 - RNA, 23 nt, Artificial Sequence
  Synthetic
ugcugaaggauuuaagggagcua

SEQ ID NO: 240649 - RNA, 24 nt, Artificial Sequence
  Synthetic
augcugaaggauuuaagggagcua

SEQ ID NO: 240650 - RNA, 18 nt, Artificial Sequence
  Synthetic
agcuagcuaggggagcua

SEQ ID NO: 240651 - RNA, 19 nt, Artificial Sequence
  Synthetic
aagcuagcuaggggagcua

SEQ ID NO: 240652 - RNA, 20 nt, Artificial Sequence
  Synthetic
aaagcuagcuaggggagcua

SEQ ID NO: 240653 - RNA, 21 nt, Artificial Sequence
  Synthetic
caaagcuagcuaggggagcua

SEQ ID NO: 240654 - RNA, 22 nt, Artificial Sequence
  Synthetic
acaaagcuagcuaggggagcua

SEQ ID NO: 240655 - RNA, 23 nt, Artificial Sequence
  Synthetic
gacaaagcuagcuaggggagcua

SEQ ID NO: 240656 - RNA, 24 nt, Artificial Sequence
  Synthetic
agacaaagcuagcuaggggagcua

SEQ ID NO: 240657 - RNA, 18 nt, Artificial Sequence
  Synthetic
ccaaaggggaaugagcua

SEQ ID NO: 240658 - RNA, 19 nt, Artificial Sequence
  Synthetic
cccaaaggggaaugagcua

SEQ ID NO: 240659 - RNA, 20 nt, Artificial Sequence
  Synthetic
gcccaaaggggaaugagcua

SEQ ID NO: 240660 - RNA, 21 nt, Artificial Sequence
  Synthetic
agcccaaaggggaaugagcua

SEQ ID NO: 240661 - RNA, 22 nt, Artificial Sequence
  Synthetic
cagcccaaaggggaaugagcua

SEQ ID NO: 240662 - RNA, 23 nt, Artificial Sequence
  Synthetic
ccagcccaaaggggaaugagcua

SEQ ID NO: 240663 - RNA, 24 nt, Artificial Sequence
  Synthetic
gccagcccaaaggggaaugagcua

SEQ ID NO: 240664 - RNA, 18 nt, Artificial Sequence
  Synthetic
augaacaaagcugagcua

SEQ ID NO: 240665 - RNA, 19 nt, Artificial Sequence
  Synthetic
aaugaacaaagcugagcua

SEQ ID NO: 240666 - RNA, 20 nt, Artificial Sequence
  Synthetic
gaaugaacaaagcugagcua

SEQ ID NO: 240667 - RNA, 21 nt, Artificial Sequence
  Synthetic
ugaaugaacaaagcugagcua

SEQ ID NO: 240668 - RNA, 22 nt, Artificial Sequence
  Synthetic
uugaaugaacaaagcugagcua

SEQ ID NO: 240669 - RNA, 23 nt, Artificial Sequence
  Synthetic
guugaaugaacaaagcugagcua

SEQ ID NO: 240670 - RNA, 24 nt, Artificial Sequence
  Synthetic
aguugaaugaacaaagcugagcua

SEQ ID NO: 240671 - RNA, 18 nt, Artificial Sequence
  Synthetic
uauguuacauuugagcua

SEQ ID NO: 240672 - RNA, 19 nt, Artificial Sequence
  Synthetic
auauguuacauuugagcua

SEQ ID NO: 240673 - RNA, 20 nt, Artificial Sequence
  Synthetic
uauauguuacauuugagcua

SEQ ID NO: 240674 - RNA, 21 nt, Artificial Sequence
  Synthetic
auauauguuacauuugagcua

SEQ ID NO: 240675 - RNA, 22 nt, Artificial Sequence
  Synthetic
gauauauguuacauuugagcua

SEQ ID NO: 240676 - RNA, 23 nt, Artificial Sequence
  Synthetic
ugauauauguuacauuugagcua

SEQ ID NO: 240677 - RNA, 24 nt, Artificial Sequence
  Synthetic
uugauauauguuacauuugagcua

SEQ ID NO: 240678 - RNA, 18 nt, Artificial Sequence
  Synthetic
gaaaugaggcaauagcua

SEQ ID NO: 240679 - RNA, 19 nt, Artificial Sequence
  Synthetic
agaaaugaggcaauagcua

SEQ ID NO: 240680 - RNA, 20 nt, Artificial Sequence
  Synthetic
gagaaaugaggcaauagcua

SEQ ID NO: 240681 - RNA, 21 nt, Artificial Sequence
  Synthetic
ugagaaaugaggcaauagcua

SEQ ID NO: 240682 - RNA, 22 nt, Artificial Sequence
  Synthetic
uugagaaaugaggcaauagcua

SEQ ID NO: 240683 - RNA, 23 nt, Artificial Sequence
  Synthetic
uuugagaaaugaggcaauagcua

SEQ ID NO: 240684 - RNA, 24 nt, Artificial Sequence
  Synthetic
auuugagaaaugaggcaauagcua

SEQ ID NO: 240685 - RNA, 18 nt, Artificial Sequence
  Synthetic
accuugguuuaauagcua

SEQ ID NO: 240686 - RNA, 19 nt, Artificial Sequence
  Synthetic
gaccuugguuuaauagcua

SEQ ID NO: 240687 - RNA, 20 nt, Artificial Sequence
  Synthetic
ggaccuugguuuaauagcua

SEQ ID NO: 240688 - RNA, 21 nt, Artificial Sequence
  Synthetic
uggaccuugguuuaauagcua

SEQ ID NO: 240689 - RNA, 22 nt, Artificial Sequence
  Synthetic
auggaccuugguuuaauagcua

SEQ ID NO: 240690 - RNA, 23 nt, Artificial Sequence
  Synthetic
uauggaccuugguuuaauagcua

SEQ ID NO: 240691 - RNA, 24 nt, Artificial Sequence
  Synthetic
uuauggaccuugguuuaauagcua

SEQ ID NO: 240692 - RNA, 18 nt, Artificial Sequence
  Synthetic
uagaucaccgcauagcua

SEQ ID NO: 240693 - RNA, 19 nt, Artificial Sequence
  Synthetic
auagaucaccgcauagcua

SEQ ID NO: 240694 - RNA, 20 nt, Artificial Sequence
  Synthetic
aauagaucaccgcauagcua

SEQ ID NO: 240695 - RNA, 21 nt, Artificial Sequence
  Synthetic
aaauagaucaccgcauagcua

SEQ ID NO: 240696 - RNA, 22 nt, Artificial Sequence
  Synthetic
gaaauagaucaccgcauagcua

SEQ ID NO: 240697 - RNA, 23 nt, Artificial Sequence
  Synthetic
ggaaauagaucaccgcauagcua

SEQ ID NO: 240698 - RNA, 24 nt, Artificial Sequence
  Synthetic
aggaaauagaucaccgcauagcua

SEQ ID NO: 240699 - RNA, 18 nt, Artificial Sequence
  Synthetic
cuaggacuuucauagcua

SEQ ID NO: 240700 - RNA, 19 nt, Artificial Sequence
  Synthetic
ucuaggacuuucauagcua

SEQ ID NO: 240701 - RNA, 20 nt, Artificial Sequence
  Synthetic
aucuaggacuuucauagcua

SEQ ID NO: 240702 - RNA, 21 nt, Artificial Sequence
  Synthetic
caucuaggacuuucauagcua

SEQ ID NO: 240703 - RNA, 22 nt, Artificial Sequence
  Synthetic
ccaucuaggacuuucauagcua

SEQ ID NO: 240704 - RNA, 23 nt, Artificial Sequence
  Synthetic
gccaucuaggacuuucauagcua

SEQ ID NO: 240705 - RNA, 24 nt, Artificial Sequence
  Synthetic
ugccaucuaggacuuucauagcua

SEQ ID NO: 240706 - RNA, 18 nt, Artificial Sequence
  Synthetic
cucaaagucauauagcua

SEQ ID NO: 240707 - RNA, 19 nt, Artificial Sequence
  Synthetic
ucucaaagucauauagcua

SEQ ID NO: 240708 - RNA, 20 nt, Artificial Sequence
  Synthetic
uucucaaagucauauagcua

SEQ ID NO: 240709 - RNA, 21 nt, Artificial Sequence
  Synthetic
uuucucaaagucauauagcua

SEQ ID NO: 240710 - RNA, 22 nt, Artificial Sequence
  Synthetic
uuuucucaaagucauauagcua

SEQ ID NO: 240711 - RNA, 23 nt, Artificial Sequence
  Synthetic
auuuucucaaagucauauagcua

SEQ ID NO: 240712 - RNA, 24 nt, Artificial Sequence
  Synthetic
uauuuucucaaagucauauagcua

SEQ ID NO: 240713 - RNA, 18 nt, Artificial Sequence
  Synthetic
uggaagauucuauagcua

SEQ ID NO: 240714 - RNA, 19 nt, Artificial Sequence
  Synthetic
uuggaagauucuauagcua

SEQ ID NO: 240715 - RNA, 20 nt, Artificial Sequence
  Synthetic
guuggaagauucuauagcua

SEQ ID NO: 240716 - RNA, 21 nt, Artificial Sequence
  Synthetic
aguuggaagauucuauagcua

SEQ ID NO: 240717 - RNA, 22 nt, Artificial Sequence
  Synthetic
caguuggaagauucuauagcua

SEQ ID NO: 240718 - RNA, 23 nt, Artificial Sequence
  Synthetic
ccaguuggaagauucuauagcua

SEQ ID NO: 240719 - RNA, 24 nt, Artificial Sequence
  Synthetic
uccaguuggaagauucuauagcua

SEQ ID NO: 240720 - RNA, 18 nt, Artificial Sequence
  Synthetic
cagagacaaagcuagcua

SEQ ID NO: 240721 - RNA, 19 nt, Artificial Sequence
  Synthetic
ccagagacaaagcuagcua

SEQ ID NO: 240722 - RNA, 20 nt, Artificial Sequence
  Synthetic
uccagagacaaagcuagcua

SEQ ID NO: 240723 - RNA, 21 nt, Artificial Sequence
  Synthetic
uuccagagacaaagcuagcua

SEQ ID NO: 240724 - RNA, 22 nt, Artificial Sequence
  Synthetic
guuccagagacaaagcuagcua

SEQ ID NO: 240725 - RNA, 23 nt, Artificial Sequence
  Synthetic
uguuccagagacaaagcuagcua

SEQ ID NO: 240726 - RNA, 24 nt, Artificial Sequence
  Synthetic
uuguuccagagacaaagcuagcua

SEQ ID NO: 240727 - RNA, 18 nt, Artificial Sequence
  Synthetic
uguccaauaaaguagcua

SEQ ID NO: 240728 - RNA, 19 nt, Artificial Sequence
  Synthetic
cuguccaauaaaguagcua

SEQ ID NO: 240729 - RNA, 20 nt, Artificial Sequence
  Synthetic
acuguccaauaaaguagcua

SEQ ID NO: 240730 - RNA, 21 nt, Artificial Sequence
  Synthetic
cacuguccaauaaaguagcua

SEQ ID NO: 240731 - RNA, 22 nt, Artificial Sequence
  Synthetic
acacuguccaauaaaguagcua

SEQ ID NO: 240732 - RNA, 23 nt, Artificial Sequence
  Synthetic
uacacuguccaauaaaguagcua

SEQ ID NO: 240733 - RNA, 24 nt, Artificial Sequence
  Synthetic
cuacacuguccaauaaaguagcua

SEQ ID NO: 240734 - RNA, 18 nt, Artificial Sequence
  Synthetic
ucaauacaaggguagcua

SEQ ID NO: 240735 - RNA, 19 nt, Artificial Sequence
  Synthetic
gucaauacaaggguagcua

SEQ ID NO: 240736 - RNA, 20 nt, Artificial Sequence
  Synthetic
ggucaauacaaggguagcua

SEQ ID NO: 240737 - RNA, 21 nt, Artificial Sequence
  Synthetic
uggucaauacaaggguagcua

SEQ ID NO: 240738 - RNA, 22 nt, Artificial Sequence
  Synthetic
auggucaauacaaggguagcua

SEQ ID NO: 240739 - RNA, 23 nt, Artificial Sequence
  Synthetic
aauggucaauacaaggguagcua

SEQ ID NO: 240740 - RNA, 24 nt, Artificial Sequence
  Synthetic
aaauggucaauacaaggguagcua

SEQ ID NO: 240741 - RNA, 18 nt, Artificial Sequence
  Synthetic
auaguuccccauuagcua

SEQ ID NO: 240742 - RNA, 19 nt, Artificial Sequence
  Synthetic
cauaguuccccauuagcua

SEQ ID NO: 240743 - RNA, 20 nt, Artificial Sequence
  Synthetic
ucauaguuccccauuagcua

SEQ ID NO: 240744 - RNA, 21 nt, Artificial Sequence
  Synthetic
aucauaguuccccauuagcua

SEQ ID NO: 240745 - RNA, 22 nt, Artificial Sequence
  Synthetic
aaucauaguuccccauuagcua

SEQ ID NO: 240746 - RNA, 23 nt, Artificial Sequence
  Synthetic
aaaucauaguuccccauuagcua

SEQ ID NO: 240747 - RNA, 24 nt, Artificial Sequence
  Synthetic
aaaaucauaguuccccauuagcua

SEQ ID NO: 240748 - RNA, 18 nt, Artificial Sequence
  Synthetic
gcauucacaacuuagcua

SEQ ID NO: 240749 - RNA, 19 nt, Artificial Sequence
  Synthetic
ugcauucacaacuuagcua

SEQ ID NO: 240750 - RNA, 20 nt, Artificial Sequence
  Synthetic
uugcauucacaacuuagcua

SEQ ID NO: 240751 - RNA, 21 nt, Artificial Sequence
  Synthetic
uuugcauucacaacuuagcua

SEQ ID NO: 240752 - RNA, 22 nt, Artificial Sequence
  Synthetic
cuuugcauucacaacuuagcua

SEQ ID NO: 240753 - RNA, 23 nt, Artificial Sequence
  Synthetic
ccuuugcauucacaacuuagcua

SEQ ID NO: 240754 - RNA, 24 nt, Artificial Sequence
  Synthetic
uccuuugcauucacaacuuagcua

SEQ ID NO: 240755 - RNA, 18 nt, Artificial Sequence
  Synthetic
acauugguuucuuagcua

SEQ ID NO: 240756 - RNA, 19 nt, Artificial Sequence
  Synthetic
uacauugguuucuuagcua

SEQ ID NO: 240757 - RNA, 20 nt, Artificial Sequence
  Synthetic
guacauugguuucuuagcua

SEQ ID NO: 240758 - RNA, 21 nt, Artificial Sequence
  Synthetic
cguacauugguuucuuagcua

SEQ ID NO: 240759 - RNA, 22 nt, Artificial Sequence
  Synthetic
ccguacauugguuucuuagcua

SEQ ID NO: 240760 - RNA, 23 nt, Artificial Sequence
  Synthetic
uccguacauugguuucuuagcua

SEQ ID NO: 240761 - RNA, 24 nt, Artificial Sequence
  Synthetic
cuccguacauugguuucuuagcua

SEQ ID NO: 240762 - RNA, 18 nt, Artificial Sequence
  Synthetic
aaacauguuucuuagcua

SEQ ID NO: 240763 - RNA, 19 nt, Artificial Sequence
  Synthetic
uaaacauguuucuuagcua

SEQ ID NO: 240764 - RNA, 20 nt, Artificial Sequence
  Synthetic
uuaaacauguuucuuagcua

SEQ ID NO: 240765 - RNA, 21 nt, Artificial Sequence
  Synthetic
guuaaacauguuucuuagcua

SEQ ID NO: 240766 - RNA, 22 nt, Artificial Sequence
  Synthetic
aguuaaacauguuucuuagcua

SEQ ID NO: 240767 - RNA, 23 nt, Artificial Sequence
  Synthetic
aaguuaaacauguuucuuagcua

SEQ ID NO: 240768 - RNA, 24 nt, Artificial Sequence
  Synthetic
gaaguuaaacauguuucuuagcua

SEQ ID NO: 240769 - RNA, 18 nt, Artificial Sequence
  Synthetic
acugcuuuagcuacgcua

SEQ ID NO: 240770 - RNA, 19 nt, Artificial Sequence
  Synthetic
cacugcuuuagcuacgcua

SEQ ID NO: 240771 - RNA, 20 nt, Artificial Sequence
  Synthetic
ccacugcuuuagcuacgcua

SEQ ID NO: 240772 - RNA, 21 nt, Artificial Sequence
  Synthetic
accacugcuuuagcuacgcua

SEQ ID NO: 240773 - RNA, 22 nt, Artificial Sequence
  Synthetic
aaccacugcuuuagcuacgcua

SEQ ID NO: 240774 - RNA, 23 nt, Artificial Sequence
  Synthetic
aaaccacugcuuuagcuacgcua

SEQ ID NO: 240775 - RNA, 24 nt, Artificial Sequence
  Synthetic
aaaaccacugcuuuagcuacgcua

SEQ ID NO: 240776 - RNA, 18 nt, Artificial Sequence
  Synthetic
uguucaaagauuacgcua

SEQ ID NO: 240777 - RNA, 19 nt, Artificial Sequence
  Synthetic
uuguucaaagauuacgcua

SEQ ID NO: 240778 - RNA, 20 nt, Artificial Sequence
  Synthetic
auuguucaaagauuacgcua

SEQ ID NO: 240779 - RNA, 21 nt, Artificial Sequence
  Synthetic
aauuguucaaagauuacgcua

SEQ ID NO: 240780 - RNA, 22 nt, Artificial Sequence
  Synthetic
aaauuguucaaagauuacgcua

SEQ ID NO: 240781 - RNA, 23 nt, Artificial Sequence
  Synthetic
caaauuguucaaagauuacgcua

SEQ ID NO: 240782 - RNA, 24 nt, Artificial Sequence
  Synthetic
ccaaauuguucaaagauuacgcua

SEQ ID NO: 240783 - RNA, 18 nt, Artificial Sequence
  Synthetic
auuuuuauuauuacgcua

SEQ ID NO: 240784 - RNA, 19 nt, Artificial Sequence
  Synthetic
uauuuuuauuauuacgcua

SEQ ID NO: 240785 - RNA, 20 nt, Artificial Sequence
  Synthetic
uuauuuuuauuauuacgcua

SEQ ID NO: 240786 - RNA, 21 nt, Artificial Sequence
  Synthetic
guuauuuuuauuauuacgcua

SEQ ID NO: 240787 - RNA, 22 nt, Artificial Sequence
  Synthetic
aguuauuuuuauuauuacgcua

SEQ ID NO: 240788 - RNA, 23 nt, Artificial Sequence
  Synthetic
aaguuauuuuuauuauuacgcua

SEQ ID NO: 240789 - RNA, 24 nt, Artificial Sequence
  Synthetic
gaaguuauuuuuauuauuacgcua

SEQ ID NO: 240790 - RNA, 18 nt, Artificial Sequence
  Synthetic
guucaaggguaaaggcua

SEQ ID NO: 240791 - RNA, 19 nt, Artificial Sequence
  Synthetic
aguucaaggguaaaggcua

SEQ ID NO: 240792 - RNA, 20 nt, Artificial Sequence
  Synthetic
aaguucaaggguaaaggcua

SEQ ID NO: 240793 - RNA, 21 nt, Artificial Sequence
  Synthetic
gaaguucaaggguaaaggcua

SEQ ID NO: 240794 - RNA, 22 nt, Artificial Sequence
  Synthetic
ugaaguucaaggguaaaggcua

SEQ ID NO: 240795 - RNA, 23 nt, Artificial Sequence
  Synthetic
cugaaguucaaggguaaaggcua

SEQ ID NO: 240796 - RNA, 24 nt, Artificial Sequence
  Synthetic
acugaaguucaaggguaaaggcua

SEQ ID NO: 240797 - RNA, 18 nt, Artificial Sequence
  Synthetic
uuagauaaaggaaggcua

SEQ ID NO: 240798 - RNA, 19 nt, Artificial Sequence
  Synthetic
guuagauaaaggaaggcua

SEQ ID NO: 240799 - RNA, 20 nt, Artificial Sequence
  Synthetic
gguuagauaaaggaaggcua

SEQ ID NO: 240800 - RNA, 21 nt, Artificial Sequence
  Synthetic
ugguuagauaaaggaaggcua

SEQ ID NO: 240801 - RNA, 22 nt, Artificial Sequence
  Synthetic
cugguuagauaaaggaaggcua

SEQ ID NO: 240802 - RNA, 23 nt, Artificial Sequence
  Synthetic
acugguuagauaaaggaaggcua

SEQ ID NO: 240803 - RNA, 24 nt, Artificial Sequence
  Synthetic
cacugguuagauaaaggaaggcua

SEQ ID NO: 240804 - RNA, 18 nt, Artificial Sequence
  Synthetic
gaagaaaacugaaggcua

SEQ ID NO: 240805 - RNA, 19 nt, Artificial Sequence
  Synthetic
agaagaaaacugaaggcua

SEQ ID NO: 240806 - RNA, 20 nt, Artificial Sequence
  Synthetic
gagaagaaaacugaaggcua

SEQ ID NO: 240807 - RNA, 21 nt, Artificial Sequence
  Synthetic
agagaagaaaacugaaggcua

SEQ ID NO: 240808 - RNA, 22 nt, Artificial Sequence
  Synthetic
cagagaagaaaacugaaggcua

SEQ ID NO: 240809 - RNA, 23 nt, Artificial Sequence
  Synthetic
gcagagaagaaaacugaaggcua

SEQ ID NO: 240810 - RNA, 24 nt, Artificial Sequence
  Synthetic
ugcagagaagaaaacugaaggcua

SEQ ID NO: 240811 - RNA, 18 nt, Artificial Sequence
  Synthetic
ugugcuggcauaaggcua

SEQ ID NO: 240812 - RNA, 19 nt, Artificial Sequence
  Synthetic
gugugcuggcauaaggcua

SEQ ID NO: 240813 - RNA, 20 nt, Artificial Sequence
  Synthetic
agugugcuggcauaaggcua

SEQ ID NO: 240814 - RNA, 21 nt, Artificial Sequence
  Synthetic
cagugugcuggcauaaggcua

SEQ ID NO: 240815 - RNA, 22 nt, Artificial Sequence
  Synthetic
acagugugcuggcauaaggcua

SEQ ID NO: 240816 - RNA, 23 nt, Artificial Sequence
  Synthetic
cacagugugcuggcauaaggcua

SEQ ID NO: 240817 - RNA, 24 nt, Artificial Sequence
  Synthetic
ccacagugugcuggcauaaggcua

SEQ ID NO: 240818 - RNA, 18 nt, Artificial Sequence
  Synthetic
uuagauaaaggcaggcua

SEQ ID NO: 240819 - RNA, 19 nt, Artificial Sequence
  Synthetic
uuuagauaaaggcaggcua

SEQ ID NO: 240820 - RNA, 20 nt, Artificial Sequence
  Synthetic
uuuuagauaaaggcaggcua

SEQ ID NO: 240821 - RNA, 21 nt, Artificial Sequence
  Synthetic
uuuuuagauaaaggcaggcua

SEQ ID NO: 240822 - RNA, 22 nt, Artificial Sequence
  Synthetic
uuuuuuagauaaaggcaggcua

SEQ ID NO: 240823 - RNA, 23 nt, Artificial Sequence
  Synthetic
auuuuuuagauaaaggcaggcua

SEQ ID NO: 240824 - RNA, 24 nt, Artificial Sequence
  Synthetic
cauuuuuuagauaaaggcaggcua

SEQ ID NO: 240825 - RNA, 18 nt, Artificial Sequence
  Synthetic
ccugaccuaaucaggcua

SEQ ID NO: 240826 - RNA, 19 nt, Artificial Sequence
  Synthetic
accugaccuaaucaggcua

SEQ ID NO: 240827 - RNA, 20 nt, Artificial Sequence
  Synthetic
uaccugaccuaaucaggcua

SEQ ID NO: 240828 - RNA, 21 nt, Artificial Sequence
  Synthetic
guaccugaccuaaucaggcua

SEQ ID NO: 240829 - RNA, 22 nt, Artificial Sequence
  Synthetic
gguaccugaccuaaucaggcua

SEQ ID NO: 240830 - RNA, 23 nt, Artificial Sequence
  Synthetic
ugguaccugaccuaaucaggcua

SEQ ID NO: 240831 - RNA, 24 nt, Artificial Sequence
  Synthetic
cugguaccugaccuaaucaggcua

SEQ ID NO: 240832 - RNA, 18 nt, Artificial Sequence
  Synthetic
gcuggagacaggaggcua

SEQ ID NO: 240833 - RNA, 19 nt, Artificial Sequence
  Synthetic
ugcuggagacaggaggcua

SEQ ID NO: 240834 - RNA, 20 nt, Artificial Sequence
  Synthetic
cugcuggagacaggaggcua

SEQ ID NO: 240835 - RNA, 21 nt, Artificial Sequence
  Synthetic
acugcuggagacaggaggcua

SEQ ID NO: 240836 - RNA, 22 nt, Artificial Sequence
  Synthetic
aacugcuggagacaggaggcua

SEQ ID NO: 240837 - RNA, 23 nt, Artificial Sequence
  Synthetic
uaacugcuggagacaggaggcua

SEQ ID NO: 240838 - RNA, 24 nt, Artificial Sequence
  Synthetic
cuaacugcuggagacaggaggcua

SEQ ID NO: 240839 - RNA, 18 nt, Artificial Sequence
  Synthetic
uaaagaaguuggaggcua

SEQ ID NO: 240840 - RNA, 19 nt, Artificial Sequence
  Synthetic
cuaaagaaguuggaggcua

SEQ ID NO: 240841 - RNA, 20 nt, Artificial Sequence
  Synthetic
gcuaaagaaguuggaggcua

SEQ ID NO: 240842 - RNA, 21 nt, Artificial Sequence
  Synthetic
ggcuaaagaaguuggaggcua

SEQ ID NO: 240843 - RNA, 22 nt, Artificial Sequence
  Synthetic
aggcuaaagaaguuggaggcua

SEQ ID NO: 240844 - RNA, 23 nt, Artificial Sequence
  Synthetic
caggcuaaagaaguuggaggcua

SEQ ID NO: 240845 - RNA, 24 nt, Artificial Sequence
  Synthetic
gcaggcuaaagaaguuggaggcua

SEQ ID NO: 240846 - RNA, 18 nt, Artificial Sequence
  Synthetic
aaguagcuauugaggcua

SEQ ID NO: 240847 - RNA, 19 nt, Artificial Sequence
  Synthetic
aaaguagcuauugaggcua

SEQ ID NO: 240848 - RNA, 20 nt, Artificial Sequence
  Synthetic
uaaaguagcuauugaggcua

SEQ ID NO: 240849 - RNA, 21 nt, Artificial Sequence
  Synthetic
auaaaguagcuauugaggcua

SEQ ID NO: 240850 - RNA, 22 nt, Artificial Sequence
  Synthetic
aauaaaguagcuauugaggcua

SEQ ID NO: 240851 - RNA, 23 nt, Artificial Sequence
  Synthetic
caauaaaguagcuauugaggcua

SEQ ID NO: 240852 - RNA, 24 nt, Artificial Sequence
  Synthetic
ccaauaaaguagcuauugaggcua

SEQ ID NO: 240853 - RNA, 18 nt, Artificial Sequence
  Synthetic
aagccauauauuaggcua

SEQ ID NO: 240854 - RNA, 19 nt, Artificial Sequence
  Synthetic
uaagccauauauuaggcua

SEQ ID NO: 240855 - RNA, 20 nt, Artificial Sequence
  Synthetic
auaagccauauauuaggcua

SEQ ID NO: 240856 - RNA, 21 nt, Artificial Sequence
  Synthetic
uauaagccauauauuaggcua

SEQ ID NO: 240857 - RNA, 22 nt, Artificial Sequence
  Synthetic
uuauaagccauauauuaggcua

SEQ ID NO: 240858 - RNA, 23 nt, Artificial Sequence
  Synthetic
auuauaagccauauauuaggcua

SEQ ID NO: 240859 - RNA, 24 nt, Artificial Sequence
  Synthetic
uauuauaagccauauauuaggcua

SEQ ID NO: 240860 - RNA, 18 nt, Artificial Sequence
  Synthetic
cgaggaaacugagggcua

SEQ ID NO: 240861 - RNA, 19 nt, Artificial Sequence
  Synthetic
acgaggaaacugagggcua

SEQ ID NO: 240862 - RNA, 20 nt, Artificial Sequence
  Synthetic
gacgaggaaacugagggcua

SEQ ID NO: 240863 - RNA, 21 nt, Artificial Sequence
  Synthetic
agacgaggaaacugagggcua

SEQ ID NO: 240864 - RNA, 22 nt, Artificial Sequence
  Synthetic
aagacgaggaaacugagggcua

SEQ ID NO: 240865 - RNA, 23 nt, Artificial Sequence
  Synthetic
uaagacgaggaaacugagggcua

SEQ ID NO: 240866 - RNA, 24 nt, Artificial Sequence
  Synthetic
uuaagacgaggaaacugagggcua

SEQ ID NO: 240867 - RNA, 18 nt, Artificial Sequence
  Synthetic
gugagcagcagcgggcua

SEQ ID NO: 240868 - RNA, 19 nt, Artificial Sequence
  Synthetic
ggugagcagcagcgggcua

SEQ ID NO: 240869 - RNA, 20 nt, Artificial Sequence
  Synthetic
aggugagcagcagcgggcua

SEQ ID NO: 240870 - RNA, 21 nt, Artificial Sequence
  Synthetic
uaggugagcagcagcgggcua

SEQ ID NO: 240871 - RNA, 22 nt, Artificial Sequence
  Synthetic
guaggugagcagcagcgggcua

SEQ ID NO: 240872 - RNA, 23 nt, Artificial Sequence
  Synthetic
aguaggugagcagcagcgggcua

SEQ ID NO: 240873 - RNA, 24 nt, Artificial Sequence
  Synthetic
caguaggugagcagcagcgggcua

SEQ ID NO: 240874 - RNA, 18 nt, Artificial Sequence
  Synthetic
gccacgacaguggggcua

SEQ ID NO: 240875 - RNA, 19 nt, Artificial Sequence
  Synthetic
ggccacgacaguggggcua

SEQ ID NO: 240876 - RNA, 20 nt, Artificial Sequence
  Synthetic
aggccacgacaguggggcua

SEQ ID NO: 240877 - RNA, 21 nt, Artificial Sequence
  Synthetic
aaggccacgacaguggggcua

SEQ ID NO: 240878 - RNA, 22 nt, Artificial Sequence
  Synthetic
aaaggccacgacaguggggcua

SEQ ID NO: 240879 - RNA, 23 nt, Artificial Sequence
  Synthetic
gaaaggccacgacaguggggcua

SEQ ID NO: 240880 - RNA, 24 nt, Artificial Sequence
  Synthetic
agaaaggccacgacaguggggcua

SEQ ID NO: 240881 - RNA, 18 nt, Artificial Sequence
  Synthetic
ggguuacuuccugggcua

SEQ ID NO: 240882 - RNA, 19 nt, Artificial Sequence
  Synthetic
uggguuacuuccugggcua

SEQ ID NO: 240883 - RNA, 20 nt, Artificial Sequence
  Synthetic
auggguuacuuccugggcua

SEQ ID NO: 240884 - RNA, 21 nt, Artificial Sequence
  Synthetic
uauggguuacuuccugggcua

SEQ ID NO: 240885 - RNA, 22 nt, Artificial Sequence
  Synthetic
auauggguuacuuccugggcua

SEQ ID NO: 240886 - RNA, 23 nt, Artificial Sequence
  Synthetic
gauauggguuacuuccugggcua

SEQ ID NO: 240887 - RNA, 24 nt, Artificial Sequence
  Synthetic
ggauauggguuacuuccugggcua

SEQ ID NO: 240888 - RNA, 18 nt, Artificial Sequence
  Synthetic
aacuauaccgcugggcua

SEQ ID NO: 240889 - RNA, 19 nt, Artificial Sequence
  Synthetic
uaacuauaccgcugggcua

SEQ ID NO: 240890 - RNA, 20 nt, Artificial Sequence
  Synthetic
auaacuauaccgcugggcua

SEQ ID NO: 240891 - RNA, 21 nt, Artificial Sequence
  Synthetic
aauaacuauaccgcugggcua

SEQ ID NO: 240892 - RNA, 22 nt, Artificial Sequence
  Synthetic
aaauaacuauaccgcugggcua

SEQ ID NO: 240893 - RNA, 23 nt, Artificial Sequence
  Synthetic
aaaauaacuauaccgcugggcua

SEQ ID NO: 240894 - RNA, 24 nt, Artificial Sequence
  Synthetic
aaaaauaacuauaccgcugggcua

SEQ ID NO: 240895 - RNA, 18 nt, Artificial Sequence
  Synthetic
uaaguuaccaaauggcua

SEQ ID NO: 240896 - RNA, 19 nt, Artificial Sequence
  Synthetic
cuaaguuaccaaauggcua

SEQ ID NO: 240897 - RNA, 20 nt, Artificial Sequence
  Synthetic
gcuaaguuaccaaauggcua

SEQ ID NO: 240898 - RNA, 21 nt, Artificial Sequence
  Synthetic
agcuaaguuaccaaauggcua

SEQ ID NO: 240899 - RNA, 22 nt, Artificial Sequence
  Synthetic
aagcuaaguuaccaaauggcua

SEQ ID NO: 240900 - RNA, 23 nt, Artificial Sequence
  Synthetic
caagcuaaguuaccaaauggcua

SEQ ID NO: 240901 - RNA, 24 nt, Artificial Sequence
  Synthetic
ucaagcuaaguuaccaaauggcua

SEQ ID NO: 240902 - RNA, 18 nt, Artificial Sequence
  Synthetic
uacuguagcauauggcua

SEQ ID NO: 240903 - RNA, 19 nt, Artificial Sequence
  Synthetic
guacuguagcauauggcua

SEQ ID NO: 240904 - RNA, 20 nt, Artificial Sequence
  Synthetic
aguacuguagcauauggcua

SEQ ID NO: 240905 - RNA, 21 nt, Artificial Sequence
  Synthetic
caguacuguagcauauggcua

SEQ ID NO: 240906 - RNA, 22 nt, Artificial Sequence
  Synthetic
gcaguacuguagcauauggcua

SEQ ID NO: 240907 - RNA, 23 nt, Artificial Sequence
  Synthetic
ugcaguacuguagcauauggcua

SEQ ID NO: 240908 - RNA, 24 nt, Artificial Sequence
  Synthetic
gugcaguacuguagcauauggcua

SEQ ID NO: 240909 - RNA, 18 nt, Artificial Sequence
  Synthetic
ggagcaaugcuauggcua

SEQ ID NO: 240910 - RNA, 19 nt, Artificial Sequence
  Synthetic
gggagcaaugcuauggcua

SEQ ID NO: 240911 - RNA, 20 nt, Artificial Sequence
  Synthetic
ugggagcaaugcuauggcua

SEQ ID NO: 240912 - RNA, 21 nt, Artificial Sequence
  Synthetic
cugggagcaaugcuauggcua

SEQ ID NO: 240913 - RNA, 22 nt, Artificial Sequence
  Synthetic
ucugggagcaaugcuauggcua

SEQ ID NO: 240914 - RNA, 23 nt, Artificial Sequence
  Synthetic
gucugggagcaaugcuauggcua

SEQ ID NO: 240915 - RNA, 24 nt, Artificial Sequence
  Synthetic
ugucugggagcaaugcuauggcua

SEQ ID NO: 240916 - RNA, 18 nt, Artificial Sequence
  Synthetic
auuaauccuuccuggcua

SEQ ID NO: 240917 - RNA, 19 nt, Artificial Sequence
  Synthetic
cauuaauccuuccuggcua

SEQ ID NO: 240918 - RNA, 20 nt, Artificial Sequence
  Synthetic
ucauuaauccuuccuggcua

SEQ ID NO: 240919 - RNA, 21 nt, Artificial Sequence
  Synthetic
uucauuaauccuuccuggcua

SEQ ID NO: 240920 - RNA, 22 nt, Artificial Sequence
  Synthetic
guucauuaauccuuccuggcua

SEQ ID NO: 240921 - RNA, 23 nt, Artificial Sequence
  Synthetic
cguucauuaauccuuccuggcua

SEQ ID NO: 240922 - RNA, 24 nt, Artificial Sequence
  Synthetic
acguucauuaauccuuccuggcua

SEQ ID NO: 240923 - RNA, 18 nt, Artificial Sequence
  Synthetic
uucuuaacucauuggcua

SEQ ID NO: 240924 - RNA, 19 nt, Artificial Sequence
  Synthetic
cuucuuaacucauuggcua

SEQ ID NO: 240925 - RNA, 20 nt, Artificial Sequence
  Synthetic
acuucuuaacucauuggcua

SEQ ID NO: 240926 - RNA, 21 nt, Artificial Sequence
  Synthetic
aacuucuuaacucauuggcua

SEQ ID NO: 240927 - RNA, 22 nt, Artificial Sequence
  Synthetic
uaacuucuuaacucauuggcua

SEQ ID NO: 240928 - RNA, 23 nt, Artificial Sequence
  Synthetic
guaacuucuuaacucauuggcua

SEQ ID NO: 240929 - RNA, 24 nt, Artificial Sequence
  Synthetic
aguaacuucuuaacucauuggcua

SEQ ID NO: 240930 - RNA, 18 nt, Artificial Sequence
  Synthetic
guuucuucuaaaaugcua

SEQ ID NO: 240931 - RNA, 19 nt, Artificial Sequence
  Synthetic
uguuucuucuaaaaugcua

SEQ ID NO: 240932 - RNA, 20 nt, Artificial Sequence
  Synthetic
guguuucuucuaaaaugcua

SEQ ID NO: 240933 - RNA, 21 nt, Artificial Sequence
  Synthetic
aguguuucuucuaaaaugcua

SEQ ID NO: 240934 - RNA, 22 nt, Artificial Sequence
  Synthetic
aaguguuucuucuaaaaugcua

SEQ ID NO: 240935 - RNA, 23 nt, Artificial Sequence
  Synthetic
gaaguguuucuucuaaaaugcua

SEQ ID NO: 240936 - RNA, 24 nt, Artificial Sequence
  Synthetic
ugaaguguuucuucuaaaaugcua

SEQ ID NO: 240937 - RNA, 18 nt, Artificial Sequence
  Synthetic
uugaagaaggcaaugcua

SEQ ID NO: 240938 - RNA, 19 nt, Artificial Sequence
  Synthetic
guugaagaaggcaaugcua

SEQ ID NO: 240939 - RNA, 20 nt, Artificial Sequence
  Synthetic
gguugaagaaggcaaugcua

SEQ ID NO: 240940 - RNA, 21 nt, Artificial Sequence
  Synthetic
agguugaagaaggcaaugcua

SEQ ID NO: 240941 - RNA, 22 nt, Artificial Sequence
  Synthetic
uagguugaagaaggcaaugcua

SEQ ID NO: 240942 - RNA, 23 nt, Artificial Sequence
  Synthetic
cuagguugaagaaggcaaugcua

SEQ ID NO: 240943 - RNA, 24 nt, Artificial Sequence
  Synthetic
acuagguugaagaaggcaaugcua

SEQ ID NO: 240944 - RNA, 18 nt, Artificial Sequence
  Synthetic
aaauaugauagaaugcua

SEQ ID NO: 240945 - RNA, 19 nt, Artificial Sequence
  Synthetic
aaaauaugauagaaugcua

SEQ ID NO: 240946 - RNA, 20 nt, Artificial Sequence
  Synthetic
aaaaauaugauagaaugcua

SEQ ID NO: 240947 - RNA, 21 nt, Artificial Sequence
  Synthetic
caaaaauaugauagaaugcua

SEQ ID NO: 240948 - RNA, 22 nt, Artificial Sequence
  Synthetic
acaaaaauaugauagaaugcua

SEQ ID NO: 240949 - RNA, 23 nt, Artificial Sequence
  Synthetic
uacaaaaauaugauagaaugcua

SEQ ID NO: 240950 - RNA, 24 nt, Artificial Sequence
  Synthetic
guacaaaaauaugauagaaugcua

SEQ ID NO: 240951 - RNA, 18 nt, Artificial Sequence
  Synthetic
ccagugcugugaaugcua

SEQ ID NO: 240952 - RNA, 19 nt, Artificial Sequence
  Synthetic
uccagugcugugaaugcua

SEQ ID NO: 240953 - RNA, 20 nt, Artificial Sequence
  Synthetic
auccagugcugugaaugcua

SEQ ID NO: 240954 - RNA, 21 nt, Artificial Sequence
  Synthetic
gauccagugcugugaaugcua

SEQ ID NO: 240955 - RNA, 22 nt, Artificial Sequence
  Synthetic
agauccagugcugugaaugcua

SEQ ID NO: 240956 - RNA, 23 nt, Artificial Sequence
  Synthetic
gagauccagugcugugaaugcua

SEQ ID NO: 240957 - RNA, 24 nt, Artificial Sequence
  Synthetic
ugagauccagugcugugaaugcua

SEQ ID NO: 240958 - RNA, 18 nt, Artificial Sequence
  Synthetic
acauccccuuucaugcua

SEQ ID NO: 240959 - RNA, 19 nt, Artificial Sequence
  Synthetic
uacauccccuuucaugcua

SEQ ID NO: 240960 - RNA, 20 nt, Artificial Sequence
  Synthetic
auacauccccuuucaugcua

SEQ ID NO: 240961 - RNA, 21 nt, Artificial Sequence
  Synthetic
cauacauccccuuucaugcua

SEQ ID NO: 240962 - RNA, 22 nt, Artificial Sequence
  Synthetic
gcauacauccccuuucaugcua

SEQ ID NO: 240963 - RNA, 23 nt, Artificial Sequence
  Synthetic
ugcauacauccccuuucaugcua

SEQ ID NO: 240964 - RNA, 24 nt, Artificial Sequence
  Synthetic
augcauacauccccuuucaugcua

SEQ ID NO: 240965 - RNA, 18 nt, Artificial Sequence
  Synthetic
cuauuuacuuagaugcua

SEQ ID NO: 240966 - RNA, 19 nt, Artificial Sequence
  Synthetic
ucuauuuacuuagaugcua

SEQ ID NO: 240967 - RNA, 20 nt, Artificial Sequence
  Synthetic
uucuauuuacuuagaugcua

SEQ ID NO: 240968 - RNA, 21 nt, Artificial Sequence
  Synthetic
uuucuauuuacuuagaugcua

SEQ ID NO: 240969 - RNA, 22 nt, Artificial Sequence
  Synthetic
auuucuauuuacuuagaugcua

SEQ ID NO: 240970 - RNA, 23 nt, Artificial Sequence
  Synthetic
cauuucuauuuacuuagaugcua

SEQ ID NO: 240971 - RNA, 24 nt, Artificial Sequence
  Synthetic
gcauuucuauuuacuuagaugcua

SEQ ID NO: 240972 - RNA, 18 nt, Artificial Sequence
  Synthetic
gagagagaauggaugcua

SEQ ID NO: 240973 - RNA, 19 nt, Artificial Sequence
  Synthetic
ggagagagaauggaugcua

SEQ ID NO: 240974 - RNA, 20 nt, Artificial Sequence
  Synthetic
aggagagagaauggaugcua

SEQ ID NO: 240975 - RNA, 21 nt, Artificial Sequence
  Synthetic
caggagagagaauggaugcua

SEQ ID NO: 240976 - RNA, 22 nt, Artificial Sequence
  Synthetic
ccaggagagagaauggaugcua

SEQ ID NO: 240977 - RNA, 23 nt, Artificial Sequence
  Synthetic
gccaggagagagaauggaugcua

SEQ ID NO: 240978 - RNA, 24 nt, Artificial Sequence
  Synthetic
agccaggagagagaauggaugcua

SEQ ID NO: 240979 - RNA, 18 nt, Artificial Sequence
  Synthetic
gaauaaauuaauaugcua

SEQ ID NO: 240980 - RNA, 19 nt, Artificial Sequence
  Synthetic
ugaauaaauuaauaugcua

SEQ ID NO: 240981 - RNA, 20 nt, Artificial Sequence
  Synthetic
uugaauaaauuaauaugcua

SEQ ID NO: 240982 - RNA, 21 nt, Artificial Sequence
  Synthetic
uuugaauaaauuaauaugcua

SEQ ID NO: 240983 - RNA, 22 nt, Artificial Sequence
  Synthetic
auuugaauaaauuaauaugcua

SEQ ID NO: 240984 - RNA, 23 nt, Artificial Sequence
  Synthetic
uauuugaauaaauuaauaugcua

SEQ ID NO: 240985 - RNA, 24 nt, Artificial Sequence
  Synthetic
uuauuugaauaaauuaauaugcua

SEQ ID NO: 240986 - RNA, 18 nt, Artificial Sequence
  Synthetic
agugcguuugauaugcua

SEQ ID NO: 240987 - RNA, 19 nt, Artificial Sequence
  Synthetic
uagugcguuugauaugcua

SEQ ID NO: 240988 - RNA, 20 nt, Artificial Sequence
  Synthetic
cuagugcguuugauaugcua

SEQ ID NO: 240989 - RNA, 21 nt, Artificial Sequence
  Synthetic
ucuagugcguuugauaugcua

SEQ ID NO: 240990 - RNA, 22 nt, Artificial Sequence
  Synthetic
uucuagugcguuugauaugcua

SEQ ID NO: 240991 - RNA, 23 nt, Artificial Sequence
  Synthetic
uuucuagugcguuugauaugcua

SEQ ID NO: 240992 - RNA, 24 nt, Artificial Sequence
  Synthetic
cuuucuagugcguuugauaugcua

SEQ ID NO: 240993 - RNA, 18 nt, Artificial Sequence
  Synthetic
caaggaucuuauaugcua

SEQ ID NO: 240994 - RNA, 19 nt, Artificial Sequence
  Synthetic
ucaaggaucuuauaugcua

SEQ ID NO: 240995 - RNA, 20 nt, Artificial Sequence
  Synthetic
cucaaggaucuuauaugcua

SEQ ID NO: 240996 - RNA, 21 nt, Artificial Sequence
  Synthetic
ucucaaggaucuuauaugcua

SEQ ID NO: 240997 - RNA, 22 nt, Artificial Sequence
  Synthetic
cucucaaggaucuuauaugcua

SEQ ID NO: 240998 - RNA, 23 nt, Artificial Sequence
  Synthetic
acucucaaggaucuuauaugcua

SEQ ID NO: 240999 - RNA, 24 nt, Artificial Sequence
  Synthetic
uacucucaaggaucuuauaugcua

SEQ ID NO: 241000 - RNA, 18 nt, Artificial Sequence
  Synthetic
aauaggaaaguuaugcua

SEQ ID NO: 241001 - RNA, 19 nt, Artificial Sequence
  Synthetic
uaauaggaaaguuaugcua

SEQ ID NO: 241002 - RNA, 20 nt, Artificial Sequence
  Synthetic
guaauaggaaaguuaugcua

SEQ ID NO: 241003 - RNA, 21 nt, Artificial Sequence
  Synthetic
uguaauaggaaaguuaugcua

SEQ ID NO: 241004 - RNA, 22 nt, Artificial Sequence
  Synthetic
cuguaauaggaaaguuaugcua

SEQ ID NO: 241005 - RNA, 23 nt, Artificial Sequence
  Synthetic
ucuguaauaggaaaguuaugcua

SEQ ID NO: 241006 - RNA, 24 nt, Artificial Sequence
  Synthetic
aucuguaauaggaaaguuaugcua

SEQ ID NO: 241007 - RNA, 18 nt, Artificial Sequence
  Synthetic
ggucaugugaaacugcua

SEQ ID NO: 241008 - RNA, 19 nt, Artificial Sequence
  Synthetic
gggucaugugaaacugcua

SEQ ID NO: 241009 - RNA, 20 nt, Artificial Sequence
  Synthetic
agggucaugugaaacugcua

SEQ ID NO: 241010 - RNA, 21 nt, Artificial Sequence
  Synthetic
aagggucaugugaaacugcua

SEQ ID NO: 241011 - RNA, 22 nt, Artificial Sequence
  Synthetic
caagggucaugugaaacugcua

SEQ ID NO: 241012 - RNA, 23 nt, Artificial Sequence
  Synthetic
ccaagggucaugugaaacugcua

SEQ ID NO: 241013 - RNA, 24 nt, Artificial Sequence
  Synthetic
cccaagggucaugugaaacugcua

SEQ ID NO: 241014 - RNA, 18 nt, Artificial Sequence
  Synthetic
cucagacccugccugcua

SEQ ID NO: 241015 - RNA, 19 nt, Artificial Sequence
  Synthetic
ucucagacccugccugcua

SEQ ID NO: 241016 - RNA, 20 nt, Artificial Sequence
  Synthetic
aucucagacccugccugcua

SEQ ID NO: 241017 - RNA, 21 nt, Artificial Sequence
  Synthetic
aaucucagacccugccugcua

SEQ ID NO: 241018 - RNA, 22 nt, Artificial Sequence
  Synthetic
aaaucucagacccugccugcua

SEQ ID NO: 241019 - RNA, 23 nt, Artificial Sequence
  Synthetic
gaaaucucagacccugccugcua

SEQ ID NO: 241020 - RNA, 24 nt, Artificial Sequence
  Synthetic
ggaaaucucagacccugccugcua

SEQ ID NO: 241021 - RNA, 18 nt, Artificial Sequence
  Synthetic
uuuaagagacuccugcua

SEQ ID NO: 241022 - RNA, 19 nt, Artificial Sequence
  Synthetic
uuuuaagagacuccugcua

SEQ ID NO: 241023 - RNA, 20 nt, Artificial Sequence
  Synthetic
uuuuuaagagacuccugcua

SEQ ID NO: 241024 - RNA, 21 nt, Artificial Sequence
  Synthetic
uuuuuuaagagacuccugcua

SEQ ID NO: 241025 - RNA, 22 nt, Artificial Sequence
  Synthetic
guuuuuuaagagacuccugcua

SEQ ID NO: 241026 - RNA, 23 nt, Artificial Sequence
  Synthetic
uguuuuuuaagagacuccugcua

SEQ ID NO: 241027 - RNA, 24 nt, Artificial Sequence
  Synthetic
guguuuuuuaagagacuccugcua

SEQ ID NO: 241028 - RNA, 18 nt, Artificial Sequence
  Synthetic
aaaaugaugcagcugcua

SEQ ID NO: 241029 - RNA, 19 nt, Artificial Sequence
  Synthetic
aaaaaugaugcagcugcua

SEQ ID NO: 241030 - RNA, 20 nt, Artificial Sequence
  Synthetic
gaaaaaugaugcagcugcua

SEQ ID NO: 241031 - RNA, 21 nt, Artificial Sequence
  Synthetic
ggaaaaaugaugcagcugcua

SEQ ID NO: 241032 - RNA, 22 nt, Artificial Sequence
  Synthetic
uggaaaaaugaugcagcugcua

SEQ ID NO: 241033 - RNA, 23 nt, Artificial Sequence
  Synthetic
auggaaaaaugaugcagcugcua

SEQ ID NO: 241034 - RNA, 24 nt, Artificial Sequence
  Synthetic
aauggaaaaaugaugcagcugcua

SEQ ID NO: 241035 - RNA, 18 nt, Artificial Sequence
  Synthetic
aggcugccucugcugcua

SEQ ID NO: 241036 - RNA, 19 nt, Artificial Sequence
  Synthetic
aaggcugccucugcugcua

SEQ ID NO: 241037 - RNA, 20 nt, Artificial Sequence
  Synthetic
aaaggcugccucugcugcua

SEQ ID NO: 241038 - RNA, 21 nt, Artificial Sequence
  Synthetic
gaaaggcugccucugcugcua

SEQ ID NO: 241039 - RNA, 22 nt, Artificial Sequence
  Synthetic
agaaaggcugccucugcugcua

SEQ ID NO: 241040 - RNA, 23 nt, Artificial Sequence
  Synthetic
aagaaaggcugccucugcugcua

SEQ ID NO: 241041 - RNA, 24 nt, Artificial Sequence
  Synthetic
gaagaaaggcugccucugcugcua

SEQ ID NO: 241042 - RNA, 18 nt, Artificial Sequence
  Synthetic
gguuggggauugcugcua

SEQ ID NO: 241043 - RNA, 19 nt, Artificial Sequence
  Synthetic
agguuggggauugcugcua

SEQ ID NO: 241044 - RNA, 20 nt, Artificial Sequence
  Synthetic
aagguuggggauugcugcua

SEQ ID NO: 241045 - RNA, 21 nt, Artificial Sequence
  Synthetic
aaagguuggggauugcugcua

SEQ ID NO: 241046 - RNA, 22 nt, Artificial Sequence
  Synthetic
aaaagguuggggauugcugcua

SEQ ID NO: 241047 - RNA, 23 nt, Artificial Sequence
  Synthetic
gaaaagguuggggauugcugcua

SEQ ID NO: 241048 - RNA, 24 nt, Artificial Sequence
  Synthetic
cgaaaagguuggggauugcugcua

SEQ ID NO: 241049 - RNA, 18 nt, Artificial Sequence
  Synthetic
aguugacucuugcugcua

SEQ ID NO: 241050 - RNA, 19 nt, Artificial Sequence
  Synthetic
aaguugacucuugcugcua

SEQ ID NO: 241051 - RNA, 20 nt, Artificial Sequence
  Synthetic
gaaguugacucuugcugcua

SEQ ID NO: 241052 - RNA, 21 nt, Artificial Sequence
  Synthetic
agaaguugacucuugcugcua

SEQ ID NO: 241053 - RNA, 22 nt, Artificial Sequence
  Synthetic
uagaaguugacucuugcugcua

SEQ ID NO: 241054 - RNA, 23 nt, Artificial Sequence
  Synthetic
uuagaaguugacucuugcugcua

SEQ ID NO: 241055 - RNA, 24 nt, Artificial Sequence
  Synthetic
uuuagaaguugacucuugcugcua

SEQ ID NO: 241056 - RNA, 18 nt, Artificial Sequence
  Synthetic
cacugacaguaucugcua

SEQ ID NO: 241057 - RNA, 19 nt, Artificial Sequence
  Synthetic
ucacugacaguaucugcua

SEQ ID NO: 241058 - RNA, 20 nt, Artificial Sequence
  Synthetic
gucacugacaguaucugcua

SEQ ID NO: 241059 - RNA, 21 nt, Artificial Sequence
  Synthetic
ggucacugacaguaucugcua

SEQ ID NO: 241060 - RNA, 22 nt, Artificial Sequence
  Synthetic
aggucacugacaguaucugcua

SEQ ID NO: 241061 - RNA, 23 nt, Artificial Sequence
  Synthetic
uaggucacugacaguaucugcua

SEQ ID NO: 241062 - RNA, 24 nt, Artificial Sequence
  Synthetic
auaggucacugacaguaucugcua

SEQ ID NO: 241063 - RNA, 18 nt, Artificial Sequence
  Synthetic
aguuacucaacucugcua

SEQ ID NO: 241064 - RNA, 19 nt, Artificial Sequence
  Synthetic
aaguuacucaacucugcua

SEQ ID NO: 241065 - RNA, 20 nt, Artificial Sequence
  Synthetic
gaaguuacucaacucugcua

SEQ ID NO: 241066 - RNA, 21 nt, Artificial Sequence
  Synthetic
ugaaguuacucaacucugcua

SEQ ID NO: 241067 - RNA, 22 nt, Artificial Sequence
  Synthetic
uugaaguuacucaacucugcua

SEQ ID NO: 241068 - RNA, 23 nt, Artificial Sequence
  Synthetic
guugaaguuacucaacucugcua

SEQ ID NO: 241069 - RNA, 24 nt, Artificial Sequence
  Synthetic
uguugaaguuacucaacucugcua

SEQ ID NO: 241070 - RNA, 18 nt, Artificial Sequence
  Synthetic
agcacucgagcucugcua

SEQ ID NO: 241071 - RNA, 19 nt, Artificial Sequence
  Synthetic
cagcacucgagcucugcua

SEQ ID NO: 241072 - RNA, 20 nt, Artificial Sequence
  Synthetic
acagcacucgagcucugcua

SEQ ID NO: 241073 - RNA, 21 nt, Artificial Sequence
  Synthetic
cacagcacucgagcucugcua

SEQ ID NO: 241074 - RNA, 22 nt, Artificial Sequence
  Synthetic
gcacagcacucgagcucugcua

SEQ ID NO: 241075 - RNA, 23 nt, Artificial Sequence
  Synthetic
agcacagcacucgagcucugcua

SEQ ID NO: 241076 - RNA, 24 nt, Artificial Sequence
  Synthetic
cagcacagcacucgagcucugcua

SEQ ID NO: 241077 - RNA, 18 nt, Artificial Sequence
  Synthetic
ucaauacugagucugcua

SEQ ID NO: 241078 - RNA, 19 nt, Artificial Sequence
  Synthetic
gucaauacugagucugcua

SEQ ID NO: 241079 - RNA, 20 nt, Artificial Sequence
  Synthetic
agucaauacugagucugcua

SEQ ID NO: 241080 - RNA, 21 nt, Artificial Sequence
  Synthetic
aagucaauacugagucugcua

SEQ ID NO: 241081 - RNA, 22 nt, Artificial Sequence
  Synthetic
aaagucaauacugagucugcua

SEQ ID NO: 241082 - RNA, 23 nt, Artificial Sequence
  Synthetic
uaaagucaauacugagucugcua

SEQ ID NO: 241083 - RNA, 24 nt, Artificial Sequence
  Synthetic
cuaaagucaauacugagucugcua

SEQ ID NO: 241084 - RNA, 18 nt, Artificial Sequence
  Synthetic
acaguaugauaagugcua

SEQ ID NO: 241085 - RNA, 19 nt, Artificial Sequence
  Synthetic
uacaguaugauaagugcua

SEQ ID NO: 241086 - RNA, 20 nt, Artificial Sequence
  Synthetic
auacaguaugauaagugcua

SEQ ID NO: 241087 - RNA, 21 nt, Artificial Sequence
  Synthetic
aauacaguaugauaagugcua

SEQ ID NO: 241088 - RNA, 22 nt, Artificial Sequence
  Synthetic
caauacaguaugauaagugcua

SEQ ID NO: 241089 - RNA, 23 nt, Artificial Sequence
  Synthetic
acaauacaguaugauaagugcua

SEQ ID NO: 241090 - RNA, 24 nt, Artificial Sequence
  Synthetic
aacaauacaguaugauaagugcua

SEQ ID NO: 241091 - RNA, 18 nt, Artificial Sequence
  Synthetic
gcugagauguuagugcua

SEQ ID NO: 241092 - RNA, 19 nt, Artificial Sequence
  Synthetic
ugcugagauguuagugcua

SEQ ID NO: 241093 - RNA, 20 nt, Artificial Sequence
  Synthetic
uugcugagauguuagugcua

SEQ ID NO: 241094 - RNA, 21 nt, Artificial Sequence
  Synthetic
auugcugagauguuagugcua

SEQ ID NO: 241095 - RNA, 22 nt, Artificial Sequence
  Synthetic
uauugcugagauguuagugcua

SEQ ID NO: 241096 - RNA, 23 nt, Artificial Sequence
  Synthetic
guauugcugagauguuagugcua

SEQ ID NO: 241097 - RNA, 24 nt, Artificial Sequence
  Synthetic
cguauugcugagauguuagugcua

SEQ ID NO: 241098 - RNA, 18 nt, Artificial Sequence
  Synthetic
acucuaaauauggugcua

SEQ ID NO: 241099 - RNA, 19 nt, Artificial Sequence
  Synthetic
gacucuaaauauggugcua

SEQ ID NO: 241100 - RNA, 20 nt, Artificial Sequence
  Synthetic
ugacucuaaauauggugcua

SEQ ID NO: 241101 - RNA, 21 nt, Artificial Sequence
  Synthetic
augacucuaaauauggugcua

SEQ ID NO: 241102 - RNA, 22 nt, Artificial Sequence
  Synthetic
aaugacucuaaauauggugcua

SEQ ID NO: 241103 - RNA, 23 nt, Artificial Sequence
  Synthetic
gaaugacucuaaauauggugcua

SEQ ID NO: 241104 - RNA, 24 nt, Artificial Sequence
  Synthetic
ugaaugacucuaaauauggugcua

SEQ ID NO: 241105 - RNA, 18 nt, Artificial Sequence
  Synthetic
ccuguucugacugugcua

SEQ ID NO: 241106 - RNA, 19 nt, Artificial Sequence
  Synthetic
accuguucugacugugcua

SEQ ID NO: 241107 - RNA, 20 nt, Artificial Sequence
  Synthetic
caccuguucugacugugcua

SEQ ID NO: 241108 - RNA, 21 nt, Artificial Sequence
  Synthetic
acaccuguucugacugugcua

SEQ ID NO: 241109 - RNA, 22 nt, Artificial Sequence
  Synthetic
aacaccuguucugacugugcua

SEQ ID NO: 241110 - RNA, 23 nt, Artificial Sequence
  Synthetic
uaacaccuguucugacugugcua

SEQ ID NO: 241111 - RNA, 24 nt, Artificial Sequence
  Synthetic
guaacaccuguucugacugugcua

SEQ ID NO: 241112 - RNA, 18 nt, Artificial Sequence
  Synthetic
gaaauucagugugugcua

SEQ ID NO: 241113 - RNA, 19 nt, Artificial Sequence
  Synthetic
ugaaauucagugugugcua

SEQ ID NO: 241114 - RNA, 20 nt, Artificial Sequence
  Synthetic
augaaauucagugugugcua

SEQ ID NO: 241115 - RNA, 21 nt, Artificial Sequence
  Synthetic
uaugaaauucagugugugcua

SEQ ID NO: 241116 - RNA, 22 nt, Artificial Sequence
  Synthetic
auaugaaauucagugugugcua

SEQ ID NO: 241117 - RNA, 23 nt, Artificial Sequence
  Synthetic
gauaugaaauucagugugugcua

SEQ ID NO: 241118 - RNA, 24 nt, Artificial Sequence
  Synthetic
agauaugaaauucagugugugcua

SEQ ID NO: 241119 - RNA, 18 nt, Artificial Sequence
  Synthetic
ugaagaaugucauugcua

SEQ ID NO: 241120 - RNA, 19 nt, Artificial Sequence
  Synthetic
gugaagaaugucauugcua

SEQ ID NO: 241121 - RNA, 20 nt, Artificial Sequence
  Synthetic
ggugaagaaugucauugcua

SEQ ID NO: 241122 - RNA, 21 nt, Artificial Sequence
  Synthetic
gggugaagaaugucauugcua

SEQ ID NO: 241123 - RNA, 22 nt, Artificial Sequence
  Synthetic
ugggugaagaaugucauugcua

SEQ ID NO: 241124 - RNA, 23 nt, Artificial Sequence
  Synthetic
cugggugaagaaugucauugcua

SEQ ID NO: 241125 - RNA, 24 nt, Artificial Sequence
  Synthetic
acugggugaagaaugucauugcua

SEQ ID NO: 241126 - RNA, 18 nt, Artificial Sequence
  Synthetic
uccacacugcaguugcua

SEQ ID NO: 241127 - RNA, 19 nt, Artificial Sequence
  Synthetic
auccacacugcaguugcua

SEQ ID NO: 241128 - RNA, 20 nt, Artificial Sequence
  Synthetic
cauccacacugcaguugcua

SEQ ID NO: 241129 - RNA, 21 nt, Artificial Sequence
  Synthetic
ucauccacacugcaguugcua

SEQ ID NO: 241130 - RNA, 22 nt, Artificial Sequence
  Synthetic
cucauccacacugcaguugcua

SEQ ID NO: 241131 - RNA, 23 nt, Artificial Sequence
  Synthetic
gcucauccacacugcaguugcua

SEQ ID NO: 241132 - RNA, 24 nt, Artificial Sequence
  Synthetic
agcucauccacacugcaguugcua

SEQ ID NO: 241133 - RNA, 18 nt, Artificial Sequence
  Synthetic
ggaaacauuuaguugcua

SEQ ID NO: 241134 - RNA, 19 nt, Artificial Sequence
  Synthetic
uggaaacauuuaguugcua

SEQ ID NO: 241135 - RNA, 20 nt, Artificial Sequence
  Synthetic
cuggaaacauuuaguugcua

SEQ ID NO: 241136 - RNA, 21 nt, Artificial Sequence
  Synthetic
ucuggaaacauuuaguugcua

SEQ ID NO: 241137 - RNA, 22 nt, Artificial Sequence
  Synthetic
gucuggaaacauuuaguugcua

SEQ ID NO: 241138 - RNA, 23 nt, Artificial Sequence
  Synthetic
agucuggaaacauuuaguugcua

SEQ ID NO: 241139 - RNA, 24 nt, Artificial Sequence
  Synthetic
cagucuggaaacauuuaguugcua

SEQ ID NO: 241140 - RNA, 18 nt, Artificial Sequence
  Synthetic
gaucuaagcugguugcua

SEQ ID NO: 241141 - RNA, 19 nt, Artificial Sequence
  Synthetic
ggaucuaagcugguugcua

SEQ ID NO: 241142 - RNA, 20 nt, Artificial Sequence
  Synthetic
gggaucuaagcugguugcua

SEQ ID NO: 241143 - RNA, 21 nt, Artificial Sequence
  Synthetic
agggaucuaagcugguugcua

SEQ ID NO: 241144 - RNA, 22 nt, Artificial Sequence
  Synthetic
aagggaucuaagcugguugcua

SEQ ID NO: 241145 - RNA, 23 nt, Artificial Sequence
  Synthetic
uaagggaucuaagcugguugcua

SEQ ID NO: 241146 - RNA, 24 nt, Artificial Sequence
  Synthetic
cuaagggaucuaagcugguugcua

SEQ ID NO: 241147 - RNA, 18 nt, Artificial Sequence
  Synthetic
augaaaucucuguugcua

SEQ ID NO: 241148 - RNA, 19 nt, Artificial Sequence
  Synthetic
uaugaaaucucuguugcua

SEQ ID NO: 241149 - RNA, 20 nt, Artificial Sequence
  Synthetic
guaugaaaucucuguugcua

SEQ ID NO: 241150 - RNA, 21 nt, Artificial Sequence
  Synthetic
uguaugaaaucucuguugcua

SEQ ID NO: 241151 - RNA, 22 nt, Artificial Sequence
  Synthetic
uuguaugaaaucucuguugcua

SEQ ID NO: 241152 - RNA, 23 nt, Artificial Sequence
  Synthetic
uuuguaugaaaucucuguugcua

SEQ ID NO: 241153 - RNA, 24 nt, Artificial Sequence
  Synthetic
auuuguaugaaaucucuguugcua

SEQ ID NO: 241154 - RNA, 18 nt, Artificial Sequence
  Synthetic
cuucaggugguguugcua

SEQ ID NO: 241155 - RNA, 19 nt, Artificial Sequence
  Synthetic
acuucaggugguguugcua

SEQ ID NO: 241156 - RNA, 20 nt, Artificial Sequence
  Synthetic
uacuucaggugguguugcua

SEQ ID NO: 241157 - RNA, 21 nt, Artificial Sequence
  Synthetic
cuacuucaggugguguugcua

SEQ ID NO: 241158 - RNA, 22 nt, Artificial Sequence
  Synthetic
ucuacuucaggugguguugcua

SEQ ID NO: 241159 - RNA, 23 nt, Artificial Sequence
  Synthetic
uucuacuucaggugguguugcua

SEQ ID NO: 241160 - RNA, 24 nt, Artificial Sequence
  Synthetic
uuucuacuucaggugguguugcua

SEQ ID NO: 241161 - RNA, 18 nt, Artificial Sequence
  Synthetic
uuucauuguuuguugcua

SEQ ID NO: 241162 - RNA, 19 nt, Artificial Sequence
  Synthetic
auuucauuguuuguugcua

SEQ ID NO: 241163 - RNA, 20 nt, Artificial Sequence
  Synthetic
cauuucauuguuuguugcua

SEQ ID NO: 241164 - RNA, 21 nt, Artificial Sequence
  Synthetic
gcauuucauuguuuguugcua

SEQ ID NO: 241165 - RNA, 22 nt, Artificial Sequence
  Synthetic
agcauuucauuguuuguugcua

SEQ ID NO: 241166 - RNA, 23 nt, Artificial Sequence
  Synthetic
gagcauuucauuguuuguugcua

SEQ ID NO: 241167 - RNA, 24 nt, Artificial Sequence
  Synthetic
agagcauuucauuguuuguugcua

SEQ ID NO: 241168 - RNA, 18 nt, Artificial Sequence
  Synthetic
uaagaauuuucuuugcua

SEQ ID NO: 241169 - RNA, 19 nt, Artificial Sequence
  Synthetic
uuaagaauuuucuuugcua

SEQ ID NO: 241170 - RNA, 20 nt, Artificial Sequence
  Synthetic
uuuaagaauuuucuuugcua

SEQ ID NO: 241171 - RNA, 21 nt, Artificial Sequence
  Synthetic
cuuuaagaauuuucuuugcua

SEQ ID NO: 241172 - RNA, 22 nt, Artificial Sequence
  Synthetic
ucuuuaagaauuuucuuugcua

SEQ ID NO: 241173 - RNA, 23 nt, Artificial Sequence
  Synthetic
aucuuuaagaauuuucuuugcua

SEQ ID NO: 241174 - RNA, 24 nt, Artificial Sequence
  Synthetic
aaucuuuaagaauuuucuuugcua

SEQ ID NO: 241175 - RNA, 18 nt, Artificial Sequence
  Synthetic
uuauuucuggguuugcua

SEQ ID NO: 241176 - RNA, 19 nt, Artificial Sequence
  Synthetic
uuuauuucuggguuugcua

SEQ ID NO: 241177 - RNA, 20 nt, Artificial Sequence
  Synthetic
uuuuauuucuggguuugcua

SEQ ID NO: 241178 - RNA, 21 nt, Artificial Sequence
  Synthetic
uuuuuauuucuggguuugcua

SEQ ID NO: 241179 - RNA, 22 nt, Artificial Sequence
  Synthetic
auuuuuauuucuggguuugcua

SEQ ID NO: 241180 - RNA, 23 nt, Artificial Sequence
  Synthetic
aauuuuuauuucuggguuugcua

SEQ ID NO: 241181 - RNA, 24 nt, Artificial Sequence
  Synthetic
aaauuuuuauuucuggguuugcua

SEQ ID NO: 241182 - RNA, 18 nt, Artificial Sequence
  Synthetic
acucucucuaaaaaucua

SEQ ID NO: 241183 - RNA, 19 nt, Artificial Sequence
  Synthetic
uacucucucuaaaaaucua

SEQ ID NO: 241184 - RNA, 20 nt, Artificial Sequence
  Synthetic
uuacucucucuaaaaaucua

SEQ ID NO: 241185 - RNA, 21 nt, Artificial Sequence
  Synthetic
uuuacucucucuaaaaaucua

SEQ ID NO: 241186 - RNA, 22 nt, Artificial Sequence
  Synthetic
uuuuacucucucuaaaaaucua

SEQ ID NO: 241187 - RNA, 23 nt, Artificial Sequence
  Synthetic
cuuuuacucucucuaaaaaucua

SEQ ID NO: 241188 - RNA, 24 nt, Artificial Sequence
  Synthetic
gcuuuuacucucucuaaaaaucua

SEQ ID NO: 241189 - RNA, 18 nt, Artificial Sequence
  Synthetic
cagaaagaacaaaaucua

SEQ ID NO: 241190 - RNA, 19 nt, Artificial Sequence
  Synthetic
ccagaaagaacaaaaucua

SEQ ID NO: 241191 - RNA, 20 nt, Artificial Sequence
  Synthetic
accagaaagaacaaaaucua

SEQ ID NO: 241192 - RNA, 21 nt, Artificial Sequence
  Synthetic
aaccagaaagaacaaaaucua

SEQ ID NO: 241193 - RNA, 22 nt, Artificial Sequence
  Synthetic
caaccagaaagaacaaaaucua

SEQ ID NO: 241194 - RNA, 23 nt, Artificial Sequence
  Synthetic
ccaaccagaaagaacaaaaucua

SEQ ID NO: 241195 - RNA, 24 nt, Artificial Sequence
  Synthetic
cccaaccagaaagaacaaaaucua

SEQ ID NO: 241196 - RNA, 18 nt, Artificial Sequence
  Synthetic
caaauauuacaaaaucua

SEQ ID NO: 241197 - RNA, 19 nt, Artificial Sequence
  Synthetic
gcaaauauuacaaaaucua

SEQ ID NO: 241198 - RNA, 20 nt, Artificial Sequence
  Synthetic
ugcaaauauuacaaaaucua

SEQ ID NO: 241199 - RNA, 21 nt, Artificial Sequence
  Synthetic
augcaaauauuacaaaaucua

SEQ ID NO: 241200 - RNA, 22 nt, Artificial Sequence
  Synthetic
uaugcaaauauuacaaaaucua

SEQ ID NO: 241201 - RNA, 23 nt, Artificial Sequence
  Synthetic
auaugcaaauauuacaaaaucua

SEQ ID NO: 241202 - RNA, 24 nt, Artificial Sequence
  Synthetic
uauaugcaaauauuacaaaaucua

SEQ ID NO: 241203 - RNA, 18 nt, Artificial Sequence
  Synthetic
uuuugaguuuaaaaucua

SEQ ID NO: 241204 - RNA, 19 nt, Artificial Sequence
  Synthetic
cuuuugaguuuaaaaucua

SEQ ID NO: 241205 - RNA, 20 nt, Artificial Sequence
  Synthetic
ucuuuugaguuuaaaaucua

SEQ ID NO: 241206 - RNA, 21 nt, Artificial Sequence
  Synthetic
cucuuuugaguuuaaaaucua

SEQ ID NO: 241207 - RNA, 22 nt, Artificial Sequence
  Synthetic
ucucuuuugaguuuaaaaucua

SEQ ID NO: 241208 - RNA, 23 nt, Artificial Sequence
  Synthetic
uucucuuuugaguuuaaaaucua

SEQ ID NO: 241209 - RNA, 24 nt, Artificial Sequence
  Synthetic
guucucuuuugaguuuaaaaucua

SEQ ID NO: 241210 - RNA, 18 nt, Artificial Sequence
  Synthetic
uaucaguaaggaaaucua

SEQ ID NO: 241211 - RNA, 19 nt, Artificial Sequence
  Synthetic
uuaucaguaaggaaaucua

SEQ ID NO: 241212 - RNA, 20 nt, Artificial Sequence
  Synthetic
guuaucaguaaggaaaucua

SEQ ID NO: 241213 - RNA, 21 nt, Artificial Sequence
  Synthetic
uguuaucaguaaggaaaucua

SEQ ID NO: 241214 - RNA, 22 nt, Artificial Sequence
  Synthetic
guguuaucaguaaggaaaucua

SEQ ID NO: 241215 - RNA, 23 nt, Artificial Sequence
  Synthetic
aguguuaucaguaaggaaaucua

SEQ ID NO: 241216 - RNA, 24 nt, Artificial Sequence
  Synthetic
uaguguuaucaguaaggaaaucua

SEQ ID NO: 241217 - RNA, 18 nt, Artificial Sequence
  Synthetic
ucugaguuuggaaaucua

SEQ ID NO: 241218 - RNA, 19 nt, Artificial Sequence
  Synthetic
uucugaguuuggaaaucua

SEQ ID NO: 241219 - RNA, 20 nt, Artificial Sequence
  Synthetic
auucugaguuuggaaaucua

SEQ ID NO: 241220 - RNA, 21 nt, Artificial Sequence
  Synthetic
aauucugaguuuggaaaucua

SEQ ID NO: 241221 - RNA, 22 nt, Artificial Sequence
  Synthetic
aaauucugaguuuggaaaucua

SEQ ID NO: 241222 - RNA, 23 nt, Artificial Sequence
  Synthetic
aaaauucugaguuuggaaaucua

SEQ ID NO: 241223 - RNA, 24 nt, Artificial Sequence
  Synthetic
gaaaauucugaguuuggaaaucua

SEQ ID NO: 241224 - RNA, 18 nt, Artificial Sequence
  Synthetic
guagaagccauaaaucua

SEQ ID NO: 241225 - RNA, 19 nt, Artificial Sequence
  Synthetic
uguagaagccauaaaucua

SEQ ID NO: 241226 - RNA, 20 nt, Artificial Sequence
  Synthetic
cuguagaagccauaaaucua

SEQ ID NO: 241227 - RNA, 21 nt, Artificial Sequence
  Synthetic
ucuguagaagccauaaaucua

SEQ ID NO: 241228 - RNA, 22 nt, Artificial Sequence
  Synthetic
gucuguagaagccauaaaucua

SEQ ID NO: 241229 - RNA, 23 nt, Artificial Sequence
  Synthetic
agucuguagaagccauaaaucua

SEQ ID NO: 241230 - RNA, 24 nt, Artificial Sequence
  Synthetic
uagucuguagaagccauaaaucua

SEQ ID NO: 241231 - RNA, 18 nt, Artificial Sequence
  Synthetic
uugugguccuuaaaucua

SEQ ID NO: 241232 - RNA, 19 nt, Artificial Sequence
  Synthetic
auugugguccuuaaaucua

SEQ ID NO: 241233 - RNA, 20 nt, Artificial Sequence
  Synthetic
gauugugguccuuaaaucua

SEQ ID NO: 241234 - RNA, 21 nt, Artificial Sequence
  Synthetic
agauugugguccuuaaaucua

SEQ ID NO: 241235 - RNA, 22 nt, Artificial Sequence
  Synthetic
gagauugugguccuuaaaucua

SEQ ID NO: 241236 - RNA, 23 nt, Artificial Sequence
  Synthetic
ugagauugugguccuuaaaucua

SEQ ID NO: 241237 - RNA, 24 nt, Artificial Sequence
  Synthetic
cugagauugugguccuuaaaucua

SEQ ID NO: 241238 - RNA, 18 nt, Artificial Sequence
  Synthetic
ugugaaugacacaaucua

SEQ ID NO: 241239 - RNA, 19 nt, Artificial Sequence
  Synthetic
uugugaaugacacaaucua

SEQ ID NO: 241240 - RNA, 20 nt, Artificial Sequence
  Synthetic
uuugugaaugacacaaucua

SEQ ID NO: 241241 - RNA, 21 nt, Artificial Sequence
  Synthetic
uuuugugaaugacacaaucua

SEQ ID NO: 241242 - RNA, 22 nt, Artificial Sequence
  Synthetic
uuuuugugaaugacacaaucua

SEQ ID NO: 241243 - RNA, 23 nt, Artificial Sequence
  Synthetic
auuuuugugaaugacacaaucua

SEQ ID NO: 241244 - RNA, 24 nt, Artificial Sequence
  Synthetic
uauuuuugugaaugacacaaucua

SEQ ID NO: 241245 - RNA, 18 nt, Artificial Sequence
  Synthetic
aucauuguccccaaucua

SEQ ID NO: 241246 - RNA, 19 nt, Artificial Sequence
  Synthetic
uaucauuguccccaaucua

SEQ ID NO: 241247 - RNA, 20 nt, Artificial Sequence
  Synthetic
cuaucauuguccccaaucua

SEQ ID NO: 241248 - RNA, 21 nt, Artificial Sequence
  Synthetic
gcuaucauuguccccaaucua

SEQ ID NO: 241249 - RNA, 22 nt, Artificial Sequence
  Synthetic
ugcuaucauuguccccaaucua

SEQ ID NO: 241250 - RNA, 23 nt, Artificial Sequence
  Synthetic
gugcuaucauuguccccaaucua

SEQ ID NO: 241251 - RNA, 24 nt, Artificial Sequence
  Synthetic
ggugcuaucauuguccccaaucua

SEQ ID NO: 241252 - RNA, 18 nt, Artificial Sequence
  Synthetic
uuuaacuaaagcaaucua

SEQ ID NO: 241253 - RNA, 19 nt, Artificial Sequence
  Synthetic
uuuuaacuaaagcaaucua

SEQ ID NO: 241254 - RNA, 20 nt, Artificial Sequence
  Synthetic
cuuuuaacuaaagcaaucua

SEQ ID NO: 241255 - RNA, 21 nt, Artificial Sequence
  Synthetic
gcuuuuaacuaaagcaaucua

SEQ ID NO: 241256 - RNA, 22 nt, Artificial Sequence
  Synthetic
ggcuuuuaacuaaagcaaucua

SEQ ID NO: 241257 - RNA, 23 nt, Artificial Sequence
  Synthetic
aggcuuuuaacuaaagcaaucua

SEQ ID NO: 241258 - RNA, 24 nt, Artificial Sequence
  Synthetic
gaggcuuuuaacuaaagcaaucua

SEQ ID NO: 241259 - RNA, 18 nt, Artificial Sequence
  Synthetic
accaacccuagcaaucua

SEQ ID NO: 241260 - RNA, 19 nt, Artificial Sequence
  Synthetic
gaccaacccuagcaaucua

SEQ ID NO: 241261 - RNA, 20 nt, Artificial Sequence
  Synthetic
agaccaacccuagcaaucua

SEQ ID NO: 241262 - RNA, 21 nt, Artificial Sequence
  Synthetic
aagaccaacccuagcaaucua

SEQ ID NO: 241263 - RNA, 22 nt, Artificial Sequence
  Synthetic
uaagaccaacccuagcaaucua

SEQ ID NO: 241264 - RNA, 23 nt, Artificial Sequence
  Synthetic
uuaagaccaacccuagcaaucua

SEQ ID NO: 241265 - RNA, 24 nt, Artificial Sequence
  Synthetic
auuaagaccaacccuagcaaucua

SEQ ID NO: 241266 - RNA, 18 nt, Artificial Sequence
  Synthetic
aaaggagaacagaaucua

SEQ ID NO: 241267 - RNA, 19 nt, Artificial Sequence
  Synthetic
uaaaggagaacagaaucua

SEQ ID NO: 241268 - RNA, 20 nt, Artificial Sequence
  Synthetic
cuaaaggagaacagaaucua

SEQ ID NO: 241269 - RNA, 21 nt, Artificial Sequence
  Synthetic
ucuaaaggagaacagaaucua

SEQ ID NO: 241270 - RNA, 22 nt, Artificial Sequence
  Synthetic
uucuaaaggagaacagaaucua

SEQ ID NO: 241271 - RNA, 23 nt, Artificial Sequence
  Synthetic
uuucuaaaggagaacagaaucua

SEQ ID NO: 241272 - RNA, 24 nt, Artificial Sequence
  Synthetic
uuuucuaaaggagaacagaaucua

SEQ ID NO: 241273 - RNA, 18 nt, Artificial Sequence
  Synthetic
caauugaaucagaaucua

SEQ ID NO: 241274 - RNA, 19 nt, Artificial Sequence
  Synthetic
ccaauugaaucagaaucua

SEQ ID NO: 241275 - RNA, 20 nt, Artificial Sequence
  Synthetic
accaauugaaucagaaucua

SEQ ID NO: 241276 - RNA, 21 nt, Artificial Sequence
  Synthetic
gaccaauugaaucagaaucua

SEQ ID NO: 241277 - RNA, 22 nt, Artificial Sequence
  Synthetic
agaccaauugaaucagaaucua

SEQ ID NO: 241278 - RNA, 23 nt, Artificial Sequence
  Synthetic
uagaccaauugaaucagaaucua

SEQ ID NO: 241279 - RNA, 24 nt, Artificial Sequence
  Synthetic
cuagaccaauugaaucagaaucua

SEQ ID NO: 241280 - RNA, 18 nt, Artificial Sequence
  Synthetic
ucuaauauccauaaucua

SEQ ID NO: 241281 - RNA, 19 nt, Artificial Sequence
  Synthetic
aucuaauauccauaaucua

SEQ ID NO: 241282 - RNA, 20 nt, Artificial Sequence
  Synthetic
gaucuaauauccauaaucua

SEQ ID NO: 241283 - RNA, 21 nt, Artificial Sequence
  Synthetic
agaucuaauauccauaaucua

SEQ ID NO: 241284 - RNA, 22 nt, Artificial Sequence
  Synthetic
aagaucuaauauccauaaucua

SEQ ID NO: 241285 - RNA, 23 nt, Artificial Sequence
  Synthetic
aaagaucuaauauccauaaucua

SEQ ID NO: 241286 - RNA, 24 nt, Artificial Sequence
  Synthetic
caaagaucuaauauccauaaucua

SEQ ID NO: 241287 - RNA, 18 nt, Artificial Sequence
  Synthetic
aaagaaguugauaaucua

SEQ ID NO: 241288 - RNA, 19 nt, Artificial Sequence
  Synthetic
uaaagaaguugauaaucua

SEQ ID NO: 241289 - RNA, 20 nt, Artificial Sequence
  Synthetic
cuaaagaaguugauaaucua

SEQ ID NO: 241290 - RNA, 21 nt, Artificial Sequence
  Synthetic
ucuaaagaaguugauaaucua

SEQ ID NO: 241291 - RNA, 22 nt, Artificial Sequence
  Synthetic
uucuaaagaaguugauaaucua

SEQ ID NO: 241292 - RNA, 23 nt, Artificial Sequence
  Synthetic
uuucuaaagaaguugauaaucua

SEQ ID NO: 241293 - RNA, 24 nt, Artificial Sequence
  Synthetic
uuuucuaaagaaguugauaaucua

SEQ ID NO: 241294 - RNA, 18 nt, Artificial Sequence
  Synthetic
uauuuuaauuauaaucua

SEQ ID NO: 241295 - RNA, 19 nt, Artificial Sequence
  Synthetic
uuauuuuaauuauaaucua

SEQ ID NO: 241296 - RNA, 20 nt, Artificial Sequence
  Synthetic
guuauuuuaauuauaaucua

SEQ ID NO: 241297 - RNA, 21 nt, Artificial Sequence
  Synthetic
uguuauuuuaauuauaaucua

SEQ ID NO: 241298 - RNA, 22 nt, Artificial Sequence
  Synthetic
uuguuauuuuaauuauaaucua

SEQ ID NO: 241299 - RNA, 23 nt, Artificial Sequence
  Synthetic
uuuguuauuuuaauuauaaucua

SEQ ID NO: 241300 - RNA, 24 nt, Artificial Sequence
  Synthetic
auuuguuauuuuaauuauaaucua

SEQ ID NO: 241301 - RNA, 18 nt, Artificial Sequence
  Synthetic
auaguacaugguaaucua

SEQ ID NO: 241302 - RNA, 19 nt, Artificial Sequence
  Synthetic
cauaguacaugguaaucua

SEQ ID NO: 241303 - RNA, 20 nt, Artificial Sequence
  Synthetic
acauaguacaugguaaucua

SEQ ID NO: 241304 - RNA, 21 nt, Artificial Sequence
  Synthetic
gacauaguacaugguaaucua

SEQ ID NO: 241305 - RNA, 22 nt, Artificial Sequence
  Synthetic
ugacauaguacaugguaaucua

SEQ ID NO: 241306 - RNA, 23 nt, Artificial Sequence
  Synthetic
gugacauaguacaugguaaucua

SEQ ID NO: 241307 - RNA, 24 nt, Artificial Sequence
  Synthetic
cgugacauaguacaugguaaucua

SEQ ID NO: 241308 - RNA, 18 nt, Artificial Sequence
  Synthetic
caaaacacugguaaucua

SEQ ID NO: 241309 - RNA, 19 nt, Artificial Sequence
  Synthetic
ucaaaacacugguaaucua

SEQ ID NO: 241310 - RNA, 20 nt, Artificial Sequence
  Synthetic
cucaaaacacugguaaucua

SEQ ID NO: 241311 - RNA, 21 nt, Artificial Sequence
  Synthetic
gcucaaaacacugguaaucua

SEQ ID NO: 241312 - RNA, 22 nt, Artificial Sequence
  Synthetic
ggcucaaaacacugguaaucua

SEQ ID NO: 241313 - RNA, 23 nt, Artificial Sequence
  Synthetic
aggcucaaaacacugguaaucua

SEQ ID NO: 241314 - RNA, 24 nt, Artificial Sequence
  Synthetic
aaggcucaaaacacugguaaucua

SEQ ID NO: 241315 - RNA, 18 nt, Artificial Sequence
  Synthetic
guaauuaguauuaaucua

SEQ ID NO: 241316 - RNA, 19 nt, Artificial Sequence
  Synthetic
cguaauuaguauuaaucua

SEQ ID NO: 241317 - RNA, 20 nt, Artificial Sequence
  Synthetic
acguaauuaguauuaaucua

SEQ ID NO: 241318 - RNA, 21 nt, Artificial Sequence
  Synthetic
gacguaauuaguauuaaucua

SEQ ID NO: 241319 - RNA, 22 nt, Artificial Sequence
  Synthetic
agacguaauuaguauuaaucua

SEQ ID NO: 241320 - RNA, 23 nt, Artificial Sequence
  Synthetic
aagacguaauuaguauuaaucua

SEQ ID NO: 241321 - RNA, 24 nt, Artificial Sequence
  Synthetic
uaagacguaauuaguauuaaucua

SEQ ID NO: 241322 - RNA, 18 nt, Artificial Sequence
  Synthetic
uugcucucagcacaucua

SEQ ID NO: 241323 - RNA, 19 nt, Artificial Sequence
  Synthetic
auugcucucagcacaucua

SEQ ID NO: 241324 - RNA, 20 nt, Artificial Sequence
  Synthetic
aauugcucucagcacaucua

SEQ ID NO: 241325 - RNA, 21 nt, Artificial Sequence
  Synthetic
aaauugcucucagcacaucua

SEQ ID NO: 241326 - RNA, 22 nt, Artificial Sequence
  Synthetic
gaaauugcucucagcacaucua

SEQ ID NO: 241327 - RNA, 23 nt, Artificial Sequence
  Synthetic
ugaaauugcucucagcacaucua

SEQ ID NO: 241328 - RNA, 24 nt, Artificial Sequence
  Synthetic
cugaaauugcucucagcacaucua

SEQ ID NO: 241329 - RNA, 18 nt, Artificial Sequence
  Synthetic
ggacuuaauagacaucua

SEQ ID NO: 241330 - RNA, 19 nt, Artificial Sequence
  Synthetic
uggacuuaauagacaucua

SEQ ID NO: 241331 - RNA, 20 nt, Artificial Sequence
  Synthetic
guggacuuaauagacaucua

SEQ ID NO: 241332 - RNA, 21 nt, Artificial Sequence
  Synthetic
aguggacuuaauagacaucua

SEQ ID NO: 241333 - RNA, 22 nt, Artificial Sequence
  Synthetic
aaguggacuuaauagacaucua

SEQ ID NO: 241334 - RNA, 23 nt, Artificial Sequence
  Synthetic
caaguggacuuaauagacaucua

SEQ ID NO: 241335 - RNA, 24 nt, Artificial Sequence
  Synthetic
ccaaguggacuuaauagacaucua

SEQ ID NO: 241336 - RNA, 18 nt, Artificial Sequence
  Synthetic
ugcugucugucccaucua

SEQ ID NO: 241337 - RNA, 19 nt, Artificial Sequence
  Synthetic
uugcugucugucccaucua

SEQ ID NO: 241338 - RNA, 20 nt, Artificial Sequence
  Synthetic
guugcugucugucccaucua

SEQ ID NO: 241339 - RNA, 21 nt, Artificial Sequence
  Synthetic
aguugcugucugucccaucua

SEQ ID NO: 241340 - RNA, 22 nt, Artificial Sequence
  Synthetic
aaguugcugucugucccaucua

SEQ ID NO: 241341 - RNA, 23 nt, Artificial Sequence
  Synthetic
aaaguugcugucugucccaucua

SEQ ID NO: 241342 - RNA, 24 nt, Artificial Sequence
  Synthetic
uaaaguugcugucugucccaucua

SEQ ID NO: 241343 - RNA, 18 nt, Artificial Sequence
  Synthetic
aaaccggcuagccaucua

SEQ ID NO: 241344 - RNA, 19 nt, Artificial Sequence
  Synthetic
uaaaccggcuagccaucua

SEQ ID NO: 241345 - RNA, 20 nt, Artificial Sequence
  Synthetic
guaaaccggcuagccaucua

SEQ ID NO: 241346 - RNA, 21 nt, Artificial Sequence
  Synthetic
gguaaaccggcuagccaucua

SEQ ID NO: 241347 - RNA, 22 nt, Artificial Sequence
  Synthetic
ggguaaaccggcuagccaucua

SEQ ID NO: 241348 - RNA, 23 nt, Artificial Sequence
  Synthetic
uggguaaaccggcuagccaucua

SEQ ID NO: 241349 - RNA, 24 nt, Artificial Sequence
  Synthetic
cuggguaaaccggcuagccaucua

SEQ ID NO: 241350 - RNA, 18 nt, Artificial Sequence
  Synthetic
uacauacguagccaucua

SEQ ID NO: 241351 - RNA, 19 nt, Artificial Sequence
  Synthetic
uuacauacguagccaucua

SEQ ID NO: 241352 - RNA, 20 nt, Artificial Sequence
  Synthetic
uuuacauacguagccaucua

SEQ ID NO: 241353 - RNA, 21 nt, Artificial Sequence
  Synthetic
guuuacauacguagccaucua

SEQ ID NO: 241354 - RNA, 22 nt, Artificial Sequence
  Synthetic
uguuuacauacguagccaucua

SEQ ID NO: 241355 - RNA, 23 nt, Artificial Sequence
  Synthetic
uuguuuacauacguagccaucua

SEQ ID NO: 241356 - RNA, 24 nt, Artificial Sequence
  Synthetic
uuuguuuacauacguagccaucua

SEQ ID NO: 241357 - RNA, 18 nt, Artificial Sequence
  Synthetic
guguucuaucagcaucua

SEQ ID NO: 241358 - RNA, 19 nt, Artificial Sequence
  Synthetic
aguguucuaucagcaucua

SEQ ID NO: 241359 - RNA, 20 nt, Artificial Sequence
  Synthetic
uaguguucuaucagcaucua

SEQ ID NO: 241360 - RNA, 21 nt, Artificial Sequence
  Synthetic
uuaguguucuaucagcaucua

SEQ ID NO: 241361 - RNA, 22 nt, Artificial Sequence
  Synthetic
cuuaguguucuaucagcaucua

SEQ ID NO: 241362 - RNA, 23 nt, Artificial Sequence
  Synthetic
acuuaguguucuaucagcaucua

SEQ ID NO: 241363 - RNA, 24 nt, Artificial Sequence
  Synthetic
aacuuaguguucuaucagcaucua

SEQ ID NO: 241364 - RNA, 18 nt, Artificial Sequence
  Synthetic
aaauuuuacuggcaucua

SEQ ID NO: 241365 - RNA, 19 nt, Artificial Sequence
  Synthetic
aaaauuuuacuggcaucua

SEQ ID NO: 241366 - RNA, 20 nt, Artificial Sequence
  Synthetic
gaaaauuuuacuggcaucua

SEQ ID NO: 241367 - RNA, 21 nt, Artificial Sequence
  Synthetic
agaaaauuuuacuggcaucua

SEQ ID NO: 241368 - RNA, 22 nt, Artificial Sequence
  Synthetic
gagaaaauuuuacuggcaucua

SEQ ID NO: 241369 - RNA, 23 nt, Artificial Sequence
  Synthetic
ugagaaaauuuuacuggcaucua

SEQ ID NO: 241370 - RNA, 24 nt, Artificial Sequence
  Synthetic
augagaaaauuuuacuggcaucua

SEQ ID NO: 241371 - RNA, 18 nt, Artificial Sequence
  Synthetic
agaccuuuucugcaucua

SEQ ID NO: 241372 - RNA, 19 nt, Artificial Sequence
  Synthetic
aagaccuuuucugcaucua

SEQ ID NO: 241373 - RNA, 20 nt, Artificial Sequence
  Synthetic
caagaccuuuucugcaucua

SEQ ID NO: 241374 - RNA, 21 nt, Artificial Sequence
  Synthetic
ccaagaccuuuucugcaucua

SEQ ID NO: 241375 - RNA, 22 nt, Artificial Sequence
  Synthetic
uccaagaccuuuucugcaucua

SEQ ID NO: 241376 - RNA, 23 nt, Artificial Sequence
  Synthetic
auccaagaccuuuucugcaucua

SEQ ID NO: 241377 - RNA, 24 nt, Artificial Sequence
  Synthetic
uauccaagaccuuuucugcaucua

SEQ ID NO: 241378 - RNA, 18 nt, Artificial Sequence
  Synthetic
gggccuuuucugcaucua

SEQ ID NO: 241379 - RNA, 19 nt, Artificial Sequence
  Synthetic
agggccuuuucugcaucua

SEQ ID NO: 241380 - RNA, 20 nt, Artificial Sequence
  Synthetic
aagggccuuuucugcaucua

SEQ ID NO: 241381 - RNA, 21 nt, Artificial Sequence
  Synthetic
caagggccuuuucugcaucua

SEQ ID NO: 241382 - RNA, 22 nt, Artificial Sequence
  Synthetic
ucaagggccuuuucugcaucua

SEQ ID NO: 241383 - RNA, 23 nt, Artificial Sequence
  Synthetic
gucaagggccuuuucugcaucua

SEQ ID NO: 241384 - RNA, 24 nt, Artificial Sequence
  Synthetic
ggucaagggccuuuucugcaucua

SEQ ID NO: 241385 - RNA, 18 nt, Artificial Sequence
  Synthetic
aggcuuuuucugcaucua

SEQ ID NO: 241386 - RNA, 19 nt, Artificial Sequence
  Synthetic
aaggcuuuuucugcaucua

SEQ ID NO: 241387 - RNA, 20 nt, Artificial Sequence
  Synthetic
aaaggcuuuuucugcaucua

SEQ ID NO: 241388 - RNA, 21 nt, Artificial Sequence
  Synthetic
caaaggcuuuuucugcaucua

SEQ ID NO: 241389 - RNA, 22 nt, Artificial Sequence
  Synthetic
ucaaaggcuuuuucugcaucua

SEQ ID NO: 241390 - RNA, 23 nt, Artificial Sequence
  Synthetic
gucaaaggcuuuuucugcaucua

SEQ ID NO: 241391 - RNA, 24 nt, Artificial Sequence
  Synthetic
ugucaaaggcuuuuucugcaucua

SEQ ID NO: 241392 - RNA, 18 nt, Artificial Sequence
  Synthetic
uagguaaugaaagaucua

SEQ ID NO: 241393 - RNA, 19 nt, Artificial Sequence
  Synthetic
cuagguaaugaaagaucua

SEQ ID NO: 241394 - RNA, 20 nt, Artificial Sequence
  Synthetic
ucuagguaaugaaagaucua

SEQ ID NO: 241395 - RNA, 21 nt, Artificial Sequence
  Synthetic
aucuagguaaugaaagaucua

SEQ ID NO: 241396 - RNA, 22 nt, Artificial Sequence
  Synthetic
caucuagguaaugaaagaucua

SEQ ID NO: 241397 - RNA, 23 nt, Artificial Sequence
  Synthetic
ucaucuagguaaugaaagaucua

SEQ ID NO: 241398 - RNA, 24 nt, Artificial Sequence
  Synthetic
gucaucuagguaaugaaagaucua

SEQ ID NO: 241399 - RNA, 18 nt, Artificial Sequence
  Synthetic
agauuaaaaauagaucua

SEQ ID NO: 241400 - RNA, 19 nt, Artificial Sequence
  Synthetic
uagauuaaaaauagaucua

SEQ ID NO: 241401 - RNA, 20 nt, Artificial Sequence
  Synthetic
auagauuaaaaauagaucua

SEQ ID NO: 241402 - RNA, 21 nt, Artificial Sequence
  Synthetic
uauagauuaaaaauagaucua

SEQ ID NO: 241403 - RNA, 22 nt, Artificial Sequence
  Synthetic
auauagauuaaaaauagaucua

SEQ ID NO: 241404 - RNA, 23 nt, Artificial Sequence
  Synthetic
uauauagauuaaaaauagaucua

SEQ ID NO: 241405 - RNA, 24 nt, Artificial Sequence
  Synthetic
uuauauagauuaaaaauagaucua

SEQ ID NO: 241406 - RNA, 18 nt, Artificial Sequence
  Synthetic
uaaauucaguucgaucua

SEQ ID NO: 241407 - RNA, 19 nt, Artificial Sequence
  Synthetic
guaaauucaguucgaucua

SEQ ID NO: 241408 - RNA, 20 nt, Artificial Sequence
  Synthetic
uguaaauucaguucgaucua

SEQ ID NO: 241409 - RNA, 21 nt, Artificial Sequence
  Synthetic
uuguaaauucaguucgaucua

SEQ ID NO: 241410 - RNA, 22 nt, Artificial Sequence
  Synthetic
cuuguaaauucaguucgaucua

SEQ ID NO: 241411 - RNA, 23 nt, Artificial Sequence
  Synthetic
ucuuguaaauucaguucgaucua

SEQ ID NO: 241412 - RNA, 24 nt, Artificial Sequence
  Synthetic
aucuuguaaauucaguucgaucua

SEQ ID NO: 241413 - RNA, 18 nt, Artificial Sequence
  Synthetic
aaaaaaaaaaaauaucua

SEQ ID NO: 241414 - RNA, 19 nt, Artificial Sequence
  Synthetic
gaaaaaaaaaaaauaucua

SEQ ID NO: 241415 - RNA, 20 nt, Artificial Sequence
  Synthetic
ggaaaaaaaaaaaauaucua

SEQ ID NO: 241416 - RNA, 21 nt, Artificial Sequence
  Synthetic
aggaaaaaaaaaaaauaucua

SEQ ID NO: 241417 - RNA, 22 nt, Artificial Sequence
  Synthetic
caggaaaaaaaaaaaauaucua

SEQ ID NO: 241418 - RNA, 23 nt, Artificial Sequence
  Synthetic
ccaggaaaaaaaaaaaauaucua

SEQ ID NO: 241419 - RNA, 24 nt, Artificial Sequence
  Synthetic
uccaggaaaaaaaaaaaauaucua

SEQ ID NO: 241420 - RNA, 18 nt, Artificial Sequence
  Synthetic
caauuagaauaauaucua

SEQ ID NO: 241421 - RNA, 19 nt, Artificial Sequence
  Synthetic
ucaauuagaauaauaucua

SEQ ID NO: 241422 - RNA, 20 nt, Artificial Sequence
  Synthetic
aucaauuagaauaauaucua

SEQ ID NO: 241423 - RNA, 21 nt, Artificial Sequence
  Synthetic
uaucaauuagaauaauaucua

SEQ ID NO: 241424 - RNA, 22 nt, Artificial Sequence
  Synthetic
guaucaauuagaauaauaucua

SEQ ID NO: 241425 - RNA, 23 nt, Artificial Sequence
  Synthetic
uguaucaauuagaauaauaucua

SEQ ID NO: 241426 - RNA, 24 nt, Artificial Sequence
  Synthetic
cuguaucaauuagaauaauaucua

SEQ ID NO: 241427 - RNA, 18 nt, Artificial Sequence
  Synthetic
uggcucagccacuaucua

SEQ ID NO: 241428 - RNA, 19 nt, Artificial Sequence
  Synthetic
auggcucagccacuaucua

SEQ ID NO: 241429 - RNA, 20 nt, Artificial Sequence
  Synthetic
aauggcucagccacuaucua

SEQ ID NO: 241430 - RNA, 21 nt, Artificial Sequence
  Synthetic
aaauggcucagccacuaucua

SEQ ID NO: 241431 - RNA, 22 nt, Artificial Sequence
  Synthetic
aaaauggcucagccacuaucua

SEQ ID NO: 241432 - RNA, 23 nt, Artificial Sequence
  Synthetic
aaaaauggcucagccacuaucua

SEQ ID NO: 241433 - RNA, 24 nt, Artificial Sequence
  Synthetic
uaaaaauggcucagccacuaucua

SEQ ID NO: 241434 - RNA, 18 nt, Artificial Sequence
  Synthetic
gaaacaugcuacuaucua

SEQ ID NO: 241435 - RNA, 19 nt, Artificial Sequence
  Synthetic
ugaaacaugcuacuaucua

SEQ ID NO: 241436 - RNA, 20 nt, Artificial Sequence
  Synthetic
augaaacaugcuacuaucua

SEQ ID NO: 241437 - RNA, 21 nt, Artificial Sequence
  Synthetic
aaugaaacaugcuacuaucua

SEQ ID NO: 241438 - RNA, 22 nt, Artificial Sequence
  Synthetic
gaaugaaacaugcuacuaucua

SEQ ID NO: 241439 - RNA, 23 nt, Artificial Sequence
  Synthetic
ggaaugaaacaugcuacuaucua

SEQ ID NO: 241440 - RNA, 24 nt, Artificial Sequence
  Synthetic
aggaaugaaacaugcuacuaucua

SEQ ID NO: 241441 - RNA, 18 nt, Artificial Sequence
  Synthetic
acuaccaauuccuaucua

SEQ ID NO: 241442 - RNA, 19 nt, Artificial Sequence
  Synthetic
aacuaccaauuccuaucua

SEQ ID NO: 241443 - RNA, 20 nt, Artificial Sequence
  Synthetic
gaacuaccaauuccuaucua

SEQ ID NO: 241444 - RNA, 21 nt, Artificial Sequence
  Synthetic
ggaacuaccaauuccuaucua

SEQ ID NO: 241445 - RNA, 22 nt, Artificial Sequence
  Synthetic
aggaacuaccaauuccuaucua

SEQ ID NO: 241446 - RNA, 23 nt, Artificial Sequence
  Synthetic
uaggaacuaccaauuccuaucua

SEQ ID NO: 241447 - RNA, 24 nt, Artificial Sequence
  Synthetic
guaggaacuaccaauuccuaucua

SEQ ID NO: 241448 - RNA, 18 nt, Artificial Sequence
  Synthetic
ucauuuagcagcuaucua

SEQ ID NO: 241449 - RNA, 19 nt, Artificial Sequence
  Synthetic
cucauuuagcagcuaucua

SEQ ID NO: 241450 - RNA, 20 nt, Artificial Sequence
  Synthetic
ucucauuuagcagcuaucua

SEQ ID NO: 241451 - RNA, 21 nt, Artificial Sequence
  Synthetic
cucucauuuagcagcuaucua

SEQ ID NO: 241452 - RNA, 22 nt, Artificial Sequence
  Synthetic
ucucucauuuagcagcuaucua

SEQ ID NO: 241453 - RNA, 23 nt, Artificial Sequence
  Synthetic
uucucucauuuagcagcuaucua

SEQ ID NO: 241454 - RNA, 24 nt, Artificial Sequence
  Synthetic
uuucucucauuuagcagcuaucua

SEQ ID NO: 241455 - RNA, 18 nt, Artificial Sequence
  Synthetic
aaggaacuaaucuaucua

SEQ ID NO: 241456 - RNA, 19 nt, Artificial Sequence
  Synthetic
aaaggaacuaaucuaucua

SEQ ID NO: 241457 - RNA, 20 nt, Artificial Sequence
  Synthetic
aaaaggaacuaaucuaucua

SEQ ID NO: 241458 - RNA, 21 nt, Artificial Sequence
  Synthetic
uaaaaggaacuaaucuaucua

SEQ ID NO: 241459 - RNA, 22 nt, Artificial Sequence
  Synthetic
uuaaaaggaacuaaucuaucua

SEQ ID NO: 241460 - RNA, 23 nt, Artificial Sequence
  Synthetic
cuuaaaaggaacuaaucuaucua

SEQ ID NO: 241461 - RNA, 24 nt, Artificial Sequence
  Synthetic
gcuuaaaaggaacuaaucuaucua

SEQ ID NO: 241462 - RNA, 18 nt, Artificial Sequence
  Synthetic
uuuucuacuuucuaucua

SEQ ID NO: 241463 - RNA, 19 nt, Artificial Sequence
  Synthetic
uuuuucuacuuucuaucua

SEQ ID NO: 241464 - RNA, 20 nt, Artificial Sequence
  Synthetic
auuuuucuacuuucuaucua

SEQ ID NO: 241465 - RNA, 21 nt, Artificial Sequence
  Synthetic
cauuuuucuacuuucuaucua

SEQ ID NO: 241466 - RNA, 22 nt, Artificial Sequence
  Synthetic
ccauuuuucuacuuucuaucua

SEQ ID NO: 241467 - RNA, 23 nt, Artificial Sequence
  Synthetic
cccauuuuucuacuuucuaucua

SEQ ID NO: 241468 - RNA, 24 nt, Artificial Sequence
  Synthetic
ucccauuuuucuacuuucuaucua

SEQ ID NO: 241469 - RNA, 18 nt, Artificial Sequence
  Synthetic
ggccauugagaguaucua

SEQ ID NO: 241470 - RNA, 19 nt, Artificial Sequence
  Synthetic
aggccauugagaguaucua

SEQ ID NO: 241471 - RNA, 20 nt, Artificial Sequence
  Synthetic
gaggccauugagaguaucua

SEQ ID NO: 241472 - RNA, 21 nt, Artificial Sequence
  Synthetic
ugaggccauugagaguaucua

SEQ ID NO: 241473 - RNA, 22 nt, Artificial Sequence
  Synthetic
augaggccauugagaguaucua

SEQ ID NO: 241474 - RNA, 23 nt, Artificial Sequence
  Synthetic
caugaggccauugagaguaucua

SEQ ID NO: 241475 - RNA, 24 nt, Artificial Sequence
  Synthetic
ucaugaggccauugagaguaucua

SEQ ID NO: 241476 - RNA, 18 nt, Artificial Sequence
  Synthetic
uuuuauaacuaguaucua

SEQ ID NO: 241477 - RNA, 19 nt, Artificial Sequence
  Synthetic
auuuuauaacuaguaucua

SEQ ID NO: 241478 - RNA, 20 nt, Artificial Sequence
  Synthetic
cauuuuauaacuaguaucua

SEQ ID NO: 241479 - RNA, 21 nt, Artificial Sequence
  Synthetic
ucauuuuauaacuaguaucua

SEQ ID NO: 241480 - RNA, 22 nt, Artificial Sequence
  Synthetic
aucauuuuauaacuaguaucua

SEQ ID NO: 241481 - RNA, 23 nt, Artificial Sequence
  Synthetic
uaucauuuuauaacuaguaucua

SEQ ID NO: 241482 - RNA, 24 nt, Artificial Sequence
  Synthetic
guaucauuuuauaacuaguaucua

SEQ ID NO: 241483 - RNA, 18 nt, Artificial Sequence
  Synthetic
cuuaauaaaggguaucua

SEQ ID NO: 241484 - RNA, 19 nt, Artificial Sequence
  Synthetic
ucuuaauaaaggguaucua

SEQ ID NO: 241485 - RNA, 20 nt, Artificial Sequence
  Synthetic
aucuuaauaaaggguaucua

SEQ ID NO: 241486 - RNA, 21 nt, Artificial Sequence
  Synthetic
caucuuaauaaaggguaucua

SEQ ID NO: 241487 - RNA, 22 nt, Artificial Sequence
  Synthetic
acaucuuaauaaaggguaucua

SEQ ID NO: 241488 - RNA, 23 nt, Artificial Sequence
  Synthetic
cacaucuuaauaaaggguaucua

SEQ ID NO: 241489 - RNA, 24 nt, Artificial Sequence
  Synthetic
ccacaucuuaauaaaggguaucua

SEQ ID NO: 241490 - RNA, 18 nt, Artificial Sequence
  Synthetic
ucuacagagauuuaucua

SEQ ID NO: 241491 - RNA, 19 nt, Artificial Sequence
  Synthetic
uucuacagagauuuaucua

SEQ ID NO: 241492 - RNA, 20 nt, Artificial Sequence
  Synthetic
uuucuacagagauuuaucua

SEQ ID NO: 241493 - RNA, 21 nt, Artificial Sequence
  Synthetic
uuuucuacagagauuuaucua

SEQ ID NO: 241494 - RNA, 22 nt, Artificial Sequence
  Synthetic
auuuucuacagagauuuaucua

SEQ ID NO: 241495 - RNA, 23 nt, Artificial Sequence
  Synthetic
uauuuucuacagagauuuaucua

SEQ ID NO: 241496 - RNA, 24 nt, Artificial Sequence
  Synthetic
uuauuuucuacagagauuuaucua

SEQ ID NO: 241497 - RNA, 18 nt, Artificial Sequence
  Synthetic
uucagguguuuuuaucua

SEQ ID NO: 241498 - RNA, 19 nt, Artificial Sequence
  Synthetic
uuucagguguuuuuaucua

SEQ ID NO: 241499 - RNA, 20 nt, Artificial Sequence
  Synthetic
auuucagguguuuuuaucua

SEQ ID NO: 241500 - RNA, 21 nt, Artificial Sequence
  Synthetic
aauuucagguguuuuuaucua

SEQ ID NO: 241501 - RNA, 22 nt, Artificial Sequence
  Synthetic
caauuucagguguuuuuaucua

SEQ ID NO: 241502 - RNA, 23 nt, Artificial Sequence
  Synthetic
ccaauuucagguguuuuuaucua

SEQ ID NO: 241503 - RNA, 24 nt, Artificial Sequence
  Synthetic
accaauuucagguguuuuuaucua

SEQ ID NO: 241504 - RNA, 18 nt, Artificial Sequence
  Synthetic
ccugucucaaaaacucua

SEQ ID NO: 241505 - RNA, 19 nt, Artificial Sequence
  Synthetic
uccugucucaaaaacucua

SEQ ID NO: 241506 - RNA, 20 nt, Artificial Sequence
  Synthetic
auccugucucaaaaacucua

SEQ ID NO: 241507 - RNA, 21 nt, Artificial Sequence
  Synthetic
gauccugucucaaaaacucua

SEQ ID NO: 241508 - RNA, 22 nt, Artificial Sequence
  Synthetic
ugauccugucucaaaaacucua

SEQ ID NO: 241509 - RNA, 23 nt, Artificial Sequence
  Synthetic
cugauccugucucaaaaacucua

SEQ ID NO: 241510 - RNA, 24 nt, Artificial Sequence
  Synthetic
ucugauccugucucaaaaacucua

SEQ ID NO: 241511 - RNA, 18 nt, Artificial Sequence
  Synthetic
ucuuccauggcaacucua

SEQ ID NO: 241512 - RNA, 19 nt, Artificial Sequence
  Synthetic
cucuuccauggcaacucua

SEQ ID NO: 241513 - RNA, 20 nt, Artificial Sequence
  Synthetic
ucucuuccauggcaacucua

SEQ ID NO: 241514 - RNA, 21 nt, Artificial Sequence
  Synthetic
uucucuuccauggcaacucua

SEQ ID NO: 241515 - RNA, 22 nt, Artificial Sequence
  Synthetic
uuucucuuccauggcaacucua

SEQ ID NO: 241516 - RNA, 23 nt, Artificial Sequence
  Synthetic
cuuucucuuccauggcaacucua

SEQ ID NO: 241517 - RNA, 24 nt, Artificial Sequence
  Synthetic
acuuucucuuccauggcaacucua

SEQ ID NO: 241518 - RNA, 18 nt, Artificial Sequence
  Synthetic
cugccucaaagaacucua

SEQ ID NO: 241519 - RNA, 19 nt, Artificial Sequence
  Synthetic
acugccucaaagaacucua

SEQ ID NO: 241520 - RNA, 20 nt, Artificial Sequence
  Synthetic
uacugccucaaagaacucua

SEQ ID NO: 241521 - RNA, 21 nt, Artificial Sequence
  Synthetic
cuacugccucaaagaacucua

SEQ ID NO: 241522 - RNA, 22 nt, Artificial Sequence
  Synthetic
ucuacugccucaaagaacucua

SEQ ID NO: 241523 - RNA, 23 nt, Artificial Sequence
  Synthetic
aucuacugccucaaagaacucua

SEQ ID NO: 241524 - RNA, 24 nt, Artificial Sequence
  Synthetic
aaucuacugccucaaagaacucua

SEQ ID NO: 241525 - RNA, 18 nt, Artificial Sequence
  Synthetic
uucuauauauacacucua

SEQ ID NO: 241526 - RNA, 19 nt, Artificial Sequence
  Synthetic
cuucuauauauacacucua

SEQ ID NO: 241527 - RNA, 20 nt, Artificial Sequence
  Synthetic
acuucuauauauacacucua

SEQ ID NO: 241528 - RNA, 21 nt, Artificial Sequence
  Synthetic
cacuucuauauauacacucua

SEQ ID NO: 241529 - RNA, 22 nt, Artificial Sequence
  Synthetic
ucacuucuauauauacacucua

SEQ ID NO: 241530 - RNA, 23 nt, Artificial Sequence
  Synthetic
uucacuucuauauauacacucua

SEQ ID NO: 241531 - RNA, 24 nt, Artificial Sequence
  Synthetic
uuucacuucuauauauacacucua

SEQ ID NO: 241532 - RNA, 18 nt, Artificial Sequence
  Synthetic
uuuuuuuuauguacucua

SEQ ID NO: 241533 - RNA, 19 nt, Artificial Sequence
  Synthetic
uuuuuuuuuauguacucua

SEQ ID NO: 241534 - RNA, 20 nt, Artificial Sequence
  Synthetic
uuuuuuuuuuauguacucua

SEQ ID NO: 241535 - RNA, 21 nt, Artificial Sequence
  Synthetic
uuuuuuuuuuuauguacucua

SEQ ID NO: 241536 - RNA, 22 nt, Artificial Sequence
  Synthetic
uuuuuuuuuuuuauguacucua

SEQ ID NO: 241537 - RNA, 23 nt, Artificial Sequence
  Synthetic
guuuuuuuuuuuuauguacucua

SEQ ID NO: 241538 - RNA, 24 nt, Artificial Sequence
  Synthetic
aguuuuuuuuuuuuauguacucua

SEQ ID NO: 241539 - RNA, 18 nt, Artificial Sequence
  Synthetic
aauugaagacaaccucua

SEQ ID NO: 241540 - RNA, 19 nt, Artificial Sequence
  Synthetic
uaauugaagacaaccucua

SEQ ID NO: 241541 - RNA, 20 nt, Artificial Sequence
  Synthetic
uuaauugaagacaaccucua

SEQ ID NO: 241542 - RNA, 21 nt, Artificial Sequence
  Synthetic
uuuaauugaagacaaccucua

SEQ ID NO: 241543 - RNA, 22 nt, Artificial Sequence
  Synthetic
uuuuaauugaagacaaccucua

SEQ ID NO: 241544 - RNA, 23 nt, Artificial Sequence
  Synthetic
uuuuuaauugaagacaaccucua

SEQ ID NO: 241545 - RNA, 24 nt, Artificial Sequence
  Synthetic
auuuuuaauugaagacaaccucua

SEQ ID NO: 241546 - RNA, 18 nt, Artificial Sequence
  Synthetic
aaauugauaauaccucua

SEQ ID NO: 241547 - RNA, 19 nt, Artificial Sequence
  Synthetic
caaauugauaauaccucua

SEQ ID NO: 241548 - RNA, 20 nt, Artificial Sequence
  Synthetic
ccaaauugauaauaccucua

SEQ ID NO: 241549 - RNA, 21 nt, Artificial Sequence
  Synthetic
uccaaauugauaauaccucua

SEQ ID NO: 241550 - RNA, 22 nt, Artificial Sequence
  Synthetic
cuccaaauugauaauaccucua

SEQ ID NO: 241551 - RNA, 23 nt, Artificial Sequence
  Synthetic
gcuccaaauugauaauaccucua

SEQ ID NO: 241552 - RNA, 24 nt, Artificial Sequence
  Synthetic
ggcuccaaauugauaauaccucua

SEQ ID NO: 241553 - RNA, 18 nt, Artificial Sequence
  Synthetic
augcuucacauaccucua

SEQ ID NO: 241554 - RNA, 19 nt, Artificial Sequence
  Synthetic
caugcuucacauaccucua

SEQ ID NO: 241555 - RNA, 20 nt, Artificial Sequence
  Synthetic
acaugcuucacauaccucua

SEQ ID NO: 241556 - RNA, 21 nt, Artificial Sequence
  Synthetic
uacaugcuucacauaccucua

SEQ ID NO: 241557 - RNA, 22 nt, Artificial Sequence
  Synthetic
cuacaugcuucacauaccucua

SEQ ID NO: 241558 - RNA, 23 nt, Artificial Sequence
  Synthetic
acuacaugcuucacauaccucua

SEQ ID NO: 241559 - RNA, 24 nt, Artificial Sequence
  Synthetic
uacuacaugcuucacauaccucua

SEQ ID NO: 241560 - RNA, 18 nt, Artificial Sequence
  Synthetic
acgauucugcaggcucua

SEQ ID NO: 241561 - RNA, 19 nt, Artificial Sequence
  Synthetic
gacgauucugcaggcucua

SEQ ID NO: 241562 - RNA, 20 nt, Artificial Sequence
  Synthetic
ugacgauucugcaggcucua

SEQ ID NO: 241563 - RNA, 21 nt, Artificial Sequence
  Synthetic
cugacgauucugcaggcucua

SEQ ID NO: 241564 - RNA, 22 nt, Artificial Sequence
  Synthetic
gcugacgauucugcaggcucua

SEQ ID NO: 241565 - RNA, 23 nt, Artificial Sequence
  Synthetic
ggcugacgauucugcaggcucua

SEQ ID NO: 241566 - RNA, 24 nt, Artificial Sequence
  Synthetic
uggcugacgauucugcaggcucua

SEQ ID NO: 241567 - RNA, 18 nt, Artificial Sequence
  Synthetic
uuauucaguauggcucua

SEQ ID NO: 241568 - RNA, 19 nt, Artificial Sequence
  Synthetic
auuauucaguauggcucua

SEQ ID NO: 241569 - RNA, 20 nt, Artificial Sequence
  Synthetic
aauuauucaguauggcucua

SEQ ID NO: 241570 - RNA, 21 nt, Artificial Sequence
  Synthetic
aaauuauucaguauggcucua

SEQ ID NO: 241571 - RNA, 22 nt, Artificial Sequence
  Synthetic
caaauuauucaguauggcucua

SEQ ID NO: 241572 - RNA, 23 nt, Artificial Sequence
  Synthetic
acaaauuauucaguauggcucua

SEQ ID NO: 241573 - RNA, 24 nt, Artificial Sequence
  Synthetic
gacaaauuauucaguauggcucua

SEQ ID NO: 241574 - RNA, 18 nt, Artificial Sequence
  Synthetic
ucuaauagagaugcucua

SEQ ID NO: 241575 - RNA, 19 nt, Artificial Sequence
  Synthetic
gucuaauagagaugcucua

SEQ ID NO: 241576 - RNA, 20 nt, Artificial Sequence
  Synthetic
ugucuaauagagaugcucua

SEQ ID NO: 241577 - RNA, 21 nt, Artificial Sequence
  Synthetic
cugucuaauagagaugcucua

SEQ ID NO: 241578 - RNA, 22 nt, Artificial Sequence
  Synthetic
ucugucuaauagagaugcucua

SEQ ID NO: 241579 - RNA, 23 nt, Artificial Sequence
  Synthetic
gucugucuaauagagaugcucua

SEQ ID NO: 241580 - RNA, 24 nt, Artificial Sequence
  Synthetic
ugucugucuaauagagaugcucua

SEQ ID NO: 241581 - RNA, 18 nt, Artificial Sequence
  Synthetic
acaauaauugaugcucua

SEQ ID NO: 241582 - RNA, 19 nt, Artificial Sequence
  Synthetic
gacaauaauugaugcucua

SEQ ID NO: 241583 - RNA, 20 nt, Artificial Sequence
  Synthetic
ugacaauaauugaugcucua

SEQ ID NO: 241584 - RNA, 21 nt, Artificial Sequence
  Synthetic
gugacaauaauugaugcucua

SEQ ID NO: 241585 - RNA, 22 nt, Artificial Sequence
  Synthetic
cgugacaauaauugaugcucua

SEQ ID NO: 241586 - RNA, 23 nt, Artificial Sequence
  Synthetic
gcgugacaauaauugaugcucua

SEQ ID NO: 241587 - RNA, 24 nt, Artificial Sequence
  Synthetic
ugcgugacaauaauugaugcucua

SEQ ID NO: 241588 - RNA, 18 nt, Artificial Sequence
  Synthetic
aaaaaaaucacugcucua

SEQ ID NO: 241589 - RNA, 19 nt, Artificial Sequence
  Synthetic
aaaaaaaaucacugcucua

SEQ ID NO: 241590 - RNA, 20 nt, Artificial Sequence
  Synthetic
caaaaaaaaucacugcucua

SEQ ID NO: 241591 - RNA, 21 nt, Artificial Sequence
  Synthetic
ccaaaaaaaaucacugcucua

SEQ ID NO: 241592 - RNA, 22 nt, Artificial Sequence
  Synthetic
accaaaaaaaaucacugcucua

SEQ ID NO: 241593 - RNA, 23 nt, Artificial Sequence
  Synthetic
uaccaaaaaaaaucacugcucua

SEQ ID NO: 241594 - RNA, 24 nt, Artificial Sequence
  Synthetic
auaccaaaaaaaaucacugcucua

SEQ ID NO: 241595 - RNA, 18 nt, Artificial Sequence
  Synthetic
uguucucaugcugcucua

SEQ ID NO: 241596 - RNA, 19 nt, Artificial Sequence
  Synthetic
cuguucucaugcugcucua

SEQ ID NO: 241597 - RNA, 20 nt, Artificial Sequence
  Synthetic
ucuguucucaugcugcucua

SEQ ID NO: 241598 - RNA, 21 nt, Artificial Sequence
  Synthetic
gucuguucucaugcugcucua

SEQ ID NO: 241599 - RNA, 22 nt, Artificial Sequence
  Synthetic
agucuguucucaugcugcucua

SEQ ID NO: 241600 - RNA, 23 nt, Artificial Sequence
  Synthetic
uagucuguucucaugcugcucua

SEQ ID NO: 241601 - RNA, 24 nt, Artificial Sequence
  Synthetic
uuagucuguucucaugcugcucua

SEQ ID NO: 241602 - RNA, 18 nt, Artificial Sequence
  Synthetic
ggccaaaccccaucucua

SEQ ID NO: 241603 - RNA, 19 nt, Artificial Sequence
  Synthetic
uggccaaaccccaucucua

SEQ ID NO: 241604 - RNA, 20 nt, Artificial Sequence
  Synthetic
auggccaaaccccaucucua

SEQ ID NO: 241605 - RNA, 21 nt, Artificial Sequence
  Synthetic
cauggccaaaccccaucucua

SEQ ID NO: 241606 - RNA, 22 nt, Artificial Sequence
  Synthetic
acauggccaaaccccaucucua

SEQ ID NO: 241607 - RNA, 23 nt, Artificial Sequence
  Synthetic
aacauggccaaaccccaucucua

SEQ ID NO: 241608 - RNA, 24 nt, Artificial Sequence
  Synthetic
caacauggccaaaccccaucucua

SEQ ID NO: 241609 - RNA, 18 nt, Artificial Sequence
  Synthetic
ggugaaaccccaucucua

SEQ ID NO: 241610 - RNA, 19 nt, Artificial Sequence
  Synthetic
uggugaaaccccaucucua

SEQ ID NO: 241611 - RNA, 20 nt, Artificial Sequence
  Synthetic
auggugaaaccccaucucua

SEQ ID NO: 241612 - RNA, 18 nt, Artificial Sequence
  Synthetic
ggcugcuagucaucucua

SEQ ID NO: 241613 - RNA, 19 nt, Artificial Sequence
  Synthetic
aggcugcuagucaucucua

SEQ ID NO: 241614 - RNA, 20 nt, Artificial Sequence
  Synthetic
aaggcugcuagucaucucua

SEQ ID NO: 241615 - RNA, 21 nt, Artificial Sequence
  Synthetic
uaaggcugcuagucaucucua

SEQ ID NO: 241616 - RNA, 22 nt, Artificial Sequence
  Synthetic
cuaaggcugcuagucaucucua

SEQ ID NO: 241617 - RNA, 23 nt, Artificial Sequence
  Synthetic
acuaaggcugcuagucaucucua

SEQ ID NO: 241618 - RNA, 24 nt, Artificial Sequence
  Synthetic
uacuaaggcugcuagucaucucua

SEQ ID NO: 241619 - RNA, 18 nt, Artificial Sequence
  Synthetic
agaagugaaagaucucua

SEQ ID NO: 241620 - RNA, 19 nt, Artificial Sequence
  Synthetic
aagaagugaaagaucucua

SEQ ID NO: 241621 - RNA, 20 nt, Artificial Sequence
  Synthetic
aaagaagugaaagaucucua

SEQ ID NO: 241622 - RNA, 21 nt, Artificial Sequence
  Synthetic
caaagaagugaaagaucucua

SEQ ID NO: 241623 - RNA, 22 nt, Artificial Sequence
  Synthetic
ccaaagaagugaaagaucucua

SEQ ID NO: 241624 - RNA, 23 nt, Artificial Sequence
  Synthetic
accaaagaagugaaagaucucua

SEQ ID NO: 241625 - RNA, 24 nt, Artificial Sequence
  Synthetic
aaccaaagaagugaaagaucucua

SEQ ID NO: 241626 - RNA, 18 nt, Artificial Sequence
  Synthetic
aaaacgcccugcucucua

SEQ ID NO: 241627 - RNA, 19 nt, Artificial Sequence
  Synthetic
aaaaacgcccugcucucua

SEQ ID NO: 241628 - RNA, 20 nt, Artificial Sequence
  Synthetic
caaaaacgcccugcucucua

SEQ ID NO: 241629 - RNA, 21 nt, Artificial Sequence
  Synthetic
acaaaaacgcccugcucucua

SEQ ID NO: 241630 - RNA, 22 nt, Artificial Sequence
  Synthetic
gacaaaaacgcccugcucucua

SEQ ID NO: 241631 - RNA, 23 nt, Artificial Sequence
  Synthetic
agacaaaaacgcccugcucucua

SEQ ID NO: 241632 - RNA, 24 nt, Artificial Sequence
  Synthetic
aagacaaaaacgcccugcucucua

SEQ ID NO: 241633 - RNA, 18 nt, Artificial Sequence
  Synthetic
ucauguuugaagucucua

SEQ ID NO: 241634 - RNA, 19 nt, Artificial Sequence
  Synthetic
cucauguuugaagucucua

SEQ ID NO: 241635 - RNA, 20 nt, Artificial Sequence
  Synthetic
acucauguuugaagucucua

SEQ ID NO: 241636 - RNA, 21 nt, Artificial Sequence
  Synthetic
cacucauguuugaagucucua

SEQ ID NO: 241637 - RNA, 22 nt, Artificial Sequence
  Synthetic
acacucauguuugaagucucua

SEQ ID NO: 241638 - RNA, 23 nt, Artificial Sequence
  Synthetic
gacacucauguuugaagucucua

SEQ ID NO: 241639 - RNA, 24 nt, Artificial Sequence
  Synthetic
agacacucauguuugaagucucua

SEQ ID NO: 241640 - RNA, 18 nt, Artificial Sequence
  Synthetic
augcuauuucauucucua

SEQ ID NO: 241641 - RNA, 19 nt, Artificial Sequence
  Synthetic
aaugcuauuucauucucua

SEQ ID NO: 241642 - RNA, 20 nt, Artificial Sequence
  Synthetic
aaaugcuauuucauucucua

SEQ ID NO: 241643 - RNA, 21 nt, Artificial Sequence
  Synthetic
aaaaugcuauuucauucucua

SEQ ID NO: 241644 - RNA, 22 nt, Artificial Sequence
  Synthetic
uaaaaugcuauuucauucucua

SEQ ID NO: 241645 - RNA, 23 nt, Artificial Sequence
  Synthetic
uuaaaaugcuauuucauucucua

SEQ ID NO: 241646 - RNA, 24 nt, Artificial Sequence
  Synthetic
uuuaaaaugcuauuucauucucua

SEQ ID NO: 241647 - RNA, 18 nt, Artificial Sequence
  Synthetic
auuggcauggcuucucua

SEQ ID NO: 241648 - RNA, 19 nt, Artificial Sequence
  Synthetic
gauuggcauggcuucucua

SEQ ID NO: 241649 - RNA, 20 nt, Artificial Sequence
  Synthetic
ggauuggcauggcuucucua

SEQ ID NO: 241650 - RNA, 21 nt, Artificial Sequence
  Synthetic
uggauuggcauggcuucucua

SEQ ID NO: 241651 - RNA, 22 nt, Artificial Sequence
  Synthetic
guggauuggcauggcuucucua

SEQ ID NO: 241652 - RNA, 23 nt, Artificial Sequence
  Synthetic
gguggauuggcauggcuucucua

SEQ ID NO: 241653 - RNA, 24 nt, Artificial Sequence
  Synthetic
ggguggauuggcauggcuucucua

SEQ ID NO: 241654 - RNA, 18 nt, Artificial Sequence
  Synthetic
uacucaucuucuucucua

SEQ ID NO: 241655 - RNA, 19 nt, Artificial Sequence
  Synthetic
cuacucaucuucuucucua

SEQ ID NO: 241656 - RNA, 20 nt, Artificial Sequence
  Synthetic
ucuacucaucuucuucucua

SEQ ID NO: 241657 - RNA, 21 nt, Artificial Sequence
  Synthetic
uucuacucaucuucuucucua

SEQ ID NO: 241658 - RNA, 22 nt, Artificial Sequence
  Synthetic
auucuacucaucuucuucucua

SEQ ID NO: 241659 - RNA, 23 nt, Artificial Sequence
  Synthetic
cauucuacucaucuucuucucua

SEQ ID NO: 241660 - RNA, 24 nt, Artificial Sequence
  Synthetic
ccauucuacucaucuucuucucua

SEQ ID NO: 241661 - RNA, 18 nt, Artificial Sequence
  Synthetic
auuccuuuuguuucucua

SEQ ID NO: 241662 - RNA, 19 nt, Artificial Sequence
  Synthetic
uauuccuuuuguuucucua

SEQ ID NO: 241663 - RNA, 20 nt, Artificial Sequence
  Synthetic
uuauuccuuuuguuucucua

SEQ ID NO: 241664 - RNA, 21 nt, Artificial Sequence
  Synthetic
cuuauuccuuuuguuucucua

SEQ ID NO: 241665 - RNA, 22 nt, Artificial Sequence
  Synthetic
ucuuauuccuuuuguuucucua

SEQ ID NO: 241666 - RNA, 23 nt, Artificial Sequence
  Synthetic
cucuuauuccuuuuguuucucua

SEQ ID NO: 241667 - RNA, 24 nt, Artificial Sequence
  Synthetic
ucucuuauuccuuuuguuucucua

SEQ ID NO: 241668 - RNA, 18 nt, Artificial Sequence
  Synthetic
uauagauuuagaagucua

SEQ ID NO: 241669 - RNA, 19 nt, Artificial Sequence
  Synthetic
guauagauuuagaagucua

SEQ ID NO: 241670 - RNA, 20 nt, Artificial Sequence
  Synthetic
uguauagauuuagaagucua

SEQ ID NO: 241671 - RNA, 21 nt, Artificial Sequence
  Synthetic
guguauagauuuagaagucua

SEQ ID NO: 241672 - RNA, 22 nt, Artificial Sequence
  Synthetic
uguguauagauuuagaagucua

SEQ ID NO: 241673 - RNA, 23 nt, Artificial Sequence
  Synthetic
uuguguauagauuuagaagucua

SEQ ID NO: 241674 - RNA, 24 nt, Artificial Sequence
  Synthetic
cuuguguauagauuuagaagucua

SEQ ID NO: 241675 - RNA, 18 nt, Artificial Sequence
  Synthetic
uguuggauaaccagucua

SEQ ID NO: 241676 - RNA, 19 nt, Artificial Sequence
  Synthetic
auguuggauaaccagucua

SEQ ID NO: 241677 - RNA, 20 nt, Artificial Sequence
  Synthetic
cauguuggauaaccagucua

SEQ ID NO: 241678 - RNA, 21 nt, Artificial Sequence
  Synthetic
ucauguuggauaaccagucua

SEQ ID NO: 241679 - RNA, 22 nt, Artificial Sequence
  Synthetic
gucauguuggauaaccagucua

SEQ ID NO: 241680 - RNA, 23 nt, Artificial Sequence
  Synthetic
agucauguuggauaaccagucua

SEQ ID NO: 241681 - RNA, 24 nt, Artificial Sequence
  Synthetic
gagucauguuggauaaccagucua

SEQ ID NO: 241682 - RNA, 18 nt, Artificial Sequence
  Synthetic
augugaaacgagagucua

SEQ ID NO: 241683 - RNA, 19 nt, Artificial Sequence
  Synthetic
uaugugaaacgagagucua

SEQ ID NO: 241684 - RNA, 20 nt, Artificial Sequence
  Synthetic
guaugugaaacgagagucua

SEQ ID NO: 241685 - RNA, 21 nt, Artificial Sequence
  Synthetic
uguaugugaaacgagagucua

SEQ ID NO: 241686 - RNA, 22 nt, Artificial Sequence
  Synthetic
auguaugugaaacgagagucua

SEQ ID NO: 241687 - RNA, 23 nt, Artificial Sequence
  Synthetic
aauguaugugaaacgagagucua

SEQ ID NO: 241688 - RNA, 24 nt, Artificial Sequence
  Synthetic
aaauguaugugaaacgagagucua

SEQ ID NO: 241689 - RNA, 18 nt, Artificial Sequence
  Synthetic
uucuccaguuagagucua

SEQ ID NO: 241690 - RNA, 19 nt, Artificial Sequence
  Synthetic
cuucuccaguuagagucua

SEQ ID NO: 241691 - RNA, 20 nt, Artificial Sequence
  Synthetic
ucuucuccaguuagagucua

SEQ ID NO: 241692 - RNA, 21 nt, Artificial Sequence
  Synthetic
cucuucuccaguuagagucua

SEQ ID NO: 241693 - RNA, 22 nt, Artificial Sequence
  Synthetic
ucucuucuccaguuagagucua

SEQ ID NO: 241694 - RNA, 23 nt, Artificial Sequence
  Synthetic
cucucuucuccaguuagagucua

SEQ ID NO: 241695 - RNA, 24 nt, Artificial Sequence
  Synthetic
acucucuucuccaguuagagucua

SEQ ID NO: 241696 - RNA, 18 nt, Artificial Sequence
  Synthetic
aaaaauuauuuacgucua

SEQ ID NO: 241697 - RNA, 19 nt, Artificial Sequence
  Synthetic
uaaaaauuauuuacgucua

SEQ ID NO: 241698 - RNA, 20 nt, Artificial Sequence
  Synthetic
cuaaaaauuauuuacgucua

SEQ ID NO: 241699 - RNA, 21 nt, Artificial Sequence
  Synthetic
gcuaaaaauuauuuacgucua

SEQ ID NO: 241700 - RNA, 22 nt, Artificial Sequence
  Synthetic
ugcuaaaaauuauuuacgucua

SEQ ID NO: 241701 - RNA, 23 nt, Artificial Sequence
  Synthetic
gugcuaaaaauuauuuacgucua

SEQ ID NO: 241702 - RNA, 24 nt, Artificial Sequence
  Synthetic
ugugcuaaaaauuauuuacgucua

SEQ ID NO: 241703 - RNA, 18 nt, Artificial Sequence
  Synthetic
cccaucucccagcgucua

SEQ ID NO: 241704 - RNA, 19 nt, Artificial Sequence
  Synthetic
gcccaucucccagcgucua

SEQ ID NO: 241705 - RNA, 20 nt, Artificial Sequence
  Synthetic
ugcccaucucccagcgucua

SEQ ID NO: 241706 - RNA, 21 nt, Artificial Sequence
  Synthetic
uugcccaucucccagcgucua

SEQ ID NO: 241707 - RNA, 22 nt, Artificial Sequence
  Synthetic
uuugcccaucucccagcgucua

SEQ ID NO: 241708 - RNA, 23 nt, Artificial Sequence
  Synthetic
guuugcccaucucccagcgucua

SEQ ID NO: 241709 - RNA, 24 nt, Artificial Sequence
  Synthetic
uguuugcccaucucccagcgucua

SEQ ID NO: 241710 - RNA, 18 nt, Artificial Sequence
  Synthetic
guuugccuuguaggucua

SEQ ID NO: 241711 - RNA, 19 nt, Artificial Sequence
  Synthetic
uguuugccuuguaggucua

SEQ ID NO: 241712 - RNA, 20 nt, Artificial Sequence
  Synthetic
cuguuugccuuguaggucua

SEQ ID NO: 241713 - RNA, 21 nt, Artificial Sequence
  Synthetic
acuguuugccuuguaggucua

SEQ ID NO: 241714 - RNA, 22 nt, Artificial Sequence
  Synthetic
uacuguuugccuuguaggucua

SEQ ID NO: 241715 - RNA, 23 nt, Artificial Sequence
  Synthetic
uuacuguuugccuuguaggucua

SEQ ID NO: 241716 - RNA, 24 nt, Artificial Sequence
  Synthetic
auuacuguuugccuuguaggucua

SEQ ID NO: 241717 - RNA, 18 nt, Artificial Sequence
  Synthetic
aucccagugugcggucua

SEQ ID NO: 241718 - RNA, 19 nt, Artificial Sequence
  Synthetic
caucccagugugcggucua

SEQ ID NO: 241719 - RNA, 20 nt, Artificial Sequence
  Synthetic
gcaucccagugugcggucua

SEQ ID NO: 241720 - RNA, 21 nt, Artificial Sequence
  Synthetic
agcaucccagugugcggucua

SEQ ID NO: 241721 - RNA, 22 nt, Artificial Sequence
  Synthetic
aagcaucccagugugcggucua

SEQ ID NO: 241722 - RNA, 23 nt, Artificial Sequence
  Synthetic
gaagcaucccagugugcggucua

SEQ ID NO: 241723 - RNA, 24 nt, Artificial Sequence
  Synthetic
agaagcaucccagugugcggucua

SEQ ID NO: 241724 - RNA, 18 nt, Artificial Sequence
  Synthetic
ccaacugccacuggucua

SEQ ID NO: 241725 - RNA, 19 nt, Artificial Sequence
  Synthetic
gccaacugccacuggucua

SEQ ID NO: 241726 - RNA, 20 nt, Artificial Sequence
  Synthetic
agccaacugccacuggucua

SEQ ID NO: 241727 - RNA, 21 nt, Artificial Sequence
  Synthetic
aagccaacugccacuggucua

SEQ ID NO: 241728 - RNA, 22 nt, Artificial Sequence
  Synthetic
caagccaacugccacuggucua

SEQ ID NO: 241729 - RNA, 23 nt, Artificial Sequence
  Synthetic
ucaagccaacugccacuggucua

SEQ ID NO: 241730 - RNA, 24 nt, Artificial Sequence
  Synthetic
aucaagccaacugccacuggucua

SEQ ID NO: 241731 - RNA, 18 nt, Artificial Sequence
  Synthetic
uugaaaaucacuggucua

SEQ ID NO: 241732 - RNA, 19 nt, Artificial Sequence
  Synthetic
guugaaaaucacuggucua

SEQ ID NO: 241733 - RNA, 20 nt, Artificial Sequence
  Synthetic
aguugaaaaucacuggucua

SEQ ID NO: 241734 - RNA, 21 nt, Artificial Sequence
  Synthetic
uaguugaaaaucacuggucua

SEQ ID NO: 241735 - RNA, 22 nt, Artificial Sequence
  Synthetic
cuaguugaaaaucacuggucua

SEQ ID NO: 241736 - RNA, 23 nt, Artificial Sequence
  Synthetic
ccuaguugaaaaucacuggucua

SEQ ID NO: 241737 - RNA, 24 nt, Artificial Sequence
  Synthetic
cccuaguugaaaaucacuggucua

SEQ ID NO: 241738 - RNA, 18 nt, Artificial Sequence
  Synthetic
aauauaccagaaugucua

SEQ ID NO: 241739 - RNA, 19 nt, Artificial Sequence
  Synthetic
gaauauaccagaaugucua

SEQ ID NO: 241740 - RNA, 20 nt, Artificial Sequence
  Synthetic
agaauauaccagaaugucua

SEQ ID NO: 241741 - RNA, 21 nt, Artificial Sequence
  Synthetic
gagaauauaccagaaugucua

SEQ ID NO: 241742 - RNA, 22 nt, Artificial Sequence
  Synthetic
ggagaauauaccagaaugucua

SEQ ID NO: 241743 - RNA, 23 nt, Artificial Sequence
  Synthetic
gggagaauauaccagaaugucua

SEQ ID NO: 241744 - RNA, 24 nt, Artificial Sequence
  Synthetic
ugggagaauauaccagaaugucua

SEQ ID NO: 241745 - RNA, 18 nt, Artificial Sequence
  Synthetic
uucauucuagaaugucua

SEQ ID NO: 241746 - RNA, 19 nt, Artificial Sequence
  Synthetic
uuucauucuagaaugucua

SEQ ID NO: 241747 - RNA, 20 nt, Artificial Sequence
  Synthetic
uuuucauucuagaaugucua

SEQ ID NO: 241748 - RNA, 21 nt, Artificial Sequence
  Synthetic
auuuucauucuagaaugucua

SEQ ID NO: 241749 - RNA, 22 nt, Artificial Sequence
  Synthetic
uauuuucauucuagaaugucua

SEQ ID NO: 241750 - RNA, 23 nt, Artificial Sequence
  Synthetic
auauuuucauucuagaaugucua

SEQ ID NO: 241751 - RNA, 24 nt, Artificial Sequence
  Synthetic
aauauuuucauucuagaaugucua

SEQ ID NO: 241752 - RNA, 18 nt, Artificial Sequence
  Synthetic
ugcuuccucuuaugucua

SEQ ID NO: 241753 - RNA, 19 nt, Artificial Sequence
  Synthetic
gugcuuccucuuaugucua

SEQ ID NO: 241754 - RNA, 20 nt, Artificial Sequence
  Synthetic
ugugcuuccucuuaugucua

SEQ ID NO: 241755 - RNA, 21 nt, Artificial Sequence
  Synthetic
augugcuuccucuuaugucua

SEQ ID NO: 241756 - RNA, 22 nt, Artificial Sequence
  Synthetic
uaugugcuuccucuuaugucua

SEQ ID NO: 241757 - RNA, 23 nt, Artificial Sequence
  Synthetic
auaugugcuuccucuuaugucua

SEQ ID NO: 241758 - RNA, 24 nt, Artificial Sequence
  Synthetic
gauaugugcuuccucuuaugucua

SEQ ID NO: 241759 - RNA, 18 nt, Artificial Sequence
  Synthetic
guguugacugacugucua

SEQ ID NO: 241760 - RNA, 19 nt, Artificial Sequence
  Synthetic
uguguugacugacugucua

SEQ ID NO: 241761 - RNA, 20 nt, Artificial Sequence
  Synthetic
uuguguugacugacugucua

SEQ ID NO: 241762 - RNA, 21 nt, Artificial Sequence
  Synthetic
uuuguguugacugacugucua

SEQ ID NO: 241763 - RNA, 22 nt, Artificial Sequence
  Synthetic
guuuguguugacugacugucua

SEQ ID NO: 241764 - RNA, 23 nt, Artificial Sequence
  Synthetic
aguuuguguugacugacugucua

SEQ ID NO: 241765 - RNA, 24 nt, Artificial Sequence
  Synthetic
gaguuuguguugacugacugucua

SEQ ID NO: 241766 - RNA, 18 nt, Artificial Sequence
  Synthetic
aauaacugacggugucua

SEQ ID NO: 241767 - RNA, 19 nt, Artificial Sequence
  Synthetic
uaauaacugacggugucua

SEQ ID NO: 241768 - RNA, 20 nt, Artificial Sequence
  Synthetic
guaauaacugacggugucua

SEQ ID NO: 241769 - RNA, 21 nt, Artificial Sequence
  Synthetic
aguaauaacugacggugucua

SEQ ID NO: 241770 - RNA, 22 nt, Artificial Sequence
  Synthetic
aaguaauaacugacggugucua

SEQ ID NO: 241771 - RNA, 23 nt, Artificial Sequence
  Synthetic
aaaguaauaacugacggugucua

SEQ ID NO: 241772 - RNA, 24 nt, Artificial Sequence
  Synthetic
aaaaguaauaacugacggugucua

SEQ ID NO: 241773 - RNA, 18 nt, Artificial Sequence
  Synthetic
uugaaauaucugugucua

SEQ ID NO: 241774 - RNA, 19 nt, Artificial Sequence
  Synthetic
guugaaauaucugugucua

SEQ ID NO: 241775 - RNA, 20 nt, Artificial Sequence
  Synthetic
aguugaaauaucugugucua

SEQ ID NO: 241776 - RNA, 21 nt, Artificial Sequence
  Synthetic
caguugaaauaucugugucua

SEQ ID NO: 241777 - RNA, 22 nt, Artificial Sequence
  Synthetic
acaguugaaauaucugugucua

SEQ ID NO: 241778 - RNA, 23 nt, Artificial Sequence
  Synthetic
cacaguugaaauaucugugucua

SEQ ID NO: 241779 - RNA, 24 nt, Artificial Sequence
  Synthetic
ucacaguugaaauaucugugucua

SEQ ID NO: 241780 - RNA, 18 nt, Artificial Sequence
  Synthetic
ugcuuucuucugugucua

SEQ ID NO: 241781 - RNA, 19 nt, Artificial Sequence
  Synthetic
gugcuuucuucugugucua

SEQ ID NO: 241782 - RNA, 20 nt, Artificial Sequence
  Synthetic
ugugcuuucuucugugucua

SEQ ID NO: 241783 - RNA, 21 nt, Artificial Sequence
  Synthetic
uugugcuuucuucugugucua

SEQ ID NO: 241784 - RNA, 22 nt, Artificial Sequence
  Synthetic
uuugugcuuucuucugugucua

SEQ ID NO: 241785 - RNA, 23 nt, Artificial Sequence
  Synthetic
uuuugugcuuucuucugugucua

SEQ ID NO: 241786 - RNA, 24 nt, Artificial Sequence
  Synthetic
auuuugugcuuucuucugugucua

SEQ ID NO: 241787 - RNA, 18 nt, Artificial Sequence
  Synthetic
aaugaguagacuugucua

SEQ ID NO: 241788 - RNA, 19 nt, Artificial Sequence
  Synthetic
aaaugaguagacuugucua

SEQ ID NO: 241789 - RNA, 20 nt, Artificial Sequence
  Synthetic
gaaaugaguagacuugucua

SEQ ID NO: 241790 - RNA, 21 nt, Artificial Sequence
  Synthetic
agaaaugaguagacuugucua

SEQ ID NO: 241791 - RNA, 22 nt, Artificial Sequence
  Synthetic
gagaaaugaguagacuugucua

SEQ ID NO: 241792 - RNA, 23 nt, Artificial Sequence
  Synthetic
agagaaaugaguagacuugucua

SEQ ID NO: 241793 - RNA, 24 nt, Artificial Sequence
  Synthetic
aagagaaaugaguagacuugucua

SEQ ID NO: 241794 - RNA, 18 nt, Artificial Sequence
  Synthetic
uccguuuuaaaaauucua

SEQ ID NO: 241795 - RNA, 19 nt, Artificial Sequence
  Synthetic
guccguuuuaaaaauucua

SEQ ID NO: 241796 - RNA, 20 nt, Artificial Sequence
  Synthetic
aguccguuuuaaaaauucua

SEQ ID NO: 241797 - RNA, 21 nt, Artificial Sequence
  Synthetic
aaguccguuuuaaaaauucua

SEQ ID NO: 241798 - RNA, 22 nt, Artificial Sequence
  Synthetic
uaaguccguuuuaaaaauucua

SEQ ID NO: 241799 - RNA, 23 nt, Artificial Sequence
  Synthetic
guaaguccguuuuaaaaauucua

SEQ ID NO: 241800 - RNA, 24 nt, Artificial Sequence
  Synthetic
gguaaguccguuuuaaaaauucua

SEQ ID NO: 241801 - RNA, 18 nt, Artificial Sequence
  Synthetic
aauuuccaaauaauucua

SEQ ID NO: 241802 - RNA, 19 nt, Artificial Sequence
  Synthetic
aaauuuccaaauaauucua

SEQ ID NO: 241803 - RNA, 20 nt, Artificial Sequence
  Synthetic
aaaauuuccaaauaauucua

SEQ ID NO: 241804 - RNA, 21 nt, Artificial Sequence
  Synthetic
gaaaauuuccaaauaauucua

SEQ ID NO: 241805 - RNA, 22 nt, Artificial Sequence
  Synthetic
agaaaauuuccaaauaauucua

SEQ ID NO: 241806 - RNA, 23 nt, Artificial Sequence
  Synthetic
cagaaaauuuccaaauaauucua

SEQ ID NO: 241807 - RNA, 24 nt, Artificial Sequence
  Synthetic
acagaaaauuuccaaauaauucua

SEQ ID NO: 241808 - RNA, 18 nt, Artificial Sequence
  Synthetic
uaaggaucccuaauucua

SEQ ID NO: 241809 - RNA, 19 nt, Artificial Sequence
  Synthetic
uuaaggaucccuaauucua

SEQ ID NO: 241810 - RNA, 20 nt, Artificial Sequence
  Synthetic
uuuaaggaucccuaauucua

SEQ ID NO: 241811 - RNA, 21 nt, Artificial Sequence
  Synthetic
auuuaaggaucccuaauucua

SEQ ID NO: 241812 - RNA, 22 nt, Artificial Sequence
  Synthetic
aauuuaaggaucccuaauucua

SEQ ID NO: 241813 - RNA, 23 nt, Artificial Sequence
  Synthetic
caauuuaaggaucccuaauucua

SEQ ID NO: 241814 - RNA, 24 nt, Artificial Sequence
  Synthetic
gcaauuuaaggaucccuaauucua

SEQ ID NO: 241815 - RNA, 18 nt, Artificial Sequence
  Synthetic
cauccaguuuuaauucua

SEQ ID NO: 241816 - RNA, 19 nt, Artificial Sequence
  Synthetic
ucauccaguuuuaauucua

SEQ ID NO: 241817 - RNA, 20 nt, Artificial Sequence
  Synthetic
aucauccaguuuuaauucua

SEQ ID NO: 241818 - RNA, 21 nt, Artificial Sequence
  Synthetic
uaucauccaguuuuaauucua

SEQ ID NO: 241819 - RNA, 22 nt, Artificial Sequence
  Synthetic
uuaucauccaguuuuaauucua

SEQ ID NO: 241820 - RNA, 23 nt, Artificial Sequence
  Synthetic
uuuaucauccaguuuuaauucua

SEQ ID NO: 241821 - RNA, 24 nt, Artificial Sequence
  Synthetic
uuuuaucauccaguuuuaauucua

SEQ ID NO: 241822 - RNA, 18 nt, Artificial Sequence
  Synthetic
acuuccauugacauucua

SEQ ID NO: 241823 - RNA, 19 nt, Artificial Sequence
  Synthetic
uacuuccauugacauucua

SEQ ID NO: 241824 - RNA, 20 nt, Artificial Sequence
  Synthetic
guacuuccauugacauucua

SEQ ID NO: 241825 - RNA, 21 nt, Artificial Sequence
  Synthetic
uguacuuccauugacauucua

SEQ ID NO: 241826 - RNA, 22 nt, Artificial Sequence
  Synthetic
uuguacuuccauugacauucua

SEQ ID NO: 241827 - RNA, 23 nt, Artificial Sequence
  Synthetic
auuguacuuccauugacauucua

SEQ ID NO: 241828 - RNA, 24 nt, Artificial Sequence
  Synthetic
aauuguacuuccauugacauucua

SEQ ID NO: 241829 - RNA, 18 nt, Artificial Sequence
  Synthetic
uaaaccauauucauucua

SEQ ID NO: 241830 - RNA, 19 nt, Artificial Sequence
  Synthetic
uuaaaccauauucauucua

SEQ ID NO: 241831 - RNA, 20 nt, Artificial Sequence
  Synthetic
guuaaaccauauucauucua

SEQ ID NO: 241832 - RNA, 21 nt, Artificial Sequence
  Synthetic
aguuaaaccauauucauucua

SEQ ID NO: 241833 - RNA, 22 nt, Artificial Sequence
  Synthetic
aaguuaaaccauauucauucua

SEQ ID NO: 241834 - RNA, 23 nt, Artificial Sequence
  Synthetic
caaguuaaaccauauucauucua

SEQ ID NO: 241835 - RNA, 24 nt, Artificial Sequence
  Synthetic
ucaaguuaaaccauauucauucua

SEQ ID NO: 241836 - RNA, 18 nt, Artificial Sequence
  Synthetic
uaaaaugaggagauucua

SEQ ID NO: 241837 - RNA, 19 nt, Artificial Sequence
  Synthetic
auaaaaugaggagauucua

SEQ ID NO: 241838 - RNA, 20 nt, Artificial Sequence
  Synthetic
cauaaaaugaggagauucua

SEQ ID NO: 241839 - RNA, 21 nt, Artificial Sequence
  Synthetic
gcauaaaaugaggagauucua

SEQ ID NO: 241840 - RNA, 22 nt, Artificial Sequence
  Synthetic
ugcauaaaaugaggagauucua

SEQ ID NO: 241841 - RNA, 23 nt, Artificial Sequence
  Synthetic
augcauaaaaugaggagauucua

SEQ ID NO: 241842 - RNA, 24 nt, Artificial Sequence
  Synthetic
aaugcauaaaaugaggagauucua

SEQ ID NO: 241843 - RNA, 18 nt, Artificial Sequence
  Synthetic
gcuggcugcaugauucua

SEQ ID NO: 241844 - RNA, 19 nt, Artificial Sequence
  Synthetic
agcuggcugcaugauucua

SEQ ID NO: 241845 - RNA, 20 nt, Artificial Sequence
  Synthetic
cagcuggcugcaugauucua

SEQ ID NO: 241846 - RNA, 21 nt, Artificial Sequence
  Synthetic
ucagcuggcugcaugauucua

SEQ ID NO: 241847 - RNA, 22 nt, Artificial Sequence
  Synthetic
uucagcuggcugcaugauucua

SEQ ID NO: 241848 - RNA, 23 nt, Artificial Sequence
  Synthetic
guucagcuggcugcaugauucua

SEQ ID NO: 241849 - RNA, 24 nt, Artificial Sequence
  Synthetic
aguucagcuggcugcaugauucua

SEQ ID NO: 241850 - RNA, 18 nt, Artificial Sequence
  Synthetic
aaguuugagaauauucua

SEQ ID NO: 241851 - RNA, 19 nt, Artificial Sequence
  Synthetic
gaaguuugagaauauucua

SEQ ID NO: 241852 - RNA, 20 nt, Artificial Sequence
  Synthetic
ggaaguuugagaauauucua

SEQ ID NO: 241853 - RNA, 21 nt, Artificial Sequence
  Synthetic
aggaaguuugagaauauucua

SEQ ID NO: 241854 - RNA, 22 nt, Artificial Sequence
  Synthetic
aaggaaguuugagaauauucua

SEQ ID NO: 241855 - RNA, 23 nt, Artificial Sequence
  Synthetic
aaaggaaguuugagaauauucua

SEQ ID NO: 241856 - RNA, 24 nt, Artificial Sequence
  Synthetic
aaaaggaaguuugagaauauucua

SEQ ID NO: 241857 - RNA, 18 nt, Artificial Sequence
  Synthetic
guuuaacgucauauucua

SEQ ID NO: 241858 - RNA, 19 nt, Artificial Sequence
  Synthetic
aguuuaacgucauauucua

SEQ ID NO: 241859 - RNA, 20 nt, Artificial Sequence
  Synthetic
uaguuuaacgucauauucua

SEQ ID NO: 241860 - RNA, 21 nt, Artificial Sequence
  Synthetic
auaguuuaacgucauauucua

SEQ ID NO: 241861 - RNA, 22 nt, Artificial Sequence
  Synthetic
uauaguuuaacgucauauucua

SEQ ID NO: 241862 - RNA, 23 nt, Artificial Sequence
  Synthetic
uuauaguuuaacgucauauucua

SEQ ID NO: 241863 - RNA, 24 nt, Artificial Sequence
  Synthetic
cuuauaguuuaacgucauauucua

SEQ ID NO: 241864 - RNA, 18 nt, Artificial Sequence
  Synthetic
ugucaaaauuuuauucua

SEQ ID NO: 241865 - RNA, 19 nt, Artificial Sequence
  Synthetic
uugucaaaauuuuauucua

SEQ ID NO: 241866 - RNA, 20 nt, Artificial Sequence
  Synthetic
auugucaaaauuuuauucua

SEQ ID NO: 241867 - RNA, 21 nt, Artificial Sequence
  Synthetic
uauugucaaaauuuuauucua

SEQ ID NO: 241868 - RNA, 22 nt, Artificial Sequence
  Synthetic
auauugucaaaauuuuauucua

SEQ ID NO: 241869 - RNA, 23 nt, Artificial Sequence
  Synthetic
uauauugucaaaauuuuauucua

SEQ ID NO: 241870 - RNA, 24 nt, Artificial Sequence
  Synthetic
uuauauugucaaaauuuuauucua

SEQ ID NO: 241871 - RNA, 18 nt, Artificial Sequence
  Synthetic
uauuuuaaccaacuucua

SEQ ID NO: 241872 - RNA, 19 nt, Artificial Sequence
  Synthetic
uuauuuuaaccaacuucua

SEQ ID NO: 241873 - RNA, 20 nt, Artificial Sequence
  Synthetic
auuauuuuaaccaacuucua

SEQ ID NO: 241874 - RNA, 21 nt, Artificial Sequence
  Synthetic
uauuauuuuaaccaacuucua

SEQ ID NO: 241875 - RNA, 22 nt, Artificial Sequence
  Synthetic
uuauuauuuuaaccaacuucua

SEQ ID NO: 241876 - RNA, 23 nt, Artificial Sequence
  Synthetic
uuuauuauuuuaaccaacuucua

SEQ ID NO: 241877 - RNA, 24 nt, Artificial Sequence
  Synthetic
uuuuauuauuuuaaccaacuucua

SEQ ID NO: 241878 - RNA, 18 nt, Artificial Sequence
  Synthetic
acaaaucaguaacuucua

SEQ ID NO: 241879 - RNA, 19 nt, Artificial Sequence
  Synthetic
cacaaaucaguaacuucua

SEQ ID NO: 241880 - RNA, 20 nt, Artificial Sequence
  Synthetic
gcacaaaucaguaacuucua

SEQ ID NO: 241881 - RNA, 21 nt, Artificial Sequence
  Synthetic
ugcacaaaucaguaacuucua

SEQ ID NO: 241882 - RNA, 22 nt, Artificial Sequence
  Synthetic
cugcacaaaucaguaacuucua

SEQ ID NO: 241883 - RNA, 23 nt, Artificial Sequence
  Synthetic
ucugcacaaaucaguaacuucua

SEQ ID NO: 241884 - RNA, 24 nt, Artificial Sequence
  Synthetic
uucugcacaaaucaguaacuucua

SEQ ID NO: 241885 - RNA, 18 nt, Artificial Sequence
  Synthetic
cuagcucgacuacuucua

SEQ ID NO: 241886 - RNA, 19 nt, Artificial Sequence
  Synthetic
acuagcucgacuacuucua

SEQ ID NO: 241887 - RNA, 20 nt, Artificial Sequence
  Synthetic
gacuagcucgacuacuucua

SEQ ID NO: 241888 - RNA, 21 nt, Artificial Sequence
  Synthetic
agacuagcucgacuacuucua

SEQ ID NO: 241889 - RNA, 22 nt, Artificial Sequence
  Synthetic
uagacuagcucgacuacuucua

SEQ ID NO: 241890 - RNA, 23 nt, Artificial Sequence
  Synthetic
uuagacuagcucgacuacuucua

SEQ ID NO: 241891 - RNA, 24 nt, Artificial Sequence
  Synthetic
uuuagacuagcucgacuacuucua

SEQ ID NO: 241892 - RNA, 18 nt, Artificial Sequence
  Synthetic
agacgaaacagccuucua

SEQ ID NO: 241893 - RNA, 19 nt, Artificial Sequence
  Synthetic
uagacgaaacagccuucua

SEQ ID NO: 241894 - RNA, 20 nt, Artificial Sequence
  Synthetic
auagacgaaacagccuucua

SEQ ID NO: 241895 - RNA, 21 nt, Artificial Sequence
  Synthetic
uauagacgaaacagccuucua

SEQ ID NO: 241896 - RNA, 22 nt, Artificial Sequence
  Synthetic
auauagacgaaacagccuucua

SEQ ID NO: 241897 - RNA, 23 nt, Artificial Sequence
  Synthetic
aauauagacgaaacagccuucua

SEQ ID NO: 241898 - RNA, 24 nt, Artificial Sequence
  Synthetic
caauauagacgaaacagccuucua

SEQ ID NO: 241899 - RNA, 18 nt, Artificial Sequence
  Synthetic
gccuuacaagagcuucua

SEQ ID NO: 241900 - RNA, 19 nt, Artificial Sequence
  Synthetic
ugccuuacaagagcuucua

SEQ ID NO: 241901 - RNA, 20 nt, Artificial Sequence
  Synthetic
cugccuuacaagagcuucua

SEQ ID NO: 241902 - RNA, 21 nt, Artificial Sequence
  Synthetic
ccugccuuacaagagcuucua

SEQ ID NO: 241903 - RNA, 22 nt, Artificial Sequence
  Synthetic
gccugccuuacaagagcuucua

SEQ ID NO: 241904 - RNA, 23 nt, Artificial Sequence
  Synthetic
ggccugccuuacaagagcuucua

SEQ ID NO: 241905 - RNA, 24 nt, Artificial Sequence
  Synthetic
aggccugccuuacaagagcuucua

SEQ ID NO: 241906 - RNA, 18 nt, Artificial Sequence
  Synthetic
augggagcggggcuucua

SEQ ID NO: 241907 - RNA, 19 nt, Artificial Sequence
  Synthetic
caugggagcggggcuucua

SEQ ID NO: 241908 - RNA, 20 nt, Artificial Sequence
  Synthetic
ucaugggagcggggcuucua

SEQ ID NO: 241909 - RNA, 21 nt, Artificial Sequence
  Synthetic
aucaugggagcggggcuucua

SEQ ID NO: 241910 - RNA, 22 nt, Artificial Sequence
  Synthetic
gaucaugggagcggggcuucua

SEQ ID NO: 241911 - RNA, 23 nt, Artificial Sequence
  Synthetic
agaucaugggagcggggcuucua

SEQ ID NO: 241912 - RNA, 24 nt, Artificial Sequence
  Synthetic
cagaucaugggagcggggcuucua

SEQ ID NO: 241913 - RNA, 18 nt, Artificial Sequence
  Synthetic
caauaauucaaucuucua

SEQ ID NO: 241914 - RNA, 19 nt, Artificial Sequence
  Synthetic
ccaauaauucaaucuucua

SEQ ID NO: 241915 - RNA, 20 nt, Artificial Sequence
  Synthetic
gccaauaauucaaucuucua

SEQ ID NO: 241916 - RNA, 21 nt, Artificial Sequence
  Synthetic
ggccaauaauucaaucuucua

SEQ ID NO: 241917 - RNA, 22 nt, Artificial Sequence
  Synthetic
aggccaauaauucaaucuucua

SEQ ID NO: 241918 - RNA, 23 nt, Artificial Sequence
  Synthetic
gaggccaauaauucaaucuucua

SEQ ID NO: 241919 - RNA, 24 nt, Artificial Sequence
  Synthetic
ugaggccaauaauucaaucuucua

SEQ ID NO: 241920 - RNA, 18 nt, Artificial Sequence
  Synthetic
aagaagugggaucuucua

SEQ ID NO: 241921 - RNA, 19 nt, Artificial Sequence
  Synthetic
uaagaagugggaucuucua

SEQ ID NO: 241922 - RNA, 20 nt, Artificial Sequence
  Synthetic
uuaagaagugggaucuucua

SEQ ID NO: 241923 - RNA, 21 nt, Artificial Sequence
  Synthetic
auuaagaagugggaucuucua

SEQ ID NO: 241924 - RNA, 22 nt, Artificial Sequence
  Synthetic
uauuaagaagugggaucuucua

SEQ ID NO: 241925 - RNA, 23 nt, Artificial Sequence
  Synthetic
cuauuaagaagugggaucuucua

SEQ ID NO: 241926 - RNA, 24 nt, Artificial Sequence
  Synthetic
gcuauuaagaagugggaucuucua

SEQ ID NO: 241927 - RNA, 18 nt, Artificial Sequence
  Synthetic
uccaaguuuacucuucua

SEQ ID NO: 241928 - RNA, 19 nt, Artificial Sequence
  Synthetic
uuccaaguuuacucuucua

SEQ ID NO: 241929 - RNA, 20 nt, Artificial Sequence
  Synthetic
uuuccaaguuuacucuucua

SEQ ID NO: 241930 - RNA, 21 nt, Artificial Sequence
  Synthetic
cuuuccaaguuuacucuucua

SEQ ID NO: 241931 - RNA, 22 nt, Artificial Sequence
  Synthetic
ccuuuccaaguuuacucuucua

SEQ ID NO: 241932 - RNA, 23 nt, Artificial Sequence
  Synthetic
gccuuuccaaguuuacucuucua

SEQ ID NO: 241933 - RNA, 24 nt, Artificial Sequence
  Synthetic
agccuuuccaaguuuacucuucua

SEQ ID NO: 241934 - RNA, 18 nt, Artificial Sequence
  Synthetic
uugcuuuaaugucuucua

SEQ ID NO: 241935 - RNA, 19 nt, Artificial Sequence
  Synthetic
uuugcuuuaaugucuucua

SEQ ID NO: 241936 - RNA, 20 nt, Artificial Sequence
  Synthetic
uuuugcuuuaaugucuucua

SEQ ID NO: 241937 - RNA, 21 nt, Artificial Sequence
  Synthetic
uuuuugcuuuaaugucuucua

SEQ ID NO: 241938 - RNA, 22 nt, Artificial Sequence
  Synthetic
auuuuugcuuuaaugucuucua

SEQ ID NO: 241939 - RNA, 23 nt, Artificial Sequence
  Synthetic
cauuuuugcuuuaaugucuucua

SEQ ID NO: 241940 - RNA, 24 nt, Artificial Sequence
  Synthetic
gcauuuuugcuuuaaugucuucua

SEQ ID NO: 241941 - RNA, 18 nt, Artificial Sequence
  Synthetic
uguaagcaaacaguucua

SEQ ID NO: 241942 - RNA, 19 nt, Artificial Sequence
  Synthetic
guguaagcaaacaguucua

SEQ ID NO: 241943 - RNA, 20 nt, Artificial Sequence
  Synthetic
aguguaagcaaacaguucua

SEQ ID NO: 241944 - RNA, 21 nt, Artificial Sequence
  Synthetic
gaguguaagcaaacaguucua

SEQ ID NO: 241945 - RNA, 22 nt, Artificial Sequence
  Synthetic
ugaguguaagcaaacaguucua

SEQ ID NO: 241946 - RNA, 23 nt, Artificial Sequence
  Synthetic
cugaguguaagcaaacaguucua

SEQ ID NO: 241947 - RNA, 24 nt, Artificial Sequence
  Synthetic
acugaguguaagcaaacaguucua

SEQ ID NO: 241948 - RNA, 18 nt, Artificial Sequence
  Synthetic
gauacuuugggaguucua

SEQ ID NO: 241949 - RNA, 19 nt, Artificial Sequence
  Synthetic
ugauacuuugggaguucua

SEQ ID NO: 241950 - RNA, 20 nt, Artificial Sequence
  Synthetic
augauacuuugggaguucua

SEQ ID NO: 241951 - RNA, 21 nt, Artificial Sequence
  Synthetic
gaugauacuuugggaguucua

SEQ ID NO: 241952 - RNA, 22 nt, Artificial Sequence
  Synthetic
agaugauacuuugggaguucua

SEQ ID NO: 241953 - RNA, 23 nt, Artificial Sequence
  Synthetic
aagaugauacuuugggaguucua

SEQ ID NO: 241954 - RNA, 24 nt, Artificial Sequence
  Synthetic
aaagaugauacuuugggaguucua

SEQ ID NO: 241955 - RNA, 18 nt, Artificial Sequence
  Synthetic
uugacuaaaauaguucua

SEQ ID NO: 241956 - RNA, 19 nt, Artificial Sequence
  Synthetic
cuugacuaaaauaguucua

SEQ ID NO: 241957 - RNA, 20 nt, Artificial Sequence
  Synthetic
ucuugacuaaaauaguucua

SEQ ID NO: 241958 - RNA, 21 nt, Artificial Sequence
  Synthetic
gucuugacuaaaauaguucua

SEQ ID NO: 241959 - RNA, 22 nt, Artificial Sequence
  Synthetic
ggucuugacuaaaauaguucua

SEQ ID NO: 241960 - RNA, 23 nt, Artificial Sequence
  Synthetic
uggucuugacuaaaauaguucua

SEQ ID NO: 241961 - RNA, 24 nt, Artificial Sequence
  Synthetic
guggucuugacuaaaauaguucua

SEQ ID NO: 241962 - RNA, 18 nt, Artificial Sequence
  Synthetic
ucaacuuggcuaguucua

SEQ ID NO: 241963 - RNA, 19 nt, Artificial Sequence
  Synthetic
uucaacuuggcuaguucua

SEQ ID NO: 241964 - RNA, 20 nt, Artificial Sequence
  Synthetic
uuucaacuuggcuaguucua

SEQ ID NO: 241965 - RNA, 21 nt, Artificial Sequence
  Synthetic
uuuucaacuuggcuaguucua

SEQ ID NO: 241966 - RNA, 22 nt, Artificial Sequence
  Synthetic
uuuuucaacuuggcuaguucua

SEQ ID NO: 241967 - RNA, 23 nt, Artificial Sequence
  Synthetic
uuuuuucaacuuggcuaguucua

SEQ ID NO: 241968 - RNA, 24 nt, Artificial Sequence
  Synthetic
auuuuuucaacuuggcuaguucua

SEQ ID NO: 241969 - RNA, 18 nt, Artificial Sequence
  Synthetic
cauaguggggaauuucua

SEQ ID NO: 241970 - RNA, 19 nt, Artificial Sequence
  Synthetic
ucauaguggggaauuucua

SEQ ID NO: 241971 - RNA, 20 nt, Artificial Sequence
  Synthetic
aucauaguggggaauuucua

SEQ ID NO: 241972 - RNA, 21 nt, Artificial Sequence
  Synthetic
aaucauaguggggaauuucua

SEQ ID NO: 241973 - RNA, 22 nt, Artificial Sequence
  Synthetic
aaaucauaguggggaauuucua

SEQ ID NO: 241974 - RNA, 23 nt, Artificial Sequence
  Synthetic
caaaucauaguggggaauuucua

SEQ ID NO: 241975 - RNA, 24 nt, Artificial Sequence
  Synthetic
gcaaaucauaguggggaauuucua

SEQ ID NO: 241976 - RNA, 18 nt, Artificial Sequence
  Synthetic
gagacuggguaauuucua

SEQ ID NO: 241977 - RNA, 19 nt, Artificial Sequence
  Synthetic
cgagacuggguaauuucua

SEQ ID NO: 241978 - RNA, 20 nt, Artificial Sequence
  Synthetic
ccgagacuggguaauuucua

SEQ ID NO: 241979 - RNA, 21 nt, Artificial Sequence
  Synthetic
cccgagacuggguaauuucua

SEQ ID NO: 241980 - RNA, 22 nt, Artificial Sequence
  Synthetic
gcccgagacuggguaauuucua

SEQ ID NO: 241981 - RNA, 23 nt, Artificial Sequence
  Synthetic
ugcccgagacuggguaauuucua

SEQ ID NO: 241982 - RNA, 24 nt, Artificial Sequence
  Synthetic
cugcccgagacuggguaauuucua

SEQ ID NO: 241983 - RNA, 18 nt, Artificial Sequence
  Synthetic
uauaaggcuacauuucua

SEQ ID NO: 241984 - RNA, 19 nt, Artificial Sequence
  Synthetic
auauaaggcuacauuucua

SEQ ID NO: 241985 - RNA, 20 nt, Artificial Sequence
  Synthetic
uauauaaggcuacauuucua

SEQ ID NO: 241986 - RNA, 21 nt, Artificial Sequence
  Synthetic
uuauauaaggcuacauuucua

SEQ ID NO: 241987 - RNA, 22 nt, Artificial Sequence
  Synthetic
uuuauauaaggcuacauuucua

SEQ ID NO: 241988 - RNA, 23 nt, Artificial Sequence
  Synthetic
uuuuauauaaggcuacauuucua

SEQ ID NO: 241989 - RNA, 24 nt, Artificial Sequence
  Synthetic
auuuuauauaaggcuacauuucua

SEQ ID NO: 241990 - RNA, 18 nt, Artificial Sequence
  Synthetic
uggauccuaccauuucua

SEQ ID NO: 241991 - RNA, 19 nt, Artificial Sequence
  Synthetic
guggauccuaccauuucua

SEQ ID NO: 241992 - RNA, 20 nt, Artificial Sequence
  Synthetic
aguggauccuaccauuucua

SEQ ID NO: 241993 - RNA, 21 nt, Artificial Sequence
  Synthetic
aaguggauccuaccauuucua

SEQ ID NO: 241994 - RNA, 22 nt, Artificial Sequence
  Synthetic
caaguggauccuaccauuucua

SEQ ID NO: 241995 - RNA, 23 nt, Artificial Sequence
  Synthetic
acaaguggauccuaccauuucua

SEQ ID NO: 241996 - RNA, 24 nt, Artificial Sequence
  Synthetic
gacaaguggauccuaccauuucua

SEQ ID NO: 241997 - RNA, 18 nt, Artificial Sequence
  Synthetic
guuuaggaagcauuucua

SEQ ID NO: 241998 - RNA, 19 nt, Artificial Sequence
  Synthetic
cguuuaggaagcauuucua

SEQ ID NO: 241999 - RNA, 20 nt, Artificial Sequence
  Synthetic
acguuuaggaagcauuucua

SEQ ID NO: 242000 - RNA, 21 nt, Artificial Sequence
  Synthetic
cacguuuaggaagcauuucua

SEQ ID NO: 242001 - RNA, 22 nt, Artificial Sequence
  Synthetic
acacguuuaggaagcauuucua

SEQ ID NO: 242002 - RNA, 23 nt, Artificial Sequence
  Synthetic
uacacguuuaggaagcauuucua

SEQ ID NO: 242003 - RNA, 24 nt, Artificial Sequence
  Synthetic
auacacguuuaggaagcauuucua

SEQ ID NO: 242004 - RNA, 18 nt, Artificial Sequence
  Synthetic
cuaucacucgcauuucua

SEQ ID NO: 242005 - RNA, 19 nt, Artificial Sequence
  Synthetic
acuaucacucgcauuucua

SEQ ID NO: 242006 - RNA, 20 nt, Artificial Sequence
  Synthetic
uacuaucacucgcauuucua

SEQ ID NO: 242007 - RNA, 21 nt, Artificial Sequence
  Synthetic
uuacuaucacucgcauuucua

SEQ ID NO: 242008 - RNA, 22 nt, Artificial Sequence
  Synthetic
uuuacuaucacucgcauuucua

SEQ ID NO: 242009 - RNA, 23 nt, Artificial Sequence
  Synthetic
cuuuacuaucacucgcauuucua

SEQ ID NO: 242010 - RNA, 24 nt, Artificial Sequence
  Synthetic
ucuuuacuaucacucgcauuucua

SEQ ID NO: 242011 - RNA, 18 nt, Artificial Sequence
  Synthetic
gccauuucugcauuucua

SEQ ID NO: 242012 - RNA, 19 nt, Artificial Sequence
  Synthetic
agccauuucugcauuucua

SEQ ID NO: 242013 - RNA, 20 nt, Artificial Sequence
  Synthetic
uagccauuucugcauuucua

SEQ ID NO: 242014 - RNA, 21 nt, Artificial Sequence
  Synthetic
uuagccauuucugcauuucua

SEQ ID NO: 242015 - RNA, 22 nt, Artificial Sequence
  Synthetic
uuuagccauuucugcauuucua

SEQ ID NO: 242016 - RNA, 23 nt, Artificial Sequence
  Synthetic
cuuuagccauuucugcauuucua

SEQ ID NO: 242017 - RNA, 24 nt, Artificial Sequence
  Synthetic
acuuuagccauuucugcauuucua

SEQ ID NO: 242018 - RNA, 18 nt, Artificial Sequence
  Synthetic
accuuuuacagauuucua

SEQ ID NO: 242019 - RNA, 19 nt, Artificial Sequence
  Synthetic
uaccuuuuacagauuucua

SEQ ID NO: 242020 - RNA, 20 nt, Artificial Sequence
  Synthetic
uuaccuuuuacagauuucua

SEQ ID NO: 242021 - RNA, 21 nt, Artificial Sequence
  Synthetic
guuaccuuuuacagauuucua

SEQ ID NO: 242022 - RNA, 22 nt, Artificial Sequence
  Synthetic
uguuaccuuuuacagauuucua

SEQ ID NO: 242023 - RNA, 23 nt, Artificial Sequence
  Synthetic
uuguuaccuuuuacagauuucua

SEQ ID NO: 242024 - RNA, 24 nt, Artificial Sequence
  Synthetic
auuguuaccuuuuacagauuucua

SEQ ID NO: 242025 - RNA, 18 nt, Artificial Sequence
  Synthetic
agcuuucaagccuuucua

SEQ ID NO: 242026 - RNA, 19 nt, Artificial Sequence
  Synthetic
cagcuuucaagccuuucua

SEQ ID NO: 242027 - RNA, 20 nt, Artificial Sequence
  Synthetic
acagcuuucaagccuuucua

SEQ ID NO: 242028 - RNA, 21 nt, Artificial Sequence
  Synthetic
aacagcuuucaagccuuucua

SEQ ID NO: 242029 - RNA, 22 nt, Artificial Sequence
  Synthetic
uaacagcuuucaagccuuucua

SEQ ID NO: 242030 - RNA, 23 nt, Artificial Sequence
  Synthetic
guaacagcuuucaagccuuucua

SEQ ID NO: 242031 - RNA, 24 nt, Artificial Sequence
  Synthetic
uguaacagcuuucaagccuuucua

SEQ ID NO: 242032 - RNA, 18 nt, Artificial Sequence
  Synthetic
ucaguuguaaucuuucua

SEQ ID NO: 242033 - RNA, 19 nt, Artificial Sequence
  Synthetic
cucaguuguaaucuuucua

SEQ ID NO: 242034 - RNA, 20 nt, Artificial Sequence
  Synthetic
ucucaguuguaaucuuucua

SEQ ID NO: 242035 - RNA, 21 nt, Artificial Sequence
  Synthetic
aucucaguuguaaucuuucua

SEQ ID NO: 242036 - RNA, 22 nt, Artificial Sequence
  Synthetic
uaucucaguuguaaucuuucua

SEQ ID NO: 242037 - RNA, 23 nt, Artificial Sequence
  Synthetic
cuaucucaguuguaaucuuucua

SEQ ID NO: 242038 - RNA, 24 nt, Artificial Sequence
  Synthetic
gcuaucucaguuguaaucuuucua

SEQ ID NO: 242039 - RNA, 18 nt, Artificial Sequence
  Synthetic
uacauaaaccucuuucua

SEQ ID NO: 242040 - RNA, 19 nt, Artificial Sequence
  Synthetic
auacauaaaccucuuucua

SEQ ID NO: 242041 - RNA, 20 nt, Artificial Sequence
  Synthetic
cauacauaaaccucuuucua

SEQ ID NO: 242042 - RNA, 21 nt, Artificial Sequence
  Synthetic
acauacauaaaccucuuucua

SEQ ID NO: 242043 - RNA, 22 nt, Artificial Sequence
  Synthetic
uacauacauaaaccucuuucua

SEQ ID NO: 242044 - RNA, 23 nt, Artificial Sequence
  Synthetic
cuacauacauaaaccucuuucua

SEQ ID NO: 242045 - RNA, 24 nt, Artificial Sequence
  Synthetic
acuacauacauaaaccucuuucua

SEQ ID NO: 242046 - RNA, 18 nt, Artificial Sequence
  Synthetic
gagaaucugggguuucua

SEQ ID NO: 242047 - RNA, 19 nt, Artificial Sequence
  Synthetic
agagaaucugggguuucua

SEQ ID NO: 242048 - RNA, 20 nt, Artificial Sequence
  Synthetic
gagagaaucugggguuucua

SEQ ID NO: 242049 - RNA, 21 nt, Artificial Sequence
  Synthetic
agagagaaucugggguuucua

SEQ ID NO: 242050 - RNA, 22 nt, Artificial Sequence
  Synthetic
gagagagaaucugggguuucua

SEQ ID NO: 242051 - RNA, 23 nt, Artificial Sequence
  Synthetic
agagagagaaucugggguuucua

SEQ ID NO: 242052 - RNA, 24 nt, Artificial Sequence
  Synthetic
gagagagagaaucugggguuucua

SEQ ID NO: 242053 - RNA, 18 nt, Artificial Sequence
  Synthetic
cccauugcucuguuucua

SEQ ID NO: 242054 - RNA, 19 nt, Artificial Sequence
  Synthetic
acccauugcucuguuucua

SEQ ID NO: 242055 - RNA, 20 nt, Artificial Sequence
  Synthetic
cacccauugcucuguuucua

SEQ ID NO: 242056 - RNA, 21 nt, Artificial Sequence
  Synthetic
ucacccauugcucuguuucua

SEQ ID NO: 242057 - RNA, 22 nt, Artificial Sequence
  Synthetic
uucacccauugcucuguuucua

SEQ ID NO: 242058 - RNA, 23 nt, Artificial Sequence
  Synthetic
uuucacccauugcucuguuucua

SEQ ID NO: 242059 - RNA, 24 nt, Artificial Sequence
  Synthetic
cuuucacccauugcucuguuucua

SEQ ID NO: 242060 - RNA, 18 nt, Artificial Sequence
  Synthetic
aauguuaaucauuuucua

SEQ ID NO: 242061 - RNA, 19 nt, Artificial Sequence
  Synthetic
aaauguuaaucauuuucua

SEQ ID NO: 242062 - RNA, 20 nt, Artificial Sequence
  Synthetic
aaaauguuaaucauuuucua

SEQ ID NO: 242063 - RNA, 21 nt, Artificial Sequence
  Synthetic
uaaaauguuaaucauuuucua

SEQ ID NO: 242064 - RNA, 22 nt, Artificial Sequence
  Synthetic
guaaaauguuaaucauuuucua

SEQ ID NO: 242065 - RNA, 23 nt, Artificial Sequence
  Synthetic
aguaaaauguuaaucauuuucua

SEQ ID NO: 242066 - RNA, 24 nt, Artificial Sequence
  Synthetic
gaguaaaauguuaaucauuuucua

SEQ ID NO: 242067 - RNA, 18 nt, Artificial Sequence
  Synthetic
auaaucguuuauuuucua

SEQ ID NO: 242068 - RNA, 19 nt, Artificial Sequence
  Synthetic
uauaaucguuuauuuucua

SEQ ID NO: 242069 - RNA, 20 nt, Artificial Sequence
  Synthetic
auauaaucguuuauuuucua

SEQ ID NO: 242070 - RNA, 21 nt, Artificial Sequence
  Synthetic
aauauaaucguuuauuuucua

SEQ ID NO: 242071 - RNA, 22 nt, Artificial Sequence
  Synthetic
uaauauaaucguuuauuuucua

SEQ ID NO: 242072 - RNA, 23 nt, Artificial Sequence
  Synthetic
auaauauaaucguuuauuuucua

SEQ ID NO: 242073 - RNA, 24 nt, Artificial Sequence
  Synthetic
gauaauauaaucguuuauuuucua

SEQ ID NO: 242074 - RNA, 18 nt, Artificial Sequence
  Synthetic
aacuuuaucaguuuucua

SEQ ID NO: 242075 - RNA, 19 nt, Artificial Sequence
  Synthetic
caacuuuaucaguuuucua

SEQ ID NO: 242076 - RNA, 20 nt, Artificial Sequence
  Synthetic
ccaacuuuaucaguuuucua

SEQ ID NO: 242077 - RNA, 21 nt, Artificial Sequence
  Synthetic
uccaacuuuaucaguuuucua

SEQ ID NO: 242078 - RNA, 22 nt, Artificial Sequence
  Synthetic
uuccaacuuuaucaguuuucua

SEQ ID NO: 242079 - RNA, 23 nt, Artificial Sequence
  Synthetic
auuccaacuuuaucaguuuucua

SEQ ID NO: 242080 - RNA, 24 nt, Artificial Sequence
  Synthetic
cauuccaacuuuaucaguuuucua

SEQ ID NO: 242081 - RNA, 18 nt, Artificial Sequence
  Synthetic
cagcauauacguuuucua

SEQ ID NO: 242082 - RNA, 19 nt, Artificial Sequence
  Synthetic
ucagcauauacguuuucua

SEQ ID NO: 242083 - RNA, 20 nt, Artificial Sequence
  Synthetic
uucagcauauacguuuucua

SEQ ID NO: 242084 - RNA, 21 nt, Artificial Sequence
  Synthetic
uuucagcauauacguuuucua

SEQ ID NO: 242085 - RNA, 22 nt, Artificial Sequence
  Synthetic
cuuucagcauauacguuuucua

SEQ ID NO: 242086 - RNA, 23 nt, Artificial Sequence
  Synthetic
acuuucagcauauacguuuucua

SEQ ID NO: 242087 - RNA, 24 nt, Artificial Sequence
  Synthetic
cacuuucagcauauacguuuucua

SEQ ID NO: 242088 - RNA, 18 nt, Artificial Sequence
  Synthetic
cgugaauuuuguuuucua

SEQ ID NO: 242089 - RNA, 19 nt, Artificial Sequence
  Synthetic
acgugaauuuuguuuucua

SEQ ID NO: 242090 - RNA, 20 nt, Artificial Sequence
  Synthetic
gacgugaauuuuguuuucua

SEQ ID NO: 242091 - RNA, 21 nt, Artificial Sequence
  Synthetic
agacgugaauuuuguuuucua

SEQ ID NO: 242092 - RNA, 22 nt, Artificial Sequence
  Synthetic
aagacgugaauuuuguuuucua

SEQ ID NO: 242093 - RNA, 23 nt, Artificial Sequence
  Synthetic
gaagacgugaauuuuguuuucua

SEQ ID NO: 242094 - RNA, 24 nt, Artificial Sequence
  Synthetic
agaagacgugaauuuuguuuucua

SEQ ID NO: 242095 - RNA, 18 nt, Artificial Sequence
  Synthetic
gagcaggagauuuuucua

SEQ ID NO: 242096 - RNA, 19 nt, Artificial Sequence
  Synthetic
ugagcaggagauuuuucua

SEQ ID NO: 242097 - RNA, 20 nt, Artificial Sequence
  Synthetic
augagcaggagauuuuucua

SEQ ID NO: 242098 - RNA, 21 nt, Artificial Sequence
  Synthetic
gaugagcaggagauuuuucua

SEQ ID NO: 242099 - RNA, 22 nt, Artificial Sequence
  Synthetic
ugaugagcaggagauuuuucua

SEQ ID NO: 242100 - RNA, 23 nt, Artificial Sequence
  Synthetic
augaugagcaggagauuuuucua

SEQ ID NO: 242101 - RNA, 24 nt, Artificial Sequence
  Synthetic
caugaugagcaggagauuuuucua

SEQ ID NO: 242102 - RNA, 18 nt, Artificial Sequence
  Synthetic
uuugaacauauuuuucua

SEQ ID NO: 242103 - RNA, 19 nt, Artificial Sequence
  Synthetic
cuuugaacauauuuuucua

SEQ ID NO: 242104 - RNA, 20 nt, Artificial Sequence
  Synthetic
ucuuugaacauauuuuucua

SEQ ID NO: 242105 - RNA, 21 nt, Artificial Sequence
  Synthetic
aucuuugaacauauuuuucua

SEQ ID NO: 242106 - RNA, 22 nt, Artificial Sequence
  Synthetic
uaucuuugaacauauuuuucua

SEQ ID NO: 242107 - RNA, 23 nt, Artificial Sequence
  Synthetic
guaucuuugaacauauuuuucua

SEQ ID NO: 242108 - RNA, 24 nt, Artificial Sequence
  Synthetic
aguaucuuugaacauauuuuucua

SEQ ID NO: 242109 - RNA, 18 nt, Artificial Sequence
  Synthetic
agauuuauacuuuuucua

SEQ ID NO: 242110 - RNA, 19 nt, Artificial Sequence
  Synthetic
gagauuuauacuuuuucua

SEQ ID NO: 242111 - RNA, 20 nt, Artificial Sequence
  Synthetic
agagauuuauacuuuuucua

SEQ ID NO: 242112 - RNA, 21 nt, Artificial Sequence
  Synthetic
uagagauuuauacuuuuucua

SEQ ID NO: 242113 - RNA, 22 nt, Artificial Sequence
  Synthetic
auagagauuuauacuuuuucua

SEQ ID NO: 242114 - RNA, 23 nt, Artificial Sequence
  Synthetic
uauagagauuuauacuuuuucua

SEQ ID NO: 242115 - RNA, 24 nt, Artificial Sequence
  Synthetic
auauagagauuuauacuuuuucua

SEQ ID NO: 242116 - RNA, 18 nt, Artificial Sequence
  Synthetic
auuuauuuauuuuuucua

SEQ ID NO: 242117 - RNA, 19 nt, Artificial Sequence
  Synthetic
uauuuauuuauuuuuucua

SEQ ID NO: 242118 - RNA, 20 nt, Artificial Sequence
  Synthetic
uuauuuauuuauuuuuucua

SEQ ID NO: 242119 - RNA, 21 nt, Artificial Sequence
  Synthetic
uuuauuuauuuauuuuuucua

SEQ ID NO: 242120 - RNA, 22 nt, Artificial Sequence
  Synthetic
uuuuauuuauuuauuuuuucua

SEQ ID NO: 242121 - RNA, 23 nt, Artificial Sequence
  Synthetic
cuuuuauuuauuuauuuuuucua

SEQ ID NO: 242122 - RNA, 24 nt, Artificial Sequence
  Synthetic
ucuuuuauuuauuuauuuuuucua

SEQ ID NO: 242123 - RNA, 18 nt, Artificial Sequence
  Synthetic
cauucuuccuuuuuucua

SEQ ID NO: 242124 - RNA, 19 nt, Artificial Sequence
  Synthetic
acauucuuccuuuuuucua

SEQ ID NO: 242125 - RNA, 20 nt, Artificial Sequence
  Synthetic
gacauucuuccuuuuuucua

SEQ ID NO: 242126 - RNA, 21 nt, Artificial Sequence
  Synthetic
ugacauucuuccuuuuuucua

SEQ ID NO: 242127 - RNA, 22 nt, Artificial Sequence
  Synthetic
cugacauucuuccuuuuuucua

SEQ ID NO: 242128 - RNA, 23 nt, Artificial Sequence
  Synthetic
ucugacauucuuccuuuuuucua

SEQ ID NO: 242129 - RNA, 24 nt, Artificial Sequence
  Synthetic
aucugacauucuuccuuuuuucua

SEQ ID NO: 242130 - RNA, 18 nt, Artificial Sequence
  Synthetic
uuuugucucaaaaaagua

SEQ ID NO: 242131 - RNA, 19 nt, Artificial Sequence
  Synthetic
uuuuugucucaaaaaagua

SEQ ID NO: 242132 - RNA, 20 nt, Artificial Sequence
  Synthetic
auuuuugucucaaaaaagua

SEQ ID NO: 242133 - RNA, 21 nt, Artificial Sequence
  Synthetic
uauuuuugucucaaaaaagua

SEQ ID NO: 242134 - RNA, 22 nt, Artificial Sequence
  Synthetic
auauuuuugucucaaaaaagua

SEQ ID NO: 242135 - RNA, 23 nt, Artificial Sequence
  Synthetic
aauauuuuugucucaaaaaagua

SEQ ID NO: 242136 - RNA, 24 nt, Artificial Sequence
  Synthetic
gaauauuuuugucucaaaaaagua

SEQ ID NO: 242137 - RNA, 18 nt, Artificial Sequence
  Synthetic
uuuugcaguaaaaaagua

SEQ ID NO: 242138 - RNA, 19 nt, Artificial Sequence
  Synthetic
auuuugcaguaaaaaagua

SEQ ID NO: 242139 - RNA, 20 nt, Artificial Sequence
  Synthetic
uauuuugcaguaaaaaagua

SEQ ID NO: 242140 - RNA, 21 nt, Artificial Sequence
  Synthetic
auauuuugcaguaaaaaagua

SEQ ID NO: 242141 - RNA, 22 nt, Artificial Sequence
  Synthetic
aauauuuugcaguaaaaaagua

SEQ ID NO: 242142 - RNA, 23 nt, Artificial Sequence
  Synthetic
gaauauuuugcaguaaaaaagua

SEQ ID NO: 242143 - RNA, 24 nt, Artificial Sequence
  Synthetic
cgaauauuuugcaguaaaaaagua

SEQ ID NO: 242144 - RNA, 18 nt, Artificial Sequence
  Synthetic
ccuuuacuagaaaaagua

SEQ ID NO: 242145 - RNA, 19 nt, Artificial Sequence
  Synthetic
uccuuuacuagaaaaagua

SEQ ID NO: 242146 - RNA, 20 nt, Artificial Sequence
  Synthetic
guccuuuacuagaaaaagua

SEQ ID NO: 242147 - RNA, 21 nt, Artificial Sequence
  Synthetic
uguccuuuacuagaaaaagua

SEQ ID NO: 242148 - RNA, 22 nt, Artificial Sequence
  Synthetic
auguccuuuacuagaaaaagua

SEQ ID NO: 242149 - RNA, 23 nt, Artificial Sequence
  Synthetic
aauguccuuuacuagaaaaagua

SEQ ID NO: 242150 - RNA, 24 nt, Artificial Sequence
  Synthetic
caauguccuuuacuagaaaaagua

SEQ ID NO: 242151 - RNA, 18 nt, Artificial Sequence
  Synthetic
aaaaaauaauaaaaagua

SEQ ID NO: 242152 - RNA, 19 nt, Artificial Sequence
  Synthetic
caaaaaauaauaaaaagua

SEQ ID NO: 242153 - RNA, 20 nt, Artificial Sequence
  Synthetic
acaaaaaauaauaaaaagua

SEQ ID NO: 242154 - RNA, 21 nt, Artificial Sequence
  Synthetic
uacaaaaaauaauaaaaagua

SEQ ID NO: 242155 - RNA, 22 nt, Artificial Sequence
  Synthetic
cuacaaaaaauaauaaaaagua

SEQ ID NO: 242156 - RNA, 23 nt, Artificial Sequence
  Synthetic
ccuacaaaaaauaauaaaaagua

SEQ ID NO: 242157 - RNA, 24 nt, Artificial Sequence
  Synthetic
accuacaaaaaauaauaaaaagua

SEQ ID NO: 242158 - RNA, 18 nt, Artificial Sequence
  Synthetic
uauauaagauaaaaagua

SEQ ID NO: 242159 - RNA, 19 nt, Artificial Sequence
  Synthetic
guauauaagauaaaaagua

SEQ ID NO: 242160 - RNA, 20 nt, Artificial Sequence
  Synthetic
uguauauaagauaaaaagua

SEQ ID NO: 242161 - RNA, 21 nt, Artificial Sequence
  Synthetic
cuguauauaagauaaaaagua

SEQ ID NO: 242162 - RNA, 22 nt, Artificial Sequence
  Synthetic
acuguauauaagauaaaaagua

SEQ ID NO: 242163 - RNA, 23 nt, Artificial Sequence
  Synthetic
gacuguauauaagauaaaaagua

SEQ ID NO: 242164 - RNA, 24 nt, Artificial Sequence
  Synthetic
agacuguauauaagauaaaaagua

SEQ ID NO: 242165 - RNA, 18 nt, Artificial Sequence
  Synthetic
gacuauuuuucaaaagua

SEQ ID NO: 242166 - RNA, 19 nt, Artificial Sequence
  Synthetic
ugacuauuuuucaaaagua

SEQ ID NO: 242167 - RNA, 20 nt, Artificial Sequence
  Synthetic
augacuauuuuucaaaagua

SEQ ID NO: 242168 - RNA, 21 nt, Artificial Sequence
  Synthetic
aaugacuauuuuucaaaagua

SEQ ID NO: 242169 - RNA, 22 nt, Artificial Sequence
  Synthetic
uaaugacuauuuuucaaaagua

SEQ ID NO: 242170 - RNA, 23 nt, Artificial Sequence
  Synthetic
guaaugacuauuuuucaaaagua

SEQ ID NO: 242171 - RNA, 24 nt, Artificial Sequence
  Synthetic
uguaaugacuauuuuucaaaagua

SEQ ID NO: 242172 - RNA, 18 nt, Artificial Sequence
  Synthetic
auuuuaauuagaaaagua

SEQ ID NO: 242173 - RNA, 19 nt, Artificial Sequence
  Synthetic
uauuuuaauuagaaaagua

SEQ ID NO: 242174 - RNA, 20 nt, Artificial Sequence
  Synthetic
cuauuuuaauuagaaaagua

SEQ ID NO: 242175 - RNA, 21 nt, Artificial Sequence
  Synthetic
acuauuuuaauuagaaaagua

SEQ ID NO: 242176 - RNA, 22 nt, Artificial Sequence
  Synthetic
uacuauuuuaauuagaaaagua

SEQ ID NO: 242177 - RNA, 23 nt, Artificial Sequence
  Synthetic
auacuauuuuaauuagaaaagua

SEQ ID NO: 242178 - RNA, 24 nt, Artificial Sequence
  Synthetic
gauacuauuuuaauuagaaaagua

SEQ ID NO: 242179 - RNA, 18 nt, Artificial Sequence
  Synthetic
uaucugugaggaaaagua

SEQ ID NO: 242180 - RNA, 19 nt, Artificial Sequence
  Synthetic
uuaucugugaggaaaagua

SEQ ID NO: 242181 - RNA, 20 nt, Artificial Sequence
  Synthetic
auuaucugugaggaaaagua

SEQ ID NO: 242182 - RNA, 21 nt, Artificial Sequence
  Synthetic
aauuaucugugaggaaaagua

SEQ ID NO: 242183 - RNA, 22 nt, Artificial Sequence
  Synthetic
uaauuaucugugaggaaaagua

SEQ ID NO: 242184 - RNA, 23 nt, Artificial Sequence
  Synthetic
guaauuaucugugaggaaaagua

SEQ ID NO: 242185 - RNA, 24 nt, Artificial Sequence
  Synthetic
aguaauuaucugugaggaaaagua

SEQ ID NO: 242186 - RNA, 18 nt, Artificial Sequence
  Synthetic
accagguaaauaaaagua

SEQ ID NO: 242187 - RNA, 19 nt, Artificial Sequence
  Synthetic
uaccagguaaauaaaagua

SEQ ID NO: 242188 - RNA, 20 nt, Artificial Sequence
  Synthetic
cuaccagguaaauaaaagua

SEQ ID NO: 242189 - RNA, 21 nt, Artificial Sequence
  Synthetic
ucuaccagguaaauaaaagua

SEQ ID NO: 242190 - RNA, 22 nt, Artificial Sequence
  Synthetic
uucuaccagguaaauaaaagua

SEQ ID NO: 242191 - RNA, 23 nt, Artificial Sequence
  Synthetic
auucuaccagguaaauaaaagua

SEQ ID NO: 242192 - RNA, 24 nt, Artificial Sequence
  Synthetic
aauucuaccagguaaauaaaagua

SEQ ID NO: 242193 - RNA, 18 nt, Artificial Sequence
  Synthetic
ccagcugugcuaaaagua

SEQ ID NO: 242194 - RNA, 19 nt, Artificial Sequence
  Synthetic
gccagcugugcuaaaagua

SEQ ID NO: 242195 - RNA, 20 nt, Artificial Sequence
  Synthetic
ugccagcugugcuaaaagua

SEQ ID NO: 242196 - RNA, 21 nt, Artificial Sequence
  Synthetic
uugccagcugugcuaaaagua

SEQ ID NO: 242197 - RNA, 22 nt, Artificial Sequence
  Synthetic
uuugccagcugugcuaaaagua

SEQ ID NO: 242198 - RNA, 23 nt, Artificial Sequence
  Synthetic
cuuugccagcugugcuaaaagua

SEQ ID NO: 242199 - RNA, 24 nt, Artificial Sequence
  Synthetic
gcuuugccagcugugcuaaaagua

SEQ ID NO: 242200 - RNA, 18 nt, Artificial Sequence
  Synthetic
aguagguauuuaaaagua

SEQ ID NO: 242201 - RNA, 19 nt, Artificial Sequence
  Synthetic
uaguagguauuuaaaagua

SEQ ID NO: 242202 - RNA, 20 nt, Artificial Sequence
  Synthetic
cuaguagguauuuaaaagua

SEQ ID NO: 242203 - RNA, 21 nt, Artificial Sequence
  Synthetic
ccuaguagguauuuaaaagua

SEQ ID NO: 242204 - RNA, 22 nt, Artificial Sequence
  Synthetic
cccuaguagguauuuaaaagua

SEQ ID NO: 242205 - RNA, 23 nt, Artificial Sequence
  Synthetic
ccccuaguagguauuuaaaagua

SEQ ID NO: 242206 - RNA, 24 nt, Artificial Sequence
  Synthetic
accccuaguagguauuuaaaagua

SEQ ID NO: 242207 - RNA, 18 nt, Artificial Sequence
  Synthetic
uuuagugaaaccaaagua

SEQ ID NO: 242208 - RNA, 19 nt, Artificial Sequence
  Synthetic
guuuagugaaaccaaagua

SEQ ID NO: 242209 - RNA, 20 nt, Artificial Sequence
  Synthetic
uguuuagugaaaccaaagua

SEQ ID NO: 242210 - RNA, 21 nt, Artificial Sequence
  Synthetic
auguuuagugaaaccaaagua

SEQ ID NO: 242211 - RNA, 22 nt, Artificial Sequence
  Synthetic
cauguuuagugaaaccaaagua

SEQ ID NO: 242212 - RNA, 23 nt, Artificial Sequence
  Synthetic
ucauguuuagugaaaccaaagua

SEQ ID NO: 242213 - RNA, 24 nt, Artificial Sequence
  Synthetic
uucauguuuagugaaaccaaagua

SEQ ID NO: 242214 - RNA, 18 nt, Artificial Sequence
  Synthetic
acguuguuugccaaagua

SEQ ID NO: 242215 - RNA, 19 nt, Artificial Sequence
  Synthetic
gacguuguuugccaaagua

SEQ ID NO: 242216 - RNA, 20 nt, Artificial Sequence
  Synthetic
agacguuguuugccaaagua

SEQ ID NO: 242217 - RNA, 21 nt, Artificial Sequence
  Synthetic
aagacguuguuugccaaagua

SEQ ID NO: 242218 - RNA, 22 nt, Artificial Sequence
  Synthetic
aaagacguuguuugccaaagua

SEQ ID NO: 242219 - RNA, 23 nt, Artificial Sequence
  Synthetic
aaaagacguuguuugccaaagua

SEQ ID NO: 242220 - RNA, 24 nt, Artificial Sequence
  Synthetic
caaaagacguuguuugccaaagua

SEQ ID NO: 242221 - RNA, 18 nt, Artificial Sequence
  Synthetic
augcacaauagcaaagua

SEQ ID NO: 242222 - RNA, 19 nt, Artificial Sequence
  Synthetic
uaugcacaauagcaaagua

SEQ ID NO: 242223 - RNA, 20 nt, Artificial Sequence
  Synthetic
cuaugcacaauagcaaagua

SEQ ID NO: 242224 - RNA, 21 nt, Artificial Sequence
  Synthetic
acuaugcacaauagcaaagua

SEQ ID NO: 242225 - RNA, 22 nt, Artificial Sequence
  Synthetic
cacuaugcacaauagcaaagua

SEQ ID NO: 242226 - RNA, 23 nt, Artificial Sequence
  Synthetic
gcacuaugcacaauagcaaagua

SEQ ID NO: 242227 - RNA, 24 nt, Artificial Sequence
  Synthetic
agcacuaugcacaauagcaaagua

SEQ ID NO: 242228 - RNA, 18 nt, Artificial Sequence
  Synthetic
ccucauuuuggcaaagua

SEQ ID NO: 242229 - RNA, 19 nt, Artificial Sequence
  Synthetic
cccucauuuuggcaaagua

SEQ ID NO: 242230 - RNA, 20 nt, Artificial Sequence
  Synthetic
ucccucauuuuggcaaagua

SEQ ID NO: 242231 - RNA, 21 nt, Artificial Sequence
  Synthetic
uucccucauuuuggcaaagua

SEQ ID NO: 242232 - RNA, 22 nt, Artificial Sequence
  Synthetic
uuucccucauuuuggcaaagua

SEQ ID NO: 242233 - RNA, 23 nt, Artificial Sequence
  Synthetic
guuucccucauuuuggcaaagua

SEQ ID NO: 242234 - RNA, 24 nt, Artificial Sequence
  Synthetic
aguuucccucauuuuggcaaagua

SEQ ID NO: 242235 - RNA, 18 nt, Artificial Sequence
  Synthetic
uguuaagaucucaaagua

SEQ ID NO: 242236 - RNA, 19 nt, Artificial Sequence
  Synthetic
uuguuaagaucucaaagua

SEQ ID NO: 242237 - RNA, 20 nt, Artificial Sequence
  Synthetic
cuuguuaagaucucaaagua

SEQ ID NO: 242238 - RNA, 21 nt, Artificial Sequence
  Synthetic
ucuuguuaagaucucaaagua

SEQ ID NO: 242239 - RNA, 22 nt, Artificial Sequence
  Synthetic
aucuuguuaagaucucaaagua

SEQ ID NO: 242240 - RNA, 23 nt, Artificial Sequence
  Synthetic
gaucuuguuaagaucucaaagua

SEQ ID NO: 242241 - RNA, 24 nt, Artificial Sequence
  Synthetic
ugaucuuguuaagaucucaaagua

SEQ ID NO: 242242 - RNA, 18 nt, Artificial Sequence
  Synthetic
aaguuuauuaagaaagua

SEQ ID NO: 242243 - RNA, 19 nt, Artificial Sequence
  Synthetic
caaguuuauuaagaaagua

SEQ ID NO: 242244 - RNA, 20 nt, Artificial Sequence
  Synthetic
gcaaguuuauuaagaaagua

SEQ ID NO: 242245 - RNA, 21 nt, Artificial Sequence
  Synthetic
agcaaguuuauuaagaaagua

SEQ ID NO: 242246 - RNA, 22 nt, Artificial Sequence
  Synthetic
aagcaaguuuauuaagaaagua

SEQ ID NO: 242247 - RNA, 23 nt, Artificial Sequence
  Synthetic
aaagcaaguuuauuaagaaagua

SEQ ID NO: 242248 - RNA, 24 nt, Artificial Sequence
  Synthetic
aaaagcaaguuuauuaagaaagua

SEQ ID NO: 242249 - RNA, 18 nt, Artificial Sequence
  Synthetic
uaauacaccuagaaagua

SEQ ID NO: 242250 - RNA, 19 nt, Artificial Sequence
  Synthetic
uuaauacaccuagaaagua

SEQ ID NO: 242251 - RNA, 20 nt, Artificial Sequence
  Synthetic
uuuaauacaccuagaaagua

SEQ ID NO: 242252 - RNA, 21 nt, Artificial Sequence
  Synthetic
cuuuaauacaccuagaaagua

SEQ ID NO: 242253 - RNA, 22 nt, Artificial Sequence
  Synthetic
ucuuuaauacaccuagaaagua

SEQ ID NO: 242254 - RNA, 23 nt, Artificial Sequence
  Synthetic
uucuuuaauacaccuagaaagua

SEQ ID NO: 242255 - RNA, 24 nt, Artificial Sequence
  Synthetic
uuucuuuaauacaccuagaaagua

SEQ ID NO: 242256 - RNA, 18 nt, Artificial Sequence
  Synthetic
uuauauuauacgaaagua

SEQ ID NO: 242257 - RNA, 19 nt, Artificial Sequence
  Synthetic
guuauauuauacgaaagua

SEQ ID NO: 242258 - RNA, 20 nt, Artificial Sequence
  Synthetic
uguuauauuauacgaaagua

SEQ ID NO: 242259 - RNA, 21 nt, Artificial Sequence
  Synthetic
auguuauauuauacgaaagua

SEQ ID NO: 242260 - RNA, 22 nt, Artificial Sequence
  Synthetic
cauguuauauuauacgaaagua

SEQ ID NO: 242261 - RNA, 23 nt, Artificial Sequence
  Synthetic
ucauguuauauuauacgaaagua

SEQ ID NO: 242262 - RNA, 24 nt, Artificial Sequence
  Synthetic
gucauguuauauuauacgaaagua

SEQ ID NO: 242263 - RNA, 18 nt, Artificial Sequence
  Synthetic
gaacuaguuacgaaagua

SEQ ID NO: 242264 - RNA, 19 nt, Artificial Sequence
  Synthetic
ggaacuaguuacgaaagua

SEQ ID NO: 242265 - RNA, 20 nt, Artificial Sequence
  Synthetic
aggaacuaguuacgaaagua

SEQ ID NO: 242266 - RNA, 21 nt, Artificial Sequence
  Synthetic
gaggaacuaguuacgaaagua

SEQ ID NO: 242267 - RNA, 22 nt, Artificial Sequence
  Synthetic
ugaggaacuaguuacgaaagua

SEQ ID NO: 242268 - RNA, 23 nt, Artificial Sequence
  Synthetic
augaggaacuaguuacgaaagua

SEQ ID NO: 242269 - RNA, 24 nt, Artificial Sequence
  Synthetic
uaugaggaacuaguuacgaaagua

SEQ ID NO: 242270 - RNA, 18 nt, Artificial Sequence
  Synthetic
gcaucucaaaugaaagua

SEQ ID NO: 242271 - RNA, 19 nt, Artificial Sequence
  Synthetic
agcaucucaaaugaaagua

SEQ ID NO: 242272 - RNA, 20 nt, Artificial Sequence
  Synthetic
gagcaucucaaaugaaagua

SEQ ID NO: 242273 - RNA, 21 nt, Artificial Sequence
  Synthetic
agagcaucucaaaugaaagua

SEQ ID NO: 242274 - RNA, 22 nt, Artificial Sequence
  Synthetic
gagagcaucucaaaugaaagua

SEQ ID NO: 242275 - RNA, 23 nt, Artificial Sequence
  Synthetic
ugagagcaucucaaaugaaagua

SEQ ID NO: 242276 - RNA, 24 nt, Artificial Sequence
  Synthetic
cugagagcaucucaaaugaaagua

SEQ ID NO: 242277 - RNA, 18 nt, Artificial Sequence
  Synthetic
uguguauuuaugaaagua

SEQ ID NO: 242278 - RNA, 19 nt, Artificial Sequence
  Synthetic
auguguauuuaugaaagua

SEQ ID NO: 242279 - RNA, 20 nt, Artificial Sequence
  Synthetic
uauguguauuuaugaaagua

SEQ ID NO: 242280 - RNA, 21 nt, Artificial Sequence
  Synthetic
guauguguauuuaugaaagua

SEQ ID NO: 242281 - RNA, 22 nt, Artificial Sequence
  Synthetic
aguauguguauuuaugaaagua

SEQ ID NO: 242282 - RNA, 23 nt, Artificial Sequence
  Synthetic
aaguauguguauuuaugaaagua

SEQ ID NO: 242283 - RNA, 24 nt, Artificial Sequence
  Synthetic
aaaguauguguauuuaugaaagua

SEQ ID NO: 242284 - RNA, 18 nt, Artificial Sequence
  Synthetic
aaauggggccugaaagua

SEQ ID NO: 242285 - RNA, 19 nt, Artificial Sequence
  Synthetic
gaaauggggccugaaagua

SEQ ID NO: 242286 - RNA, 20 nt, Artificial Sequence
  Synthetic
agaaauggggccugaaagua

SEQ ID NO: 242287 - RNA, 21 nt, Artificial Sequence
  Synthetic
gagaaauggggccugaaagua

SEQ ID NO: 242288 - RNA, 22 nt, Artificial Sequence
  Synthetic
agagaaauggggccugaaagua

SEQ ID NO: 242289 - RNA, 23 nt, Artificial Sequence
  Synthetic
aagagaaauggggccugaaagua

SEQ ID NO: 242290 - RNA, 24 nt, Artificial Sequence
  Synthetic
gaagagaaauggggccugaaagua

SEQ ID NO: 242291 - RNA, 18 nt, Artificial Sequence
  Synthetic
gauaccaugaauaaagua

SEQ ID NO: 242292 - RNA, 19 nt, Artificial Sequence
  Synthetic
ugauaccaugaauaaagua

SEQ ID NO: 242293 - RNA, 20 nt, Artificial Sequence
  Synthetic
augauaccaugaauaaagua

SEQ ID NO: 242294 - RNA, 21 nt, Artificial Sequence
  Synthetic
aaugauaccaugaauaaagua

SEQ ID NO: 242295 - RNA, 22 nt, Artificial Sequence
  Synthetic
uaaugauaccaugaauaaagua

SEQ ID NO: 242296 - RNA, 23 nt, Artificial Sequence
  Synthetic
uuaaugauaccaugaauaaagua

SEQ ID NO: 242297 - RNA, 24 nt, Artificial Sequence
  Synthetic
cuuaaugauaccaugaauaaagua

SEQ ID NO: 242298 - RNA, 18 nt, Artificial Sequence
  Synthetic
cuggguguuuauaaagua

SEQ ID NO: 242299 - RNA, 19 nt, Artificial Sequence
  Synthetic
acuggguguuuauaaagua

SEQ ID NO: 242300 - RNA, 20 nt, Artificial Sequence
  Synthetic
gacuggguguuuauaaagua

SEQ ID NO: 242301 - RNA, 21 nt, Artificial Sequence
  Synthetic
agacuggguguuuauaaagua

SEQ ID NO: 242302 - RNA, 22 nt, Artificial Sequence
  Synthetic
gagacuggguguuuauaaagua

SEQ ID NO: 242303 - RNA, 23 nt, Artificial Sequence
  Synthetic
ugagacuggguguuuauaaagua

SEQ ID NO: 242304 - RNA, 24 nt, Artificial Sequence
  Synthetic
cugagacuggguguuuauaaagua

SEQ ID NO: 242305 - RNA, 18 nt, Artificial Sequence
  Synthetic
uaccuaggcaaacaagua

SEQ ID NO: 242306 - RNA, 19 nt, Artificial Sequence
  Synthetic
guaccuaggcaaacaagua

SEQ ID NO: 242307 - RNA, 20 nt, Artificial Sequence
  Synthetic
uguaccuaggcaaacaagua

SEQ ID NO: 242308 - RNA, 21 nt, Artificial Sequence
  Synthetic
guguaccuaggcaaacaagua

SEQ ID NO: 242309 - RNA, 22 nt, Artificial Sequence
  Synthetic
gguguaccuaggcaaacaagua

SEQ ID NO: 242310 - RNA, 23 nt, Artificial Sequence
  Synthetic
agguguaccuaggcaaacaagua

SEQ ID NO: 242311 - RNA, 24 nt, Artificial Sequence
  Synthetic
uagguguaccuaggcaaacaagua

SEQ ID NO: 242312 - RNA, 18 nt, Artificial Sequence
  Synthetic
uuuugugaaugacaagua

SEQ ID NO: 242313 - RNA, 19 nt, Artificial Sequence
  Synthetic
cuuuugugaaugacaagua

SEQ ID NO: 242314 - RNA, 20 nt, Artificial Sequence
  Synthetic
acuuuugugaaugacaagua

SEQ ID NO: 242315 - RNA, 21 nt, Artificial Sequence
  Synthetic
aacuuuugugaaugacaagua

SEQ ID NO: 242316 - RNA, 22 nt, Artificial Sequence
  Synthetic
gaacuuuugugaaugacaagua

SEQ ID NO: 242317 - RNA, 23 nt, Artificial Sequence
  Synthetic
ggaacuuuugugaaugacaagua

SEQ ID NO: 242318 - RNA, 24 nt, Artificial Sequence
  Synthetic
aggaacuuuugugaaugacaagua

SEQ ID NO: 242319 - RNA, 18 nt, Artificial Sequence
  Synthetic
ugguugaucucccaagua

SEQ ID NO: 242320 - RNA, 19 nt, Artificial Sequence
  Synthetic
augguugaucucccaagua

SEQ ID NO: 242321 - RNA, 20 nt, Artificial Sequence
  Synthetic
aaugguugaucucccaagua

SEQ ID NO: 242322 - RNA, 21 nt, Artificial Sequence
  Synthetic
caaugguugaucucccaagua

SEQ ID NO: 242323 - RNA, 22 nt, Artificial Sequence
  Synthetic
ucaaugguugaucucccaagua

SEQ ID NO: 242324 - RNA, 23 nt, Artificial Sequence
  Synthetic
uucaaugguugaucucccaagua

SEQ ID NO: 242325 - RNA, 24 nt, Artificial Sequence
  Synthetic
uuucaaugguugaucucccaagua

SEQ ID NO: 242326 - RNA, 18 nt, Artificial Sequence
  Synthetic
ggccagguuugccaagua

SEQ ID NO: 242327 - RNA, 19 nt, Artificial Sequence
  Synthetic
uggccagguuugccaagua

SEQ ID NO: 242328 - RNA, 20 nt, Artificial Sequence
  Synthetic
guggccagguuugccaagua

SEQ ID NO: 242329 - RNA, 21 nt, Artificial Sequence
  Synthetic
aguggccagguuugccaagua

SEQ ID NO: 242330 - RNA, 22 nt, Artificial Sequence
  Synthetic
gaguggccagguuugccaagua

SEQ ID NO: 242331 - RNA, 23 nt, Artificial Sequence
  Synthetic
agaguggccagguuugccaagua

SEQ ID NO: 242332 - RNA, 24 nt, Artificial Sequence
  Synthetic
cagaguggccagguuugccaagua

SEQ ID NO: 242333 - RNA, 18 nt, Artificial Sequence
  Synthetic
uauaaaaauuuccaagua

SEQ ID NO: 242334 - RNA, 19 nt, Artificial Sequence
  Synthetic
auauaaaaauuuccaagua

SEQ ID NO: 242335 - RNA, 20 nt, Artificial Sequence
  Synthetic
uauauaaaaauuuccaagua

SEQ ID NO: 242336 - RNA, 21 nt, Artificial Sequence
  Synthetic
uuauauaaaaauuuccaagua

SEQ ID NO: 242337 - RNA, 22 nt, Artificial Sequence
  Synthetic
guuauauaaaaauuuccaagua

SEQ ID NO: 242338 - RNA, 23 nt, Artificial Sequence
  Synthetic
uguuauauaaaaauuuccaagua

SEQ ID NO: 242339 - RNA, 24 nt, Artificial Sequence
  Synthetic
uuguuauauaaaaauuuccaagua

SEQ ID NO: 242340 - RNA, 18 nt, Artificial Sequence
  Synthetic
acauucaaaaaagaagua

SEQ ID NO: 242341 - RNA, 19 nt, Artificial Sequence
  Synthetic
aacauucaaaaaagaagua

SEQ ID NO: 242342 - RNA, 20 nt, Artificial Sequence
  Synthetic
gaacauucaaaaaagaagua

SEQ ID NO: 242343 - RNA, 21 nt, Artificial Sequence
  Synthetic
agaacauucaaaaaagaagua

SEQ ID NO: 242344 - RNA, 22 nt, Artificial Sequence
  Synthetic
uagaacauucaaaaaagaagua

SEQ ID NO: 242345 - RNA, 23 nt, Artificial Sequence
  Synthetic
guagaacauucaaaaaagaagua

SEQ ID NO: 242346 - RNA, 24 nt, Artificial Sequence
  Synthetic
aguagaacauucaaaaaagaagua

SEQ ID NO: 242347 - RNA, 18 nt, Artificial Sequence
  Synthetic
aaaugauaaaaagaagua

SEQ ID NO: 242348 - RNA, 19 nt, Artificial Sequence
  Synthetic
caaaugauaaaaagaagua

SEQ ID NO: 242349 - RNA, 20 nt, Artificial Sequence
  Synthetic
ccaaaugauaaaaagaagua

SEQ ID NO: 242350 - RNA, 21 nt, Artificial Sequence
  Synthetic
accaaaugauaaaaagaagua

SEQ ID NO: 242351 - RNA, 22 nt, Artificial Sequence
  Synthetic
gaccaaaugauaaaaagaagua

SEQ ID NO: 242352 - RNA, 23 nt, Artificial Sequence
  Synthetic
ggaccaaaugauaaaaagaagua

SEQ ID NO: 242353 - RNA, 24 nt, Artificial Sequence
  Synthetic
aggaccaaaugauaaaaagaagua

SEQ ID NO: 242354 - RNA, 18 nt, Artificial Sequence
  Synthetic
ucacaauuaaaagaagua

SEQ ID NO: 242355 - RNA, 19 nt, Artificial Sequence
  Synthetic
aucacaauuaaaagaagua

SEQ ID NO: 242356 - RNA, 20 nt, Artificial Sequence
  Synthetic
caucacaauuaaaagaagua

SEQ ID NO: 242357 - RNA, 21 nt, Artificial Sequence
  Synthetic
acaucacaauuaaaagaagua

SEQ ID NO: 242358 - RNA, 22 nt, Artificial Sequence
  Synthetic
aacaucacaauuaaaagaagua

SEQ ID NO: 242359 - RNA, 23 nt, Artificial Sequence
  Synthetic
uaacaucacaauuaaaagaagua

SEQ ID NO: 242360 - RNA, 24 nt, Artificial Sequence
  Synthetic
uuaacaucacaauuaaaagaagua

SEQ ID NO: 242361 - RNA, 18 nt, Artificial Sequence
  Synthetic
uaacgugagaaagaagua

SEQ ID NO: 242362 - RNA, 19 nt, Artificial Sequence
  Synthetic
uuaacgugagaaagaagua

SEQ ID NO: 242363 - RNA, 20 nt, Artificial Sequence
  Synthetic
uuuaacgugagaaagaagua

SEQ ID NO: 242364 - RNA, 21 nt, Artificial Sequence
  Synthetic
cuuuaacgugagaaagaagua

SEQ ID NO: 242365 - RNA, 22 nt, Artificial Sequence
  Synthetic
ccuuuaacgugagaaagaagua

SEQ ID NO: 242366 - RNA, 23 nt, Artificial Sequence
  Synthetic
cccuuuaacgugagaaagaagua

SEQ ID NO: 242367 - RNA, 24 nt, Artificial Sequence
  Synthetic
ccccuuuaacgugagaaagaagua

SEQ ID NO: 242368 - RNA, 18 nt, Artificial Sequence
  Synthetic
aaaaguuuucaagaagua

SEQ ID NO: 242369 - RNA, 19 nt, Artificial Sequence
  Synthetic
aaaaaguuuucaagaagua

SEQ ID NO: 242370 - RNA, 20 nt, Artificial Sequence
  Synthetic
gaaaaaguuuucaagaagua

SEQ ID NO: 242371 - RNA, 21 nt, Artificial Sequence
  Synthetic
agaaaaaguuuucaagaagua

SEQ ID NO: 242372 - RNA, 22 nt, Artificial Sequence
  Synthetic
gagaaaaaguuuucaagaagua

SEQ ID NO: 242373 - RNA, 23 nt, Artificial Sequence
  Synthetic
agagaaaaaguuuucaagaagua

SEQ ID NO: 242374 - RNA, 24 nt, Artificial Sequence
  Synthetic
gagagaaaaaguuuucaagaagua

SEQ ID NO: 242375 - RNA, 18 nt, Artificial Sequence
  Synthetic
auagacuaaacagaagua

SEQ ID NO: 242376 - RNA, 19 nt, Artificial Sequence
  Synthetic
aauagacuaaacagaagua

SEQ ID NO: 242377 - RNA, 20 nt, Artificial Sequence
  Synthetic
caauagacuaaacagaagua

SEQ ID NO: 242378 - RNA, 21 nt, Artificial Sequence
  Synthetic
acaauagacuaaacagaagua

SEQ ID NO: 242379 - RNA, 22 nt, Artificial Sequence
  Synthetic
uacaauagacuaaacagaagua

SEQ ID NO: 242380 - RNA, 23 nt, Artificial Sequence
  Synthetic
uuacaauagacuaaacagaagua

SEQ ID NO: 242381 - RNA, 24 nt, Artificial Sequence
  Synthetic
guuacaauagacuaaacagaagua

SEQ ID NO: 242382 - RNA, 18 nt, Artificial Sequence
  Synthetic
uggcaggaaggagaagua

SEQ ID NO: 242383 - RNA, 19 nt, Artificial Sequence
  Synthetic
guggcaggaaggagaagua

SEQ ID NO: 242384 - RNA, 20 nt, Artificial Sequence
  Synthetic
gguggcaggaaggagaagua

SEQ ID NO: 242385 - RNA, 21 nt, Artificial Sequence
  Synthetic
agguggcaggaaggagaagua

SEQ ID NO: 242386 - RNA, 22 nt, Artificial Sequence
  Synthetic
aagguggcaggaaggagaagua

SEQ ID NO: 242387 - RNA, 23 nt, Artificial Sequence
  Synthetic
caagguggcaggaaggagaagua

SEQ ID NO: 242388 - RNA, 24 nt, Artificial Sequence
  Synthetic
acaagguggcaggaaggagaagua

SEQ ID NO: 242389 - RNA, 18 nt, Artificial Sequence
  Synthetic
ccccaacagggagaagua

SEQ ID NO: 242390 - RNA, 19 nt, Artificial Sequence
  Synthetic
accccaacagggagaagua

SEQ ID NO: 242391 - RNA, 20 nt, Artificial Sequence
  Synthetic
aaccccaacagggagaagua

SEQ ID NO: 242392 - RNA, 21 nt, Artificial Sequence
  Synthetic
caaccccaacagggagaagua

SEQ ID NO: 242393 - RNA, 22 nt, Artificial Sequence
  Synthetic
gcaaccccaacagggagaagua

SEQ ID NO: 242394 - RNA, 23 nt, Artificial Sequence
  Synthetic
ugcaaccccaacagggagaagua

SEQ ID NO: 242395 - RNA, 24 nt, Artificial Sequence
  Synthetic
uugcaaccccaacagggagaagua

SEQ ID NO: 242396 - RNA, 18 nt, Artificial Sequence
  Synthetic
guggugaguugagaagua

SEQ ID NO: 242397 - RNA, 19 nt, Artificial Sequence
  Synthetic
gguggugaguugagaagua

SEQ ID NO: 242398 - RNA, 20 nt, Artificial Sequence
  Synthetic
ugguggugaguugagaagua

SEQ ID NO: 242399 - RNA, 21 nt, Artificial Sequence
  Synthetic
augguggugaguugagaagua

SEQ ID NO: 242400 - RNA, 22 nt, Artificial Sequence
  Synthetic
uaugguggugaguugagaagua

SEQ ID NO: 242401 - RNA, 23 nt, Artificial Sequence
  Synthetic
uuaugguggugaguugagaagua

SEQ ID NO: 242402 - RNA, 24 nt, Artificial Sequence
  Synthetic
cuuaugguggugaguugagaagua

SEQ ID NO: 242403 - RNA, 18 nt, Artificial Sequence
  Synthetic
ggacguaggcuagaagua

SEQ ID NO: 242404 - RNA, 19 nt, Artificial Sequence
  Synthetic
gggacguaggcuagaagua

SEQ ID NO: 242405 - RNA, 20 nt, Artificial Sequence
  Synthetic
agggacguaggcuagaagua

SEQ ID NO: 242406 - RNA, 21 nt, Artificial Sequence
  Synthetic
aagggacguaggcuagaagua

SEQ ID NO: 242407 - RNA, 22 nt, Artificial Sequence
  Synthetic
gaagggacguaggcuagaagua

SEQ ID NO: 242408 - RNA, 23 nt, Artificial Sequence
  Synthetic
ggaagggacguaggcuagaagua

SEQ ID NO: 242409 - RNA, 24 nt, Artificial Sequence
  Synthetic
aggaagggacguaggcuagaagua

SEQ ID NO: 242410 - RNA, 18 nt, Artificial Sequence
  Synthetic
gaaaccuucaccgaagua

SEQ ID NO: 242411 - RNA, 19 nt, Artificial Sequence
  Synthetic
agaaaccuucaccgaagua

SEQ ID NO: 242412 - RNA, 20 nt, Artificial Sequence
  Synthetic
uagaaaccuucaccgaagua

SEQ ID NO: 242413 - RNA, 21 nt, Artificial Sequence
  Synthetic
cuagaaaccuucaccgaagua

SEQ ID NO: 242414 - RNA, 22 nt, Artificial Sequence
  Synthetic
gcuagaaaccuucaccgaagua

SEQ ID NO: 242415 - RNA, 23 nt, Artificial Sequence
  Synthetic
agcuagaaaccuucaccgaagua

SEQ ID NO: 242416 - RNA, 24 nt, Artificial Sequence
  Synthetic
cagcuagaaaccuucaccgaagua

SEQ ID NO: 242417 - RNA, 18 nt, Artificial Sequence
  Synthetic
acaaaacuggccgaagua

SEQ ID NO: 242418 - RNA, 19 nt, Artificial Sequence
  Synthetic
uacaaaacuggccgaagua

SEQ ID NO: 242419 - RNA, 20 nt, Artificial Sequence
  Synthetic
guacaaaacuggccgaagua

SEQ ID NO: 242420 - RNA, 21 nt, Artificial Sequence
  Synthetic
aguacaaaacuggccgaagua

SEQ ID NO: 242421 - RNA, 22 nt, Artificial Sequence
  Synthetic
caguacaaaacuggccgaagua

SEQ ID NO: 242422 - RNA, 23 nt, Artificial Sequence
  Synthetic
ccaguacaaaacuggccgaagua

SEQ ID NO: 242423 - RNA, 24 nt, Artificial Sequence
  Synthetic
cccaguacaaaacuggccgaagua

SEQ ID NO: 242424 - RNA, 18 nt, Artificial Sequence
  Synthetic
gcaauauaugccgaagua

SEQ ID NO: 242425 - RNA, 19 nt, Artificial Sequence
  Synthetic
ggcaauauaugccgaagua

SEQ ID NO: 242426 - RNA, 20 nt, Artificial Sequence
  Synthetic
uggcaauauaugccgaagua

SEQ ID NO: 242427 - RNA, 21 nt, Artificial Sequence
  Synthetic
uuggcaauauaugccgaagua

SEQ ID NO: 242428 - RNA, 22 nt, Artificial Sequence
  Synthetic
auuggcaauauaugccgaagua

SEQ ID NO: 242429 - RNA, 23 nt, Artificial Sequence
  Synthetic
uauuggcaauauaugccgaagua

SEQ ID NO: 242430 - RNA, 24 nt, Artificial Sequence
  Synthetic
uuauuggcaauauaugccgaagua

SEQ ID NO: 242431 - RNA, 18 nt, Artificial Sequence
  Synthetic
gaaggaagggaggaagua

SEQ ID NO: 242432 - RNA, 19 nt, Artificial Sequence
  Synthetic
ggaaggaagggaggaagua

SEQ ID NO: 242433 - RNA, 20 nt, Artificial Sequence
  Synthetic
aggaaggaagggaggaagua

SEQ ID NO: 242434 - RNA, 21 nt, Artificial Sequence
  Synthetic
gaggaaggaagggaggaagua

SEQ ID NO: 242435 - RNA, 22 nt, Artificial Sequence
  Synthetic
ggaggaaggaagggaggaagua

SEQ ID NO: 242436 - RNA, 23 nt, Artificial Sequence
  Synthetic
aggaggaaggaagggaggaagua

SEQ ID NO: 242437 - RNA, 24 nt, Artificial Sequence
  Synthetic
gaggaggaaggaagggaggaagua

SEQ ID NO: 242438 - RNA, 18 nt, Artificial Sequence
  Synthetic
caaagaaugggggaagua

SEQ ID NO: 242439 - RNA, 19 nt, Artificial Sequence
  Synthetic
ccaaagaaugggggaagua

SEQ ID NO: 242440 - RNA, 20 nt, Artificial Sequence
  Synthetic
accaaagaaugggggaagua

SEQ ID NO: 242441 - RNA, 21 nt, Artificial Sequence
  Synthetic
caccaaagaaugggggaagua

SEQ ID NO: 242442 - RNA, 22 nt, Artificial Sequence
  Synthetic
ucaccaaagaaugggggaagua

SEQ ID NO: 242443 - RNA, 23 nt, Artificial Sequence
  Synthetic
gucaccaaagaaugggggaagua

SEQ ID NO: 242444 - RNA, 24 nt, Artificial Sequence
  Synthetic
ggucaccaaagaaugggggaagua

SEQ ID NO: 242445 - RNA, 18 nt, Artificial Sequence
  Synthetic
gagacaucacuggaagua

SEQ ID NO: 242446 - RNA, 19 nt, Artificial Sequence
  Synthetic
agagacaucacuggaagua

SEQ ID NO: 242447 - RNA, 20 nt, Artificial Sequence
  Synthetic
aagagacaucacuggaagua

SEQ ID NO: 242448 - RNA, 21 nt, Artificial Sequence
  Synthetic
aaagagacaucacuggaagua

SEQ ID NO: 242449 - RNA, 22 nt, Artificial Sequence
  Synthetic
uaaagagacaucacuggaagua

SEQ ID NO: 242450 - RNA, 23 nt, Artificial Sequence
  Synthetic
guaaagagacaucacuggaagua

SEQ ID NO: 242451 - RNA, 24 nt, Artificial Sequence
  Synthetic
aguaaagagacaucacuggaagua

SEQ ID NO: 242452 - RNA, 18 nt, Artificial Sequence
  Synthetic
cuuugugcucaugaagua

SEQ ID NO: 242453 - RNA, 19 nt, Artificial Sequence
  Synthetic
ucuuugugcucaugaagua

SEQ ID NO: 242454 - RNA, 20 nt, Artificial Sequence
  Synthetic
aucuuugugcucaugaagua

SEQ ID NO: 242455 - RNA, 21 nt, Artificial Sequence
  Synthetic
uaucuuugugcucaugaagua

SEQ ID NO: 242456 - RNA, 22 nt, Artificial Sequence
  Synthetic
uuaucuuugugcucaugaagua

SEQ ID NO: 242457 - RNA, 23 nt, Artificial Sequence
  Synthetic
cuuaucuuugugcucaugaagua

SEQ ID NO: 242458 - RNA, 24 nt, Artificial Sequence
  Synthetic
acuuaucuuugugcucaugaagua

SEQ ID NO: 242459 - RNA, 18 nt, Artificial Sequence
  Synthetic
aaugacguaacugaagua

SEQ ID NO: 242460 - RNA, 19 nt, Artificial Sequence
  Synthetic
aaaugacguaacugaagua

SEQ ID NO: 242461 - RNA, 20 nt, Artificial Sequence
  Synthetic
gaaaugacguaacugaagua

SEQ ID NO: 242462 - RNA, 21 nt, Artificial Sequence
  Synthetic
agaaaugacguaacugaagua

SEQ ID NO: 242463 - RNA, 22 nt, Artificial Sequence
  Synthetic
uagaaaugacguaacugaagua

SEQ ID NO: 242464 - RNA, 23 nt, Artificial Sequence
  Synthetic
auagaaaugacguaacugaagua

SEQ ID NO: 242465 - RNA, 24 nt, Artificial Sequence
  Synthetic
aauagaaaugacguaacugaagua

SEQ ID NO: 242466 - RNA, 18 nt, Artificial Sequence
  Synthetic
gucccaucuauugaagua

SEQ ID NO: 242467 - RNA, 19 nt, Artificial Sequence
  Synthetic
ugucccaucuauugaagua

SEQ ID NO: 242468 - RNA, 20 nt, Artificial Sequence
  Synthetic
cugucccaucuauugaagua

SEQ ID NO: 242469 - RNA, 21 nt, Artificial Sequence
  Synthetic
ucugucccaucuauugaagua

SEQ ID NO: 242470 - RNA, 22 nt, Artificial Sequence
  Synthetic
gucugucccaucuauugaagua

SEQ ID NO: 242471 - RNA, 23 nt, Artificial Sequence
  Synthetic
ugucugucccaucuauugaagua

SEQ ID NO: 242472 - RNA, 24 nt, Artificial Sequence
  Synthetic
cugucugucccaucuauugaagua

SEQ ID NO: 242473 - RNA, 18 nt, Artificial Sequence
  Synthetic
gagauaaaacaauaagua

SEQ ID NO: 242474 - RNA, 19 nt, Artificial Sequence
  Synthetic
agagauaaaacaauaagua

SEQ ID NO: 242475 - RNA, 20 nt, Artificial Sequence
  Synthetic
aagagauaaaacaauaagua

SEQ ID NO: 242476 - RNA, 21 nt, Artificial Sequence
  Synthetic
aaagagauaaaacaauaagua

SEQ ID NO: 242477 - RNA, 22 nt, Artificial Sequence
  Synthetic
uaaagagauaaaacaauaagua

SEQ ID NO: 242478 - RNA, 23 nt, Artificial Sequence
  Synthetic
auaaagagauaaaacaauaagua

SEQ ID NO: 242479 - RNA, 24 nt, Artificial Sequence
  Synthetic
aauaaagagauaaaacaauaagua

SEQ ID NO: 242480 - RNA, 18 nt, Artificial Sequence
  Synthetic
cuaaaagaccacuaagua

SEQ ID NO: 242481 - RNA, 19 nt, Artificial Sequence
  Synthetic
acuaaaagaccacuaagua

SEQ ID NO: 242482 - RNA, 20 nt, Artificial Sequence
  Synthetic
uacuaaaagaccacuaagua

SEQ ID NO: 242483 - RNA, 21 nt, Artificial Sequence
  Synthetic
auacuaaaagaccacuaagua

SEQ ID NO: 242484 - RNA, 22 nt, Artificial Sequence
  Synthetic
uauacuaaaagaccacuaagua

SEQ ID NO: 242485 - RNA, 23 nt, Artificial Sequence
  Synthetic
cuauacuaaaagaccacuaagua

SEQ ID NO: 242486 - RNA, 24 nt, Artificial Sequence
  Synthetic
gcuauacuaaaagaccacuaagua

SEQ ID NO: 242487 - RNA, 18 nt, Artificial Sequence
  Synthetic
uccuucagugacuaagua

SEQ ID NO: 242488 - RNA, 19 nt, Artificial Sequence
  Synthetic
cuccuucagugacuaagua

SEQ ID NO: 242489 - RNA, 20 nt, Artificial Sequence
  Synthetic
ucuccuucagugacuaagua

SEQ ID NO: 242490 - RNA, 21 nt, Artificial Sequence
  Synthetic
uucuccuucagugacuaagua

SEQ ID NO: 242491 - RNA, 22 nt, Artificial Sequence
  Synthetic
uuucuccuucagugacuaagua

SEQ ID NO: 242492 - RNA, 23 nt, Artificial Sequence
  Synthetic
guuucuccuucagugacuaagua

SEQ ID NO: 242493 - RNA, 24 nt, Artificial Sequence
  Synthetic
uguuucuccuucagugacuaagua

SEQ ID NO: 242494 - RNA, 18 nt, Artificial Sequence
  Synthetic
aauacuauaugcuaagua

SEQ ID NO: 242495 - RNA, 19 nt, Artificial Sequence
  Synthetic
aaauacuauaugcuaagua

SEQ ID NO: 242496 - RNA, 20 nt, Artificial Sequence
  Synthetic
caaauacuauaugcuaagua

SEQ ID NO: 242497 - RNA, 21 nt, Artificial Sequence
  Synthetic
gcaaauacuauaugcuaagua

SEQ ID NO: 242498 - RNA, 22 nt, Artificial Sequence
  Synthetic
agcaaauacuauaugcuaagua

SEQ ID NO: 242499 - RNA, 23 nt, Artificial Sequence
  Synthetic
aagcaaauacuauaugcuaagua

SEQ ID NO: 242500 - RNA, 24 nt, Artificial Sequence
  Synthetic
uaagcaaauacuauaugcuaagua

SEQ ID NO: 242501 - RNA, 18 nt, Artificial Sequence
  Synthetic
aagaaggauaaguaagua

SEQ ID NO: 242502 - RNA, 19 nt, Artificial Sequence
  Synthetic
uaagaaggauaaguaagua

SEQ ID NO: 242503 - RNA, 20 nt, Artificial Sequence
  Synthetic
auaagaaggauaaguaagua

SEQ ID NO: 242504 - RNA, 21 nt, Artificial Sequence
  Synthetic
aauaagaaggauaaguaagua

SEQ ID NO: 242505 - RNA, 22 nt, Artificial Sequence
  Synthetic
aaauaagaaggauaaguaagua

SEQ ID NO: 242506 - RNA, 23 nt, Artificial Sequence
  Synthetic
gaaauaagaaggauaaguaagua

SEQ ID NO: 242507 - RNA, 24 nt, Artificial Sequence
  Synthetic
ggaaauaagaaggauaaguaagua

SEQ ID NO: 242508 - RNA, 18 nt, Artificial Sequence
  Synthetic
uauaaaaggguguaagua

SEQ ID NO: 242509 - RNA, 19 nt, Artificial Sequence
  Synthetic
cuauaaaaggguguaagua

SEQ ID NO: 242510 - RNA, 20 nt, Artificial Sequence
  Synthetic
ucuauaaaaggguguaagua

SEQ ID NO: 242511 - RNA, 21 nt, Artificial Sequence
  Synthetic
gucuauaaaaggguguaagua

SEQ ID NO: 242512 - RNA, 22 nt, Artificial Sequence
  Synthetic
ugucuauaaaaggguguaagua

SEQ ID NO: 242513 - RNA, 23 nt, Artificial Sequence
  Synthetic
uugucuauaaaaggguguaagua

SEQ ID NO: 242514 - RNA, 24 nt, Artificial Sequence
  Synthetic
cuugucuauaaaaggguguaagua

SEQ ID NO: 242515 - RNA, 18 nt, Artificial Sequence
  Synthetic
uaagguauuguguaagua

SEQ ID NO: 242516 - RNA, 19 nt, Artificial Sequence
  Synthetic
cuaagguauuguguaagua

SEQ ID NO: 242517 - RNA, 20 nt, Artificial Sequence
  Synthetic
gcuaagguauuguguaagua

SEQ ID NO: 242518 - RNA, 21 nt, Artificial Sequence
  Synthetic
ggcuaagguauuguguaagua

SEQ ID NO: 242519 - RNA, 22 nt, Artificial Sequence
  Synthetic
uggcuaagguauuguguaagua

SEQ ID NO: 242520 - RNA, 23 nt, Artificial Sequence
  Synthetic
auggcuaagguauuguguaagua

SEQ ID NO: 242521 - RNA, 24 nt, Artificial Sequence
  Synthetic
cauggcuaagguauuguguaagua

SEQ ID NO: 242522 - RNA, 18 nt, Artificial Sequence
  Synthetic
aaguaauaguuguaagua

SEQ ID NO: 242523 - RNA, 19 nt, Artificial Sequence
  Synthetic
gaaguaauaguuguaagua

SEQ ID NO: 242524 - RNA, 20 nt, Artificial Sequence
  Synthetic
ugaaguaauaguuguaagua

SEQ ID NO: 242525 - RNA, 21 nt, Artificial Sequence
  Synthetic
augaaguaauaguuguaagua

SEQ ID NO: 242526 - RNA, 22 nt, Artificial Sequence
  Synthetic
uaugaaguaauaguuguaagua

SEQ ID NO: 242527 - RNA, 23 nt, Artificial Sequence
  Synthetic
guaugaaguaauaguuguaagua

SEQ ID NO: 242528 - RNA, 24 nt, Artificial Sequence
  Synthetic
aguaugaaguaauaguuguaagua

SEQ ID NO: 242529 - RNA, 18 nt, Artificial Sequence
  Synthetic
cagaacuuugcuuaagua

SEQ ID NO: 242530 - RNA, 19 nt, Artificial Sequence
  Synthetic
gcagaacuuugcuuaagua

SEQ ID NO: 242531 - RNA, 20 nt, Artificial Sequence
  Synthetic
ugcagaacuuugcuuaagua

SEQ ID NO: 242532 - RNA, 21 nt, Artificial Sequence
  Synthetic
cugcagaacuuugcuuaagua

SEQ ID NO: 242533 - RNA, 22 nt, Artificial Sequence
  Synthetic
gcugcagaacuuugcuuaagua

SEQ ID NO: 242534 - RNA, 23 nt, Artificial Sequence
  Synthetic
ggcugcagaacuuugcuuaagua

SEQ ID NO: 242535 - RNA, 24 nt, Artificial Sequence
  Synthetic
uggcugcagaacuuugcuuaagua

SEQ ID NO: 242536 - RNA, 18 nt, Artificial Sequence
  Synthetic
aaauauguacuuuaagua

SEQ ID NO: 242537 - RNA, 19 nt, Artificial Sequence
  Synthetic
uaaauauguacuuuaagua

SEQ ID NO: 242538 - RNA, 20 nt, Artificial Sequence
  Synthetic
auaaauauguacuuuaagua

SEQ ID NO: 242539 - RNA, 21 nt, Artificial Sequence
  Synthetic
aauaaauauguacuuuaagua

SEQ ID NO: 242540 - RNA, 22 nt, Artificial Sequence
  Synthetic
uaauaaauauguacuuuaagua

SEQ ID NO: 242541 - RNA, 23 nt, Artificial Sequence
  Synthetic
auaauaaauauguacuuuaagua

SEQ ID NO: 242542 - RNA, 24 nt, Artificial Sequence
  Synthetic
aauaauaaauauguacuuuaagua

SEQ ID NO: 242543 - RNA, 18 nt, Artificial Sequence
  Synthetic
gucuuuauuuuuuaagua

SEQ ID NO: 242544 - RNA, 19 nt, Artificial Sequence
  Synthetic
agucuuuauuuuuuaagua

SEQ ID NO: 242545 - RNA, 20 nt, Artificial Sequence
  Synthetic
aagucuuuauuuuuuaagua

SEQ ID NO: 242546 - RNA, 21 nt, Artificial Sequence
  Synthetic
caagucuuuauuuuuuaagua

SEQ ID NO: 242547 - RNA, 22 nt, Artificial Sequence
  Synthetic
ucaagucuuuauuuuuuaagua

SEQ ID NO: 242548 - RNA, 23 nt, Artificial Sequence
  Synthetic
aucaagucuuuauuuuuuaagua

SEQ ID NO: 242549 - RNA, 24 nt, Artificial Sequence
  Synthetic
aaucaagucuuuauuuuuuaagua

SEQ ID NO: 242550 - RNA, 18 nt, Artificial Sequence
  Synthetic
ggaguugcaaaaacagua

SEQ ID NO: 242551 - RNA, 19 nt, Artificial Sequence
  Synthetic
aggaguugcaaaaacagua

SEQ ID NO: 242552 - RNA, 20 nt, Artificial Sequence
  Synthetic
aaggaguugcaaaaacagua

SEQ ID NO: 242553 - RNA, 21 nt, Artificial Sequence
  Synthetic
caaggaguugcaaaaacagua

SEQ ID NO: 242554 - RNA, 22 nt, Artificial Sequence
  Synthetic
acaaggaguugcaaaaacagua

SEQ ID NO: 242555 - RNA, 23 nt, Artificial Sequence
  Synthetic
cacaaggaguugcaaaaacagua

SEQ ID NO: 242556 - RNA, 24 nt, Artificial Sequence
  Synthetic
ucacaaggaguugcaaaaacagua

SEQ ID NO: 242557 - RNA, 18 nt, Artificial Sequence
  Synthetic
uuguugacuacaacagua

SEQ ID NO: 242558 - RNA, 19 nt, Artificial Sequence
  Synthetic
auuguugacuacaacagua

SEQ ID NO: 242559 - RNA, 20 nt, Artificial Sequence
  Synthetic
aauuguugacuacaacagua

SEQ ID NO: 242560 - RNA, 21 nt, Artificial Sequence
  Synthetic
gaauuguugacuacaacagua

SEQ ID NO: 242561 - RNA, 22 nt, Artificial Sequence
  Synthetic
agaauuguugacuacaacagua

SEQ ID NO: 242562 - RNA, 23 nt, Artificial Sequence
  Synthetic
aagaauuguugacuacaacagua

SEQ ID NO: 242563 - RNA, 24 nt, Artificial Sequence
  Synthetic
uaagaauuguugacuacaacagua

SEQ ID NO: 242564 - RNA, 18 nt, Artificial Sequence
  Synthetic
uccgaggcauccacagua

SEQ ID NO: 242565 - RNA, 19 nt, Artificial Sequence
  Synthetic
auccgaggcauccacagua

SEQ ID NO: 242566 - RNA, 20 nt, Artificial Sequence
  Synthetic
aauccgaggcauccacagua

SEQ ID NO: 242567 - RNA, 21 nt, Artificial Sequence
  Synthetic
gaauccgaggcauccacagua

SEQ ID NO: 242568 - RNA, 22 nt, Artificial Sequence
  Synthetic
ggaauccgaggcauccacagua

SEQ ID NO: 242569 - RNA, 23 nt, Artificial Sequence
  Synthetic
aggaauccgaggcauccacagua

SEQ ID NO: 242570 - RNA, 24 nt, Artificial Sequence
  Synthetic
uaggaauccgaggcauccacagua

SEQ ID NO: 242571 - RNA, 18 nt, Artificial Sequence
  Synthetic
aauuaggaaagcacagua

SEQ ID NO: 242572 - RNA, 19 nt, Artificial Sequence
  Synthetic
uaauuaggaaagcacagua

SEQ ID NO: 242573 - RNA, 20 nt, Artificial Sequence
  Synthetic
guaauuaggaaagcacagua

SEQ ID NO: 242574 - RNA, 21 nt, Artificial Sequence
  Synthetic
uguaauuaggaaagcacagua

SEQ ID NO: 242575 - RNA, 22 nt, Artificial Sequence
  Synthetic
guguaauuaggaaagcacagua

SEQ ID NO: 242576 - RNA, 23 nt, Artificial Sequence
  Synthetic
aguguaauuaggaaagcacagua

SEQ ID NO: 242577 - RNA, 24 nt, Artificial Sequence
  Synthetic
aaguguaauuaggaaagcacagua

SEQ ID NO: 242578 - RNA, 18 nt, Artificial Sequence
  Synthetic
auauuccagaagacagua

SEQ ID NO: 242579 - RNA, 19 nt, Artificial Sequence
  Synthetic
gauauuccagaagacagua

SEQ ID NO: 242580 - RNA, 20 nt, Artificial Sequence
  Synthetic
agauauuccagaagacagua

SEQ ID NO: 242581 - RNA, 21 nt, Artificial Sequence
  Synthetic
aagauauuccagaagacagua

SEQ ID NO: 242582 - RNA, 22 nt, Artificial Sequence
  Synthetic
uaagauauuccagaagacagua

SEQ ID NO: 242583 - RNA, 23 nt, Artificial Sequence
  Synthetic
cuaagauauuccagaagacagua

SEQ ID NO: 242584 - RNA, 24 nt, Artificial Sequence
  Synthetic
gcuaagauauuccagaagacagua

SEQ ID NO: 242585 - RNA, 18 nt, Artificial Sequence
  Synthetic
agcagccaguggacagua

SEQ ID NO: 242586 - RNA, 19 nt, Artificial Sequence
  Synthetic
aagcagccaguggacagua

SEQ ID NO: 242587 - RNA, 20 nt, Artificial Sequence
  Synthetic
aaagcagccaguggacagua

SEQ ID NO: 242588 - RNA, 21 nt, Artificial Sequence
  Synthetic
caaagcagccaguggacagua

SEQ ID NO: 242589 - RNA, 22 nt, Artificial Sequence
  Synthetic
acaaagcagccaguggacagua

SEQ ID NO: 242590 - RNA, 23 nt, Artificial Sequence
  Synthetic
cacaaagcagccaguggacagua

SEQ ID NO: 242591 - RNA, 24 nt, Artificial Sequence
  Synthetic
ucacaaagcagccaguggacagua

SEQ ID NO: 242592 - RNA, 18 nt, Artificial Sequence
  Synthetic
aauaauuaauauacagua

SEQ ID NO: 242593 - RNA, 19 nt, Artificial Sequence
  Synthetic
aaauaauuaauauacagua

SEQ ID NO: 242594 - RNA, 20 nt, Artificial Sequence
  Synthetic
uaaauaauuaauauacagua

SEQ ID NO: 242595 - RNA, 21 nt, Artificial Sequence
  Synthetic
uuaaauaauuaauauacagua

SEQ ID NO: 242596 - RNA, 22 nt, Artificial Sequence
  Synthetic
uuuaaauaauuaauauacagua

SEQ ID NO: 242597 - RNA, 23 nt, Artificial Sequence
  Synthetic
auuuaaauaauuaauauacagua

SEQ ID NO: 242598 - RNA, 24 nt, Artificial Sequence
  Synthetic
uauuuaaauaauuaauauacagua

SEQ ID NO: 242599 - RNA, 18 nt, Artificial Sequence
  Synthetic
uuucuucuaacuacagua

SEQ ID NO: 242600 - RNA, 19 nt, Artificial Sequence
  Synthetic
uuuucuucuaacuacagua

SEQ ID NO: 242601 - RNA, 20 nt, Artificial Sequence
  Synthetic
uuuuucuucuaacuacagua

SEQ ID NO: 242602 - RNA, 21 nt, Artificial Sequence
  Synthetic
auuuuucuucuaacuacagua

SEQ ID NO: 242603 - RNA, 22 nt, Artificial Sequence
  Synthetic
cauuuuucuucuaacuacagua

SEQ ID NO: 242604 - RNA, 23 nt, Artificial Sequence
  Synthetic
ccauuuuucuucuaacuacagua

SEQ ID NO: 242605 - RNA, 24 nt, Artificial Sequence
  Synthetic
uccauuuuucuucuaacuacagua

SEQ ID NO: 242606 - RNA, 18 nt, Artificial Sequence
  Synthetic
auuaugagaauuacagua

SEQ ID NO: 242607 - RNA, 19 nt, Artificial Sequence
  Synthetic
cauuaugagaauuacagua

SEQ ID NO: 242608 - RNA, 20 nt, Artificial Sequence
  Synthetic
gcauuaugagaauuacagua

SEQ ID NO: 242609 - RNA, 21 nt, Artificial Sequence
  Synthetic
agcauuaugagaauuacagua

SEQ ID NO: 242610 - RNA, 22 nt, Artificial Sequence
  Synthetic
uagcauuaugagaauuacagua

SEQ ID NO: 242611 - RNA, 23 nt, Artificial Sequence
  Synthetic
auagcauuaugagaauuacagua

SEQ ID NO: 242612 - RNA, 24 nt, Artificial Sequence
  Synthetic
aauagcauuaugagaauuacagua

SEQ ID NO: 242613 - RNA, 18 nt, Artificial Sequence
  Synthetic
gcagauaucuuuacagua

SEQ ID NO: 242614 - RNA, 19 nt, Artificial Sequence
  Synthetic
ggcagauaucuuuacagua

SEQ ID NO: 242615 - RNA, 20 nt, Artificial Sequence
  Synthetic
gggcagauaucuuuacagua

SEQ ID NO: 242616 - RNA, 21 nt, Artificial Sequence
  Synthetic
agggcagauaucuuuacagua

SEQ ID NO: 242617 - RNA, 22 nt, Artificial Sequence
  Synthetic
gagggcagauaucuuuacagua

SEQ ID NO: 242618 - RNA, 23 nt, Artificial Sequence
  Synthetic
agagggcagauaucuuuacagua

SEQ ID NO: 242619 - RNA, 24 nt, Artificial Sequence
  Synthetic
gagagggcagauaucuuuacagua

SEQ ID NO: 242620 - RNA, 18 nt, Artificial Sequence
  Synthetic
gauuguaauuuuacagua

SEQ ID NO: 242621 - RNA, 19 nt, Artificial Sequence
  Synthetic
agauuguaauuuuacagua

SEQ ID NO: 242622 - RNA, 20 nt, Artificial Sequence
  Synthetic
uagauuguaauuuuacagua

SEQ ID NO: 242623 - RNA, 21 nt, Artificial Sequence
  Synthetic
auagauuguaauuuuacagua

SEQ ID NO: 242624 - RNA, 22 nt, Artificial Sequence
  Synthetic
uauagauuguaauuuuacagua

SEQ ID NO: 242625 - RNA, 23 nt, Artificial Sequence
  Synthetic
auauagauuguaauuuuacagua

SEQ ID NO: 242626 - RNA, 24 nt, Artificial Sequence
  Synthetic
aauauagauuguaauuuuacagua

SEQ ID NO: 242627 - RNA, 18 nt, Artificial Sequence
  Synthetic
aauauagucucaccagua

SEQ ID NO: 242628 - RNA, 19 nt, Artificial Sequence
  Synthetic
aaauauagucucaccagua

SEQ ID NO: 242629 - RNA, 20 nt, Artificial Sequence
  Synthetic
aaaauauagucucaccagua

SEQ ID NO: 242630 - RNA, 21 nt, Artificial Sequence
  Synthetic
gaaaauauagucucaccagua

SEQ ID NO: 242631 - RNA, 22 nt, Artificial Sequence
  Synthetic
agaaaauauagucucaccagua

SEQ ID NO: 242632 - RNA, 23 nt, Artificial Sequence
  Synthetic
aagaaaauauagucucaccagua

SEQ ID NO: 242633 - RNA, 24 nt, Artificial Sequence
  Synthetic
uaagaaaauauagucucaccagua

SEQ ID NO: 242634 - RNA, 18 nt, Artificial Sequence
  Synthetic
gcauggcaaauaccagua

SEQ ID NO: 242635 - RNA, 19 nt, Artificial Sequence
  Synthetic
ggcauggcaaauaccagua

SEQ ID NO: 242636 - RNA, 20 nt, Artificial Sequence
  Synthetic
aggcauggcaaauaccagua

SEQ ID NO: 242637 - RNA, 21 nt, Artificial Sequence
  Synthetic
uaggcauggcaaauaccagua

SEQ ID NO: 242638 - RNA, 22 nt, Artificial Sequence
  Synthetic
auaggcauggcaaauaccagua

SEQ ID NO: 242639 - RNA, 23 nt, Artificial Sequence
  Synthetic
uauaggcauggcaaauaccagua

SEQ ID NO: 242640 - RNA, 24 nt, Artificial Sequence
  Synthetic
auauaggcauggcaaauaccagua

SEQ ID NO: 242641 - RNA, 18 nt, Artificial Sequence
  Synthetic
uuggguauauacccagua

SEQ ID NO: 242642 - RNA, 19 nt, Artificial Sequence
  Synthetic
uuuggguauauacccagua

SEQ ID NO: 242643 - RNA, 20 nt, Artificial Sequence
  Synthetic
cuuuggguauauacccagua

SEQ ID NO: 242644 - RNA, 18 nt, Artificial Sequence
  Synthetic
uugucucuguccccagua

SEQ ID NO: 242645 - RNA, 19 nt, Artificial Sequence
  Synthetic
uuugucucuguccccagua

SEQ ID NO: 242646 - RNA, 20 nt, Artificial Sequence
  Synthetic
cuuugucucuguccccagua

SEQ ID NO: 242647 - RNA, 21 nt, Artificial Sequence
  Synthetic
gcuuugucucuguccccagua

SEQ ID NO: 242648 - RNA, 22 nt, Artificial Sequence
  Synthetic
ugcuuugucucuguccccagua

SEQ ID NO: 242649 - RNA, 23 nt, Artificial Sequence
  Synthetic
uugcuuugucucuguccccagua

SEQ ID NO: 242650 - RNA, 24 nt, Artificial Sequence
  Synthetic
uuugcuuugucucuguccccagua

SEQ ID NO: 242651 - RNA, 18 nt, Artificial Sequence
  Synthetic
ugggcuauaugcccagua

SEQ ID NO: 242652 - RNA, 19 nt, Artificial Sequence
  Synthetic
uugggcuauaugcccagua

SEQ ID NO: 242653 - RNA, 20 nt, Artificial Sequence
  Synthetic
uuugggcuauaugcccagua

SEQ ID NO: 242654 - RNA, 21 nt, Artificial Sequence
  Synthetic
auuugggcuauaugcccagua

SEQ ID NO: 242655 - RNA, 22 nt, Artificial Sequence
  Synthetic
uauuugggcuauaugcccagua

SEQ ID NO: 242656 - RNA, 23 nt, Artificial Sequence
  Synthetic
uuauuugggcuauaugcccagua

SEQ ID NO: 242657 - RNA, 24 nt, Artificial Sequence
  Synthetic
uuuauuugggcuauaugcccagua

SEQ ID NO: 242658 - RNA, 18 nt, Artificial Sequence
  Synthetic
uccacauugcugccagua

SEQ ID NO: 242659 - RNA, 19 nt, Artificial Sequence
  Synthetic
cuccacauugcugccagua

SEQ ID NO: 242660 - RNA, 20 nt, Artificial Sequence
  Synthetic
ccuccacauugcugccagua

SEQ ID NO: 242661 - RNA, 21 nt, Artificial Sequence
  Synthetic
uccuccacauugcugccagua

SEQ ID NO: 242662 - RNA, 22 nt, Artificial Sequence
  Synthetic
guccuccacauugcugccagua

SEQ ID NO: 242663 - RNA, 23 nt, Artificial Sequence
  Synthetic
uguccuccacauugcugccagua

SEQ ID NO: 242664 - RNA, 24 nt, Artificial Sequence
  Synthetic
auguccuccacauugcugccagua

SEQ ID NO: 242665 - RNA, 18 nt, Artificial Sequence
  Synthetic
uuggguauauauccagua

SEQ ID NO: 242666 - RNA, 19 nt, Artificial Sequence
  Synthetic
uuuggguauauauccagua

SEQ ID NO: 242667 - RNA, 20 nt, Artificial Sequence
  Synthetic
cuuuggguauauauccagua

SEQ ID NO: 242668 - RNA, 21 nt, Artificial Sequence
  Synthetic
ccuuuggguauauauccagua

SEQ ID NO: 242669 - RNA, 22 nt, Artificial Sequence
  Synthetic
uccuuuggguauauauccagua

SEQ ID NO: 242670 - RNA, 23 nt, Artificial Sequence
  Synthetic
auccuuuggguauauauccagua

SEQ ID NO: 242671 - RNA, 24 nt, Artificial Sequence
  Synthetic
aauccuuuggguauauauccagua

SEQ ID NO: 242672 - RNA, 18 nt, Artificial Sequence
  Synthetic
guggagaauuauccagua

SEQ ID NO: 242673 - RNA, 19 nt, Artificial Sequence
  Synthetic
uguggagaauuauccagua

SEQ ID NO: 242674 - RNA, 20 nt, Artificial Sequence
  Synthetic
guguggagaauuauccagua

SEQ ID NO: 242675 - RNA, 21 nt, Artificial Sequence
  Synthetic
uguguggagaauuauccagua

SEQ ID NO: 242676 - RNA, 22 nt, Artificial Sequence
  Synthetic
uuguguggagaauuauccagua

SEQ ID NO: 242677 - RNA, 23 nt, Artificial Sequence
  Synthetic
cuuguguggagaauuauccagua

SEQ ID NO: 242678 - RNA, 24 nt, Artificial Sequence
  Synthetic
ucuuguguggagaauuauccagua

SEQ ID NO: 242679 - RNA, 18 nt, Artificial Sequence
  Synthetic
gaugucauaaaagcagua

SEQ ID NO: 242680 - RNA, 19 nt, Artificial Sequence
  Synthetic
agaugucauaaaagcagua

SEQ ID NO: 242681 - RNA, 20 nt, Artificial Sequence
  Synthetic
gagaugucauaaaagcagua

SEQ ID NO: 242682 - RNA, 21 nt, Artificial Sequence
  Synthetic
ugagaugucauaaaagcagua

SEQ ID NO: 242683 - RNA, 22 nt, Artificial Sequence
  Synthetic
gugagaugucauaaaagcagua

SEQ ID NO: 242684 - RNA, 23 nt, Artificial Sequence
  Synthetic
agugagaugucauaaaagcagua

SEQ ID NO: 242685 - RNA, 24 nt, Artificial Sequence
  Synthetic
aagugagaugucauaaaagcagua

SEQ ID NO: 242686 - RNA, 18 nt, Artificial Sequence
  Synthetic
cauuaaucaacagcagua

SEQ ID NO: 242687 - RNA, 19 nt, Artificial Sequence
  Synthetic
ccauuaaucaacagcagua

SEQ ID NO: 242688 - RNA, 20 nt, Artificial Sequence
  Synthetic
accauuaaucaacagcagua

SEQ ID NO: 242689 - RNA, 21 nt, Artificial Sequence
  Synthetic
aaccauuaaucaacagcagua

SEQ ID NO: 242690 - RNA, 22 nt, Artificial Sequence
  Synthetic
caaccauuaaucaacagcagua

SEQ ID NO: 242691 - RNA, 23 nt, Artificial Sequence
  Synthetic
ucaaccauuaaucaacagcagua

SEQ ID NO: 242692 - RNA, 24 nt, Artificial Sequence
  Synthetic
aucaaccauuaaucaacagcagua

SEQ ID NO: 242693 - RNA, 18 nt, Artificial Sequence
  Synthetic
uauauaugaagagcagua

SEQ ID NO: 242694 - RNA, 19 nt, Artificial Sequence
  Synthetic
auauauaugaagagcagua

SEQ ID NO: 242695 - RNA, 20 nt, Artificial Sequence
  Synthetic
uauauauaugaagagcagua

SEQ ID NO: 242696 - RNA, 21 nt, Artificial Sequence
  Synthetic
guauauauaugaagagcagua

SEQ ID NO: 242697 - RNA, 22 nt, Artificial Sequence
  Synthetic
aguauauauaugaagagcagua

SEQ ID NO: 242698 - RNA, 23 nt, Artificial Sequence
  Synthetic
caguauauauaugaagagcagua

SEQ ID NO: 242699 - RNA, 24 nt, Artificial Sequence
  Synthetic
ucaguauauauaugaagagcagua

SEQ ID NO: 242700 - RNA, 18 nt, Artificial Sequence
  Synthetic
uccuauuagugagcagua

SEQ ID NO: 242701 - RNA, 19 nt, Artificial Sequence
  Synthetic
uuccuauuagugagcagua

SEQ ID NO: 242702 - RNA, 20 nt, Artificial Sequence
  Synthetic
auuccuauuagugagcagua

SEQ ID NO: 242703 - RNA, 21 nt, Artificial Sequence
  Synthetic
uauuccuauuagugagcagua

SEQ ID NO: 242704 - RNA, 22 nt, Artificial Sequence
  Synthetic
guauuccuauuagugagcagua

SEQ ID NO: 242705 - RNA, 23 nt, Artificial Sequence
  Synthetic
uguauuccuauuagugagcagua

SEQ ID NO: 242706 - RNA, 24 nt, Artificial Sequence
  Synthetic
cuguauuccuauuagugagcagua

SEQ ID NO: 242707 - RNA, 18 nt, Artificial Sequence
  Synthetic
gaagugaaggaggcagua

SEQ ID NO: 242708 - RNA, 19 nt, Artificial Sequence
  Synthetic
ggaagugaaggaggcagua

SEQ ID NO: 242709 - RNA, 20 nt, Artificial Sequence
  Synthetic
aggaagugaaggaggcagua

SEQ ID NO: 242710 - RNA, 21 nt, Artificial Sequence
  Synthetic
aaggaagugaaggaggcagua

SEQ ID NO: 242711 - RNA, 22 nt, Artificial Sequence
  Synthetic
uaaggaagugaaggaggcagua

SEQ ID NO: 242712 - RNA, 23 nt, Artificial Sequence
  Synthetic
auaaggaagugaaggaggcagua

SEQ ID NO: 242713 - RNA, 24 nt, Artificial Sequence
  Synthetic
uauaaggaagugaaggaggcagua

SEQ ID NO: 242714 - RNA, 18 nt, Artificial Sequence
  Synthetic
cauacagugaaugcagua

SEQ ID NO: 242715 - RNA, 19 nt, Artificial Sequence
  Synthetic
gcauacagugaaugcagua

SEQ ID NO: 242716 - RNA, 20 nt, Artificial Sequence
  Synthetic
agcauacagugaaugcagua

SEQ ID NO: 242717 - RNA, 21 nt, Artificial Sequence
  Synthetic
gagcauacagugaaugcagua

SEQ ID NO: 242718 - RNA, 22 nt, Artificial Sequence
  Synthetic
agagcauacagugaaugcagua

SEQ ID NO: 242719 - RNA, 23 nt, Artificial Sequence
  Synthetic
gagagcauacagugaaugcagua

SEQ ID NO: 242720 - RNA, 24 nt, Artificial Sequence
  Synthetic
agagagcauacagugaaugcagua

SEQ ID NO: 242721 - RNA, 18 nt, Artificial Sequence
  Synthetic
uuggguauauaugcagua

SEQ ID NO: 242722 - RNA, 19 nt, Artificial Sequence
  Synthetic
uuuggguauauaugcagua

SEQ ID NO: 242723 - RNA, 20 nt, Artificial Sequence
  Synthetic
cuuuggguauauaugcagua

SEQ ID NO: 242724 - RNA, 21 nt, Artificial Sequence
  Synthetic
acuuuggguauauaugcagua

SEQ ID NO: 242725 - RNA, 22 nt, Artificial Sequence
  Synthetic
uacuuuggguauauaugcagua

SEQ ID NO: 242726 - RNA, 23 nt, Artificial Sequence
  Synthetic
auacuuuggguauauaugcagua

SEQ ID NO: 242727 - RNA, 24 nt, Artificial Sequence
  Synthetic
aauacuuuggguauauaugcagua

SEQ ID NO: 242728 - RNA, 18 nt, Artificial Sequence
  Synthetic
uguauauuaucugcagua

SEQ ID NO: 242729 - RNA, 19 nt, Artificial Sequence
  Synthetic
cuguauauuaucugcagua

SEQ ID NO: 242730 - RNA, 20 nt, Artificial Sequence
  Synthetic
ccuguauauuaucugcagua

SEQ ID NO: 242731 - RNA, 21 nt, Artificial Sequence
  Synthetic
cccuguauauuaucugcagua

SEQ ID NO: 242732 - RNA, 22 nt, Artificial Sequence
  Synthetic
ccccuguauauuaucugcagua

SEQ ID NO: 242733 - RNA, 23 nt, Artificial Sequence
  Synthetic
accccuguauauuaucugcagua

SEQ ID NO: 242734 - RNA, 24 nt, Artificial Sequence
  Synthetic
uaccccuguauauuaucugcagua

SEQ ID NO: 242735 - RNA, 18 nt, Artificial Sequence
  Synthetic
uaacaagacagugcagua

SEQ ID NO: 242736 - RNA, 19 nt, Artificial Sequence
  Synthetic
cuaacaagacagugcagua

SEQ ID NO: 242737 - RNA, 20 nt, Artificial Sequence
  Synthetic
acuaacaagacagugcagua

SEQ ID NO: 242738 - RNA, 21 nt, Artificial Sequence
  Synthetic
aacuaacaagacagugcagua

SEQ ID NO: 242739 - RNA, 22 nt, Artificial Sequence
  Synthetic
uaacuaacaagacagugcagua

SEQ ID NO: 242740 - RNA, 23 nt, Artificial Sequence
  Synthetic
auaacuaacaagacagugcagua

SEQ ID NO: 242741 - RNA, 24 nt, Artificial Sequence
  Synthetic
aauaacuaacaagacagugcagua

SEQ ID NO: 242742 - RNA, 18 nt, Artificial Sequence
  Synthetic
caaaaaaauauugcagua

SEQ ID NO: 242743 - RNA, 19 nt, Artificial Sequence
  Synthetic
acaaaaaaauauugcagua

SEQ ID NO: 242744 - RNA, 20 nt, Artificial Sequence
  Synthetic
aacaaaaaaauauugcagua

SEQ ID NO: 242745 - RNA, 21 nt, Artificial Sequence
  Synthetic
gaacaaaaaaauauugcagua

SEQ ID NO: 242746 - RNA, 22 nt, Artificial Sequence
  Synthetic
agaacaaaaaaauauugcagua

SEQ ID NO: 242747 - RNA, 23 nt, Artificial Sequence
  Synthetic
gagaacaaaaaaauauugcagua

SEQ ID NO: 242748 - RNA, 24 nt, Artificial Sequence
  Synthetic
ugagaacaaaaaaauauugcagua

SEQ ID NO: 242749 - RNA, 18 nt, Artificial Sequence
  Synthetic
uucacauuugaaucagua

SEQ ID NO: 242750 - RNA, 19 nt, Artificial Sequence
  Synthetic
auucacauuugaaucagua

SEQ ID NO: 242751 - RNA, 20 nt, Artificial Sequence
  Synthetic
gauucacauuugaaucagua

SEQ ID NO: 242752 - RNA, 21 nt, Artificial Sequence
  Synthetic
agauucacauuugaaucagua

SEQ ID NO: 242753 - RNA, 22 nt, Artificial Sequence
  Synthetic
gagauucacauuugaaucagua

SEQ ID NO: 242754 - RNA, 23 nt, Artificial Sequence
  Synthetic
agagauucacauuugaaucagua

SEQ ID NO: 242755 - RNA, 24 nt, Artificial Sequence
  Synthetic
gagagauucacauuugaaucagua

SEQ ID NO: 242756 - RNA, 18 nt, Artificial Sequence
  Synthetic
caucuucauugaucagua

SEQ ID NO: 242757 - RNA, 19 nt, Artificial Sequence
  Synthetic
ccaucuucauugaucagua

SEQ ID NO: 242758 - RNA, 20 nt, Artificial Sequence
  Synthetic
cccaucuucauugaucagua

SEQ ID NO: 242759 - RNA, 21 nt, Artificial Sequence
  Synthetic
acccaucuucauugaucagua

SEQ ID NO: 242760 - RNA, 22 nt, Artificial Sequence
  Synthetic
gacccaucuucauugaucagua

SEQ ID NO: 242761 - RNA, 23 nt, Artificial Sequence
  Synthetic
ugacccaucuucauugaucagua

SEQ ID NO: 242762 - RNA, 24 nt, Artificial Sequence
  Synthetic
gugacccaucuucauugaucagua

SEQ ID NO: 242763 - RNA, 18 nt, Artificial Sequence
  Synthetic
auuugcuugcuaucagua

SEQ ID NO: 242764 - RNA, 19 nt, Artificial Sequence
  Synthetic
uauuugcuugcuaucagua

SEQ ID NO: 242765 - RNA, 20 nt, Artificial Sequence
  Synthetic
uuauuugcuugcuaucagua

SEQ ID NO: 242766 - RNA, 21 nt, Artificial Sequence
  Synthetic
uuuauuugcuugcuaucagua

SEQ ID NO: 242767 - RNA, 22 nt, Artificial Sequence
  Synthetic
uuuuauuugcuugcuaucagua

SEQ ID NO: 242768 - RNA, 23 nt, Artificial Sequence
  Synthetic
auuuuauuugcuugcuaucagua

SEQ ID NO: 242769 - RNA, 24 nt, Artificial Sequence
  Synthetic
cauuuuauuugcuugcuaucagua

SEQ ID NO: 242770 - RNA, 18 nt, Artificial Sequence
  Synthetic
caacacgauguaucagua

SEQ ID NO: 242771 - RNA, 19 nt, Artificial Sequence
  Synthetic
acaacacgauguaucagua

SEQ ID NO: 242772 - RNA, 20 nt, Artificial Sequence
  Synthetic
cacaacacgauguaucagua

SEQ ID NO: 242773 - RNA, 21 nt, Artificial Sequence
  Synthetic
gcacaacacgauguaucagua

SEQ ID NO: 242774 - RNA, 22 nt, Artificial Sequence
  Synthetic
cgcacaacacgauguaucagua

SEQ ID NO: 242775 - RNA, 23 nt, Artificial Sequence
  Synthetic
acgcacaacacgauguaucagua

SEQ ID NO: 242776 - RNA, 24 nt, Artificial Sequence
  Synthetic
aacgcacaacacgauguaucagua

SEQ ID NO: 242777 - RNA, 18 nt, Artificial Sequence
  Synthetic
agauaaaaauuaucagua

SEQ ID NO: 242778 - RNA, 19 nt, Artificial Sequence
  Synthetic
uagauaaaaauuaucagua

SEQ ID NO: 242779 - RNA, 20 nt, Artificial Sequence
  Synthetic
uuagauaaaaauuaucagua

SEQ ID NO: 242780 - RNA, 21 nt, Artificial Sequence
  Synthetic
auuagauaaaaauuaucagua

SEQ ID NO: 242781 - RNA, 22 nt, Artificial Sequence
  Synthetic
aauuagauaaaaauuaucagua

SEQ ID NO: 242782 - RNA, 23 nt, Artificial Sequence
  Synthetic
aaauuagauaaaaauuaucagua

SEQ ID NO: 242783 - RNA, 24 nt, Artificial Sequence
  Synthetic
uaaauuagauaaaaauuaucagua

SEQ ID NO: 242784 - RNA, 18 nt, Artificial Sequence
  Synthetic
uaaauaguguuaucagua

SEQ ID NO: 242785 - RNA, 19 nt, Artificial Sequence
  Synthetic
uuaaauaguguuaucagua

SEQ ID NO: 242786 - RNA, 20 nt, Artificial Sequence
  Synthetic
auuaaauaguguuaucagua

SEQ ID NO: 242787 - RNA, 21 nt, Artificial Sequence
  Synthetic
aauuaaauaguguuaucagua

SEQ ID NO: 242788 - RNA, 22 nt, Artificial Sequence
  Synthetic
aaauuaaauaguguuaucagua

SEQ ID NO: 242789 - RNA, 23 nt, Artificial Sequence
  Synthetic
aaaauuaaauaguguuaucagua

SEQ ID NO: 242790 - RNA, 24 nt, Artificial Sequence
  Synthetic
aaaaauuaaauaguguuaucagua

SEQ ID NO: 242791 - RNA, 18 nt, Artificial Sequence
  Synthetic
uacgagcaagacucagua

SEQ ID NO: 242792 - RNA, 19 nt, Artificial Sequence
  Synthetic
uuacgagcaagacucagua

SEQ ID NO: 242793 - RNA, 20 nt, Artificial Sequence
  Synthetic
auuacgagcaagacucagua

SEQ ID NO: 242794 - RNA, 21 nt, Artificial Sequence
  Synthetic
aauuacgagcaagacucagua

SEQ ID NO: 242795 - RNA, 22 nt, Artificial Sequence
  Synthetic
uaauuacgagcaagacucagua

SEQ ID NO: 242796 - RNA, 23 nt, Artificial Sequence
  Synthetic
auaauuacgagcaagacucagua

SEQ ID NO: 242797 - RNA, 24 nt, Artificial Sequence
  Synthetic
gauaauuacgagcaagacucagua

SEQ ID NO: 242798 - RNA, 18 nt, Artificial Sequence
  Synthetic
uagauugagggcucagua

SEQ ID NO: 242799 - RNA, 19 nt, Artificial Sequence
  Synthetic
auagauugagggcucagua

SEQ ID NO: 242800 - RNA, 20 nt, Artificial Sequence
  Synthetic
cauagauugagggcucagua

SEQ ID NO: 242801 - RNA, 21 nt, Artificial Sequence
  Synthetic
ccauagauugagggcucagua

SEQ ID NO: 242802 - RNA, 22 nt, Artificial Sequence
  Synthetic
cccauagauugagggcucagua

SEQ ID NO: 242803 - RNA, 23 nt, Artificial Sequence
  Synthetic
ucccauagauugagggcucagua

SEQ ID NO: 242804 - RNA, 24 nt, Artificial Sequence
  Synthetic
aucccauagauugagggcucagua

SEQ ID NO: 242805 - RNA, 18 nt, Artificial Sequence
  Synthetic
caagguaguuugucagua

SEQ ID NO: 242806 - RNA, 19 nt, Artificial Sequence
  Synthetic
ucaagguaguuugucagua

SEQ ID NO: 242807 - RNA, 20 nt, Artificial Sequence
  Synthetic
gucaagguaguuugucagua

SEQ ID NO: 242808 - RNA, 21 nt, Artificial Sequence
  Synthetic
ugucaagguaguuugucagua

SEQ ID NO: 242809 - RNA, 22 nt, Artificial Sequence
  Synthetic
uugucaagguaguuugucagua

SEQ ID NO: 242810 - RNA, 23 nt, Artificial Sequence
  Synthetic
uuugucaagguaguuugucagua

SEQ ID NO: 242811 - RNA, 24 nt, Artificial Sequence
  Synthetic
auuugucaagguaguuugucagua

SEQ ID NO: 242812 - RNA, 18 nt, Artificial Sequence
  Synthetic
uauguacaauuuucagua

SEQ ID NO: 242813 - RNA, 19 nt, Artificial Sequence
  Synthetic
auauguacaauuuucagua

SEQ ID NO: 242814 - RNA, 20 nt, Artificial Sequence
  Synthetic
cauauguacaauuuucagua

SEQ ID NO: 242815 - RNA, 21 nt, Artificial Sequence
  Synthetic
ucauauguacaauuuucagua

SEQ ID NO: 242816 - RNA, 22 nt, Artificial Sequence
  Synthetic
cucauauguacaauuuucagua

SEQ ID NO: 242817 - RNA, 23 nt, Artificial Sequence
  Synthetic
ccucauauguacaauuuucagua

SEQ ID NO: 242818 - RNA, 24 nt, Artificial Sequence
  Synthetic
gccucauauguacaauuuucagua

SEQ ID NO: 242819 - RNA, 18 nt, Artificial Sequence
  Synthetic
gagggagaccuaagagua

SEQ ID NO: 242820 - RNA, 19 nt, Artificial Sequence
  Synthetic
agagggagaccuaagagua

SEQ ID NO: 242821 - RNA, 20 nt, Artificial Sequence
  Synthetic
aagagggagaccuaagagua

SEQ ID NO: 242822 - RNA, 21 nt, Artificial Sequence
  Synthetic
caagagggagaccuaagagua

SEQ ID NO: 242823 - RNA, 22 nt, Artificial Sequence
  Synthetic
acaagagggagaccuaagagua

SEQ ID NO: 242824 - RNA, 23 nt, Artificial Sequence
  Synthetic
cacaagagggagaccuaagagua

SEQ ID NO: 242825 - RNA, 24 nt, Artificial Sequence
  Synthetic
acacaagagggagaccuaagagua

SEQ ID NO: 242826 - RNA, 18 nt, Artificial Sequence
  Synthetic
agugaggcagacagagua

SEQ ID NO: 242827 - RNA, 19 nt, Artificial Sequence
  Synthetic
aagugaggcagacagagua

SEQ ID NO: 242828 - RNA, 20 nt, Artificial Sequence
  Synthetic
gaagugaggcagacagagua

SEQ ID NO: 242829 - RNA, 21 nt, Artificial Sequence
  Synthetic
agaagugaggcagacagagua

SEQ ID NO: 242830 - RNA, 22 nt, Artificial Sequence
  Synthetic
aagaagugaggcagacagagua

SEQ ID NO: 242831 - RNA, 23 nt, Artificial Sequence
  Synthetic
caagaagugaggcagacagagua

SEQ ID NO: 242832 - RNA, 24 nt, Artificial Sequence
  Synthetic
acaagaagugaggcagacagagua

SEQ ID NO: 242833 - RNA, 18 nt, Artificial Sequence
  Synthetic
caaaucugguucagagua

SEQ ID NO: 242834 - RNA, 19 nt, Artificial Sequence
  Synthetic
ucaaaucugguucagagua

SEQ ID NO: 242835 - RNA, 20 nt, Artificial Sequence
  Synthetic
gucaaaucugguucagagua

SEQ ID NO: 242836 - RNA, 21 nt, Artificial Sequence
  Synthetic
ggucaaaucugguucagagua

SEQ ID NO: 242837 - RNA, 22 nt, Artificial Sequence
  Synthetic
gggucaaaucugguucagagua

SEQ ID NO: 242838 - RNA, 23 nt, Artificial Sequence
  Synthetic
agggucaaaucugguucagagua

SEQ ID NO: 242839 - RNA, 24 nt, Artificial Sequence
  Synthetic
gagggucaaaucugguucagagua

SEQ ID NO: 242840 - RNA, 18 nt, Artificial Sequence
  Synthetic
aaccagacuaagagagua

SEQ ID NO: 242841 - RNA, 19 nt, Artificial Sequence
  Synthetic
uaaccagacuaagagagua

SEQ ID NO: 242842 - RNA, 20 nt, Artificial Sequence
  Synthetic
cuaaccagacuaagagagua

SEQ ID NO: 242843 - RNA, 21 nt, Artificial Sequence
  Synthetic
gcuaaccagacuaagagagua

SEQ ID NO: 242844 - RNA, 22 nt, Artificial Sequence
  Synthetic
agcuaaccagacuaagagagua

SEQ ID NO: 242845 - RNA, 23 nt, Artificial Sequence
  Synthetic
uagcuaaccagacuaagagagua

SEQ ID NO: 242846 - RNA, 24 nt, Artificial Sequence
  Synthetic
uuagcuaaccagacuaagagagua

SEQ ID NO: 242847 - RNA, 18 nt, Artificial Sequence
  Synthetic
auugaaauacugagagua

SEQ ID NO: 242848 - RNA, 19 nt, Artificial Sequence
  Synthetic
aauugaaauacugagagua

SEQ ID NO: 242849 - RNA, 20 nt, Artificial Sequence
  Synthetic
uaauugaaauacugagagua

SEQ ID NO: 242850 - RNA, 21 nt, Artificial Sequence
  Synthetic
auaauugaaauacugagagua

SEQ ID NO: 242851 - RNA, 22 nt, Artificial Sequence
  Synthetic
gauaauugaaauacugagagua

SEQ ID NO: 242852 - RNA, 23 nt, Artificial Sequence
  Synthetic
ugauaauugaaauacugagagua

SEQ ID NO: 242853 - RNA, 24 nt, Artificial Sequence
  Synthetic
augauaauugaaauacugagagua

SEQ ID NO: 242854 - RNA, 18 nt, Artificial Sequence
  Synthetic
ugcauaauuaaacgagua

SEQ ID NO: 242855 - RNA, 19 nt, Artificial Sequence
  Synthetic
uugcauaauuaaacgagua

SEQ ID NO: 242856 - RNA, 20 nt, Artificial Sequence
  Synthetic
auugcauaauuaaacgagua

SEQ ID NO: 242857 - RNA, 21 nt, Artificial Sequence
  Synthetic
gauugcauaauuaaacgagua

SEQ ID NO: 242858 - RNA, 22 nt, Artificial Sequence
  Synthetic
cgauugcauaauuaaacgagua

SEQ ID NO: 242859 - RNA, 23 nt, Artificial Sequence
  Synthetic
ccgauugcauaauuaaacgagua

SEQ ID NO: 242860 - RNA, 24 nt, Artificial Sequence
  Synthetic
uccgauugcauaauuaaacgagua

SEQ ID NO: 242861 - RNA, 18 nt, Artificial Sequence
  Synthetic
ugcuugauaaaaggagua

SEQ ID NO: 242862 - RNA, 19 nt, Artificial Sequence
  Synthetic
augcuugauaaaaggagua

SEQ ID NO: 242863 - RNA, 20 nt, Artificial Sequence
  Synthetic
aaugcuugauaaaaggagua

SEQ ID NO: 242864 - RNA, 21 nt, Artificial Sequence
  Synthetic
uaaugcuugauaaaaggagua

SEQ ID NO: 242865 - RNA, 22 nt, Artificial Sequence
  Synthetic
guaaugcuugauaaaaggagua

SEQ ID NO: 242866 - RNA, 23 nt, Artificial Sequence
  Synthetic
uguaaugcuugauaaaaggagua

SEQ ID NO: 242867 - RNA, 24 nt, Artificial Sequence
  Synthetic
cuguaaugcuugauaaaaggagua

SEQ ID NO: 242868 - RNA, 18 nt, Artificial Sequence
  Synthetic
gugacagacgaaggagua

SEQ ID NO: 242869 - RNA, 19 nt, Artificial Sequence
  Synthetic
agugacagacgaaggagua

SEQ ID NO: 242870 - RNA, 20 nt, Artificial Sequence
  Synthetic
gagugacagacgaaggagua

SEQ ID NO: 242871 - RNA, 21 nt, Artificial Sequence
  Synthetic
agagugacagacgaaggagua

SEQ ID NO: 242872 - RNA, 22 nt, Artificial Sequence
  Synthetic
aagagugacagacgaaggagua

SEQ ID NO: 242873 - RNA, 23 nt, Artificial Sequence
  Synthetic
gaagagugacagacgaaggagua

SEQ ID NO: 242874 - RNA, 24 nt, Artificial Sequence
  Synthetic
ggaagagugacagacgaaggagua

SEQ ID NO: 242875 - RNA, 18 nt, Artificial Sequence
  Synthetic
ugcaaaauccuaggagua

SEQ ID NO: 242876 - RNA, 19 nt, Artificial Sequence
  Synthetic
augcaaaauccuaggagua

SEQ ID NO: 242877 - RNA, 20 nt, Artificial Sequence
  Synthetic
uaugcaaaauccuaggagua

SEQ ID NO: 242878 - RNA, 21 nt, Artificial Sequence
  Synthetic
uuaugcaaaauccuaggagua

SEQ ID NO: 242879 - RNA, 22 nt, Artificial Sequence
  Synthetic
uuuaugcaaaauccuaggagua

SEQ ID NO: 242880 - RNA, 23 nt, Artificial Sequence
  Synthetic
cuuuaugcaaaauccuaggagua

SEQ ID NO: 242881 - RNA, 24 nt, Artificial Sequence
  Synthetic
acuuuaugcaaaauccuaggagua

SEQ ID NO: 242882 - RNA, 18 nt, Artificial Sequence
  Synthetic
aggaugcaaguaggagua

SEQ ID NO: 242883 - RNA, 19 nt, Artificial Sequence
  Synthetic
gaggaugcaaguaggagua

SEQ ID NO: 242884 - RNA, 20 nt, Artificial Sequence
  Synthetic
ugaggaugcaaguaggagua

SEQ ID NO: 242885 - RNA, 21 nt, Artificial Sequence
  Synthetic
augaggaugcaaguaggagua

SEQ ID NO: 242886 - RNA, 22 nt, Artificial Sequence
  Synthetic
aaugaggaugcaaguaggagua

SEQ ID NO: 242887 - RNA, 23 nt, Artificial Sequence
  Synthetic
caaugaggaugcaaguaggagua

SEQ ID NO: 242888 - RNA, 24 nt, Artificial Sequence
  Synthetic
gcaaugaggaugcaaguaggagua

SEQ ID NO: 242889 - RNA, 18 nt, Artificial Sequence
  Synthetic
guuacugcauagggagua

SEQ ID NO: 242890 - RNA, 19 nt, Artificial Sequence
  Synthetic
uguuacugcauagggagua

SEQ ID NO: 242891 - RNA, 20 nt, Artificial Sequence
  Synthetic
auguuacugcauagggagua

SEQ ID NO: 242892 - RNA, 21 nt, Artificial Sequence
  Synthetic
aauguuacugcauagggagua

SEQ ID NO: 242893 - RNA, 22 nt, Artificial Sequence
  Synthetic
aaauguuacugcauagggagua

SEQ ID NO: 242894 - RNA, 23 nt, Artificial Sequence
  Synthetic
uaaauguuacugcauagggagua

SEQ ID NO: 242895 - RNA, 24 nt, Artificial Sequence
  Synthetic
uuaaauguuacugcauagggagua

SEQ ID NO: 242896 - RNA, 18 nt, Artificial Sequence
  Synthetic
aggcagauagggggagua

SEQ ID NO: 242897 - RNA, 19 nt, Artificial Sequence
  Synthetic
uaggcagauagggggagua

SEQ ID NO: 242898 - RNA, 20 nt, Artificial Sequence
  Synthetic
uuaggcagauagggggagua

SEQ ID NO: 242899 - RNA, 21 nt, Artificial Sequence
  Synthetic
uuuaggcagauagggggagua

SEQ ID NO: 242900 - RNA, 22 nt, Artificial Sequence
  Synthetic
uuuuaggcagauagggggagua

SEQ ID NO: 242901 - RNA, 23 nt, Artificial Sequence
  Synthetic
cuuuuaggcagauagggggagua

SEQ ID NO: 242902 - RNA, 24 nt, Artificial Sequence
  Synthetic
gcuuuuaggcagauagggggagua

SEQ ID NO: 242903 - RNA, 18 nt, Artificial Sequence
  Synthetic
gcuucacugcugggagua

SEQ ID NO: 242904 - RNA, 19 nt, Artificial Sequence
  Synthetic
agcuucacugcugggagua

SEQ ID NO: 242905 - RNA, 20 nt, Artificial Sequence
  Synthetic
aagcuucacugcugggagua

SEQ ID NO: 242906 - RNA, 21 nt, Artificial Sequence
  Synthetic
caagcuucacugcugggagua

SEQ ID NO: 242907 - RNA, 22 nt, Artificial Sequence
  Synthetic
gcaagcuucacugcugggagua

SEQ ID NO: 242908 - RNA, 23 nt, Artificial Sequence
  Synthetic
ugcaagcuucacugcugggagua

SEQ ID NO: 242909 - RNA, 24 nt, Artificial Sequence
  Synthetic
cugcaagcuucacugcugggagua

SEQ ID NO: 242910 - RNA, 18 nt, Artificial Sequence
  Synthetic
agugcuguaaauggagua

SEQ ID NO: 242911 - RNA, 19 nt, Artificial Sequence
  Synthetic
uagugcuguaaauggagua

SEQ ID NO: 242912 - RNA, 20 nt, Artificial Sequence
  Synthetic
cuagugcuguaaauggagua

SEQ ID NO: 242913 - RNA, 21 nt, Artificial Sequence
  Synthetic
ucuagugcuguaaauggagua

SEQ ID NO: 242914 - RNA, 22 nt, Artificial Sequence
  Synthetic
gucuagugcuguaaauggagua

SEQ ID NO: 242915 - RNA, 23 nt, Artificial Sequence
  Synthetic
ugucuagugcuguaaauggagua

SEQ ID NO: 242916 - RNA, 24 nt, Artificial Sequence
  Synthetic
cugucuagugcuguaaauggagua

SEQ ID NO: 242917 - RNA, 18 nt, Artificial Sequence
  Synthetic
uuuguauucuauggagua

SEQ ID NO: 242918 - RNA, 19 nt, Artificial Sequence
  Synthetic
uuuuguauucuauggagua

SEQ ID NO: 242919 - RNA, 20 nt, Artificial Sequence
  Synthetic
uuuuuguauucuauggagua

SEQ ID NO: 242920 - RNA, 21 nt, Artificial Sequence
  Synthetic
guuuuuguauucuauggagua

SEQ ID NO: 242921 - RNA, 22 nt, Artificial Sequence
  Synthetic
aguuuuuguauucuauggagua

SEQ ID NO: 242922 - RNA, 23 nt, Artificial Sequence
  Synthetic
gaguuuuuguauucuauggagua

SEQ ID NO: 242923 - RNA, 24 nt, Artificial Sequence
  Synthetic
agaguuuuuguauucuauggagua

SEQ ID NO: 242924 - RNA, 18 nt, Artificial Sequence
  Synthetic
ugggagugggaaugagua

SEQ ID NO: 242925 - RNA, 19 nt, Artificial Sequence
  Synthetic
uugggagugggaaugagua

SEQ ID NO: 242926 - RNA, 20 nt, Artificial Sequence
  Synthetic
uuugggagugggaaugagua

SEQ ID NO: 242927 - RNA, 21 nt, Artificial Sequence
  Synthetic
guuugggagugggaaugagua

SEQ ID NO: 242928 - RNA, 22 nt, Artificial Sequence
  Synthetic
gguuugggagugggaaugagua

SEQ ID NO: 242929 - RNA, 23 nt, Artificial Sequence
  Synthetic
ugguuugggagugggaaugagua

SEQ ID NO: 242930 - RNA, 24 nt, Artificial Sequence
  Synthetic
uugguuugggagugggaaugagua

SEQ ID NO: 242931 - RNA, 18 nt, Artificial Sequence
  Synthetic
cagucuucaucaugagua

SEQ ID NO: 242932 - RNA, 19 nt, Artificial Sequence
  Synthetic
acagucuucaucaugagua

SEQ ID NO: 242933 - RNA, 20 nt, Artificial Sequence
  Synthetic
aacagucuucaucaugagua

SEQ ID NO: 242934 - RNA, 21 nt, Artificial Sequence
  Synthetic
uaacagucuucaucaugagua

SEQ ID NO: 242935 - RNA, 22 nt, Artificial Sequence
  Synthetic
guaacagucuucaucaugagua

SEQ ID NO: 242936 - RNA, 23 nt, Artificial Sequence
  Synthetic
uguaacagucuucaucaugagua

SEQ ID NO: 242937 - RNA, 24 nt, Artificial Sequence
  Synthetic
auguaacagucuucaucaugagua

SEQ ID NO: 242938 - RNA, 18 nt, Artificial Sequence
  Synthetic
cucaggaguuacugagua

SEQ ID NO: 242939 - RNA, 19 nt, Artificial Sequence
  Synthetic
ucucaggaguuacugagua

SEQ ID NO: 242940 - RNA, 20 nt, Artificial Sequence
  Synthetic
aucucaggaguuacugagua

SEQ ID NO: 242941 - RNA, 21 nt, Artificial Sequence
  Synthetic
caucucaggaguuacugagua

SEQ ID NO: 242942 - RNA, 22 nt, Artificial Sequence
  Synthetic
ucaucucaggaguuacugagua

SEQ ID NO: 242943 - RNA, 23 nt, Artificial Sequence
  Synthetic
uucaucucaggaguuacugagua

SEQ ID NO: 242944 - RNA, 24 nt, Artificial Sequence
  Synthetic
guucaucucaggaguuacugagua

SEQ ID NO: 242945 - RNA, 18 nt, Artificial Sequence
  Synthetic
ugauuuaauaccugagua

SEQ ID NO: 242946 - RNA, 19 nt, Artificial Sequence
  Synthetic
uugauuuaauaccugagua

SEQ ID NO: 242947 - RNA, 20 nt, Artificial Sequence
  Synthetic
uuugauuuaauaccugagua

SEQ ID NO: 242948 - RNA, 21 nt, Artificial Sequence
  Synthetic
auuugauuuaauaccugagua

SEQ ID NO: 242949 - RNA, 22 nt, Artificial Sequence
  Synthetic
uauuugauuuaauaccugagua

SEQ ID NO: 242950 - RNA, 23 nt, Artificial Sequence
  Synthetic
auauuugauuuaauaccugagua

SEQ ID NO: 242951 - RNA, 24 nt, Artificial Sequence
  Synthetic
aauauuugauuuaauaccugagua

SEQ ID NO: 242952 - RNA, 18 nt, Artificial Sequence
  Synthetic
cguuuccuauucugagua

SEQ ID NO: 242953 - RNA, 19 nt, Artificial Sequence
  Synthetic
ucguuuccuauucugagua

SEQ ID NO: 242954 - RNA, 20 nt, Artificial Sequence
  Synthetic
uucguuuccuauucugagua

SEQ ID NO: 242955 - RNA, 21 nt, Artificial Sequence
  Synthetic
cuucguuuccuauucugagua

SEQ ID NO: 242956 - RNA, 22 nt, Artificial Sequence
  Synthetic
ucuucguuuccuauucugagua

SEQ ID NO: 242957 - RNA, 23 nt, Artificial Sequence
  Synthetic
aucuucguuuccuauucugagua

SEQ ID NO: 242958 - RNA, 24 nt, Artificial Sequence
  Synthetic
gaucuucguuuccuauucugagua

SEQ ID NO: 242959 - RNA, 18 nt, Artificial Sequence
  Synthetic
gauuuuauucugugagua

SEQ ID NO: 242960 - RNA, 19 nt, Artificial Sequence
  Synthetic
ggauuuuauucugugagua

SEQ ID NO: 242961 - RNA, 20 nt, Artificial Sequence
  Synthetic
uggauuuuauucugugagua

SEQ ID NO: 242962 - RNA, 21 nt, Artificial Sequence
  Synthetic
guggauuuuauucugugagua

SEQ ID NO: 242963 - RNA, 22 nt, Artificial Sequence
  Synthetic
gguggauuuuauucugugagua

SEQ ID NO: 242964 - RNA, 23 nt, Artificial Sequence
  Synthetic
agguggauuuuauucugugagua

SEQ ID NO: 242965 - RNA, 24 nt, Artificial Sequence
  Synthetic
gagguggauuuuauucugugagua

SEQ ID NO: 242966 - RNA, 18 nt, Artificial Sequence
  Synthetic
acuaauugccauugagua

SEQ ID NO: 242967 - RNA, 19 nt, Artificial Sequence
  Synthetic
uacuaauugccauugagua

SEQ ID NO: 242968 - RNA, 20 nt, Artificial Sequence
  Synthetic
auacuaauugccauugagua

SEQ ID NO: 242969 - RNA, 21 nt, Artificial Sequence
  Synthetic
cauacuaauugccauugagua

SEQ ID NO: 242970 - RNA, 22 nt, Artificial Sequence
  Synthetic
gcauacuaauugccauugagua

SEQ ID NO: 242971 - RNA, 23 nt, Artificial Sequence
  Synthetic
ugcauacuaauugccauugagua

SEQ ID NO: 242972 - RNA, 24 nt, Artificial Sequence
  Synthetic
gugcauacuaauugccauugagua

SEQ ID NO: 242973 - RNA, 18 nt, Artificial Sequence
  Synthetic
uugaugguaccuugagua

SEQ ID NO: 242974 - RNA, 19 nt, Artificial Sequence
  Synthetic
uuugaugguaccuugagua

SEQ ID NO: 242975 - RNA, 20 nt, Artificial Sequence
  Synthetic
auuugaugguaccuugagua

SEQ ID NO: 242976 - RNA, 21 nt, Artificial Sequence
  Synthetic
uauuugaugguaccuugagua

SEQ ID NO: 242977 - RNA, 22 nt, Artificial Sequence
  Synthetic
guauuugaugguaccuugagua

SEQ ID NO: 242978 - RNA, 23 nt, Artificial Sequence
  Synthetic
gguauuugaugguaccuugagua

SEQ ID NO: 242979 - RNA, 24 nt, Artificial Sequence
  Synthetic
ggguauuugaugguaccuugagua

SEQ ID NO: 242980 - RNA, 18 nt, Artificial Sequence
  Synthetic
cauuucuauaaaauagua

SEQ ID NO: 242981 - RNA, 19 nt, Artificial Sequence
  Synthetic
ccauuucuauaaaauagua

SEQ ID NO: 242982 - RNA, 20 nt, Artificial Sequence
  Synthetic
gccauuucuauaaaauagua

SEQ ID NO: 242983 - RNA, 21 nt, Artificial Sequence
  Synthetic
agccauuucuauaaaauagua

SEQ ID NO: 242984 - RNA, 22 nt, Artificial Sequence
  Synthetic
aagccauuucuauaaaauagua

SEQ ID NO: 242985 - RNA, 23 nt, Artificial Sequence
  Synthetic
gaagccauuucuauaaaauagua

SEQ ID NO: 242986 - RNA, 24 nt, Artificial Sequence
  Synthetic
agaagccauuucuauaaaauagua

SEQ ID NO: 242987 - RNA, 18 nt, Artificial Sequence
  Synthetic
aucuggagucaaauagua

SEQ ID NO: 242988 - RNA, 19 nt, Artificial Sequence
  Synthetic
caucuggagucaaauagua

SEQ ID NO: 242989 - RNA, 20 nt, Artificial Sequence
  Synthetic
ucaucuggagucaaauagua

SEQ ID NO: 242990 - RNA, 21 nt, Artificial Sequence
  Synthetic
aucaucuggagucaaauagua

SEQ ID NO: 242991 - RNA, 22 nt, Artificial Sequence
  Synthetic
aaucaucuggagucaaauagua

SEQ ID NO: 242992 - RNA, 23 nt, Artificial Sequence
  Synthetic
aaaucaucuggagucaaauagua

SEQ ID NO: 242993 - RNA, 24 nt, Artificial Sequence
  Synthetic
aaaaucaucuggagucaaauagua

SEQ ID NO: 242994 - RNA, 18 nt, Artificial Sequence
  Synthetic
aaacuugaauaaauagua

SEQ ID NO: 242995 - RNA, 19 nt, Artificial Sequence
  Synthetic
uaaacuugaauaaauagua

SEQ ID NO: 242996 - RNA, 20 nt, Artificial Sequence
  Synthetic
auaaacuugaauaaauagua

SEQ ID NO: 242997 - RNA, 21 nt, Artificial Sequence
  Synthetic
gauaaacuugaauaaauagua

SEQ ID NO: 242998 - RNA, 22 nt, Artificial Sequence
  Synthetic
ugauaaacuugaauaaauagua

SEQ ID NO: 242999 - RNA, 23 nt, Artificial Sequence
  Synthetic
uugauaaacuugaauaaauagua

SEQ ID NO: 243000 - RNA, 24 nt, Artificial Sequence
  Synthetic
cuugauaaacuugaauaaauagua

SEQ ID NO: 243001 - RNA, 18 nt, Artificial Sequence
  Synthetic
uacaauuuuugaauagua

SEQ ID NO: 243002 - RNA, 19 nt, Artificial Sequence
  Synthetic
auacaauuuuugaauagua

SEQ ID NO: 243003 - RNA, 20 nt, Artificial Sequence
  Synthetic
uauacaauuuuugaauagua

SEQ ID NO: 243004 - RNA, 21 nt, Artificial Sequence
  Synthetic
guauacaauuuuugaauagua

SEQ ID NO: 243005 - RNA, 22 nt, Artificial Sequence
  Synthetic
aguauacaauuuuugaauagua

SEQ ID NO: 243006 - RNA, 23 nt, Artificial Sequence
  Synthetic
aaguauacaauuuuugaauagua

SEQ ID NO: 243007 - RNA, 24 nt, Artificial Sequence
  Synthetic
gaaguauacaauuuuugaauagua

SEQ ID NO: 243008 - RNA, 18 nt, Artificial Sequence
  Synthetic
uacaguacaauaauagua

SEQ ID NO: 243009 - RNA, 19 nt, Artificial Sequence
  Synthetic
cuacaguacaauaauagua

SEQ ID NO: 243010 - RNA, 20 nt, Artificial Sequence
  Synthetic
acuacaguacaauaauagua

SEQ ID NO: 243011 - RNA, 21 nt, Artificial Sequence
  Synthetic
aacuacaguacaauaauagua

SEQ ID NO: 243012 - RNA, 22 nt, Artificial Sequence
  Synthetic
aaacuacaguacaauaauagua

SEQ ID NO: 243013 - RNA, 23 nt, Artificial Sequence
  Synthetic
caaacuacaguacaauaauagua

SEQ ID NO: 243014 - RNA, 24 nt, Artificial Sequence
  Synthetic
acaaacuacaguacaauaauagua

SEQ ID NO: 243015 - RNA, 18 nt, Artificial Sequence
  Synthetic
ugucgaugacacauagua

SEQ ID NO: 243016 - RNA, 19 nt, Artificial Sequence
  Synthetic
uugucgaugacacauagua

SEQ ID NO: 243017 - RNA, 20 nt, Artificial Sequence
  Synthetic
cuugucgaugacacauagua

SEQ ID NO: 243018 - RNA, 21 nt, Artificial Sequence
  Synthetic
ucuugucgaugacacauagua

SEQ ID NO: 243019 - RNA, 22 nt, Artificial Sequence
  Synthetic
cucuugucgaugacacauagua

SEQ ID NO: 243020 - RNA, 23 nt, Artificial Sequence
  Synthetic
acucuugucgaugacacauagua

SEQ ID NO: 243021 - RNA, 24 nt, Artificial Sequence
  Synthetic
aacucuugucgaugacacauagua

SEQ ID NO: 243022 - RNA, 18 nt, Artificial Sequence
  Synthetic
guguccuguugcauagua

SEQ ID NO: 243023 - RNA, 19 nt, Artificial Sequence
  Synthetic
gguguccuguugcauagua

SEQ ID NO: 243024 - RNA, 20 nt, Artificial Sequence
  Synthetic
ugguguccuguugcauagua

SEQ ID NO: 243025 - RNA, 21 nt, Artificial Sequence
  Synthetic
cugguguccuguugcauagua

SEQ ID NO: 243026 - RNA, 22 nt, Artificial Sequence
  Synthetic
ucugguguccuguugcauagua

SEQ ID NO: 243027 - RNA, 23 nt, Artificial Sequence
  Synthetic
uucugguguccuguugcauagua

SEQ ID NO: 243028 - RNA, 24 nt, Artificial Sequence
  Synthetic
guucugguguccuguugcauagua

SEQ ID NO: 243029 - RNA, 18 nt, Artificial Sequence
  Synthetic
acauuugaguagauagua

SEQ ID NO: 243030 - RNA, 19 nt, Artificial Sequence
  Synthetic
aacauuugaguagauagua

SEQ ID NO: 243031 - RNA, 20 nt, Artificial Sequence
  Synthetic
gaacauuugaguagauagua

SEQ ID NO: 243032 - RNA, 21 nt, Artificial Sequence
  Synthetic
agaacauuugaguagauagua

SEQ ID NO: 243033 - RNA, 22 nt, Artificial Sequence
  Synthetic
cagaacauuugaguagauagua

SEQ ID NO: 243034 - RNA, 23 nt, Artificial Sequence
  Synthetic
gcagaacauuugaguagauagua

SEQ ID NO: 243035 - RNA, 24 nt, Artificial Sequence
  Synthetic
agcagaacauuugaguagauagua

SEQ ID NO: 243036 - RNA, 18 nt, Artificial Sequence
  Synthetic
cugcaguggaggauagua

SEQ ID NO: 243037 - RNA, 19 nt, Artificial Sequence
  Synthetic
ccugcaguggaggauagua

SEQ ID NO: 243038 - RNA, 20 nt, Artificial Sequence
  Synthetic
uccugcaguggaggauagua

SEQ ID NO: 243039 - RNA, 21 nt, Artificial Sequence
  Synthetic
auccugcaguggaggauagua

SEQ ID NO: 243040 - RNA, 22 nt, Artificial Sequence
  Synthetic
uauccugcaguggaggauagua

SEQ ID NO: 243041 - RNA, 23 nt, Artificial Sequence
  Synthetic
uuauccugcaguggaggauagua

SEQ ID NO: 243042 - RNA, 24 nt, Artificial Sequence
  Synthetic
auuauccugcaguggaggauagua

SEQ ID NO: 243043 - RNA, 18 nt, Artificial Sequence
  Synthetic
uacaaggaagggauagua

SEQ ID NO: 243044 - RNA, 19 nt, Artificial Sequence
  Synthetic
uuacaaggaagggauagua

SEQ ID NO: 243045 - RNA, 20 nt, Artificial Sequence
  Synthetic
auuacaaggaagggauagua

SEQ ID NO: 243046 - RNA, 21 nt, Artificial Sequence
  Synthetic
uauuacaaggaagggauagua

SEQ ID NO: 243047 - RNA, 22 nt, Artificial Sequence
  Synthetic
cuauuacaaggaagggauagua

SEQ ID NO: 243048 - RNA, 23 nt, Artificial Sequence
  Synthetic
ucuauuacaaggaagggauagua

SEQ ID NO: 243049 - RNA, 24 nt, Artificial Sequence
  Synthetic
cucuauuacaaggaagggauagua

SEQ ID NO: 243050 - RNA, 18 nt, Artificial Sequence
  Synthetic
cugggucaacauauagua

SEQ ID NO: 243051 - RNA, 19 nt, Artificial Sequence
  Synthetic
acugggucaacauauagua

SEQ ID NO: 243052 - RNA, 20 nt, Artificial Sequence
  Synthetic
gacugggucaacauauagua

SEQ ID NO: 243053 - RNA, 21 nt, Artificial Sequence
  Synthetic
agacugggucaacauauagua

SEQ ID NO: 243054 - RNA, 22 nt, Artificial Sequence
  Synthetic
uagacugggucaacauauagua

SEQ ID NO: 243055 - RNA, 23 nt, Artificial Sequence
  Synthetic
auagacugggucaacauauagua

SEQ ID NO: 243056 - RNA, 24 nt, Artificial Sequence
  Synthetic
aauagacugggucaacauauagua

SEQ ID NO: 243057 - RNA, 18 nt, Artificial Sequence
  Synthetic
gacuugauccauauagua

SEQ ID NO: 243058 - RNA, 19 nt, Artificial Sequence
  Synthetic
ugacuugauccauauagua

SEQ ID NO: 243059 - RNA, 20 nt, Artificial Sequence
  Synthetic
augacuugauccauauagua

SEQ ID NO: 243060 - RNA, 21 nt, Artificial Sequence
  Synthetic
uaugacuugauccauauagua

SEQ ID NO: 243061 - RNA, 22 nt, Artificial Sequence
  Synthetic
auaugacuugauccauauagua

SEQ ID NO: 243062 - RNA, 23 nt, Artificial Sequence
  Synthetic
aauaugacuugauccauauagua

SEQ ID NO: 243063 - RNA, 24 nt, Artificial Sequence
  Synthetic
aaauaugacuugauccauauagua

SEQ ID NO: 243064 - RNA, 18 nt, Artificial Sequence
  Synthetic
caaggagcucauauagua

SEQ ID NO: 243065 - RNA, 19 nt, Artificial Sequence
  Synthetic
ucaaggagcucauauagua

SEQ ID NO: 243066 - RNA, 20 nt, Artificial Sequence
  Synthetic
uucaaggagcucauauagua

SEQ ID NO: 243067 - RNA, 21 nt, Artificial Sequence
  Synthetic
uuucaaggagcucauauagua

SEQ ID NO: 243068 - RNA, 22 nt, Artificial Sequence
  Synthetic
cuuucaaggagcucauauagua

SEQ ID NO: 243069 - RNA, 23 nt, Artificial Sequence
  Synthetic
ccuuucaaggagcucauauagua

SEQ ID NO: 243070 - RNA, 24 nt, Artificial Sequence
  Synthetic
uccuuucaaggagcucauauagua

SEQ ID NO: 243071 - RNA, 18 nt, Artificial Sequence
  Synthetic
acauacuggaaacuagua

SEQ ID NO: 243072 - RNA, 19 nt, Artificial Sequence
  Synthetic
uacauacuggaaacuagua

SEQ ID NO: 243073 - RNA, 20 nt, Artificial Sequence
  Synthetic
guacauacuggaaacuagua

SEQ ID NO: 243074 - RNA, 21 nt, Artificial Sequence
  Synthetic
aguacauacuggaaacuagua

SEQ ID NO: 243075 - RNA, 22 nt, Artificial Sequence
  Synthetic
caguacauacuggaaacuagua

SEQ ID NO: 243076 - RNA, 23 nt, Artificial Sequence
  Synthetic
acaguacauacuggaaacuagua

SEQ ID NO: 243077 - RNA, 24 nt, Artificial Sequence
  Synthetic
aacaguacauacuggaaacuagua

SEQ ID NO: 243078 - RNA, 18 nt, Artificial Sequence
  Synthetic
uuugcugacacccuagua

SEQ ID NO: 243079 - RNA, 19 nt, Artificial Sequence
  Synthetic
guuugcugacacccuagua

SEQ ID NO: 243080 - RNA, 20 nt, Artificial Sequence
  Synthetic
aguuugcugacacccuagua

SEQ ID NO: 243081 - RNA, 21 nt, Artificial Sequence
  Synthetic
uaguuugcugacacccuagua

SEQ ID NO: 243082 - RNA, 22 nt, Artificial Sequence
  Synthetic
guaguuugcugacacccuagua

SEQ ID NO: 243083 - RNA, 23 nt, Artificial Sequence
  Synthetic
uguaguuugcugacacccuagua

SEQ ID NO: 243084 - RNA, 24 nt, Artificial Sequence
  Synthetic
uuguaguuugcugacacccuagua

SEQ ID NO: 243085 - RNA, 18 nt, Artificial Sequence
  Synthetic
ccccacccuucccuagua

SEQ ID NO: 243086 - RNA, 19 nt, Artificial Sequence
  Synthetic
accccacccuucccuagua

SEQ ID NO: 243087 - RNA, 20 nt, Artificial Sequence
  Synthetic
uaccccacccuucccuagua

SEQ ID NO: 243088 - RNA, 21 nt, Artificial Sequence
  Synthetic
auaccccacccuucccuagua

SEQ ID NO: 243089 - RNA, 22 nt, Artificial Sequence
  Synthetic
uauaccccacccuucccuagua

SEQ ID NO: 243090 - RNA, 23 nt, Artificial Sequence
  Synthetic
uuauaccccacccuucccuagua

SEQ ID NO: 243091 - RNA, 24 nt, Artificial Sequence
  Synthetic
auuauaccccacccuucccuagua

SEQ ID NO: 243092 - RNA, 18 nt, Artificial Sequence
  Synthetic
uacugcuuacugcuagua

SEQ ID NO: 243093 - RNA, 19 nt, Artificial Sequence
  Synthetic
uuacugcuuacugcuagua

SEQ ID NO: 243094 - RNA, 20 nt, Artificial Sequence
  Synthetic
cuuacugcuuacugcuagua

SEQ ID NO: 243095 - RNA, 21 nt, Artificial Sequence
  Synthetic
gcuuacugcuuacugcuagua

SEQ ID NO: 243096 - RNA, 22 nt, Artificial Sequence
  Synthetic
ugcuuacugcuuacugcuagua

SEQ ID NO: 243097 - RNA, 23 nt, Artificial Sequence
  Synthetic
uugcuuacugcuuacugcuagua

SEQ ID NO: 243098 - RNA, 24 nt, Artificial Sequence
  Synthetic
cuugcuuacugcuuacugcuagua

SEQ ID NO: 243099 - RNA, 18 nt, Artificial Sequence
  Synthetic
uacugcuuauugcuagua

SEQ ID NO: 243100 - RNA, 19 nt, Artificial Sequence
  Synthetic
uuacugcuuauugcuagua

SEQ ID NO: 243101 - RNA, 20 nt, Artificial Sequence
  Synthetic
cuuacugcuuauugcuagua

SEQ ID NO: 243102 - RNA, 21 nt, Artificial Sequence
  Synthetic
gcuuacugcuuauugcuagua

SEQ ID NO: 243103 - RNA, 22 nt, Artificial Sequence
  Synthetic
ugcuuacugcuuauugcuagua

SEQ ID NO: 243104 - RNA, 23 nt, Artificial Sequence
  Synthetic
uugcuuacugcuuauugcuagua

SEQ ID NO: 243105 - RNA, 24 nt, Artificial Sequence
  Synthetic
cuugcuuacugcuuauugcuagua

SEQ ID NO: 243106 - RNA, 18 nt, Artificial Sequence
  Synthetic
agagcucacaaucuagua

SEQ ID NO: 243107 - RNA, 19 nt, Artificial Sequence
  Synthetic
cagagcucacaaucuagua

SEQ ID NO: 243108 - RNA, 20 nt, Artificial Sequence
  Synthetic
ucagagcucacaaucuagua

SEQ ID NO: 243109 - RNA, 21 nt, Artificial Sequence
  Synthetic
gucagagcucacaaucuagua

SEQ ID NO: 243110 - RNA, 22 nt, Artificial Sequence
  Synthetic
agucagagcucacaaucuagua

SEQ ID NO: 243111 - RNA, 23 nt, Artificial Sequence
  Synthetic
aagucagagcucacaaucuagua

SEQ ID NO: 243112 - RNA, 24 nt, Artificial Sequence
  Synthetic
gaagucagagcucacaaucuagua

SEQ ID NO: 243113 - RNA, 18 nt, Artificial Sequence
  Synthetic
uuuucuaacacucuagua

SEQ ID NO: 243114 - RNA, 19 nt, Artificial Sequence
  Synthetic
uuuuucuaacacucuagua

SEQ ID NO: 243115 - RNA, 20 nt, Artificial Sequence
  Synthetic
guuuuucuaacacucuagua

SEQ ID NO: 243116 - RNA, 21 nt, Artificial Sequence
  Synthetic
uguuuuucuaacacucuagua

SEQ ID NO: 243117 - RNA, 22 nt, Artificial Sequence
  Synthetic
guguuuuucuaacacucuagua

SEQ ID NO: 243118 - RNA, 23 nt, Artificial Sequence
  Synthetic
uguguuuuucuaacacucuagua

SEQ ID NO: 243119 - RNA, 24 nt, Artificial Sequence
  Synthetic
auguguuuuucuaacacucuagua

SEQ ID NO: 243120 - RNA, 18 nt, Artificial Sequence
  Synthetic
agaacuuacacucuagua

SEQ ID NO: 243121 - RNA, 19 nt, Artificial Sequence
  Synthetic
uagaacuuacacucuagua

SEQ ID NO: 243122 - RNA, 20 nt, Artificial Sequence
  Synthetic
guagaacuuacacucuagua

SEQ ID NO: 243123 - RNA, 21 nt, Artificial Sequence
  Synthetic
cguagaacuuacacucuagua

SEQ ID NO: 243124 - RNA, 22 nt, Artificial Sequence
  Synthetic
ucguagaacuuacacucuagua

SEQ ID NO: 243125 - RNA, 23 nt, Artificial Sequence
  Synthetic
cucguagaacuuacacucuagua

SEQ ID NO: 243126 - RNA, 24 nt, Artificial Sequence
  Synthetic
ucucguagaacuuacacucuagua

SEQ ID NO: 243127 - RNA, 18 nt, Artificial Sequence
  Synthetic
auuuaaaauagaguagua

SEQ ID NO: 243128 - RNA, 19 nt, Artificial Sequence
  Synthetic
uauuuaaaauagaguagua

SEQ ID NO: 243129 - RNA, 20 nt, Artificial Sequence
  Synthetic
cuauuuaaaauagaguagua

SEQ ID NO: 243130 - RNA, 21 nt, Artificial Sequence
  Synthetic
gcuauuuaaaauagaguagua

SEQ ID NO: 243131 - RNA, 22 nt, Artificial Sequence
  Synthetic
ugcuauuuaaaauagaguagua

SEQ ID NO: 243132 - RNA, 23 nt, Artificial Sequence
  Synthetic
gugcuauuuaaaauagaguagua

SEQ ID NO: 243133 - RNA, 24 nt, Artificial Sequence
  Synthetic
ggugcuauuuaaaauagaguagua

SEQ ID NO: 243134 - RNA, 18 nt, Artificial Sequence
  Synthetic
gauagaacacagguagua

SEQ ID NO: 243135 - RNA, 19 nt, Artificial Sequence
  Synthetic
ugauagaacacagguagua

SEQ ID NO: 243136 - RNA, 20 nt, Artificial Sequence
  Synthetic
cugauagaacacagguagua

SEQ ID NO: 243137 - RNA, 21 nt, Artificial Sequence
  Synthetic
gcugauagaacacagguagua

SEQ ID NO: 243138 - RNA, 22 nt, Artificial Sequence
  Synthetic
ugcugauagaacacagguagua

SEQ ID NO: 243139 - RNA, 23 nt, Artificial Sequence
  Synthetic
uugcugauagaacacagguagua

SEQ ID NO: 243140 - RNA, 24 nt, Artificial Sequence
  Synthetic
auugcugauagaacacagguagua

SEQ ID NO: 243141 - RNA, 18 nt, Artificial Sequence
  Synthetic
ccacuaccccagguagua

SEQ ID NO: 243142 - RNA, 19 nt, Artificial Sequence
  Synthetic
cccacuaccccagguagua

SEQ ID NO: 243143 - RNA, 20 nt, Artificial Sequence
  Synthetic
gcccacuaccccagguagua

SEQ ID NO: 243144 - RNA, 21 nt, Artificial Sequence
  Synthetic
ugcccacuaccccagguagua

SEQ ID NO: 243145 - RNA, 22 nt, Artificial Sequence
  Synthetic
augcccacuaccccagguagua

SEQ ID NO: 243146 - RNA, 23 nt, Artificial Sequence
  Synthetic
caugcccacuaccccagguagua

SEQ ID NO: 243147 - RNA, 24 nt, Artificial Sequence
  Synthetic
ccaugcccacuaccccagguagua

SEQ ID NO: 243148 - RNA, 18 nt, Artificial Sequence
  Synthetic
caacaaaggacgguagua

SEQ ID NO: 243149 - RNA, 19 nt, Artificial Sequence
  Synthetic
gcaacaaaggacgguagua

SEQ ID NO: 243150 - RNA, 20 nt, Artificial Sequence
  Synthetic
ugcaacaaaggacgguagua

SEQ ID NO: 243151 - RNA, 21 nt, Artificial Sequence
  Synthetic
uugcaacaaaggacgguagua

SEQ ID NO: 243152 - RNA, 22 nt, Artificial Sequence
  Synthetic
auugcaacaaaggacgguagua

SEQ ID NO: 243153 - RNA, 23 nt, Artificial Sequence
  Synthetic
gauugcaacaaaggacgguagua

SEQ ID NO: 243154 - RNA, 24 nt, Artificial Sequence
  Synthetic
agauugcaacaaaggacgguagua

SEQ ID NO: 243155 - RNA, 18 nt, Artificial Sequence
  Synthetic
ucugauuuaauuguagua

SEQ ID NO: 243156 - RNA, 19 nt, Artificial Sequence
  Synthetic
cucugauuuaauuguagua

SEQ ID NO: 243157 - RNA, 20 nt, Artificial Sequence
  Synthetic
acucugauuuaauuguagua

SEQ ID NO: 243158 - RNA, 21 nt, Artificial Sequence
  Synthetic
cacucugauuuaauuguagua

SEQ ID NO: 243159 - RNA, 22 nt, Artificial Sequence
  Synthetic
gcacucugauuuaauuguagua

SEQ ID NO: 243160 - RNA, 23 nt, Artificial Sequence
  Synthetic
ugcacucugauuuaauuguagua

SEQ ID NO: 243161 - RNA, 24 nt, Artificial Sequence
  Synthetic
augcacucugauuuaauuguagua

SEQ ID NO: 243162 - RNA, 18 nt, Artificial Sequence
  Synthetic
aacuuguacauuguagua

SEQ ID NO: 243163 - RNA, 19 nt, Artificial Sequence
  Synthetic
gaacuuguacauuguagua

SEQ ID NO: 243164 - RNA, 20 nt, Artificial Sequence
  Synthetic
agaacuuguacauuguagua

SEQ ID NO: 243165 - RNA, 21 nt, Artificial Sequence
  Synthetic
uagaacuuguacauuguagua

SEQ ID NO: 243166 - RNA, 22 nt, Artificial Sequence
  Synthetic
uuagaacuuguacauuguagua

SEQ ID NO: 243167 - RNA, 23 nt, Artificial Sequence
  Synthetic
guuagaacuuguacauuguagua

SEQ ID NO: 243168 - RNA, 24 nt, Artificial Sequence
  Synthetic
aguuagaacuuguacauuguagua

SEQ ID NO: 243169 - RNA, 18 nt, Artificial Sequence
  Synthetic
agugcagggguuguagua

SEQ ID NO: 243170 - RNA, 19 nt, Artificial Sequence
  Synthetic
gagugcagggguuguagua

SEQ ID NO: 243171 - RNA, 20 nt, Artificial Sequence
  Synthetic
ugagugcagggguuguagua

SEQ ID NO: 243172 - RNA, 21 nt, Artificial Sequence
  Synthetic
gugagugcagggguuguagua

SEQ ID NO: 243173 - RNA, 22 nt, Artificial Sequence
  Synthetic
ugugagugcagggguuguagua

SEQ ID NO: 243174 - RNA, 23 nt, Artificial Sequence
  Synthetic
cugugagugcagggguuguagua

SEQ ID NO: 243175 - RNA, 24 nt, Artificial Sequence
  Synthetic
ucugugagugcagggguuguagua

SEQ ID NO: 243176 - RNA, 18 nt, Artificial Sequence
  Synthetic
aguccacaauuuguagua

SEQ ID NO: 243177 - RNA, 19 nt, Artificial Sequence
  Synthetic
gaguccacaauuuguagua

SEQ ID NO: 243178 - RNA, 20 nt, Artificial Sequence
  Synthetic
ugaguccacaauuuguagua

SEQ ID NO: 243179 - RNA, 21 nt, Artificial Sequence
  Synthetic
gugaguccacaauuuguagua

SEQ ID NO: 243180 - RNA, 22 nt, Artificial Sequence
  Synthetic
ugugaguccacaauuuguagua

SEQ ID NO: 243181 - RNA, 23 nt, Artificial Sequence
  Synthetic
augugaguccacaauuuguagua

SEQ ID NO: 243182 - RNA, 24 nt, Artificial Sequence
  Synthetic
caugugaguccacaauuuguagua

SEQ ID NO: 243183 - RNA, 18 nt, Artificial Sequence
  Synthetic
aaguauuaguaauuagua

SEQ ID NO: 243184 - RNA, 19 nt, Artificial Sequence
  Synthetic
gaaguauuaguaauuagua

SEQ ID NO: 243185 - RNA, 20 nt, Artificial Sequence
  Synthetic
ugaaguauuaguaauuagua

SEQ ID NO: 243186 - RNA, 21 nt, Artificial Sequence
  Synthetic
cugaaguauuaguaauuagua

SEQ ID NO: 243187 - RNA, 22 nt, Artificial Sequence
  Synthetic
ucugaaguauuaguaauuagua

SEQ ID NO: 243188 - RNA, 23 nt, Artificial Sequence
  Synthetic
gucugaaguauuaguaauuagua

SEQ ID NO: 243189 - RNA, 24 nt, Artificial Sequence
  Synthetic
ggucugaaguauuaguaauuagua

SEQ ID NO: 243190 - RNA, 18 nt, Artificial Sequence
  Synthetic
uuagagauuuaauuagua

SEQ ID NO: 243191 - RNA, 19 nt, Artificial Sequence
  Synthetic
guuagagauuuaauuagua

SEQ ID NO: 243192 - RNA, 20 nt, Artificial Sequence
  Synthetic
gguuagagauuuaauuagua

SEQ ID NO: 243193 - RNA, 21 nt, Artificial Sequence
  Synthetic
agguuagagauuuaauuagua

SEQ ID NO: 243194 - RNA, 22 nt, Artificial Sequence
  Synthetic
cagguuagagauuuaauuagua

SEQ ID NO: 243195 - RNA, 23 nt, Artificial Sequence
  Synthetic
ucagguuagagauuuaauuagua

SEQ ID NO: 243196 - RNA, 24 nt, Artificial Sequence
  Synthetic
aucagguuagagauuuaauuagua

SEQ ID NO: 243197 - RNA, 18 nt, Artificial Sequence
  Synthetic
cgaaggcaauucuuagua

SEQ ID NO: 243198 - RNA, 19 nt, Artificial Sequence
  Synthetic
ccgaaggcaauucuuagua

SEQ ID NO: 243199 - RNA, 20 nt, Artificial Sequence
  Synthetic
gccgaaggcaauucuuagua

SEQ ID NO: 243200 - RNA, 21 nt, Artificial Sequence
  Synthetic
ggccgaaggcaauucuuagua

SEQ ID NO: 243201 - RNA, 22 nt, Artificial Sequence
  Synthetic
aggccgaaggcaauucuuagua

SEQ ID NO: 243202 - RNA, 23 nt, Artificial Sequence
  Synthetic
gaggccgaaggcaauucuuagua

SEQ ID NO: 243203 - RNA, 24 nt, Artificial Sequence
  Synthetic
ugaggccgaaggcaauucuuagua

SEQ ID NO: 243204 - RNA, 18 nt, Artificial Sequence
  Synthetic
agaaauuuuugguuagua

SEQ ID NO: 243205 - RNA, 19 nt, Artificial Sequence
  Synthetic
aagaaauuuuugguuagua

SEQ ID NO: 243206 - RNA, 20 nt, Artificial Sequence
  Synthetic
gaagaaauuuuugguuagua

SEQ ID NO: 243207 - RNA, 21 nt, Artificial Sequence
  Synthetic
ggaagaaauuuuugguuagua

SEQ ID NO: 243208 - RNA, 22 nt, Artificial Sequence
  Synthetic
aggaagaaauuuuugguuagua

SEQ ID NO: 243209 - RNA, 23 nt, Artificial Sequence
  Synthetic
uaggaagaaauuuuugguuagua

SEQ ID NO: 243210 - RNA, 24 nt, Artificial Sequence
  Synthetic
cuaggaagaaauuuuugguuagua

SEQ ID NO: 243211 - RNA, 18 nt, Artificial Sequence
  Synthetic
agccccauaguguuagua

SEQ ID NO: 243212 - RNA, 19 nt, Artificial Sequence
  Synthetic
uagccccauaguguuagua

SEQ ID NO: 243213 - RNA, 20 nt, Artificial Sequence
  Synthetic
auagccccauaguguuagua

SEQ ID NO: 243214 - RNA, 21 nt, Artificial Sequence
  Synthetic
aauagccccauaguguuagua

SEQ ID NO: 243215 - RNA, 22 nt, Artificial Sequence
  Synthetic
aaauagccccauaguguuagua

SEQ ID NO: 243216 - RNA, 23 nt, Artificial Sequence
  Synthetic
gaaauagccccauaguguuagua

SEQ ID NO: 243217 - RNA, 24 nt, Artificial Sequence
  Synthetic
ugaaauagccccauaguguuagua

SEQ ID NO: 243218 - RNA, 18 nt, Artificial Sequence
  Synthetic
acuaacugggauuuagua

SEQ ID NO: 243219 - RNA, 19 nt, Artificial Sequence
  Synthetic
aacuaacugggauuuagua

SEQ ID NO: 243220 - RNA, 20 nt, Artificial Sequence
  Synthetic
uaacuaacugggauuuagua

SEQ ID NO: 243221 - RNA, 21 nt, Artificial Sequence
  Synthetic
auaacuaacugggauuuagua

SEQ ID NO: 243222 - RNA, 22 nt, Artificial Sequence
  Synthetic
cauaacuaacugggauuuagua

SEQ ID NO: 243223 - RNA, 23 nt, Artificial Sequence
  Synthetic
ccauaacuaacugggauuuagua

SEQ ID NO: 243224 - RNA, 24 nt, Artificial Sequence
  Synthetic
accauaacuaacugggauuuagua

SEQ ID NO: 243225 - RNA, 18 nt, Artificial Sequence
  Synthetic
gaugcuguggauuuagua

SEQ ID NO: 243226 - RNA, 19 nt, Artificial Sequence
  Synthetic
cgaugcuguggauuuagua

SEQ ID NO: 243227 - RNA, 20 nt, Artificial Sequence
  Synthetic
gcgaugcuguggauuuagua

SEQ ID NO: 243228 - RNA, 21 nt, Artificial Sequence
  Synthetic
ggcgaugcuguggauuuagua

SEQ ID NO: 243229 - RNA, 22 nt, Artificial Sequence
  Synthetic
gggcgaugcuguggauuuagua

SEQ ID NO: 243230 - RNA, 23 nt, Artificial Sequence
  Synthetic
ugggcgaugcuguggauuuagua

SEQ ID NO: 243231 - RNA, 24 nt, Artificial Sequence
  Synthetic
gugggcgaugcuguggauuuagua

SEQ ID NO: 243232 - RNA, 18 nt, Artificial Sequence
  Synthetic
gucaugaaauauuuagua

SEQ ID NO: 243233 - RNA, 19 nt, Artificial Sequence
  Synthetic
agucaugaaauauuuagua

SEQ ID NO: 243234 - RNA, 20 nt, Artificial Sequence
  Synthetic
uagucaugaaauauuuagua

SEQ ID NO: 243235 - RNA, 21 nt, Artificial Sequence
  Synthetic
uuagucaugaaauauuuagua

SEQ ID NO: 243236 - RNA, 22 nt, Artificial Sequence
  Synthetic
auuagucaugaaauauuuagua

SEQ ID NO: 243237 - RNA, 23 nt, Artificial Sequence
  Synthetic
aauuagucaugaaauauuuagua

SEQ ID NO: 243238 - RNA, 24 nt, Artificial Sequence
  Synthetic
uaauuagucaugaaauauuuagua

SEQ ID NO: 243239 - RNA, 18 nt, Artificial Sequence
  Synthetic
accaucguauauuuagua

SEQ ID NO: 243240 - RNA, 19 nt, Artificial Sequence
  Synthetic
uaccaucguauauuuagua

SEQ ID NO: 243241 - RNA, 20 nt, Artificial Sequence
  Synthetic
auaccaucguauauuuagua

SEQ ID NO: 243242 - RNA, 21 nt, Artificial Sequence
  Synthetic
aauaccaucguauauuuagua

SEQ ID NO: 243243 - RNA, 22 nt, Artificial Sequence
  Synthetic
uaauaccaucguauauuuagua

SEQ ID NO: 243244 - RNA, 23 nt, Artificial Sequence
  Synthetic
guaauaccaucguauauuuagua

SEQ ID NO: 243245 - RNA, 24 nt, Artificial Sequence
  Synthetic
uguaauaccaucguauauuuagua

SEQ ID NO: 243246 - RNA, 18 nt, Artificial Sequence
  Synthetic
caguauacauuuuuagua

SEQ ID NO: 243247 - RNA, 19 nt, Artificial Sequence
  Synthetic
acaguauacauuuuuagua

SEQ ID NO: 243248 - RNA, 20 nt, Artificial Sequence
  Synthetic
uacaguauacauuuuuagua

SEQ ID NO: 243249 - RNA, 21 nt, Artificial Sequence
  Synthetic
auacaguauacauuuuuagua

SEQ ID NO: 243250 - RNA, 22 nt, Artificial Sequence
  Synthetic
gauacaguauacauuuuuagua

SEQ ID NO: 243251 - RNA, 23 nt, Artificial Sequence
  Synthetic
agauacaguauacauuuuuagua

SEQ ID NO: 243252 - RNA, 24 nt, Artificial Sequence
  Synthetic
aagauacaguauacauuuuuagua

SEQ ID NO: 243253 - RNA, 18 nt, Artificial Sequence
  Synthetic
uucuguaauguaaacgua

SEQ ID NO: 243254 - RNA, 19 nt, Artificial Sequence
  Synthetic
uuucuguaauguaaacgua

SEQ ID NO: 243255 - RNA, 20 nt, Artificial Sequence
  Synthetic
uuuucuguaauguaaacgua

SEQ ID NO: 243256 - RNA, 21 nt, Artificial Sequence
  Synthetic
guuuucuguaauguaaacgua

SEQ ID NO: 243257 - RNA, 22 nt, Artificial Sequence
  Synthetic
uguuuucuguaauguaaacgua

SEQ ID NO: 243258 - RNA, 23 nt, Artificial Sequence
  Synthetic
guguuuucuguaauguaaacgua

SEQ ID NO: 243259 - RNA, 24 nt, Artificial Sequence
  Synthetic
aguguuuucuguaauguaaacgua

SEQ ID NO: 243260 - RNA, 18 nt, Artificial Sequence
  Synthetic
accagccuggccaacgua

SEQ ID NO: 243261 - RNA, 19 nt, Artificial Sequence
  Synthetic
uaccagccuggccaacgua

SEQ ID NO: 243262 - RNA, 20 nt, Artificial Sequence
  Synthetic
auaccagccuggccaacgua

SEQ ID NO: 243263 - RNA, 21 nt, Artificial Sequence
  Synthetic
aauaccagccuggccaacgua

SEQ ID NO: 243264 - RNA, 22 nt, Artificial Sequence
  Synthetic
caauaccagccuggccaacgua

SEQ ID NO: 243265 - RNA, 23 nt, Artificial Sequence
  Synthetic
ucaauaccagccuggccaacgua

SEQ ID NO: 243266 - RNA, 24 nt, Artificial Sequence
  Synthetic
uucaauaccagccuggccaacgua

SEQ ID NO: 243267 - RNA, 18 nt, Artificial Sequence
  Synthetic
aauaaauccuugaacgua

SEQ ID NO: 243268 - RNA, 19 nt, Artificial Sequence
  Synthetic
aaauaaauccuugaacgua

SEQ ID NO: 243269 - RNA, 20 nt, Artificial Sequence
  Synthetic
uaaauaaauccuugaacgua

SEQ ID NO: 243270 - RNA, 21 nt, Artificial Sequence
  Synthetic
uuaaauaaauccuugaacgua

SEQ ID NO: 243271 - RNA, 22 nt, Artificial Sequence
  Synthetic
auuaaauaaauccuugaacgua

SEQ ID NO: 243272 - RNA, 23 nt, Artificial Sequence
  Synthetic
gauuaaauaaauccuugaacgua

SEQ ID NO: 243273 - RNA, 24 nt, Artificial Sequence
  Synthetic
ggauuaaauaaauccuugaacgua

SEQ ID NO: 243274 - RNA, 18 nt, Artificial Sequence
  Synthetic
ugaguugauaagcacgua

SEQ ID NO: 243275 - RNA, 19 nt, Artificial Sequence
  Synthetic
gugaguugauaagcacgua

SEQ ID NO: 243276 - RNA, 20 nt, Artificial Sequence
  Synthetic
agugaguugauaagcacgua

SEQ ID NO: 243277 - RNA, 21 nt, Artificial Sequence
  Synthetic
aagugaguugauaagcacgua

SEQ ID NO: 243278 - RNA, 22 nt, Artificial Sequence
  Synthetic
caagugaguugauaagcacgua

SEQ ID NO: 243279 - RNA, 23 nt, Artificial Sequence
  Synthetic
gcaagugaguugauaagcacgua

SEQ ID NO: 243280 - RNA, 24 nt, Artificial Sequence
  Synthetic
cgcaagugaguugauaagcacgua

SEQ ID NO: 243281 - RNA, 18 nt, Artificial Sequence
  Synthetic
uuauucaagaggcacgua

SEQ ID NO: 243282 - RNA, 19 nt, Artificial Sequence
  Synthetic
auuauucaagaggcacgua

SEQ ID NO: 243283 - RNA, 20 nt, Artificial Sequence
  Synthetic
uauuauucaagaggcacgua

SEQ ID NO: 243284 - RNA, 21 nt, Artificial Sequence
  Synthetic
cuauuauucaagaggcacgua

SEQ ID NO: 243285 - RNA, 22 nt, Artificial Sequence
  Synthetic
ccuauuauucaagaggcacgua

SEQ ID NO: 243286 - RNA, 23 nt, Artificial Sequence
  Synthetic
accuauuauucaagaggcacgua

SEQ ID NO: 243287 - RNA, 24 nt, Artificial Sequence
  Synthetic
uaccuauuauucaagaggcacgua

SEQ ID NO: 243288 - RNA, 18 nt, Artificial Sequence
  Synthetic
uccagccugggugacgua

SEQ ID NO: 243289 - RNA, 19 nt, Artificial Sequence
  Synthetic
cuccagccugggugacgua

SEQ ID NO: 243290 - RNA, 20 nt, Artificial Sequence
  Synthetic
acuccagccugggugacgua

SEQ ID NO: 243291 - RNA, 21 nt, Artificial Sequence
  Synthetic
uacuccagccugggugacgua

SEQ ID NO: 243292 - RNA, 22 nt, Artificial Sequence
  Synthetic
guacuccagccugggugacgua

SEQ ID NO: 243293 - RNA, 23 nt, Artificial Sequence
  Synthetic
uguacuccagccugggugacgua

SEQ ID NO: 243294 - RNA, 24 nt, Artificial Sequence
  Synthetic
guguacuccagccugggugacgua

SEQ ID NO: 243295 - RNA, 18 nt, Artificial Sequence
  Synthetic
caaaguacagcauacgua

SEQ ID NO: 243296 - RNA, 19 nt, Artificial Sequence
  Synthetic
acaaaguacagcauacgua

SEQ ID NO: 243297 - RNA, 20 nt, Artificial Sequence
  Synthetic
gacaaaguacagcauacgua

SEQ ID NO: 243298 - RNA, 21 nt, Artificial Sequence
  Synthetic
ggacaaaguacagcauacgua

SEQ ID NO: 243299 - RNA, 22 nt, Artificial Sequence
  Synthetic
gggacaaaguacagcauacgua

SEQ ID NO: 243300 - RNA, 23 nt, Artificial Sequence
  Synthetic
ugggacaaaguacagcauacgua

SEQ ID NO: 243301 - RNA, 24 nt, Artificial Sequence
  Synthetic
augggacaaaguacagcauacgua

SEQ ID NO: 243302 - RNA, 18 nt, Artificial Sequence
  Synthetic
guaguuagcauuuacgua

SEQ ID NO: 243303 - RNA, 19 nt, Artificial Sequence
  Synthetic
uguaguuagcauuuacgua

SEQ ID NO: 243304 - RNA, 20 nt, Artificial Sequence
  Synthetic
guguaguuagcauuuacgua

SEQ ID NO: 243305 - RNA, 21 nt, Artificial Sequence
  Synthetic
uguguaguuagcauuuacgua

SEQ ID NO: 243306 - RNA, 22 nt, Artificial Sequence
  Synthetic
cuguguaguuagcauuuacgua

SEQ ID NO: 243307 - RNA, 23 nt, Artificial Sequence
  Synthetic
acuguguaguuagcauuuacgua

SEQ ID NO: 243308 - RNA, 24 nt, Artificial Sequence
  Synthetic
uacuguguaguuagcauuuacgua

SEQ ID NO: 243309 - RNA, 18 nt, Artificial Sequence
  Synthetic
augcaauauauacccgua

SEQ ID NO: 243310 - RNA, 19 nt, Artificial Sequence
  Synthetic
caugcaauauauacccgua

SEQ ID NO: 243311 - RNA, 20 nt, Artificial Sequence
  Synthetic
ucaugcaauauauacccgua

SEQ ID NO: 243312 - RNA, 21 nt, Artificial Sequence
  Synthetic
uucaugcaauauauacccgua

SEQ ID NO: 243313 - RNA, 22 nt, Artificial Sequence
  Synthetic
auucaugcaauauauacccgua

SEQ ID NO: 243314 - RNA, 23 nt, Artificial Sequence
  Synthetic
aauucaugcaauauauacccgua

SEQ ID NO: 243315 - RNA, 24 nt, Artificial Sequence
  Synthetic
aaauucaugcaauauauacccgua

SEQ ID NO: 243316 - RNA, 18 nt, Artificial Sequence
  Synthetic
gcucccuuucaccccgua

SEQ ID NO: 243317 - RNA, 19 nt, Artificial Sequence
  Synthetic
agcucccuuucaccccgua

SEQ ID NO: 243318 - RNA, 20 nt, Artificial Sequence
  Synthetic
cagcucccuuucaccccgua

SEQ ID NO: 243319 - RNA, 21 nt, Artificial Sequence
  Synthetic
gcagcucccuuucaccccgua

SEQ ID NO: 243320 - RNA, 22 nt, Artificial Sequence
  Synthetic
ugcagcucccuuucaccccgua

SEQ ID NO: 243321 - RNA, 23 nt, Artificial Sequence
  Synthetic
uugcagcucccuuucaccccgua

SEQ ID NO: 243322 - RNA, 24 nt, Artificial Sequence
  Synthetic
uuugcagcucccuuucaccccgua

SEQ ID NO: 243323 - RNA, 18 nt, Artificial Sequence
  Synthetic
augaaucauuucuccgua

SEQ ID NO: 243324 - RNA, 19 nt, Artificial Sequence
  Synthetic
aaugaaucauuucuccgua

SEQ ID NO: 243325 - RNA, 20 nt, Artificial Sequence
  Synthetic
gaaugaaucauuucuccgua

SEQ ID NO: 243326 - RNA, 21 nt, Artificial Sequence
  Synthetic
ggaaugaaucauuucuccgua

SEQ ID NO: 243327 - RNA, 22 nt, Artificial Sequence
  Synthetic
gggaaugaaucauuucuccgua

SEQ ID NO: 243328 - RNA, 23 nt, Artificial Sequence
  Synthetic
ggggaaugaaucauuucuccgua

SEQ ID NO: 243329 - RNA, 24 nt, Artificial Sequence
  Synthetic
gggggaaugaaucauuucuccgua

SEQ ID NO: 243330 - RNA, 18 nt, Artificial Sequence
  Synthetic
ccagcucaucuuuccgua

SEQ ID NO: 243331 - RNA, 19 nt, Artificial Sequence
  Synthetic
cccagcucaucuuuccgua

SEQ ID NO: 243332 - RNA, 20 nt, Artificial Sequence
  Synthetic
acccagcucaucuuuccgua

SEQ ID NO: 243333 - RNA, 21 nt, Artificial Sequence
  Synthetic
cacccagcucaucuuuccgua

SEQ ID NO: 243334 - RNA, 22 nt, Artificial Sequence
  Synthetic
ucacccagcucaucuuuccgua

SEQ ID NO: 243335 - RNA, 23 nt, Artificial Sequence
  Synthetic
cucacccagcucaucuuuccgua

SEQ ID NO: 243336 - RNA, 24 nt, Artificial Sequence
  Synthetic
ucucacccagcucaucuuuccgua

SEQ ID NO: 243337 - RNA, 18 nt, Artificial Sequence
  Synthetic
gagcaaagcuaaagcgua

SEQ ID NO: 243338 - RNA, 19 nt, Artificial Sequence
  Synthetic
agagcaaagcuaaagcgua

SEQ ID NO: 243339 - RNA, 20 nt, Artificial Sequence
  Synthetic
aagagcaaagcuaaagcgua

SEQ ID NO: 243340 - RNA, 21 nt, Artificial Sequence
  Synthetic
aaagagcaaagcuaaagcgua

SEQ ID NO: 243341 - RNA, 22 nt, Artificial Sequence
  Synthetic
aaaagagcaaagcuaaagcgua

SEQ ID NO: 243342 - RNA, 23 nt, Artificial Sequence
  Synthetic
gaaaagagcaaagcuaaagcgua

SEQ ID NO: 243343 - RNA, 24 nt, Artificial Sequence
  Synthetic
agaaaagagcaaagcuaaagcgua

SEQ ID NO: 243344 - RNA, 18 nt, Artificial Sequence
  Synthetic
uuuuauguugcuagcgua

SEQ ID NO: 243345 - RNA, 19 nt, Artificial Sequence
  Synthetic
uuuuuauguugcuagcgua

SEQ ID NO: 243346 - RNA, 20 nt, Artificial Sequence
  Synthetic
guuuuuauguugcuagcgua

SEQ ID NO: 243347 - RNA, 21 nt, Artificial Sequence
  Synthetic
uguuuuuauguugcuagcgua

SEQ ID NO: 243348 - RNA, 22 nt, Artificial Sequence
  Synthetic
cuguuuuuauguugcuagcgua

SEQ ID NO: 243349 - RNA, 23 nt, Artificial Sequence
  Synthetic
ccuguuuuuauguugcuagcgua

SEQ ID NO: 243350 - RNA, 24 nt, Artificial Sequence
  Synthetic
uccuguuuuuauguugcuagcgua

SEQ ID NO: 243351 - RNA, 18 nt, Artificial Sequence
  Synthetic
caucauugagaaugcgua

SEQ ID NO: 243352 - RNA, 19 nt, Artificial Sequence
  Synthetic
ucaucauugagaaugcgua

SEQ ID NO: 243353 - RNA, 20 nt, Artificial Sequence
  Synthetic
uucaucauugagaaugcgua

SEQ ID NO: 243354 - RNA, 21 nt, Artificial Sequence
  Synthetic
uuucaucauugagaaugcgua

SEQ ID NO: 243355 - RNA, 22 nt, Artificial Sequence
  Synthetic
uuuucaucauugagaaugcgua

SEQ ID NO: 243356 - RNA, 23 nt, Artificial Sequence
  Synthetic
auuuucaucauugagaaugcgua

SEQ ID NO: 243357 - RNA, 24 nt, Artificial Sequence
  Synthetic
gauuuucaucauugagaaugcgua

SEQ ID NO: 243358 - RNA, 18 nt, Artificial Sequence
  Synthetic
auaaaucucucaugcgua

SEQ ID NO: 243359 - RNA, 19 nt, Artificial Sequence
  Synthetic
gauaaaucucucaugcgua

SEQ ID NO: 243360 - RNA, 20 nt, Artificial Sequence
  Synthetic
agauaaaucucucaugcgua

SEQ ID NO: 243361 - RNA, 21 nt, Artificial Sequence
  Synthetic
uagauaaaucucucaugcgua

SEQ ID NO: 243362 - RNA, 22 nt, Artificial Sequence
  Synthetic
uuagauaaaucucucaugcgua

SEQ ID NO: 243363 - RNA, 23 nt, Artificial Sequence
  Synthetic
uuuagauaaaucucucaugcgua

SEQ ID NO: 243364 - RNA, 24 nt, Artificial Sequence
  Synthetic
guuuagauaaaucucucaugcgua

SEQ ID NO: 243365 - RNA, 18 nt, Artificial Sequence
  Synthetic
uaugcugcauucugcgua

SEQ ID NO: 243366 - RNA, 19 nt, Artificial Sequence
  Synthetic
auaugcugcauucugcgua

SEQ ID NO: 243367 - RNA, 20 nt, Artificial Sequence
  Synthetic
aauaugcugcauucugcgua

SEQ ID NO: 243368 - RNA, 21 nt, Artificial Sequence
  Synthetic
uaauaugcugcauucugcgua

SEQ ID NO: 243369 - RNA, 22 nt, Artificial Sequence
  Synthetic
cuaauaugcugcauucugcgua

SEQ ID NO: 243370 - RNA, 23 nt, Artificial Sequence
  Synthetic
ucuaauaugcugcauucugcgua

SEQ ID NO: 243371 - RNA, 24 nt, Artificial Sequence
  Synthetic
cucuaauaugcugcauucugcgua

SEQ ID NO: 243372 - RNA, 18 nt, Artificial Sequence
  Synthetic
uaguuucuugucaucgua

SEQ ID NO: 243373 - RNA, 19 nt, Artificial Sequence
  Synthetic
guaguuucuugucaucgua

SEQ ID NO: 243374 - RNA, 20 nt, Artificial Sequence
  Synthetic
aguaguuucuugucaucgua

SEQ ID NO: 243375 - RNA, 21 nt, Artificial Sequence
  Synthetic
caguaguuucuugucaucgua

SEQ ID NO: 243376 - RNA, 22 nt, Artificial Sequence
  Synthetic
ucaguaguuucuugucaucgua

SEQ ID NO: 243377 - RNA, 23 nt, Artificial Sequence
  Synthetic
cucaguaguuucuugucaucgua

SEQ ID NO: 243378 - RNA, 24 nt, Artificial Sequence
  Synthetic
gcucaguaguuucuugucaucgua

SEQ ID NO: 243379 - RNA, 18 nt, Artificial Sequence
  Synthetic
auuguuaauagucucgua

SEQ ID NO: 243380 - RNA, 19 nt, Artificial Sequence
  Synthetic
uauuguuaauagucucgua

SEQ ID NO: 243381 - RNA, 20 nt, Artificial Sequence
  Synthetic
guauuguuaauagucucgua

SEQ ID NO: 243382 - RNA, 21 nt, Artificial Sequence
  Synthetic
gguauuguuaauagucucgua

SEQ ID NO: 243383 - RNA, 22 nt, Artificial Sequence
  Synthetic
ugguauuguuaauagucucgua

SEQ ID NO: 243384 - RNA, 23 nt, Artificial Sequence
  Synthetic
gugguauuguuaauagucucgua

SEQ ID NO: 243385 - RNA, 24 nt, Artificial Sequence
  Synthetic
agugguauuguuaauagucucgua

SEQ ID NO: 243386 - RNA, 18 nt, Artificial Sequence
  Synthetic
agucaccauucagucgua

SEQ ID NO: 243387 - RNA, 19 nt, Artificial Sequence
  Synthetic
uagucaccauucagucgua

SEQ ID NO: 243388 - RNA, 20 nt, Artificial Sequence
  Synthetic
auagucaccauucagucgua

SEQ ID NO: 243389 - RNA, 21 nt, Artificial Sequence
  Synthetic
uauagucaccauucagucgua

SEQ ID NO: 243390 - RNA, 22 nt, Artificial Sequence
  Synthetic
cuauagucaccauucagucgua

SEQ ID NO: 243391 - RNA, 23 nt, Artificial Sequence
  Synthetic
acuauagucaccauucagucgua

SEQ ID NO: 243392 - RNA, 24 nt, Artificial Sequence
  Synthetic
aacuauagucaccauucagucgua

SEQ ID NO: 243393 - RNA, 18 nt, Artificial Sequence
  Synthetic
gacuucuccagauucgua

SEQ ID NO: 243394 - RNA, 19 nt, Artificial Sequence
  Synthetic
ggacuucuccagauucgua

SEQ ID NO: 243395 - RNA, 20 nt, Artificial Sequence
  Synthetic
gggacuucuccagauucgua

SEQ ID NO: 243396 - RNA, 21 nt, Artificial Sequence
  Synthetic
ugggacuucuccagauucgua

SEQ ID NO: 243397 - RNA, 22 nt, Artificial Sequence
  Synthetic
uugggacuucuccagauucgua

SEQ ID NO: 243398 - RNA, 23 nt, Artificial Sequence
  Synthetic
cuugggacuucuccagauucgua

SEQ ID NO: 243399 - RNA, 24 nt, Artificial Sequence
  Synthetic
ucuugggacuucuccagauucgua

SEQ ID NO: 243400 - RNA, 18 nt, Artificial Sequence
  Synthetic
aaugugucuuguuucgua

SEQ ID NO: 243401 - RNA, 19 nt, Artificial Sequence
  Synthetic
uaaugugucuuguuucgua

SEQ ID NO: 243402 - RNA, 20 nt, Artificial Sequence
  Synthetic
uuaaugugucuuguuucgua

SEQ ID NO: 243403 - RNA, 21 nt, Artificial Sequence
  Synthetic
guuaaugugucuuguuucgua

SEQ ID NO: 243404 - RNA, 22 nt, Artificial Sequence
  Synthetic
uguuaaugugucuuguuucgua

SEQ ID NO: 243405 - RNA, 23 nt, Artificial Sequence
  Synthetic
auguuaaugugucuuguuucgua

SEQ ID NO: 243406 - RNA, 24 nt, Artificial Sequence
  Synthetic
gauguuaaugugucuuguuucgua

SEQ ID NO: 243407 - RNA, 18 nt, Artificial Sequence
  Synthetic
uaauucuucuaaaaggua

SEQ ID NO: 243408 - RNA, 19 nt, Artificial Sequence
  Synthetic
uuaauucuucuaaaaggua

SEQ ID NO: 243409 - RNA, 20 nt, Artificial Sequence
  Synthetic
uuuaauucuucuaaaaggua

SEQ ID NO: 243410 - RNA, 21 nt, Artificial Sequence
  Synthetic
guuuaauucuucuaaaaggua

SEQ ID NO: 243411 - RNA, 22 nt, Artificial Sequence
  Synthetic
uguuuaauucuucuaaaaggua

SEQ ID NO: 243412 - RNA, 23 nt, Artificial Sequence
  Synthetic
auguuuaauucuucuaaaaggua

SEQ ID NO: 243413 - RNA, 24 nt, Artificial Sequence
  Synthetic
aauguuuaauucuucuaaaaggua

SEQ ID NO: 243414 - RNA, 18 nt, Artificial Sequence
  Synthetic
uaaauuacuuaaaaggua

SEQ ID NO: 243415 - RNA, 19 nt, Artificial Sequence
  Synthetic
uuaaauuacuuaaaaggua

SEQ ID NO: 243416 - RNA, 20 nt, Artificial Sequence
  Synthetic
uuuaaauuacuuaaaaggua

SEQ ID NO: 243417 - RNA, 21 nt, Artificial Sequence
  Synthetic
uuuuaaauuacuuaaaaggua

SEQ ID NO: 243418 - RNA, 22 nt, Artificial Sequence
  Synthetic
uuuuuaaauuacuuaaaaggua

SEQ ID NO: 243419 - RNA, 23 nt, Artificial Sequence
  Synthetic
auuuuuaaauuacuuaaaaggua

SEQ ID NO: 243420 - RNA, 24 nt, Artificial Sequence
  Synthetic
uauuuuuaaauuacuuaaaaggua

SEQ ID NO: 243421 - RNA, 18 nt, Artificial Sequence
  Synthetic
ugcaccacaacaaaggua

SEQ ID NO: 243422 - RNA, 19 nt, Artificial Sequence
  Synthetic
cugcaccacaacaaaggua

SEQ ID NO: 243423 - RNA, 20 nt, Artificial Sequence
  Synthetic
gcugcaccacaacaaaggua

SEQ ID NO: 243424 - RNA, 21 nt, Artificial Sequence
  Synthetic
agcugcaccacaacaaaggua

SEQ ID NO: 243425 - RNA, 22 nt, Artificial Sequence
  Synthetic
cagcugcaccacaacaaaggua

SEQ ID NO: 243426 - RNA, 23 nt, Artificial Sequence
  Synthetic
acagcugcaccacaacaaaggua

SEQ ID NO: 243427 - RNA, 24 nt, Artificial Sequence
  Synthetic
uacagcugcaccacaacaaaggua

SEQ ID NO: 243428 - RNA, 18 nt, Artificial Sequence
  Synthetic
guggagaccucaaaggua

SEQ ID NO: 243429 - RNA, 19 nt, Artificial Sequence
  Synthetic
aguggagaccucaaaggua

SEQ ID NO: 243430 - RNA, 20 nt, Artificial Sequence
  Synthetic
uaguggagaccucaaaggua

SEQ ID NO: 243431 - RNA, 21 nt, Artificial Sequence
  Synthetic
auaguggagaccucaaaggua

SEQ ID NO: 243432 - RNA, 22 nt, Artificial Sequence
  Synthetic
cauaguggagaccucaaaggua

SEQ ID NO: 243433 - RNA, 23 nt, Artificial Sequence
  Synthetic
gcauaguggagaccucaaaggua

SEQ ID NO: 243434 - RNA, 24 nt, Artificial Sequence
  Synthetic
agcauaguggagaccucaaaggua

SEQ ID NO: 243435 - RNA, 18 nt, Artificial Sequence
  Synthetic
aaggugaaaagaaaggua

SEQ ID NO: 243436 - RNA, 19 nt, Artificial Sequence
  Synthetic
aaaggugaaaagaaaggua

SEQ ID NO: 243437 - RNA, 20 nt, Artificial Sequence
  Synthetic
gaaaggugaaaagaaaggua

SEQ ID NO: 243438 - RNA, 21 nt, Artificial Sequence
  Synthetic
ggaaaggugaaaagaaaggua

SEQ ID NO: 243439 - RNA, 22 nt, Artificial Sequence
  Synthetic
uggaaaggugaaaagaaaggua

SEQ ID NO: 243440 - RNA, 23 nt, Artificial Sequence
  Synthetic
uuggaaaggugaaaagaaaggua

SEQ ID NO: 243441 - RNA, 24 nt, Artificial Sequence
  Synthetic
cuuggaaaggugaaaagaaaggua

SEQ ID NO: 243442 - RNA, 18 nt, Artificial Sequence
  Synthetic
ucuguagcaagaaaggua

SEQ ID NO: 243443 - RNA, 19 nt, Artificial Sequence
  Synthetic
aucuguagcaagaaaggua

SEQ ID NO: 243444 - RNA, 20 nt, Artificial Sequence
  Synthetic
gaucuguagcaagaaaggua

SEQ ID NO: 243445 - RNA, 21 nt, Artificial Sequence
  Synthetic
agaucuguagcaagaaaggua

SEQ ID NO: 243446 - RNA, 22 nt, Artificial Sequence
  Synthetic
cagaucuguagcaagaaaggua

SEQ ID NO: 243447 - RNA, 23 nt, Artificial Sequence
  Synthetic
ucagaucuguagcaagaaaggua

SEQ ID NO: 243448 - RNA, 24 nt, Artificial Sequence
  Synthetic
aucagaucuguagcaagaaaggua

SEQ ID NO: 243449 - RNA, 18 nt, Artificial Sequence
  Synthetic
auaaucuguggaaaggua

SEQ ID NO: 243450 - RNA, 19 nt, Artificial Sequence
  Synthetic
uauaaucuguggaaaggua

SEQ ID NO: 243451 - RNA, 20 nt, Artificial Sequence
  Synthetic
auauaaucuguggaaaggua

SEQ ID NO: 243452 - RNA, 21 nt, Artificial Sequence
  Synthetic
aauauaaucuguggaaaggua

SEQ ID NO: 243453 - RNA, 22 nt, Artificial Sequence
  Synthetic
caauauaaucuguggaaaggua

SEQ ID NO: 243454 - RNA, 23 nt, Artificial Sequence
  Synthetic
acaauauaaucuguggaaaggua

SEQ ID NO: 243455 - RNA, 24 nt, Artificial Sequence
  Synthetic
aacaauauaaucuguggaaaggua

SEQ ID NO: 243456 - RNA, 18 nt, Artificial Sequence
  Synthetic
gccaccucccacaaggua

SEQ ID NO: 243457 - RNA, 19 nt, Artificial Sequence
  Synthetic
cgccaccucccacaaggua

SEQ ID NO: 243458 - RNA, 20 nt, Artificial Sequence
  Synthetic
ucgccaccucccacaaggua

SEQ ID NO: 243459 - RNA, 21 nt, Artificial Sequence
  Synthetic
aucgccaccucccacaaggua

SEQ ID NO: 243460 - RNA, 22 nt, Artificial Sequence
  Synthetic
uaucgccaccucccacaaggua

SEQ ID NO: 243461 - RNA, 23 nt, Artificial Sequence
  Synthetic
cuaucgccaccucccacaaggua

SEQ ID NO: 243462 - RNA, 24 nt, Artificial Sequence
  Synthetic
ucuaucgccaccucccacaaggua

SEQ ID NO: 243463 - RNA, 18 nt, Artificial Sequence
  Synthetic
cuuacagugugcaaggua

SEQ ID NO: 243464 - RNA, 19 nt, Artificial Sequence
  Synthetic
gcuuacagugugcaaggua

SEQ ID NO: 243465 - RNA, 20 nt, Artificial Sequence
  Synthetic
ugcuuacagugugcaaggua

SEQ ID NO: 243466 - RNA, 21 nt, Artificial Sequence
  Synthetic
gugcuuacagugugcaaggua

SEQ ID NO: 243467 - RNA, 22 nt, Artificial Sequence
  Synthetic
ugugcuuacagugugcaaggua

SEQ ID NO: 243468 - RNA, 23 nt, Artificial Sequence
  Synthetic
augugcuuacagugugcaaggua

SEQ ID NO: 243469 - RNA, 24 nt, Artificial Sequence
  Synthetic
uaugugcuuacagugugcaaggua

SEQ ID NO: 243470 - RNA, 18 nt, Artificial Sequence
  Synthetic
uucuuucaugucaaggua

SEQ ID NO: 243471 - RNA, 19 nt, Artificial Sequence
  Synthetic
uuucuuucaugucaaggua

SEQ ID NO: 243472 - RNA, 20 nt, Artificial Sequence
  Synthetic
uuuucuuucaugucaaggua

SEQ ID NO: 243473 - RNA, 21 nt, Artificial Sequence
  Synthetic
auuuucuuucaugucaaggua

SEQ ID NO: 243474 - RNA, 22 nt, Artificial Sequence
  Synthetic
aauuuucuuucaugucaaggua

SEQ ID NO: 243475 - RNA, 23 nt, Artificial Sequence
  Synthetic
uaauuuucuuucaugucaaggua

SEQ ID NO: 243476 - RNA, 24 nt, Artificial Sequence
  Synthetic
auaauuuucuuucaugucaaggua

SEQ ID NO: 243477 - RNA, 18 nt, Artificial Sequence
  Synthetic
uuagcuauuuucaaggua

SEQ ID NO: 243478 - RNA, 19 nt, Artificial Sequence
  Synthetic
uuuagcuauuuucaaggua

SEQ ID NO: 243479 - RNA, 20 nt, Artificial Sequence
  Synthetic
auuuagcuauuuucaaggua

SEQ ID NO: 243480 - RNA, 21 nt, Artificial Sequence
  Synthetic
uauuuagcuauuuucaaggua

SEQ ID NO: 243481 - RNA, 22 nt, Artificial Sequence
  Synthetic
uuauuuagcuauuuucaaggua

SEQ ID NO: 243482 - RNA, 23 nt, Artificial Sequence
  Synthetic
guuauuuagcuauuuucaaggua

SEQ ID NO: 243483 - RNA, 24 nt, Artificial Sequence
  Synthetic
uguuauuuagcuauuuucaaggua

SEQ ID NO: 243484 - RNA, 18 nt, Artificial Sequence
  Synthetic
aaagauuggaagaaggua

SEQ ID NO: 243485 - RNA, 19 nt, Artificial Sequence
  Synthetic
caaagauuggaagaaggua

SEQ ID NO: 243486 - RNA, 20 nt, Artificial Sequence
  Synthetic
gcaaagauuggaagaaggua

SEQ ID NO: 243487 - RNA, 21 nt, Artificial Sequence
  Synthetic
agcaaagauuggaagaaggua

SEQ ID NO: 243488 - RNA, 22 nt, Artificial Sequence
  Synthetic
gagcaaagauuggaagaaggua

SEQ ID NO: 243489 - RNA, 23 nt, Artificial Sequence
  Synthetic
ugagcaaagauuggaagaaggua

SEQ ID NO: 243490 - RNA, 24 nt, Artificial Sequence
  Synthetic
uugagcaaagauuggaagaaggua

SEQ ID NO: 243491 - RNA, 18 nt, Artificial Sequence
  Synthetic
guagagaauuagaaggua

SEQ ID NO: 243492 - RNA, 19 nt, Artificial Sequence
  Synthetic
aguagagaauuagaaggua

SEQ ID NO: 243493 - RNA, 20 nt, Artificial Sequence
  Synthetic
gaguagagaauuagaaggua

SEQ ID NO: 243494 - RNA, 21 nt, Artificial Sequence
  Synthetic
ugaguagagaauuagaaggua

SEQ ID NO: 243495 - RNA, 22 nt, Artificial Sequence
  Synthetic
gugaguagagaauuagaaggua

SEQ ID NO: 243496 - RNA, 23 nt, Artificial Sequence
  Synthetic
ugugaguagagaauuagaaggua

SEQ ID NO: 243497 - RNA, 24 nt, Artificial Sequence
  Synthetic
cugugaguagagaauuagaaggua

SEQ ID NO: 243498 - RNA, 18 nt, Artificial Sequence
  Synthetic
uucucauggaggaaggua

SEQ ID NO: 243499 - RNA, 19 nt, Artificial Sequence
  Synthetic
guucucauggaggaaggua

SEQ ID NO: 243500 - RNA, 20 nt, Artificial Sequence
  Synthetic
gguucucauggaggaaggua

SEQ ID NO: 243501 - RNA, 21 nt, Artificial Sequence
  Synthetic
agguucucauggaggaaggua

SEQ ID NO: 243502 - RNA, 22 nt, Artificial Sequence
  Synthetic
aagguucucauggaggaaggua

SEQ ID NO: 243503 - RNA, 23 nt, Artificial Sequence
  Synthetic
aaagguucucauggaggaaggua

SEQ ID NO: 243504 - RNA, 24 nt, Artificial Sequence
  Synthetic
gaaagguucucauggaggaaggua

SEQ ID NO: 243505 - RNA, 18 nt, Artificial Sequence
  Synthetic
gggcagagugggaaggua

SEQ ID NO: 243506 - RNA, 19 nt, Artificial Sequence
  Synthetic
ggggcagagugggaaggua

SEQ ID NO: 243507 - RNA, 20 nt, Artificial Sequence
  Synthetic
aggggcagagugggaaggua

SEQ ID NO: 243508 - RNA, 21 nt, Artificial Sequence
  Synthetic
aaggggcagagugggaaggua

SEQ ID NO: 243509 - RNA, 22 nt, Artificial Sequence
  Synthetic
gaaggggcagagugggaaggua

SEQ ID NO: 243510 - RNA, 23 nt, Artificial Sequence
  Synthetic
agaaggggcagagugggaaggua

SEQ ID NO: 243511 - RNA, 24 nt, Artificial Sequence
  Synthetic
cagaaggggcagagugggaaggua

SEQ ID NO: 243512 - RNA, 18 nt, Artificial Sequence
  Synthetic
aauuccugaaugaaggua

SEQ ID NO: 243513 - RNA, 19 nt, Artificial Sequence
  Synthetic
aaauuccugaaugaaggua

SEQ ID NO: 243514 - RNA, 20 nt, Artificial Sequence
  Synthetic
uaaauuccugaaugaaggua

SEQ ID NO: 243515 - RNA, 21 nt, Artificial Sequence
  Synthetic
uuaaauuccugaaugaaggua

SEQ ID NO: 243516 - RNA, 22 nt, Artificial Sequence
  Synthetic
uuuaaauuccugaaugaaggua

SEQ ID NO: 243517 - RNA, 23 nt, Artificial Sequence
  Synthetic
cuuuaaauuccugaaugaaggua

SEQ ID NO: 243518 - RNA, 24 nt, Artificial Sequence
  Synthetic
acuuuaaauuccugaaugaaggua

SEQ ID NO: 243519 - RNA, 18 nt, Artificial Sequence
  Synthetic
acucagccagugaaggua

SEQ ID NO: 243520 - RNA, 19 nt, Artificial Sequence
  Synthetic
cacucagccagugaaggua

SEQ ID NO: 243521 - RNA, 20 nt, Artificial Sequence
  Synthetic
ccacucagccagugaaggua

SEQ ID NO: 243522 - RNA, 21 nt, Artificial Sequence
  Synthetic
gccacucagccagugaaggua

SEQ ID NO: 243523 - RNA, 22 nt, Artificial Sequence
  Synthetic
agccacucagccagugaaggua

SEQ ID NO: 243524 - RNA, 23 nt, Artificial Sequence
  Synthetic
cagccacucagccagugaaggua

SEQ ID NO: 243525 - RNA, 24 nt, Artificial Sequence
  Synthetic
ccagccacucagccagugaaggua

SEQ ID NO: 243526 - RNA, 18 nt, Artificial Sequence
  Synthetic
ugaauuggccauaaggua

SEQ ID NO: 243527 - RNA, 19 nt, Artificial Sequence
  Synthetic
uugaauuggccauaaggua

SEQ ID NO: 243528 - RNA, 20 nt, Artificial Sequence
  Synthetic
cuugaauuggccauaaggua

SEQ ID NO: 243529 - RNA, 21 nt, Artificial Sequence
  Synthetic
acuugaauuggccauaaggua

SEQ ID NO: 243530 - RNA, 22 nt, Artificial Sequence
  Synthetic
uacuugaauuggccauaaggua

SEQ ID NO: 243531 - RNA, 23 nt, Artificial Sequence
  Synthetic
uuacuugaauuggccauaaggua

SEQ ID NO: 243532 - RNA, 24 nt, Artificial Sequence
  Synthetic
auuacuugaauuggccauaaggua

SEQ ID NO: 243533 - RNA, 18 nt, Artificial Sequence
  Synthetic
uaauuuuuggcuaaggua

SEQ ID NO: 243534 - RNA, 19 nt, Artificial Sequence
  Synthetic
uuaauuuuuggcuaaggua

SEQ ID NO: 243535 - RNA, 20 nt, Artificial Sequence
  Synthetic
uuuaauuuuuggcuaaggua

SEQ ID NO: 243536 - RNA, 21 nt, Artificial Sequence
  Synthetic
auuuaauuuuuggcuaaggua

SEQ ID NO: 243537 - RNA, 22 nt, Artificial Sequence
  Synthetic
uauuuaauuuuuggcuaaggua

SEQ ID NO: 243538 - RNA, 23 nt, Artificial Sequence
  Synthetic
guauuuaauuuuuggcuaaggua

SEQ ID NO: 243539 - RNA, 24 nt, Artificial Sequence
  Synthetic
gguauuuaauuuuuggcuaaggua

SEQ ID NO: 243540 - RNA, 18 nt, Artificial Sequence
  Synthetic
aagguacuuuguaaggua

SEQ ID NO: 243541 - RNA, 19 nt, Artificial Sequence
  Synthetic
uaagguacuuuguaaggua

SEQ ID NO: 243542 - RNA, 20 nt, Artificial Sequence
  Synthetic
guaagguacuuuguaaggua

SEQ ID NO: 243543 - RNA, 21 nt, Artificial Sequence
  Synthetic
uguaagguacuuuguaaggua

SEQ ID NO: 243544 - RNA, 22 nt, Artificial Sequence
  Synthetic
guguaagguacuuuguaaggua

SEQ ID NO: 243545 - RNA, 23 nt, Artificial Sequence
  Synthetic
uguguaagguacuuuguaaggua

SEQ ID NO: 243546 - RNA, 24 nt, Artificial Sequence
  Synthetic
cuguguaagguacuuuguaaggua

SEQ ID NO: 243547 - RNA, 18 nt, Artificial Sequence
  Synthetic
cauaaugaaauuaaggua

SEQ ID NO: 243548 - RNA, 19 nt, Artificial Sequence
  Synthetic
ucauaaugaaauuaaggua

SEQ ID NO: 243549 - RNA, 20 nt, Artificial Sequence
  Synthetic
gucauaaugaaauuaaggua

SEQ ID NO: 243550 - RNA, 21 nt, Artificial Sequence
  Synthetic
ugucauaaugaaauuaaggua

SEQ ID NO: 243551 - RNA, 22 nt, Artificial Sequence
  Synthetic
augucauaaugaaauuaaggua

SEQ ID NO: 243552 - RNA, 23 nt, Artificial Sequence
  Synthetic
aaugucauaaugaaauuaaggua

SEQ ID NO: 243553 - RNA, 24 nt, Artificial Sequence
  Synthetic
aaaugucauaaugaaauuaaggua

SEQ ID NO: 243554 - RNA, 18 nt, Artificial Sequence
  Synthetic
ccauuugacguuaaggua

SEQ ID NO: 243555 - RNA, 19 nt, Artificial Sequence
  Synthetic
accauuugacguuaaggua

SEQ ID NO: 243556 - RNA, 20 nt, Artificial Sequence
  Synthetic
gaccauuugacguuaaggua

SEQ ID NO: 243557 - RNA, 21 nt, Artificial Sequence
  Synthetic
ggaccauuugacguuaaggua

SEQ ID NO: 243558 - RNA, 22 nt, Artificial Sequence
  Synthetic
aggaccauuugacguuaaggua

SEQ ID NO: 243559 - RNA, 23 nt, Artificial Sequence
  Synthetic
aaggaccauuugacguuaaggua

SEQ ID NO: 243560 - RNA, 24 nt, Artificial Sequence
  Synthetic
gaaggaccauuugacguuaaggua

SEQ ID NO: 243561 - RNA, 18 nt, Artificial Sequence
  Synthetic
guacguuggguacaggua

SEQ ID NO: 243562 - RNA, 19 nt, Artificial Sequence
  Synthetic
uguacguuggguacaggua

SEQ ID NO: 243563 - RNA, 20 nt, Artificial Sequence
  Synthetic
cuguacguuggguacaggua

SEQ ID NO: 243564 - RNA, 21 nt, Artificial Sequence
  Synthetic
acuguacguuggguacaggua

SEQ ID NO: 243565 - RNA, 22 nt, Artificial Sequence
  Synthetic
aacuguacguuggguacaggua

SEQ ID NO: 243566 - RNA, 23 nt, Artificial Sequence
  Synthetic
caacuguacguuggguacaggua

SEQ ID NO: 243567 - RNA, 24 nt, Artificial Sequence
  Synthetic
ucaacuguacguuggguacaggua

SEQ ID NO: 243568 - RNA, 18 nt, Artificial Sequence
  Synthetic
gaucccaccacccaggua

SEQ ID NO: 243569 - RNA, 19 nt, Artificial Sequence
  Synthetic
ugaucccaccacccaggua

SEQ ID NO: 243570 - RNA, 20 nt, Artificial Sequence
  Synthetic
augaucccaccacccaggua

SEQ ID NO: 243571 - RNA, 21 nt, Artificial Sequence
  Synthetic
aaugaucccaccacccaggua

SEQ ID NO: 243572 - RNA, 22 nt, Artificial Sequence
  Synthetic
gaaugaucccaccacccaggua

SEQ ID NO: 243573 - RNA, 23 nt, Artificial Sequence
  Synthetic
ugaaugaucccaccacccaggua

SEQ ID NO: 243574 - RNA, 24 nt, Artificial Sequence
  Synthetic
augaaugaucccaccacccaggua

SEQ ID NO: 243575 - RNA, 18 nt, Artificial Sequence
  Synthetic
gauacugucacccaggua

SEQ ID NO: 243576 - RNA, 19 nt, Artificial Sequence
  Synthetic
ugauacugucacccaggua

SEQ ID NO: 243577 - RNA, 20 nt, Artificial Sequence
  Synthetic
augauacugucacccaggua

SEQ ID NO: 243578 - RNA, 21 nt, Artificial Sequence
  Synthetic
aaugauacugucacccaggua

SEQ ID NO: 243579 - RNA, 22 nt, Artificial Sequence
  Synthetic
aaaugauacugucacccaggua

SEQ ID NO: 243580 - RNA, 23 nt, Artificial Sequence
  Synthetic
caaaugauacugucacccaggua

SEQ ID NO: 243581 - RNA, 24 nt, Artificial Sequence
  Synthetic
acaaaugauacugucacccaggua

SEQ ID NO: 243582 - RNA, 18 nt, Artificial Sequence
  Synthetic
aauucuguaagccaggua

SEQ ID NO: 243583 - RNA, 19 nt, Artificial Sequence
  Synthetic
gaauucuguaagccaggua

SEQ ID NO: 243584 - RNA, 20 nt, Artificial Sequence
  Synthetic
ggaauucuguaagccaggua

SEQ ID NO: 243585 - RNA, 21 nt, Artificial Sequence
  Synthetic
gggaauucuguaagccaggua

SEQ ID NO: 243586 - RNA, 22 nt, Artificial Sequence
  Synthetic
ugggaauucuguaagccaggua

SEQ ID NO: 243587 - RNA, 23 nt, Artificial Sequence
  Synthetic
uugggaauucuguaagccaggua

SEQ ID NO: 243588 - RNA, 24 nt, Artificial Sequence
  Synthetic
auugggaauucuguaagccaggua

SEQ ID NO: 243589 - RNA, 18 nt, Artificial Sequence
  Synthetic
aggucugcacagcaggua

SEQ ID NO: 243590 - RNA, 19 nt, Artificial Sequence
  Synthetic
aaggucugcacagcaggua

SEQ ID NO: 243591 - RNA, 20 nt, Artificial Sequence
  Synthetic
uaaggucugcacagcaggua

SEQ ID NO: 243592 - RNA, 21 nt, Artificial Sequence
  Synthetic
guaaggucugcacagcaggua

SEQ ID NO: 243593 - RNA, 22 nt, Artificial Sequence
  Synthetic
uguaaggucugcacagcaggua

SEQ ID NO: 243594 - RNA, 23 nt, Artificial Sequence
  Synthetic
auguaaggucugcacagcaggua

SEQ ID NO: 243595 - RNA, 24 nt, Artificial Sequence
  Synthetic
aauguaaggucugcacagcaggua

SEQ ID NO: 243596 - RNA, 18 nt, Artificial Sequence
  Synthetic
uucgucaauuggcaggua

SEQ ID NO: 243597 - RNA, 19 nt, Artificial Sequence
  Synthetic
guucgucaauuggcaggua

SEQ ID NO: 243598 - RNA, 20 nt, Artificial Sequence
  Synthetic
gguucgucaauuggcaggua

SEQ ID NO: 243599 - RNA, 21 nt, Artificial Sequence
  Synthetic
ggguucgucaauuggcaggua

SEQ ID NO: 243600 - RNA, 22 nt, Artificial Sequence
  Synthetic
aggguucgucaauuggcaggua

SEQ ID NO: 243601 - RNA, 23 nt, Artificial Sequence
  Synthetic
gaggguucgucaauuggcaggua

SEQ ID NO: 243602 - RNA, 24 nt, Artificial Sequence
  Synthetic
agaggguucgucaauuggcaggua

SEQ ID NO: 243603 - RNA, 18 nt, Artificial Sequence
  Synthetic
uuggaaauucaucaggua

SEQ ID NO: 243604 - RNA, 19 nt, Artificial Sequence
  Synthetic
uuuggaaauucaucaggua

SEQ ID NO: 243605 - RNA, 20 nt, Artificial Sequence
  Synthetic
auuuggaaauucaucaggua

SEQ ID NO: 243606 - RNA, 21 nt, Artificial Sequence
  Synthetic
aauuuggaaauucaucaggua

SEQ ID NO: 243607 - RNA, 22 nt, Artificial Sequence
  Synthetic
caauuuggaaauucaucaggua

SEQ ID NO: 243608 - RNA, 23 nt, Artificial Sequence
  Synthetic
ucaauuuggaaauucaucaggua

SEQ ID NO: 243609 - RNA, 24 nt, Artificial Sequence
  Synthetic
aucaauuuggaaauucaucaggua

SEQ ID NO: 243610 - RNA, 18 nt, Artificial Sequence
  Synthetic
agauggguuggucaggua

SEQ ID NO: 243611 - RNA, 19 nt, Artificial Sequence
  Synthetic
gagauggguuggucaggua

SEQ ID NO: 243612 - RNA, 20 nt, Artificial Sequence
  Synthetic
agagauggguuggucaggua

SEQ ID NO: 243613 - RNA, 21 nt, Artificial Sequence
  Synthetic
aagagauggguuggucaggua

SEQ ID NO: 243614 - RNA, 22 nt, Artificial Sequence
  Synthetic
uaagagauggguuggucaggua

SEQ ID NO: 243615 - RNA, 23 nt, Artificial Sequence
  Synthetic
cuaagagauggguuggucaggua

SEQ ID NO: 243616 - RNA, 24 nt, Artificial Sequence
  Synthetic
ccuaagagauggguuggucaggua

SEQ ID NO: 243617 - RNA, 18 nt, Artificial Sequence
  Synthetic
uaaaauagggaagaggua

SEQ ID NO: 243618 - RNA, 19 nt, Artificial Sequence
  Synthetic
uuaaaauagggaagaggua

SEQ ID NO: 243619 - RNA, 20 nt, Artificial Sequence
  Synthetic
uuuaaaauagggaagaggua

SEQ ID NO: 243620 - RNA, 21 nt, Artificial Sequence
  Synthetic
auuuaaaauagggaagaggua

SEQ ID NO: 243621 - RNA, 22 nt, Artificial Sequence
  Synthetic
gauuuaaaauagggaagaggua

SEQ ID NO: 243622 - RNA, 23 nt, Artificial Sequence
  Synthetic
ugauuuaaaauagggaagaggua

SEQ ID NO: 243623 - RNA, 24 nt, Artificial Sequence
  Synthetic
gugauuuaaaauagggaagaggua

SEQ ID NO: 243624 - RNA, 18 nt, Artificial Sequence
  Synthetic
caauagaggccagaggua

SEQ ID NO: 243625 - RNA, 19 nt, Artificial Sequence
  Synthetic
acaauagaggccagaggua

SEQ ID NO: 243626 - RNA, 20 nt, Artificial Sequence
  Synthetic
aacaauagaggccagaggua

SEQ ID NO: 243627 - RNA, 21 nt, Artificial Sequence
  Synthetic
aaacaauagaggccagaggua

SEQ ID NO: 243628 - RNA, 22 nt, Artificial Sequence
  Synthetic
uaaacaauagaggccagaggua

SEQ ID NO: 243629 - RNA, 23 nt, Artificial Sequence
  Synthetic
auaaacaauagaggccagaggua

SEQ ID NO: 243630 - RNA, 24 nt, Artificial Sequence
  Synthetic
cauaaacaauagaggccagaggua

SEQ ID NO: 243631 - RNA, 18 nt, Artificial Sequence
  Synthetic
gcuuuuauuucagaggua

SEQ ID NO: 243632 - RNA, 19 nt, Artificial Sequence
  Synthetic
ugcuuuuauuucagaggua

SEQ ID NO: 243633 - RNA, 20 nt, Artificial Sequence
  Synthetic
uugcuuuuauuucagaggua

SEQ ID NO: 243634 - RNA, 21 nt, Artificial Sequence
  Synthetic
auugcuuuuauuucagaggua

SEQ ID NO: 243635 - RNA, 22 nt, Artificial Sequence
  Synthetic
aauugcuuuuauuucagaggua

SEQ ID NO: 243636 - RNA, 23 nt, Artificial Sequence
  Synthetic
aaauugcuuuuauuucagaggua

SEQ ID NO: 243637 - RNA, 24 nt, Artificial Sequence
  Synthetic
uaaauugcuuuuauuucagaggua

SEQ ID NO: 243638 - RNA, 18 nt, Artificial Sequence
  Synthetic
uucccaacaagagaggua

SEQ ID NO: 243639 - RNA, 19 nt, Artificial Sequence
  Synthetic
uuucccaacaagagaggua

SEQ ID NO: 243640 - RNA, 20 nt, Artificial Sequence
  Synthetic
auuucccaacaagagaggua

SEQ ID NO: 243641 - RNA, 21 nt, Artificial Sequence
  Synthetic
uauuucccaacaagagaggua

SEQ ID NO: 243642 - RNA, 22 nt, Artificial Sequence
  Synthetic
uuauuucccaacaagagaggua

SEQ ID NO: 243643 - RNA, 23 nt, Artificial Sequence
  Synthetic
cuuauuucccaacaagagaggua

SEQ ID NO: 243644 - RNA, 24 nt, Artificial Sequence
  Synthetic
ucuuauuucccaacaagagaggua

SEQ ID NO: 243645 - RNA, 18 nt, Artificial Sequence
  Synthetic
aggagaggaagagaggua

SEQ ID NO: 243646 - RNA, 19 nt, Artificial Sequence
  Synthetic
aaggagaggaagagaggua

SEQ ID NO: 243647 - RNA, 20 nt, Artificial Sequence
  Synthetic
caaggagaggaagagaggua

SEQ ID NO: 243648 - RNA, 21 nt, Artificial Sequence
  Synthetic
ccaaggagaggaagagaggua

SEQ ID NO: 243649 - RNA, 22 nt, Artificial Sequence
  Synthetic
cccaaggagaggaagagaggua

SEQ ID NO: 243650 - RNA, 23 nt, Artificial Sequence
  Synthetic
gcccaaggagaggaagagaggua

SEQ ID NO: 243651 - RNA, 24 nt, Artificial Sequence
  Synthetic
ggcccaaggagaggaagagaggua

SEQ ID NO: 243652 - RNA, 18 nt, Artificial Sequence
  Synthetic
ucugaagagaaggaggua

SEQ ID NO: 243653 - RNA, 19 nt, Artificial Sequence
  Synthetic
aucugaagagaaggaggua

SEQ ID NO: 243654 - RNA, 20 nt, Artificial Sequence
  Synthetic
aaucugaagagaaggaggua

SEQ ID NO: 243655 - RNA, 21 nt, Artificial Sequence
  Synthetic
aaaucugaagagaaggaggua

SEQ ID NO: 243656 - RNA, 22 nt, Artificial Sequence
  Synthetic
uaaaucugaagagaaggaggua

SEQ ID NO: 243657 - RNA, 23 nt, Artificial Sequence
  Synthetic
cuaaaucugaagagaaggaggua

SEQ ID NO: 243658 - RNA, 24 nt, Artificial Sequence
  Synthetic
ccuaaaucugaagagaaggaggua

SEQ ID NO: 243659 - RNA, 18 nt, Artificial Sequence
  Synthetic
ggccuuaaacaggaggua

SEQ ID NO: 243660 - RNA, 19 nt, Artificial Sequence
  Synthetic
uggccuuaaacaggaggua

SEQ ID NO: 243661 - RNA, 20 nt, Artificial Sequence
  Synthetic
uuggccuuaaacaggaggua

SEQ ID NO: 243662 - RNA, 21 nt, Artificial Sequence
  Synthetic
auuggccuuaaacaggaggua

SEQ ID NO: 243663 - RNA, 22 nt, Artificial Sequence
  Synthetic
uauuggccuuaaacaggaggua

SEQ ID NO: 243664 - RNA, 23 nt, Artificial Sequence
  Synthetic
uuauuggccuuaaacaggaggua

SEQ ID NO: 243665 - RNA, 24 nt, Artificial Sequence
  Synthetic
guuauuggccuuaaacaggaggua

SEQ ID NO: 243666 - RNA, 18 nt, Artificial Sequence
  Synthetic
cuuauacuagaggaggua

SEQ ID NO: 243667 - RNA, 19 nt, Artificial Sequence
  Synthetic
ccuuauacuagaggaggua

SEQ ID NO: 243668 - RNA, 20 nt, Artificial Sequence
  Synthetic
uccuuauacuagaggaggua

SEQ ID NO: 243669 - RNA, 21 nt, Artificial Sequence
  Synthetic
guccuuauacuagaggaggua

SEQ ID NO: 243670 - RNA, 22 nt, Artificial Sequence
  Synthetic
aguccuuauacuagaggaggua

SEQ ID NO: 243671 - RNA, 23 nt, Artificial Sequence
  Synthetic
gaguccuuauacuagaggaggua

SEQ ID NO: 243672 - RNA, 24 nt, Artificial Sequence
  Synthetic
ugaguccuuauacuagaggaggua

SEQ ID NO: 243673 - RNA, 18 nt, Artificial Sequence
  Synthetic
agugguguucgggaggua

SEQ ID NO: 243674 - RNA, 19 nt, Artificial Sequence
  Synthetic
aagugguguucgggaggua

SEQ ID NO: 243675 - RNA, 20 nt, Artificial Sequence
  Synthetic
aaagugguguucgggaggua

SEQ ID NO: 243676 - RNA, 21 nt, Artificial Sequence
  Synthetic
aaaagugguguucgggaggua

SEQ ID NO: 243677 - RNA, 22 nt, Artificial Sequence
  Synthetic
uaaaagugguguucgggaggua

SEQ ID NO: 243678 - RNA, 23 nt, Artificial Sequence
  Synthetic
uuaaaagugguguucgggaggua

SEQ ID NO: 243679 - RNA, 24 nt, Artificial Sequence
  Synthetic
uuuaaaagugguguucgggaggua

SEQ ID NO: 243680 - RNA, 18 nt, Artificial Sequence
  Synthetic
cagggauugugugaggua

SEQ ID NO: 243681 - RNA, 19 nt, Artificial Sequence
  Synthetic
acagggauugugugaggua

SEQ ID NO: 243682 - RNA, 20 nt, Artificial Sequence
  Synthetic
cacagggauugugugaggua

SEQ ID NO: 243683 - RNA, 21 nt, Artificial Sequence
  Synthetic
ucacagggauugugugaggua

SEQ ID NO: 243684 - RNA, 22 nt, Artificial Sequence
  Synthetic
aucacagggauugugugaggua

SEQ ID NO: 243685 - RNA, 23 nt, Artificial Sequence
  Synthetic
aaucacagggauugugugaggua

SEQ ID NO: 243686 - RNA, 24 nt, Artificial Sequence
  Synthetic
gaaucacagggauugugugaggua

SEQ ID NO: 243687 - RNA, 18 nt, Artificial Sequence
  Synthetic
agaaagauuccauaggua

SEQ ID NO: 243688 - RNA, 19 nt, Artificial Sequence
  Synthetic
cagaaagauuccauaggua

SEQ ID NO: 243689 - RNA, 20 nt, Artificial Sequence
  Synthetic
ccagaaagauuccauaggua

SEQ ID NO: 243690 - RNA, 21 nt, Artificial Sequence
  Synthetic
accagaaagauuccauaggua

SEQ ID NO: 243691 - RNA, 22 nt, Artificial Sequence
  Synthetic
aaccagaaagauuccauaggua

SEQ ID NO: 243692 - RNA, 23 nt, Artificial Sequence
  Synthetic
caaccagaaagauuccauaggua

SEQ ID NO: 243693 - RNA, 24 nt, Artificial Sequence
  Synthetic
gcaaccagaaagauuccauaggua

SEQ ID NO: 243694 - RNA, 18 nt, Artificial Sequence
  Synthetic
agauaccaagcauaggua

SEQ ID NO: 243695 - RNA, 19 nt, Artificial Sequence
  Synthetic
cagauaccaagcauaggua

SEQ ID NO: 243696 - RNA, 20 nt, Artificial Sequence
  Synthetic
ucagauaccaagcauaggua

SEQ ID NO: 243697 - RNA, 21 nt, Artificial Sequence
  Synthetic
aucagauaccaagcauaggua

SEQ ID NO: 243698 - RNA, 22 nt, Artificial Sequence
  Synthetic
aaucagauaccaagcauaggua

SEQ ID NO: 243699 - RNA, 23 nt, Artificial Sequence
  Synthetic
uaaucagauaccaagcauaggua

SEQ ID NO: 243700 - RNA, 24 nt, Artificial Sequence
  Synthetic
auaaucagauaccaagcauaggua

SEQ ID NO: 243701 - RNA, 18 nt, Artificial Sequence
  Synthetic
cgcugugucaucuaggua

SEQ ID NO: 243702 - RNA, 19 nt, Artificial Sequence
  Synthetic
acgcugugucaucuaggua

SEQ ID NO: 243703 - RNA, 20 nt, Artificial Sequence
  Synthetic
gacgcugugucaucuaggua

SEQ ID NO: 243704 - RNA, 21 nt, Artificial Sequence
  Synthetic
cgacgcugugucaucuaggua

SEQ ID NO: 243705 - RNA, 22 nt, Artificial Sequence
  Synthetic
ucgacgcugugucaucuaggua

SEQ ID NO: 243706 - RNA, 23 nt, Artificial Sequence
  Synthetic
cucgacgcugugucaucuaggua

SEQ ID NO: 243707 - RNA, 24 nt, Artificial Sequence
  Synthetic
ccucgacgcugugucaucuaggua

SEQ ID NO: 243708 - RNA, 18 nt, Artificial Sequence
  Synthetic
acuguaguaaccacggua

SEQ ID NO: 243709 - RNA, 19 nt, Artificial Sequence
  Synthetic
uacuguaguaaccacggua

SEQ ID NO: 243710 - RNA, 20 nt, Artificial Sequence
  Synthetic
uuacuguaguaaccacggua

SEQ ID NO: 243711 - RNA, 21 nt, Artificial Sequence
  Synthetic
cuuacuguaguaaccacggua

SEQ ID NO: 243712 - RNA, 22 nt, Artificial Sequence
  Synthetic
acuuacuguaguaaccacggua

SEQ ID NO: 243713 - RNA, 23 nt, Artificial Sequence
  Synthetic
aacuuacuguaguaaccacggua

SEQ ID NO: 243714 - RNA, 24 nt, Artificial Sequence
  Synthetic
uaacuuacuguaguaaccacggua

SEQ ID NO: 243715 - RNA, 18 nt, Artificial Sequence
  Synthetic
auaaaaauauguacggua

SEQ ID NO: 243716 - RNA, 19 nt, Artificial Sequence
  Synthetic
cauaaaaauauguacggua

SEQ ID NO: 243717 - RNA, 20 nt, Artificial Sequence
  Synthetic
ccauaaaaauauguacggua

SEQ ID NO: 243718 - RNA, 21 nt, Artificial Sequence
  Synthetic
accauaaaaauauguacggua

SEQ ID NO: 243719 - RNA, 22 nt, Artificial Sequence
  Synthetic
caccauaaaaauauguacggua

SEQ ID NO: 243720 - RNA, 23 nt, Artificial Sequence
  Synthetic
ccaccauaaaaauauguacggua

SEQ ID NO: 243721 - RNA, 24 nt, Artificial Sequence
  Synthetic
uccaccauaaaaauauguacggua

SEQ ID NO: 243722 - RNA, 18 nt, Artificial Sequence
  Synthetic
aucuuuuucucugcggua

SEQ ID NO: 243723 - RNA, 19 nt, Artificial Sequence
  Synthetic
uaucuuuuucucugcggua

SEQ ID NO: 243724 - RNA, 20 nt, Artificial Sequence
  Synthetic
guaucuuuuucucugcggua

SEQ ID NO: 243725 - RNA, 21 nt, Artificial Sequence
  Synthetic
uguaucuuuuucucugcggua

SEQ ID NO: 243726 - RNA, 22 nt, Artificial Sequence
  Synthetic
uuguaucuuuuucucugcggua

SEQ ID NO: 243727 - RNA, 23 nt, Artificial Sequence
  Synthetic
auuguaucuuuuucucugcggua

SEQ ID NO: 243728 - RNA, 24 nt, Artificial Sequence
  Synthetic
cauuguaucuuuuucucugcggua

SEQ ID NO: 243729 - RNA, 18 nt, Artificial Sequence
  Synthetic
gcuuggacuuggucggua

SEQ ID NO: 243730 - RNA, 19 nt, Artificial Sequence
  Synthetic
ggcuuggacuuggucggua

SEQ ID NO: 243731 - RNA, 20 nt, Artificial Sequence
  Synthetic
uggcuuggacuuggucggua

SEQ ID NO: 243732 - RNA, 21 nt, Artificial Sequence
  Synthetic
guggcuuggacuuggucggua

SEQ ID NO: 243733 - RNA, 22 nt, Artificial Sequence
  Synthetic
gguggcuuggacuuggucggua

SEQ ID NO: 243734 - RNA, 23 nt, Artificial Sequence
  Synthetic
ugguggcuuggacuuggucggua

SEQ ID NO: 243735 - RNA, 24 nt, Artificial Sequence
  Synthetic
cugguggcuuggacuuggucggua

SEQ ID NO: 243736 - RNA, 18 nt, Artificial Sequence
  Synthetic
cuugaaauccaaagggua

SEQ ID NO: 243737 - RNA, 19 nt, Artificial Sequence
  Synthetic
acuugaaauccaaagggua

SEQ ID NO: 243738 - RNA, 20 nt, Artificial Sequence
  Synthetic
uacuugaaauccaaagggua

SEQ ID NO: 243739 - RNA, 21 nt, Artificial Sequence
  Synthetic
auacuugaaauccaaagggua

SEQ ID NO: 243740 - RNA, 22 nt, Artificial Sequence
  Synthetic
gauacuugaaauccaaagggua

SEQ ID NO: 243741 - RNA, 23 nt, Artificial Sequence
  Synthetic
ggauacuugaaauccaaagggua

SEQ ID NO: 243742 - RNA, 24 nt, Artificial Sequence
  Synthetic
aggauacuugaaauccaaagggua

SEQ ID NO: 243743 - RNA, 18 nt, Artificial Sequence
  Synthetic
ggaaaauaagcaagggua

SEQ ID NO: 243744 - RNA, 19 nt, Artificial Sequence
  Synthetic
uggaaaauaagcaagggua

SEQ ID NO: 243745 - RNA, 20 nt, Artificial Sequence
  Synthetic
auggaaaauaagcaagggua

SEQ ID NO: 243746 - RNA, 21 nt, Artificial Sequence
  Synthetic
aauggaaaauaagcaagggua

SEQ ID NO: 243747 - RNA, 22 nt, Artificial Sequence
  Synthetic
aaauggaaaauaagcaagggua

SEQ ID NO: 243748 - RNA, 23 nt, Artificial Sequence
  Synthetic
uaaauggaaaauaagcaagggua

SEQ ID NO: 243749 - RNA, 24 nt, Artificial Sequence
  Synthetic
cuaaauggaaaauaagcaagggua

SEQ ID NO: 243750 - RNA, 18 nt, Artificial Sequence
  Synthetic
cacaaauaaagaagggua

SEQ ID NO: 243751 - RNA, 19 nt, Artificial Sequence
  Synthetic
acacaaauaaagaagggua

SEQ ID NO: 243752 - RNA, 20 nt, Artificial Sequence
  Synthetic
cacacaaauaaagaagggua

SEQ ID NO: 243753 - RNA, 21 nt, Artificial Sequence
  Synthetic
gcacacaaauaaagaagggua

SEQ ID NO: 243754 - RNA, 22 nt, Artificial Sequence
  Synthetic
ugcacacaaauaaagaagggua

SEQ ID NO: 243755 - RNA, 23 nt, Artificial Sequence
  Synthetic
gugcacacaaauaaagaagggua

SEQ ID NO: 243756 - RNA, 24 nt, Artificial Sequence
  Synthetic
ggugcacacaaauaaagaagggua

SEQ ID NO: 243757 - RNA, 18 nt, Artificial Sequence
  Synthetic
cuaaaguauuuaagggua

SEQ ID NO: 243758 - RNA, 19 nt, Artificial Sequence
  Synthetic
ccuaaaguauuuaagggua

SEQ ID NO: 243759 - RNA, 20 nt, Artificial Sequence
  Synthetic
accuaaaguauuuaagggua

SEQ ID NO: 243760 - RNA, 21 nt, Artificial Sequence
  Synthetic
aaccuaaaguauuuaagggua

SEQ ID NO: 243761 - RNA, 22 nt, Artificial Sequence
  Synthetic
aaaccuaaaguauuuaagggua

SEQ ID NO: 243762 - RNA, 23 nt, Artificial Sequence
  Synthetic
aaaaccuaaaguauuuaagggua

SEQ ID NO: 243763 - RNA, 24 nt, Artificial Sequence
  Synthetic
uaaaaccuaaaguauuuaagggua

SEQ ID NO: 243764 - RNA, 18 nt, Artificial Sequence
  Synthetic
uggcugggccgcagggua

SEQ ID NO: 243765 - RNA, 19 nt, Artificial Sequence
  Synthetic
uuggcugggccgcagggua

SEQ ID NO: 243766 - RNA, 20 nt, Artificial Sequence
  Synthetic
cuuggcugggccgcagggua

SEQ ID NO: 243767 - RNA, 21 nt, Artificial Sequence
  Synthetic
acuuggcugggccgcagggua

SEQ ID NO: 243768 - RNA, 22 nt, Artificial Sequence
  Synthetic
aacuuggcugggccgcagggua

SEQ ID NO: 243769 - RNA, 23 nt, Artificial Sequence
  Synthetic
caacuuggcugggccgcagggua

SEQ ID NO: 243770 - RNA, 24 nt, Artificial Sequence
  Synthetic
ucaacuuggcugggccgcagggua

SEQ ID NO: 243771 - RNA, 18 nt, Artificial Sequence
  Synthetic
aaaaaaaucaucagggua

SEQ ID NO: 243772 - RNA, 19 nt, Artificial Sequence
  Synthetic
gaaaaaaaucaucagggua

SEQ ID NO: 243773 - RNA, 20 nt, Artificial Sequence
  Synthetic
ugaaaaaaaucaucagggua

SEQ ID NO: 243774 - RNA, 21 nt, Artificial Sequence
  Synthetic
augaaaaaaaucaucagggua

SEQ ID NO: 243775 - RNA, 22 nt, Artificial Sequence
  Synthetic
gaugaaaaaaaucaucagggua

SEQ ID NO: 243776 - RNA, 23 nt, Artificial Sequence
  Synthetic
cgaugaaaaaaaucaucagggua

SEQ ID NO: 243777 - RNA, 24 nt, Artificial Sequence
  Synthetic
acgaugaaaaaaaucaucagggua

SEQ ID NO: 243778 - RNA, 18 nt, Artificial Sequence
  Synthetic
ucucuuguauucagggua

SEQ ID NO: 243779 - RNA, 19 nt, Artificial Sequence
  Synthetic
gucucuuguauucagggua

SEQ ID NO: 243780 - RNA, 20 nt, Artificial Sequence
  Synthetic
ggucucuuguauucagggua

SEQ ID NO: 243781 - RNA, 21 nt, Artificial Sequence
  Synthetic
gggucucuuguauucagggua

SEQ ID NO: 243782 - RNA, 22 nt, Artificial Sequence
  Synthetic
agggucucuuguauucagggua

SEQ ID NO: 243783 - RNA, 23 nt, Artificial Sequence
  Synthetic
uagggucucuuguauucagggua

SEQ ID NO: 243784 - RNA, 24 nt, Artificial Sequence
  Synthetic
uuagggucucuuguauucagggua

SEQ ID NO: 243785 - RNA, 18 nt, Artificial Sequence
  Synthetic
auguuuuuugagagggua

SEQ ID NO: 243786 - RNA, 19 nt, Artificial Sequence
  Synthetic
gauguuuuuugagagggua

SEQ ID NO: 243787 - RNA, 20 nt, Artificial Sequence
  Synthetic
ugauguuuuuugagagggua

SEQ ID NO: 243788 - RNA, 21 nt, Artificial Sequence
  Synthetic
augauguuuuuugagagggua

SEQ ID NO: 243789 - RNA, 22 nt, Artificial Sequence
  Synthetic
caugauguuuuuugagagggua

SEQ ID NO: 243790 - RNA, 23 nt, Artificial Sequence
  Synthetic
ccaugauguuuuuugagagggua

SEQ ID NO: 243791 - RNA, 24 nt, Artificial Sequence
  Synthetic
accaugauguuuuuugagagggua

SEQ ID NO: 243792 - RNA, 18 nt, Artificial Sequence
  Synthetic
uagcaugauuuuagggua

SEQ ID NO: 243793 - RNA, 19 nt, Artificial Sequence
  Synthetic
cuagcaugauuuuagggua

SEQ ID NO: 243794 - RNA, 20 nt, Artificial Sequence
  Synthetic
ucuagcaugauuuuagggua

SEQ ID NO: 243795 - RNA, 21 nt, Artificial Sequence
  Synthetic
aucuagcaugauuuuagggua

SEQ ID NO: 243796 - RNA, 22 nt, Artificial Sequence
  Synthetic
uaucuagcaugauuuuagggua

SEQ ID NO: 243797 - RNA, 23 nt, Artificial Sequence
  Synthetic
guaucuagcaugauuuuagggua

SEQ ID NO: 243798 - RNA, 24 nt, Artificial Sequence
  Synthetic
cguaucuagcaugauuuuagggua

SEQ ID NO: 243799 - RNA, 18 nt, Artificial Sequence
  Synthetic
auuuuuguauaaggggua

SEQ ID NO: 243800 - RNA, 19 nt, Artificial Sequence
  Synthetic
gauuuuuguauaaggggua

SEQ ID NO: 243801 - RNA, 20 nt, Artificial Sequence
  Synthetic
ugauuuuuguauaaggggua

SEQ ID NO: 243802 - RNA, 21 nt, Artificial Sequence
  Synthetic
uugauuuuuguauaaggggua

SEQ ID NO: 243803 - RNA, 22 nt, Artificial Sequence
  Synthetic
guugauuuuuguauaaggggua

SEQ ID NO: 243804 - RNA, 23 nt, Artificial Sequence
  Synthetic
aguugauuuuuguauaaggggua

SEQ ID NO: 243805 - RNA, 24 nt, Artificial Sequence
  Synthetic
gaguugauuuuuguauaaggggua

SEQ ID NO: 243806 - RNA, 18 nt, Artificial Sequence
  Synthetic
agggaccagggaggggua

SEQ ID NO: 243807 - RNA, 19 nt, Artificial Sequence
  Synthetic
cagggaccagggaggggua

SEQ ID NO: 243808 - RNA, 20 nt, Artificial Sequence
  Synthetic
ccagggaccagggaggggua

SEQ ID NO: 243809 - RNA, 21 nt, Artificial Sequence
  Synthetic
gccagggaccagggaggggua

SEQ ID NO: 243810 - RNA, 22 nt, Artificial Sequence
  Synthetic
ugccagggaccagggaggggua

SEQ ID NO: 243811 - RNA, 23 nt, Artificial Sequence
  Synthetic
uugccagggaccagggaggggua

SEQ ID NO: 243812 - RNA, 24 nt, Artificial Sequence
  Synthetic
guugccagggaccagggaggggua

SEQ ID NO: 243813 - RNA, 18 nt, Artificial Sequence
  Synthetic
cugggaggcuccggggua

SEQ ID NO: 243814 - RNA, 19 nt, Artificial Sequence
  Synthetic
gcugggaggcuccggggua

SEQ ID NO: 243815 - RNA, 20 nt, Artificial Sequence
  Synthetic
ugcugggaggcuccggggua

SEQ ID NO: 243816 - RNA, 21 nt, Artificial Sequence
  Synthetic
gugcugggaggcuccggggua

SEQ ID NO: 243817 - RNA, 22 nt, Artificial Sequence
  Synthetic
agugcugggaggcuccggggua

SEQ ID NO: 243818 - RNA, 23 nt, Artificial Sequence
  Synthetic
cagugcugggaggcuccggggua

SEQ ID NO: 243819 - RNA, 24 nt, Artificial Sequence
  Synthetic
gcagugcugggaggcuccggggua

SEQ ID NO: 243820 - RNA, 18 nt, Artificial Sequence
  Synthetic
agugacuuuuucggggua

SEQ ID NO: 243821 - RNA, 19 nt, Artificial Sequence
  Synthetic
uagugacuuuuucggggua

SEQ ID NO: 243822 - RNA, 20 nt, Artificial Sequence
  Synthetic
uuagugacuuuuucggggua

SEQ ID NO: 243823 - RNA, 21 nt, Artificial Sequence
  Synthetic
auuagugacuuuuucggggua

SEQ ID NO: 243824 - RNA, 22 nt, Artificial Sequence
  Synthetic
cauuagugacuuuuucggggua

SEQ ID NO: 243825 - RNA, 23 nt, Artificial Sequence
  Synthetic
gcauuagugacuuuuucggggua

SEQ ID NO: 243826 - RNA, 24 nt, Artificial Sequence
  Synthetic
ggcauuagugacuuuuucggggua

SEQ ID NO: 243827 - RNA, 18 nt, Artificial Sequence
  Synthetic
aauucuucccuuggggua

SEQ ID NO: 243828 - RNA, 19 nt, Artificial Sequence
  Synthetic
caauucuucccuuggggua

SEQ ID NO: 243829 - RNA, 20 nt, Artificial Sequence
  Synthetic
ccaauucuucccuuggggua

SEQ ID NO: 243830 - RNA, 21 nt, Artificial Sequence
  Synthetic
cccaauucuucccuuggggua

SEQ ID NO: 243831 - RNA, 22 nt, Artificial Sequence
  Synthetic
ccccaauucuucccuuggggua

SEQ ID NO: 243832 - RNA, 23 nt, Artificial Sequence
  Synthetic
uccccaauucuucccuuggggua

SEQ ID NO: 243833 - RNA, 24 nt, Artificial Sequence
  Synthetic
cuccccaauucuucccuuggggua

SEQ ID NO: 243834 - RNA, 18 nt, Artificial Sequence
  Synthetic
ugcuaaacaguuggggua

SEQ ID NO: 243835 - RNA, 19 nt, Artificial Sequence
  Synthetic
gugcuaaacaguuggggua

SEQ ID NO: 243836 - RNA, 20 nt, Artificial Sequence
  Synthetic
cgugcuaaacaguuggggua

SEQ ID NO: 243837 - RNA, 21 nt, Artificial Sequence
  Synthetic
gcgugcuaaacaguuggggua

SEQ ID NO: 243838 - RNA, 22 nt, Artificial Sequence
  Synthetic
ugcgugcuaaacaguuggggua

SEQ ID NO: 243839 - RNA, 23 nt, Artificial Sequence
  Synthetic
augcgugcuaaacaguuggggua

SEQ ID NO: 243840 - RNA, 24 nt, Artificial Sequence
  Synthetic
uaugcgugcuaaacaguuggggua

SEQ ID NO: 243841 - RNA, 18 nt, Artificial Sequence
  Synthetic
ucccugaauuacugggua

SEQ ID NO: 243842 - RNA, 19 nt, Artificial Sequence
  Synthetic
gucccugaauuacugggua

SEQ ID NO: 243843 - RNA, 20 nt, Artificial Sequence
  Synthetic
agucccugaauuacugggua

SEQ ID NO: 243844 - RNA, 21 nt, Artificial Sequence
  Synthetic
gagucccugaauuacugggua

SEQ ID NO: 243845 - RNA, 22 nt, Artificial Sequence
  Synthetic
agagucccugaauuacugggua

SEQ ID NO: 243846 - RNA, 23 nt, Artificial Sequence
  Synthetic
cagagucccugaauuacugggua

SEQ ID NO: 243847 - RNA, 24 nt, Artificial Sequence
  Synthetic
ucagagucccugaauuacugggua

SEQ ID NO: 243848 - RNA, 18 nt, Artificial Sequence
  Synthetic
uaaaagcuagagugggua

SEQ ID NO: 243849 - RNA, 19 nt, Artificial Sequence
  Synthetic
uuaaaagcuagagugggua

SEQ ID NO: 243850 - RNA, 20 nt, Artificial Sequence
  Synthetic
uuuaaaagcuagagugggua

SEQ ID NO: 243851 - RNA, 21 nt, Artificial Sequence
  Synthetic
uuuuaaaagcuagagugggua

SEQ ID NO: 243852 - RNA, 22 nt, Artificial Sequence
  Synthetic
uuuuuaaaagcuagagugggua

SEQ ID NO: 243853 - RNA, 23 nt, Artificial Sequence
  Synthetic
guuuuuaaaagcuagagugggua

SEQ ID NO: 243854 - RNA, 24 nt, Artificial Sequence
  Synthetic
uguuuuuaaaagcuagagugggua

SEQ ID NO: 243855 - RNA, 18 nt, Artificial Sequence
  Synthetic
uuuuuuggggggugggua

SEQ ID NO: 243856 - RNA, 19 nt, Artificial Sequence
  Synthetic
cuuuuuuggggggugggua

SEQ ID NO: 243857 - RNA, 20 nt, Artificial Sequence
  Synthetic
ucuuuuuuggggggugggua

SEQ ID NO: 243858 - RNA, 21 nt, Artificial Sequence
  Synthetic
uucuuuuuuggggggugggua

SEQ ID NO: 243859 - RNA, 22 nt, Artificial Sequence
  Synthetic
uuucuuuuuuggggggugggua

SEQ ID NO: 243860 - RNA, 23 nt, Artificial Sequence
  Synthetic
cuuucuuuuuuggggggugggua

SEQ ID NO: 243861 - RNA, 24 nt, Artificial Sequence
  Synthetic
ucuuucuuuuuuggggggugggua

SEQ ID NO: 243862 - RNA, 18 nt, Artificial Sequence
  Synthetic
uugagaggugggugggua

SEQ ID NO: 243863 - RNA, 19 nt, Artificial Sequence
  Synthetic
uuugagaggugggugggua

SEQ ID NO: 243864 - RNA, 20 nt, Artificial Sequence
  Synthetic
auuugagaggugggugggua

SEQ ID NO: 243865 - RNA, 21 nt, Artificial Sequence
  Synthetic
uauuugagaggugggugggua

SEQ ID NO: 243866 - RNA, 22 nt, Artificial Sequence
  Synthetic
cuauuugagaggugggugggua

SEQ ID NO: 243867 - RNA, 23 nt, Artificial Sequence
  Synthetic
gcuauuugagaggugggugggua

SEQ ID NO: 243868 - RNA, 24 nt, Artificial Sequence
  Synthetic
agcuauuugagaggugggugggua

SEQ ID NO: 243869 - RNA, 18 nt, Artificial Sequence
  Synthetic
uccccuaguuggugggua

SEQ ID NO: 243870 - RNA, 19 nt, Artificial Sequence
  Synthetic
cuccccuaguuggugggua

SEQ ID NO: 243871 - RNA, 20 nt, Artificial Sequence
  Synthetic
gcuccccuaguuggugggua

SEQ ID NO: 243872 - RNA, 21 nt, Artificial Sequence
  Synthetic
agcuccccuaguuggugggua

SEQ ID NO: 243873 - RNA, 22 nt, Artificial Sequence
  Synthetic
aagcuccccuaguuggugggua

SEQ ID NO: 243874 - RNA, 23 nt, Artificial Sequence
  Synthetic
uaagcuccccuaguuggugggua

SEQ ID NO: 243875 - RNA, 24 nt, Artificial Sequence
  Synthetic
auaagcuccccuaguuggugggua

SEQ ID NO: 243876 - RNA, 18 nt, Artificial Sequence
  Synthetic
gauguaugcauuugggua

SEQ ID NO: 243877 - RNA, 19 nt, Artificial Sequence
  Synthetic
agauguaugcauuugggua

SEQ ID NO: 243878 - RNA, 20 nt, Artificial Sequence
  Synthetic
uagauguaugcauuugggua

SEQ ID NO: 243879 - RNA, 21 nt, Artificial Sequence
  Synthetic
uuagauguaugcauuugggua

SEQ ID NO: 243880 - RNA, 22 nt, Artificial Sequence
  Synthetic
uuuagauguaugcauuugggua

SEQ ID NO: 243881 - RNA, 23 nt, Artificial Sequence
  Synthetic
uuuuagauguaugcauuugggua

SEQ ID NO: 243882 - RNA, 24 nt, Artificial Sequence
  Synthetic
uuuuuagauguaugcauuugggua

SEQ ID NO: 243883 - RNA, 18 nt, Artificial Sequence
  Synthetic
ucuacuauauuuugggua

SEQ ID NO: 243884 - RNA, 19 nt, Artificial Sequence
  Synthetic
uucuacuauauuuugggua

SEQ ID NO: 243885 - RNA, 20 nt, Artificial Sequence
  Synthetic
auucuacuauauuuugggua

SEQ ID NO: 243886 - RNA, 21 nt, Artificial Sequence
  Synthetic
gauucuacuauauuuugggua

SEQ ID NO: 243887 - RNA, 22 nt, Artificial Sequence
  Synthetic
ggauucuacuauauuuugggua

SEQ ID NO: 243888 - RNA, 23 nt, Artificial Sequence
  Synthetic
uggauucuacuauauuuugggua

SEQ ID NO: 243889 - RNA, 24 nt, Artificial Sequence
  Synthetic
uuggauucuacuauauuuugggua

SEQ ID NO: 243890 - RNA, 18 nt, Artificial Sequence
  Synthetic
uucuccuuuaaaauggua

SEQ ID NO: 243891 - RNA, 19 nt, Artificial Sequence
  Synthetic
guucuccuuuaaaauggua

SEQ ID NO: 243892 - RNA, 20 nt, Artificial Sequence
  Synthetic
gguucuccuuuaaaauggua

SEQ ID NO: 243893 - RNA, 21 nt, Artificial Sequence
  Synthetic
ggguucuccuuuaaaauggua

SEQ ID NO: 243894 - RNA, 22 nt, Artificial Sequence
  Synthetic
gggguucuccuuuaaaauggua

SEQ ID NO: 243895 - RNA, 23 nt, Artificial Sequence
  Synthetic
ggggguucuccuuuaaaauggua

SEQ ID NO: 243896 - RNA, 24 nt, Artificial Sequence
  Synthetic
uggggguucuccuuuaaaauggua

SEQ ID NO: 243897 - RNA, 18 nt, Artificial Sequence
  Synthetic
ucuacuucuuaaauggua

SEQ ID NO: 243898 - RNA, 19 nt, Artificial Sequence
  Synthetic
cucuacuucuuaaauggua

SEQ ID NO: 243899 - RNA, 20 nt, Artificial Sequence
  Synthetic
gcucuacuucuuaaauggua

SEQ ID NO: 243900 - RNA, 21 nt, Artificial Sequence
  Synthetic
ugcucuacuucuuaaauggua

SEQ ID NO: 243901 - RNA, 22 nt, Artificial Sequence
  Synthetic
uugcucuacuucuuaaauggua

SEQ ID NO: 243902 - RNA, 23 nt, Artificial Sequence
  Synthetic
cuugcucuacuucuuaaauggua

SEQ ID NO: 243903 - RNA, 24 nt, Artificial Sequence
  Synthetic
ccuugcucuacuucuuaaauggua

SEQ ID NO: 243904 - RNA, 18 nt, Artificial Sequence
  Synthetic
agcagcuggugaauggua

SEQ ID NO: 243905 - RNA, 19 nt, Artificial Sequence
  Synthetic
uagcagcuggugaauggua

SEQ ID NO: 243906 - RNA, 20 nt, Artificial Sequence
  Synthetic
auagcagcuggugaauggua

SEQ ID NO: 243907 - RNA, 21 nt, Artificial Sequence
  Synthetic
aauagcagcuggugaauggua

SEQ ID NO: 243908 - RNA, 22 nt, Artificial Sequence
  Synthetic
aaauagcagcuggugaauggua

SEQ ID NO: 243909 - RNA, 23 nt, Artificial Sequence
  Synthetic
gaaauagcagcuggugaauggua

SEQ ID NO: 243910 - RNA, 24 nt, Artificial Sequence
  Synthetic
agaaauagcagcuggugaauggua

SEQ ID NO: 243911 - RNA, 18 nt, Artificial Sequence
  Synthetic
uugaugauaauaauggua

SEQ ID NO: 243912 - RNA, 19 nt, Artificial Sequence
  Synthetic
cuugaugauaauaauggua

SEQ ID NO: 243913 - RNA, 20 nt, Artificial Sequence
  Synthetic
acuugaugauaauaauggua

SEQ ID NO: 243914 - RNA, 21 nt, Artificial Sequence
  Synthetic
gacuugaugauaauaauggua

SEQ ID NO: 243915 - RNA, 22 nt, Artificial Sequence
  Synthetic
cgacuugaugauaauaauggua

SEQ ID NO: 243916 - RNA, 23 nt, Artificial Sequence
  Synthetic
acgacuugaugauaauaauggua

SEQ ID NO: 243917 - RNA, 24 nt, Artificial Sequence
  Synthetic
uacgacuugaugauaauaauggua

SEQ ID NO: 243918 - RNA, 18 nt, Artificial Sequence
  Synthetic
uuacauuacauaauggua

SEQ ID NO: 243919 - RNA, 19 nt, Artificial Sequence
  Synthetic
auuacauuacauaauggua

SEQ ID NO: 243920 - RNA, 20 nt, Artificial Sequence
  Synthetic
uauuacauuacauaauggua

SEQ ID NO: 243921 - RNA, 21 nt, Artificial Sequence
  Synthetic
guauuacauuacauaauggua

SEQ ID NO: 243922 - RNA, 22 nt, Artificial Sequence
  Synthetic
gguauuacauuacauaauggua

SEQ ID NO: 243923 - RNA, 23 nt, Artificial Sequence
  Synthetic
ggguauuacauuacauaauggua

SEQ ID NO: 243924 - RNA, 24 nt, Artificial Sequence
  Synthetic
aggguauuacauuacauaauggua

SEQ ID NO: 243925 - RNA, 18 nt, Artificial Sequence
  Synthetic
ugggugucauuaauggua

SEQ ID NO: 243926 - RNA, 19 nt, Artificial Sequence
  Synthetic
gugggugucauuaauggua

SEQ ID NO: 243927 - RNA, 20 nt, Artificial Sequence
  Synthetic
ugugggugucauuaauggua

SEQ ID NO: 243928 - RNA, 21 nt, Artificial Sequence
  Synthetic
uugugggugucauuaauggua

SEQ ID NO: 243929 - RNA, 22 nt, Artificial Sequence
  Synthetic
auugugggugucauuaauggua

SEQ ID NO: 243930 - RNA, 23 nt, Artificial Sequence
  Synthetic
uauugugggugucauuaauggua

SEQ ID NO: 243931 - RNA, 24 nt, Artificial Sequence
  Synthetic
cuauugugggugucauuaauggua

SEQ ID NO: 243932 - RNA, 18 nt, Artificial Sequence
  Synthetic
agucaaagauuaauggua

SEQ ID NO: 243933 - RNA, 19 nt, Artificial Sequence
  Synthetic
uagucaaagauuaauggua

SEQ ID NO: 243934 - RNA, 20 nt, Artificial Sequence
  Synthetic
uuagucaaagauuaauggua

SEQ ID NO: 243935 - RNA, 21 nt, Artificial Sequence
  Synthetic
auuagucaaagauuaauggua

SEQ ID NO: 243936 - RNA, 22 nt, Artificial Sequence
  Synthetic
uauuagucaaagauuaauggua

SEQ ID NO: 243937 - RNA, 23 nt, Artificial Sequence
  Synthetic
guauuagucaaagauuaauggua

SEQ ID NO: 243938 - RNA, 24 nt, Artificial Sequence
  Synthetic
gguauuagucaaagauuaauggua

SEQ ID NO: 243939 - RNA, 18 nt, Artificial Sequence
  Synthetic
cauuuaucaaacauggua

SEQ ID NO: 243940 - RNA, 19 nt, Artificial Sequence
  Synthetic
acauuuaucaaacauggua

SEQ ID NO: 243941 - RNA, 20 nt, Artificial Sequence
  Synthetic
aacauuuaucaaacauggua

SEQ ID NO: 243942 - RNA, 21 nt, Artificial Sequence
  Synthetic
caacauuuaucaaacauggua

SEQ ID NO: 243943 - RNA, 22 nt, Artificial Sequence
  Synthetic
acaacauuuaucaaacauggua

SEQ ID NO: 243944 - RNA, 23 nt, Artificial Sequence
  Synthetic
gacaacauuuaucaaacauggua

SEQ ID NO: 243945 - RNA, 24 nt, Artificial Sequence
  Synthetic
ggacaacauuuaucaaacauggua

SEQ ID NO: 243946 - RNA, 18 nt, Artificial Sequence
  Synthetic
aaauccauuaccauggua

SEQ ID NO: 243947 - RNA, 19 nt, Artificial Sequence
  Synthetic
uaaauccauuaccauggua

SEQ ID NO: 243948 - RNA, 20 nt, Artificial Sequence
  Synthetic
uuaaauccauuaccauggua

SEQ ID NO: 243949 - RNA, 21 nt, Artificial Sequence
  Synthetic
uuuaaauccauuaccauggua

SEQ ID NO: 243950 - RNA, 22 nt, Artificial Sequence
  Synthetic
auuuaaauccauuaccauggua

SEQ ID NO: 243951 - RNA, 23 nt, Artificial Sequence
  Synthetic
aauuuaaauccauuaccauggua

SEQ ID NO: 243952 - RNA, 24 nt, Artificial Sequence
  Synthetic
uaauuuaaauccauuaccauggua

SEQ ID NO: 243953 - RNA, 18 nt, Artificial Sequence
  Synthetic
ucaaagacaagcauggua

SEQ ID NO: 243954 - RNA, 19 nt, Artificial Sequence
  Synthetic
aucaaagacaagcauggua

SEQ ID NO: 243955 - RNA, 20 nt, Artificial Sequence
  Synthetic
caucaaagacaagcauggua

SEQ ID NO: 243956 - RNA, 21 nt, Artificial Sequence
  Synthetic
gcaucaaagacaagcauggua

SEQ ID NO: 243957 - RNA, 22 nt, Artificial Sequence
  Synthetic
agcaucaaagacaagcauggua

SEQ ID NO: 243958 - RNA, 23 nt, Artificial Sequence
  Synthetic
cagcaucaaagacaagcauggua

SEQ ID NO: 243959 - RNA, 24 nt, Artificial Sequence
  Synthetic
gcagcaucaaagacaagcauggua

SEQ ID NO: 243960 - RNA, 18 nt, Artificial Sequence
  Synthetic
gaauuggguaucauggua

SEQ ID NO: 243961 - RNA, 19 nt, Artificial Sequence
  Synthetic
agaauuggguaucauggua

SEQ ID NO: 243962 - RNA, 20 nt, Artificial Sequence
  Synthetic
aagaauuggguaucauggua

SEQ ID NO: 243963 - RNA, 21 nt, Artificial Sequence
  Synthetic
caagaauuggguaucauggua

SEQ ID NO: 243964 - RNA, 22 nt, Artificial Sequence
  Synthetic
acaagaauuggguaucauggua

SEQ ID NO: 243965 - RNA, 23 nt, Artificial Sequence
  Synthetic
gacaagaauuggguaucauggua

SEQ ID NO: 243966 - RNA, 24 nt, Artificial Sequence
  Synthetic
ugacaagaauuggguaucauggua

SEQ ID NO: 243967 - RNA, 18 nt, Artificial Sequence
  Synthetic
aaugagaagaagauggua

SEQ ID NO: 243968 - RNA, 19 nt, Artificial Sequence
  Synthetic
caaugagaagaagauggua

SEQ ID NO: 243969 - RNA, 20 nt, Artificial Sequence
  Synthetic
gcaaugagaagaagauggua

SEQ ID NO: 243970 - RNA, 21 nt, Artificial Sequence
  Synthetic
ggcaaugagaagaagauggua

SEQ ID NO: 243971 - RNA, 22 nt, Artificial Sequence
  Synthetic
uggcaaugagaagaagauggua

SEQ ID NO: 243972 - RNA, 23 nt, Artificial Sequence
  Synthetic
auggcaaugagaagaagauggua

SEQ ID NO: 243973 - RNA, 24 nt, Artificial Sequence
  Synthetic
aauggcaaugagaagaagauggua

SEQ ID NO: 243974 - RNA, 18 nt, Artificial Sequence
  Synthetic
cuaauaucagagauggua

SEQ ID NO: 243975 - RNA, 19 nt, Artificial Sequence
  Synthetic
ucuaauaucagagauggua

SEQ ID NO: 243976 - RNA, 20 nt, Artificial Sequence
  Synthetic
aucuaauaucagagauggua

SEQ ID NO: 243977 - RNA, 21 nt, Artificial Sequence
  Synthetic
uaucuaauaucagagauggua

SEQ ID NO: 243978 - RNA, 22 nt, Artificial Sequence
  Synthetic
cuaucuaauaucagagauggua

SEQ ID NO: 243979 - RNA, 23 nt, Artificial Sequence
  Synthetic
gcuaucuaauaucagagauggua

SEQ ID NO: 243980 - RNA, 24 nt, Artificial Sequence
  Synthetic
ugcuaucuaauaucagagauggua

SEQ ID NO: 243981 - RNA, 18 nt, Artificial Sequence
  Synthetic
ggaucaaguuagauggua

SEQ ID NO: 243982 - RNA, 19 nt, Artificial Sequence
  Synthetic
aggaucaaguuagauggua

SEQ ID NO: 243983 - RNA, 20 nt, Artificial Sequence
  Synthetic
aaggaucaaguuagauggua

SEQ ID NO: 243984 - RNA, 21 nt, Artificial Sequence
  Synthetic
gaaggaucaaguuagauggua

SEQ ID NO: 243985 - RNA, 22 nt, Artificial Sequence
  Synthetic
agaaggaucaaguuagauggua

SEQ ID NO: 243986 - RNA, 23 nt, Artificial Sequence
  Synthetic
uagaaggaucaaguuagauggua

SEQ ID NO: 243987 - RNA, 24 nt, Artificial Sequence
  Synthetic
guagaaggaucaaguuagauggua

SEQ ID NO: 243988 - RNA, 18 nt, Artificial Sequence
  Synthetic
guaacugaaaggauggua

SEQ ID NO: 243989 - RNA, 19 nt, Artificial Sequence
  Synthetic
gguaacugaaaggauggua

SEQ ID NO: 243990 - RNA, 20 nt, Artificial Sequence
  Synthetic
ugguaacugaaaggauggua

SEQ ID NO: 243991 - RNA, 21 nt, Artificial Sequence
  Synthetic
gugguaacugaaaggauggua

SEQ ID NO: 243992 - RNA, 22 nt, Artificial Sequence
  Synthetic
agugguaacugaaaggauggua

SEQ ID NO: 243993 - RNA, 23 nt, Artificial Sequence
  Synthetic
aagugguaacugaaaggauggua

SEQ ID NO: 243994 - RNA, 24 nt, Artificial Sequence
  Synthetic
aaagugguaacugaaaggauggua

SEQ ID NO: 243995 - RNA, 18 nt, Artificial Sequence
  Synthetic
ugucccucuuaccuggua

SEQ ID NO: 243996 - RNA, 19 nt, Artificial Sequence
  Synthetic
augucccucuuaccuggua

SEQ ID NO: 243997 - RNA, 20 nt, Artificial Sequence
  Synthetic
aaugucccucuuaccuggua

SEQ ID NO: 243998 - RNA, 21 nt, Artificial Sequence
  Synthetic
caaugucccucuuaccuggua

SEQ ID NO: 243999 - RNA, 22 nt, Artificial Sequence
  Synthetic
ucaaugucccucuuaccuggua

SEQ ID NO: 244000 - RNA, 23 nt, Artificial Sequence
  Synthetic
aucaaugucccucuuaccuggua

SEQ ID NO: 244001 - RNA, 24 nt, Artificial Sequence
  Synthetic
caucaaugucccucuuaccuggua

SEQ ID NO: 244002 - RNA, 18 nt, Artificial Sequence
  Synthetic
cacaagggaaagcuggua

SEQ ID NO: 244003 - RNA, 19 nt, Artificial Sequence
  Synthetic
ccacaagggaaagcuggua

SEQ ID NO: 244004 - RNA, 20 nt, Artificial Sequence
  Synthetic
accacaagggaaagcuggua

SEQ ID NO: 244005 - RNA, 21 nt, Artificial Sequence
  Synthetic
gaccacaagggaaagcuggua

SEQ ID NO: 244006 - RNA, 22 nt, Artificial Sequence
  Synthetic
agaccacaagggaaagcuggua

SEQ ID NO: 244007 - RNA, 23 nt, Artificial Sequence
  Synthetic
gagaccacaagggaaagcuggua

SEQ ID NO: 244008 - RNA, 24 nt, Artificial Sequence
  Synthetic
cgagaccacaagggaaagcuggua

SEQ ID NO: 244009 - RNA, 18 nt, Artificial Sequence
  Synthetic
aaugaaugugagcuggua

SEQ ID NO: 244010 - RNA, 19 nt, Artificial Sequence
  Synthetic
aaaugaaugugagcuggua

SEQ ID NO: 244011 - RNA, 20 nt, Artificial Sequence
  Synthetic
gaaaugaaugugagcuggua

SEQ ID NO: 244012 - RNA, 21 nt, Artificial Sequence
  Synthetic
ggaaaugaaugugagcuggua

SEQ ID NO: 244013 - RNA, 22 nt, Artificial Sequence
  Synthetic
aggaaaugaaugugagcuggua

SEQ ID NO: 244014 - RNA, 23 nt, Artificial Sequence
  Synthetic
aaggaaaugaaugugagcuggua

SEQ ID NO: 244015 - RNA, 24 nt, Artificial Sequence
  Synthetic
uaaggaaaugaaugugagcuggua

SEQ ID NO: 244016 - RNA, 18 nt, Artificial Sequence
  Synthetic
gaauuagauucucuggua

SEQ ID NO: 244017 - RNA, 19 nt, Artificial Sequence
  Synthetic
ggaauuagauucucuggua

SEQ ID NO: 244018 - RNA, 20 nt, Artificial Sequence
  Synthetic
uggaauuagauucucuggua

SEQ ID NO: 244019 - RNA, 21 nt, Artificial Sequence
  Synthetic
auggaauuagauucucuggua

SEQ ID NO: 244020 - RNA, 22 nt, Artificial Sequence
  Synthetic
uauggaauuagauucucuggua

SEQ ID NO: 244021 - RNA, 23 nt, Artificial Sequence
  Synthetic
uuauggaauuagauucucuggua

SEQ ID NO: 244022 - RNA, 24 nt, Artificial Sequence
  Synthetic
cuuauggaauuagauucucuggua

SEQ ID NO: 244023 - RNA, 18 nt, Artificial Sequence
  Synthetic
cauaucacguaaguggua

SEQ ID NO: 244024 - RNA, 19 nt, Artificial Sequence
  Synthetic
ccauaucacguaaguggua

SEQ ID NO: 244025 - RNA, 20 nt, Artificial Sequence
  Synthetic
gccauaucacguaaguggua

SEQ ID NO: 244026 - RNA, 21 nt, Artificial Sequence
  Synthetic
ugccauaucacguaaguggua

SEQ ID NO: 244027 - RNA, 22 nt, Artificial Sequence
  Synthetic
uugccauaucacguaaguggua

SEQ ID NO: 244028 - RNA, 23 nt, Artificial Sequence
  Synthetic
cuugccauaucacguaaguggua

SEQ ID NO: 244029 - RNA, 24 nt, Artificial Sequence
  Synthetic
acuugccauaucacguaaguggua

SEQ ID NO: 244030 - RNA, 18 nt, Artificial Sequence
  Synthetic
uaaugauauaagguggua

SEQ ID NO: 244031 - RNA, 19 nt, Artificial Sequence
  Synthetic
auaaugauauaagguggua

SEQ ID NO: 244032 - RNA, 20 nt, Artificial Sequence
  Synthetic
uauaaugauauaagguggua

SEQ ID NO: 244033 - RNA, 21 nt, Artificial Sequence
  Synthetic
cuauaaugauauaagguggua

SEQ ID NO: 244034 - RNA, 22 nt, Artificial Sequence
  Synthetic
ucuauaaugauauaagguggua

SEQ ID NO: 244035 - RNA, 23 nt, Artificial Sequence
  Synthetic
aucuauaaugauauaagguggua

SEQ ID NO: 244036 - RNA, 24 nt, Artificial Sequence
  Synthetic
uaucuauaaugauauaagguggua

SEQ ID NO: 244037 - RNA, 18 nt, Artificial Sequence
  Synthetic
aguacaccauagguggua

SEQ ID NO: 244038 - RNA, 19 nt, Artificial Sequence
  Synthetic
uaguacaccauagguggua

SEQ ID NO: 244039 - RNA, 20 nt, Artificial Sequence
  Synthetic
cuaguacaccauagguggua

SEQ ID NO: 244040 - RNA, 21 nt, Artificial Sequence
  Synthetic
gcuaguacaccauagguggua

SEQ ID NO: 244041 - RNA, 22 nt, Artificial Sequence
  Synthetic
cgcuaguacaccauagguggua

SEQ ID NO: 244042 - RNA, 23 nt, Artificial Sequence
  Synthetic
acgcuaguacaccauagguggua

SEQ ID NO: 244043 - RNA, 24 nt, Artificial Sequence
  Synthetic
aacgcuaguacaccauagguggua

SEQ ID NO: 244044 - RNA, 18 nt, Artificial Sequence
  Synthetic
cuuuuaauuucuguggua

SEQ ID NO: 244045 - RNA, 19 nt, Artificial Sequence
  Synthetic
ucuuuuaauuucuguggua

SEQ ID NO: 244046 - RNA, 20 nt, Artificial Sequence
  Synthetic
uucuuuuaauuucuguggua

SEQ ID NO: 244047 - RNA, 21 nt, Artificial Sequence
  Synthetic
uuucuuuuaauuucuguggua

SEQ ID NO: 244048 - RNA, 22 nt, Artificial Sequence
  Synthetic
uuuucuuuuaauuucuguggua

SEQ ID NO: 244049 - RNA, 23 nt, Artificial Sequence
  Synthetic
uuuuucuuuuaauuucuguggua

SEQ ID NO: 244050 - RNA, 24 nt, Artificial Sequence
  Synthetic
auuuuucuuuuaauuucuguggua

SEQ ID NO: 244051 - RNA, 18 nt, Artificial Sequence
  Synthetic
acuuguuaaaguguggua

SEQ ID NO: 244052 - RNA, 19 nt, Artificial Sequence
  Synthetic
uacuuguuaaaguguggua

SEQ ID NO: 244053 - RNA, 20 nt, Artificial Sequence
  Synthetic
uuacuuguuaaaguguggua

SEQ ID NO: 244054 - RNA, 21 nt, Artificial Sequence
  Synthetic
auuacuuguuaaaguguggua

SEQ ID NO: 244055 - RNA, 22 nt, Artificial Sequence
  Synthetic
uauuacuuguuaaaguguggua

SEQ ID NO: 244056 - RNA, 23 nt, Artificial Sequence
  Synthetic
auauuacuuguuaaaguguggua

SEQ ID NO: 244057 - RNA, 24 nt, Artificial Sequence
  Synthetic
aauauuacuuguuaaaguguggua

SEQ ID NO: 244058 - RNA, 18 nt, Artificial Sequence
  Synthetic
caaaauccauguguggua

SEQ ID NO: 244059 - RNA, 19 nt, Artificial Sequence
  Synthetic
acaaaauccauguguggua

SEQ ID NO: 244060 - RNA, 20 nt, Artificial Sequence
  Synthetic
aacaaaauccauguguggua

SEQ ID NO: 244061 - RNA, 21 nt, Artificial Sequence
  Synthetic
uaacaaaauccauguguggua

SEQ ID NO: 244062 - RNA, 22 nt, Artificial Sequence
  Synthetic
auaacaaaauccauguguggua

SEQ ID NO: 244063 - RNA, 23 nt, Artificial Sequence
  Synthetic
aauaacaaaauccauguguggua

SEQ ID NO: 244064 - RNA, 24 nt, Artificial Sequence
  Synthetic
aaauaacaaaauccauguguggua

SEQ ID NO: 244065 - RNA, 18 nt, Artificial Sequence
  Synthetic
ggagugcaguuuguggua

SEQ ID NO: 244066 - RNA, 19 nt, Artificial Sequence
  Synthetic
gggagugcaguuuguggua

SEQ ID NO: 244067 - RNA, 20 nt, Artificial Sequence
  Synthetic
ggggagugcaguuuguggua

SEQ ID NO: 244068 - RNA, 21 nt, Artificial Sequence
  Synthetic
uggggagugcaguuuguggua

SEQ ID NO: 244069 - RNA, 22 nt, Artificial Sequence
  Synthetic
guggggagugcaguuuguggua

SEQ ID NO: 244070 - RNA, 23 nt, Artificial Sequence
  Synthetic
uguggggagugcaguuuguggua

SEQ ID NO: 244071 - RNA, 24 nt, Artificial Sequence
  Synthetic
uuguggggagugcaguuuguggua

SEQ ID NO: 244072 - RNA, 18 nt, Artificial Sequence
  Synthetic
aguaauugguacuuggua

SEQ ID NO: 244073 - RNA, 19 nt, Artificial Sequence
  Synthetic
caguaauugguacuuggua

SEQ ID NO: 244074 - RNA, 20 nt, Artificial Sequence
  Synthetic
ccaguaauugguacuuggua

SEQ ID NO: 244075 - RNA, 21 nt, Artificial Sequence
  Synthetic
cccaguaauugguacuuggua

SEQ ID NO: 244076 - RNA, 22 nt, Artificial Sequence
  Synthetic
gcccaguaauugguacuuggua

SEQ ID NO: 244077 - RNA, 23 nt, Artificial Sequence
  Synthetic
ggcccaguaauugguacuuggua

SEQ ID NO: 244078 - RNA, 24 nt, Artificial Sequence
  Synthetic
aggcccaguaauugguacuuggua

SEQ ID NO: 244079 - RNA, 18 nt, Artificial Sequence
  Synthetic
uguuugcagugcuuggua

SEQ ID NO: 244080 - RNA, 19 nt, Artificial Sequence
  Synthetic
auguuugcagugcuuggua

SEQ ID NO: 244081 - RNA, 20 nt, Artificial Sequence
  Synthetic
uauguuugcagugcuuggua

SEQ ID NO: 244082 - RNA, 21 nt, Artificial Sequence
  Synthetic
auauguuugcagugcuuggua

SEQ ID NO: 244083 - RNA, 22 nt, Artificial Sequence
  Synthetic
uauauguuugcagugcuuggua

SEQ ID NO: 244084 - RNA, 23 nt, Artificial Sequence
  Synthetic
cuauauguuugcagugcuuggua

SEQ ID NO: 244085 - RNA, 24 nt, Artificial Sequence
  Synthetic
gcuauauguuugcagugcuuggua

SEQ ID NO: 244086 - RNA, 18 nt, Artificial Sequence
  Synthetic
ucauuuauuugcuuggua

SEQ ID NO: 244087 - RNA, 19 nt, Artificial Sequence
  Synthetic
aucauuuauuugcuuggua

SEQ ID NO: 244088 - RNA, 20 nt, Artificial Sequence
  Synthetic
aaucauuuauuugcuuggua

SEQ ID NO: 244089 - RNA, 21 nt, Artificial Sequence
  Synthetic
gaaucauuuauuugcuuggua

SEQ ID NO: 244090 - RNA, 22 nt, Artificial Sequence
  Synthetic
ugaaucauuuauuugcuuggua

SEQ ID NO: 244091 - RNA, 23 nt, Artificial Sequence
  Synthetic
augaaucauuuauuugcuuggua

SEQ ID NO: 244092 - RNA, 24 nt, Artificial Sequence
  Synthetic
aaugaaucauuuauuugcuuggua

SEQ ID NO: 244093 - RNA, 18 nt, Artificial Sequence
  Synthetic
cuagacacgucguuggua

SEQ ID NO: 244094 - RNA, 19 nt, Artificial Sequence
  Synthetic
gcuagacacgucguuggua

SEQ ID NO: 244095 - RNA, 20 nt, Artificial Sequence
  Synthetic
ggcuagacacgucguuggua

SEQ ID NO: 244096 - RNA, 21 nt, Artificial Sequence
  Synthetic
gggcuagacacgucguuggua

SEQ ID NO: 244097 - RNA, 22 nt, Artificial Sequence
  Synthetic
agggcuagacacgucguuggua

SEQ ID NO: 244098 - RNA, 23 nt, Artificial Sequence
  Synthetic
uagggcuagacacgucguuggua

SEQ ID NO: 244099 - RNA, 24 nt, Artificial Sequence
  Synthetic
guagggcuagacacgucguuggua

SEQ ID NO: 244100 - RNA, 18 nt, Artificial Sequence
  Synthetic
cagaaaugucauuuggua

SEQ ID NO: 244101 - RNA, 19 nt, Artificial Sequence
  Synthetic
gcagaaaugucauuuggua

SEQ ID NO: 244102 - RNA, 20 nt, Artificial Sequence
  Synthetic
agcagaaaugucauuuggua

SEQ ID NO: 244103 - RNA, 21 nt, Artificial Sequence
  Synthetic
uagcagaaaugucauuuggua

SEQ ID NO: 244104 - RNA, 22 nt, Artificial Sequence
  Synthetic
cuagcagaaaugucauuuggua

SEQ ID NO: 244105 - RNA, 23 nt, Artificial Sequence
  Synthetic
gcuagcagaaaugucauuuggua

SEQ ID NO: 244106 - RNA, 24 nt, Artificial Sequence
  Synthetic
ugcuagcagaaaugucauuuggua

SEQ ID NO: 244107 - RNA, 18 nt, Artificial Sequence
  Synthetic
cuaauccaggauuuggua

SEQ ID NO: 244108 - RNA, 19 nt, Artificial Sequence
  Synthetic
acuaauccaggauuuggua

SEQ ID NO: 244109 - RNA, 20 nt, Artificial Sequence
  Synthetic
aacuaauccaggauuuggua

SEQ ID NO: 244110 - RNA, 21 nt, Artificial Sequence
  Synthetic
gaacuaauccaggauuuggua

SEQ ID NO: 244111 - RNA, 22 nt, Artificial Sequence
  Synthetic
ugaacuaauccaggauuuggua

SEQ ID NO: 244112 - RNA, 23 nt, Artificial Sequence
  Synthetic
cugaacuaauccaggauuuggua

SEQ ID NO: 244113 - RNA, 24 nt, Artificial Sequence
  Synthetic
acugaacuaauccaggauuuggua

SEQ ID NO: 244114 - RNA, 18 nt, Artificial Sequence
  Synthetic
ggugagauggauuuggua

SEQ ID NO: 244115 - RNA, 19 nt, Artificial Sequence
  Synthetic
uggugagauggauuuggua

SEQ ID NO: 244116 - RNA, 20 nt, Artificial Sequence
  Synthetic
auggugagauggauuuggua

SEQ ID NO: 244117 - RNA, 21 nt, Artificial Sequence
  Synthetic
uauggugagauggauuuggua

SEQ ID NO: 244118 - RNA, 22 nt, Artificial Sequence
  Synthetic
uuauggugagauggauuuggua

SEQ ID NO: 244119 - RNA, 23 nt, Artificial Sequence
  Synthetic
guuauggugagauggauuuggua

SEQ ID NO: 244120 - RNA, 24 nt, Artificial Sequence
  Synthetic
uguuauggugagauggauuuggua

SEQ ID NO: 244121 - RNA, 18 nt, Artificial Sequence
  Synthetic
gauuccaugucuuuggua

SEQ ID NO: 244122 - RNA, 19 nt, Artificial Sequence
  Synthetic
ugauuccaugucuuuggua

SEQ ID NO: 244123 - RNA, 20 nt, Artificial Sequence
  Synthetic
uugauuccaugucuuuggua

SEQ ID NO: 244124 - RNA, 21 nt, Artificial Sequence
  Synthetic
guugauuccaugucuuuggua

SEQ ID NO: 244125 - RNA, 22 nt, Artificial Sequence
  Synthetic
gguugauuccaugucuuuggua

SEQ ID NO: 244126 - RNA, 23 nt, Artificial Sequence
  Synthetic
agguugauuccaugucuuuggua

SEQ ID NO: 244127 - RNA, 24 nt, Artificial Sequence
  Synthetic
uagguugauuccaugucuuuggua

SEQ ID NO: 244128 - RNA, 18 nt, Artificial Sequence
  Synthetic
augacuaugauuuuggua

SEQ ID NO: 244129 - RNA, 19 nt, Artificial Sequence
  Synthetic
aaugacuaugauuuuggua

SEQ ID NO: 244130 - RNA, 20 nt, Artificial Sequence
  Synthetic
uaaugacuaugauuuuggua

SEQ ID NO: 244131 - RNA, 21 nt, Artificial Sequence
  Synthetic
auaaugacuaugauuuuggua

SEQ ID NO: 244132 - RNA, 22 nt, Artificial Sequence
  Synthetic
gauaaugacuaugauuuuggua

SEQ ID NO: 244133 - RNA, 23 nt, Artificial Sequence
  Synthetic
agauaaugacuaugauuuuggua

SEQ ID NO: 244134 - RNA, 24 nt, Artificial Sequence
  Synthetic
uagauaaugacuaugauuuuggua

SEQ ID NO: 244135 - RNA, 18 nt, Artificial Sequence
  Synthetic
accaucacacuuuuggua

SEQ ID NO: 244136 - RNA, 19 nt, Artificial Sequence
  Synthetic
uaccaucacacuuuuggua

SEQ ID NO: 244137 - RNA, 20 nt, Artificial Sequence
  Synthetic
cuaccaucacacuuuuggua

SEQ ID NO: 244138 - RNA, 21 nt, Artificial Sequence
  Synthetic
ccuaccaucacacuuuuggua

SEQ ID NO: 244139 - RNA, 22 nt, Artificial Sequence
  Synthetic
uccuaccaucacacuuuuggua

SEQ ID NO: 244140 - RNA, 23 nt, Artificial Sequence
  Synthetic
guccuaccaucacacuuuuggua

SEQ ID NO: 244141 - RNA, 24 nt, Artificial Sequence
  Synthetic
aguccuaccaucacacuuuuggua

SEQ ID NO: 244142 - RNA, 18 nt, Artificial Sequence
  Synthetic
uuucagaaaaaaaaugua

SEQ ID NO: 244143 - RNA, 19 nt, Artificial Sequence
  Synthetic
cuuucagaaaaaaaaugua

SEQ ID NO: 244144 - RNA, 20 nt, Artificial Sequence
  Synthetic
ccuuucagaaaaaaaaugua

SEQ ID NO: 244145 - RNA, 21 nt, Artificial Sequence
  Synthetic
accuuucagaaaaaaaaugua

SEQ ID NO: 244146 - RNA, 22 nt, Artificial Sequence
  Synthetic
aaccuuucagaaaaaaaaugua

SEQ ID NO: 244147 - RNA, 23 nt, Artificial Sequence
  Synthetic
uaaccuuucagaaaaaaaaugua

SEQ ID NO: 244148 - RNA, 24 nt, Artificial Sequence
  Synthetic
cuaaccuuucagaaaaaaaaugua

SEQ ID NO: 244149 - RNA, 18 nt, Artificial Sequence
  Synthetic
gugaucaauaaaaaugua

SEQ ID NO: 244150 - RNA, 19 nt, Artificial Sequence
  Synthetic
ugugaucaauaaaaaugua

SEQ ID NO: 244151 - RNA, 20 nt, Artificial Sequence
  Synthetic
cugugaucaauaaaaaugua

SEQ ID NO: 244152 - RNA, 21 nt, Artificial Sequence
  Synthetic
gcugugaucaauaaaaaugua

SEQ ID NO: 244153 - RNA, 22 nt, Artificial Sequence
  Synthetic
ugcugugaucaauaaaaaugua

SEQ ID NO: 244154 - RNA, 23 nt, Artificial Sequence
  Synthetic
gugcugugaucaauaaaaaugua

SEQ ID NO: 244155 - RNA, 24 nt, Artificial Sequence
  Synthetic
ggugcugugaucaauaaaaaugua

SEQ ID NO: 244156 - RNA, 18 nt, Artificial Sequence
  Synthetic
uucuuuaauaaaaaugua

SEQ ID NO: 244157 - RNA, 19 nt, Artificial Sequence
  Synthetic
guucuuuaauaaaaaugua

SEQ ID NO: 244158 - RNA, 20 nt, Artificial Sequence
  Synthetic
uguucuuuaauaaaaaugua

SEQ ID NO: 244159 - RNA, 21 nt, Artificial Sequence
  Synthetic
uuguucuuuaauaaaaaugua

SEQ ID NO: 244160 - RNA, 22 nt, Artificial Sequence
  Synthetic
cuuguucuuuaauaaaaaugua

SEQ ID NO: 244161 - RNA, 23 nt, Artificial Sequence
  Synthetic
gcuuguucuuuaauaaaaaugua

SEQ ID NO: 244162 - RNA, 24 nt, Artificial Sequence
  Synthetic
ugcuuguucuuuaauaaaaaugua

SEQ ID NO: 244163 - RNA, 18 nt, Artificial Sequence
  Synthetic
auauaguuuaaaaaugua

SEQ ID NO: 244164 - RNA, 19 nt, Artificial Sequence
  Synthetic
aauauaguuuaaaaaugua

SEQ ID NO: 244165 - RNA, 20 nt, Artificial Sequence
  Synthetic
aaauauaguuuaaaaaugua

SEQ ID NO: 244166 - RNA, 21 nt, Artificial Sequence
  Synthetic
aaaauauaguuuaaaaaugua

SEQ ID NO: 244167 - RNA, 22 nt, Artificial Sequence
  Synthetic
uaaaauauaguuuaaaaaugua

SEQ ID NO: 244168 - RNA, 23 nt, Artificial Sequence
  Synthetic
uuaaaauauaguuuaaaaaugua

SEQ ID NO: 244169 - RNA, 24 nt, Artificial Sequence
  Synthetic
cuuaaaauauaguuuaaaaaugua

SEQ ID NO: 244170 - RNA, 18 nt, Artificial Sequence
  Synthetic
augggcauucaaaaugua

SEQ ID NO: 244171 - RNA, 19 nt, Artificial Sequence
  Synthetic
aaugggcauucaaaaugua

SEQ ID NO: 244172 - RNA, 20 nt, Artificial Sequence
  Synthetic
caaugggcauucaaaaugua

SEQ ID NO: 244173 - RNA, 21 nt, Artificial Sequence
  Synthetic
gcaaugggcauucaaaaugua

SEQ ID NO: 244174 - RNA, 22 nt, Artificial Sequence
  Synthetic
ugcaaugggcauucaaaaugua

SEQ ID NO: 244175 - RNA, 23 nt, Artificial Sequence
  Synthetic
cugcaaugggcauucaaaaugua

SEQ ID NO: 244176 - RNA, 24 nt, Artificial Sequence
  Synthetic
acugcaaugggcauucaaaaugua

SEQ ID NO: 244177 - RNA, 18 nt, Artificial Sequence
  Synthetic
uauaugcaaagaaaugua

SEQ ID NO: 244178 - RNA, 19 nt, Artificial Sequence
  Synthetic
uuauaugcaaagaaaugua

SEQ ID NO: 244179 - RNA, 20 nt, Artificial Sequence
  Synthetic
uuuauaugcaaagaaaugua

SEQ ID NO: 244180 - RNA, 21 nt, Artificial Sequence
  Synthetic
guuuauaugcaaagaaaugua

SEQ ID NO: 244181 - RNA, 22 nt, Artificial Sequence
  Synthetic
aguuuauaugcaaagaaaugua

SEQ ID NO: 244182 - RNA, 23 nt, Artificial Sequence
  Synthetic
uaguuuauaugcaaagaaaugua

SEQ ID NO: 244183 - RNA, 24 nt, Artificial Sequence
  Synthetic
cuaguuuauaugcaaagaaaugua

SEQ ID NO: 244184 - RNA, 18 nt, Artificial Sequence
  Synthetic
aacgaauucugaaaugua

SEQ ID NO: 244185 - RNA, 19 nt, Artificial Sequence
  Synthetic
aaacgaauucugaaaugua

SEQ ID NO: 244186 - RNA, 20 nt, Artificial Sequence
  Synthetic
aaaacgaauucugaaaugua

SEQ ID NO: 244187 - RNA, 21 nt, Artificial Sequence
  Synthetic
aaaaacgaauucugaaaugua

SEQ ID NO: 244188 - RNA, 22 nt, Artificial Sequence
  Synthetic
uaaaaacgaauucugaaaugua

SEQ ID NO: 244189 - RNA, 23 nt, Artificial Sequence
  Synthetic
auaaaaacgaauucugaaaugua

SEQ ID NO: 244190 - RNA, 24 nt, Artificial Sequence
  Synthetic
gauaaaaacgaauucugaaaugua

SEQ ID NO: 244191 - RNA, 18 nt, Artificial Sequence
  Synthetic
aaccugcaaauaaaugua

SEQ ID NO: 244192 - RNA, 19 nt, Artificial Sequence
  Synthetic
caaccugcaaauaaaugua

SEQ ID NO: 244193 - RNA, 20 nt, Artificial Sequence
  Synthetic
ucaaccugcaaauaaaugua

SEQ ID NO: 244194 - RNA, 21 nt, Artificial Sequence
  Synthetic
uucaaccugcaaauaaaugua

SEQ ID NO: 244195 - RNA, 22 nt, Artificial Sequence
  Synthetic
auucaaccugcaaauaaaugua

SEQ ID NO: 244196 - RNA, 23 nt, Artificial Sequence
  Synthetic
aauucaaccugcaaauaaaugua

SEQ ID NO: 244197 - RNA, 24 nt, Artificial Sequence
  Synthetic
aaauucaaccugcaaauaaaugua

SEQ ID NO: 244198 - RNA, 18 nt, Artificial Sequence
  Synthetic
cuccaaauccuaaaugua

SEQ ID NO: 244199 - RNA, 19 nt, Artificial Sequence
  Synthetic
gcuccaaauccuaaaugua

SEQ ID NO: 244200 - RNA, 20 nt, Artificial Sequence
  Synthetic
agcuccaaauccuaaaugua

SEQ ID NO: 244201 - RNA, 21 nt, Artificial Sequence
  Synthetic
uagcuccaaauccuaaaugua

SEQ ID NO: 244202 - RNA, 22 nt, Artificial Sequence
  Synthetic
cuagcuccaaauccuaaaugua

SEQ ID NO: 244203 - RNA, 23 nt, Artificial Sequence
  Synthetic
ccuagcuccaaauccuaaaugua

SEQ ID NO: 244204 - RNA, 24 nt, Artificial Sequence
  Synthetic
cccuagcuccaaauccuaaaugua

SEQ ID NO: 244205 - RNA, 18 nt, Artificial Sequence
  Synthetic
gcuaaaugucuaaaugua

SEQ ID NO: 244206 - RNA, 19 nt, Artificial Sequence
  Synthetic
agcuaaaugucuaaaugua

SEQ ID NO: 244207 - RNA, 20 nt, Artificial Sequence
  Synthetic
aagcuaaaugucuaaaugua

SEQ ID NO: 244208 - RNA, 21 nt, Artificial Sequence
  Synthetic
aaagcuaaaugucuaaaugua

SEQ ID NO: 244209 - RNA, 22 nt, Artificial Sequence
  Synthetic
aaaagcuaaaugucuaaaugua

SEQ ID NO: 244210 - RNA, 23 nt, Artificial Sequence
  Synthetic
aaaaagcuaaaugucuaaaugua

SEQ ID NO: 244211 - RNA, 24 nt, Artificial Sequence
  Synthetic
aaaaaagcuaaaugucuaaaugua

SEQ ID NO: 244212 - RNA, 18 nt, Artificial Sequence
  Synthetic
ugauauuaugacaaugua

SEQ ID NO: 244213 - RNA, 19 nt, Artificial Sequence
  Synthetic
cugauauuaugacaaugua

SEQ ID NO: 244214 - RNA, 20 nt, Artificial Sequence
  Synthetic
gcugauauuaugacaaugua

SEQ ID NO: 244215 - RNA, 21 nt, Artificial Sequence
  Synthetic
agcugauauuaugacaaugua

SEQ ID NO: 244216 - RNA, 22 nt, Artificial Sequence
  Synthetic
aagcugauauuaugacaaugua

SEQ ID NO: 244217 - RNA, 23 nt, Artificial Sequence
  Synthetic
aaagcugauauuaugacaaugua

SEQ ID NO: 244218 - RNA, 24 nt, Artificial Sequence
  Synthetic
uaaagcugauauuaugacaaugua

SEQ ID NO: 244219 - RNA, 18 nt, Artificial Sequence
  Synthetic
aggacguuugacaaugua

SEQ ID NO: 244220 - RNA, 19 nt, Artificial Sequence
  Synthetic
gaggacguuugacaaugua

SEQ ID NO: 244221 - RNA, 20 nt, Artificial Sequence
  Synthetic
agaggacguuugacaaugua

SEQ ID NO: 244222 - RNA, 21 nt, Artificial Sequence
  Synthetic
cagaggacguuugacaaugua

SEQ ID NO: 244223 - RNA, 22 nt, Artificial Sequence
  Synthetic
gcagaggacguuugacaaugua

SEQ ID NO: 244224 - RNA, 23 nt, Artificial Sequence
  Synthetic
ugcagaggacguuugacaaugua

SEQ ID NO: 244225 - RNA, 24 nt, Artificial Sequence
  Synthetic
cugcagaggacguuugacaaugua

SEQ ID NO: 244226 - RNA, 18 nt, Artificial Sequence
  Synthetic
ggauacaaaaucaaugua

SEQ ID NO: 244227 - RNA, 19 nt, Artificial Sequence
  Synthetic
aggauacaaaaucaaugua

SEQ ID NO: 244228 - RNA, 20 nt, Artificial Sequence
  Synthetic
caggauacaaaaucaaugua

SEQ ID NO: 244229 - RNA, 21 nt, Artificial Sequence
  Synthetic
ucaggauacaaaaucaaugua

SEQ ID NO: 244230 - RNA, 22 nt, Artificial Sequence
  Synthetic
cucaggauacaaaaucaaugua

SEQ ID NO: 244231 - RNA, 23 nt, Artificial Sequence
  Synthetic
ucucaggauacaaaaucaaugua

SEQ ID NO: 244232 - RNA, 24 nt, Artificial Sequence
  Synthetic
gucucaggauacaaaaucaaugua

SEQ ID NO: 244233 - RNA, 18 nt, Artificial Sequence
  Synthetic
uucucuugggagaaugua

SEQ ID NO: 244234 - RNA, 19 nt, Artificial Sequence
  Synthetic
cuucucuugggagaaugua

SEQ ID NO: 244235 - RNA, 20 nt, Artificial Sequence
  Synthetic
ucuucucuugggagaaugua

SEQ ID NO: 244236 - RNA, 21 nt, Artificial Sequence
  Synthetic
uucuucucuugggagaaugua

SEQ ID NO: 244237 - RNA, 22 nt, Artificial Sequence
  Synthetic
uuucuucucuugggagaaugua

SEQ ID NO: 244238 - RNA, 23 nt, Artificial Sequence
  Synthetic
uuuucuucucuugggagaaugua

SEQ ID NO: 244239 - RNA, 24 nt, Artificial Sequence
  Synthetic
guuuucuucucuugggagaaugua

SEQ ID NO: 244240 - RNA, 18 nt, Artificial Sequence
  Synthetic
cuaauguauucgaaugua

SEQ ID NO: 244241 - RNA, 19 nt, Artificial Sequence
  Synthetic
ucuaauguauucgaaugua

SEQ ID NO: 244242 - RNA, 20 nt, Artificial Sequence
  Synthetic
aucuaauguauucgaaugua

SEQ ID NO: 244243 - RNA, 21 nt, Artificial Sequence
  Synthetic
aaucuaauguauucgaaugua

SEQ ID NO: 244244 - RNA, 22 nt, Artificial Sequence
  Synthetic
aaaucuaauguauucgaaugua

SEQ ID NO: 244245 - RNA, 23 nt, Artificial Sequence
  Synthetic
aaaaucuaauguauucgaaugua

SEQ ID NO: 244246 - RNA, 24 nt, Artificial Sequence
  Synthetic
aaaaaucuaauguauucgaaugua

SEQ ID NO: 244247 - RNA, 18 nt, Artificial Sequence
  Synthetic
aauuucccuuggaaugua

SEQ ID NO: 244248 - RNA, 19 nt, Artificial Sequence
  Synthetic
aaauuucccuuggaaugua

SEQ ID NO: 244249 - RNA, 20 nt, Artificial Sequence
  Synthetic
uaaauuucccuuggaaugua

SEQ ID NO: 244250 - RNA, 21 nt, Artificial Sequence
  Synthetic
uuaaauuucccuuggaaugua

SEQ ID NO: 244251 - RNA, 22 nt, Artificial Sequence
  Synthetic
uuuaaauuucccuuggaaugua

SEQ ID NO: 244252 - RNA, 23 nt, Artificial Sequence
  Synthetic
auuuaaauuucccuuggaaugua

SEQ ID NO: 244253 - RNA, 24 nt, Artificial Sequence
  Synthetic
cauuuaaauuucccuuggaaugua

SEQ ID NO: 244254 - RNA, 18 nt, Artificial Sequence
  Synthetic
aggucaaaaacuaaugua

SEQ ID NO: 244255 - RNA, 19 nt, Artificial Sequence
  Synthetic
uaggucaaaaacuaaugua

SEQ ID NO: 244256 - RNA, 20 nt, Artificial Sequence
  Synthetic
auaggucaaaaacuaaugua

SEQ ID NO: 244257 - RNA, 21 nt, Artificial Sequence
  Synthetic
uauaggucaaaaacuaaugua

SEQ ID NO: 244258 - RNA, 22 nt, Artificial Sequence
  Synthetic
auauaggucaaaaacuaaugua

SEQ ID NO: 244259 - RNA, 23 nt, Artificial Sequence
  Synthetic
aauauaggucaaaaacuaaugua

SEQ ID NO: 244260 - RNA, 24 nt, Artificial Sequence
  Synthetic
aaauauaggucaaaaacuaaugua

SEQ ID NO: 244261 - RNA, 18 nt, Artificial Sequence
  Synthetic
gugaugcgaauuaaugua

SEQ ID NO: 244262 - RNA, 19 nt, Artificial Sequence
  Synthetic
ggugaugcgaauuaaugua

SEQ ID NO: 244263 - RNA, 20 nt, Artificial Sequence
  Synthetic
gggugaugcgaauuaaugua

SEQ ID NO: 244264 - RNA, 21 nt, Artificial Sequence
  Synthetic
agggugaugcgaauuaaugua

SEQ ID NO: 244265 - RNA, 22 nt, Artificial Sequence
  Synthetic
gagggugaugcgaauuaaugua

SEQ ID NO: 244266 - RNA, 23 nt, Artificial Sequence
  Synthetic
ugagggugaugcgaauuaaugua

SEQ ID NO: 244267 - RNA, 24 nt, Artificial Sequence
  Synthetic
gugagggugaugcgaauuaaugua

SEQ ID NO: 244268 - RNA, 18 nt, Artificial Sequence
  Synthetic
gggugguucuaacaugua

SEQ ID NO: 244269 - RNA, 19 nt, Artificial Sequence
  Synthetic
ugggugguucuaacaugua

SEQ ID NO: 244270 - RNA, 20 nt, Artificial Sequence
  Synthetic
uugggugguucuaacaugua

SEQ ID NO: 244271 - RNA, 21 nt, Artificial Sequence
  Synthetic
auugggugguucuaacaugua

SEQ ID NO: 244272 - RNA, 22 nt, Artificial Sequence
  Synthetic
aauugggugguucuaacaugua

SEQ ID NO: 244273 - RNA, 23 nt, Artificial Sequence
  Synthetic
uaauugggugguucuaacaugua

SEQ ID NO: 244274 - RNA, 24 nt, Artificial Sequence
  Synthetic
guaauugggugguucuaacaugua

SEQ ID NO: 244275 - RNA, 18 nt, Artificial Sequence
  Synthetic
gcuuucaucacacaugua

SEQ ID NO: 244276 - RNA, 19 nt, Artificial Sequence
  Synthetic
agcuuucaucacacaugua

SEQ ID NO: 244277 - RNA, 20 nt, Artificial Sequence
  Synthetic
aagcuuucaucacacaugua

SEQ ID NO: 244278 - RNA, 21 nt, Artificial Sequence
  Synthetic
gaagcuuucaucacacaugua

SEQ ID NO: 244279 - RNA, 22 nt, Artificial Sequence
  Synthetic
ugaagcuuucaucacacaugua

SEQ ID NO: 244280 - RNA, 23 nt, Artificial Sequence
  Synthetic
cugaagcuuucaucacacaugua

SEQ ID NO: 244281 - RNA, 24 nt, Artificial Sequence
  Synthetic
gcugaagcuuucaucacacaugua

SEQ ID NO: 244282 - RNA, 18 nt, Artificial Sequence
  Synthetic
aguucugggauacaugua

SEQ ID NO: 244283 - RNA, 19 nt, Artificial Sequence
  Synthetic
aaguucugggauacaugua

SEQ ID NO: 244284 - RNA, 20 nt, Artificial Sequence
  Synthetic
uaaguucugggauacaugua

SEQ ID NO: 244285 - RNA, 21 nt, Artificial Sequence
  Synthetic
uuaaguucugggauacaugua

SEQ ID NO: 244286 - RNA, 22 nt, Artificial Sequence
  Synthetic
cuuaaguucugggauacaugua

SEQ ID NO: 244287 - RNA, 23 nt, Artificial Sequence
  Synthetic
acuuaaguucugggauacaugua

SEQ ID NO: 244288 - RNA, 24 nt, Artificial Sequence
  Synthetic
uacuuaaguucugggauacaugua

SEQ ID NO: 244289 - RNA, 18 nt, Artificial Sequence
  Synthetic
accagccacaagcaugua

SEQ ID NO: 244290 - RNA, 19 nt, Artificial Sequence
  Synthetic
gaccagccacaagcaugua

SEQ ID NO: 244291 - RNA, 20 nt, Artificial Sequence
  Synthetic
ugaccagccacaagcaugua

SEQ ID NO: 244292 - RNA, 21 nt, Artificial Sequence
  Synthetic
uugaccagccacaagcaugua

SEQ ID NO: 244293 - RNA, 22 nt, Artificial Sequence
  Synthetic
uuugaccagccacaagcaugua

SEQ ID NO: 244294 - RNA, 23 nt, Artificial Sequence
  Synthetic
uuuugaccagccacaagcaugua

SEQ ID NO: 244295 - RNA, 24 nt, Artificial Sequence
  Synthetic
uuuuugaccagccacaagcaugua

SEQ ID NO: 244296 - RNA, 18 nt, Artificial Sequence
  Synthetic
ucauuuaggaagcaugua

SEQ ID NO: 244297 - RNA, 19 nt, Artificial Sequence
  Synthetic
uucauuuaggaagcaugua

SEQ ID NO: 244298 - RNA, 20 nt, Artificial Sequence
  Synthetic
cuucauuuaggaagcaugua

SEQ ID NO: 244299 - RNA, 21 nt, Artificial Sequence
  Synthetic
ccuucauuuaggaagcaugua

SEQ ID NO: 244300 - RNA, 22 nt, Artificial Sequence
  Synthetic
uccuucauuuaggaagcaugua

SEQ ID NO: 244301 - RNA, 23 nt, Artificial Sequence
  Synthetic
uuccuucauuuaggaagcaugua

SEQ ID NO: 244302 - RNA, 24 nt, Artificial Sequence
  Synthetic
cuuccuucauuuaggaagcaugua

SEQ ID NO: 244303 - RNA, 18 nt, Artificial Sequence
  Synthetic
uuguauguugagcaugua

SEQ ID NO: 244304 - RNA, 19 nt, Artificial Sequence
  Synthetic
uuuguauguugagcaugua

SEQ ID NO: 244305 - RNA, 20 nt, Artificial Sequence
  Synthetic
uuuuguauguugagcaugua

SEQ ID NO: 244306 - RNA, 21 nt, Artificial Sequence
  Synthetic
cuuuuguauguugagcaugua

SEQ ID NO: 244307 - RNA, 22 nt, Artificial Sequence
  Synthetic
acuuuuguauguugagcaugua

SEQ ID NO: 244308 - RNA, 23 nt, Artificial Sequence
  Synthetic
cacuuuuguauguugagcaugua

SEQ ID NO: 244309 - RNA, 24 nt, Artificial Sequence
  Synthetic
ccacuuuuguauguugagcaugua

SEQ ID NO: 244310 - RNA, 18 nt, Artificial Sequence
  Synthetic
uuaaauuagaggcaugua

SEQ ID NO: 244311 - RNA, 19 nt, Artificial Sequence
  Synthetic
uuuaaauuagaggcaugua

SEQ ID NO: 244312 - RNA, 20 nt, Artificial Sequence
  Synthetic
uuuuaaauuagaggcaugua

SEQ ID NO: 244313 - RNA, 21 nt, Artificial Sequence
  Synthetic
auuuuaaauuagaggcaugua

SEQ ID NO: 244314 - RNA, 22 nt, Artificial Sequence
  Synthetic
uauuuuaaauuagaggcaugua

SEQ ID NO: 244315 - RNA, 23 nt, Artificial Sequence
  Synthetic
uuauuuuaaauuagaggcaugua

SEQ ID NO: 244316 - RNA, 24 nt, Artificial Sequence
  Synthetic
uuuauuuuaaauuagaggcaugua

SEQ ID NO: 244317 - RNA, 18 nt, Artificial Sequence
  Synthetic
cauaaccauuugcaugua

SEQ ID NO: 244318 - RNA, 19 nt, Artificial Sequence
  Synthetic
acauaaccauuugcaugua

SEQ ID NO: 244319 - RNA, 20 nt, Artificial Sequence
  Synthetic
aacauaaccauuugcaugua

SEQ ID NO: 244320 - RNA, 21 nt, Artificial Sequence
  Synthetic
gaacauaaccauuugcaugua

SEQ ID NO: 244321 - RNA, 22 nt, Artificial Sequence
  Synthetic
agaacauaaccauuugcaugua

SEQ ID NO: 244322 - RNA, 23 nt, Artificial Sequence
  Synthetic
cagaacauaaccauuugcaugua

SEQ ID NO: 244323 - RNA, 24 nt, Artificial Sequence
  Synthetic
gcagaacauaaccauuugcaugua

SEQ ID NO: 244324 - RNA, 18 nt, Artificial Sequence
  Synthetic
aaaaugacuccucaugua

SEQ ID NO: 244325 - RNA, 19 nt, Artificial Sequence
  Synthetic
aaaaaugacuccucaugua

SEQ ID NO: 244326 - RNA, 20 nt, Artificial Sequence
  Synthetic
aaaaaaugacuccucaugua

SEQ ID NO: 244327 - RNA, 21 nt, Artificial Sequence
  Synthetic
aaaaaaaugacuccucaugua

SEQ ID NO: 244328 - RNA, 22 nt, Artificial Sequence
  Synthetic
gaaaaaaaugacuccucaugua

SEQ ID NO: 244329 - RNA, 23 nt, Artificial Sequence
  Synthetic
agaaaaaaaugacuccucaugua

SEQ ID NO: 244330 - RNA, 24 nt, Artificial Sequence
  Synthetic
cagaaaaaaaugacuccucaugua

SEQ ID NO: 244331 - RNA, 18 nt, Artificial Sequence
  Synthetic
caguacuaauuucaugua

SEQ ID NO: 244332 - RNA, 19 nt, Artificial Sequence
  Synthetic
ccaguacuaauuucaugua

SEQ ID NO: 244333 - RNA, 20 nt, Artificial Sequence
  Synthetic
uccaguacuaauuucaugua

SEQ ID NO: 244334 - RNA, 21 nt, Artificial Sequence
  Synthetic
cuccaguacuaauuucaugua

SEQ ID NO: 244335 - RNA, 22 nt, Artificial Sequence
  Synthetic
ccuccaguacuaauuucaugua

SEQ ID NO: 244336 - RNA, 23 nt, Artificial Sequence
  Synthetic
gccuccaguacuaauuucaugua

SEQ ID NO: 244337 - RNA, 24 nt, Artificial Sequence
  Synthetic
ggccuccaguacuaauuucaugua

SEQ ID NO: 244338 - RNA, 18 nt, Artificial Sequence
  Synthetic
uaccuagaugaagaugua

SEQ ID NO: 244339 - RNA, 19 nt, Artificial Sequence
  Synthetic
cuaccuagaugaagaugua

SEQ ID NO: 244340 - RNA, 20 nt, Artificial Sequence
  Synthetic
gcuaccuagaugaagaugua

SEQ ID NO: 244341 - RNA, 21 nt, Artificial Sequence
  Synthetic
agcuaccuagaugaagaugua

SEQ ID NO: 244342 - RNA, 22 nt, Artificial Sequence
  Synthetic
gagcuaccuagaugaagaugua

SEQ ID NO: 244343 - RNA, 23 nt, Artificial Sequence
  Synthetic
ggagcuaccuagaugaagaugua

SEQ ID NO: 244344 - RNA, 24 nt, Artificial Sequence
  Synthetic
uggagcuaccuagaugaagaugua

SEQ ID NO: 244345 - RNA, 18 nt, Artificial Sequence
  Synthetic
acccuuacguaagaugua

SEQ ID NO: 244346 - RNA, 19 nt, Artificial Sequence
  Synthetic
aacccuuacguaagaugua

SEQ ID NO: 244347 - RNA, 20 nt, Artificial Sequence
  Synthetic
aaacccuuacguaagaugua

SEQ ID NO: 244348 - RNA, 21 nt, Artificial Sequence
  Synthetic
aaaacccuuacguaagaugua

SEQ ID NO: 244349 - RNA, 22 nt, Artificial Sequence
  Synthetic
aaaaacccuuacguaagaugua

SEQ ID NO: 244350 - RNA, 23 nt, Artificial Sequence
  Synthetic
aaaaaacccuuacguaagaugua

SEQ ID NO: 244351 - RNA, 24 nt, Artificial Sequence
  Synthetic
uaaaaaacccuuacguaagaugua

SEQ ID NO: 244352 - RNA, 18 nt, Artificial Sequence
  Synthetic
aggcaguuuuaagaugua

SEQ ID NO: 244353 - RNA, 19 nt, Artificial Sequence
  Synthetic
aaggcaguuuuaagaugua

SEQ ID NO: 244354 - RNA, 20 nt, Artificial Sequence
  Synthetic
gaaggcaguuuuaagaugua

SEQ ID NO: 244355 - RNA, 21 nt, Artificial Sequence
  Synthetic
ugaaggcaguuuuaagaugua

SEQ ID NO: 244356 - RNA, 22 nt, Artificial Sequence
  Synthetic
augaaggcaguuuuaagaugua

SEQ ID NO: 244357 - RNA, 23 nt, Artificial Sequence
  Synthetic
aaugaaggcaguuuuaagaugua

SEQ ID NO: 244358 - RNA, 24 nt, Artificial Sequence
  Synthetic
aaaugaaggcaguuuuaagaugua

SEQ ID NO: 244359 - RNA, 18 nt, Artificial Sequence
  Synthetic
gcauacuuuuuagaugua

SEQ ID NO: 244360 - RNA, 19 nt, Artificial Sequence
  Synthetic
ggcauacuuuuuagaugua

SEQ ID NO: 244361 - RNA, 20 nt, Artificial Sequence
  Synthetic
aggcauacuuuuuagaugua

SEQ ID NO: 244362 - RNA, 21 nt, Artificial Sequence
  Synthetic
aaggcauacuuuuuagaugua

SEQ ID NO: 244363 - RNA, 22 nt, Artificial Sequence
  Synthetic
aaaggcauacuuuuuagaugua

SEQ ID NO: 244364 - RNA, 23 nt, Artificial Sequence
  Synthetic
aaaaggcauacuuuuuagaugua

SEQ ID NO: 244365 - RNA, 24 nt, Artificial Sequence
  Synthetic
caaaaggcauacuuuuuagaugua

SEQ ID NO: 244366 - RNA, 18 nt, Artificial Sequence
  Synthetic
uagaauucagaggaugua

SEQ ID NO: 244367 - RNA, 19 nt, Artificial Sequence
  Synthetic
cuagaauucagaggaugua

SEQ ID NO: 244368 - RNA, 20 nt, Artificial Sequence
  Synthetic
ccuagaauucagaggaugua

SEQ ID NO: 244369 - RNA, 21 nt, Artificial Sequence
  Synthetic
gccuagaauucagaggaugua

SEQ ID NO: 244370 - RNA, 22 nt, Artificial Sequence
  Synthetic
ugccuagaauucagaggaugua

SEQ ID NO: 244371 - RNA, 23 nt, Artificial Sequence
  Synthetic
cugccuagaauucagaggaugua

SEQ ID NO: 244372 - RNA, 24 nt, Artificial Sequence
  Synthetic
ucugccuagaauucagaggaugua

SEQ ID NO: 244373 - RNA, 18 nt, Artificial Sequence
  Synthetic
ugcuguuacagugaugua

SEQ ID NO: 244374 - RNA, 19 nt, Artificial Sequence
  Synthetic
cugcuguuacagugaugua

SEQ ID NO: 244375 - RNA, 20 nt, Artificial Sequence
  Synthetic
gcugcuguuacagugaugua

SEQ ID NO: 244376 - RNA, 21 nt, Artificial Sequence
  Synthetic
ugcugcuguuacagugaugua

SEQ ID NO: 244377 - RNA, 22 nt, Artificial Sequence
  Synthetic
gugcugcuguuacagugaugua

SEQ ID NO: 244378 - RNA, 23 nt, Artificial Sequence
  Synthetic
ugugcugcuguuacagugaugua

SEQ ID NO: 244379 - RNA, 24 nt, Artificial Sequence
  Synthetic
augugcugcuguuacagugaugua

SEQ ID NO: 244380 - RNA, 18 nt, Artificial Sequence
  Synthetic
ggccagcucugugaugua

SEQ ID NO: 244381 - RNA, 19 nt, Artificial Sequence
  Synthetic
gggccagcucugugaugua

SEQ ID NO: 244382 - RNA, 20 nt, Artificial Sequence
  Synthetic
ggggccagcucugugaugua

SEQ ID NO: 244383 - RNA, 21 nt, Artificial Sequence
  Synthetic
aggggccagcucugugaugua

SEQ ID NO: 244384 - RNA, 22 nt, Artificial Sequence
  Synthetic
aaggggccagcucugugaugua

SEQ ID NO: 244385 - RNA, 23 nt, Artificial Sequence
  Synthetic
gaaggggccagcucugugaugua

SEQ ID NO: 244386 - RNA, 24 nt, Artificial Sequence
  Synthetic
agaaggggccagcucugugaugua

SEQ ID NO: 244387 - RNA, 18 nt, Artificial Sequence
  Synthetic
guggaaucugcauaugua

SEQ ID NO: 244388 - RNA, 19 nt, Artificial Sequence
  Synthetic
cguggaaucugcauaugua

SEQ ID NO: 244389 - RNA, 20 nt, Artificial Sequence
  Synthetic
ucguggaaucugcauaugua

SEQ ID NO: 244390 - RNA, 21 nt, Artificial Sequence
  Synthetic
gucguggaaucugcauaugua

SEQ ID NO: 244391 - RNA, 22 nt, Artificial Sequence
  Synthetic
ggucguggaaucugcauaugua

SEQ ID NO: 244392 - RNA, 23 nt, Artificial Sequence
  Synthetic
gggucguggaaucugcauaugua

SEQ ID NO: 244393 - RNA, 24 nt, Artificial Sequence
  Synthetic
ugggucguggaaucugcauaugua

SEQ ID NO: 244394 - RNA, 18 nt, Artificial Sequence
  Synthetic
gaaaaauacagauaugua

SEQ ID NO: 244395 - RNA, 19 nt, Artificial Sequence
  Synthetic
ugaaaaauacagauaugua

SEQ ID NO: 244396 - RNA, 20 nt, Artificial Sequence
  Synthetic
gugaaaaauacagauaugua

SEQ ID NO: 244397 - RNA, 21 nt, Artificial Sequence
  Synthetic
ggugaaaaauacagauaugua

SEQ ID NO: 244398 - RNA, 22 nt, Artificial Sequence
  Synthetic
uggugaaaaauacagauaugua

SEQ ID NO: 244399 - RNA, 23 nt, Artificial Sequence
  Synthetic
auggugaaaaauacagauaugua

SEQ ID NO: 244400 - RNA, 24 nt, Artificial Sequence
  Synthetic
uauggugaaaaauacagauaugua

SEQ ID NO: 244401 - RNA, 18 nt, Artificial Sequence
  Synthetic
uauuacauaugcuaugua

SEQ ID NO: 244402 - RNA, 19 nt, Artificial Sequence
  Synthetic
auauuacauaugcuaugua

SEQ ID NO: 244403 - RNA, 20 nt, Artificial Sequence
  Synthetic
cauauuacauaugcuaugua

SEQ ID NO: 244404 - RNA, 21 nt, Artificial Sequence
  Synthetic
gcauauuacauaugcuaugua

SEQ ID NO: 244405 - RNA, 22 nt, Artificial Sequence
  Synthetic
ugcauauuacauaugcuaugua

SEQ ID NO: 244406 - RNA, 23 nt, Artificial Sequence
  Synthetic
cugcauauuacauaugcuaugua

SEQ ID NO: 244407 - RNA, 24 nt, Artificial Sequence
  Synthetic
ccugcauauuacauaugcuaugua

SEQ ID NO: 244408 - RNA, 18 nt, Artificial Sequence
  Synthetic
uaaaagaggaaguaugua

SEQ ID NO: 244409 - RNA, 19 nt, Artificial Sequence
  Synthetic
guaaaagaggaaguaugua

SEQ ID NO: 244410 - RNA, 20 nt, Artificial Sequence
  Synthetic
aguaaaagaggaaguaugua

SEQ ID NO: 244411 - RNA, 21 nt, Artificial Sequence
  Synthetic
caguaaaagaggaaguaugua

SEQ ID NO: 244412 - RNA, 22 nt, Artificial Sequence
  Synthetic
gcaguaaaagaggaaguaugua

SEQ ID NO: 244413 - RNA, 23 nt, Artificial Sequence
  Synthetic
agcaguaaaagaggaaguaugua

SEQ ID NO: 244414 - RNA, 24 nt, Artificial Sequence
  Synthetic
uagcaguaaaagaggaaguaugua

SEQ ID NO: 244415 - RNA, 18 nt, Artificial Sequence
  Synthetic
ugguucucaauguaugua

SEQ ID NO: 244416 - RNA, 19 nt, Artificial Sequence
  Synthetic
gugguucucaauguaugua

SEQ ID NO: 244417 - RNA, 20 nt, Artificial Sequence
  Synthetic
ugugguucucaauguaugua

SEQ ID NO: 244418 - RNA, 21 nt, Artificial Sequence
  Synthetic
augugguucucaauguaugua

SEQ ID NO: 244419 - RNA, 22 nt, Artificial Sequence
  Synthetic
gaugugguucucaauguaugua

SEQ ID NO: 244420 - RNA, 23 nt, Artificial Sequence
  Synthetic
ugaugugguucucaauguaugua

SEQ ID NO: 244421 - RNA, 24 nt, Artificial Sequence
  Synthetic
cugaugugguucucaauguaugua

SEQ ID NO: 244422 - RNA, 18 nt, Artificial Sequence
  Synthetic
uuauauaugaguuaugua

SEQ ID NO: 244423 - RNA, 19 nt, Artificial Sequence
  Synthetic
cuuauauaugaguuaugua

SEQ ID NO: 244424 - RNA, 20 nt, Artificial Sequence
  Synthetic
ucuuauauaugaguuaugua

SEQ ID NO: 244425 - RNA, 21 nt, Artificial Sequence
  Synthetic
uucuuauauaugaguuaugua

SEQ ID NO: 244426 - RNA, 22 nt, Artificial Sequence
  Synthetic
uuucuuauauaugaguuaugua

SEQ ID NO: 244427 - RNA, 23 nt, Artificial Sequence
  Synthetic
auuucuuauauaugaguuaugua

SEQ ID NO: 244428 - RNA, 24 nt, Artificial Sequence
  Synthetic
gauuucuuauauaugaguuaugua

SEQ ID NO: 244429 - RNA, 18 nt, Artificial Sequence
  Synthetic
uuaacauacgguuaugua

SEQ ID NO: 244430 - RNA, 19 nt, Artificial Sequence
  Synthetic
auuaacauacgguuaugua

SEQ ID NO: 244431 - RNA, 20 nt, Artificial Sequence
  Synthetic
aauuaacauacgguuaugua

SEQ ID NO: 244432 - RNA, 21 nt, Artificial Sequence
  Synthetic
caauuaacauacgguuaugua

SEQ ID NO: 244433 - RNA, 22 nt, Artificial Sequence
  Synthetic
gcaauuaacauacgguuaugua

SEQ ID NO: 244434 - RNA, 23 nt, Artificial Sequence
  Synthetic
ugcaauuaacauacgguuaugua

SEQ ID NO: 244435 - RNA, 24 nt, Artificial Sequence
  Synthetic
uugcaauuaacauacgguuaugua

SEQ ID NO: 244436 - RNA, 18 nt, Artificial Sequence
  Synthetic
ccacacaaaauuuaugua

SEQ ID NO: 244437 - RNA, 19 nt, Artificial Sequence
  Synthetic
uccacacaaaauuuaugua

SEQ ID NO: 244438 - RNA, 20 nt, Artificial Sequence
  Synthetic
uuccacacaaaauuuaugua

SEQ ID NO: 244439 - RNA, 21 nt, Artificial Sequence
  Synthetic
uuuccacacaaaauuuaugua

SEQ ID NO: 244440 - RNA, 22 nt, Artificial Sequence
  Synthetic
cuuuccacacaaaauuuaugua

SEQ ID NO: 244441 - RNA, 23 nt, Artificial Sequence
  Synthetic
ccuuuccacacaaaauuuaugua

SEQ ID NO: 244442 - RNA, 24 nt, Artificial Sequence
  Synthetic
gccuuuccacacaaaauuuaugua

SEQ ID NO: 244443 - RNA, 18 nt, Artificial Sequence
  Synthetic
agaaacaaauuuuaugua

SEQ ID NO: 244444 - RNA, 19 nt, Artificial Sequence
  Synthetic
aagaaacaaauuuuaugua

SEQ ID NO: 244445 - RNA, 20 nt, Artificial Sequence
  Synthetic
caagaaacaaauuuuaugua

SEQ ID NO: 244446 - RNA, 21 nt, Artificial Sequence
  Synthetic
ucaagaaacaaauuuuaugua

SEQ ID NO: 244447 - RNA, 22 nt, Artificial Sequence
  Synthetic
uucaagaaacaaauuuuaugua

SEQ ID NO: 244448 - RNA, 23 nt, Artificial Sequence
  Synthetic
cuucaagaaacaaauuuuaugua

SEQ ID NO: 244449 - RNA, 24 nt, Artificial Sequence
  Synthetic
ccuucaagaaacaaauuuuaugua

SEQ ID NO: 244450 - RNA, 18 nt, Artificial Sequence
  Synthetic
gauacagacuuuuaugua

SEQ ID NO: 244451 - RNA, 19 nt, Artificial Sequence
  Synthetic
agauacagacuuuuaugua

SEQ ID NO: 244452 - RNA, 20 nt, Artificial Sequence
  Synthetic
aagauacagacuuuuaugua

SEQ ID NO: 244453 - RNA, 21 nt, Artificial Sequence
  Synthetic
aaagauacagacuuuuaugua

SEQ ID NO: 244454 - RNA, 22 nt, Artificial Sequence
  Synthetic
uaaagauacagacuuuuaugua

SEQ ID NO: 244455 - RNA, 23 nt, Artificial Sequence
  Synthetic
guaaagauacagacuuuuaugua

SEQ ID NO: 244456 - RNA, 24 nt, Artificial Sequence
  Synthetic
uguaaagauacagacuuuuaugua

SEQ ID NO: 244457 - RNA, 18 nt, Artificial Sequence
  Synthetic
uguuugauuuuuuaugua

SEQ ID NO: 244458 - RNA, 19 nt, Artificial Sequence
  Synthetic
uuguuugauuuuuuaugua

SEQ ID NO: 244459 - RNA, 20 nt, Artificial Sequence
  Synthetic
cuuguuugauuuuuuaugua

SEQ ID NO: 244460 - RNA, 21 nt, Artificial Sequence
  Synthetic
gcuuguuugauuuuuuaugua

SEQ ID NO: 244461 - RNA, 22 nt, Artificial Sequence
  Synthetic
ggcuuguuugauuuuuuaugua

SEQ ID NO: 244462 - RNA, 23 nt, Artificial Sequence
  Synthetic
uggcuuguuugauuuuuuaugua

SEQ ID NO: 244463 - RNA, 24 nt, Artificial Sequence
  Synthetic
uuggcuuguuugauuuuuuaugua

SEQ ID NO: 244464 - RNA, 18 nt, Artificial Sequence
  Synthetic
augaauuuaaaaacugua

SEQ ID NO: 244465 - RNA, 19 nt, Artificial Sequence
  Synthetic
uaugaauuuaaaaacugua

SEQ ID NO: 244466 - RNA, 20 nt, Artificial Sequence
  Synthetic
cuaugaauuuaaaaacugua

SEQ ID NO: 244467 - RNA, 21 nt, Artificial Sequence
  Synthetic
ucuaugaauuuaaaaacugua

SEQ ID NO: 244468 - RNA, 22 nt, Artificial Sequence
  Synthetic
aucuaugaauuuaaaaacugua

SEQ ID NO: 244469 - RNA, 23 nt, Artificial Sequence
  Synthetic
aaucuaugaauuuaaaaacugua

SEQ ID NO: 244470 - RNA, 24 nt, Artificial Sequence
  Synthetic
uaaucuaugaauuuaaaaacugua

SEQ ID NO: 244471 - RNA, 18 nt, Artificial Sequence
  Synthetic
cauuuauuuaaaacugua

SEQ ID NO: 244472 - RNA, 19 nt, Artificial Sequence
  Synthetic
ucauuuauuuaaaacugua

SEQ ID NO: 244473 - RNA, 20 nt, Artificial Sequence
  Synthetic
cucauuuauuuaaaacugua

SEQ ID NO: 244474 - RNA, 21 nt, Artificial Sequence
  Synthetic
acucauuuauuuaaaacugua

SEQ ID NO: 244475 - RNA, 22 nt, Artificial Sequence
  Synthetic
gacucauuuauuuaaaacugua

SEQ ID NO: 244476 - RNA, 23 nt, Artificial Sequence
  Synthetic
ugacucauuuauuuaaaacugua

SEQ ID NO: 244477 - RNA, 24 nt, Artificial Sequence
  Synthetic
augacucauuuauuuaaaacugua

SEQ ID NO: 244478 - RNA, 18 nt, Artificial Sequence
  Synthetic
caugcuaaagaaacugua

SEQ ID NO: 244479 - RNA, 19 nt, Artificial Sequence
  Synthetic
ucaugcuaaagaaacugua

SEQ ID NO: 244480 - RNA, 20 nt, Artificial Sequence
  Synthetic
uucaugcuaaagaaacugua

SEQ ID NO: 244481 - RNA, 21 nt, Artificial Sequence
  Synthetic
uuucaugcuaaagaaacugua

SEQ ID NO: 244482 - RNA, 22 nt, Artificial Sequence
  Synthetic
cuuucaugcuaaagaaacugua

SEQ ID NO: 244483 - RNA, 23 nt, Artificial Sequence
  Synthetic
ccuuucaugcuaaagaaacugua

SEQ ID NO: 244484 - RNA, 24 nt, Artificial Sequence
  Synthetic
cccuuucaugcuaaagaaacugua

SEQ ID NO: 244485 - RNA, 18 nt, Artificial Sequence
  Synthetic
cuggucuuguaaacugua

SEQ ID NO: 244486 - RNA, 19 nt, Artificial Sequence
  Synthetic
ccuggucuuguaaacugua

SEQ ID NO: 244487 - RNA, 20 nt, Artificial Sequence
  Synthetic
accuggucuuguaaacugua

SEQ ID NO: 244488 - RNA, 21 nt, Artificial Sequence
  Synthetic
uaccuggucuuguaaacugua

SEQ ID NO: 244489 - RNA, 22 nt, Artificial Sequence
  Synthetic
cuaccuggucuuguaaacugua

SEQ ID NO: 244490 - RNA, 23 nt, Artificial Sequence
  Synthetic
ucuaccuggucuuguaaacugua

SEQ ID NO: 244491 - RNA, 24 nt, Artificial Sequence
  Synthetic
aucuaccuggucuuguaaacugua

SEQ ID NO: 244492 - RNA, 18 nt, Artificial Sequence
  Synthetic
guugagaguagaacugua

SEQ ID NO: 244493 - RNA, 19 nt, Artificial Sequence
  Synthetic
gguugagaguagaacugua

SEQ ID NO: 244494 - RNA, 20 nt, Artificial Sequence
  Synthetic
ggguugagaguagaacugua

SEQ ID NO: 244495 - RNA, 21 nt, Artificial Sequence
  Synthetic
uggguugagaguagaacugua

SEQ ID NO: 244496 - RNA, 22 nt, Artificial Sequence
  Synthetic
cuggguugagaguagaacugua

SEQ ID NO: 244497 - RNA, 23 nt, Artificial Sequence
  Synthetic
ucuggguugagaguagaacugua

SEQ ID NO: 244498 - RNA, 24 nt, Artificial Sequence
  Synthetic
uucuggguugagaguagaacugua

SEQ ID NO: 244499 - RNA, 18 nt, Artificial Sequence
  Synthetic
auauugguagacacugua

SEQ ID NO: 244500 - RNA, 19 nt, Artificial Sequence
  Synthetic
gauauugguagacacugua

SEQ ID NO: 244501 - RNA, 20 nt, Artificial Sequence
  Synthetic
agauauugguagacacugua

SEQ ID NO: 244502 - RNA, 21 nt, Artificial Sequence
  Synthetic
gagauauugguagacacugua

SEQ ID NO: 244503 - RNA, 22 nt, Artificial Sequence
  Synthetic
agagauauugguagacacugua

SEQ ID NO: 244504 - RNA, 23 nt, Artificial Sequence
  Synthetic
cagagauauugguagacacugua

SEQ ID NO: 244505 - RNA, 24 nt, Artificial Sequence
  Synthetic
acagagauauugguagacacugua

SEQ ID NO: 244506 - RNA, 18 nt, Artificial Sequence
  Synthetic
gcuggucauaagacugua

SEQ ID NO: 244507 - RNA, 19 nt, Artificial Sequence
  Synthetic
ggcuggucauaagacugua

SEQ ID NO: 244508 - RNA, 20 nt, Artificial Sequence
  Synthetic
aggcuggucauaagacugua

SEQ ID NO: 244509 - RNA, 21 nt, Artificial Sequence
  Synthetic
caggcuggucauaagacugua

SEQ ID NO: 244510 - RNA, 22 nt, Artificial Sequence
  Synthetic
acaggcuggucauaagacugua

SEQ ID NO: 244511 - RNA, 23 nt, Artificial Sequence
  Synthetic
aacaggcuggucauaagacugua

SEQ ID NO: 244512 - RNA, 24 nt, Artificial Sequence
  Synthetic
gaacaggcuggucauaagacugua

SEQ ID NO: 244513 - RNA, 18 nt, Artificial Sequence
  Synthetic
aaauugcaagagacugua

SEQ ID NO: 244514 - RNA, 19 nt, Artificial Sequence
  Synthetic
uaaauugcaagagacugua

SEQ ID NO: 244515 - RNA, 20 nt, Artificial Sequence
  Synthetic
guaaauugcaagagacugua

SEQ ID NO: 244516 - RNA, 21 nt, Artificial Sequence
  Synthetic
cguaaauugcaagagacugua

SEQ ID NO: 244517 - RNA, 22 nt, Artificial Sequence
  Synthetic
ccguaaauugcaagagacugua

SEQ ID NO: 244518 - RNA, 23 nt, Artificial Sequence
  Synthetic
cccguaaauugcaagagacugua

SEQ ID NO: 244519 - RNA, 24 nt, Artificial Sequence
  Synthetic
acccguaaauugcaagagacugua

SEQ ID NO: 244520 - RNA, 18 nt, Artificial Sequence
  Synthetic
uucuucugguugacugua

SEQ ID NO: 244521 - RNA, 19 nt, Artificial Sequence
  Synthetic
cuucuucugguugacugua

SEQ ID NO: 244522 - RNA, 20 nt, Artificial Sequence
  Synthetic
acuucuucugguugacugua

SEQ ID NO: 244523 - RNA, 21 nt, Artificial Sequence
  Synthetic
uacuucuucugguugacugua

SEQ ID NO: 244524 - RNA, 22 nt, Artificial Sequence
  Synthetic
auacuucuucugguugacugua

SEQ ID NO: 244525 - RNA, 23 nt, Artificial Sequence
  Synthetic
uauacuucuucugguugacugua

SEQ ID NO: 244526 - RNA, 24 nt, Artificial Sequence
  Synthetic
auauacuucuucugguugacugua

SEQ ID NO: 244527 - RNA, 18 nt, Artificial Sequence
  Synthetic
guuuagcaaaguacugua

SEQ ID NO: 244528 - RNA, 19 nt, Artificial Sequence
  Synthetic
aguuuagcaaaguacugua

SEQ ID NO: 244529 - RNA, 20 nt, Artificial Sequence
  Synthetic
gaguuuagcaaaguacugua

SEQ ID NO: 244530 - RNA, 21 nt, Artificial Sequence
  Synthetic
agaguuuagcaaaguacugua

SEQ ID NO: 244531 - RNA, 22 nt, Artificial Sequence
  Synthetic
gagaguuuagcaaaguacugua

SEQ ID NO: 244532 - RNA, 23 nt, Artificial Sequence
  Synthetic
agagaguuuagcaaaguacugua

SEQ ID NO: 244533 - RNA, 24 nt, Artificial Sequence
  Synthetic
uagagaguuuagcaaaguacugua

SEQ ID NO: 244534 - RNA, 18 nt, Artificial Sequence
  Synthetic
uuaauugcuguuacugua

SEQ ID NO: 244535 - RNA, 19 nt, Artificial Sequence
  Synthetic
cuuaauugcuguuacugua

SEQ ID NO: 244536 - RNA, 20 nt, Artificial Sequence
  Synthetic
ucuuaauugcuguuacugua

SEQ ID NO: 244537 - RNA, 21 nt, Artificial Sequence
  Synthetic
gucuuaauugcuguuacugua

SEQ ID NO: 244538 - RNA, 22 nt, Artificial Sequence
  Synthetic
ugucuuaauugcuguuacugua

SEQ ID NO: 244539 - RNA, 23 nt, Artificial Sequence
  Synthetic
augucuuaauugcuguuacugua

SEQ ID NO: 244540 - RNA, 24 nt, Artificial Sequence
  Synthetic
uaugucuuaauugcuguuacugua

SEQ ID NO: 244541 - RNA, 18 nt, Artificial Sequence
  Synthetic
guauguguguuuacugua

SEQ ID NO: 244542 - RNA, 19 nt, Artificial Sequence
  Synthetic
uguauguguguuuacugua

SEQ ID NO: 244543 - RNA, 20 nt, Artificial Sequence
  Synthetic
guguauguguguuuacugua

SEQ ID NO: 244544 - RNA, 21 nt, Artificial Sequence
  Synthetic
uguguauguguguuuacugua

SEQ ID NO: 244545 - RNA, 22 nt, Artificial Sequence
  Synthetic
auguguauguguguuuacugua

SEQ ID NO: 244546 - RNA, 23 nt, Artificial Sequence
  Synthetic
aauguguauguguguuuacugua

SEQ ID NO: 244547 - RNA, 24 nt, Artificial Sequence
  Synthetic
gaauguguauguguguuuacugua

SEQ ID NO: 244548 - RNA, 18 nt, Artificial Sequence
  Synthetic
gcagcauauuuuacugua

SEQ ID NO: 244549 - RNA, 19 nt, Artificial Sequence
  Synthetic
agcagcauauuuuacugua

SEQ ID NO: 244550 - RNA, 20 nt, Artificial Sequence
  Synthetic
uagcagcauauuuuacugua

SEQ ID NO: 244551 - RNA, 21 nt, Artificial Sequence
  Synthetic
auagcagcauauuuuacugua

SEQ ID NO: 244552 - RNA, 22 nt, Artificial Sequence
  Synthetic
cauagcagcauauuuuacugua

SEQ ID NO: 244553 - RNA, 23 nt, Artificial Sequence
  Synthetic
ucauagcagcauauuuuacugua

SEQ ID NO: 244554 - RNA, 24 nt, Artificial Sequence
  Synthetic
uucauagcagcauauuuuacugua

SEQ ID NO: 244555 - RNA, 18 nt, Artificial Sequence
  Synthetic
cucaaaaguugaccugua

SEQ ID NO: 244556 - RNA, 19 nt, Artificial Sequence
  Synthetic
ucucaaaaguugaccugua

SEQ ID NO: 244557 - RNA, 20 nt, Artificial Sequence
  Synthetic
uucucaaaaguugaccugua

SEQ ID NO: 244558 - RNA, 21 nt, Artificial Sequence
  Synthetic
cuucucaaaaguugaccugua

SEQ ID NO: 244559 - RNA, 22 nt, Artificial Sequence
  Synthetic
gcuucucaaaaguugaccugua

SEQ ID NO: 244560 - RNA, 23 nt, Artificial Sequence
  Synthetic
ugcuucucaaaaguugaccugua

SEQ ID NO: 244561 - RNA, 24 nt, Artificial Sequence
  Synthetic
gugcuucucaaaaguugaccugua

SEQ ID NO: 244562 - RNA, 18 nt, Artificial Sequence
  Synthetic
gccauuauucacccugua

SEQ ID NO: 244563 - RNA, 19 nt, Artificial Sequence
  Synthetic
ugccauuauucacccugua

SEQ ID NO: 244564 - RNA, 20 nt, Artificial Sequence
  Synthetic
uugccauuauucacccugua

SEQ ID NO: 244565 - RNA, 21 nt, Artificial Sequence
  Synthetic
auugccauuauucacccugua

SEQ ID NO: 244566 - RNA, 22 nt, Artificial Sequence
  Synthetic
gauugccauuauucacccugua

SEQ ID NO: 244567 - RNA, 23 nt, Artificial Sequence
  Synthetic
ggauugccauuauucacccugua

SEQ ID NO: 244568 - RNA, 24 nt, Artificial Sequence
  Synthetic
uggauugccauuauucacccugua

SEQ ID NO: 244569 - RNA, 18 nt, Artificial Sequence
  Synthetic
ucucaggagaagccugua

SEQ ID NO: 244570 - RNA, 19 nt, Artificial Sequence
  Synthetic
cucucaggagaagccugua

SEQ ID NO: 244571 - RNA, 20 nt, Artificial Sequence
  Synthetic
gcucucaggagaagccugua

SEQ ID NO: 244572 - RNA, 21 nt, Artificial Sequence
  Synthetic
ugcucucaggagaagccugua

SEQ ID NO: 244573 - RNA, 22 nt, Artificial Sequence
  Synthetic
cugcucucaggagaagccugua

SEQ ID NO: 244574 - RNA, 23 nt, Artificial Sequence
  Synthetic
ucugcucucaggagaagccugua

SEQ ID NO: 244575 - RNA, 24 nt, Artificial Sequence
  Synthetic
gucugcucucaggagaagccugua

SEQ ID NO: 244576 - RNA, 18 nt, Artificial Sequence
  Synthetic
aaauuuaaauuuccugua

SEQ ID NO: 244577 - RNA, 19 nt, Artificial Sequence
  Synthetic
uaaauuuaaauuuccugua

SEQ ID NO: 244578 - RNA, 20 nt, Artificial Sequence
  Synthetic
auaaauuuaaauuuccugua

SEQ ID NO: 244579 - RNA, 21 nt, Artificial Sequence
  Synthetic
aauaaauuuaaauuuccugua

SEQ ID NO: 244580 - RNA, 22 nt, Artificial Sequence
  Synthetic
aaauaaauuuaaauuuccugua

SEQ ID NO: 244581 - RNA, 23 nt, Artificial Sequence
  Synthetic
gaaauaaauuuaaauuuccugua

SEQ ID NO: 244582 - RNA, 24 nt, Artificial Sequence
  Synthetic
cgaaauaaauuuaaauuuccugua

SEQ ID NO: 244583 - RNA, 18 nt, Artificial Sequence
  Synthetic
gggcuucccucagcugua

SEQ ID NO: 244584 - RNA, 19 nt, Artificial Sequence
  Synthetic
agggcuucccucagcugua

SEQ ID NO: 244585 - RNA, 20 nt, Artificial Sequence
  Synthetic
aagggcuucccucagcugua

SEQ ID NO: 244586 - RNA, 21 nt, Artificial Sequence
  Synthetic
caagggcuucccucagcugua

SEQ ID NO: 244587 - RNA, 22 nt, Artificial Sequence
  Synthetic
ucaagggcuucccucagcugua

SEQ ID NO: 244588 - RNA, 23 nt, Artificial Sequence
  Synthetic
uucaagggcuucccucagcugua

SEQ ID NO: 244589 - RNA, 24 nt, Artificial Sequence
  Synthetic
uuucaagggcuucccucagcugua

SEQ ID NO: 244590 - RNA, 18 nt, Artificial Sequence
  Synthetic
acaguucugcaggcugua

SEQ ID NO: 244591 - RNA, 19 nt, Artificial Sequence
  Synthetic
cacaguucugcaggcugua

SEQ ID NO: 244592 - RNA, 20 nt, Artificial Sequence
  Synthetic
ucacaguucugcaggcugua

SEQ ID NO: 244593 - RNA, 21 nt, Artificial Sequence
  Synthetic
cucacaguucugcaggcugua

SEQ ID NO: 244594 - RNA, 22 nt, Artificial Sequence
  Synthetic
gcucacaguucugcaggcugua

SEQ ID NO: 244595 - RNA, 23 nt, Artificial Sequence
  Synthetic
ggcucacaguucugcaggcugua

SEQ ID NO: 244596 - RNA, 24 nt, Artificial Sequence
  Synthetic
uggcucacaguucugcaggcugua

SEQ ID NO: 244597 - RNA, 18 nt, Artificial Sequence
  Synthetic
augguucugcaggcugua

SEQ ID NO: 244598 - RNA, 19 nt, Artificial Sequence
  Synthetic
gaugguucugcaggcugua

SEQ ID NO: 244599 - RNA, 20 nt, Artificial Sequence
  Synthetic
ugaugguucugcaggcugua

SEQ ID NO: 244600 - RNA, 21 nt, Artificial Sequence
  Synthetic
cugaugguucugcaggcugua

SEQ ID NO: 244601 - RNA, 22 nt, Artificial Sequence
  Synthetic
gcugaugguucugcaggcugua

SEQ ID NO: 244602 - RNA, 23 nt, Artificial Sequence
  Synthetic
ggcugaugguucugcaggcugua

SEQ ID NO: 244603 - RNA, 24 nt, Artificial Sequence
  Synthetic
uggcugaugguucugcaggcugua

SEQ ID NO: 244604 - RNA, 18 nt, Artificial Sequence
  Synthetic
aaccuaucaucggcugua

SEQ ID NO: 244605 - RNA, 19 nt, Artificial Sequence
  Synthetic
aaaccuaucaucggcugua

SEQ ID NO: 244606 - RNA, 20 nt, Artificial Sequence
  Synthetic
aaaaccuaucaucggcugua

SEQ ID NO: 244607 - RNA, 21 nt, Artificial Sequence
  Synthetic
aaaaaccuaucaucggcugua

SEQ ID NO: 244608 - RNA, 22 nt, Artificial Sequence
  Synthetic
uaaaaaccuaucaucggcugua

SEQ ID NO: 244609 - RNA, 23 nt, Artificial Sequence
  Synthetic
auaaaaaccuaucaucggcugua

SEQ ID NO: 244610 - RNA, 24 nt, Artificial Sequence
  Synthetic
aauaaaaaccuaucaucggcugua

SEQ ID NO: 244611 - RNA, 18 nt, Artificial Sequence
  Synthetic
ugguggcacauggcugua

SEQ ID NO: 244612 - RNA, 19 nt, Artificial Sequence
  Synthetic
augguggcacauggcugua

SEQ ID NO: 244613 - RNA, 20 nt, Artificial Sequence
  Synthetic
caugguggcacauggcugua

SEQ ID NO: 244614 - RNA, 21 nt, Artificial Sequence
  Synthetic
gcaugguggcacauggcugua

SEQ ID NO: 244615 - RNA, 22 nt, Artificial Sequence
  Synthetic
ggcaugguggcacauggcugua

SEQ ID NO: 244616 - RNA, 23 nt, Artificial Sequence
  Synthetic
gggcaugguggcacauggcugua

SEQ ID NO: 244617 - RNA, 24 nt, Artificial Sequence
  Synthetic
ugggcaugguggcacauggcugua

SEQ ID NO: 244618 - RNA, 18 nt, Artificial Sequence
  Synthetic
uaaguaaaccaugcugua

SEQ ID NO: 244619 - RNA, 19 nt, Artificial Sequence
  Synthetic
guaaguaaaccaugcugua

SEQ ID NO: 244620 - RNA, 20 nt, Artificial Sequence
  Synthetic
aguaaguaaaccaugcugua

SEQ ID NO: 244621 - RNA, 21 nt, Artificial Sequence
  Synthetic
caguaaguaaaccaugcugua

SEQ ID NO: 244622 - RNA, 22 nt, Artificial Sequence
  Synthetic
ucaguaaguaaaccaugcugua

SEQ ID NO: 244623 - RNA, 23 nt, Artificial Sequence
  Synthetic
uucaguaaguaaaccaugcugua

SEQ ID NO: 244624 - RNA, 24 nt, Artificial Sequence
  Synthetic
auucaguaaguaaaccaugcugua

SEQ ID NO: 244625 - RNA, 18 nt, Artificial Sequence
  Synthetic
cagaggauucaugcugua

SEQ ID NO: 244626 - RNA, 19 nt, Artificial Sequence
  Synthetic
ucagaggauucaugcugua

SEQ ID NO: 244627 - RNA, 20 nt, Artificial Sequence
  Synthetic
cucagaggauucaugcugua

SEQ ID NO: 244628 - RNA, 21 nt, Artificial Sequence
  Synthetic
ccucagaggauucaugcugua

SEQ ID NO: 244629 - RNA, 22 nt, Artificial Sequence
  Synthetic
cccucagaggauucaugcugua

SEQ ID NO: 244630 - RNA, 23 nt, Artificial Sequence
  Synthetic
gcccucagaggauucaugcugua

SEQ ID NO: 244631 - RNA, 24 nt, Artificial Sequence
  Synthetic
agcccucagaggauucaugcugua

SEQ ID NO: 244632 - RNA, 18 nt, Artificial Sequence
  Synthetic
ucaccucagucugcugua

SEQ ID NO: 244633 - RNA, 19 nt, Artificial Sequence
  Synthetic
aucaccucagucugcugua

SEQ ID NO: 244634 - RNA, 20 nt, Artificial Sequence
  Synthetic
gaucaccucagucugcugua

SEQ ID NO: 244635 - RNA, 21 nt, Artificial Sequence
  Synthetic
ggaucaccucagucugcugua

SEQ ID NO: 244636 - RNA, 22 nt, Artificial Sequence
  Synthetic
aggaucaccucagucugcugua

SEQ ID NO: 244637 - RNA, 23 nt, Artificial Sequence
  Synthetic
uaggaucaccucagucugcugua

SEQ ID NO: 244638 - RNA, 24 nt, Artificial Sequence
  Synthetic
cuaggaucaccucagucugcugua

SEQ ID NO: 244639 - RNA, 18 nt, Artificial Sequence
  Synthetic
uuuauauauguugcugua

SEQ ID NO: 244640 - RNA, 19 nt, Artificial Sequence
  Synthetic
auuuauauauguugcugua

SEQ ID NO: 244641 - RNA, 20 nt, Artificial Sequence
  Synthetic
uauuuauauauguugcugua

SEQ ID NO: 244642 - RNA, 21 nt, Artificial Sequence
  Synthetic
auauuuauauauguugcugua

SEQ ID NO: 244643 - RNA, 22 nt, Artificial Sequence
  Synthetic
uauauuuauauauguugcugua

SEQ ID NO: 244644 - RNA, 23 nt, Artificial Sequence
  Synthetic
auauauuuauauauguugcugua

SEQ ID NO: 244645 - RNA, 24 nt, Artificial Sequence
  Synthetic
aauauauuuauauauguugcugua

SEQ ID NO: 244646 - RNA, 18 nt, Artificial Sequence
  Synthetic
aaauacaaaugaucugua

SEQ ID NO: 244647 - RNA, 19 nt, Artificial Sequence
  Synthetic
caaauacaaaugaucugua

SEQ ID NO: 244648 - RNA, 20 nt, Artificial Sequence
  Synthetic
ucaaauacaaaugaucugua

SEQ ID NO: 244649 - RNA, 21 nt, Artificial Sequence
  Synthetic
aucaaauacaaaugaucugua

SEQ ID NO: 244650 - RNA, 22 nt, Artificial Sequence
  Synthetic
uaucaaauacaaaugaucugua

SEQ ID NO: 244651 - RNA, 23 nt, Artificial Sequence
  Synthetic
guaucaaauacaaaugaucugua

SEQ ID NO: 244652 - RNA, 24 nt, Artificial Sequence
  Synthetic
uguaucaaauacaaaugaucugua

SEQ ID NO: 244653 - RNA, 18 nt, Artificial Sequence
  Synthetic
cuacaaacgugaucugua

SEQ ID NO: 244654 - RNA, 19 nt, Artificial Sequence
  Synthetic
ucuacaaacgugaucugua

SEQ ID NO: 244655 - RNA, 20 nt, Artificial Sequence
  Synthetic
cucuacaaacgugaucugua

SEQ ID NO: 244656 - RNA, 21 nt, Artificial Sequence
  Synthetic
ucucuacaaacgugaucugua

SEQ ID NO: 244657 - RNA, 22 nt, Artificial Sequence
  Synthetic
gucucuacaaacgugaucugua

SEQ ID NO: 244658 - RNA, 23 nt, Artificial Sequence
  Synthetic
ggucucuacaaacgugaucugua

SEQ ID NO: 244659 - RNA, 24 nt, Artificial Sequence
  Synthetic
aggucucuacaaacgugaucugua

SEQ ID NO: 244660 - RNA, 18 nt, Artificial Sequence
  Synthetic
uccaguaaaugcucugua

SEQ ID NO: 244661 - RNA, 19 nt, Artificial Sequence
  Synthetic
uuccaguaaaugcucugua

SEQ ID NO: 244662 - RNA, 20 nt, Artificial Sequence
  Synthetic
guuccaguaaaugcucugua

SEQ ID NO: 244663 - RNA, 21 nt, Artificial Sequence
  Synthetic
gguuccaguaaaugcucugua

SEQ ID NO: 244664 - RNA, 22 nt, Artificial Sequence
  Synthetic
ggguuccaguaaaugcucugua

SEQ ID NO: 244665 - RNA, 23 nt, Artificial Sequence
  Synthetic
uggguuccaguaaaugcucugua

SEQ ID NO: 244666 - RNA, 24 nt, Artificial Sequence
  Synthetic
cuggguuccaguaaaugcucugua

SEQ ID NO: 244667 - RNA, 18 nt, Artificial Sequence
  Synthetic
ggggaaggggcgucugua

SEQ ID NO: 244668 - RNA, 19 nt, Artificial Sequence
  Synthetic
aggggaaggggcgucugua

SEQ ID NO: 244669 - RNA, 20 nt, Artificial Sequence
  Synthetic
aaggggaaggggcgucugua

SEQ ID NO: 244670 - RNA, 21 nt, Artificial Sequence
  Synthetic
gaaggggaaggggcgucugua

SEQ ID NO: 244671 - RNA, 22 nt, Artificial Sequence
  Synthetic
ggaaggggaaggggcgucugua

SEQ ID NO: 244672 - RNA, 23 nt, Artificial Sequence
  Synthetic
aggaaggggaaggggcgucugua

SEQ ID NO: 244673 - RNA, 24 nt, Artificial Sequence
  Synthetic
gaggaaggggaaggggcgucugua

SEQ ID NO: 244674 - RNA, 18 nt, Artificial Sequence
  Synthetic
auuuuuccuaauucugua

SEQ ID NO: 244675 - RNA, 19 nt, Artificial Sequence
  Synthetic
aauuuuuccuaauucugua

SEQ ID NO: 244676 - RNA, 20 nt, Artificial Sequence
  Synthetic
uaauuuuuccuaauucugua

SEQ ID NO: 244677 - RNA, 21 nt, Artificial Sequence
  Synthetic
guaauuuuuccuaauucugua

SEQ ID NO: 244678 - RNA, 22 nt, Artificial Sequence
  Synthetic
aguaauuuuuccuaauucugua

SEQ ID NO: 244679 - RNA, 23 nt, Artificial Sequence
  Synthetic
aaguaauuuuuccuaauucugua

SEQ ID NO: 244680 - RNA, 24 nt, Artificial Sequence
  Synthetic
aaaguaauuuuuccuaauucugua

SEQ ID NO: 244681 - RNA, 18 nt, Artificial Sequence
  Synthetic
uagcaaacuuauucugua

SEQ ID NO: 244682 - RNA, 19 nt, Artificial Sequence
  Synthetic
uuagcaaacuuauucugua

SEQ ID NO: 244683 - RNA, 20 nt, Artificial Sequence
  Synthetic
guuagcaaacuuauucugua

SEQ ID NO: 244684 - RNA, 21 nt, Artificial Sequence
  Synthetic
aguuagcaaacuuauucugua

SEQ ID NO: 244685 - RNA, 22 nt, Artificial Sequence
  Synthetic
aaguuagcaaacuuauucugua

SEQ ID NO: 244686 - RNA, 23 nt, Artificial Sequence
  Synthetic
gaaguuagcaaacuuauucugua

SEQ ID NO: 244687 - RNA, 24 nt, Artificial Sequence
  Synthetic
agaaguuagcaaacuuauucugua

SEQ ID NO: 244688 - RNA, 18 nt, Artificial Sequence
  Synthetic
ugcauuuuuucuucugua

SEQ ID NO: 244689 - RNA, 19 nt, Artificial Sequence
  Synthetic
cugcauuuuuucuucugua

SEQ ID NO: 244690 - RNA, 20 nt, Artificial Sequence
  Synthetic
ucugcauuuuuucuucugua

SEQ ID NO: 244691 - RNA, 21 nt, Artificial Sequence
  Synthetic
aucugcauuuuuucuucugua

SEQ ID NO: 244692 - RNA, 22 nt, Artificial Sequence
  Synthetic
aaucugcauuuuuucuucugua

SEQ ID NO: 244693 - RNA, 23 nt, Artificial Sequence
  Synthetic
aaaucugcauuuuuucuucugua

SEQ ID NO: 244694 - RNA, 24 nt, Artificial Sequence
  Synthetic
gaaaucugcauuuuuucuucugua

SEQ ID NO: 244695 - RNA, 18 nt, Artificial Sequence
  Synthetic
uggauauuuuuuucugua

SEQ ID NO: 244696 - RNA, 19 nt, Artificial Sequence
  Synthetic
auggauauuuuuuucugua

SEQ ID NO: 244697 - RNA, 20 nt, Artificial Sequence
  Synthetic
gauggauauuuuuuucugua

SEQ ID NO: 244698 - RNA, 21 nt, Artificial Sequence
  Synthetic
ggauggauauuuuuuucugua

SEQ ID NO: 244699 - RNA, 22 nt, Artificial Sequence
  Synthetic
aggauggauauuuuuuucugua

SEQ ID NO: 244700 - RNA, 23 nt, Artificial Sequence
  Synthetic
gaggauggauauuuuuuucugua

SEQ ID NO: 244701 - RNA, 24 nt, Artificial Sequence
  Synthetic
agaggauggauauuuuuuucugua

SEQ ID NO: 244702 - RNA, 18 nt, Artificial Sequence
  Synthetic
ugaucacuaaaaagugua

SEQ ID NO: 244703 - RNA, 19 nt, Artificial Sequence
  Synthetic
gugaucacuaaaaagugua

SEQ ID NO: 244704 - RNA, 20 nt, Artificial Sequence
  Synthetic
agugaucacuaaaaagugua

SEQ ID NO: 244705 - RNA, 21 nt, Artificial Sequence
  Synthetic
aagugaucacuaaaaagugua

SEQ ID NO: 244706 - RNA, 22 nt, Artificial Sequence
  Synthetic
aaagugaucacuaaaaagugua

SEQ ID NO: 244707 - RNA, 23 nt, Artificial Sequence
  Synthetic
gaaagugaucacuaaaaagugua

SEQ ID NO: 244708 - RNA, 24 nt, Artificial Sequence
  Synthetic
agaaagugaucacuaaaaagugua

SEQ ID NO: 244709 - RNA, 18 nt, Artificial Sequence
  Synthetic
aauaguggcaaaagugua

SEQ ID NO: 244710 - RNA, 19 nt, Artificial Sequence
  Synthetic
caauaguggcaaaagugua

SEQ ID NO: 244711 - RNA, 20 nt, Artificial Sequence
  Synthetic
ucaauaguggcaaaagugua

SEQ ID NO: 244712 - RNA, 21 nt, Artificial Sequence
  Synthetic
cucaauaguggcaaaagugua

SEQ ID NO: 244713 - RNA, 22 nt, Artificial Sequence
  Synthetic
gcucaauaguggcaaaagugua

SEQ ID NO: 244714 - RNA, 23 nt, Artificial Sequence
  Synthetic
ugcucaauaguggcaaaagugua

SEQ ID NO: 244715 - RNA, 24 nt, Artificial Sequence
  Synthetic
augcucaauaguggcaaaagugua

SEQ ID NO: 244716 - RNA, 18 nt, Artificial Sequence
  Synthetic
ucaaauacugcaagugua

SEQ ID NO: 244717 - RNA, 19 nt, Artificial Sequence
  Synthetic
aucaaauacugcaagugua

SEQ ID NO: 244718 - RNA, 20 nt, Artificial Sequence
  Synthetic
gaucaaauacugcaagugua

SEQ ID NO: 244719 - RNA, 21 nt, Artificial Sequence
  Synthetic
agaucaaauacugcaagugua

SEQ ID NO: 244720 - RNA, 22 nt, Artificial Sequence
  Synthetic
uagaucaaauacugcaagugua

SEQ ID NO: 244721 - RNA, 23 nt, Artificial Sequence
  Synthetic
guagaucaaauacugcaagugua

SEQ ID NO: 244722 - RNA, 24 nt, Artificial Sequence
  Synthetic
uguagaucaaauacugcaagugua

SEQ ID NO: 244723 - RNA, 18 nt, Artificial Sequence
  Synthetic
auuccugccaacagugua

SEQ ID NO: 244724 - RNA, 19 nt, Artificial Sequence
  Synthetic
cauuccugccaacagugua

SEQ ID NO: 244725 - RNA, 20 nt, Artificial Sequence
  Synthetic
acauuccugccaacagugua

SEQ ID NO: 244726 - RNA, 21 nt, Artificial Sequence
  Synthetic
uacauuccugccaacagugua

SEQ ID NO: 244727 - RNA, 22 nt, Artificial Sequence
  Synthetic
uuacauuccugccaacagugua

SEQ ID NO: 244728 - RNA, 23 nt, Artificial Sequence
  Synthetic
uuuacauuccugccaacagugua

SEQ ID NO: 244729 - RNA, 24 nt, Artificial Sequence
  Synthetic
auuuacauuccugccaacagugua

SEQ ID NO: 244730 - RNA, 18 nt, Artificial Sequence
  Synthetic
gggauggaauacagugua

SEQ ID NO: 244731 - RNA, 19 nt, Artificial Sequence
  Synthetic
agggauggaauacagugua

SEQ ID NO: 244732 - RNA, 20 nt, Artificial Sequence
  Synthetic
uagggauggaauacagugua

SEQ ID NO: 244733 - RNA, 21 nt, Artificial Sequence
  Synthetic
uuagggauggaauacagugua

SEQ ID NO: 244734 - RNA, 22 nt, Artificial Sequence
  Synthetic
cuuagggauggaauacagugua

SEQ ID NO: 244735 - RNA, 23 nt, Artificial Sequence
  Synthetic
ucuuagggauggaauacagugua

SEQ ID NO: 244736 - RNA, 24 nt, Artificial Sequence
  Synthetic
uucuuagggauggaauacagugua

SEQ ID NO: 244737 - RNA, 18 nt, Artificial Sequence
  Synthetic
gugugagaaugcagugua

SEQ ID NO: 244738 - RNA, 19 nt, Artificial Sequence
  Synthetic
agugugagaaugcagugua

SEQ ID NO: 244739 - RNA, 20 nt, Artificial Sequence
  Synthetic
uagugugagaaugcagugua

SEQ ID NO: 244740 - RNA, 21 nt, Artificial Sequence
  Synthetic
auagugugagaaugcagugua

SEQ ID NO: 244741 - RNA, 22 nt, Artificial Sequence
  Synthetic
uauagugugagaaugcagugua

SEQ ID NO: 244742 - RNA, 23 nt, Artificial Sequence
  Synthetic
uuauagugugagaaugcagugua

SEQ ID NO: 244743 - RNA, 24 nt, Artificial Sequence
  Synthetic
uuuauagugugagaaugcagugua

SEQ ID NO: 244744 - RNA, 18 nt, Artificial Sequence
  Synthetic
gggaagucuuggagugua

SEQ ID NO: 244745 - RNA, 19 nt, Artificial Sequence
  Synthetic
agggaagucuuggagugua

SEQ ID NO: 244746 - RNA, 20 nt, Artificial Sequence
  Synthetic
aagggaagucuuggagugua

SEQ ID NO: 244747 - RNA, 21 nt, Artificial Sequence
  Synthetic
aaagggaagucuuggagugua

SEQ ID NO: 244748 - RNA, 22 nt, Artificial Sequence
  Synthetic
gaaagggaagucuuggagugua

SEQ ID NO: 244749 - RNA, 23 nt, Artificial Sequence
  Synthetic
ugaaagggaagucuuggagugua

SEQ ID NO: 244750 - RNA, 24 nt, Artificial Sequence
  Synthetic
uugaaagggaagucuuggagugua

SEQ ID NO: 244751 - RNA, 18 nt, Artificial Sequence
  Synthetic
uguaauauggugagugua

SEQ ID NO: 244752 - RNA, 19 nt, Artificial Sequence
  Synthetic
uuguaauauggugagugua

SEQ ID NO: 244753 - RNA, 20 nt, Artificial Sequence
  Synthetic
guuguaauauggugagugua

SEQ ID NO: 244754 - RNA, 21 nt, Artificial Sequence
  Synthetic
gguuguaauauggugagugua

SEQ ID NO: 244755 - RNA, 22 nt, Artificial Sequence
  Synthetic
agguuguaauauggugagugua

SEQ ID NO: 244756 - RNA, 23 nt, Artificial Sequence
  Synthetic
aagguuguaauauggugagugua

SEQ ID NO: 244757 - RNA, 24 nt, Artificial Sequence
  Synthetic
caagguuguaauauggugagugua

SEQ ID NO: 244758 - RNA, 18 nt, Artificial Sequence
  Synthetic
ucagauagauugagugua

SEQ ID NO: 244759 - RNA, 19 nt, Artificial Sequence
  Synthetic
cucagauagauugagugua

SEQ ID NO: 244760 - RNA, 20 nt, Artificial Sequence
  Synthetic
ucucagauagauugagugua

SEQ ID NO: 244761 - RNA, 21 nt, Artificial Sequence
  Synthetic
uucucagauagauugagugua

SEQ ID NO: 244762 - RNA, 22 nt, Artificial Sequence
  Synthetic
cuucucagauagauugagugua

SEQ ID NO: 244763 - RNA, 23 nt, Artificial Sequence
  Synthetic
ucuucucagauagauugagugua

SEQ ID NO: 244764 - RNA, 24 nt, Artificial Sequence
  Synthetic
uucuucucagauagauugagugua

SEQ ID NO: 244765 - RNA, 18 nt, Artificial Sequence
  Synthetic
uaagagguacauagugua

SEQ ID NO: 244766 - RNA, 19 nt, Artificial Sequence
  Synthetic
cuaagagguacauagugua

SEQ ID NO: 244767 - RNA, 20 nt, Artificial Sequence
  Synthetic
ucuaagagguacauagugua

SEQ ID NO: 244768 - RNA, 21 nt, Artificial Sequence
  Synthetic
uucuaagagguacauagugua

SEQ ID NO: 244769 - RNA, 22 nt, Artificial Sequence
  Synthetic
auucuaagagguacauagugua

SEQ ID NO: 244770 - RNA, 23 nt, Artificial Sequence
  Synthetic
uauucuaagagguacauagugua

SEQ ID NO: 244771 - RNA, 24 nt, Artificial Sequence
  Synthetic
uuauucuaagagguacauagugua

SEQ ID NO: 244772 - RNA, 18 nt, Artificial Sequence
  Synthetic
uagcuuauuguuagugua

SEQ ID NO: 244773 - RNA, 19 nt, Artificial Sequence
  Synthetic
guagcuuauuguuagugua

SEQ ID NO: 244774 - RNA, 20 nt, Artificial Sequence
  Synthetic
gguagcuuauuguuagugua

SEQ ID NO: 244775 - RNA, 21 nt, Artificial Sequence
  Synthetic
ggguagcuuauuguuagugua

SEQ ID NO: 244776 - RNA, 22 nt, Artificial Sequence
  Synthetic
uggguagcuuauuguuagugua

SEQ ID NO: 244777 - RNA, 23 nt, Artificial Sequence
  Synthetic
uuggguagcuuauuguuagugua

SEQ ID NO: 244778 - RNA, 24 nt, Artificial Sequence
  Synthetic
auuggguagcuuauuguuagugua

SEQ ID NO: 244779 - RNA, 18 nt, Artificial Sequence
  Synthetic
auuuuuguauaaggugua

SEQ ID NO: 244780 - RNA, 19 nt, Artificial Sequence
  Synthetic
aauuuuuguauaaggugua

SEQ ID NO: 244781 - RNA, 20 nt, Artificial Sequence
  Synthetic
uaauuuuuguauaaggugua

SEQ ID NO: 244782 - RNA, 22 nt, Artificial Sequence
  Synthetic
auuaauuuuuguauaaggugua

SEQ ID NO: 244783 - RNA, 23 nt, Artificial Sequence
  Synthetic
aauuaauuuuuguauaaggugua

SEQ ID NO: 244784 - RNA, 24 nt, Artificial Sequence
  Synthetic
uaauuaauuuuuguauaaggugua

SEQ ID NO: 244785 - RNA, 19 nt, Artificial Sequence
  Synthetic
gauuuuuguauaaggugua

SEQ ID NO: 244786 - RNA, 20 nt, Artificial Sequence
  Synthetic
ugauuuuuguauaaggugua

SEQ ID NO: 244787 - RNA, 18 nt, Artificial Sequence
  Synthetic
aggauugggcagggugua

SEQ ID NO: 244788 - RNA, 19 nt, Artificial Sequence
  Synthetic
caggauugggcagggugua

SEQ ID NO: 244789 - RNA, 20 nt, Artificial Sequence
  Synthetic
ucaggauugggcagggugua

SEQ ID NO: 244790 - RNA, 21 nt, Artificial Sequence
  Synthetic
cucaggauugggcagggugua

SEQ ID NO: 244791 - RNA, 22 nt, Artificial Sequence
  Synthetic
acucaggauugggcagggugua

SEQ ID NO: 244792 - RNA, 23 nt, Artificial Sequence
  Synthetic
uacucaggauugggcagggugua

SEQ ID NO: 244793 - RNA, 24 nt, Artificial Sequence
  Synthetic
auacucaggauugggcagggugua

SEQ ID NO: 244794 - RNA, 18 nt, Artificial Sequence
  Synthetic
auuuuuguauauggugua

SEQ ID NO: 244795 - RNA, 19 nt, Artificial Sequence
  Synthetic
aauuuuuguauauggugua

SEQ ID NO: 244796 - RNA, 20 nt, Artificial Sequence
  Synthetic
uaauuuuuguauauggugua

SEQ ID NO: 244797 - RNA, 21 nt, Artificial Sequence
  Synthetic
uuaauuuuuguauauggugua

SEQ ID NO: 244798 - RNA, 22 nt, Artificial Sequence
  Synthetic
guuaauuuuuguauauggugua

SEQ ID NO: 244799 - RNA, 23 nt, Artificial Sequence
  Synthetic
aguuaauuuuuguauauggugua

SEQ ID NO: 244800 - RNA, 24 nt, Artificial Sequence
  Synthetic
gaguuaauuuuuguauauggugua

SEQ ID NO: 244801 - RNA, 18 nt, Artificial Sequence
  Synthetic
uugucuauucuuggugua

SEQ ID NO: 244802 - RNA, 19 nt, Artificial Sequence
  Synthetic
uuugucuauucuuggugua

SEQ ID NO: 244803 - RNA, 20 nt, Artificial Sequence
  Synthetic
guuugucuauucuuggugua

SEQ ID NO: 244804 - RNA, 21 nt, Artificial Sequence
  Synthetic
uguuugucuauucuuggugua

SEQ ID NO: 244805 - RNA, 22 nt, Artificial Sequence
  Synthetic
cuguuugucuauucuuggugua

SEQ ID NO: 244806 - RNA, 23 nt, Artificial Sequence
  Synthetic
ucuguuugucuauucuuggugua

SEQ ID NO: 244807 - RNA, 24 nt, Artificial Sequence
  Synthetic
cucuguuugucuauucuuggugua

SEQ ID NO: 244808 - RNA, 18 nt, Artificial Sequence
  Synthetic
cuuuauccuacaugugua

SEQ ID NO: 244809 - RNA, 19 nt, Artificial Sequence
  Synthetic
ccuuuauccuacaugugua

SEQ ID NO: 244810 - RNA, 20 nt, Artificial Sequence
  Synthetic
uccuuuauccuacaugugua

SEQ ID NO: 244811 - RNA, 21 nt, Artificial Sequence
  Synthetic
guccuuuauccuacaugugua

SEQ ID NO: 244812 - RNA, 22 nt, Artificial Sequence
  Synthetic
uguccuuuauccuacaugugua

SEQ ID NO: 244813 - RNA, 23 nt, Artificial Sequence
  Synthetic
auguccuuuauccuacaugugua

SEQ ID NO: 244814 - RNA, 24 nt, Artificial Sequence
  Synthetic
cauguccuuuauccuacaugugua

SEQ ID NO: 244815 - RNA, 18 nt, Artificial Sequence
  Synthetic
acagucaugcuaugugua

SEQ ID NO: 244816 - RNA, 19 nt, Artificial Sequence
  Synthetic
uacagucaugcuaugugua

SEQ ID NO: 244817 - RNA, 20 nt, Artificial Sequence
  Synthetic
auacagucaugcuaugugua

SEQ ID NO: 244818 - RNA, 21 nt, Artificial Sequence
  Synthetic
aauacagucaugcuaugugua

SEQ ID NO: 244819 - RNA, 22 nt, Artificial Sequence
  Synthetic
aaauacagucaugcuaugugua

SEQ ID NO: 244820 - RNA, 23 nt, Artificial Sequence
  Synthetic
aaaauacagucaugcuaugugua

SEQ ID NO: 244821 - RNA, 24 nt, Artificial Sequence
  Synthetic
aaaaauacagucaugcuaugugua

SEQ ID NO: 244822 - RNA, 18 nt, Artificial Sequence
  Synthetic
aaugcaguagacugugua

SEQ ID NO: 244823 - RNA, 19 nt, Artificial Sequence
  Synthetic
aaaugcaguagacugugua

SEQ ID NO: 244824 - RNA, 20 nt, Artificial Sequence
  Synthetic
caaaugcaguagacugugua

SEQ ID NO: 244825 - RNA, 21 nt, Artificial Sequence
  Synthetic
acaaaugcaguagacugugua

SEQ ID NO: 244826 - RNA, 22 nt, Artificial Sequence
  Synthetic
uacaaaugcaguagacugugua

SEQ ID NO: 244827 - RNA, 23 nt, Artificial Sequence
  Synthetic
auacaaaugcaguagacugugua

SEQ ID NO: 244828 - RNA, 24 nt, Artificial Sequence
  Synthetic
cauacaaaugcaguagacugugua

SEQ ID NO: 244829 - RNA, 18 nt, Artificial Sequence
  Synthetic
uuugacugauccugugua

SEQ ID NO: 244830 - RNA, 19 nt, Artificial Sequence
  Synthetic
guuugacugauccugugua

SEQ ID NO: 244831 - RNA, 20 nt, Artificial Sequence
  Synthetic
uguuugacugauccugugua

SEQ ID NO: 244832 - RNA, 21 nt, Artificial Sequence
  Synthetic
guguuugacugauccugugua

SEQ ID NO: 244833 - RNA, 22 nt, Artificial Sequence
  Synthetic
aguguuugacugauccugugua

SEQ ID NO: 244834 - RNA, 23 nt, Artificial Sequence
  Synthetic
caguguuugacugauccugugua

SEQ ID NO: 244835 - RNA, 24 nt, Artificial Sequence
  Synthetic
gcaguguuugacugauccugugua

SEQ ID NO: 244836 - RNA, 18 nt, Artificial Sequence
  Synthetic
aaugcagcuagcugugua

SEQ ID NO: 244837 - RNA, 19 nt, Artificial Sequence
  Synthetic
aaaugcagcuagcugugua

SEQ ID NO: 244838 - RNA, 20 nt, Artificial Sequence
  Synthetic
gaaaugcagcuagcugugua

SEQ ID NO: 244839 - RNA, 21 nt, Artificial Sequence
  Synthetic
ugaaaugcagcuagcugugua

SEQ ID NO: 244840 - RNA, 22 nt, Artificial Sequence
  Synthetic
augaaaugcagcuagcugugua

SEQ ID NO: 244841 - RNA, 23 nt, Artificial Sequence
  Synthetic
gaugaaaugcagcuagcugugua

SEQ ID NO: 244842 - RNA, 24 nt, Artificial Sequence
  Synthetic
ugaugaaaugcagcuagcugugua

SEQ ID NO: 244843 - RNA, 18 nt, Artificial Sequence
  Synthetic
gaaauguuacgcugugua

SEQ ID NO: 244844 - RNA, 19 nt, Artificial Sequence
  Synthetic
ugaaauguuacgcugugua

SEQ ID NO: 244845 - RNA, 20 nt, Artificial Sequence
  Synthetic
uugaaauguuacgcugugua

SEQ ID NO: 244846 - RNA, 21 nt, Artificial Sequence
  Synthetic
auugaaauguuacgcugugua

SEQ ID NO: 244847 - RNA, 22 nt, Artificial Sequence
  Synthetic
uauugaaauguuacgcugugua

SEQ ID NO: 244848 - RNA, 23 nt, Artificial Sequence
  Synthetic
uuauugaaauguuacgcugugua

SEQ ID NO: 244849 - RNA, 24 nt, Artificial Sequence
  Synthetic
auuauugaaauguuacgcugugua

SEQ ID NO: 244850 - RNA, 18 nt, Artificial Sequence
  Synthetic
gguuaaccuugcugugua

SEQ ID NO: 244851 - RNA, 19 nt, Artificial Sequence
  Synthetic
ggguuaaccuugcugugua

SEQ ID NO: 244852 - RNA, 20 nt, Artificial Sequence
  Synthetic
aggguuaaccuugcugugua

SEQ ID NO: 244853 - RNA, 21 nt, Artificial Sequence
  Synthetic
aaggguuaaccuugcugugua

SEQ ID NO: 244854 - RNA, 22 nt, Artificial Sequence
  Synthetic
uaaggguuaaccuugcugugua

SEQ ID NO: 244855 - RNA, 23 nt, Artificial Sequence
  Synthetic
guaaggguuaaccuugcugugua

SEQ ID NO: 244856 - RNA, 24 nt, Artificial Sequence
  Synthetic
aguaaggguuaaccuugcugugua

SEQ ID NO: 244857 - RNA, 18 nt, Artificial Sequence
  Synthetic
agccauggagucugugua

SEQ ID NO: 244858 - RNA, 19 nt, Artificial Sequence
  Synthetic
cagccauggagucugugua

SEQ ID NO: 244859 - RNA, 20 nt, Artificial Sequence
  Synthetic
ucagccauggagucugugua

SEQ ID NO: 244860 - RNA, 21 nt, Artificial Sequence
  Synthetic
gucagccauggagucugugua

SEQ ID NO: 244861 - RNA, 22 nt, Artificial Sequence
  Synthetic
agucagccauggagucugugua

SEQ ID NO: 244862 - RNA, 23 nt, Artificial Sequence
  Synthetic
gagucagccauggagucugugua

SEQ ID NO: 244863 - RNA, 24 nt, Artificial Sequence
  Synthetic
ggagucagccauggagucugugua

SEQ ID NO: 244864 - RNA, 18 nt, Artificial Sequence
  Synthetic
gccuauuuggucugugua

SEQ ID NO: 244865 - RNA, 19 nt, Artificial Sequence
  Synthetic
agccuauuuggucugugua

SEQ ID NO: 244866 - RNA, 20 nt, Artificial Sequence
  Synthetic
gagccuauuuggucugugua

SEQ ID NO: 244867 - RNA, 21 nt, Artificial Sequence
  Synthetic
agagccuauuuggucugugua

SEQ ID NO: 244868 - RNA, 22 nt, Artificial Sequence
  Synthetic
cagagccuauuuggucugugua

SEQ ID NO: 244869 - RNA, 23 nt, Artificial Sequence
  Synthetic
ccagagccuauuuggucugugua

SEQ ID NO: 244870 - RNA, 24 nt, Artificial Sequence
  Synthetic
gccagagccuauuuggucugugua

SEQ ID NO: 244871 - RNA, 18 nt, Artificial Sequence
  Synthetic
cuucaccucuucugugua

SEQ ID NO: 244872 - RNA, 19 nt, Artificial Sequence
  Synthetic
ccuucaccucuucugugua

SEQ ID NO: 244873 - RNA, 20 nt, Artificial Sequence
  Synthetic
uccuucaccucuucugugua

SEQ ID NO: 244874 - RNA, 21 nt, Artificial Sequence
  Synthetic
uuccuucaccucuucugugua

SEQ ID NO: 244875 - RNA, 22 nt, Artificial Sequence
  Synthetic
cuuccuucaccucuucugugua

SEQ ID NO: 244876 - RNA, 23 nt, Artificial Sequence
  Synthetic
gcuuccuucaccucuucugugua

SEQ ID NO: 244877 - RNA, 24 nt, Artificial Sequence
  Synthetic
agcuuccuucaccucuucugugua

SEQ ID NO: 244878 - RNA, 18 nt, Artificial Sequence
  Synthetic
gaaaaaaauaugugugua

SEQ ID NO: 244879 - RNA, 19 nt, Artificial Sequence
  Synthetic
agaaaaaaauaugugugua

SEQ ID NO: 244880 - RNA, 20 nt, Artificial Sequence
  Synthetic
aagaaaaaaauaugugugua

SEQ ID NO: 244881 - RNA, 21 nt, Artificial Sequence
  Synthetic
aaagaaaaaaauaugugugua

SEQ ID NO: 244882 - RNA, 22 nt, Artificial Sequence
  Synthetic
gaaagaaaaaaauaugugugua

SEQ ID NO: 244883 - RNA, 23 nt, Artificial Sequence
  Synthetic
agaaagaaaaaaauaugugugua

SEQ ID NO: 244884 - RNA, 24 nt, Artificial Sequence
  Synthetic
aagaaagaaaaaaauaugugugua

SEQ ID NO: 244885 - RNA, 18 nt, Artificial Sequence
  Synthetic
cgggguaggcugugugua

SEQ ID NO: 244886 - RNA, 19 nt, Artificial Sequence
  Synthetic
gcgggguaggcugugugua

SEQ ID NO: 244887 - RNA, 20 nt, Artificial Sequence
  Synthetic
agcgggguaggcugugugua

SEQ ID NO: 244888 - RNA, 21 nt, Artificial Sequence
  Synthetic
uagcgggguaggcugugugua

SEQ ID NO: 244889 - RNA, 22 nt, Artificial Sequence
  Synthetic
auagcgggguaggcugugugua

SEQ ID NO: 244890 - RNA, 23 nt, Artificial Sequence
  Synthetic
gauagcgggguaggcugugugua

SEQ ID NO: 244891 - RNA, 24 nt, Artificial Sequence
  Synthetic
ugauagcgggguaggcugugugua

SEQ ID NO: 244892 - RNA, 18 nt, Artificial Sequence
  Synthetic
caaacacucuguugugua

SEQ ID NO: 244893 - RNA, 19 nt, Artificial Sequence
  Synthetic
ucaaacacucuguugugua

SEQ ID NO: 244894 - RNA, 20 nt, Artificial Sequence
  Synthetic
uucaaacacucuguugugua

SEQ ID NO: 244895 - RNA, 21 nt, Artificial Sequence
  Synthetic
uuucaaacacucuguugugua

SEQ ID NO: 244896 - RNA, 22 nt, Artificial Sequence
  Synthetic
auuucaaacacucuguugugua

SEQ ID NO: 244897 - RNA, 23 nt, Artificial Sequence
  Synthetic
uauuucaaacacucuguugugua

SEQ ID NO: 244898 - RNA, 24 nt, Artificial Sequence
  Synthetic
auauuucaaacacucuguugugua

SEQ ID NO: 244899 - RNA, 18 nt, Artificial Sequence
  Synthetic
uucccauaacuuugugua

SEQ ID NO: 244900 - RNA, 19 nt, Artificial Sequence
  Synthetic
uuucccauaacuuugugua

SEQ ID NO: 244901 - RNA, 20 nt, Artificial Sequence
  Synthetic
uuuucccauaacuuugugua

SEQ ID NO: 244902 - RNA, 21 nt, Artificial Sequence
  Synthetic
cuuuucccauaacuuugugua

SEQ ID NO: 244903 - RNA, 22 nt, Artificial Sequence
  Synthetic
gcuuuucccauaacuuugugua

SEQ ID NO: 244904 - RNA, 23 nt, Artificial Sequence
  Synthetic
agcuuuucccauaacuuugugua

SEQ ID NO: 244905 - RNA, 24 nt, Artificial Sequence
  Synthetic
uagcuuuucccauaacuuugugua

SEQ ID NO: 244906 - RNA, 18 nt, Artificial Sequence
  Synthetic
uauuaucuguuuugugua

SEQ ID NO: 244907 - RNA, 19 nt, Artificial Sequence
  Synthetic
cuauuaucuguuuugugua

SEQ ID NO: 244908 - RNA, 20 nt, Artificial Sequence
  Synthetic
ucuauuaucuguuuugugua

SEQ ID NO: 244909 - RNA, 21 nt, Artificial Sequence
  Synthetic
uucuauuaucuguuuugugua

SEQ ID NO: 244910 - RNA, 22 nt, Artificial Sequence
  Synthetic
uuucuauuaucuguuuugugua

SEQ ID NO: 244911 - RNA, 23 nt, Artificial Sequence
  Synthetic
auuucuauuaucuguuuugugua

SEQ ID NO: 244912 - RNA, 24 nt, Artificial Sequence
  Synthetic
uauuucuauuaucuguuuugugua

SEQ ID NO: 244913 - RNA, 18 nt, Artificial Sequence
  Synthetic
uuccuguuguuuugugua

SEQ ID NO: 244914 - RNA, 19 nt, Artificial Sequence
  Synthetic
guuccuguuguuuugugua

SEQ ID NO: 244915 - RNA, 20 nt, Artificial Sequence
  Synthetic
uguuccuguuguuuugugua

SEQ ID NO: 244916 - RNA, 21 nt, Artificial Sequence
  Synthetic
guguuccuguuguuuugugua

SEQ ID NO: 244917 - RNA, 22 nt, Artificial Sequence
  Synthetic
uguguuccuguuguuuugugua

SEQ ID NO: 244918 - RNA, 23 nt, Artificial Sequence
  Synthetic
guguguuccuguuguuuugugua

SEQ ID NO: 244919 - RNA, 24 nt, Artificial Sequence
  Synthetic
uguguguuccuguuguuuugugua

SEQ ID NO: 244920 - RNA, 18 nt, Artificial Sequence
  Synthetic
aggguauauuuuugugua

SEQ ID NO: 244921 - RNA, 19 nt, Artificial Sequence
  Synthetic
gaggguauauuuuugugua

SEQ ID NO: 244922 - RNA, 20 nt, Artificial Sequence
  Synthetic
ggaggguauauuuuugugua

SEQ ID NO: 244923 - RNA, 21 nt, Artificial Sequence
  Synthetic
gggaggguauauuuuugugua

SEQ ID NO: 244924 - RNA, 22 nt, Artificial Sequence
  Synthetic
ggggaggguauauuuuugugua

SEQ ID NO: 244925 - RNA, 23 nt, Artificial Sequence
  Synthetic
gggggaggguauauuuuugugua

SEQ ID NO: 244926 - RNA, 24 nt, Artificial Sequence
  Synthetic
agggggaggguauauuuuugugua

SEQ ID NO: 244927 - RNA, 18 nt, Artificial Sequence
  Synthetic
cacaaagcaaaaauugua

SEQ ID NO: 244928 - RNA, 19 nt, Artificial Sequence
  Synthetic
gcacaaagcaaaaauugua

SEQ ID NO: 244929 - RNA, 20 nt, Artificial Sequence
  Synthetic
agcacaaagcaaaaauugua

SEQ ID NO: 244930 - RNA, 21 nt, Artificial Sequence
  Synthetic
cagcacaaagcaaaaauugua

SEQ ID NO: 244931 - RNA, 22 nt, Artificial Sequence
  Synthetic
acagcacaaagcaaaaauugua

SEQ ID NO: 244932 - RNA, 23 nt, Artificial Sequence
  Synthetic
aacagcacaaagcaaaaauugua

SEQ ID NO: 244933 - RNA, 24 nt, Artificial Sequence
  Synthetic
caacagcacaaagcaaaaauugua

SEQ ID NO: 244934 - RNA, 18 nt, Artificial Sequence
  Synthetic
gaagccuaagaaauugua

SEQ ID NO: 244935 - RNA, 19 nt, Artificial Sequence
  Synthetic
ugaagccuaagaaauugua

SEQ ID NO: 244936 - RNA, 20 nt, Artificial Sequence
  Synthetic
augaagccuaagaaauugua

SEQ ID NO: 244937 - RNA, 21 nt, Artificial Sequence
  Synthetic
aaugaagccuaagaaauugua

SEQ ID NO: 244938 - RNA, 22 nt, Artificial Sequence
  Synthetic
aaaugaagccuaagaaauugua

SEQ ID NO: 244939 - RNA, 23 nt, Artificial Sequence
  Synthetic
aaaaugaagccuaagaaauugua

SEQ ID NO: 244940 - RNA, 24 nt, Artificial Sequence
  Synthetic
caaaaugaagccuaagaaauugua

SEQ ID NO: 244941 - RNA, 18 nt, Artificial Sequence
  Synthetic
ucuggagaugcaauugua

SEQ ID NO: 244942 - RNA, 19 nt, Artificial Sequence
  Synthetic
aucuggagaugcaauugua

SEQ ID NO: 244943 - RNA, 20 nt, Artificial Sequence
  Synthetic
gaucuggagaugcaauugua

SEQ ID NO: 244944 - RNA, 21 nt, Artificial Sequence
  Synthetic
agaucuggagaugcaauugua

SEQ ID NO: 244945 - RNA, 22 nt, Artificial Sequence
  Synthetic
gagaucuggagaugcaauugua

SEQ ID NO: 244946 - RNA, 23 nt, Artificial Sequence
  Synthetic
ggagaucuggagaugcaauugua

SEQ ID NO: 244947 - RNA, 24 nt, Artificial Sequence
  Synthetic
aggagaucuggagaugcaauugua

SEQ ID NO: 244948 - RNA, 18 nt, Artificial Sequence
  Synthetic
auuugcucuauaauugua

SEQ ID NO: 244949 - RNA, 19 nt, Artificial Sequence
  Synthetic
aauuugcucuauaauugua

SEQ ID NO: 244950 - RNA, 20 nt, Artificial Sequence
  Synthetic
aaauuugcucuauaauugua

SEQ ID NO: 244951 - RNA, 21 nt, Artificial Sequence
  Synthetic
gaaauuugcucuauaauugua

SEQ ID NO: 244952 - RNA, 22 nt, Artificial Sequence
  Synthetic
ugaaauuugcucuauaauugua

SEQ ID NO: 244953 - RNA, 23 nt, Artificial Sequence
  Synthetic
cugaaauuugcucuauaauugua

SEQ ID NO: 244954 - RNA, 24 nt, Artificial Sequence
  Synthetic
gcugaaauuugcucuauaauugua

SEQ ID NO: 244955 - RNA, 18 nt, Artificial Sequence
  Synthetic
uacagcagaguaauugua

SEQ ID NO: 244956 - RNA, 19 nt, Artificial Sequence
  Synthetic
cuacagcagaguaauugua

SEQ ID NO: 244957 - RNA, 20 nt, Artificial Sequence
  Synthetic
ccuacagcagaguaauugua

SEQ ID NO: 244958 - RNA, 21 nt, Artificial Sequence
  Synthetic
uccuacagcagaguaauugua

SEQ ID NO: 244959 - RNA, 22 nt, Artificial Sequence
  Synthetic
guccuacagcagaguaauugua

SEQ ID NO: 244960 - RNA, 23 nt, Artificial Sequence
  Synthetic
uguccuacagcagaguaauugua

SEQ ID NO: 244961 - RNA, 24 nt, Artificial Sequence
  Synthetic
uuguccuacagcagaguaauugua

SEQ ID NO: 244962 - RNA, 18 nt, Artificial Sequence
  Synthetic
ugcccauagguaauugua

SEQ ID NO: 244963 - RNA, 19 nt, Artificial Sequence
  Synthetic
uugcccauagguaauugua

SEQ ID NO: 244964 - RNA, 20 nt, Artificial Sequence
  Synthetic
guugcccauagguaauugua

SEQ ID NO: 244965 - RNA, 21 nt, Artificial Sequence
  Synthetic
uguugcccauagguaauugua

SEQ ID NO: 244966 - RNA, 22 nt, Artificial Sequence
  Synthetic
cuguugcccauagguaauugua

SEQ ID NO: 244967 - RNA, 23 nt, Artificial Sequence
  Synthetic
acuguugcccauagguaauugua

SEQ ID NO: 244968 - RNA, 24 nt, Artificial Sequence
  Synthetic
aacuguugcccauagguaauugua

SEQ ID NO: 244969 - RNA, 18 nt, Artificial Sequence
  Synthetic
auuauaccugacauugua

SEQ ID NO: 244970 - RNA, 19 nt, Artificial Sequence
  Synthetic
aauuauaccugacauugua

SEQ ID NO: 244971 - RNA, 20 nt, Artificial Sequence
  Synthetic
aaauuauaccugacauugua

SEQ ID NO: 244972 - RNA, 21 nt, Artificial Sequence
  Synthetic
aaaauuauaccugacauugua

SEQ ID NO: 244973 - RNA, 22 nt, Artificial Sequence
  Synthetic
uaaaauuauaccugacauugua

SEQ ID NO: 244974 - RNA, 23 nt, Artificial Sequence
  Synthetic
uuaaaauuauaccugacauugua

SEQ ID NO: 244975 - RNA, 24 nt, Artificial Sequence
  Synthetic
cuuaaaauuauaccugacauugua

SEQ ID NO: 244976 - RNA, 18 nt, Artificial Sequence
  Synthetic
agcacugucuacauugua

SEQ ID NO: 244977 - RNA, 19 nt, Artificial Sequence
  Synthetic
uagcacugucuacauugua

SEQ ID NO: 244978 - RNA, 20 nt, Artificial Sequence
  Synthetic
auagcacugucuacauugua

SEQ ID NO: 244979 - RNA, 21 nt, Artificial Sequence
  Synthetic
uauagcacugucuacauugua

SEQ ID NO: 244980 - RNA, 22 nt, Artificial Sequence
  Synthetic
cuauagcacugucuacauugua

SEQ ID NO: 244981 - RNA, 23 nt, Artificial Sequence
  Synthetic
ucuauagcacugucuacauugua

SEQ ID NO: 244982 - RNA, 24 nt, Artificial Sequence
  Synthetic
gucuauagcacugucuacauugua

SEQ ID NO: 244983 - RNA, 18 nt, Artificial Sequence
  Synthetic
gccuuuggggccauugua

SEQ ID NO: 244984 - RNA, 19 nt, Artificial Sequence
  Synthetic
ggccuuuggggccauugua

SEQ ID NO: 244985 - RNA, 20 nt, Artificial Sequence
  Synthetic
gggccuuuggggccauugua

SEQ ID NO: 244986 - RNA, 21 nt, Artificial Sequence
  Synthetic
agggccuuuggggccauugua

SEQ ID NO: 244987 - RNA, 22 nt, Artificial Sequence
  Synthetic
gagggccuuuggggccauugua

SEQ ID NO: 244988 - RNA, 23 nt, Artificial Sequence
  Synthetic
ggagggccuuuggggccauugua

SEQ ID NO: 244989 - RNA, 24 nt, Artificial Sequence
  Synthetic
uggagggccuuuggggccauugua

SEQ ID NO: 244990 - RNA, 18 nt, Artificial Sequence
  Synthetic
agccacugaagcauugua

SEQ ID NO: 244991 - RNA, 19 nt, Artificial Sequence
  Synthetic
aagccacugaagcauugua

SEQ ID NO: 244992 - RNA, 20 nt, Artificial Sequence
  Synthetic
aaagccacugaagcauugua

SEQ ID NO: 244993 - RNA, 21 nt, Artificial Sequence
  Synthetic
gaaagccacugaagcauugua

SEQ ID NO: 244994 - RNA, 22 nt, Artificial Sequence
  Synthetic
ugaaagccacugaagcauugua

SEQ ID NO: 244995 - RNA, 23 nt, Artificial Sequence
  Synthetic
uugaaagccacugaagcauugua

SEQ ID NO: 244996 - RNA, 24 nt, Artificial Sequence
  Synthetic
auugaaagccacugaagcauugua

SEQ ID NO: 244997 - RNA, 18 nt, Artificial Sequence
  Synthetic
aaacucgcuagcauugua

SEQ ID NO: 244998 - RNA, 19 nt, Artificial Sequence
  Synthetic
caaacucgcuagcauugua

SEQ ID NO: 244999 - RNA, 20 nt, Artificial Sequence
  Synthetic
ccaaacucgcuagcauugua

SEQ ID NO: 245000 - RNA, 21 nt, Artificial Sequence
  Synthetic
cccaaacucgcuagcauugua

SEQ ID NO: 245001 - RNA, 22 nt, Artificial Sequence
  Synthetic
ccccaaacucgcuagcauugua

SEQ ID NO: 245002 - RNA, 23 nt, Artificial Sequence
  Synthetic
gccccaaacucgcuagcauugua

SEQ ID NO: 245003 - RNA, 24 nt, Artificial Sequence
  Synthetic
ugccccaaacucgcuagcauugua

SEQ ID NO: 245004 - RNA, 18 nt, Artificial Sequence
  Synthetic
guuuaaaauggcauugua

SEQ ID NO: 245005 - RNA, 19 nt, Artificial Sequence
  Synthetic
uguuuaaaauggcauugua

SEQ ID NO: 245006 - RNA, 20 nt, Artificial Sequence
  Synthetic
guguuuaaaauggcauugua

SEQ ID NO: 245007 - RNA, 21 nt, Artificial Sequence
  Synthetic
gguguuuaaaauggcauugua

SEQ ID NO: 245008 - RNA, 22 nt, Artificial Sequence
  Synthetic
agguguuuaaaauggcauugua

SEQ ID NO: 245009 - RNA, 23 nt, Artificial Sequence
  Synthetic
aagguguuuaaaauggcauugua

SEQ ID NO: 245010 - RNA, 24 nt, Artificial Sequence
  Synthetic
aaagguguuuaaaauggcauugua

SEQ ID NO: 245011 - RNA, 18 nt, Artificial Sequence
  Synthetic
cauguauuuggcauugua

SEQ ID NO: 245012 - RNA, 19 nt, Artificial Sequence
  Synthetic
ucauguauuuggcauugua

SEQ ID NO: 245013 - RNA, 20 nt, Artificial Sequence
  Synthetic
aucauguauuuggcauugua

SEQ ID NO: 245014 - RNA, 21 nt, Artificial Sequence
  Synthetic
gaucauguauuuggcauugua

SEQ ID NO: 245015 - RNA, 22 nt, Artificial Sequence
  Synthetic
cgaucauguauuuggcauugua

SEQ ID NO: 245016 - RNA, 23 nt, Artificial Sequence
  Synthetic
acgaucauguauuuggcauugua

SEQ ID NO: 245017 - RNA, 24 nt, Artificial Sequence
  Synthetic
cacgaucauguauuuggcauugua

SEQ ID NO: 245018 - RNA, 18 nt, Artificial Sequence
  Synthetic
cuuaagacucucauugua

SEQ ID NO: 245019 - RNA, 19 nt, Artificial Sequence
  Synthetic
acuuaagacucucauugua

SEQ ID NO: 245020 - RNA, 20 nt, Artificial Sequence
  Synthetic
uacuuaagacucucauugua

SEQ ID NO: 245021 - RNA, 21 nt, Artificial Sequence
  Synthetic
uuacuuaagacucucauugua

SEQ ID NO: 245022 - RNA, 22 nt, Artificial Sequence
  Synthetic
auuacuuaagacucucauugua

SEQ ID NO: 245023 - RNA, 23 nt, Artificial Sequence
  Synthetic
gauuacuuaagacucucauugua

SEQ ID NO: 245024 - RNA, 24 nt, Artificial Sequence
  Synthetic
ugauuacuuaagacucucauugua

SEQ ID NO: 245025 - RNA, 18 nt, Artificial Sequence
  Synthetic
aaucgcagccagauugua

SEQ ID NO: 245026 - RNA, 19 nt, Artificial Sequence
  Synthetic
gaaucgcagccagauugua

SEQ ID NO: 245027 - RNA, 20 nt, Artificial Sequence
  Synthetic
agaaucgcagccagauugua

SEQ ID NO: 245028 - RNA, 21 nt, Artificial Sequence
  Synthetic
gagaaucgcagccagauugua

SEQ ID NO: 245029 - RNA, 22 nt, Artificial Sequence
  Synthetic
ggagaaucgcagccagauugua

SEQ ID NO: 245030 - RNA, 23 nt, Artificial Sequence
  Synthetic
uggagaaucgcagccagauugua

SEQ ID NO: 245031 - RNA, 24 nt, Artificial Sequence
  Synthetic
uuggagaaucgcagccagauugua

SEQ ID NO: 245032 - RNA, 18 nt, Artificial Sequence
  Synthetic
ugaaagaaguagauugua

SEQ ID NO: 245033 - RNA, 19 nt, Artificial Sequence
  Synthetic
gugaaagaaguagauugua

SEQ ID NO: 245034 - RNA, 20 nt, Artificial Sequence
  Synthetic
ugugaaagaaguagauugua

SEQ ID NO: 245035 - RNA, 21 nt, Artificial Sequence
  Synthetic
augugaaagaaguagauugua

SEQ ID NO: 245036 - RNA, 22 nt, Artificial Sequence
  Synthetic
aaugugaaagaaguagauugua

SEQ ID NO: 245037 - RNA, 23 nt, Artificial Sequence
  Synthetic
aaaugugaaagaaguagauugua

SEQ ID NO: 245038 - RNA, 24 nt, Artificial Sequence
  Synthetic
uaaaugugaaagaaguagauugua

SEQ ID NO: 245039 - RNA, 18 nt, Artificial Sequence
  Synthetic
uggacaaggacgauugua

SEQ ID NO: 245040 - RNA, 19 nt, Artificial Sequence
  Synthetic
uuggacaaggacgauugua

SEQ ID NO: 245041 - RNA, 20 nt, Artificial Sequence
  Synthetic
cuuggacaaggacgauugua

SEQ ID NO: 245042 - RNA, 21 nt, Artificial Sequence
  Synthetic
gcuuggacaaggacgauugua

SEQ ID NO: 245043 - RNA, 22 nt, Artificial Sequence
  Synthetic
ggcuuggacaaggacgauugua

SEQ ID NO: 245044 - RNA, 23 nt, Artificial Sequence
  Synthetic
uggcuuggacaaggacgauugua

SEQ ID NO: 245045 - RNA, 24 nt, Artificial Sequence
  Synthetic
guggcuuggacaaggacgauugua

SEQ ID NO: 245046 - RNA, 18 nt, Artificial Sequence
  Synthetic
aaaaacgcacugauugua

SEQ ID NO: 245047 - RNA, 19 nt, Artificial Sequence
  Synthetic
gaaaaacgcacugauugua

SEQ ID NO: 245048 - RNA, 20 nt, Artificial Sequence
  Synthetic
agaaaaacgcacugauugua

SEQ ID NO: 245049 - RNA, 21 nt, Artificial Sequence
  Synthetic
cagaaaaacgcacugauugua

SEQ ID NO: 245050 - RNA, 22 nt, Artificial Sequence
  Synthetic
acagaaaaacgcacugauugua

SEQ ID NO: 245051 - RNA, 23 nt, Artificial Sequence
  Synthetic
uacagaaaaacgcacugauugua

SEQ ID NO: 245052 - RNA, 24 nt, Artificial Sequence
  Synthetic
uuacagaaaaacgcacugauugua

SEQ ID NO: 245053 - RNA, 18 nt, Artificial Sequence
  Synthetic
acugcaagcaauauugua

SEQ ID NO: 245054 - RNA, 19 nt, Artificial Sequence
  Synthetic
uacugcaagcaauauugua

SEQ ID NO: 245055 - RNA, 20 nt, Artificial Sequence
  Synthetic
guacugcaagcaauauugua

SEQ ID NO: 245056 - RNA, 21 nt, Artificial Sequence
  Synthetic
uguacugcaagcaauauugua

SEQ ID NO: 245057 - RNA, 22 nt, Artificial Sequence
  Synthetic
uuguacugcaagcaauauugua

SEQ ID NO: 245058 - RNA, 23 nt, Artificial Sequence
  Synthetic
uuuguacugcaagcaauauugua

SEQ ID NO: 245059 - RNA, 24 nt, Artificial Sequence
  Synthetic
uuuuguacugcaagcaauauugua

SEQ ID NO: 245060 - RNA, 18 nt, Artificial Sequence
  Synthetic
auuuucuugcauauugua

SEQ ID NO: 245061 - RNA, 19 nt, Artificial Sequence
  Synthetic
uauuuucuugcauauugua

SEQ ID NO: 245062 - RNA, 20 nt, Artificial Sequence
  Synthetic
auauuuucuugcauauugua

SEQ ID NO: 245063 - RNA, 21 nt, Artificial Sequence
  Synthetic
aauauuuucuugcauauugua

SEQ ID NO: 245064 - RNA, 22 nt, Artificial Sequence
  Synthetic
aaauauuuucuugcauauugua

SEQ ID NO: 245065 - RNA, 23 nt, Artificial Sequence
  Synthetic
gaaauauuuucuugcauauugua

SEQ ID NO: 245066 - RNA, 24 nt, Artificial Sequence
  Synthetic
ugaaauauuuucuugcauauugua

SEQ ID NO: 245067 - RNA, 18 nt, Artificial Sequence
  Synthetic
uucuuuuucgauauugua

SEQ ID NO: 245068 - RNA, 19 nt, Artificial Sequence
  Synthetic
auucuuuuucgauauugua

SEQ ID NO: 245069 - RNA, 20 nt, Artificial Sequence
  Synthetic
uauucuuuuucgauauugua

SEQ ID NO: 245070 - RNA, 21 nt, Artificial Sequence
  Synthetic
auauucuuuuucgauauugua

SEQ ID NO: 245071 - RNA, 22 nt, Artificial Sequence
  Synthetic
uauauucuuuuucgauauugua

SEQ ID NO: 245072 - RNA, 23 nt, Artificial Sequence
  Synthetic
auauauucuuuuucgauauugua

SEQ ID NO: 245073 - RNA, 24 nt, Artificial Sequence
  Synthetic
uauauauucuuuuucgauauugua

SEQ ID NO: 245074 - RNA, 18 nt, Artificial Sequence
  Synthetic
cuucuauucaguauugua

SEQ ID NO: 245075 - RNA, 19 nt, Artificial Sequence
  Synthetic
acuucuauucaguauugua

SEQ ID NO: 245076 - RNA, 20 nt, Artificial Sequence
  Synthetic
cacuucuauucaguauugua

SEQ ID NO: 245077 - RNA, 21 nt, Artificial Sequence
  Synthetic
ccacuucuauucaguauugua

SEQ ID NO: 245078 - RNA, 22 nt, Artificial Sequence
  Synthetic
accacuucuauucaguauugua

SEQ ID NO: 245079 - RNA, 23 nt, Artificial Sequence
  Synthetic
caccacuucuauucaguauugua

SEQ ID NO: 245080 - RNA, 24 nt, Artificial Sequence
  Synthetic
ucaccacuucuauucaguauugua

SEQ ID NO: 245081 - RNA, 18 nt, Artificial Sequence
  Synthetic
gaaaauauggguauugua

SEQ ID NO: 245082 - RNA, 19 nt, Artificial Sequence
  Synthetic
ggaaaauauggguauugua

SEQ ID NO: 245083 - RNA, 20 nt, Artificial Sequence
  Synthetic
uggaaaauauggguauugua

SEQ ID NO: 245084 - RNA, 21 nt, Artificial Sequence
  Synthetic
auggaaaauauggguauugua

SEQ ID NO: 245085 - RNA, 22 nt, Artificial Sequence
  Synthetic
cauggaaaauauggguauugua

SEQ ID NO: 245086 - RNA, 23 nt, Artificial Sequence
  Synthetic
acauggaaaauauggguauugua

SEQ ID NO: 245087 - RNA, 24 nt, Artificial Sequence
  Synthetic
cacauggaaaauauggguauugua

SEQ ID NO: 245088 - RNA, 18 nt, Artificial Sequence
  Synthetic
gcuccugcuguuauugua

SEQ ID NO: 245089 - RNA, 19 nt, Artificial Sequence
  Synthetic
ggcuccugcuguuauugua

SEQ ID NO: 245090 - RNA, 20 nt, Artificial Sequence
  Synthetic
aggcuccugcuguuauugua

SEQ ID NO: 245091 - RNA, 21 nt, Artificial Sequence
  Synthetic
aaggcuccugcuguuauugua

SEQ ID NO: 245092 - RNA, 22 nt, Artificial Sequence
  Synthetic
gaaggcuccugcuguuauugua

SEQ ID NO: 245093 - RNA, 23 nt, Artificial Sequence
  Synthetic
ugaaggcuccugcuguuauugua

SEQ ID NO: 245094 - RNA, 24 nt, Artificial Sequence
  Synthetic
uugaaggcuccugcuguuauugua

SEQ ID NO: 245095 - RNA, 18 nt, Artificial Sequence
  Synthetic
aagaacaguaaacuugua

SEQ ID NO: 245096 - RNA, 19 nt, Artificial Sequence
  Synthetic
aaagaacaguaaacuugua

SEQ ID NO: 245097 - RNA, 20 nt, Artificial Sequence
  Synthetic
caaagaacaguaaacuugua

SEQ ID NO: 245098 - RNA, 21 nt, Artificial Sequence
  Synthetic
acaaagaacaguaaacuugua

SEQ ID NO: 245099 - RNA, 22 nt, Artificial Sequence
  Synthetic
aacaaagaacaguaaacuugua

SEQ ID NO: 245100 - RNA, 23 nt, Artificial Sequence
  Synthetic
gaacaaagaacaguaaacuugua

SEQ ID NO: 245101 - RNA, 24 nt, Artificial Sequence
  Synthetic
ugaacaaagaacaguaaacuugua

SEQ ID NO: 245102 - RNA, 18 nt, Artificial Sequence
  Synthetic
ucagugaaauaacuugua

SEQ ID NO: 245103 - RNA, 19 nt, Artificial Sequence
  Synthetic
aucagugaaauaacuugua

SEQ ID NO: 245104 - RNA, 20 nt, Artificial Sequence
  Synthetic
aaucagugaaauaacuugua

SEQ ID NO: 245105 - RNA, 21 nt, Artificial Sequence
  Synthetic
uaaucagugaaauaacuugua

SEQ ID NO: 245106 - RNA, 22 nt, Artificial Sequence
  Synthetic
auaaucagugaaauaacuugua

SEQ ID NO: 245107 - RNA, 23 nt, Artificial Sequence
  Synthetic
uauaaucagugaaauaacuugua

SEQ ID NO: 245108 - RNA, 24 nt, Artificial Sequence
  Synthetic
uuauaaucagugaaauaacuugua

SEQ ID NO: 245109 - RNA, 18 nt, Artificial Sequence
  Synthetic
uccacuucauaacuugua

SEQ ID NO: 245110 - RNA, 19 nt, Artificial Sequence
  Synthetic
uuccacuucauaacuugua

SEQ ID NO: 245111 - RNA, 20 nt, Artificial Sequence
  Synthetic
cuuccacuucauaacuugua

SEQ ID NO: 245112 - RNA, 21 nt, Artificial Sequence
  Synthetic
ucuuccacuucauaacuugua

SEQ ID NO: 245113 - RNA, 22 nt, Artificial Sequence
  Synthetic
uucuuccacuucauaacuugua

SEQ ID NO: 245114 - RNA, 23 nt, Artificial Sequence
  Synthetic
uuucuuccacuucauaacuugua

SEQ ID NO: 245115 - RNA, 24 nt, Artificial Sequence
  Synthetic
uuuucuuccacuucauaacuugua

SEQ ID NO: 245116 - RNA, 18 nt, Artificial Sequence
  Synthetic
ccuucuugccaccuugua

SEQ ID NO: 245117 - RNA, 19 nt, Artificial Sequence
  Synthetic
uccuucuugccaccuugua

SEQ ID NO: 245118 - RNA, 20 nt, Artificial Sequence
  Synthetic
cuccuucuugccaccuugua

SEQ ID NO: 245119 - RNA, 21 nt, Artificial Sequence
  Synthetic
ucuccuucuugccaccuugua

SEQ ID NO: 245120 - RNA, 22 nt, Artificial Sequence
  Synthetic
uucuccuucuugccaccuugua

SEQ ID NO: 245121 - RNA, 23 nt, Artificial Sequence
  Synthetic
auucuccuucuugccaccuugua

SEQ ID NO: 245122 - RNA, 24 nt, Artificial Sequence
  Synthetic
cauucuccuucuugccaccuugua

SEQ ID NO: 245123 - RNA, 18 nt, Artificial Sequence
  Synthetic
uauucuaccuuccuugua

SEQ ID NO: 245124 - RNA, 19 nt, Artificial Sequence
  Synthetic
auauucuaccuuccuugua

SEQ ID NO: 245125 - RNA, 20 nt, Artificial Sequence
  Synthetic
aauauucuaccuuccuugua

SEQ ID NO: 245126 - RNA, 21 nt, Artificial Sequence
  Synthetic
aaauauucuaccuuccuugua

SEQ ID NO: 245127 - RNA, 22 nt, Artificial Sequence
  Synthetic
caaauauucuaccuuccuugua

SEQ ID NO: 245128 - RNA, 23 nt, Artificial Sequence
  Synthetic
acaaauauucuaccuuccuugua

SEQ ID NO: 245129 - RNA, 24 nt, Artificial Sequence
  Synthetic
gacaaauauucuaccuuccuugua

SEQ ID NO: 245130 - RNA, 18 nt, Artificial Sequence
  Synthetic
ugggaggcagagcuugua

SEQ ID NO: 245131 - RNA, 19 nt, Artificial Sequence
  Synthetic
cugggaggcagagcuugua

SEQ ID NO: 245132 - RNA, 20 nt, Artificial Sequence
  Synthetic
ccugggaggcagagcuugua

SEQ ID NO: 245133 - RNA, 21 nt, Artificial Sequence
  Synthetic
accugggaggcagagcuugua

SEQ ID NO: 245134 - RNA, 22 nt, Artificial Sequence
  Synthetic
aaccugggaggcagagcuugua

SEQ ID NO: 245135 - RNA, 23 nt, Artificial Sequence
  Synthetic
gaaccugggaggcagagcuugua

SEQ ID NO: 245136 - RNA, 24 nt, Artificial Sequence
  Synthetic
ugaaccugggaggcagagcuugua

SEQ ID NO: 245137 - RNA, 18 nt, Artificial Sequence
  Synthetic
acaucucccuggcuugua

SEQ ID NO: 245138 - RNA, 19 nt, Artificial Sequence
  Synthetic
uacaucucccuggcuugua

SEQ ID NO: 245139 - RNA, 20 nt, Artificial Sequence
  Synthetic
guacaucucccuggcuugua

SEQ ID NO: 245140 - RNA, 21 nt, Artificial Sequence
  Synthetic
aguacaucucccuggcuugua

SEQ ID NO: 245141 - RNA, 22 nt, Artificial Sequence
  Synthetic
gaguacaucucccuggcuugua

SEQ ID NO: 245142 - RNA, 23 nt, Artificial Sequence
  Synthetic
cgaguacaucucccuggcuugua

SEQ ID NO: 245143 - RNA, 24 nt, Artificial Sequence
  Synthetic
acgaguacaucucccuggcuugua

SEQ ID NO: 245144 - RNA, 18 nt, Artificial Sequence
  Synthetic
aagguauugcugcuugua

SEQ ID NO: 245145 - RNA, 19 nt, Artificial Sequence
  Synthetic
uaagguauugcugcuugua

SEQ ID NO: 245146 - RNA, 20 nt, Artificial Sequence
  Synthetic
guaagguauugcugcuugua

SEQ ID NO: 245147 - RNA, 21 nt, Artificial Sequence
  Synthetic
gguaagguauugcugcuugua

SEQ ID NO: 245148 - RNA, 22 nt, Artificial Sequence
  Synthetic
ugguaagguauugcugcuugua

SEQ ID NO: 245149 - RNA, 23 nt, Artificial Sequence
  Synthetic
cugguaagguauugcugcuugua

SEQ ID NO: 245150 - RNA, 24 nt, Artificial Sequence
  Synthetic
acugguaagguauugcugcuugua

SEQ ID NO: 245151 - RNA, 18 nt, Artificial Sequence
  Synthetic
uugagagucuugcuugua

SEQ ID NO: 245152 - RNA, 19 nt, Artificial Sequence
  Synthetic
cuugagagucuugcuugua

SEQ ID NO: 245153 - RNA, 20 nt, Artificial Sequence
  Synthetic
gcuugagagucuugcuugua

SEQ ID NO: 245154 - RNA, 21 nt, Artificial Sequence
  Synthetic
ggcuugagagucuugcuugua

SEQ ID NO: 245155 - RNA, 22 nt, Artificial Sequence
  Synthetic
uggcuugagagucuugcuugua

SEQ ID NO: 245156 - RNA, 23 nt, Artificial Sequence
  Synthetic
auggcuugagagucuugcuugua

SEQ ID NO: 245157 - RNA, 24 nt, Artificial Sequence
  Synthetic
aauggcuugagagucuugcuugua

SEQ ID NO: 245158 - RNA, 18 nt, Artificial Sequence
  Synthetic
aaaaauugaacucuugua

SEQ ID NO: 245159 - RNA, 19 nt, Artificial Sequence
  Synthetic
uaaaaauugaacucuugua

SEQ ID NO: 245160 - RNA, 20 nt, Artificial Sequence
  Synthetic
uuaaaaauugaacucuugua

SEQ ID NO: 245161 - RNA, 21 nt, Artificial Sequence
  Synthetic
cuuaaaaauugaacucuugua

SEQ ID NO: 245162 - RNA, 22 nt, Artificial Sequence
  Synthetic
ucuuaaaaauugaacucuugua

SEQ ID NO: 245163 - RNA, 23 nt, Artificial Sequence
  Synthetic
uucuuaaaaauugaacucuugua

SEQ ID NO: 245164 - RNA, 24 nt, Artificial Sequence
  Synthetic
uuucuuaaaaauugaacucuugua

SEQ ID NO: 245165 - RNA, 18 nt, Artificial Sequence
  Synthetic
uuguacucuuuucuugua

SEQ ID NO: 245166 - RNA, 19 nt, Artificial Sequence
  Synthetic
cuuguacucuuuucuugua

SEQ ID NO: 245167 - RNA, 20 nt, Artificial Sequence
  Synthetic
ucuuguacucuuuucuugua

SEQ ID NO: 245168 - RNA, 21 nt, Artificial Sequence
  Synthetic
aucuuguacucuuuucuugua

SEQ ID NO: 245169 - RNA, 22 nt, Artificial Sequence
  Synthetic
uaucuuguacucuuuucuugua

SEQ ID NO: 245170 - RNA, 23 nt, Artificial Sequence
  Synthetic
auaucuuguacucuuuucuugua

SEQ ID NO: 245171 - RNA, 24 nt, Artificial Sequence
  Synthetic
cauaucuuguacucuuuucuugua

SEQ ID NO: 245172 - RNA, 18 nt, Artificial Sequence
  Synthetic
acuucagcaaaaguugua

SEQ ID NO: 245173 - RNA, 19 nt, Artificial Sequence
  Synthetic
gacuucagcaaaaguugua

SEQ ID NO: 245174 - RNA, 20 nt, Artificial Sequence
  Synthetic
ugacuucagcaaaaguugua

SEQ ID NO: 245175 - RNA, 21 nt, Artificial Sequence
  Synthetic
augacuucagcaaaaguugua

SEQ ID NO: 245176 - RNA, 22 nt, Artificial Sequence
  Synthetic
aaugacuucagcaaaaguugua

SEQ ID NO: 245177 - RNA, 23 nt, Artificial Sequence
  Synthetic
gaaugacuucagcaaaaguugua

SEQ ID NO: 245178 - RNA, 24 nt, Artificial Sequence
  Synthetic
agaaugacuucagcaaaaguugua

SEQ ID NO: 245179 - RNA, 18 nt, Artificial Sequence
  Synthetic
agcuguauaacaguugua

SEQ ID NO: 245180 - RNA, 19 nt, Artificial Sequence
  Synthetic
cagcuguauaacaguugua

SEQ ID NO: 245181 - RNA, 20 nt, Artificial Sequence
  Synthetic
acagcuguauaacaguugua

SEQ ID NO: 245182 - RNA, 21 nt, Artificial Sequence
  Synthetic
aacagcuguauaacaguugua

SEQ ID NO: 245183 - RNA, 22 nt, Artificial Sequence
  Synthetic
caacagcuguauaacaguugua

SEQ ID NO: 245184 - RNA, 23 nt, Artificial Sequence
  Synthetic
acaacagcuguauaacaguugua

SEQ ID NO: 245185 - RNA, 24 nt, Artificial Sequence
  Synthetic
aacaacagcuguauaacaguugua

SEQ ID NO: 245186 - RNA, 18 nt, Artificial Sequence
  Synthetic
cugccugcuggaguugua

SEQ ID NO: 245187 - RNA, 19 nt, Artificial Sequence
  Synthetic
gcugccugcuggaguugua

SEQ ID NO: 245188 - RNA, 20 nt, Artificial Sequence
  Synthetic
ggcugccugcuggaguugua

SEQ ID NO: 245189 - RNA, 21 nt, Artificial Sequence
  Synthetic
uggcugccugcuggaguugua

SEQ ID NO: 245190 - RNA, 22 nt, Artificial Sequence
  Synthetic
cuggcugccugcuggaguugua

SEQ ID NO: 245191 - RNA, 23 nt, Artificial Sequence
  Synthetic
ccuggcugccugcuggaguugua

SEQ ID NO: 245192 - RNA, 24 nt, Artificial Sequence
  Synthetic
accuggcugccugcuggaguugua

SEQ ID NO: 245193 - RNA, 18 nt, Artificial Sequence
  Synthetic
aaaucuacucuaguugua

SEQ ID NO: 245194 - RNA, 19 nt, Artificial Sequence
  Synthetic
uaaaucuacucuaguugua

SEQ ID NO: 245195 - RNA, 20 nt, Artificial Sequence
  Synthetic
auaaaucuacucuaguugua

SEQ ID NO: 245196 - RNA, 21 nt, Artificial Sequence
  Synthetic
aauaaaucuacucuaguugua

SEQ ID NO: 245197 - RNA, 22 nt, Artificial Sequence
  Synthetic
aaauaaaucuacucuaguugua

SEQ ID NO: 245198 - RNA, 23 nt, Artificial Sequence
  Synthetic
aaaauaaaucuacucuaguugua

SEQ ID NO: 245199 - RNA, 24 nt, Artificial Sequence
  Synthetic
uaaaauaaaucuacucuaguugua

SEQ ID NO: 245200 - RNA, 18 nt, Artificial Sequence
  Synthetic
uauauaagcaagguugua

SEQ ID NO: 245201 - RNA, 19 nt, Artificial Sequence
  Synthetic
uuauauaagcaagguugua

SEQ ID NO: 245202 - RNA, 20 nt, Artificial Sequence
  Synthetic
uuuauauaagcaagguugua

SEQ ID NO: 245203 - RNA, 21 nt, Artificial Sequence
  Synthetic
cuuuauauaagcaagguugua

SEQ ID NO: 245204 - RNA, 22 nt, Artificial Sequence
  Synthetic
ucuuuauauaagcaagguugua

SEQ ID NO: 245205 - RNA, 23 nt, Artificial Sequence
  Synthetic
cucuuuauauaagcaagguugua

SEQ ID NO: 245206 - RNA, 24 nt, Artificial Sequence
  Synthetic
ccucuuuauauaagcaagguugua

SEQ ID NO: 245207 - RNA, 18 nt, Artificial Sequence
  Synthetic
augauucugcagguugua

SEQ ID NO: 245208 - RNA, 19 nt, Artificial Sequence
  Synthetic
caugauucugcagguugua

SEQ ID NO: 245209 - RNA, 20 nt, Artificial Sequence
  Synthetic
ucaugauucugcagguugua

SEQ ID NO: 245210 - RNA, 21 nt, Artificial Sequence
  Synthetic
uucaugauucugcagguugua

SEQ ID NO: 245211 - RNA, 22 nt, Artificial Sequence
  Synthetic
auucaugauucugcagguugua

SEQ ID NO: 245212 - RNA, 23 nt, Artificial Sequence
  Synthetic
gauucaugauucugcagguugua

SEQ ID NO: 245213 - RNA, 24 nt, Artificial Sequence
  Synthetic
cgauucaugauucugcagguugua

SEQ ID NO: 245214 - RNA, 18 nt, Artificial Sequence
  Synthetic
ggauguguguagguugua

SEQ ID NO: 245215 - RNA, 19 nt, Artificial Sequence
  Synthetic
aggauguguguagguugua

SEQ ID NO: 245216 - RNA, 20 nt, Artificial Sequence
  Synthetic
gaggauguguguagguugua

SEQ ID NO: 245217 - RNA, 21 nt, Artificial Sequence
  Synthetic
ggaggauguguguagguugua

SEQ ID NO: 245218 - RNA, 22 nt, Artificial Sequence
  Synthetic
aggaggauguguguagguugua

SEQ ID NO: 245219 - RNA, 23 nt, Artificial Sequence
  Synthetic
uaggaggauguguguagguugua

SEQ ID NO: 245220 - RNA, 24 nt, Artificial Sequence
  Synthetic
auaggaggauguguguagguugua

SEQ ID NO: 245221 - RNA, 18 nt, Artificial Sequence
  Synthetic
ugacaccauuguguugua

SEQ ID NO: 245222 - RNA, 19 nt, Artificial Sequence
  Synthetic
augacaccauuguguugua

SEQ ID NO: 245223 - RNA, 20 nt, Artificial Sequence
  Synthetic
aaugacaccauuguguugua

SEQ ID NO: 245224 - RNA, 21 nt, Artificial Sequence
  Synthetic
gaaugacaccauuguguugua

SEQ ID NO: 245225 - RNA, 22 nt, Artificial Sequence
  Synthetic
agaaugacaccauuguguugua

SEQ ID NO: 245226 - RNA, 23 nt, Artificial Sequence
  Synthetic
cagaaugacaccauuguguugua

SEQ ID NO: 245227 - RNA, 24 nt, Artificial Sequence
  Synthetic
gcagaaugacaccauuguguugua

SEQ ID NO: 245228 - RNA, 18 nt, Artificial Sequence
  Synthetic
acuagguaauaauuugua

SEQ ID NO: 245229 - RNA, 19 nt, Artificial Sequence
  Synthetic
gacuagguaauaauuugua

SEQ ID NO: 245230 - RNA, 20 nt, Artificial Sequence
  Synthetic
agacuagguaauaauuugua

SEQ ID NO: 245231 - RNA, 21 nt, Artificial Sequence
  Synthetic
aagacuagguaauaauuugua

SEQ ID NO: 245232 - RNA, 22 nt, Artificial Sequence
  Synthetic
uaagacuagguaauaauuugua

SEQ ID NO: 245233 - RNA, 23 nt, Artificial Sequence
  Synthetic
cuaagacuagguaauaauuugua

SEQ ID NO: 245234 - RNA, 24 nt, Artificial Sequence
  Synthetic
ccuaagacuagguaauaauuugua

SEQ ID NO: 245235 - RNA, 18 nt, Artificial Sequence
  Synthetic
ccagcguuggcauuugua

SEQ ID NO: 245236 - RNA, 19 nt, Artificial Sequence
  Synthetic
accagcguuggcauuugua

SEQ ID NO: 245237 - RNA, 20 nt, Artificial Sequence
  Synthetic
caccagcguuggcauuugua

SEQ ID NO: 245238 - RNA, 21 nt, Artificial Sequence
  Synthetic
acaccagcguuggcauuugua

SEQ ID NO: 245239 - RNA, 22 nt, Artificial Sequence
  Synthetic
cacaccagcguuggcauuugua

SEQ ID NO: 245240 - RNA, 23 nt, Artificial Sequence
  Synthetic
gcacaccagcguuggcauuugua

SEQ ID NO: 245241 - RNA, 24 nt, Artificial Sequence
  Synthetic
ugcacaccagcguuggcauuugua

SEQ ID NO: 245242 - RNA, 18 nt, Artificial Sequence
  Synthetic
ugauuaaauagauuugua

SEQ ID NO: 245243 - RNA, 19 nt, Artificial Sequence
  Synthetic
augauuaaauagauuugua

SEQ ID NO: 245244 - RNA, 20 nt, Artificial Sequence
  Synthetic
gaugauuaaauagauuugua

SEQ ID NO: 245245 - RNA, 21 nt, Artificial Sequence
  Synthetic
agaugauuaaauagauuugua

SEQ ID NO: 245246 - RNA, 22 nt, Artificial Sequence
  Synthetic
uagaugauuaaauagauuugua

SEQ ID NO: 245247 - RNA, 23 nt, Artificial Sequence
  Synthetic
uuagaugauuaaauagauuugua

SEQ ID NO: 245248 - RNA, 24 nt, Artificial Sequence
  Synthetic
uuuagaugauuaaauagauuugua

SEQ ID NO: 245249 - RNA, 18 nt, Artificial Sequence
  Synthetic
gaaguuuuuagauuugua

SEQ ID NO: 245250 - RNA, 19 nt, Artificial Sequence
  Synthetic
agaaguuuuuagauuugua

SEQ ID NO: 245251 - RNA, 20 nt, Artificial Sequence
  Synthetic
uagaaguuuuuagauuugua

SEQ ID NO: 245252 - RNA, 21 nt, Artificial Sequence
  Synthetic
auagaaguuuuuagauuugua

SEQ ID NO: 245253 - RNA, 22 nt, Artificial Sequence
  Synthetic
cauagaaguuuuuagauuugua

SEQ ID NO: 245254 - RNA, 23 nt, Artificial Sequence
  Synthetic
ucauagaaguuuuuagauuugua

SEQ ID NO: 245255 - RNA, 24 nt, Artificial Sequence
  Synthetic
cucauagaaguuuuuagauuugua

SEQ ID NO: 245256 - RNA, 18 nt, Artificial Sequence
  Synthetic
ucaaugugauuauuugua

SEQ ID NO: 245257 - RNA, 19 nt, Artificial Sequence
  Synthetic
gucaaugugauuauuugua

SEQ ID NO: 245258 - RNA, 20 nt, Artificial Sequence
  Synthetic
ugucaaugugauuauuugua

SEQ ID NO: 245259 - RNA, 21 nt, Artificial Sequence
  Synthetic
augucaaugugauuauuugua

SEQ ID NO: 245260 - RNA, 22 nt, Artificial Sequence
  Synthetic
aaugucaaugugauuauuugua

SEQ ID NO: 245261 - RNA, 23 nt, Artificial Sequence
  Synthetic
caaugucaaugugauuauuugua

SEQ ID NO: 245262 - RNA, 24 nt, Artificial Sequence
  Synthetic
acaaugucaaugugauuauuugua

SEQ ID NO: 245263 - RNA, 18 nt, Artificial Sequence
  Synthetic
aucaaggaaagcuuugua

SEQ ID NO: 245264 - RNA, 19 nt, Artificial Sequence
  Synthetic
aaucaaggaaagcuuugua

SEQ ID NO: 245265 - RNA, 20 nt, Artificial Sequence
  Synthetic
uaaucaaggaaagcuuugua

SEQ ID NO: 245266 - RNA, 21 nt, Artificial Sequence
  Synthetic
uuaaucaaggaaagcuuugua

SEQ ID NO: 245267 - RNA, 22 nt, Artificial Sequence
  Synthetic
auuaaucaaggaaagcuuugua

SEQ ID NO: 245268 - RNA, 23 nt, Artificial Sequence
  Synthetic
aauuaaucaaggaaagcuuugua

SEQ ID NO: 245269 - RNA, 24 nt, Artificial Sequence
  Synthetic
uaauuaaucaaggaaagcuuugua

SEQ ID NO: 245270 - RNA, 18 nt, Artificial Sequence
  Synthetic
caguagucuucguuugua

SEQ ID NO: 245271 - RNA, 19 nt, Artificial Sequence
  Synthetic
acaguagucuucguuugua

SEQ ID NO: 245272 - RNA, 20 nt, Artificial Sequence
  Synthetic
aacaguagucuucguuugua

SEQ ID NO: 245273 - RNA, 21 nt, Artificial Sequence
  Synthetic
caacaguagucuucguuugua

SEQ ID NO: 245274 - RNA, 22 nt, Artificial Sequence
  Synthetic
acaacaguagucuucguuugua

SEQ ID NO: 245275 - RNA, 23 nt, Artificial Sequence
  Synthetic
aacaacaguagucuucguuugua

SEQ ID NO: 245276 - RNA, 24 nt, Artificial Sequence
  Synthetic
uaacaacaguagucuucguuugua

SEQ ID NO: 245277 - RNA, 18 nt, Artificial Sequence
  Synthetic
gcuaugugaauguuugua

SEQ ID NO: 245278 - RNA, 19 nt, Artificial Sequence
  Synthetic
ggcuaugugaauguuugua

SEQ ID NO: 245279 - RNA, 20 nt, Artificial Sequence
  Synthetic
gggcuaugugaauguuugua

SEQ ID NO: 245280 - RNA, 21 nt, Artificial Sequence
  Synthetic
ugggcuaugugaauguuugua

SEQ ID NO: 245281 - RNA, 22 nt, Artificial Sequence
  Synthetic
gugggcuaugugaauguuugua

SEQ ID NO: 245282 - RNA, 23 nt, Artificial Sequence
  Synthetic
ggugggcuaugugaauguuugua

SEQ ID NO: 245283 - RNA, 24 nt, Artificial Sequence
  Synthetic
uggugggcuaugugaauguuugua

SEQ ID NO: 245284 - RNA, 18 nt, Artificial Sequence
  Synthetic
ugucagcuccuguuugua

SEQ ID NO: 245285 - RNA, 19 nt, Artificial Sequence
  Synthetic
gugucagcuccuguuugua

SEQ ID NO: 245286 - RNA, 20 nt, Artificial Sequence
  Synthetic
ugugucagcuccuguuugua

SEQ ID NO: 245287 - RNA, 21 nt, Artificial Sequence
  Synthetic
cugugucagcuccuguuugua

SEQ ID NO: 245288 - RNA, 22 nt, Artificial Sequence
  Synthetic
gcugugucagcuccuguuugua

SEQ ID NO: 245289 - RNA, 23 nt, Artificial Sequence
  Synthetic
agcugugucagcuccuguuugua

SEQ ID NO: 245290 - RNA, 24 nt, Artificial Sequence
  Synthetic
cagcugugucagcuccuguuugua

SEQ ID NO: 245291 - RNA, 18 nt, Artificial Sequence
  Synthetic
agccuggcuccuuuugua

SEQ ID NO: 245292 - RNA, 19 nt, Artificial Sequence
  Synthetic
uagccuggcuccuuuugua

SEQ ID NO: 245293 - RNA, 20 nt, Artificial Sequence
  Synthetic
cuagccuggcuccuuuugua

SEQ ID NO: 245294 - RNA, 21 nt, Artificial Sequence
  Synthetic
ucuagccuggcuccuuuugua

SEQ ID NO: 245295 - RNA, 22 nt, Artificial Sequence
  Synthetic
uucuagccuggcuccuuuugua

SEQ ID NO: 245296 - RNA, 23 nt, Artificial Sequence
  Synthetic
cuucuagccuggcuccuuuugua

SEQ ID NO: 245297 - RNA, 24 nt, Artificial Sequence
  Synthetic
gcuucuagccuggcuccuuuugua

SEQ ID NO: 245298 - RNA, 18 nt, Artificial Sequence
  Synthetic
auuccuuagaguuuugua

SEQ ID NO: 245299 - RNA, 19 nt, Artificial Sequence
  Synthetic
aauuccuuagaguuuugua

SEQ ID NO: 245300 - RNA, 20 nt, Artificial Sequence
  Synthetic
aaauuccuuagaguuuugua

SEQ ID NO: 245301 - RNA, 21 nt, Artificial Sequence
  Synthetic
uaaauuccuuagaguuuugua

SEQ ID NO: 245302 - RNA, 22 nt, Artificial Sequence
  Synthetic
auaaauuccuuagaguuuugua

SEQ ID NO: 245303 - RNA, 23 nt, Artificial Sequence
  Synthetic
aauaaauuccuuagaguuuugua

SEQ ID NO: 245304 - RNA, 24 nt, Artificial Sequence
  Synthetic
aaauaaauuccuuagaguuuugua

SEQ ID NO: 245305 - RNA, 18 nt, Artificial Sequence
  Synthetic
ggagaaaggguuuuugua

SEQ ID NO: 245306 - RNA, 19 nt, Artificial Sequence
  Synthetic
uggagaaaggguuuuugua

SEQ ID NO: 245307 - RNA, 20 nt, Artificial Sequence
  Synthetic
cuggagaaaggguuuuugua

SEQ ID NO: 245308 - RNA, 21 nt, Artificial Sequence
  Synthetic
ccuggagaaaggguuuuugua

SEQ ID NO: 245309 - RNA, 22 nt, Artificial Sequence
  Synthetic
gccuggagaaaggguuuuugua

SEQ ID NO: 245310 - RNA, 23 nt, Artificial Sequence
  Synthetic
ugccuggagaaaggguuuuugua

SEQ ID NO: 245311 - RNA, 24 nt, Artificial Sequence
  Synthetic
augccuggagaaaggguuuuugua

SEQ ID NO: 245312 - RNA, 18 nt, Artificial Sequence
  Synthetic
gcacaacuuuuuuuugua

SEQ ID NO: 245313 - RNA, 19 nt, Artificial Sequence
  Synthetic
agcacaacuuuuuuuugua

SEQ ID NO: 245314 - RNA, 20 nt, Artificial Sequence
  Synthetic
uagcacaacuuuuuuuugua

SEQ ID NO: 245315 - RNA, 21 nt, Artificial Sequence
  Synthetic
cuagcacaacuuuuuuuugua

SEQ ID NO: 245316 - RNA, 22 nt, Artificial Sequence
  Synthetic
ccuagcacaacuuuuuuuugua

SEQ ID NO: 245317 - RNA, 23 nt, Artificial Sequence
  Synthetic
uccuagcacaacuuuuuuuugua

SEQ ID NO: 245318 - RNA, 24 nt, Artificial Sequence
  Synthetic
cuccuagcacaacuuuuuuuugua

SEQ ID NO: 245319 - RNA, 18 nt, Artificial Sequence
  Synthetic
uaaaaaaaaaaaaaauua

SEQ ID NO: 245320 - RNA, 19 nt, Artificial Sequence
  Synthetic
cuaaaaaaaaaaaaaauua

SEQ ID NO: 245321 - RNA, 20 nt, Artificial Sequence
  Synthetic
gcuaaaaaaaaaaaaaauua

SEQ ID NO: 245322 - RNA, 21 nt, Artificial Sequence
  Synthetic
agcuaaaaaaaaaaaaaauua

SEQ ID NO: 245323 - RNA, 22 nt, Artificial Sequence
  Synthetic
cagcuaaaaaaaaaaaaaauua

SEQ ID NO: 245324 - RNA, 23 nt, Artificial Sequence
  Synthetic
acagcuaaaaaaaaaaaaaauua

SEQ ID NO: 245325 - RNA, 24 nt, Artificial Sequence
  Synthetic
cacagcuaaaaaaaaaaaaaauua

SEQ ID NO: 245326 - RNA, 18 nt, Artificial Sequence
  Synthetic
aaaagaagaaaaaaauua

SEQ ID NO: 245327 - RNA, 19 nt, Artificial Sequence
  Synthetic
aaaaagaagaaaaaaauua

SEQ ID NO: 245328 - RNA, 20 nt, Artificial Sequence
  Synthetic
aaaaaagaagaaaaaaauua

SEQ ID NO: 245329 - RNA, 21 nt, Artificial Sequence
  Synthetic
caaaaaagaagaaaaaaauua

SEQ ID NO: 245330 - RNA, 22 nt, Artificial Sequence
  Synthetic
acaaaaaagaagaaaaaaauua

SEQ ID NO: 245331 - RNA, 23 nt, Artificial Sequence
  Synthetic
cacaaaaaagaagaaaaaaauua

SEQ ID NO: 245332 - RNA, 24 nt, Artificial Sequence
  Synthetic
ucacaaaaaagaagaaaaaaauua

SEQ ID NO: 245333 - RNA, 18 nt, Artificial Sequence
  Synthetic
cagcuuagaaaaaaauua

SEQ ID NO: 245334 - RNA, 19 nt, Artificial Sequence
  Synthetic
acagcuuagaaaaaaauua

SEQ ID NO: 245335 - RNA, 20 nt, Artificial Sequence
  Synthetic
cacagcuuagaaaaaaauua

SEQ ID NO: 245336 - RNA, 21 nt, Artificial Sequence
  Synthetic
ccacagcuuagaaaaaaauua

SEQ ID NO: 245337 - RNA, 22 nt, Artificial Sequence
  Synthetic
uccacagcuuagaaaaaaauua

SEQ ID NO: 245338 - RNA, 23 nt, Artificial Sequence
  Synthetic
cuccacagcuuagaaaaaaauua

SEQ ID NO: 245339 - RNA, 24 nt, Artificial Sequence
  Synthetic
acuccacagcuuagaaaaaaauua

SEQ ID NO: 245340 - RNA, 18 nt, Artificial Sequence
  Synthetic
aaaccucuaaaaaaauua

SEQ ID NO: 245341 - RNA, 19 nt, Artificial Sequence
  Synthetic
gaaaccucuaaaaaaauua

SEQ ID NO: 245342 - RNA, 20 nt, Artificial Sequence
  Synthetic
agaaaccucuaaaaaaauua

SEQ ID NO: 245343 - RNA, 21 nt, Artificial Sequence
  Synthetic
aagaaaccucuaaaaaaauua

SEQ ID NO: 245344 - RNA, 22 nt, Artificial Sequence
  Synthetic
aaagaaaccucuaaaaaaauua

SEQ ID NO: 245345 - RNA, 23 nt, Artificial Sequence
  Synthetic
aaaagaaaccucuaaaaaaauua

SEQ ID NO: 245346 - RNA, 24 nt, Artificial Sequence
  Synthetic
aaaaagaaaccucuaaaaaaauua

SEQ ID NO: 245347 - RNA, 18 nt, Artificial Sequence
  Synthetic
gaaccaugacaaaaauua

SEQ ID NO: 245348 - RNA, 19 nt, Artificial Sequence
  Synthetic
agaaccaugacaaaaauua

SEQ ID NO: 245349 - RNA, 20 nt, Artificial Sequence
  Synthetic
cagaaccaugacaaaaauua

SEQ ID NO: 245350 - RNA, 21 nt, Artificial Sequence
  Synthetic
ucagaaccaugacaaaaauua

SEQ ID NO: 245351 - RNA, 22 nt, Artificial Sequence
  Synthetic
uucagaaccaugacaaaaauua

SEQ ID NO: 245352 - RNA, 23 nt, Artificial Sequence
  Synthetic
guucagaaccaugacaaaaauua

SEQ ID NO: 245353 - RNA, 24 nt, Artificial Sequence
  Synthetic
aguucagaaccaugacaaaaauua

SEQ ID NO: 245354 - RNA, 18 nt, Artificial Sequence
  Synthetic
guaagaauacaaaaauua

SEQ ID NO: 245355 - RNA, 19 nt, Artificial Sequence
  Synthetic
aguaagaauacaaaaauua

SEQ ID NO: 245356 - RNA, 20 nt, Artificial Sequence
  Synthetic
caguaagaauacaaaaauua

SEQ ID NO: 245357 - RNA, 21 nt, Artificial Sequence
  Synthetic
ccaguaagaauacaaaaauua

SEQ ID NO: 245358 - RNA, 22 nt, Artificial Sequence
  Synthetic
cccaguaagaauacaaaaauua

SEQ ID NO: 245359 - RNA, 23 nt, Artificial Sequence
  Synthetic
ccccaguaagaauacaaaaauua

SEQ ID NO: 245360 - RNA, 24 nt, Artificial Sequence
  Synthetic
accccaguaagaauacaaaaauua

SEQ ID NO: 245361 - RNA, 18 nt, Artificial Sequence
  Synthetic
ggaaaagcccaaaaauua

SEQ ID NO: 245362 - RNA, 19 nt, Artificial Sequence
  Synthetic
uggaaaagcccaaaaauua

SEQ ID NO: 245363 - RNA, 20 nt, Artificial Sequence
  Synthetic
guggaaaagcccaaaaauua

SEQ ID NO: 245364 - RNA, 21 nt, Artificial Sequence
  Synthetic
aguggaaaagcccaaaaauua

SEQ ID NO: 245365 - RNA, 22 nt, Artificial Sequence
  Synthetic
uaguggaaaagcccaaaaauua

SEQ ID NO: 245366 - RNA, 23 nt, Artificial Sequence
  Synthetic
uuaguggaaaagcccaaaaauua

SEQ ID NO: 245367 - RNA, 24 nt, Artificial Sequence
  Synthetic
uuuaguggaaaagcccaaaaauua

SEQ ID NO: 245368 - RNA, 18 nt, Artificial Sequence
  Synthetic
aguaugauaccaaaauua

SEQ ID NO: 245369 - RNA, 19 nt, Artificial Sequence
  Synthetic
caguaugauaccaaaauua

SEQ ID NO: 245370 - RNA, 20 nt, Artificial Sequence
  Synthetic
acaguaugauaccaaaauua

SEQ ID NO: 245371 - RNA, 21 nt, Artificial Sequence
  Synthetic
cacaguaugauaccaaaauua

SEQ ID NO: 245372 - RNA, 22 nt, Artificial Sequence
  Synthetic
ccacaguaugauaccaaaauua

SEQ ID NO: 245373 - RNA, 23 nt, Artificial Sequence
  Synthetic
cccacaguaugauaccaaaauua

SEQ ID NO: 245374 - RNA, 24 nt, Artificial Sequence
  Synthetic
ucccacaguaugauaccaaaauua

SEQ ID NO: 245375 - RNA, 18 nt, Artificial Sequence
  Synthetic
aaccgauuagcaaaauua

SEQ ID NO: 245376 - RNA, 19 nt, Artificial Sequence
  Synthetic
uaaccgauuagcaaaauua

SEQ ID NO: 245377 - RNA, 20 nt, Artificial Sequence
  Synthetic
auaaccgauuagcaaaauua

SEQ ID NO: 245378 - RNA, 21 nt, Artificial Sequence
  Synthetic
aauaaccgauuagcaaaauua

SEQ ID NO: 245379 - RNA, 22 nt, Artificial Sequence
  Synthetic
uaauaaccgauuagcaaaauua

SEQ ID NO: 245380 - RNA, 23 nt, Artificial Sequence
  Synthetic
uuaauaaccgauuagcaaaauua

SEQ ID NO: 245381 - RNA, 24 nt, Artificial Sequence
  Synthetic
uuuaauaaccgauuagcaaaauua

SEQ ID NO: 245382 - RNA, 18 nt, Artificial Sequence
  Synthetic
auaucaagugcaaaauua

SEQ ID NO: 245383 - RNA, 19 nt, Artificial Sequence
  Synthetic
aauaucaagugcaaaauua

SEQ ID NO: 245384 - RNA, 20 nt, Artificial Sequence
  Synthetic
aaauaucaagugcaaaauua

SEQ ID NO: 245385 - RNA, 21 nt, Artificial Sequence
  Synthetic
aaaauaucaagugcaaaauua

SEQ ID NO: 245386 - RNA, 22 nt, Artificial Sequence
  Synthetic
aaaaauaucaagugcaaaauua

SEQ ID NO: 245387 - RNA, 23 nt, Artificial Sequence
  Synthetic
aaaaaauaucaagugcaaaauua

SEQ ID NO: 245388 - RNA, 24 nt, Artificial Sequence
  Synthetic
aaaaaaauaucaagugcaaaauua

SEQ ID NO: 245389 - RNA, 18 nt, Artificial Sequence
  Synthetic
cccaaagucucaaaauua

SEQ ID NO: 245390 - RNA, 19 nt, Artificial Sequence
  Synthetic
ucccaaagucucaaaauua

SEQ ID NO: 245391 - RNA, 20 nt, Artificial Sequence
  Synthetic
cucccaaagucucaaaauua

SEQ ID NO: 245392 - RNA, 21 nt, Artificial Sequence
  Synthetic
ccucccaaagucucaaaauua

SEQ ID NO: 245393 - RNA, 22 nt, Artificial Sequence
  Synthetic
uccucccaaagucucaaaauua

SEQ ID NO: 245394 - RNA, 23 nt, Artificial Sequence
  Synthetic
cuccucccaaagucucaaaauua

SEQ ID NO: 245395 - RNA, 24 nt, Artificial Sequence
  Synthetic
ucuccucccaaagucucaaaauua

SEQ ID NO: 245396 - RNA, 18 nt, Artificial Sequence
  Synthetic
auugaugcuucaaaauua

SEQ ID NO: 245397 - RNA, 19 nt, Artificial Sequence
  Synthetic
uauugaugcuucaaaauua

SEQ ID NO: 245398 - RNA, 20 nt, Artificial Sequence
  Synthetic
cuauugaugcuucaaaauua

SEQ ID NO: 245399 - RNA, 21 nt, Artificial Sequence
  Synthetic
ucuauugaugcuucaaaauua

SEQ ID NO: 245400 - RNA, 22 nt, Artificial Sequence
  Synthetic
uucuauugaugcuucaaaauua

SEQ ID NO: 245401 - RNA, 23 nt, Artificial Sequence
  Synthetic
uuucuauugaugcuucaaaauua

SEQ ID NO: 245402 - RNA, 24 nt, Artificial Sequence
  Synthetic
guuucuauugaugcuucaaaauua

SEQ ID NO: 245403 - RNA, 18 nt, Artificial Sequence
  Synthetic
aaggagcacagaaaauua

SEQ ID NO: 245404 - RNA, 19 nt, Artificial Sequence
  Synthetic
aaaggagcacagaaaauua

SEQ ID NO: 245405 - RNA, 20 nt, Artificial Sequence
  Synthetic
gaaaggagcacagaaaauua

SEQ ID NO: 245406 - RNA, 21 nt, Artificial Sequence
  Synthetic
agaaaggagcacagaaaauua

SEQ ID NO: 245407 - RNA, 22 nt, Artificial Sequence
  Synthetic
aagaaaggagcacagaaaauua

SEQ ID NO: 245408 - RNA, 23 nt, Artificial Sequence
  Synthetic
aaagaaaggagcacagaaaauua

SEQ ID NO: 245409 - RNA, 24 nt, Artificial Sequence
  Synthetic
caaagaaaggagcacagaaaauua

SEQ ID NO: 245410 - RNA, 18 nt, Artificial Sequence
  Synthetic
auuuugagaauaaaauua

SEQ ID NO: 245411 - RNA, 19 nt, Artificial Sequence
  Synthetic
cauuuugagaauaaaauua

SEQ ID NO: 245412 - RNA, 20 nt, Artificial Sequence
  Synthetic
ucauuuugagaauaaaauua

SEQ ID NO: 245413 - RNA, 21 nt, Artificial Sequence
  Synthetic
cucauuuugagaauaaaauua

SEQ ID NO: 245414 - RNA, 22 nt, Artificial Sequence
  Synthetic
acucauuuugagaauaaaauua

SEQ ID NO: 245415 - RNA, 23 nt, Artificial Sequence
  Synthetic
aacucauuuugagaauaaaauua

SEQ ID NO: 245416 - RNA, 24 nt, Artificial Sequence
  Synthetic
caacucauuuugagaauaaaauua

SEQ ID NO: 245417 - RNA, 18 nt, Artificial Sequence
  Synthetic
uaagauccuauaaaauua

SEQ ID NO: 245418 - RNA, 19 nt, Artificial Sequence
  Synthetic
cuaagauccuauaaaauua

SEQ ID NO: 245419 - RNA, 20 nt, Artificial Sequence
  Synthetic
ccuaagauccuauaaaauua

SEQ ID NO: 245420 - RNA, 21 nt, Artificial Sequence
  Synthetic
uccuaagauccuauaaaauua

SEQ ID NO: 245421 - RNA, 22 nt, Artificial Sequence
  Synthetic
uuccuaagauccuauaaaauua

SEQ ID NO: 245422 - RNA, 23 nt, Artificial Sequence
  Synthetic
uuuccuaagauccuauaaaauua

SEQ ID NO: 245423 - RNA, 24 nt, Artificial Sequence
  Synthetic
guuuccuaagauccuauaaaauua

SEQ ID NO: 245424 - RNA, 18 nt, Artificial Sequence
  Synthetic
uuuuccauuuuaaaauua

SEQ ID NO: 245425 - RNA, 19 nt, Artificial Sequence
  Synthetic
uuuuuccauuuuaaaauua

SEQ ID NO: 245426 - RNA, 20 nt, Artificial Sequence
  Synthetic
cuuuuuccauuuuaaaauua

SEQ ID NO: 245427 - RNA, 21 nt, Artificial Sequence
  Synthetic
gcuuuuuccauuuuaaaauua

SEQ ID NO: 245428 - RNA, 22 nt, Artificial Sequence
  Synthetic
ugcuuuuuccauuuuaaaauua

SEQ ID NO: 245429 - RNA, 23 nt, Artificial Sequence
  Synthetic
augcuuuuuccauuuuaaaauua

SEQ ID NO: 245430 - RNA, 24 nt, Artificial Sequence
  Synthetic
uaugcuuuuuccauuuuaaaauua

SEQ ID NO: 245431 - RNA, 18 nt, Artificial Sequence
  Synthetic
uucaaaguuuuaaaauua

SEQ ID NO: 245432 - RNA, 19 nt, Artificial Sequence
  Synthetic
auucaaaguuuuaaaauua

SEQ ID NO: 245433 - RNA, 20 nt, Artificial Sequence
  Synthetic
uauucaaaguuuuaaaauua

SEQ ID NO: 245434 - RNA, 21 nt, Artificial Sequence
  Synthetic
auauucaaaguuuuaaaauua

SEQ ID NO: 245435 - RNA, 22 nt, Artificial Sequence
  Synthetic
cauauucaaaguuuuaaaauua

SEQ ID NO: 245436 - RNA, 23 nt, Artificial Sequence
  Synthetic
gcauauucaaaguuuuaaaauua

SEQ ID NO: 245437 - RNA, 24 nt, Artificial Sequence
  Synthetic
agcauauucaaaguuuuaaaauua

SEQ ID NO: 245438 - RNA, 18 nt, Artificial Sequence
  Synthetic
uuuuaaucuaacaaauua

SEQ ID NO: 245439 - RNA, 19 nt, Artificial Sequence
  Synthetic
auuuuaaucuaacaaauua

SEQ ID NO: 245440 - RNA, 20 nt, Artificial Sequence
  Synthetic
uauuuuaaucuaacaaauua

SEQ ID NO: 245441 - RNA, 21 nt, Artificial Sequence
  Synthetic
cuauuuuaaucuaacaaauua

SEQ ID NO: 245442 - RNA, 22 nt, Artificial Sequence
  Synthetic
ucuauuuuaaucuaacaaauua

SEQ ID NO: 245443 - RNA, 23 nt, Artificial Sequence
  Synthetic
gucuauuuuaaucuaacaaauua

SEQ ID NO: 245444 - RNA, 24 nt, Artificial Sequence
  Synthetic
ugucuauuuuaaucuaacaaauua

SEQ ID NO: 245445 - RNA, 18 nt, Artificial Sequence
  Synthetic
auuuaacuuuccaaauua

SEQ ID NO: 245446 - RNA, 19 nt, Artificial Sequence
  Synthetic
cauuuaacuuuccaaauua

SEQ ID NO: 245447 - RNA, 20 nt, Artificial Sequence
  Synthetic
acauuuaacuuuccaaauua

SEQ ID NO: 245448 - RNA, 21 nt, Artificial Sequence
  Synthetic
gacauuuaacuuuccaaauua

SEQ ID NO: 245449 - RNA, 22 nt, Artificial Sequence
  Synthetic
ugacauuuaacuuuccaaauua

SEQ ID NO: 245450 - RNA, 23 nt, Artificial Sequence
  Synthetic
gugacauuuaacuuuccaaauua

SEQ ID NO: 245451 - RNA, 24 nt, Artificial Sequence
  Synthetic
cgugacauuuaacuuuccaaauua

SEQ ID NO: 245452 - RNA, 18 nt, Artificial Sequence
  Synthetic
aauaaagucagcaaauua

SEQ ID NO: 245453 - RNA, 19 nt, Artificial Sequence
  Synthetic
uaauaaagucagcaaauua

SEQ ID NO: 245454 - RNA, 20 nt, Artificial Sequence
  Synthetic
uuaauaaagucagcaaauua

SEQ ID NO: 245455 - RNA, 21 nt, Artificial Sequence
  Synthetic
uuuaauaaagucagcaaauua

SEQ ID NO: 245456 - RNA, 22 nt, Artificial Sequence
  Synthetic
uuuuaauaaagucagcaaauua

SEQ ID NO: 245457 - RNA, 23 nt, Artificial Sequence
  Synthetic
cuuuuaauaaagucagcaaauua

SEQ ID NO: 245458 - RNA, 24 nt, Artificial Sequence
  Synthetic
ccuuuuaauaaagucagcaaauua

SEQ ID NO: 245459 - RNA, 18 nt, Artificial Sequence
  Synthetic
uguuaaaaaugcaaauua

SEQ ID NO: 245460 - RNA, 19 nt, Artificial Sequence
  Synthetic
uuguuaaaaaugcaaauua

SEQ ID NO: 245461 - RNA, 20 nt, Artificial Sequence
  Synthetic
auuguuaaaaaugcaaauua

SEQ ID NO: 245462 - RNA, 21 nt, Artificial Sequence
  Synthetic
aauuguuaaaaaugcaaauua

SEQ ID NO: 245463 - RNA, 22 nt, Artificial Sequence
  Synthetic
aaauuguuaaaaaugcaaauua

SEQ ID NO: 245464 - RNA, 23 nt, Artificial Sequence
  Synthetic
aaaauuguuaaaaaugcaaauua

SEQ ID NO: 245465 - RNA, 24 nt, Artificial Sequence
  Synthetic
gaaaauuguuaaaaaugcaaauua

SEQ ID NO: 245466 - RNA, 18 nt, Artificial Sequence
  Synthetic
uaugcaugaaucaaauua

SEQ ID NO: 245467 - RNA, 19 nt, Artificial Sequence
  Synthetic
auaugcaugaaucaaauua

SEQ ID NO: 245468 - RNA, 20 nt, Artificial Sequence
  Synthetic
gauaugcaugaaucaaauua

SEQ ID NO: 245469 - RNA, 21 nt, Artificial Sequence
  Synthetic
agauaugcaugaaucaaauua

SEQ ID NO: 245470 - RNA, 22 nt, Artificial Sequence
  Synthetic
cagauaugcaugaaucaaauua

SEQ ID NO: 245471 - RNA, 23 nt, Artificial Sequence
  Synthetic
acagauaugcaugaaucaaauua

SEQ ID NO: 245472 - RNA, 24 nt, Artificial Sequence
  Synthetic
gacagauaugcaugaaucaaauua

SEQ ID NO: 245473 - RNA, 18 nt, Artificial Sequence
  Synthetic
ucuuaacuucagaaauua

SEQ ID NO: 245474 - RNA, 19 nt, Artificial Sequence
  Synthetic
aucuuaacuucagaaauua

SEQ ID NO: 245475 - RNA, 20 nt, Artificial Sequence
  Synthetic
caucuuaacuucagaaauua

SEQ ID NO: 245476 - RNA, 21 nt, Artificial Sequence
  Synthetic
ucaucuuaacuucagaaauua

SEQ ID NO: 245477 - RNA, 22 nt, Artificial Sequence
  Synthetic
uucaucuuaacuucagaaauua

SEQ ID NO: 245478 - RNA, 23 nt, Artificial Sequence
  Synthetic
cuucaucuuaacuucagaaauua

SEQ ID NO: 245479 - RNA, 24 nt, Artificial Sequence
  Synthetic
ucuucaucuuaacuucagaaauua

SEQ ID NO: 245480 - RNA, 18 nt, Artificial Sequence
  Synthetic
cucaucuaauagaaauua

SEQ ID NO: 245481 - RNA, 19 nt, Artificial Sequence
  Synthetic
acucaucuaauagaaauua

SEQ ID NO: 245482 - RNA, 20 nt, Artificial Sequence
  Synthetic
cacucaucuaauagaaauua

SEQ ID NO: 245483 - RNA, 21 nt, Artificial Sequence
  Synthetic
ucacucaucuaauagaaauua

SEQ ID NO: 245484 - RNA, 22 nt, Artificial Sequence
  Synthetic
aucacucaucuaauagaaauua

SEQ ID NO: 245485 - RNA, 23 nt, Artificial Sequence
  Synthetic
aaucacucaucuaauagaaauua

SEQ ID NO: 245486 - RNA, 24 nt, Artificial Sequence
  Synthetic
aaaucacucaucuaauagaaauua

SEQ ID NO: 245487 - RNA, 18 nt, Artificial Sequence
  Synthetic
acacuauccaggaaauua

SEQ ID NO: 245488 - RNA, 19 nt, Artificial Sequence
  Synthetic
aacacuauccaggaaauua

SEQ ID NO: 245489 - RNA, 20 nt, Artificial Sequence
  Synthetic
gaacacuauccaggaaauua

SEQ ID NO: 245490 - RNA, 21 nt, Artificial Sequence
  Synthetic
ugaacacuauccaggaaauua

SEQ ID NO: 245491 - RNA, 22 nt, Artificial Sequence
  Synthetic
uugaacacuauccaggaaauua

SEQ ID NO: 245492 - RNA, 23 nt, Artificial Sequence
  Synthetic
uuugaacacuauccaggaaauua

SEQ ID NO: 245493 - RNA, 24 nt, Artificial Sequence
  Synthetic
auuugaacacuauccaggaaauua

SEQ ID NO: 245494 - RNA, 18 nt, Artificial Sequence
  Synthetic
aagugggcuaggaaauua

SEQ ID NO: 245495 - RNA, 19 nt, Artificial Sequence
  Synthetic
aaagugggcuaggaaauua

SEQ ID NO: 245496 - RNA, 20 nt, Artificial Sequence
  Synthetic
uaaagugggcuaggaaauua

SEQ ID NO: 245497 - RNA, 21 nt, Artificial Sequence
  Synthetic
guaaagugggcuaggaaauua

SEQ ID NO: 245498 - RNA, 22 nt, Artificial Sequence
  Synthetic
gguaaagugggcuaggaaauua

SEQ ID NO: 245499 - RNA, 23 nt, Artificial Sequence
  Synthetic
cgguaaagugggcuaggaaauua

SEQ ID NO: 245500 - RNA, 24 nt, Artificial Sequence
  Synthetic
ccgguaaagugggcuaggaaauua

SEQ ID NO: 245501 - RNA, 18 nt, Artificial Sequence
  Synthetic
gaagaaaaccugaaauua

SEQ ID NO: 245502 - RNA, 19 nt, Artificial Sequence
  Synthetic
ugaagaaaaccugaaauua

SEQ ID NO: 245503 - RNA, 20 nt, Artificial Sequence
  Synthetic
cugaagaaaaccugaaauua

SEQ ID NO: 245504 - RNA, 21 nt, Artificial Sequence
  Synthetic
ccugaagaaaaccugaaauua

SEQ ID NO: 245505 - RNA, 22 nt, Artificial Sequence
  Synthetic
uccugaagaaaaccugaaauua

SEQ ID NO: 245506 - RNA, 23 nt, Artificial Sequence
  Synthetic
auccugaagaaaaccugaaauua

SEQ ID NO: 245507 - RNA, 24 nt, Artificial Sequence
  Synthetic
cauccugaagaaaaccugaaauua

SEQ ID NO: 245508 - RNA, 18 nt, Artificial Sequence
  Synthetic
cuuuaaguccugaaauua

SEQ ID NO: 245509 - RNA, 19 nt, Artificial Sequence
  Synthetic
acuuuaaguccugaaauua

SEQ ID NO: 245510 - RNA, 20 nt, Artificial Sequence
  Synthetic
uacuuuaaguccugaaauua

SEQ ID NO: 245511 - RNA, 21 nt, Artificial Sequence
  Synthetic
auacuuuaaguccugaaauua

SEQ ID NO: 245512 - RNA, 22 nt, Artificial Sequence
  Synthetic
aauacuuuaaguccugaaauua

SEQ ID NO: 245513 - RNA, 23 nt, Artificial Sequence
  Synthetic
aaauacuuuaaguccugaaauua

SEQ ID NO: 245514 - RNA, 24 nt, Artificial Sequence
  Synthetic
uaaauacuuuaaguccugaaauua

SEQ ID NO: 245515 - RNA, 18 nt, Artificial Sequence
  Synthetic
uagcucaugcugaaauua

SEQ ID NO: 245516 - RNA, 19 nt, Artificial Sequence
  Synthetic
guagcucaugcugaaauua

SEQ ID NO: 245517 - RNA, 20 nt, Artificial Sequence
  Synthetic
aguagcucaugcugaaauua

SEQ ID NO: 245518 - RNA, 21 nt, Artificial Sequence
  Synthetic
caguagcucaugcugaaauua

SEQ ID NO: 245519 - RNA, 22 nt, Artificial Sequence
  Synthetic
ucaguagcucaugcugaaauua

SEQ ID NO: 245520 - RNA, 23 nt, Artificial Sequence
  Synthetic
cucaguagcucaugcugaaauua

SEQ ID NO: 245521 - RNA, 24 nt, Artificial Sequence
  Synthetic
acucaguagcucaugcugaaauua

SEQ ID NO: 245522 - RNA, 18 nt, Artificial Sequence
  Synthetic
caauaccucgugaaauua

SEQ ID NO: 245523 - RNA, 19 nt, Artificial Sequence
  Synthetic
ucaauaccucgugaaauua

SEQ ID NO: 245524 - RNA, 20 nt, Artificial Sequence
  Synthetic
uucaauaccucgugaaauua

SEQ ID NO: 245525 - RNA, 21 nt, Artificial Sequence
  Synthetic
auucaauaccucgugaaauua

SEQ ID NO: 245526 - RNA, 22 nt, Artificial Sequence
  Synthetic
uauucaauaccucgugaaauua

SEQ ID NO: 245527 - RNA, 23 nt, Artificial Sequence
  Synthetic
uuauucaauaccucgugaaauua

SEQ ID NO: 245528 - RNA, 24 nt, Artificial Sequence
  Synthetic
uuuauucaauaccucgugaaauua

SEQ ID NO: 245529 - RNA, 18 nt, Artificial Sequence
  Synthetic
uaguuucauuugaaauua

SEQ ID NO: 245530 - RNA, 19 nt, Artificial Sequence
  Synthetic
auaguuucauuugaaauua

SEQ ID NO: 245531 - RNA, 20 nt, Artificial Sequence
  Synthetic
aauaguuucauuugaaauua

SEQ ID NO: 245532 - RNA, 21 nt, Artificial Sequence
  Synthetic
aaauaguuucauuugaaauua

SEQ ID NO: 245533 - RNA, 22 nt, Artificial Sequence
  Synthetic
gaaauaguuucauuugaaauua

SEQ ID NO: 245534 - RNA, 23 nt, Artificial Sequence
  Synthetic
ugaaauaguuucauuugaaauua

SEQ ID NO: 245535 - RNA, 24 nt, Artificial Sequence
  Synthetic
uugaaauaguuucauuugaaauua

SEQ ID NO: 245536 - RNA, 18 nt, Artificial Sequence
  Synthetic
auacauauauauaaauua

SEQ ID NO: 245537 - RNA, 19 nt, Artificial Sequence
  Synthetic
aauacauauauauaaauua

SEQ ID NO: 245538 - RNA, 20 nt, Artificial Sequence
  Synthetic
uaauacauauauauaaauua

SEQ ID NO: 245539 - RNA, 21 nt, Artificial Sequence
  Synthetic
auaauacauauauauaaauua

SEQ ID NO: 245540 - RNA, 22 nt, Artificial Sequence
  Synthetic
uauaauacauauauauaaauua

SEQ ID NO: 245541 - RNA, 23 nt, Artificial Sequence
  Synthetic
auauaauacauauauauaaauua

SEQ ID NO: 245542 - RNA, 24 nt, Artificial Sequence
  Synthetic
uauauaauacauauauauaaauua

SEQ ID NO: 245543 - RNA, 18 nt, Artificial Sequence
  Synthetic
augacaauguauaaauua

SEQ ID NO: 245544 - RNA, 19 nt, Artificial Sequence
  Synthetic
gaugacaauguauaaauua

SEQ ID NO: 245545 - RNA, 20 nt, Artificial Sequence
  Synthetic
ugaugacaauguauaaauua

SEQ ID NO: 245546 - RNA, 21 nt, Artificial Sequence
  Synthetic
cugaugacaauguauaaauua

SEQ ID NO: 245547 - RNA, 22 nt, Artificial Sequence
  Synthetic
acugaugacaauguauaaauua

SEQ ID NO: 245548 - RNA, 23 nt, Artificial Sequence
  Synthetic
cacugaugacaauguauaaauua

SEQ ID NO: 245549 - RNA, 24 nt, Artificial Sequence
  Synthetic
acacugaugacaauguauaaauua

SEQ ID NO: 245550 - RNA, 18 nt, Artificial Sequence
  Synthetic
aaaugauguuauaaauua

SEQ ID NO: 245551 - RNA, 19 nt, Artificial Sequence
  Synthetic
uaaaugauguuauaaauua

SEQ ID NO: 245552 - RNA, 20 nt, Artificial Sequence
  Synthetic
guaaaugauguuauaaauua

SEQ ID NO: 245553 - RNA, 21 nt, Artificial Sequence
  Synthetic
uguaaaugauguuauaaauua

SEQ ID NO: 245554 - RNA, 22 nt, Artificial Sequence
  Synthetic
uuguaaaugauguuauaaauua

SEQ ID NO: 245555 - RNA, 23 nt, Artificial Sequence
  Synthetic
cuuguaaaugauguuauaaauua

SEQ ID NO: 245556 - RNA, 24 nt, Artificial Sequence
  Synthetic
acuuguaaaugauguuauaaauua

SEQ ID NO: 245557 - RNA, 18 nt, Artificial Sequence
  Synthetic
uguuaagugacuaaauua

SEQ ID NO: 245558 - RNA, 19 nt, Artificial Sequence
  Synthetic
uuguuaagugacuaaauua

SEQ ID NO: 245559 - RNA, 20 nt, Artificial Sequence
  Synthetic
uuuguuaagugacuaaauua

SEQ ID NO: 245560 - RNA, 21 nt, Artificial Sequence
  Synthetic
guuuguuaagugacuaaauua

SEQ ID NO: 245561 - RNA, 22 nt, Artificial Sequence
  Synthetic
aguuuguuaagugacuaaauua

SEQ ID NO: 245562 - RNA, 23 nt, Artificial Sequence
  Synthetic
aaguuuguuaagugacuaaauua

SEQ ID NO: 245563 - RNA, 24 nt, Artificial Sequence
  Synthetic
gaaguuuguuaagugacuaaauua

SEQ ID NO: 245564 - RNA, 18 nt, Artificial Sequence
  Synthetic
ucccuauugucuaaauua

SEQ ID NO: 245565 - RNA, 19 nt, Artificial Sequence
  Synthetic
aucccuauugucuaaauua

SEQ ID NO: 245566 - RNA, 20 nt, Artificial Sequence
  Synthetic
aaucccuauugucuaaauua

SEQ ID NO: 245567 - RNA, 21 nt, Artificial Sequence
  Synthetic
aaaucccuauugucuaaauua

SEQ ID NO: 245568 - RNA, 22 nt, Artificial Sequence
  Synthetic
uaaaucccuauugucuaaauua

SEQ ID NO: 245569 - RNA, 23 nt, Artificial Sequence
  Synthetic
auaaaucccuauugucuaaauua

SEQ ID NO: 245570 - RNA, 24 nt, Artificial Sequence
  Synthetic
gauaaaucccuauugucuaaauua

SEQ ID NO: 245571 - RNA, 18 nt, Artificial Sequence
  Synthetic
uuauuuuucuguaaauua

SEQ ID NO: 245572 - RNA, 19 nt, Artificial Sequence
  Synthetic
uuuauuuuucuguaaauua

SEQ ID NO: 245573 - RNA, 20 nt, Artificial Sequence
  Synthetic
uuuuauuuuucuguaaauua

SEQ ID NO: 245574 - RNA, 21 nt, Artificial Sequence
  Synthetic
auuuuauuuuucuguaaauua

SEQ ID NO: 245575 - RNA, 22 nt, Artificial Sequence
  Synthetic
uauuuuauuuuucuguaaauua

SEQ ID NO: 245576 - RNA, 23 nt, Artificial Sequence
  Synthetic
uuauuuuauuuuucuguaaauua

SEQ ID NO: 245577 - RNA, 24 nt, Artificial Sequence
  Synthetic
auuauuuuauuuuucuguaaauua

SEQ ID NO: 245578 - RNA, 18 nt, Artificial Sequence
  Synthetic
aaauaaauaaaccaauua

SEQ ID NO: 245579 - RNA, 19 nt, Artificial Sequence
  Synthetic
uaaauaaauaaaccaauua

SEQ ID NO: 245580 - RNA, 20 nt, Artificial Sequence
  Synthetic
uuaaauaaauaaaccaauua

SEQ ID NO: 245581 - RNA, 21 nt, Artificial Sequence
  Synthetic
auuaaauaaauaaaccaauua

SEQ ID NO: 245582 - RNA, 22 nt, Artificial Sequence
  Synthetic
uauuaaauaaauaaaccaauua

SEQ ID NO: 245583 - RNA, 23 nt, Artificial Sequence
  Synthetic
cuauuaaauaaauaaaccaauua

SEQ ID NO: 245584 - RNA, 24 nt, Artificial Sequence
  Synthetic
acuauuaaauaaauaaaccaauua

SEQ ID NO: 245585 - RNA, 18 nt, Artificial Sequence
  Synthetic
ucaugggcagcccaauua

SEQ ID NO: 245586 - RNA, 19 nt, Artificial Sequence
  Synthetic
uucaugggcagcccaauua

SEQ ID NO: 245587 - RNA, 20 nt, Artificial Sequence
  Synthetic
auucaugggcagcccaauua

SEQ ID NO: 245588 - RNA, 21 nt, Artificial Sequence
  Synthetic
cauucaugggcagcccaauua

SEQ ID NO: 245589 - RNA, 22 nt, Artificial Sequence
  Synthetic
ucauucaugggcagcccaauua

SEQ ID NO: 245590 - RNA, 23 nt, Artificial Sequence
  Synthetic
uucauucaugggcagcccaauua

SEQ ID NO: 245591 - RNA, 24 nt, Artificial Sequence
  Synthetic
cuucauucaugggcagcccaauua

SEQ ID NO: 245592 - RNA, 18 nt, Artificial Sequence
  Synthetic
gcagcauuuugccaauua

SEQ ID NO: 245593 - RNA, 19 nt, Artificial Sequence
  Synthetic
ugcagcauuuugccaauua

SEQ ID NO: 245594 - RNA, 20 nt, Artificial Sequence
  Synthetic
cugcagcauuuugccaauua

SEQ ID NO: 245595 - RNA, 21 nt, Artificial Sequence
  Synthetic
ccugcagcauuuugccaauua

SEQ ID NO: 245596 - RNA, 22 nt, Artificial Sequence
  Synthetic
accugcagcauuuugccaauua

SEQ ID NO: 245597 - RNA, 23 nt, Artificial Sequence
  Synthetic
aaccugcagcauuuugccaauua

SEQ ID NO: 245598 - RNA, 24 nt, Artificial Sequence
  Synthetic
aaaccugcagcauuuugccaauua

SEQ ID NO: 245599 - RNA, 18 nt, Artificial Sequence
  Synthetic
aggacacuaauccaauua

SEQ ID NO: 245600 - RNA, 19 nt, Artificial Sequence
  Synthetic
aaggacacuaauccaauua

SEQ ID NO: 245601 - RNA, 20 nt, Artificial Sequence
  Synthetic
aaaggacacuaauccaauua

SEQ ID NO: 245602 - RNA, 21 nt, Artificial Sequence
  Synthetic
aaaaggacacuaauccaauua

SEQ ID NO: 245603 - RNA, 22 nt, Artificial Sequence
  Synthetic
uaaaaggacacuaauccaauua

SEQ ID NO: 245604 - RNA, 23 nt, Artificial Sequence
  Synthetic
uuaaaaggacacuaauccaauua

SEQ ID NO: 245605 - RNA, 24 nt, Artificial Sequence
  Synthetic
cuuaaaaggacacuaauccaauua

SEQ ID NO: 245606 - RNA, 18 nt, Artificial Sequence
  Synthetic
uaagcagcacuccaauua

SEQ ID NO: 245607 - RNA, 19 nt, Artificial Sequence
  Synthetic
uuaagcagcacuccaauua

SEQ ID NO: 245608 - RNA, 20 nt, Artificial Sequence
  Synthetic
cuuaagcagcacuccaauua

SEQ ID NO: 245609 - RNA, 21 nt, Artificial Sequence
  Synthetic
acuuaagcagcacuccaauua

SEQ ID NO: 245610 - RNA, 22 nt, Artificial Sequence
  Synthetic
cacuuaagcagcacuccaauua

SEQ ID NO: 245611 - RNA, 23 nt, Artificial Sequence
  Synthetic
ucacuuaagcagcacuccaauua

SEQ ID NO: 245612 - RNA, 24 nt, Artificial Sequence
  Synthetic
uucacuuaagcagcacuccaauua

SEQ ID NO: 245613 - RNA, 18 nt, Artificial Sequence
  Synthetic
ucaagaaugcagcaauua

SEQ ID NO: 245614 - RNA, 19 nt, Artificial Sequence
  Synthetic
uucaagaaugcagcaauua

SEQ ID NO: 245615 - RNA, 20 nt, Artificial Sequence
  Synthetic
uuucaagaaugcagcaauua

SEQ ID NO: 245616 - RNA, 21 nt, Artificial Sequence
  Synthetic
uuuucaagaaugcagcaauua

SEQ ID NO: 245617 - RNA, 22 nt, Artificial Sequence
  Synthetic
uuuuucaagaaugcagcaauua

SEQ ID NO: 245618 - RNA, 23 nt, Artificial Sequence
  Synthetic
auuuuucaagaaugcagcaauua

SEQ ID NO: 245619 - RNA, 24 nt, Artificial Sequence
  Synthetic
aauuuuucaagaaugcagcaauua

SEQ ID NO: 245620 - RNA, 18 nt, Artificial Sequence
  Synthetic
uuguuuauacugcaauua

SEQ ID NO: 245621 - RNA, 19 nt, Artificial Sequence
  Synthetic
auuguuuauacugcaauua

SEQ ID NO: 245622 - RNA, 20 nt, Artificial Sequence
  Synthetic
uauuguuuauacugcaauua

SEQ ID NO: 245623 - RNA, 21 nt, Artificial Sequence
  Synthetic
auauuguuuauacugcaauua

SEQ ID NO: 245624 - RNA, 22 nt, Artificial Sequence
  Synthetic
cauauuguuuauacugcaauua

SEQ ID NO: 245625 - RNA, 23 nt, Artificial Sequence
  Synthetic
acauauuguuuauacugcaauua

SEQ ID NO: 245626 - RNA, 24 nt, Artificial Sequence
  Synthetic
gacauauuguuuauacugcaauua

SEQ ID NO: 245627 - RNA, 18 nt, Artificial Sequence
  Synthetic
aaaauaugacaucaauua

SEQ ID NO: 245628 - RNA, 19 nt, Artificial Sequence
  Synthetic
caaaauaugacaucaauua

SEQ ID NO: 245629 - RNA, 20 nt, Artificial Sequence
  Synthetic
ccaaaauaugacaucaauua

SEQ ID NO: 245630 - RNA, 21 nt, Artificial Sequence
  Synthetic
uccaaaauaugacaucaauua

SEQ ID NO: 245631 - RNA, 22 nt, Artificial Sequence
  Synthetic
uuccaaaauaugacaucaauua

SEQ ID NO: 245632 - RNA, 23 nt, Artificial Sequence
  Synthetic
guuccaaaauaugacaucaauua

SEQ ID NO: 245633 - RNA, 24 nt, Artificial Sequence
  Synthetic
aguuccaaaauaugacaucaauua

SEQ ID NO: 245634 - RNA, 18 nt, Artificial Sequence
  Synthetic
gaacaauaaagucaauua

SEQ ID NO: 245635 - RNA, 19 nt, Artificial Sequence
  Synthetic
ugaacaauaaagucaauua

SEQ ID NO: 245636 - RNA, 20 nt, Artificial Sequence
  Synthetic
augaacaauaaagucaauua

SEQ ID NO: 245637 - RNA, 21 nt, Artificial Sequence
  Synthetic
uaugaacaauaaagucaauua

SEQ ID NO: 245638 - RNA, 22 nt, Artificial Sequence
  Synthetic
uuaugaacaauaaagucaauua

SEQ ID NO: 245639 - RNA, 23 nt, Artificial Sequence
  Synthetic
auuaugaacaauaaagucaauua

SEQ ID NO: 245640 - RNA, 24 nt, Artificial Sequence
  Synthetic
uauuaugaacaauaaagucaauua

SEQ ID NO: 245641 - RNA, 18 nt, Artificial Sequence
  Synthetic
ugauuuuuuagucaauua

SEQ ID NO: 245642 - RNA, 19 nt, Artificial Sequence
  Synthetic
uugauuuuuuagucaauua

SEQ ID NO: 245643 - RNA, 20 nt, Artificial Sequence
  Synthetic
cuugauuuuuuagucaauua

SEQ ID NO: 245644 - RNA, 21 nt, Artificial Sequence
  Synthetic
acuugauuuuuuagucaauua

SEQ ID NO: 245645 - RNA, 22 nt, Artificial Sequence
  Synthetic
gacuugauuuuuuagucaauua

SEQ ID NO: 245646 - RNA, 23 nt, Artificial Sequence
  Synthetic
ugacuugauuuuuuagucaauua

SEQ ID NO: 245647 - RNA, 24 nt, Artificial Sequence
  Synthetic
uugacuugauuuuuuagucaauua

SEQ ID NO: 245648 - RNA, 18 nt, Artificial Sequence
  Synthetic
agauacuugauucaauua

SEQ ID NO: 245649 - RNA, 19 nt, Artificial Sequence
  Synthetic
uagauacuugauucaauua

SEQ ID NO: 245650 - RNA, 20 nt, Artificial Sequence
  Synthetic
cuagauacuugauucaauua

SEQ ID NO: 245651 - RNA, 21 nt, Artificial Sequence
  Synthetic
acuagauacuugauucaauua

SEQ ID NO: 245652 - RNA, 22 nt, Artificial Sequence
  Synthetic
aacuagauacuugauucaauua

SEQ ID NO: 245653 - RNA, 23 nt, Artificial Sequence
  Synthetic
caacuagauacuugauucaauua

SEQ ID NO: 245654 - RNA, 24 nt, Artificial Sequence
  Synthetic
gcaacuagauacuugauucaauua

SEQ ID NO: 245655 - RNA, 18 nt, Artificial Sequence
  Synthetic
aucuucucucuucaauua

SEQ ID NO: 245656 - RNA, 19 nt, Artificial Sequence
  Synthetic
caucuucucucuucaauua

SEQ ID NO: 245657 - RNA, 20 nt, Artificial Sequence
  Synthetic
ucaucuucucucuucaauua

SEQ ID NO: 245658 - RNA, 21 nt, Artificial Sequence
  Synthetic
gucaucuucucucuucaauua

SEQ ID NO: 245659 - RNA, 22 nt, Artificial Sequence
  Synthetic
ugucaucuucucucuucaauua

SEQ ID NO: 245660 - RNA, 23 nt, Artificial Sequence
  Synthetic
cugucaucuucucucuucaauua

SEQ ID NO: 245661 - RNA, 24 nt, Artificial Sequence
  Synthetic
acugucaucuucucucuucaauua

SEQ ID NO: 245662 - RNA, 18 nt, Artificial Sequence
  Synthetic
uuuuuuuguuuucaauua

SEQ ID NO: 245663 - RNA, 19 nt, Artificial Sequence
  Synthetic
cuuuuuuuguuuucaauua

SEQ ID NO: 245664 - RNA, 20 nt, Artificial Sequence
  Synthetic
acuuuuuuuguuuucaauua

SEQ ID NO: 245665 - RNA, 21 nt, Artificial Sequence
  Synthetic
cacuuuuuuuguuuucaauua

SEQ ID NO: 245666 - RNA, 22 nt, Artificial Sequence
  Synthetic
ccacuuuuuuuguuuucaauua

SEQ ID NO: 245667 - RNA, 23 nt, Artificial Sequence
  Synthetic
cccacuuuuuuuguuuucaauua

SEQ ID NO: 245668 - RNA, 24 nt, Artificial Sequence
  Synthetic
ccccacuuuuuuuguuuucaauua

SEQ ID NO: 245669 - RNA, 18 nt, Artificial Sequence
  Synthetic
guagcuaaaaaagaauua

SEQ ID NO: 245670 - RNA, 19 nt, Artificial Sequence
  Synthetic
aguagcuaaaaaagaauua

SEQ ID NO: 245671 - RNA, 20 nt, Artificial Sequence
  Synthetic
uaguagcuaaaaaagaauua

SEQ ID NO: 245672 - RNA, 21 nt, Artificial Sequence
  Synthetic
guaguagcuaaaaaagaauua

SEQ ID NO: 245673 - RNA, 22 nt, Artificial Sequence
  Synthetic
gguaguagcuaaaaaagaauua

SEQ ID NO: 245674 - RNA, 23 nt, Artificial Sequence
  Synthetic
ugguaguagcuaaaaaagaauua

SEQ ID NO: 245675 - RNA, 24 nt, Artificial Sequence
  Synthetic
gugguaguagcuaaaaaagaauua

SEQ ID NO: 245676 - RNA, 18 nt, Artificial Sequence
  Synthetic
cugaggucuaaagaauua

SEQ ID NO: 245677 - RNA, 19 nt, Artificial Sequence
  Synthetic
acugaggucuaaagaauua

SEQ ID NO: 245678 - RNA, 20 nt, Artificial Sequence
  Synthetic
uacugaggucuaaagaauua

SEQ ID NO: 245679 - RNA, 21 nt, Artificial Sequence
  Synthetic
cuacugaggucuaaagaauua

SEQ ID NO: 245680 - RNA, 22 nt, Artificial Sequence
  Synthetic
ucuacugaggucuaaagaauua

SEQ ID NO: 245681 - RNA, 23 nt, Artificial Sequence
  Synthetic
cucuacugaggucuaaagaauua

SEQ ID NO: 245682 - RNA, 24 nt, Artificial Sequence
  Synthetic
ccucuacugaggucuaaagaauua

SEQ ID NO: 245683 - RNA, 18 nt, Artificial Sequence
  Synthetic
uaacuaguuccagaauua

SEQ ID NO: 245684 - RNA, 19 nt, Artificial Sequence
  Synthetic
auaacuaguuccagaauua

SEQ ID NO: 245685 - RNA, 20 nt, Artificial Sequence
  Synthetic
gauaacuaguuccagaauua

SEQ ID NO: 245686 - RNA, 21 nt, Artificial Sequence
  Synthetic
ugauaacuaguuccagaauua

SEQ ID NO: 245687 - RNA, 22 nt, Artificial Sequence
  Synthetic
cugauaacuaguuccagaauua

SEQ ID NO: 245688 - RNA, 23 nt, Artificial Sequence
  Synthetic
ccugauaacuaguuccagaauua

SEQ ID NO: 245689 - RNA, 24 nt, Artificial Sequence
  Synthetic
gccugauaacuaguuccagaauua

SEQ ID NO: 245690 - RNA, 18 nt, Artificial Sequence
  Synthetic
uccuuccacauagaauua

SEQ ID NO: 245691 - RNA, 19 nt, Artificial Sequence
  Synthetic
uuccuuccacauagaauua

SEQ ID NO: 245692 - RNA, 20 nt, Artificial Sequence
  Synthetic
uuuccuuccacauagaauua

SEQ ID NO: 245693 - RNA, 21 nt, Artificial Sequence
  Synthetic
uuuuccuuccacauagaauua

SEQ ID NO: 245694 - RNA, 22 nt, Artificial Sequence
  Synthetic
cuuuuccuuccacauagaauua

SEQ ID NO: 245695 - RNA, 23 nt, Artificial Sequence
  Synthetic
acuuuuccuuccacauagaauua

SEQ ID NO: 245696 - RNA, 24 nt, Artificial Sequence
  Synthetic
uacuuuuccuuccacauagaauua

SEQ ID NO: 245697 - RNA, 18 nt, Artificial Sequence
  Synthetic
agauuguugauagaauua

SEQ ID NO: 245698 - RNA, 19 nt, Artificial Sequence
  Synthetic
gagauuguugauagaauua

SEQ ID NO: 245699 - RNA, 20 nt, Artificial Sequence
  Synthetic
agagauuguugauagaauua

SEQ ID NO: 245700 - RNA, 21 nt, Artificial Sequence
  Synthetic
cagagauuguugauagaauua

SEQ ID NO: 245701 - RNA, 22 nt, Artificial Sequence
  Synthetic
gcagagauuguugauagaauua

SEQ ID NO: 245702 - RNA, 23 nt, Artificial Sequence
  Synthetic
agcagagauuguugauagaauua

SEQ ID NO: 245703 - RNA, 24 nt, Artificial Sequence
  Synthetic
aagcagagauuguugauagaauua

SEQ ID NO: 245704 - RNA, 18 nt, Artificial Sequence
  Synthetic
uuagaaguuuuagaauua

SEQ ID NO: 245705 - RNA, 19 nt, Artificial Sequence
  Synthetic
guuagaaguuuuagaauua

SEQ ID NO: 245706 - RNA, 20 nt, Artificial Sequence
  Synthetic
gguuagaaguuuuagaauua

SEQ ID NO: 245707 - RNA, 21 nt, Artificial Sequence
  Synthetic
ugguuagaaguuuuagaauua

SEQ ID NO: 245708 - RNA, 22 nt, Artificial Sequence
  Synthetic
augguuagaaguuuuagaauua

SEQ ID NO: 245709 - RNA, 23 nt, Artificial Sequence
  Synthetic
caugguuagaaguuuuagaauua

SEQ ID NO: 245710 - RNA, 24 nt, Artificial Sequence
  Synthetic
ucaugguuagaaguuuuagaauua

SEQ ID NO: 245711 - RNA, 18 nt, Artificial Sequence
  Synthetic
gguuuuccuaaggaauua

SEQ ID NO: 245712 - RNA, 19 nt, Artificial Sequence
  Synthetic
agguuuuccuaaggaauua

SEQ ID NO: 245713 - RNA, 20 nt, Artificial Sequence
  Synthetic
aagguuuuccuaaggaauua

SEQ ID NO: 245714 - RNA, 21 nt, Artificial Sequence
  Synthetic
uaagguuuuccuaaggaauua

SEQ ID NO: 245715 - RNA, 22 nt, Artificial Sequence
  Synthetic
cuaagguuuuccuaaggaauua

SEQ ID NO: 245716 - RNA, 23 nt, Artificial Sequence
  Synthetic
ccuaagguuuuccuaaggaauua

SEQ ID NO: 245717 - RNA, 24 nt, Artificial Sequence
  Synthetic
uccuaagguuuuccuaaggaauua

SEQ ID NO: 245718 - RNA, 18 nt, Artificial Sequence
  Synthetic
aucaggugggaggaauua

SEQ ID NO: 245719 - RNA, 19 nt, Artificial Sequence
  Synthetic
aaucaggugggaggaauua

SEQ ID NO: 245720 - RNA, 20 nt, Artificial Sequence
  Synthetic
aaaucaggugggaggaauua

SEQ ID NO: 245721 - RNA, 21 nt, Artificial Sequence
  Synthetic
caaaucaggugggaggaauua

SEQ ID NO: 245722 - RNA, 22 nt, Artificial Sequence
  Synthetic
acaaaucaggugggaggaauua

SEQ ID NO: 245723 - RNA, 23 nt, Artificial Sequence
  Synthetic
cacaaaucaggugggaggaauua

SEQ ID NO: 245724 - RNA, 24 nt, Artificial Sequence
  Synthetic
acacaaaucaggugggaggaauua

SEQ ID NO: 245725 - RNA, 18 nt, Artificial Sequence
  Synthetic
cuaacugcgagggaauua

SEQ ID NO: 245726 - RNA, 19 nt, Artificial Sequence
  Synthetic
ccuaacugcgagggaauua

SEQ ID NO: 245727 - RNA, 20 nt, Artificial Sequence
  Synthetic
accuaacugcgagggaauua

SEQ ID NO: 245728 - RNA, 21 nt, Artificial Sequence
  Synthetic
caccuaacugcgagggaauua

SEQ ID NO: 245729 - RNA, 22 nt, Artificial Sequence
  Synthetic
acaccuaacugcgagggaauua

SEQ ID NO: 245730 - RNA, 23 nt, Artificial Sequence
  Synthetic
cacaccuaacugcgagggaauua

SEQ ID NO: 245731 - RNA, 24 nt, Artificial Sequence
  Synthetic
ucacaccuaacugcgagggaauua

SEQ ID NO: 245732 - RNA, 18 nt, Artificial Sequence
  Synthetic
guggugaguugggaauua

SEQ ID NO: 245733 - RNA, 19 nt, Artificial Sequence
  Synthetic
uguggugaguugggaauua

SEQ ID NO: 245734 - RNA, 20 nt, Artificial Sequence
  Synthetic
uuguggugaguugggaauua

SEQ ID NO: 245735 - RNA, 21 nt, Artificial Sequence
  Synthetic
auuguggugaguugggaauua

SEQ ID NO: 245736 - RNA, 22 nt, Artificial Sequence
  Synthetic
uauuguggugaguugggaauua

SEQ ID NO: 245737 - RNA, 23 nt, Artificial Sequence
  Synthetic
uuauuguggugaguugggaauua

SEQ ID NO: 245738 - RNA, 24 nt, Artificial Sequence
  Synthetic
cuuauuguggugaguugggaauua

SEQ ID NO: 245739 - RNA, 18 nt, Artificial Sequence
  Synthetic
cagcagguaauggaauua

SEQ ID NO: 245740 - RNA, 19 nt, Artificial Sequence
  Synthetic
acagcagguaauggaauua

SEQ ID NO: 245741 - RNA, 20 nt, Artificial Sequence
  Synthetic
cacagcagguaauggaauua

SEQ ID NO: 245742 - RNA, 21 nt, Artificial Sequence
  Synthetic
gcacagcagguaauggaauua

SEQ ID NO: 245743 - RNA, 22 nt, Artificial Sequence
  Synthetic
ugcacagcagguaauggaauua

SEQ ID NO: 245744 - RNA, 23 nt, Artificial Sequence
  Synthetic
cugcacagcagguaauggaauua

SEQ ID NO: 245745 - RNA, 24 nt, Artificial Sequence
  Synthetic
ucugcacagcagguaauggaauua

SEQ ID NO: 245746 - RNA, 18 nt, Artificial Sequence
  Synthetic
gaagaguuaauggaauua

SEQ ID NO: 245747 - RNA, 19 nt, Artificial Sequence
  Synthetic
ggaagaguuaauggaauua

SEQ ID NO: 245748 - RNA, 20 nt, Artificial Sequence
  Synthetic
aggaagaguuaauggaauua

SEQ ID NO: 245749 - RNA, 21 nt, Artificial Sequence
  Synthetic
caggaagaguuaauggaauua

SEQ ID NO: 245750 - RNA, 22 nt, Artificial Sequence
  Synthetic
ucaggaagaguuaauggaauua

SEQ ID NO: 245751 - RNA, 23 nt, Artificial Sequence
  Synthetic
uucaggaagaguuaauggaauua

SEQ ID NO: 245752 - RNA, 24 nt, Artificial Sequence
  Synthetic
uuucaggaagaguuaauggaauua

SEQ ID NO: 245753 - RNA, 18 nt, Artificial Sequence
  Synthetic
uuucuaggugcugaauua

SEQ ID NO: 245754 - RNA, 19 nt, Artificial Sequence
  Synthetic
uuuucuaggugcugaauua

SEQ ID NO: 245755 - RNA, 20 nt, Artificial Sequence
  Synthetic
uuuuucuaggugcugaauua

SEQ ID NO: 245756 - RNA, 21 nt, Artificial Sequence
  Synthetic
guuuuucuaggugcugaauua

SEQ ID NO: 245757 - RNA, 22 nt, Artificial Sequence
  Synthetic
uguuuuucuaggugcugaauua

SEQ ID NO: 245758 - RNA, 23 nt, Artificial Sequence
  Synthetic
auguuuuucuaggugcugaauua

SEQ ID NO: 245759 - RNA, 24 nt, Artificial Sequence
  Synthetic
aauguuuuucuaggugcugaauua

SEQ ID NO: 245760 - RNA, 18 nt, Artificial Sequence
  Synthetic
aaggagaccugugaauua

SEQ ID NO: 245761 - RNA, 19 nt, Artificial Sequence
  Synthetic
aaaggagaccugugaauua

SEQ ID NO: 245762 - RNA, 20 nt, Artificial Sequence
  Synthetic
caaaggagaccugugaauua

SEQ ID NO: 245763 - RNA, 21 nt, Artificial Sequence
  Synthetic
ccaaaggagaccugugaauua

SEQ ID NO: 245764 - RNA, 22 nt, Artificial Sequence
  Synthetic
accaaaggagaccugugaauua

SEQ ID NO: 245765 - RNA, 23 nt, Artificial Sequence
  Synthetic
aaccaaaggagaccugugaauua

SEQ ID NO: 245766 - RNA, 24 nt, Artificial Sequence
  Synthetic
caaccaaaggagaccugugaauua

SEQ ID NO: 245767 - RNA, 18 nt, Artificial Sequence
  Synthetic
auacugauuugugaauua

SEQ ID NO: 245768 - RNA, 19 nt, Artificial Sequence
  Synthetic
aauacugauuugugaauua

SEQ ID NO: 245769 - RNA, 20 nt, Artificial Sequence
  Synthetic
aaauacugauuugugaauua

SEQ ID NO: 245770 - RNA, 21 nt, Artificial Sequence
  Synthetic
caaauacugauuugugaauua

SEQ ID NO: 245771 - RNA, 22 nt, Artificial Sequence
  Synthetic
acaaauacugauuugugaauua

SEQ ID NO: 245772 - RNA, 23 nt, Artificial Sequence
  Synthetic
gacaaauacugauuugugaauua

SEQ ID NO: 245773 - RNA, 24 nt, Artificial Sequence
  Synthetic
agacaaauacugauuugugaauua

SEQ ID NO: 245774 - RNA, 18 nt, Artificial Sequence
  Synthetic
aacccaauucaauaauua

SEQ ID NO: 245775 - RNA, 19 nt, Artificial Sequence
  Synthetic
uaacccaauucaauaauua

SEQ ID NO: 245776 - RNA, 20 nt, Artificial Sequence
  Synthetic
cuaacccaauucaauaauua

SEQ ID NO: 245777 - RNA, 21 nt, Artificial Sequence
  Synthetic
acuaacccaauucaauaauua

SEQ ID NO: 245778 - RNA, 22 nt, Artificial Sequence
  Synthetic
uacuaacccaauucaauaauua

SEQ ID NO: 245779 - RNA, 23 nt, Artificial Sequence
  Synthetic
guacuaacccaauucaauaauua

SEQ ID NO: 245780 - RNA, 24 nt, Artificial Sequence
  Synthetic
aguacuaacccaauucaauaauua

SEQ ID NO: 245781 - RNA, 18 nt, Artificial Sequence
  Synthetic
ucauucgucuaauaauua

SEQ ID NO: 245782 - RNA, 19 nt, Artificial Sequence
  Synthetic
aucauucgucuaauaauua

SEQ ID NO: 245783 - RNA, 20 nt, Artificial Sequence
  Synthetic
aaucauucgucuaauaauua

SEQ ID NO: 245784 - RNA, 21 nt, Artificial Sequence
  Synthetic
aaaucauucgucuaauaauua

SEQ ID NO: 245785 - RNA, 22 nt, Artificial Sequence
  Synthetic
caaaucauucgucuaauaauua

SEQ ID NO: 245786 - RNA, 23 nt, Artificial Sequence
  Synthetic
ucaaaucauucgucuaauaauua

SEQ ID NO: 245787 - RNA, 24 nt, Artificial Sequence
  Synthetic
aucaaaucauucgucuaauaauua

SEQ ID NO: 245788 - RNA, 18 nt, Artificial Sequence
  Synthetic
uuguuaucaucauaauua

SEQ ID NO: 245789 - RNA, 19 nt, Artificial Sequence
  Synthetic
auuguuaucaucauaauua

SEQ ID NO: 245790 - RNA, 20 nt, Artificial Sequence
  Synthetic
uauuguuaucaucauaauua

SEQ ID NO: 245791 - RNA, 21 nt, Artificial Sequence
  Synthetic
cuauuguuaucaucauaauua

SEQ ID NO: 245792 - RNA, 22 nt, Artificial Sequence
  Synthetic
acuauuguuaucaucauaauua

SEQ ID NO: 245793 - RNA, 23 nt, Artificial Sequence
  Synthetic
uacuauuguuaucaucauaauua

SEQ ID NO: 245794 - RNA, 24 nt, Artificial Sequence
  Synthetic
cuacuauuguuaucaucauaauua

SEQ ID NO: 245795 - RNA, 18 nt, Artificial Sequence
  Synthetic
uuugucucuucauaauua

SEQ ID NO: 245796 - RNA, 19 nt, Artificial Sequence
  Synthetic
cuuugucucuucauaauua

SEQ ID NO: 245797 - RNA, 20 nt, Artificial Sequence
  Synthetic
acuuugucucuucauaauua

SEQ ID NO: 245798 - RNA, 21 nt, Artificial Sequence
  Synthetic
aacuuugucucuucauaauua

SEQ ID NO: 245799 - RNA, 22 nt, Artificial Sequence
  Synthetic
aaacuuugucucuucauaauua

SEQ ID NO: 245800 - RNA, 23 nt, Artificial Sequence
  Synthetic
uaaacuuugucucuucauaauua

SEQ ID NO: 245801 - RNA, 24 nt, Artificial Sequence
  Synthetic
uuaaacuuugucucuucauaauua

SEQ ID NO: 245802 - RNA, 18 nt, Artificial Sequence
  Synthetic
aauuuuuuuguauaauua

SEQ ID NO: 245803 - RNA, 19 nt, Artificial Sequence
  Synthetic
uaauuuuuuuguauaauua

SEQ ID NO: 245804 - RNA, 20 nt, Artificial Sequence
  Synthetic
cuaauuuuuuuguauaauua

SEQ ID NO: 245805 - RNA, 21 nt, Artificial Sequence
  Synthetic
ccuaauuuuuuuguauaauua

SEQ ID NO: 245806 - RNA, 22 nt, Artificial Sequence
  Synthetic
accuaauuuuuuuguauaauua

SEQ ID NO: 245807 - RNA, 23 nt, Artificial Sequence
  Synthetic
aaccuaauuuuuuuguauaauua

SEQ ID NO: 245808 - RNA, 24 nt, Artificial Sequence
  Synthetic
aaaccuaauuuuuuuguauaauua

SEQ ID NO: 245809 - RNA, 18 nt, Artificial Sequence
  Synthetic
cugccaauacccuaauua

SEQ ID NO: 245810 - RNA, 19 nt, Artificial Sequence
  Synthetic
ccugccaauacccuaauua

SEQ ID NO: 245811 - RNA, 20 nt, Artificial Sequence
  Synthetic
gccugccaauacccuaauua

SEQ ID NO: 245812 - RNA, 21 nt, Artificial Sequence
  Synthetic
ugccugccaauacccuaauua

SEQ ID NO: 245813 - RNA, 22 nt, Artificial Sequence
  Synthetic
uugccugccaauacccuaauua

SEQ ID NO: 245814 - RNA, 23 nt, Artificial Sequence
  Synthetic
uuugccugccaauacccuaauua

SEQ ID NO: 245815 - RNA, 24 nt, Artificial Sequence
  Synthetic
cuuugccugccaauacccuaauua

SEQ ID NO: 245816 - RNA, 18 nt, Artificial Sequence
  Synthetic
acccaugauugcuaauua

SEQ ID NO: 245817 - RNA, 19 nt, Artificial Sequence
  Synthetic
cacccaugauugcuaauua

SEQ ID NO: 245818 - RNA, 20 nt, Artificial Sequence
  Synthetic
ccacccaugauugcuaauua

SEQ ID NO: 245819 - RNA, 21 nt, Artificial Sequence
  Synthetic
uccacccaugauugcuaauua

SEQ ID NO: 245820 - RNA, 22 nt, Artificial Sequence
  Synthetic
uuccacccaugauugcuaauua

SEQ ID NO: 245821 - RNA, 23 nt, Artificial Sequence
  Synthetic
uuuccacccaugauugcuaauua

SEQ ID NO: 245822 - RNA, 24 nt, Artificial Sequence
  Synthetic
guuuccacccaugauugcuaauua

SEQ ID NO: 245823 - RNA, 18 nt, Artificial Sequence
  Synthetic
ugauguagccaguaauua

SEQ ID NO: 245824 - RNA, 19 nt, Artificial Sequence
  Synthetic
cugauguagccaguaauua

SEQ ID NO: 245825 - RNA, 20 nt, Artificial Sequence
  Synthetic
acugauguagccaguaauua

SEQ ID NO: 245826 - RNA, 21 nt, Artificial Sequence
  Synthetic
aacugauguagccaguaauua

SEQ ID NO: 245827 - RNA, 22 nt, Artificial Sequence
  Synthetic
gaacugauguagccaguaauua

SEQ ID NO: 245828 - RNA, 23 nt, Artificial Sequence
  Synthetic
agaacugauguagccaguaauua

SEQ ID NO: 245829 - RNA, 24 nt, Artificial Sequence
  Synthetic
cagaacugauguagccaguaauua

SEQ ID NO: 245830 - RNA, 18 nt, Artificial Sequence
  Synthetic
uuccucagugcguaauua

SEQ ID NO: 245831 - RNA, 19 nt, Artificial Sequence
  Synthetic
guuccucagugcguaauua

SEQ ID NO: 245832 - RNA, 20 nt, Artificial Sequence
  Synthetic
uguuccucagugcguaauua

SEQ ID NO: 245833 - RNA, 21 nt, Artificial Sequence
  Synthetic
uuguuccucagugcguaauua

SEQ ID NO: 245834 - RNA, 22 nt, Artificial Sequence
  Synthetic
guuguuccucagugcguaauua

SEQ ID NO: 245835 - RNA, 23 nt, Artificial Sequence
  Synthetic
aguuguuccucagugcguaauua

SEQ ID NO: 245836 - RNA, 24 nt, Artificial Sequence
  Synthetic
gaguuguuccucagugcguaauua

SEQ ID NO: 245837 - RNA, 18 nt, Artificial Sequence
  Synthetic
ugguggaagagguaauua

SEQ ID NO: 245838 - RNA, 19 nt, Artificial Sequence
  Synthetic
cugguggaagagguaauua

SEQ ID NO: 245839 - RNA, 20 nt, Artificial Sequence
  Synthetic
ucugguggaagagguaauua

SEQ ID NO: 245840 - RNA, 21 nt, Artificial Sequence
  Synthetic
uucugguggaagagguaauua

SEQ ID NO: 245841 - RNA, 22 nt, Artificial Sequence
  Synthetic
auucugguggaagagguaauua

SEQ ID NO: 245842 - RNA, 23 nt, Artificial Sequence
  Synthetic
aauucugguggaagagguaauua

SEQ ID NO: 245843 - RNA, 24 nt, Artificial Sequence
  Synthetic
caauucugguggaagagguaauua

SEQ ID NO: 245844 - RNA, 18 nt, Artificial Sequence
  Synthetic
gaucaucaucuguaauua

SEQ ID NO: 245845 - RNA, 19 nt, Artificial Sequence
  Synthetic
ugaucaucaucuguaauua

SEQ ID NO: 245846 - RNA, 20 nt, Artificial Sequence
  Synthetic
augaucaucaucuguaauua

SEQ ID NO: 245847 - RNA, 21 nt, Artificial Sequence
  Synthetic
aaugaucaucaucuguaauua

SEQ ID NO: 245848 - RNA, 22 nt, Artificial Sequence
  Synthetic
gaaugaucaucaucuguaauua

SEQ ID NO: 245849 - RNA, 23 nt, Artificial Sequence
  Synthetic
ggaaugaucaucaucuguaauua

SEQ ID NO: 245850 - RNA, 24 nt, Artificial Sequence
  Synthetic
aggaaugaucaucaucuguaauua

SEQ ID NO: 245851 - RNA, 18 nt, Artificial Sequence
  Synthetic
uaaccuaacaauuaauua

SEQ ID NO: 245852 - RNA, 19 nt, Artificial Sequence
  Synthetic
uuaaccuaacaauuaauua

SEQ ID NO: 245853 - RNA, 20 nt, Artificial Sequence
  Synthetic
guuaaccuaacaauuaauua

SEQ ID NO: 245854 - RNA, 21 nt, Artificial Sequence
  Synthetic
uguuaaccuaacaauuaauua

SEQ ID NO: 245855 - RNA, 22 nt, Artificial Sequence
  Synthetic
auguuaaccuaacaauuaauua

SEQ ID NO: 245856 - RNA, 23 nt, Artificial Sequence
  Synthetic
uauguuaaccuaacaauuaauua

SEQ ID NO: 245857 - RNA, 24 nt, Artificial Sequence
  Synthetic
auauguuaaccuaacaauuaauua

SEQ ID NO: 245858 - RNA, 18 nt, Artificial Sequence
  Synthetic
gaaccuuaagauuaauua

SEQ ID NO: 245859 - RNA, 19 nt, Artificial Sequence
  Synthetic
ugaaccuuaagauuaauua

SEQ ID NO: 245860 - RNA, 20 nt, Artificial Sequence
  Synthetic
gugaaccuuaagauuaauua

SEQ ID NO: 245861 - RNA, 21 nt, Artificial Sequence
  Synthetic
agugaaccuuaagauuaauua

SEQ ID NO: 245862 - RNA, 22 nt, Artificial Sequence
  Synthetic
aagugaaccuuaagauuaauua

SEQ ID NO: 245863 - RNA, 23 nt, Artificial Sequence
  Synthetic
aaagugaaccuuaagauuaauua

SEQ ID NO: 245864 - RNA, 24 nt, Artificial Sequence
  Synthetic
aaaagugaaccuuaagauuaauua

SEQ ID NO: 245865 - RNA, 18 nt, Artificial Sequence
  Synthetic
auaguagauuauuaauua

SEQ ID NO: 245866 - RNA, 19 nt, Artificial Sequence
  Synthetic
cauaguagauuauuaauua

SEQ ID NO: 245867 - RNA, 20 nt, Artificial Sequence
  Synthetic
acauaguagauuauuaauua

SEQ ID NO: 245868 - RNA, 21 nt, Artificial Sequence
  Synthetic
cacauaguagauuauuaauua

SEQ ID NO: 245869 - RNA, 22 nt, Artificial Sequence
  Synthetic
gcacauaguagauuauuaauua

SEQ ID NO: 245870 - RNA, 23 nt, Artificial Sequence
  Synthetic
ggcacauaguagauuauuaauua

SEQ ID NO: 245871 - RNA, 24 nt, Artificial Sequence
  Synthetic
uggcacauaguagauuauuaauua

SEQ ID NO: 245872 - RNA, 18 nt, Artificial Sequence
  Synthetic
aauugugacacuuaauua

SEQ ID NO: 245873 - RNA, 19 nt, Artificial Sequence
  Synthetic
aaauugugacacuuaauua

SEQ ID NO: 245874 - RNA, 20 nt, Artificial Sequence
  Synthetic
caaauugugacacuuaauua

SEQ ID NO: 245875 - RNA, 21 nt, Artificial Sequence
  Synthetic
gcaaauugugacacuuaauua

SEQ ID NO: 245876 - RNA, 22 nt, Artificial Sequence
  Synthetic
cgcaaauugugacacuuaauua

SEQ ID NO: 245877 - RNA, 23 nt, Artificial Sequence
  Synthetic
acgcaaauugugacacuuaauua

SEQ ID NO: 245878 - RNA, 24 nt, Artificial Sequence
  Synthetic
uacgcaaauugugacacuuaauua

SEQ ID NO: 245879 - RNA, 18 nt, Artificial Sequence
  Synthetic
cucuuucuuuuuuaauua

SEQ ID NO: 245880 - RNA, 19 nt, Artificial Sequence
  Synthetic
acucuuucuuuuuuaauua

SEQ ID NO: 245881 - RNA, 20 nt, Artificial Sequence
  Synthetic
cacucuuucuuuuuuaauua

SEQ ID NO: 245882 - RNA, 21 nt, Artificial Sequence
  Synthetic
ccacucuuucuuuuuuaauua

SEQ ID NO: 245883 - RNA, 22 nt, Artificial Sequence
  Synthetic
cccacucuuucuuuuuuaauua

SEQ ID NO: 245884 - RNA, 23 nt, Artificial Sequence
  Synthetic
gcccacucuuucuuuuuuaauua

SEQ ID NO: 245885 - RNA, 24 nt, Artificial Sequence
  Synthetic
ggcccacucuuucuuuuuuaauua

SEQ ID NO: 245886 - RNA, 18 nt, Artificial Sequence
  Synthetic
guuaggaacacaacauua

SEQ ID NO: 245887 - RNA, 19 nt, Artificial Sequence
  Synthetic
gguuaggaacacaacauua

SEQ ID NO: 245888 - RNA, 20 nt, Artificial Sequence
  Synthetic
cgguuaggaacacaacauua

SEQ ID NO: 245889 - RNA, 21 nt, Artificial Sequence
  Synthetic
ucgguuaggaacacaacauua

SEQ ID NO: 245890 - RNA, 22 nt, Artificial Sequence
  Synthetic
cucgguuaggaacacaacauua

SEQ ID NO: 245891 - RNA, 23 nt, Artificial Sequence
  Synthetic
gcucgguuaggaacacaacauua

SEQ ID NO: 245892 - RNA, 24 nt, Artificial Sequence
  Synthetic
agcucgguuaggaacacaacauua

SEQ ID NO: 245893 - RNA, 18 nt, Artificial Sequence
  Synthetic
aggcagagaccaacauua

SEQ ID NO: 245894 - RNA, 19 nt, Artificial Sequence
  Synthetic
aaggcagagaccaacauua

SEQ ID NO: 245895 - RNA, 20 nt, Artificial Sequence
  Synthetic
caaggcagagaccaacauua

SEQ ID NO: 245896 - RNA, 21 nt, Artificial Sequence
  Synthetic
gcaaggcagagaccaacauua

SEQ ID NO: 245897 - RNA, 22 nt, Artificial Sequence
  Synthetic
ugcaaggcagagaccaacauua

SEQ ID NO: 245898 - RNA, 23 nt, Artificial Sequence
  Synthetic
uugcaaggcagagaccaacauua

SEQ ID NO: 245899 - RNA, 24 nt, Artificial Sequence
  Synthetic
guugcaaggcagagaccaacauua

SEQ ID NO: 245900 - RNA, 18 nt, Artificial Sequence
  Synthetic
gcauuacuaccaacauua

SEQ ID NO: 245901 - RNA, 19 nt, Artificial Sequence
  Synthetic
ugcauuacuaccaacauua

SEQ ID NO: 245902 - RNA, 20 nt, Artificial Sequence
  Synthetic
gugcauuacuaccaacauua

SEQ ID NO: 245903 - RNA, 21 nt, Artificial Sequence
  Synthetic
ggugcauuacuaccaacauua

SEQ ID NO: 245904 - RNA, 22 nt, Artificial Sequence
  Synthetic
gggugcauuacuaccaacauua

SEQ ID NO: 245905 - RNA, 23 nt, Artificial Sequence
  Synthetic
agggugcauuacuaccaacauua

SEQ ID NO: 245906 - RNA, 24 nt, Artificial Sequence
  Synthetic
gagggugcauuacuaccaacauua

SEQ ID NO: 245907 - RNA, 18 nt, Artificial Sequence
  Synthetic
uagaaggaugcaacauua

SEQ ID NO: 245908 - RNA, 19 nt, Artificial Sequence
  Synthetic
cuagaaggaugcaacauua

SEQ ID NO: 245909 - RNA, 20 nt, Artificial Sequence
  Synthetic
acuagaaggaugcaacauua

SEQ ID NO: 245910 - RNA, 21 nt, Artificial Sequence
  Synthetic
gacuagaaggaugcaacauua

SEQ ID NO: 245911 - RNA, 22 nt, Artificial Sequence
  Synthetic
ggacuagaaggaugcaacauua

SEQ ID NO: 245912 - RNA, 23 nt, Artificial Sequence
  Synthetic
gggacuagaaggaugcaacauua

SEQ ID NO: 245913 - RNA, 24 nt, Artificial Sequence
  Synthetic
ggggacuagaaggaugcaacauua

SEQ ID NO: 245914 - RNA, 18 nt, Artificial Sequence
  Synthetic
uuagcaacgagaacauua

SEQ ID NO: 245915 - RNA, 19 nt, Artificial Sequence
  Synthetic
cuuagcaacgagaacauua

SEQ ID NO: 245916 - RNA, 20 nt, Artificial Sequence
  Synthetic
ucuuagcaacgagaacauua

SEQ ID NO: 245917 - RNA, 21 nt, Artificial Sequence
  Synthetic
gucuuagcaacgagaacauua

SEQ ID NO: 245918 - RNA, 22 nt, Artificial Sequence
  Synthetic
agucuuagcaacgagaacauua

SEQ ID NO: 245919 - RNA, 23 nt, Artificial Sequence
  Synthetic
aagucuuagcaacgagaacauua

SEQ ID NO: 245920 - RNA, 24 nt, Artificial Sequence
  Synthetic
aaagucuuagcaacgagaacauua

SEQ ID NO: 245921 - RNA, 18 nt, Artificial Sequence
  Synthetic
ugaaaggcacuaacauua

SEQ ID NO: 245922 - RNA, 19 nt, Artificial Sequence
  Synthetic
gugaaaggcacuaacauua

SEQ ID NO: 245923 - RNA, 20 nt, Artificial Sequence
  Synthetic
ggugaaaggcacuaacauua

SEQ ID NO: 245924 - RNA, 21 nt, Artificial Sequence
  Synthetic
gggugaaaggcacuaacauua

SEQ ID NO: 245925 - RNA, 22 nt, Artificial Sequence
  Synthetic
agggugaaaggcacuaacauua

SEQ ID NO: 245926 - RNA, 23 nt, Artificial Sequence
  Synthetic
cagggugaaaggcacuaacauua

SEQ ID NO: 245927 - RNA, 24 nt, Artificial Sequence
  Synthetic
gcagggugaaaggcacuaacauua

SEQ ID NO: 245928 - RNA, 18 nt, Artificial Sequence
  Synthetic
ccccucucucacacauua

SEQ ID NO: 245929 - RNA, 19 nt, Artificial Sequence
  Synthetic
uccccucucucacacauua

SEQ ID NO: 245930 - RNA, 20 nt, Artificial Sequence
  Synthetic
cuccccucucucacacauua

SEQ ID NO: 245931 - RNA, 21 nt, Artificial Sequence
  Synthetic
ccuccccucucucacacauua

SEQ ID NO: 245932 - RNA, 22 nt, Artificial Sequence
  Synthetic
cccuccccucucucacacauua

SEQ ID NO: 245933 - RNA, 23 nt, Artificial Sequence
  Synthetic
ucccuccccucucucacacauua

SEQ ID NO: 245934 - RNA, 24 nt, Artificial Sequence
  Synthetic
uucccuccccucucucacacauua

SEQ ID NO: 245935 - RNA, 18 nt, Artificial Sequence
  Synthetic
gagauucaaagcacauua

SEQ ID NO: 245936 - RNA, 19 nt, Artificial Sequence
  Synthetic
ugagauucaaagcacauua

SEQ ID NO: 245937 - RNA, 20 nt, Artificial Sequence
  Synthetic
uugagauucaaagcacauua

SEQ ID NO: 245938 - RNA, 21 nt, Artificial Sequence
  Synthetic
guugagauucaaagcacauua

SEQ ID NO: 245939 - RNA, 22 nt, Artificial Sequence
  Synthetic
uguugagauucaaagcacauua

SEQ ID NO: 245940 - RNA, 23 nt, Artificial Sequence
  Synthetic
cuguugagauucaaagcacauua

SEQ ID NO: 245941 - RNA, 24 nt, Artificial Sequence
  Synthetic
ucuguugagauucaaagcacauua

SEQ ID NO: 245942 - RNA, 18 nt, Artificial Sequence
  Synthetic
uugugacuauggacauua

SEQ ID NO: 245943 - RNA, 19 nt, Artificial Sequence
  Synthetic
auugugacuauggacauua

SEQ ID NO: 245944 - RNA, 20 nt, Artificial Sequence
  Synthetic
cauugugacuauggacauua

SEQ ID NO: 245945 - RNA, 21 nt, Artificial Sequence
  Synthetic
ucauugugacuauggacauua

SEQ ID NO: 245946 - RNA, 22 nt, Artificial Sequence
  Synthetic
cucauugugacuauggacauua

SEQ ID NO: 245947 - RNA, 23 nt, Artificial Sequence
  Synthetic
ucucauugugacuauggacauua

SEQ ID NO: 245948 - RNA, 24 nt, Artificial Sequence
  Synthetic
uucucauugugacuauggacauua

SEQ ID NO: 245949 - RNA, 18 nt, Artificial Sequence
  Synthetic
gugggaggcaugacauua

SEQ ID NO: 245950 - RNA, 19 nt, Artificial Sequence
  Synthetic
ggugggaggcaugacauua

SEQ ID NO: 245951 - RNA, 20 nt, Artificial Sequence
  Synthetic
gggugggaggcaugacauua

SEQ ID NO: 245952 - RNA, 21 nt, Artificial Sequence
  Synthetic
ggggugggaggcaugacauua

SEQ ID NO: 245953 - RNA, 22 nt, Artificial Sequence
  Synthetic
uggggugggaggcaugacauua

SEQ ID NO: 245954 - RNA, 23 nt, Artificial Sequence
  Synthetic
guggggugggaggcaugacauua

SEQ ID NO: 245955 - RNA, 24 nt, Artificial Sequence
  Synthetic
uguggggugggaggcaugacauua

SEQ ID NO: 245956 - RNA, 18 nt, Artificial Sequence
  Synthetic
acagauuuucauacauua

SEQ ID NO: 245957 - RNA, 19 nt, Artificial Sequence
  Synthetic
gacagauuuucauacauua

SEQ ID NO: 245958 - RNA, 20 nt, Artificial Sequence
  Synthetic
ugacagauuuucauacauua

SEQ ID NO: 245959 - RNA, 21 nt, Artificial Sequence
  Synthetic
augacagauuuucauacauua

SEQ ID NO: 245960 - RNA, 22 nt, Artificial Sequence
  Synthetic
gaugacagauuuucauacauua

SEQ ID NO: 245961 - RNA, 23 nt, Artificial Sequence
  Synthetic
agaugacagauuuucauacauua

SEQ ID NO: 245962 - RNA, 24 nt, Artificial Sequence
  Synthetic
aagaugacagauuuucauacauua

SEQ ID NO: 245963 - RNA, 18 nt, Artificial Sequence
  Synthetic
uugaaaaauucuacauua

SEQ ID NO: 245964 - RNA, 19 nt, Artificial Sequence
  Synthetic
uuugaaaaauucuacauua

SEQ ID NO: 245965 - RNA, 20 nt, Artificial Sequence
  Synthetic
auuugaaaaauucuacauua

SEQ ID NO: 245966 - RNA, 21 nt, Artificial Sequence
  Synthetic
cauuugaaaaauucuacauua

SEQ ID NO: 245967 - RNA, 22 nt, Artificial Sequence
  Synthetic
acauuugaaaaauucuacauua

SEQ ID NO: 245968 - RNA, 23 nt, Artificial Sequence
  Synthetic
gacauuugaaaaauucuacauua

SEQ ID NO: 245969 - RNA, 24 nt, Artificial Sequence
  Synthetic
ggacauuugaaaaauucuacauua

SEQ ID NO: 245970 - RNA, 18 nt, Artificial Sequence
  Synthetic
uauuauuucuuuacauua

SEQ ID NO: 245971 - RNA, 19 nt, Artificial Sequence
  Synthetic
cuauuauuucuuuacauua

SEQ ID NO: 245972 - RNA, 20 nt, Artificial Sequence
  Synthetic
ccuauuauuucuuuacauua

SEQ ID NO: 245973 - RNA, 21 nt, Artificial Sequence
  Synthetic
gccuauuauuucuuuacauua

SEQ ID NO: 245974 - RNA, 22 nt, Artificial Sequence
  Synthetic
agccuauuauuucuuuacauua

SEQ ID NO: 245975 - RNA, 23 nt, Artificial Sequence
  Synthetic
aagccuauuauuucuuuacauua

SEQ ID NO: 245976 - RNA, 24 nt, Artificial Sequence
  Synthetic
uaagccuauuauuucuuuacauua

SEQ ID NO: 245977 - RNA, 18 nt, Artificial Sequence
  Synthetic
ucaauguguaaaccauua

SEQ ID NO: 245978 - RNA, 19 nt, Artificial Sequence
  Synthetic
uucaauguguaaaccauua

SEQ ID NO: 245979 - RNA, 20 nt, Artificial Sequence
  Synthetic
cuucaauguguaaaccauua

SEQ ID NO: 245980 - RNA, 21 nt, Artificial Sequence
  Synthetic
ccuucaauguguaaaccauua

SEQ ID NO: 245981 - RNA, 22 nt, Artificial Sequence
  Synthetic
cccuucaauguguaaaccauua

SEQ ID NO: 245982 - RNA, 23 nt, Artificial Sequence
  Synthetic
ucccuucaauguguaaaccauua

SEQ ID NO: 245983 - RNA, 24 nt, Artificial Sequence
  Synthetic
uucccuucaauguguaaaccauua

SEQ ID NO: 245984 - RNA, 18 nt, Artificial Sequence
  Synthetic
auauuaguacaaccauua

SEQ ID NO: 245985 - RNA, 19 nt, Artificial Sequence
  Synthetic
uauauuaguacaaccauua

SEQ ID NO: 245986 - RNA, 20 nt, Artificial Sequence
  Synthetic
guauauuaguacaaccauua

SEQ ID NO: 245987 - RNA, 21 nt, Artificial Sequence
  Synthetic
uguauauuaguacaaccauua

SEQ ID NO: 245988 - RNA, 22 nt, Artificial Sequence
  Synthetic
auguauauuaguacaaccauua

SEQ ID NO: 245989 - RNA, 23 nt, Artificial Sequence
  Synthetic
aauguauauuaguacaaccauua

SEQ ID NO: 245990 - RNA, 24 nt, Artificial Sequence
  Synthetic
gaauguauauuaguacaaccauua

SEQ ID NO: 245991 - RNA, 18 nt, Artificial Sequence
  Synthetic
aaauuaaaaacaccauua

SEQ ID NO: 245992 - RNA, 19 nt, Artificial Sequence
  Synthetic
uaaauuaaaaacaccauua

SEQ ID NO: 245993 - RNA, 20 nt, Artificial Sequence
  Synthetic
auaaauuaaaaacaccauua

SEQ ID NO: 245994 - RNA, 21 nt, Artificial Sequence
  Synthetic
uauaaauuaaaaacaccauua

SEQ ID NO: 245995 - RNA, 22 nt, Artificial Sequence
  Synthetic
guauaaauuaaaaacaccauua

SEQ ID NO: 245996 - RNA, 23 nt, Artificial Sequence
  Synthetic
gguauaaauuaaaaacaccauua

SEQ ID NO: 245997 - RNA, 24 nt, Artificial Sequence
  Synthetic
agguauaaauuaaaaacaccauua

SEQ ID NO: 245998 - RNA, 18 nt, Artificial Sequence
  Synthetic
auuugagaaacaccauua

SEQ ID NO: 245999 - RNA, 19 nt, Artificial Sequence
  Synthetic
cauuugagaaacaccauua

SEQ ID NO: 246000 - RNA, 20 nt, Artificial Sequence
  Synthetic
acauuugagaaacaccauua

SEQ ID NO: 246001 - RNA, 21 nt, Artificial Sequence
  Synthetic
gacauuugagaaacaccauua

SEQ ID NO: 246002 - RNA, 22 nt, Artificial Sequence
  Synthetic
ugacauuugagaaacaccauua

SEQ ID NO: 246003 - RNA, 23 nt, Artificial Sequence
  Synthetic
cugacauuugagaaacaccauua

SEQ ID NO: 246004 - RNA, 24 nt, Artificial Sequence
  Synthetic
acugacauuugagaaacaccauua

SEQ ID NO: 246005 - RNA, 18 nt, Artificial Sequence
  Synthetic
uuauccuguccaccauua

SEQ ID NO: 246006 - RNA, 19 nt, Artificial Sequence
  Synthetic
uuuauccuguccaccauua

SEQ ID NO: 246007 - RNA, 20 nt, Artificial Sequence
  Synthetic
cuuuauccuguccaccauua

SEQ ID NO: 246008 - RNA, 21 nt, Artificial Sequence
  Synthetic
ucuuuauccuguccaccauua

SEQ ID NO: 246009 - RNA, 22 nt, Artificial Sequence
  Synthetic
uucuuuauccuguccaccauua

SEQ ID NO: 246010 - RNA, 23 nt, Artificial Sequence
  Synthetic
auucuuuauccuguccaccauua

SEQ ID NO: 246011 - RNA, 24 nt, Artificial Sequence
  Synthetic
cauucuuuauccuguccaccauua

SEQ ID NO: 246012 - RNA, 18 nt, Artificial Sequence
  Synthetic
gacccagcaaucccauua

SEQ ID NO: 246013 - RNA, 19 nt, Artificial Sequence
  Synthetic
ugacccagcaaucccauua

SEQ ID NO: 246014 - RNA, 20 nt, Artificial Sequence
  Synthetic
uugacccagcaaucccauua

SEQ ID NO: 246015 - RNA, 21 nt, Artificial Sequence
  Synthetic
uuugacccagcaaucccauua

SEQ ID NO: 246016 - RNA, 22 nt, Artificial Sequence
  Synthetic
auuugacccagcaaucccauua

SEQ ID NO: 246017 - RNA, 23 nt, Artificial Sequence
  Synthetic
cauuugacccagcaaucccauua

SEQ ID NO: 246018 - RNA, 24 nt, Artificial Sequence
  Synthetic
ccauuugacccagcaaucccauua

SEQ ID NO: 246019 - RNA, 18 nt, Artificial Sequence
  Synthetic
uuaauuauucucccauua

SEQ ID NO: 246020 - RNA, 19 nt, Artificial Sequence
  Synthetic
auuaauuauucucccauua

SEQ ID NO: 246021 - RNA, 20 nt, Artificial Sequence
  Synthetic
aauuaauuauucucccauua

SEQ ID NO: 246022 - RNA, 21 nt, Artificial Sequence
  Synthetic
uaauuaauuauucucccauua

SEQ ID NO: 246023 - RNA, 22 nt, Artificial Sequence
  Synthetic
auaauuaauuauucucccauua

SEQ ID NO: 246024 - RNA, 23 nt, Artificial Sequence
  Synthetic
aauaauuaauuauucucccauua

SEQ ID NO: 246025 - RNA, 24 nt, Artificial Sequence
  Synthetic
aaauaauuaauuauucucccauua

SEQ ID NO: 246026 - RNA, 18 nt, Artificial Sequence
  Synthetic
guaugucuaaagccauua

SEQ ID NO: 246027 - RNA, 19 nt, Artificial Sequence
  Synthetic
aguaugucuaaagccauua

SEQ ID NO: 246028 - RNA, 20 nt, Artificial Sequence
  Synthetic
gaguaugucuaaagccauua

SEQ ID NO: 246029 - RNA, 21 nt, Artificial Sequence
  Synthetic
agaguaugucuaaagccauua

SEQ ID NO: 246030 - RNA, 22 nt, Artificial Sequence
  Synthetic
cagaguaugucuaaagccauua

SEQ ID NO: 246031 - RNA, 23 nt, Artificial Sequence
  Synthetic
ccagaguaugucuaaagccauua

SEQ ID NO: 246032 - RNA, 24 nt, Artificial Sequence
  Synthetic
uccagaguaugucuaaagccauua

SEQ ID NO: 246033 - RNA, 18 nt, Artificial Sequence
  Synthetic
ugccuccaggagccauua

SEQ ID NO: 246034 - RNA, 19 nt, Artificial Sequence
  Synthetic
augccuccaggagccauua

SEQ ID NO: 246035 - RNA, 20 nt, Artificial Sequence
  Synthetic
aaugccuccaggagccauua

SEQ ID NO: 246036 - RNA, 21 nt, Artificial Sequence
  Synthetic
uaaugccuccaggagccauua

SEQ ID NO: 246037 - RNA, 22 nt, Artificial Sequence
  Synthetic
cuaaugccuccaggagccauua

SEQ ID NO: 246038 - RNA, 23 nt, Artificial Sequence
  Synthetic
ucuaaugccuccaggagccauua

SEQ ID NO: 246039 - RNA, 24 nt, Artificial Sequence
  Synthetic
gucuaaugccuccaggagccauua

SEQ ID NO: 246040 - RNA, 18 nt, Artificial Sequence
  Synthetic
caaaaacauuagccauua

SEQ ID NO: 246041 - RNA, 19 nt, Artificial Sequence
  Synthetic
ucaaaaacauuagccauua

SEQ ID NO: 246042 - RNA, 20 nt, Artificial Sequence
  Synthetic
aucaaaaacauuagccauua

SEQ ID NO: 246043 - RNA, 21 nt, Artificial Sequence
  Synthetic
uaucaaaaacauuagccauua

SEQ ID NO: 246044 - RNA, 22 nt, Artificial Sequence
  Synthetic
uuaucaaaaacauuagccauua

SEQ ID NO: 246045 - RNA, 23 nt, Artificial Sequence
  Synthetic
auuaucaaaaacauuagccauua

SEQ ID NO: 246046 - RNA, 24 nt, Artificial Sequence
  Synthetic
gauuaucaaaaacauuagccauua

SEQ ID NO: 246047 - RNA, 18 nt, Artificial Sequence
  Synthetic
gcucuguucaugccauua

SEQ ID NO: 246048 - RNA, 19 nt, Artificial Sequence
  Synthetic
agcucuguucaugccauua

SEQ ID NO: 246049 - RNA, 20 nt, Artificial Sequence
  Synthetic
gagcucuguucaugccauua

SEQ ID NO: 246050 - RNA, 21 nt, Artificial Sequence
  Synthetic
ugagcucuguucaugccauua

SEQ ID NO: 246051 - RNA, 22 nt, Artificial Sequence
  Synthetic
augagcucuguucaugccauua

SEQ ID NO: 246052 - RNA, 23 nt, Artificial Sequence
  Synthetic
aaugagcucuguucaugccauua

SEQ ID NO: 246053 - RNA, 24 nt, Artificial Sequence
  Synthetic
gaaugagcucuguucaugccauua

SEQ ID NO: 246054 - RNA, 18 nt, Artificial Sequence
  Synthetic
gaggggcaccugccauua

SEQ ID NO: 246055 - RNA, 19 nt, Artificial Sequence
  Synthetic
ggaggggcaccugccauua

SEQ ID NO: 246056 - RNA, 20 nt, Artificial Sequence
  Synthetic
gggaggggcaccugccauua

SEQ ID NO: 246057 - RNA, 21 nt, Artificial Sequence
  Synthetic
ggggaggggcaccugccauua

SEQ ID NO: 246058 - RNA, 22 nt, Artificial Sequence
  Synthetic
uggggaggggcaccugccauua

SEQ ID NO: 246059 - RNA, 23 nt, Artificial Sequence
  Synthetic
guggggaggggcaccugccauua

SEQ ID NO: 246060 - RNA, 24 nt, Artificial Sequence
  Synthetic
uguggggaggggcaccugccauua

SEQ ID NO: 246061 - RNA, 18 nt, Artificial Sequence
  Synthetic
gauaucuacuugccauua

SEQ ID NO: 246062 - RNA, 19 nt, Artificial Sequence
  Synthetic
agauaucuacuugccauua

SEQ ID NO: 246063 - RNA, 20 nt, Artificial Sequence
  Synthetic
cagauaucuacuugccauua

SEQ ID NO: 246064 - RNA, 21 nt, Artificial Sequence
  Synthetic
ccagauaucuacuugccauua

SEQ ID NO: 246065 - RNA, 22 nt, Artificial Sequence
  Synthetic
uccagauaucuacuugccauua

SEQ ID NO: 246066 - RNA, 23 nt, Artificial Sequence
  Synthetic
uuccagauaucuacuugccauua

SEQ ID NO: 246067 - RNA, 24 nt, Artificial Sequence
  Synthetic
auuccagauaucuacuugccauua

SEQ ID NO: 246068 - RNA, 18 nt, Artificial Sequence
  Synthetic
uuaugaauuuauccauua

SEQ ID NO: 246069 - RNA, 19 nt, Artificial Sequence
  Synthetic
guuaugaauuuauccauua

SEQ ID NO: 246070 - RNA, 20 nt, Artificial Sequence
  Synthetic
aguuaugaauuuauccauua

SEQ ID NO: 246071 - RNA, 21 nt, Artificial Sequence
  Synthetic
caguuaugaauuuauccauua

SEQ ID NO: 246072 - RNA, 22 nt, Artificial Sequence
  Synthetic
ccaguuaugaauuuauccauua

SEQ ID NO: 246073 - RNA, 23 nt, Artificial Sequence
  Synthetic
gccaguuaugaauuuauccauua

SEQ ID NO: 246074 - RNA, 24 nt, Artificial Sequence
  Synthetic
ugccaguuaugaauuuauccauua

SEQ ID NO: 246075 - RNA, 18 nt, Artificial Sequence
  Synthetic
cuucuagugcuuccauua

SEQ ID NO: 246076 - RNA, 19 nt, Artificial Sequence
  Synthetic
ccuucuagugcuuccauua

SEQ ID NO: 246077 - RNA, 20 nt, Artificial Sequence
  Synthetic
cccuucuagugcuuccauua

SEQ ID NO: 246078 - RNA, 21 nt, Artificial Sequence
  Synthetic
ucccuucuagugcuuccauua

SEQ ID NO: 246079 - RNA, 22 nt, Artificial Sequence
  Synthetic
uucccuucuagugcuuccauua

SEQ ID NO: 246080 - RNA, 23 nt, Artificial Sequence
  Synthetic
uuucccuucuagugcuuccauua

SEQ ID NO: 246081 - RNA, 24 nt, Artificial Sequence
  Synthetic
auuucccuucuagugcuuccauua

SEQ ID NO: 246082 - RNA, 18 nt, Artificial Sequence
  Synthetic
uauccuaguguuccauua

SEQ ID NO: 246083 - RNA, 19 nt, Artificial Sequence
  Synthetic
uuauccuaguguuccauua

SEQ ID NO: 246084 - RNA, 20 nt, Artificial Sequence
  Synthetic
uuuauccuaguguuccauua

SEQ ID NO: 246085 - RNA, 21 nt, Artificial Sequence
  Synthetic
auuuauccuaguguuccauua

SEQ ID NO: 246086 - RNA, 22 nt, Artificial Sequence
  Synthetic
uauuuauccuaguguuccauua

SEQ ID NO: 246087 - RNA, 23 nt, Artificial Sequence
  Synthetic
cuauuuauccuaguguuccauua

SEQ ID NO: 246088 - RNA, 24 nt, Artificial Sequence
  Synthetic
gcuauuuauccuaguguuccauua

SEQ ID NO: 246089 - RNA, 18 nt, Artificial Sequence
  Synthetic
uaaacuauuuuuccauua

SEQ ID NO: 246090 - RNA, 19 nt, Artificial Sequence
  Synthetic
uuaaacuauuuuuccauua

SEQ ID NO: 246091 - RNA, 20 nt, Artificial Sequence
  Synthetic
auuaaacuauuuuuccauua

SEQ ID NO: 246092 - RNA, 21 nt, Artificial Sequence
  Synthetic
aauuaaacuauuuuuccauua

SEQ ID NO: 246093 - RNA, 22 nt, Artificial Sequence
  Synthetic
gaauuaaacuauuuuuccauua

SEQ ID NO: 246094 - RNA, 23 nt, Artificial Sequence
  Synthetic
ggaauuaaacuauuuuuccauua

SEQ ID NO: 246095 - RNA, 24 nt, Artificial Sequence
  Synthetic
aggaauuaaacuauuuuuccauua

SEQ ID NO: 246096 - RNA, 18 nt, Artificial Sequence
  Synthetic
agcuggaacaaagcauua

SEQ ID NO: 246097 - RNA, 19 nt, Artificial Sequence
  Synthetic
uagcuggaacaaagcauua

SEQ ID NO: 246098 - RNA, 20 nt, Artificial Sequence
  Synthetic
auagcuggaacaaagcauua

SEQ ID NO: 246099 - RNA, 21 nt, Artificial Sequence
  Synthetic
uauagcuggaacaaagcauua

SEQ ID NO: 246100 - RNA, 22 nt, Artificial Sequence
  Synthetic
uuauagcuggaacaaagcauua

SEQ ID NO: 246101 - RNA, 23 nt, Artificial Sequence
  Synthetic
cuuauagcuggaacaaagcauua

SEQ ID NO: 246102 - RNA, 24 nt, Artificial Sequence
  Synthetic
ucuuauagcuggaacaaagcauua

SEQ ID NO: 246103 - RNA, 18 nt, Artificial Sequence
  Synthetic
uacauugacucagcauua

SEQ ID NO: 246104 - RNA, 19 nt, Artificial Sequence
  Synthetic
cuacauugacucagcauua

SEQ ID NO: 246105 - RNA, 20 nt, Artificial Sequence
  Synthetic
ucuacauugacucagcauua

SEQ ID NO: 246106 - RNA, 21 nt, Artificial Sequence
  Synthetic
cucuacauugacucagcauua

SEQ ID NO: 246107 - RNA, 22 nt, Artificial Sequence
  Synthetic
acucuacauugacucagcauua

SEQ ID NO: 246108 - RNA, 23 nt, Artificial Sequence
  Synthetic
uacucuacauugacucagcauua

SEQ ID NO: 246109 - RNA, 24 nt, Artificial Sequence
  Synthetic
uuacucuacauugacucagcauua

SEQ ID NO: 246110 - RNA, 18 nt, Artificial Sequence
  Synthetic
uuagaacugagagcauua

SEQ ID NO: 246111 - RNA, 19 nt, Artificial Sequence
  Synthetic
auuagaacugagagcauua

SEQ ID NO: 246112 - RNA, 20 nt, Artificial Sequence
  Synthetic
uauuagaacugagagcauua

SEQ ID NO: 246113 - RNA, 21 nt, Artificial Sequence
  Synthetic
guauuagaacugagagcauua

SEQ ID NO: 246114 - RNA, 22 nt, Artificial Sequence
  Synthetic
uguauuagaacugagagcauua

SEQ ID NO: 246115 - RNA, 23 nt, Artificial Sequence
  Synthetic
auguauuagaacugagagcauua

SEQ ID NO: 246116 - RNA, 24 nt, Artificial Sequence
  Synthetic
cauguauuagaacugagagcauua

SEQ ID NO: 246117 - RNA, 18 nt, Artificial Sequence
  Synthetic
ugugcacauuuagcauua

SEQ ID NO: 246118 - RNA, 19 nt, Artificial Sequence
  Synthetic
cugugcacauuuagcauua

SEQ ID NO: 246119 - RNA, 20 nt, Artificial Sequence
  Synthetic
ccugugcacauuuagcauua

SEQ ID NO: 246120 - RNA, 21 nt, Artificial Sequence
  Synthetic
cccugugcacauuuagcauua

SEQ ID NO: 246121 - RNA, 22 nt, Artificial Sequence
  Synthetic
gcccugugcacauuuagcauua

SEQ ID NO: 246122 - RNA, 23 nt, Artificial Sequence
  Synthetic
agcccugugcacauuuagcauua

SEQ ID NO: 246123 - RNA, 24 nt, Artificial Sequence
  Synthetic
aagcccugugcacauuuagcauua

SEQ ID NO: 246124 - RNA, 18 nt, Artificial Sequence
  Synthetic
uggauggagugugcauua

SEQ ID NO: 246125 - RNA, 19 nt, Artificial Sequence
  Synthetic
uuggauggagugugcauua

SEQ ID NO: 246126 - RNA, 20 nt, Artificial Sequence
  Synthetic
cuuggauggagugugcauua

SEQ ID NO: 246127 - RNA, 21 nt, Artificial Sequence
  Synthetic
ucuuggauggagugugcauua

SEQ ID NO: 246128 - RNA, 22 nt, Artificial Sequence
  Synthetic
uucuuggauggagugugcauua

SEQ ID NO: 246129 - RNA, 23 nt, Artificial Sequence
  Synthetic
guucuuggauggagugugcauua

SEQ ID NO: 246130 - RNA, 24 nt, Artificial Sequence
  Synthetic
uguucuuggauggagugugcauua

SEQ ID NO: 246131 - RNA, 18 nt, Artificial Sequence
  Synthetic
acuucugacauugcauua

SEQ ID NO: 246132 - RNA, 19 nt, Artificial Sequence
  Synthetic
uacuucugacauugcauua

SEQ ID NO: 246133 - RNA, 20 nt, Artificial Sequence
  Synthetic
guacuucugacauugcauua

SEQ ID NO: 246134 - RNA, 21 nt, Artificial Sequence
  Synthetic
aguacuucugacauugcauua

SEQ ID NO: 246135 - RNA, 22 nt, Artificial Sequence
  Synthetic
uaguacuucugacauugcauua

SEQ ID NO: 246136 - RNA, 23 nt, Artificial Sequence
  Synthetic
uuaguacuucugacauugcauua

SEQ ID NO: 246137 - RNA, 24 nt, Artificial Sequence
  Synthetic
uuuaguacuucugacauugcauua

SEQ ID NO: 246138 - RNA, 18 nt, Artificial Sequence
  Synthetic
uugcaaaaaaaaucauua

SEQ ID NO: 246139 - RNA, 19 nt, Artificial Sequence
  Synthetic
uuugcaaaaaaaaucauua

SEQ ID NO: 246140 - RNA, 20 nt, Artificial Sequence
  Synthetic
uuuugcaaaaaaaaucauua

SEQ ID NO: 246141 - RNA, 21 nt, Artificial Sequence
  Synthetic
auuuugcaaaaaaaaucauua

SEQ ID NO: 246142 - RNA, 22 nt, Artificial Sequence
  Synthetic
aauuuugcaaaaaaaaucauua

SEQ ID NO: 246143 - RNA, 23 nt, Artificial Sequence
  Synthetic
aaauuuugcaaaaaaaaucauua

SEQ ID NO: 246144 - RNA, 24 nt, Artificial Sequence
  Synthetic
aaaauuuugcaaaaaaaaucauua

SEQ ID NO: 246145 - RNA, 18 nt, Artificial Sequence
  Synthetic
caagcuucugaaucauua

SEQ ID NO: 246146 - RNA, 19 nt, Artificial Sequence
  Synthetic
gcaagcuucugaaucauua

SEQ ID NO: 246147 - RNA, 20 nt, Artificial Sequence
  Synthetic
ugcaagcuucugaaucauua

SEQ ID NO: 246148 - RNA, 21 nt, Artificial Sequence
  Synthetic
cugcaagcuucugaaucauua

SEQ ID NO: 246149 - RNA, 22 nt, Artificial Sequence
  Synthetic
acugcaagcuucugaaucauua

SEQ ID NO: 246150 - RNA, 23 nt, Artificial Sequence
  Synthetic
aacugcaagcuucugaaucauua

SEQ ID NO: 246151 - RNA, 24 nt, Artificial Sequence
  Synthetic
aaacugcaagcuucugaaucauua

SEQ ID NO: 246152 - RNA, 18 nt, Artificial Sequence
  Synthetic
gaaguauaauaaucauua

SEQ ID NO: 246153 - RNA, 19 nt, Artificial Sequence
  Synthetic
ggaaguauaauaaucauua

SEQ ID NO: 246154 - RNA, 20 nt, Artificial Sequence
  Synthetic
aggaaguauaauaaucauua

SEQ ID NO: 246155 - RNA, 21 nt, Artificial Sequence
  Synthetic
uaggaaguauaauaaucauua

SEQ ID NO: 246156 - RNA, 22 nt, Artificial Sequence
  Synthetic
guaggaaguauaauaaucauua

SEQ ID NO: 246157 - RNA, 23 nt, Artificial Sequence
  Synthetic
aguaggaaguauaauaaucauua

SEQ ID NO: 246158 - RNA, 24 nt, Artificial Sequence
  Synthetic
uaguaggaaguauaauaaucauua

SEQ ID NO: 246159 - RNA, 18 nt, Artificial Sequence
  Synthetic
ccacaucacucaucauua

SEQ ID NO: 246160 - RNA, 19 nt, Artificial Sequence
  Synthetic
uccacaucacucaucauua

SEQ ID NO: 246161 - RNA, 20 nt, Artificial Sequence
  Synthetic
cuccacaucacucaucauua

SEQ ID NO: 246162 - RNA, 21 nt, Artificial Sequence
  Synthetic
gcuccacaucacucaucauua

SEQ ID NO: 246163 - RNA, 22 nt, Artificial Sequence
  Synthetic
ugcuccacaucacucaucauua

SEQ ID NO: 246164 - RNA, 23 nt, Artificial Sequence
  Synthetic
augcuccacaucacucaucauua

SEQ ID NO: 246165 - RNA, 24 nt, Artificial Sequence
  Synthetic
aaugcuccacaucacucaucauua

SEQ ID NO: 246166 - RNA, 18 nt, Artificial Sequence
  Synthetic
acagaagaguuaucauua

SEQ ID NO: 246167 - RNA, 19 nt, Artificial Sequence
  Synthetic
uacagaagaguuaucauua

SEQ ID NO: 246168 - RNA, 20 nt, Artificial Sequence
  Synthetic
guacagaagaguuaucauua

SEQ ID NO: 246169 - RNA, 21 nt, Artificial Sequence
  Synthetic
cguacagaagaguuaucauua

SEQ ID NO: 246170 - RNA, 22 nt, Artificial Sequence
  Synthetic
gcguacagaagaguuaucauua

SEQ ID NO: 246171 - RNA, 23 nt, Artificial Sequence
  Synthetic
ugcguacagaagaguuaucauua

SEQ ID NO: 246172 - RNA, 24 nt, Artificial Sequence
  Synthetic
augcguacagaagaguuaucauua

SEQ ID NO: 246173 - RNA, 18 nt, Artificial Sequence
  Synthetic
gaagagauguuaucauua

SEQ ID NO: 246174 - RNA, 19 nt, Artificial Sequence
  Synthetic
ugaagagauguuaucauua

SEQ ID NO: 246175 - RNA, 20 nt, Artificial Sequence
  Synthetic
uugaagagauguuaucauua

SEQ ID NO: 246176 - RNA, 21 nt, Artificial Sequence
  Synthetic
uuugaagagauguuaucauua

SEQ ID NO: 246177 - RNA, 22 nt, Artificial Sequence
  Synthetic
auuugaagagauguuaucauua

SEQ ID NO: 246178 - RNA, 23 nt, Artificial Sequence
  Synthetic
cauuugaagagauguuaucauua

SEQ ID NO: 246179 - RNA, 24 nt, Artificial Sequence
  Synthetic
ucauuugaagagauguuaucauua

SEQ ID NO: 246180 - RNA, 18 nt, Artificial Sequence
  Synthetic
aaucaacuauccucauua

SEQ ID NO: 246181 - RNA, 19 nt, Artificial Sequence
  Synthetic
caaucaacuauccucauua

SEQ ID NO: 246182 - RNA, 20 nt, Artificial Sequence
  Synthetic
acaaucaacuauccucauua

SEQ ID NO: 246183 - RNA, 21 nt, Artificial Sequence
  Synthetic
aacaaucaacuauccucauua

SEQ ID NO: 246184 - RNA, 22 nt, Artificial Sequence
  Synthetic
uaacaaucaacuauccucauua

SEQ ID NO: 246185 - RNA, 23 nt, Artificial Sequence
  Synthetic
auaacaaucaacuauccucauua

SEQ ID NO: 246186 - RNA, 24 nt, Artificial Sequence
  Synthetic
cauaacaaucaacuauccucauua

SEQ ID NO: 246187 - RNA, 18 nt, Artificial Sequence
  Synthetic
caucaucacuggucauua

SEQ ID NO: 246188 - RNA, 19 nt, Artificial Sequence
  Synthetic
ucaucaucacuggucauua

SEQ ID NO: 246189 - RNA, 20 nt, Artificial Sequence
  Synthetic
cucaucaucacuggucauua

SEQ ID NO: 246190 - RNA, 21 nt, Artificial Sequence
  Synthetic
gcucaucaucacuggucauua

SEQ ID NO: 246191 - RNA, 22 nt, Artificial Sequence
  Synthetic
agcucaucaucacuggucauua

SEQ ID NO: 246192 - RNA, 23 nt, Artificial Sequence
  Synthetic
aagcucaucaucacuggucauua

SEQ ID NO: 246193 - RNA, 24 nt, Artificial Sequence
  Synthetic
aaagcucaucaucacuggucauua

SEQ ID NO: 246194 - RNA, 18 nt, Artificial Sequence
  Synthetic
ggauacuuacugucauua

SEQ ID NO: 246195 - RNA, 19 nt, Artificial Sequence
  Synthetic
uggauacuuacugucauua

SEQ ID NO: 246196 - RNA, 20 nt, Artificial Sequence
  Synthetic
auggauacuuacugucauua

SEQ ID NO: 246197 - RNA, 21 nt, Artificial Sequence
  Synthetic
aauggauacuuacugucauua

SEQ ID NO: 246198 - RNA, 22 nt, Artificial Sequence
  Synthetic
uaauggauacuuacugucauua

SEQ ID NO: 246199 - RNA, 23 nt, Artificial Sequence
  Synthetic
cuaauggauacuuacugucauua

SEQ ID NO: 246200 - RNA, 24 nt, Artificial Sequence
  Synthetic
ucuaauggauacuuacugucauua

SEQ ID NO: 246201 - RNA, 18 nt, Artificial Sequence
  Synthetic
aguagaagcuugucauua

SEQ ID NO: 246202 - RNA, 19 nt, Artificial Sequence
  Synthetic
gaguagaagcuugucauua

SEQ ID NO: 246203 - RNA, 20 nt, Artificial Sequence
  Synthetic
ugaguagaagcuugucauua

SEQ ID NO: 246204 - RNA, 21 nt, Artificial Sequence
  Synthetic
cugaguagaagcuugucauua

SEQ ID NO: 246205 - RNA, 22 nt, Artificial Sequence
  Synthetic
gcugaguagaagcuugucauua

SEQ ID NO: 246206 - RNA, 23 nt, Artificial Sequence
  Synthetic
ggcugaguagaagcuugucauua

SEQ ID NO: 246207 - RNA, 24 nt, Artificial Sequence
  Synthetic
aggcugaguagaagcuugucauua

SEQ ID NO: 246208 - RNA, 18 nt, Artificial Sequence
  Synthetic
gaaugaacuaauucauua

SEQ ID NO: 246209 - RNA, 19 nt, Artificial Sequence
  Synthetic
agaaugaacuaauucauua

SEQ ID NO: 246210 - RNA, 20 nt, Artificial Sequence
  Synthetic
cagaaugaacuaauucauua

SEQ ID NO: 246211 - RNA, 21 nt, Artificial Sequence
  Synthetic
ucagaaugaacuaauucauua

SEQ ID NO: 246212 - RNA, 22 nt, Artificial Sequence
  Synthetic
uucagaaugaacuaauucauua

SEQ ID NO: 246213 - RNA, 23 nt, Artificial Sequence
  Synthetic
uuucagaaugaacuaauucauua

SEQ ID NO: 246214 - RNA, 24 nt, Artificial Sequence
  Synthetic
uuuucagaaugaacuaauucauua

SEQ ID NO: 246215 - RNA, 18 nt, Artificial Sequence
  Synthetic
uagcuauaaaguucauua

SEQ ID NO: 246216 - RNA, 19 nt, Artificial Sequence
  Synthetic
auagcuauaaaguucauua

SEQ ID NO: 246217 - RNA, 20 nt, Artificial Sequence
  Synthetic
uauagcuauaaaguucauua

SEQ ID NO: 246218 - RNA, 21 nt, Artificial Sequence
  Synthetic
auauagcuauaaaguucauua

SEQ ID NO: 246219 - RNA, 22 nt, Artificial Sequence
  Synthetic
aauauagcuauaaaguucauua

SEQ ID NO: 246220 - RNA, 23 nt, Artificial Sequence
  Synthetic
aaauauagcuauaaaguucauua

SEQ ID NO: 246221 - RNA, 24 nt, Artificial Sequence
  Synthetic
aaaauauagcuauaaaguucauua

SEQ ID NO: 246222 - RNA, 18 nt, Artificial Sequence
  Synthetic
caaaaaaaauguucauua

SEQ ID NO: 246223 - RNA, 19 nt, Artificial Sequence
  Synthetic
ccaaaaaaaauguucauua

SEQ ID NO: 246224 - RNA, 20 nt, Artificial Sequence
  Synthetic
uccaaaaaaaauguucauua

SEQ ID NO: 246225 - RNA, 21 nt, Artificial Sequence
  Synthetic
auccaaaaaaaauguucauua

SEQ ID NO: 246226 - RNA, 22 nt, Artificial Sequence
  Synthetic
gauccaaaaaaaauguucauua

SEQ ID NO: 246227 - RNA, 23 nt, Artificial Sequence
  Synthetic
ugauccaaaaaaaauguucauua

SEQ ID NO: 246228 - RNA, 24 nt, Artificial Sequence
  Synthetic
cugauccaaaaaaaauguucauua

SEQ ID NO: 246229 - RNA, 18 nt, Artificial Sequence
  Synthetic
gaccuauuuuguucauua

SEQ ID NO: 246230 - RNA, 19 nt, Artificial Sequence
  Synthetic
agaccuauuuuguucauua

SEQ ID NO: 246231 - RNA, 20 nt, Artificial Sequence
  Synthetic
gagaccuauuuuguucauua

SEQ ID NO: 246232 - RNA, 21 nt, Artificial Sequence
  Synthetic
ugagaccuauuuuguucauua

SEQ ID NO: 246233 - RNA, 22 nt, Artificial Sequence
  Synthetic
cugagaccuauuuuguucauua

SEQ ID NO: 246234 - RNA, 23 nt, Artificial Sequence
  Synthetic
ccugagaccuauuuuguucauua

SEQ ID NO: 246235 - RNA, 24 nt, Artificial Sequence
  Synthetic
cccugagaccuauuuuguucauua

SEQ ID NO: 246236 - RNA, 18 nt, Artificial Sequence
  Synthetic
uacauuuauauuucauua

SEQ ID NO: 246237 - RNA, 19 nt, Artificial Sequence
  Synthetic
guacauuuauauuucauua

SEQ ID NO: 246238 - RNA, 20 nt, Artificial Sequence
  Synthetic
uguacauuuauauuucauua

SEQ ID NO: 246239 - RNA, 21 nt, Artificial Sequence
  Synthetic
cuguacauuuauauuucauua

SEQ ID NO: 246240 - RNA, 22 nt, Artificial Sequence
  Synthetic
ccuguacauuuauauuucauua

SEQ ID NO: 246241 - RNA, 23 nt, Artificial Sequence
  Synthetic
gccuguacauuuauauuucauua

SEQ ID NO: 246242 - RNA, 24 nt, Artificial Sequence
  Synthetic
ggccuguacauuuauauuucauua

SEQ ID NO: 246243 - RNA, 18 nt, Artificial Sequence
  Synthetic
aauggcguucaaagauua

SEQ ID NO: 246244 - RNA, 19 nt, Artificial Sequence
  Synthetic
caauggcguucaaagauua

SEQ ID NO: 246245 - RNA, 20 nt, Artificial Sequence
  Synthetic
acaauggcguucaaagauua

SEQ ID NO: 246246 - RNA, 21 nt, Artificial Sequence
  Synthetic
aacaauggcguucaaagauua

SEQ ID NO: 246247 - RNA, 22 nt, Artificial Sequence
  Synthetic
aaacaauggcguucaaagauua

SEQ ID NO: 246248 - RNA, 23 nt, Artificial Sequence
  Synthetic
aaaacaauggcguucaaagauua

SEQ ID NO: 246249 - RNA, 24 nt, Artificial Sequence
  Synthetic
caaaacaauggcguucaaagauua

SEQ ID NO: 246250 - RNA, 18 nt, Artificial Sequence
  Synthetic
cucuagguagaaagauua

SEQ ID NO: 246251 - RNA, 19 nt, Artificial Sequence
  Synthetic
ccucuagguagaaagauua

SEQ ID NO: 246252 - RNA, 20 nt, Artificial Sequence
  Synthetic
accucuagguagaaagauua

SEQ ID NO: 246253 - RNA, 21 nt, Artificial Sequence
  Synthetic
uaccucuagguagaaagauua

SEQ ID NO: 246254 - RNA, 22 nt, Artificial Sequence
  Synthetic
cuaccucuagguagaaagauua

SEQ ID NO: 246255 - RNA, 23 nt, Artificial Sequence
  Synthetic
acuaccucuagguagaaagauua

SEQ ID NO: 246256 - RNA, 24 nt, Artificial Sequence
  Synthetic
uacuaccucuagguagaaagauua

SEQ ID NO: 246257 - RNA, 18 nt, Artificial Sequence
  Synthetic
gauaauuuuuaaagauua

SEQ ID NO: 246258 - RNA, 19 nt, Artificial Sequence
  Synthetic
agauaauuuuuaaagauua

SEQ ID NO: 246259 - RNA, 20 nt, Artificial Sequence
  Synthetic
uagauaauuuuuaaagauua

SEQ ID NO: 246260 - RNA, 21 nt, Artificial Sequence
  Synthetic
auagauaauuuuuaaagauua

SEQ ID NO: 246261 - RNA, 22 nt, Artificial Sequence
  Synthetic
uauagauaauuuuuaaagauua

SEQ ID NO: 246262 - RNA, 23 nt, Artificial Sequence
  Synthetic
auauagauaauuuuuaaagauua

SEQ ID NO: 246263 - RNA, 24 nt, Artificial Sequence
  Synthetic
cauauagauaauuuuuaaagauua

SEQ ID NO: 246264 - RNA, 18 nt, Artificial Sequence
  Synthetic
agcaugaagagaagauua

SEQ ID NO: 246265 - RNA, 19 nt, Artificial Sequence
  Synthetic
aagcaugaagagaagauua

SEQ ID NO: 246266 - RNA, 20 nt, Artificial Sequence
  Synthetic
aaagcaugaagagaagauua

SEQ ID NO: 246267 - RNA, 21 nt, Artificial Sequence
  Synthetic
uaaagcaugaagagaagauua

SEQ ID NO: 246268 - RNA, 22 nt, Artificial Sequence
  Synthetic
auaaagcaugaagagaagauua

SEQ ID NO: 246269 - RNA, 23 nt, Artificial Sequence
  Synthetic
aauaaagcaugaagagaagauua

SEQ ID NO: 246270 - RNA, 24 nt, Artificial Sequence
  Synthetic
aaauaaagcaugaagagaagauua

SEQ ID NO: 246271 - RNA, 18 nt, Artificial Sequence
  Synthetic
aaguaacuaaacagauua

SEQ ID NO: 246272 - RNA, 19 nt, Artificial Sequence
  Synthetic
uaaguaacuaaacagauua

SEQ ID NO: 246273 - RNA, 20 nt, Artificial Sequence
  Synthetic
uuaaguaacuaaacagauua

SEQ ID NO: 246274 - RNA, 21 nt, Artificial Sequence
  Synthetic
uuuaaguaacuaaacagauua

SEQ ID NO: 246275 - RNA, 22 nt, Artificial Sequence
  Synthetic
uuuuaaguaacuaaacagauua

SEQ ID NO: 246276 - RNA, 23 nt, Artificial Sequence
  Synthetic
auuuuaaguaacuaaacagauua

SEQ ID NO: 246277 - RNA, 24 nt, Artificial Sequence
  Synthetic
cauuuuaaguaacuaaacagauua

SEQ ID NO: 246278 - RNA, 18 nt, Artificial Sequence
  Synthetic
aagaauauacucagauua

SEQ ID NO: 246279 - RNA, 19 nt, Artificial Sequence
  Synthetic
caagaauauacucagauua

SEQ ID NO: 246280 - RNA, 20 nt, Artificial Sequence
  Synthetic
ucaagaauauacucagauua

SEQ ID NO: 246281 - RNA, 21 nt, Artificial Sequence
  Synthetic
cucaagaauauacucagauua

SEQ ID NO: 246282 - RNA, 22 nt, Artificial Sequence
  Synthetic
acucaagaauauacucagauua

SEQ ID NO: 246283 - RNA, 23 nt, Artificial Sequence
  Synthetic
gacucaagaauauacucagauua

SEQ ID NO: 246284 - RNA, 24 nt, Artificial Sequence
  Synthetic
agacucaagaauauacucagauua

SEQ ID NO: 246285 - RNA, 18 nt, Artificial Sequence
  Synthetic
ugaauugcucucagauua

SEQ ID NO: 246286 - RNA, 19 nt, Artificial Sequence
  Synthetic
cugaauugcucucagauua

SEQ ID NO: 246287 - RNA, 20 nt, Artificial Sequence
  Synthetic
ucugaauugcucucagauua

SEQ ID NO: 246288 - RNA, 21 nt, Artificial Sequence
  Synthetic
uucugaauugcucucagauua

SEQ ID NO: 246289 - RNA, 22 nt, Artificial Sequence
  Synthetic
uuucugaauugcucucagauua

SEQ ID NO: 246290 - RNA, 23 nt, Artificial Sequence
  Synthetic
auuucugaauugcucucagauua

SEQ ID NO: 246291 - RNA, 24 nt, Artificial Sequence
  Synthetic
cauuucugaauugcucucagauua

SEQ ID NO: 246292 - RNA, 18 nt, Artificial Sequence
  Synthetic
agagacauucucagauua

SEQ ID NO: 246293 - RNA, 19 nt, Artificial Sequence
  Synthetic
aagagacauucucagauua

SEQ ID NO: 246294 - RNA, 20 nt, Artificial Sequence
  Synthetic
aaagagacauucucagauua

SEQ ID NO: 246295 - RNA, 21 nt, Artificial Sequence
  Synthetic
gaaagagacauucucagauua

SEQ ID NO: 246296 - RNA, 22 nt, Artificial Sequence
  Synthetic
ggaaagagacauucucagauua

SEQ ID NO: 246297 - RNA, 23 nt, Artificial Sequence
  Synthetic
gggaaagagacauucucagauua

SEQ ID NO: 246298 - RNA, 24 nt, Artificial Sequence
  Synthetic
agggaaagagacauucucagauua

SEQ ID NO: 246299 - RNA, 18 nt, Artificial Sequence
  Synthetic
ugagggcuaaagagauua

SEQ ID NO: 246300 - RNA, 19 nt, Artificial Sequence
  Synthetic
cugagggcuaaagagauua

SEQ ID NO: 246301 - RNA, 20 nt, Artificial Sequence
  Synthetic
acugagggcuaaagagauua

SEQ ID NO: 246302 - RNA, 21 nt, Artificial Sequence
  Synthetic
aacugagggcuaaagagauua

SEQ ID NO: 246303 - RNA, 22 nt, Artificial Sequence
  Synthetic
aaacugagggcuaaagagauua

SEQ ID NO: 246304 - RNA, 23 nt, Artificial Sequence
  Synthetic
gaaacugagggcuaaagagauua

SEQ ID NO: 246305 - RNA, 24 nt, Artificial Sequence
  Synthetic
ggaaacugagggcuaaagagauua

SEQ ID NO: 246306 - RNA, 18 nt, Artificial Sequence
  Synthetic
cuuacgagugugagauua

SEQ ID NO: 246307 - RNA, 19 nt, Artificial Sequence
  Synthetic
ucuuacgagugugagauua

SEQ ID NO: 246308 - RNA, 20 nt, Artificial Sequence
  Synthetic
uucuuacgagugugagauua

SEQ ID NO: 246309 - RNA, 21 nt, Artificial Sequence
  Synthetic
uuucuuacgagugugagauua

SEQ ID NO: 246310 - RNA, 22 nt, Artificial Sequence
  Synthetic
uuuucuuacgagugugagauua

SEQ ID NO: 246311 - RNA, 23 nt, Artificial Sequence
  Synthetic
uuuuucuuacgagugugagauua

SEQ ID NO: 246312 - RNA, 24 nt, Artificial Sequence
  Synthetic
uuuuuucuuacgagugugagauua

SEQ ID NO: 246313 - RNA, 18 nt, Artificial Sequence
  Synthetic
uucgcaaaguauagauua

SEQ ID NO: 246314 - RNA, 19 nt, Artificial Sequence
  Synthetic
cuucgcaaaguauagauua

SEQ ID NO: 246315 - RNA, 20 nt, Artificial Sequence
  Synthetic
ucuucgcaaaguauagauua

SEQ ID NO: 246316 - RNA, 21 nt, Artificial Sequence
  Synthetic
uucuucgcaaaguauagauua

SEQ ID NO: 246317 - RNA, 22 nt, Artificial Sequence
  Synthetic
guucuucgcaaaguauagauua

SEQ ID NO: 246318 - RNA, 23 nt, Artificial Sequence
  Synthetic
aguucuucgcaaaguauagauua

SEQ ID NO: 246319 - RNA, 24 nt, Artificial Sequence
  Synthetic
caguucuucgcaaaguauagauua

SEQ ID NO: 246320 - RNA, 18 nt, Artificial Sequence
  Synthetic
aaacgcccuacuagauua

SEQ ID NO: 246321 - RNA, 19 nt, Artificial Sequence
  Synthetic
aaaacgcccuacuagauua

SEQ ID NO: 246322 - RNA, 20 nt, Artificial Sequence
  Synthetic
aaaaacgcccuacuagauua

SEQ ID NO: 246323 - RNA, 21 nt, Artificial Sequence
  Synthetic
aaaaaacgcccuacuagauua

SEQ ID NO: 246324 - RNA, 22 nt, Artificial Sequence
  Synthetic
aaaaaaacgcccuacuagauua

SEQ ID NO: 246325 - RNA, 23 nt, Artificial Sequence
  Synthetic
caaaaaaacgcccuacuagauua

SEQ ID NO: 246326 - RNA, 24 nt, Artificial Sequence
  Synthetic
ccaaaaaaacgcccuacuagauua

SEQ ID NO: 246327 - RNA, 18 nt, Artificial Sequence
  Synthetic
uaauacaaagguagauua

SEQ ID NO: 246328 - RNA, 19 nt, Artificial Sequence
  Synthetic
uuaauacaaagguagauua

SEQ ID NO: 246329 - RNA, 20 nt, Artificial Sequence
  Synthetic
auuaauacaaagguagauua

SEQ ID NO: 246330 - RNA, 21 nt, Artificial Sequence
  Synthetic
aauuaauacaaagguagauua

SEQ ID NO: 246331 - RNA, 22 nt, Artificial Sequence
  Synthetic
caauuaauacaaagguagauua

SEQ ID NO: 246332 - RNA, 23 nt, Artificial Sequence
  Synthetic
ucaauuaauacaaagguagauua

SEQ ID NO: 246333 - RNA, 24 nt, Artificial Sequence
  Synthetic
aucaauuaauacaaagguagauua

SEQ ID NO: 246334 - RNA, 18 nt, Artificial Sequence
  Synthetic
acugucaauauuagauua

SEQ ID NO: 246335 - RNA, 19 nt, Artificial Sequence
  Synthetic
cacugucaauauuagauua

SEQ ID NO: 246336 - RNA, 20 nt, Artificial Sequence
  Synthetic
ccacugucaauauuagauua

SEQ ID NO: 246337 - RNA, 21 nt, Artificial Sequence
  Synthetic
uccacugucaauauuagauua

SEQ ID NO: 246338 - RNA, 22 nt, Artificial Sequence
  Synthetic
cuccacugucaauauuagauua

SEQ ID NO: 246339 - RNA, 23 nt, Artificial Sequence
  Synthetic
acuccacugucaauauuagauua

SEQ ID NO: 246340 - RNA, 24 nt, Artificial Sequence
  Synthetic
uacuccacugucaauauuagauua

SEQ ID NO: 246341 - RNA, 18 nt, Artificial Sequence
  Synthetic
ugaauuugcuuuagauua

SEQ ID NO: 246342 - RNA, 19 nt, Artificial Sequence
  Synthetic
augaauuugcuuuagauua

SEQ ID NO: 246343 - RNA, 20 nt, Artificial Sequence
  Synthetic
uaugaauuugcuuuagauua

SEQ ID NO: 246344 - RNA, 21 nt, Artificial Sequence
  Synthetic
cuaugaauuugcuuuagauua

SEQ ID NO: 246345 - RNA, 22 nt, Artificial Sequence
  Synthetic
ccuaugaauuugcuuuagauua

SEQ ID NO: 246346 - RNA, 23 nt, Artificial Sequence
  Synthetic
cccuaugaauuugcuuuagauua

SEQ ID NO: 246347 - RNA, 24 nt, Artificial Sequence
  Synthetic
ccccuaugaauuugcuuuagauua

SEQ ID NO: 246348 - RNA, 18 nt, Artificial Sequence
  Synthetic
uagaauaaaaaacgauua

SEQ ID NO: 246349 - RNA, 19 nt, Artificial Sequence
  Synthetic
guagaauaaaaaacgauua

SEQ ID NO: 246350 - RNA, 20 nt, Artificial Sequence
  Synthetic
aguagaauaaaaaacgauua

SEQ ID NO: 246351 - RNA, 21 nt, Artificial Sequence
  Synthetic
gaguagaauaaaaaacgauua

SEQ ID NO: 246352 - RNA, 22 nt, Artificial Sequence
  Synthetic
ugaguagaauaaaaaacgauua

SEQ ID NO: 246353 - RNA, 23 nt, Artificial Sequence
  Synthetic
cugaguagaauaaaaaacgauua

SEQ ID NO: 246354 - RNA, 24 nt, Artificial Sequence
  Synthetic
acugaguagaauaaaaaacgauua

SEQ ID NO: 246355 - RNA, 18 nt, Artificial Sequence
  Synthetic
auccaagugacacgauua

SEQ ID NO: 246356 - RNA, 19 nt, Artificial Sequence
  Synthetic
gauccaagugacacgauua

SEQ ID NO: 246357 - RNA, 20 nt, Artificial Sequence
  Synthetic
ugauccaagugacacgauua

SEQ ID NO: 246358 - RNA, 21 nt, Artificial Sequence
  Synthetic
cugauccaagugacacgauua

SEQ ID NO: 246359 - RNA, 22 nt, Artificial Sequence
  Synthetic
gcugauccaagugacacgauua

SEQ ID NO: 246360 - RNA, 23 nt, Artificial Sequence
  Synthetic
agcugauccaagugacacgauua

SEQ ID NO: 246361 - RNA, 24 nt, Artificial Sequence
  Synthetic
aagcugauccaagugacacgauua

SEQ ID NO: 246362 - RNA, 18 nt, Artificial Sequence
  Synthetic
ucacaugauggacgauua

SEQ ID NO: 246363 - RNA, 19 nt, Artificial Sequence
  Synthetic
aucacaugauggacgauua

SEQ ID NO: 246364 - RNA, 20 nt, Artificial Sequence
  Synthetic
caucacaugauggacgauua

SEQ ID NO: 246365 - RNA, 21 nt, Artificial Sequence
  Synthetic
ucaucacaugauggacgauua

SEQ ID NO: 246366 - RNA, 22 nt, Artificial Sequence
  Synthetic
gucaucacaugauggacgauua

SEQ ID NO: 246367 - RNA, 23 nt, Artificial Sequence
  Synthetic
ugucaucacaugauggacgauua

SEQ ID NO: 246368 - RNA, 24 nt, Artificial Sequence
  Synthetic
augucaucacaugauggacgauua

SEQ ID NO: 246369 - RNA, 18 nt, Artificial Sequence
  Synthetic
gauagaauggggcgauua

SEQ ID NO: 246370 - RNA, 19 nt, Artificial Sequence
  Synthetic
agauagaauggggcgauua

SEQ ID NO: 246371 - RNA, 20 nt, Artificial Sequence
  Synthetic
uagauagaauggggcgauua

SEQ ID NO: 246372 - RNA, 21 nt, Artificial Sequence
  Synthetic
auagauagaauggggcgauua

SEQ ID NO: 246373 - RNA, 22 nt, Artificial Sequence
  Synthetic
uauagauagaauggggcgauua

SEQ ID NO: 246374 - RNA, 23 nt, Artificial Sequence
  Synthetic
cuauagauagaauggggcgauua

SEQ ID NO: 246375 - RNA, 24 nt, Artificial Sequence
  Synthetic
acuauagauagaauggggcgauua

SEQ ID NO: 246376 - RNA, 18 nt, Artificial Sequence
  Synthetic
auaaaauaagaaggauua

SEQ ID NO: 246377 - RNA, 19 nt, Artificial Sequence
  Synthetic
aauaaaauaagaaggauua

SEQ ID NO: 246378 - RNA, 20 nt, Artificial Sequence
  Synthetic
caauaaaauaagaaggauua

SEQ ID NO: 246379 - RNA, 21 nt, Artificial Sequence
  Synthetic
acaauaaaauaagaaggauua

SEQ ID NO: 246380 - RNA, 22 nt, Artificial Sequence
  Synthetic
uacaauaaaauaagaaggauua

SEQ ID NO: 246381 - RNA, 23 nt, Artificial Sequence
  Synthetic
cuacaauaaaauaagaaggauua

SEQ ID NO: 246382 - RNA, 24 nt, Artificial Sequence
  Synthetic
acuacaauaaaauaagaaggauua

SEQ ID NO: 246383 - RNA, 18 nt, Artificial Sequence
  Synthetic
uauggaggcacaggauua

SEQ ID NO: 246384 - RNA, 19 nt, Artificial Sequence
  Synthetic
cuauggaggcacaggauua

SEQ ID NO: 246385 - RNA, 20 nt, Artificial Sequence
  Synthetic
ucuauggaggcacaggauua

SEQ ID NO: 246386 - RNA, 21 nt, Artificial Sequence
  Synthetic
aucuauggaggcacaggauua

SEQ ID NO: 246387 - RNA, 22 nt, Artificial Sequence
  Synthetic
aaucuauggaggcacaggauua

SEQ ID NO: 246388 - RNA, 23 nt, Artificial Sequence
  Synthetic
aaaucuauggaggcacaggauua

SEQ ID NO: 246389 - RNA, 24 nt, Artificial Sequence
  Synthetic
aaaaucuauggaggcacaggauua

SEQ ID NO: 246390 - RNA, 18 nt, Artificial Sequence
  Synthetic
aaaugaacauuaggauua

SEQ ID NO: 246391 - RNA, 19 nt, Artificial Sequence
  Synthetic
aaaaugaacauuaggauua

SEQ ID NO: 246392 - RNA, 20 nt, Artificial Sequence
  Synthetic
uaaaaugaacauuaggauua

SEQ ID NO: 246393 - RNA, 21 nt, Artificial Sequence
  Synthetic
guaaaaugaacauuaggauua

SEQ ID NO: 246394 - RNA, 22 nt, Artificial Sequence
  Synthetic
aguaaaaugaacauuaggauua

SEQ ID NO: 246395 - RNA, 23 nt, Artificial Sequence
  Synthetic
aaguaaaaugaacauuaggauua

SEQ ID NO: 246396 - RNA, 24 nt, Artificial Sequence
  Synthetic
aaaguaaaaugaacauuaggauua

SEQ ID NO: 246397 - RNA, 18 nt, Artificial Sequence
  Synthetic
caguugcaguuaggauua

SEQ ID NO: 246398 - RNA, 19 nt, Artificial Sequence
  Synthetic
gcaguugcaguuaggauua

SEQ ID NO: 246399 - RNA, 20 nt, Artificial Sequence
  Synthetic
ggcaguugcaguuaggauua

SEQ ID NO: 246400 - RNA, 21 nt, Artificial Sequence
  Synthetic
uggcaguugcaguuaggauua

SEQ ID NO: 246401 - RNA, 22 nt, Artificial Sequence
  Synthetic
cuggcaguugcaguuaggauua

SEQ ID NO: 246402 - RNA, 23 nt, Artificial Sequence
  Synthetic
acuggcaguugcaguuaggauua

SEQ ID NO: 246403 - RNA, 24 nt, Artificial Sequence
  Synthetic
aacuggcaguugcaguuaggauua

SEQ ID NO: 246404 - RNA, 18 nt, Artificial Sequence
  Synthetic
gcccauauucagggauua

SEQ ID NO: 246405 - RNA, 19 nt, Artificial Sequence
  Synthetic
ggcccauauucagggauua

SEQ ID NO: 246406 - RNA, 20 nt, Artificial Sequence
  Synthetic
aggcccauauucagggauua

SEQ ID NO: 246407 - RNA, 21 nt, Artificial Sequence
  Synthetic
caggcccauauucagggauua

SEQ ID NO: 246408 - RNA, 22 nt, Artificial Sequence
  Synthetic
gcaggcccauauucagggauua

SEQ ID NO: 246409 - RNA, 23 nt, Artificial Sequence
  Synthetic
ggcaggcccauauucagggauua

SEQ ID NO: 246410 - RNA, 24 nt, Artificial Sequence
  Synthetic
aggcaggcccauauucagggauua

SEQ ID NO: 246411 - RNA, 18 nt, Artificial Sequence
  Synthetic
ugaaaaaaauagggauua

SEQ ID NO: 246412 - RNA, 19 nt, Artificial Sequence
  Synthetic
uugaaaaaaauagggauua

SEQ ID NO: 246413 - RNA, 20 nt, Artificial Sequence
  Synthetic
guugaaaaaaauagggauua

SEQ ID NO: 246414 - RNA, 21 nt, Artificial Sequence
  Synthetic
aguugaaaaaaauagggauua

SEQ ID NO: 246415 - RNA, 22 nt, Artificial Sequence
  Synthetic
aaguugaaaaaaauagggauua

SEQ ID NO: 246416 - RNA, 23 nt, Artificial Sequence
  Synthetic
caaguugaaaaaaauagggauua

SEQ ID NO: 246417 - RNA, 24 nt, Artificial Sequence
  Synthetic
ucaaguugaaaaaaauagggauua

SEQ ID NO: 246418 - RNA, 18 nt, Artificial Sequence
  Synthetic
uuacuugaauggggauua

SEQ ID NO: 246419 - RNA, 19 nt, Artificial Sequence
  Synthetic
guuacuugaauggggauua

SEQ ID NO: 246420 - RNA, 20 nt, Artificial Sequence
  Synthetic
uguuacuugaauggggauua

SEQ ID NO: 246421 - RNA, 21 nt, Artificial Sequence
  Synthetic
uuguuacuugaauggggauua

SEQ ID NO: 246422 - RNA, 22 nt, Artificial Sequence
  Synthetic
uuuguuacuugaauggggauua

SEQ ID NO: 246423 - RNA, 23 nt, Artificial Sequence
  Synthetic
uuuuguuacuugaauggggauua

SEQ ID NO: 246424 - RNA, 24 nt, Artificial Sequence
  Synthetic
guuuuguuacuugaauggggauua

SEQ ID NO: 246425 - RNA, 18 nt, Artificial Sequence
  Synthetic
caugacacauggggauua

SEQ ID NO: 246426 - RNA, 19 nt, Artificial Sequence
  Synthetic
acaugacacauggggauua

SEQ ID NO: 246427 - RNA, 20 nt, Artificial Sequence
  Synthetic
cacaugacacauggggauua

SEQ ID NO: 246428 - RNA, 21 nt, Artificial Sequence
  Synthetic
ucacaugacacauggggauua

SEQ ID NO: 246429 - RNA, 22 nt, Artificial Sequence
  Synthetic
cucacaugacacauggggauua

SEQ ID NO: 246430 - RNA, 23 nt, Artificial Sequence
  Synthetic
ccucacaugacacauggggauua

SEQ ID NO: 246431 - RNA, 24 nt, Artificial Sequence
  Synthetic
cccucacaugacacauggggauua

SEQ ID NO: 246432 - RNA, 19 nt, Artificial Sequence
  Synthetic
ccaugacacauggggauua

SEQ ID NO: 246433 - RNA, 20 nt, Artificial Sequence
  Synthetic
cccaugacacauggggauua

SEQ ID NO: 246434 - RNA, 21 nt, Artificial Sequence
  Synthetic
ucccaugacacauggggauua

SEQ ID NO: 246435 - RNA, 22 nt, Artificial Sequence
  Synthetic
cucccaugacacauggggauua

SEQ ID NO: 246436 - RNA, 23 nt, Artificial Sequence
  Synthetic
acucccaugacacauggggauua

SEQ ID NO: 246437 - RNA, 24 nt, Artificial Sequence
  Synthetic
cacucccaugacacauggggauua

SEQ ID NO: 246438 - RNA, 18 nt, Artificial Sequence
  Synthetic
uuugacaccuggggauua

SEQ ID NO: 246439 - RNA, 19 nt, Artificial Sequence
  Synthetic
cuuugacaccuggggauua

SEQ ID NO: 246440 - RNA, 20 nt, Artificial Sequence
  Synthetic
ccuuugacaccuggggauua

SEQ ID NO: 246441 - RNA, 21 nt, Artificial Sequence
  Synthetic
uccuuugacaccuggggauua

SEQ ID NO: 246442 - RNA, 22 nt, Artificial Sequence
  Synthetic
cuccuuugacaccuggggauua

SEQ ID NO: 246443 - RNA, 23 nt, Artificial Sequence
  Synthetic
ucuccuuugacaccuggggauua

SEQ ID NO: 246444 - RNA, 24 nt, Artificial Sequence
  Synthetic
cucuccuuugacaccuggggauua

SEQ ID NO: 246445 - RNA, 18 nt, Artificial Sequence
  Synthetic
caugacaucuggggauua

SEQ ID NO: 246446 - RNA, 19 nt, Artificial Sequence
  Synthetic
ccaugacaucuggggauua

SEQ ID NO: 246447 - RNA, 20 nt, Artificial Sequence
  Synthetic
cccaugacaucuggggauua

SEQ ID NO: 246448 - RNA, 21 nt, Artificial Sequence
  Synthetic
ucccaugacaucuggggauua

SEQ ID NO: 246449 - RNA, 22 nt, Artificial Sequence
  Synthetic
cucccaugacaucuggggauua

SEQ ID NO: 246450 - RNA, 23 nt, Artificial Sequence
  Synthetic
ccucccaugacaucuggggauua

SEQ ID NO: 246451 - RNA, 24 nt, Artificial Sequence
  Synthetic
cccucccaugacaucuggggauua

SEQ ID NO: 246452 - RNA, 18 nt, Artificial Sequence
  Synthetic
cacaacacguggggauua

SEQ ID NO: 246453 - RNA, 19 nt, Artificial Sequence
  Synthetic
ccacaacacguggggauua

SEQ ID NO: 246454 - RNA, 20 nt, Artificial Sequence
  Synthetic
cccacaacacguggggauua

SEQ ID NO: 246455 - RNA, 21 nt, Artificial Sequence
  Synthetic
ucccacaacacguggggauua

SEQ ID NO: 246456 - RNA, 22 nt, Artificial Sequence
  Synthetic
cucccacaacacguggggauua

SEQ ID NO: 246457 - RNA, 23 nt, Artificial Sequence
  Synthetic
ccucccacaacacguggggauua

SEQ ID NO: 246458 - RNA, 24 nt, Artificial Sequence
  Synthetic
cccucccacaacacguggggauua

SEQ ID NO: 246459 - RNA, 18 nt, Artificial Sequence
  Synthetic
cuugacacguggggauua

SEQ ID NO: 246460 - RNA, 19 nt, Artificial Sequence
  Synthetic
ccuugacacguggggauua

SEQ ID NO: 246461 - RNA, 20 nt, Artificial Sequence
  Synthetic
cccuugacacguggggauua

SEQ ID NO: 246462 - RNA, 21 nt, Artificial Sequence
  Synthetic
ucccuugacacguggggauua

SEQ ID NO: 246463 - RNA, 22 nt, Artificial Sequence
  Synthetic
cucccuugacacguggggauua

SEQ ID NO: 246464 - RNA, 23 nt, Artificial Sequence
  Synthetic
ucucccuugacacguggggauua

SEQ ID NO: 246465 - RNA, 24 nt, Artificial Sequence
  Synthetic
cucucccuugacacguggggauua

SEQ ID NO: 246466 - RNA, 18 nt, Artificial Sequence
  Synthetic
ucugagaagaugggauua

SEQ ID NO: 246467 - RNA, 19 nt, Artificial Sequence
  Synthetic
uucugagaagaugggauua

SEQ ID NO: 246468 - RNA, 20 nt, Artificial Sequence
  Synthetic
cuucugagaagaugggauua

SEQ ID NO: 246469 - RNA, 21 nt, Artificial Sequence
  Synthetic
ccuucugagaagaugggauua

SEQ ID NO: 246470 - RNA, 22 nt, Artificial Sequence
  Synthetic
gccuucugagaagaugggauua

SEQ ID NO: 246471 - RNA, 23 nt, Artificial Sequence
  Synthetic
agccuucugagaagaugggauua

SEQ ID NO: 246472 - RNA, 24 nt, Artificial Sequence
  Synthetic
cagccuucugagaagaugggauua

SEQ ID NO: 246473 - RNA, 18 nt, Artificial Sequence
  Synthetic
cccgaguagcugggauua

SEQ ID NO: 246474 - RNA, 19 nt, Artificial Sequence
  Synthetic
ucccgaguagcugggauua

SEQ ID NO: 246475 - RNA, 20 nt, Artificial Sequence
  Synthetic
cucccgaguagcugggauua

SEQ ID NO: 246476 - RNA, 21 nt, Artificial Sequence
  Synthetic
ccucccgaguagcugggauua

SEQ ID NO: 246477 - RNA, 22 nt, Artificial Sequence
  Synthetic
gccucccgaguagcugggauua

SEQ ID NO: 246478 - RNA, 23 nt, Artificial Sequence
  Synthetic
agccucccgaguagcugggauua

SEQ ID NO: 246479 - RNA, 24 nt, Artificial Sequence
  Synthetic
cagccucccgaguagcugggauua

SEQ ID NO: 246480 - RNA, 18 nt, Artificial Sequence
  Synthetic
ccugaguagcugggauua

SEQ ID NO: 246481 - RNA, 19 nt, Artificial Sequence
  Synthetic
uccugaguagcugggauua

SEQ ID NO: 246482 - RNA, 20 nt, Artificial Sequence
  Synthetic
cuccugaguagcugggauua

SEQ ID NO: 246483 - RNA, 21 nt, Artificial Sequence
  Synthetic
ccuccugaguagcugggauua

SEQ ID NO: 246484 - RNA, 22 nt, Artificial Sequence
  Synthetic
gccuccugaguagcugggauua

SEQ ID NO: 246485 - RNA, 23 nt, Artificial Sequence
  Synthetic
agccuccugaguagcugggauua

SEQ ID NO: 246486 - RNA, 24 nt, Artificial Sequence
  Synthetic
cagccuccugaguagcugggauua

SEQ ID NO: 246487 - RNA, 18 nt, Artificial Sequence
  Synthetic
aagaucuaucugggauua

SEQ ID NO: 246488 - RNA, 19 nt, Artificial Sequence
  Synthetic
uaagaucuaucugggauua

SEQ ID NO: 246489 - RNA, 20 nt, Artificial Sequence
  Synthetic
auaagaucuaucugggauua

SEQ ID NO: 246490 - RNA, 21 nt, Artificial Sequence
  Synthetic
cauaagaucuaucugggauua

SEQ ID NO: 246491 - RNA, 22 nt, Artificial Sequence
  Synthetic
acauaagaucuaucugggauua

SEQ ID NO: 246492 - RNA, 23 nt, Artificial Sequence
  Synthetic
uacauaagaucuaucugggauua

SEQ ID NO: 246493 - RNA, 24 nt, Artificial Sequence
  Synthetic
uuacauaagaucuaucugggauua

SEQ ID NO: 246494 - RNA, 18 nt, Artificial Sequence
  Synthetic
gcauuguuggauggauua

SEQ ID NO: 246495 - RNA, 19 nt, Artificial Sequence
  Synthetic
agcauuguuggauggauua

SEQ ID NO: 246496 - RNA, 20 nt, Artificial Sequence
  Synthetic
uagcauuguuggauggauua

SEQ ID NO: 246497 - RNA, 21 nt, Artificial Sequence
  Synthetic
guagcauuguuggauggauua

SEQ ID NO: 246498 - RNA, 22 nt, Artificial Sequence
  Synthetic
cguagcauuguuggauggauua

SEQ ID NO: 246499 - RNA, 23 nt, Artificial Sequence
  Synthetic
ucguagcauuguuggauggauua

SEQ ID NO: 246500 - RNA, 24 nt, Artificial Sequence
  Synthetic
gucguagcauuguuggauggauua

SEQ ID NO: 246501 - RNA, 18 nt, Artificial Sequence
  Synthetic
uucuugauuucuggauua

SEQ ID NO: 246502 - RNA, 19 nt, Artificial Sequence
  Synthetic
auucuugauuucuggauua

SEQ ID NO: 246503 - RNA, 20 nt, Artificial Sequence
  Synthetic
cauucuugauuucuggauua

SEQ ID NO: 246504 - RNA, 21 nt, Artificial Sequence
  Synthetic
ccauucuugauuucuggauua

SEQ ID NO: 246505 - RNA, 22 nt, Artificial Sequence
  Synthetic
cccauucuugauuucuggauua

SEQ ID NO: 246506 - RNA, 23 nt, Artificial Sequence
  Synthetic
ccccauucuugauuucuggauua

SEQ ID NO: 246507 - RNA, 24 nt, Artificial Sequence
  Synthetic
uccccauucuugauuucuggauua

SEQ ID NO: 246508 - RNA, 18 nt, Artificial Sequence
  Synthetic
auuacaaaauguggauua

SEQ ID NO: 246509 - RNA, 19 nt, Artificial Sequence
  Synthetic
aauuacaaaauguggauua

SEQ ID NO: 246510 - RNA, 20 nt, Artificial Sequence
  Synthetic
aaauuacaaaauguggauua

SEQ ID NO: 246511 - RNA, 21 nt, Artificial Sequence
  Synthetic
gaaauuacaaaauguggauua

SEQ ID NO: 246512 - RNA, 22 nt, Artificial Sequence
  Synthetic
ugaaauuacaaaauguggauua

SEQ ID NO: 246513 - RNA, 23 nt, Artificial Sequence
  Synthetic
uugaaauuacaaaauguggauua

SEQ ID NO: 246514 - RNA, 24 nt, Artificial Sequence
  Synthetic
auugaaauuacaaaauguggauua

SEQ ID NO: 246515 - RNA, 18 nt, Artificial Sequence
  Synthetic
aaggcugaucuuggauua

SEQ ID NO: 246516 - RNA, 19 nt, Artificial Sequence
  Synthetic
uaaggcugaucuuggauua

SEQ ID NO: 246517 - RNA, 20 nt, Artificial Sequence
  Synthetic
cuaaggcugaucuuggauua

SEQ ID NO: 246518 - RNA, 21 nt, Artificial Sequence
  Synthetic
ucuaaggcugaucuuggauua

SEQ ID NO: 246519 - RNA, 22 nt, Artificial Sequence
  Synthetic
uucuaaggcugaucuuggauua

SEQ ID NO: 246520 - RNA, 23 nt, Artificial Sequence
  Synthetic
uuucuaaggcugaucuuggauua

SEQ ID NO: 246521 - RNA, 24 nt, Artificial Sequence
  Synthetic
guuucuaaggcugaucuuggauua

SEQ ID NO: 246522 - RNA, 18 nt, Artificial Sequence
  Synthetic
uuauuuacaacaugauua

SEQ ID NO: 246523 - RNA, 19 nt, Artificial Sequence
  Synthetic
cuuauuuacaacaugauua

SEQ ID NO: 246524 - RNA, 20 nt, Artificial Sequence
  Synthetic
acuuauuuacaacaugauua

SEQ ID NO: 246525 - RNA, 21 nt, Artificial Sequence
  Synthetic
aacuuauuuacaacaugauua

SEQ ID NO: 246526 - RNA, 22 nt, Artificial Sequence
  Synthetic
aaacuuauuuacaacaugauua

SEQ ID NO: 246527 - RNA, 23 nt, Artificial Sequence
  Synthetic
aaaacuuauuuacaacaugauua

SEQ ID NO: 246528 - RNA, 24 nt, Artificial Sequence
  Synthetic
aaaaacuuauuuacaacaugauua

SEQ ID NO: 246529 - RNA, 18 nt, Artificial Sequence
  Synthetic
uagguaugaacaugauua

SEQ ID NO: 246530 - RNA, 19 nt, Artificial Sequence
  Synthetic
uuagguaugaacaugauua

SEQ ID NO: 246531 - RNA, 20 nt, Artificial Sequence
  Synthetic
auuagguaugaacaugauua

SEQ ID NO: 246532 - RNA, 21 nt, Artificial Sequence
  Synthetic
aauuagguaugaacaugauua

SEQ ID NO: 246533 - RNA, 22 nt, Artificial Sequence
  Synthetic
aaauuagguaugaacaugauua

SEQ ID NO: 246534 - RNA, 23 nt, Artificial Sequence
  Synthetic
aaaauuagguaugaacaugauua

SEQ ID NO: 246535 - RNA, 24 nt, Artificial Sequence
  Synthetic
uaaaauuagguaugaacaugauua

SEQ ID NO: 246536 - RNA, 18 nt, Artificial Sequence
  Synthetic
ccuuaagcugcaugauua

SEQ ID NO: 246537 - RNA, 19 nt, Artificial Sequence
  Synthetic
gccuuaagcugcaugauua

SEQ ID NO: 246538 - RNA, 20 nt, Artificial Sequence
  Synthetic
agccuuaagcugcaugauua

SEQ ID NO: 246539 - RNA, 21 nt, Artificial Sequence
  Synthetic
uagccuuaagcugcaugauua

SEQ ID NO: 246540 - RNA, 22 nt, Artificial Sequence
  Synthetic
uuagccuuaagcugcaugauua

SEQ ID NO: 246541 - RNA, 23 nt, Artificial Sequence
  Synthetic
auuagccuuaagcugcaugauua

SEQ ID NO: 246542 - RNA, 24 nt, Artificial Sequence
  Synthetic
cauuagccuuaagcugcaugauua

SEQ ID NO: 246543 - RNA, 18 nt, Artificial Sequence
  Synthetic
gcauuucccugcugauua

SEQ ID NO: 246544 - RNA, 19 nt, Artificial Sequence
  Synthetic
ugcauuucccugcugauua

SEQ ID NO: 246545 - RNA, 20 nt, Artificial Sequence
  Synthetic
uugcauuucccugcugauua

SEQ ID NO: 246546 - RNA, 21 nt, Artificial Sequence
  Synthetic
uuugcauuucccugcugauua

SEQ ID NO: 246547 - RNA, 22 nt, Artificial Sequence
  Synthetic
auuugcauuucccugcugauua

SEQ ID NO: 246548 - RNA, 23 nt, Artificial Sequence
  Synthetic
gauuugcauuucccugcugauua

SEQ ID NO: 246549 - RNA, 24 nt, Artificial Sequence
  Synthetic
ugauuugcauuucccugcugauua

SEQ ID NO: 246550 - RNA, 18 nt, Artificial Sequence
  Synthetic
gauguguaucagugauua

SEQ ID NO: 246551 - RNA, 19 nt, Artificial Sequence
  Synthetic
agauguguaucagugauua

SEQ ID NO: 246552 - RNA, 20 nt, Artificial Sequence
  Synthetic
cagauguguaucagugauua

SEQ ID NO: 246553 - RNA, 21 nt, Artificial Sequence
  Synthetic
acagauguguaucagugauua

SEQ ID NO: 246554 - RNA, 22 nt, Artificial Sequence
  Synthetic
aacagauguguaucagugauua

SEQ ID NO: 246555 - RNA, 23 nt, Artificial Sequence
  Synthetic
gaacagauguguaucagugauua

SEQ ID NO: 246556 - RNA, 24 nt, Artificial Sequence
  Synthetic
ggaacagauguguaucagugauua

SEQ ID NO: 246557 - RNA, 18 nt, Artificial Sequence
  Synthetic
caucaucacuggugauua

SEQ ID NO: 246558 - RNA, 19 nt, Artificial Sequence
  Synthetic
ucaucaucacuggugauua

SEQ ID NO: 246559 - RNA, 20 nt, Artificial Sequence
  Synthetic
cucaucaucacuggugauua

SEQ ID NO: 246560 - RNA, 21 nt, Artificial Sequence
  Synthetic
gcucaucaucacuggugauua

SEQ ID NO: 246561 - RNA, 22 nt, Artificial Sequence
  Synthetic
agcucaucaucacuggugauua

SEQ ID NO: 246562 - RNA, 23 nt, Artificial Sequence
  Synthetic
aagcucaucaucacuggugauua

SEQ ID NO: 246563 - RNA, 24 nt, Artificial Sequence
  Synthetic
aaagcucaucaucacuggugauua

SEQ ID NO: 246564 - RNA, 18 nt, Artificial Sequence
  Synthetic
aaagcuucuaugugauua

SEQ ID NO: 246565 - RNA, 19 nt, Artificial Sequence
  Synthetic
uaaagcuucuaugugauua

SEQ ID NO: 246566 - RNA, 20 nt, Artificial Sequence
  Synthetic
cuaaagcuucuaugugauua

SEQ ID NO: 246567 - RNA, 21 nt, Artificial Sequence
  Synthetic
ccuaaagcuucuaugugauua

SEQ ID NO: 246568 - RNA, 22 nt, Artificial Sequence
  Synthetic
cccuaaagcuucuaugugauua

SEQ ID NO: 246569 - RNA, 23 nt, Artificial Sequence
  Synthetic
ccccuaaagcuucuaugugauua

SEQ ID NO: 246570 - RNA, 24 nt, Artificial Sequence
  Synthetic
uccccuaaagcuucuaugugauua

SEQ ID NO: 246571 - RNA, 18 nt, Artificial Sequence
  Synthetic
auagcaacacugugauua

SEQ ID NO: 246572 - RNA, 19 nt, Artificial Sequence
  Synthetic
uauagcaacacugugauua

SEQ ID NO: 246573 - RNA, 20 nt, Artificial Sequence
  Synthetic
uuauagcaacacugugauua

SEQ ID NO: 246574 - RNA, 21 nt, Artificial Sequence
  Synthetic
auuauagcaacacugugauua

SEQ ID NO: 246575 - RNA, 22 nt, Artificial Sequence
  Synthetic
aauuauagcaacacugugauua

SEQ ID NO: 246576 - RNA, 23 nt, Artificial Sequence
  Synthetic
uaauuauagcaacacugugauua

SEQ ID NO: 246577 - RNA, 24 nt, Artificial Sequence
  Synthetic
guaauuauagcaacacugugauua

SEQ ID NO: 246578 - RNA, 18 nt, Artificial Sequence
  Synthetic
acuugguuaccuugauua

SEQ ID NO: 246579 - RNA, 19 nt, Artificial Sequence
  Synthetic
uacuugguuaccuugauua

SEQ ID NO: 246580 - RNA, 20 nt, Artificial Sequence
  Synthetic
auacuugguuaccuugauua

SEQ ID NO: 246581 - RNA, 21 nt, Artificial Sequence
  Synthetic
uauacuugguuaccuugauua

SEQ ID NO: 246582 - RNA, 22 nt, Artificial Sequence
  Synthetic
auauacuugguuaccuugauua

SEQ ID NO: 246583 - RNA, 23 nt, Artificial Sequence
  Synthetic
cauauacuugguuaccuugauua

SEQ ID NO: 246584 - RNA, 24 nt, Artificial Sequence
  Synthetic
gcauauacuugguuaccuugauua

SEQ ID NO: 246585 - RNA, 18 nt, Artificial Sequence
  Synthetic
aggauaaggaguugauua

SEQ ID NO: 246586 - RNA, 19 nt, Artificial Sequence
  Synthetic
caggauaaggaguugauua

SEQ ID NO: 246587 - RNA, 20 nt, Artificial Sequence
  Synthetic
ucaggauaaggaguugauua

SEQ ID NO: 246588 - RNA, 21 nt, Artificial Sequence
  Synthetic
cucaggauaaggaguugauua

SEQ ID NO: 246589 - RNA, 22 nt, Artificial Sequence
  Synthetic
acucaggauaaggaguugauua

SEQ ID NO: 246590 - RNA, 23 nt, Artificial Sequence
  Synthetic
aacucaggauaaggaguugauua

SEQ ID NO: 246591 - RNA, 24 nt, Artificial Sequence
  Synthetic
aaacucaggauaaggaguugauua

SEQ ID NO: 246592 - RNA, 18 nt, Artificial Sequence
  Synthetic
ugauuucaguguugauua

SEQ ID NO: 246593 - RNA, 19 nt, Artificial Sequence
  Synthetic
gugauuucaguguugauua

SEQ ID NO: 246594 - RNA, 20 nt, Artificial Sequence
  Synthetic
agugauuucaguguugauua

SEQ ID NO: 246595 - RNA, 21 nt, Artificial Sequence
  Synthetic
aagugauuucaguguugauua

SEQ ID NO: 246596 - RNA, 22 nt, Artificial Sequence
  Synthetic
caagugauuucaguguugauua

SEQ ID NO: 246597 - RNA, 23 nt, Artificial Sequence
  Synthetic
gcaagugauuucaguguugauua

SEQ ID NO: 246598 - RNA, 24 nt, Artificial Sequence
  Synthetic
ugcaagugauuucaguguugauua

SEQ ID NO: 246599 - RNA, 18 nt, Artificial Sequence
  Synthetic
aaaauuuugcuuugauua

SEQ ID NO: 246600 - RNA, 19 nt, Artificial Sequence
  Synthetic
aaaaauuuugcuuugauua

SEQ ID NO: 246601 - RNA, 20 nt, Artificial Sequence
  Synthetic
uaaaaauuuugcuuugauua

SEQ ID NO: 246602 - RNA, 21 nt, Artificial Sequence
  Synthetic
uuaaaaauuuugcuuugauua

SEQ ID NO: 246603 - RNA, 22 nt, Artificial Sequence
  Synthetic
uuuaaaaauuuugcuuugauua

SEQ ID NO: 246604 - RNA, 23 nt, Artificial Sequence
  Synthetic
uuuuaaaaauuuugcuuugauua

SEQ ID NO: 246605 - RNA, 24 nt, Artificial Sequence
  Synthetic
uuuuuaaaaauuuugcuuugauua

SEQ ID NO: 246606 - RNA, 18 nt, Artificial Sequence
  Synthetic
auaacugaaguuugauua

SEQ ID NO: 246607 - RNA, 19 nt, Artificial Sequence
  Synthetic
gauaacugaaguuugauua

SEQ ID NO: 246608 - RNA, 20 nt, Artificial Sequence
  Synthetic
agauaacugaaguuugauua

SEQ ID NO: 246609 - RNA, 21 nt, Artificial Sequence
  Synthetic
cagauaacugaaguuugauua

SEQ ID NO: 246610 - RNA, 22 nt, Artificial Sequence
  Synthetic
acagauaacugaaguuugauua

SEQ ID NO: 246611 - RNA, 23 nt, Artificial Sequence
  Synthetic
uacagauaacugaaguuugauua

SEQ ID NO: 246612 - RNA, 24 nt, Artificial Sequence
  Synthetic
auacagauaacugaaguuugauua

SEQ ID NO: 246613 - RNA, 18 nt, Artificial Sequence
  Synthetic
aagaaagaaaaaauauua

SEQ ID NO: 246614 - RNA, 19 nt, Artificial Sequence
  Synthetic
aaagaaagaaaaaauauua

SEQ ID NO: 246615 - RNA, 20 nt, Artificial Sequence
  Synthetic
aaaagaaagaaaaaauauua

SEQ ID NO: 246616 - RNA, 21 nt, Artificial Sequence
  Synthetic
gaaaagaaagaaaaaauauua

SEQ ID NO: 246617 - RNA, 22 nt, Artificial Sequence
  Synthetic
agaaaagaaagaaaaaauauua

SEQ ID NO: 246618 - RNA, 23 nt, Artificial Sequence
  Synthetic
aagaaaagaaagaaaaaauauua

SEQ ID NO: 246619 - RNA, 24 nt, Artificial Sequence
  Synthetic
aaagaaaagaaagaaaaaauauua

SEQ ID NO: 246620 - RNA, 18 nt, Artificial Sequence
  Synthetic
caucuuuuuaaaauauua

SEQ ID NO: 246621 - RNA, 19 nt, Artificial Sequence
  Synthetic
ucaucuuuuuaaaauauua

SEQ ID NO: 246622 - RNA, 20 nt, Artificial Sequence
  Synthetic
uucaucuuuuuaaaauauua

SEQ ID NO: 246623 - RNA, 21 nt, Artificial Sequence
  Synthetic
uuucaucuuuuuaaaauauua

SEQ ID NO: 246624 - RNA, 22 nt, Artificial Sequence
  Synthetic
guuucaucuuuuuaaaauauua

SEQ ID NO: 246625 - RNA, 23 nt, Artificial Sequence
  Synthetic
uguuucaucuuuuuaaaauauua

SEQ ID NO: 246626 - RNA, 24 nt, Artificial Sequence
  Synthetic
uuguuucaucuuuuuaaaauauua

SEQ ID NO: 246627 - RNA, 18 nt, Artificial Sequence
  Synthetic
uuuuuccuagaaauauua

SEQ ID NO: 246628 - RNA, 19 nt, Artificial Sequence
  Synthetic
uuuuuuccuagaaauauua

SEQ ID NO: 246629 - RNA, 20 nt, Artificial Sequence
  Synthetic
uuuuuuuccuagaaauauua

SEQ ID NO: 246630 - RNA, 21 nt, Artificial Sequence
  Synthetic
cuuuuuuuccuagaaauauua

SEQ ID NO: 246631 - RNA, 22 nt, Artificial Sequence
  Synthetic
acuuuuuuuccuagaaauauua

SEQ ID NO: 246632 - RNA, 23 nt, Artificial Sequence
  Synthetic
aacuuuuuuuccuagaaauauua

SEQ ID NO: 246633 - RNA, 24 nt, Artificial Sequence
  Synthetic
aaacuuuuuuuccuagaaauauua

SEQ ID NO: 246634 - RNA, 18 nt, Artificial Sequence
  Synthetic
gacaagaaaggaauauua

SEQ ID NO: 246635 - RNA, 19 nt, Artificial Sequence
  Synthetic
agacaagaaaggaauauua

SEQ ID NO: 246636 - RNA, 20 nt, Artificial Sequence
  Synthetic
aagacaagaaaggaauauua

SEQ ID NO: 246637 - RNA, 21 nt, Artificial Sequence
  Synthetic
aaagacaagaaaggaauauua

SEQ ID NO: 246638 - RNA, 22 nt, Artificial Sequence
  Synthetic
aaaagacaagaaaggaauauua

SEQ ID NO: 246639 - RNA, 23 nt, Artificial Sequence
  Synthetic
aaaaagacaagaaaggaauauua

SEQ ID NO: 246640 - RNA, 24 nt, Artificial Sequence
  Synthetic
aaaaaagacaagaaaggaauauua

SEQ ID NO: 246641 - RNA, 18 nt, Artificial Sequence
  Synthetic
caagaugacggaauauua

SEQ ID NO: 246642 - RNA, 19 nt, Artificial Sequence
  Synthetic
acaagaugacggaauauua

SEQ ID NO: 246643 - RNA, 20 nt, Artificial Sequence
  Synthetic
aacaagaugacggaauauua

SEQ ID NO: 246644 - RNA, 21 nt, Artificial Sequence
  Synthetic
gaacaagaugacggaauauua

SEQ ID NO: 246645 - RNA, 22 nt, Artificial Sequence
  Synthetic
ggaacaagaugacggaauauua

SEQ ID NO: 246646 - RNA, 23 nt, Artificial Sequence
  Synthetic
aggaacaagaugacggaauauua

SEQ ID NO: 246647 - RNA, 24 nt, Artificial Sequence
  Synthetic
uaggaacaagaugacggaauauua

SEQ ID NO: 246648 - RNA, 18 nt, Artificial Sequence
  Synthetic
uagauucauauaauauua

SEQ ID NO: 246649 - RNA, 19 nt, Artificial Sequence
  Synthetic
uuagauucauauaauauua

SEQ ID NO: 246650 - RNA, 20 nt, Artificial Sequence
  Synthetic
uuuagauucauauaauauua

SEQ ID NO: 246651 - RNA, 21 nt, Artificial Sequence
  Synthetic
uuuuagauucauauaauauua

SEQ ID NO: 246652 - RNA, 22 nt, Artificial Sequence
  Synthetic
guuuuagauucauauaauauua

SEQ ID NO: 246653 - RNA, 23 nt, Artificial Sequence
  Synthetic
uguuuuagauucauauaauauua

SEQ ID NO: 246654 - RNA, 24 nt, Artificial Sequence
  Synthetic
cuguuuuagauucauauaauauua

SEQ ID NO: 246655 - RNA, 18 nt, Artificial Sequence
  Synthetic
gucaaauuacuaauauua

SEQ ID NO: 246656 - RNA, 19 nt, Artificial Sequence
  Synthetic
ggucaaauuacuaauauua

SEQ ID NO: 246657 - RNA, 20 nt, Artificial Sequence
  Synthetic
uggucaaauuacuaauauua

SEQ ID NO: 246658 - RNA, 21 nt, Artificial Sequence
  Synthetic
auggucaaauuacuaauauua

SEQ ID NO: 246659 - RNA, 22 nt, Artificial Sequence
  Synthetic
aauggucaaauuacuaauauua

SEQ ID NO: 246660 - RNA, 23 nt, Artificial Sequence
  Synthetic
aaauggucaaauuacuaauauua

SEQ ID NO: 246661 - RNA, 24 nt, Artificial Sequence
  Synthetic
gaaauggucaaauuacuaauauua

SEQ ID NO: 246662 - RNA, 18 nt, Artificial Sequence
  Synthetic
ccuuccuguggcauauua

SEQ ID NO: 246663 - RNA, 19 nt, Artificial Sequence
  Synthetic
cccuuccuguggcauauua

SEQ ID NO: 246664 - RNA, 20 nt, Artificial Sequence
  Synthetic
ucccuuccuguggcauauua

SEQ ID NO: 246665 - RNA, 21 nt, Artificial Sequence
  Synthetic
gucccuuccuguggcauauua

SEQ ID NO: 246666 - RNA, 22 nt, Artificial Sequence
  Synthetic
cgucccuuccuguggcauauua

SEQ ID NO: 246667 - RNA, 23 nt, Artificial Sequence
  Synthetic
ucgucccuuccuguggcauauua

SEQ ID NO: 246668 - RNA, 24 nt, Artificial Sequence
  Synthetic
cucgucccuuccuguggcauauua

SEQ ID NO: 246669 - RNA, 18 nt, Artificial Sequence
  Synthetic
caauucauggucauauua

SEQ ID NO: 246670 - RNA, 19 nt, Artificial Sequence
  Synthetic
gcaauucauggucauauua

SEQ ID NO: 246671 - RNA, 20 nt, Artificial Sequence
  Synthetic
agcaauucauggucauauua

SEQ ID NO: 246672 - RNA, 21 nt, Artificial Sequence
  Synthetic
cagcaauucauggucauauua

SEQ ID NO: 246673 - RNA, 22 nt, Artificial Sequence
  Synthetic
ccagcaauucauggucauauua

SEQ ID NO: 246674 - RNA, 23 nt, Artificial Sequence
  Synthetic
accagcaauucauggucauauua

SEQ ID NO: 246675 - RNA, 24 nt, Artificial Sequence
  Synthetic
aaccagcaauucauggucauauua

SEQ ID NO: 246676 - RNA, 18 nt, Artificial Sequence
  Synthetic
agacaauauuucauauua

SEQ ID NO: 246677 - RNA, 19 nt, Artificial Sequence
  Synthetic
gagacaauauuucauauua

SEQ ID NO: 246678 - RNA, 20 nt, Artificial Sequence
  Synthetic
agagacaauauuucauauua

SEQ ID NO: 246679 - RNA, 21 nt, Artificial Sequence
  Synthetic
aagagacaauauuucauauua

SEQ ID NO: 246680 - RNA, 22 nt, Artificial Sequence
  Synthetic
gaagagacaauauuucauauua

SEQ ID NO: 246681 - RNA, 23 nt, Artificial Sequence
  Synthetic
ggaagagacaauauuucauauua

SEQ ID NO: 246682 - RNA, 24 nt, Artificial Sequence
  Synthetic
gggaagagacaauauuucauauua

SEQ ID NO: 246683 - RNA, 18 nt, Artificial Sequence
  Synthetic
auuagacacaagauauua

SEQ ID NO: 246684 - RNA, 19 nt, Artificial Sequence
  Synthetic
gauuagacacaagauauua

SEQ ID NO: 246685 - RNA, 20 nt, Artificial Sequence
  Synthetic
ugauuagacacaagauauua

SEQ ID NO: 246686 - RNA, 21 nt, Artificial Sequence
  Synthetic
augauuagacacaagauauua

SEQ ID NO: 246687 - RNA, 22 nt, Artificial Sequence
  Synthetic
caugauuagacacaagauauua

SEQ ID NO: 246688 - RNA, 23 nt, Artificial Sequence
  Synthetic
acaugauuagacacaagauauua

SEQ ID NO: 246689 - RNA, 24 nt, Artificial Sequence
  Synthetic
cacaugauuagacacaagauauua

SEQ ID NO: 246690 - RNA, 18 nt, Artificial Sequence
  Synthetic
guaauaauuucgauauua

SEQ ID NO: 246691 - RNA, 19 nt, Artificial Sequence
  Synthetic
aguaauaauuucgauauua

SEQ ID NO: 246692 - RNA, 20 nt, Artificial Sequence
  Synthetic
aaguaauaauuucgauauua

SEQ ID NO: 246693 - RNA, 21 nt, Artificial Sequence
  Synthetic
gaaguaauaauuucgauauua

SEQ ID NO: 246694 - RNA, 22 nt, Artificial Sequence
  Synthetic
agaaguaauaauuucgauauua

SEQ ID NO: 246695 - RNA, 23 nt, Artificial Sequence
  Synthetic
uagaaguaauaauuucgauauua

SEQ ID NO: 246696 - RNA, 24 nt, Artificial Sequence
  Synthetic
guagaaguaauaauuucgauauua

SEQ ID NO: 246697 - RNA, 18 nt, Artificial Sequence
  Synthetic
gcuuuuuagaggauauua

SEQ ID NO: 246698 - RNA, 19 nt, Artificial Sequence
  Synthetic
ggcuuuuuagaggauauua

SEQ ID NO: 246699 - RNA, 20 nt, Artificial Sequence
  Synthetic
aggcuuuuuagaggauauua

SEQ ID NO: 246700 - RNA, 21 nt, Artificial Sequence
  Synthetic
aaggcuuuuuagaggauauua

SEQ ID NO: 246701 - RNA, 22 nt, Artificial Sequence
  Synthetic
caaggcuuuuuagaggauauua

SEQ ID NO: 246702 - RNA, 23 nt, Artificial Sequence
  Synthetic
gcaaggcuuuuuagaggauauua

SEQ ID NO: 246703 - RNA, 24 nt, Artificial Sequence
  Synthetic
ggcaaggcuuuuuagaggauauua

SEQ ID NO: 246704 - RNA, 18 nt, Artificial Sequence
  Synthetic
aaacacagcuggauauua

SEQ ID NO: 246705 - RNA, 19 nt, Artificial Sequence
  Synthetic
uaaacacagcuggauauua

SEQ ID NO: 246706 - RNA, 20 nt, Artificial Sequence
  Synthetic
auaaacacagcuggauauua

SEQ ID NO: 246707 - RNA, 21 nt, Artificial Sequence
  Synthetic
gauaaacacagcuggauauua

SEQ ID NO: 246708 - RNA, 22 nt, Artificial Sequence
  Synthetic
agauaaacacagcuggauauua

SEQ ID NO: 246709 - RNA, 23 nt, Artificial Sequence
  Synthetic
gagauaaacacagcuggauauua

SEQ ID NO: 246710 - RNA, 24 nt, Artificial Sequence
  Synthetic
agagauaaacacagcuggauauua

SEQ ID NO: 246711 - RNA, 18 nt, Artificial Sequence
  Synthetic
aaguaaaauuggauauua

SEQ ID NO: 246712 - RNA, 19 nt, Artificial Sequence
  Synthetic
aaaguaaaauuggauauua

SEQ ID NO: 246713 - RNA, 20 nt, Artificial Sequence
  Synthetic
gaaaguaaaauuggauauua

SEQ ID NO: 246714 - RNA, 21 nt, Artificial Sequence
  Synthetic
ugaaaguaaaauuggauauua

SEQ ID NO: 246715 - RNA, 22 nt, Artificial Sequence
  Synthetic
cugaaaguaaaauuggauauua

SEQ ID NO: 246716 - RNA, 23 nt, Artificial Sequence
  Synthetic
ucugaaaguaaaauuggauauua

SEQ ID NO: 246717 - RNA, 24 nt, Artificial Sequence
  Synthetic
aucugaaaguaaaauuggauauua

SEQ ID NO: 246718 - RNA, 18 nt, Artificial Sequence
  Synthetic
caagaggauaguauauua

SEQ ID NO: 246719 - RNA, 19 nt, Artificial Sequence
  Synthetic
ccaagaggauaguauauua

SEQ ID NO: 246720 - RNA, 20 nt, Artificial Sequence
  Synthetic
uccaagaggauaguauauua

SEQ ID NO: 246721 - RNA, 21 nt, Artificial Sequence
  Synthetic
uuccaagaggauaguauauua

SEQ ID NO: 246722 - RNA, 22 nt, Artificial Sequence
  Synthetic
uuuccaagaggauaguauauua

SEQ ID NO: 246723 - RNA, 23 nt, Artificial Sequence
  Synthetic
auuuccaagaggauaguauauua

SEQ ID NO: 246724 - RNA, 24 nt, Artificial Sequence
  Synthetic
uauuuccaagaggauaguauauua

SEQ ID NO: 246725 - RNA, 18 nt, Artificial Sequence
  Synthetic
gaauugacacguauauua

SEQ ID NO: 246726 - RNA, 19 nt, Artificial Sequence
  Synthetic
ugaauugacacguauauua

SEQ ID NO: 246727 - RNA, 20 nt, Artificial Sequence
  Synthetic
augaauugacacguauauua

SEQ ID NO: 246728 - RNA, 21 nt, Artificial Sequence
  Synthetic
uaugaauugacacguauauua

SEQ ID NO: 246729 - RNA, 22 nt, Artificial Sequence
  Synthetic
cuaugaauugacacguauauua

SEQ ID NO: 246730 - RNA, 23 nt, Artificial Sequence
  Synthetic
ucuaugaauugacacguauauua

SEQ ID NO: 246731 - RNA, 24 nt, Artificial Sequence
  Synthetic
aucuaugaauugacacguauauua

SEQ ID NO: 246732 - RNA, 18 nt, Artificial Sequence
  Synthetic
auuguuaaauguauauua

SEQ ID NO: 246733 - RNA, 19 nt, Artificial Sequence
  Synthetic
aauuguuaaauguauauua

SEQ ID NO: 246734 - RNA, 20 nt, Artificial Sequence
  Synthetic
aaauuguuaaauguauauua

SEQ ID NO: 246735 - RNA, 21 nt, Artificial Sequence
  Synthetic
aaaauuguuaaauguauauua

SEQ ID NO: 246736 - RNA, 22 nt, Artificial Sequence
  Synthetic
aaaaauuguuaaauguauauua

SEQ ID NO: 246737 - RNA, 23 nt, Artificial Sequence
  Synthetic
aaaaaauuguuaaauguauauua

SEQ ID NO: 246738 - RNA, 24 nt, Artificial Sequence
  Synthetic
uaaaaaauuguuaaauguauauua

SEQ ID NO: 246739 - RNA, 18 nt, Artificial Sequence
  Synthetic
agcucugaaauuauauua

SEQ ID NO: 246740 - RNA, 19 nt, Artificial Sequence
  Synthetic
aagcucugaaauuauauua

SEQ ID NO: 246741 - RNA, 20 nt, Artificial Sequence
  Synthetic
aaagcucugaaauuauauua

SEQ ID NO: 246742 - RNA, 21 nt, Artificial Sequence
  Synthetic
aaaagcucugaaauuauauua

SEQ ID NO: 246743 - RNA, 22 nt, Artificial Sequence
  Synthetic
caaaagcucugaaauuauauua

SEQ ID NO: 246744 - RNA, 23 nt, Artificial Sequence
  Synthetic
acaaaagcucugaaauuauauua

SEQ ID NO: 246745 - RNA, 24 nt, Artificial Sequence
  Synthetic
aacaaaagcucugaaauuauauua

SEQ ID NO: 246746 - RNA, 18 nt, Artificial Sequence
  Synthetic
gauuugaacuuuauauua

SEQ ID NO: 246747 - RNA, 19 nt, Artificial Sequence
  Synthetic
ggauuugaacuuuauauua

SEQ ID NO: 246748 - RNA, 20 nt, Artificial Sequence
  Synthetic
uggauuugaacuuuauauua

SEQ ID NO: 246749 - RNA, 21 nt, Artificial Sequence
  Synthetic
cuggauuugaacuuuauauua

SEQ ID NO: 246750 - RNA, 22 nt, Artificial Sequence
  Synthetic
ccuggauuugaacuuuauauua

SEQ ID NO: 246751 - RNA, 23 nt, Artificial Sequence
  Synthetic
gccuggauuugaacuuuauauua

SEQ ID NO: 246752 - RNA, 24 nt, Artificial Sequence
  Synthetic
ugccuggauuugaacuuuauauua

SEQ ID NO: 246753 - RNA, 18 nt, Artificial Sequence
  Synthetic
aaaauaugcacacuauua

SEQ ID NO: 246754 - RNA, 19 nt, Artificial Sequence
  Synthetic
gaaaauaugcacacuauua

SEQ ID NO: 246755 - RNA, 20 nt, Artificial Sequence
  Synthetic
agaaaauaugcacacuauua

SEQ ID NO: 246756 - RNA, 21 nt, Artificial Sequence
  Synthetic
gagaaaauaugcacacuauua

SEQ ID NO: 246757 - RNA, 22 nt, Artificial Sequence
  Synthetic
ggagaaaauaugcacacuauua

SEQ ID NO: 246758 - RNA, 23 nt, Artificial Sequence
  Synthetic
gggagaaaauaugcacacuauua

SEQ ID NO: 246759 - RNA, 24 nt, Artificial Sequence
  Synthetic
ggggagaaaauaugcacacuauua

SEQ ID NO: 246760 - RNA, 18 nt, Artificial Sequence
  Synthetic
ugucucaaaugacuauua

SEQ ID NO: 246761 - RNA, 19 nt, Artificial Sequence
  Synthetic
cugucucaaaugacuauua

SEQ ID NO: 246762 - RNA, 20 nt, Artificial Sequence
  Synthetic
gcugucucaaaugacuauua

SEQ ID NO: 246763 - RNA, 21 nt, Artificial Sequence
  Synthetic
agcugucucaaaugacuauua

SEQ ID NO: 246764 - RNA, 22 nt, Artificial Sequence
  Synthetic
uagcugucucaaaugacuauua

SEQ ID NO: 246765 - RNA, 23 nt, Artificial Sequence
  Synthetic
cuagcugucucaaaugacuauua

SEQ ID NO: 246766 - RNA, 24 nt, Artificial Sequence
  Synthetic
acuagcugucucaaaugacuauua

SEQ ID NO: 246767 - RNA, 18 nt, Artificial Sequence
  Synthetic
uuuaucaaacaccuauua

SEQ ID NO: 246768 - RNA, 19 nt, Artificial Sequence
  Synthetic
guuuaucaaacaccuauua

SEQ ID NO: 246769 - RNA, 20 nt, Artificial Sequence
  Synthetic
aguuuaucaaacaccuauua

SEQ ID NO: 246770 - RNA, 21 nt, Artificial Sequence
  Synthetic
aaguuuaucaaacaccuauua

SEQ ID NO: 246771 - RNA, 22 nt, Artificial Sequence
  Synthetic
aaaguuuaucaaacaccuauua

SEQ ID NO: 246772 - RNA, 23 nt, Artificial Sequence
  Synthetic
aaaaguuuaucaaacaccuauua

SEQ ID NO: 246773 - RNA, 24 nt, Artificial Sequence
  Synthetic
caaaaguuuaucaaacaccuauua

SEQ ID NO: 246774 - RNA, 18 nt, Artificial Sequence
  Synthetic
gccccucuuccccuauua

SEQ ID NO: 246775 - RNA, 19 nt, Artificial Sequence
  Synthetic
ugccccucuuccccuauua

SEQ ID NO: 246776 - RNA, 20 nt, Artificial Sequence
  Synthetic
uugccccucuuccccuauua

SEQ ID NO: 246777 - RNA, 21 nt, Artificial Sequence
  Synthetic
uuugccccucuuccccuauua

SEQ ID NO: 246778 - RNA, 22 nt, Artificial Sequence
  Synthetic
auuugccccucuuccccuauua

SEQ ID NO: 246779 - RNA, 23 nt, Artificial Sequence
  Synthetic
aauuugccccucuuccccuauua

SEQ ID NO: 246780 - RNA, 24 nt, Artificial Sequence
  Synthetic
gaauuugccccucuuccccuauua

SEQ ID NO: 246781 - RNA, 18 nt, Artificial Sequence
  Synthetic
aaaucuguauuccuauua

SEQ ID NO: 246782 - RNA, 19 nt, Artificial Sequence
  Synthetic
uaaaucuguauuccuauua

SEQ ID NO: 246783 - RNA, 20 nt, Artificial Sequence
  Synthetic
auaaaucuguauuccuauua

SEQ ID NO: 246784 - RNA, 21 nt, Artificial Sequence
  Synthetic
uauaaaucuguauuccuauua

SEQ ID NO: 246785 - RNA, 22 nt, Artificial Sequence
  Synthetic
auauaaaucuguauuccuauua

SEQ ID NO: 246786 - RNA, 23 nt, Artificial Sequence
  Synthetic
gauauaaaucuguauuccuauua

SEQ ID NO: 246787 - RNA, 24 nt, Artificial Sequence
  Synthetic
ugauauaaaucuguauuccuauua

SEQ ID NO: 246788 - RNA, 18 nt, Artificial Sequence
  Synthetic
aggccagaagagcuauua

SEQ ID NO: 246789 - RNA, 19 nt, Artificial Sequence
  Synthetic
gaggccagaagagcuauua

SEQ ID NO: 246790 - RNA, 20 nt, Artificial Sequence
  Synthetic
agaggccagaagagcuauua

SEQ ID NO: 246791 - RNA, 21 nt, Artificial Sequence
  Synthetic
uagaggccagaagagcuauua

SEQ ID NO: 246792 - RNA, 22 nt, Artificial Sequence
  Synthetic
auagaggccagaagagcuauua

SEQ ID NO: 246793 - RNA, 23 nt, Artificial Sequence
  Synthetic
uauagaggccagaagagcuauua

SEQ ID NO: 246794 - RNA, 24 nt, Artificial Sequence
  Synthetic
auauagaggccagaagagcuauua

SEQ ID NO: 246795 - RNA, 18 nt, Artificial Sequence
  Synthetic
ggauaguuucaucuauua

SEQ ID NO: 246796 - RNA, 19 nt, Artificial Sequence
  Synthetic
uggauaguuucaucuauua

SEQ ID NO: 246797 - RNA, 20 nt, Artificial Sequence
  Synthetic
guggauaguuucaucuauua

SEQ ID NO: 246798 - RNA, 21 nt, Artificial Sequence
  Synthetic
uguggauaguuucaucuauua

SEQ ID NO: 246799 - RNA, 22 nt, Artificial Sequence
  Synthetic
uuguggauaguuucaucuauua

SEQ ID NO: 246800 - RNA, 23 nt, Artificial Sequence
  Synthetic
uuuguggauaguuucaucuauua

SEQ ID NO: 246801 - RNA, 24 nt, Artificial Sequence
  Synthetic
guuuguggauaguuucaucuauua

SEQ ID NO: 246802 - RNA, 18 nt, Artificial Sequence
  Synthetic
uucaagagcuaucuauua

SEQ ID NO: 246803 - RNA, 19 nt, Artificial Sequence
  Synthetic
auucaagagcuaucuauua

SEQ ID NO: 246804 - RNA, 20 nt, Artificial Sequence
  Synthetic
uauucaagagcuaucuauua

SEQ ID NO: 246805 - RNA, 21 nt, Artificial Sequence
  Synthetic
uuauucaagagcuaucuauua

SEQ ID NO: 246806 - RNA, 22 nt, Artificial Sequence
  Synthetic
uuuauucaagagcuaucuauua

SEQ ID NO: 246807 - RNA, 23 nt, Artificial Sequence
  Synthetic
auuuauucaagagcuaucuauua

SEQ ID NO: 246808 - RNA, 24 nt, Artificial Sequence
  Synthetic
uauuuauucaagagcuaucuauua

SEQ ID NO: 246809 - RNA, 18 nt, Artificial Sequence
  Synthetic
gagagccugucucuauua

SEQ ID NO: 246810 - RNA, 19 nt, Artificial Sequence
  Synthetic
ugagagccugucucuauua

SEQ ID NO: 246811 - RNA, 20 nt, Artificial Sequence
  Synthetic
gugagagccugucucuauua

SEQ ID NO: 246812 - RNA, 21 nt, Artificial Sequence
  Synthetic
agugagagccugucucuauua

SEQ ID NO: 246813 - RNA, 22 nt, Artificial Sequence
  Synthetic
cagugagagccugucucuauua

SEQ ID NO: 246814 - RNA, 23 nt, Artificial Sequence
  Synthetic
acagugagagccugucucuauua

SEQ ID NO: 246815 - RNA, 24 nt, Artificial Sequence
  Synthetic
cacagugagagccugucucuauua

SEQ ID NO: 246816 - RNA, 18 nt, Artificial Sequence
  Synthetic
auugggcugugucuauua

SEQ ID NO: 246817 - RNA, 19 nt, Artificial Sequence
  Synthetic
cauugggcugugucuauua

SEQ ID NO: 246818 - RNA, 20 nt, Artificial Sequence
  Synthetic
acauugggcugugucuauua

SEQ ID NO: 246819 - RNA, 21 nt, Artificial Sequence
  Synthetic
gacauugggcugugucuauua

SEQ ID NO: 246820 - RNA, 22 nt, Artificial Sequence
  Synthetic
ggacauugggcugugucuauua

SEQ ID NO: 246821 - RNA, 23 nt, Artificial Sequence
  Synthetic
uggacauugggcugugucuauua

SEQ ID NO: 246822 - RNA, 24 nt, Artificial Sequence
  Synthetic
auggacauugggcugugucuauua

SEQ ID NO: 246823 - RNA, 18 nt, Artificial Sequence
  Synthetic
gcugaaagccuucuauua

SEQ ID NO: 246824 - RNA, 19 nt, Artificial Sequence
  Synthetic
ugcugaaagccuucuauua

SEQ ID NO: 246825 - RNA, 20 nt, Artificial Sequence
  Synthetic
uugcugaaagccuucuauua

SEQ ID NO: 246826 - RNA, 21 nt, Artificial Sequence
  Synthetic
uuugcugaaagccuucuauua

SEQ ID NO: 246827 - RNA, 22 nt, Artificial Sequence
  Synthetic
uuuugcugaaagccuucuauua

SEQ ID NO: 246828 - RNA, 23 nt, Artificial Sequence
  Synthetic
uuuuugcugaaagccuucuauua

SEQ ID NO: 246829 - RNA, 24 nt, Artificial Sequence
  Synthetic
uuuuuugcugaaagccuucuauua

SEQ ID NO: 246830 - RNA, 18 nt, Artificial Sequence
  Synthetic
auaucaccuaaaguauua

SEQ ID NO: 246831 - RNA, 19 nt, Artificial Sequence
  Synthetic
cauaucaccuaaaguauua

SEQ ID NO: 246832 - RNA, 20 nt, Artificial Sequence
  Synthetic
acauaucaccuaaaguauua

SEQ ID NO: 246833 - RNA, 21 nt, Artificial Sequence
  Synthetic
uacauaucaccuaaaguauua

SEQ ID NO: 246834 - RNA, 22 nt, Artificial Sequence
  Synthetic
auacauaucaccuaaaguauua

SEQ ID NO: 246835 - RNA, 23 nt, Artificial Sequence
  Synthetic
cauacauaucaccuaaaguauua

SEQ ID NO: 246836 - RNA, 24 nt, Artificial Sequence
  Synthetic
ucauacauaucaccuaaaguauua

SEQ ID NO: 246837 - RNA, 18 nt, Artificial Sequence
  Synthetic
cacugcaauggaguauua

SEQ ID NO: 246838 - RNA, 19 nt, Artificial Sequence
  Synthetic
ccacugcaauggaguauua

SEQ ID NO: 246839 - RNA, 20 nt, Artificial Sequence
  Synthetic
accacugcaauggaguauua

SEQ ID NO: 246840 - RNA, 21 nt, Artificial Sequence
  Synthetic
gaccacugcaauggaguauua

SEQ ID NO: 246841 - RNA, 22 nt, Artificial Sequence
  Synthetic
ggaccacugcaauggaguauua

SEQ ID NO: 246842 - RNA, 23 nt, Artificial Sequence
  Synthetic
gggaccacugcaauggaguauua

SEQ ID NO: 246843 - RNA, 24 nt, Artificial Sequence
  Synthetic
agggaccacugcaauggaguauua

SEQ ID NO: 246844 - RNA, 18 nt, Artificial Sequence
  Synthetic
ggaaaaacaauaguauua

SEQ ID NO: 246845 - RNA, 19 nt, Artificial Sequence
  Synthetic
aggaaaaacaauaguauua

SEQ ID NO: 246846 - RNA, 20 nt, Artificial Sequence
  Synthetic
caggaaaaacaauaguauua

SEQ ID NO: 246847 - RNA, 21 nt, Artificial Sequence
  Synthetic
ccaggaaaaacaauaguauua

SEQ ID NO: 246848 - RNA, 22 nt, Artificial Sequence
  Synthetic
cccaggaaaaacaauaguauua

SEQ ID NO: 246849 - RNA, 23 nt, Artificial Sequence
  Synthetic
ucccaggaaaaacaauaguauua

SEQ ID NO: 246850 - RNA, 24 nt, Artificial Sequence
  Synthetic
uucccaggaaaaacaauaguauua

SEQ ID NO: 246851 - RNA, 18 nt, Artificial Sequence
  Synthetic
ucaguuuucuggguauua

SEQ ID NO: 246852 - RNA, 19 nt, Artificial Sequence
  Synthetic
aucaguuuucuggguauua

SEQ ID NO: 246853 - RNA, 20 nt, Artificial Sequence
  Synthetic
aaucaguuuucuggguauua

SEQ ID NO: 246854 - RNA, 21 nt, Artificial Sequence
  Synthetic
aaaucaguuuucuggguauua

SEQ ID NO: 246855 - RNA, 22 nt, Artificial Sequence
  Synthetic
uaaaucaguuuucuggguauua

SEQ ID NO: 246856 - RNA, 23 nt, Artificial Sequence
  Synthetic
guaaaucaguuuucuggguauua

SEQ ID NO: 246857 - RNA, 24 nt, Artificial Sequence
  Synthetic
gguaaaucaguuuucuggguauua

SEQ ID NO: 246858 - RNA, 18 nt, Artificial Sequence
  Synthetic
auagggaaagauguauua

SEQ ID NO: 246859 - RNA, 19 nt, Artificial Sequence
  Synthetic
aauagggaaagauguauua

SEQ ID NO: 246860 - RNA, 20 nt, Artificial Sequence
  Synthetic
gaauagggaaagauguauua

SEQ ID NO: 246861 - RNA, 21 nt, Artificial Sequence
  Synthetic
agaauagggaaagauguauua

SEQ ID NO: 246862 - RNA, 22 nt, Artificial Sequence
  Synthetic
aagaauagggaaagauguauua

SEQ ID NO: 246863 - RNA, 23 nt, Artificial Sequence
  Synthetic
aaagaauagggaaagauguauua

SEQ ID NO: 246864 - RNA, 24 nt, Artificial Sequence
  Synthetic
uaaagaauagggaaagauguauua

SEQ ID NO: 246865 - RNA, 18 nt, Artificial Sequence
  Synthetic
cagaauagaaguguauua

SEQ ID NO: 246866 - RNA, 19 nt, Artificial Sequence
  Synthetic
acagaauagaaguguauua

SEQ ID NO: 246867 - RNA, 20 nt, Artificial Sequence
  Synthetic
cacagaauagaaguguauua

SEQ ID NO: 246868 - RNA, 21 nt, Artificial Sequence
  Synthetic
acacagaauagaaguguauua

SEQ ID NO: 246869 - RNA, 22 nt, Artificial Sequence
  Synthetic
aacacagaauagaaguguauua

SEQ ID NO: 246870 - RNA, 23 nt, Artificial Sequence
  Synthetic
gaacacagaauagaaguguauua

SEQ ID NO: 246871 - RNA, 24 nt, Artificial Sequence
  Synthetic
ugaacacagaauagaaguguauua

SEQ ID NO: 246872 - RNA, 18 nt, Artificial Sequence
  Synthetic
aaggggaggaaauuauua

SEQ ID NO: 246873 - RNA, 19 nt, Artificial Sequence
  Synthetic
caaggggaggaaauuauua

SEQ ID NO: 246874 - RNA, 20 nt, Artificial Sequence
  Synthetic
ucaaggggaggaaauuauua

SEQ ID NO: 246875 - RNA, 21 nt, Artificial Sequence
  Synthetic
cucaaggggaggaaauuauua

SEQ ID NO: 246876 - RNA, 22 nt, Artificial Sequence
  Synthetic
ucucaaggggaggaaauuauua

SEQ ID NO: 246877 - RNA, 23 nt, Artificial Sequence
  Synthetic
cucucaaggggaggaaauuauua

SEQ ID NO: 246878 - RNA, 24 nt, Artificial Sequence
  Synthetic
acucucaaggggaggaaauuauua

SEQ ID NO: 246879 - RNA, 18 nt, Artificial Sequence
  Synthetic
acaauucaacaauuauua

SEQ ID NO: 246880 - RNA, 19 nt, Artificial Sequence
  Synthetic
gacaauucaacaauuauua

SEQ ID NO: 246881 - RNA, 20 nt, Artificial Sequence
  Synthetic
agacaauucaacaauuauua

SEQ ID NO: 246882 - RNA, 21 nt, Artificial Sequence
  Synthetic
uagacaauucaacaauuauua

SEQ ID NO: 246883 - RNA, 22 nt, Artificial Sequence
  Synthetic
cuagacaauucaacaauuauua

SEQ ID NO: 246884 - RNA, 23 nt, Artificial Sequence
  Synthetic
acuagacaauucaacaauuauua

SEQ ID NO: 246885 - RNA, 24 nt, Artificial Sequence
  Synthetic
aacuagacaauucaacaauuauua

SEQ ID NO: 246886 - RNA, 18 nt, Artificial Sequence
  Synthetic
uguauuuuucaauuauua

SEQ ID NO: 246887 - RNA, 19 nt, Artificial Sequence
  Synthetic
auguauuuuucaauuauua

SEQ ID NO: 246888 - RNA, 20 nt, Artificial Sequence
  Synthetic
cauguauuuuucaauuauua

SEQ ID NO: 246889 - RNA, 21 nt, Artificial Sequence
  Synthetic
ucauguauuuuucaauuauua

SEQ ID NO: 246890 - RNA, 22 nt, Artificial Sequence
  Synthetic
aucauguauuuuucaauuauua

SEQ ID NO: 246891 - RNA, 23 nt, Artificial Sequence
  Synthetic
caucauguauuuuucaauuauua

SEQ ID NO: 246892 - RNA, 24 nt, Artificial Sequence
  Synthetic
ucaucauguauuuuucaauuauua

SEQ ID NO: 246893 - RNA, 18 nt, Artificial Sequence
  Synthetic
aaaauuacugaauuauua

SEQ ID NO: 246894 - RNA, 19 nt, Artificial Sequence
  Synthetic
uaaaauuacugaauuauua

SEQ ID NO: 246895 - RNA, 20 nt, Artificial Sequence
  Synthetic
cuaaaauuacugaauuauua

SEQ ID NO: 246896 - RNA, 21 nt, Artificial Sequence
  Synthetic
ucuaaaauuacugaauuauua

SEQ ID NO: 246897 - RNA, 22 nt, Artificial Sequence
  Synthetic
aucuaaaauuacugaauuauua

SEQ ID NO: 246898 - RNA, 23 nt, Artificial Sequence
  Synthetic
aaucuaaaauuacugaauuauua

SEQ ID NO: 246899 - RNA, 24 nt, Artificial Sequence
  Synthetic
gaaucuaaaauuacugaauuauua

SEQ ID NO: 246900 - RNA, 18 nt, Artificial Sequence
  Synthetic
guuuuuagauaauuauua

SEQ ID NO: 246901 - RNA, 19 nt, Artificial Sequence
  Synthetic
uguuuuuagauaauuauua

SEQ ID NO: 246902 - RNA, 20 nt, Artificial Sequence
  Synthetic
uuguuuuuagauaauuauua

SEQ ID NO: 246903 - RNA, 21 nt, Artificial Sequence
  Synthetic
guuguuuuuagauaauuauua

SEQ ID NO: 246904 - RNA, 22 nt, Artificial Sequence
  Synthetic
gguuguuuuuagauaauuauua

SEQ ID NO: 246905 - RNA, 23 nt, Artificial Sequence
  Synthetic
ugguuguuuuuagauaauuauua

SEQ ID NO: 246906 - RNA, 24 nt, Artificial Sequence
  Synthetic
augguuguuuuuagauaauuauua

SEQ ID NO: 246907 - RNA, 18 nt, Artificial Sequence
  Synthetic
gcugcuauugcauuauua

SEQ ID NO: 246908 - RNA, 19 nt, Artificial Sequence
  Synthetic
agcugcuauugcauuauua

SEQ ID NO: 246909 - RNA, 20 nt, Artificial Sequence
  Synthetic
aagcugcuauugcauuauua

SEQ ID NO: 246910 - RNA, 21 nt, Artificial Sequence
  Synthetic
aaagcugcuauugcauuauua

SEQ ID NO: 246911 - RNA, 22 nt, Artificial Sequence
  Synthetic
aaaagcugcuauugcauuauua

SEQ ID NO: 246912 - RNA, 23 nt, Artificial Sequence
  Synthetic
uaaaagcugcuauugcauuauua

SEQ ID NO: 246913 - RNA, 24 nt, Artificial Sequence
  Synthetic
auaaaagcugcuauugcauuauua

SEQ ID NO: 246914 - RNA, 18 nt, Artificial Sequence
  Synthetic
auuuucccuagauuauua

SEQ ID NO: 246915 - RNA, 19 nt, Artificial Sequence
  Synthetic
uauuuucccuagauuauua

SEQ ID NO: 246916 - RNA, 20 nt, Artificial Sequence
  Synthetic
guauuuucccuagauuauua

SEQ ID NO: 246917 - RNA, 21 nt, Artificial Sequence
  Synthetic
cguauuuucccuagauuauua

SEQ ID NO: 246918 - RNA, 22 nt, Artificial Sequence
  Synthetic
gcguauuuucccuagauuauua

SEQ ID NO: 246919 - RNA, 23 nt, Artificial Sequence
  Synthetic
ggcguauuuucccuagauuauua

SEQ ID NO: 246920 - RNA, 24 nt, Artificial Sequence
  Synthetic
aggcguauuuucccuagauuauua

SEQ ID NO: 246921 - RNA, 18 nt, Artificial Sequence
  Synthetic
auucauaauauauuauua

SEQ ID NO: 246922 - RNA, 19 nt, Artificial Sequence
  Synthetic
uauucauaauauauuauua

SEQ ID NO: 246923 - RNA, 20 nt, Artificial Sequence
  Synthetic
uuauucauaauauauuauua

SEQ ID NO: 246924 - RNA, 21 nt, Artificial Sequence
  Synthetic
auuauucauaauauauuauua

SEQ ID NO: 246925 - RNA, 22 nt, Artificial Sequence
  Synthetic
uauuauucauaauauauuauua

SEQ ID NO: 246926 - RNA, 23 nt, Artificial Sequence
  Synthetic
uuauuauucauaauauauuauua

SEQ ID NO: 246927 - RNA, 24 nt, Artificial Sequence
  Synthetic
auuauuauucauaauauauuauua

SEQ ID NO: 246928 - RNA, 18 nt, Artificial Sequence
  Synthetic
aaugaaucuguauuauua

SEQ ID NO: 246929 - RNA, 19 nt, Artificial Sequence
  Synthetic
aaaugaaucuguauuauua

SEQ ID NO: 246930 - RNA, 20 nt, Artificial Sequence
  Synthetic
gaaaugaaucuguauuauua

SEQ ID NO: 246931 - RNA, 21 nt, Artificial Sequence
  Synthetic
ggaaaugaaucuguauuauua

SEQ ID NO: 246932 - RNA, 22 nt, Artificial Sequence
  Synthetic
uggaaaugaaucuguauuauua

SEQ ID NO: 246933 - RNA, 23 nt, Artificial Sequence
  Synthetic
auggaaaugaaucuguauuauua

SEQ ID NO: 246934 - RNA, 24 nt, Artificial Sequence
  Synthetic
uauggaaaugaaucuguauuauua

SEQ ID NO: 246935 - RNA, 18 nt, Artificial Sequence
  Synthetic
ucaagcucuuacuuauua

SEQ ID NO: 246936 - RNA, 19 nt, Artificial Sequence
  Synthetic
cucaagcucuuacuuauua

SEQ ID NO: 246937 - RNA, 20 nt, Artificial Sequence
  Synthetic
ucucaagcucuuacuuauua

SEQ ID NO: 246938 - RNA, 21 nt, Artificial Sequence
  Synthetic
aucucaagcucuuacuuauua

SEQ ID NO: 246939 - RNA, 22 nt, Artificial Sequence
  Synthetic
aaucucaagcucuuacuuauua

SEQ ID NO: 246940 - RNA, 23 nt, Artificial Sequence
  Synthetic
aaaucucaagcucuuacuuauua

SEQ ID NO: 246941 - RNA, 24 nt, Artificial Sequence
  Synthetic
uaaaucucaagcucuuacuuauua

SEQ ID NO: 246942 - RNA, 18 nt, Artificial Sequence
  Synthetic
uugcugcaucucuuauua

SEQ ID NO: 246943 - RNA, 19 nt, Artificial Sequence
  Synthetic
uuugcugcaucucuuauua

SEQ ID NO: 246944 - RNA, 20 nt, Artificial Sequence
  Synthetic
cuuugcugcaucucuuauua

SEQ ID NO: 246945 - RNA, 21 nt, Artificial Sequence
  Synthetic
ucuuugcugcaucucuuauua

SEQ ID NO: 246946 - RNA, 22 nt, Artificial Sequence
  Synthetic
uucuuugcugcaucucuuauua

SEQ ID NO: 246947 - RNA, 23 nt, Artificial Sequence
  Synthetic
guucuuugcugcaucucuuauua

SEQ ID NO: 246948 - RNA, 24 nt, Artificial Sequence
  Synthetic
uguucuuugcugcaucucuuauua

SEQ ID NO: 246949 - RNA, 18 nt, Artificial Sequence
  Synthetic
uaucagauaauguuauua

SEQ ID NO: 246950 - RNA, 19 nt, Artificial Sequence
  Synthetic
auaucagauaauguuauua

SEQ ID NO: 246951 - RNA, 20 nt, Artificial Sequence
  Synthetic
aauaucagauaauguuauua

SEQ ID NO: 246952 - RNA, 21 nt, Artificial Sequence
  Synthetic
caauaucagauaauguuauua

SEQ ID NO: 246953 - RNA, 22 nt, Artificial Sequence
  Synthetic
acaauaucagauaauguuauua

SEQ ID NO: 246954 - RNA, 23 nt, Artificial Sequence
  Synthetic
aacaauaucagauaauguuauua

SEQ ID NO: 246955 - RNA, 24 nt, Artificial Sequence
  Synthetic
gaacaauaucagauaauguuauua

SEQ ID NO: 246956 - RNA, 18 nt, Artificial Sequence
  Synthetic
auaaaaagaguguuauua

SEQ ID NO: 246957 - RNA, 19 nt, Artificial Sequence
  Synthetic
aauaaaaagaguguuauua

SEQ ID NO: 246958 - RNA, 20 nt, Artificial Sequence
  Synthetic
uaauaaaaagaguguuauua

SEQ ID NO: 246959 - RNA, 21 nt, Artificial Sequence
  Synthetic
cuaauaaaaagaguguuauua

SEQ ID NO: 246960 - RNA, 22 nt, Artificial Sequence
  Synthetic
ccuaauaaaaagaguguuauua

SEQ ID NO: 246961 - RNA, 23 nt, Artificial Sequence
  Synthetic
cccuaauaaaaagaguguuauua

SEQ ID NO: 246962 - RNA, 24 nt, Artificial Sequence
  Synthetic
acccuaauaaaaagaguguuauua

SEQ ID NO: 246963 - RNA, 18 nt, Artificial Sequence
  Synthetic
aagaacaagaauuuauua

SEQ ID NO: 246964 - RNA, 19 nt, Artificial Sequence
  Synthetic
caagaacaagaauuuauua

SEQ ID NO: 246965 - RNA, 20 nt, Artificial Sequence
  Synthetic
gcaagaacaagaauuuauua

SEQ ID NO: 246966 - RNA, 21 nt, Artificial Sequence
  Synthetic
ugcaagaacaagaauuuauua

SEQ ID NO: 246967 - RNA, 22 nt, Artificial Sequence
  Synthetic
gugcaagaacaagaauuuauua

SEQ ID NO: 246968 - RNA, 23 nt, Artificial Sequence
  Synthetic
ugugcaagaacaagaauuuauua

SEQ ID NO: 246969 - RNA, 24 nt, Artificial Sequence
  Synthetic
uugugcaagaacaagaauuuauua

SEQ ID NO: 246970 - RNA, 18 nt, Artificial Sequence
  Synthetic
gcuaacucucauuuauua

SEQ ID NO: 246971 - RNA, 19 nt, Artificial Sequence
  Synthetic
ugcuaacucucauuuauua

SEQ ID NO: 246972 - RNA, 20 nt, Artificial Sequence
  Synthetic
augcuaacucucauuuauua

SEQ ID NO: 246973 - RNA, 21 nt, Artificial Sequence
  Synthetic
gaugcuaacucucauuuauua

SEQ ID NO: 246974 - RNA, 22 nt, Artificial Sequence
  Synthetic
agaugcuaacucucauuuauua

SEQ ID NO: 246975 - RNA, 23 nt, Artificial Sequence
  Synthetic
uagaugcuaacucucauuuauua

SEQ ID NO: 246976 - RNA, 24 nt, Artificial Sequence
  Synthetic
auagaugcuaacucucauuuauua

SEQ ID NO: 246977 - RNA, 18 nt, Artificial Sequence
  Synthetic
auggcucuuuauuuauua

SEQ ID NO: 246978 - RNA, 19 nt, Artificial Sequence
  Synthetic
aauggcucuuuauuuauua

SEQ ID NO: 246979 - RNA, 20 nt, Artificial Sequence
  Synthetic
aaauggcucuuuauuuauua

SEQ ID NO: 246980 - RNA, 21 nt, Artificial Sequence
  Synthetic
caaauggcucuuuauuuauua

SEQ ID NO: 246981 - RNA, 22 nt, Artificial Sequence
  Synthetic
ccaaauggcucuuuauuuauua

SEQ ID NO: 246982 - RNA, 23 nt, Artificial Sequence
  Synthetic
accaaauggcucuuuauuuauua

SEQ ID NO: 246983 - RNA, 24 nt, Artificial Sequence
  Synthetic
gaccaaauggcucuuuauuuauua

SEQ ID NO: 246984 - RNA, 18 nt, Artificial Sequence
  Synthetic
ugauguaaaauuuuauua

SEQ ID NO: 246985 - RNA, 19 nt, Artificial Sequence
  Synthetic
cugauguaaaauuuuauua

SEQ ID NO: 246986 - RNA, 20 nt, Artificial Sequence
  Synthetic
ucugauguaaaauuuuauua

SEQ ID NO: 246987 - RNA, 21 nt, Artificial Sequence
  Synthetic
uucugauguaaaauuuuauua

SEQ ID NO: 246988 - RNA, 22 nt, Artificial Sequence
  Synthetic
cuucugauguaaaauuuuauua

SEQ ID NO: 246989 - RNA, 23 nt, Artificial Sequence
  Synthetic
acuucugauguaaaauuuuauua

SEQ ID NO: 246990 - RNA, 24 nt, Artificial Sequence
  Synthetic
aacuucugauguaaaauuuuauua

SEQ ID NO: 246991 - RNA, 18 nt, Artificial Sequence
  Synthetic
ugggacaauauuuuauua

SEQ ID NO: 246992 - RNA, 19 nt, Artificial Sequence
  Synthetic
augggacaauauuuuauua

SEQ ID NO: 246993 - RNA, 20 nt, Artificial Sequence
  Synthetic
aaugggacaauauuuuauua

SEQ ID NO: 246994 - RNA, 21 nt, Artificial Sequence
  Synthetic
aaaugggacaauauuuuauua

SEQ ID NO: 246995 - RNA, 22 nt, Artificial Sequence
  Synthetic
aaaaugggacaauauuuuauua

SEQ ID NO: 246996 - RNA, 23 nt, Artificial Sequence
  Synthetic
uaaaaugggacaauauuuuauua

SEQ ID NO: 246997 - RNA, 24 nt, Artificial Sequence
  Synthetic
auaaaaugggacaauauuuuauua

SEQ ID NO: 246998 - RNA, 18 nt, Artificial Sequence
  Synthetic
auuuugugucuuuuauua

SEQ ID NO: 246999 - RNA, 19 nt, Artificial Sequence
  Synthetic
cauuuugugucuuuuauua

SEQ ID NO: 247000 - RNA, 20 nt, Artificial Sequence
  Synthetic
ucauuuugugucuuuuauua

SEQ ID NO: 247001 - RNA, 21 nt, Artificial Sequence
  Synthetic
aucauuuugugucuuuuauua

SEQ ID NO: 247002 - RNA, 22 nt, Artificial Sequence
  Synthetic
caucauuuugugucuuuuauua

SEQ ID NO: 247003 - RNA, 23 nt, Artificial Sequence
  Synthetic
ucaucauuuugugucuuuuauua

SEQ ID NO: 247004 - RNA, 24 nt, Artificial Sequence
  Synthetic
aucaucauuuugugucuuuuauua

SEQ ID NO: 247005 - RNA, 18 nt, Artificial Sequence
  Synthetic
agaaucauuguuuuauua

SEQ ID NO: 247006 - RNA, 19 nt, Artificial Sequence
  Synthetic
cagaaucauuguuuuauua

SEQ ID NO: 247007 - RNA, 20 nt, Artificial Sequence
  Synthetic
gcagaaucauuguuuuauua

SEQ ID NO: 247008 - RNA, 21 nt, Artificial Sequence
  Synthetic
agcagaaucauuguuuuauua

SEQ ID NO: 247009 - RNA, 22 nt, Artificial Sequence
  Synthetic
aagcagaaucauuguuuuauua

SEQ ID NO: 247010 - RNA, 23 nt, Artificial Sequence
  Synthetic
gaagcagaaucauuguuuuauua

SEQ ID NO: 247011 - RNA, 24 nt, Artificial Sequence
  Synthetic
agaagcagaaucauuguuuuauua

SEQ ID NO: 247012 - RNA, 18 nt, Artificial Sequence
  Synthetic
agcugaauauuuuuauua

SEQ ID NO: 247013 - RNA, 19 nt, Artificial Sequence
  Synthetic
cagcugaauauuuuuauua

SEQ ID NO: 247014 - RNA, 20 nt, Artificial Sequence
  Synthetic
ccagcugaauauuuuuauua

SEQ ID NO: 247015 - RNA, 21 nt, Artificial Sequence
  Synthetic
accagcugaauauuuuuauua

SEQ ID NO: 247016 - RNA, 22 nt, Artificial Sequence
  Synthetic
aaccagcugaauauuuuuauua

SEQ ID NO: 247017 - RNA, 23 nt, Artificial Sequence
  Synthetic
aaaccagcugaauauuuuuauua

SEQ ID NO: 247018 - RNA, 24 nt, Artificial Sequence
  Synthetic
uaaaccagcugaauauuuuuauua

SEQ ID NO: 247019 - RNA, 18 nt, Artificial Sequence
  Synthetic
acaauauaccaaaacuua

SEQ ID NO: 247020 - RNA, 19 nt, Artificial Sequence
  Synthetic
uacaauauaccaaaacuua

SEQ ID NO: 247021 - RNA, 20 nt, Artificial Sequence
  Synthetic
auacaauauaccaaaacuua

SEQ ID NO: 247022 - RNA, 21 nt, Artificial Sequence
  Synthetic
aauacaauauaccaaaacuua

SEQ ID NO: 247023 - RNA, 22 nt, Artificial Sequence
  Synthetic
aaauacaauauaccaaaacuua

SEQ ID NO: 247024 - RNA, 23 nt, Artificial Sequence
  Synthetic
aaaauacaauauaccaaaacuua

SEQ ID NO: 247025 - RNA, 24 nt, Artificial Sequence
  Synthetic
aaaaauacaauauaccaaaacuua

SEQ ID NO: 247026 - RNA, 18 nt, Artificial Sequence
  Synthetic
gauacagggcaaaacuua

SEQ ID NO: 247027 - RNA, 19 nt, Artificial Sequence
  Synthetic
agauacagggcaaaacuua

SEQ ID NO: 247028 - RNA, 20 nt, Artificial Sequence
  Synthetic
aagauacagggcaaaacuua

SEQ ID NO: 247029 - RNA, 21 nt, Artificial Sequence
  Synthetic
aaagauacagggcaaaacuua

SEQ ID NO: 247030 - RNA, 22 nt, Artificial Sequence
  Synthetic
aaaagauacagggcaaaacuua

SEQ ID NO: 247031 - RNA, 23 nt, Artificial Sequence
  Synthetic
caaaagauacagggcaaaacuua

SEQ ID NO: 247032 - RNA, 24 nt, Artificial Sequence
  Synthetic
gcaaaagauacagggcaaaacuua

SEQ ID NO: 247033 - RNA, 18 nt, Artificial Sequence
  Synthetic
uuugccucgagaaacuua

SEQ ID NO: 247034 - RNA, 19 nt, Artificial Sequence
  Synthetic
auuugccucgagaaacuua

SEQ ID NO: 247035 - RNA, 20 nt, Artificial Sequence
  Synthetic
uauuugccucgagaaacuua

SEQ ID NO: 247036 - RNA, 21 nt, Artificial Sequence
  Synthetic
auauuugccucgagaaacuua

SEQ ID NO: 247037 - RNA, 22 nt, Artificial Sequence
  Synthetic
aauauuugccucgagaaacuua

SEQ ID NO: 247038 - RNA, 23 nt, Artificial Sequence
  Synthetic
aaauauuugccucgagaaacuua

SEQ ID NO: 247039 - RNA, 24 nt, Artificial Sequence
  Synthetic
uaaauauuugccucgagaaacuua

SEQ ID NO: 247040 - RNA, 18 nt, Artificial Sequence
  Synthetic
gaagugaaaugaaacuua

SEQ ID NO: 247041 - RNA, 19 nt, Artificial Sequence
  Synthetic
ugaagugaaaugaaacuua

SEQ ID NO: 247042 - RNA, 20 nt, Artificial Sequence
  Synthetic
cugaagugaaaugaaacuua

SEQ ID NO: 247043 - RNA, 21 nt, Artificial Sequence
  Synthetic
acugaagugaaaugaaacuua

SEQ ID NO: 247044 - RNA, 22 nt, Artificial Sequence
  Synthetic
aacugaagugaaaugaaacuua

SEQ ID NO: 247045 - RNA, 23 nt, Artificial Sequence
  Synthetic
uaacugaagugaaaugaaacuua

SEQ ID NO: 247046 - RNA, 24 nt, Artificial Sequence
  Synthetic
uuaacugaagugaaaugaaacuua

SEQ ID NO: 247047 - RNA, 18 nt, Artificial Sequence
  Synthetic
uguuagaacugaaacuua

SEQ ID NO: 247048 - RNA, 19 nt, Artificial Sequence
  Synthetic
auguuagaacugaaacuua

SEQ ID NO: 247049 - RNA, 20 nt, Artificial Sequence
  Synthetic
aauguuagaacugaaacuua

SEQ ID NO: 247050 - RNA, 21 nt, Artificial Sequence
  Synthetic
aaauguuagaacugaaacuua

SEQ ID NO: 247051 - RNA, 22 nt, Artificial Sequence
  Synthetic
caaauguuagaacugaaacuua

SEQ ID NO: 247052 - RNA, 23 nt, Artificial Sequence
  Synthetic
acaaauguuagaacugaaacuua

SEQ ID NO: 247053 - RNA, 24 nt, Artificial Sequence
  Synthetic
aacaaauguuagaacugaaacuua

SEQ ID NO: 247054 - RNA, 18 nt, Artificial Sequence
  Synthetic
gagaccuauauaaacuua

SEQ ID NO: 247055 - RNA, 19 nt, Artificial Sequence
  Synthetic
ugagaccuauauaaacuua

SEQ ID NO: 247056 - RNA, 20 nt, Artificial Sequence
  Synthetic
augagaccuauauaaacuua

SEQ ID NO: 247057 - RNA, 21 nt, Artificial Sequence
  Synthetic
aaugagaccuauauaaacuua

SEQ ID NO: 247058 - RNA, 22 nt, Artificial Sequence
  Synthetic
gaaugagaccuauauaaacuua

SEQ ID NO: 247059 - RNA, 23 nt, Artificial Sequence
  Synthetic
agaaugagaccuauauaaacuua

SEQ ID NO: 247060 - RNA, 24 nt, Artificial Sequence
  Synthetic
uagaaugagaccuauauaaacuua

SEQ ID NO: 247061 - RNA, 18 nt, Artificial Sequence
  Synthetic
agacugaagaucaacuua

SEQ ID NO: 247062 - RNA, 19 nt, Artificial Sequence
  Synthetic
gagacugaagaucaacuua

SEQ ID NO: 247063 - RNA, 20 nt, Artificial Sequence
  Synthetic
agagacugaagaucaacuua

SEQ ID NO: 247064 - RNA, 21 nt, Artificial Sequence
  Synthetic
cagagacugaagaucaacuua

SEQ ID NO: 247065 - RNA, 22 nt, Artificial Sequence
  Synthetic
ucagagacugaagaucaacuua

SEQ ID NO: 247066 - RNA, 23 nt, Artificial Sequence
  Synthetic
aucagagacugaagaucaacuua

SEQ ID NO: 247067 - RNA, 24 nt, Artificial Sequence
  Synthetic
uaucagagacugaagaucaacuua

SEQ ID NO: 247068 - RNA, 18 nt, Artificial Sequence
  Synthetic
ugggagaagcugaacuua

SEQ ID NO: 247069 - RNA, 19 nt, Artificial Sequence
  Synthetic
uugggagaagcugaacuua

SEQ ID NO: 247070 - RNA, 20 nt, Artificial Sequence
  Synthetic
auugggagaagcugaacuua

SEQ ID NO: 247071 - RNA, 21 nt, Artificial Sequence
  Synthetic
cauugggagaagcugaacuua

SEQ ID NO: 247072 - RNA, 22 nt, Artificial Sequence
  Synthetic
acauugggagaagcugaacuua

SEQ ID NO: 247073 - RNA, 23 nt, Artificial Sequence
  Synthetic
cacauugggagaagcugaacuua

SEQ ID NO: 247074 - RNA, 24 nt, Artificial Sequence
  Synthetic
acacauugggagaagcugaacuua

SEQ ID NO: 247075 - RNA, 18 nt, Artificial Sequence
  Synthetic
uuaucagcugugaacuua

SEQ ID NO: 247076 - RNA, 19 nt, Artificial Sequence
  Synthetic
uuuaucagcugugaacuua

SEQ ID NO: 247077 - RNA, 20 nt, Artificial Sequence
  Synthetic
cuuuaucagcugugaacuua

SEQ ID NO: 247078 - RNA, 21 nt, Artificial Sequence
  Synthetic
ccuuuaucagcugugaacuua

SEQ ID NO: 247079 - RNA, 22 nt, Artificial Sequence
  Synthetic
gccuuuaucagcugugaacuua

SEQ ID NO: 247080 - RNA, 23 nt, Artificial Sequence
  Synthetic
agccuuuaucagcugugaacuua

SEQ ID NO: 247081 - RNA, 24 nt, Artificial Sequence
  Synthetic
gagccuuuaucagcugugaacuua

SEQ ID NO: 247082 - RNA, 18 nt, Artificial Sequence
  Synthetic
agggucuucuuuaacuua

SEQ ID NO: 247083 - RNA, 19 nt, Artificial Sequence
  Synthetic
cagggucuucuuuaacuua

SEQ ID NO: 247084 - RNA, 20 nt, Artificial Sequence
  Synthetic
ucagggucuucuuuaacuua

SEQ ID NO: 247085 - RNA, 21 nt, Artificial Sequence
  Synthetic
aucagggucuucuuuaacuua

SEQ ID NO: 247086 - RNA, 22 nt, Artificial Sequence
  Synthetic
aaucagggucuucuuuaacuua

SEQ ID NO: 247087 - RNA, 23 nt, Artificial Sequence
  Synthetic
uaaucagggucuucuuuaacuua

SEQ ID NO: 247088 - RNA, 24 nt, Artificial Sequence
  Synthetic
auaaucagggucuucuuuaacuua

SEQ ID NO: 247089 - RNA, 18 nt, Artificial Sequence
  Synthetic
uguaaccaagcacacuua

SEQ ID NO: 247090 - RNA, 19 nt, Artificial Sequence
  Synthetic
auguaaccaagcacacuua

SEQ ID NO: 247091 - RNA, 20 nt, Artificial Sequence
  Synthetic
cauguaaccaagcacacuua

SEQ ID NO: 247092 - RNA, 21 nt, Artificial Sequence
  Synthetic
ucauguaaccaagcacacuua

SEQ ID NO: 247093 - RNA, 22 nt, Artificial Sequence
  Synthetic
uucauguaaccaagcacacuua

SEQ ID NO: 247094 - RNA, 23 nt, Artificial Sequence
  Synthetic
auucauguaaccaagcacacuua

SEQ ID NO: 247095 - RNA, 24 nt, Artificial Sequence
  Synthetic
uauucauguaaccaagcacacuua

SEQ ID NO: 247096 - RNA, 18 nt, Artificial Sequence
  Synthetic
uagaaaugugcacacuua

SEQ ID NO: 247097 - RNA, 19 nt, Artificial Sequence
  Synthetic
auagaaaugugcacacuua

SEQ ID NO: 247098 - RNA, 20 nt, Artificial Sequence
  Synthetic
uauagaaaugugcacacuua

SEQ ID NO: 247099 - RNA, 21 nt, Artificial Sequence
  Synthetic
uuauagaaaugugcacacuua

SEQ ID NO: 247100 - RNA, 22 nt, Artificial Sequence
  Synthetic
guuauagaaaugugcacacuua

SEQ ID NO: 247101 - RNA, 23 nt, Artificial Sequence
  Synthetic
uguuauagaaaugugcacacuua

SEQ ID NO: 247102 - RNA, 24 nt, Artificial Sequence
  Synthetic
uuguuauagaaaugugcacacuua

SEQ ID NO: 247103 - RNA, 18 nt, Artificial Sequence
  Synthetic
gaaauacauauacacuua

SEQ ID NO: 247104 - RNA, 19 nt, Artificial Sequence
  Synthetic
ugaaauacauauacacuua

SEQ ID NO: 247105 - RNA, 20 nt, Artificial Sequence
  Synthetic
uugaaauacauauacacuua

SEQ ID NO: 247106 - RNA, 21 nt, Artificial Sequence
  Synthetic
uuugaaauacauauacacuua

SEQ ID NO: 247107 - RNA, 22 nt, Artificial Sequence
  Synthetic
uuuugaaauacauauacacuua

SEQ ID NO: 247108 - RNA, 23 nt, Artificial Sequence
  Synthetic
auuuugaaauacauauacacuua

SEQ ID NO: 247109 - RNA, 24 nt, Artificial Sequence
  Synthetic
uauuuugaaauacauauacacuua

SEQ ID NO: 247110 - RNA, 18 nt, Artificial Sequence
  Synthetic
uuguauuaguuacacuua

SEQ ID NO: 247111 - RNA, 19 nt, Artificial Sequence
  Synthetic
guuguauuaguuacacuua

SEQ ID NO: 247112 - RNA, 20 nt, Artificial Sequence
  Synthetic
aguuguauuaguuacacuua

SEQ ID NO: 247113 - RNA, 21 nt, Artificial Sequence
  Synthetic
caguuguauuaguuacacuua

SEQ ID NO: 247114 - RNA, 22 nt, Artificial Sequence
  Synthetic
ucaguuguauuaguuacacuua

SEQ ID NO: 247115 - RNA, 23 nt, Artificial Sequence
  Synthetic
cucaguuguauuaguuacacuua

SEQ ID NO: 247116 - RNA, 24 nt, Artificial Sequence
  Synthetic
ccucaguuguauuaguuacacuua

SEQ ID NO: 247117 - RNA, 18 nt, Artificial Sequence
  Synthetic
uucucaagcaggcacuua

SEQ ID NO: 247118 - RNA, 19 nt, Artificial Sequence
  Synthetic
uuucucaagcaggcacuua

SEQ ID NO: 247119 - RNA, 20 nt, Artificial Sequence
  Synthetic
cuuucucaagcaggcacuua

SEQ ID NO: 247120 - RNA, 21 nt, Artificial Sequence
  Synthetic
gcuuucucaagcaggcacuua

SEQ ID NO: 247121 - RNA, 22 nt, Artificial Sequence
  Synthetic
agcuuucucaagcaggcacuua

SEQ ID NO: 247122 - RNA, 23 nt, Artificial Sequence
  Synthetic
gagcuuucucaagcaggcacuua

SEQ ID NO: 247123 - RNA, 24 nt, Artificial Sequence
  Synthetic
ugagcuuucucaagcaggcacuua

SEQ ID NO: 247124 - RNA, 18 nt, Artificial Sequence
  Synthetic
auguuaaauaaucacuua

SEQ ID NO: 247125 - RNA, 19 nt, Artificial Sequence
  Synthetic
uauguuaaauaaucacuua

SEQ ID NO: 247126 - RNA, 20 nt, Artificial Sequence
  Synthetic
uuauguuaaauaaucacuua

SEQ ID NO: 247127 - RNA, 21 nt, Artificial Sequence
  Synthetic
auuauguuaaauaaucacuua

SEQ ID NO: 247128 - RNA, 22 nt, Artificial Sequence
  Synthetic
gauuauguuaaauaaucacuua

SEQ ID NO: 247129 - RNA, 23 nt, Artificial Sequence
  Synthetic
agauuauguuaaauaaucacuua

SEQ ID NO: 247130 - RNA, 24 nt, Artificial Sequence
  Synthetic
uagauuauguuaaauaaucacuua

SEQ ID NO: 247131 - RNA, 18 nt, Artificial Sequence
  Synthetic
cuuuccauagaucacuua

SEQ ID NO: 247132 - RNA, 19 nt, Artificial Sequence
  Synthetic
ucuuuccauagaucacuua

SEQ ID NO: 247133 - RNA, 20 nt, Artificial Sequence
  Synthetic
uucuuuccauagaucacuua

SEQ ID NO: 247134 - RNA, 21 nt, Artificial Sequence
  Synthetic
uuucuuuccauagaucacuua

SEQ ID NO: 247135 - RNA, 22 nt, Artificial Sequence
  Synthetic
uuuucuuuccauagaucacuua

SEQ ID NO: 247136 - RNA, 23 nt, Artificial Sequence
  Synthetic
uuuuucuuuccauagaucacuua

SEQ ID NO: 247137 - RNA, 24 nt, Artificial Sequence
  Synthetic
uuuuuucuuuccauagaucacuua

SEQ ID NO: 247138 - RNA, 18 nt, Artificial Sequence
  Synthetic
auauucuguuaagacuua

SEQ ID NO: 247139 - RNA, 19 nt, Artificial Sequence
  Synthetic
aauauucuguuaagacuua

SEQ ID NO: 247140 - RNA, 20 nt, Artificial Sequence
  Synthetic
aaauauucuguuaagacuua

SEQ ID NO: 247141 - RNA, 21 nt, Artificial Sequence
  Synthetic
uaaauauucuguuaagacuua

SEQ ID NO: 247142 - RNA, 22 nt, Artificial Sequence
  Synthetic
guaaauauucuguuaagacuua

SEQ ID NO: 247143 - RNA, 23 nt, Artificial Sequence
  Synthetic
aguaaauauucuguuaagacuua

SEQ ID NO: 247144 - RNA, 24 nt, Artificial Sequence
  Synthetic
aaguaaauauucuguuaagacuua

SEQ ID NO: 247145 - RNA, 18 nt, Artificial Sequence
  Synthetic
cauaaaaagagagacuua

SEQ ID NO: 247146 - RNA, 19 nt, Artificial Sequence
  Synthetic
acauaaaaagagagacuua

SEQ ID NO: 247147 - RNA, 20 nt, Artificial Sequence
  Synthetic
uacauaaaaagagagacuua

SEQ ID NO: 247148 - RNA, 21 nt, Artificial Sequence
  Synthetic
guacauaaaaagagagacuua

SEQ ID NO: 247149 - RNA, 22 nt, Artificial Sequence
  Synthetic
uguacauaaaaagagagacuua

SEQ ID NO: 247150 - RNA, 23 nt, Artificial Sequence
  Synthetic
uuguacauaaaaagagagacuua

SEQ ID NO: 247151 - RNA, 24 nt, Artificial Sequence
  Synthetic
cuuguacauaaaaagagagacuua

SEQ ID NO: 247152 - RNA, 18 nt, Artificial Sequence
  Synthetic
aacuugguuggagacuua

SEQ ID NO: 247153 - RNA, 19 nt, Artificial Sequence
  Synthetic
aaacuugguuggagacuua

SEQ ID NO: 247154 - RNA, 20 nt, Artificial Sequence
  Synthetic
aaaacuugguuggagacuua

SEQ ID NO: 247155 - RNA, 21 nt, Artificial Sequence
  Synthetic
uaaaacuugguuggagacuua

SEQ ID NO: 247156 - RNA, 22 nt, Artificial Sequence
  Synthetic
auaaaacuugguuggagacuua

SEQ ID NO: 247157 - RNA, 23 nt, Artificial Sequence
  Synthetic
gauaaaacuugguuggagacuua

SEQ ID NO: 247158 - RNA, 24 nt, Artificial Sequence
  Synthetic
agauaaaacuugguuggagacuua

SEQ ID NO: 247159 - RNA, 18 nt, Artificial Sequence
  Synthetic
caacucuggggggacuua

SEQ ID NO: 247160 - RNA, 19 nt, Artificial Sequence
  Synthetic
ucaacucuggggggacuua

SEQ ID NO: 247161 - RNA, 20 nt, Artificial Sequence
  Synthetic
cucaacucuggggggacuua

SEQ ID NO: 247162 - RNA, 21 nt, Artificial Sequence
  Synthetic
acucaacucuggggggacuua

SEQ ID NO: 247163 - RNA, 22 nt, Artificial Sequence
  Synthetic
cacucaacucuggggggacuua

SEQ ID NO: 247164 - RNA, 23 nt, Artificial Sequence
  Synthetic
ucacucaacucuggggggacuua

SEQ ID NO: 247165 - RNA, 24 nt, Artificial Sequence
  Synthetic
uucacucaacucuggggggacuua

SEQ ID NO: 247166 - RNA, 18 nt, Artificial Sequence
  Synthetic
caguacuucuuggacuua

SEQ ID NO: 247167 - RNA, 19 nt, Artificial Sequence
  Synthetic
acaguacuucuuggacuua

SEQ ID NO: 247168 - RNA, 20 nt, Artificial Sequence
  Synthetic
gacaguacuucuuggacuua

SEQ ID NO: 247169 - RNA, 21 nt, Artificial Sequence
  Synthetic
ggacaguacuucuuggacuua

SEQ ID NO: 247170 - RNA, 22 nt, Artificial Sequence
  Synthetic
aggacaguacuucuuggacuua

SEQ ID NO: 247171 - RNA, 23 nt, Artificial Sequence
  Synthetic
uaggacaguacuucuuggacuua

SEQ ID NO: 247172 - RNA, 24 nt, Artificial Sequence
  Synthetic
auaggacaguacuucuuggacuua

SEQ ID NO: 247173 - RNA, 18 nt, Artificial Sequence
  Synthetic
acauuaauugaugacuua

SEQ ID NO: 247174 - RNA, 19 nt, Artificial Sequence
  Synthetic
aacauuaauugaugacuua

SEQ ID NO: 247175 - RNA, 20 nt, Artificial Sequence
  Synthetic
caacauuaauugaugacuua

SEQ ID NO: 247176 - RNA, 21 nt, Artificial Sequence
  Synthetic
acaacauuaauugaugacuua

SEQ ID NO: 247177 - RNA, 22 nt, Artificial Sequence
  Synthetic
aacaacauuaauugaugacuua

SEQ ID NO: 247178 - RNA, 23 nt, Artificial Sequence
  Synthetic
caacaacauuaauugaugacuua

SEQ ID NO: 247179 - RNA, 24 nt, Artificial Sequence
  Synthetic
ucaacaacauuaauugaugacuua

SEQ ID NO: 247180 - RNA, 18 nt, Artificial Sequence
  Synthetic
uuaucuuauugugacuua

SEQ ID NO: 247181 - RNA, 19 nt, Artificial Sequence
  Synthetic
cuuaucuuauugugacuua

SEQ ID NO: 247182 - RNA, 20 nt, Artificial Sequence
  Synthetic
ucuuaucuuauugugacuua

SEQ ID NO: 247183 - RNA, 21 nt, Artificial Sequence
  Synthetic
uucuuaucuuauugugacuua

SEQ ID NO: 247184 - RNA, 22 nt, Artificial Sequence
  Synthetic
auucuuaucuuauugugacuua

SEQ ID NO: 247185 - RNA, 23 nt, Artificial Sequence
  Synthetic
uauucuuaucuuauugugacuua

SEQ ID NO: 247186 - RNA, 24 nt, Artificial Sequence
  Synthetic
auauucuuaucuuauugugacuua

SEQ ID NO: 247187 - RNA, 18 nt, Artificial Sequence
  Synthetic
uaauuugaaaaauacuua

SEQ ID NO: 247188 - RNA, 19 nt, Artificial Sequence
  Synthetic
uuaauuugaaaaauacuua

SEQ ID NO: 247189 - RNA, 20 nt, Artificial Sequence
  Synthetic
guuaauuugaaaaauacuua

SEQ ID NO: 247190 - RNA, 21 nt, Artificial Sequence
  Synthetic
gguuaauuugaaaaauacuua

SEQ ID NO: 247191 - RNA, 22 nt, Artificial Sequence
  Synthetic
agguuaauuugaaaaauacuua

SEQ ID NO: 247192 - RNA, 23 nt, Artificial Sequence
  Synthetic
cagguuaauuugaaaaauacuua

SEQ ID NO: 247193 - RNA, 24 nt, Artificial Sequence
  Synthetic
ucagguuaauuugaaaaauacuua

SEQ ID NO: 247194 - RNA, 18 nt, Artificial Sequence
  Synthetic
cuuaaugcaaaauacuua

SEQ ID NO: 247195 - RNA, 19 nt, Artificial Sequence
  Synthetic
gcuuaaugcaaaauacuua

SEQ ID NO: 247196 - RNA, 20 nt, Artificial Sequence
  Synthetic
ggcuuaaugcaaaauacuua

SEQ ID NO: 247197 - RNA, 21 nt, Artificial Sequence
  Synthetic
aggcuuaaugcaaaauacuua

SEQ ID NO: 247198 - RNA, 22 nt, Artificial Sequence
  Synthetic
aaggcuuaaugcaaaauacuua

SEQ ID NO: 247199 - RNA, 23 nt, Artificial Sequence
  Synthetic
gaaggcuuaaugcaaaauacuua

SEQ ID NO: 247200 - RNA, 24 nt, Artificial Sequence
  Synthetic
ugaaggcuuaaugcaaaauacuua

SEQ ID NO: 247201 - RNA, 18 nt, Artificial Sequence
  Synthetic
gaauuuggagaauacuua

SEQ ID NO: 247202 - RNA, 19 nt, Artificial Sequence
  Synthetic
ggaauuuggagaauacuua

SEQ ID NO: 247203 - RNA, 20 nt, Artificial Sequence
  Synthetic
uggaauuuggagaauacuua

SEQ ID NO: 247204 - RNA, 21 nt, Artificial Sequence
  Synthetic
guggaauuuggagaauacuua

SEQ ID NO: 247205 - RNA, 22 nt, Artificial Sequence
  Synthetic
uguggaauuuggagaauacuua

SEQ ID NO: 247206 - RNA, 23 nt, Artificial Sequence
  Synthetic
guguggaauuuggagaauacuua

SEQ ID NO: 247207 - RNA, 24 nt, Artificial Sequence
  Synthetic
gguguggaauuuggagaauacuua

SEQ ID NO: 247208 - RNA, 18 nt, Artificial Sequence
  Synthetic
agugauaacauauacuua

SEQ ID NO: 247209 - RNA, 19 nt, Artificial Sequence
  Synthetic
aagugauaacauauacuua

SEQ ID NO: 247210 - RNA, 20 nt, Artificial Sequence
  Synthetic
aaagugauaacauauacuua

SEQ ID NO: 247211 - RNA, 21 nt, Artificial Sequence
  Synthetic
caaagugauaacauauacuua

SEQ ID NO: 247212 - RNA, 22 nt, Artificial Sequence
  Synthetic
ucaaagugauaacauauacuua

SEQ ID NO: 247213 - RNA, 23 nt, Artificial Sequence
  Synthetic
aucaaagugauaacauauacuua

SEQ ID NO: 247214 - RNA, 24 nt, Artificial Sequence
  Synthetic
uaucaaagugauaacauauacuua

SEQ ID NO: 247215 - RNA, 18 nt, Artificial Sequence
  Synthetic
cgguaaucuuuauacuua

SEQ ID NO: 247216 - RNA, 19 nt, Artificial Sequence
  Synthetic
acgguaaucuuuauacuua

SEQ ID NO: 247217 - RNA, 20 nt, Artificial Sequence
  Synthetic
uacgguaaucuuuauacuua

SEQ ID NO: 247218 - RNA, 21 nt, Artificial Sequence
  Synthetic
cuacgguaaucuuuauacuua

SEQ ID NO: 247219 - RNA, 22 nt, Artificial Sequence
  Synthetic
gcuacgguaaucuuuauacuua

SEQ ID NO: 247220 - RNA, 23 nt, Artificial Sequence
  Synthetic
cgcuacgguaaucuuuauacuua

SEQ ID NO: 247221 - RNA, 24 nt, Artificial Sequence
  Synthetic
ucgcuacgguaaucuuuauacuua

SEQ ID NO: 247222 - RNA, 18 nt, Artificial Sequence
  Synthetic
ucauagcgcuccuacuua

SEQ ID NO: 247223 - RNA, 19 nt, Artificial Sequence
  Synthetic
gucauagcgcuccuacuua

SEQ ID NO: 247224 - RNA, 20 nt, Artificial Sequence
  Synthetic
ugucauagcgcuccuacuua

SEQ ID NO: 247225 - RNA, 21 nt, Artificial Sequence
  Synthetic
uugucauagcgcuccuacuua

SEQ ID NO: 247226 - RNA, 22 nt, Artificial Sequence
  Synthetic
guugucauagcgcuccuacuua

SEQ ID NO: 247227 - RNA, 23 nt, Artificial Sequence
  Synthetic
gguugucauagcgcuccuacuua

SEQ ID NO: 247228 - RNA, 24 nt, Artificial Sequence
  Synthetic
ugguugucauagcgcuccuacuua

SEQ ID NO: 247229 - RNA, 18 nt, Artificial Sequence
  Synthetic
agugaaaauggcuacuua

SEQ ID NO: 247230 - RNA, 19 nt, Artificial Sequence
  Synthetic
uagugaaaauggcuacuua

SEQ ID NO: 247231 - RNA, 20 nt, Artificial Sequence
  Synthetic
cuagugaaaauggcuacuua

SEQ ID NO: 247232 - RNA, 21 nt, Artificial Sequence
  Synthetic
acuagugaaaauggcuacuua

SEQ ID NO: 247233 - RNA, 22 nt, Artificial Sequence
  Synthetic
gacuagugaaaauggcuacuua

SEQ ID NO: 247234 - RNA, 23 nt, Artificial Sequence
  Synthetic
agacuagugaaaauggcuacuua

SEQ ID NO: 247235 - RNA, 24 nt, Artificial Sequence
  Synthetic
gagacuagugaaaauggcuacuua

SEQ ID NO: 247236 - RNA, 18 nt, Artificial Sequence
  Synthetic
auccuaauauucuacuua

SEQ ID NO: 247237 - RNA, 19 nt, Artificial Sequence
  Synthetic
aauccuaauauucuacuua

SEQ ID NO: 247238 - RNA, 20 nt, Artificial Sequence
  Synthetic
gaauccuaauauucuacuua

SEQ ID NO: 247239 - RNA, 21 nt, Artificial Sequence
  Synthetic
ugaauccuaauauucuacuua

SEQ ID NO: 247240 - RNA, 22 nt, Artificial Sequence
  Synthetic
cugaauccuaauauucuacuua

SEQ ID NO: 247241 - RNA, 23 nt, Artificial Sequence
  Synthetic
gcugaauccuaauauucuacuua

SEQ ID NO: 247242 - RNA, 24 nt, Artificial Sequence
  Synthetic
ggcugaauccuaauauucuacuua

SEQ ID NO: 247243 - RNA, 18 nt, Artificial Sequence
  Synthetic
auaccuguuugguacuua

SEQ ID NO: 247244 - RNA, 19 nt, Artificial Sequence
  Synthetic
uauaccuguuugguacuua

SEQ ID NO: 247245 - RNA, 20 nt, Artificial Sequence
  Synthetic
auauaccuguuugguacuua

SEQ ID NO: 247246 - RNA, 21 nt, Artificial Sequence
  Synthetic
cauauaccuguuugguacuua

SEQ ID NO: 247247 - RNA, 22 nt, Artificial Sequence
  Synthetic
ucauauaccuguuugguacuua

SEQ ID NO: 247248 - RNA, 23 nt, Artificial Sequence
  Synthetic
uucauauaccuguuugguacuua

SEQ ID NO: 247249 - RNA, 24 nt, Artificial Sequence
  Synthetic
auucauauaccuguuugguacuua

SEQ ID NO: 247250 - RNA, 18 nt, Artificial Sequence
  Synthetic
cauucguaaauguacuua

SEQ ID NO: 247251 - RNA, 19 nt, Artificial Sequence
  Synthetic
gcauucguaaauguacuua

SEQ ID NO: 247252 - RNA, 20 nt, Artificial Sequence
  Synthetic
ggcauucguaaauguacuua

SEQ ID NO: 247253 - RNA, 21 nt, Artificial Sequence
  Synthetic
aggcauucguaaauguacuua

SEQ ID NO: 247254 - RNA, 22 nt, Artificial Sequence
  Synthetic
gaggcauucguaaauguacuua

SEQ ID NO: 247255 - RNA, 23 nt, Artificial Sequence
  Synthetic
ggaggcauucguaaauguacuua

SEQ ID NO: 247256 - RNA, 24 nt, Artificial Sequence
  Synthetic
gggaggcauucguaaauguacuua

SEQ ID NO: 247257 - RNA, 18 nt, Artificial Sequence
  Synthetic
cauguaaauuauuacuua

SEQ ID NO: 247258 - RNA, 19 nt, Artificial Sequence
  Synthetic
ucauguaaauuauuacuua

SEQ ID NO: 247259 - RNA, 20 nt, Artificial Sequence
  Synthetic
aucauguaaauuauuacuua

SEQ ID NO: 247260 - RNA, 21 nt, Artificial Sequence
  Synthetic
uaucauguaaauuauuacuua

SEQ ID NO: 247261 - RNA, 22 nt, Artificial Sequence
  Synthetic
auaucauguaaauuauuacuua

SEQ ID NO: 247262 - RNA, 23 nt, Artificial Sequence
  Synthetic
aauaucauguaaauuauuacuua

SEQ ID NO: 247263 - RNA, 24 nt, Artificial Sequence
  Synthetic
aaauaucauguaaauuauuacuua

SEQ ID NO: 247264 - RNA, 18 nt, Artificial Sequence
  Synthetic
gaggaaaaaaaaaccuua

SEQ ID NO: 247265 - RNA, 19 nt, Artificial Sequence
  Synthetic
ggaggaaaaaaaaaccuua

SEQ ID NO: 247266 - RNA, 20 nt, Artificial Sequence
  Synthetic
uggaggaaaaaaaaaccuua

SEQ ID NO: 247267 - RNA, 21 nt, Artificial Sequence
  Synthetic
auggaggaaaaaaaaaccuua

SEQ ID NO: 247268 - RNA, 22 nt, Artificial Sequence
  Synthetic
cauggaggaaaaaaaaaccuua

SEQ ID NO: 247269 - RNA, 23 nt, Artificial Sequence
  Synthetic
gcauggaggaaaaaaaaaccuua

SEQ ID NO: 247270 - RNA, 24 nt, Artificial Sequence
  Synthetic
ggcauggaggaaaaaaaaaccuua

SEQ ID NO: 247271 - RNA, 18 nt, Artificial Sequence
  Synthetic
caagaacuuuaaaccuua

SEQ ID NO: 247272 - RNA, 19 nt, Artificial Sequence
  Synthetic
gcaagaacuuuaaaccuua

SEQ ID NO: 247273 - RNA, 20 nt, Artificial Sequence
  Synthetic
ugcaagaacuuuaaaccuua

SEQ ID NO: 247274 - RNA, 21 nt, Artificial Sequence
  Synthetic
gugcaagaacuuuaaaccuua

SEQ ID NO: 247275 - RNA, 22 nt, Artificial Sequence
  Synthetic
agugcaagaacuuuaaaccuua

SEQ ID NO: 247276 - RNA, 23 nt, Artificial Sequence
  Synthetic
cagugcaagaacuuuaaaccuua

SEQ ID NO: 247277 - RNA, 24 nt, Artificial Sequence
  Synthetic
gcagugcaagaacuuuaaaccuua

SEQ ID NO: 247278 - RNA, 18 nt, Artificial Sequence
  Synthetic
augaaugugggaaccuua

SEQ ID NO: 247279 - RNA, 19 nt, Artificial Sequence
  Synthetic
aaugaaugugggaaccuua

SEQ ID NO: 247280 - RNA, 20 nt, Artificial Sequence
  Synthetic
uaaugaaugugggaaccuua

SEQ ID NO: 247281 - RNA, 21 nt, Artificial Sequence
  Synthetic
guaaugaaugugggaaccuua

SEQ ID NO: 247282 - RNA, 22 nt, Artificial Sequence
  Synthetic
gguaaugaaugugggaaccuua

SEQ ID NO: 247283 - RNA, 23 nt, Artificial Sequence
  Synthetic
ggguaaugaaugugggaaccuua

SEQ ID NO: 247284 - RNA, 24 nt, Artificial Sequence
  Synthetic
aggguaaugaaugugggaaccuua

SEQ ID NO: 247285 - RNA, 18 nt, Artificial Sequence
  Synthetic
ugugaaaauggaaccuua

SEQ ID NO: 247286 - RNA, 19 nt, Artificial Sequence
  Synthetic
augugaaaauggaaccuua

SEQ ID NO: 247287 - RNA, 20 nt, Artificial Sequence
  Synthetic
uaugugaaaauggaaccuua

SEQ ID NO: 247288 - RNA, 21 nt, Artificial Sequence
  Synthetic
guaugugaaaauggaaccuua

SEQ ID NO: 247289 - RNA, 22 nt, Artificial Sequence
  Synthetic
cguaugugaaaauggaaccuua

SEQ ID NO: 247290 - RNA, 23 nt, Artificial Sequence
  Synthetic
gcguaugugaaaauggaaccuua

SEQ ID NO: 247291 - RNA, 24 nt, Artificial Sequence
  Synthetic
ugcguaugugaaaauggaaccuua

SEQ ID NO: 247292 - RNA, 18 nt, Artificial Sequence
  Synthetic
augguauacauaaccuua

SEQ ID NO: 247293 - RNA, 19 nt, Artificial Sequence
  Synthetic
caugguauacauaaccuua

SEQ ID NO: 247294 - RNA, 20 nt, Artificial Sequence
  Synthetic
ucaugguauacauaaccuua

SEQ ID NO: 247295 - RNA, 21 nt, Artificial Sequence
  Synthetic
uucaugguauacauaaccuua

SEQ ID NO: 247296 - RNA, 22 nt, Artificial Sequence
  Synthetic
cuucaugguauacauaaccuua

SEQ ID NO: 247297 - RNA, 23 nt, Artificial Sequence
  Synthetic
acuucaugguauacauaaccuua

SEQ ID NO: 247298 - RNA, 24 nt, Artificial Sequence
  Synthetic
gacuucaugguauacauaaccuua

SEQ ID NO: 247299 - RNA, 18 nt, Artificial Sequence
  Synthetic
ucccauuugcuaaccuua

SEQ ID NO: 247300 - RNA, 19 nt, Artificial Sequence
  Synthetic
uucccauuugcuaaccuua

SEQ ID NO: 247301 - RNA, 20 nt, Artificial Sequence
  Synthetic
cuucccauuugcuaaccuua

SEQ ID NO: 247302 - RNA, 21 nt, Artificial Sequence
  Synthetic
acuucccauuugcuaaccuua

SEQ ID NO: 247303 - RNA, 22 nt, Artificial Sequence
  Synthetic
uacuucccauuugcuaaccuua

SEQ ID NO: 247304 - RNA, 23 nt, Artificial Sequence
  Synthetic
uuacuucccauuugcuaaccuua

SEQ ID NO: 247305 - RNA, 24 nt, Artificial Sequence
  Synthetic
cuuacuucccauuugcuaaccuua

SEQ ID NO: 247306 - RNA, 18 nt, Artificial Sequence
  Synthetic
aggaugcaguuaaccuua

SEQ ID NO: 247307 - RNA, 19 nt, Artificial Sequence
  Synthetic
caggaugcaguuaaccuua

SEQ ID NO: 247308 - RNA, 20 nt, Artificial Sequence
  Synthetic
gcaggaugcaguuaaccuua

SEQ ID NO: 247309 - RNA, 21 nt, Artificial Sequence
  Synthetic
ggcaggaugcaguuaaccuua

SEQ ID NO: 247310 - RNA, 22 nt, Artificial Sequence
  Synthetic
aggcaggaugcaguuaaccuua

SEQ ID NO: 247311 - RNA, 23 nt, Artificial Sequence
  Synthetic
gaggcaggaugcaguuaaccuua

SEQ ID NO: 247312 - RNA, 24 nt, Artificial Sequence
  Synthetic
agaggcaggaugcaguuaaccuua

SEQ ID NO: 247313 - RNA, 18 nt, Artificial Sequence
  Synthetic
cacacuucacauaccuua

SEQ ID NO: 247314 - RNA, 19 nt, Artificial Sequence
  Synthetic
acacacuucacauaccuua

SEQ ID NO: 247315 - RNA, 20 nt, Artificial Sequence
  Synthetic
cacacacuucacauaccuua

SEQ ID NO: 247316 - RNA, 21 nt, Artificial Sequence
  Synthetic
ucacacacuucacauaccuua

SEQ ID NO: 247317 - RNA, 22 nt, Artificial Sequence
  Synthetic
uucacacacuucacauaccuua

SEQ ID NO: 247318 - RNA, 23 nt, Artificial Sequence
  Synthetic
uuucacacacuucacauaccuua

SEQ ID NO: 247319 - RNA, 24 nt, Artificial Sequence
  Synthetic
uuuucacacacuucacauaccuua

SEQ ID NO: 247320 - RNA, 18 nt, Artificial Sequence
  Synthetic
aauuuaaguguuaccuua

SEQ ID NO: 247321 - RNA, 19 nt, Artificial Sequence
  Synthetic
uaauuuaaguguuaccuua

SEQ ID NO: 247322 - RNA, 20 nt, Artificial Sequence
  Synthetic
uuaauuuaaguguuaccuua

SEQ ID NO: 247323 - RNA, 21 nt, Artificial Sequence
  Synthetic
uuuaauuuaaguguuaccuua

SEQ ID NO: 247324 - RNA, 22 nt, Artificial Sequence
  Synthetic
uuuuaauuuaaguguuaccuua

SEQ ID NO: 247325 - RNA, 23 nt, Artificial Sequence
  Synthetic
guuuuaauuuaaguguuaccuua

SEQ ID NO: 247326 - RNA, 24 nt, Artificial Sequence
  Synthetic
gguuuuaauuuaaguguuaccuua

SEQ ID NO: 247327 - RNA, 18 nt, Artificial Sequence
  Synthetic
uaaauagucucacccuua

SEQ ID NO: 247328 - RNA, 19 nt, Artificial Sequence
  Synthetic
auaaauagucucacccuua

SEQ ID NO: 247329 - RNA, 20 nt, Artificial Sequence
  Synthetic
uauaaauagucucacccuua

SEQ ID NO: 247330 - RNA, 21 nt, Artificial Sequence
  Synthetic
auauaaauagucucacccuua

SEQ ID NO: 247331 - RNA, 22 nt, Artificial Sequence
  Synthetic
cauauaaauagucucacccuua

SEQ ID NO: 247332 - RNA, 23 nt, Artificial Sequence
  Synthetic
gcauauaaauagucucacccuua

SEQ ID NO: 247333 - RNA, 24 nt, Artificial Sequence
  Synthetic
ugcauauaaauagucucacccuua

SEQ ID NO: 247334 - RNA, 18 nt, Artificial Sequence
  Synthetic
uacuaaaucugacccuua

SEQ ID NO: 247335 - RNA, 19 nt, Artificial Sequence
  Synthetic
uuacuaaaucugacccuua

SEQ ID NO: 247336 - RNA, 20 nt, Artificial Sequence
  Synthetic
auuacuaaaucugacccuua

SEQ ID NO: 247337 - RNA, 21 nt, Artificial Sequence
  Synthetic
gauuacuaaaucugacccuua

SEQ ID NO: 247338 - RNA, 22 nt, Artificial Sequence
  Synthetic
ugauuacuaaaucugacccuua

SEQ ID NO: 247339 - RNA, 23 nt, Artificial Sequence
  Synthetic
gugauuacuaaaucugacccuua

SEQ ID NO: 247340 - RNA, 24 nt, Artificial Sequence
  Synthetic
agugauuacuaaaucugacccuua

SEQ ID NO: 247341 - RNA, 18 nt, Artificial Sequence
  Synthetic
agauagauuugacccuua

SEQ ID NO: 247342 - RNA, 19 nt, Artificial Sequence
  Synthetic
aagauagauuugacccuua

SEQ ID NO: 247343 - RNA, 20 nt, Artificial Sequence
  Synthetic
uaagauagauuugacccuua

SEQ ID NO: 247344 - RNA, 21 nt, Artificial Sequence
  Synthetic
guaagauagauuugacccuua

SEQ ID NO: 247345 - RNA, 22 nt, Artificial Sequence
  Synthetic
gguaagauagauuugacccuua

SEQ ID NO: 247346 - RNA, 23 nt, Artificial Sequence
  Synthetic
agguaagauagauuugacccuua

SEQ ID NO: 247347 - RNA, 24 nt, Artificial Sequence
  Synthetic
cagguaagauagauuugacccuua

SEQ ID NO: 247348 - RNA, 18 nt, Artificial Sequence
  Synthetic
auauaguuucuacccuua

SEQ ID NO: 247349 - RNA, 19 nt, Artificial Sequence
  Synthetic
aauauaguuucuacccuua

SEQ ID NO: 247350 - RNA, 20 nt, Artificial Sequence
  Synthetic
caauauaguuucuacccuua

SEQ ID NO: 247351 - RNA, 21 nt, Artificial Sequence
  Synthetic
ucaauauaguuucuacccuua

SEQ ID NO: 247352 - RNA, 22 nt, Artificial Sequence
  Synthetic
uucaauauaguuucuacccuua

SEQ ID NO: 247353 - RNA, 23 nt, Artificial Sequence
  Synthetic
auucaauauaguuucuacccuua

SEQ ID NO: 247354 - RNA, 24 nt, Artificial Sequence
  Synthetic
gauucaauauaguuucuacccuua

SEQ ID NO: 247355 - RNA, 18 nt, Artificial Sequence
  Synthetic
ccuccccuacaucccuua

SEQ ID NO: 247356 - RNA, 19 nt, Artificial Sequence
  Synthetic
uccuccccuacaucccuua

SEQ ID NO: 247357 - RNA, 20 nt, Artificial Sequence
  Synthetic
auccuccccuacaucccuua

SEQ ID NO: 247358 - RNA, 21 nt, Artificial Sequence
  Synthetic
aauccuccccuacaucccuua

SEQ ID NO: 247359 - RNA, 22 nt, Artificial Sequence
  Synthetic
gaauccuccccuacaucccuua

SEQ ID NO: 247360 - RNA, 23 nt, Artificial Sequence
  Synthetic
agaauccuccccuacaucccuua

SEQ ID NO: 247361 - RNA, 24 nt, Artificial Sequence
  Synthetic
aagaauccuccccuacaucccuua

SEQ ID NO: 247362 - RNA, 18 nt, Artificial Sequence
  Synthetic
gugaaaauccuucccuua

SEQ ID NO: 247363 - RNA, 19 nt, Artificial Sequence
  Synthetic
agugaaaauccuucccuua

SEQ ID NO: 247364 - RNA, 20 nt, Artificial Sequence
  Synthetic
aagugaaaauccuucccuua

SEQ ID NO: 247365 - RNA, 21 nt, Artificial Sequence
  Synthetic
uaagugaaaauccuucccuua

SEQ ID NO: 247366 - RNA, 22 nt, Artificial Sequence
  Synthetic
uuaagugaaaauccuucccuua

SEQ ID NO: 247367 - RNA, 23 nt, Artificial Sequence
  Synthetic
guuaagugaaaauccuucccuua

SEQ ID NO: 247368 - RNA, 24 nt, Artificial Sequence
  Synthetic
aguuaagugaaaauccuucccuua

SEQ ID NO: 247369 - RNA, 18 nt, Artificial Sequence
  Synthetic
agagaaaauuuucccuua

SEQ ID NO: 247370 - RNA, 19 nt, Artificial Sequence
  Synthetic
gagagaaaauuuucccuua

SEQ ID NO: 247371 - RNA, 20 nt, Artificial Sequence
  Synthetic
ugagagaaaauuuucccuua

SEQ ID NO: 247372 - RNA, 21 nt, Artificial Sequence
  Synthetic
uugagagaaaauuuucccuua

SEQ ID NO: 247373 - RNA, 22 nt, Artificial Sequence
  Synthetic
uuugagagaaaauuuucccuua

SEQ ID NO: 247374 - RNA, 23 nt, Artificial Sequence
  Synthetic
auuugagagaaaauuuucccuua

SEQ ID NO: 247375 - RNA, 24 nt, Artificial Sequence
  Synthetic
uauuugagagaaaauuuucccuua

SEQ ID NO: 247376 - RNA, 18 nt, Artificial Sequence
  Synthetic
uaaaauguuugagccuua

SEQ ID NO: 247377 - RNA, 19 nt, Artificial Sequence
  Synthetic
guaaaauguuugagccuua

SEQ ID NO: 247378 - RNA, 20 nt, Artificial Sequence
  Synthetic
aguaaaauguuugagccuua

SEQ ID NO: 247379 - RNA, 21 nt, Artificial Sequence
  Synthetic
uaguaaaauguuugagccuua

SEQ ID NO: 247380 - RNA, 22 nt, Artificial Sequence
  Synthetic
auaguaaaauguuugagccuua

SEQ ID NO: 247381 - RNA, 23 nt, Artificial Sequence
  Synthetic
cauaguaaaauguuugagccuua

SEQ ID NO: 247382 - RNA, 24 nt, Artificial Sequence
  Synthetic
acauaguaaaauguuugagccuua

SEQ ID NO: 247383 - RNA, 18 nt, Artificial Sequence
  Synthetic
uaguugagugaugccuua

SEQ ID NO: 247384 - RNA, 19 nt, Artificial Sequence
  Synthetic
uuaguugagugaugccuua

SEQ ID NO: 247385 - RNA, 20 nt, Artificial Sequence
  Synthetic
auuaguugagugaugccuua

SEQ ID NO: 247386 - RNA, 21 nt, Artificial Sequence
  Synthetic
gauuaguugagugaugccuua

SEQ ID NO: 247387 - RNA, 22 nt, Artificial Sequence
  Synthetic
ggauuaguugagugaugccuua

SEQ ID NO: 247388 - RNA, 23 nt, Artificial Sequence
  Synthetic
aggauuaguugagugaugccuua

SEQ ID NO: 247389 - RNA, 24 nt, Artificial Sequence
  Synthetic
caggauuaguugagugaugccuua

SEQ ID NO: 247390 - RNA, 18 nt, Artificial Sequence
  Synthetic
aaaggaacauaugccuua

SEQ ID NO: 247391 - RNA, 19 nt, Artificial Sequence
  Synthetic
uaaaggaacauaugccuua

SEQ ID NO: 247392 - RNA, 20 nt, Artificial Sequence
  Synthetic
auaaaggaacauaugccuua

SEQ ID NO: 247393 - RNA, 21 nt, Artificial Sequence
  Synthetic
cauaaaggaacauaugccuua

SEQ ID NO: 247394 - RNA, 22 nt, Artificial Sequence
  Synthetic
ucauaaaggaacauaugccuua

SEQ ID NO: 247395 - RNA, 23 nt, Artificial Sequence
  Synthetic
uucauaaaggaacauaugccuua

SEQ ID NO: 247396 - RNA, 24 nt, Artificial Sequence
  Synthetic
uuucauaaaggaacauaugccuua

SEQ ID NO: 247397 - RNA, 18 nt, Artificial Sequence
  Synthetic
uauuggguauaugccuua

SEQ ID NO: 247398 - RNA, 19 nt, Artificial Sequence
  Synthetic
cuauuggguauaugccuua

SEQ ID NO: 247399 - RNA, 20 nt, Artificial Sequence
  Synthetic
ucuauuggguauaugccuua

SEQ ID NO: 247400 - RNA, 21 nt, Artificial Sequence
  Synthetic
cucuauuggguauaugccuua

SEQ ID NO: 247401 - RNA, 22 nt, Artificial Sequence
  Synthetic
ccucuauuggguauaugccuua

SEQ ID NO: 247402 - RNA, 23 nt, Artificial Sequence
  Synthetic
cccucuauuggguauaugccuua

SEQ ID NO: 247403 - RNA, 24 nt, Artificial Sequence
  Synthetic
ucccucuauuggguauaugccuua

SEQ ID NO: 247404 - RNA, 18 nt, Artificial Sequence
  Synthetic
cauuccguaaaauccuua

SEQ ID NO: 247405 - RNA, 19 nt, Artificial Sequence
  Synthetic
ccauuccguaaaauccuua

SEQ ID NO: 247406 - RNA, 20 nt, Artificial Sequence
  Synthetic
accauuccguaaaauccuua

SEQ ID NO: 247407 - RNA, 21 nt, Artificial Sequence
  Synthetic
caccauuccguaaaauccuua

SEQ ID NO: 247408 - RNA, 22 nt, Artificial Sequence
  Synthetic
ccaccauuccguaaaauccuua

SEQ ID NO: 247409 - RNA, 23 nt, Artificial Sequence
  Synthetic
accaccauuccguaaaauccuua

SEQ ID NO: 247410 - RNA, 24 nt, Artificial Sequence
  Synthetic
uaccaccauuccguaaaauccuua

SEQ ID NO: 247411 - RNA, 18 nt, Artificial Sequence
  Synthetic
aagaaaaggaaauccuua

SEQ ID NO: 247412 - RNA, 19 nt, Artificial Sequence
  Synthetic
aaagaaaaggaaauccuua

SEQ ID NO: 247413 - RNA, 20 nt, Artificial Sequence
  Synthetic
uaaagaaaaggaaauccuua

SEQ ID NO: 247414 - RNA, 21 nt, Artificial Sequence
  Synthetic
uuaaagaaaaggaaauccuua

SEQ ID NO: 247415 - RNA, 22 nt, Artificial Sequence
  Synthetic
uuuaaagaaaaggaaauccuua

SEQ ID NO: 247416 - RNA, 23 nt, Artificial Sequence
  Synthetic
cuuuaaagaaaaggaaauccuua

SEQ ID NO: 247417 - RNA, 24 nt, Artificial Sequence
  Synthetic
acuuuaaagaaaaggaaauccuua

SEQ ID NO: 247418 - RNA, 18 nt, Artificial Sequence
  Synthetic
uuucuaauuugauccuua

SEQ ID NO: 247419 - RNA, 19 nt, Artificial Sequence
  Synthetic
uuuucuaauuugauccuua

SEQ ID NO: 247420 - RNA, 20 nt, Artificial Sequence
  Synthetic
auuuucuaauuugauccuua

SEQ ID NO: 247421 - RNA, 21 nt, Artificial Sequence
  Synthetic
cauuuucuaauuugauccuua

SEQ ID NO: 247422 - RNA, 22 nt, Artificial Sequence
  Synthetic
ucauuuucuaauuugauccuua

SEQ ID NO: 247423 - RNA, 23 nt, Artificial Sequence
  Synthetic
gucauuuucuaauuugauccuua

SEQ ID NO: 247424 - RNA, 24 nt, Artificial Sequence
  Synthetic
ugucauuuucuaauuugauccuua

SEQ ID NO: 247425 - RNA, 18 nt, Artificial Sequence
  Synthetic
ucccacacaagcuccuua

SEQ ID NO: 247426 - RNA, 19 nt, Artificial Sequence
  Synthetic
cucccacacaagcuccuua

SEQ ID NO: 247427 - RNA, 20 nt, Artificial Sequence
  Synthetic
ccucccacacaagcuccuua

SEQ ID NO: 247428 - RNA, 21 nt, Artificial Sequence
  Synthetic
gccucccacacaagcuccuua

SEQ ID NO: 247429 - RNA, 22 nt, Artificial Sequence
  Synthetic
ugccucccacacaagcuccuua

SEQ ID NO: 247430 - RNA, 23 nt, Artificial Sequence
  Synthetic
cugccucccacacaagcuccuua

SEQ ID NO: 247431 - RNA, 24 nt, Artificial Sequence
  Synthetic
ucugccucccacacaagcuccuua

SEQ ID NO: 247432 - RNA, 18 nt, Artificial Sequence
  Synthetic
uaucuauaggucuccuua

SEQ ID NO: 247433 - RNA, 19 nt, Artificial Sequence
  Synthetic
uuaucuauaggucuccuua

SEQ ID NO: 247434 - RNA, 20 nt, Artificial Sequence
  Synthetic
auuaucuauaggucuccuua

SEQ ID NO: 247435 - RNA, 21 nt, Artificial Sequence
  Synthetic
uauuaucuauaggucuccuua

SEQ ID NO: 247436 - RNA, 22 nt, Artificial Sequence
  Synthetic
guauuaucuauaggucuccuua

SEQ ID NO: 247437 - RNA, 23 nt, Artificial Sequence
  Synthetic
uguauuaucuauaggucuccuua

SEQ ID NO: 247438 - RNA, 24 nt, Artificial Sequence
  Synthetic
cuguauuaucuauaggucuccuua

SEQ ID NO: 247439 - RNA, 18 nt, Artificial Sequence
  Synthetic
caaguaaaauucuccuua

SEQ ID NO: 247440 - RNA, 19 nt, Artificial Sequence
  Synthetic
ccaaguaaaauucuccuua

SEQ ID NO: 247441 - RNA, 20 nt, Artificial Sequence
  Synthetic
uccaaguaaaauucuccuua

SEQ ID NO: 247442 - RNA, 21 nt, Artificial Sequence
  Synthetic
auccaaguaaaauucuccuua

SEQ ID NO: 247443 - RNA, 22 nt, Artificial Sequence
  Synthetic
gauccaaguaaaauucuccuua

SEQ ID NO: 247444 - RNA, 23 nt, Artificial Sequence
  Synthetic
ggauccaaguaaaauucuccuua

SEQ ID NO: 247445 - RNA, 24 nt, Artificial Sequence
  Synthetic
aggauccaaguaaaauucuccuua

SEQ ID NO: 247446 - RNA, 18 nt, Artificial Sequence
  Synthetic
uucgcucucuucuccuua

SEQ ID NO: 247447 - RNA, 19 nt, Artificial Sequence
  Synthetic
uuucgcucucuucuccuua

SEQ ID NO: 247448 - RNA, 20 nt, Artificial Sequence
  Synthetic
uuuucgcucucuucuccuua

SEQ ID NO: 247449 - RNA, 21 nt, Artificial Sequence
  Synthetic
cuuuucgcucucuucuccuua

SEQ ID NO: 247450 - RNA, 22 nt, Artificial Sequence
  Synthetic
acuuuucgcucucuucuccuua

SEQ ID NO: 247451 - RNA, 23 nt, Artificial Sequence
  Synthetic
uacuuuucgcucucuucuccuua

SEQ ID NO: 247452 - RNA, 24 nt, Artificial Sequence
  Synthetic
uuacuuuucgcucucuucuccuua

SEQ ID NO: 247453 - RNA, 18 nt, Artificial Sequence
  Synthetic
uuaagaaaucauuccuua

SEQ ID NO: 247454 - RNA, 19 nt, Artificial Sequence
  Synthetic
uuuaagaaaucauuccuua

SEQ ID NO: 247455 - RNA, 20 nt, Artificial Sequence
  Synthetic
uuuuaagaaaucauuccuua

SEQ ID NO: 247456 - RNA, 21 nt, Artificial Sequence
  Synthetic
uuuuuaagaaaucauuccuua

SEQ ID NO: 247457 - RNA, 22 nt, Artificial Sequence
  Synthetic
cuuuuuaagaaaucauuccuua

SEQ ID NO: 247458 - RNA, 23 nt, Artificial Sequence
  Synthetic
ccuuuuuaagaaaucauuccuua

SEQ ID NO: 247459 - RNA, 24 nt, Artificial Sequence
  Synthetic
cccuuuuuaagaaaucauuccuua

SEQ ID NO: 247460 - RNA, 18 nt, Artificial Sequence
  Synthetic
cuagguuucaguuccuua

SEQ ID NO: 247461 - RNA, 19 nt, Artificial Sequence
  Synthetic
gcuagguuucaguuccuua

SEQ ID NO: 247462 - RNA, 20 nt, Artificial Sequence
  Synthetic
agcuagguuucaguuccuua

SEQ ID NO: 247463 - RNA, 21 nt, Artificial Sequence
  Synthetic
cagcuagguuucaguuccuua

SEQ ID NO: 247464 - RNA, 22 nt, Artificial Sequence
  Synthetic
ccagcuagguuucaguuccuua

SEQ ID NO: 247465 - RNA, 23 nt, Artificial Sequence
  Synthetic
accagcuagguuucaguuccuua

SEQ ID NO: 247466 - RNA, 24 nt, Artificial Sequence
  Synthetic
uaccagcuagguuucaguuccuua

SEQ ID NO: 247467 - RNA, 18 nt, Artificial Sequence
  Synthetic
uguuauuguauuuccuua

SEQ ID NO: 247468 - RNA, 19 nt, Artificial Sequence
  Synthetic
cuguuauuguauuuccuua

SEQ ID NO: 247469 - RNA, 20 nt, Artificial Sequence
  Synthetic
gcuguuauuguauuuccuua

SEQ ID NO: 247470 - RNA, 21 nt, Artificial Sequence
  Synthetic
agcuguuauuguauuuccuua

SEQ ID NO: 247471 - RNA, 22 nt, Artificial Sequence
  Synthetic
uagcuguuauuguauuuccuua

SEQ ID NO: 247472 - RNA, 23 nt, Artificial Sequence
  Synthetic
uuagcuguuauuguauuuccuua

SEQ ID NO: 247473 - RNA, 24 nt, Artificial Sequence
  Synthetic
auuagcuguuauuguauuuccuua

SEQ ID NO: 247474 - RNA, 18 nt, Artificial Sequence
  Synthetic
ugcaagaaacuuuccuua

SEQ ID NO: 247475 - RNA, 19 nt, Artificial Sequence
  Synthetic
gugcaagaaacuuuccuua

SEQ ID NO: 247476 - RNA, 20 nt, Artificial Sequence
  Synthetic
ggugcaagaaacuuuccuua

SEQ ID NO: 247477 - RNA, 21 nt, Artificial Sequence
  Synthetic
uggugcaagaaacuuuccuua

SEQ ID NO: 247478 - RNA, 22 nt, Artificial Sequence
  Synthetic
cuggugcaagaaacuuuccuua

SEQ ID NO: 247479 - RNA, 23 nt, Artificial Sequence
  Synthetic
ccuggugcaagaaacuuuccuua

SEQ ID NO: 247480 - RNA, 24 nt, Artificial Sequence
  Synthetic
cccuggugcaagaaacuuuccuua

SEQ ID NO: 247481 - RNA, 18 nt, Artificial Sequence
  Synthetic
uuauuucucagaagcuua

SEQ ID NO: 247482 - RNA, 19 nt, Artificial Sequence
  Synthetic
uuuauuucucagaagcuua

SEQ ID NO: 247483 - RNA, 20 nt, Artificial Sequence
  Synthetic
auuuauuucucagaagcuua

SEQ ID NO: 247484 - RNA, 21 nt, Artificial Sequence
  Synthetic
uauuuauuucucagaagcuua

SEQ ID NO: 247485 - RNA, 22 nt, Artificial Sequence
  Synthetic
uuauuuauuucucagaagcuua

SEQ ID NO: 247486 - RNA, 23 nt, Artificial Sequence
  Synthetic
uuuauuuauuucucagaagcuua

SEQ ID NO: 247487 - RNA, 24 nt, Artificial Sequence
  Synthetic
auuuauuuauuucucagaagcuua

SEQ ID NO: 247488 - RNA, 18 nt, Artificial Sequence
  Synthetic
auuccuaccugaagcuua

SEQ ID NO: 247489 - RNA, 19 nt, Artificial Sequence
  Synthetic
gauuccuaccugaagcuua

SEQ ID NO: 247490 - RNA, 20 nt, Artificial Sequence
  Synthetic
ggauuccuaccugaagcuua

SEQ ID NO: 247491 - RNA, 21 nt, Artificial Sequence
  Synthetic
aggauuccuaccugaagcuua

SEQ ID NO: 247492 - RNA, 22 nt, Artificial Sequence
  Synthetic
caggauuccuaccugaagcuua

SEQ ID NO: 247493 - RNA, 23 nt, Artificial Sequence
  Synthetic
gcaggauuccuaccugaagcuua

SEQ ID NO: 247494 - RNA, 24 nt, Artificial Sequence
  Synthetic
ugcaggauuccuaccugaagcuua

SEQ ID NO: 247495 - RNA, 18 nt, Artificial Sequence
  Synthetic
agucacaguaacagcuua

SEQ ID NO: 247496 - RNA, 19 nt, Artificial Sequence
  Synthetic
uagucacaguaacagcuua

SEQ ID NO: 247497 - RNA, 20 nt, Artificial Sequence
  Synthetic
auagucacaguaacagcuua

SEQ ID NO: 247498 - RNA, 21 nt, Artificial Sequence
  Synthetic
gauagucacaguaacagcuua

SEQ ID NO: 247499 - RNA, 22 nt, Artificial Sequence
  Synthetic
ugauagucacaguaacagcuua

SEQ ID NO: 247500 - RNA, 23 nt, Artificial Sequence
  Synthetic
gugauagucacaguaacagcuua

SEQ ID NO: 247501 - RNA, 24 nt, Artificial Sequence
  Synthetic
ugugauagucacaguaacagcuua

SEQ ID NO: 247502 - RNA, 18 nt, Artificial Sequence
  Synthetic
uuucauaaaaccagcuua

SEQ ID NO: 247503 - RNA, 19 nt, Artificial Sequence
  Synthetic
auuucauaaaaccagcuua

SEQ ID NO: 247504 - RNA, 20 nt, Artificial Sequence
  Synthetic
uauuucauaaaaccagcuua

SEQ ID NO: 247505 - RNA, 21 nt, Artificial Sequence
  Synthetic
uuauuucauaaaaccagcuua

SEQ ID NO: 247506 - RNA, 22 nt, Artificial Sequence
  Synthetic
uuuauuucauaaaaccagcuua

SEQ ID NO: 247507 - RNA, 23 nt, Artificial Sequence
  Synthetic
uuuuauuucauaaaaccagcuua

SEQ ID NO: 247508 - RNA, 24 nt, Artificial Sequence
  Synthetic
uuuuuauuucauaaaaccagcuua

SEQ ID NO: 247509 - RNA, 18 nt, Artificial Sequence
  Synthetic
guaccacuugggagcuua

SEQ ID NO: 247510 - RNA, 19 nt, Artificial Sequence
  Synthetic
aguaccacuugggagcuua

SEQ ID NO: 247511 - RNA, 20 nt, Artificial Sequence
  Synthetic
caguaccacuugggagcuua

SEQ ID NO: 247512 - RNA, 21 nt, Artificial Sequence
  Synthetic
gcaguaccacuugggagcuua

SEQ ID NO: 247513 - RNA, 22 nt, Artificial Sequence
  Synthetic
agcaguaccacuugggagcuua

SEQ ID NO: 247514 - RNA, 23 nt, Artificial Sequence
  Synthetic
cagcaguaccacuugggagcuua

SEQ ID NO: 247515 - RNA, 24 nt, Artificial Sequence
  Synthetic
gcagcaguaccacuugggagcuua

SEQ ID NO: 247516 - RNA, 18 nt, Artificial Sequence
  Synthetic
auugguacuuggagcuua

SEQ ID NO: 247517 - RNA, 19 nt, Artificial Sequence
  Synthetic
gauugguacuuggagcuua

SEQ ID NO: 247518 - RNA, 20 nt, Artificial Sequence
  Synthetic
agauugguacuuggagcuua

SEQ ID NO: 247519 - RNA, 21 nt, Artificial Sequence
  Synthetic
uagauugguacuuggagcuua

SEQ ID NO: 247520 - RNA, 22 nt, Artificial Sequence
  Synthetic
cuagauugguacuuggagcuua

SEQ ID NO: 247521 - RNA, 23 nt, Artificial Sequence
  Synthetic
ucuagauugguacuuggagcuua

SEQ ID NO: 247522 - RNA, 24 nt, Artificial Sequence
  Synthetic
cucuagauugguacuuggagcuua

SEQ ID NO: 247523 - RNA, 18 nt, Artificial Sequence
  Synthetic
uauacaguucugagcuua

SEQ ID NO: 247524 - RNA, 19 nt, Artificial Sequence
  Synthetic
uuauacaguucugagcuua

SEQ ID NO: 247525 - RNA, 20 nt, Artificial Sequence
  Synthetic
auuauacaguucugagcuua

SEQ ID NO: 247526 - RNA, 21 nt, Artificial Sequence
  Synthetic
aauuauacaguucugagcuua

SEQ ID NO: 247527 - RNA, 22 nt, Artificial Sequence
  Synthetic
aaauuauacaguucugagcuua

SEQ ID NO: 247528 - RNA, 23 nt, Artificial Sequence
  Synthetic
gaaauuauacaguucugagcuua

SEQ ID NO: 247529 - RNA, 24 nt, Artificial Sequence
  Synthetic
ggaaauuauacaguucugagcuua

SEQ ID NO: 247530 - RNA, 18 nt, Artificial Sequence
  Synthetic
auaaagaauucuagcuua

SEQ ID NO: 247531 - RNA, 19 nt, Artificial Sequence
  Synthetic
uauaaagaauucuagcuua

SEQ ID NO: 247532 - RNA, 20 nt, Artificial Sequence
  Synthetic
cuauaaagaauucuagcuua

SEQ ID NO: 247533 - RNA, 21 nt, Artificial Sequence
  Synthetic
gcuauaaagaauucuagcuua

SEQ ID NO: 247534 - RNA, 22 nt, Artificial Sequence
  Synthetic
ggcuauaaagaauucuagcuua

SEQ ID NO: 247535 - RNA, 23 nt, Artificial Sequence
  Synthetic
aggcuauaaagaauucuagcuua

SEQ ID NO: 247536 - RNA, 24 nt, Artificial Sequence
  Synthetic
aaggcuauaaagaauucuagcuua

SEQ ID NO: 247537 - RNA, 18 nt, Artificial Sequence
  Synthetic
guggagggggcucgcuua

SEQ ID NO: 247538 - RNA, 19 nt, Artificial Sequence
  Synthetic
uguggagggggcucgcuua

SEQ ID NO: 247539 - RNA, 20 nt, Artificial Sequence
  Synthetic
uuguggagggggcucgcuua

SEQ ID NO: 247540 - RNA, 21 nt, Artificial Sequence
  Synthetic
uuuguggagggggcucgcuua

SEQ ID NO: 247541 - RNA, 22 nt, Artificial Sequence
  Synthetic
guuuguggagggggcucgcuua

SEQ ID NO: 247542 - RNA, 23 nt, Artificial Sequence
  Synthetic
cguuuguggagggggcucgcuua

SEQ ID NO: 247543 - RNA, 24 nt, Artificial Sequence
  Synthetic
gcguuuguggagggggcucgcuua

SEQ ID NO: 247544 - RNA, 18 nt, Artificial Sequence
  Synthetic
uaaguaaaaagaggcuua

SEQ ID NO: 247545 - RNA, 19 nt, Artificial Sequence
  Synthetic
auaaguaaaaagaggcuua

SEQ ID NO: 247546 - RNA, 20 nt, Artificial Sequence
  Synthetic
uauaaguaaaaagaggcuua

SEQ ID NO: 247547 - RNA, 21 nt, Artificial Sequence
  Synthetic
uuauaaguaaaaagaggcuua

SEQ ID NO: 247548 - RNA, 22 nt, Artificial Sequence
  Synthetic
uuuauaaguaaaaagaggcuua

SEQ ID NO: 247549 - RNA, 23 nt, Artificial Sequence
  Synthetic
auuuauaaguaaaaagaggcuua

SEQ ID NO: 247550 - RNA, 24 nt, Artificial Sequence
  Synthetic
aauuuauaaguaaaaagaggcuua

SEQ ID NO: 247551 - RNA, 18 nt, Artificial Sequence
  Synthetic
ccagaaaggaacggcuua

SEQ ID NO: 247552 - RNA, 19 nt, Artificial Sequence
  Synthetic
cccagaaaggaacggcuua

SEQ ID NO: 247553 - RNA, 20 nt, Artificial Sequence
  Synthetic
acccagaaaggaacggcuua

SEQ ID NO: 247554 - RNA, 21 nt, Artificial Sequence
  Synthetic
cacccagaaaggaacggcuua

SEQ ID NO: 247555 - RNA, 22 nt, Artificial Sequence
  Synthetic
gcacccagaaaggaacggcuua

SEQ ID NO: 247556 - RNA, 23 nt, Artificial Sequence
  Synthetic
ugcacccagaaaggaacggcuua

SEQ ID NO: 247557 - RNA, 24 nt, Artificial Sequence
  Synthetic
cugcacccagaaaggaacggcuua

SEQ ID NO: 247558 - RNA, 18 nt, Artificial Sequence
  Synthetic
guuuuaaaugagggcuua

SEQ ID NO: 247559 - RNA, 19 nt, Artificial Sequence
  Synthetic
aguuuuaaaugagggcuua

SEQ ID NO: 247560 - RNA, 20 nt, Artificial Sequence
  Synthetic
gaguuuuaaaugagggcuua

SEQ ID NO: 247561 - RNA, 21 nt, Artificial Sequence
  Synthetic
ggaguuuuaaaugagggcuua

SEQ ID NO: 247562 - RNA, 22 nt, Artificial Sequence
  Synthetic
aggaguuuuaaaugagggcuua

SEQ ID NO: 247563 - RNA, 23 nt, Artificial Sequence
  Synthetic
gaggaguuuuaaaugagggcuua

SEQ ID NO: 247564 - RNA, 24 nt, Artificial Sequence
  Synthetic
ggaggaguuuuaaaugagggcuua

SEQ ID NO: 247565 - RNA, 18 nt, Artificial Sequence
  Synthetic
aaaucuagcuauggcuua

SEQ ID NO: 247566 - RNA, 19 nt, Artificial Sequence
  Synthetic
gaaaucuagcuauggcuua

SEQ ID NO: 247567 - RNA, 20 nt, Artificial Sequence
  Synthetic
ugaaaucuagcuauggcuua

SEQ ID NO: 247568 - RNA, 21 nt, Artificial Sequence
  Synthetic
cugaaaucuagcuauggcuua

SEQ ID NO: 247569 - RNA, 22 nt, Artificial Sequence
  Synthetic
acugaaaucuagcuauggcuua

SEQ ID NO: 247570 - RNA, 23 nt, Artificial Sequence
  Synthetic
aacugaaaucuagcuauggcuua

SEQ ID NO: 247571 - RNA, 24 nt, Artificial Sequence
  Synthetic
gaacugaaaucuagcuauggcuua

SEQ ID NO: 247572 - RNA, 18 nt, Artificial Sequence
  Synthetic
uucacuuugacuggcuua

SEQ ID NO: 247573 - RNA, 19 nt, Artificial Sequence
  Synthetic
cuucacuuugacuggcuua

SEQ ID NO: 247574 - RNA, 20 nt, Artificial Sequence
  Synthetic
gcuucacuuugacuggcuua

SEQ ID NO: 247575 - RNA, 21 nt, Artificial Sequence
  Synthetic
agcuucacuuugacuggcuua

SEQ ID NO: 247576 - RNA, 22 nt, Artificial Sequence
  Synthetic
uagcuucacuuugacuggcuua

SEQ ID NO: 247577 - RNA, 23 nt, Artificial Sequence
  Synthetic
uuagcuucacuuugacuggcuua

SEQ ID NO: 247578 - RNA, 24 nt, Artificial Sequence
  Synthetic
auuagcuucacuuugacuggcuua

SEQ ID NO: 247579 - RNA, 18 nt, Artificial Sequence
  Synthetic
acugugcagccuggcuua

SEQ ID NO: 247580 - RNA, 19 nt, Artificial Sequence
  Synthetic
aacugugcagccuggcuua

SEQ ID NO: 247581 - RNA, 20 nt, Artificial Sequence
  Synthetic
aaacugugcagccuggcuua

SEQ ID NO: 247582 - RNA, 21 nt, Artificial Sequence
  Synthetic
uaaacugugcagccuggcuua

SEQ ID NO: 247583 - RNA, 22 nt, Artificial Sequence
  Synthetic
auaaacugugcagccuggcuua

SEQ ID NO: 247584 - RNA, 23 nt, Artificial Sequence
  Synthetic
aauaaacugugcagccuggcuua

SEQ ID NO: 247585 - RNA, 24 nt, Artificial Sequence
  Synthetic
aaauaaacugugcagccuggcuua

SEQ ID NO: 247586 - RNA, 18 nt, Artificial Sequence
  Synthetic
auguucgaugguggcuua

SEQ ID NO: 247587 - RNA, 19 nt, Artificial Sequence
  Synthetic
cauguucgaugguggcuua

SEQ ID NO: 247588 - RNA, 20 nt, Artificial Sequence
  Synthetic
gcauguucgaugguggcuua

SEQ ID NO: 247589 - RNA, 21 nt, Artificial Sequence
  Synthetic
agcauguucgaugguggcuua

SEQ ID NO: 247590 - RNA, 22 nt, Artificial Sequence
  Synthetic
cagcauguucgaugguggcuua

SEQ ID NO: 247591 - RNA, 23 nt, Artificial Sequence
  Synthetic
gcagcauguucgaugguggcuua

SEQ ID NO: 247592 - RNA, 24 nt, Artificial Sequence
  Synthetic
ugcagcauguucgaugguggcuua

SEQ ID NO: 247593 - RNA, 18 nt, Artificial Sequence
  Synthetic
aagaaauguguuggcuua

SEQ ID NO: 247594 - RNA, 19 nt, Artificial Sequence
  Synthetic
aaagaaauguguuggcuua

SEQ ID NO: 247595 - RNA, 20 nt, Artificial Sequence
  Synthetic
aaaagaaauguguuggcuua

SEQ ID NO: 247596 - RNA, 21 nt, Artificial Sequence
  Synthetic
caaaagaaauguguuggcuua

SEQ ID NO: 247597 - RNA, 22 nt, Artificial Sequence
  Synthetic
gcaaaagaaauguguuggcuua

SEQ ID NO: 247598 - RNA, 23 nt, Artificial Sequence
  Synthetic
ugcaaaagaaauguguuggcuua

SEQ ID NO: 247599 - RNA, 24 nt, Artificial Sequence
  Synthetic
augcaaaagaaauguguuggcuua

SEQ ID NO: 247600 - RNA, 18 nt, Artificial Sequence
  Synthetic
ucacucagcaaaugcuua

SEQ ID NO: 247601 - RNA, 19 nt, Artificial Sequence
  Synthetic
uucacucagcaaaugcuua

SEQ ID NO: 247602 - RNA, 20 nt, Artificial Sequence
  Synthetic
guucacucagcaaaugcuua

SEQ ID NO: 247603 - RNA, 21 nt, Artificial Sequence
  Synthetic
cguucacucagcaaaugcuua

SEQ ID NO: 247604 - RNA, 22 nt, Artificial Sequence
  Synthetic
gcguucacucagcaaaugcuua

SEQ ID NO: 247605 - RNA, 23 nt, Artificial Sequence
  Synthetic
ugcguucacucagcaaaugcuua

SEQ ID NO: 247606 - RNA, 24 nt, Artificial Sequence
  Synthetic
augcguucacucagcaaaugcuua

SEQ ID NO: 247607 - RNA, 18 nt, Artificial Sequence
  Synthetic
gcacuccagaaaugcuua

SEQ ID NO: 247608 - RNA, 19 nt, Artificial Sequence
  Synthetic
cgcacuccagaaaugcuua

SEQ ID NO: 247609 - RNA, 20 nt, Artificial Sequence
  Synthetic
acgcacuccagaaaugcuua

SEQ ID NO: 247610 - RNA, 21 nt, Artificial Sequence
  Synthetic
cacgcacuccagaaaugcuua

SEQ ID NO: 247611 - RNA, 22 nt, Artificial Sequence
  Synthetic
ccacgcacuccagaaaugcuua

SEQ ID NO: 247612 - RNA, 23 nt, Artificial Sequence
  Synthetic
accacgcacuccagaaaugcuua

SEQ ID NO: 247613 - RNA, 24 nt, Artificial Sequence
  Synthetic
caccacgcacuccagaaaugcuua

SEQ ID NO: 247614 - RNA, 18 nt, Artificial Sequence
  Synthetic
aaauaucuaaacugcuua

SEQ ID NO: 247615 - RNA, 19 nt, Artificial Sequence
  Synthetic
aaaauaucuaaacugcuua

SEQ ID NO: 247616 - RNA, 20 nt, Artificial Sequence
  Synthetic
uaaaauaucuaaacugcuua

SEQ ID NO: 247617 - RNA, 21 nt, Artificial Sequence
  Synthetic
uuaaaauaucuaaacugcuua

SEQ ID NO: 247618 - RNA, 22 nt, Artificial Sequence
  Synthetic
auuaaaauaucuaaacugcuua

SEQ ID NO: 247619 - RNA, 23 nt, Artificial Sequence
  Synthetic
aauuaaaauaucuaaacugcuua

SEQ ID NO: 247620 - RNA, 24 nt, Artificial Sequence
  Synthetic
uaauuaaaauaucuaaacugcuua

SEQ ID NO: 247621 - RNA, 18 nt, Artificial Sequence
  Synthetic
ugcaagcugcccugcuua

SEQ ID NO: 247622 - RNA, 19 nt, Artificial Sequence
  Synthetic
augcaagcugcccugcuua

SEQ ID NO: 247623 - RNA, 20 nt, Artificial Sequence
  Synthetic
gaugcaagcugcccugcuua

SEQ ID NO: 247624 - RNA, 21 nt, Artificial Sequence
  Synthetic
ggaugcaagcugcccugcuua

SEQ ID NO: 247625 - RNA, 22 nt, Artificial Sequence
  Synthetic
gggaugcaagcugcccugcuua

SEQ ID NO: 247626 - RNA, 23 nt, Artificial Sequence
  Synthetic
agggaugcaagcugcccugcuua

SEQ ID NO: 247627 - RNA, 24 nt, Artificial Sequence
  Synthetic
cagggaugcaagcugcccugcuua

SEQ ID NO: 247628 - RNA, 18 nt, Artificial Sequence
  Synthetic
ugucuucgaaucugcuua

SEQ ID NO: 247629 - RNA, 19 nt, Artificial Sequence
  Synthetic
uugucuucgaaucugcuua

SEQ ID NO: 247630 - RNA, 20 nt, Artificial Sequence
  Synthetic
cuugucuucgaaucugcuua

SEQ ID NO: 247631 - RNA, 21 nt, Artificial Sequence
  Synthetic
ccuugucuucgaaucugcuua

SEQ ID NO: 247632 - RNA, 22 nt, Artificial Sequence
  Synthetic
cccuugucuucgaaucugcuua

SEQ ID NO: 247633 - RNA, 23 nt, Artificial Sequence
  Synthetic
ucccuugucuucgaaucugcuua

SEQ ID NO: 247634 - RNA, 24 nt, Artificial Sequence
  Synthetic
aucccuugucuucgaaucugcuua

SEQ ID NO: 247635 - RNA, 18 nt, Artificial Sequence
  Synthetic
gcuguauuccucugcuua

SEQ ID NO: 247636 - RNA, 19 nt, Artificial Sequence
  Synthetic
ugcuguauuccucugcuua

SEQ ID NO: 247637 - RNA, 20 nt, Artificial Sequence
  Synthetic
cugcuguauuccucugcuua

SEQ ID NO: 247638 - RNA, 21 nt, Artificial Sequence
  Synthetic
ccugcuguauuccucugcuua

SEQ ID NO: 247639 - RNA, 22 nt, Artificial Sequence
  Synthetic
gccugcuguauuccucugcuua

SEQ ID NO: 247640 - RNA, 23 nt, Artificial Sequence
  Synthetic
agccugcuguauuccucugcuua

SEQ ID NO: 247641 - RNA, 24 nt, Artificial Sequence
  Synthetic
cagccugcuguauuccucugcuua

SEQ ID NO: 247642 - RNA, 18 nt, Artificial Sequence
  Synthetic
uaacuaaagcagugcuua

SEQ ID NO: 247643 - RNA, 19 nt, Artificial Sequence
  Synthetic
guaacuaaagcagugcuua

SEQ ID NO: 247644 - RNA, 20 nt, Artificial Sequence
  Synthetic
uguaacuaaagcagugcuua

SEQ ID NO: 247645 - RNA, 21 nt, Artificial Sequence
  Synthetic
auguaacuaaagcagugcuua

SEQ ID NO: 247646 - RNA, 22 nt, Artificial Sequence
  Synthetic
gauguaacuaaagcagugcuua

SEQ ID NO: 247647 - RNA, 23 nt, Artificial Sequence
  Synthetic
ggauguaacuaaagcagugcuua

SEQ ID NO: 247648 - RNA, 24 nt, Artificial Sequence
  Synthetic
aggauguaacuaaagcagugcuua

SEQ ID NO: 247649 - RNA, 18 nt, Artificial Sequence
  Synthetic
gaacuugaaaugugcuua

SEQ ID NO: 247650 - RNA, 19 nt, Artificial Sequence
  Synthetic
agaacuugaaaugugcuua

SEQ ID NO: 247651 - RNA, 20 nt, Artificial Sequence
  Synthetic
gagaacuugaaaugugcuua

SEQ ID NO: 247652 - RNA, 21 nt, Artificial Sequence
  Synthetic
ugagaacuugaaaugugcuua

SEQ ID NO: 247653 - RNA, 22 nt, Artificial Sequence
  Synthetic
uugagaacuugaaaugugcuua

SEQ ID NO: 247654 - RNA, 23 nt, Artificial Sequence
  Synthetic
auugagaacuugaaaugugcuua

SEQ ID NO: 247655 - RNA, 24 nt, Artificial Sequence
  Synthetic
cauugagaacuugaaaugugcuua

SEQ ID NO: 247656 - RNA, 18 nt, Artificial Sequence
  Synthetic
ucccuuagaaauugcuua

SEQ ID NO: 247657 - RNA, 19 nt, Artificial Sequence
  Synthetic
gucccuuagaaauugcuua

SEQ ID NO: 247658 - RNA, 20 nt, Artificial Sequence
  Synthetic
ugucccuuagaaauugcuua

SEQ ID NO: 247659 - RNA, 21 nt, Artificial Sequence
  Synthetic
uugucccuuagaaauugcuua

SEQ ID NO: 247660 - RNA, 22 nt, Artificial Sequence
  Synthetic
uuugucccuuagaaauugcuua

SEQ ID NO: 247661 - RNA, 23 nt, Artificial Sequence
  Synthetic
auuugucccuuagaaauugcuua

SEQ ID NO: 247662 - RNA, 24 nt, Artificial Sequence
  Synthetic
aauuugucccuuagaaauugcuua

SEQ ID NO: 247663 - RNA, 18 nt, Artificial Sequence
  Synthetic
uaaauaacauguugcuua

SEQ ID NO: 247664 - RNA, 19 nt, Artificial Sequence
  Synthetic
uuaaauaacauguugcuua

SEQ ID NO: 247665 - RNA, 20 nt, Artificial Sequence
  Synthetic
guuaaauaacauguugcuua

SEQ ID NO: 247666 - RNA, 21 nt, Artificial Sequence
  Synthetic
aguuaaauaacauguugcuua

SEQ ID NO: 247667 - RNA, 22 nt, Artificial Sequence
  Synthetic
aaguuaaauaacauguugcuua

SEQ ID NO: 247668 - RNA, 23 nt, Artificial Sequence
  Synthetic
gaaguuaaauaacauguugcuua

SEQ ID NO: 247669 - RNA, 24 nt, Artificial Sequence
  Synthetic
ugaaguuaaauaacauguugcuua

SEQ ID NO: 247670 - RNA, 18 nt, Artificial Sequence
  Synthetic
uauuauaguuguugcuua

SEQ ID NO: 247671 - RNA, 19 nt, Artificial Sequence
  Synthetic
auauuauaguuguugcuua

SEQ ID NO: 247672 - RNA, 20 nt, Artificial Sequence
  Synthetic
aauauuauaguuguugcuua

SEQ ID NO: 247673 - RNA, 21 nt, Artificial Sequence
  Synthetic
caauauuauaguuguugcuua

SEQ ID NO: 247674 - RNA, 22 nt, Artificial Sequence
  Synthetic
acaauauuauaguuguugcuua

SEQ ID NO: 247675 - RNA, 23 nt, Artificial Sequence
  Synthetic
cacaauauuauaguuguugcuua

SEQ ID NO: 247676 - RNA, 24 nt, Artificial Sequence
  Synthetic
gcacaauauuauaguuguugcuua

SEQ ID NO: 247677 - RNA, 18 nt, Artificial Sequence
  Synthetic
aaaacccugcuuugcuua

SEQ ID NO: 247678 - RNA, 19 nt, Artificial Sequence
  Synthetic
uaaaacccugcuuugcuua

SEQ ID NO: 247679 - RNA, 20 nt, Artificial Sequence
  Synthetic
auaaaacccugcuuugcuua

SEQ ID NO: 247680 - RNA, 21 nt, Artificial Sequence
  Synthetic
cauaaaacccugcuuugcuua

SEQ ID NO: 247681 - RNA, 22 nt, Artificial Sequence
  Synthetic
ucauaaaacccugcuuugcuua

SEQ ID NO: 247682 - RNA, 23 nt, Artificial Sequence
  Synthetic
aucauaaaacccugcuuugcuua

SEQ ID NO: 247683 - RNA, 24 nt, Artificial Sequence
  Synthetic
uaucauaaaacccugcuuugcuua

SEQ ID NO: 247684 - RNA, 18 nt, Artificial Sequence
  Synthetic
gagcaaacaaaaaucuua

SEQ ID NO: 247685 - RNA, 19 nt, Artificial Sequence
  Synthetic
ugagcaaacaaaaaucuua

SEQ ID NO: 247686 - RNA, 20 nt, Artificial Sequence
  Synthetic
augagcaaacaaaaaucuua

SEQ ID NO: 247687 - RNA, 21 nt, Artificial Sequence
  Synthetic
aaugagcaaacaaaaaucuua

SEQ ID NO: 247688 - RNA, 22 nt, Artificial Sequence
  Synthetic
caaugagcaaacaaaaaucuua

SEQ ID NO: 247689 - RNA, 23 nt, Artificial Sequence
  Synthetic
ucaaugagcaaacaaaaaucuua

SEQ ID NO: 247690 - RNA, 24 nt, Artificial Sequence
  Synthetic
uucaaugagcaaacaaaaaucuua

SEQ ID NO: 247691 - RNA, 18 nt, Artificial Sequence
  Synthetic
gauuguugaccaaucuua

SEQ ID NO: 247692 - RNA, 19 nt, Artificial Sequence
  Synthetic
agauuguugaccaaucuua

SEQ ID NO: 247693 - RNA, 20 nt, Artificial Sequence
  Synthetic
cagauuguugaccaaucuua

SEQ ID NO: 247694 - RNA, 21 nt, Artificial Sequence
  Synthetic
ucagauuguugaccaaucuua

SEQ ID NO: 247695 - RNA, 22 nt, Artificial Sequence
  Synthetic
cucagauuguugaccaaucuua

SEQ ID NO: 247696 - RNA, 23 nt, Artificial Sequence
  Synthetic
acucagauuguugaccaaucuua

SEQ ID NO: 247697 - RNA, 24 nt, Artificial Sequence
  Synthetic
uacucagauuguugaccaaucuua

SEQ ID NO: 247698 - RNA, 18 nt, Artificial Sequence
  Synthetic
aaaaauauuauaaucuua

SEQ ID NO: 247699 - RNA, 19 nt, Artificial Sequence
  Synthetic
gaaaaauauuauaaucuua

SEQ ID NO: 247700 - RNA, 20 nt, Artificial Sequence
  Synthetic
agaaaaauauuauaaucuua

SEQ ID NO: 247701 - RNA, 21 nt, Artificial Sequence
  Synthetic
cagaaaaauauuauaaucuua

SEQ ID NO: 247702 - RNA, 22 nt, Artificial Sequence
  Synthetic
acagaaaaauauuauaaucuua

SEQ ID NO: 247703 - RNA, 23 nt, Artificial Sequence
  Synthetic
uacagaaaaauauuauaaucuua

SEQ ID NO: 247704 - RNA, 24 nt, Artificial Sequence
  Synthetic
uuacagaaaaauauuauaaucuua

SEQ ID NO: 247705 - RNA, 18 nt, Artificial Sequence
  Synthetic
uguaacucccccaucuua

SEQ ID NO: 247706 - RNA, 19 nt, Artificial Sequence
  Synthetic
uuguaacucccccaucuua

SEQ ID NO: 247707 - RNA, 20 nt, Artificial Sequence
  Synthetic
uuuguaacucccccaucuua

SEQ ID NO: 247708 - RNA, 21 nt, Artificial Sequence
  Synthetic
uuuuguaacucccccaucuua

SEQ ID NO: 247709 - RNA, 22 nt, Artificial Sequence
  Synthetic
cuuuuguaacucccccaucuua

SEQ ID NO: 247710 - RNA, 23 nt, Artificial Sequence
  Synthetic
ccuuuuguaacucccccaucuua

SEQ ID NO: 247711 - RNA, 24 nt, Artificial Sequence
  Synthetic
gccuuuuguaacucccccaucuua

SEQ ID NO: 247712 - RNA, 18 nt, Artificial Sequence
  Synthetic
aaauccucuuucaucuua

SEQ ID NO: 247713 - RNA, 19 nt, Artificial Sequence
  Synthetic
uaaauccucuuucaucuua

SEQ ID NO: 247714 - RNA, 20 nt, Artificial Sequence
  Synthetic
cuaaauccucuuucaucuua

SEQ ID NO: 247715 - RNA, 21 nt, Artificial Sequence
  Synthetic
ccuaaauccucuuucaucuua

SEQ ID NO: 247716 - RNA, 22 nt, Artificial Sequence
  Synthetic
uccuaaauccucuuucaucuua

SEQ ID NO: 247717 - RNA, 23 nt, Artificial Sequence
  Synthetic
auccuaaauccucuuucaucuua

SEQ ID NO: 247718 - RNA, 24 nt, Artificial Sequence
  Synthetic
uauccuaaauccucuuucaucuua

SEQ ID NO: 247719 - RNA, 18 nt, Artificial Sequence
  Synthetic
gucaaccauuagaucuua

SEQ ID NO: 247720 - RNA, 19 nt, Artificial Sequence
  Synthetic
agucaaccauuagaucuua

SEQ ID NO: 247721 - RNA, 20 nt, Artificial Sequence
  Synthetic
gagucaaccauuagaucuua

SEQ ID NO: 247722 - RNA, 21 nt, Artificial Sequence
  Synthetic
agagucaaccauuagaucuua

SEQ ID NO: 247723 - RNA, 22 nt, Artificial Sequence
  Synthetic
gagagucaaccauuagaucuua

SEQ ID NO: 247724 - RNA, 23 nt, Artificial Sequence
  Synthetic
agagagucaaccauuagaucuua

SEQ ID NO: 247725 - RNA, 24 nt, Artificial Sequence
  Synthetic
cagagagucaaccauuagaucuua

SEQ ID NO: 247726 - RNA, 18 nt, Artificial Sequence
  Synthetic
ccaacuccugcgaucuua

SEQ ID NO: 247727 - RNA, 19 nt, Artificial Sequence
  Synthetic
cccaacuccugcgaucuua

SEQ ID NO: 247728 - RNA, 20 nt, Artificial Sequence
  Synthetic
gcccaacuccugcgaucuua

SEQ ID NO: 247729 - RNA, 21 nt, Artificial Sequence
  Synthetic
ugcccaacuccugcgaucuua

SEQ ID NO: 247730 - RNA, 22 nt, Artificial Sequence
  Synthetic
uugcccaacuccugcgaucuua

SEQ ID NO: 247731 - RNA, 23 nt, Artificial Sequence
  Synthetic
uuugcccaacuccugcgaucuua

SEQ ID NO: 247732 - RNA, 24 nt, Artificial Sequence
  Synthetic
auuugcccaacuccugcgaucuua

SEQ ID NO: 247733 - RNA, 18 nt, Artificial Sequence
  Synthetic
cagggggacaugaucuua

SEQ ID NO: 247734 - RNA, 19 nt, Artificial Sequence
  Synthetic
ccagggggacaugaucuua

SEQ ID NO: 247735 - RNA, 20 nt, Artificial Sequence
  Synthetic
cccagggggacaugaucuua

SEQ ID NO: 247736 - RNA, 21 nt, Artificial Sequence
  Synthetic
ucccagggggacaugaucuua

SEQ ID NO: 247737 - RNA, 22 nt, Artificial Sequence
  Synthetic
uucccagggggacaugaucuua

SEQ ID NO: 247738 - RNA, 23 nt, Artificial Sequence
  Synthetic
guucccagggggacaugaucuua

SEQ ID NO: 247739 - RNA, 24 nt, Artificial Sequence
  Synthetic
aguucccagggggacaugaucuua

SEQ ID NO: 247740 - RNA, 18 nt, Artificial Sequence
  Synthetic
gucuugcuccugaucuua

SEQ ID NO: 247741 - RNA, 19 nt, Artificial Sequence
  Synthetic
ugucuugcuccugaucuua

SEQ ID NO: 247742 - RNA, 20 nt, Artificial Sequence
  Synthetic
uugucuugcuccugaucuua

SEQ ID NO: 247743 - RNA, 21 nt, Artificial Sequence
  Synthetic
uuugucuugcuccugaucuua

SEQ ID NO: 247744 - RNA, 22 nt, Artificial Sequence
  Synthetic
cuuugucuugcuccugaucuua

SEQ ID NO: 247745 - RNA, 23 nt, Artificial Sequence
  Synthetic
ucuuugucuugcuccugaucuua

SEQ ID NO: 247746 - RNA, 24 nt, Artificial Sequence
  Synthetic
aucuuugucuugcuccugaucuua

SEQ ID NO: 247747 - RNA, 18 nt, Artificial Sequence
  Synthetic
gucuuguuucugaucuua

SEQ ID NO: 247748 - RNA, 19 nt, Artificial Sequence
  Synthetic
ugucuuguuucugaucuua

SEQ ID NO: 247749 - RNA, 20 nt, Artificial Sequence
  Synthetic
uugucuuguuucugaucuua

SEQ ID NO: 247750 - RNA, 21 nt, Artificial Sequence
  Synthetic
cuugucuuguuucugaucuua

SEQ ID NO: 247751 - RNA, 22 nt, Artificial Sequence
  Synthetic
ucuugucuuguuucugaucuua

SEQ ID NO: 247752 - RNA, 23 nt, Artificial Sequence
  Synthetic
uucuugucuuguuucugaucuua

SEQ ID NO: 247753 - RNA, 24 nt, Artificial Sequence
  Synthetic
auucuugucuuguuucugaucuua

SEQ ID NO: 247754 - RNA, 18 nt, Artificial Sequence
  Synthetic
uguuuuuauaauaucuua

SEQ ID NO: 247755 - RNA, 19 nt, Artificial Sequence
  Synthetic
cuguuuuuauaauaucuua

SEQ ID NO: 247756 - RNA, 20 nt, Artificial Sequence
  Synthetic
acuguuuuuauaauaucuua

SEQ ID NO: 247757 - RNA, 21 nt, Artificial Sequence
  Synthetic
cacuguuuuuauaauaucuua

SEQ ID NO: 247758 - RNA, 22 nt, Artificial Sequence
  Synthetic
ccacuguuuuuauaauaucuua

SEQ ID NO: 247759 - RNA, 23 nt, Artificial Sequence
  Synthetic
accacuguuuuuauaauaucuua

SEQ ID NO: 247760 - RNA, 24 nt, Artificial Sequence
  Synthetic
aaccacuguuuuuauaauaucuua

SEQ ID NO: 247761 - RNA, 18 nt, Artificial Sequence
  Synthetic
auucugucuacuaucuua

SEQ ID NO: 247762 - RNA, 19 nt, Artificial Sequence
  Synthetic
uauucugucuacuaucuua

SEQ ID NO: 247763 - RNA, 20 nt, Artificial Sequence
  Synthetic
cuauucugucuacuaucuua

SEQ ID NO: 247764 - RNA, 21 nt, Artificial Sequence
  Synthetic
ccuauucugucuacuaucuua

SEQ ID NO: 247765 - RNA, 22 nt, Artificial Sequence
  Synthetic
accuauucugucuacuaucuua

SEQ ID NO: 247766 - RNA, 23 nt, Artificial Sequence
  Synthetic
caccuauucugucuacuaucuua

SEQ ID NO: 247767 - RNA, 24 nt, Artificial Sequence
  Synthetic
acaccuauucugucuacuaucuua

SEQ ID NO: 247768 - RNA, 18 nt, Artificial Sequence
  Synthetic
ucuaucaccccuaucuua

SEQ ID NO: 247769 - RNA, 19 nt, Artificial Sequence
  Synthetic
cucuaucaccccuaucuua

SEQ ID NO: 247770 - RNA, 20 nt, Artificial Sequence
  Synthetic
ucucuaucaccccuaucuua

SEQ ID NO: 247771 - RNA, 21 nt, Artificial Sequence
  Synthetic
cucucuaucaccccuaucuua

SEQ ID NO: 247772 - RNA, 22 nt, Artificial Sequence
  Synthetic
ucucucuaucaccccuaucuua

SEQ ID NO: 247773 - RNA, 23 nt, Artificial Sequence
  Synthetic
gucucucuaucaccccuaucuua

SEQ ID NO: 247774 - RNA, 24 nt, Artificial Sequence
  Synthetic
cgucucucuaucaccccuaucuua

SEQ ID NO: 247775 - RNA, 18 nt, Artificial Sequence
  Synthetic
ugccuuuuugguaucuua

SEQ ID NO: 247776 - RNA, 19 nt, Artificial Sequence
  Synthetic
uugccuuuuugguaucuua

SEQ ID NO: 247777 - RNA, 20 nt, Artificial Sequence
  Synthetic
uuugccuuuuugguaucuua

SEQ ID NO: 247778 - RNA, 21 nt, Artificial Sequence
  Synthetic
uuuugccuuuuugguaucuua

SEQ ID NO: 247779 - RNA, 22 nt, Artificial Sequence
  Synthetic
guuuugccuuuuugguaucuua

SEQ ID NO: 247780 - RNA, 23 nt, Artificial Sequence
  Synthetic
uguuuugccuuuuugguaucuua

SEQ ID NO: 247781 - RNA, 24 nt, Artificial Sequence
  Synthetic
uuguuuugccuuuuugguaucuua

SEQ ID NO: 247782 - RNA, 18 nt, Artificial Sequence
  Synthetic
gaaucuacuugacucuua

SEQ ID NO: 247783 - RNA, 19 nt, Artificial Sequence
  Synthetic
agaaucuacuugacucuua

SEQ ID NO: 247784 - RNA, 20 nt, Artificial Sequence
  Synthetic
uagaaucuacuugacucuua

SEQ ID NO: 247785 - RNA, 21 nt, Artificial Sequence
  Synthetic
uuagaaucuacuugacucuua

SEQ ID NO: 247786 - RNA, 22 nt, Artificial Sequence
  Synthetic
uuuagaaucuacuugacucuua

SEQ ID NO: 247787 - RNA, 23 nt, Artificial Sequence
  Synthetic
uuuuagaaucuacuugacucuua

SEQ ID NO: 247788 - RNA, 24 nt, Artificial Sequence
  Synthetic
auuuuagaaucuacuugacucuua

SEQ ID NO: 247789 - RNA, 18 nt, Artificial Sequence
  Synthetic
caacaccuaagccucuua

SEQ ID NO: 247790 - RNA, 19 nt, Artificial Sequence
  Synthetic
gcaacaccuaagccucuua

SEQ ID NO: 247791 - RNA, 20 nt, Artificial Sequence
  Synthetic
ggcaacaccuaagccucuua

SEQ ID NO: 247792 - RNA, 21 nt, Artificial Sequence
  Synthetic
aggcaacaccuaagccucuua

SEQ ID NO: 247793 - RNA, 22 nt, Artificial Sequence
  Synthetic
aaggcaacaccuaagccucuua

SEQ ID NO: 247794 - RNA, 23 nt, Artificial Sequence
  Synthetic
caaggcaacaccuaagccucuua

SEQ ID NO: 247795 - RNA, 24 nt, Artificial Sequence
  Synthetic
ucaaggcaacaccuaagccucuua

SEQ ID NO: 247796 - RNA, 18 nt, Artificial Sequence
  Synthetic
uucugcaucagccucuua

SEQ ID NO: 247797 - RNA, 19 nt, Artificial Sequence
  Synthetic
guucugcaucagccucuua

SEQ ID NO: 247798 - RNA, 20 nt, Artificial Sequence
  Synthetic
aguucugcaucagccucuua

SEQ ID NO: 247799 - RNA, 21 nt, Artificial Sequence
  Synthetic
aaguucugcaucagccucuua

SEQ ID NO: 247800 - RNA, 22 nt, Artificial Sequence
  Synthetic
uaaguucugcaucagccucuua

SEQ ID NO: 247801 - RNA, 23 nt, Artificial Sequence
  Synthetic
uuaaguucugcaucagccucuua

SEQ ID NO: 247802 - RNA, 24 nt, Artificial Sequence
  Synthetic
auuaaguucugcaucagccucuua

SEQ ID NO: 247803 - RNA, 18 nt, Artificial Sequence
  Synthetic
aagaccguccuccucuua

SEQ ID NO: 247804 - RNA, 19 nt, Artificial Sequence
  Synthetic
aaagaccguccuccucuua

SEQ ID NO: 247805 - RNA, 20 nt, Artificial Sequence
  Synthetic
aaaagaccguccuccucuua

SEQ ID NO: 247806 - RNA, 21 nt, Artificial Sequence
  Synthetic
gaaaagaccguccuccucuua

SEQ ID NO: 247807 - RNA, 22 nt, Artificial Sequence
  Synthetic
ugaaaagaccguccuccucuua

SEQ ID NO: 247808 - RNA, 23 nt, Artificial Sequence
  Synthetic
augaaaagaccguccuccucuua

SEQ ID NO: 247809 - RNA, 24 nt, Artificial Sequence
  Synthetic
caugaaaagaccguccuccucuua

SEQ ID NO: 247810 - RNA, 18 nt, Artificial Sequence
  Synthetic
cugcuauuauagcucuua

SEQ ID NO: 247811 - RNA, 19 nt, Artificial Sequence
  Synthetic
ucugcuauuauagcucuua

SEQ ID NO: 247812 - RNA, 20 nt, Artificial Sequence
  Synthetic
uucugcuauuauagcucuua

SEQ ID NO: 247813 - RNA, 21 nt, Artificial Sequence
  Synthetic
uuucugcuauuauagcucuua

SEQ ID NO: 247814 - RNA, 22 nt, Artificial Sequence
  Synthetic
auuucugcuauuauagcucuua

SEQ ID NO: 247815 - RNA, 23 nt, Artificial Sequence
  Synthetic
uauuucugcuauuauagcucuua

SEQ ID NO: 247816 - RNA, 24 nt, Artificial Sequence
  Synthetic
guauuucugcuauuauagcucuua

SEQ ID NO: 247817 - RNA, 18 nt, Artificial Sequence
  Synthetic
aacagacuauggcucuua

SEQ ID NO: 247818 - RNA, 19 nt, Artificial Sequence
  Synthetic
aaacagacuauggcucuua

SEQ ID NO: 247819 - RNA, 20 nt, Artificial Sequence
  Synthetic
gaaacagacuauggcucuua

SEQ ID NO: 247820 - RNA, 21 nt, Artificial Sequence
  Synthetic
agaaacagacuauggcucuua

SEQ ID NO: 247821 - RNA, 22 nt, Artificial Sequence
  Synthetic
gagaaacagacuauggcucuua

SEQ ID NO: 247822 - RNA, 23 nt, Artificial Sequence
  Synthetic
ggagaaacagacuauggcucuua

SEQ ID NO: 247823 - RNA, 24 nt, Artificial Sequence
  Synthetic
uggagaaacagacuauggcucuua

SEQ ID NO: 247824 - RNA, 18 nt, Artificial Sequence
  Synthetic
caguguuaucugcucuua

SEQ ID NO: 247825 - RNA, 19 nt, Artificial Sequence
  Synthetic
ucaguguuaucugcucuua

SEQ ID NO: 247826 - RNA, 20 nt, Artificial Sequence
  Synthetic
aucaguguuaucugcucuua

SEQ ID NO: 247827 - RNA, 21 nt, Artificial Sequence
  Synthetic
caucaguguuaucugcucuua

SEQ ID NO: 247828 - RNA, 22 nt, Artificial Sequence
  Synthetic
gcaucaguguuaucugcucuua

SEQ ID NO: 247829 - RNA, 23 nt, Artificial Sequence
  Synthetic
ggcaucaguguuaucugcucuua

SEQ ID NO: 247830 - RNA, 24 nt, Artificial Sequence
  Synthetic
aggcaucaguguuaucugcucuua

SEQ ID NO: 247831 - RNA, 18 nt, Artificial Sequence
  Synthetic
gauagaaaauaucucuua

SEQ ID NO: 247832 - RNA, 19 nt, Artificial Sequence
  Synthetic
ugauagaaaauaucucuua

SEQ ID NO: 247833 - RNA, 20 nt, Artificial Sequence
  Synthetic
augauagaaaauaucucuua

SEQ ID NO: 247834 - RNA, 21 nt, Artificial Sequence
  Synthetic
aaugauagaaaauaucucuua

SEQ ID NO: 247835 - RNA, 22 nt, Artificial Sequence
  Synthetic
uaaugauagaaaauaucucuua

SEQ ID NO: 247836 - RNA, 23 nt, Artificial Sequence
  Synthetic
uuaaugauagaaaauaucucuua

SEQ ID NO: 247837 - RNA, 24 nt, Artificial Sequence
  Synthetic
uuuaaugauagaaaauaucucuua

SEQ ID NO: 247838 - RNA, 18 nt, Artificial Sequence
  Synthetic
uuauuuugcucucucuua

SEQ ID NO: 247839 - RNA, 19 nt, Artificial Sequence
  Synthetic
guuauuuugcucucucuua

SEQ ID NO: 247840 - RNA, 20 nt, Artificial Sequence
  Synthetic
aguuauuuugcucucucuua

SEQ ID NO: 247841 - RNA, 21 nt, Artificial Sequence
  Synthetic
caguuauuuugcucucucuua

SEQ ID NO: 247842 - RNA, 22 nt, Artificial Sequence
  Synthetic
ucaguuauuuugcucucucuua

SEQ ID NO: 247843 - RNA, 23 nt, Artificial Sequence
  Synthetic
cucaguuauuuugcucucucuua

SEQ ID NO: 247844 - RNA, 24 nt, Artificial Sequence
  Synthetic
ucucaguuauuuugcucucucuua

SEQ ID NO: 247845 - RNA, 18 nt, Artificial Sequence
  Synthetic
gccuugcuuugucucuua

SEQ ID NO: 247846 - RNA, 19 nt, Artificial Sequence
  Synthetic
ugccuugcuuugucucuua

SEQ ID NO: 247847 - RNA, 20 nt, Artificial Sequence
  Synthetic
uugccuugcuuugucucuua

SEQ ID NO: 247848 - RNA, 21 nt, Artificial Sequence
  Synthetic
auugccuugcuuugucucuua

SEQ ID NO: 247849 - RNA, 22 nt, Artificial Sequence
  Synthetic
uauugccuugcuuugucucuua

SEQ ID NO: 247850 - RNA, 23 nt, Artificial Sequence
  Synthetic
uuauugccuugcuuugucucuua

SEQ ID NO: 247851 - RNA, 24 nt, Artificial Sequence
  Synthetic
uuuauugccuugcuuugucucuua

SEQ ID NO: 247852 - RNA, 18 nt, Artificial Sequence
  Synthetic
cauugcacuggagucuua

SEQ ID NO: 247853 - RNA, 19 nt, Artificial Sequence
  Synthetic
ucauugcacuggagucuua

SEQ ID NO: 247854 - RNA, 20 nt, Artificial Sequence
  Synthetic
aucauugcacuggagucuua

SEQ ID NO: 247855 - RNA, 21 nt, Artificial Sequence
  Synthetic
uaucauugcacuggagucuua

SEQ ID NO: 247856 - RNA, 22 nt, Artificial Sequence
  Synthetic
guaucauugcacuggagucuua

SEQ ID NO: 247857 - RNA, 23 nt, Artificial Sequence
  Synthetic
uguaucauugcacuggagucuua

SEQ ID NO: 247858 - RNA, 24 nt, Artificial Sequence
  Synthetic
uuguaucauugcacuggagucuua

SEQ ID NO: 247859 - RNA, 18 nt, Artificial Sequence
  Synthetic
ugggauauaauagucuua

SEQ ID NO: 247860 - RNA, 19 nt, Artificial Sequence
  Synthetic
uugggauauaauagucuua

SEQ ID NO: 247861 - RNA, 20 nt, Artificial Sequence
  Synthetic
cuugggauauaauagucuua

SEQ ID NO: 247862 - RNA, 21 nt, Artificial Sequence
  Synthetic
acuugggauauaauagucuua

SEQ ID NO: 247863 - RNA, 22 nt, Artificial Sequence
  Synthetic
aacuugggauauaauagucuua

SEQ ID NO: 247864 - RNA, 23 nt, Artificial Sequence
  Synthetic
caacuugggauauaauagucuua

SEQ ID NO: 247865 - RNA, 24 nt, Artificial Sequence
  Synthetic
ucaacuugggauauaauagucuua

SEQ ID NO: 247866 - RNA, 18 nt, Artificial Sequence
  Synthetic
uaaucaaaaaaggucuua

SEQ ID NO: 247867 - RNA, 19 nt, Artificial Sequence
  Synthetic
guaaucaaaaaaggucuua

SEQ ID NO: 247868 - RNA, 20 nt, Artificial Sequence
  Synthetic
gguaaucaaaaaaggucuua

SEQ ID NO: 247869 - RNA, 21 nt, Artificial Sequence
  Synthetic
ugguaaucaaaaaaggucuua

SEQ ID NO: 247870 - RNA, 22 nt, Artificial Sequence
  Synthetic
gugguaaucaaaaaaggucuua

SEQ ID NO: 247871 - RNA, 23 nt, Artificial Sequence
  Synthetic
ugugguaaucaaaaaaggucuua

SEQ ID NO: 247872 - RNA, 24 nt, Artificial Sequence
  Synthetic
augugguaaucaaaaaaggucuua

SEQ ID NO: 247873 - RNA, 18 nt, Artificial Sequence
  Synthetic
uggagccccugggucuua

SEQ ID NO: 247874 - RNA, 19 nt, Artificial Sequence
  Synthetic
cuggagccccugggucuua

SEQ ID NO: 247875 - RNA, 20 nt, Artificial Sequence
  Synthetic
ccuggagccccugggucuua

SEQ ID NO: 247876 - RNA, 21 nt, Artificial Sequence
  Synthetic
accuggagccccugggucuua

SEQ ID NO: 247877 - RNA, 22 nt, Artificial Sequence
  Synthetic
uaccuggagccccugggucuua

SEQ ID NO: 247878 - RNA, 23 nt, Artificial Sequence
  Synthetic
uuaccuggagccccugggucuua

SEQ ID NO: 247879 - RNA, 24 nt, Artificial Sequence
  Synthetic
guuaccuggagccccugggucuua

SEQ ID NO: 247880 - RNA, 18 nt, Artificial Sequence
  Synthetic
uuugagauaaaugucuua

SEQ ID NO: 247881 - RNA, 19 nt, Artificial Sequence
  Synthetic
auuugagauaaaugucuua

SEQ ID NO: 247882 - RNA, 20 nt, Artificial Sequence
  Synthetic
uauuugagauaaaugucuua

SEQ ID NO: 247883 - RNA, 21 nt, Artificial Sequence
  Synthetic
auauuugagauaaaugucuua

SEQ ID NO: 247884 - RNA, 22 nt, Artificial Sequence
  Synthetic
aauauuugagauaaaugucuua

SEQ ID NO: 247885 - RNA, 23 nt, Artificial Sequence
  Synthetic
caauauuugagauaaaugucuua

SEQ ID NO: 247886 - RNA, 24 nt, Artificial Sequence
  Synthetic
gcaauauuugagauaaaugucuua

SEQ ID NO: 247887 - RNA, 18 nt, Artificial Sequence
  Synthetic
uuuggcagggaugucuua

SEQ ID NO: 247888 - RNA, 19 nt, Artificial Sequence
  Synthetic
guuuggcagggaugucuua

SEQ ID NO: 247889 - RNA, 20 nt, Artificial Sequence
  Synthetic
gguuuggcagggaugucuua

SEQ ID NO: 247890 - RNA, 21 nt, Artificial Sequence
  Synthetic
ugguuuggcagggaugucuua

SEQ ID NO: 247891 - RNA, 22 nt, Artificial Sequence
  Synthetic
augguuuggcagggaugucuua

SEQ ID NO: 247892 - RNA, 23 nt, Artificial Sequence
  Synthetic
gaugguuuggcagggaugucuua

SEQ ID NO: 247893 - RNA, 24 nt, Artificial Sequence
  Synthetic
agaugguuuggcagggaugucuua

SEQ ID NO: 247894 - RNA, 18 nt, Artificial Sequence
  Synthetic
uuguauguggaugucuua

SEQ ID NO: 247895 - RNA, 19 nt, Artificial Sequence
  Synthetic
uuuguauguggaugucuua

SEQ ID NO: 247896 - RNA, 20 nt, Artificial Sequence
  Synthetic
auuuguauguggaugucuua

SEQ ID NO: 247897 - RNA, 21 nt, Artificial Sequence
  Synthetic
aauuuguauguggaugucuua

SEQ ID NO: 247898 - RNA, 22 nt, Artificial Sequence
  Synthetic
aaauuuguauguggaugucuua

SEQ ID NO: 247899 - RNA, 23 nt, Artificial Sequence
  Synthetic
aaaauuuguauguggaugucuua

SEQ ID NO: 247900 - RNA, 24 nt, Artificial Sequence
  Synthetic
uaaaauuuguauguggaugucuua

SEQ ID NO: 247901 - RNA, 18 nt, Artificial Sequence
  Synthetic
accuccagcucugucuua

SEQ ID NO: 247902 - RNA, 19 nt, Artificial Sequence
  Synthetic
uaccuccagcucugucuua

SEQ ID NO: 247903 - RNA, 20 nt, Artificial Sequence
  Synthetic
cuaccuccagcucugucuua

SEQ ID NO: 247904 - RNA, 21 nt, Artificial Sequence
  Synthetic
ccuaccuccagcucugucuua

SEQ ID NO: 247905 - RNA, 22 nt, Artificial Sequence
  Synthetic
uccuaccuccagcucugucuua

SEQ ID NO: 247906 - RNA, 23 nt, Artificial Sequence
  Synthetic
uuccuaccuccagcucugucuua

SEQ ID NO: 247907 - RNA, 24 nt, Artificial Sequence
  Synthetic
cuuccuaccuccagcucugucuua

SEQ ID NO: 247908 - RNA, 18 nt, Artificial Sequence
  Synthetic
aauauuuauggugucuua

SEQ ID NO: 247909 - RNA, 19 nt, Artificial Sequence
  Synthetic
uaauauuuauggugucuua

SEQ ID NO: 247910 - RNA, 20 nt, Artificial Sequence
  Synthetic
guaauauuuauggugucuua

SEQ ID NO: 247911 - RNA, 21 nt, Artificial Sequence
  Synthetic
uguaauauuuauggugucuua

SEQ ID NO: 247912 - RNA, 22 nt, Artificial Sequence
  Synthetic
uuguaauauuuauggugucuua

SEQ ID NO: 247913 - RNA, 23 nt, Artificial Sequence
  Synthetic
auuguaauauuuauggugucuua

SEQ ID NO: 247914 - RNA, 24 nt, Artificial Sequence
  Synthetic
gauuguaauauuuauggugucuua

SEQ ID NO: 247915 - RNA, 18 nt, Artificial Sequence
  Synthetic
uuugcucugguugucuua

SEQ ID NO: 247916 - RNA, 19 nt, Artificial Sequence
  Synthetic
uuuugcucugguugucuua

SEQ ID NO: 247917 - RNA, 20 nt, Artificial Sequence
  Synthetic
uuuuugcucugguugucuua

SEQ ID NO: 247918 - RNA, 21 nt, Artificial Sequence
  Synthetic
cuuuuugcucugguugucuua

SEQ ID NO: 247919 - RNA, 22 nt, Artificial Sequence
  Synthetic
acuuuuugcucugguugucuua

SEQ ID NO: 247920 - RNA, 23 nt, Artificial Sequence
  Synthetic
gacuuuuugcucugguugucuua

SEQ ID NO: 247921 - RNA, 24 nt, Artificial Sequence
  Synthetic
agacuuuuugcucugguugucuua

SEQ ID NO: 247922 - RNA, 18 nt, Artificial Sequence
  Synthetic
aaauagugcuuugucuua

SEQ ID NO: 247923 - RNA, 19 nt, Artificial Sequence
  Synthetic
aaaauagugcuuugucuua

SEQ ID NO: 247924 - RNA, 20 nt, Artificial Sequence
  Synthetic
gaaaauagugcuuugucuua

SEQ ID NO: 247925 - RNA, 21 nt, Artificial Sequence
  Synthetic
agaaaauagugcuuugucuua

SEQ ID NO: 247926 - RNA, 22 nt, Artificial Sequence
  Synthetic
uagaaaauagugcuuugucuua

SEQ ID NO: 247927 - RNA, 23 nt, Artificial Sequence
  Synthetic
auagaaaauagugcuuugucuua

SEQ ID NO: 247928 - RNA, 24 nt, Artificial Sequence
  Synthetic
aauagaaaauagugcuuugucuua

SEQ ID NO: 247929 - RNA, 18 nt, Artificial Sequence
  Synthetic
ucuauaauaaaauucuua

SEQ ID NO: 247930 - RNA, 19 nt, Artificial Sequence
  Synthetic
gucuauaauaaaauucuua

SEQ ID NO: 247931 - RNA, 20 nt, Artificial Sequence
  Synthetic
ugucuauaauaaaauucuua

SEQ ID NO: 247932 - RNA, 21 nt, Artificial Sequence
  Synthetic
cugucuauaauaaaauucuua

SEQ ID NO: 247933 - RNA, 22 nt, Artificial Sequence
  Synthetic
ucugucuauaauaaaauucuua

SEQ ID NO: 247934 - RNA, 23 nt, Artificial Sequence
  Synthetic
aucugucuauaauaaaauucuua

SEQ ID NO: 247935 - RNA, 24 nt, Artificial Sequence
  Synthetic
aaucugucuauaauaaaauucuua

SEQ ID NO: 247936 - RNA, 18 nt, Artificial Sequence
  Synthetic
uuacucuacaaauucuua

SEQ ID NO: 247937 - RNA, 19 nt, Artificial Sequence
  Synthetic
guuacucuacaaauucuua

SEQ ID NO: 247938 - RNA, 20 nt, Artificial Sequence
  Synthetic
aguuacucuacaaauucuua

SEQ ID NO: 247939 - RNA, 21 nt, Artificial Sequence
  Synthetic
aaguuacucuacaaauucuua

SEQ ID NO: 247940 - RNA, 22 nt, Artificial Sequence
  Synthetic
uaaguuacucuacaaauucuua

SEQ ID NO: 247941 - RNA, 23 nt, Artificial Sequence
  Synthetic
cuaaguuacucuacaaauucuua

SEQ ID NO: 247942 - RNA, 24 nt, Artificial Sequence
  Synthetic
ucuaaguuacucuacaaauucuua

SEQ ID NO: 247943 - RNA, 18 nt, Artificial Sequence
  Synthetic
cccaguccagaauucuua

SEQ ID NO: 247944 - RNA, 19 nt, Artificial Sequence
  Synthetic
acccaguccagaauucuua

SEQ ID NO: 247945 - RNA, 20 nt, Artificial Sequence
  Synthetic
aacccaguccagaauucuua

SEQ ID NO: 247946 - RNA, 21 nt, Artificial Sequence
  Synthetic
caacccaguccagaauucuua

SEQ ID NO: 247947 - RNA, 22 nt, Artificial Sequence
  Synthetic
ucaacccaguccagaauucuua

SEQ ID NO: 247948 - RNA, 23 nt, Artificial Sequence
  Synthetic
uucaacccaguccagaauucuua

SEQ ID NO: 247949 - RNA, 24 nt, Artificial Sequence
  Synthetic
uuucaacccaguccagaauucuua

SEQ ID NO: 247950 - RNA, 18 nt, Artificial Sequence
  Synthetic
gcuaagcuguaauucuua

SEQ ID NO: 247951 - RNA, 19 nt, Artificial Sequence
  Synthetic
agcuaagcuguaauucuua

SEQ ID NO: 247952 - RNA, 20 nt, Artificial Sequence
  Synthetic
aagcuaagcuguaauucuua

SEQ ID NO: 247953 - RNA, 21 nt, Artificial Sequence
  Synthetic
gaagcuaagcuguaauucuua

SEQ ID NO: 247954 - RNA, 22 nt, Artificial Sequence
  Synthetic
agaagcuaagcuguaauucuua

SEQ ID NO: 247955 - RNA, 23 nt, Artificial Sequence
  Synthetic
aagaagcuaagcuguaauucuua

SEQ ID NO: 247956 - RNA, 24 nt, Artificial Sequence
  Synthetic
gaagaagcuaagcuguaauucuua

SEQ ID NO: 247957 - RNA, 18 nt, Artificial Sequence
  Synthetic
caauauucaacauucuua

SEQ ID NO: 247958 - RNA, 19 nt, Artificial Sequence
  Synthetic
ccaauauucaacauucuua

SEQ ID NO: 247959 - RNA, 20 nt, Artificial Sequence
  Synthetic
gccaauauucaacauucuua

SEQ ID NO: 247960 - RNA, 21 nt, Artificial Sequence
  Synthetic
ggccaauauucaacauucuua

SEQ ID NO: 247961 - RNA, 22 nt, Artificial Sequence
  Synthetic
gggccaauauucaacauucuua

SEQ ID NO: 247962 - RNA, 23 nt, Artificial Sequence
  Synthetic
ggggccaauauucaacauucuua

SEQ ID NO: 247963 - RNA, 24 nt, Artificial Sequence
  Synthetic
gggggccaauauucaacauucuua

SEQ ID NO: 247964 - RNA, 18 nt, Artificial Sequence
  Synthetic
aauuuuuauaacuucuua

SEQ ID NO: 247965 - RNA, 19 nt, Artificial Sequence
  Synthetic
uaauuuuuauaacuucuua

SEQ ID NO: 247966 - RNA, 20 nt, Artificial Sequence
  Synthetic
cuaauuuuuauaacuucuua

SEQ ID NO: 247967 - RNA, 21 nt, Artificial Sequence
  Synthetic
ccuaauuuuuauaacuucuua

SEQ ID NO: 247968 - RNA, 22 nt, Artificial Sequence
  Synthetic
gccuaauuuuuauaacuucuua

SEQ ID NO: 247969 - RNA, 23 nt, Artificial Sequence
  Synthetic
agccuaauuuuuauaacuucuua

SEQ ID NO: 247970 - RNA, 24 nt, Artificial Sequence
  Synthetic
cagccuaauuuuuauaacuucuua

SEQ ID NO: 247971 - RNA, 18 nt, Artificial Sequence
  Synthetic
aaaaugccuuccuucuua

SEQ ID NO: 247972 - RNA, 19 nt, Artificial Sequence
  Synthetic
gaaaaugccuuccuucuua

SEQ ID NO: 247973 - RNA, 20 nt, Artificial Sequence
  Synthetic
ugaaaaugccuuccuucuua

SEQ ID NO: 247974 - RNA, 21 nt, Artificial Sequence
  Synthetic
gugaaaaugccuuccuucuua

SEQ ID NO: 247975 - RNA, 22 nt, Artificial Sequence
  Synthetic
ggugaaaaugccuuccuucuua

SEQ ID NO: 247976 - RNA, 23 nt, Artificial Sequence
  Synthetic
gggugaaaaugccuuccuucuua

SEQ ID NO: 247977 - RNA, 24 nt, Artificial Sequence
  Synthetic
ugggugaaaaugccuuccuucuua

SEQ ID NO: 247978 - RNA, 18 nt, Artificial Sequence
  Synthetic
aaaccaauuaucuucuua

SEQ ID NO: 247979 - RNA, 19 nt, Artificial Sequence
  Synthetic
aaaaccaauuaucuucuua

SEQ ID NO: 247980 - RNA, 20 nt, Artificial Sequence
  Synthetic
aaaaaccaauuaucuucuua

SEQ ID NO: 247981 - RNA, 21 nt, Artificial Sequence
  Synthetic
uaaaaaccaauuaucuucuua

SEQ ID NO: 247982 - RNA, 22 nt, Artificial Sequence
  Synthetic
uuaaaaaccaauuaucuucuua

SEQ ID NO: 247983 - RNA, 23 nt, Artificial Sequence
  Synthetic
uuuaaaaaccaauuaucuucuua

SEQ ID NO: 247984 - RNA, 24 nt, Artificial Sequence
  Synthetic
cuuuaaaaaccaauuaucuucuua

SEQ ID NO: 247985 - RNA, 18 nt, Artificial Sequence
  Synthetic
aucauugagccguucuua

SEQ ID NO: 247986 - RNA, 19 nt, Artificial Sequence
  Synthetic
caucauugagccguucuua

SEQ ID NO: 247987 - RNA, 20 nt, Artificial Sequence
  Synthetic
ucaucauugagccguucuua

SEQ ID NO: 247988 - RNA, 21 nt, Artificial Sequence
  Synthetic
aucaucauugagccguucuua

SEQ ID NO: 247989 - RNA, 22 nt, Artificial Sequence
  Synthetic
uaucaucauugagccguucuua

SEQ ID NO: 247990 - RNA, 23 nt, Artificial Sequence
  Synthetic
auaucaucauugagccguucuua

SEQ ID NO: 247991 - RNA, 24 nt, Artificial Sequence
  Synthetic
aauaucaucauugagccguucuua

SEQ ID NO: 247992 - RNA, 18 nt, Artificial Sequence
  Synthetic
ccaauccagaauuucuua

SEQ ID NO: 247993 - RNA, 19 nt, Artificial Sequence
  Synthetic
gccaauccagaauuucuua

SEQ ID NO: 247994 - RNA, 20 nt, Artificial Sequence
  Synthetic
ugccaauccagaauuucuua

SEQ ID NO: 247995 - RNA, 21 nt, Artificial Sequence
  Synthetic
uugccaauccagaauuucuua

SEQ ID NO: 247996 - RNA, 22 nt, Artificial Sequence
  Synthetic
uuugccaauccagaauuucuua

SEQ ID NO: 247997 - RNA, 23 nt, Artificial Sequence
  Synthetic
cuuugccaauccagaauuucuua

SEQ ID NO: 247998 - RNA, 24 nt, Artificial Sequence
  Synthetic
acuuugccaauccagaauuucuua

SEQ ID NO: 247999 - RNA, 18 nt, Artificial Sequence
  Synthetic
auagaaauucauuucuua

SEQ ID NO: 248000 - RNA, 19 nt, Artificial Sequence
  Synthetic
gauagaaauucauuucuua

SEQ ID NO: 248001 - RNA, 20 nt, Artificial Sequence
  Synthetic
ugauagaaauucauuucuua

SEQ ID NO: 248002 - RNA, 21 nt, Artificial Sequence
  Synthetic
augauagaaauucauuucuua

SEQ ID NO: 248003 - RNA, 22 nt, Artificial Sequence
  Synthetic
aaugauagaaauucauuucuua

SEQ ID NO: 248004 - RNA, 23 nt, Artificial Sequence
  Synthetic
aaaugauagaaauucauuucuua

SEQ ID NO: 248005 - RNA, 24 nt, Artificial Sequence
  Synthetic
caaaugauagaaauucauuucuua

SEQ ID NO: 248006 - RNA, 18 nt, Artificial Sequence
  Synthetic
caguaugaagauuucuua

SEQ ID NO: 248007 - RNA, 19 nt, Artificial Sequence
  Synthetic
acaguaugaagauuucuua

SEQ ID NO: 248008 - RNA, 20 nt, Artificial Sequence
  Synthetic
aacaguaugaagauuucuua

SEQ ID NO: 248009 - RNA, 21 nt, Artificial Sequence
  Synthetic
aaacaguaugaagauuucuua

SEQ ID NO: 248010 - RNA, 22 nt, Artificial Sequence
  Synthetic
aaaacaguaugaagauuucuua

SEQ ID NO: 248011 - RNA, 23 nt, Artificial Sequence
  Synthetic
gaaaacaguaugaagauuucuua

SEQ ID NO: 248012 - RNA, 24 nt, Artificial Sequence
  Synthetic
ggaaaacaguaugaagauuucuua

SEQ ID NO: 248013 - RNA, 18 nt, Artificial Sequence
  Synthetic
cauuuauauuauuucuua

SEQ ID NO: 248014 - RNA, 19 nt, Artificial Sequence
  Synthetic
ucauuuauauuauuucuua

SEQ ID NO: 248015 - RNA, 20 nt, Artificial Sequence
  Synthetic
uucauuuauauuauuucuua

SEQ ID NO: 248016 - RNA, 21 nt, Artificial Sequence
  Synthetic
uuucauuuauauuauuucuua

SEQ ID NO: 248017 - RNA, 22 nt, Artificial Sequence
  Synthetic
auuucauuuauauuauuucuua

SEQ ID NO: 248018 - RNA, 23 nt, Artificial Sequence
  Synthetic
cauuucauuuauauuauuucuua

SEQ ID NO: 248019 - RNA, 24 nt, Artificial Sequence
  Synthetic
gcauuucauuuauauuauuucuua

SEQ ID NO: 248020 - RNA, 18 nt, Artificial Sequence
  Synthetic
ucuucucuaacuuucuua

SEQ ID NO: 248021 - RNA, 19 nt, Artificial Sequence
  Synthetic
gucuucucuaacuuucuua

SEQ ID NO: 248022 - RNA, 20 nt, Artificial Sequence
  Synthetic
ggucuucucuaacuuucuua

SEQ ID NO: 248023 - RNA, 21 nt, Artificial Sequence
  Synthetic
gggucuucucuaacuuucuua

SEQ ID NO: 248024 - RNA, 22 nt, Artificial Sequence
  Synthetic
ugggucuucucuaacuuucuua

SEQ ID NO: 248025 - RNA, 23 nt, Artificial Sequence
  Synthetic
cugggucuucucuaacuuucuua

SEQ ID NO: 248026 - RNA, 24 nt, Artificial Sequence
  Synthetic
ucugggucuucucuaacuuucuua

SEQ ID NO: 248027 - RNA, 18 nt, Artificial Sequence
  Synthetic
gaagaauccauuuucuua

SEQ ID NO: 248028 - RNA, 19 nt, Artificial Sequence
  Synthetic
agaagaauccauuuucuua

SEQ ID NO: 248029 - RNA, 20 nt, Artificial Sequence
  Synthetic
aagaagaauccauuuucuua

SEQ ID NO: 248030 - RNA, 21 nt, Artificial Sequence
  Synthetic
aaagaagaauccauuuucuua

SEQ ID NO: 248031 - RNA, 22 nt, Artificial Sequence
  Synthetic
aaaagaagaauccauuuucuua

SEQ ID NO: 248032 - RNA, 23 nt, Artificial Sequence
  Synthetic
aaaaagaagaauccauuuucuua

SEQ ID NO: 248033 - RNA, 24 nt, Artificial Sequence
  Synthetic
uaaaaagaagaauccauuuucuua

SEQ ID NO: 248034 - RNA, 18 nt, Artificial Sequence
  Synthetic
guuuaaacuauuuucuua

SEQ ID NO: 248035 - RNA, 19 nt, Artificial Sequence
  Synthetic
uguuuaaacuauuuucuua

SEQ ID NO: 248036 - RNA, 20 nt, Artificial Sequence
  Synthetic
uuguuuaaacuauuuucuua

SEQ ID NO: 248037 - RNA, 21 nt, Artificial Sequence
  Synthetic
auuguuuaaacuauuuucuua

SEQ ID NO: 248038 - RNA, 22 nt, Artificial Sequence
  Synthetic
aauuguuuaaacuauuuucuua

SEQ ID NO: 248039 - RNA, 23 nt, Artificial Sequence
  Synthetic
aaauuguuuaaacuauuuucuua

SEQ ID NO: 248040 - RNA, 24 nt, Artificial Sequence
  Synthetic
caaauuguuuaaacuauuuucuua

SEQ ID NO: 248041 - RNA, 18 nt, Artificial Sequence
  Synthetic
acacguuuucuuuucuua

SEQ ID NO: 248042 - RNA, 19 nt, Artificial Sequence
  Synthetic
aacacguuuucuuuucuua

SEQ ID NO: 248043 - RNA, 20 nt, Artificial Sequence
  Synthetic
uaacacguuuucuuuucuua

SEQ ID NO: 248044 - RNA, 21 nt, Artificial Sequence
  Synthetic
cuaacacguuuucuuuucuua

SEQ ID NO: 248045 - RNA, 22 nt, Artificial Sequence
  Synthetic
gcuaacacguuuucuuuucuua

SEQ ID NO: 248046 - RNA, 23 nt, Artificial Sequence
  Synthetic
agcuaacacguuuucuuuucuua

SEQ ID NO: 248047 - RNA, 24 nt, Artificial Sequence
  Synthetic
cagcuaacacguuuucuuuucuua

SEQ ID NO: 248048 - RNA, 18 nt, Artificial Sequence
  Synthetic
ccauaugcuuuuuucuua

SEQ ID NO: 248049 - RNA, 19 nt, Artificial Sequence
  Synthetic
accauaugcuuuuuucuua

SEQ ID NO: 248050 - RNA, 20 nt, Artificial Sequence
  Synthetic
uaccauaugcuuuuuucuua

SEQ ID NO: 248051 - RNA, 21 nt, Artificial Sequence
  Synthetic
auaccauaugcuuuuuucuua

SEQ ID NO: 248052 - RNA, 22 nt, Artificial Sequence
  Synthetic
gauaccauaugcuuuuuucuua

SEQ ID NO: 248053 - RNA, 23 nt, Artificial Sequence
  Synthetic
ugauaccauaugcuuuuuucuua

SEQ ID NO: 248054 - RNA, 24 nt, Artificial Sequence
  Synthetic
augauaccauaugcuuuuuucuua

SEQ ID NO: 248055 - RNA, 18 nt, Artificial Sequence
  Synthetic
aaagauguuuuuuucuua

SEQ ID NO: 248056 - RNA, 19 nt, Artificial Sequence
  Synthetic
aaaagauguuuuuuucuua

SEQ ID NO: 248057 - RNA, 20 nt, Artificial Sequence
  Synthetic
aaaaagauguuuuuuucuua

SEQ ID NO: 248058 - RNA, 21 nt, Artificial Sequence
  Synthetic
gaaaaagauguuuuuuucuua

SEQ ID NO: 248059 - RNA, 22 nt, Artificial Sequence
  Synthetic
ugaaaaagauguuuuuuucuua

SEQ ID NO: 248060 - RNA, 23 nt, Artificial Sequence
  Synthetic
uugaaaaagauguuuuuuucuua

SEQ ID NO: 248061 - RNA, 24 nt, Artificial Sequence
  Synthetic
guugaaaaagauguuuuuuucuua

SEQ ID NO: 248062 - RNA, 18 nt, Artificial Sequence
  Synthetic
aaaagaagaaaaaaguua

SEQ ID NO: 248063 - RNA, 19 nt, Artificial Sequence
  Synthetic
aaaaagaagaaaaaaguua

SEQ ID NO: 248064 - RNA, 20 nt, Artificial Sequence
  Synthetic
gaaaaagaagaaaaaaguua

SEQ ID NO: 248065 - RNA, 21 nt, Artificial Sequence
  Synthetic
ugaaaaagaagaaaaaaguua

SEQ ID NO: 248066 - RNA, 22 nt, Artificial Sequence
  Synthetic
gugaaaaagaagaaaaaaguua

SEQ ID NO: 248067 - RNA, 23 nt, Artificial Sequence
  Synthetic
ugugaaaaagaagaaaaaaguua

SEQ ID NO: 248068 - RNA, 24 nt, Artificial Sequence
  Synthetic
uugugaaaaagaagaaaaaaguua

SEQ ID NO: 248069 - RNA, 18 nt, Artificial Sequence
  Synthetic
cuaaacauagaaaaguua

SEQ ID NO: 248070 - RNA, 19 nt, Artificial Sequence
  Synthetic
ucuaaacauagaaaaguua

SEQ ID NO: 248071 - RNA, 20 nt, Artificial Sequence
  Synthetic
aucuaaacauagaaaaguua

SEQ ID NO: 248072 - RNA, 21 nt, Artificial Sequence
  Synthetic
caucuaaacauagaaaaguua

SEQ ID NO: 248073 - RNA, 22 nt, Artificial Sequence
  Synthetic
acaucuaaacauagaaaaguua

SEQ ID NO: 248074 - RNA, 23 nt, Artificial Sequence
  Synthetic
cacaucuaaacauagaaaaguua

SEQ ID NO: 248075 - RNA, 24 nt, Artificial Sequence
  Synthetic
ucacaucuaaacauagaaaaguua

SEQ ID NO: 248076 - RNA, 18 nt, Artificial Sequence
  Synthetic
caauucuagacaaaguua

SEQ ID NO: 248077 - RNA, 19 nt, Artificial Sequence
  Synthetic
ucaauucuagacaaaguua

SEQ ID NO: 248078 - RNA, 20 nt, Artificial Sequence
  Synthetic
aucaauucuagacaaaguua

SEQ ID NO: 248079 - RNA, 21 nt, Artificial Sequence
  Synthetic
gaucaauucuagacaaaguua

SEQ ID NO: 248080 - RNA, 22 nt, Artificial Sequence
  Synthetic
ugaucaauucuagacaaaguua

SEQ ID NO: 248081 - RNA, 23 nt, Artificial Sequence
  Synthetic
uugaucaauucuagacaaaguua

SEQ ID NO: 248082 - RNA, 24 nt, Artificial Sequence
  Synthetic
guugaucaauucuagacaaaguua

SEQ ID NO: 248083 - RNA, 18 nt, Artificial Sequence
  Synthetic
ucaaguacgacaaaguua

SEQ ID NO: 248084 - RNA, 19 nt, Artificial Sequence
  Synthetic
uucaaguacgacaaaguua

SEQ ID NO: 248085 - RNA, 20 nt, Artificial Sequence
  Synthetic
auucaaguacgacaaaguua

SEQ ID NO: 248086 - RNA, 21 nt, Artificial Sequence
  Synthetic
cauucaaguacgacaaaguua

SEQ ID NO: 248087 - RNA, 22 nt, Artificial Sequence
  Synthetic
acauucaaguacgacaaaguua

SEQ ID NO: 248088 - RNA, 23 nt, Artificial Sequence
  Synthetic
aacauucaaguacgacaaaguua

SEQ ID NO: 248089 - RNA, 24 nt, Artificial Sequence
  Synthetic
caacauucaaguacgacaaaguua

SEQ ID NO: 248090 - RNA, 18 nt, Artificial Sequence
  Synthetic
caaggcuaaccaaaguua

SEQ ID NO: 248091 - RNA, 19 nt, Artificial Sequence
  Synthetic
ccaaggcuaaccaaaguua

SEQ ID NO: 248092 - RNA, 20 nt, Artificial Sequence
  Synthetic
uccaaggcuaaccaaaguua

SEQ ID NO: 248093 - RNA, 21 nt, Artificial Sequence
  Synthetic
guccaaggcuaaccaaaguua

SEQ ID NO: 248094 - RNA, 22 nt, Artificial Sequence
  Synthetic
uguccaaggcuaaccaaaguua

SEQ ID NO: 248095 - RNA, 23 nt, Artificial Sequence
  Synthetic
auguccaaggcuaaccaaaguua

SEQ ID NO: 248096 - RNA, 24 nt, Artificial Sequence
  Synthetic
uauguccaaggcuaaccaaaguua

SEQ ID NO: 248097 - RNA, 18 nt, Artificial Sequence
  Synthetic
guuauuuuaagaaaguua

SEQ ID NO: 248098 - RNA, 19 nt, Artificial Sequence
  Synthetic
aguuauuuuaagaaaguua

SEQ ID NO: 248099 - RNA, 20 nt, Artificial Sequence
  Synthetic
uaguuauuuuaagaaaguua

SEQ ID NO: 248100 - RNA, 21 nt, Artificial Sequence
  Synthetic
auaguuauuuuaagaaaguua

SEQ ID NO: 248101 - RNA, 22 nt, Artificial Sequence
  Synthetic
uauaguuauuuuaagaaaguua

SEQ ID NO: 248102 - RNA, 23 nt, Artificial Sequence
  Synthetic
cuauaguuauuuuaagaaaguua

SEQ ID NO: 248103 - RNA, 24 nt, Artificial Sequence
  Synthetic
ccuauaguuauuuuaagaaaguua

SEQ ID NO: 248104 - RNA, 18 nt, Artificial Sequence
  Synthetic
uuguuacuuguaaaguua

SEQ ID NO: 248105 - RNA, 19 nt, Artificial Sequence
  Synthetic
guuguuacuuguaaaguua

SEQ ID NO: 248106 - RNA, 20 nt, Artificial Sequence
  Synthetic
aguuguuacuuguaaaguua

SEQ ID NO: 248107 - RNA, 21 nt, Artificial Sequence
  Synthetic
uaguuguuacuuguaaaguua

SEQ ID NO: 248108 - RNA, 22 nt, Artificial Sequence
  Synthetic
auaguuguuacuuguaaaguua

SEQ ID NO: 248109 - RNA, 23 nt, Artificial Sequence
  Synthetic
aauaguuguuacuuguaaaguua

SEQ ID NO: 248110 - RNA, 24 nt, Artificial Sequence
  Synthetic
gaauaguuguuacuuguaaaguua

SEQ ID NO: 248111 - RNA, 18 nt, Artificial Sequence
  Synthetic
aaacaauucaacaaguua

SEQ ID NO: 248112 - RNA, 19 nt, Artificial Sequence
  Synthetic
uaaacaauucaacaaguua

SEQ ID NO: 248113 - RNA, 20 nt, Artificial Sequence
  Synthetic
auaaacaauucaacaaguua

SEQ ID NO: 248114 - RNA, 21 nt, Artificial Sequence
  Synthetic
cauaaacaauucaacaaguua

SEQ ID NO: 248115 - RNA, 22 nt, Artificial Sequence
  Synthetic
acauaaacaauucaacaaguua

SEQ ID NO: 248116 - RNA, 23 nt, Artificial Sequence
  Synthetic
uacauaaacaauucaacaaguua

SEQ ID NO: 248117 - RNA, 24 nt, Artificial Sequence
  Synthetic
uuacauaaacaauucaacaaguua

SEQ ID NO: 248118 - RNA, 18 nt, Artificial Sequence
  Synthetic
cuuuuaucuuccaaguua

SEQ ID NO: 248119 - RNA, 19 nt, Artificial Sequence
  Synthetic
gcuuuuaucuuccaaguua

SEQ ID NO: 248120 - RNA, 20 nt, Artificial Sequence
  Synthetic
ugcuuuuaucuuccaaguua

SEQ ID NO: 248121 - RNA, 21 nt, Artificial Sequence
  Synthetic
uugcuuuuaucuuccaaguua

SEQ ID NO: 248122 - RNA, 22 nt, Artificial Sequence
  Synthetic
cuugcuuuuaucuuccaaguua

SEQ ID NO: 248123 - RNA, 23 nt, Artificial Sequence
  Synthetic
acuugcuuuuaucuuccaaguua

SEQ ID NO: 248124 - RNA, 24 nt, Artificial Sequence
  Synthetic
cacuugcuuuuaucuuccaaguua

SEQ ID NO: 248125 - RNA, 18 nt, Artificial Sequence
  Synthetic
cacggcauaagcaaguua

SEQ ID NO: 248126 - RNA, 19 nt, Artificial Sequence
  Synthetic
acacggcauaagcaaguua

SEQ ID NO: 248127 - RNA, 20 nt, Artificial Sequence
  Synthetic
aacacggcauaagcaaguua

SEQ ID NO: 248128 - RNA, 21 nt, Artificial Sequence
  Synthetic
uaacacggcauaagcaaguua

SEQ ID NO: 248129 - RNA, 22 nt, Artificial Sequence
  Synthetic
uuaacacggcauaagcaaguua

SEQ ID NO: 248130 - RNA, 23 nt, Artificial Sequence
  Synthetic
cuuaacacggcauaagcaaguua

SEQ ID NO: 248131 - RNA, 24 nt, Artificial Sequence
  Synthetic
ucuuaacacggcauaagcaaguua

SEQ ID NO: 248132 - RNA, 18 nt, Artificial Sequence
  Synthetic
uaacgcacacucaaguua

SEQ ID NO: 248133 - RNA, 19 nt, Artificial Sequence
  Synthetic
cuaacgcacacucaaguua

SEQ ID NO: 248134 - RNA, 20 nt, Artificial Sequence
  Synthetic
ucuaacgcacacucaaguua

SEQ ID NO: 248135 - RNA, 21 nt, Artificial Sequence
  Synthetic
uucuaacgcacacucaaguua

SEQ ID NO: 248136 - RNA, 22 nt, Artificial Sequence
  Synthetic
auucuaacgcacacucaaguua

SEQ ID NO: 248137 - RNA, 23 nt, Artificial Sequence
  Synthetic
aauucuaacgcacacucaaguua

SEQ ID NO: 248138 - RNA, 24 nt, Artificial Sequence
  Synthetic
caauucuaacgcacacucaaguua

SEQ ID NO: 248139 - RNA, 18 nt, Artificial Sequence
  Synthetic
cucucagcucucaaguua

SEQ ID NO: 248140 - RNA, 19 nt, Artificial Sequence
  Synthetic
gcucucagcucucaaguua

SEQ ID NO: 248141 - RNA, 20 nt, Artificial Sequence
  Synthetic
ugcucucagcucucaaguua

SEQ ID NO: 248142 - RNA, 21 nt, Artificial Sequence
  Synthetic
augcucucagcucucaaguua

SEQ ID NO: 248143 - RNA, 22 nt, Artificial Sequence
  Synthetic
aaugcucucagcucucaaguua

SEQ ID NO: 248144 - RNA, 23 nt, Artificial Sequence
  Synthetic
aaaugcucucagcucucaaguua

SEQ ID NO: 248145 - RNA, 24 nt, Artificial Sequence
  Synthetic
aaaaugcucucagcucucaaguua

SEQ ID NO: 248146 - RNA, 18 nt, Artificial Sequence
  Synthetic
auuucucuauucaaguua

SEQ ID NO: 248147 - RNA, 19 nt, Artificial Sequence
  Synthetic
uauuucucuauucaaguua

SEQ ID NO: 248148 - RNA, 20 nt, Artificial Sequence
  Synthetic
uuauuucucuauucaaguua

SEQ ID NO: 248149 - RNA, 21 nt, Artificial Sequence
  Synthetic
auuauuucucuauucaaguua

SEQ ID NO: 248150 - RNA, 22 nt, Artificial Sequence
  Synthetic
gauuauuucucuauucaaguua

SEQ ID NO: 248151 - RNA, 23 nt, Artificial Sequence
  Synthetic
ugauuauuucucuauucaaguua

SEQ ID NO: 248152 - RNA, 24 nt, Artificial Sequence
  Synthetic
augauuauuucucuauucaaguua

SEQ ID NO: 248153 - RNA, 18 nt, Artificial Sequence
  Synthetic
uuugagucacagaaguua

SEQ ID NO: 248154 - RNA, 19 nt, Artificial Sequence
  Synthetic
auuugagucacagaaguua

SEQ ID NO: 248155 - RNA, 20 nt, Artificial Sequence
  Synthetic
cauuugagucacagaaguua

SEQ ID NO: 248156 - RNA, 21 nt, Artificial Sequence
  Synthetic
ucauuugagucacagaaguua

SEQ ID NO: 248157 - RNA, 22 nt, Artificial Sequence
  Synthetic
cucauuugagucacagaaguua

SEQ ID NO: 248158 - RNA, 23 nt, Artificial Sequence
  Synthetic
gcucauuugagucacagaaguua

SEQ ID NO: 248159 - RNA, 24 nt, Artificial Sequence
  Synthetic
agcucauuugagucacagaaguua

SEQ ID NO: 248160 - RNA, 18 nt, Artificial Sequence
  Synthetic
cccucagaccagaaguua

SEQ ID NO: 248161 - RNA, 19 nt, Artificial Sequence
  Synthetic
ccccucagaccagaaguua

SEQ ID NO: 248162 - RNA, 20 nt, Artificial Sequence
  Synthetic
cccccucagaccagaaguua

SEQ ID NO: 248163 - RNA, 21 nt, Artificial Sequence
  Synthetic
ucccccucagaccagaaguua

SEQ ID NO: 248164 - RNA, 22 nt, Artificial Sequence
  Synthetic
uucccccucagaccagaaguua

SEQ ID NO: 248165 - RNA, 23 nt, Artificial Sequence
  Synthetic
cuucccccucagaccagaaguua

SEQ ID NO: 248166 - RNA, 24 nt, Artificial Sequence
  Synthetic
ccuucccccucagaccagaaguua

SEQ ID NO: 248167 - RNA, 18 nt, Artificial Sequence
  Synthetic
uguguuagcuggaaguua

SEQ ID NO: 248168 - RNA, 19 nt, Artificial Sequence
  Synthetic
cuguguuagcuggaaguua

SEQ ID NO: 248169 - RNA, 20 nt, Artificial Sequence
  Synthetic
gcuguguuagcuggaaguua

SEQ ID NO: 248170 - RNA, 21 nt, Artificial Sequence
  Synthetic
agcuguguuagcuggaaguua

SEQ ID NO: 248171 - RNA, 22 nt, Artificial Sequence
  Synthetic
cagcuguguuagcuggaaguua

SEQ ID NO: 248172 - RNA, 23 nt, Artificial Sequence
  Synthetic
ccagcuguguuagcuggaaguua

SEQ ID NO: 248173 - RNA, 24 nt, Artificial Sequence
  Synthetic
gccagcuguguuagcuggaaguua

SEQ ID NO: 248174 - RNA, 18 nt, Artificial Sequence
  Synthetic
cagcuggaaaugaaguua

SEQ ID NO: 248175 - RNA, 19 nt, Artificial Sequence
  Synthetic
ccagcuggaaaugaaguua

SEQ ID NO: 248176 - RNA, 20 nt, Artificial Sequence
  Synthetic
uccagcuggaaaugaaguua

SEQ ID NO: 248177 - RNA, 21 nt, Artificial Sequence
  Synthetic
guccagcuggaaaugaaguua

SEQ ID NO: 248178 - RNA, 22 nt, Artificial Sequence
  Synthetic
uguccagcuggaaaugaaguua

SEQ ID NO: 248179 - RNA, 23 nt, Artificial Sequence
  Synthetic
guguccagcuggaaaugaaguua

SEQ ID NO: 248180 - RNA, 24 nt, Artificial Sequence
  Synthetic
aguguccagcuggaaaugaaguua

SEQ ID NO: 248181 - RNA, 18 nt, Artificial Sequence
  Synthetic
acaucaguggauaaguua

SEQ ID NO: 248182 - RNA, 19 nt, Artificial Sequence
  Synthetic
uacaucaguggauaaguua

SEQ ID NO: 248183 - RNA, 20 nt, Artificial Sequence
  Synthetic
cuacaucaguggauaaguua

SEQ ID NO: 248184 - RNA, 21 nt, Artificial Sequence
  Synthetic
ucuacaucaguggauaaguua

SEQ ID NO: 248185 - RNA, 22 nt, Artificial Sequence
  Synthetic
uucuacaucaguggauaaguua

SEQ ID NO: 248186 - RNA, 23 nt, Artificial Sequence
  Synthetic
uuucuacaucaguggauaaguua

SEQ ID NO: 248187 - RNA, 24 nt, Artificial Sequence
  Synthetic
guuucuacaucaguggauaaguua

SEQ ID NO: 248188 - RNA, 18 nt, Artificial Sequence
  Synthetic
uugcaauaaaguaaguua

SEQ ID NO: 248189 - RNA, 19 nt, Artificial Sequence
  Synthetic
cuugcaauaaaguaaguua

SEQ ID NO: 248190 - RNA, 20 nt, Artificial Sequence
  Synthetic
ucuugcaauaaaguaaguua

SEQ ID NO: 248191 - RNA, 21 nt, Artificial Sequence
  Synthetic
uucuugcaauaaaguaaguua

SEQ ID NO: 248192 - RNA, 22 nt, Artificial Sequence
  Synthetic
auucuugcaauaaaguaaguua

SEQ ID NO: 248193 - RNA, 23 nt, Artificial Sequence
  Synthetic
uauucuugcaauaaaguaaguua

SEQ ID NO: 248194 - RNA, 24 nt, Artificial Sequence
  Synthetic
guauucuugcaauaaaguaaguua

SEQ ID NO: 248195 - RNA, 18 nt, Artificial Sequence
  Synthetic
uauaugaaucuuaaguua

SEQ ID NO: 248196 - RNA, 19 nt, Artificial Sequence
  Synthetic
auauaugaaucuuaaguua

SEQ ID NO: 248197 - RNA, 20 nt, Artificial Sequence
  Synthetic
gauauaugaaucuuaaguua

SEQ ID NO: 248198 - RNA, 21 nt, Artificial Sequence
  Synthetic
ggauauaugaaucuuaaguua

SEQ ID NO: 248199 - RNA, 22 nt, Artificial Sequence
  Synthetic
uggauauaugaaucuuaaguua

SEQ ID NO: 248200 - RNA, 23 nt, Artificial Sequence
  Synthetic
cuggauauaugaaucuuaaguua

SEQ ID NO: 248201 - RNA, 24 nt, Artificial Sequence
  Synthetic
gcuggauauaugaaucuuaaguua

SEQ ID NO: 248202 - RNA, 18 nt, Artificial Sequence
  Synthetic
auauccuucguuaaguua

SEQ ID NO: 248203 - RNA, 19 nt, Artificial Sequence
  Synthetic
aauauccuucguuaaguua

SEQ ID NO: 248204 - RNA, 20 nt, Artificial Sequence
  Synthetic
aaauauccuucguuaaguua

SEQ ID NO: 248205 - RNA, 21 nt, Artificial Sequence
  Synthetic
aaaauauccuucguuaaguua

SEQ ID NO: 248206 - RNA, 22 nt, Artificial Sequence
  Synthetic
aaaaauauccuucguuaaguua

SEQ ID NO: 248207 - RNA, 23 nt, Artificial Sequence
  Synthetic
caaaaauauccuucguuaaguua

SEQ ID NO: 248208 - RNA, 24 nt, Artificial Sequence
  Synthetic
gcaaaaauauccuucguuaaguua

SEQ ID NO: 248209 - RNA, 18 nt, Artificial Sequence
  Synthetic
auuuggcuauuuaaguua

SEQ ID NO: 248210 - RNA, 19 nt, Artificial Sequence
  Synthetic
aauuuggcuauuuaaguua

SEQ ID NO: 248211 - RNA, 20 nt, Artificial Sequence
  Synthetic
caauuuggcuauuuaaguua

SEQ ID NO: 248212 - RNA, 21 nt, Artificial Sequence
  Synthetic
acaauuuggcuauuuaaguua

SEQ ID NO: 248213 - RNA, 22 nt, Artificial Sequence
  Synthetic
aacaauuuggcuauuuaaguua

SEQ ID NO: 248214 - RNA, 23 nt, Artificial Sequence
  Synthetic
caacaauuuggcuauuuaaguua

SEQ ID NO: 248215 - RNA, 24 nt, Artificial Sequence
  Synthetic
acaacaauuuggcuauuuaaguua

SEQ ID NO: 248216 - RNA, 18 nt, Artificial Sequence
  Synthetic
gaaauauuaaaacaguua

SEQ ID NO: 248217 - RNA, 19 nt, Artificial Sequence
  Synthetic
ugaaauauuaaaacaguua

SEQ ID NO: 248218 - RNA, 20 nt, Artificial Sequence
  Synthetic
augaaauauuaaaacaguua

SEQ ID NO: 248219 - RNA, 21 nt, Artificial Sequence
  Synthetic
aaugaaauauuaaaacaguua

SEQ ID NO: 248220 - RNA, 22 nt, Artificial Sequence
  Synthetic
aaaugaaauauuaaaacaguua

SEQ ID NO: 248221 - RNA, 23 nt, Artificial Sequence
  Synthetic
gaaaugaaauauuaaaacaguua

SEQ ID NO: 248222 - RNA, 24 nt, Artificial Sequence
  Synthetic
ugaaaugaaauauuaaaacaguua

SEQ ID NO: 248223 - RNA, 18 nt, Artificial Sequence
  Synthetic
uauucaaaaagacaguua

SEQ ID NO: 248224 - RNA, 19 nt, Artificial Sequence
  Synthetic
uuauucaaaaagacaguua

SEQ ID NO: 248225 - RNA, 20 nt, Artificial Sequence
  Synthetic
guuauucaaaaagacaguua

SEQ ID NO: 248226 - RNA, 21 nt, Artificial Sequence
  Synthetic
uguuauucaaaaagacaguua

SEQ ID NO: 248227 - RNA, 22 nt, Artificial Sequence
  Synthetic
auguuauucaaaaagacaguua

SEQ ID NO: 248228 - RNA, 23 nt, Artificial Sequence
  Synthetic
cauguuauucaaaaagacaguua

SEQ ID NO: 248229 - RNA, 24 nt, Artificial Sequence
  Synthetic
ccauguuauucaaaaagacaguua

SEQ ID NO: 248230 - RNA, 18 nt, Artificial Sequence
  Synthetic
aacacuggaugacaguua

SEQ ID NO: 248231 - RNA, 19 nt, Artificial Sequence
  Synthetic
aaacacuggaugacaguua

SEQ ID NO: 248232 - RNA, 20 nt, Artificial Sequence
  Synthetic
aaaacacuggaugacaguua

SEQ ID NO: 248233 - RNA, 21 nt, Artificial Sequence
  Synthetic
aaaaacacuggaugacaguua

SEQ ID NO: 248234 - RNA, 22 nt, Artificial Sequence
  Synthetic
gaaaaacacuggaugacaguua

SEQ ID NO: 248235 - RNA, 23 nt, Artificial Sequence
  Synthetic
ugaaaaacacuggaugacaguua

SEQ ID NO: 248236 - RNA, 24 nt, Artificial Sequence
  Synthetic
cugaaaaacacuggaugacaguua

SEQ ID NO: 248237 - RNA, 18 nt, Artificial Sequence
  Synthetic
agauagcuccuacaguua

SEQ ID NO: 248238 - RNA, 19 nt, Artificial Sequence
  Synthetic
gagauagcuccuacaguua

SEQ ID NO: 248239 - RNA, 20 nt, Artificial Sequence
  Synthetic
ggagauagcuccuacaguua

SEQ ID NO: 248240 - RNA, 21 nt, Artificial Sequence
  Synthetic
aggagauagcuccuacaguua

SEQ ID NO: 248241 - RNA, 22 nt, Artificial Sequence
  Synthetic
gaggagauagcuccuacaguua

SEQ ID NO: 248242 - RNA, 23 nt, Artificial Sequence
  Synthetic
agaggagauagcuccuacaguua

SEQ ID NO: 248243 - RNA, 24 nt, Artificial Sequence
  Synthetic
uagaggagauagcuccuacaguua

SEQ ID NO: 248244 - RNA, 18 nt, Artificial Sequence
  Synthetic
guuuacuucuuacaguua

SEQ ID NO: 248245 - RNA, 19 nt, Artificial Sequence
  Synthetic
aguuuacuucuuacaguua

SEQ ID NO: 248246 - RNA, 20 nt, Artificial Sequence
  Synthetic
gaguuuacuucuuacaguua

SEQ ID NO: 248247 - RNA, 21 nt, Artificial Sequence
  Synthetic
ggaguuuacuucuuacaguua

SEQ ID NO: 248248 - RNA, 22 nt, Artificial Sequence
  Synthetic
aggaguuuacuucuuacaguua

SEQ ID NO: 248249 - RNA, 23 nt, Artificial Sequence
  Synthetic
aaggaguuuacuucuuacaguua

SEQ ID NO: 248250 - RNA, 24 nt, Artificial Sequence
  Synthetic
aaaggaguuuacuucuuacaguua

SEQ ID NO: 248251 - RNA, 18 nt, Artificial Sequence
  Synthetic
caauaauuaagccaguua

SEQ ID NO: 248252 - RNA, 19 nt, Artificial Sequence
  Synthetic
ccaauaauuaagccaguua

SEQ ID NO: 248253 - RNA, 20 nt, Artificial Sequence
  Synthetic
gccaauaauuaagccaguua

SEQ ID NO: 248254 - RNA, 21 nt, Artificial Sequence
  Synthetic
agccaauaauuaagccaguua

SEQ ID NO: 248255 - RNA, 22 nt, Artificial Sequence
  Synthetic
aagccaauaauuaagccaguua

SEQ ID NO: 248256 - RNA, 23 nt, Artificial Sequence
  Synthetic
gaagccaauaauuaagccaguua

SEQ ID NO: 248257 - RNA, 24 nt, Artificial Sequence
  Synthetic
agaagccaauaauuaagccaguua

SEQ ID NO: 248258 - RNA, 18 nt, Artificial Sequence
  Synthetic
ugagagauucagcaguua

SEQ ID NO: 248259 - RNA, 19 nt, Artificial Sequence
  Synthetic
cugagagauucagcaguua

SEQ ID NO: 248260 - RNA, 20 nt, Artificial Sequence
  Synthetic
gcugagagauucagcaguua

SEQ ID NO: 248261 - RNA, 21 nt, Artificial Sequence
  Synthetic
ggcugagagauucagcaguua

SEQ ID NO: 248262 - RNA, 22 nt, Artificial Sequence
  Synthetic
aggcugagagauucagcaguua

SEQ ID NO: 248263 - RNA, 23 nt, Artificial Sequence
  Synthetic
caggcugagagauucagcaguua

SEQ ID NO: 248264 - RNA, 24 nt, Artificial Sequence
  Synthetic
gcaggcugagagauucagcaguua

SEQ ID NO: 248265 - RNA, 18 nt, Artificial Sequence
  Synthetic
aaauacacuuggcaguua

SEQ ID NO: 248266 - RNA, 19 nt, Artificial Sequence
  Synthetic
gaaauacacuuggcaguua

SEQ ID NO: 248267 - RNA, 20 nt, Artificial Sequence
  Synthetic
agaaauacacuuggcaguua

SEQ ID NO: 248268 - RNA, 21 nt, Artificial Sequence
  Synthetic
gagaaauacacuuggcaguua

SEQ ID NO: 248269 - RNA, 22 nt, Artificial Sequence
  Synthetic
agagaaauacacuuggcaguua

SEQ ID NO: 248270 - RNA, 23 nt, Artificial Sequence
  Synthetic
uagagaaauacacuuggcaguua

SEQ ID NO: 248271 - RNA, 24 nt, Artificial Sequence
  Synthetic
auagagaaauacacuuggcaguua

SEQ ID NO: 248272 - RNA, 18 nt, Artificial Sequence
  Synthetic
augaauauuuggcaguua

SEQ ID NO: 248273 - RNA, 19 nt, Artificial Sequence
  Synthetic
aaugaauauuuggcaguua

SEQ ID NO: 248274 - RNA, 20 nt, Artificial Sequence
  Synthetic
caaugaauauuuggcaguua

SEQ ID NO: 248275 - RNA, 21 nt, Artificial Sequence
  Synthetic
acaaugaauauuuggcaguua

SEQ ID NO: 248276 - RNA, 22 nt, Artificial Sequence
  Synthetic
cacaaugaauauuuggcaguua

SEQ ID NO: 248277 - RNA, 23 nt, Artificial Sequence
  Synthetic
acacaaugaauauuuggcaguua

SEQ ID NO: 248278 - RNA, 24 nt, Artificial Sequence
  Synthetic
gacacaaugaauauuuggcaguua

SEQ ID NO: 248279 - RNA, 18 nt, Artificial Sequence
  Synthetic
caucagauacugcaguua

SEQ ID NO: 248280 - RNA, 19 nt, Artificial Sequence
  Synthetic
ucaucagauacugcaguua

SEQ ID NO: 248281 - RNA, 20 nt, Artificial Sequence
  Synthetic
gucaucagauacugcaguua

SEQ ID NO: 248282 - RNA, 21 nt, Artificial Sequence
  Synthetic
ugucaucagauacugcaguua

SEQ ID NO: 248283 - RNA, 22 nt, Artificial Sequence
  Synthetic
uugucaucagauacugcaguua

SEQ ID NO: 248284 - RNA, 23 nt, Artificial Sequence
  Synthetic
guugucaucagauacugcaguua

SEQ ID NO: 248285 - RNA, 24 nt, Artificial Sequence
  Synthetic
gguugucaucagauacugcaguua

SEQ ID NO: 248286 - RNA, 18 nt, Artificial Sequence
  Synthetic
gagauuagcaaucaguua

SEQ ID NO: 248287 - RNA, 19 nt, Artificial Sequence
  Synthetic
agagauuagcaaucaguua

SEQ ID NO: 248288 - RNA, 20 nt, Artificial Sequence
  Synthetic
aagagauuagcaaucaguua

SEQ ID NO: 248289 - RNA, 21 nt, Artificial Sequence
  Synthetic
aaagagauuagcaaucaguua

SEQ ID NO: 248290 - RNA, 22 nt, Artificial Sequence
  Synthetic
aaaagagauuagcaaucaguua

SEQ ID NO: 248291 - RNA, 23 nt, Artificial Sequence
  Synthetic
caaaagagauuagcaaucaguua

SEQ ID NO: 248292 - RNA, 24 nt, Artificial Sequence
  Synthetic
ucaaaagagauuagcaaucaguua

SEQ ID NO: 248293 - RNA, 18 nt, Artificial Sequence
  Synthetic
gucgcaauaucucaguua

SEQ ID NO: 248294 - RNA, 19 nt, Artificial Sequence
  Synthetic
ugucgcaauaucucaguua

SEQ ID NO: 248295 - RNA, 20 nt, Artificial Sequence
  Synthetic
uugucgcaauaucucaguua

SEQ ID NO: 248296 - RNA, 21 nt, Artificial Sequence
  Synthetic
auugucgcaauaucucaguua

SEQ ID NO: 248297 - RNA, 22 nt, Artificial Sequence
  Synthetic
aauugucgcaauaucucaguua

SEQ ID NO: 248298 - RNA, 23 nt, Artificial Sequence
  Synthetic
uaauugucgcaauaucucaguua

SEQ ID NO: 248299 - RNA, 24 nt, Artificial Sequence
  Synthetic
uuaauugucgcaauaucucaguua

SEQ ID NO: 248300 - RNA, 18 nt, Artificial Sequence
  Synthetic
uacauuuggagucaguua

SEQ ID NO: 248301 - RNA, 19 nt, Artificial Sequence
  Synthetic
cuacauuuggagucaguua

SEQ ID NO: 248302 - RNA, 20 nt, Artificial Sequence
  Synthetic
gcuacauuuggagucaguua

SEQ ID NO: 248303 - RNA, 21 nt, Artificial Sequence
  Synthetic
ggcuacauuuggagucaguua

SEQ ID NO: 248304 - RNA, 22 nt, Artificial Sequence
  Synthetic
aggcuacauuuggagucaguua

SEQ ID NO: 248305 - RNA, 23 nt, Artificial Sequence
  Synthetic
gaggcuacauuuggagucaguua

SEQ ID NO: 248306 - RNA, 24 nt, Artificial Sequence
  Synthetic
ggaggcuacauuuggagucaguua

SEQ ID NO: 248307 - RNA, 18 nt, Artificial Sequence
  Synthetic
gagugguggggucaguua

SEQ ID NO: 248308 - RNA, 19 nt, Artificial Sequence
  Synthetic
ggagugguggggucaguua

SEQ ID NO: 248309 - RNA, 20 nt, Artificial Sequence
  Synthetic
uggagugguggggucaguua

SEQ ID NO: 248310 - RNA, 21 nt, Artificial Sequence
  Synthetic
guggagugguggggucaguua

SEQ ID NO: 248311 - RNA, 22 nt, Artificial Sequence
  Synthetic
gguggagugguggggucaguua

SEQ ID NO: 248312 - RNA, 23 nt, Artificial Sequence
  Synthetic
ggguggagugguggggucaguua

SEQ ID NO: 248313 - RNA, 24 nt, Artificial Sequence
  Synthetic
aggguggagugguggggucaguua

SEQ ID NO: 248314 - RNA, 18 nt, Artificial Sequence
  Synthetic
acuacaaaguuucaguua

SEQ ID NO: 248315 - RNA, 19 nt, Artificial Sequence
  Synthetic
gacuacaaaguuucaguua

SEQ ID NO: 248316 - RNA, 20 nt, Artificial Sequence
  Synthetic
agacuacaaaguuucaguua

SEQ ID NO: 248317 - RNA, 21 nt, Artificial Sequence
  Synthetic
aagacuacaaaguuucaguua

SEQ ID NO: 248318 - RNA, 22 nt, Artificial Sequence
  Synthetic
aaagacuacaaaguuucaguua

SEQ ID NO: 248319 - RNA, 23 nt, Artificial Sequence
  Synthetic
uaaagacuacaaaguuucaguua

SEQ ID NO: 248320 - RNA, 24 nt, Artificial Sequence
  Synthetic
uuaaagacuacaaaguuucaguua

SEQ ID NO: 248321 - RNA, 18 nt, Artificial Sequence
  Synthetic
gccucauaaaaagaguua

SEQ ID NO: 248322 - RNA, 19 nt, Artificial Sequence
  Synthetic
ggccucauaaaaagaguua

SEQ ID NO: 248323 - RNA, 20 nt, Artificial Sequence
  Synthetic
uggccucauaaaaagaguua

SEQ ID NO: 248324 - RNA, 21 nt, Artificial Sequence
  Synthetic
cuggccucauaaaaagaguua

SEQ ID NO: 248325 - RNA, 22 nt, Artificial Sequence
  Synthetic
gcuggccucauaaaaagaguua

SEQ ID NO: 248326 - RNA, 23 nt, Artificial Sequence
  Synthetic
ugcuggccucauaaaaagaguua

SEQ ID NO: 248327 - RNA, 24 nt, Artificial Sequence
  Synthetic
cugcuggccucauaaaaagaguua

SEQ ID NO: 248328 - RNA, 18 nt, Artificial Sequence
  Synthetic
uucagaaauaaagaguua

SEQ ID NO: 248329 - RNA, 19 nt, Artificial Sequence
  Synthetic
uuucagaaauaaagaguua

SEQ ID NO: 248330 - RNA, 20 nt, Artificial Sequence
  Synthetic
uuuucagaaauaaagaguua

SEQ ID NO: 248331 - RNA, 21 nt, Artificial Sequence
  Synthetic
auuuucagaaauaaagaguua

SEQ ID NO: 248332 - RNA, 22 nt, Artificial Sequence
  Synthetic
uauuuucagaaauaaagaguua

SEQ ID NO: 248333 - RNA, 23 nt, Artificial Sequence
  Synthetic
cuauuuucagaaauaaagaguua

SEQ ID NO: 248334 - RNA, 24 nt, Artificial Sequence
  Synthetic
ccuauuuucagaaauaaagaguua

SEQ ID NO: 248335 - RNA, 18 nt, Artificial Sequence
  Synthetic
gaauuucaggaagaguua

SEQ ID NO: 248336 - RNA, 19 nt, Artificial Sequence
  Synthetic
ugaauuucaggaagaguua

SEQ ID NO: 248337 - RNA, 20 nt, Artificial Sequence
  Synthetic
uugaauuucaggaagaguua

SEQ ID NO: 248338 - RNA, 21 nt, Artificial Sequence
  Synthetic
auugaauuucaggaagaguua

SEQ ID NO: 248339 - RNA, 22 nt, Artificial Sequence
  Synthetic
gauugaauuucaggaagaguua

SEQ ID NO: 248340 - RNA, 23 nt, Artificial Sequence
  Synthetic
cgauugaauuucaggaagaguua

SEQ ID NO: 248341 - RNA, 24 nt, Artificial Sequence
  Synthetic
ucgauugaauuucaggaagaguua

SEQ ID NO: 248342 - RNA, 18 nt, Artificial Sequence
  Synthetic
uuauucaaggcagaguua

SEQ ID NO: 248343 - RNA, 19 nt, Artificial Sequence
  Synthetic
auuauucaaggcagaguua

SEQ ID NO: 248344 - RNA, 20 nt, Artificial Sequence
  Synthetic
aauuauucaaggcagaguua

SEQ ID NO: 248345 - RNA, 21 nt, Artificial Sequence
  Synthetic
aaauuauucaaggcagaguua

SEQ ID NO: 248346 - RNA, 22 nt, Artificial Sequence
  Synthetic
aaaauuauucaaggcagaguua

SEQ ID NO: 248347 - RNA, 23 nt, Artificial Sequence
  Synthetic
uaaaauuauucaaggcagaguua

SEQ ID NO: 248348 - RNA, 24 nt, Artificial Sequence
  Synthetic
auaaaauuauucaaggcagaguua

SEQ ID NO: 248349 - RNA, 18 nt, Artificial Sequence
  Synthetic
acuauaaccucagaguua

SEQ ID NO: 248350 - RNA, 19 nt, Artificial Sequence
  Synthetic
uacuauaaccucagaguua

SEQ ID NO: 248351 - RNA, 20 nt, Artificial Sequence
  Synthetic
auacuauaaccucagaguua

SEQ ID NO: 248352 - RNA, 21 nt, Artificial Sequence
  Synthetic
aauacuauaaccucagaguua

SEQ ID NO: 248353 - RNA, 22 nt, Artificial Sequence
  Synthetic
uaauacuauaaccucagaguua

SEQ ID NO: 248354 - RNA, 23 nt, Artificial Sequence
  Synthetic
uuaauacuauaaccucagaguua

SEQ ID NO: 248355 - RNA, 24 nt, Artificial Sequence
  Synthetic
cuuaauacuauaaccucagaguua

SEQ ID NO: 248356 - RNA, 18 nt, Artificial Sequence
  Synthetic
aggaggcauugagaguua

SEQ ID NO: 248357 - RNA, 19 nt, Artificial Sequence
  Synthetic
gaggaggcauugagaguua

SEQ ID NO: 248358 - RNA, 20 nt, Artificial Sequence
  Synthetic
agaggaggcauugagaguua

SEQ ID NO: 248359 - RNA, 21 nt, Artificial Sequence
  Synthetic
cagaggaggcauugagaguua

SEQ ID NO: 248360 - RNA, 22 nt, Artificial Sequence
  Synthetic
acagaggaggcauugagaguua

SEQ ID NO: 248361 - RNA, 23 nt, Artificial Sequence
  Synthetic
uacagaggaggcauugagaguua

SEQ ID NO: 248362 - RNA, 24 nt, Artificial Sequence
  Synthetic
cuacagaggaggcauugagaguua

SEQ ID NO: 248363 - RNA, 18 nt, Artificial Sequence
  Synthetic
ggggguucauucgaguua

SEQ ID NO: 248364 - RNA, 19 nt, Artificial Sequence
  Synthetic
uggggguucauucgaguua

SEQ ID NO: 248365 - RNA, 20 nt, Artificial Sequence
  Synthetic
guggggguucauucgaguua

SEQ ID NO: 248366 - RNA, 21 nt, Artificial Sequence
  Synthetic
aguggggguucauucgaguua

SEQ ID NO: 248367 - RNA, 22 nt, Artificial Sequence
  Synthetic
gaguggggguucauucgaguua

SEQ ID NO: 248368 - RNA, 23 nt, Artificial Sequence
  Synthetic
ggaguggggguucauucgaguua

SEQ ID NO: 248369 - RNA, 24 nt, Artificial Sequence
  Synthetic
aggaguggggguucauucgaguua

SEQ ID NO: 248370 - RNA, 18 nt, Artificial Sequence
  Synthetic
gcuccuucuaaggaguua

SEQ ID NO: 248371 - RNA, 19 nt, Artificial Sequence
  Synthetic
agcuccuucuaaggaguua

SEQ ID NO: 248372 - RNA, 20 nt, Artificial Sequence
  Synthetic
gagcuccuucuaaggaguua

SEQ ID NO: 248373 - RNA, 21 nt, Artificial Sequence
  Synthetic
agagcuccuucuaaggaguua

SEQ ID NO: 248374 - RNA, 22 nt, Artificial Sequence
  Synthetic
gagagcuccuucuaaggaguua

SEQ ID NO: 248375 - RNA, 23 nt, Artificial Sequence
  Synthetic
agagagcuccuucuaaggaguua

SEQ ID NO: 248376 - RNA, 24 nt, Artificial Sequence
  Synthetic
cagagagcuccuucuaaggaguua

SEQ ID NO: 248377 - RNA, 18 nt, Artificial Sequence
  Synthetic
cugggaaaguaggaguua

SEQ ID NO: 248378 - RNA, 19 nt, Artificial Sequence
  Synthetic
ccugggaaaguaggaguua

SEQ ID NO: 248379 - RNA, 20 nt, Artificial Sequence
  Synthetic
gccugggaaaguaggaguua

SEQ ID NO: 248380 - RNA, 21 nt, Artificial Sequence
  Synthetic
ugccugggaaaguaggaguua

SEQ ID NO: 248381 - RNA, 22 nt, Artificial Sequence
  Synthetic
gugccugggaaaguaggaguua

SEQ ID NO: 248382 - RNA, 23 nt, Artificial Sequence
  Synthetic
ugugccugggaaaguaggaguua

SEQ ID NO: 248383 - RNA, 24 nt, Artificial Sequence
  Synthetic
augugccugggaaaguaggaguua

SEQ ID NO: 248384 - RNA, 18 nt, Artificial Sequence
  Synthetic
ugaaugagaugggaguua

SEQ ID NO: 248385 - RNA, 19 nt, Artificial Sequence
  Synthetic
cugaaugagaugggaguua

SEQ ID NO: 248386 - RNA, 20 nt, Artificial Sequence
  Synthetic
ucugaaugagaugggaguua

SEQ ID NO: 248387 - RNA, 21 nt, Artificial Sequence
  Synthetic
aucugaaugagaugggaguua

SEQ ID NO: 248388 - RNA, 22 nt, Artificial Sequence
  Synthetic
aaucugaaugagaugggaguua

SEQ ID NO: 248389 - RNA, 23 nt, Artificial Sequence
  Synthetic
uaaucugaaugagaugggaguua

SEQ ID NO: 248390 - RNA, 24 nt, Artificial Sequence
  Synthetic
uuaaucugaaugagaugggaguua

SEQ ID NO: 248391 - RNA, 18 nt, Artificial Sequence
  Synthetic
aagccuguauuggaguua

SEQ ID NO: 248392 - RNA, 19 nt, Artificial Sequence
  Synthetic
gaagccuguauuggaguua

SEQ ID NO: 248393 - RNA, 20 nt, Artificial Sequence
  Synthetic
agaagccuguauuggaguua

SEQ ID NO: 248394 - RNA, 21 nt, Artificial Sequence
  Synthetic
gagaagccuguauuggaguua

SEQ ID NO: 248395 - RNA, 22 nt, Artificial Sequence
  Synthetic
ggagaagccuguauuggaguua

SEQ ID NO: 248396 - RNA, 23 nt, Artificial Sequence
  Synthetic
aggagaagccuguauuggaguua

SEQ ID NO: 248397 - RNA, 24 nt, Artificial Sequence
  Synthetic
caggagaagccuguauuggaguua

SEQ ID NO: 248398 - RNA, 18 nt, Artificial Sequence
  Synthetic
gccucauaaaaugaguua

SEQ ID NO: 248399 - RNA, 19 nt, Artificial Sequence
  Synthetic
ggccucauaaaaugaguua

SEQ ID NO: 248400 - RNA, 20 nt, Artificial Sequence
  Synthetic
uggccucauaaaaugaguua

SEQ ID NO: 248401 - RNA, 21 nt, Artificial Sequence
  Synthetic
cuggccucauaaaaugaguua

SEQ ID NO: 248402 - RNA, 22 nt, Artificial Sequence
  Synthetic
gcuggccucauaaaaugaguua

SEQ ID NO: 248403 - RNA, 23 nt, Artificial Sequence
  Synthetic
ugcuggccucauaaaaugaguua

SEQ ID NO: 248404 - RNA, 24 nt, Artificial Sequence
  Synthetic
augcuggccucauaaaaugaguua

SEQ ID NO: 248405 - RNA, 18 nt, Artificial Sequence
  Synthetic
aagugcugagaugaguua

SEQ ID NO: 248406 - RNA, 19 nt, Artificial Sequence
  Synthetic
uaagugcugagaugaguua

SEQ ID NO: 248407 - RNA, 20 nt, Artificial Sequence
  Synthetic
cuaagugcugagaugaguua

SEQ ID NO: 248408 - RNA, 21 nt, Artificial Sequence
  Synthetic
ucuaagugcugagaugaguua

SEQ ID NO: 248409 - RNA, 22 nt, Artificial Sequence
  Synthetic
cucuaagugcugagaugaguua

SEQ ID NO: 248410 - RNA, 23 nt, Artificial Sequence
  Synthetic
ccucuaagugcugagaugaguua

SEQ ID NO: 248411 - RNA, 24 nt, Artificial Sequence
  Synthetic
gccucuaagugcugagaugaguua

SEQ ID NO: 248412 - RNA, 18 nt, Artificial Sequence
  Synthetic
uacaaaggaauugaguua

SEQ ID NO: 248413 - RNA, 19 nt, Artificial Sequence
  Synthetic
cuacaaaggaauugaguua

SEQ ID NO: 248414 - RNA, 20 nt, Artificial Sequence
  Synthetic
gcuacaaaggaauugaguua

SEQ ID NO: 248415 - RNA, 21 nt, Artificial Sequence
  Synthetic
agcuacaaaggaauugaguua

SEQ ID NO: 248416 - RNA, 22 nt, Artificial Sequence
  Synthetic
cagcuacaaaggaauugaguua

SEQ ID NO: 248417 - RNA, 23 nt, Artificial Sequence
  Synthetic
gcagcuacaaaggaauugaguua

SEQ ID NO: 248418 - RNA, 24 nt, Artificial Sequence
  Synthetic
ugcagcuacaaaggaauugaguua

SEQ ID NO: 248419 - RNA, 18 nt, Artificial Sequence
  Synthetic
auuauauuguuugaguua

SEQ ID NO: 248420 - RNA, 19 nt, Artificial Sequence
  Synthetic
gauuauauuguuugaguua

SEQ ID NO: 248421 - RNA, 20 nt, Artificial Sequence
  Synthetic
ugauuauauuguuugaguua

SEQ ID NO: 248422 - RNA, 21 nt, Artificial Sequence
  Synthetic
augauuauauuguuugaguua

SEQ ID NO: 248423 - RNA, 22 nt, Artificial Sequence
  Synthetic
gaugauuauauuguuugaguua

SEQ ID NO: 248424 - RNA, 23 nt, Artificial Sequence
  Synthetic
agaugauuauauuguuugaguua

SEQ ID NO: 248425 - RNA, 24 nt, Artificial Sequence
  Synthetic
gagaugauuauauuguuugaguua

SEQ ID NO: 248426 - RNA, 18 nt, Artificial Sequence
  Synthetic
uggacuuaauaauaguua

SEQ ID NO: 248427 - RNA, 19 nt, Artificial Sequence
  Synthetic
auggacuuaauaauaguua

SEQ ID NO: 248428 - RNA, 20 nt, Artificial Sequence
  Synthetic
aauggacuuaauaauaguua

SEQ ID NO: 248429 - RNA, 21 nt, Artificial Sequence
  Synthetic
aaauggacuuaauaauaguua

SEQ ID NO: 248430 - RNA, 22 nt, Artificial Sequence
  Synthetic
caaauggacuuaauaauaguua

SEQ ID NO: 248431 - RNA, 23 nt, Artificial Sequence
  Synthetic
ccaaauggacuuaauaauaguua

SEQ ID NO: 248432 - RNA, 24 nt, Artificial Sequence
  Synthetic
accaaauggacuuaauaauaguua

SEQ ID NO: 248433 - RNA, 18 nt, Artificial Sequence
  Synthetic
auacucaguggauaguua

SEQ ID NO: 248434 - RNA, 19 nt, Artificial Sequence
  Synthetic
cauacucaguggauaguua

SEQ ID NO: 248435 - RNA, 20 nt, Artificial Sequence
  Synthetic
acauacucaguggauaguua

SEQ ID NO: 248436 - RNA, 21 nt, Artificial Sequence
  Synthetic
aacauacucaguggauaguua

SEQ ID NO: 248437 - RNA, 22 nt, Artificial Sequence
  Synthetic
aaacauacucaguggauaguua

SEQ ID NO: 248438 - RNA, 23 nt, Artificial Sequence
  Synthetic
uaaacauacucaguggauaguua

SEQ ID NO: 248439 - RNA, 24 nt, Artificial Sequence
  Synthetic
uuaaacauacucaguggauaguua

SEQ ID NO: 248440 - RNA, 18 nt, Artificial Sequence
  Synthetic
gcacaaauaauauaguua

SEQ ID NO: 248441 - RNA, 19 nt, Artificial Sequence
  Synthetic
ggcacaaauaauauaguua

SEQ ID NO: 248442 - RNA, 20 nt, Artificial Sequence
  Synthetic
gggcacaaauaauauaguua

SEQ ID NO: 248443 - RNA, 21 nt, Artificial Sequence
  Synthetic
agggcacaaauaauauaguua

SEQ ID NO: 248444 - RNA, 22 nt, Artificial Sequence
  Synthetic
cagggcacaaauaauauaguua

SEQ ID NO: 248445 - RNA, 23 nt, Artificial Sequence
  Synthetic
acagggcacaaauaauauaguua

SEQ ID NO: 248446 - RNA, 24 nt, Artificial Sequence
  Synthetic
aacagggcacaaauaauauaguua

SEQ ID NO: 248447 - RNA, 18 nt, Artificial Sequence
  Synthetic
uuucuguauuaguaguua

SEQ ID NO: 248448 - RNA, 19 nt, Artificial Sequence
  Synthetic
uuuucuguauuaguaguua

SEQ ID NO: 248449 - RNA, 20 nt, Artificial Sequence
  Synthetic
auuuucuguauuaguaguua

SEQ ID NO: 248450 - RNA, 21 nt, Artificial Sequence
  Synthetic
uauuuucuguauuaguaguua

SEQ ID NO: 248451 - RNA, 22 nt, Artificial Sequence
  Synthetic
uuauuuucuguauuaguaguua

SEQ ID NO: 248452 - RNA, 23 nt, Artificial Sequence
  Synthetic
auuauuuucuguauuaguaguua

SEQ ID NO: 248453 - RNA, 24 nt, Artificial Sequence
  Synthetic
gauuauuuucuguauuaguaguua

SEQ ID NO: 248454 - RNA, 18 nt, Artificial Sequence
  Synthetic
aaguuaugacuguaguua

SEQ ID NO: 248455 - RNA, 19 nt, Artificial Sequence
  Synthetic
caaguuaugacuguaguua

SEQ ID NO: 248456 - RNA, 20 nt, Artificial Sequence
  Synthetic
acaaguuaugacuguaguua

SEQ ID NO: 248457 - RNA, 21 nt, Artificial Sequence
  Synthetic
aacaaguuaugacuguaguua

SEQ ID NO: 248458 - RNA, 22 nt, Artificial Sequence
  Synthetic
aaacaaguuaugacuguaguua

SEQ ID NO: 248459 - RNA, 23 nt, Artificial Sequence
  Synthetic
gaaacaaguuaugacuguaguua

SEQ ID NO: 248460 - RNA, 24 nt, Artificial Sequence
  Synthetic
ugaaacaaguuaugacuguaguua

SEQ ID NO: 248461 - RNA, 18 nt, Artificial Sequence
  Synthetic
ggauaaggguuguaguua

SEQ ID NO: 248462 - RNA, 19 nt, Artificial Sequence
  Synthetic
aggauaaggguuguaguua

SEQ ID NO: 248463 - RNA, 20 nt, Artificial Sequence
  Synthetic
aaggauaaggguuguaguua

SEQ ID NO: 248464 - RNA, 21 nt, Artificial Sequence
  Synthetic
aaaggauaaggguuguaguua

SEQ ID NO: 248465 - RNA, 22 nt, Artificial Sequence
  Synthetic
gaaaggauaaggguuguaguua

SEQ ID NO: 248466 - RNA, 23 nt, Artificial Sequence
  Synthetic
ggaaaggauaaggguuguaguua

SEQ ID NO: 248467 - RNA, 24 nt, Artificial Sequence
  Synthetic
gggaaaggauaaggguuguaguua

SEQ ID NO: 248468 - RNA, 18 nt, Artificial Sequence
  Synthetic
uucauauaauguuaguua

SEQ ID NO: 248469 - RNA, 19 nt, Artificial Sequence
  Synthetic
auucauauaauguuaguua

SEQ ID NO: 248470 - RNA, 20 nt, Artificial Sequence
  Synthetic
aauucauauaauguuaguua

SEQ ID NO: 248471 - RNA, 21 nt, Artificial Sequence
  Synthetic
gaauucauauaauguuaguua

SEQ ID NO: 248472 - RNA, 22 nt, Artificial Sequence
  Synthetic
ugaauucauauaauguuaguua

SEQ ID NO: 248473 - RNA, 23 nt, Artificial Sequence
  Synthetic
augaauucauauaauguuaguua

SEQ ID NO: 248474 - RNA, 24 nt, Artificial Sequence
  Synthetic
gaugaauucauauaauguuaguua

SEQ ID NO: 248475 - RNA, 18 nt, Artificial Sequence
  Synthetic
ucaugggucuuuuaguua

SEQ ID NO: 248476 - RNA, 19 nt, Artificial Sequence
  Synthetic
cucaugggucuuuuaguua

SEQ ID NO: 248477 - RNA, 20 nt, Artificial Sequence
  Synthetic
gcucaugggucuuuuaguua

SEQ ID NO: 248478 - RNA, 21 nt, Artificial Sequence
  Synthetic
agcucaugggucuuuuaguua

SEQ ID NO: 248479 - RNA, 22 nt, Artificial Sequence
  Synthetic
aagcucaugggucuuuuaguua

SEQ ID NO: 248480 - RNA, 23 nt, Artificial Sequence
  Synthetic
caagcucaugggucuuuuaguua

SEQ ID NO: 248481 - RNA, 24 nt, Artificial Sequence
  Synthetic
ucaagcucaugggucuuuuaguua

SEQ ID NO: 248482 - RNA, 18 nt, Artificial Sequence
  Synthetic
cccaaacugugcacguua

SEQ ID NO: 248483 - RNA, 19 nt, Artificial Sequence
  Synthetic
ucccaaacugugcacguua

SEQ ID NO: 248484 - RNA, 20 nt, Artificial Sequence
  Synthetic
gucccaaacugugcacguua

SEQ ID NO: 248485 - RNA, 21 nt, Artificial Sequence
  Synthetic
ugucccaaacugugcacguua

SEQ ID NO: 248486 - RNA, 22 nt, Artificial Sequence
  Synthetic
augucccaaacugugcacguua

SEQ ID NO: 248487 - RNA, 23 nt, Artificial Sequence
  Synthetic
caugucccaaacugugcacguua

SEQ ID NO: 248488 - RNA, 24 nt, Artificial Sequence
  Synthetic
acaugucccaaacugugcacguua

SEQ ID NO: 248489 - RNA, 18 nt, Artificial Sequence
  Synthetic
accuuaaaaaaaagguua

SEQ ID NO: 248490 - RNA, 19 nt, Artificial Sequence
  Synthetic
aaccuuaaaaaaaagguua

SEQ ID NO: 248491 - RNA, 20 nt, Artificial Sequence
  Synthetic
gaaccuuaaaaaaaagguua

SEQ ID NO: 248492 - RNA, 21 nt, Artificial Sequence
  Synthetic
agaaccuuaaaaaaaagguua

SEQ ID NO: 248493 - RNA, 22 nt, Artificial Sequence
  Synthetic
aagaaccuuaaaaaaaagguua

SEQ ID NO: 248494 - RNA, 23 nt, Artificial Sequence
  Synthetic
uaagaaccuuaaaaaaaagguua

SEQ ID NO: 248495 - RNA, 24 nt, Artificial Sequence
  Synthetic
cuaagaaccuuaaaaaaaagguua

SEQ ID NO: 248496 - RNA, 18 nt, Artificial Sequence
  Synthetic
guaaugggggaaagguua

SEQ ID NO: 248497 - RNA, 19 nt, Artificial Sequence
  Synthetic
uguaaugggggaaagguua

SEQ ID NO: 248498 - RNA, 20 nt, Artificial Sequence
  Synthetic
uuguaaugggggaaagguua

SEQ ID NO: 248499 - RNA, 21 nt, Artificial Sequence
  Synthetic
uuuguaaugggggaaagguua

SEQ ID NO: 248500 - RNA, 22 nt, Artificial Sequence
  Synthetic
auuuguaaugggggaaagguua

SEQ ID NO: 248501 - RNA, 23 nt, Artificial Sequence
  Synthetic
uauuuguaaugggggaaagguua

SEQ ID NO: 248502 - RNA, 24 nt, Artificial Sequence
  Synthetic
uuauuuguaaugggggaaagguua

SEQ ID NO: 248503 - RNA, 18 nt, Artificial Sequence
  Synthetic
auaauuuguccaagguua

SEQ ID NO: 248504 - RNA, 19 nt, Artificial Sequence
  Synthetic
aauaauuuguccaagguua

SEQ ID NO: 248505 - RNA, 20 nt, Artificial Sequence
  Synthetic
aaauaauuuguccaagguua

SEQ ID NO: 248506 - RNA, 21 nt, Artificial Sequence
  Synthetic
uaaauaauuuguccaagguua

SEQ ID NO: 248507 - RNA, 22 nt, Artificial Sequence
  Synthetic
uuaaauaauuuguccaagguua

SEQ ID NO: 248508 - RNA, 23 nt, Artificial Sequence
  Synthetic
guuaaauaauuuguccaagguua

SEQ ID NO: 248509 - RNA, 24 nt, Artificial Sequence
  Synthetic
gguuaaauaauuuguccaagguua

SEQ ID NO: 248510 - RNA, 18 nt, Artificial Sequence
  Synthetic
uguauguaguuaagguua

SEQ ID NO: 248511 - RNA, 19 nt, Artificial Sequence
  Synthetic
uuguauguaguuaagguua

SEQ ID NO: 248512 - RNA, 20 nt, Artificial Sequence
  Synthetic
uuuguauguaguuaagguua

SEQ ID NO: 248513 - RNA, 21 nt, Artificial Sequence
  Synthetic
uuuuguauguaguuaagguua

SEQ ID NO: 248514 - RNA, 22 nt, Artificial Sequence
  Synthetic
guuuuguauguaguuaagguua

SEQ ID NO: 248515 - RNA, 23 nt, Artificial Sequence
  Synthetic
aguuuuguauguaguuaagguua

SEQ ID NO: 248516 - RNA, 24 nt, Artificial Sequence
  Synthetic
uaguuuuguauguaguuaagguua

SEQ ID NO: 248517 - RNA, 18 nt, Artificial Sequence
  Synthetic
gaaaaucugaccagguua

SEQ ID NO: 248518 - RNA, 19 nt, Artificial Sequence
  Synthetic
agaaaaucugaccagguua

SEQ ID NO: 248519 - RNA, 20 nt, Artificial Sequence
  Synthetic
aagaaaaucugaccagguua

SEQ ID NO: 248520 - RNA, 21 nt, Artificial Sequence
  Synthetic
gaagaaaaucugaccagguua

SEQ ID NO: 248521 - RNA, 22 nt, Artificial Sequence
  Synthetic
ugaagaaaaucugaccagguua

SEQ ID NO: 248522 - RNA, 23 nt, Artificial Sequence
  Synthetic
cugaagaaaaucugaccagguua

SEQ ID NO: 248523 - RNA, 24 nt, Artificial Sequence
  Synthetic
ucugaagaaaaucugaccagguua

SEQ ID NO: 248524 - RNA, 18 nt, Artificial Sequence
  Synthetic
ugcuauacagccagguua

SEQ ID NO: 248525 - RNA, 19 nt, Artificial Sequence
  Synthetic
augcuauacagccagguua

SEQ ID NO: 248526 - RNA, 20 nt, Artificial Sequence
  Synthetic
aaugcuauacagccagguua

SEQ ID NO: 248527 - RNA, 21 nt, Artificial Sequence
  Synthetic
aaaugcuauacagccagguua

SEQ ID NO: 248528 - RNA, 22 nt, Artificial Sequence
  Synthetic
uaaaugcuauacagccagguua

SEQ ID NO: 248529 - RNA, 23 nt, Artificial Sequence
  Synthetic
uuaaaugcuauacagccagguua

SEQ ID NO: 248530 - RNA, 24 nt, Artificial Sequence
  Synthetic
auuaaaugcuauacagccagguua

SEQ ID NO: 248531 - RNA, 18 nt, Artificial Sequence
  Synthetic
ugaaaaugguccagguua

SEQ ID NO: 248532 - RNA, 19 nt, Artificial Sequence
  Synthetic
cugaaaaugguccagguua

SEQ ID NO: 248533 - RNA, 20 nt, Artificial Sequence
  Synthetic
ucugaaaaugguccagguua

SEQ ID NO: 248534 - RNA, 21 nt, Artificial Sequence
  Synthetic
cucugaaaaugguccagguua

SEQ ID NO: 248535 - RNA, 22 nt, Artificial Sequence
  Synthetic
acucugaaaaugguccagguua

SEQ ID NO: 248536 - RNA, 23 nt, Artificial Sequence
  Synthetic
uacucugaaaaugguccagguua

SEQ ID NO: 248537 - RNA, 24 nt, Artificial Sequence
  Synthetic
cuacucugaaaaugguccagguua

SEQ ID NO: 248538 - RNA, 18 nt, Artificial Sequence
  Synthetic
ucgaggggugggagguua

SEQ ID NO: 248539 - RNA, 19 nt, Artificial Sequence
  Synthetic
gucgaggggugggagguua

SEQ ID NO: 248540 - RNA, 20 nt, Artificial Sequence
  Synthetic
ugucgaggggugggagguua

SEQ ID NO: 248541 - RNA, 21 nt, Artificial Sequence
  Synthetic
cugucgaggggugggagguua

SEQ ID NO: 248542 - RNA, 22 nt, Artificial Sequence
  Synthetic
ccugucgaggggugggagguua

SEQ ID NO: 248543 - RNA, 23 nt, Artificial Sequence
  Synthetic
gccugucgaggggugggagguua

SEQ ID NO: 248544 - RNA, 24 nt, Artificial Sequence
  Synthetic
ggccugucgaggggugggagguua

SEQ ID NO: 248545 - RNA, 18 nt, Artificial Sequence
  Synthetic
uggggauuauggagguua

SEQ ID NO: 248546 - RNA, 19 nt, Artificial Sequence
  Synthetic
guggggauuauggagguua

SEQ ID NO: 248547 - RNA, 20 nt, Artificial Sequence
  Synthetic
cguggggauuauggagguua

SEQ ID NO: 248548 - RNA, 21 nt, Artificial Sequence
  Synthetic
acguggggauuauggagguua

SEQ ID NO: 248549 - RNA, 22 nt, Artificial Sequence
  Synthetic
cacguggggauuauggagguua

SEQ ID NO: 248550 - RNA, 23 nt, Artificial Sequence
  Synthetic
acacguggggauuauggagguua

SEQ ID NO: 248551 - RNA, 24 nt, Artificial Sequence
  Synthetic
gacacguggggauuauggagguua

SEQ ID NO: 248552 - RNA, 18 nt, Artificial Sequence
  Synthetic
cauagucaaaauagguua

SEQ ID NO: 248553 - RNA, 19 nt, Artificial Sequence
  Synthetic
ucauagucaaaauagguua

SEQ ID NO: 248554 - RNA, 20 nt, Artificial Sequence
  Synthetic
cucauagucaaaauagguua

SEQ ID NO: 248555 - RNA, 21 nt, Artificial Sequence
  Synthetic
ucucauagucaaaauagguua

SEQ ID NO: 248556 - RNA, 22 nt, Artificial Sequence
  Synthetic
gucucauagucaaaauagguua

SEQ ID NO: 248557 - RNA, 23 nt, Artificial Sequence
  Synthetic
ugucucauagucaaaauagguua

SEQ ID NO: 248558 - RNA, 24 nt, Artificial Sequence
  Synthetic
cugucucauagucaaaauagguua

SEQ ID NO: 248559 - RNA, 18 nt, Artificial Sequence
  Synthetic
acucuaagacauagguua

SEQ ID NO: 248560 - RNA, 19 nt, Artificial Sequence
  Synthetic
cacucuaagacauagguua

SEQ ID NO: 248561 - RNA, 20 nt, Artificial Sequence
  Synthetic
ucacucuaagacauagguua

SEQ ID NO: 248562 - RNA, 21 nt, Artificial Sequence
  Synthetic
aucacucuaagacauagguua

SEQ ID NO: 248563 - RNA, 22 nt, Artificial Sequence
  Synthetic
uaucacucuaagacauagguua

SEQ ID NO: 248564 - RNA, 23 nt, Artificial Sequence
  Synthetic
auaucacucuaagacauagguua

SEQ ID NO: 248565 - RNA, 24 nt, Artificial Sequence
  Synthetic
uauaucacucuaagacauagguua

SEQ ID NO: 248566 - RNA, 18 nt, Artificial Sequence
  Synthetic
ccuuaaaaaauuagguua

SEQ ID NO: 248567 - RNA, 19 nt, Artificial Sequence
  Synthetic
uccuuaaaaaauuagguua

SEQ ID NO: 248568 - RNA, 20 nt, Artificial Sequence
  Synthetic
uuccuuaaaaaauuagguua

SEQ ID NO: 248569 - RNA, 21 nt, Artificial Sequence
  Synthetic
auuccuuaaaaaauuagguua

SEQ ID NO: 248570 - RNA, 22 nt, Artificial Sequence
  Synthetic
aauuccuuaaaaaauuagguua

SEQ ID NO: 248571 - RNA, 23 nt, Artificial Sequence
  Synthetic
gaauuccuuaaaaaauuagguua

SEQ ID NO: 248572 - RNA, 24 nt, Artificial Sequence
  Synthetic
ugaauuccuuaaaaaauuagguua

SEQ ID NO: 248573 - RNA, 18 nt, Artificial Sequence
  Synthetic
ugauaaccccaaggguua

SEQ ID NO: 248574 - RNA, 19 nt, Artificial Sequence
  Synthetic
cugauaaccccaaggguua

SEQ ID NO: 248575 - RNA, 20 nt, Artificial Sequence
  Synthetic
ucugauaaccccaaggguua

SEQ ID NO: 248576 - RNA, 21 nt, Artificial Sequence
  Synthetic
aucugauaaccccaaggguua

SEQ ID NO: 248577 - RNA, 22 nt, Artificial Sequence
  Synthetic
aaucugauaaccccaaggguua

SEQ ID NO: 248578 - RNA, 23 nt, Artificial Sequence
  Synthetic
gaaucugauaaccccaaggguua

SEQ ID NO: 248579 - RNA, 24 nt, Artificial Sequence
  Synthetic
agaaucugauaaccccaaggguua

SEQ ID NO: 248580 - RNA, 18 nt, Artificial Sequence
  Synthetic
gacagcagaagaggguua

SEQ ID NO: 248581 - RNA, 19 nt, Artificial Sequence
  Synthetic
agacagcagaagaggguua

SEQ ID NO: 248582 - RNA, 20 nt, Artificial Sequence
  Synthetic
aagacagcagaagaggguua

SEQ ID NO: 248583 - RNA, 21 nt, Artificial Sequence
  Synthetic
gaagacagcagaagaggguua

SEQ ID NO: 248584 - RNA, 22 nt, Artificial Sequence
  Synthetic
ugaagacagcagaagaggguua

SEQ ID NO: 248585 - RNA, 23 nt, Artificial Sequence
  Synthetic
gugaagacagcagaagaggguua

SEQ ID NO: 248586 - RNA, 24 nt, Artificial Sequence
  Synthetic
ugugaagacagcagaagaggguua

SEQ ID NO: 248587 - RNA, 18 nt, Artificial Sequence
  Synthetic
agugaaagaauaggguua

SEQ ID NO: 248588 - RNA, 19 nt, Artificial Sequence
  Synthetic
gagugaaagaauaggguua

SEQ ID NO: 248589 - RNA, 20 nt, Artificial Sequence
  Synthetic
agagugaaagaauaggguua

SEQ ID NO: 248590 - RNA, 21 nt, Artificial Sequence
  Synthetic
aagagugaaagaauaggguua

SEQ ID NO: 248591 - RNA, 22 nt, Artificial Sequence
  Synthetic
uaagagugaaagaauaggguua

SEQ ID NO: 248592 - RNA, 23 nt, Artificial Sequence
  Synthetic
guaagagugaaagaauaggguua

SEQ ID NO: 248593 - RNA, 24 nt, Artificial Sequence
  Synthetic
uguaagagugaaagaauaggguua

SEQ ID NO: 248594 - RNA, 18 nt, Artificial Sequence
  Synthetic
cacuggauuauaggguua

SEQ ID NO: 248595 - RNA, 19 nt, Artificial Sequence
  Synthetic
gcacuggauuauaggguua

SEQ ID NO: 248596 - RNA, 20 nt, Artificial Sequence
  Synthetic
ggcacuggauuauaggguua

SEQ ID NO: 248597 - RNA, 21 nt, Artificial Sequence
  Synthetic
uggcacuggauuauaggguua

SEQ ID NO: 248598 - RNA, 22 nt, Artificial Sequence
  Synthetic
uuggcacuggauuauaggguua

SEQ ID NO: 248599 - RNA, 23 nt, Artificial Sequence
  Synthetic
guuggcacuggauuauaggguua

SEQ ID NO: 248600 - RNA, 24 nt, Artificial Sequence
  Synthetic
aguuggcacuggauuauaggguua

SEQ ID NO: 248601 - RNA, 18 nt, Artificial Sequence
  Synthetic
aucgcaguuguaggguua

SEQ ID NO: 248602 - RNA, 19 nt, Artificial Sequence
  Synthetic
aaucgcaguuguaggguua

SEQ ID NO: 248603 - RNA, 20 nt, Artificial Sequence
  Synthetic
aaaucgcaguuguaggguua

SEQ ID NO: 248604 - RNA, 21 nt, Artificial Sequence
  Synthetic
gaaaucgcaguuguaggguua

SEQ ID NO: 248605 - RNA, 22 nt, Artificial Sequence
  Synthetic
cgaaaucgcaguuguaggguua

SEQ ID NO: 248606 - RNA, 23 nt, Artificial Sequence
  Synthetic
ccgaaaucgcaguuguaggguua

SEQ ID NO: 248607 - RNA, 24 nt, Artificial Sequence
  Synthetic
gccgaaaucgcaguuguaggguua

SEQ ID NO: 248608 - RNA, 18 nt, Artificial Sequence
  Synthetic
ucugucuuuguaggguua

SEQ ID NO: 248609 - RNA, 19 nt, Artificial Sequence
  Synthetic
uucugucuuuguaggguua

SEQ ID NO: 248610 - RNA, 20 nt, Artificial Sequence
  Synthetic
auucugucuuuguaggguua

SEQ ID NO: 248611 - RNA, 21 nt, Artificial Sequence
  Synthetic
uauucugucuuuguaggguua

SEQ ID NO: 248612 - RNA, 22 nt, Artificial Sequence
  Synthetic
guauucugucuuuguaggguua

SEQ ID NO: 248613 - RNA, 23 nt, Artificial Sequence
  Synthetic
aguauucugucuuuguaggguua

SEQ ID NO: 248614 - RNA, 24 nt, Artificial Sequence
  Synthetic
uaguauucugucuuuguaggguua

SEQ ID NO: 248615 - RNA, 18 nt, Artificial Sequence
  Synthetic
ccugugaauuuaggguua

SEQ ID NO: 248616 - RNA, 19 nt, Artificial Sequence
  Synthetic
gccugugaauuuaggguua

SEQ ID NO: 248617 - RNA, 20 nt, Artificial Sequence
  Synthetic
ugccugugaauuuaggguua

SEQ ID NO: 248618 - RNA, 21 nt, Artificial Sequence
  Synthetic
augccugugaauuuaggguua

SEQ ID NO: 248619 - RNA, 22 nt, Artificial Sequence
  Synthetic
uaugccugugaauuuaggguua

SEQ ID NO: 248620 - RNA, 23 nt, Artificial Sequence
  Synthetic
auaugccugugaauuuaggguua

SEQ ID NO: 248621 - RNA, 24 nt, Artificial Sequence
  Synthetic
aauaugccugugaauuuaggguua

SEQ ID NO: 248622 - RNA, 18 nt, Artificial Sequence
  Synthetic
caggacguguggggguua

SEQ ID NO: 248623 - RNA, 19 nt, Artificial Sequence
  Synthetic
ccaggacguguggggguua

SEQ ID NO: 248624 - RNA, 20 nt, Artificial Sequence
  Synthetic
cccaggacguguggggguua

SEQ ID NO: 248625 - RNA, 21 nt, Artificial Sequence
  Synthetic
ucccaggacguguggggguua

SEQ ID NO: 248626 - RNA, 22 nt, Artificial Sequence
  Synthetic
cucccaggacguguggggguua

SEQ ID NO: 248627 - RNA, 23 nt, Artificial Sequence
  Synthetic
ccucccaggacguguggggguua

SEQ ID NO: 248628 - RNA, 24 nt, Artificial Sequence
  Synthetic
cccucccaggacguguggggguua

SEQ ID NO: 248629 - RNA, 18 nt, Artificial Sequence
  Synthetic
gaaacugcuuugggguua

SEQ ID NO: 248630 - RNA, 19 nt, Artificial Sequence
  Synthetic
ggaaacugcuuugggguua

SEQ ID NO: 248631 - RNA, 20 nt, Artificial Sequence
  Synthetic
uggaaacugcuuugggguua

SEQ ID NO: 248632 - RNA, 21 nt, Artificial Sequence
  Synthetic
guggaaacugcuuugggguua

SEQ ID NO: 248633 - RNA, 22 nt, Artificial Sequence
  Synthetic
aguggaaacugcuuugggguua

SEQ ID NO: 248634 - RNA, 23 nt, Artificial Sequence
  Synthetic
gaguggaaacugcuuugggguua

SEQ ID NO: 248635 - RNA, 24 nt, Artificial Sequence
  Synthetic
agaguggaaacugcuuugggguua

SEQ ID NO: 248636 - RNA, 18 nt, Artificial Sequence
  Synthetic
ucaguuccauguggguua

SEQ ID NO: 248637 - RNA, 19 nt, Artificial Sequence
  Synthetic
uucaguuccauguggguua

SEQ ID NO: 248638 - RNA, 20 nt, Artificial Sequence
  Synthetic
uuucaguuccauguggguua

SEQ ID NO: 248639 - RNA, 21 nt, Artificial Sequence
  Synthetic
guuucaguuccauguggguua

SEQ ID NO: 248640 - RNA, 22 nt, Artificial Sequence
  Synthetic
aguuucaguuccauguggguua

SEQ ID NO: 248641 - RNA, 23 nt, Artificial Sequence
  Synthetic
aaguuucaguuccauguggguua

SEQ ID NO: 248642 - RNA, 24 nt, Artificial Sequence
  Synthetic
uaaguuucaguuccauguggguua

SEQ ID NO: 248643 - RNA, 18 nt, Artificial Sequence
  Synthetic
augucaauauuuggguua

SEQ ID NO: 248644 - RNA, 19 nt, Artificial Sequence
  Synthetic
aaugucaauauuuggguua

SEQ ID NO: 248645 - RNA, 20 nt, Artificial Sequence
  Synthetic
uaaugucaauauuuggguua

SEQ ID NO: 248646 - RNA, 21 nt, Artificial Sequence
  Synthetic
auaaugucaauauuuggguua

SEQ ID NO: 248647 - RNA, 22 nt, Artificial Sequence
  Synthetic
aauaaugucaauauuuggguua

SEQ ID NO: 248648 - RNA, 23 nt, Artificial Sequence
  Synthetic
uaauaaugucaauauuuggguua

SEQ ID NO: 248649 - RNA, 24 nt, Artificial Sequence
  Synthetic
uuaauaaugucaauauuuggguua

SEQ ID NO: 248650 - RNA, 18 nt, Artificial Sequence
  Synthetic
gaaauaauauuuggguua

SEQ ID NO: 248651 - RNA, 19 nt, Artificial Sequence
  Synthetic
ugaaauaauauuuggguua

SEQ ID NO: 248652 - RNA, 20 nt, Artificial Sequence
  Synthetic
cugaaauaauauuuggguua

SEQ ID NO: 248653 - RNA, 21 nt, Artificial Sequence
  Synthetic
acugaaauaauauuuggguua

SEQ ID NO: 248654 - RNA, 22 nt, Artificial Sequence
  Synthetic
aacugaaauaauauuuggguua

SEQ ID NO: 248655 - RNA, 23 nt, Artificial Sequence
  Synthetic
uaacugaaauaauauuuggguua

SEQ ID NO: 248656 - RNA, 24 nt, Artificial Sequence
  Synthetic
auaacugaaauaauauuuggguua

SEQ ID NO: 248657 - RNA, 18 nt, Artificial Sequence
  Synthetic
guagagaucacaugguua

SEQ ID NO: 248658 - RNA, 19 nt, Artificial Sequence
  Synthetic
uguagagaucacaugguua

SEQ ID NO: 248659 - RNA, 20 nt, Artificial Sequence
  Synthetic
guguagagaucacaugguua

SEQ ID NO: 248660 - RNA, 21 nt, Artificial Sequence
  Synthetic
uguguagagaucacaugguua

SEQ ID NO: 248661 - RNA, 22 nt, Artificial Sequence
  Synthetic
guguguagagaucacaugguua

SEQ ID NO: 248662 - RNA, 23 nt, Artificial Sequence
  Synthetic
gguguguagagaucacaugguua

SEQ ID NO: 248663 - RNA, 24 nt, Artificial Sequence
  Synthetic
ugguguguagagaucacaugguua

SEQ ID NO: 248664 - RNA, 18 nt, Artificial Sequence
  Synthetic
uaggaacuguuaugguua

SEQ ID NO: 248665 - RNA, 19 nt, Artificial Sequence
  Synthetic
guaggaacuguuaugguua

SEQ ID NO: 248666 - RNA, 20 nt, Artificial Sequence
  Synthetic
aguaggaacuguuaugguua

SEQ ID NO: 248667 - RNA, 21 nt, Artificial Sequence
  Synthetic
uaguaggaacuguuaugguua

SEQ ID NO: 248668 - RNA, 22 nt, Artificial Sequence
  Synthetic
cuaguaggaacuguuaugguua

SEQ ID NO: 248669 - RNA, 23 nt, Artificial Sequence
  Synthetic
acuaguaggaacuguuaugguua

SEQ ID NO: 248670 - RNA, 24 nt, Artificial Sequence
  Synthetic
aacuaguaggaacuguuaugguua

SEQ ID NO: 248671 - RNA, 18 nt, Artificial Sequence
  Synthetic
augcuuacuaccugguua

SEQ ID NO: 248672 - RNA, 19 nt, Artificial Sequence
  Synthetic
uaugcuuacuaccugguua

SEQ ID NO: 248673 - RNA, 20 nt, Artificial Sequence
  Synthetic
cuaugcuuacuaccugguua

SEQ ID NO: 248674 - RNA, 21 nt, Artificial Sequence
  Synthetic
acuaugcuuacuaccugguua

SEQ ID NO: 248675 - RNA, 22 nt, Artificial Sequence
  Synthetic
uacuaugcuuacuaccugguua

SEQ ID NO: 248676 - RNA, 23 nt, Artificial Sequence
  Synthetic
guacuaugcuuacuaccugguua

SEQ ID NO: 248677 - RNA, 24 nt, Artificial Sequence
  Synthetic
uguacuaugcuuacuaccugguua

SEQ ID NO: 248678 - RNA, 18 nt, Artificial Sequence
  Synthetic
uggaaauaaagcugguua

SEQ ID NO: 248679 - RNA, 19 nt, Artificial Sequence
  Synthetic
uuggaaauaaagcugguua

SEQ ID NO: 248680 - RNA, 20 nt, Artificial Sequence
  Synthetic
auuggaaauaaagcugguua

SEQ ID NO: 248681 - RNA, 21 nt, Artificial Sequence
  Synthetic
uauuggaaauaaagcugguua

SEQ ID NO: 248682 - RNA, 22 nt, Artificial Sequence
  Synthetic
auauuggaaauaaagcugguua

SEQ ID NO: 248683 - RNA, 23 nt, Artificial Sequence
  Synthetic
cauauuggaaauaaagcugguua

SEQ ID NO: 248684 - RNA, 24 nt, Artificial Sequence
  Synthetic
ccauauuggaaauaaagcugguua

SEQ ID NO: 248685 - RNA, 18 nt, Artificial Sequence
  Synthetic
ucacugagcugcugguua

SEQ ID NO: 248686 - RNA, 19 nt, Artificial Sequence
  Synthetic
aucacugagcugcugguua

SEQ ID NO: 248687 - RNA, 20 nt, Artificial Sequence
  Synthetic
aaucacugagcugcugguua

SEQ ID NO: 248688 - RNA, 21 nt, Artificial Sequence
  Synthetic
gaaucacugagcugcugguua

SEQ ID NO: 248689 - RNA, 22 nt, Artificial Sequence
  Synthetic
agaaucacugagcugcugguua

SEQ ID NO: 248690 - RNA, 23 nt, Artificial Sequence
  Synthetic
uagaaucacugagcugcugguua

SEQ ID NO: 248691 - RNA, 24 nt, Artificial Sequence
  Synthetic
uuagaaucacugagcugcugguua

SEQ ID NO: 248692 - RNA, 18 nt, Artificial Sequence
  Synthetic
aacuauucccagugguua

SEQ ID NO: 248693 - RNA, 19 nt, Artificial Sequence
  Synthetic
gaacuauucccagugguua

SEQ ID NO: 248694 - RNA, 20 nt, Artificial Sequence
  Synthetic
ugaacuauucccagugguua

SEQ ID NO: 248695 - RNA, 21 nt, Artificial Sequence
  Synthetic
gugaacuauucccagugguua

SEQ ID NO: 248696 - RNA, 22 nt, Artificial Sequence
  Synthetic
agugaacuauucccagugguua

SEQ ID NO: 248697 - RNA, 23 nt, Artificial Sequence
  Synthetic
cagugaacuauucccagugguua

SEQ ID NO: 248698 - RNA, 24 nt, Artificial Sequence
  Synthetic
gcagugaacuauucccagugguua

SEQ ID NO: 248699 - RNA, 18 nt, Artificial Sequence
  Synthetic
uagucucugaggugguua

SEQ ID NO: 248700 - RNA, 19 nt, Artificial Sequence
  Synthetic
uuagucucugaggugguua

SEQ ID NO: 248701 - RNA, 20 nt, Artificial Sequence
  Synthetic
cuuagucucugaggugguua

SEQ ID NO: 248702 - RNA, 21 nt, Artificial Sequence
  Synthetic
ccuuagucucugaggugguua

SEQ ID NO: 248703 - RNA, 22 nt, Artificial Sequence
  Synthetic
cccuuagucucugaggugguua

SEQ ID NO: 248704 - RNA, 23 nt, Artificial Sequence
  Synthetic
acccuuagucucugaggugguua

SEQ ID NO: 248705 - RNA, 24 nt, Artificial Sequence
  Synthetic
uacccuuagucucugaggugguua

SEQ ID NO: 248706 - RNA, 18 nt, Artificial Sequence
  Synthetic
cauaugugguggugguua

SEQ ID NO: 248707 - RNA, 19 nt, Artificial Sequence
  Synthetic
acauaugugguggugguua

SEQ ID NO: 248708 - RNA, 20 nt, Artificial Sequence
  Synthetic
uacauaugugguggugguua

SEQ ID NO: 248709 - RNA, 21 nt, Artificial Sequence
  Synthetic
uuacauaugugguggugguua

SEQ ID NO: 248710 - RNA, 22 nt, Artificial Sequence
  Synthetic
auuacauaugugguggugguua

SEQ ID NO: 248711 - RNA, 23 nt, Artificial Sequence
  Synthetic
uauuacauaugugguggugguua

SEQ ID NO: 248712 - RNA, 24 nt, Artificial Sequence
  Synthetic
auauuacauaugugguggugguua

SEQ ID NO: 248713 - RNA, 18 nt, Artificial Sequence
  Synthetic
aaauacucugauugguua

SEQ ID NO: 248714 - RNA, 19 nt, Artificial Sequence
  Synthetic
uaaauacucugauugguua

SEQ ID NO: 248715 - RNA, 20 nt, Artificial Sequence
  Synthetic
auaaauacucugauugguua

SEQ ID NO: 248716 - RNA, 21 nt, Artificial Sequence
  Synthetic
aauaaauacucugauugguua

SEQ ID NO: 248717 - RNA, 22 nt, Artificial Sequence
  Synthetic
aaauaaauacucugauugguua

SEQ ID NO: 248718 - RNA, 23 nt, Artificial Sequence
  Synthetic
uaaauaaauacucugauugguua

SEQ ID NO: 248719 - RNA, 24 nt, Artificial Sequence
  Synthetic
uuaaauaaauacucugauugguua

SEQ ID NO: 248720 - RNA, 18 nt, Artificial Sequence
  Synthetic
uuuuuacugcuuugguua

SEQ ID NO: 248721 - RNA, 19 nt, Artificial Sequence
  Synthetic
uuuuuuacugcuuugguua

SEQ ID NO: 248722 - RNA, 20 nt, Artificial Sequence
  Synthetic
uuuuuuuacugcuuugguua

SEQ ID NO: 248723 - RNA, 21 nt, Artificial Sequence
  Synthetic
auuuuuuuacugcuuugguua

SEQ ID NO: 248724 - RNA, 22 nt, Artificial Sequence
  Synthetic
cauuuuuuuacugcuuugguua

SEQ ID NO: 248725 - RNA, 23 nt, Artificial Sequence
  Synthetic
ucauuuuuuuacugcuuugguua

SEQ ID NO: 248726 - RNA, 24 nt, Artificial Sequence
  Synthetic
cucauuuuuuuacugcuuugguua

SEQ ID NO: 248727 - RNA, 18 nt, Artificial Sequence
  Synthetic
gcaagugauuuuugguua

SEQ ID NO: 248728 - RNA, 19 nt, Artificial Sequence
  Synthetic
ugcaagugauuuuugguua

SEQ ID NO: 248729 - RNA, 20 nt, Artificial Sequence
  Synthetic
uugcaagugauuuuugguua

SEQ ID NO: 248730 - RNA, 21 nt, Artificial Sequence
  Synthetic
uuugcaagugauuuuugguua

SEQ ID NO: 248731 - RNA, 22 nt, Artificial Sequence
  Synthetic
auuugcaagugauuuuugguua

SEQ ID NO: 248732 - RNA, 23 nt, Artificial Sequence
  Synthetic
uauuugcaagugauuuuugguua

SEQ ID NO: 248733 - RNA, 24 nt, Artificial Sequence
  Synthetic
uuauuugcaagugauuuuugguua

SEQ ID NO: 248734 - RNA, 18 nt, Artificial Sequence
  Synthetic
uaacaagaagaaauguua

SEQ ID NO: 248735 - RNA, 19 nt, Artificial Sequence
  Synthetic
cuaacaagaagaaauguua

SEQ ID NO: 248736 - RNA, 20 nt, Artificial Sequence
  Synthetic
gcuaacaagaagaaauguua

SEQ ID NO: 248737 - RNA, 21 nt, Artificial Sequence
  Synthetic
agcuaacaagaagaaauguua

SEQ ID NO: 248738 - RNA, 22 nt, Artificial Sequence
  Synthetic
uagcuaacaagaagaaauguua

SEQ ID NO: 248739 - RNA, 23 nt, Artificial Sequence
  Synthetic
cuagcuaacaagaagaaauguua

SEQ ID NO: 248740 - RNA, 24 nt, Artificial Sequence
  Synthetic
ccuagcuaacaagaagaaauguua

SEQ ID NO: 248741 - RNA, 18 nt, Artificial Sequence
  Synthetic
agagaugacuaaauguua

SEQ ID NO: 248742 - RNA, 19 nt, Artificial Sequence
  Synthetic
aagagaugacuaaauguua

SEQ ID NO: 248743 - RNA, 20 nt, Artificial Sequence
  Synthetic
aaagagaugacuaaauguua

SEQ ID NO: 248744 - RNA, 21 nt, Artificial Sequence
  Synthetic
caaagagaugacuaaauguua

SEQ ID NO: 248745 - RNA, 22 nt, Artificial Sequence
  Synthetic
acaaagagaugacuaaauguua

SEQ ID NO: 248746 - RNA, 23 nt, Artificial Sequence
  Synthetic
gacaaagagaugacuaaauguua

SEQ ID NO: 248747 - RNA, 24 nt, Artificial Sequence
  Synthetic
ugacaaagagaugacuaaauguua

SEQ ID NO: 248748 - RNA, 18 nt, Artificial Sequence
  Synthetic
guuuaggagagaauguua

SEQ ID NO: 248749 - RNA, 19 nt, Artificial Sequence
  Synthetic
gguuuaggagagaauguua

SEQ ID NO: 248750 - RNA, 20 nt, Artificial Sequence
  Synthetic
agguuuaggagagaauguua

SEQ ID NO: 248751 - RNA, 21 nt, Artificial Sequence
  Synthetic
gagguuuaggagagaauguua

SEQ ID NO: 248752 - RNA, 22 nt, Artificial Sequence
  Synthetic
agagguuuaggagagaauguua

SEQ ID NO: 248753 - RNA, 23 nt, Artificial Sequence
  Synthetic
gagagguuuaggagagaauguua

SEQ ID NO: 248754 - RNA, 24 nt, Artificial Sequence
  Synthetic
agagagguuuaggagagaauguua

SEQ ID NO: 248755 - RNA, 18 nt, Artificial Sequence
  Synthetic
uaauaagauguaauguua

SEQ ID NO: 248756 - RNA, 19 nt, Artificial Sequence
  Synthetic
auaauaagauguaauguua

SEQ ID NO: 248757 - RNA, 20 nt, Artificial Sequence
  Synthetic
uauaauaagauguaauguua

SEQ ID NO: 248758 - RNA, 21 nt, Artificial Sequence
  Synthetic
auauaauaagauguaauguua

SEQ ID NO: 248759 - RNA, 22 nt, Artificial Sequence
  Synthetic
aauauaauaagauguaauguua

SEQ ID NO: 248760 - RNA, 23 nt, Artificial Sequence
  Synthetic
caauauaauaagauguaauguua

SEQ ID NO: 248761 - RNA, 24 nt, Artificial Sequence
  Synthetic
ucaauauaauaagauguaauguua

SEQ ID NO: 248762 - RNA, 18 nt, Artificial Sequence
  Synthetic
ucccuggguguaauguua

SEQ ID NO: 248763 - RNA, 19 nt, Artificial Sequence
  Synthetic
gucccuggguguaauguua

SEQ ID NO: 248764 - RNA, 20 nt, Artificial Sequence
  Synthetic
ugucccuggguguaauguua

SEQ ID NO: 248765 - RNA, 21 nt, Artificial Sequence
  Synthetic
uugucccuggguguaauguua

SEQ ID NO: 248766 - RNA, 22 nt, Artificial Sequence
  Synthetic
cuugucccuggguguaauguua

SEQ ID NO: 248767 - RNA, 23 nt, Artificial Sequence
  Synthetic
ucuugucccuggguguaauguua

SEQ ID NO: 248768 - RNA, 24 nt, Artificial Sequence
  Synthetic
uucuugucccuggguguaauguua

SEQ ID NO: 248769 - RNA, 18 nt, Artificial Sequence
  Synthetic
gcauuuuaagacauguua

SEQ ID NO: 248770 - RNA, 19 nt, Artificial Sequence
  Synthetic
ugcauuuuaagacauguua

SEQ ID NO: 248771 - RNA, 20 nt, Artificial Sequence
  Synthetic
cugcauuuuaagacauguua

SEQ ID NO: 248772 - RNA, 21 nt, Artificial Sequence
  Synthetic
acugcauuuuaagacauguua

SEQ ID NO: 248773 - RNA, 22 nt, Artificial Sequence
  Synthetic
aacugcauuuuaagacauguua

SEQ ID NO: 248774 - RNA, 23 nt, Artificial Sequence
  Synthetic
aaacugcauuuuaagacauguua

SEQ ID NO: 248775 - RNA, 24 nt, Artificial Sequence
  Synthetic
caaacugcauuuuaagacauguua

SEQ ID NO: 248776 - RNA, 18 nt, Artificial Sequence
  Synthetic
ggcuuuuugaccauguua

SEQ ID NO: 248777 - RNA, 19 nt, Artificial Sequence
  Synthetic
gggcuuuuugaccauguua

SEQ ID NO: 248778 - RNA, 20 nt, Artificial Sequence
  Synthetic
agggcuuuuugaccauguua

SEQ ID NO: 248779 - RNA, 21 nt, Artificial Sequence
  Synthetic
aagggcuuuuugaccauguua

SEQ ID NO: 248780 - RNA, 22 nt, Artificial Sequence
  Synthetic
aaagggcuuuuugaccauguua

SEQ ID NO: 248781 - RNA, 23 nt, Artificial Sequence
  Synthetic
caaagggcuuuuugaccauguua

SEQ ID NO: 248782 - RNA, 24 nt, Artificial Sequence
  Synthetic
acaaagggcuuuuugaccauguua

SEQ ID NO: 248783 - RNA, 18 nt, Artificial Sequence
  Synthetic
gaucccaucgccauguua

SEQ ID NO: 248784 - RNA, 19 nt, Artificial Sequence
  Synthetic
ggaucccaucgccauguua

SEQ ID NO: 248785 - RNA, 20 nt, Artificial Sequence
  Synthetic
cggaucccaucgccauguua

SEQ ID NO: 248786 - RNA, 21 nt, Artificial Sequence
  Synthetic
acggaucccaucgccauguua

SEQ ID NO: 248787 - RNA, 22 nt, Artificial Sequence
  Synthetic
uacggaucccaucgccauguua

SEQ ID NO: 248788 - RNA, 23 nt, Artificial Sequence
  Synthetic
guacggaucccaucgccauguua

SEQ ID NO: 248789 - RNA, 24 nt, Artificial Sequence
  Synthetic
aguacggaucccaucgccauguua

SEQ ID NO: 248790 - RNA, 18 nt, Artificial Sequence
  Synthetic
gagaaacauuccauguua

SEQ ID NO: 248791 - RNA, 19 nt, Artificial Sequence
  Synthetic
ggagaaacauuccauguua

SEQ ID NO: 248792 - RNA, 20 nt, Artificial Sequence
  Synthetic
uggagaaacauuccauguua

SEQ ID NO: 248793 - RNA, 21 nt, Artificial Sequence
  Synthetic
auggagaaacauuccauguua

SEQ ID NO: 248794 - RNA, 22 nt, Artificial Sequence
  Synthetic
aauggagaaacauuccauguua

SEQ ID NO: 248795 - RNA, 23 nt, Artificial Sequence
  Synthetic
aaauggagaaacauuccauguua

SEQ ID NO: 248796 - RNA, 24 nt, Artificial Sequence
  Synthetic
caaauggagaaacauuccauguua

SEQ ID NO: 248797 - RNA, 18 nt, Artificial Sequence
  Synthetic
aaauaaaacuagauguua

SEQ ID NO: 248798 - RNA, 19 nt, Artificial Sequence
  Synthetic
aaaauaaaacuagauguua

SEQ ID NO: 248799 - RNA, 20 nt, Artificial Sequence
  Synthetic
gaaaauaaaacuagauguua

SEQ ID NO: 248800 - RNA, 21 nt, Artificial Sequence
  Synthetic
agaaaauaaaacuagauguua

SEQ ID NO: 248801 - RNA, 22 nt, Artificial Sequence
  Synthetic
aagaaaauaaaacuagauguua

SEQ ID NO: 248802 - RNA, 23 nt, Artificial Sequence
  Synthetic
uaagaaaauaaaacuagauguua

SEQ ID NO: 248803 - RNA, 24 nt, Artificial Sequence
  Synthetic
uuaagaaaauaaaacuagauguua

SEQ ID NO: 248804 - RNA, 18 nt, Artificial Sequence
  Synthetic
gggaucaggcugauguua

SEQ ID NO: 248805 - RNA, 19 nt, Artificial Sequence
  Synthetic
ugggaucaggcugauguua

SEQ ID NO: 248806 - RNA, 20 nt, Artificial Sequence
  Synthetic
gugggaucaggcugauguua

SEQ ID NO: 248807 - RNA, 21 nt, Artificial Sequence
  Synthetic
agugggaucaggcugauguua

SEQ ID NO: 248808 - RNA, 22 nt, Artificial Sequence
  Synthetic
cagugggaucaggcugauguua

SEQ ID NO: 248809 - RNA, 23 nt, Artificial Sequence
  Synthetic
gcagugggaucaggcugauguua

SEQ ID NO: 248810 - RNA, 24 nt, Artificial Sequence
  Synthetic
agcagugggaucaggcugauguua

SEQ ID NO: 248811 - RNA, 18 nt, Artificial Sequence
  Synthetic
ucucucugguugauguua

SEQ ID NO: 248812 - RNA, 19 nt, Artificial Sequence
  Synthetic
gucucucugguugauguua

SEQ ID NO: 248813 - RNA, 20 nt, Artificial Sequence
  Synthetic
agucucucugguugauguua

SEQ ID NO: 248814 - RNA, 21 nt, Artificial Sequence
  Synthetic
gagucucucugguugauguua

SEQ ID NO: 248815 - RNA, 22 nt, Artificial Sequence
  Synthetic
ggagucucucugguugauguua

SEQ ID NO: 248816 - RNA, 23 nt, Artificial Sequence
  Synthetic
gggagucucucugguugauguua

SEQ ID NO: 248817 - RNA, 24 nt, Artificial Sequence
  Synthetic
ugggagucucucugguugauguua

SEQ ID NO: 248818 - RNA, 18 nt, Artificial Sequence
  Synthetic
uauguuaagcauauguua

SEQ ID NO: 248819 - RNA, 19 nt, Artificial Sequence
  Synthetic
cuauguuaagcauauguua

SEQ ID NO: 248820 - RNA, 20 nt, Artificial Sequence
  Synthetic
ucuauguuaagcauauguua

SEQ ID NO: 248821 - RNA, 21 nt, Artificial Sequence
  Synthetic
cucuauguuaagcauauguua

SEQ ID NO: 248822 - RNA, 22 nt, Artificial Sequence
  Synthetic
acucuauguuaagcauauguua

SEQ ID NO: 248823 - RNA, 23 nt, Artificial Sequence
  Synthetic
uacucuauguuaagcauauguua

SEQ ID NO: 248824 - RNA, 24 nt, Artificial Sequence
  Synthetic
cuacucuauguuaagcauauguua

SEQ ID NO: 248825 - RNA, 18 nt, Artificial Sequence
  Synthetic
cucaugcaauauauguua

SEQ ID NO: 248826 - RNA, 19 nt, Artificial Sequence
  Synthetic
ucucaugcaauauauguua

SEQ ID NO: 248827 - RNA, 20 nt, Artificial Sequence
  Synthetic
uucucaugcaauauauguua

SEQ ID NO: 248828 - RNA, 21 nt, Artificial Sequence
  Synthetic
uuucucaugcaauauauguua

SEQ ID NO: 248829 - RNA, 22 nt, Artificial Sequence
  Synthetic
uuuucucaugcaauauauguua

SEQ ID NO: 248830 - RNA, 23 nt, Artificial Sequence
  Synthetic
auuuucucaugcaauauauguua

SEQ ID NO: 248831 - RNA, 24 nt, Artificial Sequence
  Synthetic
uauuuucucaugcaauauauguua

SEQ ID NO: 248832 - RNA, 18 nt, Artificial Sequence
  Synthetic
aaagaucaaacuauguua

SEQ ID NO: 248833 - RNA, 19 nt, Artificial Sequence
  Synthetic
aaaagaucaaacuauguua

SEQ ID NO: 248834 - RNA, 20 nt, Artificial Sequence
  Synthetic
aaaaagaucaaacuauguua

SEQ ID NO: 248835 - RNA, 21 nt, Artificial Sequence
  Synthetic
aaaaaagaucaaacuauguua

SEQ ID NO: 248836 - RNA, 22 nt, Artificial Sequence
  Synthetic
gaaaaaagaucaaacuauguua

SEQ ID NO: 248837 - RNA, 23 nt, Artificial Sequence
  Synthetic
ugaaaaaagaucaaacuauguua

SEQ ID NO: 248838 - RNA, 24 nt, Artificial Sequence
  Synthetic
augaaaaaagaucaaacuauguua

SEQ ID NO: 248839 - RNA, 18 nt, Artificial Sequence
  Synthetic
auuuuaucaacuauguua

SEQ ID NO: 248840 - RNA, 19 nt, Artificial Sequence
  Synthetic
aauuuuaucaacuauguua

SEQ ID NO: 248841 - RNA, 20 nt, Artificial Sequence
  Synthetic
gaauuuuaucaacuauguua

SEQ ID NO: 248842 - RNA, 21 nt, Artificial Sequence
  Synthetic
ggaauuuuaucaacuauguua

SEQ ID NO: 248843 - RNA, 22 nt, Artificial Sequence
  Synthetic
aggaauuuuaucaacuauguua

SEQ ID NO: 248844 - RNA, 23 nt, Artificial Sequence
  Synthetic
aaggaauuuuaucaacuauguua

SEQ ID NO: 248845 - RNA, 24 nt, Artificial Sequence
  Synthetic
gaaggaauuuuaucaacuauguua

SEQ ID NO: 248846 - RNA, 18 nt, Artificial Sequence
  Synthetic
cccuaagcuucuauguua

SEQ ID NO: 248847 - RNA, 19 nt, Artificial Sequence
  Synthetic
ccccuaagcuucuauguua

SEQ ID NO: 248848 - RNA, 20 nt, Artificial Sequence
  Synthetic
uccccuaagcuucuauguua

SEQ ID NO: 248849 - RNA, 21 nt, Artificial Sequence
  Synthetic
uuccccuaagcuucuauguua

SEQ ID NO: 248850 - RNA, 22 nt, Artificial Sequence
  Synthetic
cuuccccuaagcuucuauguua

SEQ ID NO: 248851 - RNA, 23 nt, Artificial Sequence
  Synthetic
ucuuccccuaagcuucuauguua

SEQ ID NO: 248852 - RNA, 24 nt, Artificial Sequence
  Synthetic
aucuuccccuaagcuucuauguua

SEQ ID NO: 248853 - RNA, 18 nt, Artificial Sequence
  Synthetic
auuauaucacuuauguua

SEQ ID NO: 248854 - RNA, 19 nt, Artificial Sequence
  Synthetic
aauuauaucacuuauguua

SEQ ID NO: 248855 - RNA, 20 nt, Artificial Sequence
  Synthetic
aaauuauaucacuuauguua

SEQ ID NO: 248856 - RNA, 21 nt, Artificial Sequence
  Synthetic
aaaauuauaucacuuauguua

SEQ ID NO: 248857 - RNA, 22 nt, Artificial Sequence
  Synthetic
aaaaauuauaucacuuauguua

SEQ ID NO: 248858 - RNA, 23 nt, Artificial Sequence
  Synthetic
aaaaaauuauaucacuuauguua

SEQ ID NO: 248859 - RNA, 24 nt, Artificial Sequence
  Synthetic
gaaaaaauuauaucacuuauguua

SEQ ID NO: 248860 - RNA, 18 nt, Artificial Sequence
  Synthetic
ucuuugauacuuauguua

SEQ ID NO: 248861 - RNA, 19 nt, Artificial Sequence
  Synthetic
gucuuugauacuuauguua

SEQ ID NO: 248862 - RNA, 20 nt, Artificial Sequence
  Synthetic
ugucuuugauacuuauguua

SEQ ID NO: 248863 - RNA, 21 nt, Artificial Sequence
  Synthetic
augucuuugauacuuauguua

SEQ ID NO: 248864 - RNA, 22 nt, Artificial Sequence
  Synthetic
caugucuuugauacuuauguua

SEQ ID NO: 248865 - RNA, 23 nt, Artificial Sequence
  Synthetic
acaugucuuugauacuuauguua

SEQ ID NO: 248866 - RNA, 24 nt, Artificial Sequence
  Synthetic
aacaugucuuugauacuuauguua

SEQ ID NO: 248867 - RNA, 18 nt, Artificial Sequence
  Synthetic
ccuuucacuuuuauguua

SEQ ID NO: 248868 - RNA, 19 nt, Artificial Sequence
  Synthetic
accuuucacuuuuauguua

SEQ ID NO: 248869 - RNA, 20 nt, Artificial Sequence
  Synthetic
caccuuucacuuuuauguua

SEQ ID NO: 248870 - RNA, 21 nt, Artificial Sequence
  Synthetic
ccaccuuucacuuuuauguua

SEQ ID NO: 248871 - RNA, 22 nt, Artificial Sequence
  Synthetic
uccaccuuucacuuuuauguua

SEQ ID NO: 248872 - RNA, 23 nt, Artificial Sequence
  Synthetic
cuccaccuuucacuuuuauguua

SEQ ID NO: 248873 - RNA, 24 nt, Artificial Sequence
  Synthetic
gcuccaccuuucacuuuuauguua

SEQ ID NO: 248874 - RNA, 18 nt, Artificial Sequence
  Synthetic
auuauuacuuuuauguua

SEQ ID NO: 248875 - RNA, 19 nt, Artificial Sequence
  Synthetic
gauuauuacuuuuauguua

SEQ ID NO: 248876 - RNA, 20 nt, Artificial Sequence
  Synthetic
cgauuauuacuuuuauguua

SEQ ID NO: 248877 - RNA, 21 nt, Artificial Sequence
  Synthetic
gcgauuauuacuuuuauguua

SEQ ID NO: 248878 - RNA, 22 nt, Artificial Sequence
  Synthetic
ugcgauuauuacuuuuauguua

SEQ ID NO: 248879 - RNA, 23 nt, Artificial Sequence
  Synthetic
uugcgauuauuacuuuuauguua

SEQ ID NO: 248880 - RNA, 24 nt, Artificial Sequence
  Synthetic
auugcgauuauuacuuuuauguua

SEQ ID NO: 248881 - RNA, 18 nt, Artificial Sequence
  Synthetic
gccagauaucaacuguua

SEQ ID NO: 248882 - RNA, 19 nt, Artificial Sequence
  Synthetic
agccagauaucaacuguua

SEQ ID NO: 248883 - RNA, 20 nt, Artificial Sequence
  Synthetic
cagccagauaucaacuguua

SEQ ID NO: 248884 - RNA, 21 nt, Artificial Sequence
  Synthetic
acagccagauaucaacuguua

SEQ ID NO: 248885 - RNA, 22 nt, Artificial Sequence
  Synthetic
gacagccagauaucaacuguua

SEQ ID NO: 248886 - RNA, 23 nt, Artificial Sequence
  Synthetic
cgacagccagauaucaacuguua

SEQ ID NO: 248887 - RNA, 24 nt, Artificial Sequence
  Synthetic
acgacagccagauaucaacuguua

SEQ ID NO: 248888 - RNA, 18 nt, Artificial Sequence
  Synthetic
ucauguauuauacuguua

SEQ ID NO: 248889 - RNA, 19 nt, Artificial Sequence
  Synthetic
cucauguauuauacuguua

SEQ ID NO: 248890 - RNA, 20 nt, Artificial Sequence
  Synthetic
ucucauguauuauacuguua

SEQ ID NO: 248891 - RNA, 21 nt, Artificial Sequence
  Synthetic
cucucauguauuauacuguua

SEQ ID NO: 248892 - RNA, 22 nt, Artificial Sequence
  Synthetic
acucucauguauuauacuguua

SEQ ID NO: 248893 - RNA, 23 nt, Artificial Sequence
  Synthetic
cacucucauguauuauacuguua

SEQ ID NO: 248894 - RNA, 24 nt, Artificial Sequence
  Synthetic
ucacucucauguauuauacuguua

SEQ ID NO: 248895 - RNA, 18 nt, Artificial Sequence
  Synthetic
gaaauucuccuacuguua

SEQ ID NO: 248896 - RNA, 19 nt, Artificial Sequence
  Synthetic
ugaaauucuccuacuguua

SEQ ID NO: 248897 - RNA, 20 nt, Artificial Sequence
  Synthetic
augaaauucuccuacuguua

SEQ ID NO: 248898 - RNA, 21 nt, Artificial Sequence
  Synthetic
caugaaauucuccuacuguua

SEQ ID NO: 248899 - RNA, 22 nt, Artificial Sequence
  Synthetic
ccaugaaauucuccuacuguua

SEQ ID NO: 248900 - RNA, 23 nt, Artificial Sequence
  Synthetic
accaugaaauucuccuacuguua

SEQ ID NO: 248901 - RNA, 24 nt, Artificial Sequence
  Synthetic
gaccaugaaauucuccuacuguua

SEQ ID NO: 248902 - RNA, 18 nt, Artificial Sequence
  Synthetic
auuuuuuggcaccuguua

SEQ ID NO: 248903 - RNA, 19 nt, Artificial Sequence
  Synthetic
uauuuuuuggcaccuguua

SEQ ID NO: 248904 - RNA, 20 nt, Artificial Sequence
  Synthetic
uuauuuuuuggcaccuguua

SEQ ID NO: 248905 - RNA, 21 nt, Artificial Sequence
  Synthetic
auuauuuuuuggcaccuguua

SEQ ID NO: 248906 - RNA, 22 nt, Artificial Sequence
  Synthetic
cauuauuuuuuggcaccuguua

SEQ ID NO: 248907 - RNA, 23 nt, Artificial Sequence
  Synthetic
acauuauuuuuuggcaccuguua

SEQ ID NO: 248908 - RNA, 24 nt, Artificial Sequence
  Synthetic
aacauuauuuuuuggcaccuguua

SEQ ID NO: 248909 - RNA, 18 nt, Artificial Sequence
  Synthetic
uuuuuuugagugcuguua

SEQ ID NO: 248910 - RNA, 19 nt, Artificial Sequence
  Synthetic
uuuuuuuugagugcuguua

SEQ ID NO: 248911 - RNA, 20 nt, Artificial Sequence
  Synthetic
auuuuuuuugagugcuguua

SEQ ID NO: 248912 - RNA, 21 nt, Artificial Sequence
  Synthetic
cauuuuuuuugagugcuguua

SEQ ID NO: 248913 - RNA, 22 nt, Artificial Sequence
  Synthetic
ccauuuuuuuugagugcuguua

SEQ ID NO: 248914 - RNA, 23 nt, Artificial Sequence
  Synthetic
accauuuuuuuugagugcuguua

SEQ ID NO: 248915 - RNA, 24 nt, Artificial Sequence
  Synthetic
uaccauuuuuuuugagugcuguua

SEQ ID NO: 248916 - RNA, 18 nt, Artificial Sequence
  Synthetic
acccacccaaaucuguua

SEQ ID NO: 248917 - RNA, 19 nt, Artificial Sequence
  Synthetic
aacccacccaaaucuguua

SEQ ID NO: 248918 - RNA, 20 nt, Artificial Sequence
  Synthetic
aaacccacccaaaucuguua

SEQ ID NO: 248919 - RNA, 21 nt, Artificial Sequence
  Synthetic
aaaacccacccaaaucuguua

SEQ ID NO: 248920 - RNA, 22 nt, Artificial Sequence
  Synthetic
caaaacccacccaaaucuguua

SEQ ID NO: 248921 - RNA, 23 nt, Artificial Sequence
  Synthetic
acaaaacccacccaaaucuguua

SEQ ID NO: 248922 - RNA, 24 nt, Artificial Sequence
  Synthetic
aacaaaacccacccaaaucuguua

SEQ ID NO: 248923 - RNA, 18 nt, Artificial Sequence
  Synthetic
aaaaaccagaaucuguua

SEQ ID NO: 248924 - RNA, 19 nt, Artificial Sequence
  Synthetic
aaaaaaccagaaucuguua

SEQ ID NO: 248925 - RNA, 20 nt, Artificial Sequence
  Synthetic
aaaaaaaccagaaucuguua

SEQ ID NO: 248926 - RNA, 21 nt, Artificial Sequence
  Synthetic
aaaaaaaaccagaaucuguua

SEQ ID NO: 248927 - RNA, 22 nt, Artificial Sequence
  Synthetic
aaaaaaaaaccagaaucuguua

SEQ ID NO: 248928 - RNA, 23 nt, Artificial Sequence
  Synthetic
aaaaaaaaaaccagaaucuguua

SEQ ID NO: 248929 - RNA, 24 nt, Artificial Sequence
  Synthetic
aaaaaaaaaaaccagaaucuguua

SEQ ID NO: 248930 - RNA, 18 nt, Artificial Sequence
  Synthetic
acuccuccguaucuguua

SEQ ID NO: 248931 - RNA, 19 nt, Artificial Sequence
  Synthetic
cacuccuccguaucuguua

SEQ ID NO: 248932 - RNA, 20 nt, Artificial Sequence
  Synthetic
ucacuccuccguaucuguua

SEQ ID NO: 248933 - RNA, 21 nt, Artificial Sequence
  Synthetic
aucacuccuccguaucuguua

SEQ ID NO: 248934 - RNA, 22 nt, Artificial Sequence
  Synthetic
aaucacuccuccguaucuguua

SEQ ID NO: 248935 - RNA, 23 nt, Artificial Sequence
  Synthetic
aaaucacuccuccguaucuguua

SEQ ID NO: 248936 - RNA, 24 nt, Artificial Sequence
  Synthetic
caaaucacuccuccguaucuguua

SEQ ID NO: 248937 - RNA, 18 nt, Artificial Sequence
  Synthetic
aaaucuuguuaucuguua

SEQ ID NO: 248938 - RNA, 19 nt, Artificial Sequence
  Synthetic
aaaaucuuguuaucuguua

SEQ ID NO: 248939 - RNA, 20 nt, Artificial Sequence
  Synthetic
caaaaucuuguuaucuguua

SEQ ID NO: 248940 - RNA, 21 nt, Artificial Sequence
  Synthetic
ucaaaaucuuguuaucuguua

SEQ ID NO: 248941 - RNA, 22 nt, Artificial Sequence
  Synthetic
uucaaaaucuuguuaucuguua

SEQ ID NO: 248942 - RNA, 23 nt, Artificial Sequence
  Synthetic
uuucaaaaucuuguuaucuguua

SEQ ID NO: 248943 - RNA, 24 nt, Artificial Sequence
  Synthetic
uuuucaaaaucuuguuaucuguua

SEQ ID NO: 248944 - RNA, 18 nt, Artificial Sequence
  Synthetic
ugggcuaugacucuguua

SEQ ID NO: 248945 - RNA, 19 nt, Artificial Sequence
  Synthetic
uugggcuaugacucuguua

SEQ ID NO: 248946 - RNA, 20 nt, Artificial Sequence
  Synthetic
auugggcuaugacucuguua

SEQ ID NO: 248947 - RNA, 21 nt, Artificial Sequence
  Synthetic
gauugggcuaugacucuguua

SEQ ID NO: 248948 - RNA, 22 nt, Artificial Sequence
  Synthetic
ggauugggcuaugacucuguua

SEQ ID NO: 248949 - RNA, 23 nt, Artificial Sequence
  Synthetic
aggauugggcuaugacucuguua

SEQ ID NO: 248950 - RNA, 24 nt, Artificial Sequence
  Synthetic
aaggauugggcuaugacucuguua

SEQ ID NO: 248951 - RNA, 18 nt, Artificial Sequence
  Synthetic
aagugagguugucuguua

SEQ ID NO: 248952 - RNA, 19 nt, Artificial Sequence
  Synthetic
gaagugagguugucuguua

SEQ ID NO: 248953 - RNA, 20 nt, Artificial Sequence
  Synthetic
ggaagugagguugucuguua

SEQ ID NO: 248954 - RNA, 21 nt, Artificial Sequence
  Synthetic
aggaagugagguugucuguua

SEQ ID NO: 248955 - RNA, 22 nt, Artificial Sequence
  Synthetic
uaggaagugagguugucuguua

SEQ ID NO: 248956 - RNA, 23 nt, Artificial Sequence
  Synthetic
guaggaagugagguugucuguua

SEQ ID NO: 248957 - RNA, 24 nt, Artificial Sequence
  Synthetic
aguaggaagugagguugucuguua

SEQ ID NO: 248958 - RNA, 18 nt, Artificial Sequence
  Synthetic
gauuaucaaauucuguua

SEQ ID NO: 248959 - RNA, 19 nt, Artificial Sequence
  Synthetic
agauuaucaaauucuguua

SEQ ID NO: 248960 - RNA, 20 nt, Artificial Sequence
  Synthetic
uagauuaucaaauucuguua

SEQ ID NO: 248961 - RNA, 21 nt, Artificial Sequence
  Synthetic
guagauuaucaaauucuguua

SEQ ID NO: 248962 - RNA, 22 nt, Artificial Sequence
  Synthetic
uguagauuaucaaauucuguua

SEQ ID NO: 248963 - RNA, 23 nt, Artificial Sequence
  Synthetic
auguagauuaucaaauucuguua

SEQ ID NO: 248964 - RNA, 24 nt, Artificial Sequence
  Synthetic
aauguagauuaucaaauucuguua

SEQ ID NO: 248965 - RNA, 18 nt, Artificial Sequence
  Synthetic
guguaugcuuuucuguua

SEQ ID NO: 248966 - RNA, 19 nt, Artificial Sequence
  Synthetic
uguguaugcuuuucuguua

SEQ ID NO: 248967 - RNA, 20 nt, Artificial Sequence
  Synthetic
auguguaugcuuuucuguua

SEQ ID NO: 248968 - RNA, 21 nt, Artificial Sequence
  Synthetic
aauguguaugcuuuucuguua

SEQ ID NO: 248969 - RNA, 22 nt, Artificial Sequence
  Synthetic
uaauguguaugcuuuucuguua

SEQ ID NO: 248970 - RNA, 23 nt, Artificial Sequence
  Synthetic
guaauguguaugcuuuucuguua

SEQ ID NO: 248971 - RNA, 24 nt, Artificial Sequence
  Synthetic
aguaauguguaugcuuuucuguua

SEQ ID NO: 248972 - RNA, 18 nt, Artificial Sequence
  Synthetic
aaucuuaacaaaguguua

SEQ ID NO: 248973 - RNA, 19 nt, Artificial Sequence
  Synthetic
aaaucuuaacaaaguguua

SEQ ID NO: 248974 - RNA, 20 nt, Artificial Sequence
  Synthetic
aaaaucuuaacaaaguguua

SEQ ID NO: 248975 - RNA, 21 nt, Artificial Sequence
  Synthetic
uaaaaucuuaacaaaguguua

SEQ ID NO: 248976 - RNA, 22 nt, Artificial Sequence
  Synthetic
uuaaaaucuuaacaaaguguua

SEQ ID NO: 248977 - RNA, 23 nt, Artificial Sequence
  Synthetic
uuuaaaaucuuaacaaaguguua

SEQ ID NO: 248978 - RNA, 24 nt, Artificial Sequence
  Synthetic
uuuuaaaaucuuaacaaaguguua

SEQ ID NO: 248979 - RNA, 18 nt, Artificial Sequence
  Synthetic
ugcuuuggcuaaguguua

SEQ ID NO: 248980 - RNA, 19 nt, Artificial Sequence
  Synthetic
uugcuuuggcuaaguguua

SEQ ID NO: 248981 - RNA, 20 nt, Artificial Sequence
  Synthetic
uuugcuuuggcuaaguguua

SEQ ID NO: 248982 - RNA, 21 nt, Artificial Sequence
  Synthetic
auuugcuuuggcuaaguguua

SEQ ID NO: 248983 - RNA, 22 nt, Artificial Sequence
  Synthetic
aauuugcuuuggcuaaguguua

SEQ ID NO: 248984 - RNA, 23 nt, Artificial Sequence
  Synthetic
uaauuugcuuuggcuaaguguua

SEQ ID NO: 248985 - RNA, 24 nt, Artificial Sequence
  Synthetic
auaauuugcuuuggcuaaguguua

SEQ ID NO: 248986 - RNA, 18 nt, Artificial Sequence
  Synthetic
uugcuacgcucaguguua

SEQ ID NO: 248987 - RNA, 19 nt, Artificial Sequence
  Synthetic
uuugcuacgcucaguguua

SEQ ID NO: 248988 - RNA, 20 nt, Artificial Sequence
  Synthetic
uuuugcuacgcucaguguua

SEQ ID NO: 248989 - RNA, 21 nt, Artificial Sequence
  Synthetic
cuuuugcuacgcucaguguua

SEQ ID NO: 248990 - RNA, 22 nt, Artificial Sequence
  Synthetic
ccuuuugcuacgcucaguguua

SEQ ID NO: 248991 - RNA, 23 nt, Artificial Sequence
  Synthetic
uccuuuugcuacgcucaguguua

SEQ ID NO: 248992 - RNA, 24 nt, Artificial Sequence
  Synthetic
cuccuuuugcuacgcucaguguua

SEQ ID NO: 248993 - RNA, 18 nt, Artificial Sequence
  Synthetic
gccaauaucugaguguua

SEQ ID NO: 248994 - RNA, 19 nt, Artificial Sequence
  Synthetic
ugccaauaucugaguguua

SEQ ID NO: 248995 - RNA, 20 nt, Artificial Sequence
  Synthetic
uugccaauaucugaguguua

SEQ ID NO: 248996 - RNA, 21 nt, Artificial Sequence
  Synthetic
auugccaauaucugaguguua

SEQ ID NO: 248997 - RNA, 22 nt, Artificial Sequence
  Synthetic
gauugccaauaucugaguguua

SEQ ID NO: 248998 - RNA, 23 nt, Artificial Sequence
  Synthetic
ggauugccaauaucugaguguua

SEQ ID NO: 248999 - RNA, 24 nt, Artificial Sequence
  Synthetic
aggauugccaauaucugaguguua

SEQ ID NO: 249000 - RNA, 18 nt, Artificial Sequence
  Synthetic
gcuuuucauuugguguua

SEQ ID NO: 249001 - RNA, 19 nt, Artificial Sequence
  Synthetic
ggcuuuucauuugguguua

SEQ ID NO: 249002 - RNA, 20 nt, Artificial Sequence
  Synthetic
aggcuuuucauuugguguua

SEQ ID NO: 249003 - RNA, 21 nt, Artificial Sequence
  Synthetic
aaggcuuuucauuugguguua

SEQ ID NO: 249004 - RNA, 22 nt, Artificial Sequence
  Synthetic
aaaggcuuuucauuugguguua

SEQ ID NO: 249005 - RNA, 23 nt, Artificial Sequence
  Synthetic
uaaaggcuuuucauuugguguua

SEQ ID NO: 249006 - RNA, 24 nt, Artificial Sequence
  Synthetic
cuaaaggcuuuucauuugguguua

SEQ ID NO: 249007 - RNA, 18 nt, Artificial Sequence
  Synthetic
cuucuuagauauguguua

SEQ ID NO: 249008 - RNA, 19 nt, Artificial Sequence
  Synthetic
ucuucuuagauauguguua

SEQ ID NO: 249009 - RNA, 20 nt, Artificial Sequence
  Synthetic
uucuucuuagauauguguua

SEQ ID NO: 249010 - RNA, 21 nt, Artificial Sequence
  Synthetic
uuucuucuuagauauguguua

SEQ ID NO: 249011 - RNA, 22 nt, Artificial Sequence
  Synthetic
cuuucuucuuagauauguguua

SEQ ID NO: 249012 - RNA, 23 nt, Artificial Sequence
  Synthetic
gcuuucuucuuagauauguguua

SEQ ID NO: 249013 - RNA, 24 nt, Artificial Sequence
  Synthetic
ugcuuucuucuuagauauguguua

SEQ ID NO: 249014 - RNA, 18 nt, Artificial Sequence
  Synthetic
uuauaauguccuguguua

SEQ ID NO: 249015 - RNA, 19 nt, Artificial Sequence
  Synthetic
auuauaauguccuguguua

SEQ ID NO: 249016 - RNA, 20 nt, Artificial Sequence
  Synthetic
aauuauaauguccuguguua

SEQ ID NO: 249017 - RNA, 21 nt, Artificial Sequence
  Synthetic
aaauuauaauguccuguguua

SEQ ID NO: 249018 - RNA, 22 nt, Artificial Sequence
  Synthetic
aaaauuauaauguccuguguua

SEQ ID NO: 249019 - RNA, 23 nt, Artificial Sequence
  Synthetic
uaaaauuauaauguccuguguua

SEQ ID NO: 249020 - RNA, 24 nt, Artificial Sequence
  Synthetic
uuaaaauuauaauguccuguguua

SEQ ID NO: 249021 - RNA, 18 nt, Artificial Sequence
  Synthetic
ugauaacguuguguguua

SEQ ID NO: 249022 - RNA, 19 nt, Artificial Sequence
  Synthetic
augauaacguuguguguua

SEQ ID NO: 249023 - RNA, 20 nt, Artificial Sequence
  Synthetic
uaugauaacguuguguguua

SEQ ID NO: 249024 - RNA, 21 nt, Artificial Sequence
  Synthetic
uuaugauaacguuguguguua

SEQ ID NO: 249025 - RNA, 22 nt, Artificial Sequence
  Synthetic
auuaugauaacguuguguguua

SEQ ID NO: 249026 - RNA, 23 nt, Artificial Sequence
  Synthetic
aauuaugauaacguuguguguua

SEQ ID NO: 249027 - RNA, 24 nt, Artificial Sequence
  Synthetic
aaauuaugauaacguuguguguua

SEQ ID NO: 249028 - RNA, 18 nt, Artificial Sequence
  Synthetic
guauuuuuuaaauuguua

SEQ ID NO: 249029 - RNA, 19 nt, Artificial Sequence
  Synthetic
cguauuuuuuaaauuguua

SEQ ID NO: 249030 - RNA, 20 nt, Artificial Sequence
  Synthetic
ccguauuuuuuaaauuguua

SEQ ID NO: 249031 - RNA, 21 nt, Artificial Sequence
  Synthetic
accguauuuuuuaaauuguua

SEQ ID NO: 249032 - RNA, 22 nt, Artificial Sequence
  Synthetic
uaccguauuuuuuaaauuguua

SEQ ID NO: 249033 - RNA, 23 nt, Artificial Sequence
  Synthetic
uuaccguauuuuuuaaauuguua

SEQ ID NO: 249034 - RNA, 24 nt, Artificial Sequence
  Synthetic
guuaccguauuuuuuaaauuguua

SEQ ID NO: 249035 - RNA, 18 nt, Artificial Sequence
  Synthetic
gagcaucuggaauuguua

SEQ ID NO: 249036 - RNA, 19 nt, Artificial Sequence
  Synthetic
agagcaucuggaauuguua

SEQ ID NO: 249037 - RNA, 20 nt, Artificial Sequence
  Synthetic
cagagcaucuggaauuguua

SEQ ID NO: 249038 - RNA, 21 nt, Artificial Sequence
  Synthetic
ccagagcaucuggaauuguua

SEQ ID NO: 249039 - RNA, 22 nt, Artificial Sequence
  Synthetic
gccagagcaucuggaauuguua

SEQ ID NO: 249040 - RNA, 23 nt, Artificial Sequence
  Synthetic
ugccagagcaucuggaauuguua

SEQ ID NO: 249041 - RNA, 24 nt, Artificial Sequence
  Synthetic
augccagagcaucuggaauuguua

SEQ ID NO: 249042 - RNA, 18 nt, Artificial Sequence
  Synthetic
auguuuugugcauuguua

SEQ ID NO: 249043 - RNA, 19 nt, Artificial Sequence
  Synthetic
aauguuuugugcauuguua

SEQ ID NO: 249044 - RNA, 20 nt, Artificial Sequence
  Synthetic
uaauguuuugugcauuguua

SEQ ID NO: 249045 - RNA, 21 nt, Artificial Sequence
  Synthetic
uuaauguuuugugcauuguua

SEQ ID NO: 249046 - RNA, 22 nt, Artificial Sequence
  Synthetic
auuaauguuuugugcauuguua

SEQ ID NO: 249047 - RNA, 23 nt, Artificial Sequence
  Synthetic
uauuaauguuuugugcauuguua

SEQ ID NO: 249048 - RNA, 24 nt, Artificial Sequence
  Synthetic
uuauuaauguuuugugcauuguua

SEQ ID NO: 249049 - RNA, 18 nt, Artificial Sequence
  Synthetic
caauguauaugauuguua

SEQ ID NO: 249050 - RNA, 19 nt, Artificial Sequence
  Synthetic
acaauguauaugauuguua

SEQ ID NO: 249051 - RNA, 20 nt, Artificial Sequence
  Synthetic
cacaauguauaugauuguua

SEQ ID NO: 249052 - RNA, 21 nt, Artificial Sequence
  Synthetic
ccacaauguauaugauuguua

SEQ ID NO: 249053 - RNA, 22 nt, Artificial Sequence
  Synthetic
uccacaauguauaugauuguua

SEQ ID NO: 249054 - RNA, 23 nt, Artificial Sequence
  Synthetic
uuccacaauguauaugauuguua

SEQ ID NO: 249055 - RNA, 24 nt, Artificial Sequence
  Synthetic
cuuccacaauguauaugauuguua

SEQ ID NO: 249056 - RNA, 18 nt, Artificial Sequence
  Synthetic
cuugcacuuauauuguua

SEQ ID NO: 249057 - RNA, 19 nt, Artificial Sequence
  Synthetic
gcuugcacuuauauuguua

SEQ ID NO: 249058 - RNA, 20 nt, Artificial Sequence
  Synthetic
agcuugcacuuauauuguua

SEQ ID NO: 249059 - RNA, 21 nt, Artificial Sequence
  Synthetic
aagcuugcacuuauauuguua

SEQ ID NO: 249060 - RNA, 22 nt, Artificial Sequence
  Synthetic
aaagcuugcacuuauauuguua

SEQ ID NO: 249061 - RNA, 23 nt, Artificial Sequence
  Synthetic
aaaagcuugcacuuauauuguua

SEQ ID NO: 249062 - RNA, 24 nt, Artificial Sequence
  Synthetic
aaaaagcuugcacuuauauuguua

SEQ ID NO: 249063 - RNA, 18 nt, Artificial Sequence
  Synthetic
aaauuugacuuauuguua

SEQ ID NO: 249064 - RNA, 19 nt, Artificial Sequence
  Synthetic
uaaauuugacuuauuguua

SEQ ID NO: 249065 - RNA, 20 nt, Artificial Sequence
  Synthetic
uuaaauuugacuuauuguua

SEQ ID NO: 249066 - RNA, 21 nt, Artificial Sequence
  Synthetic
auuaaauuugacuuauuguua

SEQ ID NO: 249067 - RNA, 22 nt, Artificial Sequence
  Synthetic
aauuaaauuugacuuauuguua

SEQ ID NO: 249068 - RNA, 23 nt, Artificial Sequence
  Synthetic
caauuaaauuugacuuauuguua

SEQ ID NO: 249069 - RNA, 24 nt, Artificial Sequence
  Synthetic
ucaauuaaauuugacuuauuguua

SEQ ID NO: 249070 - RNA, 18 nt, Artificial Sequence
  Synthetic
gacuaauaaugguuguua

SEQ ID NO: 249071 - RNA, 19 nt, Artificial Sequence
  Synthetic
agacuaauaaugguuguua

SEQ ID NO: 249072 - RNA, 20 nt, Artificial Sequence
  Synthetic
aagacuaauaaugguuguua

SEQ ID NO: 249073 - RNA, 21 nt, Artificial Sequence
  Synthetic
aaagacuaauaaugguuguua

SEQ ID NO: 249074 - RNA, 22 nt, Artificial Sequence
  Synthetic
aaaagacuaauaaugguuguua

SEQ ID NO: 249075 - RNA, 23 nt, Artificial Sequence
  Synthetic
caaaagacuaauaaugguuguua

SEQ ID NO: 249076 - RNA, 24 nt, Artificial Sequence
  Synthetic
acaaaagacuaauaaugguuguua

SEQ ID NO: 249077 - RNA, 18 nt, Artificial Sequence
  Synthetic
aaaaagagaauguuguua

SEQ ID NO: 249078 - RNA, 19 nt, Artificial Sequence
  Synthetic
aaaaaagagaauguuguua

SEQ ID NO: 249079 - RNA, 20 nt, Artificial Sequence
  Synthetic
aaaaaaagagaauguuguua

SEQ ID NO: 249080 - RNA, 21 nt, Artificial Sequence
  Synthetic
gaaaaaaagagaauguuguua

SEQ ID NO: 249081 - RNA, 22 nt, Artificial Sequence
  Synthetic
agaaaaaaagagaauguuguua

SEQ ID NO: 249082 - RNA, 23 nt, Artificial Sequence
  Synthetic
cagaaaaaaagagaauguuguua

SEQ ID NO: 249083 - RNA, 24 nt, Artificial Sequence
  Synthetic
ccagaaaaaaagagaauguuguua

SEQ ID NO: 249084 - RNA, 18 nt, Artificial Sequence
  Synthetic
gaagaaaauuuguuguua

SEQ ID NO: 249085 - RNA, 19 nt, Artificial Sequence
  Synthetic
agaagaaaauuuguuguua

SEQ ID NO: 249086 - RNA, 20 nt, Artificial Sequence
  Synthetic
aagaagaaaauuuguuguua

SEQ ID NO: 249087 - RNA, 21 nt, Artificial Sequence
  Synthetic
aaagaagaaaauuuguuguua

SEQ ID NO: 249088 - RNA, 22 nt, Artificial Sequence
  Synthetic
uaaagaagaaaauuuguuguua

SEQ ID NO: 249089 - RNA, 23 nt, Artificial Sequence
  Synthetic
auaaagaagaaaauuuguuguua

SEQ ID NO: 249090 - RNA, 24 nt, Artificial Sequence
  Synthetic
uauaaagaagaaaauuuguuguua

SEQ ID NO: 249091 - RNA, 18 nt, Artificial Sequence
  Synthetic
guacugugaaauuuguua

SEQ ID NO: 249092 - RNA, 19 nt, Artificial Sequence
  Synthetic
gguacugugaaauuuguua

SEQ ID NO: 249093 - RNA, 20 nt, Artificial Sequence
  Synthetic
agguacugugaaauuuguua

SEQ ID NO: 249094 - RNA, 21 nt, Artificial Sequence
  Synthetic
gagguacugugaaauuuguua

SEQ ID NO: 249095 - RNA, 22 nt, Artificial Sequence
  Synthetic
agagguacugugaaauuuguua

SEQ ID NO: 249096 - RNA, 23 nt, Artificial Sequence
  Synthetic
aagagguacugugaaauuuguua

SEQ ID NO: 249097 - RNA, 24 nt, Artificial Sequence
  Synthetic
aaagagguacugugaaauuuguua

SEQ ID NO: 249098 - RNA, 18 nt, Artificial Sequence
  Synthetic
guuagggagaguuuguua

SEQ ID NO: 249099 - RNA, 19 nt, Artificial Sequence
  Synthetic
aguuagggagaguuuguua

SEQ ID NO: 249100 - RNA, 20 nt, Artificial Sequence
  Synthetic
gaguuagggagaguuuguua

SEQ ID NO: 249101 - RNA, 21 nt, Artificial Sequence
  Synthetic
ggaguuagggagaguuuguua

SEQ ID NO: 249102 - RNA, 22 nt, Artificial Sequence
  Synthetic
aggaguuagggagaguuuguua

SEQ ID NO: 249103 - RNA, 23 nt, Artificial Sequence
  Synthetic
uaggaguuagggagaguuuguua

SEQ ID NO: 249104 - RNA, 24 nt, Artificial Sequence
  Synthetic
guaggaguuagggagaguuuguua

SEQ ID NO: 249105 - RNA, 18 nt, Artificial Sequence
  Synthetic
uuauguagcauuuuguua

SEQ ID NO: 249106 - RNA, 19 nt, Artificial Sequence
  Synthetic
guuauguagcauuuuguua

SEQ ID NO: 249107 - RNA, 20 nt, Artificial Sequence
  Synthetic
aguuauguagcauuuuguua

SEQ ID NO: 249108 - RNA, 21 nt, Artificial Sequence
  Synthetic
uaguuauguagcauuuuguua

SEQ ID NO: 249109 - RNA, 22 nt, Artificial Sequence
  Synthetic
guaguuauguagcauuuuguua

SEQ ID NO: 249110 - RNA, 23 nt, Artificial Sequence
  Synthetic
uguaguuauguagcauuuuguua

SEQ ID NO: 249111 - RNA, 24 nt, Artificial Sequence
  Synthetic
uuguaguuauguagcauuuuguua

SEQ ID NO: 249112 - RNA, 18 nt, Artificial Sequence
  Synthetic
cagaaaaaaaaaaauuua

SEQ ID NO: 249113 - RNA, 19 nt, Artificial Sequence
  Synthetic
ucagaaaaaaaaaaauuua

SEQ ID NO: 249114 - RNA, 20 nt, Artificial Sequence
  Synthetic
cucagaaaaaaaaaaauuua

SEQ ID NO: 249115 - RNA, 21 nt, Artificial Sequence
  Synthetic
ucucagaaaaaaaaaaauuua

SEQ ID NO: 249116 - RNA, 22 nt, Artificial Sequence
  Synthetic
aucucagaaaaaaaaaaauuua

SEQ ID NO: 249117 - RNA, 23 nt, Artificial Sequence
  Synthetic
caucucagaaaaaaaaaaauuua

SEQ ID NO: 249118 - RNA, 24 nt, Artificial Sequence
  Synthetic
ccaucucagaaaaaaaaaaauuua

SEQ ID NO: 249119 - RNA, 18 nt, Artificial Sequence
  Synthetic
uaaauugcccaaaauuua

SEQ ID NO: 249120 - RNA, 19 nt, Artificial Sequence
  Synthetic
uuaaauugcccaaaauuua

SEQ ID NO: 249121 - RNA, 20 nt, Artificial Sequence
  Synthetic
auuaaauugcccaaaauuua

SEQ ID NO: 249122 - RNA, 21 nt, Artificial Sequence
  Synthetic
aauuaaauugcccaaaauuua

SEQ ID NO: 249123 - RNA, 22 nt, Artificial Sequence
  Synthetic
aaauuaaauugcccaaaauuua

SEQ ID NO: 249124 - RNA, 23 nt, Artificial Sequence
  Synthetic
aaaauuaaauugcccaaaauuua

SEQ ID NO: 249125 - RNA, 24 nt, Artificial Sequence
  Synthetic
aaaaauuaaauugcccaaaauuua

SEQ ID NO: 249126 - RNA, 18 nt, Artificial Sequence
  Synthetic
uaaaacuaucaaaauuua

SEQ ID NO: 249127 - RNA, 19 nt, Artificial Sequence
  Synthetic
auaaaacuaucaaaauuua

SEQ ID NO: 249128 - RNA, 20 nt, Artificial Sequence
  Synthetic
cauaaaacuaucaaaauuua

SEQ ID NO: 249129 - RNA, 21 nt, Artificial Sequence
  Synthetic
acauaaaacuaucaaaauuua

SEQ ID NO: 249130 - RNA, 22 nt, Artificial Sequence
  Synthetic
aacauaaaacuaucaaaauuua

SEQ ID NO: 249131 - RNA, 23 nt, Artificial Sequence
  Synthetic
aaacauaaaacuaucaaaauuua

SEQ ID NO: 249132 - RNA, 24 nt, Artificial Sequence
  Synthetic
aaaacauaaaacuaucaaaauuua

SEQ ID NO: 249133 - RNA, 18 nt, Artificial Sequence
  Synthetic
acccggucagaaaauuua

SEQ ID NO: 249134 - RNA, 19 nt, Artificial Sequence
  Synthetic
aacccggucagaaaauuua

SEQ ID NO: 249135 - RNA, 20 nt, Artificial Sequence
  Synthetic
gaacccggucagaaaauuua

SEQ ID NO: 249136 - RNA, 21 nt, Artificial Sequence
  Synthetic
ugaacccggucagaaaauuua

SEQ ID NO: 249137 - RNA, 22 nt, Artificial Sequence
  Synthetic
gugaacccggucagaaaauuua

SEQ ID NO: 249138 - RNA, 23 nt, Artificial Sequence
  Synthetic
agugaacccggucagaaaauuua

SEQ ID NO: 249139 - RNA, 24 nt, Artificial Sequence
  Synthetic
aagugaacccggucagaaaauuua

SEQ ID NO: 249140 - RNA, 18 nt, Artificial Sequence
  Synthetic
agguaaaaugaaaauuua

SEQ ID NO: 249141 - RNA, 19 nt, Artificial Sequence
  Synthetic
uagguaaaaugaaaauuua

SEQ ID NO: 249142 - RNA, 20 nt, Artificial Sequence
  Synthetic
guagguaaaaugaaaauuua

SEQ ID NO: 249143 - RNA, 21 nt, Artificial Sequence
  Synthetic
aguagguaaaaugaaaauuua

SEQ ID NO: 249144 - RNA, 22 nt, Artificial Sequence
  Synthetic
uaguagguaaaaugaaaauuua

SEQ ID NO: 249145 - RNA, 23 nt, Artificial Sequence
  Synthetic
uuaguagguaaaaugaaaauuua

SEQ ID NO: 249146 - RNA, 24 nt, Artificial Sequence
  Synthetic
auuaguagguaaaaugaaaauuua

SEQ ID NO: 249147 - RNA, 18 nt, Artificial Sequence
  Synthetic
uggagcgagacaaauuua

SEQ ID NO: 249148 - RNA, 19 nt, Artificial Sequence
  Synthetic
auggagcgagacaaauuua

SEQ ID NO: 249149 - RNA, 20 nt, Artificial Sequence
  Synthetic
aauggagcgagacaaauuua

SEQ ID NO: 249150 - RNA, 21 nt, Artificial Sequence
  Synthetic
uaauggagcgagacaaauuua

SEQ ID NO: 249151 - RNA, 22 nt, Artificial Sequence
  Synthetic
uuaauggagcgagacaaauuua

SEQ ID NO: 249152 - RNA, 23 nt, Artificial Sequence
  Synthetic
auuaauggagcgagacaaauuua

SEQ ID NO: 249153 - RNA, 24 nt, Artificial Sequence
  Synthetic
aauuaauggagcgagacaaauuua

SEQ ID NO: 249154 - RNA, 18 nt, Artificial Sequence
  Synthetic
ucuguaucuacaaauuua

SEQ ID NO: 249155 - RNA, 19 nt, Artificial Sequence
  Synthetic
aucuguaucuacaaauuua

SEQ ID NO: 249156 - RNA, 20 nt, Artificial Sequence
  Synthetic
aaucuguaucuacaaauuua

SEQ ID NO: 249157 - RNA, 21 nt, Artificial Sequence
  Synthetic
aaaucuguaucuacaaauuua

SEQ ID NO: 249158 - RNA, 22 nt, Artificial Sequence
  Synthetic
caaaucuguaucuacaaauuua

SEQ ID NO: 249159 - RNA, 23 nt, Artificial Sequence
  Synthetic
ucaaaucuguaucuacaaauuua

SEQ ID NO: 249160 - RNA, 24 nt, Artificial Sequence
  Synthetic
gucaaaucuguaucuacaaauuua

SEQ ID NO: 249161 - RNA, 18 nt, Artificial Sequence
  Synthetic
guuaauaugccaaauuua

SEQ ID NO: 249162 - RNA, 19 nt, Artificial Sequence
  Synthetic
uguuaauaugccaaauuua

SEQ ID NO: 249163 - RNA, 20 nt, Artificial Sequence
  Synthetic
uuguuaauaugccaaauuua

SEQ ID NO: 249164 - RNA, 21 nt, Artificial Sequence
  Synthetic
uuuguuaauaugccaaauuua

SEQ ID NO: 249165 - RNA, 22 nt, Artificial Sequence
  Synthetic
cuuuguuaauaugccaaauuua

SEQ ID NO: 249166 - RNA, 23 nt, Artificial Sequence
  Synthetic
ccuuuguuaauaugccaaauuua

SEQ ID NO: 249167 - RNA, 24 nt, Artificial Sequence
  Synthetic
uccuuuguuaauaugccaaauuua

SEQ ID NO: 249168 - RNA, 18 nt, Artificial Sequence
  Synthetic
uaguuuuuagcaaauuua

SEQ ID NO: 249169 - RNA, 19 nt, Artificial Sequence
  Synthetic
guaguuuuuagcaaauuua

SEQ ID NO: 249170 - RNA, 20 nt, Artificial Sequence
  Synthetic
uguaguuuuuagcaaauuua

SEQ ID NO: 249171 - RNA, 21 nt, Artificial Sequence
  Synthetic
auguaguuuuuagcaaauuua

SEQ ID NO: 249172 - RNA, 22 nt, Artificial Sequence
  Synthetic
aauguaguuuuuagcaaauuua

SEQ ID NO: 249173 - RNA, 23 nt, Artificial Sequence
  Synthetic
gaauguaguuuuuagcaaauuua

SEQ ID NO: 249174 - RNA, 24 nt, Artificial Sequence
  Synthetic
agaauguaguuuuuagcaaauuua

SEQ ID NO: 249175 - RNA, 18 nt, Artificial Sequence
  Synthetic
gggagcuaaggaaauuua

SEQ ID NO: 249176 - RNA, 19 nt, Artificial Sequence
  Synthetic
ggggagcuaaggaaauuua

SEQ ID NO: 249177 - RNA, 20 nt, Artificial Sequence
  Synthetic
aggggagcuaaggaaauuua

SEQ ID NO: 249178 - RNA, 21 nt, Artificial Sequence
  Synthetic
uaggggagcuaaggaaauuua

SEQ ID NO: 249179 - RNA, 22 nt, Artificial Sequence
  Synthetic
cuaggggagcuaaggaaauuua

SEQ ID NO: 249180 - RNA, 23 nt, Artificial Sequence
  Synthetic
gcuaggggagcuaaggaaauuua

SEQ ID NO: 249181 - RNA, 24 nt, Artificial Sequence
  Synthetic
agcuaggggagcuaaggaaauuua

SEQ ID NO: 249182 - RNA, 18 nt, Artificial Sequence
  Synthetic
uaguugacaauaaauuua

SEQ ID NO: 249183 - RNA, 19 nt, Artificial Sequence
  Synthetic
guaguugacaauaaauuua

SEQ ID NO: 249184 - RNA, 20 nt, Artificial Sequence
  Synthetic
gguaguugacaauaaauuua

SEQ ID NO: 249185 - RNA, 21 nt, Artificial Sequence
  Synthetic
agguaguugacaauaaauuua

SEQ ID NO: 249186 - RNA, 22 nt, Artificial Sequence
  Synthetic
aagguaguugacaauaaauuua

SEQ ID NO: 249187 - RNA, 23 nt, Artificial Sequence
  Synthetic
gaagguaguugacaauaaauuua

SEQ ID NO: 249188 - RNA, 24 nt, Artificial Sequence
  Synthetic
ggaagguaguugacaauaaauuua

SEQ ID NO: 249189 - RNA, 18 nt, Artificial Sequence
  Synthetic
agggacacauuaaauuua

SEQ ID NO: 249190 - RNA, 19 nt, Artificial Sequence
  Synthetic
gagggacacauuaaauuua

SEQ ID NO: 249191 - RNA, 20 nt, Artificial Sequence
  Synthetic
agagggacacauuaaauuua

SEQ ID NO: 249192 - RNA, 21 nt, Artificial Sequence
  Synthetic
cagagggacacauuaaauuua

SEQ ID NO: 249193 - RNA, 22 nt, Artificial Sequence
  Synthetic
acagagggacacauuaaauuua

SEQ ID NO: 249194 - RNA, 23 nt, Artificial Sequence
  Synthetic
gacagagggacacauuaaauuua

SEQ ID NO: 249195 - RNA, 24 nt, Artificial Sequence
  Synthetic
ggacagagggacacauuaaauuua

SEQ ID NO: 249196 - RNA, 18 nt, Artificial Sequence
  Synthetic
cauuauggauuaaauuua

SEQ ID NO: 249197 - RNA, 19 nt, Artificial Sequence
  Synthetic
acauuauggauuaaauuua

SEQ ID NO: 249198 - RNA, 20 nt, Artificial Sequence
  Synthetic
aacauuauggauuaaauuua

SEQ ID NO: 249199 - RNA, 21 nt, Artificial Sequence
  Synthetic
aaacauuauggauuaaauuua

SEQ ID NO: 249200 - RNA, 22 nt, Artificial Sequence
  Synthetic
aaaacauuauggauuaaauuua

SEQ ID NO: 249201 - RNA, 23 nt, Artificial Sequence
  Synthetic
caaaacauuauggauuaaauuua

SEQ ID NO: 249202 - RNA, 24 nt, Artificial Sequence
  Synthetic
acaaaacauuauggauuaaauuua

SEQ ID NO: 249203 - RNA, 18 nt, Artificial Sequence
  Synthetic
uaguaaauaaccaauuua

SEQ ID NO: 249204 - RNA, 19 nt, Artificial Sequence
  Synthetic
guaguaaauaaccaauuua

SEQ ID NO: 249205 - RNA, 20 nt, Artificial Sequence
  Synthetic
aguaguaaauaaccaauuua

SEQ ID NO: 249206 - RNA, 21 nt, Artificial Sequence
  Synthetic
aaguaguaaauaaccaauuua

SEQ ID NO: 249207 - RNA, 22 nt, Artificial Sequence
  Synthetic
gaaguaguaaauaaccaauuua

SEQ ID NO: 249208 - RNA, 23 nt, Artificial Sequence
  Synthetic
agaaguaguaaauaaccaauuua

SEQ ID NO: 249209 - RNA, 24 nt, Artificial Sequence
  Synthetic
cagaaguaguaaauaaccaauuua

SEQ ID NO: 249210 - RNA, 18 nt, Artificial Sequence
  Synthetic
auguaucucaucaauuua

SEQ ID NO: 249211 - RNA, 19 nt, Artificial Sequence
  Synthetic
gauguaucucaucaauuua

SEQ ID NO: 249212 - RNA, 20 nt, Artificial Sequence
  Synthetic
ugauguaucucaucaauuua

SEQ ID NO: 249213 - RNA, 21 nt, Artificial Sequence
  Synthetic
uugauguaucucaucaauuua

SEQ ID NO: 249214 - RNA, 22 nt, Artificial Sequence
  Synthetic
uuugauguaucucaucaauuua

SEQ ID NO: 249215 - RNA, 23 nt, Artificial Sequence
  Synthetic
uuuugauguaucucaucaauuua

SEQ ID NO: 249216 - RNA, 24 nt, Artificial Sequence
  Synthetic
uuuuugauguaucucaucaauuua

SEQ ID NO: 249217 - RNA, 18 nt, Artificial Sequence
  Synthetic
agguggugaaagaauuua

SEQ ID NO: 249218 - RNA, 19 nt, Artificial Sequence
  Synthetic
cagguggugaaagaauuua

SEQ ID NO: 249219 - RNA, 20 nt, Artificial Sequence
  Synthetic
gcagguggugaaagaauuua

SEQ ID NO: 249220 - RNA, 21 nt, Artificial Sequence
  Synthetic
agcagguggugaaagaauuua

SEQ ID NO: 249221 - RNA, 22 nt, Artificial Sequence
  Synthetic
gagcagguggugaaagaauuua

SEQ ID NO: 249222 - RNA, 23 nt, Artificial Sequence
  Synthetic
agagcagguggugaaagaauuua

SEQ ID NO: 249223 - RNA, 24 nt, Artificial Sequence
  Synthetic
aagagcagguggugaaagaauuua

SEQ ID NO: 249224 - RNA, 18 nt, Artificial Sequence
  Synthetic
gguauggcacugaauuua

SEQ ID NO: 249225 - RNA, 19 nt, Artificial Sequence
  Synthetic
ggguauggcacugaauuua

SEQ ID NO: 249226 - RNA, 20 nt, Artificial Sequence
  Synthetic
uggguauggcacugaauuua

SEQ ID NO: 249227 - RNA, 21 nt, Artificial Sequence
  Synthetic
auggguauggcacugaauuua

SEQ ID NO: 249228 - RNA, 22 nt, Artificial Sequence
  Synthetic
uauggguauggcacugaauuua

SEQ ID NO: 249229 - RNA, 23 nt, Artificial Sequence
  Synthetic
guauggguauggcacugaauuua

SEQ ID NO: 249230 - RNA, 24 nt, Artificial Sequence
  Synthetic
aguauggguauggcacugaauuua

SEQ ID NO: 249231 - RNA, 18 nt, Artificial Sequence
  Synthetic
uuuacauuucugaauuua

SEQ ID NO: 249232 - RNA, 19 nt, Artificial Sequence
  Synthetic
cuuuacauuucugaauuua

SEQ ID NO: 249233 - RNA, 20 nt, Artificial Sequence
  Synthetic
ucuuuacauuucugaauuua

SEQ ID NO: 249234 - RNA, 21 nt, Artificial Sequence
  Synthetic
uucuuuacauuucugaauuua

SEQ ID NO: 249235 - RNA, 22 nt, Artificial Sequence
  Synthetic
uuucuuuacauuucugaauuua

SEQ ID NO: 249236 - RNA, 23 nt, Artificial Sequence
  Synthetic
auuucuuuacauuucugaauuua

SEQ ID NO: 249237 - RNA, 24 nt, Artificial Sequence
  Synthetic
uauuucuuuacauuucugaauuua

SEQ ID NO: 249238 - RNA, 18 nt, Artificial Sequence
  Synthetic
uuuaaacgagauaauuua

SEQ ID NO: 249239 - RNA, 19 nt, Artificial Sequence
  Synthetic
guuuaaacgagauaauuua

SEQ ID NO: 249240 - RNA, 20 nt, Artificial Sequence
  Synthetic
uguuuaaacgagauaauuua

SEQ ID NO: 249241 - RNA, 21 nt, Artificial Sequence
  Synthetic
cuguuuaaacgagauaauuua

SEQ ID NO: 249242 - RNA, 22 nt, Artificial Sequence
  Synthetic
acuguuuaaacgagauaauuua

SEQ ID NO: 249243 - RNA, 23 nt, Artificial Sequence
  Synthetic
aacuguuuaaacgagauaauuua

SEQ ID NO: 249244 - RNA, 24 nt, Artificial Sequence
  Synthetic
uaacuguuuaaacgagauaauuua

SEQ ID NO: 249245 - RNA, 18 nt, Artificial Sequence
  Synthetic
gaauacuguuauaauuua

SEQ ID NO: 249246 - RNA, 19 nt, Artificial Sequence
  Synthetic
ugaauacuguuauaauuua

SEQ ID NO: 249247 - RNA, 20 nt, Artificial Sequence
  Synthetic
cugaauacuguuauaauuua

SEQ ID NO: 249248 - RNA, 21 nt, Artificial Sequence
  Synthetic
ucugaauacuguuauaauuua

SEQ ID NO: 249249 - RNA, 22 nt, Artificial Sequence
  Synthetic
uucugaauacuguuauaauuua

SEQ ID NO: 249250 - RNA, 23 nt, Artificial Sequence
  Synthetic
auucugaauacuguuauaauuua

SEQ ID NO: 249251 - RNA, 24 nt, Artificial Sequence
  Synthetic
aauucugaauacuguuauaauuua

SEQ ID NO: 249252 - RNA, 18 nt, Artificial Sequence
  Synthetic
guuuuauaggguaauuua

SEQ ID NO: 249253 - RNA, 19 nt, Artificial Sequence
  Synthetic
aguuuuauaggguaauuua

SEQ ID NO: 249254 - RNA, 20 nt, Artificial Sequence
  Synthetic
aaguuuuauaggguaauuua

SEQ ID NO: 249255 - RNA, 21 nt, Artificial Sequence
  Synthetic
gaaguuuuauaggguaauuua

SEQ ID NO: 249256 - RNA, 22 nt, Artificial Sequence
  Synthetic
ggaaguuuuauaggguaauuua

SEQ ID NO: 249257 - RNA, 23 nt, Artificial Sequence
  Synthetic
uggaaguuuuauaggguaauuua

SEQ ID NO: 249258 - RNA, 24 nt, Artificial Sequence
  Synthetic
auggaaguuuuauaggguaauuua

SEQ ID NO: 249259 - RNA, 18 nt, Artificial Sequence
  Synthetic
gcccugauauguaauuua

SEQ ID NO: 249260 - RNA, 19 nt, Artificial Sequence
  Synthetic
ugcccugauauguaauuua

SEQ ID NO: 249261 - RNA, 20 nt, Artificial Sequence
  Synthetic
uugcccugauauguaauuua

SEQ ID NO: 249262 - RNA, 21 nt, Artificial Sequence
  Synthetic
uuugcccugauauguaauuua

SEQ ID NO: 249263 - RNA, 22 nt, Artificial Sequence
  Synthetic
uuuugcccugauauguaauuua

SEQ ID NO: 249264 - RNA, 23 nt, Artificial Sequence
  Synthetic
cuuuugcccugauauguaauuua

SEQ ID NO: 249265 - RNA, 24 nt, Artificial Sequence
  Synthetic
ucuuuugcccugauauguaauuua

SEQ ID NO: 249266 - RNA, 18 nt, Artificial Sequence
  Synthetic
aaaccgucaauuaauuua

SEQ ID NO: 249267 - RNA, 19 nt, Artificial Sequence
  Synthetic
gaaaccgucaauuaauuua

SEQ ID NO: 249268 - RNA, 20 nt, Artificial Sequence
  Synthetic
agaaaccgucaauuaauuua

SEQ ID NO: 249269 - RNA, 21 nt, Artificial Sequence
  Synthetic
gagaaaccgucaauuaauuua

SEQ ID NO: 249270 - RNA, 22 nt, Artificial Sequence
  Synthetic
ggagaaaccgucaauuaauuua

SEQ ID NO: 249271 - RNA, 23 nt, Artificial Sequence
  Synthetic
aggagaaaccgucaauuaauuua

SEQ ID NO: 249272 - RNA, 24 nt, Artificial Sequence
  Synthetic
aaggagaaaccgucaauuaauuua

SEQ ID NO: 249273 - RNA, 18 nt, Artificial Sequence
  Synthetic
aaauaacauuuuaauuua

SEQ ID NO: 249274 - RNA, 19 nt, Artificial Sequence
  Synthetic
aaaauaacauuuuaauuua

SEQ ID NO: 249275 - RNA, 20 nt, Artificial Sequence
  Synthetic
gaaaauaacauuuuaauuua

SEQ ID NO: 249276 - RNA, 21 nt, Artificial Sequence
  Synthetic
agaaaauaacauuuuaauuua

SEQ ID NO: 249277 - RNA, 22 nt, Artificial Sequence
  Synthetic
aagaaaauaacauuuuaauuua

SEQ ID NO: 249278 - RNA, 23 nt, Artificial Sequence
  Synthetic
aaagaaaauaacauuuuaauuua

SEQ ID NO: 249279 - RNA, 24 nt, Artificial Sequence
  Synthetic
gaaagaaaauaacauuuuaauuua

SEQ ID NO: 249280 - RNA, 18 nt, Artificial Sequence
  Synthetic
uuuauucagaaacauuua

SEQ ID NO: 249281 - RNA, 19 nt, Artificial Sequence
  Synthetic
auuuauucagaaacauuua

SEQ ID NO: 249282 - RNA, 20 nt, Artificial Sequence
  Synthetic
uauuuauucagaaacauuua

SEQ ID NO: 249283 - RNA, 21 nt, Artificial Sequence
  Synthetic
uuauuuauucagaaacauuua

SEQ ID NO: 249284 - RNA, 22 nt, Artificial Sequence
  Synthetic
uuuauuuauucagaaacauuua

SEQ ID NO: 249285 - RNA, 23 nt, Artificial Sequence
  Synthetic
guuuauuuauucagaaacauuua

SEQ ID NO: 249286 - RNA, 24 nt, Artificial Sequence
  Synthetic
aguuuauuuauucagaaacauuua

SEQ ID NO: 249287 - RNA, 18 nt, Artificial Sequence
  Synthetic
auaaucagacaacauuua

SEQ ID NO: 249288 - RNA, 19 nt, Artificial Sequence
  Synthetic
uauaaucagacaacauuua

SEQ ID NO: 249289 - RNA, 20 nt, Artificial Sequence
  Synthetic
cuauaaucagacaacauuua

SEQ ID NO: 249290 - RNA, 21 nt, Artificial Sequence
  Synthetic
ucuauaaucagacaacauuua

SEQ ID NO: 249291 - RNA, 22 nt, Artificial Sequence
  Synthetic
aucuauaaucagacaacauuua

SEQ ID NO: 249292 - RNA, 23 nt, Artificial Sequence
  Synthetic
uaucuauaaucagacaacauuua

SEQ ID NO: 249293 - RNA, 24 nt, Artificial Sequence
  Synthetic
guaucuauaaucagacaacauuua

SEQ ID NO: 249294 - RNA, 18 nt, Artificial Sequence
  Synthetic
aauccuauagaacauuua

SEQ ID NO: 249295 - RNA, 19 nt, Artificial Sequence
  Synthetic
aaauccuauagaacauuua

SEQ ID NO: 249296 - RNA, 20 nt, Artificial Sequence
  Synthetic
caaauccuauagaacauuua

SEQ ID NO: 249297 - RNA, 21 nt, Artificial Sequence
  Synthetic
acaaauccuauagaacauuua

SEQ ID NO: 249298 - RNA, 22 nt, Artificial Sequence
  Synthetic
uacaaauccuauagaacauuua

SEQ ID NO: 249299 - RNA, 23 nt, Artificial Sequence
  Synthetic
uuacaaauccuauagaacauuua

SEQ ID NO: 249300 - RNA, 24 nt, Artificial Sequence
  Synthetic
uuuacaaauccuauagaacauuua

SEQ ID NO: 249301 - RNA, 18 nt, Artificial Sequence
  Synthetic
ugaccuaacuaacauuua

SEQ ID NO: 249302 - RNA, 19 nt, Artificial Sequence
  Synthetic
uugaccuaacuaacauuua

SEQ ID NO: 249303 - RNA, 20 nt, Artificial Sequence
  Synthetic
cuugaccuaacuaacauuua

SEQ ID NO: 249304 - RNA, 21 nt, Artificial Sequence
  Synthetic
gcuugaccuaacuaacauuua

SEQ ID NO: 249305 - RNA, 22 nt, Artificial Sequence
  Synthetic
agcuugaccuaacuaacauuua

SEQ ID NO: 249306 - RNA, 23 nt, Artificial Sequence
  Synthetic
cagcuugaccuaacuaacauuua

SEQ ID NO: 249307 - RNA, 24 nt, Artificial Sequence
  Synthetic
ccagcuugaccuaacuaacauuua

SEQ ID NO: 249308 - RNA, 18 nt, Artificial Sequence
  Synthetic
guccccagaccacauuua

SEQ ID NO: 249309 - RNA, 19 nt, Artificial Sequence
  Synthetic
gguccccagaccacauuua

SEQ ID NO: 249310 - RNA, 20 nt, Artificial Sequence
  Synthetic
ggguccccagaccacauuua

SEQ ID NO: 249311 - RNA, 21 nt, Artificial Sequence
  Synthetic
gggguccccagaccacauuua

SEQ ID NO: 249312 - RNA, 22 nt, Artificial Sequence
  Synthetic
agggguccccagaccacauuua

SEQ ID NO: 249313 - RNA, 23 nt, Artificial Sequence
  Synthetic
cagggguccccagaccacauuua

SEQ ID NO: 249314 - RNA, 24 nt, Artificial Sequence
  Synthetic
ccagggguccccagaccacauuua

SEQ ID NO: 249315 - RNA, 18 nt, Artificial Sequence
  Synthetic
ugcagaguaccacauuua

SEQ ID NO: 249316 - RNA, 19 nt, Artificial Sequence
  Synthetic
augcagaguaccacauuua

SEQ ID NO: 249317 - RNA, 20 nt, Artificial Sequence
  Synthetic
uaugcagaguaccacauuua

SEQ ID NO: 249318 - RNA, 21 nt, Artificial Sequence
  Synthetic
cuaugcagaguaccacauuua

SEQ ID NO: 249319 - RNA, 22 nt, Artificial Sequence
  Synthetic
ucuaugcagaguaccacauuua

SEQ ID NO: 249320 - RNA, 23 nt, Artificial Sequence
  Synthetic
uucuaugcagaguaccacauuua

SEQ ID NO: 249321 - RNA, 24 nt, Artificial Sequence
  Synthetic
uuucuaugcagaguaccacauuua

SEQ ID NO: 249322 - RNA, 18 nt, Artificial Sequence
  Synthetic
guuuaauaaucacauuua

SEQ ID NO: 249323 - RNA, 19 nt, Artificial Sequence
  Synthetic
gguuuaauaaucacauuua

SEQ ID NO: 249324 - RNA, 20 nt, Artificial Sequence
  Synthetic
agguuuaauaaucacauuua

SEQ ID NO: 249325 - RNA, 21 nt, Artificial Sequence
  Synthetic
aagguuuaauaaucacauuua

SEQ ID NO: 249326 - RNA, 22 nt, Artificial Sequence
  Synthetic
aaagguuuaauaaucacauuua

SEQ ID NO: 249327 - RNA, 23 nt, Artificial Sequence
  Synthetic
uaaagguuuaauaaucacauuua

SEQ ID NO: 249328 - RNA, 24 nt, Artificial Sequence
  Synthetic
uuaaagguuuaauaaucacauuua

SEQ ID NO: 249329 - RNA, 18 nt, Artificial Sequence
  Synthetic
ucauuugacagacauuua

SEQ ID NO: 249330 - RNA, 19 nt, Artificial Sequence
  Synthetic
cucauuugacagacauuua

SEQ ID NO: 249331 - RNA, 20 nt, Artificial Sequence
  Synthetic
acucauuugacagacauuua

SEQ ID NO: 249332 - RNA, 21 nt, Artificial Sequence
  Synthetic
aacucauuugacagacauuua

SEQ ID NO: 249333 - RNA, 22 nt, Artificial Sequence
  Synthetic
caacucauuugacagacauuua

SEQ ID NO: 249334 - RNA, 23 nt, Artificial Sequence
  Synthetic
acaacucauuugacagacauuua

SEQ ID NO: 249335 - RNA, 24 nt, Artificial Sequence
  Synthetic
uacaacucauuugacagacauuua

SEQ ID NO: 249336 - RNA, 18 nt, Artificial Sequence
  Synthetic
acuagaagaggacauuua

SEQ ID NO: 249337 - RNA, 19 nt, Artificial Sequence
  Synthetic
cacuagaagaggacauuua

SEQ ID NO: 249338 - RNA, 20 nt, Artificial Sequence
  Synthetic
gcacuagaagaggacauuua

SEQ ID NO: 249339 - RNA, 21 nt, Artificial Sequence
  Synthetic
ggcacuagaagaggacauuua

SEQ ID NO: 249340 - RNA, 22 nt, Artificial Sequence
  Synthetic
aggcacuagaagaggacauuua

SEQ ID NO: 249341 - RNA, 23 nt, Artificial Sequence
  Synthetic
uaggcacuagaagaggacauuua

SEQ ID NO: 249342 - RNA, 24 nt, Artificial Sequence
  Synthetic
uuaggcacuagaagaggacauuua

SEQ ID NO: 249343 - RNA, 18 nt, Artificial Sequence
  Synthetic
aucuagaguugacauuua

SEQ ID NO: 249344 - RNA, 19 nt, Artificial Sequence
  Synthetic
aaucuagaguugacauuua

SEQ ID NO: 249345 - RNA, 20 nt, Artificial Sequence
  Synthetic
aaaucuagaguugacauuua

SEQ ID NO: 249346 - RNA, 21 nt, Artificial Sequence
  Synthetic
gaaaucuagaguugacauuua

SEQ ID NO: 249347 - RNA, 22 nt, Artificial Sequence
  Synthetic
agaaaucuagaguugacauuua

SEQ ID NO: 249348 - RNA, 23 nt, Artificial Sequence
  Synthetic
cagaaaucuagaguugacauuua

SEQ ID NO: 249349 - RNA, 24 nt, Artificial Sequence
  Synthetic
acagaaaucuagaguugacauuua

SEQ ID NO: 249350 - RNA, 18 nt, Artificial Sequence
  Synthetic
cauucuuuccaccauuua

SEQ ID NO: 249351 - RNA, 19 nt, Artificial Sequence
  Synthetic
ucauucuuuccaccauuua

SEQ ID NO: 249352 - RNA, 20 nt, Artificial Sequence
  Synthetic
uucauucuuuccaccauuua

SEQ ID NO: 249353 - RNA, 21 nt, Artificial Sequence
  Synthetic
uuucauucuuuccaccauuua

SEQ ID NO: 249354 - RNA, 22 nt, Artificial Sequence
  Synthetic
uuuucauucuuuccaccauuua

SEQ ID NO: 249355 - RNA, 23 nt, Artificial Sequence
  Synthetic
uuuuucauucuuuccaccauuua

SEQ ID NO: 249356 - RNA, 24 nt, Artificial Sequence
  Synthetic
uuuuuucauucuuuccaccauuua

SEQ ID NO: 249357 - RNA, 18 nt, Artificial Sequence
  Synthetic
uuuucccaauaccauuua

SEQ ID NO: 249358 - RNA, 19 nt, Artificial Sequence
  Synthetic
guuuucccaauaccauuua

SEQ ID NO: 249359 - RNA, 20 nt, Artificial Sequence
  Synthetic
aguuuucccaauaccauuua

SEQ ID NO: 249360 - RNA, 21 nt, Artificial Sequence
  Synthetic
caguuuucccaauaccauuua

SEQ ID NO: 249361 - RNA, 22 nt, Artificial Sequence
  Synthetic
ucaguuuucccaauaccauuua

SEQ ID NO: 249362 - RNA, 23 nt, Artificial Sequence
  Synthetic
uucaguuuucccaauaccauuua

SEQ ID NO: 249363 - RNA, 24 nt, Artificial Sequence
  Synthetic
auucaguuuucccaauaccauuua

SEQ ID NO: 249364 - RNA, 18 nt, Artificial Sequence
  Synthetic
ugaggguauuaccauuua

SEQ ID NO: 249365 - RNA, 19 nt, Artificial Sequence
  Synthetic
augaggguauuaccauuua

SEQ ID NO: 249366 - RNA, 20 nt, Artificial Sequence
  Synthetic
gaugaggguauuaccauuua

SEQ ID NO: 249367 - RNA, 21 nt, Artificial Sequence
  Synthetic
ugaugaggguauuaccauuua

SEQ ID NO: 249368 - RNA, 22 nt, Artificial Sequence
  Synthetic
augaugaggguauuaccauuua

SEQ ID NO: 249369 - RNA, 23 nt, Artificial Sequence
  Synthetic
uaugaugaggguauuaccauuua

SEQ ID NO: 249370 - RNA, 24 nt, Artificial Sequence
  Synthetic
uuaugaugaggguauuaccauuua

SEQ ID NO: 249371 - RNA, 18 nt, Artificial Sequence
  Synthetic
gaaauaugaacccauuua

SEQ ID NO: 249372 - RNA, 19 nt, Artificial Sequence
  Synthetic
agaaauaugaacccauuua

SEQ ID NO: 249373 - RNA, 20 nt, Artificial Sequence
  Synthetic
gagaaauaugaacccauuua

SEQ ID NO: 249374 - RNA, 21 nt, Artificial Sequence
  Synthetic
agagaaauaugaacccauuua

SEQ ID NO: 249375 - RNA, 22 nt, Artificial Sequence
  Synthetic
aagagaaauaugaacccauuua

SEQ ID NO: 249376 - RNA, 23 nt, Artificial Sequence
  Synthetic
uaagagaaauaugaacccauuua

SEQ ID NO: 249377 - RNA, 24 nt, Artificial Sequence
  Synthetic
auaagagaaauaugaacccauuua

SEQ ID NO: 249378 - RNA, 18 nt, Artificial Sequence
  Synthetic
aucaguaauugccauuua

SEQ ID NO: 249379 - RNA, 19 nt, Artificial Sequence
  Synthetic
aaucaguaauugccauuua

SEQ ID NO: 249380 - RNA, 20 nt, Artificial Sequence
  Synthetic
aaaucaguaauugccauuua

SEQ ID NO: 249381 - RNA, 21 nt, Artificial Sequence
  Synthetic
gaaaucaguaauugccauuua

SEQ ID NO: 249382 - RNA, 22 nt, Artificial Sequence
  Synthetic
ugaaaucaguaauugccauuua

SEQ ID NO: 249383 - RNA, 23 nt, Artificial Sequence
  Synthetic
uugaaaucaguaauugccauuua

SEQ ID NO: 249384 - RNA, 24 nt, Artificial Sequence
  Synthetic
auugaaaucaguaauugccauuua

SEQ ID NO: 249385 - RNA, 18 nt, Artificial Sequence
  Synthetic
uacacuccuauccauuua

SEQ ID NO: 249386 - RNA, 19 nt, Artificial Sequence
  Synthetic
auacacuccuauccauuua

SEQ ID NO: 249387 - RNA, 20 nt, Artificial Sequence
  Synthetic
cauacacuccuauccauuua

SEQ ID NO: 249388 - RNA, 21 nt, Artificial Sequence
  Synthetic
acauacacuccuauccauuua

SEQ ID NO: 249389 - RNA, 22 nt, Artificial Sequence
  Synthetic
gacauacacuccuauccauuua

SEQ ID NO: 249390 - RNA, 23 nt, Artificial Sequence
  Synthetic
ugacauacacuccuauccauuua

SEQ ID NO: 249391 - RNA, 24 nt, Artificial Sequence
  Synthetic
cugacauacacuccuauccauuua

SEQ ID NO: 249392 - RNA, 18 nt, Artificial Sequence
  Synthetic
ucucagaaccuccauuua

SEQ ID NO: 249393 - RNA, 19 nt, Artificial Sequence
  Synthetic
aucucagaaccuccauuua

SEQ ID NO: 249394 - RNA, 20 nt, Artificial Sequence
  Synthetic
caucucagaaccuccauuua

SEQ ID NO: 249395 - RNA, 21 nt, Artificial Sequence
  Synthetic
ucaucucagaaccuccauuua

SEQ ID NO: 249396 - RNA, 22 nt, Artificial Sequence
  Synthetic
uucaucucagaaccuccauuua

SEQ ID NO: 249397 - RNA, 23 nt, Artificial Sequence
  Synthetic
cuucaucucagaaccuccauuua

SEQ ID NO: 249398 - RNA, 24 nt, Artificial Sequence
  Synthetic
gcuucaucucagaaccuccauuua

SEQ ID NO: 249399 - RNA, 18 nt, Artificial Sequence
  Synthetic
uugugaguccagcauuua

SEQ ID NO: 249400 - RNA, 19 nt, Artificial Sequence
  Synthetic
uuugugaguccagcauuua

SEQ ID NO: 249401 - RNA, 20 nt, Artificial Sequence
  Synthetic
guuugugaguccagcauuua

SEQ ID NO: 249402 - RNA, 21 nt, Artificial Sequence
  Synthetic
gguuugugaguccagcauuua

SEQ ID NO: 249403 - RNA, 22 nt, Artificial Sequence
  Synthetic
ggguuugugaguccagcauuua

SEQ ID NO: 249404 - RNA, 23 nt, Artificial Sequence
  Synthetic
cggguuugugaguccagcauuua

SEQ ID NO: 249405 - RNA, 24 nt, Artificial Sequence
  Synthetic
acggguuugugaguccagcauuua

SEQ ID NO: 249406 - RNA, 18 nt, Artificial Sequence
  Synthetic
guaaaauuaaggcauuua

SEQ ID NO: 249407 - RNA, 19 nt, Artificial Sequence
  Synthetic
uguaaaauuaaggcauuua

SEQ ID NO: 249408 - RNA, 20 nt, Artificial Sequence
  Synthetic
cuguaaaauuaaggcauuua

SEQ ID NO: 249409 - RNA, 21 nt, Artificial Sequence
  Synthetic
acuguaaaauuaaggcauuua

SEQ ID NO: 249410 - RNA, 22 nt, Artificial Sequence
  Synthetic
cacuguaaaauuaaggcauuua

SEQ ID NO: 249411 - RNA, 23 nt, Artificial Sequence
  Synthetic
ccacuguaaaauuaaggcauuua

SEQ ID NO: 249412 - RNA, 24 nt, Artificial Sequence
  Synthetic
accacuguaaaauuaaggcauuua

SEQ ID NO: 249413 - RNA, 18 nt, Artificial Sequence
  Synthetic
guaaccucaaugcauuua

SEQ ID NO: 249414 - RNA, 19 nt, Artificial Sequence
  Synthetic
aguaaccucaaugcauuua

SEQ ID NO: 249415 - RNA, 20 nt, Artificial Sequence
  Synthetic
caguaaccucaaugcauuua

SEQ ID NO: 249416 - RNA, 21 nt, Artificial Sequence
  Synthetic
ccaguaaccucaaugcauuua

SEQ ID NO: 249417 - RNA, 22 nt, Artificial Sequence
  Synthetic
gccaguaaccucaaugcauuua

SEQ ID NO: 249418 - RNA, 23 nt, Artificial Sequence
  Synthetic
ggccaguaaccucaaugcauuua

SEQ ID NO: 249419 - RNA, 24 nt, Artificial Sequence
  Synthetic
gggccaguaaccucaaugcauuua

SEQ ID NO: 249420 - RNA, 18 nt, Artificial Sequence
  Synthetic
aagacucauaugcauuua

SEQ ID NO: 249421 - RNA, 19 nt, Artificial Sequence
  Synthetic
uaagacucauaugcauuua

SEQ ID NO: 249422 - RNA, 20 nt, Artificial Sequence
  Synthetic
auaagacucauaugcauuua

SEQ ID NO: 249423 - RNA, 21 nt, Artificial Sequence
  Synthetic
cauaagacucauaugcauuua

SEQ ID NO: 249424 - RNA, 22 nt, Artificial Sequence
  Synthetic
gcauaagacucauaugcauuua

SEQ ID NO: 249425 - RNA, 23 nt, Artificial Sequence
  Synthetic
agcauaagacucauaugcauuua

SEQ ID NO: 249426 - RNA, 24 nt, Artificial Sequence
  Synthetic
gagcauaagacucauaugcauuua

SEQ ID NO: 249427 - RNA, 18 nt, Artificial Sequence
  Synthetic
acccaagcauugcauuua

SEQ ID NO: 249428 - RNA, 19 nt, Artificial Sequence
  Synthetic
aacccaagcauugcauuua

SEQ ID NO: 249429 - RNA, 20 nt, Artificial Sequence
  Synthetic
aaacccaagcauugcauuua

SEQ ID NO: 249430 - RNA, 21 nt, Artificial Sequence
  Synthetic
uaaacccaagcauugcauuua

SEQ ID NO: 249431 - RNA, 22 nt, Artificial Sequence
  Synthetic
auaaacccaagcauugcauuua

SEQ ID NO: 249432 - RNA, 23 nt, Artificial Sequence
  Synthetic
cauaaacccaagcauugcauuua

SEQ ID NO: 249433 - RNA, 24 nt, Artificial Sequence
  Synthetic
ccauaaacccaagcauugcauuua

SEQ ID NO: 249434 - RNA, 18 nt, Artificial Sequence
  Synthetic
gauccccuguugcauuua

SEQ ID NO: 249435 - RNA, 19 nt, Artificial Sequence
  Synthetic
ggauccccuguugcauuua

SEQ ID NO: 249436 - RNA, 20 nt, Artificial Sequence
  Synthetic
gggauccccuguugcauuua

SEQ ID NO: 249437 - RNA, 21 nt, Artificial Sequence
  Synthetic
ugggauccccuguugcauuua

SEQ ID NO: 249438 - RNA, 22 nt, Artificial Sequence
  Synthetic
uugggauccccuguugcauuua

SEQ ID NO: 249439 - RNA, 23 nt, Artificial Sequence
  Synthetic
auugggauccccuguugcauuua

SEQ ID NO: 249440 - RNA, 24 nt, Artificial Sequence
  Synthetic
uauugggauccccuguugcauuua

SEQ ID NO: 249441 - RNA, 18 nt, Artificial Sequence
  Synthetic
auccuauguaaucauuua

SEQ ID NO: 249442 - RNA, 19 nt, Artificial Sequence
  Synthetic
uauccuauguaaucauuua

SEQ ID NO: 249443 - RNA, 20 nt, Artificial Sequence
  Synthetic
uuauccuauguaaucauuua

SEQ ID NO: 249444 - RNA, 21 nt, Artificial Sequence
  Synthetic
uuuauccuauguaaucauuua

SEQ ID NO: 249445 - RNA, 22 nt, Artificial Sequence
  Synthetic
guuuauccuauguaaucauuua

SEQ ID NO: 249446 - RNA, 23 nt, Artificial Sequence
  Synthetic
uguuuauccuauguaaucauuua

SEQ ID NO: 249447 - RNA, 24 nt, Artificial Sequence
  Synthetic
uuguuuauccuauguaaucauuua

SEQ ID NO: 249448 - RNA, 18 nt, Artificial Sequence
  Synthetic
agauggggucaucauuua

SEQ ID NO: 249449 - RNA, 19 nt, Artificial Sequence
  Synthetic
aagauggggucaucauuua

SEQ ID NO: 249450 - RNA, 20 nt, Artificial Sequence
  Synthetic
aaagauggggucaucauuua

SEQ ID NO: 249451 - RNA, 21 nt, Artificial Sequence
  Synthetic
gaaagauggggucaucauuua

SEQ ID NO: 249452 - RNA, 22 nt, Artificial Sequence
  Synthetic
ggaaagauggggucaucauuua

SEQ ID NO: 249453 - RNA, 23 nt, Artificial Sequence
  Synthetic
cggaaagauggggucaucauuua

SEQ ID NO: 249454 - RNA, 24 nt, Artificial Sequence
  Synthetic
acggaaagauggggucaucauuua

SEQ ID NO: 249455 - RNA, 18 nt, Artificial Sequence
  Synthetic
gguuguggagaucauuua

SEQ ID NO: 249456 - RNA, 19 nt, Artificial Sequence
  Synthetic
agguuguggagaucauuua

SEQ ID NO: 249457 - RNA, 20 nt, Artificial Sequence
  Synthetic
cagguuguggagaucauuua

SEQ ID NO: 249458 - RNA, 21 nt, Artificial Sequence
  Synthetic
gcagguuguggagaucauuua

SEQ ID NO: 249459 - RNA, 22 nt, Artificial Sequence
  Synthetic
ggcagguuguggagaucauuua

SEQ ID NO: 249460 - RNA, 23 nt, Artificial Sequence
  Synthetic
aggcagguuguggagaucauuua

SEQ ID NO: 249461 - RNA, 24 nt, Artificial Sequence
  Synthetic
uaggcagguuguggagaucauuua

SEQ ID NO: 249462 - RNA, 18 nt, Artificial Sequence
  Synthetic
uuacuaacuuaucauuua

SEQ ID NO: 249463 - RNA, 19 nt, Artificial Sequence
  Synthetic
uuuacuaacuuaucauuua

SEQ ID NO: 249464 - RNA, 20 nt, Artificial Sequence
  Synthetic
auuuacuaacuuaucauuua

SEQ ID NO: 249465 - RNA, 21 nt, Artificial Sequence
  Synthetic
cauuuacuaacuuaucauuua

SEQ ID NO: 249466 - RNA, 22 nt, Artificial Sequence
  Synthetic
acauuuacuaacuuaucauuua

SEQ ID NO: 249467 - RNA, 23 nt, Artificial Sequence
  Synthetic
aacauuuacuaacuuaucauuua

SEQ ID NO: 249468 - RNA, 24 nt, Artificial Sequence
  Synthetic
caacauuuacuaacuuaucauuua

SEQ ID NO: 249469 - RNA, 18 nt, Artificial Sequence
  Synthetic
uuuugacugacucauuua

SEQ ID NO: 249470 - RNA, 19 nt, Artificial Sequence
  Synthetic
auuuugacugacucauuua

SEQ ID NO: 249471 - RNA, 20 nt, Artificial Sequence
  Synthetic
uauuuugacugacucauuua

SEQ ID NO: 249472 - RNA, 21 nt, Artificial Sequence
  Synthetic
cuauuuugacugacucauuua

SEQ ID NO: 249473 - RNA, 22 nt, Artificial Sequence
  Synthetic
ucuauuuugacugacucauuua

SEQ ID NO: 249474 - RNA, 23 nt, Artificial Sequence
  Synthetic
gucuauuuugacugacucauuua

SEQ ID NO: 249475 - RNA, 24 nt, Artificial Sequence
  Synthetic
agucuauuuugacugacucauuua

SEQ ID NO: 249476 - RNA, 18 nt, Artificial Sequence
  Synthetic
uuuauauauacucauuua

SEQ ID NO: 249477 - RNA, 19 nt, Artificial Sequence
  Synthetic
auuuauauauacucauuua

SEQ ID NO: 249478 - RNA, 20 nt, Artificial Sequence
  Synthetic
aauuuauauauacucauuua

SEQ ID NO: 249479 - RNA, 21 nt, Artificial Sequence
  Synthetic
aaauuuauauauacucauuua

SEQ ID NO: 249480 - RNA, 22 nt, Artificial Sequence
  Synthetic
gaaauuuauauauacucauuua

SEQ ID NO: 249481 - RNA, 23 nt, Artificial Sequence
  Synthetic
agaaauuuauauauacucauuua

SEQ ID NO: 249482 - RNA, 24 nt, Artificial Sequence
  Synthetic
aagaaauuuauauauacucauuua

SEQ ID NO: 249483 - RNA, 18 nt, Artificial Sequence
  Synthetic
uauggcaacugucauuua

SEQ ID NO: 249484 - RNA, 19 nt, Artificial Sequence
  Synthetic
uuauggcaacugucauuua

SEQ ID NO: 249485 - RNA, 20 nt, Artificial Sequence
  Synthetic
uuuauggcaacugucauuua

SEQ ID NO: 249486 - RNA, 21 nt, Artificial Sequence
  Synthetic
uuuuauggcaacugucauuua

SEQ ID NO: 249487 - RNA, 22 nt, Artificial Sequence
  Synthetic
uuuuuauggcaacugucauuua

SEQ ID NO: 249488 - RNA, 23 nt, Artificial Sequence
  Synthetic
uuuuuuauggcaacugucauuua

SEQ ID NO: 249489 - RNA, 24 nt, Artificial Sequence
  Synthetic
guuuuuuauggcaacugucauuua

SEQ ID NO: 249490 - RNA, 18 nt, Artificial Sequence
  Synthetic
agcagaaauugucauuua

SEQ ID NO: 249491 - RNA, 19 nt, Artificial Sequence
  Synthetic
aagcagaaauugucauuua

SEQ ID NO: 249492 - RNA, 20 nt, Artificial Sequence
  Synthetic
gaagcagaaauugucauuua

SEQ ID NO: 249493 - RNA, 21 nt, Artificial Sequence
  Synthetic
agaagcagaaauugucauuua

SEQ ID NO: 249494 - RNA, 22 nt, Artificial Sequence
  Synthetic
gagaagcagaaauugucauuua

SEQ ID NO: 249495 - RNA, 23 nt, Artificial Sequence
  Synthetic
ugagaagcagaaauugucauuua

SEQ ID NO: 249496 - RNA, 24 nt, Artificial Sequence
  Synthetic
augagaagcagaaauugucauuua

SEQ ID NO: 249497 - RNA, 18 nt, Artificial Sequence
  Synthetic
uuguuacauugucauuua

SEQ ID NO: 249498 - RNA, 19 nt, Artificial Sequence
  Synthetic
cuuguuacauugucauuua

SEQ ID NO: 249499 - RNA, 20 nt, Artificial Sequence
  Synthetic
acuuguuacauugucauuua

SEQ ID NO: 249500 - RNA, 21 nt, Artificial Sequence
  Synthetic
cacuuguuacauugucauuua

SEQ ID NO: 249501 - RNA, 22 nt, Artificial Sequence
  Synthetic
ccacuuguuacauugucauuua

SEQ ID NO: 249502 - RNA, 23 nt, Artificial Sequence
  Synthetic
gccacuuguuacauugucauuua

SEQ ID NO: 249503 - RNA, 24 nt, Artificial Sequence
  Synthetic
agccacuuguuacauugucauuua

SEQ ID NO: 249504 - RNA, 18 nt, Artificial Sequence
  Synthetic
auuugcuucauucauuua

SEQ ID NO: 249505 - RNA, 19 nt, Artificial Sequence
  Synthetic
cauuugcuucauucauuua

SEQ ID NO: 249506 - RNA, 20 nt, Artificial Sequence
  Synthetic
ucauuugcuucauucauuua

SEQ ID NO: 249507 - RNA, 21 nt, Artificial Sequence
  Synthetic
uucauuugcuucauucauuua

SEQ ID NO: 249508 - RNA, 22 nt, Artificial Sequence
  Synthetic
uuucauuugcuucauucauuua

SEQ ID NO: 249509 - RNA, 23 nt, Artificial Sequence
  Synthetic
uuuucauuugcuucauucauuua

SEQ ID NO: 249510 - RNA, 24 nt, Artificial Sequence
  Synthetic
guuuucauuugcuucauucauuua

SEQ ID NO: 249511 - RNA, 18 nt, Artificial Sequence
  Synthetic
uuaauucauauucauuua

SEQ ID NO: 249512 - RNA, 19 nt, Artificial Sequence
  Synthetic
cuuaauucauauucauuua

SEQ ID NO: 249513 - RNA, 20 nt, Artificial Sequence
  Synthetic
gcuuaauucauauucauuua

SEQ ID NO: 249514 - RNA, 21 nt, Artificial Sequence
  Synthetic
agcuuaauucauauucauuua

SEQ ID NO: 249515 - RNA, 22 nt, Artificial Sequence
  Synthetic
cagcuuaauucauauucauuua

SEQ ID NO: 249516 - RNA, 23 nt, Artificial Sequence
  Synthetic
ucagcuuaauucauauucauuua

SEQ ID NO: 249517 - RNA, 24 nt, Artificial Sequence
  Synthetic
uucagcuuaauucauauucauuua

SEQ ID NO: 249518 - RNA, 18 nt, Artificial Sequence
  Synthetic
ucuagaucuguucauuua

SEQ ID NO: 249519 - RNA, 19 nt, Artificial Sequence
  Synthetic
uucuagaucuguucauuua

SEQ ID NO: 249520 - RNA, 20 nt, Artificial Sequence
  Synthetic
auucuagaucuguucauuua

SEQ ID NO: 249521 - RNA, 21 nt, Artificial Sequence
  Synthetic
aauucuagaucuguucauuua

SEQ ID NO: 249522 - RNA, 22 nt, Artificial Sequence
  Synthetic
uaauucuagaucuguucauuua

SEQ ID NO: 249523 - RNA, 23 nt, Artificial Sequence
  Synthetic
uuaauucuagaucuguucauuua

SEQ ID NO: 249524 - RNA, 24 nt, Artificial Sequence
  Synthetic
auuaauucuagaucuguucauuua

SEQ ID NO: 249525 - RNA, 18 nt, Artificial Sequence
  Synthetic
gguuugaaauuucauuua

SEQ ID NO: 249526 - RNA, 19 nt, Artificial Sequence
  Synthetic
ggguuugaaauuucauuua

SEQ ID NO: 249527 - RNA, 20 nt, Artificial Sequence
  Synthetic
uggguuugaaauuucauuua

SEQ ID NO: 249528 - RNA, 21 nt, Artificial Sequence
  Synthetic
uuggguuugaaauuucauuua

SEQ ID NO: 249529 - RNA, 22 nt, Artificial Sequence
  Synthetic
uuuggguuugaaauuucauuua

SEQ ID NO: 249530 - RNA, 23 nt, Artificial Sequence
  Synthetic
auuuggguuugaaauuucauuua

SEQ ID NO: 249531 - RNA, 24 nt, Artificial Sequence
  Synthetic
aauuuggguuugaaauuucauuua

SEQ ID NO: 249532 - RNA, 18 nt, Artificial Sequence
  Synthetic
gaauuuaaaaaagauuua

SEQ ID NO: 249533 - RNA, 19 nt, Artificial Sequence
  Synthetic
agaauuuaaaaaagauuua

SEQ ID NO: 249534 - RNA, 20 nt, Artificial Sequence
  Synthetic
aagaauuuaaaaaagauuua

SEQ ID NO: 249535 - RNA, 21 nt, Artificial Sequence
  Synthetic
caagaauuuaaaaaagauuua

SEQ ID NO: 249536 - RNA, 22 nt, Artificial Sequence
  Synthetic
gcaagaauuuaaaaaagauuua

SEQ ID NO: 249537 - RNA, 23 nt, Artificial Sequence
  Synthetic
ugcaagaauuuaaaaaagauuua

SEQ ID NO: 249538 - RNA, 24 nt, Artificial Sequence
  Synthetic
augcaagaauuuaaaaaagauuua

SEQ ID NO: 249539 - RNA, 18 nt, Artificial Sequence
  Synthetic
gaggguacuaaagauuua

SEQ ID NO: 249540 - RNA, 19 nt, Artificial Sequence
  Synthetic
ugaggguacuaaagauuua

SEQ ID NO: 249541 - RNA, 20 nt, Artificial Sequence
  Synthetic
augaggguacuaaagauuua

SEQ ID NO: 249542 - RNA, 21 nt, Artificial Sequence
  Synthetic
caugaggguacuaaagauuua

SEQ ID NO: 249543 - RNA, 22 nt, Artificial Sequence
  Synthetic
acaugaggguacuaaagauuua

SEQ ID NO: 249544 - RNA, 23 nt, Artificial Sequence
  Synthetic
uacaugaggguacuaaagauuua

SEQ ID NO: 249545 - RNA, 24 nt, Artificial Sequence
  Synthetic
uuacaugaggguacuaaagauuua

SEQ ID NO: 249546 - RNA, 18 nt, Artificial Sequence
  Synthetic
gaacauggacaagauuua

SEQ ID NO: 249547 - RNA, 19 nt, Artificial Sequence
  Synthetic
ggaacauggacaagauuua

SEQ ID NO: 249548 - RNA, 20 nt, Artificial Sequence
  Synthetic
aggaacauggacaagauuua

SEQ ID NO: 249549 - RNA, 21 nt, Artificial Sequence
  Synthetic
gaggaacauggacaagauuua

SEQ ID NO: 249550 - RNA, 22 nt, Artificial Sequence
  Synthetic
agaggaacauggacaagauuua

SEQ ID NO: 249551 - RNA, 23 nt, Artificial Sequence
  Synthetic
gagaggaacauggacaagauuua

SEQ ID NO: 249552 - RNA, 24 nt, Artificial Sequence
  Synthetic
ggagaggaacauggacaagauuua

SEQ ID NO: 249553 - RNA, 18 nt, Artificial Sequence
  Synthetic
uuuauaccaacagauuua

SEQ ID NO: 249554 - RNA, 19 nt, Artificial Sequence
  Synthetic
uuuuauaccaacagauuua

SEQ ID NO: 249555 - RNA, 20 nt, Artificial Sequence
  Synthetic
auuuuauaccaacagauuua

SEQ ID NO: 249556 - RNA, 21 nt, Artificial Sequence
  Synthetic
gauuuuauaccaacagauuua

SEQ ID NO: 249557 - RNA, 22 nt, Artificial Sequence
  Synthetic
ggauuuuauaccaacagauuua

SEQ ID NO: 249558 - RNA, 23 nt, Artificial Sequence
  Synthetic
aggauuuuauaccaacagauuua

SEQ ID NO: 249559 - RNA, 24 nt, Artificial Sequence
  Synthetic
uaggauuuuauaccaacagauuua

SEQ ID NO: 249560 - RNA, 18 nt, Artificial Sequence
  Synthetic
ccuacuugaacagauuua

SEQ ID NO: 249561 - RNA, 19 nt, Artificial Sequence
  Synthetic
accuacuugaacagauuua

SEQ ID NO: 249562 - RNA, 20 nt, Artificial Sequence
  Synthetic
aaccuacuugaacagauuua

SEQ ID NO: 249563 - RNA, 21 nt, Artificial Sequence
  Synthetic
caaccuacuugaacagauuua

SEQ ID NO: 249564 - RNA, 22 nt, Artificial Sequence
  Synthetic
acaaccuacuugaacagauuua

SEQ ID NO: 249565 - RNA, 23 nt, Artificial Sequence
  Synthetic
aacaaccuacuugaacagauuua

SEQ ID NO: 249566 - RNA, 24 nt, Artificial Sequence
  Synthetic
gaacaaccuacuugaacagauuua

SEQ ID NO: 249567 - RNA, 18 nt, Artificial Sequence
  Synthetic
guuuuuagcugagauuua

SEQ ID NO: 249568 - RNA, 19 nt, Artificial Sequence
  Synthetic
aguuuuuagcugagauuua

SEQ ID NO: 249569 - RNA, 20 nt, Artificial Sequence
  Synthetic
caguuuuuagcugagauuua

SEQ ID NO: 249570 - RNA, 21 nt, Artificial Sequence
  Synthetic
gcaguuuuuagcugagauuua

SEQ ID NO: 249571 - RNA, 22 nt, Artificial Sequence
  Synthetic
agcaguuuuuagcugagauuua

SEQ ID NO: 249572 - RNA, 23 nt, Artificial Sequence
  Synthetic
cagcaguuuuuagcugagauuua

SEQ ID NO: 249573 - RNA, 24 nt, Artificial Sequence
  Synthetic
ucagcaguuuuuagcugagauuua

SEQ ID NO: 249574 - RNA, 18 nt, Artificial Sequence
  Synthetic
agaguagauuuagauuua

SEQ ID NO: 249575 - RNA, 19 nt, Artificial Sequence
  Synthetic
uagaguagauuuagauuua

SEQ ID NO: 249576 - RNA, 20 nt, Artificial Sequence
  Synthetic
uuagaguagauuuagauuua

SEQ ID NO: 249577 - RNA, 21 nt, Artificial Sequence
  Synthetic
auuagaguagauuuagauuua

SEQ ID NO: 249578 - RNA, 22 nt, Artificial Sequence
  Synthetic
aauuagaguagauuuagauuua

SEQ ID NO: 249579 - RNA, 23 nt, Artificial Sequence
  Synthetic
aaauuagaguagauuuagauuua

SEQ ID NO: 249580 - RNA, 24 nt, Artificial Sequence
  Synthetic
aaaauuagaguagauuuagauuua

SEQ ID NO: 249581 - RNA, 18 nt, Artificial Sequence
  Synthetic
gcacuugggaucgauuua

SEQ ID NO: 249582 - RNA, 19 nt, Artificial Sequence
  Synthetic
ggcacuugggaucgauuua

SEQ ID NO: 249583 - RNA, 20 nt, Artificial Sequence
  Synthetic
uggcacuugggaucgauuua

SEQ ID NO: 249584 - RNA, 21 nt, Artificial Sequence
  Synthetic
cuggcacuugggaucgauuua

SEQ ID NO: 249585 - RNA, 22 nt, Artificial Sequence
  Synthetic
ucuggcacuugggaucgauuua

SEQ ID NO: 249586 - RNA, 23 nt, Artificial Sequence
  Synthetic
uucuggcacuugggaucgauuua

SEQ ID NO: 249587 - RNA, 24 nt, Artificial Sequence
  Synthetic
uuucuggcacuugggaucgauuua

SEQ ID NO: 249588 - RNA, 18 nt, Artificial Sequence
  Synthetic
aaaauuaagcucgauuua

SEQ ID NO: 249589 - RNA, 19 nt, Artificial Sequence
  Synthetic
aaaaauuaagcucgauuua

SEQ ID NO: 249590 - RNA, 20 nt, Artificial Sequence
  Synthetic
aaaaaauuaagcucgauuua

SEQ ID NO: 249591 - RNA, 21 nt, Artificial Sequence
  Synthetic
uaaaaaauuaagcucgauuua

SEQ ID NO: 249592 - RNA, 22 nt, Artificial Sequence
  Synthetic
uuaaaaaauuaagcucgauuua

SEQ ID NO: 249593 - RNA, 23 nt, Artificial Sequence
  Synthetic
uuuaaaaaauuaagcucgauuua

SEQ ID NO: 249594 - RNA, 24 nt, Artificial Sequence
  Synthetic
auuuaaaaaauuaagcucgauuua

SEQ ID NO: 249595 - RNA, 18 nt, Artificial Sequence
  Synthetic
uacaggaaaaaggauuua

SEQ ID NO: 249596 - RNA, 19 nt, Artificial Sequence
  Synthetic
auacaggaaaaaggauuua

SEQ ID NO: 249597 - RNA, 20 nt, Artificial Sequence
  Synthetic
uauacaggaaaaaggauuua

SEQ ID NO: 249598 - RNA, 21 nt, Artificial Sequence
  Synthetic
uuauacaggaaaaaggauuua

SEQ ID NO: 249599 - RNA, 22 nt, Artificial Sequence
  Synthetic
uuuauacaggaaaaaggauuua

SEQ ID NO: 249600 - RNA, 23 nt, Artificial Sequence
  Synthetic
auuuauacaggaaaaaggauuua

SEQ ID NO: 249601 - RNA, 24 nt, Artificial Sequence
  Synthetic
cauuuauacaggaaaaaggauuua

SEQ ID NO: 249602 - RNA, 18 nt, Artificial Sequence
  Synthetic
aauaugcugaaggauuua

SEQ ID NO: 249603 - RNA, 19 nt, Artificial Sequence
  Synthetic
gaauaugcugaaggauuua

SEQ ID NO: 249604 - RNA, 20 nt, Artificial Sequence
  Synthetic
ggaauaugcugaaggauuua

SEQ ID NO: 249605 - RNA, 21 nt, Artificial Sequence
  Synthetic
aggaauaugcugaaggauuua

SEQ ID NO: 249606 - RNA, 22 nt, Artificial Sequence
  Synthetic
gaggaauaugcugaaggauuua

SEQ ID NO: 249607 - RNA, 23 nt, Artificial Sequence
  Synthetic
agaggaauaugcugaaggauuua

SEQ ID NO: 249608 - RNA, 24 nt, Artificial Sequence
  Synthetic
aagaggaauaugcugaaggauuua

SEQ ID NO: 249609 - RNA, 18 nt, Artificial Sequence
  Synthetic
uuucccaauaaggauuua

SEQ ID NO: 249610 - RNA, 19 nt, Artificial Sequence
  Synthetic
uuuucccaauaaggauuua

SEQ ID NO: 249611 - RNA, 20 nt, Artificial Sequence
  Synthetic
cuuuucccaauaaggauuua

SEQ ID NO: 249612 - RNA, 21 nt, Artificial Sequence
  Synthetic
ucuuuucccaauaaggauuua

SEQ ID NO: 249613 - RNA, 22 nt, Artificial Sequence
  Synthetic
cucuuuucccaauaaggauuua

SEQ ID NO: 249614 - RNA, 23 nt, Artificial Sequence
  Synthetic
ucucuuuucccaauaaggauuua

SEQ ID NO: 249615 - RNA, 24 nt, Artificial Sequence
  Synthetic
uucucuuuucccaauaaggauuua

SEQ ID NO: 249616 - RNA, 18 nt, Artificial Sequence
  Synthetic
cuagcuuuuugggauuua

SEQ ID NO: 249617 - RNA, 19 nt, Artificial Sequence
  Synthetic
ucuagcuuuuugggauuua

SEQ ID NO: 249618 - RNA, 20 nt, Artificial Sequence
  Synthetic
uucuagcuuuuugggauuua

SEQ ID NO: 249619 - RNA, 21 nt, Artificial Sequence
  Synthetic
auucuagcuuuuugggauuua

SEQ ID NO: 249620 - RNA, 22 nt, Artificial Sequence
  Synthetic
cauucuagcuuuuugggauuua

SEQ ID NO: 249621 - RNA, 23 nt, Artificial Sequence
  Synthetic
gcauucuagcuuuuugggauuua

SEQ ID NO: 249622 - RNA, 24 nt, Artificial Sequence
  Synthetic
ugcauucuagcuuuuugggauuua

SEQ ID NO: 249623 - RNA, 18 nt, Artificial Sequence
  Synthetic
aaauauauaauggauuua

SEQ ID NO: 249624 - RNA, 19 nt, Artificial Sequence
  Synthetic
aaaauauauaauggauuua

SEQ ID NO: 249625 - RNA, 20 nt, Artificial Sequence
  Synthetic
uaaaauauauaauggauuua

SEQ ID NO: 249626 - RNA, 21 nt, Artificial Sequence
  Synthetic
uuaaaauauauaauggauuua

SEQ ID NO: 249627 - RNA, 22 nt, Artificial Sequence
  Synthetic
uuuaaaauauauaauggauuua

SEQ ID NO: 249628 - RNA, 23 nt, Artificial Sequence
  Synthetic
uuuuaaaauauauaauggauuua

SEQ ID NO: 249629 - RNA, 24 nt, Artificial Sequence
  Synthetic
guuuuaaaauauauaauggauuua

SEQ ID NO: 249630 - RNA, 18 nt, Artificial Sequence
  Synthetic
caucuuuucauggauuua

SEQ ID NO: 249631 - RNA, 19 nt, Artificial Sequence
  Synthetic
gcaucuuuucauggauuua

SEQ ID NO: 249632 - RNA, 20 nt, Artificial Sequence
  Synthetic
agcaucuuuucauggauuua

SEQ ID NO: 249633 - RNA, 21 nt, Artificial Sequence
  Synthetic
aagcaucuuuucauggauuua

SEQ ID NO: 249634 - RNA, 22 nt, Artificial Sequence
  Synthetic
uaagcaucuuuucauggauuua

SEQ ID NO: 249635 - RNA, 23 nt, Artificial Sequence
  Synthetic
uuaagcaucuuuucauggauuua

SEQ ID NO: 249636 - RNA, 24 nt, Artificial Sequence
  Synthetic
auuaagcaucuuuucauggauuua

SEQ ID NO: 249637 - RNA, 18 nt, Artificial Sequence
  Synthetic
acuucauagaaugauuua

SEQ ID NO: 249638 - RNA, 19 nt, Artificial Sequence
  Synthetic
gacuucauagaaugauuua

SEQ ID NO: 249639 - RNA, 20 nt, Artificial Sequence
  Synthetic
ugacuucauagaaugauuua

SEQ ID NO: 249640 - RNA, 21 nt, Artificial Sequence
  Synthetic
cugacuucauagaaugauuua

SEQ ID NO: 249641 - RNA, 22 nt, Artificial Sequence
  Synthetic
acugacuucauagaaugauuua

SEQ ID NO: 249642 - RNA, 23 nt, Artificial Sequence
  Synthetic
uacugacuucauagaaugauuua

SEQ ID NO: 249643 - RNA, 24 nt, Artificial Sequence
  Synthetic
auacugacuucauagaaugauuua

SEQ ID NO: 249644 - RNA, 18 nt, Artificial Sequence
  Synthetic
cuaggugccugugauuua

SEQ ID NO: 249645 - RNA, 19 nt, Artificial Sequence
  Synthetic
ucuaggugccugugauuua

SEQ ID NO: 249646 - RNA, 20 nt, Artificial Sequence
  Synthetic
gucuaggugccugugauuua

SEQ ID NO: 249647 - RNA, 21 nt, Artificial Sequence
  Synthetic
ggucuaggugccugugauuua

SEQ ID NO: 249648 - RNA, 22 nt, Artificial Sequence
  Synthetic
gggucuaggugccugugauuua

SEQ ID NO: 249649 - RNA, 23 nt, Artificial Sequence
  Synthetic
ggggucuaggugccugugauuua

SEQ ID NO: 249650 - RNA, 24 nt, Artificial Sequence
  Synthetic
aggggucuaggugccugugauuua

SEQ ID NO: 249651 - RNA, 18 nt, Artificial Sequence
  Synthetic
agcaacuucugugauuua

SEQ ID NO: 249652 - RNA, 19 nt, Artificial Sequence
  Synthetic
aagcaacuucugugauuua

SEQ ID NO: 249653 - RNA, 20 nt, Artificial Sequence
  Synthetic
aaagcaacuucugugauuua

SEQ ID NO: 249654 - RNA, 21 nt, Artificial Sequence
  Synthetic
aaaagcaacuucugugauuua

SEQ ID NO: 249655 - RNA, 22 nt, Artificial Sequence
  Synthetic
caaaagcaacuucugugauuua

SEQ ID NO: 249656 - RNA, 23 nt, Artificial Sequence
  Synthetic
acaaaagcaacuucugugauuua

SEQ ID NO: 249657 - RNA, 24 nt, Artificial Sequence
  Synthetic
gacaaaagcaacuucugugauuua

SEQ ID NO: 249658 - RNA, 18 nt, Artificial Sequence
  Synthetic
cuccuucaaaaauauuua

SEQ ID NO: 249659 - RNA, 19 nt, Artificial Sequence
  Synthetic
acuccuucaaaaauauuua

SEQ ID NO: 249660 - RNA, 20 nt, Artificial Sequence
  Synthetic
cacuccuucaaaaauauuua

SEQ ID NO: 249661 - RNA, 21 nt, Artificial Sequence
  Synthetic
ucacuccuucaaaaauauuua

SEQ ID NO: 249662 - RNA, 22 nt, Artificial Sequence
  Synthetic
uucacuccuucaaaaauauuua

SEQ ID NO: 249663 - RNA, 23 nt, Artificial Sequence
  Synthetic
guucacuccuucaaaaauauuua

SEQ ID NO: 249664 - RNA, 24 nt, Artificial Sequence
  Synthetic
uguucacuccuucaaaaauauuua

SEQ ID NO: 249665 - RNA, 18 nt, Artificial Sequence
  Synthetic
gcggaaguaaaauauuua

SEQ ID NO: 249666 - RNA, 19 nt, Artificial Sequence
  Synthetic
ggcggaaguaaaauauuua

SEQ ID NO: 249667 - RNA, 20 nt, Artificial Sequence
  Synthetic
uggcggaaguaaaauauuua

SEQ ID NO: 249668 - RNA, 21 nt, Artificial Sequence
  Synthetic
guggcggaaguaaaauauuua

SEQ ID NO: 249669 - RNA, 22 nt, Artificial Sequence
  Synthetic
aguggcggaaguaaaauauuua

SEQ ID NO: 249670 - RNA, 23 nt, Artificial Sequence
  Synthetic
caguggcggaaguaaaauauuua

SEQ ID NO: 249671 - RNA, 24 nt, Artificial Sequence
  Synthetic
ucaguggcggaaguaaaauauuua

SEQ ID NO: 249672 - RNA, 18 nt, Artificial Sequence
  Synthetic
ucaauucagaaauauuua

SEQ ID NO: 249673 - RNA, 19 nt, Artificial Sequence
  Synthetic
uucaauucagaaauauuua

SEQ ID NO: 249674 - RNA, 20 nt, Artificial Sequence
  Synthetic
auucaauucagaaauauuua

SEQ ID NO: 249675 - RNA, 21 nt, Artificial Sequence
  Synthetic
uauucaauucagaaauauuua

SEQ ID NO: 249676 - RNA, 22 nt, Artificial Sequence
  Synthetic
uuauucaauucagaaauauuua

SEQ ID NO: 249677 - RNA, 23 nt, Artificial Sequence
  Synthetic
uuuauucaauucagaaauauuua

SEQ ID NO: 249678 - RNA, 24 nt, Artificial Sequence
  Synthetic
uuuuauucaauucagaaauauuua

SEQ ID NO: 249679 - RNA, 18 nt, Artificial Sequence
  Synthetic
acucaugugaaauauuua

SEQ ID NO: 249680 - RNA, 19 nt, Artificial Sequence
  Synthetic
aacucaugugaaauauuua

SEQ ID NO: 249681 - RNA, 20 nt, Artificial Sequence
  Synthetic
uaacucaugugaaauauuua

SEQ ID NO: 249682 - RNA, 21 nt, Artificial Sequence
  Synthetic
auaacucaugugaaauauuua

SEQ ID NO: 249683 - RNA, 22 nt, Artificial Sequence
  Synthetic
gauaacucaugugaaauauuua

SEQ ID NO: 249684 - RNA, 23 nt, Artificial Sequence
  Synthetic
agauaacucaugugaaauauuua

SEQ ID NO: 249685 - RNA, 24 nt, Artificial Sequence
  Synthetic
cagauaacucaugugaaauauuua

SEQ ID NO: 249686 - RNA, 18 nt, Artificial Sequence
  Synthetic
gcgcucaauaaauauuua

SEQ ID NO: 249687 - RNA, 19 nt, Artificial Sequence
  Synthetic
ugcgcucaauaaauauuua

SEQ ID NO: 249688 - RNA, 20 nt, Artificial Sequence
  Synthetic
augcgcucaauaaauauuua

SEQ ID NO: 249689 - RNA, 21 nt, Artificial Sequence
  Synthetic
aaugcgcucaauaaauauuua

SEQ ID NO: 249690 - RNA, 22 nt, Artificial Sequence
  Synthetic
caaugcgcucaauaaauauuua

SEQ ID NO: 249691 - RNA, 23 nt, Artificial Sequence
  Synthetic
gcaaugcgcucaauaaauauuua

SEQ ID NO: 249692 - RNA, 24 nt, Artificial Sequence
  Synthetic
ugcaaugcgcucaauaaauauuua

SEQ ID NO: 249693 - RNA, 18 nt, Artificial Sequence
  Synthetic
ccacauaauaaauauuua

SEQ ID NO: 249694 - RNA, 19 nt, Artificial Sequence
  Synthetic
accacauaauaaauauuua

SEQ ID NO: 249695 - RNA, 20 nt, Artificial Sequence
  Synthetic
uaccacauaauaaauauuua

SEQ ID NO: 249696 - RNA, 21 nt, Artificial Sequence
  Synthetic
cuaccacauaauaaauauuua

SEQ ID NO: 249697 - RNA, 22 nt, Artificial Sequence
  Synthetic
ccuaccacauaauaaauauuua

SEQ ID NO: 249698 - RNA, 23 nt, Artificial Sequence
  Synthetic
accuaccacauaauaaauauuua

SEQ ID NO: 249699 - RNA, 24 nt, Artificial Sequence
  Synthetic
uaccuaccacauaauaaauauuua

SEQ ID NO: 249700 - RNA, 18 nt, Artificial Sequence
  Synthetic
gcagacuguaaauauuua

SEQ ID NO: 249701 - RNA, 19 nt, Artificial Sequence
  Synthetic
ugcagacuguaaauauuua

SEQ ID NO: 249702 - RNA, 20 nt, Artificial Sequence
  Synthetic
gugcagacuguaaauauuua

SEQ ID NO: 249703 - RNA, 21 nt, Artificial Sequence
  Synthetic
ugugcagacuguaaauauuua

SEQ ID NO: 249704 - RNA, 22 nt, Artificial Sequence
  Synthetic
augugcagacuguaaauauuua

SEQ ID NO: 249705 - RNA, 23 nt, Artificial Sequence
  Synthetic
uaugugcagacuguaaauauuua

SEQ ID NO: 249706 - RNA, 24 nt, Artificial Sequence
  Synthetic
guaugugcagacuguaaauauuua

SEQ ID NO: 249707 - RNA, 18 nt, Artificial Sequence
  Synthetic
ggagaacauuaauauuua

SEQ ID NO: 249708 - RNA, 19 nt, Artificial Sequence
  Synthetic
uggagaacauuaauauuua

SEQ ID NO: 249709 - RNA, 20 nt, Artificial Sequence
  Synthetic
uuggagaacauuaauauuua

SEQ ID NO: 249710 - RNA, 21 nt, Artificial Sequence
  Synthetic
uuuggagaacauuaauauuua

SEQ ID NO: 249711 - RNA, 22 nt, Artificial Sequence
  Synthetic
uuuuggagaacauuaauauuua

SEQ ID NO: 249712 - RNA, 23 nt, Artificial Sequence
  Synthetic
auuuuggagaacauuaauauuua

SEQ ID NO: 249713 - RNA, 24 nt, Artificial Sequence
  Synthetic
aauuuuggagaacauuaauauuua

SEQ ID NO: 249714 - RNA, 18 nt, Artificial Sequence
  Synthetic
gauaauaguacauauuua

SEQ ID NO: 249715 - RNA, 19 nt, Artificial Sequence
  Synthetic
agauaauaguacauauuua

SEQ ID NO: 249716 - RNA, 20 nt, Artificial Sequence
  Synthetic
aagauaauaguacauauuua

SEQ ID NO: 249717 - RNA, 21 nt, Artificial Sequence
  Synthetic
aaagauaauaguacauauuua

SEQ ID NO: 249718 - RNA, 22 nt, Artificial Sequence
  Synthetic
uaaagauaauaguacauauuua

SEQ ID NO: 249719 - RNA, 23 nt, Artificial Sequence
  Synthetic
auaaagauaauaguacauauuua

SEQ ID NO: 249720 - RNA, 24 nt, Artificial Sequence
  Synthetic
aauaaagauaauaguacauauuua

SEQ ID NO: 249721 - RNA, 18 nt, Artificial Sequence
  Synthetic
ucaucaggcagauauuua

SEQ ID NO: 249722 - RNA, 19 nt, Artificial Sequence
  Synthetic
uucaucaggcagauauuua

SEQ ID NO: 249723 - RNA, 20 nt, Artificial Sequence
  Synthetic
uuucaucaggcagauauuua

SEQ ID NO: 249724 - RNA, 21 nt, Artificial Sequence
  Synthetic
guuucaucaggcagauauuua

SEQ ID NO: 249725 - RNA, 22 nt, Artificial Sequence
  Synthetic
uguuucaucaggcagauauuua

SEQ ID NO: 249726 - RNA, 23 nt, Artificial Sequence
  Synthetic
uuguuucaucaggcagauauuua

SEQ ID NO: 249727 - RNA, 24 nt, Artificial Sequence
  Synthetic
uuuguuucaucaggcagauauuua

SEQ ID NO: 249728 - RNA, 18 nt, Artificial Sequence
  Synthetic
uuuacagaaauauauuua

SEQ ID NO: 249729 - RNA, 19 nt, Artificial Sequence
  Synthetic
auuuacagaaauauauuua

SEQ ID NO: 249730 - RNA, 20 nt, Artificial Sequence
  Synthetic
uauuuacagaaauauauuua

SEQ ID NO: 249731 - RNA, 21 nt, Artificial Sequence
  Synthetic
guauuuacagaaauauauuua

SEQ ID NO: 249732 - RNA, 22 nt, Artificial Sequence
  Synthetic
uguauuuacagaaauauauuua

SEQ ID NO: 249733 - RNA, 23 nt, Artificial Sequence
  Synthetic
guguauuuacagaaauauauuua

SEQ ID NO: 249734 - RNA, 24 nt, Artificial Sequence
  Synthetic
uguguauuuacagaaauauauuua

SEQ ID NO: 249735 - RNA, 18 nt, Artificial Sequence
  Synthetic
guuaccuaaauauauuua

SEQ ID NO: 249736 - RNA, 19 nt, Artificial Sequence
  Synthetic
uguuaccuaaauauauuua

SEQ ID NO: 249737 - RNA, 20 nt, Artificial Sequence
  Synthetic
uuguuaccuaaauauauuua

SEQ ID NO: 249738 - RNA, 21 nt, Artificial Sequence
  Synthetic
cuuguuaccuaaauauauuua

SEQ ID NO: 249739 - RNA, 22 nt, Artificial Sequence
  Synthetic
ucuuguuaccuaaauauauuua

SEQ ID NO: 249740 - RNA, 23 nt, Artificial Sequence
  Synthetic
gucuuguuaccuaaauauauuua

SEQ ID NO: 249741 - RNA, 24 nt, Artificial Sequence
  Synthetic
ugucuuguuaccuaaauauauuua

SEQ ID NO: 249742 - RNA, 18 nt, Artificial Sequence
  Synthetic
uaaaaaaggauauauuua

SEQ ID NO: 249743 - RNA, 19 nt, Artificial Sequence
  Synthetic
auaaaaaaggauauauuua

SEQ ID NO: 249744 - RNA, 20 nt, Artificial Sequence
  Synthetic
aauaaaaaaggauauauuua

SEQ ID NO: 249745 - RNA, 21 nt, Artificial Sequence
  Synthetic
aaauaaaaaaggauauauuua

SEQ ID NO: 249746 - RNA, 22 nt, Artificial Sequence
  Synthetic
aaaauaaaaaaggauauauuua

SEQ ID NO: 249747 - RNA, 23 nt, Artificial Sequence
  Synthetic
gaaaauaaaaaaggauauauuua

SEQ ID NO: 249748 - RNA, 24 nt, Artificial Sequence
  Synthetic
agaaaauaaaaaaggauauauuua

SEQ ID NO: 249749 - RNA, 18 nt, Artificial Sequence
  Synthetic
uaugcauauauauauuua

SEQ ID NO: 249750 - RNA, 19 nt, Artificial Sequence
  Synthetic
auaugcauauauauauuua

SEQ ID NO: 249751 - RNA, 20 nt, Artificial Sequence
  Synthetic
cauaugcauauauauauuua

SEQ ID NO: 249752 - RNA, 21 nt, Artificial Sequence
  Synthetic
acauaugcauauauauauuua

SEQ ID NO: 249753 - RNA, 22 nt, Artificial Sequence
  Synthetic
uacauaugcauauauauauuua

SEQ ID NO: 249754 - RNA, 23 nt, Artificial Sequence
  Synthetic
auacauaugcauauauauauuua

SEQ ID NO: 249755 - RNA, 24 nt, Artificial Sequence
  Synthetic
uauacauaugcauauauauauuua

SEQ ID NO: 249756 - RNA, 18 nt, Artificial Sequence
  Synthetic
auuucucuuaacuauuua

SEQ ID NO: 249757 - RNA, 19 nt, Artificial Sequence
  Synthetic
aauuucucuuaacuauuua

SEQ ID NO: 249758 - RNA, 20 nt, Artificial Sequence
  Synthetic
gaauuucucuuaacuauuua

SEQ ID NO: 249759 - RNA, 21 nt, Artificial Sequence
  Synthetic
ugaauuucucuuaacuauuua

SEQ ID NO: 249760 - RNA, 22 nt, Artificial Sequence
  Synthetic
gugaauuucucuuaacuauuua

SEQ ID NO: 249761 - RNA, 23 nt, Artificial Sequence
  Synthetic
ugugaauuucucuuaacuauuua

SEQ ID NO: 249762 - RNA, 24 nt, Artificial Sequence
  Synthetic
augugaauuucucuuaacuauuua

SEQ ID NO: 249763 - RNA, 18 nt, Artificial Sequence
  Synthetic
guguuaauucacuauuua

SEQ ID NO: 249764 - RNA, 19 nt, Artificial Sequence
  Synthetic
uguguuaauucacuauuua

SEQ ID NO: 249765 - RNA, 20 nt, Artificial Sequence
  Synthetic
cuguguuaauucacuauuua

SEQ ID NO: 249766 - RNA, 21 nt, Artificial Sequence
  Synthetic
acuguguuaauucacuauuua

SEQ ID NO: 249767 - RNA, 22 nt, Artificial Sequence
  Synthetic
cacuguguuaauucacuauuua

SEQ ID NO: 249768 - RNA, 23 nt, Artificial Sequence
  Synthetic
gcacuguguuaauucacuauuua

SEQ ID NO: 249769 - RNA, 24 nt, Artificial Sequence
  Synthetic
ugcacuguguuaauucacuauuua

SEQ ID NO: 249770 - RNA, 18 nt, Artificial Sequence
  Synthetic
aggguguucaccuauuua

SEQ ID NO: 249771 - RNA, 19 nt, Artificial Sequence
  Synthetic
aaggguguucaccuauuua

SEQ ID NO: 249772 - RNA, 20 nt, Artificial Sequence
  Synthetic
aaaggguguucaccuauuua

SEQ ID NO: 249773 - RNA, 21 nt, Artificial Sequence
  Synthetic
aaaaggguguucaccuauuua

SEQ ID NO: 249774 - RNA, 22 nt, Artificial Sequence
  Synthetic
aaaaaggguguucaccuauuua

SEQ ID NO: 249775 - RNA, 23 nt, Artificial Sequence
  Synthetic
aaaaaaggguguucaccuauuua

SEQ ID NO: 249776 - RNA, 24 nt, Artificial Sequence
  Synthetic
aaaaaaaggguguucaccuauuua

SEQ ID NO: 249777 - RNA, 18 nt, Artificial Sequence
  Synthetic
gauguuuugagcuauuua

SEQ ID NO: 249778 - RNA, 19 nt, Artificial Sequence
  Synthetic
ugauguuuugagcuauuua

SEQ ID NO: 249779 - RNA, 20 nt, Artificial Sequence
  Synthetic
cugauguuuugagcuauuua

SEQ ID NO: 249780 - RNA, 21 nt, Artificial Sequence
  Synthetic
acugauguuuugagcuauuua

SEQ ID NO: 249781 - RNA, 22 nt, Artificial Sequence
  Synthetic
gacugauguuuugagcuauuua

SEQ ID NO: 249782 - RNA, 23 nt, Artificial Sequence
  Synthetic
agacugauguuuugagcuauuua

SEQ ID NO: 249783 - RNA, 24 nt, Artificial Sequence
  Synthetic
uagacugauguuuugagcuauuua

SEQ ID NO: 249784 - RNA, 18 nt, Artificial Sequence
  Synthetic
uuaacuuggugcuauuua

SEQ ID NO: 249785 - RNA, 19 nt, Artificial Sequence
  Synthetic
guuaacuuggugcuauuua

SEQ ID NO: 249786 - RNA, 20 nt, Artificial Sequence
  Synthetic
aguuaacuuggugcuauuua

SEQ ID NO: 249787 - RNA, 21 nt, Artificial Sequence
  Synthetic
caguuaacuuggugcuauuua

SEQ ID NO: 249788 - RNA, 22 nt, Artificial Sequence
  Synthetic
ucaguuaacuuggugcuauuua

SEQ ID NO: 249789 - RNA, 23 nt, Artificial Sequence
  Synthetic
aucaguuaacuuggugcuauuua

SEQ ID NO: 249790 - RNA, 24 nt, Artificial Sequence
  Synthetic
aaucaguuaacuuggugcuauuua

SEQ ID NO: 249791 - RNA, 18 nt, Artificial Sequence
  Synthetic
aauagauugugcuauuua

SEQ ID NO: 249792 - RNA, 19 nt, Artificial Sequence
  Synthetic
uaauagauugugcuauuua

SEQ ID NO: 249793 - RNA, 20 nt, Artificial Sequence
  Synthetic
auaauagauugugcuauuua

SEQ ID NO: 249794 - RNA, 21 nt, Artificial Sequence
  Synthetic
uauaauagauugugcuauuua

SEQ ID NO: 249795 - RNA, 22 nt, Artificial Sequence
  Synthetic
cuauaauagauugugcuauuua

SEQ ID NO: 249796 - RNA, 23 nt, Artificial Sequence
  Synthetic
acuauaauagauugugcuauuua

SEQ ID NO: 249797 - RNA, 24 nt, Artificial Sequence
  Synthetic
uacuauaauagauugugcuauuua

SEQ ID NO: 249798 - RNA, 18 nt, Artificial Sequence
  Synthetic
ugggauucucucuauuua

SEQ ID NO: 249799 - RNA, 19 nt, Artificial Sequence
  Synthetic
uugggauucucucuauuua

SEQ ID NO: 249800 - RNA, 20 nt, Artificial Sequence
  Synthetic
uuugggauucucucuauuua

SEQ ID NO: 249801 - RNA, 21 nt, Artificial Sequence
  Synthetic
cuuugggauucucucuauuua

SEQ ID NO: 249802 - RNA, 22 nt, Artificial Sequence
  Synthetic
ucuuugggauucucucuauuua

SEQ ID NO: 249803 - RNA, 23 nt, Artificial Sequence
  Synthetic
cucuuugggauucucucuauuua

SEQ ID NO: 249804 - RNA, 24 nt, Artificial Sequence
  Synthetic
ucucuuugggauucucucuauuua

SEQ ID NO: 249805 - RNA, 18 nt, Artificial Sequence
  Synthetic
aaaaugcugaaguauuua

SEQ ID NO: 249806 - RNA, 19 nt, Artificial Sequence
  Synthetic
aaaaaugcugaaguauuua

SEQ ID NO: 249807 - RNA, 20 nt, Artificial Sequence
  Synthetic
gaaaaaugcugaaguauuua

SEQ ID NO: 249808 - RNA, 21 nt, Artificial Sequence
  Synthetic
agaaaaaugcugaaguauuua

SEQ ID NO: 249809 - RNA, 22 nt, Artificial Sequence
  Synthetic
gagaaaaaugcugaaguauuua

SEQ ID NO: 249810 - RNA, 23 nt, Artificial Sequence
  Synthetic
agagaaaaaugcugaaguauuua

SEQ ID NO: 249811 - RNA, 24 nt, Artificial Sequence
  Synthetic
aagagaaaaaugcugaaguauuua

SEQ ID NO: 249812 - RNA, 18 nt, Artificial Sequence
  Synthetic
acuaaacaccaguauuua

SEQ ID NO: 249813 - RNA, 19 nt, Artificial Sequence
  Synthetic
uacuaaacaccaguauuua

SEQ ID NO: 249814 - RNA, 20 nt, Artificial Sequence
  Synthetic
guacuaaacaccaguauuua

SEQ ID NO: 249815 - RNA, 21 nt, Artificial Sequence
  Synthetic
aguacuaaacaccaguauuua

SEQ ID NO: 249816 - RNA, 22 nt, Artificial Sequence
  Synthetic
aaguacuaaacaccaguauuua

SEQ ID NO: 249817 - RNA, 23 nt, Artificial Sequence
  Synthetic
uaaguacuaaacaccaguauuua

SEQ ID NO: 249818 - RNA, 24 nt, Artificial Sequence
  Synthetic
auaaguacuaaacaccaguauuua

SEQ ID NO: 249819 - RNA, 18 nt, Artificial Sequence
  Synthetic
cagcuaaagcaguauuua

SEQ ID NO: 249820 - RNA, 19 nt, Artificial Sequence
  Synthetic
acagcuaaagcaguauuua

SEQ ID NO: 249821 - RNA, 20 nt, Artificial Sequence
  Synthetic
cacagcuaaagcaguauuua

SEQ ID NO: 249822 - RNA, 21 nt, Artificial Sequence
  Synthetic
acacagcuaaagcaguauuua

SEQ ID NO: 249823 - RNA, 22 nt, Artificial Sequence
  Synthetic
gacacagcuaaagcaguauuua

SEQ ID NO: 249824 - RNA, 23 nt, Artificial Sequence
  Synthetic
ggacacagcuaaagcaguauuua

SEQ ID NO: 249825 - RNA, 24 nt, Artificial Sequence
  Synthetic
gggacacagcuaaagcaguauuua

SEQ ID NO: 249826 - RNA, 18 nt, Artificial Sequence
  Synthetic
ucacagagcagguauuua

SEQ ID NO: 249827 - RNA, 19 nt, Artificial Sequence
  Synthetic
aucacagagcagguauuua

SEQ ID NO: 249828 - RNA, 20 nt, Artificial Sequence
  Synthetic
uaucacagagcagguauuua

SEQ ID NO: 249829 - RNA, 21 nt, Artificial Sequence
  Synthetic
cuaucacagagcagguauuua

SEQ ID NO: 249830 - RNA, 22 nt, Artificial Sequence
  Synthetic
ucuaucacagagcagguauuua

SEQ ID NO: 249831 - RNA, 23 nt, Artificial Sequence
  Synthetic
gucuaucacagagcagguauuua

SEQ ID NO: 249832 - RNA, 24 nt, Artificial Sequence
  Synthetic
agucuaucacagagcagguauuua

SEQ ID NO: 249833 - RNA, 18 nt, Artificial Sequence
  Synthetic
cauauugacugguauuua

SEQ ID NO: 249834 - RNA, 19 nt, Artificial Sequence
  Synthetic
ccauauugacugguauuua

SEQ ID NO: 249835 - RNA, 20 nt, Artificial Sequence
  Synthetic
accauauugacugguauuua

SEQ ID NO: 249836 - RNA, 21 nt, Artificial Sequence
  Synthetic
uaccauauugacugguauuua

SEQ ID NO: 249837 - RNA, 22 nt, Artificial Sequence
  Synthetic
uuaccauauugacugguauuua

SEQ ID NO: 249838 - RNA, 23 nt, Artificial Sequence
  Synthetic
guuaccauauugacugguauuua

SEQ ID NO: 249839 - RNA, 24 nt, Artificial Sequence
  Synthetic
uguuaccauauugacugguauuua

SEQ ID NO: 249840 - RNA, 18 nt, Artificial Sequence
  Synthetic
uuuacagaacuguauuua

SEQ ID NO: 249841 - RNA, 19 nt, Artificial Sequence
  Synthetic
auuuacagaacuguauuua

SEQ ID NO: 249842 - RNA, 20 nt, Artificial Sequence
  Synthetic
uauuuacagaacuguauuua

SEQ ID NO: 249843 - RNA, 21 nt, Artificial Sequence
  Synthetic
auauuuacagaacuguauuua

SEQ ID NO: 249844 - RNA, 22 nt, Artificial Sequence
  Synthetic
uauauuuacagaacuguauuua

SEQ ID NO: 249845 - RNA, 23 nt, Artificial Sequence
  Synthetic
auauauuuacagaacuguauuua

SEQ ID NO: 249846 - RNA, 24 nt, Artificial Sequence
  Synthetic
gauauauuuacagaacuguauuua

SEQ ID NO: 249847 - RNA, 18 nt, Artificial Sequence
  Synthetic
gcaugcacgguguauuua

SEQ ID NO: 249848 - RNA, 19 nt, Artificial Sequence
  Synthetic
agcaugcacgguguauuua

SEQ ID NO: 249849 - RNA, 20 nt, Artificial Sequence
  Synthetic
gagcaugcacgguguauuua

SEQ ID NO: 249850 - RNA, 21 nt, Artificial Sequence
  Synthetic
ggagcaugcacgguguauuua

SEQ ID NO: 249851 - RNA, 22 nt, Artificial Sequence
  Synthetic
gggagcaugcacgguguauuua

SEQ ID NO: 249852 - RNA, 23 nt, Artificial Sequence
  Synthetic
ggggagcaugcacgguguauuua

SEQ ID NO: 249853 - RNA, 24 nt, Artificial Sequence
  Synthetic
aggggagcaugcacgguguauuua

SEQ ID NO: 249854 - RNA, 18 nt, Artificial Sequence
  Synthetic
aaucaugauguguauuua

SEQ ID NO: 249855 - RNA, 19 nt, Artificial Sequence
  Synthetic
aaaucaugauguguauuua

SEQ ID NO: 249856 - RNA, 20 nt, Artificial Sequence
  Synthetic
caaaucaugauguguauuua

SEQ ID NO: 249857 - RNA, 21 nt, Artificial Sequence
  Synthetic
ucaaaucaugauguguauuua

SEQ ID NO: 249858 - RNA, 22 nt, Artificial Sequence
  Synthetic
aucaaaucaugauguguauuua

SEQ ID NO: 249859 - RNA, 23 nt, Artificial Sequence
  Synthetic
uaucaaaucaugauguguauuua

SEQ ID NO: 249860 - RNA, 24 nt, Artificial Sequence
  Synthetic
auaucaaaucaugauguguauuua

SEQ ID NO: 249861 - RNA, 18 nt, Artificial Sequence
  Synthetic
ccaaaaucacauuauuua

SEQ ID NO: 249862 - RNA, 19 nt, Artificial Sequence
  Synthetic
accaaaaucacauuauuua

SEQ ID NO: 249863 - RNA, 20 nt, Artificial Sequence
  Synthetic
gaccaaaaucacauuauuua

SEQ ID NO: 249864 - RNA, 21 nt, Artificial Sequence
  Synthetic
ugaccaaaaucacauuauuua

SEQ ID NO: 249865 - RNA, 22 nt, Artificial Sequence
  Synthetic
gugaccaaaaucacauuauuua

SEQ ID NO: 249866 - RNA, 23 nt, Artificial Sequence
  Synthetic
ugugaccaaaaucacauuauuua

SEQ ID NO: 249867 - RNA, 24 nt, Artificial Sequence
  Synthetic
augugaccaaaaucacauuauuua

SEQ ID NO: 249868 - RNA, 18 nt, Artificial Sequence
  Synthetic
aagagcuugcauuauuua

SEQ ID NO: 249869 - RNA, 19 nt, Artificial Sequence
  Synthetic
gaagagcuugcauuauuua

SEQ ID NO: 249870 - RNA, 20 nt, Artificial Sequence
  Synthetic
ugaagagcuugcauuauuua

SEQ ID NO: 249871 - RNA, 21 nt, Artificial Sequence
  Synthetic
cugaagagcuugcauuauuua

SEQ ID NO: 249872 - RNA, 22 nt, Artificial Sequence
  Synthetic
ccugaagagcuugcauuauuua

SEQ ID NO: 249873 - RNA, 23 nt, Artificial Sequence
  Synthetic
uccugaagagcuugcauuauuua

SEQ ID NO: 249874 - RNA, 24 nt, Artificial Sequence
  Synthetic
auccugaagagcuugcauuauuua

SEQ ID NO: 249875 - RNA, 18 nt, Artificial Sequence
  Synthetic
auuggcucauauuauuua

SEQ ID NO: 249876 - RNA, 19 nt, Artificial Sequence
  Synthetic
gauuggcucauauuauuua

SEQ ID NO: 249877 - RNA, 20 nt, Artificial Sequence
  Synthetic
agauuggcucauauuauuua

SEQ ID NO: 249878 - RNA, 21 nt, Artificial Sequence
  Synthetic
aagauuggcucauauuauuua

SEQ ID NO: 249879 - RNA, 22 nt, Artificial Sequence
  Synthetic
gaagauuggcucauauuauuua

SEQ ID NO: 249880 - RNA, 23 nt, Artificial Sequence
  Synthetic
ugaagauuggcucauauuauuua

SEQ ID NO: 249881 - RNA, 24 nt, Artificial Sequence
  Synthetic
cugaagauuggcucauauuauuua

SEQ ID NO: 249882 - RNA, 18 nt, Artificial Sequence
  Synthetic
uggaaagcaacuuauuua

SEQ ID NO: 249883 - RNA, 19 nt, Artificial Sequence
  Synthetic
uuggaaagcaacuuauuua

SEQ ID NO: 249884 - RNA, 20 nt, Artificial Sequence
  Synthetic
cuuggaaagcaacuuauuua

SEQ ID NO: 249885 - RNA, 21 nt, Artificial Sequence
  Synthetic
acuuggaaagcaacuuauuua

SEQ ID NO: 249886 - RNA, 22 nt, Artificial Sequence
  Synthetic
aacuuggaaagcaacuuauuua

SEQ ID NO: 249887 - RNA, 23 nt, Artificial Sequence
  Synthetic
gaacuuggaaagcaacuuauuua

SEQ ID NO: 249888 - RNA, 24 nt, Artificial Sequence
  Synthetic
ugaacuuggaaagcaacuuauuua

SEQ ID NO: 249889 - RNA, 18 nt, Artificial Sequence
  Synthetic
ccacccuucccuuauuua

SEQ ID NO: 249890 - RNA, 19 nt, Artificial Sequence
  Synthetic
cccacccuucccuuauuua

SEQ ID NO: 249891 - RNA, 20 nt, Artificial Sequence
  Synthetic
ucccacccuucccuuauuua

SEQ ID NO: 249892 - RNA, 21 nt, Artificial Sequence
  Synthetic
uucccacccuucccuuauuua

SEQ ID NO: 249893 - RNA, 22 nt, Artificial Sequence
  Synthetic
cuucccacccuucccuuauuua

SEQ ID NO: 249894 - RNA, 23 nt, Artificial Sequence
  Synthetic
acuucccacccuucccuuauuua

SEQ ID NO: 249895 - RNA, 24 nt, Artificial Sequence
  Synthetic
cacuucccacccuucccuuauuua

SEQ ID NO: 249896 - RNA, 18 nt, Artificial Sequence
  Synthetic
guauucccuucuuauuua

SEQ ID NO: 249897 - RNA, 19 nt, Artificial Sequence
  Synthetic
gguauucccuucuuauuua

SEQ ID NO: 249898 - RNA, 20 nt, Artificial Sequence
  Synthetic
ugguauucccuucuuauuua

SEQ ID NO: 249899 - RNA, 21 nt, Artificial Sequence
  Synthetic
gugguauucccuucuuauuua

SEQ ID NO: 249900 - RNA, 22 nt, Artificial Sequence
  Synthetic
agugguauucccuucuuauuua

SEQ ID NO: 249901 - RNA, 23 nt, Artificial Sequence
  Synthetic
gagugguauucccuucuuauuua

SEQ ID NO: 249902 - RNA, 24 nt, Artificial Sequence
  Synthetic
agagugguauucccuucuuauuua

SEQ ID NO: 249903 - RNA, 18 nt, Artificial Sequence
  Synthetic
acauucaucuguuauuua

SEQ ID NO: 249904 - RNA, 19 nt, Artificial Sequence
  Synthetic
uacauucaucuguuauuua

SEQ ID NO: 249905 - RNA, 20 nt, Artificial Sequence
  Synthetic
uuacauucaucuguuauuua

SEQ ID NO: 249906 - RNA, 21 nt, Artificial Sequence
  Synthetic
uuuacauucaucuguuauuua

SEQ ID NO: 249907 - RNA, 22 nt, Artificial Sequence
  Synthetic
guuuacauucaucuguuauuua

SEQ ID NO: 249908 - RNA, 23 nt, Artificial Sequence
  Synthetic
aguuuacauucaucuguuauuua

SEQ ID NO: 249909 - RNA, 24 nt, Artificial Sequence
  Synthetic
gaguuuacauucaucuguuauuua

SEQ ID NO: 249910 - RNA, 18 nt, Artificial Sequence
  Synthetic
uugaggaaaauuuauuua

SEQ ID NO: 249911 - RNA, 19 nt, Artificial Sequence
  Synthetic
auugaggaaaauuuauuua

SEQ ID NO: 249912 - RNA, 20 nt, Artificial Sequence
  Synthetic
cauugaggaaaauuuauuua

SEQ ID NO: 249913 - RNA, 21 nt, Artificial Sequence
  Synthetic
ucauugaggaaaauuuauuua

SEQ ID NO: 249914 - RNA, 22 nt, Artificial Sequence
  Synthetic
aucauugaggaaaauuuauuua

SEQ ID NO: 249915 - RNA, 23 nt, Artificial Sequence
  Synthetic
gaucauugaggaaaauuuauuua

SEQ ID NO: 249916 - RNA, 24 nt, Artificial Sequence
  Synthetic
ugaucauugaggaaaauuuauuua

SEQ ID NO: 249917 - RNA, 18 nt, Artificial Sequence
  Synthetic
acugggguaauuuauuua

SEQ ID NO: 249918 - RNA, 19 nt, Artificial Sequence
  Synthetic
gacugggguaauuuauuua

SEQ ID NO: 249919 - RNA, 20 nt, Artificial Sequence
  Synthetic
agacugggguaauuuauuua

SEQ ID NO: 249920 - RNA, 21 nt, Artificial Sequence
  Synthetic
gagacugggguaauuuauuua

SEQ ID NO: 249921 - RNA, 22 nt, Artificial Sequence
  Synthetic
ugagacugggguaauuuauuua

SEQ ID NO: 249922 - RNA, 23 nt, Artificial Sequence
  Synthetic
cugagacugggguaauuuauuua

SEQ ID NO: 249923 - RNA, 24 nt, Artificial Sequence
  Synthetic
ccugagacugggguaauuuauuua

SEQ ID NO: 249924 - RNA, 18 nt, Artificial Sequence
  Synthetic
uuguucagcauuuauuua

SEQ ID NO: 249925 - RNA, 19 nt, Artificial Sequence
  Synthetic
uuuguucagcauuuauuua

SEQ ID NO: 249926 - RNA, 20 nt, Artificial Sequence
  Synthetic
auuuguucagcauuuauuua

SEQ ID NO: 249927 - RNA, 21 nt, Artificial Sequence
  Synthetic
uauuuguucagcauuuauuua

SEQ ID NO: 249928 - RNA, 22 nt, Artificial Sequence
  Synthetic
auauuuguucagcauuuauuua

SEQ ID NO: 249929 - RNA, 23 nt, Artificial Sequence
  Synthetic
aauauuuguucagcauuuauuua

SEQ ID NO: 249930 - RNA, 24 nt, Artificial Sequence
  Synthetic
aaauauuuguucagcauuuauuua

SEQ ID NO: 249931 - RNA, 18 nt, Artificial Sequence
  Synthetic
ccagugacacuuuauuua

SEQ ID NO: 249932 - RNA, 19 nt, Artificial Sequence
  Synthetic
uccagugacacuuuauuua

SEQ ID NO: 249933 - RNA, 20 nt, Artificial Sequence
  Synthetic
cuccagugacacuuuauuua

SEQ ID NO: 249934 - RNA, 21 nt, Artificial Sequence
  Synthetic
gcuccagugacacuuuauuua

SEQ ID NO: 249935 - RNA, 22 nt, Artificial Sequence
  Synthetic
ugcuccagugacacuuuauuua

SEQ ID NO: 249936 - RNA, 23 nt, Artificial Sequence
  Synthetic
gugcuccagugacacuuuauuua

SEQ ID NO: 249937 - RNA, 24 nt, Artificial Sequence
  Synthetic
ugugcuccagugacacuuuauuua

SEQ ID NO: 249938 - RNA, 18 nt, Artificial Sequence
  Synthetic
cagucacuucuuuauuua

SEQ ID NO: 249939 - RNA, 19 nt, Artificial Sequence
  Synthetic
ccagucacuucuuuauuua

SEQ ID NO: 249940 - RNA, 20 nt, Artificial Sequence
  Synthetic
accagucacuucuuuauuua

SEQ ID NO: 249941 - RNA, 21 nt, Artificial Sequence
  Synthetic
uaccagucacuucuuuauuua

SEQ ID NO: 249942 - RNA, 22 nt, Artificial Sequence
  Synthetic
uuaccagucacuucuuuauuua

SEQ ID NO: 249943 - RNA, 23 nt, Artificial Sequence
  Synthetic
guuaccagucacuucuuuauuua

SEQ ID NO: 249944 - RNA, 24 nt, Artificial Sequence
  Synthetic
uguuaccagucacuucuuuauuua

SEQ ID NO: 249945 - RNA, 18 nt, Artificial Sequence
  Synthetic
uuuguuuuguuuuauuua

SEQ ID NO: 249946 - RNA, 19 nt, Artificial Sequence
  Synthetic
uuuuguuuuguuuuauuua

SEQ ID NO: 249947 - RNA, 20 nt, Artificial Sequence
  Synthetic
guuuuguuuuguuuuauuua

SEQ ID NO: 249948 - RNA, 21 nt, Artificial Sequence
  Synthetic
uguuuuguuuuguuuuauuua

SEQ ID NO: 249949 - RNA, 22 nt, Artificial Sequence
  Synthetic
uuguuuuguuuuguuuuauuua

SEQ ID NO: 249950 - RNA, 23 nt, Artificial Sequence
  Synthetic
uuuguuuuguuuuguuuuauuua

SEQ ID NO: 249951 - RNA, 24 nt, Artificial Sequence
  Synthetic
uuuuguuuuguuuuguuuuauuua

SEQ ID NO: 249952 - RNA, 18 nt, Artificial Sequence
  Synthetic
gacaagacacaaacuuua

SEQ ID NO: 249953 - RNA, 19 nt, Artificial Sequence
  Synthetic
cgacaagacacaaacuuua

SEQ ID NO: 249954 - RNA, 20 nt, Artificial Sequence
  Synthetic
ccgacaagacacaaacuuua

SEQ ID NO: 249955 - RNA, 21 nt, Artificial Sequence
  Synthetic
uccgacaagacacaaacuuua

SEQ ID NO: 249956 - RNA, 22 nt, Artificial Sequence
  Synthetic
uuccgacaagacacaaacuuua

SEQ ID NO: 249957 - RNA, 23 nt, Artificial Sequence
  Synthetic
auuccgacaagacacaaacuuua

SEQ ID NO: 249958 - RNA, 24 nt, Artificial Sequence
  Synthetic
cauuccgacaagacacaaacuuua

SEQ ID NO: 249959 - RNA, 18 nt, Artificial Sequence
  Synthetic
uccaaaccugaaacuuua

SEQ ID NO: 249960 - RNA, 19 nt, Artificial Sequence
  Synthetic
cuccaaaccugaaacuuua

SEQ ID NO: 249961 - RNA, 20 nt, Artificial Sequence
  Synthetic
gcuccaaaccugaaacuuua

SEQ ID NO: 249962 - RNA, 21 nt, Artificial Sequence
  Synthetic
agcuccaaaccugaaacuuua

SEQ ID NO: 249963 - RNA, 22 nt, Artificial Sequence
  Synthetic
cagcuccaaaccugaaacuuua

SEQ ID NO: 249964 - RNA, 23 nt, Artificial Sequence
  Synthetic
ucagcuccaaaccugaaacuuua

SEQ ID NO: 249965 - RNA, 24 nt, Artificial Sequence
  Synthetic
uucagcuccaaaccugaaacuuua

SEQ ID NO: 249966 - RNA, 18 nt, Artificial Sequence
  Synthetic
guaaauuugacaacuuua

SEQ ID NO: 249967 - RNA, 19 nt, Artificial Sequence
  Synthetic
uguaaauuugacaacuuua

SEQ ID NO: 249968 - RNA, 20 nt, Artificial Sequence
  Synthetic
guguaaauuugacaacuuua

SEQ ID NO: 249969 - RNA, 21 nt, Artificial Sequence
  Synthetic
aguguaaauuugacaacuuua

SEQ ID NO: 249970 - RNA, 22 nt, Artificial Sequence
  Synthetic
uaguguaaauuugacaacuuua

SEQ ID NO: 249971 - RNA, 23 nt, Artificial Sequence
  Synthetic
auaguguaaauuugacaacuuua

SEQ ID NO: 249972 - RNA, 24 nt, Artificial Sequence
  Synthetic
gauaguguaaauuugacaacuuua

SEQ ID NO: 249973 - RNA, 18 nt, Artificial Sequence
  Synthetic
auuacgguuugaacuuua

SEQ ID NO: 249974 - RNA, 19 nt, Artificial Sequence
  Synthetic
aauuacgguuugaacuuua

SEQ ID NO: 249975 - RNA, 20 nt, Artificial Sequence
  Synthetic
uaauuacgguuugaacuuua

SEQ ID NO: 249976 - RNA, 21 nt, Artificial Sequence
  Synthetic
auaauuacgguuugaacuuua

SEQ ID NO: 249977 - RNA, 22 nt, Artificial Sequence
  Synthetic
uauaauuacgguuugaacuuua

SEQ ID NO: 249978 - RNA, 23 nt, Artificial Sequence
  Synthetic
uuauaauuacgguuugaacuuua

SEQ ID NO: 249979 - RNA, 24 nt, Artificial Sequence
  Synthetic
auuauaauuacgguuugaacuuua

SEQ ID NO: 249980 - RNA, 18 nt, Artificial Sequence
  Synthetic
cuugauggcauaacuuua

SEQ ID NO: 249981 - RNA, 19 nt, Artificial Sequence
  Synthetic
acuugauggcauaacuuua

SEQ ID NO: 249982 - RNA, 20 nt, Artificial Sequence
  Synthetic
aacuugauggcauaacuuua

SEQ ID NO: 249983 - RNA, 21 nt, Artificial Sequence
  Synthetic
caacuugauggcauaacuuua

SEQ ID NO: 249984 - RNA, 22 nt, Artificial Sequence
  Synthetic
acaacuugauggcauaacuuua

SEQ ID NO: 249985 - RNA, 23 nt, Artificial Sequence
  Synthetic
gacaacuugauggcauaacuuua

SEQ ID NO: 249986 - RNA, 24 nt, Artificial Sequence
  Synthetic
ggacaacuugauggcauaacuuua

SEQ ID NO: 249987 - RNA, 18 nt, Artificial Sequence
  Synthetic
auuuacucgauaacuuua

SEQ ID NO: 249988 - RNA, 19 nt, Artificial Sequence
  Synthetic
cauuuacucgauaacuuua

SEQ ID NO: 249989 - RNA, 20 nt, Artificial Sequence
  Synthetic
ucauuuacucgauaacuuua

SEQ ID NO: 249990 - RNA, 21 nt, Artificial Sequence
  Synthetic
aucauuuacucgauaacuuua

SEQ ID NO: 249991 - RNA, 22 nt, Artificial Sequence
  Synthetic
aaucauuuacucgauaacuuua

SEQ ID NO: 249992 - RNA, 23 nt, Artificial Sequence
  Synthetic
caaucauuuacucgauaacuuua

SEQ ID NO: 249993 - RNA, 24 nt, Artificial Sequence
  Synthetic
ccaaucauuuacucgauaacuuua

SEQ ID NO: 249994 - RNA, 18 nt, Artificial Sequence
  Synthetic
auuauaaucgccacuuua

SEQ ID NO: 249995 - RNA, 19 nt, Artificial Sequence
  Synthetic
uauuauaaucgccacuuua

SEQ ID NO: 249996 - RNA, 20 nt, Artificial Sequence
  Synthetic
cuauuauaaucgccacuuua

SEQ ID NO: 249997 - RNA, 21 nt, Artificial Sequence
  Synthetic
acuauuauaaucgccacuuua

SEQ ID NO: 249998 - RNA, 22 nt, Artificial Sequence
  Synthetic
uacuauuauaaucgccacuuua

SEQ ID NO: 249999 - RNA, 23 nt, Artificial Sequence
  Synthetic
guacuauuauaaucgccacuuua

SEQ ID NO: 250000 - RNA, 24 nt, Artificial Sequence
  Synthetic
aguacuauuauaaucgccacuuua

SEQ ID NO: 250001 - RNA, 18 nt, Artificial Sequence
  Synthetic
ugcaucuuauucacuuua

SEQ ID NO: 250002 - RNA, 19 nt, Artificial Sequence
  Synthetic
gugcaucuuauucacuuua

SEQ ID NO: 250003 - RNA, 20 nt, Artificial Sequence
  Synthetic
agugcaucuuauucacuuua

SEQ ID NO: 250004 - RNA, 21 nt, Artificial Sequence
  Synthetic
aagugcaucuuauucacuuua

SEQ ID NO: 250005 - RNA, 22 nt, Artificial Sequence
  Synthetic
uaagugcaucuuauucacuuua

SEQ ID NO: 250006 - RNA, 23 nt, Artificial Sequence
  Synthetic
uuaagugcaucuuauucacuuua

SEQ ID NO: 250007 - RNA, 24 nt, Artificial Sequence
  Synthetic
guuaagugcaucuuauucacuuua

SEQ ID NO: 250008 - RNA, 18 nt, Artificial Sequence
  Synthetic
uccucauccuucacuuua

SEQ ID NO: 250009 - RNA, 19 nt, Artificial Sequence
  Synthetic
uuccucauccuucacuuua

SEQ ID NO: 250010 - RNA, 20 nt, Artificial Sequence
  Synthetic
guuccucauccuucacuuua

SEQ ID NO: 250011 - RNA, 21 nt, Artificial Sequence
  Synthetic
aguuccucauccuucacuuua

SEQ ID NO: 250012 - RNA, 22 nt, Artificial Sequence
  Synthetic
uaguuccucauccuucacuuua

SEQ ID NO: 250013 - RNA, 23 nt, Artificial Sequence
  Synthetic
cuaguuccucauccuucacuuua

SEQ ID NO: 250014 - RNA, 24 nt, Artificial Sequence
  Synthetic
ucuaguuccucauccuucacuuua

SEQ ID NO: 250015 - RNA, 18 nt, Artificial Sequence
  Synthetic
ucaugacuuuucacuuua

SEQ ID NO: 250016 - RNA, 19 nt, Artificial Sequence
  Synthetic
aucaugacuuuucacuuua

SEQ ID NO: 250017 - RNA, 20 nt, Artificial Sequence
  Synthetic
gaucaugacuuuucacuuua

SEQ ID NO: 250018 - RNA, 21 nt, Artificial Sequence
  Synthetic
agaucaugacuuuucacuuua

SEQ ID NO: 250019 - RNA, 22 nt, Artificial Sequence
  Synthetic
aagaucaugacuuuucacuuua

SEQ ID NO: 250020 - RNA, 23 nt, Artificial Sequence
  Synthetic
caagaucaugacuuuucacuuua

SEQ ID NO: 250021 - RNA, 24 nt, Artificial Sequence
  Synthetic
gcaagaucaugacuuuucacuuua

SEQ ID NO: 250022 - RNA, 18 nt, Artificial Sequence
  Synthetic
cauauuuuuuucacuuua

SEQ ID NO: 250023 - RNA, 19 nt, Artificial Sequence
  Synthetic
ucauauuuuuuucacuuua

SEQ ID NO: 250024 - RNA, 20 nt, Artificial Sequence
  Synthetic
aucauauuuuuuucacuuua

SEQ ID NO: 250025 - RNA, 21 nt, Artificial Sequence
  Synthetic
caucauauuuuuuucacuuua

SEQ ID NO: 250026 - RNA, 22 nt, Artificial Sequence
  Synthetic
gcaucauauuuuuuucacuuua

SEQ ID NO: 250027 - RNA, 23 nt, Artificial Sequence
  Synthetic
ugcaucauauuuuuuucacuuua

SEQ ID NO: 250028 - RNA, 24 nt, Artificial Sequence
  Synthetic
uugcaucauauuuuuuucacuuua

SEQ ID NO: 250029 - RNA, 18 nt, Artificial Sequence
  Synthetic
ugaaaacaauguacuuua

SEQ ID NO: 250030 - RNA, 19 nt, Artificial Sequence
  Synthetic
cugaaaacaauguacuuua

SEQ ID NO: 250031 - RNA, 20 nt, Artificial Sequence
  Synthetic
gcugaaaacaauguacuuua

SEQ ID NO: 250032 - RNA, 21 nt, Artificial Sequence
  Synthetic
ugcugaaaacaauguacuuua

SEQ ID NO: 250033 - RNA, 22 nt, Artificial Sequence
  Synthetic
uugcugaaaacaauguacuuua

SEQ ID NO: 250034 - RNA, 23 nt, Artificial Sequence
  Synthetic
uuugcugaaaacaauguacuuua

SEQ ID NO: 250035 - RNA, 24 nt, Artificial Sequence
  Synthetic
uuuugcugaaaacaauguacuuua

SEQ ID NO: 250036 - RNA, 18 nt, Artificial Sequence
  Synthetic
cucugcagcuguacuuua

SEQ ID NO: 250037 - RNA, 19 nt, Artificial Sequence
  Synthetic
acucugcagcuguacuuua

SEQ ID NO: 250038 - RNA, 20 nt, Artificial Sequence
  Synthetic
uacucugcagcuguacuuua

SEQ ID NO: 250039 - RNA, 21 nt, Artificial Sequence
  Synthetic
auacucugcagcuguacuuua

SEQ ID NO: 250040 - RNA, 22 nt, Artificial Sequence
  Synthetic
uauacucugcagcuguacuuua

SEQ ID NO: 250041 - RNA, 23 nt, Artificial Sequence
  Synthetic
uuauacucugcagcuguacuuua

SEQ ID NO: 250042 - RNA, 24 nt, Artificial Sequence
  Synthetic
uuuauacucugcagcuguacuuua

SEQ ID NO: 250043 - RNA, 18 nt, Artificial Sequence
  Synthetic
uuuggggaaguuacuuua

SEQ ID NO: 250044 - RNA, 19 nt, Artificial Sequence
  Synthetic
guuuggggaaguuacuuua

SEQ ID NO: 250045 - RNA, 20 nt, Artificial Sequence
  Synthetic
aguuuggggaaguuacuuua

SEQ ID NO: 250046 - RNA, 21 nt, Artificial Sequence
  Synthetic
gaguuuggggaaguuacuuua

SEQ ID NO: 250047 - RNA, 22 nt, Artificial Sequence
  Synthetic
ggaguuuggggaaguuacuuua

SEQ ID NO: 250048 - RNA, 23 nt, Artificial Sequence
  Synthetic
gggaguuuggggaaguuacuuua

SEQ ID NO: 250049 - RNA, 24 nt, Artificial Sequence
  Synthetic
ugggaguuuggggaaguuacuuua

SEQ ID NO: 250050 - RNA, 18 nt, Artificial Sequence
  Synthetic
acaguuaauguuacuuua

SEQ ID NO: 250051 - RNA, 19 nt, Artificial Sequence
  Synthetic
aacaguuaauguuacuuua

SEQ ID NO: 250052 - RNA, 20 nt, Artificial Sequence
  Synthetic
aaacaguuaauguuacuuua

SEQ ID NO: 250053 - RNA, 21 nt, Artificial Sequence
  Synthetic
uaaacaguuaauguuacuuua

SEQ ID NO: 250054 - RNA, 22 nt, Artificial Sequence
  Synthetic
cuaaacaguuaauguuacuuua

SEQ ID NO: 250055 - RNA, 23 nt, Artificial Sequence
  Synthetic
acuaaacaguuaauguuacuuua

SEQ ID NO: 250056 - RNA, 24 nt, Artificial Sequence
  Synthetic
aacuaaacaguuaauguuacuuua

SEQ ID NO: 250057 - RNA, 18 nt, Artificial Sequence
  Synthetic
uucauaauauuuacuuua

SEQ ID NO: 250058 - RNA, 19 nt, Artificial Sequence
  Synthetic
uuucauaauauuuacuuua

SEQ ID NO: 250059 - RNA, 20 nt, Artificial Sequence
  Synthetic
uuuucauaauauuuacuuua

SEQ ID NO: 250060 - RNA, 21 nt, Artificial Sequence
  Synthetic
uuuuucauaauauuuacuuua

SEQ ID NO: 250061 - RNA, 22 nt, Artificial Sequence
  Synthetic
guuuuucauaauauuuacuuua

SEQ ID NO: 250062 - RNA, 23 nt, Artificial Sequence
  Synthetic
uguuuuucauaauauuuacuuua

SEQ ID NO: 250063 - RNA, 24 nt, Artificial Sequence
  Synthetic
auguuuuucauaauauuuacuuua

SEQ ID NO: 250064 - RNA, 18 nt, Artificial Sequence
  Synthetic
accugaagguaaccuuua

SEQ ID NO: 250065 - RNA, 19 nt, Artificial Sequence
  Synthetic
caccugaagguaaccuuua

SEQ ID NO: 250066 - RNA, 20 nt, Artificial Sequence
  Synthetic
gcaccugaagguaaccuuua

SEQ ID NO: 250067 - RNA, 21 nt, Artificial Sequence
  Synthetic
agcaccugaagguaaccuuua

SEQ ID NO: 250068 - RNA, 22 nt, Artificial Sequence
  Synthetic
aagcaccugaagguaaccuuua

SEQ ID NO: 250069 - RNA, 23 nt, Artificial Sequence
  Synthetic
aaagcaccugaagguaaccuuua

SEQ ID NO: 250070 - RNA, 24 nt, Artificial Sequence
  Synthetic
aaaagcaccugaagguaaccuuua

SEQ ID NO: 250071 - RNA, 18 nt, Artificial Sequence
  Synthetic
agcauaaaauucccuuua

SEQ ID NO: 250072 - RNA, 19 nt, Artificial Sequence
  Synthetic
uagcauaaaauucccuuua

SEQ ID NO: 250073 - RNA, 20 nt, Artificial Sequence
  Synthetic
cuagcauaaaauucccuuua

SEQ ID NO: 250074 - RNA, 21 nt, Artificial Sequence
  Synthetic
acuagcauaaaauucccuuua

SEQ ID NO: 250075 - RNA, 22 nt, Artificial Sequence
  Synthetic
uacuagcauaaaauucccuuua

SEQ ID NO: 250076 - RNA, 23 nt, Artificial Sequence
  Synthetic
uuacuagcauaaaauucccuuua

SEQ ID NO: 250077 - RNA, 24 nt, Artificial Sequence
  Synthetic
uuuacuagcauaaaauucccuuua

SEQ ID NO: 250078 - RNA, 18 nt, Artificial Sequence
  Synthetic
gcuuuguuguucccuuua

SEQ ID NO: 250079 - RNA, 19 nt, Artificial Sequence
  Synthetic
ggcuuuguuguucccuuua

SEQ ID NO: 250080 - RNA, 20 nt, Artificial Sequence
  Synthetic
aggcuuuguuguucccuuua

SEQ ID NO: 250081 - RNA, 21 nt, Artificial Sequence
  Synthetic
caggcuuuguuguucccuuua

SEQ ID NO: 250082 - RNA, 22 nt, Artificial Sequence
  Synthetic
ccaggcuuuguuguucccuuua

SEQ ID NO: 250083 - RNA, 23 nt, Artificial Sequence
  Synthetic
uccaggcuuuguuguucccuuua

SEQ ID NO: 250084 - RNA, 24 nt, Artificial Sequence
  Synthetic
auccaggcuuuguuguucccuuua

SEQ ID NO: 250085 - RNA, 18 nt, Artificial Sequence
  Synthetic
cuaagucccuggccuuua

SEQ ID NO: 250086 - RNA, 19 nt, Artificial Sequence
  Synthetic
acuaagucccuggccuuua

SEQ ID NO: 250087 - RNA, 20 nt, Artificial Sequence
  Synthetic
gacuaagucccuggccuuua

SEQ ID NO: 250088 - RNA, 21 nt, Artificial Sequence
  Synthetic
ugacuaagucccuggccuuua

SEQ ID NO: 250089 - RNA, 22 nt, Artificial Sequence
  Synthetic
augacuaagucccuggccuuua

SEQ ID NO: 250090 - RNA, 23 nt, Artificial Sequence
  Synthetic
aaugacuaagucccuggccuuua

SEQ ID NO: 250091 - RNA, 24 nt, Artificial Sequence
  Synthetic
caaugacuaagucccuggccuuua

SEQ ID NO: 250092 - RNA, 18 nt, Artificial Sequence
  Synthetic
auugauguguuuccuuua

SEQ ID NO: 250093 - RNA, 19 nt, Artificial Sequence
  Synthetic
cauugauguguuuccuuua

SEQ ID NO: 250094 - RNA, 20 nt, Artificial Sequence
  Synthetic
gcauugauguguuuccuuua

SEQ ID NO: 250095 - RNA, 21 nt, Artificial Sequence
  Synthetic
ugcauugauguguuuccuuua

SEQ ID NO: 250096 - RNA, 22 nt, Artificial Sequence
  Synthetic
uugcauugauguguuuccuuua

SEQ ID NO: 250097 - RNA, 23 nt, Artificial Sequence
  Synthetic
cuugcauugauguguuuccuuua

SEQ ID NO: 250098 - RNA, 24 nt, Artificial Sequence
  Synthetic
gcuugcauugauguguuuccuuua

SEQ ID NO: 250099 - RNA, 18 nt, Artificial Sequence
  Synthetic
uuaauuuuaacagcuuua

SEQ ID NO: 250100 - RNA, 19 nt, Artificial Sequence
  Synthetic
uuuaauuuuaacagcuuua

SEQ ID NO: 250101 - RNA, 20 nt, Artificial Sequence
  Synthetic
uuuuaauuuuaacagcuuua

SEQ ID NO: 250102 - RNA, 21 nt, Artificial Sequence
  Synthetic
uuuuuaauuuuaacagcuuua

SEQ ID NO: 250103 - RNA, 22 nt, Artificial Sequence
  Synthetic
uuuuuuaauuuuaacagcuuua

SEQ ID NO: 250104 - RNA, 23 nt, Artificial Sequence
  Synthetic
guuuuuuaauuuuaacagcuuua

SEQ ID NO: 250105 - RNA, 24 nt, Artificial Sequence
  Synthetic
uguuuuuuaauuuuaacagcuuua

SEQ ID NO: 250106 - RNA, 18 nt, Artificial Sequence
  Synthetic
ccuccuuaccuagcuuua

SEQ ID NO: 250107 - RNA, 19 nt, Artificial Sequence
  Synthetic
uccuccuuaccuagcuuua

SEQ ID NO: 250108 - RNA, 20 nt, Artificial Sequence
  Synthetic
cuccuccuuaccuagcuuua

SEQ ID NO: 250109 - RNA, 21 nt, Artificial Sequence
  Synthetic
ccuccuccuuaccuagcuuua

SEQ ID NO: 250110 - RNA, 22 nt, Artificial Sequence
  Synthetic
gccuccuccuuaccuagcuuua

SEQ ID NO: 250111 - RNA, 23 nt, Artificial Sequence
  Synthetic
ugccuccuccuuaccuagcuuua

SEQ ID NO: 250112 - RNA, 24 nt, Artificial Sequence
  Synthetic
cugccuccuccuuaccuagcuuua

SEQ ID NO: 250113 - RNA, 18 nt, Artificial Sequence
  Synthetic
cccuuuagcuucgcuuua

SEQ ID NO: 250114 - RNA, 19 nt, Artificial Sequence
  Synthetic
ccccuuuagcuucgcuuua

SEQ ID NO: 250115 - RNA, 20 nt, Artificial Sequence
  Synthetic
uccccuuuagcuucgcuuua

SEQ ID NO: 250116 - RNA, 21 nt, Artificial Sequence
  Synthetic
guccccuuuagcuucgcuuua

SEQ ID NO: 250117 - RNA, 22 nt, Artificial Sequence
  Synthetic
gguccccuuuagcuucgcuuua

SEQ ID NO: 250118 - RNA, 23 nt, Artificial Sequence
  Synthetic
ugguccccuuuagcuucgcuuua

SEQ ID NO: 250119 - RNA, 24 nt, Artificial Sequence
  Synthetic
augguccccuuuagcuucgcuuua

SEQ ID NO: 250120 - RNA, 18 nt, Artificial Sequence
  Synthetic
gugggcacuacugcuuua

SEQ ID NO: 250121 - RNA, 19 nt, Artificial Sequence
  Synthetic
ugugggcacuacugcuuua

SEQ ID NO: 250122 - RNA, 20 nt, Artificial Sequence
  Synthetic
augugggcacuacugcuuua

SEQ ID NO: 250123 - RNA, 21 nt, Artificial Sequence
  Synthetic
uaugugggcacuacugcuuua

SEQ ID NO: 250124 - RNA, 22 nt, Artificial Sequence
  Synthetic
auaugugggcacuacugcuuua

SEQ ID NO: 250125 - RNA, 23 nt, Artificial Sequence
  Synthetic
aauaugugggcacuacugcuuua

SEQ ID NO: 250126 - RNA, 24 nt, Artificial Sequence
  Synthetic
aaauaugugggcacuacugcuuua

SEQ ID NO: 250127 - RNA, 18 nt, Artificial Sequence
  Synthetic
aauauaucaucugcuuua

SEQ ID NO: 250128 - RNA, 19 nt, Artificial Sequence
  Synthetic
caauauaucaucugcuuua

SEQ ID NO: 250129 - RNA, 20 nt, Artificial Sequence
  Synthetic
acaauauaucaucugcuuua

SEQ ID NO: 250130 - RNA, 21 nt, Artificial Sequence
  Synthetic
cacaauauaucaucugcuuua

SEQ ID NO: 250131 - RNA, 22 nt, Artificial Sequence
  Synthetic
ccacaauauaucaucugcuuua

SEQ ID NO: 250132 - RNA, 23 nt, Artificial Sequence
  Synthetic
uccacaauauaucaucugcuuua

SEQ ID NO: 250133 - RNA, 24 nt, Artificial Sequence
  Synthetic
uuccacaauauaucaucugcuuua

SEQ ID NO: 250134 - RNA, 18 nt, Artificial Sequence
  Synthetic
uaacgagucauugcuuua

SEQ ID NO: 250135 - RNA, 19 nt, Artificial Sequence
  Synthetic
uuaacgagucauugcuuua

SEQ ID NO: 250136 - RNA, 20 nt, Artificial Sequence
  Synthetic
auuaacgagucauugcuuua

SEQ ID NO: 250137 - RNA, 21 nt, Artificial Sequence
  Synthetic
uauuaacgagucauugcuuua

SEQ ID NO: 250138 - RNA, 22 nt, Artificial Sequence
  Synthetic
cuauuaacgagucauugcuuua

SEQ ID NO: 250139 - RNA, 23 nt, Artificial Sequence
  Synthetic
gcuauuaacgagucauugcuuua

SEQ ID NO: 250140 - RNA, 24 nt, Artificial Sequence
  Synthetic
ggcuauuaacgagucauugcuuua

SEQ ID NO: 250141 - RNA, 18 nt, Artificial Sequence
  Synthetic
uguucaagaguugcuuua

SEQ ID NO: 250142 - RNA, 19 nt, Artificial Sequence
  Synthetic
guguucaagaguugcuuua

SEQ ID NO: 250143 - RNA, 20 nt, Artificial Sequence
  Synthetic
aguguucaagaguugcuuua

SEQ ID NO: 250144 - RNA, 21 nt, Artificial Sequence
  Synthetic
aaguguucaagaguugcuuua

SEQ ID NO: 250145 - RNA, 22 nt, Artificial Sequence
  Synthetic
caaguguucaagaguugcuuua

SEQ ID NO: 250146 - RNA, 23 nt, Artificial Sequence
  Synthetic
ucaaguguucaagaguugcuuua

SEQ ID NO: 250147 - RNA, 24 nt, Artificial Sequence
  Synthetic
uucaaguguucaagaguugcuuua

SEQ ID NO: 250148 - RNA, 18 nt, Artificial Sequence
  Synthetic
gcacagggauuugcuuua

SEQ ID NO: 250149 - RNA, 19 nt, Artificial Sequence
  Synthetic
ugcacagggauuugcuuua

SEQ ID NO: 250150 - RNA, 20 nt, Artificial Sequence
  Synthetic
uugcacagggauuugcuuua

SEQ ID NO: 250151 - RNA, 21 nt, Artificial Sequence
  Synthetic
guugcacagggauuugcuuua

SEQ ID NO: 250152 - RNA, 22 nt, Artificial Sequence
  Synthetic
aguugcacagggauuugcuuua

SEQ ID NO: 250153 - RNA, 23 nt, Artificial Sequence
  Synthetic
uaguugcacagggauuugcuuua

SEQ ID NO: 250154 - RNA, 24 nt, Artificial Sequence
  Synthetic
uuaguugcacagggauuugcuuua

SEQ ID NO: 250155 - RNA, 18 nt, Artificial Sequence
  Synthetic
aaaaguaucuuugcuuua

SEQ ID NO: 250156 - RNA, 19 nt, Artificial Sequence
  Synthetic
gaaaaguaucuuugcuuua

SEQ ID NO: 250157 - RNA, 20 nt, Artificial Sequence
  Synthetic
ugaaaaguaucuuugcuuua

SEQ ID NO: 250158 - RNA, 21 nt, Artificial Sequence
  Synthetic
cugaaaaguaucuuugcuuua

SEQ ID NO: 250159 - RNA, 22 nt, Artificial Sequence
  Synthetic
gcugaaaaguaucuuugcuuua

SEQ ID NO: 250160 - RNA, 23 nt, Artificial Sequence
  Synthetic
agcugaaaaguaucuuugcuuua

SEQ ID NO: 250161 - RNA, 24 nt, Artificial Sequence
  Synthetic
uagcugaaaaguaucuuugcuuua

SEQ ID NO: 250162 - RNA, 18 nt, Artificial Sequence
  Synthetic
auuuguauguuugcuuua

SEQ ID NO: 250163 - RNA, 19 nt, Artificial Sequence
  Synthetic
cauuuguauguuugcuuua

SEQ ID NO: 250164 - RNA, 20 nt, Artificial Sequence
  Synthetic
ccauuuguauguuugcuuua

SEQ ID NO: 250165 - RNA, 21 nt, Artificial Sequence
  Synthetic
gccauuuguauguuugcuuua

SEQ ID NO: 250166 - RNA, 22 nt, Artificial Sequence
  Synthetic
agccauuuguauguuugcuuua

SEQ ID NO: 250167 - RNA, 23 nt, Artificial Sequence
  Synthetic
uagccauuuguauguuugcuuua

SEQ ID NO: 250168 - RNA, 24 nt, Artificial Sequence
  Synthetic
uuagccauuuguauguuugcuuua

SEQ ID NO: 250169 - RNA, 18 nt, Artificial Sequence
  Synthetic
uaacagcaucaaucuuua

SEQ ID NO: 250170 - RNA, 19 nt, Artificial Sequence
  Synthetic
uuaacagcaucaaucuuua

SEQ ID NO: 250171 - RNA, 20 nt, Artificial Sequence
  Synthetic
uuuaacagcaucaaucuuua

SEQ ID NO: 250172 - RNA, 21 nt, Artificial Sequence
  Synthetic
guuuaacagcaucaaucuuua

SEQ ID NO: 250173 - RNA, 22 nt, Artificial Sequence
  Synthetic
uguuuaacagcaucaaucuuua

SEQ ID NO: 250174 - RNA, 23 nt, Artificial Sequence
  Synthetic
auguuuaacagcaucaaucuuua

SEQ ID NO: 250175 - RNA, 24 nt, Artificial Sequence
  Synthetic
cauguuuaacagcaucaaucuuua

SEQ ID NO: 250176 - RNA, 18 nt, Artificial Sequence
  Synthetic
uaucuacuuccaucuuua

SEQ ID NO: 250177 - RNA, 19 nt, Artificial Sequence
  Synthetic
uuaucuacuuccaucuuua

SEQ ID NO: 250178 - RNA, 20 nt, Artificial Sequence
  Synthetic
guuaucuacuuccaucuuua

SEQ ID NO: 250179 - RNA, 21 nt, Artificial Sequence
  Synthetic
aguuaucuacuuccaucuuua

SEQ ID NO: 250180 - RNA, 22 nt, Artificial Sequence
  Synthetic
uaguuaucuacuuccaucuuua

SEQ ID NO: 250181 - RNA, 23 nt, Artificial Sequence
  Synthetic
auaguuaucuacuuccaucuuua

SEQ ID NO: 250182 - RNA, 24 nt, Artificial Sequence
  Synthetic
aauaguuaucuacuuccaucuuua

SEQ ID NO: 250183 - RNA, 18 nt, Artificial Sequence
  Synthetic
ugauaugggugaucuuua

SEQ ID NO: 250184 - RNA, 19 nt, Artificial Sequence
  Synthetic
gugauaugggugaucuuua

SEQ ID NO: 250185 - RNA, 20 nt, Artificial Sequence
  Synthetic
agugauaugggugaucuuua

SEQ ID NO: 250186 - RNA, 21 nt, Artificial Sequence
  Synthetic
aagugauaugggugaucuuua

SEQ ID NO: 250187 - RNA, 22 nt, Artificial Sequence
  Synthetic
aaagugauaugggugaucuuua

SEQ ID NO: 250188 - RNA, 23 nt, Artificial Sequence
  Synthetic
caaagugauaugggugaucuuua

SEQ ID NO: 250189 - RNA, 24 nt, Artificial Sequence
  Synthetic
ccaaagugauaugggugaucuuua

SEQ ID NO: 250190 - RNA, 18 nt, Artificial Sequence
  Synthetic
cuaauuuuuguaucuuua

SEQ ID NO: 250191 - RNA, 19 nt, Artificial Sequence
  Synthetic
gcuaauuuuuguaucuuua

SEQ ID NO: 250192 - RNA, 20 nt, Artificial Sequence
  Synthetic
ggcuaauuuuuguaucuuua

SEQ ID NO: 250193 - RNA, 21 nt, Artificial Sequence
  Synthetic
uggcuaauuuuuguaucuuua

SEQ ID NO: 250194 - RNA, 22 nt, Artificial Sequence
  Synthetic
cuggcuaauuuuuguaucuuua

SEQ ID NO: 250195 - RNA, 23 nt, Artificial Sequence
  Synthetic
ccuggcuaauuuuuguaucuuua

SEQ ID NO: 250196 - RNA, 24 nt, Artificial Sequence
  Synthetic
gccuggcuaauuuuuguaucuuua

SEQ ID NO: 250197 - RNA, 18 nt, Artificial Sequence
  Synthetic
aagccuuaucccucuuua

SEQ ID NO: 250198 - RNA, 19 nt, Artificial Sequence
  Synthetic
caagccuuaucccucuuua

SEQ ID NO: 250199 - RNA, 20 nt, Artificial Sequence
  Synthetic
ucaagccuuaucccucuuua

SEQ ID NO: 250200 - RNA, 21 nt, Artificial Sequence
  Synthetic
cucaagccuuaucccucuuua

SEQ ID NO: 250201 - RNA, 22 nt, Artificial Sequence
  Synthetic
acucaagccuuaucccucuuua

SEQ ID NO: 250202 - RNA, 23 nt, Artificial Sequence
  Synthetic
cacucaagccuuaucccucuuua

SEQ ID NO: 250203 - RNA, 24 nt, Artificial Sequence
  Synthetic
ccacucaagccuuaucccucuuua

SEQ ID NO: 250204 - RNA, 18 nt, Artificial Sequence
  Synthetic
acauucauacugucuuua

SEQ ID NO: 250205 - RNA, 19 nt, Artificial Sequence
  Synthetic
aacauucauacugucuuua

SEQ ID NO: 250206 - RNA, 20 nt, Artificial Sequence
  Synthetic
aaacauucauacugucuuua

SEQ ID NO: 250207 - RNA, 21 nt, Artificial Sequence
  Synthetic
gaaacauucauacugucuuua

SEQ ID NO: 250208 - RNA, 22 nt, Artificial Sequence
  Synthetic
agaaacauucauacugucuuua

SEQ ID NO: 250209 - RNA, 23 nt, Artificial Sequence
  Synthetic
gagaaacauucauacugucuuua

SEQ ID NO: 250210 - RNA, 24 nt, Artificial Sequence
  Synthetic
ugagaaacauucauacugucuuua

SEQ ID NO: 250211 - RNA, 18 nt, Artificial Sequence
  Synthetic
cgugugcaugugucuuua

SEQ ID NO: 250212 - RNA, 19 nt, Artificial Sequence
  Synthetic
acgugugcaugugucuuua

SEQ ID NO: 250213 - RNA, 20 nt, Artificial Sequence
  Synthetic
uacgugugcaugugucuuua

SEQ ID NO: 250214 - RNA, 18 nt, Artificial Sequence
  Synthetic
uuuugguacuugucuuua

SEQ ID NO: 250215 - RNA, 19 nt, Artificial Sequence
  Synthetic
uuuuugguacuugucuuua

SEQ ID NO: 250216 - RNA, 20 nt, Artificial Sequence
  Synthetic
auuuuugguacuugucuuua

SEQ ID NO: 250217 - RNA, 21 nt, Artificial Sequence
  Synthetic
cauuuuugguacuugucuuua

SEQ ID NO: 250218 - RNA, 22 nt, Artificial Sequence
  Synthetic
acauuuuugguacuugucuuua

SEQ ID NO: 250219 - RNA, 23 nt, Artificial Sequence
  Synthetic
aacauuuuugguacuugucuuua

SEQ ID NO: 250220 - RNA, 24 nt, Artificial Sequence
  Synthetic
uaacauuuuugguacuugucuuua

SEQ ID NO: 250221 - RNA, 18 nt, Artificial Sequence
  Synthetic
auucagccuuugucuuua

SEQ ID NO: 250222 - RNA, 19 nt, Artificial Sequence
  Synthetic
gauucagccuuugucuuua

SEQ ID NO: 250223 - RNA, 20 nt, Artificial Sequence
  Synthetic
agauucagccuuugucuuua

SEQ ID NO: 250224 - RNA, 21 nt, Artificial Sequence
  Synthetic
aagauucagccuuugucuuua

SEQ ID NO: 250225 - RNA, 22 nt, Artificial Sequence
  Synthetic
uaagauucagccuuugucuuua

SEQ ID NO: 250226 - RNA, 23 nt, Artificial Sequence
  Synthetic
guaagauucagccuuugucuuua

SEQ ID NO: 250227 - RNA, 24 nt, Artificial Sequence
  Synthetic
aguaagauucagccuuugucuuua

SEQ ID NO: 250228 - RNA, 18 nt, Artificial Sequence
  Synthetic
uaaguaaacaauucuuua

SEQ ID NO: 250229 - RNA, 19 nt, Artificial Sequence
  Synthetic
uuaaguaaacaauucuuua

SEQ ID NO: 250230 - RNA, 20 nt, Artificial Sequence
  Synthetic
auuaaguaaacaauucuuua

SEQ ID NO: 250231 - RNA, 21 nt, Artificial Sequence
  Synthetic
aauuaaguaaacaauucuuua

SEQ ID NO: 250232 - RNA, 22 nt, Artificial Sequence
  Synthetic
gaauuaaguaaacaauucuuua

SEQ ID NO: 250233 - RNA, 23 nt, Artificial Sequence
  Synthetic
ugaauuaaguaaacaauucuuua

SEQ ID NO: 250234 - RNA, 24 nt, Artificial Sequence
  Synthetic
gugaauuaaguaaacaauucuuua

SEQ ID NO: 250235 - RNA, 18 nt, Artificial Sequence
  Synthetic
aaagauguggauucuuua

SEQ ID NO: 250236 - RNA, 19 nt, Artificial Sequence
  Synthetic
aaaagauguggauucuuua

SEQ ID NO: 250237 - RNA, 20 nt, Artificial Sequence
  Synthetic
aaaaagauguggauucuuua

SEQ ID NO: 250238 - RNA, 21 nt, Artificial Sequence
  Synthetic
uaaaaagauguggauucuuua

SEQ ID NO: 250239 - RNA, 22 nt, Artificial Sequence
  Synthetic
auaaaaagauguggauucuuua

SEQ ID NO: 250240 - RNA, 23 nt, Artificial Sequence
  Synthetic
uauaaaaagauguggauucuuua

SEQ ID NO: 250241 - RNA, 24 nt, Artificial Sequence
  Synthetic
uuauaaaaagauguggauucuuua

SEQ ID NO: 250242 - RNA, 18 nt, Artificial Sequence
  Synthetic
aaaauuuucacuucuuua

SEQ ID NO: 250243 - RNA, 19 nt, Artificial Sequence
  Synthetic
caaaauuuucacuucuuua

SEQ ID NO: 250244 - RNA, 20 nt, Artificial Sequence
  Synthetic
ucaaaauuuucacuucuuua

SEQ ID NO: 250245 - RNA, 21 nt, Artificial Sequence
  Synthetic
gucaaaauuuucacuucuuua

SEQ ID NO: 250246 - RNA, 22 nt, Artificial Sequence
  Synthetic
ugucaaaauuuucacuucuuua

SEQ ID NO: 250247 - RNA, 23 nt, Artificial Sequence
  Synthetic
cugucaaaauuuucacuucuuua

SEQ ID NO: 250248 - RNA, 24 nt, Artificial Sequence
  Synthetic
acugucaaaauuuucacuucuuua

SEQ ID NO: 250249 - RNA, 18 nt, Artificial Sequence
  Synthetic
gcugggacaaguucuuua

SEQ ID NO: 250250 - RNA, 19 nt, Artificial Sequence
  Synthetic
ugcugggacaaguucuuua

SEQ ID NO: 250251 - RNA, 20 nt, Artificial Sequence
  Synthetic
cugcugggacaaguucuuua

SEQ ID NO: 250252 - RNA, 21 nt, Artificial Sequence
  Synthetic
ccugcugggacaaguucuuua

SEQ ID NO: 250253 - RNA, 22 nt, Artificial Sequence
  Synthetic
accugcugggacaaguucuuua

SEQ ID NO: 250254 - RNA, 23 nt, Artificial Sequence
  Synthetic
caccugcugggacaaguucuuua

SEQ ID NO: 250255 - RNA, 24 nt, Artificial Sequence
  Synthetic
ccaccugcugggacaaguucuuua

SEQ ID NO: 250256 - RNA, 18 nt, Artificial Sequence
  Synthetic
aauauagcuauuucuuua

SEQ ID NO: 250257 - RNA, 19 nt, Artificial Sequence
  Synthetic
uaauauagcuauuucuuua

SEQ ID NO: 250258 - RNA, 20 nt, Artificial Sequence
  Synthetic
auaauauagcuauuucuuua

SEQ ID NO: 250259 - RNA, 21 nt, Artificial Sequence
  Synthetic
gauaauauagcuauuucuuua

SEQ ID NO: 250260 - RNA, 22 nt, Artificial Sequence
  Synthetic
agauaauauagcuauuucuuua

SEQ ID NO: 250261 - RNA, 23 nt, Artificial Sequence
  Synthetic
aagauaauauagcuauuucuuua

SEQ ID NO: 250262 - RNA, 24 nt, Artificial Sequence
  Synthetic
gaagauaauauagcuauuucuuua

SEQ ID NO: 250263 - RNA, 18 nt, Artificial Sequence
  Synthetic
gagaauuuuguuucuuua

SEQ ID NO: 250264 - RNA, 19 nt, Artificial Sequence
  Synthetic
ugagaauuuuguuucuuua

SEQ ID NO: 250265 - RNA, 20 nt, Artificial Sequence
  Synthetic
augagaauuuuguuucuuua

SEQ ID NO: 250266 - RNA, 21 nt, Artificial Sequence
  Synthetic
aaugagaauuuuguuucuuua

SEQ ID NO: 250267 - RNA, 22 nt, Artificial Sequence
  Synthetic
uaaugagaauuuuguuucuuua

SEQ ID NO: 250268 - RNA, 23 nt, Artificial Sequence
  Synthetic
auaaugagaauuuuguuucuuua

SEQ ID NO: 250269 - RNA, 24 nt, Artificial Sequence
  Synthetic
aauaaugagaauuuuguuucuuua

SEQ ID NO: 250270 - RNA, 18 nt, Artificial Sequence
  Synthetic
uuaaguaacuuuucuuua

SEQ ID NO: 250271 - RNA, 19 nt, Artificial Sequence
  Synthetic
uuuaaguaacuuuucuuua

SEQ ID NO: 250272 - RNA, 20 nt, Artificial Sequence
  Synthetic
auuuaaguaacuuuucuuua

SEQ ID NO: 250273 - RNA, 21 nt, Artificial Sequence
  Synthetic
uauuuaaguaacuuuucuuua

SEQ ID NO: 250274 - RNA, 22 nt, Artificial Sequence
  Synthetic
uuauuuaaguaacuuuucuuua

SEQ ID NO: 250275 - RNA, 23 nt, Artificial Sequence
  Synthetic
auuauuuaaguaacuuuucuuua

SEQ ID NO: 250276 - RNA, 24 nt, Artificial Sequence
  Synthetic
cauuauuuaaguaacuuuucuuua

SEQ ID NO: 250277 - RNA, 18 nt, Artificial Sequence
  Synthetic
gucccaagcuuuucuuua

SEQ ID NO: 250278 - RNA, 19 nt, Artificial Sequence
  Synthetic
ggucccaagcuuuucuuua

SEQ ID NO: 250279 - RNA, 20 nt, Artificial Sequence
  Synthetic
gggucccaagcuuuucuuua

SEQ ID NO: 250280 - RNA, 21 nt, Artificial Sequence
  Synthetic
cgggucccaagcuuuucuuua

SEQ ID NO: 250281 - RNA, 22 nt, Artificial Sequence
  Synthetic
ucgggucccaagcuuuucuuua

SEQ ID NO: 250282 - RNA, 23 nt, Artificial Sequence
  Synthetic
aucgggucccaagcuuuucuuua

SEQ ID NO: 250283 - RNA, 24 nt, Artificial Sequence
  Synthetic
caucgggucccaagcuuuucuuua

SEQ ID NO: 250284 - RNA, 18 nt, Artificial Sequence
  Synthetic
caugaacaccaaaguuua

SEQ ID NO: 250285 - RNA, 19 nt, Artificial Sequence
  Synthetic
ucaugaacaccaaaguuua

SEQ ID NO: 250286 - RNA, 20 nt, Artificial Sequence
  Synthetic
cucaugaacaccaaaguuua

SEQ ID NO: 250287 - RNA, 21 nt, Artificial Sequence
  Synthetic
gcucaugaacaccaaaguuua

SEQ ID NO: 250288 - RNA, 22 nt, Artificial Sequence
  Synthetic
ugcucaugaacaccaaaguuua

SEQ ID NO: 250289 - RNA, 23 nt, Artificial Sequence
  Synthetic
cugcucaugaacaccaaaguuua

SEQ ID NO: 250290 - RNA, 24 nt, Artificial Sequence
  Synthetic
gcugcucaugaacaccaaaguuua

SEQ ID NO: 250291 - RNA, 18 nt, Artificial Sequence
  Synthetic
gucuaaagcuaaaguuua

SEQ ID NO: 250292 - RNA, 19 nt, Artificial Sequence
  Synthetic
cgucuaaagcuaaaguuua

SEQ ID NO: 250293 - RNA, 20 nt, Artificial Sequence
  Synthetic
ccgucuaaagcuaaaguuua

SEQ ID NO: 250294 - RNA, 21 nt, Artificial Sequence
  Synthetic
accgucuaaagcuaaaguuua

SEQ ID NO: 250295 - RNA, 22 nt, Artificial Sequence
  Synthetic
caccgucuaaagcuaaaguuua

SEQ ID NO: 250296 - RNA, 23 nt, Artificial Sequence
  Synthetic
ccaccgucuaaagcuaaaguuua

SEQ ID NO: 250297 - RNA, 24 nt, Artificial Sequence
  Synthetic
cccaccgucuaaagcuaaaguuua

SEQ ID NO: 250298 - RNA, 18 nt, Artificial Sequence
  Synthetic
aucuuaugguaaaguuua

SEQ ID NO: 250299 - RNA, 19 nt, Artificial Sequence
  Synthetic
gaucuuaugguaaaguuua

SEQ ID NO: 250300 - RNA, 20 nt, Artificial Sequence
  Synthetic
agaucuuaugguaaaguuua

SEQ ID NO: 250301 - RNA, 21 nt, Artificial Sequence
  Synthetic
aagaucuuaugguaaaguuua

SEQ ID NO: 250302 - RNA, 22 nt, Artificial Sequence
  Synthetic
caagaucuuaugguaaaguuua

SEQ ID NO: 250303 - RNA, 23 nt, Artificial Sequence
  Synthetic
ccaagaucuuaugguaaaguuua

SEQ ID NO: 250304 - RNA, 24 nt, Artificial Sequence
  Synthetic
cccaagaucuuaugguaaaguuua

SEQ ID NO: 250305 - RNA, 18 nt, Artificial Sequence
  Synthetic
caaagagguacaaguuua

SEQ ID NO: 250306 - RNA, 19 nt, Artificial Sequence
  Synthetic
ccaaagagguacaaguuua

SEQ ID NO: 250307 - RNA, 20 nt, Artificial Sequence
  Synthetic
gccaaagagguacaaguuua

SEQ ID NO: 250308 - RNA, 21 nt, Artificial Sequence
  Synthetic
agccaaagagguacaaguuua

SEQ ID NO: 250309 - RNA, 22 nt, Artificial Sequence
  Synthetic
gagccaaagagguacaaguuua

SEQ ID NO: 250310 - RNA, 23 nt, Artificial Sequence
  Synthetic
ugagccaaagagguacaaguuua

SEQ ID NO: 250311 - RNA, 24 nt, Artificial Sequence
  Synthetic
uugagccaaagagguacaaguuua

SEQ ID NO: 250312 - RNA, 18 nt, Artificial Sequence
  Synthetic
acaggaaaaagaaguuua

SEQ ID NO: 250313 - RNA, 19 nt, Artificial Sequence
  Synthetic
uacaggaaaaagaaguuua

SEQ ID NO: 250314 - RNA, 20 nt, Artificial Sequence
  Synthetic
auacaggaaaaagaaguuua

SEQ ID NO: 250315 - RNA, 21 nt, Artificial Sequence
  Synthetic
uauacaggaaaaagaaguuua

SEQ ID NO: 250316 - RNA, 22 nt, Artificial Sequence
  Synthetic
uuauacaggaaaaagaaguuua

SEQ ID NO: 250317 - RNA, 23 nt, Artificial Sequence
  Synthetic
uuuauacaggaaaaagaaguuua

SEQ ID NO: 250318 - RNA, 24 nt, Artificial Sequence
  Synthetic
auuuauacaggaaaaagaaguuua

SEQ ID NO: 250319 - RNA, 18 nt, Artificial Sequence
  Synthetic
uuccuuuagggaaguuua

SEQ ID NO: 250320 - RNA, 19 nt, Artificial Sequence
  Synthetic
uuuccuuuagggaaguuua

SEQ ID NO: 250321 - RNA, 20 nt, Artificial Sequence
  Synthetic
guuuccuuuagggaaguuua

SEQ ID NO: 250322 - RNA, 21 nt, Artificial Sequence
  Synthetic
uguuuccuuuagggaaguuua

SEQ ID NO: 250323 - RNA, 22 nt, Artificial Sequence
  Synthetic
guguuuccuuuagggaaguuua

SEQ ID NO: 250324 - RNA, 23 nt, Artificial Sequence
  Synthetic
uguguuuccuuuagggaaguuua

SEQ ID NO: 250325 - RNA, 24 nt, Artificial Sequence
  Synthetic
auguguuuccuuuagggaaguuua

SEQ ID NO: 250326 - RNA, 18 nt, Artificial Sequence
  Synthetic
caaggacacugaaguuua

SEQ ID NO: 250327 - RNA, 19 nt, Artificial Sequence
  Synthetic
ccaaggacacugaaguuua

SEQ ID NO: 250328 - RNA, 20 nt, Artificial Sequence
  Synthetic
accaaggacacugaaguuua

SEQ ID NO: 250329 - RNA, 21 nt, Artificial Sequence
  Synthetic
uaccaaggacacugaaguuua

SEQ ID NO: 250330 - RNA, 22 nt, Artificial Sequence
  Synthetic
guaccaaggacacugaaguuua

SEQ ID NO: 250331 - RNA, 23 nt, Artificial Sequence
  Synthetic
aguaccaaggacacugaaguuua

SEQ ID NO: 250332 - RNA, 24 nt, Artificial Sequence
  Synthetic
uaguaccaaggacacugaaguuua

SEQ ID NO: 250333 - RNA, 18 nt, Artificial Sequence
  Synthetic
ucaaguaaacuaaguuua

SEQ ID NO: 250334 - RNA, 19 nt, Artificial Sequence
  Synthetic
aucaaguaaacuaaguuua

SEQ ID NO: 250335 - RNA, 20 nt, Artificial Sequence
  Synthetic
uaucaaguaaacuaaguuua

SEQ ID NO: 250336 - RNA, 21 nt, Artificial Sequence
  Synthetic
auaucaaguaaacuaaguuua

SEQ ID NO: 250337 - RNA, 22 nt, Artificial Sequence
  Synthetic
gauaucaaguaaacuaaguuua

SEQ ID NO: 250338 - RNA, 23 nt, Artificial Sequence
  Synthetic
agauaucaaguaaacuaaguuua

SEQ ID NO: 250339 - RNA, 24 nt, Artificial Sequence
  Synthetic
aagauaucaaguaaacuaaguuua

SEQ ID NO: 250340 - RNA, 18 nt, Artificial Sequence
  Synthetic
uuuaggccaguaaguuua

SEQ ID NO: 250341 - RNA, 19 nt, Artificial Sequence
  Synthetic
uuuuaggccaguaaguuua

SEQ ID NO: 250342 - RNA, 20 nt, Artificial Sequence
  Synthetic
guuuuaggccaguaaguuua

SEQ ID NO: 250343 - RNA, 21 nt, Artificial Sequence
  Synthetic
uguuuuaggccaguaaguuua

SEQ ID NO: 250344 - RNA, 22 nt, Artificial Sequence
  Synthetic
uuguuuuaggccaguaaguuua

SEQ ID NO: 250345 - RNA, 23 nt, Artificial Sequence
  Synthetic
guuguuuuaggccaguaaguuua

SEQ ID NO: 250346 - RNA, 24 nt, Artificial Sequence
  Synthetic
uguuguuuuaggccaguaaguuua

SEQ ID NO: 250347 - RNA, 18 nt, Artificial Sequence
  Synthetic
auuauaauuaacaguuua

SEQ ID NO: 250348 - RNA, 19 nt, Artificial Sequence
  Synthetic
cauuauaauuaacaguuua

SEQ ID NO: 250349 - RNA, 20 nt, Artificial Sequence
  Synthetic
acauuauaauuaacaguuua

SEQ ID NO: 250350 - RNA, 21 nt, Artificial Sequence
  Synthetic
cacauuauaauuaacaguuua

SEQ ID NO: 250351 - RNA, 22 nt, Artificial Sequence
  Synthetic
acacauuauaauuaacaguuua

SEQ ID NO: 250352 - RNA, 23 nt, Artificial Sequence
  Synthetic
aacacauuauaauuaacaguuua

SEQ ID NO: 250353 - RNA, 24 nt, Artificial Sequence
  Synthetic
uaacacauuauaauuaacaguuua

SEQ ID NO: 250354 - RNA, 18 nt, Artificial Sequence
  Synthetic
acuagaauaaccaguuua

SEQ ID NO: 250355 - RNA, 19 nt, Artificial Sequence
  Synthetic
aacuagaauaaccaguuua

SEQ ID NO: 250356 - RNA, 20 nt, Artificial Sequence
  Synthetic
uaacuagaauaaccaguuua

SEQ ID NO: 250357 - RNA, 21 nt, Artificial Sequence
  Synthetic
cuaacuagaauaaccaguuua

SEQ ID NO: 250358 - RNA, 22 nt, Artificial Sequence
  Synthetic
gcuaacuagaauaaccaguuua

SEQ ID NO: 250359 - RNA, 23 nt, Artificial Sequence
  Synthetic
ugcuaacuagaauaaccaguuua

SEQ ID NO: 250360 - RNA, 24 nt, Artificial Sequence
  Synthetic
uugcuaacuagaauaaccaguuua

SEQ ID NO: 250361 - RNA, 18 nt, Artificial Sequence
  Synthetic
acaaagauccagaguuua

SEQ ID NO: 250362 - RNA, 19 nt, Artificial Sequence
  Synthetic
uacaaagauccagaguuua

SEQ ID NO: 250363 - RNA, 20 nt, Artificial Sequence
  Synthetic
auacaaagauccagaguuua

SEQ ID NO: 250364 - RNA, 21 nt, Artificial Sequence
  Synthetic
aauacaaagauccagaguuua

SEQ ID NO: 250365 - RNA, 22 nt, Artificial Sequence
  Synthetic
gaauacaaagauccagaguuua

SEQ ID NO: 250366 - RNA, 23 nt, Artificial Sequence
  Synthetic
ugaauacaaagauccagaguuua

SEQ ID NO: 250367 - RNA, 24 nt, Artificial Sequence
  Synthetic
gugaauacaaagauccagaguuua

SEQ ID NO: 250368 - RNA, 18 nt, Artificial Sequence
  Synthetic
accaguuuauagaguuua

SEQ ID NO: 250369 - RNA, 19 nt, Artificial Sequence
  Synthetic
caccaguuuauagaguuua

SEQ ID NO: 250370 - RNA, 20 nt, Artificial Sequence
  Synthetic
ccaccaguuuauagaguuua

SEQ ID NO: 250371 - RNA, 21 nt, Artificial Sequence
  Synthetic
cccaccaguuuauagaguuua

SEQ ID NO: 250372 - RNA, 22 nt, Artificial Sequence
  Synthetic
ucccaccaguuuauagaguuua

SEQ ID NO: 250373 - RNA, 23 nt, Artificial Sequence
  Synthetic
gucccaccaguuuauagaguuua

SEQ ID NO: 250374 - RNA, 24 nt, Artificial Sequence
  Synthetic
ugucccaccaguuuauagaguuua

SEQ ID NO: 250375 - RNA, 18 nt, Artificial Sequence
  Synthetic
gucuauauaaggaguuua

SEQ ID NO: 250376 - RNA, 19 nt, Artificial Sequence
  Synthetic
agucuauauaaggaguuua

SEQ ID NO: 250377 - RNA, 20 nt, Artificial Sequence
  Synthetic
gagucuauauaaggaguuua

SEQ ID NO: 250378 - RNA, 21 nt, Artificial Sequence
  Synthetic
ugagucuauauaaggaguuua

SEQ ID NO: 250379 - RNA, 22 nt, Artificial Sequence
  Synthetic
augagucuauauaaggaguuua

SEQ ID NO: 250380 - RNA, 23 nt, Artificial Sequence
  Synthetic
uaugagucuauauaaggaguuua

SEQ ID NO: 250381 - RNA, 24 nt, Artificial Sequence
  Synthetic
cuaugagucuauauaaggaguuua

SEQ ID NO: 250382 - RNA, 18 nt, Artificial Sequence
  Synthetic
ggaagagguuggaguuua

SEQ ID NO: 250383 - RNA, 19 nt, Artificial Sequence
  Synthetic
cggaagagguuggaguuua

SEQ ID NO: 250384 - RNA, 20 nt, Artificial Sequence
  Synthetic
acggaagagguuggaguuua

SEQ ID NO: 250385 - RNA, 21 nt, Artificial Sequence
  Synthetic
cacggaagagguuggaguuua

SEQ ID NO: 250386 - RNA, 22 nt, Artificial Sequence
  Synthetic
gcacggaagagguuggaguuua

SEQ ID NO: 250387 - RNA, 23 nt, Artificial Sequence
  Synthetic
ggcacggaagagguuggaguuua

SEQ ID NO: 250388 - RNA, 24 nt, Artificial Sequence
  Synthetic
uggcacggaagagguuggaguuua

SEQ ID NO: 250389 - RNA, 18 nt, Artificial Sequence
  Synthetic
aauguauccaugaguuua

SEQ ID NO: 250390 - RNA, 19 nt, Artificial Sequence
  Synthetic
uaauguauccaugaguuua

SEQ ID NO: 250391 - RNA, 20 nt, Artificial Sequence
  Synthetic
uuaauguauccaugaguuua

SEQ ID NO: 250392 - RNA, 21 nt, Artificial Sequence
  Synthetic
uuuaauguauccaugaguuua

SEQ ID NO: 250393 - RNA, 22 nt, Artificial Sequence
  Synthetic
cuuuaauguauccaugaguuua

SEQ ID NO: 250394 - RNA, 23 nt, Artificial Sequence
  Synthetic
acuuuaauguauccaugaguuua

SEQ ID NO: 250395 - RNA, 24 nt, Artificial Sequence
  Synthetic
uacuuuaauguauccaugaguuua

SEQ ID NO: 250396 - RNA, 18 nt, Artificial Sequence
  Synthetic
uguccuugcgauaguuua

SEQ ID NO: 250397 - RNA, 19 nt, Artificial Sequence
  Synthetic
uuguccuugcgauaguuua

SEQ ID NO: 250398 - RNA, 20 nt, Artificial Sequence
  Synthetic
uuuguccuugcgauaguuua

SEQ ID NO: 250399 - RNA, 21 nt, Artificial Sequence
  Synthetic
uuuuguccuugcgauaguuua

SEQ ID NO: 250400 - RNA, 22 nt, Artificial Sequence
  Synthetic
uuuuuguccuugcgauaguuua

SEQ ID NO: 250401 - RNA, 23 nt, Artificial Sequence
  Synthetic
uuuuuuguccuugcgauaguuua

SEQ ID NO: 250402 - RNA, 24 nt, Artificial Sequence
  Synthetic
guuuuuuguccuugcgauaguuua

SEQ ID NO: 250403 - RNA, 18 nt, Artificial Sequence
  Synthetic
uguucuugcgauaguuua

SEQ ID NO: 250404 - RNA, 19 nt, Artificial Sequence
  Synthetic
uuguucuugcgauaguuua

SEQ ID NO: 250405 - RNA, 20 nt, Artificial Sequence
  Synthetic
uuuguucuugcgauaguuua

SEQ ID NO: 250406 - RNA, 18 nt, Artificial Sequence
  Synthetic
aaaucuuagaguaguuua

SEQ ID NO: 250407 - RNA, 19 nt, Artificial Sequence
  Synthetic
uaaaucuuagaguaguuua

SEQ ID NO: 250408 - RNA, 20 nt, Artificial Sequence
  Synthetic
auaaaucuuagaguaguuua

SEQ ID NO: 250409 - RNA, 21 nt, Artificial Sequence
  Synthetic
uauaaaucuuagaguaguuua

SEQ ID NO: 250410 - RNA, 22 nt, Artificial Sequence
  Synthetic
guauaaaucuuagaguaguuua

SEQ ID NO: 250411 - RNA, 23 nt, Artificial Sequence
  Synthetic
uguauaaaucuuagaguaguuua

SEQ ID NO: 250412 - RNA, 24 nt, Artificial Sequence
  Synthetic
uuguauaaaucuuagaguaguuua

SEQ ID NO: 250413 - RNA, 18 nt, Artificial Sequence
  Synthetic
ucuuugaucuguaguuua

SEQ ID NO: 250414 - RNA, 19 nt, Artificial Sequence
  Synthetic
uucuuugaucuguaguuua

SEQ ID NO: 250415 - RNA, 20 nt, Artificial Sequence
  Synthetic
cuucuuugaucuguaguuua

SEQ ID NO: 250416 - RNA, 21 nt, Artificial Sequence
  Synthetic
ucuucuuugaucuguaguuua

SEQ ID NO: 250417 - RNA, 22 nt, Artificial Sequence
  Synthetic
aucuucuuugaucuguaguuua

SEQ ID NO: 250418 - RNA, 23 nt, Artificial Sequence
  Synthetic
uaucuucuuugaucuguaguuua

SEQ ID NO: 250419 - RNA, 24 nt, Artificial Sequence
  Synthetic
cuaucuucuuugaucuguaguuua

SEQ ID NO: 250420 - RNA, 18 nt, Artificial Sequence
  Synthetic
aaauggaauuuuaguuua

SEQ ID NO: 250421 - RNA, 19 nt, Artificial Sequence
  Synthetic
uaaauggaauuuuaguuua

SEQ ID NO: 250422 - RNA, 20 nt, Artificial Sequence
  Synthetic
auaaauggaauuuuaguuua

SEQ ID NO: 250423 - RNA, 21 nt, Artificial Sequence
  Synthetic
gauaaauggaauuuuaguuua

SEQ ID NO: 250424 - RNA, 22 nt, Artificial Sequence
  Synthetic
ggauaaauggaauuuuaguuua

SEQ ID NO: 250425 - RNA, 23 nt, Artificial Sequence
  Synthetic
gggauaaauggaauuuuaguuua

SEQ ID NO: 250426 - RNA, 24 nt, Artificial Sequence
  Synthetic
ugggauaaauggaauuuuaguuua

SEQ ID NO: 250427 - RNA, 18 nt, Artificial Sequence
  Synthetic
ucacaauauaaacguuua

SEQ ID NO: 250428 - RNA, 19 nt, Artificial Sequence
  Synthetic
aucacaauauaaacguuua

SEQ ID NO: 250429 - RNA, 20 nt, Artificial Sequence
  Synthetic
uaucacaauauaaacguuua

SEQ ID NO: 250430 - RNA, 21 nt, Artificial Sequence
  Synthetic
auaucacaauauaaacguuua

SEQ ID NO: 250431 - RNA, 22 nt, Artificial Sequence
  Synthetic
uauaucacaauauaaacguuua

SEQ ID NO: 250432 - RNA, 23 nt, Artificial Sequence
  Synthetic
auauaucacaauauaaacguuua

SEQ ID NO: 250433 - RNA, 24 nt, Artificial Sequence
  Synthetic
aauauaucacaauauaaacguuua

SEQ ID NO: 250434 - RNA, 18 nt, Artificial Sequence
  Synthetic
ucacggcuauuucguuua

SEQ ID NO: 250435 - RNA, 19 nt, Artificial Sequence
  Synthetic
gucacggcuauuucguuua

SEQ ID NO: 250436 - RNA, 20 nt, Artificial Sequence
  Synthetic
ugucacggcuauuucguuua

SEQ ID NO: 250437 - RNA, 21 nt, Artificial Sequence
  Synthetic
uugucacggcuauuucguuua

SEQ ID NO: 250438 - RNA, 22 nt, Artificial Sequence
  Synthetic
auugucacggcuauuucguuua

SEQ ID NO: 250439 - RNA, 23 nt, Artificial Sequence
  Synthetic
aauugucacggcuauuucguuua

SEQ ID NO: 250440 - RNA, 24 nt, Artificial Sequence
  Synthetic
gaauugucacggcuauuucguuua

SEQ ID NO: 250441 - RNA, 18 nt, Artificial Sequence
  Synthetic
cuacuuucaaaagguuua

SEQ ID NO: 250442 - RNA, 19 nt, Artificial Sequence
  Synthetic
ccuacuuucaaaagguuua

SEQ ID NO: 250443 - RNA, 20 nt, Artificial Sequence
  Synthetic
uccuacuuucaaaagguuua

SEQ ID NO: 250444 - RNA, 21 nt, Artificial Sequence
  Synthetic
auccuacuuucaaaagguuua

SEQ ID NO: 250445 - RNA, 22 nt, Artificial Sequence
  Synthetic
gauccuacuuucaaaagguuua

SEQ ID NO: 250446 - RNA, 23 nt, Artificial Sequence
  Synthetic
agauccuacuuucaaaagguuua

SEQ ID NO: 250447 - RNA, 24 nt, Artificial Sequence
  Synthetic
uagauccuacuuucaaaagguuua

SEQ ID NO: 250448 - RNA, 18 nt, Artificial Sequence
  Synthetic
aauuuuauccaagguuua

SEQ ID NO: 250449 - RNA, 19 nt, Artificial Sequence
  Synthetic
gaauuuuauccaagguuua

SEQ ID NO: 250450 - RNA, 20 nt, Artificial Sequence
  Synthetic
ggaauuuuauccaagguuua

SEQ ID NO: 250451 - RNA, 21 nt, Artificial Sequence
  Synthetic
gggaauuuuauccaagguuua

SEQ ID NO: 250452 - RNA, 22 nt, Artificial Sequence
  Synthetic
ggggaauuuuauccaagguuua

SEQ ID NO: 250453 - RNA, 23 nt, Artificial Sequence
  Synthetic
aggggaauuuuauccaagguuua

SEQ ID NO: 250454 - RNA, 24 nt, Artificial Sequence
  Synthetic
caggggaauuuuauccaagguuua

SEQ ID NO: 250455 - RNA, 18 nt, Artificial Sequence
  Synthetic
aaugaguguccagguuua

SEQ ID NO: 250456 - RNA, 19 nt, Artificial Sequence
  Synthetic
aaaugaguguccagguuua

SEQ ID NO: 250457 - RNA, 20 nt, Artificial Sequence
  Synthetic
aaaaugaguguccagguuua

SEQ ID NO: 250458 - RNA, 21 nt, Artificial Sequence
  Synthetic
gaaaaugaguguccagguuua

SEQ ID NO: 250459 - RNA, 22 nt, Artificial Sequence
  Synthetic
agaaaaugaguguccagguuua

SEQ ID NO: 250460 - RNA, 23 nt, Artificial Sequence
  Synthetic
aagaaaaugaguguccagguuua

SEQ ID NO: 250461 - RNA, 24 nt, Artificial Sequence
  Synthetic
gaagaaaaugaguguccagguuua

SEQ ID NO: 250462 - RNA, 18 nt, Artificial Sequence
  Synthetic
uaaauauuggcagguuua

SEQ ID NO: 250463 - RNA, 19 nt, Artificial Sequence
  Synthetic
cuaaauauuggcagguuua

SEQ ID NO: 250464 - RNA, 20 nt, Artificial Sequence
  Synthetic
acuaaauauuggcagguuua

SEQ ID NO: 250465 - RNA, 21 nt, Artificial Sequence
  Synthetic
gacuaaauauuggcagguuua

SEQ ID NO: 250466 - RNA, 22 nt, Artificial Sequence
  Synthetic
ugacuaaauauuggcagguuua

SEQ ID NO: 250467 - RNA, 23 nt, Artificial Sequence
  Synthetic
gugacuaaauauuggcagguuua

SEQ ID NO: 250468 - RNA, 24 nt, Artificial Sequence
  Synthetic
agugacuaaauauuggcagguuua

SEQ ID NO: 250469 - RNA, 18 nt, Artificial Sequence
  Synthetic
agauuagugucagguuua

SEQ ID NO: 250470 - RNA, 19 nt, Artificial Sequence
  Synthetic
cagauuagugucagguuua

SEQ ID NO: 250471 - RNA, 20 nt, Artificial Sequence
  Synthetic
ucagauuagugucagguuua

SEQ ID NO: 250472 - RNA, 21 nt, Artificial Sequence
  Synthetic
cucagauuagugucagguuua

SEQ ID NO: 250473 - RNA, 22 nt, Artificial Sequence
  Synthetic
acucagauuagugucagguuua

SEQ ID NO: 250474 - RNA, 23 nt, Artificial Sequence
  Synthetic
aacucagauuagugucagguuua

SEQ ID NO: 250475 - RNA, 24 nt, Artificial Sequence
  Synthetic
aaacucagauuagugucagguuua

SEQ ID NO: 250476 - RNA, 18 nt, Artificial Sequence
  Synthetic
acaaaagaaagagguuua

SEQ ID NO: 250477 - RNA, 19 nt, Artificial Sequence
  Synthetic
uacaaaagaaagagguuua

SEQ ID NO: 250478 - RNA, 20 nt, Artificial Sequence
  Synthetic
uuacaaaagaaagagguuua

SEQ ID NO: 250479 - RNA, 21 nt, Artificial Sequence
  Synthetic
uuuacaaaagaaagagguuua

SEQ ID NO: 250480 - RNA, 22 nt, Artificial Sequence
  Synthetic
auuuacaaaagaaagagguuua

SEQ ID NO: 250481 - RNA, 23 nt, Artificial Sequence
  Synthetic
aauuuacaaaagaaagagguuua

SEQ ID NO: 250482 - RNA, 24 nt, Artificial Sequence
  Synthetic
caauuuacaaaagaaagagguuua

SEQ ID NO: 250483 - RNA, 18 nt, Artificial Sequence
  Synthetic
uaaggagccugagguuua

SEQ ID NO: 250484 - RNA, 19 nt, Artificial Sequence
  Synthetic
uuaaggagccugagguuua

SEQ ID NO: 250485 - RNA, 20 nt, Artificial Sequence
  Synthetic
auuaaggagccugagguuua

SEQ ID NO: 250486 - RNA, 21 nt, Artificial Sequence
  Synthetic
gauuaaggagccugagguuua

SEQ ID NO: 250487 - RNA, 22 nt, Artificial Sequence
  Synthetic
agauuaaggagccugagguuua

SEQ ID NO: 250488 - RNA, 23 nt, Artificial Sequence
  Synthetic
aagauuaaggagccugagguuua

SEQ ID NO: 250489 - RNA, 24 nt, Artificial Sequence
  Synthetic
aaagauuaaggagccugagguuua

SEQ ID NO: 250490 - RNA, 18 nt, Artificial Sequence
  Synthetic
ucuguggagagggguuua

SEQ ID NO: 250491 - RNA, 19 nt, Artificial Sequence
  Synthetic
cucuguggagagggguuua

SEQ ID NO: 250492 - RNA, 20 nt, Artificial Sequence
  Synthetic
ccucuguggagagggguuua

SEQ ID NO: 250493 - RNA, 21 nt, Artificial Sequence
  Synthetic
uccucuguggagagggguuua

SEQ ID NO: 250494 - RNA, 22 nt, Artificial Sequence
  Synthetic
cuccucuguggagagggguuua

SEQ ID NO: 250495 - RNA, 23 nt, Artificial Sequence
  Synthetic
ccuccucuguggagagggguuua

SEQ ID NO: 250496 - RNA, 24 nt, Artificial Sequence
  Synthetic
accuccucuguggagagggguuua

SEQ ID NO: 250497 - RNA, 18 nt, Artificial Sequence
  Synthetic
ugcugcaaaaaugguuua

SEQ ID NO: 250498 - RNA, 19 nt, Artificial Sequence
  Synthetic
augcugcaaaaaugguuua

SEQ ID NO: 250499 - RNA, 20 nt, Artificial Sequence
  Synthetic
uaugcugcaaaaaugguuua

SEQ ID NO: 250500 - RNA, 21 nt, Artificial Sequence
  Synthetic
uuaugcugcaaaaaugguuua

SEQ ID NO: 250501 - RNA, 22 nt, Artificial Sequence
  Synthetic
guuaugcugcaaaaaugguuua

SEQ ID NO: 250502 - RNA, 23 nt, Artificial Sequence
  Synthetic
aguuaugcugcaaaaaugguuua

SEQ ID NO: 250503 - RNA, 24 nt, Artificial Sequence
  Synthetic
gaguuaugcugcaaaaaugguuua

SEQ ID NO: 250504 - RNA, 18 nt, Artificial Sequence
  Synthetic
uguugaaaccaugguuua

SEQ ID NO: 250505 - RNA, 19 nt, Artificial Sequence
  Synthetic
uuguugaaaccaugguuua

SEQ ID NO: 250506 - RNA, 20 nt, Artificial Sequence
  Synthetic
auuguugaaaccaugguuua

SEQ ID NO: 250507 - RNA, 21 nt, Artificial Sequence
  Synthetic
aauuguugaaaccaugguuua

SEQ ID NO: 250508 - RNA, 22 nt, Artificial Sequence
  Synthetic
gaauuguugaaaccaugguuua

SEQ ID NO: 250509 - RNA, 23 nt, Artificial Sequence
  Synthetic
ugaauuguugaaaccaugguuua

SEQ ID NO: 250510 - RNA, 24 nt, Artificial Sequence
  Synthetic
uugaauuguugaaaccaugguuua

SEQ ID NO: 250511 - RNA, 18 nt, Artificial Sequence
  Synthetic
ucgcauaccacugguuua

SEQ ID NO: 250512 - RNA, 19 nt, Artificial Sequence
  Synthetic
uucgcauaccacugguuua

SEQ ID NO: 250513 - RNA, 20 nt, Artificial Sequence
  Synthetic
cuucgcauaccacugguuua

SEQ ID NO: 250514 - RNA, 21 nt, Artificial Sequence
  Synthetic
acuucgcauaccacugguuua

SEQ ID NO: 250515 - RNA, 22 nt, Artificial Sequence
  Synthetic
gacuucgcauaccacugguuua

SEQ ID NO: 250516 - RNA, 23 nt, Artificial Sequence
  Synthetic
ugacuucgcauaccacugguuua

SEQ ID NO: 250517 - RNA, 24 nt, Artificial Sequence
  Synthetic
augacuucgcauaccacugguuua

SEQ ID NO: 250518 - RNA, 18 nt, Artificial Sequence
  Synthetic
cugucuguuauugguuua

SEQ ID NO: 250519 - RNA, 19 nt, Artificial Sequence
  Synthetic
ucugucuguuauugguuua

SEQ ID NO: 250520 - RNA, 20 nt, Artificial Sequence
  Synthetic
cucugucuguuauugguuua

SEQ ID NO: 250521 - RNA, 21 nt, Artificial Sequence
  Synthetic
ucucugucuguuauugguuua

SEQ ID NO: 250522 - RNA, 22 nt, Artificial Sequence
  Synthetic
cucucugucuguuauugguuua

SEQ ID NO: 250523 - RNA, 23 nt, Artificial Sequence
  Synthetic
gcucucugucuguuauugguuua

SEQ ID NO: 250524 - RNA, 24 nt, Artificial Sequence
  Synthetic
ggcucucugucuguuauugguuua

SEQ ID NO: 250525 - RNA, 18 nt, Artificial Sequence
  Synthetic
ugaauauuaaaauguuua

SEQ ID NO: 250526 - RNA, 19 nt, Artificial Sequence
  Synthetic
cugaauauuaaaauguuua

SEQ ID NO: 250527 - RNA, 20 nt, Artificial Sequence
  Synthetic
acugaauauuaaaauguuua

SEQ ID NO: 250528 - RNA, 21 nt, Artificial Sequence
  Synthetic
cacugaauauuaaaauguuua

SEQ ID NO: 250529 - RNA, 22 nt, Artificial Sequence
  Synthetic
ccacugaauauuaaaauguuua

SEQ ID NO: 250530 - RNA, 23 nt, Artificial Sequence
  Synthetic
accacugaauauuaaaauguuua

SEQ ID NO: 250531 - RNA, 24 nt, Artificial Sequence
  Synthetic
uaccacugaauauuaaaauguuua

SEQ ID NO: 250532 - RNA, 18 nt, Artificial Sequence
  Synthetic
uaacgcaacaaauguuua

SEQ ID NO: 250533 - RNA, 19 nt, Artificial Sequence
  Synthetic
uuaacgcaacaaauguuua

SEQ ID NO: 250534 - RNA, 20 nt, Artificial Sequence
  Synthetic
uuuaacgcaacaaauguuua

SEQ ID NO: 250535 - RNA, 21 nt, Artificial Sequence
  Synthetic
uuuuaacgcaacaaauguuua

SEQ ID NO: 250536 - RNA, 22 nt, Artificial Sequence
  Synthetic
cuuuuaacgcaacaaauguuua

SEQ ID NO: 250537 - RNA, 23 nt, Artificial Sequence
  Synthetic
acuuuuaacgcaacaaauguuua

SEQ ID NO: 250538 - RNA, 24 nt, Artificial Sequence
  Synthetic
uacuuuuaacgcaacaaauguuua

SEQ ID NO: 250539 - RNA, 18 nt, Artificial Sequence
  Synthetic
agguacaauaaauguuua

SEQ ID NO: 250540 - RNA, 19 nt, Artificial Sequence
  Synthetic
aagguacaauaaauguuua

SEQ ID NO: 250541 - RNA, 20 nt, Artificial Sequence
  Synthetic
uaagguacaauaaauguuua

SEQ ID NO: 250542 - RNA, 21 nt, Artificial Sequence
  Synthetic
guaagguacaauaaauguuua

SEQ ID NO: 250543 - RNA, 22 nt, Artificial Sequence
  Synthetic
aguaagguacaauaaauguuua

SEQ ID NO: 250544 - RNA, 23 nt, Artificial Sequence
  Synthetic
uaguaagguacaauaaauguuua

SEQ ID NO: 250545 - RNA, 24 nt, Artificial Sequence
  Synthetic
uuaguaagguacaauaaauguuua

SEQ ID NO: 250546 - RNA, 18 nt, Artificial Sequence
  Synthetic
cuuagucaacaauguuua

SEQ ID NO: 250547 - RNA, 19 nt, Artificial Sequence
  Synthetic
ucuuagucaacaauguuua

SEQ ID NO: 250548 - RNA, 20 nt, Artificial Sequence
  Synthetic
aucuuagucaacaauguuua

SEQ ID NO: 250549 - RNA, 21 nt, Artificial Sequence
  Synthetic
uaucuuagucaacaauguuua

SEQ ID NO: 250550 - RNA, 22 nt, Artificial Sequence
  Synthetic
guaucuuagucaacaauguuua

SEQ ID NO: 250551 - RNA, 23 nt, Artificial Sequence
  Synthetic
uguaucuuagucaacaauguuua

SEQ ID NO: 250552 - RNA, 24 nt, Artificial Sequence
  Synthetic
cuguaucuuagucaacaauguuua

SEQ ID NO: 250553 - RNA, 18 nt, Artificial Sequence
  Synthetic
agcaugccacaauguuua

SEQ ID NO: 250554 - RNA, 19 nt, Artificial Sequence
  Synthetic
aagcaugccacaauguuua

SEQ ID NO: 250555 - RNA, 20 nt, Artificial Sequence
  Synthetic
aaagcaugccacaauguuua

SEQ ID NO: 250556 - RNA, 21 nt, Artificial Sequence
  Synthetic
uaaagcaugccacaauguuua

SEQ ID NO: 250557 - RNA, 22 nt, Artificial Sequence
  Synthetic
auaaagcaugccacaauguuua

SEQ ID NO: 250558 - RNA, 23 nt, Artificial Sequence
  Synthetic
aauaaagcaugccacaauguuua

SEQ ID NO: 250559 - RNA, 24 nt, Artificial Sequence
  Synthetic
gaauaaagcaugccacaauguuua

SEQ ID NO: 250560 - RNA, 18 nt, Artificial Sequence
  Synthetic
uuuggagcugaauguuua

SEQ ID NO: 250561 - RNA, 19 nt, Artificial Sequence
  Synthetic
uuuuggagcugaauguuua

SEQ ID NO: 250562 - RNA, 20 nt, Artificial Sequence
  Synthetic
uuuuuggagcugaauguuua

SEQ ID NO: 250563 - RNA, 21 nt, Artificial Sequence
  Synthetic
cuuuuuggagcugaauguuua

SEQ ID NO: 250564 - RNA, 22 nt, Artificial Sequence
  Synthetic
ccuuuuuggagcugaauguuua

SEQ ID NO: 250565 - RNA, 23 nt, Artificial Sequence
  Synthetic
gccuuuuuggagcugaauguuua

SEQ ID NO: 250566 - RNA, 24 nt, Artificial Sequence
  Synthetic
ugccuuuuuggagcugaauguuua

SEQ ID NO: 250567 - RNA, 18 nt, Artificial Sequence
  Synthetic
uugucuucuacauguuua

SEQ ID NO: 250568 - RNA, 19 nt, Artificial Sequence
  Synthetic
uuugucuucuacauguuua

SEQ ID NO: 250569 - RNA, 20 nt, Artificial Sequence
  Synthetic
cuuugucuucuacauguuua

SEQ ID NO: 250570 - RNA, 21 nt, Artificial Sequence
  Synthetic
acuuugucuucuacauguuua

SEQ ID NO: 250571 - RNA, 22 nt, Artificial Sequence
  Synthetic
uacuuugucuucuacauguuua

SEQ ID NO: 250572 - RNA, 23 nt, Artificial Sequence
  Synthetic
uuacuuugucuucuacauguuua

SEQ ID NO: 250573 - RNA, 24 nt, Artificial Sequence
  Synthetic
cuuacuuugucuucuacauguuua

SEQ ID NO: 250574 - RNA, 18 nt, Artificial Sequence
  Synthetic
auuauuauuucauguuua

SEQ ID NO: 250575 - RNA, 19 nt, Artificial Sequence
  Synthetic
uauuauuauuucauguuua

SEQ ID NO: 250576 - RNA, 20 nt, Artificial Sequence
  Synthetic
guauuauuauuucauguuua

SEQ ID NO: 250577 - RNA, 21 nt, Artificial Sequence
  Synthetic
uguauuauuauuucauguuua

SEQ ID NO: 250578 - RNA, 22 nt, Artificial Sequence
  Synthetic
auguauuauuauuucauguuua

SEQ ID NO: 250579 - RNA, 23 nt, Artificial Sequence
  Synthetic
uauguauuauuauuucauguuua

SEQ ID NO: 250580 - RNA, 24 nt, Artificial Sequence
  Synthetic
guauguauuauuauuucauguuua

SEQ ID NO: 250581 - RNA, 18 nt, Artificial Sequence
  Synthetic
auccuaaaucgauguuua

SEQ ID NO: 250582 - RNA, 19 nt, Artificial Sequence
  Synthetic
gauccuaaaucgauguuua

SEQ ID NO: 250583 - RNA, 20 nt, Artificial Sequence
  Synthetic
agauccuaaaucgauguuua

SEQ ID NO: 250584 - RNA, 21 nt, Artificial Sequence
  Synthetic
uagauccuaaaucgauguuua

SEQ ID NO: 250585 - RNA, 22 nt, Artificial Sequence
  Synthetic
guagauccuaaaucgauguuua

SEQ ID NO: 250586 - RNA, 23 nt, Artificial Sequence
  Synthetic
aguagauccuaaaucgauguuua

SEQ ID NO: 250587 - RNA, 24 nt, Artificial Sequence
  Synthetic
caguagauccuaaaucgauguuua

SEQ ID NO: 250588 - RNA, 18 nt, Artificial Sequence
  Synthetic
caugcacauguauguuua

SEQ ID NO: 250589 - RNA, 19 nt, Artificial Sequence
  Synthetic
acaugcacauguauguuua

SEQ ID NO: 250590 - RNA, 20 nt, Artificial Sequence
  Synthetic
cacaugcacauguauguuua

SEQ ID NO: 250591 - RNA, 21 nt, Artificial Sequence
  Synthetic
acacaugcacauguauguuua

SEQ ID NO: 250592 - RNA, 22 nt, Artificial Sequence
  Synthetic
gacacaugcacauguauguuua

SEQ ID NO: 250593 - RNA, 23 nt, Artificial Sequence
  Synthetic
agacacaugcacauguauguuua

SEQ ID NO: 250594 - RNA, 24 nt, Artificial Sequence
  Synthetic
aagacacaugcacauguauguuua

SEQ ID NO: 250595 - RNA, 18 nt, Artificial Sequence
  Synthetic
uagucaaguuuauguuua

SEQ ID NO: 250596 - RNA, 19 nt, Artificial Sequence
  Synthetic
auagucaaguuuauguuua

SEQ ID NO: 250597 - RNA, 20 nt, Artificial Sequence
  Synthetic
uauagucaaguuuauguuua

SEQ ID NO: 250598 - RNA, 21 nt, Artificial Sequence
  Synthetic
cuauagucaaguuuauguuua

SEQ ID NO: 250599 - RNA, 22 nt, Artificial Sequence
  Synthetic
ucuauagucaaguuuauguuua

SEQ ID NO: 250600 - RNA, 23 nt, Artificial Sequence
  Synthetic
cucuauagucaaguuuauguuua

SEQ ID NO: 250601 - RNA, 24 nt, Artificial Sequence
  Synthetic
acucuauagucaaguuuauguuua

SEQ ID NO: 250602 - RNA, 18 nt, Artificial Sequence
  Synthetic
augcuuauacacuguuua

SEQ ID NO: 250603 - RNA, 19 nt, Artificial Sequence
  Synthetic
aaugcuuauacacuguuua

SEQ ID NO: 250604 - RNA, 20 nt, Artificial Sequence
  Synthetic
gaaugcuuauacacuguuua

SEQ ID NO: 250605 - RNA, 21 nt, Artificial Sequence
  Synthetic
ggaaugcuuauacacuguuua

SEQ ID NO: 250606 - RNA, 22 nt, Artificial Sequence
  Synthetic
gggaaugcuuauacacuguuua

SEQ ID NO: 250607 - RNA, 23 nt, Artificial Sequence
  Synthetic
agggaaugcuuauacacuguuua

SEQ ID NO: 250608 - RNA, 24 nt, Artificial Sequence
  Synthetic
aagggaaugcuuauacacuguuua

SEQ ID NO: 250609 - RNA, 18 nt, Artificial Sequence
  Synthetic
acccaagguagcuguuua

SEQ ID NO: 250610 - RNA, 19 nt, Artificial Sequence
  Synthetic
gacccaagguagcuguuua

SEQ ID NO: 250611 - RNA, 20 nt, Artificial Sequence
  Synthetic
ugacccaagguagcuguuua

SEQ ID NO: 250612 - RNA, 21 nt, Artificial Sequence
  Synthetic
gugacccaagguagcuguuua

SEQ ID NO: 250613 - RNA, 22 nt, Artificial Sequence
  Synthetic
agugacccaagguagcuguuua

SEQ ID NO: 250614 - RNA, 23 nt, Artificial Sequence
  Synthetic
gagugacccaagguagcuguuua

SEQ ID NO: 250615 - RNA, 24 nt, Artificial Sequence
  Synthetic
ggagugacccaagguagcuguuua

SEQ ID NO: 250616 - RNA, 18 nt, Artificial Sequence
  Synthetic
agugagaaccucuguuua

SEQ ID NO: 250617 - RNA, 19 nt, Artificial Sequence
  Synthetic
cagugagaaccucuguuua

SEQ ID NO: 250618 - RNA, 20 nt, Artificial Sequence
  Synthetic
ccagugagaaccucuguuua

SEQ ID NO: 250619 - RNA, 21 nt, Artificial Sequence
  Synthetic
uccagugagaaccucuguuua

SEQ ID NO: 250620 - RNA, 22 nt, Artificial Sequence
  Synthetic
guccagugagaaccucuguuua

SEQ ID NO: 250621 - RNA, 23 nt, Artificial Sequence
  Synthetic
uguccagugagaaccucuguuua

SEQ ID NO: 250622 - RNA, 24 nt, Artificial Sequence
  Synthetic
uuguccagugagaaccucuguuua

SEQ ID NO: 250623 - RNA, 18 nt, Artificial Sequence
  Synthetic
aguaauggcaaguguuua

SEQ ID NO: 250624 - RNA, 19 nt, Artificial Sequence
  Synthetic
uaguaauggcaaguguuua

SEQ ID NO: 250625 - RNA, 20 nt, Artificial Sequence
  Synthetic
auaguaauggcaaguguuua

SEQ ID NO: 250626 - RNA, 21 nt, Artificial Sequence
  Synthetic
aauaguaauggcaaguguuua

SEQ ID NO: 250627 - RNA, 22 nt, Artificial Sequence
  Synthetic
uaauaguaauggcaaguguuua

SEQ ID NO: 250628 - RNA, 23 nt, Artificial Sequence
  Synthetic
guaauaguaauggcaaguguuua

SEQ ID NO: 250629 - RNA, 24 nt, Artificial Sequence
  Synthetic
aguaauaguaauggcaaguguuua

SEQ ID NO: 250630 - RNA, 18 nt, Artificial Sequence
  Synthetic
uuauaaaaaaauuguuua

SEQ ID NO: 250631 - RNA, 19 nt, Artificial Sequence
  Synthetic
cuuauaaaaaaauuguuua

SEQ ID NO: 250632 - RNA, 20 nt, Artificial Sequence
  Synthetic
gcuuauaaaaaaauuguuua

SEQ ID NO: 250633 - RNA, 21 nt, Artificial Sequence
  Synthetic
cgcuuauaaaaaaauuguuua

SEQ ID NO: 250634 - RNA, 22 nt, Artificial Sequence
  Synthetic
gcgcuuauaaaaaaauuguuua

SEQ ID NO: 250635 - RNA, 23 nt, Artificial Sequence
  Synthetic
agcgcuuauaaaaaaauuguuua

SEQ ID NO: 250636 - RNA, 24 nt, Artificial Sequence
  Synthetic
uagcgcuuauaaaaaaauuguuua

SEQ ID NO: 250637 - RNA, 18 nt, Artificial Sequence
  Synthetic
uguuuguuuaauuguuua

SEQ ID NO: 250638 - RNA, 19 nt, Artificial Sequence
  Synthetic
uuguuuguuuaauuguuua

SEQ ID NO: 250639 - RNA, 20 nt, Artificial Sequence
  Synthetic
uuuguuuguuuaauuguuua

SEQ ID NO: 250640 - RNA, 21 nt, Artificial Sequence
  Synthetic
guuuguuuguuuaauuguuua

SEQ ID NO: 250641 - RNA, 22 nt, Artificial Sequence
  Synthetic
uguuuguuuguuuaauuguuua

SEQ ID NO: 250642 - RNA, 23 nt, Artificial Sequence
  Synthetic
uuguuuguuuguuuaauuguuua

SEQ ID NO: 250643 - RNA, 24 nt, Artificial Sequence
  Synthetic
uuuguuuguuuguuuaauuguuua

SEQ ID NO: 250644 - RNA, 18 nt, Artificial Sequence
  Synthetic
cagucuguucuuuguuua

SEQ ID NO: 250645 - RNA, 19 nt, Artificial Sequence
  Synthetic
acagucuguucuuuguuua

SEQ ID NO: 250646 - RNA, 20 nt, Artificial Sequence
  Synthetic
aacagucuguucuuuguuua

SEQ ID NO: 250647 - RNA, 21 nt, Artificial Sequence
  Synthetic
uaacagucuguucuuuguuua

SEQ ID NO: 250648 - RNA, 22 nt, Artificial Sequence
  Synthetic
auaacagucuguucuuuguuua

SEQ ID NO: 250649 - RNA, 23 nt, Artificial Sequence
  Synthetic
aauaacagucuguucuuuguuua

SEQ ID NO: 250650 - RNA, 24 nt, Artificial Sequence
  Synthetic
caauaacagucuguucuuuguuua

SEQ ID NO: 250651 - RNA, 18 nt, Artificial Sequence
  Synthetic
gaaaauccauuuuguuua

SEQ ID NO: 250652 - RNA, 19 nt, Artificial Sequence
  Synthetic
ugaaaauccauuuuguuua

SEQ ID NO: 250653 - RNA, 20 nt, Artificial Sequence
  Synthetic
uugaaaauccauuuuguuua

SEQ ID NO: 250654 - RNA, 21 nt, Artificial Sequence
  Synthetic
guugaaaauccauuuuguuua

SEQ ID NO: 250655 - RNA, 22 nt, Artificial Sequence
  Synthetic
uguugaaaauccauuuuguuua

SEQ ID NO: 250656 - RNA, 23 nt, Artificial Sequence
  Synthetic
guguugaaaauccauuuuguuua

SEQ ID NO: 250657 - RNA, 24 nt, Artificial Sequence
  Synthetic
aguguugaaaauccauuuuguuua

SEQ ID NO: 250658 - RNA, 18 nt, Artificial Sequence
  Synthetic
guuuuuuguuuuuguuua

SEQ ID NO: 250659 - RNA, 19 nt, Artificial Sequence
  Synthetic
uguuuuuuguuuuuguuua

SEQ ID NO: 250660 - RNA, 20 nt, Artificial Sequence
  Synthetic
cuguuuuuuguuuuuguuua

SEQ ID NO: 250661 - RNA, 21 nt, Artificial Sequence
  Synthetic
ucuguuuuuuguuuuuguuua

SEQ ID NO: 250662 - RNA, 22 nt, Artificial Sequence
  Synthetic
cucuguuuuuuguuuuuguuua

SEQ ID NO: 250663 - RNA, 23 nt, Artificial Sequence
  Synthetic
acucuguuuuuuguuuuuguuua

SEQ ID NO: 250664 - RNA, 24 nt, Artificial Sequence
  Synthetic
aacucuguuuuuuguuuuuguuua

SEQ ID NO: 250665 - RNA, 18 nt, Artificial Sequence
  Synthetic
uuacuagcucaaauuuua

SEQ ID NO: 250666 - RNA, 19 nt, Artificial Sequence
  Synthetic
guuacuagcucaaauuuua

SEQ ID NO: 250667 - RNA, 20 nt, Artificial Sequence
  Synthetic
gguuacuagcucaaauuuua

SEQ ID NO: 250668 - RNA, 21 nt, Artificial Sequence
  Synthetic
ugguuacuagcucaaauuuua

SEQ ID NO: 250669 - RNA, 22 nt, Artificial Sequence
  Synthetic
gugguuacuagcucaaauuuua

SEQ ID NO: 250670 - RNA, 23 nt, Artificial Sequence
  Synthetic
cgugguuacuagcucaaauuuua

SEQ ID NO: 250671 - RNA, 24 nt, Artificial Sequence
  Synthetic
acgugguuacuagcucaaauuuua

SEQ ID NO: 250672 - RNA, 18 nt, Artificial Sequence
  Synthetic
cuuuugaacuaaauuuua

SEQ ID NO: 250673 - RNA, 19 nt, Artificial Sequence
  Synthetic
gcuuuugaacuaaauuuua

SEQ ID NO: 250674 - RNA, 20 nt, Artificial Sequence
  Synthetic
ggcuuuugaacuaaauuuua

SEQ ID NO: 250675 - RNA, 21 nt, Artificial Sequence
  Synthetic
uggcuuuugaacuaaauuuua

SEQ ID NO: 250676 - RNA, 22 nt, Artificial Sequence
  Synthetic
uuggcuuuugaacuaaauuuua

SEQ ID NO: 250677 - RNA, 23 nt, Artificial Sequence
  Synthetic
guuggcuuuugaacuaaauuuua

SEQ ID NO: 250678 - RNA, 24 nt, Artificial Sequence
  Synthetic
uguuggcuuuugaacuaaauuuua

SEQ ID NO: 250679 - RNA, 18 nt, Artificial Sequence
  Synthetic
ugugcagauuaaauuuua

SEQ ID NO: 250680 - RNA, 19 nt, Artificial Sequence
  Synthetic
uugugcagauuaaauuuua

SEQ ID NO: 250681 - RNA, 20 nt, Artificial Sequence
  Synthetic
uuugugcagauuaaauuuua

SEQ ID NO: 250682 - RNA, 21 nt, Artificial Sequence
  Synthetic
auuugugcagauuaaauuuua

SEQ ID NO: 250683 - RNA, 22 nt, Artificial Sequence
  Synthetic
cauuugugcagauuaaauuuua

SEQ ID NO: 250684 - RNA, 23 nt, Artificial Sequence
  Synthetic
ccauuugugcagauuaaauuuua

SEQ ID NO: 250685 - RNA, 24 nt, Artificial Sequence
  Synthetic
gccauuugugcagauuaaauuuua

SEQ ID NO: 250686 - RNA, 18 nt, Artificial Sequence
  Synthetic
uuugaaauuuaaauuuua

SEQ ID NO: 250687 - RNA, 19 nt, Artificial Sequence
  Synthetic
auuugaaauuuaaauuuua

SEQ ID NO: 250688 - RNA, 20 nt, Artificial Sequence
  Synthetic
cauuugaaauuuaaauuuua

SEQ ID NO: 250689 - RNA, 21 nt, Artificial Sequence
  Synthetic
ucauuugaaauuuaaauuuua

SEQ ID NO: 250690 - RNA, 22 nt, Artificial Sequence
  Synthetic
aucauuugaaauuuaaauuuua

SEQ ID NO: 250691 - RNA, 23 nt, Artificial Sequence
  Synthetic
aaucauuugaaauuuaaauuuua

SEQ ID NO: 250692 - RNA, 24 nt, Artificial Sequence
  Synthetic
gaaucauuugaaauuuaaauuuua

SEQ ID NO: 250693 - RNA, 18 nt, Artificial Sequence
  Synthetic
uacuuguaagcaauuuua

SEQ ID NO: 250694 - RNA, 19 nt, Artificial Sequence
  Synthetic
guacuuguaagcaauuuua

SEQ ID NO: 250695 - RNA, 20 nt, Artificial Sequence
  Synthetic
uguacuuguaagcaauuuua

SEQ ID NO: 250696 - RNA, 21 nt, Artificial Sequence
  Synthetic
uuguacuuguaagcaauuuua

SEQ ID NO: 250697 - RNA, 22 nt, Artificial Sequence
  Synthetic
auuguacuuguaagcaauuuua

SEQ ID NO: 250698 - RNA, 23 nt, Artificial Sequence
  Synthetic
gauuguacuuguaagcaauuuua

SEQ ID NO: 250699 - RNA, 24 nt, Artificial Sequence
  Synthetic
ggauuguacuuguaagcaauuuua

SEQ ID NO: 250700 - RNA, 18 nt, Artificial Sequence
  Synthetic
uagcaugaaggaauuuua

SEQ ID NO: 250701 - RNA, 19 nt, Artificial Sequence
  Synthetic
uuagcaugaaggaauuuua

SEQ ID NO: 250702 - RNA, 20 nt, Artificial Sequence
  Synthetic
auuagcaugaaggaauuuua

SEQ ID NO: 250703 - RNA, 21 nt, Artificial Sequence
  Synthetic
gauuagcaugaaggaauuuua

SEQ ID NO: 250704 - RNA, 22 nt, Artificial Sequence
  Synthetic
ugauuagcaugaaggaauuuua

SEQ ID NO: 250705 - RNA, 23 nt, Artificial Sequence
  Synthetic
gugauuagcaugaaggaauuuua

SEQ ID NO: 250706 - RNA, 24 nt, Artificial Sequence
  Synthetic
agugauuagcaugaaggaauuuua

SEQ ID NO: 250707 - RNA, 18 nt, Artificial Sequence
  Synthetic
aaacuaggaggaauuuua

SEQ ID NO: 250708 - RNA, 19 nt, Artificial Sequence
  Synthetic
gaaacuaggaggaauuuua

SEQ ID NO: 250709 - RNA, 20 nt, Artificial Sequence
  Synthetic
agaaacuaggaggaauuuua

SEQ ID NO: 250710 - RNA, 21 nt, Artificial Sequence
  Synthetic
cagaaacuaggaggaauuuua

SEQ ID NO: 250711 - RNA, 22 nt, Artificial Sequence
  Synthetic
gcagaaacuaggaggaauuuua

SEQ ID NO: 250712 - RNA, 23 nt, Artificial Sequence
  Synthetic
agcagaaacuaggaggaauuuua

SEQ ID NO: 250713 - RNA, 24 nt, Artificial Sequence
  Synthetic
aagcagaaacuaggaggaauuuua

SEQ ID NO: 250714 - RNA, 18 nt, Artificial Sequence
  Synthetic
aagaauuucugaauuuua

SEQ ID NO: 250715 - RNA, 19 nt, Artificial Sequence
  Synthetic
uaagaauuucugaauuuua

SEQ ID NO: 250716 - RNA, 20 nt, Artificial Sequence
  Synthetic
guaagaauuucugaauuuua

SEQ ID NO: 250717 - RNA, 21 nt, Artificial Sequence
  Synthetic
gguaagaauuucugaauuuua

SEQ ID NO: 250718 - RNA, 22 nt, Artificial Sequence
  Synthetic
cgguaagaauuucugaauuuua

SEQ ID NO: 250719 - RNA, 23 nt, Artificial Sequence
  Synthetic
ucgguaagaauuucugaauuuua

SEQ ID NO: 250720 - RNA, 24 nt, Artificial Sequence
  Synthetic
cucgguaagaauuucugaauuuua

SEQ ID NO: 250721 - RNA, 18 nt, Artificial Sequence
  Synthetic
aggacaugcauaauuuua

SEQ ID NO: 250722 - RNA, 19 nt, Artificial Sequence
  Synthetic
aaggacaugcauaauuuua

SEQ ID NO: 250723 - RNA, 20 nt, Artificial Sequence
  Synthetic
aaaggacaugcauaauuuua

SEQ ID NO: 250724 - RNA, 21 nt, Artificial Sequence
  Synthetic
uaaaggacaugcauaauuuua

SEQ ID NO: 250725 - RNA, 22 nt, Artificial Sequence
  Synthetic
uuaaaggacaugcauaauuuua

SEQ ID NO: 250726 - RNA, 23 nt, Artificial Sequence
  Synthetic
uuuaaaggacaugcauaauuuua

SEQ ID NO: 250727 - RNA, 24 nt, Artificial Sequence
  Synthetic
auuuaaaggacaugcauaauuuua

SEQ ID NO: 250728 - RNA, 18 nt, Artificial Sequence
  Synthetic
acaguaugacuaauuuua

SEQ ID NO: 250729 - RNA, 19 nt, Artificial Sequence
  Synthetic
cacaguaugacuaauuuua

SEQ ID NO: 250730 - RNA, 20 nt, Artificial Sequence
  Synthetic
ccacaguaugacuaauuuua

SEQ ID NO: 250731 - RNA, 21 nt, Artificial Sequence
  Synthetic
accacaguaugacuaauuuua

SEQ ID NO: 250732 - RNA, 22 nt, Artificial Sequence
  Synthetic
caccacaguaugacuaauuuua

SEQ ID NO: 250733 - RNA, 23 nt, Artificial Sequence
  Synthetic
ucaccacaguaugacuaauuuua

SEQ ID NO: 250734 - RNA, 24 nt, Artificial Sequence
  Synthetic
aucaccacaguaugacuaauuuua

SEQ ID NO: 250735 - RNA, 18 nt, Artificial Sequence
  Synthetic
uccauaugccuaauuuua

SEQ ID NO: 250736 - RNA, 19 nt, Artificial Sequence
  Synthetic
guccauaugccuaauuuua

SEQ ID NO: 250737 - RNA, 20 nt, Artificial Sequence
  Synthetic
uguccauaugccuaauuuua

SEQ ID NO: 250738 - RNA, 21 nt, Artificial Sequence
  Synthetic
guguccauaugccuaauuuua

SEQ ID NO: 250739 - RNA, 22 nt, Artificial Sequence
  Synthetic
uguguccauaugccuaauuuua

SEQ ID NO: 250740 - RNA, 23 nt, Artificial Sequence
  Synthetic
auguguccauaugccuaauuuua

SEQ ID NO: 250741 - RNA, 24 nt, Artificial Sequence
  Synthetic
cauguguccauaugccuaauuuua

SEQ ID NO: 250742 - RNA, 18 nt, Artificial Sequence
  Synthetic
uuuuuaaauuuaauuuua

SEQ ID NO: 250743 - RNA, 19 nt, Artificial Sequence
  Synthetic
uuuuuuaaauuuaauuuua

SEQ ID NO: 250744 - RNA, 20 nt, Artificial Sequence
  Synthetic
auuuuuuaaauuuaauuuua

SEQ ID NO: 250745 - RNA, 21 nt, Artificial Sequence
  Synthetic
aauuuuuuaaauuuaauuuua

SEQ ID NO: 250746 - RNA, 22 nt, Artificial Sequence
  Synthetic
gaauuuuuuaaauuuaauuuua

SEQ ID NO: 250747 - RNA, 23 nt, Artificial Sequence
  Synthetic
ugaauuuuuuaaauuuaauuuua

SEQ ID NO: 250748 - RNA, 24 nt, Artificial Sequence
  Synthetic
cugaauuuuuuaaauuuaauuuua

SEQ ID NO: 250749 - RNA, 18 nt, Artificial Sequence
  Synthetic
auucuccuuuuaauuuua

SEQ ID NO: 250750 - RNA, 19 nt, Artificial Sequence
  Synthetic
uauucuccuuuuaauuuua

SEQ ID NO: 250751 - RNA, 20 nt, Artificial Sequence
  Synthetic
cuauucuccuuuuaauuuua

SEQ ID NO: 250752 - RNA, 21 nt, Artificial Sequence
  Synthetic
gcuauucuccuuuuaauuuua

SEQ ID NO: 250753 - RNA, 22 nt, Artificial Sequence
  Synthetic
ugcuauucuccuuuuaauuuua

SEQ ID NO: 250754 - RNA, 23 nt, Artificial Sequence
  Synthetic
uugcuauucuccuuuuaauuuua

SEQ ID NO: 250755 - RNA, 24 nt, Artificial Sequence
  Synthetic
guugcuauucuccuuuuaauuuua

SEQ ID NO: 250756 - RNA, 18 nt, Artificial Sequence
  Synthetic
gaauaugacaacauuuua

SEQ ID NO: 250757 - RNA, 19 nt, Artificial Sequence
  Synthetic
ggaauaugacaacauuuua

SEQ ID NO: 250758 - RNA, 20 nt, Artificial Sequence
  Synthetic
uggaauaugacaacauuuua

SEQ ID NO: 250759 - RNA, 21 nt, Artificial Sequence
  Synthetic
uuggaauaugacaacauuuua

SEQ ID NO: 250760 - RNA, 22 nt, Artificial Sequence
  Synthetic
uuuggaauaugacaacauuuua

SEQ ID NO: 250761 - RNA, 23 nt, Artificial Sequence
  Synthetic
auuuggaauaugacaacauuuua

SEQ ID NO: 250762 - RNA, 24 nt, Artificial Sequence
  Synthetic
uauuuggaauaugacaacauuuua

SEQ ID NO: 250763 - RNA, 18 nt, Artificial Sequence
  Synthetic
ggcaccucgaacauuuua

SEQ ID NO: 250764 - RNA, 19 nt, Artificial Sequence
  Synthetic
aggcaccucgaacauuuua

SEQ ID NO: 250765 - RNA, 20 nt, Artificial Sequence
  Synthetic
caggcaccucgaacauuuua

SEQ ID NO: 250766 - RNA, 21 nt, Artificial Sequence
  Synthetic
acaggcaccucgaacauuuua

SEQ ID NO: 250767 - RNA, 22 nt, Artificial Sequence
  Synthetic
gacaggcaccucgaacauuuua

SEQ ID NO: 250768 - RNA, 23 nt, Artificial Sequence
  Synthetic
ugacaggcaccucgaacauuuua

SEQ ID NO: 250769 - RNA, 24 nt, Artificial Sequence
  Synthetic
cugacaggcaccucgaacauuuua

SEQ ID NO: 250770 - RNA, 18 nt, Artificial Sequence
  Synthetic
guuuaacagcccauuuua

SEQ ID NO: 250771 - RNA, 19 nt, Artificial Sequence
  Synthetic
uguuuaacagcccauuuua

SEQ ID NO: 250772 - RNA, 20 nt, Artificial Sequence
  Synthetic
guguuuaacagcccauuuua

SEQ ID NO: 250773 - RNA, 21 nt, Artificial Sequence
  Synthetic
uguguuuaacagcccauuuua

SEQ ID NO: 250774 - RNA, 22 nt, Artificial Sequence
  Synthetic
cuguguuuaacagcccauuuua

SEQ ID NO: 250775 - RNA, 23 nt, Artificial Sequence
  Synthetic
ucuguguuuaacagcccauuuua

SEQ ID NO: 250776 - RNA, 24 nt, Artificial Sequence
  Synthetic
aucuguguuuaacagcccauuuua

SEQ ID NO: 250777 - RNA, 18 nt, Artificial Sequence
  Synthetic
uggauauaagccauuuua

SEQ ID NO: 250778 - RNA, 19 nt, Artificial Sequence
  Synthetic
uuggauauaagccauuuua

SEQ ID NO: 250779 - RNA, 20 nt, Artificial Sequence
  Synthetic
uuuggauauaagccauuuua

SEQ ID NO: 250780 - RNA, 21 nt, Artificial Sequence
  Synthetic
uuuuggauauaagccauuuua

SEQ ID NO: 250781 - RNA, 22 nt, Artificial Sequence
  Synthetic
cuuuuggauauaagccauuuua

SEQ ID NO: 250782 - RNA, 23 nt, Artificial Sequence
  Synthetic
ucuuuuggauauaagccauuuua

SEQ ID NO: 250783 - RNA, 24 nt, Artificial Sequence
  Synthetic
gucuuuuggauauaagccauuuua

SEQ ID NO: 250784 - RNA, 18 nt, Artificial Sequence
  Synthetic
ucugucauagccauuuua

SEQ ID NO: 250785 - RNA, 19 nt, Artificial Sequence
  Synthetic
cucugucauagccauuuua

SEQ ID NO: 250786 - RNA, 20 nt, Artificial Sequence
  Synthetic
ucucugucauagccauuuua

SEQ ID NO: 250787 - RNA, 21 nt, Artificial Sequence
  Synthetic
aucucugucauagccauuuua

SEQ ID NO: 250788 - RNA, 22 nt, Artificial Sequence
  Synthetic
aaucucugucauagccauuuua

SEQ ID NO: 250789 - RNA, 23 nt, Artificial Sequence
  Synthetic
caaucucugucauagccauuuua

SEQ ID NO: 250790 - RNA, 24 nt, Artificial Sequence
  Synthetic
ccaaucucugucauagccauuuua

SEQ ID NO: 250791 - RNA, 18 nt, Artificial Sequence
  Synthetic
ugcuccccaagcauuuua

SEQ ID NO: 250792 - RNA, 19 nt, Artificial Sequence
  Synthetic
uugcuccccaagcauuuua

SEQ ID NO: 250793 - RNA, 20 nt, Artificial Sequence
  Synthetic
auugcuccccaagcauuuua

SEQ ID NO: 250794 - RNA, 21 nt, Artificial Sequence
  Synthetic
gauugcuccccaagcauuuua

SEQ ID NO: 250795 - RNA, 22 nt, Artificial Sequence
  Synthetic
ggauugcuccccaagcauuuua

SEQ ID NO: 250796 - RNA, 23 nt, Artificial Sequence
  Synthetic
aggauugcuccccaagcauuuua

SEQ ID NO: 250797 - RNA, 24 nt, Artificial Sequence
  Synthetic
aaggauugcuccccaagcauuuua

SEQ ID NO: 250798 - RNA, 18 nt, Artificial Sequence
  Synthetic
acugauuggugcauuuua

SEQ ID NO: 250799 - RNA, 19 nt, Artificial Sequence
  Synthetic
uacugauuggugcauuuua

SEQ ID NO: 250800 - RNA, 20 nt, Artificial Sequence
  Synthetic
cuacugauuggugcauuuua

SEQ ID NO: 250801 - RNA, 21 nt, Artificial Sequence
  Synthetic
ccuacugauuggugcauuuua

SEQ ID NO: 250802 - RNA, 22 nt, Artificial Sequence
  Synthetic
uccuacugauuggugcauuuua

SEQ ID NO: 250803 - RNA, 23 nt, Artificial Sequence
  Synthetic
auccuacugauuggugcauuuua

SEQ ID NO: 250804 - RNA, 24 nt, Artificial Sequence
  Synthetic
aauccuacugauuggugcauuuua

SEQ ID NO: 250805 - RNA, 18 nt, Artificial Sequence
  Synthetic
aaauaaauuugcauuuua

SEQ ID NO: 250806 - RNA, 19 nt, Artificial Sequence
  Synthetic
uaaauaaauuugcauuuua

SEQ ID NO: 250807 - RNA, 20 nt, Artificial Sequence
  Synthetic
guaaauaaauuugcauuuua

SEQ ID NO: 250808 - RNA, 21 nt, Artificial Sequence
  Synthetic
uguaaauaaauuugcauuuua

SEQ ID NO: 250809 - RNA, 22 nt, Artificial Sequence
  Synthetic
auguaaauaaauuugcauuuua

SEQ ID NO: 250810 - RNA, 23 nt, Artificial Sequence
  Synthetic
gauguaaauaaauuugcauuuua

SEQ ID NO: 250811 - RNA, 24 nt, Artificial Sequence
  Synthetic
ugauguaaauaaauuugcauuuua

SEQ ID NO: 250812 - RNA, 18 nt, Artificial Sequence
  Synthetic
aaugucucucucauuuua

SEQ ID NO: 250813 - RNA, 19 nt, Artificial Sequence
  Synthetic
uaaugucucucucauuuua

SEQ ID NO: 250814 - RNA, 20 nt, Artificial Sequence
  Synthetic
cuaaugucucucucauuuua

SEQ ID NO: 250815 - RNA, 21 nt, Artificial Sequence
  Synthetic
acuaaugucucucucauuuua

SEQ ID NO: 250816 - RNA, 22 nt, Artificial Sequence
  Synthetic
uacuaaugucucucucauuuua

SEQ ID NO: 250817 - RNA, 23 nt, Artificial Sequence
  Synthetic
auacuaaugucucucucauuuua

SEQ ID NO: 250818 - RNA, 24 nt, Artificial Sequence
  Synthetic
gauacuaaugucucucucauuuua

SEQ ID NO: 250819 - RNA, 18 nt, Artificial Sequence
  Synthetic
auaaauauauucauuuua

SEQ ID NO: 250820 - RNA, 19 nt, Artificial Sequence
  Synthetic
aauaaauauauucauuuua

SEQ ID NO: 250821 - RNA, 20 nt, Artificial Sequence
  Synthetic
caauaaauauauucauuuua

SEQ ID NO: 250822 - RNA, 21 nt, Artificial Sequence
  Synthetic
ucaauaaauauauucauuuua

SEQ ID NO: 250823 - RNA, 22 nt, Artificial Sequence
  Synthetic
aucaauaaauauauucauuuua

SEQ ID NO: 250824 - RNA, 23 nt, Artificial Sequence
  Synthetic
aaucaauaaauauauucauuuua

SEQ ID NO: 250825 - RNA, 24 nt, Artificial Sequence
  Synthetic
uaaucaauaaauauauucauuuua

SEQ ID NO: 250826 - RNA, 18 nt, Artificial Sequence
  Synthetic
gaccauacugagauuuua

SEQ ID NO: 250827 - RNA, 19 nt, Artificial Sequence
  Synthetic
ugaccauacugagauuuua

SEQ ID NO: 250828 - RNA, 20 nt, Artificial Sequence
  Synthetic
augaccauacugagauuuua

SEQ ID NO: 250829 - RNA, 21 nt, Artificial Sequence
  Synthetic
gaugaccauacugagauuuua

SEQ ID NO: 250830 - RNA, 22 nt, Artificial Sequence
  Synthetic
agaugaccauacugagauuuua

SEQ ID NO: 250831 - RNA, 23 nt, Artificial Sequence
  Synthetic
uagaugaccauacugagauuuua

SEQ ID NO: 250832 - RNA, 24 nt, Artificial Sequence
  Synthetic
cuagaugaccauacugagauuuua

SEQ ID NO: 250833 - RNA, 18 nt, Artificial Sequence
  Synthetic
gauguugcauagauuuua

SEQ ID NO: 250834 - RNA, 19 nt, Artificial Sequence
  Synthetic
ugauguugcauagauuuua

SEQ ID NO: 250835 - RNA, 20 nt, Artificial Sequence
  Synthetic
augauguugcauagauuuua

SEQ ID NO: 250836 - RNA, 21 nt, Artificial Sequence
  Synthetic
uaugauguugcauagauuuua

SEQ ID NO: 250837 - RNA, 22 nt, Artificial Sequence
  Synthetic
uuaugauguugcauagauuuua

SEQ ID NO: 250838 - RNA, 23 nt, Artificial Sequence
  Synthetic
auuaugauguugcauagauuuua

SEQ ID NO: 250839 - RNA, 24 nt, Artificial Sequence
  Synthetic
cauuaugauguugcauagauuuua

SEQ ID NO: 250840 - RNA, 18 nt, Artificial Sequence
  Synthetic
augaugcccuagauuuua

SEQ ID NO: 250841 - RNA, 19 nt, Artificial Sequence
  Synthetic
gaugaugcccuagauuuua

SEQ ID NO: 250842 - RNA, 20 nt, Artificial Sequence
  Synthetic
ugaugaugcccuagauuuua

SEQ ID NO: 250843 - RNA, 21 nt, Artificial Sequence
  Synthetic
gugaugaugcccuagauuuua

SEQ ID NO: 250844 - RNA, 22 nt, Artificial Sequence
  Synthetic
agugaugaugcccuagauuuua

SEQ ID NO: 250845 - RNA, 23 nt, Artificial Sequence
  Synthetic
gagugaugaugcccuagauuuua

SEQ ID NO: 250846 - RNA, 24 nt, Artificial Sequence
  Synthetic
ugagugaugaugcccuagauuuua

SEQ ID NO: 250847 - RNA, 18 nt, Artificial Sequence
  Synthetic
ugcugaaccuggauuuua

SEQ ID NO: 250848 - RNA, 19 nt, Artificial Sequence
  Synthetic
uugcugaaccuggauuuua

SEQ ID NO: 250849 - RNA, 20 nt, Artificial Sequence
  Synthetic
uuugcugaaccuggauuuua

SEQ ID NO: 250850 - RNA, 21 nt, Artificial Sequence
  Synthetic
cuuugcugaaccuggauuuua

SEQ ID NO: 250851 - RNA, 22 nt, Artificial Sequence
  Synthetic
ucuuugcugaaccuggauuuua

SEQ ID NO: 250852 - RNA, 23 nt, Artificial Sequence
  Synthetic
uucuuugcugaaccuggauuuua

SEQ ID NO: 250853 - RNA, 24 nt, Artificial Sequence
  Synthetic
cuucuuugcugaaccuggauuuua

SEQ ID NO: 250854 - RNA, 18 nt, Artificial Sequence
  Synthetic
auauagugcuggauuuua

SEQ ID NO: 250855 - RNA, 19 nt, Artificial Sequence
  Synthetic
gauauagugcuggauuuua

SEQ ID NO: 250856 - RNA, 20 nt, Artificial Sequence
  Synthetic
ggauauagugcuggauuuua

SEQ ID NO: 250857 - RNA, 21 nt, Artificial Sequence
  Synthetic
uggauauagugcuggauuuua

SEQ ID NO: 250858 - RNA, 22 nt, Artificial Sequence
  Synthetic
auggauauagugcuggauuuua

SEQ ID NO: 250859 - RNA, 23 nt, Artificial Sequence
  Synthetic
uauggauauagugcuggauuuua

SEQ ID NO: 250860 - RNA, 24 nt, Artificial Sequence
  Synthetic
auauggauauagugcuggauuuua

SEQ ID NO: 250861 - RNA, 18 nt, Artificial Sequence
  Synthetic
auauaaauguggauuuua

SEQ ID NO: 250862 - RNA, 19 nt, Artificial Sequence
  Synthetic
aauauaaauguggauuuua

SEQ ID NO: 250863 - RNA, 20 nt, Artificial Sequence
  Synthetic
gaauauaaauguggauuuua

SEQ ID NO: 250864 - RNA, 21 nt, Artificial Sequence
  Synthetic
ugaauauaaauguggauuuua

SEQ ID NO: 250865 - RNA, 22 nt, Artificial Sequence
  Synthetic
cugaauauaaauguggauuuua

SEQ ID NO: 250866 - RNA, 23 nt, Artificial Sequence
  Synthetic
acugaauauaaauguggauuuua

SEQ ID NO: 250867 - RNA, 24 nt, Artificial Sequence
  Synthetic
aacugaauauaaauguggauuuua

SEQ ID NO: 250868 - RNA, 18 nt, Artificial Sequence
  Synthetic
aauaauuaguugauuuua

SEQ ID NO: 250869 - RNA, 19 nt, Artificial Sequence
  Synthetic
aaauaauuaguugauuuua

SEQ ID NO: 250870 - RNA, 20 nt, Artificial Sequence
  Synthetic
aaaauaauuaguugauuuua

SEQ ID NO: 250871 - RNA, 21 nt, Artificial Sequence
  Synthetic
gaaaauaauuaguugauuuua

SEQ ID NO: 250872 - RNA, 22 nt, Artificial Sequence
  Synthetic
ggaaaauaauuaguugauuuua

SEQ ID NO: 250873 - RNA, 23 nt, Artificial Sequence
  Synthetic
uggaaaauaauuaguugauuuua

SEQ ID NO: 250874 - RNA, 24 nt, Artificial Sequence
  Synthetic
auggaaaauaauuaguugauuuua

SEQ ID NO: 250875 - RNA, 18 nt, Artificial Sequence
  Synthetic
aauuuaaaaaauauuuua

SEQ ID NO: 250876 - RNA, 19 nt, Artificial Sequence
  Synthetic
gaauuuaaaaaauauuuua

SEQ ID NO: 250877 - RNA, 20 nt, Artificial Sequence
  Synthetic
ugaauuuaaaaaauauuuua

SEQ ID NO: 250878 - RNA, 21 nt, Artificial Sequence
  Synthetic
cugaauuuaaaaaauauuuua

SEQ ID NO: 250879 - RNA, 22 nt, Artificial Sequence
  Synthetic
acugaauuuaaaaaauauuuua

SEQ ID NO: 250880 - RNA, 23 nt, Artificial Sequence
  Synthetic
aacugaauuuaaaaaauauuuua

SEQ ID NO: 250881 - RNA, 24 nt, Artificial Sequence
  Synthetic
uaacugaauuuaaaaaauauuuua

SEQ ID NO: 250882 - RNA, 18 nt, Artificial Sequence
  Synthetic
aaguaucauaauauuuua

SEQ ID NO: 250883 - RNA, 19 nt, Artificial Sequence
  Synthetic
caaguaucauaauauuuua

SEQ ID NO: 250884 - RNA, 20 nt, Artificial Sequence
  Synthetic
gcaaguaucauaauauuuua

SEQ ID NO: 250885 - RNA, 21 nt, Artificial Sequence
  Synthetic
agcaaguaucauaauauuuua

SEQ ID NO: 250886 - RNA, 22 nt, Artificial Sequence
  Synthetic
cagcaaguaucauaauauuuua

SEQ ID NO: 250887 - RNA, 23 nt, Artificial Sequence
  Synthetic
ucagcaaguaucauaauauuuua

SEQ ID NO: 250888 - RNA, 24 nt, Artificial Sequence
  Synthetic
uucagcaaguaucauaauauuuua

SEQ ID NO: 250889 - RNA, 18 nt, Artificial Sequence
  Synthetic
uguuuauuuaauauuuua

SEQ ID NO: 250890 - RNA, 19 nt, Artificial Sequence
  Synthetic
guguuuauuuaauauuuua

SEQ ID NO: 250891 - RNA, 20 nt, Artificial Sequence
  Synthetic
aguguuuauuuaauauuuua

SEQ ID NO: 250892 - RNA, 21 nt, Artificial Sequence
  Synthetic
gaguguuuauuuaauauuuua

SEQ ID NO: 250893 - RNA, 22 nt, Artificial Sequence
  Synthetic
ugaguguuuauuuaauauuuua

SEQ ID NO: 250894 - RNA, 23 nt, Artificial Sequence
  Synthetic
uugaguguuuauuuaauauuuua

SEQ ID NO: 250895 - RNA, 24 nt, Artificial Sequence
  Synthetic
uuugaguguuuauuuaauauuuua

SEQ ID NO: 250896 - RNA, 18 nt, Artificial Sequence
  Synthetic
aggaaaagagauauuuua

SEQ ID NO: 250897 - RNA, 19 nt, Artificial Sequence
  Synthetic
aaggaaaagagauauuuua

SEQ ID NO: 250898 - RNA, 20 nt, Artificial Sequence
  Synthetic
uaaggaaaagagauauuuua

SEQ ID NO: 250899 - RNA, 21 nt, Artificial Sequence
  Synthetic
auaaggaaaagagauauuuua

SEQ ID NO: 250900 - RNA, 22 nt, Artificial Sequence
  Synthetic
gauaaggaaaagagauauuuua

SEQ ID NO: 250901 - RNA, 23 nt, Artificial Sequence
  Synthetic
cgauaaggaaaagagauauuuua

SEQ ID NO: 250902 - RNA, 24 nt, Artificial Sequence
  Synthetic
ucgauaaggaaaagagauauuuua

SEQ ID NO: 250903 - RNA, 18 nt, Artificial Sequence
  Synthetic
acugccaauuauauuuua

SEQ ID NO: 250904 - RNA, 19 nt, Artificial Sequence
  Synthetic
aacugccaauuauauuuua

SEQ ID NO: 250905 - RNA, 20 nt, Artificial Sequence
  Synthetic
caacugccaauuauauuuua

SEQ ID NO: 250906 - RNA, 21 nt, Artificial Sequence
  Synthetic
gcaacugccaauuauauuuua

SEQ ID NO: 250907 - RNA, 22 nt, Artificial Sequence
  Synthetic
ggcaacugccaauuauauuuua

SEQ ID NO: 250908 - RNA, 23 nt, Artificial Sequence
  Synthetic
aggcaacugccaauuauauuuua

SEQ ID NO: 250909 - RNA, 24 nt, Artificial Sequence
  Synthetic
aaggcaacugccaauuauauuuua

SEQ ID NO: 250910 - RNA, 18 nt, Artificial Sequence
  Synthetic
uuuaucguaacuauuuua

SEQ ID NO: 250911 - RNA, 19 nt, Artificial Sequence
  Synthetic
uuuuaucguaacuauuuua

SEQ ID NO: 250912 - RNA, 20 nt, Artificial Sequence
  Synthetic
auuuuaucguaacuauuuua

SEQ ID NO: 250913 - RNA, 21 nt, Artificial Sequence
  Synthetic
aauuuuaucguaacuauuuua

SEQ ID NO: 250914 - RNA, 22 nt, Artificial Sequence
  Synthetic
aaauuuuaucguaacuauuuua

SEQ ID NO: 250915 - RNA, 23 nt, Artificial Sequence
  Synthetic
aaaauuuuaucguaacuauuuua

SEQ ID NO: 250916 - RNA, 24 nt, Artificial Sequence
  Synthetic
aaaaauuuuaucguaacuauuuua

SEQ ID NO: 250917 - RNA, 18 nt, Artificial Sequence
  Synthetic
acuauuuuaucuauuuua

SEQ ID NO: 250918 - RNA, 19 nt, Artificial Sequence
  Synthetic
aacuauuuuaucuauuuua

SEQ ID NO: 250919 - RNA, 20 nt, Artificial Sequence
  Synthetic
gaacuauuuuaucuauuuua

SEQ ID NO: 250920 - RNA, 21 nt, Artificial Sequence
  Synthetic
ggaacuauuuuaucuauuuua

SEQ ID NO: 250921 - RNA, 22 nt, Artificial Sequence
  Synthetic
uggaacuauuuuaucuauuuua

SEQ ID NO: 250922 - RNA, 23 nt, Artificial Sequence
  Synthetic
uuggaacuauuuuaucuauuuua

SEQ ID NO: 250923 - RNA, 24 nt, Artificial Sequence
  Synthetic
guuggaacuauuuuaucuauuuua

SEQ ID NO: 250924 - RNA, 18 nt, Artificial Sequence
  Synthetic
ugccguaacucuauuuua

SEQ ID NO: 250925 - RNA, 19 nt, Artificial Sequence
  Synthetic
augccguaacucuauuuua

SEQ ID NO: 250926 - RNA, 20 nt, Artificial Sequence
  Synthetic
gaugccguaacucuauuuua

SEQ ID NO: 250927 - RNA, 21 nt, Artificial Sequence
  Synthetic
ugaugccguaacucuauuuua

SEQ ID NO: 250928 - RNA, 22 nt, Artificial Sequence
  Synthetic
augaugccguaacucuauuuua

SEQ ID NO: 250929 - RNA, 23 nt, Artificial Sequence
  Synthetic
aaugaugccguaacucuauuuua

SEQ ID NO: 250930 - RNA, 24 nt, Artificial Sequence
  Synthetic
aaaugaugccguaacucuauuuua

SEQ ID NO: 250931 - RNA, 18 nt, Artificial Sequence
  Synthetic
cgguuugccaguauuuua

SEQ ID NO: 250932 - RNA, 19 nt, Artificial Sequence
  Synthetic
ucgguuugccaguauuuua

SEQ ID NO: 250933 - RNA, 20 nt, Artificial Sequence
  Synthetic
uucgguuugccaguauuuua

SEQ ID NO: 250934 - RNA, 18 nt, Artificial Sequence
  Synthetic
ugguuugccaguauuuua

SEQ ID NO: 250935 - RNA, 19 nt, Artificial Sequence
  Synthetic
uugguuugccaguauuuua

SEQ ID NO: 250936 - RNA, 20 nt, Artificial Sequence
  Synthetic
uuugguuugccaguauuuua

SEQ ID NO: 250937 - RNA, 21 nt, Artificial Sequence
  Synthetic
auuugguuugccaguauuuua

SEQ ID NO: 250938 - RNA, 22 nt, Artificial Sequence
  Synthetic
gauuugguuugccaguauuuua

SEQ ID NO: 250939 - RNA, 23 nt, Artificial Sequence
  Synthetic
ggauuugguuugccaguauuuua

SEQ ID NO: 250940 - RNA, 24 nt, Artificial Sequence
  Synthetic
uggauuugguuugccaguauuuua

SEQ ID NO: 250941 - RNA, 18 nt, Artificial Sequence
  Synthetic
acaucccagauuauuuua

SEQ ID NO: 250942 - RNA, 19 nt, Artificial Sequence
  Synthetic
cacaucccagauuauuuua

SEQ ID NO: 250943 - RNA, 20 nt, Artificial Sequence
  Synthetic
ccacaucccagauuauuuua

SEQ ID NO: 250944 - RNA, 21 nt, Artificial Sequence
  Synthetic
accacaucccagauuauuuua

SEQ ID NO: 250945 - RNA, 22 nt, Artificial Sequence
  Synthetic
uaccacaucccagauuauuuua

SEQ ID NO: 250946 - RNA, 23 nt, Artificial Sequence
  Synthetic
uuaccacaucccagauuauuuua

SEQ ID NO: 250947 - RNA, 24 nt, Artificial Sequence
  Synthetic
guuaccacaucccagauuauuuua

SEQ ID NO: 250948 - RNA, 18 nt, Artificial Sequence
  Synthetic
auucuguaucuuauuuua

SEQ ID NO: 250949 - RNA, 19 nt, Artificial Sequence
  Synthetic
uauucuguaucuuauuuua

SEQ ID NO: 250950 - RNA, 20 nt, Artificial Sequence
  Synthetic
cuauucuguaucuuauuuua

SEQ ID NO: 250951 - RNA, 21 nt, Artificial Sequence
  Synthetic
gcuauucuguaucuuauuuua

SEQ ID NO: 250952 - RNA, 22 nt, Artificial Sequence
  Synthetic
ugcuauucuguaucuuauuuua

SEQ ID NO: 250953 - RNA, 23 nt, Artificial Sequence
  Synthetic
augcuauucuguaucuuauuuua

SEQ ID NO: 250954 - RNA, 24 nt, Artificial Sequence
  Synthetic
aaugcuauucuguaucuuauuuua

SEQ ID NO: 250955 - RNA, 18 nt, Artificial Sequence
  Synthetic
uuaguaagucuuauuuua

SEQ ID NO: 250956 - RNA, 19 nt, Artificial Sequence
  Synthetic
auuaguaagucuuauuuua

SEQ ID NO: 250957 - RNA, 20 nt, Artificial Sequence
  Synthetic
cauuaguaagucuuauuuua

SEQ ID NO: 250958 - RNA, 21 nt, Artificial Sequence
  Synthetic
ccauuaguaagucuuauuuua

SEQ ID NO: 250959 - RNA, 22 nt, Artificial Sequence
  Synthetic
accauuaguaagucuuauuuua

SEQ ID NO: 250960 - RNA, 23 nt, Artificial Sequence
  Synthetic
aaccauuaguaagucuuauuuua

SEQ ID NO: 250961 - RNA, 24 nt, Artificial Sequence
  Synthetic
uaaccauuaguaagucuuauuuua

SEQ ID NO: 250962 - RNA, 18 nt, Artificial Sequence
  Synthetic
aauaauuagguuauuuua

SEQ ID NO: 250963 - RNA, 19 nt, Artificial Sequence
  Synthetic
aaauaauuagguuauuuua

SEQ ID NO: 250964 - RNA, 20 nt, Artificial Sequence
  Synthetic
uaaauaauuagguuauuuua

SEQ ID NO: 250965 - RNA, 21 nt, Artificial Sequence
  Synthetic
auaaauaauuagguuauuuua

SEQ ID NO: 250966 - RNA, 22 nt, Artificial Sequence
  Synthetic
aauaaauaauuagguuauuuua

SEQ ID NO: 250967 - RNA, 23 nt, Artificial Sequence
  Synthetic
aaauaaauaauuagguuauuuua

SEQ ID NO: 250968 - RNA, 24 nt, Artificial Sequence
  Synthetic
gaaauaaauaauuagguuauuuua

SEQ ID NO: 250969 - RNA, 18 nt, Artificial Sequence
  Synthetic
ucuuguuagucacuuuua

SEQ ID NO: 250970 - RNA, 19 nt, Artificial Sequence
  Synthetic
cucuuguuagucacuuuua

SEQ ID NO: 250971 - RNA, 20 nt, Artificial Sequence
  Synthetic
acucuuguuagucacuuuua

SEQ ID NO: 250972 - RNA, 21 nt, Artificial Sequence
  Synthetic
aacucuuguuagucacuuuua

SEQ ID NO: 250973 - RNA, 22 nt, Artificial Sequence
  Synthetic
caacucuuguuagucacuuuua

SEQ ID NO: 250974 - RNA, 23 nt, Artificial Sequence
  Synthetic
ucaacucuuguuagucacuuuua

SEQ ID NO: 250975 - RNA, 24 nt, Artificial Sequence
  Synthetic
uucaacucuuguuagucacuuuua

SEQ ID NO: 250976 - RNA, 18 nt, Artificial Sequence
  Synthetic
auauucagcauacuuuua

SEQ ID NO: 250977 - RNA, 19 nt, Artificial Sequence
  Synthetic
aauauucagcauacuuuua

SEQ ID NO: 250978 - RNA, 20 nt, Artificial Sequence
  Synthetic
gaauauucagcauacuuuua

SEQ ID NO: 250979 - RNA, 21 nt, Artificial Sequence
  Synthetic
agaauauucagcauacuuuua

SEQ ID NO: 250980 - RNA, 22 nt, Artificial Sequence
  Synthetic
uagaauauucagcauacuuuua

SEQ ID NO: 250981 - RNA, 23 nt, Artificial Sequence
  Synthetic
uuagaauauucagcauacuuuua

SEQ ID NO: 250982 - RNA, 24 nt, Artificial Sequence
  Synthetic
auuagaauauucagcauacuuuua

SEQ ID NO: 250983 - RNA, 18 nt, Artificial Sequence
  Synthetic
gauuauuacuuacuuuua

SEQ ID NO: 250984 - RNA, 19 nt, Artificial Sequence
  Synthetic
ggauuauuacuuacuuuua

SEQ ID NO: 250985 - RNA, 20 nt, Artificial Sequence
  Synthetic
uggauuauuacuuacuuuua

SEQ ID NO: 250986 - RNA, 21 nt, Artificial Sequence
  Synthetic
auggauuauuacuuacuuuua

SEQ ID NO: 250987 - RNA, 22 nt, Artificial Sequence
  Synthetic
uauggauuauuacuuacuuuua

SEQ ID NO: 250988 - RNA, 23 nt, Artificial Sequence
  Synthetic
uuauggauuauuacuuacuuuua

SEQ ID NO: 250989 - RNA, 24 nt, Artificial Sequence
  Synthetic
uuuauggauuauuacuuacuuuua

SEQ ID NO: 250990 - RNA, 18 nt, Artificial Sequence
  Synthetic
uuugacaaagaccuuuua

SEQ ID NO: 250991 - RNA, 19 nt, Artificial Sequence
  Synthetic
cuuugacaaagaccuuuua

SEQ ID NO: 250992 - RNA, 20 nt, Artificial Sequence
  Synthetic
acuuugacaaagaccuuuua

SEQ ID NO: 250993 - RNA, 21 nt, Artificial Sequence
  Synthetic
aacuuugacaaagaccuuuua

SEQ ID NO: 250994 - RNA, 22 nt, Artificial Sequence
  Synthetic
gaacuuugacaaagaccuuuua

SEQ ID NO: 250995 - RNA, 23 nt, Artificial Sequence
  Synthetic
agaacuuugacaaagaccuuuua

SEQ ID NO: 250996 - RNA, 24 nt, Artificial Sequence
  Synthetic
cagaacuuugacaaagaccuuuua

SEQ ID NO: 250997 - RNA, 18 nt, Artificial Sequence
  Synthetic
ccaacagaguaccuuuua

SEQ ID NO: 250998 - RNA, 19 nt, Artificial Sequence
  Synthetic
gccaacagaguaccuuuua

SEQ ID NO: 250999 - RNA, 20 nt, Artificial Sequence
  Synthetic
agccaacagaguaccuuuua

SEQ ID NO: 251000 - RNA, 21 nt, Artificial Sequence
  Synthetic
gagccaacagaguaccuuuua

SEQ ID NO: 251001 - RNA, 22 nt, Artificial Sequence
  Synthetic
ugagccaacagaguaccuuuua

SEQ ID NO: 251002 - RNA, 23 nt, Artificial Sequence
  Synthetic
uugagccaacagaguaccuuuua

SEQ ID NO: 251003 - RNA, 24 nt, Artificial Sequence
  Synthetic
cuugagccaacagaguaccuuuua

SEQ ID NO: 251004 - RNA, 18 nt, Artificial Sequence
  Synthetic
gauaccucuacccuuuua

SEQ ID NO: 251005 - RNA, 19 nt, Artificial Sequence
  Synthetic
ggauaccucuacccuuuua

SEQ ID NO: 251006 - RNA, 20 nt, Artificial Sequence
  Synthetic
gggauaccucuacccuuuua

SEQ ID NO: 251007 - RNA, 21 nt, Artificial Sequence
  Synthetic
agggauaccucuacccuuuua

SEQ ID NO: 251008 - RNA, 22 nt, Artificial Sequence
  Synthetic
aagggauaccucuacccuuuua

SEQ ID NO: 251009 - RNA, 23 nt, Artificial Sequence
  Synthetic
aaagggauaccucuacccuuuua

SEQ ID NO: 251010 - RNA, 24 nt, Artificial Sequence
  Synthetic
aaaagggauaccucuacccuuuua

SEQ ID NO: 251011 - RNA, 18 nt, Artificial Sequence
  Synthetic
aaaacagugguccuuuua

SEQ ID NO: 251012 - RNA, 19 nt, Artificial Sequence
  Synthetic
gaaaacagugguccuuuua

SEQ ID NO: 251013 - RNA, 20 nt, Artificial Sequence
  Synthetic
ggaaaacagugguccuuuua

SEQ ID NO: 251014 - RNA, 21 nt, Artificial Sequence
  Synthetic
aggaaaacagugguccuuuua

SEQ ID NO: 251015 - RNA, 22 nt, Artificial Sequence
  Synthetic
aaggaaaacagugguccuuuua

SEQ ID NO: 251016 - RNA, 23 nt, Artificial Sequence
  Synthetic
gaaggaaaacagugguccuuuua

SEQ ID NO: 251017 - RNA, 24 nt, Artificial Sequence
  Synthetic
agaaggaaaacagugguccuuuua

SEQ ID NO: 251018 - RNA, 18 nt, Artificial Sequence
  Synthetic
acaaauuauaagcuuuua

SEQ ID NO: 251019 - RNA, 19 nt, Artificial Sequence
  Synthetic
gacaaauuauaagcuuuua

SEQ ID NO: 251020 - RNA, 20 nt, Artificial Sequence
  Synthetic
agacaaauuauaagcuuuua

SEQ ID NO: 251021 - RNA, 21 nt, Artificial Sequence
  Synthetic
uagacaaauuauaagcuuuua

SEQ ID NO: 251022 - RNA, 22 nt, Artificial Sequence
  Synthetic
uuagacaaauuauaagcuuuua

SEQ ID NO: 251023 - RNA, 23 nt, Artificial Sequence
  Synthetic
auuagacaaauuauaagcuuuua

SEQ ID NO: 251024 - RNA, 24 nt, Artificial Sequence
  Synthetic
uauuagacaaauuauaagcuuuua

SEQ ID NO: 251025 - RNA, 18 nt, Artificial Sequence
  Synthetic
cucuuuucuuugcuuuua

SEQ ID NO: 251026 - RNA, 19 nt, Artificial Sequence
  Synthetic
gcucuuuucuuugcuuuua

SEQ ID NO: 251027 - RNA, 20 nt, Artificial Sequence
  Synthetic
ugcucuuuucuuugcuuuua

SEQ ID NO: 251028 - RNA, 21 nt, Artificial Sequence
  Synthetic
uugcucuuuucuuugcuuuua

SEQ ID NO: 251029 - RNA, 22 nt, Artificial Sequence
  Synthetic
auugcucuuuucuuugcuuuua

SEQ ID NO: 251030 - RNA, 23 nt, Artificial Sequence
  Synthetic
aauugcucuuuucuuugcuuuua

SEQ ID NO: 251031 - RNA, 24 nt, Artificial Sequence
  Synthetic
gaauugcucuuuucuuugcuuuua

SEQ ID NO: 251032 - RNA, 18 nt, Artificial Sequence
  Synthetic
acuuaaucgagucuuuua

SEQ ID NO: 251033 - RNA, 19 nt, Artificial Sequence
  Synthetic
cacuuaaucgagucuuuua

SEQ ID NO: 251034 - RNA, 20 nt, Artificial Sequence
  Synthetic
ccacuuaaucgagucuuuua

SEQ ID NO: 251035 - RNA, 21 nt, Artificial Sequence
  Synthetic
gccacuuaaucgagucuuuua

SEQ ID NO: 251036 - RNA, 22 nt, Artificial Sequence
  Synthetic
agccacuuaaucgagucuuuua

SEQ ID NO: 251037 - RNA, 23 nt, Artificial Sequence
  Synthetic
uagccacuuaaucgagucuuuua

SEQ ID NO: 251038 - RNA, 24 nt, Artificial Sequence
  Synthetic
uuagccacuuaaucgagucuuuua

SEQ ID NO: 251039 - RNA, 18 nt, Artificial Sequence
  Synthetic
cauaccaauugucuuuua

SEQ ID NO: 251040 - RNA, 19 nt, Artificial Sequence
  Synthetic
gcauaccaauugucuuuua

SEQ ID NO: 251041 - RNA, 20 nt, Artificial Sequence
  Synthetic
ugcauaccaauugucuuuua

SEQ ID NO: 251042 - RNA, 21 nt, Artificial Sequence
  Synthetic
gugcauaccaauugucuuuua

SEQ ID NO: 251043 - RNA, 22 nt, Artificial Sequence
  Synthetic
ggugcauaccaauugucuuuua

SEQ ID NO: 251044 - RNA, 23 nt, Artificial Sequence
  Synthetic
gggugcauaccaauugucuuuua

SEQ ID NO: 251045 - RNA, 24 nt, Artificial Sequence
  Synthetic
agggugcauaccaauugucuuuua

SEQ ID NO: 251046 - RNA, 18 nt, Artificial Sequence
  Synthetic
cuuaguuaaguucuuuua

SEQ ID NO: 251047 - RNA, 19 nt, Artificial Sequence
  Synthetic
gcuuaguuaaguucuuuua

SEQ ID NO: 251048 - RNA, 20 nt, Artificial Sequence
  Synthetic
agcuuaguuaaguucuuuua

SEQ ID NO: 251049 - RNA, 21 nt, Artificial Sequence
  Synthetic
cagcuuaguuaaguucuuuua

SEQ ID NO: 251050 - RNA, 22 nt, Artificial Sequence
  Synthetic
acagcuuaguuaaguucuuuua

SEQ ID NO: 251051 - RNA, 23 nt, Artificial Sequence
  Synthetic
aacagcuuaguuaaguucuuuua

SEQ ID NO: 251052 - RNA, 24 nt, Artificial Sequence
  Synthetic
uaacagcuuaguuaaguucuuuua

SEQ ID NO: 251053 - RNA, 18 nt, Artificial Sequence
  Synthetic
ggccaaauguuucuuuua

SEQ ID NO: 251054 - RNA, 19 nt, Artificial Sequence
  Synthetic
aggccaaauguuucuuuua

SEQ ID NO: 251055 - RNA, 20 nt, Artificial Sequence
  Synthetic
uaggccaaauguuucuuuua

SEQ ID NO: 251056 - RNA, 21 nt, Artificial Sequence
  Synthetic
uuaggccaaauguuucuuuua

SEQ ID NO: 251057 - RNA, 22 nt, Artificial Sequence
  Synthetic
uuuaggccaaauguuucuuuua

SEQ ID NO: 251058 - RNA, 23 nt, Artificial Sequence
  Synthetic
cuuuaggccaaauguuucuuuua

SEQ ID NO: 251059 - RNA, 24 nt, Artificial Sequence
  Synthetic
acuuuaggccaaauguuucuuuua

SEQ ID NO: 251060 - RNA, 18 nt, Artificial Sequence
  Synthetic
uguauuuuaaaaguuuua

SEQ ID NO: 251061 - RNA, 19 nt, Artificial Sequence
  Synthetic
cuguauuuuaaaaguuuua

SEQ ID NO: 251062 - RNA, 20 nt, Artificial Sequence
  Synthetic
acuguauuuuaaaaguuuua

SEQ ID NO: 251063 - RNA, 21 nt, Artificial Sequence
  Synthetic
aacuguauuuuaaaaguuuua

SEQ ID NO: 251064 - RNA, 22 nt, Artificial Sequence
  Synthetic
uaacuguauuuuaaaaguuuua

SEQ ID NO: 251065 - RNA, 23 nt, Artificial Sequence
  Synthetic
auaacuguauuuuaaaaguuuua

SEQ ID NO: 251066 - RNA, 24 nt, Artificial Sequence
  Synthetic
aauaacuguauuuuaaaaguuuua

SEQ ID NO: 251067 - RNA, 18 nt, Artificial Sequence
  Synthetic
auaaucugcacaguuuua

SEQ ID NO: 251068 - RNA, 19 nt, Artificial Sequence
  Synthetic
gauaaucugcacaguuuua

SEQ ID NO: 251069 - RNA, 20 nt, Artificial Sequence
  Synthetic
agauaaucugcacaguuuua

SEQ ID NO: 251070 - RNA, 21 nt, Artificial Sequence
  Synthetic
aagauaaucugcacaguuuua

SEQ ID NO: 251071 - RNA, 22 nt, Artificial Sequence
  Synthetic
uaagauaaucugcacaguuuua

SEQ ID NO: 251072 - RNA, 23 nt, Artificial Sequence
  Synthetic
uuaagauaaucugcacaguuuua

SEQ ID NO: 251073 - RNA, 24 nt, Artificial Sequence
  Synthetic
uuuaagauaaucugcacaguuuua

SEQ ID NO: 251074 - RNA, 18 nt, Artificial Sequence
  Synthetic
cugaaagcaucaguuuua

SEQ ID NO: 251075 - RNA, 19 nt, Artificial Sequence
  Synthetic
acugaaagcaucaguuuua

SEQ ID NO: 251076 - RNA, 20 nt, Artificial Sequence
  Synthetic
uacugaaagcaucaguuuua

SEQ ID NO: 251077 - RNA, 21 nt, Artificial Sequence
  Synthetic
uuacugaaagcaucaguuuua

SEQ ID NO: 251078 - RNA, 22 nt, Artificial Sequence
  Synthetic
uuuacugaaagcaucaguuuua

SEQ ID NO: 251079 - RNA, 23 nt, Artificial Sequence
  Synthetic
uuuuacugaaagcaucaguuuua

SEQ ID NO: 251080 - RNA, 24 nt, Artificial Sequence
  Synthetic
auuuuacugaaagcaucaguuuua

SEQ ID NO: 251081 - RNA, 18 nt, Artificial Sequence
  Synthetic
gaaaguuacucaguuuua

SEQ ID NO: 251082 - RNA, 19 nt, Artificial Sequence
  Synthetic
agaaaguuacucaguuuua

SEQ ID NO: 251083 - RNA, 20 nt, Artificial Sequence
  Synthetic
uagaaaguuacucaguuuua

SEQ ID NO: 251084 - RNA, 21 nt, Artificial Sequence
  Synthetic
guagaaaguuacucaguuuua

SEQ ID NO: 251085 - RNA, 22 nt, Artificial Sequence
  Synthetic
aguagaaaguuacucaguuuua

SEQ ID NO: 251086 - RNA, 23 nt, Artificial Sequence
  Synthetic
aaguagaaaguuacucaguuuua

SEQ ID NO: 251087 - RNA, 24 nt, Artificial Sequence
  Synthetic
gaaguagaaaguuacucaguuuua

SEQ ID NO: 251088 - RNA, 18 nt, Artificial Sequence
  Synthetic
aaccuagagagaguuuua

SEQ ID NO: 251089 - RNA, 19 nt, Artificial Sequence
  Synthetic
uaaccuagagagaguuuua

SEQ ID NO: 251090 - RNA, 20 nt, Artificial Sequence
  Synthetic
uuaaccuagagagaguuuua

SEQ ID NO: 251091 - RNA, 21 nt, Artificial Sequence
  Synthetic
auuaaccuagagagaguuuua

SEQ ID NO: 251092 - RNA, 22 nt, Artificial Sequence
  Synthetic
gauuaaccuagagagaguuuua

SEQ ID NO: 251093 - RNA, 23 nt, Artificial Sequence
  Synthetic
ugauuaaccuagagagaguuuua

SEQ ID NO: 251094 - RNA, 24 nt, Artificial Sequence
  Synthetic
gugauuaaccuagagagaguuuua

SEQ ID NO: 251095 - RNA, 18 nt, Artificial Sequence
  Synthetic
ucucugacuagaguuuua

SEQ ID NO: 251096 - RNA, 19 nt, Artificial Sequence
  Synthetic
uucucugacuagaguuuua

SEQ ID NO: 251097 - RNA, 20 nt, Artificial Sequence
  Synthetic
cuucucugacuagaguuuua

SEQ ID NO: 251098 - RNA, 21 nt, Artificial Sequence
  Synthetic
acuucucugacuagaguuuua

SEQ ID NO: 251099 - RNA, 22 nt, Artificial Sequence
  Synthetic
gacuucucugacuagaguuuua

SEQ ID NO: 251100 - RNA, 23 nt, Artificial Sequence
  Synthetic
agacuucucugacuagaguuuua

SEQ ID NO: 251101 - RNA, 24 nt, Artificial Sequence
  Synthetic
aagacuucucugacuagaguuuua

SEQ ID NO: 251102 - RNA, 18 nt, Artificial Sequence
  Synthetic
ucugucagaauaguuuua

SEQ ID NO: 251103 - RNA, 19 nt, Artificial Sequence
  Synthetic
uucugucagaauaguuuua

SEQ ID NO: 251104 - RNA, 20 nt, Artificial Sequence
  Synthetic
cuucugucagaauaguuuua

SEQ ID NO: 251105 - RNA, 21 nt, Artificial Sequence
  Synthetic
acuucugucagaauaguuuua

SEQ ID NO: 251106 - RNA, 22 nt, Artificial Sequence
  Synthetic
gacuucugucagaauaguuuua

SEQ ID NO: 251107 - RNA, 23 nt, Artificial Sequence
  Synthetic
ugacuucugucagaauaguuuua

SEQ ID NO: 251108 - RNA, 24 nt, Artificial Sequence
  Synthetic
gugacuucugucagaauaguuuua

SEQ ID NO: 251109 - RNA, 18 nt, Artificial Sequence
  Synthetic
uugcuuggaauaguuuua

SEQ ID NO: 251110 - RNA, 19 nt, Artificial Sequence
  Synthetic
auugcuuggaauaguuuua

SEQ ID NO: 251111 - RNA, 20 nt, Artificial Sequence
  Synthetic
uauugcuuggaauaguuuua

SEQ ID NO: 251112 - RNA, 21 nt, Artificial Sequence
  Synthetic
guauugcuuggaauaguuuua

SEQ ID NO: 251113 - RNA, 22 nt, Artificial Sequence
  Synthetic
uguauugcuuggaauaguuuua

SEQ ID NO: 251114 - RNA, 23 nt, Artificial Sequence
  Synthetic
uuguauugcuuggaauaguuuua

SEQ ID NO: 251115 - RNA, 24 nt, Artificial Sequence
  Synthetic
uuuguauugcuuggaauaguuuua

SEQ ID NO: 251116 - RNA, 18 nt, Artificial Sequence
  Synthetic
uaggcacagauaguuuua

SEQ ID NO: 251117 - RNA, 19 nt, Artificial Sequence
  Synthetic
guaggcacagauaguuuua

SEQ ID NO: 251118 - RNA, 20 nt, Artificial Sequence
  Synthetic
aguaggcacagauaguuuua

SEQ ID NO: 251119 - RNA, 21 nt, Artificial Sequence
  Synthetic
gaguaggcacagauaguuuua

SEQ ID NO: 251120 - RNA, 22 nt, Artificial Sequence
  Synthetic
ggaguaggcacagauaguuuua

SEQ ID NO: 251121 - RNA, 23 nt, Artificial Sequence
  Synthetic
aggaguaggcacagauaguuuua

SEQ ID NO: 251122 - RNA, 24 nt, Artificial Sequence
  Synthetic
aaggaguaggcacagauaguuuua

SEQ ID NO: 251123 - RNA, 18 nt, Artificial Sequence
  Synthetic
augauagugauaguuuua

SEQ ID NO: 251124 - RNA, 19 nt, Artificial Sequence
  Synthetic
aaugauagugauaguuuua

SEQ ID NO: 251125 - RNA, 20 nt, Artificial Sequence
  Synthetic
aaaugauagugauaguuuua

SEQ ID NO: 251126 - RNA, 21 nt, Artificial Sequence
  Synthetic
aaaaugauagugauaguuuua

SEQ ID NO: 251127 - RNA, 22 nt, Artificial Sequence
  Synthetic
aaaaaugauagugauaguuuua

SEQ ID NO: 251128 - RNA, 23 nt, Artificial Sequence
  Synthetic
uaaaaaugauagugauaguuuua

SEQ ID NO: 251129 - RNA, 24 nt, Artificial Sequence
  Synthetic
auaaaaaugauagugauaguuuua

SEQ ID NO: 251130 - RNA, 18 nt, Artificial Sequence
  Synthetic
ccaauauuacuaguuuua

SEQ ID NO: 251131 - RNA, 19 nt, Artificial Sequence
  Synthetic
accaauauuacuaguuuua

SEQ ID NO: 251132 - RNA, 20 nt, Artificial Sequence
  Synthetic
uaccaauauuacuaguuuua

SEQ ID NO: 251133 - RNA, 21 nt, Artificial Sequence
  Synthetic
uuaccaauauuacuaguuuua

SEQ ID NO: 251134 - RNA, 22 nt, Artificial Sequence
  Synthetic
uuuaccaauauuacuaguuuua

SEQ ID NO: 251135 - RNA, 23 nt, Artificial Sequence
  Synthetic
guuuaccaauauuacuaguuuua

SEQ ID NO: 251136 - RNA, 24 nt, Artificial Sequence
  Synthetic
uguuuaccaauauuacuaguuuua

SEQ ID NO: 251137 - RNA, 18 nt, Artificial Sequence
  Synthetic
gagcauauuuggguuuua

SEQ ID NO: 251138 - RNA, 19 nt, Artificial Sequence
  Synthetic
ugagcauauuuggguuuua

SEQ ID NO: 251139 - RNA, 20 nt, Artificial Sequence
  Synthetic
augagcauauuuggguuuua

SEQ ID NO: 251140 - RNA, 21 nt, Artificial Sequence
  Synthetic
caugagcauauuuggguuuua

SEQ ID NO: 251141 - RNA, 22 nt, Artificial Sequence
  Synthetic
acaugagcauauuuggguuuua

SEQ ID NO: 251142 - RNA, 23 nt, Artificial Sequence
  Synthetic
gacaugagcauauuuggguuuua

SEQ ID NO: 251143 - RNA, 24 nt, Artificial Sequence
  Synthetic
ugacaugagcauauuuggguuuua

SEQ ID NO: 251144 - RNA, 18 nt, Artificial Sequence
  Synthetic
aaaguacuaaugguuuua

SEQ ID NO: 251145 - RNA, 19 nt, Artificial Sequence
  Synthetic
gaaaguacuaaugguuuua

SEQ ID NO: 251146 - RNA, 20 nt, Artificial Sequence
  Synthetic
ggaaaguacuaaugguuuua

SEQ ID NO: 251147 - RNA, 21 nt, Artificial Sequence
  Synthetic
aggaaaguacuaaugguuuua

SEQ ID NO: 251148 - RNA, 22 nt, Artificial Sequence
  Synthetic
caggaaaguacuaaugguuuua

SEQ ID NO: 251149 - RNA, 23 nt, Artificial Sequence
  Synthetic
ucaggaaaguacuaaugguuuua

SEQ ID NO: 251150 - RNA, 24 nt, Artificial Sequence
  Synthetic
uucaggaaaguacuaaugguuuua

SEQ ID NO: 251151 - RNA, 18 nt, Artificial Sequence
  Synthetic
guaaacaaacauguuuua

SEQ ID NO: 251152 - RNA, 19 nt, Artificial Sequence
  Synthetic
uguaaacaaacauguuuua

SEQ ID NO: 251153 - RNA, 20 nt, Artificial Sequence
  Synthetic
uuguaaacaaacauguuuua

SEQ ID NO: 251154 - RNA, 21 nt, Artificial Sequence
  Synthetic
uuuguaaacaaacauguuuua

SEQ ID NO: 251155 - RNA, 22 nt, Artificial Sequence
  Synthetic
uuuuguaaacaaacauguuuua

SEQ ID NO: 251156 - RNA, 23 nt, Artificial Sequence
  Synthetic
auuuuguaaacaaacauguuuua

SEQ ID NO: 251157 - RNA, 24 nt, Artificial Sequence
  Synthetic
gauuuuguaaacaaacauguuuua

SEQ ID NO: 251158 - RNA, 18 nt, Artificial Sequence
  Synthetic
aaagaugguccuguuuua

SEQ ID NO: 251159 - RNA, 19 nt, Artificial Sequence
  Synthetic
caaagaugguccuguuuua

SEQ ID NO: 251160 - RNA, 20 nt, Artificial Sequence
  Synthetic
ucaaagaugguccuguuuua

SEQ ID NO: 251161 - RNA, 21 nt, Artificial Sequence
  Synthetic
cucaaagaugguccuguuuua

SEQ ID NO: 251162 - RNA, 22 nt, Artificial Sequence
  Synthetic
ucucaaagaugguccuguuuua

SEQ ID NO: 251163 - RNA, 23 nt, Artificial Sequence
  Synthetic
gucucaaagaugguccuguuuua

SEQ ID NO: 251164 - RNA, 24 nt, Artificial Sequence
  Synthetic
ggucucaaagaugguccuguuuua

SEQ ID NO: 251165 - RNA, 18 nt, Artificial Sequence
  Synthetic
ccgcaacaugcuguuuua

SEQ ID NO: 251166 - RNA, 19 nt, Artificial Sequence
  Synthetic
gccgcaacaugcuguuuua

SEQ ID NO: 251167 - RNA, 20 nt, Artificial Sequence
  Synthetic
ggccgcaacaugcuguuuua

SEQ ID NO: 251168 - RNA, 21 nt, Artificial Sequence
  Synthetic
cggccgcaacaugcuguuuua

SEQ ID NO: 251169 - RNA, 22 nt, Artificial Sequence
  Synthetic
ccggccgcaacaugcuguuuua

SEQ ID NO: 251170 - RNA, 23 nt, Artificial Sequence
  Synthetic
cccggccgcaacaugcuguuuua

SEQ ID NO: 251171 - RNA, 24 nt, Artificial Sequence
  Synthetic
acccggccgcaacaugcuguuuua

SEQ ID NO: 251172 - RNA, 18 nt, Artificial Sequence
  Synthetic
uuacuauaugguguuuua

SEQ ID NO: 251173 - RNA, 19 nt, Artificial Sequence
  Synthetic
uuuacuauaugguguuuua

SEQ ID NO: 251174 - RNA, 20 nt, Artificial Sequence
  Synthetic
auuuacuauaugguguuuua

SEQ ID NO: 251175 - RNA, 21 nt, Artificial Sequence
  Synthetic
uauuuacuauaugguguuuua

SEQ ID NO: 251176 - RNA, 22 nt, Artificial Sequence
  Synthetic
auauuuacuauaugguguuuua

SEQ ID NO: 251177 - RNA, 23 nt, Artificial Sequence
  Synthetic
aauauuuacuauaugguguuuua

SEQ ID NO: 251178 - RNA, 24 nt, Artificial Sequence
  Synthetic
aaauauuuacuauaugguguuuua

SEQ ID NO: 251179 - RNA, 18 nt, Artificial Sequence
  Synthetic
ccagcagccuguguuuua

SEQ ID NO: 251180 - RNA, 19 nt, Artificial Sequence
  Synthetic
cccagcagccuguguuuua

SEQ ID NO: 251181 - RNA, 20 nt, Artificial Sequence
  Synthetic
gcccagcagccuguguuuua

SEQ ID NO: 251182 - RNA, 21 nt, Artificial Sequence
  Synthetic
agcccagcagccuguguuuua

SEQ ID NO: 251183 - RNA, 22 nt, Artificial Sequence
  Synthetic
gagcccagcagccuguguuuua

SEQ ID NO: 251184 - RNA, 23 nt, Artificial Sequence
  Synthetic
ggagcccagcagccuguguuuua

SEQ ID NO: 251185 - RNA, 24 nt, Artificial Sequence
  Synthetic
uggagcccagcagccuguguuuua

SEQ ID NO: 251186 - RNA, 18 nt, Artificial Sequence
  Synthetic
aauuggaacuuuguuuua

SEQ ID NO: 251187 - RNA, 19 nt, Artificial Sequence
  Synthetic
aaauuggaacuuuguuuua

SEQ ID NO: 251188 - RNA, 20 nt, Artificial Sequence
  Synthetic
gaaauuggaacuuuguuuua

SEQ ID NO: 251189 - RNA, 21 nt, Artificial Sequence
  Synthetic
ugaaauuggaacuuuguuuua

SEQ ID NO: 251190 - RNA, 22 nt, Artificial Sequence
  Synthetic
cugaaauuggaacuuuguuuua

SEQ ID NO: 251191 - RNA, 23 nt, Artificial Sequence
  Synthetic
ucugaaauuggaacuuuguuuua

SEQ ID NO: 251192 - RNA, 24 nt, Artificial Sequence
  Synthetic
aucugaaauuggaacuuuguuuua

SEQ ID NO: 251193 - RNA, 18 nt, Artificial Sequence
  Synthetic
caauuccuuuuuguuuua

SEQ ID NO: 251194 - RNA, 19 nt, Artificial Sequence
  Synthetic
ccaauuccuuuuuguuuua

SEQ ID NO: 251195 - RNA, 20 nt, Artificial Sequence
  Synthetic
uccaauuccuuuuuguuuua

SEQ ID NO: 251196 - RNA, 21 nt, Artificial Sequence
  Synthetic
uuccaauuccuuuuuguuuua

SEQ ID NO: 251197 - RNA, 22 nt, Artificial Sequence
  Synthetic
uuuccaauuccuuuuuguuuua

SEQ ID NO: 251198 - RNA, 23 nt, Artificial Sequence
  Synthetic
cuuuccaauuccuuuuuguuuua

SEQ ID NO: 251199 - RNA, 24 nt, Artificial Sequence
  Synthetic
ucuuuccaauuccuuuuuguuuua

SEQ ID NO: 251200 - RNA, 18 nt, Artificial Sequence
  Synthetic
ucuuuguagcaauuuuua

SEQ ID NO: 251201 - RNA, 19 nt, Artificial Sequence
  Synthetic
cucuuuguagcaauuuuua

SEQ ID NO: 251202 - RNA, 20 nt, Artificial Sequence
  Synthetic
ucucuuuguagcaauuuuua

SEQ ID NO: 251203 - RNA, 21 nt, Artificial Sequence
  Synthetic
uucucuuuguagcaauuuuua

SEQ ID NO: 251204 - RNA, 22 nt, Artificial Sequence
  Synthetic
auucucuuuguagcaauuuuua

SEQ ID NO: 251205 - RNA, 23 nt, Artificial Sequence
  Synthetic
uauucucuuuguagcaauuuuua

SEQ ID NO: 251206 - RNA, 24 nt, Artificial Sequence
  Synthetic
uuauucucuuuguagcaauuuuua

SEQ ID NO: 251207 - RNA, 18 nt, Artificial Sequence
  Synthetic
uugggucaagaauuuuua

SEQ ID NO: 251208 - RNA, 19 nt, Artificial Sequence
  Synthetic
auugggucaagaauuuuua

SEQ ID NO: 251209 - RNA, 20 nt, Artificial Sequence
  Synthetic
uauugggucaagaauuuuua

SEQ ID NO: 251210 - RNA, 21 nt, Artificial Sequence
  Synthetic
uuauugggucaagaauuuuua

SEQ ID NO: 251211 - RNA, 22 nt, Artificial Sequence
  Synthetic
uuuauugggucaagaauuuuua

SEQ ID NO: 251212 - RNA, 23 nt, Artificial Sequence
  Synthetic
uuuuauugggucaagaauuuuua

SEQ ID NO: 251213 - RNA, 24 nt, Artificial Sequence
  Synthetic
auuuuauugggucaagaauuuuua

SEQ ID NO: 251214 - RNA, 18 nt, Artificial Sequence
  Synthetic
uaagaaugauaauuuuua

SEQ ID NO: 251215 - RNA, 19 nt, Artificial Sequence
  Synthetic
uuaagaaugauaauuuuua

SEQ ID NO: 251216 - RNA, 20 nt, Artificial Sequence
  Synthetic
auuaagaaugauaauuuuua

SEQ ID NO: 251217 - RNA, 21 nt, Artificial Sequence
  Synthetic
aauuaagaaugauaauuuuua

SEQ ID NO: 251218 - RNA, 22 nt, Artificial Sequence
  Synthetic
aaauuaagaaugauaauuuuua

SEQ ID NO: 251219 - RNA, 23 nt, Artificial Sequence
  Synthetic
gaaauuaagaaugauaauuuuua

SEQ ID NO: 251220 - RNA, 24 nt, Artificial Sequence
  Synthetic
agaaauuaagaaugauaauuuuua

SEQ ID NO: 251221 - RNA, 18 nt, Artificial Sequence
  Synthetic
uuaauguguccauuuuua

SEQ ID NO: 251222 - RNA, 19 nt, Artificial Sequence
  Synthetic
auuaauguguccauuuuua

SEQ ID NO: 251223 - RNA, 20 nt, Artificial Sequence
  Synthetic
cauuaauguguccauuuuua

SEQ ID NO: 251224 - RNA, 21 nt, Artificial Sequence
  Synthetic
ccauuaauguguccauuuuua

SEQ ID NO: 251225 - RNA, 22 nt, Artificial Sequence
  Synthetic
accauuaauguguccauuuuua

SEQ ID NO: 251226 - RNA, 23 nt, Artificial Sequence
  Synthetic
aaccauuaauguguccauuuuua

SEQ ID NO: 251227 - RNA, 24 nt, Artificial Sequence
  Synthetic
aaaccauuaauguguccauuuuua

SEQ ID NO: 251228 - RNA, 18 nt, Artificial Sequence
  Synthetic
augugcaauucauuuuua

SEQ ID NO: 251229 - RNA, 19 nt, Artificial Sequence
  Synthetic
aaugugcaauucauuuuua

SEQ ID NO: 251230 - RNA, 20 nt, Artificial Sequence
  Synthetic
caaugugcaauucauuuuua

SEQ ID NO: 251231 - RNA, 21 nt, Artificial Sequence
  Synthetic
gcaaugugcaauucauuuuua

SEQ ID NO: 251232 - RNA, 22 nt, Artificial Sequence
  Synthetic
ugcaaugugcaauucauuuuua

SEQ ID NO: 251233 - RNA, 23 nt, Artificial Sequence
  Synthetic
augcaaugugcaauucauuuuua

SEQ ID NO: 251234 - RNA, 24 nt, Artificial Sequence
  Synthetic
uaugcaaugugcaauucauuuuua

SEQ ID NO: 251235 - RNA, 18 nt, Artificial Sequence
  Synthetic
uuuuuuuguucauuuuua

SEQ ID NO: 251236 - RNA, 19 nt, Artificial Sequence
  Synthetic
cuuuuuuuguucauuuuua

SEQ ID NO: 251237 - RNA, 20 nt, Artificial Sequence
  Synthetic
ccuuuuuuuguucauuuuua

SEQ ID NO: 251238 - RNA, 21 nt, Artificial Sequence
  Synthetic
uccuuuuuuuguucauuuuua

SEQ ID NO: 251239 - RNA, 22 nt, Artificial Sequence
  Synthetic
uuccuuuuuuuguucauuuuua

SEQ ID NO: 251240 - RNA, 23 nt, Artificial Sequence
  Synthetic
cuuccuuuuuuuguucauuuuua

SEQ ID NO: 251241 - RNA, 24 nt, Artificial Sequence
  Synthetic
ucuuccuuuuuuuguucauuuuua

SEQ ID NO: 251242 - RNA, 18 nt, Artificial Sequence
  Synthetic
aacugcauuucauuuuua

SEQ ID NO: 251243 - RNA, 19 nt, Artificial Sequence
  Synthetic
aaacugcauuucauuuuua

SEQ ID NO: 251244 - RNA, 20 nt, Artificial Sequence
  Synthetic
caaacugcauuucauuuuua

SEQ ID NO: 251245 - RNA, 21 nt, Artificial Sequence
  Synthetic
gcaaacugcauuucauuuuua

SEQ ID NO: 251246 - RNA, 22 nt, Artificial Sequence
  Synthetic
ugcaaacugcauuucauuuuua

SEQ ID NO: 251247 - RNA, 23 nt, Artificial Sequence
  Synthetic
uugcaaacugcauuucauuuuua

SEQ ID NO: 251248 - RNA, 24 nt, Artificial Sequence
  Synthetic
auugcaaacugcauuucauuuuua

SEQ ID NO: 251249 - RNA, 18 nt, Artificial Sequence
  Synthetic
cucauuugaagauuuuua

SEQ ID NO: 251250 - RNA, 19 nt, Artificial Sequence
  Synthetic
gcucauuugaagauuuuua

SEQ ID NO: 251251 - RNA, 20 nt, Artificial Sequence
  Synthetic
agcucauuugaagauuuuua

SEQ ID NO: 251252 - RNA, 21 nt, Artificial Sequence
  Synthetic
cagcucauuugaagauuuuua

SEQ ID NO: 251253 - RNA, 22 nt, Artificial Sequence
  Synthetic
gcagcucauuugaagauuuuua

SEQ ID NO: 251254 - RNA, 23 nt, Artificial Sequence
  Synthetic
ugcagcucauuugaagauuuuua

SEQ ID NO: 251255 - RNA, 24 nt, Artificial Sequence
  Synthetic
uugcagcucauuugaagauuuuua

SEQ ID NO: 251256 - RNA, 18 nt, Artificial Sequence
  Synthetic
aaccuccuuagauuuuua

SEQ ID NO: 251257 - RNA, 19 nt, Artificial Sequence
  Synthetic
gaaccuccuuagauuuuua

SEQ ID NO: 251258 - RNA, 20 nt, Artificial Sequence
  Synthetic
ugaaccuccuuagauuuuua

SEQ ID NO: 251259 - RNA, 21 nt, Artificial Sequence
  Synthetic
gugaaccuccuuagauuuuua

SEQ ID NO: 251260 - RNA, 22 nt, Artificial Sequence
  Synthetic
ugugaaccuccuuagauuuuua

SEQ ID NO: 251261 - RNA, 23 nt, Artificial Sequence
  Synthetic
uugugaaccuccuuagauuuuua

SEQ ID NO: 251262 - RNA, 24 nt, Artificial Sequence
  Synthetic
guugugaaccuccuuagauuuuua

SEQ ID NO: 251263 - RNA, 18 nt, Artificial Sequence
  Synthetic
guagauuguugauuuuua

SEQ ID NO: 251264 - RNA, 19 nt, Artificial Sequence
  Synthetic
uguagauuguugauuuuua

SEQ ID NO: 251265 - RNA, 20 nt, Artificial Sequence
  Synthetic
auguagauuguugauuuuua

SEQ ID NO: 251266 - RNA, 21 nt, Artificial Sequence
  Synthetic
uauguagauuguugauuuuua

SEQ ID NO: 251267 - RNA, 22 nt, Artificial Sequence
  Synthetic
cuauguagauuguugauuuuua

SEQ ID NO: 251268 - RNA, 23 nt, Artificial Sequence
  Synthetic
gcuauguagauuguugauuuuua

SEQ ID NO: 251269 - RNA, 24 nt, Artificial Sequence
  Synthetic
ugcuauguagauuguugauuuuua

SEQ ID NO: 251270 - RNA, 18 nt, Artificial Sequence
  Synthetic
accggccuuugauuuuua

SEQ ID NO: 251271 - RNA, 19 nt, Artificial Sequence
  Synthetic
caccggccuuugauuuuua

SEQ ID NO: 251272 - RNA, 20 nt, Artificial Sequence
  Synthetic
acaccggccuuugauuuuua

SEQ ID NO: 251273 - RNA, 21 nt, Artificial Sequence
  Synthetic
aacaccggccuuugauuuuua

SEQ ID NO: 251274 - RNA, 22 nt, Artificial Sequence
  Synthetic
caacaccggccuuugauuuuua

SEQ ID NO: 251275 - RNA, 23 nt, Artificial Sequence
  Synthetic
ucaacaccggccuuugauuuuua

SEQ ID NO: 251276 - RNA, 24 nt, Artificial Sequence
  Synthetic
aucaacaccggccuuugauuuuua

SEQ ID NO: 251277 - RNA, 18 nt, Artificial Sequence
  Synthetic
aaagaagaaauauuuuua

SEQ ID NO: 251278 - RNA, 19 nt, Artificial Sequence
  Synthetic
gaaagaagaaauauuuuua

SEQ ID NO: 251279 - RNA, 20 nt, Artificial Sequence
  Synthetic
ggaaagaagaaauauuuuua

SEQ ID NO: 251280 - RNA, 21 nt, Artificial Sequence
  Synthetic
aggaaagaagaaauauuuuua

SEQ ID NO: 251281 - RNA, 22 nt, Artificial Sequence
  Synthetic
aaggaaagaagaaauauuuuua

SEQ ID NO: 251282 - RNA, 23 nt, Artificial Sequence
  Synthetic
aaaggaaagaagaaauauuuuua

SEQ ID NO: 251283 - RNA, 24 nt, Artificial Sequence
  Synthetic
aaaaggaaagaagaaauauuuuua

SEQ ID NO: 251284 - RNA, 18 nt, Artificial Sequence
  Synthetic
uaagcaaauguauuuuua

SEQ ID NO: 251285 - RNA, 19 nt, Artificial Sequence
  Synthetic
uuaagcaaauguauuuuua

SEQ ID NO: 251286 - RNA, 20 nt, Artificial Sequence
  Synthetic
uuuaagcaaauguauuuuua

SEQ ID NO: 251287 - RNA, 21 nt, Artificial Sequence
  Synthetic
uuuuaagcaaauguauuuuua

SEQ ID NO: 251288 - RNA, 22 nt, Artificial Sequence
  Synthetic
uuuuuaagcaaauguauuuuua

SEQ ID NO: 251289 - RNA, 23 nt, Artificial Sequence
  Synthetic
auuuuuaagcaaauguauuuuua

SEQ ID NO: 251290 - RNA, 24 nt, Artificial Sequence
  Synthetic
aauuuuuaagcaaauguauuuuua

SEQ ID NO: 251291 - RNA, 18 nt, Artificial Sequence
  Synthetic
auucuaaagcacuuuuua

SEQ ID NO: 251292 - RNA, 19 nt, Artificial Sequence
  Synthetic
aauucuaaagcacuuuuua

SEQ ID NO: 251293 - RNA, 20 nt, Artificial Sequence
  Synthetic
aaauucuaaagcacuuuuua

SEQ ID NO: 251294 - RNA, 21 nt, Artificial Sequence
  Synthetic
aaaauucuaaagcacuuuuua

SEQ ID NO: 251295 - RNA, 22 nt, Artificial Sequence
  Synthetic
gaaaauucuaaagcacuuuuua

SEQ ID NO: 251296 - RNA, 23 nt, Artificial Sequence
  Synthetic
agaaaauucuaaagcacuuuuua

SEQ ID NO: 251297 - RNA, 24 nt, Artificial Sequence
  Synthetic
aagaaaauucuaaagcacuuuuua

SEQ ID NO: 251298 - RNA, 18 nt, Artificial Sequence
  Synthetic
cuccuaauuaccuuuuua

SEQ ID NO: 251299 - RNA, 19 nt, Artificial Sequence
  Synthetic
ucuccuaauuaccuuuuua

SEQ ID NO: 251300 - RNA, 20 nt, Artificial Sequence
  Synthetic
gucuccuaauuaccuuuuua

SEQ ID NO: 251301 - RNA, 21 nt, Artificial Sequence
  Synthetic
agucuccuaauuaccuuuuua

SEQ ID NO: 251302 - RNA, 22 nt, Artificial Sequence
  Synthetic
aagucuccuaauuaccuuuuua

SEQ ID NO: 251303 - RNA, 23 nt, Artificial Sequence
  Synthetic
uaagucuccuaauuaccuuuuua

SEQ ID NO: 251304 - RNA, 24 nt, Artificial Sequence
  Synthetic
cuaagucuccuaauuaccuuuuua

SEQ ID NO: 251305 - RNA, 18 nt, Artificial Sequence
  Synthetic
gucaagggaagcuuuuua

SEQ ID NO: 251306 - RNA, 19 nt, Artificial Sequence
  Synthetic
agucaagggaagcuuuuua

SEQ ID NO: 251307 - RNA, 20 nt, Artificial Sequence
  Synthetic
uagucaagggaagcuuuuua

SEQ ID NO: 251308 - RNA, 21 nt, Artificial Sequence
  Synthetic
auagucaagggaagcuuuuua

SEQ ID NO: 251309 - RNA, 22 nt, Artificial Sequence
  Synthetic
aauagucaagggaagcuuuuua

SEQ ID NO: 251310 - RNA, 23 nt, Artificial Sequence
  Synthetic
gaauagucaagggaagcuuuuua

SEQ ID NO: 251311 - RNA, 24 nt, Artificial Sequence
  Synthetic
ggaauagucaagggaagcuuuuua

SEQ ID NO: 251312 - RNA, 18 nt, Artificial Sequence
  Synthetic
accaggcaaggcuuuuua

SEQ ID NO: 251313 - RNA, 19 nt, Artificial Sequence
  Synthetic
gaccaggcaaggcuuuuua

SEQ ID NO: 251314 - RNA, 20 nt, Artificial Sequence
  Synthetic
ggaccaggcaaggcuuuuua

SEQ ID NO: 251315 - RNA, 21 nt, Artificial Sequence
  Synthetic
aggaccaggcaaggcuuuuua

SEQ ID NO: 251316 - RNA, 22 nt, Artificial Sequence
  Synthetic
uaggaccaggcaaggcuuuuua

SEQ ID NO: 251317 - RNA, 23 nt, Artificial Sequence
  Synthetic
auaggaccaggcaaggcuuuuua

SEQ ID NO: 251318 - RNA, 24 nt, Artificial Sequence
  Synthetic
aauaggaccaggcaaggcuuuuua

SEQ ID NO: 251319 - RNA, 18 nt, Artificial Sequence
  Synthetic
cuuugcugaugcuuuuua

SEQ ID NO: 251320 - RNA, 19 nt, Artificial Sequence
  Synthetic
ccuuugcugaugcuuuuua

SEQ ID NO: 251321 - RNA, 20 nt, Artificial Sequence
  Synthetic
uccuuugcugaugcuuuuua

SEQ ID NO: 251322 - RNA, 21 nt, Artificial Sequence
  Synthetic
auccuuugcugaugcuuuuua

SEQ ID NO: 251323 - RNA, 22 nt, Artificial Sequence
  Synthetic
uauccuuugcugaugcuuuuua

SEQ ID NO: 251324 - RNA, 23 nt, Artificial Sequence
  Synthetic
auauccuuugcugaugcuuuuua

SEQ ID NO: 251325 - RNA, 24 nt, Artificial Sequence
  Synthetic
aauauccuuugcugaugcuuuuua

SEQ ID NO: 251326 - RNA, 18 nt, Artificial Sequence
  Synthetic
ucauuauguuucuuuuua

SEQ ID NO: 251327 - RNA, 19 nt, Artificial Sequence
  Synthetic
uucauuauguuucuuuuua

SEQ ID NO: 251328 - RNA, 20 nt, Artificial Sequence
  Synthetic
cuucauuauguuucuuuuua

SEQ ID NO: 251329 - RNA, 21 nt, Artificial Sequence
  Synthetic
ucuucauuauguuucuuuuua

SEQ ID NO: 251330 - RNA, 22 nt, Artificial Sequence
  Synthetic
gucuucauuauguuucuuuuua

SEQ ID NO: 251331 - RNA, 23 nt, Artificial Sequence
  Synthetic
ugucuucauuauguuucuuuuua

SEQ ID NO: 251332 - RNA, 24 nt, Artificial Sequence
  Synthetic
uugucuucauuauguuucuuuuua

SEQ ID NO: 251333 - RNA, 18 nt, Artificial Sequence
  Synthetic
uguuuucuuuucuuuuua

SEQ ID NO: 251334 - RNA, 19 nt, Artificial Sequence
  Synthetic
auguuuucuuuucuuuuua

SEQ ID NO: 251335 - RNA, 20 nt, Artificial Sequence
  Synthetic
cauguuuucuuuucuuuuua

SEQ ID NO: 251336 - RNA, 21 nt, Artificial Sequence
  Synthetic
ucauguuuucuuuucuuuuua

SEQ ID NO: 251337 - RNA, 22 nt, Artificial Sequence
  Synthetic
aucauguuuucuuuucuuuuua

SEQ ID NO: 251338 - RNA, 23 nt, Artificial Sequence
  Synthetic
aaucauguuuucuuuucuuuuua

SEQ ID NO: 251339 - RNA, 24 nt, Artificial Sequence
  Synthetic
aaaucauguuuucuuuucuuuuua

SEQ ID NO: 251340 - RNA, 18 nt, Artificial Sequence
  Synthetic
uucuguguuuucuuuuua

SEQ ID NO: 251341 - RNA, 19 nt, Artificial Sequence
  Synthetic
uuucuguguuuucuuuuua

SEQ ID NO: 251342 - RNA, 20 nt, Artificial Sequence
  Synthetic
uuuucuguguuuucuuuuua

SEQ ID NO: 251343 - RNA, 21 nt, Artificial Sequence
  Synthetic
guuuucuguguuuucuuuuua

SEQ ID NO: 251344 - RNA, 22 nt, Artificial Sequence
  Synthetic
aguuuucuguguuuucuuuuua

SEQ ID NO: 251345 - RNA, 23 nt, Artificial Sequence
  Synthetic
gaguuuucuguguuuucuuuuua

SEQ ID NO: 251346 - RNA, 24 nt, Artificial Sequence
  Synthetic
cgaguuuucuguguuuucuuuuua

SEQ ID NO: 251347 - RNA, 18 nt, Artificial Sequence
  Synthetic
gucuugugccaguuuuua

SEQ ID NO: 251348 - RNA, 19 nt, Artificial Sequence
  Synthetic
ugucuugugccaguuuuua

SEQ ID NO: 251349 - RNA, 20 nt, Artificial Sequence
  Synthetic
cugucuugugccaguuuuua

SEQ ID NO: 251350 - RNA, 21 nt, Artificial Sequence
  Synthetic
ccugucuugugccaguuuuua

SEQ ID NO: 251351 - RNA, 22 nt, Artificial Sequence
  Synthetic
cccugucuugugccaguuuuua

SEQ ID NO: 251352 - RNA, 23 nt, Artificial Sequence
  Synthetic
ucccugucuugugccaguuuuua

SEQ ID NO: 251353 - RNA, 24 nt, Artificial Sequence
  Synthetic
aucccugucuugugccaguuuuua

SEQ ID NO: 251354 - RNA, 18 nt, Artificial Sequence
  Synthetic
uauuuggccugguuuuua

SEQ ID NO: 251355 - RNA, 19 nt, Artificial Sequence
  Synthetic
guauuuggccugguuuuua

SEQ ID NO: 251356 - RNA, 20 nt, Artificial Sequence
  Synthetic
aguauuuggccugguuuuua

SEQ ID NO: 251357 - RNA, 21 nt, Artificial Sequence
  Synthetic
gaguauuuggccugguuuuua

SEQ ID NO: 251358 - RNA, 22 nt, Artificial Sequence
  Synthetic
agaguauuuggccugguuuuua

SEQ ID NO: 251359 - RNA, 23 nt, Artificial Sequence
  Synthetic
cagaguauuuggccugguuuuua

SEQ ID NO: 251360 - RNA, 24 nt, Artificial Sequence
  Synthetic
ccagaguauuuggccugguuuuua

SEQ ID NO: 251361 - RNA, 18 nt, Artificial Sequence
  Synthetic
aauaaacugcuguuuuua

SEQ ID NO: 251362 - RNA, 19 nt, Artificial Sequence
  Synthetic
gaauaaacugcuguuuuua

SEQ ID NO: 251363 - RNA, 20 nt, Artificial Sequence
  Synthetic
ugaauaaacugcuguuuuua

SEQ ID NO: 251364 - RNA, 21 nt, Artificial Sequence
  Synthetic
augaauaaacugcuguuuuua

SEQ ID NO: 251365 - RNA, 22 nt, Artificial Sequence
  Synthetic
caugaauaaacugcuguuuuua

SEQ ID NO: 251366 - RNA, 23 nt, Artificial Sequence
  Synthetic
acaugaauaaacugcuguuuuua

SEQ ID NO: 251367 - RNA, 24 nt, Artificial Sequence
  Synthetic
gacaugaauaaacugcuguuuuua

SEQ ID NO: 251368 - RNA, 18 nt, Artificial Sequence
  Synthetic
uucaaccuuguguuuuua

SEQ ID NO: 251369 - RNA, 19 nt, Artificial Sequence
  Synthetic
auucaaccuuguguuuuua

SEQ ID NO: 251370 - RNA, 20 nt, Artificial Sequence
  Synthetic
cauucaaccuuguguuuuua

SEQ ID NO: 251371 - RNA, 21 nt, Artificial Sequence
  Synthetic
ccauucaaccuuguguuuuua

SEQ ID NO: 251372 - RNA, 22 nt, Artificial Sequence
  Synthetic
cccauucaaccuuguguuuuua

SEQ ID NO: 251373 - RNA, 23 nt, Artificial Sequence
  Synthetic
ccccauucaaccuuguguuuuua

SEQ ID NO: 251374 - RNA, 24 nt, Artificial Sequence
  Synthetic
gccccauucaaccuuguguuuuua

SEQ ID NO: 251375 - RNA, 18 nt, Artificial Sequence
  Synthetic
augaaagucuuguuuuua

SEQ ID NO: 251376 - RNA, 19 nt, Artificial Sequence
  Synthetic
aaugaaagucuuguuuuua

SEQ ID NO: 251377 - RNA, 20 nt, Artificial Sequence
  Synthetic
gaaugaaagucuuguuuuua

SEQ ID NO: 251378 - RNA, 21 nt, Artificial Sequence
  Synthetic
agaaugaaagucuuguuuuua

SEQ ID NO: 251379 - RNA, 22 nt, Artificial Sequence
  Synthetic
uagaaugaaagucuuguuuuua

SEQ ID NO: 251380 - RNA, 23 nt, Artificial Sequence
  Synthetic
cuagaaugaaagucuuguuuuua

SEQ ID NO: 251381 - RNA, 24 nt, Artificial Sequence
  Synthetic
ucuagaaugaaagucuuguuuuua

SEQ ID NO: 251382 - RNA, 18 nt, Artificial Sequence
  Synthetic
ugaaauauacauuuuuua

SEQ ID NO: 251383 - RNA, 19 nt, Artificial Sequence
  Synthetic
cugaaauauacauuuuuua

SEQ ID NO: 251384 - RNA, 20 nt, Artificial Sequence
  Synthetic
acugaaauauacauuuuuua

SEQ ID NO: 251385 - RNA, 21 nt, Artificial Sequence
  Synthetic
gacugaaauauacauuuuuua

SEQ ID NO: 251386 - RNA, 22 nt, Artificial Sequence
  Synthetic
ugacugaaauauacauuuuuua

SEQ ID NO: 251387 - RNA, 23 nt, Artificial Sequence
  Synthetic
augacugaaauauacauuuuuua

SEQ ID NO: 251388 - RNA, 24 nt, Artificial Sequence
  Synthetic
aaugacugaaauauacauuuuuua

SEQ ID NO: 251389 - RNA, 18 nt, Artificial Sequence
  Synthetic
ucucauaaugauuuuuua

SEQ ID NO: 251390 - RNA, 19 nt, Artificial Sequence
  Synthetic
uucucauaaugauuuuuua

SEQ ID NO: 251391 - RNA, 20 nt, Artificial Sequence
  Synthetic
uuucucauaaugauuuuuua

SEQ ID NO: 251392 - RNA, 21 nt, Artificial Sequence
  Synthetic
cuuucucauaaugauuuuuua

SEQ ID NO: 251393 - RNA, 22 nt, Artificial Sequence
  Synthetic
acuuucucauaaugauuuuuua

SEQ ID NO: 251394 - RNA, 23 nt, Artificial Sequence
  Synthetic
aacuuucucauaaugauuuuuua

SEQ ID NO: 251395 - RNA, 24 nt, Artificial Sequence
  Synthetic
gaacuuucucauaaugauuuuuua

SEQ ID NO: 251396 - RNA, 18 nt, Artificial Sequence
  Synthetic
uauuggauuuauuuuuua

SEQ ID NO: 251397 - RNA, 19 nt, Artificial Sequence
  Synthetic
guauuggauuuauuuuuua

SEQ ID NO: 251398 - RNA, 20 nt, Artificial Sequence
  Synthetic
uguauuggauuuauuuuuua

SEQ ID NO: 251399 - RNA, 21 nt, Artificial Sequence
  Synthetic
uuguauuggauuuauuuuuua

SEQ ID NO: 251400 - RNA, 22 nt, Artificial Sequence
  Synthetic
guuguauuggauuuauuuuuua

SEQ ID NO: 251401 - RNA, 23 nt, Artificial Sequence
  Synthetic
uguuguauuggauuuauuuuuua

SEQ ID NO: 251402 - RNA, 24 nt, Artificial Sequence
  Synthetic
uuguuguauuggauuuauuuuuua

SEQ ID NO: 251403 - RNA, 18 nt, Artificial Sequence
  Synthetic
gguggauauucuuuuuua

SEQ ID NO: 251404 - RNA, 19 nt, Artificial Sequence
  Synthetic
ugguggauauucuuuuuua

SEQ ID NO: 251405 - RNA, 20 nt, Artificial Sequence
  Synthetic
augguggauauucuuuuuua

SEQ ID NO: 251406 - RNA, 21 nt, Artificial Sequence
  Synthetic
aaugguggauauucuuuuuua

SEQ ID NO: 251407 - RNA, 22 nt, Artificial Sequence
  Synthetic
gaaugguggauauucuuuuuua

SEQ ID NO: 251408 - RNA, 23 nt, Artificial Sequence
  Synthetic
agaaugguggauauucuuuuuua

SEQ ID NO: 251409 - RNA, 24 nt, Artificial Sequence
  Synthetic
aagaaugguggauauucuuuuuua

SEQ ID NO: 251410 - RNA, 18 nt, Artificial Sequence
  Synthetic
aauguagucaguuuuuua

SEQ ID NO: 251411 - RNA, 19 nt, Artificial Sequence
  Synthetic
uaauguagucaguuuuuua

SEQ ID NO: 251412 - RNA, 20 nt, Artificial Sequence
  Synthetic
guaauguagucaguuuuuua

SEQ ID NO: 251413 - RNA, 21 nt, Artificial Sequence
  Synthetic
gguaauguagucaguuuuuua

SEQ ID NO: 251414 - RNA, 22 nt, Artificial Sequence
  Synthetic
agguaauguagucaguuuuuua

SEQ ID NO: 251415 - RNA, 23 nt, Artificial Sequence
  Synthetic
aagguaauguagucaguuuuuua

SEQ ID NO: 251416 - RNA, 24 nt, Artificial Sequence
  Synthetic
gaagguaauguagucaguuuuuua

SEQ ID NO: 251417 - RNA, 18 nt, Artificial Sequence
  Synthetic
uuguguggauguuuuuua

SEQ ID NO: 251418 - RNA, 19 nt, Artificial Sequence
  Synthetic
uuuguguggauguuuuuua

SEQ ID NO: 251419 - RNA, 20 nt, Artificial Sequence
  Synthetic
uuuuguguggauguuuuuua

SEQ ID NO: 251420 - RNA, 21 nt, Artificial Sequence
  Synthetic
guuuuguguggauguuuuuua

SEQ ID NO: 251421 - RNA, 22 nt, Artificial Sequence
  Synthetic
uguuuuguguggauguuuuuua

SEQ ID NO: 251422 - RNA, 23 nt, Artificial Sequence
  Synthetic
guguuuuguguggauguuuuuua

SEQ ID NO: 251423 - RNA, 24 nt, Artificial Sequence
  Synthetic
cguguuuuguguggauguuuuuua

SEQ ID NO: 251424 - RNA, 18 nt, Artificial Sequence
  Synthetic
uguccucuuuguuuuuua

SEQ ID NO: 251425 - RNA, 19 nt, Artificial Sequence
  Synthetic
cuguccucuuuguuuuuua

SEQ ID NO: 251426 - RNA, 20 nt, Artificial Sequence
  Synthetic
ucuguccucuuuguuuuuua

SEQ ID NO: 251427 - RNA, 21 nt, Artificial Sequence
  Synthetic
cucuguccucuuuguuuuuua

SEQ ID NO: 251428 - RNA, 22 nt, Artificial Sequence
  Synthetic
acucuguccucuuuguuuuuua

SEQ ID NO: 251429 - RNA, 23 nt, Artificial Sequence
  Synthetic
gacucuguccucuuuguuuuuua

SEQ ID NO: 251430 - RNA, 24 nt, Artificial Sequence
  Synthetic
ggacucuguccucuuuguuuuuua

SEQ ID NO: 251431 - RNA, 18 nt, Artificial Sequence
  Synthetic
gccagucaaauuuuuuua

SEQ ID NO: 251432 - RNA, 19 nt, Artificial Sequence
  Synthetic
ugccagucaaauuuuuuua

SEQ ID NO: 251433 - RNA, 20 nt, Artificial Sequence
  Synthetic
augccagucaaauuuuuuua

SEQ ID NO: 251434 - RNA, 21 nt, Artificial Sequence
  Synthetic
gaugccagucaaauuuuuuua

SEQ ID NO: 251435 - RNA, 22 nt, Artificial Sequence
  Synthetic
ugaugccagucaaauuuuuuua

SEQ ID NO: 251436 - RNA, 23 nt, Artificial Sequence
  Synthetic
uugaugccagucaaauuuuuuua

SEQ ID NO: 251437 - RNA, 24 nt, Artificial Sequence
  Synthetic
uuugaugccagucaaauuuuuuua

SEQ ID NO: 251438 - RNA, 18 nt, Artificial Sequence
  Synthetic
cuuguuuuuauuuuuuua

SEQ ID NO: 251439 - RNA, 19 nt, Artificial Sequence
  Synthetic
acuuguuuuuauuuuuuua

SEQ ID NO: 251440 - RNA, 20 nt, Artificial Sequence
  Synthetic
cacuuguuuuuauuuuuuua

SEQ ID NO: 251441 - RNA, 21 nt, Artificial Sequence
  Synthetic
gcacuuguuuuuauuuuuuua

SEQ ID NO: 251442 - RNA, 22 nt, Artificial Sequence
  Synthetic
agcacuuguuuuuauuuuuuua

SEQ ID NO: 251443 - RNA, 23 nt, Artificial Sequence
  Synthetic
aagcacuuguuuuuauuuuuuua

SEQ ID NO: 251444 - RNA, 24 nt, Artificial Sequence
  Synthetic
gaagcacuuguuuuuauuuuuuua

SEQ ID NO: 251445 - RNA, 18 nt, Artificial Sequence
  Synthetic
uaaggacuccuuuuuuua

SEQ ID NO: 251446 - RNA, 19 nt, Artificial Sequence
  Synthetic
uuaaggacuccuuuuuuua

SEQ ID NO: 251447 - RNA, 20 nt, Artificial Sequence
  Synthetic
auuaaggacuccuuuuuuua

SEQ ID NO: 251448 - RNA, 21 nt, Artificial Sequence
  Synthetic
aauuaaggacuccuuuuuuua

SEQ ID NO: 251449 - RNA, 22 nt, Artificial Sequence
  Synthetic
aaauuaaggacuccuuuuuuua

SEQ ID NO: 251450 - RNA, 23 nt, Artificial Sequence
  Synthetic
aaaauuaaggacuccuuuuuuua

SEQ ID NO: 251451 - RNA, 24 nt, Artificial Sequence
  Synthetic
aaaaauuaaggacuccuuuuuuua

SEQ ID NO: 251452 - RNA, 18 nt, Artificial Sequence
  Synthetic
agcaauaggguuuuuuua

SEQ ID NO: 251453 - RNA, 19 nt, Artificial Sequence
  Synthetic
uagcaauaggguuuuuuua

SEQ ID NO: 251454 - RNA, 20 nt, Artificial Sequence
  Synthetic
auagcaauaggguuuuuuua

SEQ ID NO: 251455 - RNA, 21 nt, Artificial Sequence
  Synthetic
aauagcaauaggguuuuuuua

SEQ ID NO: 251456 - RNA, 22 nt, Artificial Sequence
  Synthetic
caauagcaauaggguuuuuuua

SEQ ID NO: 251457 - RNA, 23 nt, Artificial Sequence
  Synthetic
ccaauagcaauaggguuuuuuua

SEQ ID NO: 251458 - RNA, 24 nt, Artificial Sequence
  Synthetic
uccaauagcaauaggguuuuuuua

SEQ ID NO: 251459 - RNA, 18 nt, Artificial Sequence
  Synthetic
gauaagcuuuuuuuuuua

SEQ ID NO: 251460 - RNA, 19 nt, Artificial Sequence
  Synthetic
agauaagcuuuuuuuuuua

SEQ ID NO: 251461 - RNA, 20 nt, Artificial Sequence
  Synthetic
uagauaagcuuuuuuuuuua

SEQ ID NO: 251462 - RNA, 21 nt, Artificial Sequence
  Synthetic
uuagauaagcuuuuuuuuuua

SEQ ID NO: 251463 - RNA, 22 nt, Artificial Sequence
  Synthetic
uuuagauaagcuuuuuuuuuua

SEQ ID NO: 251464 - RNA, 23 nt, Artificial Sequence
  Synthetic
auuuagauaagcuuuuuuuuuua

SEQ ID NO: 251465 - RNA, 24 nt, Artificial Sequence
  Synthetic
aauuuagauaagcuuuuuuuuuua

SEQ ID NO: 251466 - RNA, 18 nt, Artificial Sequence
  Synthetic
ucuuuuuuuuuuuuuuua

SEQ ID NO: 251467 - RNA, 19 nt, Artificial Sequence
  Synthetic
uucuuuuuuuuuuuuuuua

SEQ ID NO: 251468 - RNA, 20 nt, Artificial Sequence
  Synthetic
auucuuuuuuuuuuuuuuua

SEQ ID NO: 251469 - RNA, 21 nt, Artificial Sequence
  Synthetic
cauucuuuuuuuuuuuuuuua

SEQ ID NO: 251470 - RNA, 22 nt, Artificial Sequence
  Synthetic
gcauucuuuuuuuuuuuuuuua

SEQ ID NO: 251471 - RNA, 23 nt, Artificial Sequence
  Synthetic
cgcauucuuuuuuuuuuuuuuua

SEQ ID NO: 251472 - RNA, 24 nt, Artificial Sequence
  Synthetic
ucgcauucuuuuuuuuuuuuuuua

SEQ ID NO: 251473 - RNA, 19 nt, Artificial Sequence
  Synthetic
uaaaaaaaaaaaaaaaaac

SEQ ID NO: 251474 - RNA, 20 nt, Artificial Sequence
  Synthetic
uuaaaaaaaaaaaaaaaaac

SEQ ID NO: 251475 - RNA, 21 nt, Artificial Sequence
  Synthetic
uuuaaaaaaaaaaaaaaaaac

SEQ ID NO: 251476 - RNA, 22 nt, Artificial Sequence
  Synthetic
guuuaaaaaaaaaaaaaaaaac

SEQ ID NO: 251477 - RNA, 23 nt, Artificial Sequence
  Synthetic
uguuuaaaaaaaaaaaaaaaaac

SEQ ID NO: 251478 - RNA, 24 nt, Artificial Sequence
  Synthetic
guguuuaaaaaaaaaaaaaaaaac

SEQ ID NO: 251479 - RNA, 18 nt, Artificial Sequence
  Synthetic
cauucucagaaaaaaaac

SEQ ID NO: 251480 - RNA, 19 nt, Artificial Sequence
  Synthetic
acauucucagaaaaaaaac

SEQ ID NO: 251481 - RNA, 20 nt, Artificial Sequence
  Synthetic
cacauucucagaaaaaaaac

SEQ ID NO: 251482 - RNA, 21 nt, Artificial Sequence
  Synthetic
ccacauucucagaaaaaaaac

SEQ ID NO: 251483 - RNA, 22 nt, Artificial Sequence
  Synthetic
accacauucucagaaaaaaaac

SEQ ID NO: 251484 - RNA, 23 nt, Artificial Sequence
  Synthetic
aaccacauucucagaaaaaaaac

SEQ ID NO: 251485 - RNA, 24 nt, Artificial Sequence
  Synthetic
uaaccacauucucagaaaaaaaac

SEQ ID NO: 251486 - RNA, 18 nt, Artificial Sequence
  Synthetic
uccugauggaaaaaaaac

SEQ ID NO: 251487 - RNA, 19 nt, Artificial Sequence
  Synthetic
auccugauggaaaaaaaac

SEQ ID NO: 251488 - RNA, 20 nt, Artificial Sequence
  Synthetic
cauccugauggaaaaaaaac

SEQ ID NO: 251489 - RNA, 21 nt, Artificial Sequence
  Synthetic
acauccugauggaaaaaaaac

SEQ ID NO: 251490 - RNA, 22 nt, Artificial Sequence
  Synthetic
aacauccugauggaaaaaaaac

SEQ ID NO: 251491 - RNA, 23 nt, Artificial Sequence
  Synthetic
aaacauccugauggaaaaaaaac

SEQ ID NO: 251492 - RNA, 24 nt, Artificial Sequence
  Synthetic
uaaacauccugauggaaaaaaaac

SEQ ID NO: 251493 - RNA, 18 nt, Artificial Sequence
  Synthetic
augacacuuaaaaaaaac

SEQ ID NO: 251494 - RNA, 19 nt, Artificial Sequence
  Synthetic
aaugacacuuaaaaaaaac

SEQ ID NO: 251495 - RNA, 20 nt, Artificial Sequence
  Synthetic
aaaugacacuuaaaaaaaac

SEQ ID NO: 251496 - RNA, 21 nt, Artificial Sequence
  Synthetic
caaaugacacuuaaaaaaaac

SEQ ID NO: 251497 - RNA, 22 nt, Artificial Sequence
  Synthetic
ucaaaugacacuuaaaaaaaac

SEQ ID NO: 251498 - RNA, 23 nt, Artificial Sequence
  Synthetic
uucaaaugacacuuaaaaaaaac

SEQ ID NO: 251499 - RNA, 24 nt, Artificial Sequence
  Synthetic
auucaaaugacacuuaaaaaaaac

SEQ ID NO: 251500 - RNA, 18 nt, Artificial Sequence
  Synthetic
ucacaaaauuaaaaaaac

SEQ ID NO: 251501 - RNA, 19 nt, Artificial Sequence
  Synthetic
uucacaaaauuaaaaaaac

SEQ ID NO: 251502 - RNA, 20 nt, Artificial Sequence
  Synthetic
uuucacaaaauuaaaaaaac

SEQ ID NO: 251503 - RNA, 21 nt, Artificial Sequence
  Synthetic
cuuucacaaaauuaaaaaaac

SEQ ID NO: 251504 - RNA, 22 nt, Artificial Sequence
  Synthetic
ucuuucacaaaauuaaaaaaac

SEQ ID NO: 251505 - RNA, 23 nt, Artificial Sequence
  Synthetic
uucuuucacaaaauuaaaaaaac

SEQ ID NO: 251506 - RNA, 24 nt, Artificial Sequence
  Synthetic
cuucuuucacaaaauuaaaaaaac

SEQ ID NO: 251507 - RNA, 18 nt, Artificial Sequence
  Synthetic
uaaaggugaucaaaaaac

SEQ ID NO: 251508 - RNA, 19 nt, Artificial Sequence
  Synthetic
uuaaaggugaucaaaaaac

SEQ ID NO: 251509 - RNA, 20 nt, Artificial Sequence
  Synthetic
guuaaaggugaucaaaaaac

SEQ ID NO: 251510 - RNA, 21 nt, Artificial Sequence
  Synthetic
uguuaaaggugaucaaaaaac

SEQ ID NO: 251511 - RNA, 22 nt, Artificial Sequence
  Synthetic
auguuaaaggugaucaaaaaac

SEQ ID NO: 251512 - RNA, 23 nt, Artificial Sequence
  Synthetic
uauguuaaaggugaucaaaaaac

SEQ ID NO: 251513 - RNA, 24 nt, Artificial Sequence
  Synthetic
cuauguuaaaggugaucaaaaaac

SEQ ID NO: 251514 - RNA, 18 nt, Artificial Sequence
  Synthetic
acuaccuuuugaaaaaac

SEQ ID NO: 251515 - RNA, 19 nt, Artificial Sequence
  Synthetic
uacuaccuuuugaaaaaac

SEQ ID NO: 251516 - RNA, 20 nt, Artificial Sequence
  Synthetic
guacuaccuuuugaaaaaac

SEQ ID NO: 251517 - RNA, 21 nt, Artificial Sequence
  Synthetic
aguacuaccuuuugaaaaaac

SEQ ID NO: 251518 - RNA, 22 nt, Artificial Sequence
  Synthetic
aaguacuaccuuuugaaaaaac

SEQ ID NO: 251519 - RNA, 23 nt, Artificial Sequence
  Synthetic
aaaguacuaccuuuugaaaaaac

SEQ ID NO: 251520 - RNA, 24 nt, Artificial Sequence
  Synthetic
uaaaguacuaccuuuugaaaaaac

SEQ ID NO: 251521 - RNA, 18 nt, Artificial Sequence
  Synthetic
aucuuuucaauaaaaaac

SEQ ID NO: 251522 - RNA, 19 nt, Artificial Sequence
  Synthetic
uaucuuuucaauaaaaaac

SEQ ID NO: 251523 - RNA, 20 nt, Artificial Sequence
  Synthetic
uuaucuuuucaauaaaaaac

SEQ ID NO: 251524 - RNA, 21 nt, Artificial Sequence
  Synthetic
uuuaucuuuucaauaaaaaac

SEQ ID NO: 251525 - RNA, 22 nt, Artificial Sequence
  Synthetic
guuuaucuuuucaauaaaaaac

SEQ ID NO: 251526 - RNA, 23 nt, Artificial Sequence
  Synthetic
uguuuaucuuuucaauaaaaaac

SEQ ID NO: 251527 - RNA, 24 nt, Artificial Sequence
  Synthetic
guguuuaucuuuucaauaaaaaac

SEQ ID NO: 251528 - RNA, 18 nt, Artificial Sequence
  Synthetic
auagcuagucuaaaaaac

SEQ ID NO: 251529 - RNA, 19 nt, Artificial Sequence
  Synthetic
cauagcuagucuaaaaaac

SEQ ID NO: 251530 - RNA, 20 nt, Artificial Sequence
  Synthetic
acauagcuagucuaaaaaac

SEQ ID NO: 251531 - RNA, 21 nt, Artificial Sequence
  Synthetic
aacauagcuagucuaaaaaac

SEQ ID NO: 251532 - RNA, 22 nt, Artificial Sequence
  Synthetic
aaacauagcuagucuaaaaaac

SEQ ID NO: 251533 - RNA, 23 nt, Artificial Sequence
  Synthetic
uaaacauagcuagucuaaaaaac

SEQ ID NO: 251534 - RNA, 24 nt, Artificial Sequence
  Synthetic
uuaaacauagcuagucuaaaaaac

SEQ ID NO: 251535 - RNA, 18 nt, Artificial Sequence
  Synthetic
acuuucagcuuaaaaaac

SEQ ID NO: 251536 - RNA, 19 nt, Artificial Sequence
  Synthetic
cacuuucagcuuaaaaaac

SEQ ID NO: 251537 - RNA, 20 nt, Artificial Sequence
  Synthetic
acacuuucagcuuaaaaaac

SEQ ID NO: 251538 - RNA, 21 nt, Artificial Sequence
  Synthetic
uacacuuucagcuuaaaaaac

SEQ ID NO: 251539 - RNA, 22 nt, Artificial Sequence
  Synthetic
cuacacuuucagcuuaaaaaac

SEQ ID NO: 251540 - RNA, 23 nt, Artificial Sequence
  Synthetic
ucuacacuuucagcuuaaaaaac

SEQ ID NO: 251541 - RNA, 24 nt, Artificial Sequence
  Synthetic
uucuacacuuucagcuuaaaaaac

SEQ ID NO: 251542 - RNA, 18 nt, Artificial Sequence
  Synthetic
ugaaacucuuuaaaaaac

SEQ ID NO: 251543 - RNA, 19 nt, Artificial Sequence
  Synthetic
uugaaacucuuuaaaaaac

SEQ ID NO: 251544 - RNA, 20 nt, Artificial Sequence
  Synthetic
auugaaacucuuuaaaaaac

SEQ ID NO: 251545 - RNA, 21 nt, Artificial Sequence
  Synthetic
uauugaaacucuuuaaaaaac

SEQ ID NO: 251546 - RNA, 22 nt, Artificial Sequence
  Synthetic
uuauugaaacucuuuaaaaaac

SEQ ID NO: 251547 - RNA, 23 nt, Artificial Sequence
  Synthetic
cuuauugaaacucuuuaaaaaac

SEQ ID NO: 251548 - RNA, 24 nt, Artificial Sequence
  Synthetic
acuuauugaaacucuuuaaaaaac

SEQ ID NO: 251549 - RNA, 18 nt, Artificial Sequence
  Synthetic
gguuuaauuuuaaaaaac

SEQ ID NO: 251550 - RNA, 19 nt, Artificial Sequence
  Synthetic
agguuuaauuuuaaaaaac

SEQ ID NO: 251551 - RNA, 20 nt, Artificial Sequence
  Synthetic
uagguuuaauuuuaaaaaac

SEQ ID NO: 251552 - RNA, 21 nt, Artificial Sequence
  Synthetic
cuagguuuaauuuuaaaaaac

SEQ ID NO: 251553 - RNA, 22 nt, Artificial Sequence
  Synthetic
ucuagguuuaauuuuaaaaaac

SEQ ID NO: 251554 - RNA, 23 nt, Artificial Sequence
  Synthetic
cucuagguuuaauuuuaaaaaac

SEQ ID NO: 251555 - RNA, 24 nt, Artificial Sequence
  Synthetic
ccucuagguuuaauuuuaaaaaac

SEQ ID NO: 251556 - RNA, 18 nt, Artificial Sequence
  Synthetic
uuuuucuaaaacaaaaac

SEQ ID NO: 251557 - RNA, 19 nt, Artificial Sequence
  Synthetic
uuuuuucuaaaacaaaaac

SEQ ID NO: 251558 - RNA, 20 nt, Artificial Sequence
  Synthetic
auuuuuucuaaaacaaaaac

SEQ ID NO: 251559 - RNA, 21 nt, Artificial Sequence
  Synthetic
aauuuuuucuaaaacaaaaac

SEQ ID NO: 251560 - RNA, 22 nt, Artificial Sequence
  Synthetic
uaauuuuuucuaaaacaaaaac

SEQ ID NO: 251561 - RNA, 23 nt, Artificial Sequence
  Synthetic
uuaauuuuuucuaaaacaaaaac

SEQ ID NO: 251562 - RNA, 24 nt, Artificial Sequence
  Synthetic
cuuaauuuuuucuaaaacaaaaac

SEQ ID NO: 251563 - RNA, 18 nt, Artificial Sequence
  Synthetic
gagacuagcaacaaaaac

SEQ ID NO: 251564 - RNA, 19 nt, Artificial Sequence
  Synthetic
agagacuagcaacaaaaac

SEQ ID NO: 251565 - RNA, 20 nt, Artificial Sequence
  Synthetic
aagagacuagcaacaaaaac

SEQ ID NO: 251566 - RNA, 21 nt, Artificial Sequence
  Synthetic
caagagacuagcaacaaaaac

SEQ ID NO: 251567 - RNA, 22 nt, Artificial Sequence
  Synthetic
gcaagagacuagcaacaaaaac

SEQ ID NO: 251568 - RNA, 23 nt, Artificial Sequence
  Synthetic
agcaagagacuagcaacaaaaac

SEQ ID NO: 251569 - RNA, 24 nt, Artificial Sequence
  Synthetic
uagcaagagacuagcaacaaaaac

SEQ ID NO: 251570 - RNA, 18 nt, Artificial Sequence
  Synthetic
uuuuauuugaacaaaaac

SEQ ID NO: 251571 - RNA, 19 nt, Artificial Sequence
  Synthetic
uuuuuauuugaacaaaaac

SEQ ID NO: 251572 - RNA, 20 nt, Artificial Sequence
  Synthetic
uuuuuuauuugaacaaaaac

SEQ ID NO: 251573 - RNA, 21 nt, Artificial Sequence
  Synthetic
guuuuuuauuugaacaaaaac

SEQ ID NO: 251574 - RNA, 22 nt, Artificial Sequence
  Synthetic
aguuuuuuauuugaacaaaaac

SEQ ID NO: 251575 - RNA, 23 nt, Artificial Sequence
  Synthetic
caguuuuuuauuugaacaaaaac

SEQ ID NO: 251576 - RNA, 24 nt, Artificial Sequence
  Synthetic
ucaguuuuuuauuugaacaaaaac

SEQ ID NO: 251577 - RNA, 18 nt, Artificial Sequence
  Synthetic
auaaauuuuuacaaaaac

SEQ ID NO: 251578 - RNA, 19 nt, Artificial Sequence
  Synthetic
cauaaauuuuuacaaaaac

SEQ ID NO: 251579 - RNA, 20 nt, Artificial Sequence
  Synthetic
ucauaaauuuuuacaaaaac

SEQ ID NO: 251580 - RNA, 21 nt, Artificial Sequence
  Synthetic
aucauaaauuuuuacaaaaac

SEQ ID NO: 251581 - RNA, 22 nt, Artificial Sequence
  Synthetic
caucauaaauuuuuacaaaaac

SEQ ID NO: 251582 - RNA, 23 nt, Artificial Sequence
  Synthetic
ucaucauaaauuuuuacaaaaac

SEQ ID NO: 251583 - RNA, 24 nt, Artificial Sequence
  Synthetic
aucaucauaaauuuuuacaaaaac

SEQ ID NO: 251584 - RNA, 18 nt, Artificial Sequence
  Synthetic
uaaaaacaaaccaaaaac

SEQ ID NO: 251585 - RNA, 19 nt, Artificial Sequence
  Synthetic
auaaaaacaaaccaaaaac

SEQ ID NO: 251586 - RNA, 20 nt, Artificial Sequence
  Synthetic
uauaaaaacaaaccaaaaac

SEQ ID NO: 251587 - RNA, 21 nt, Artificial Sequence
  Synthetic
cuauaaaaacaaaccaaaaac

SEQ ID NO: 251588 - RNA, 22 nt, Artificial Sequence
  Synthetic
acuauaaaaacaaaccaaaaac

SEQ ID NO: 251589 - RNA, 23 nt, Artificial Sequence
  Synthetic
uacuauaaaaacaaaccaaaaac

SEQ ID NO: 251590 - RNA, 24 nt, Artificial Sequence
  Synthetic
cuacuauaaaaacaaaccaaaaac

SEQ ID NO: 251591 - RNA, 18 nt, Artificial Sequence
  Synthetic
uucauuauagccaaaaac

SEQ ID NO: 251592 - RNA, 19 nt, Artificial Sequence
  Synthetic
auucauuauagccaaaaac

SEQ ID NO: 251593 - RNA, 20 nt, Artificial Sequence
  Synthetic
uauucauuauagccaaaaac

SEQ ID NO: 251594 - RNA, 21 nt, Artificial Sequence
  Synthetic
uuauucauuauagccaaaaac

SEQ ID NO: 251595 - RNA, 22 nt, Artificial Sequence
  Synthetic
auuauucauuauagccaaaaac

SEQ ID NO: 251596 - RNA, 23 nt, Artificial Sequence
  Synthetic
cauuauucauuauagccaaaaac

SEQ ID NO: 251597 - RNA, 24 nt, Artificial Sequence
  Synthetic
ccauuauucauuauagccaaaaac

SEQ ID NO: 251598 - RNA, 18 nt, Artificial Sequence
  Synthetic
caucccugauccaaaaac

SEQ ID NO: 251599 - RNA, 19 nt, Artificial Sequence
  Synthetic
acaucccugauccaaaaac

SEQ ID NO: 251600 - RNA, 20 nt, Artificial Sequence
  Synthetic
aacaucccugauccaaaaac

SEQ ID NO: 251601 - RNA, 21 nt, Artificial Sequence
  Synthetic
gaacaucccugauccaaaaac

SEQ ID NO: 251602 - RNA, 22 nt, Artificial Sequence
  Synthetic
ugaacaucccugauccaaaaac

SEQ ID NO: 251603 - RNA, 23 nt, Artificial Sequence
  Synthetic
uugaacaucccugauccaaaaac

SEQ ID NO: 251604 - RNA, 24 nt, Artificial Sequence
  Synthetic
guugaacaucccugauccaaaaac

SEQ ID NO: 251605 - RNA, 18 nt, Artificial Sequence
  Synthetic
ucuuguuucuccaaaaac

SEQ ID NO: 251606 - RNA, 19 nt, Artificial Sequence
  Synthetic
cucuuguuucuccaaaaac

SEQ ID NO: 251607 - RNA, 20 nt, Artificial Sequence
  Synthetic
acucuuguuucuccaaaaac

SEQ ID NO: 251608 - RNA, 21 nt, Artificial Sequence
  Synthetic
cacucuuguuucuccaaaaac

SEQ ID NO: 251609 - RNA, 22 nt, Artificial Sequence
  Synthetic
gcacucuuguuucuccaaaaac

SEQ ID NO: 251610 - RNA, 23 nt, Artificial Sequence
  Synthetic
ggcacucuuguuucuccaaaaac

SEQ ID NO: 251611 - RNA, 24 nt, Artificial Sequence
  Synthetic
aggcacucuuguuucuccaaaaac

SEQ ID NO: 251612 - RNA, 18 nt, Artificial Sequence
  Synthetic
ccugaaaauuccaaaaac

SEQ ID NO: 251613 - RNA, 19 nt, Artificial Sequence
  Synthetic
gccugaaaauuccaaaaac

SEQ ID NO: 251614 - RNA, 20 nt, Artificial Sequence
  Synthetic
agccugaaaauuccaaaaac

SEQ ID NO: 251615 - RNA, 21 nt, Artificial Sequence
  Synthetic
aagccugaaaauuccaaaaac

SEQ ID NO: 251616 - RNA, 22 nt, Artificial Sequence
  Synthetic
aaagccugaaaauuccaaaaac

SEQ ID NO: 251617 - RNA, 23 nt, Artificial Sequence
  Synthetic
aaaagccugaaaauuccaaaaac

SEQ ID NO: 251618 - RNA, 24 nt, Artificial Sequence
  Synthetic
aaaaagccugaaaauuccaaaaac

SEQ ID NO: 251619 - RNA, 18 nt, Artificial Sequence
  Synthetic
uacugaaugggcaaaaac

SEQ ID NO: 251620 - RNA, 19 nt, Artificial Sequence
  Synthetic
auacugaaugggcaaaaac

SEQ ID NO: 251621 - RNA, 20 nt, Artificial Sequence
  Synthetic
cauacugaaugggcaaaaac

SEQ ID NO: 251622 - RNA, 18 nt, Artificial Sequence
  Synthetic
gagugagccaagaaaaac

SEQ ID NO: 251623 - RNA, 19 nt, Artificial Sequence
  Synthetic
ggagugagccaagaaaaac

SEQ ID NO: 251624 - RNA, 20 nt, Artificial Sequence
  Synthetic
aggagugagccaagaaaaac

SEQ ID NO: 251625 - RNA, 21 nt, Artificial Sequence
  Synthetic
gaggagugagccaagaaaaac

SEQ ID NO: 251626 - RNA, 22 nt, Artificial Sequence
  Synthetic
agaggagugagccaagaaaaac

SEQ ID NO: 251627 - RNA, 23 nt, Artificial Sequence
  Synthetic
gagaggagugagccaagaaaaac

SEQ ID NO: 251628 - RNA, 24 nt, Artificial Sequence
  Synthetic
ggagaggagugagccaagaaaaac

SEQ ID NO: 251629 - RNA, 18 nt, Artificial Sequence
  Synthetic
cagauucacaugaaaaac

SEQ ID NO: 251630 - RNA, 19 nt, Artificial Sequence
  Synthetic
acagauucacaugaaaaac

SEQ ID NO: 251631 - RNA, 20 nt, Artificial Sequence
  Synthetic
uacagauucacaugaaaaac

SEQ ID NO: 251632 - RNA, 21 nt, Artificial Sequence
  Synthetic
uuacagauucacaugaaaaac

SEQ ID NO: 251633 - RNA, 22 nt, Artificial Sequence
  Synthetic
cuuacagauucacaugaaaaac

SEQ ID NO: 251634 - RNA, 23 nt, Artificial Sequence
  Synthetic
ucuuacagauucacaugaaaaac

SEQ ID NO: 251635 - RNA, 24 nt, Artificial Sequence
  Synthetic
cucuuacagauucacaugaaaaac

SEQ ID NO: 251636 - RNA, 18 nt, Artificial Sequence
  Synthetic
gcuuacaaaaauaaaaac

SEQ ID NO: 251637 - RNA, 19 nt, Artificial Sequence
  Synthetic
agcuuacaaaaauaaaaac

SEQ ID NO: 251638 - RNA, 20 nt, Artificial Sequence
  Synthetic
aagcuuacaaaaauaaaaac

SEQ ID NO: 251639 - RNA, 21 nt, Artificial Sequence
  Synthetic
caagcuuacaaaaauaaaaac

SEQ ID NO: 251640 - RNA, 22 nt, Artificial Sequence
  Synthetic
acaagcuuacaaaaauaaaaac

SEQ ID NO: 251641 - RNA, 23 nt, Artificial Sequence
  Synthetic
gacaagcuuacaaaaauaaaaac

SEQ ID NO: 251642 - RNA, 24 nt, Artificial Sequence
  Synthetic
ugacaagcuuacaaaaauaaaaac

SEQ ID NO: 251643 - RNA, 18 nt, Artificial Sequence
  Synthetic
uaugcacaauauaaaaac

SEQ ID NO: 251644 - RNA, 19 nt, Artificial Sequence
  Synthetic
cuaugcacaauauaaaaac

SEQ ID NO: 251645 - RNA, 20 nt, Artificial Sequence
  Synthetic
gcuaugcacaauauaaaaac

SEQ ID NO: 251646 - RNA, 21 nt, Artificial Sequence
  Synthetic
agcuaugcacaauauaaaaac

SEQ ID NO: 251647 - RNA, 22 nt, Artificial Sequence
  Synthetic
uagcuaugcacaauauaaaaac

SEQ ID NO: 251648 - RNA, 23 nt, Artificial Sequence
  Synthetic
auagcuaugcacaauauaaaaac

SEQ ID NO: 251649 - RNA, 24 nt, Artificial Sequence
  Synthetic
cauagcuaugcacaauauaaaaac

SEQ ID NO: 251650 - RNA, 18 nt, Artificial Sequence
  Synthetic
gucuugccaauuaaaaac

SEQ ID NO: 251651 - RNA, 19 nt, Artificial Sequence
  Synthetic
ggucuugccaauuaaaaac

SEQ ID NO: 251652 - RNA, 20 nt, Artificial Sequence
  Synthetic
aggucuugccaauuaaaaac

SEQ ID NO: 251653 - RNA, 21 nt, Artificial Sequence
  Synthetic
aaggucuugccaauuaaaaac

SEQ ID NO: 251654 - RNA, 22 nt, Artificial Sequence
  Synthetic
gaaggucuugccaauuaaaaac

SEQ ID NO: 251655 - RNA, 23 nt, Artificial Sequence
  Synthetic
ggaaggucuugccaauuaaaaac

SEQ ID NO: 251656 - RNA, 24 nt, Artificial Sequence
  Synthetic
gggaaggucuugccaauuaaaaac

SEQ ID NO: 251657 - RNA, 18 nt, Artificial Sequence
  Synthetic
uucuccaauauuaaaaac

SEQ ID NO: 251658 - RNA, 19 nt, Artificial Sequence
  Synthetic
guucuccaauauuaaaaac

SEQ ID NO: 251659 - RNA, 20 nt, Artificial Sequence
  Synthetic
uguucuccaauauuaaaaac

SEQ ID NO: 251660 - RNA, 21 nt, Artificial Sequence
  Synthetic
uuguucuccaauauuaaaaac

SEQ ID NO: 251661 - RNA, 22 nt, Artificial Sequence
  Synthetic
auuguucuccaauauuaaaaac

SEQ ID NO: 251662 - RNA, 23 nt, Artificial Sequence
  Synthetic
aauuguucuccaauauuaaaaac

SEQ ID NO: 251663 - RNA, 24 nt, Artificial Sequence
  Synthetic
uaauuguucuccaauauuaaaaac

SEQ ID NO: 251664 - RNA, 18 nt, Artificial Sequence
  Synthetic
uuggaagggguuaaaaac

SEQ ID NO: 251665 - RNA, 19 nt, Artificial Sequence
  Synthetic
guuggaagggguuaaaaac

SEQ ID NO: 251666 - RNA, 20 nt, Artificial Sequence
  Synthetic
gguuggaagggguuaaaaac

SEQ ID NO: 251667 - RNA, 21 nt, Artificial Sequence
  Synthetic
agguuggaagggguuaaaaac

SEQ ID NO: 251668 - RNA, 22 nt, Artificial Sequence
  Synthetic
gagguuggaagggguuaaaaac

SEQ ID NO: 251669 - RNA, 23 nt, Artificial Sequence
  Synthetic
agagguuggaagggguuaaaaac

SEQ ID NO: 251670 - RNA, 24 nt, Artificial Sequence
  Synthetic
aagagguuggaagggguuaaaaac

SEQ ID NO: 251671 - RNA, 18 nt, Artificial Sequence
  Synthetic
gacuucuauuuuaaaaac

SEQ ID NO: 251672 - RNA, 19 nt, Artificial Sequence
  Synthetic
agacuucuauuuuaaaaac

SEQ ID NO: 251673 - RNA, 20 nt, Artificial Sequence
  Synthetic
cagacuucuauuuuaaaaac

SEQ ID NO: 251674 - RNA, 21 nt, Artificial Sequence
  Synthetic
ucagacuucuauuuuaaaaac

SEQ ID NO: 251675 - RNA, 22 nt, Artificial Sequence
  Synthetic
cucagacuucuauuuuaaaaac

SEQ ID NO: 251676 - RNA, 23 nt, Artificial Sequence
  Synthetic
gcucagacuucuauuuuaaaaac

SEQ ID NO: 251677 - RNA, 24 nt, Artificial Sequence
  Synthetic
ggcucagacuucuauuuuaaaaac

SEQ ID NO: 251678 - RNA, 18 nt, Artificial Sequence
  Synthetic
auugaccucaaacaaaac

SEQ ID NO: 251679 - RNA, 19 nt, Artificial Sequence
  Synthetic
aauugaccucaaacaaaac

SEQ ID NO: 251680 - RNA, 20 nt, Artificial Sequence
  Synthetic
gaauugaccucaaacaaaac

SEQ ID NO: 251681 - RNA, 21 nt, Artificial Sequence
  Synthetic
ugaauugaccucaaacaaaac

SEQ ID NO: 251682 - RNA, 22 nt, Artificial Sequence
  Synthetic
gugaauugaccucaaacaaaac

SEQ ID NO: 251683 - RNA, 23 nt, Artificial Sequence
  Synthetic
agugaauugaccucaaacaaaac

SEQ ID NO: 251684 - RNA, 24 nt, Artificial Sequence
  Synthetic
cagugaauugaccucaaacaaaac

SEQ ID NO: 251685 - RNA, 18 nt, Artificial Sequence
  Synthetic
aaggccaacacacaaaac

SEQ ID NO: 251686 - RNA, 19 nt, Artificial Sequence
  Synthetic
aaaggccaacacacaaaac

SEQ ID NO: 251687 - RNA, 20 nt, Artificial Sequence
  Synthetic
uaaaggccaacacacaaaac

SEQ ID NO: 251688 - RNA, 21 nt, Artificial Sequence
  Synthetic
auaaaggccaacacacaaaac

SEQ ID NO: 251689 - RNA, 22 nt, Artificial Sequence
  Synthetic
aauaaaggccaacacacaaaac

SEQ ID NO: 251690 - RNA, 23 nt, Artificial Sequence
  Synthetic
aaauaaaggccaacacacaaaac

SEQ ID NO: 251691 - RNA, 24 nt, Artificial Sequence
  Synthetic
caaauaaaggccaacacacaaaac

SEQ ID NO: 251692 - RNA, 18 nt, Artificial Sequence
  Synthetic
ccuacauccucacaaaac

SEQ ID NO: 251693 - RNA, 19 nt, Artificial Sequence
  Synthetic
uccuacauccucacaaaac

SEQ ID NO: 251694 - RNA, 20 nt, Artificial Sequence
  Synthetic
auccuacauccucacaaaac

SEQ ID NO: 251695 - RNA, 21 nt, Artificial Sequence
  Synthetic
aauccuacauccucacaaaac

SEQ ID NO: 251696 - RNA, 22 nt, Artificial Sequence
  Synthetic
uaauccuacauccucacaaaac

SEQ ID NO: 251697 - RNA, 23 nt, Artificial Sequence
  Synthetic
uuaauccuacauccucacaaaac

SEQ ID NO: 251698 - RNA, 24 nt, Artificial Sequence
  Synthetic
uuuaauccuacauccucacaaaac

SEQ ID NO: 251699 - RNA, 18 nt, Artificial Sequence
  Synthetic
guuuacagaugacaaaac

SEQ ID NO: 251700 - RNA, 19 nt, Artificial Sequence
  Synthetic
aguuuacagaugacaaaac

SEQ ID NO: 251701 - RNA, 20 nt, Artificial Sequence
  Synthetic
uaguuuacagaugacaaaac

SEQ ID NO: 251702 - RNA, 21 nt, Artificial Sequence
  Synthetic
cuaguuuacagaugacaaaac

SEQ ID NO: 251703 - RNA, 22 nt, Artificial Sequence
  Synthetic
ccuaguuuacagaugacaaaac

SEQ ID NO: 251704 - RNA, 23 nt, Artificial Sequence
  Synthetic
uccuaguuuacagaugacaaaac

SEQ ID NO: 251705 - RNA, 24 nt, Artificial Sequence
  Synthetic
auccuaguuuacagaugacaaaac

SEQ ID NO: 251706 - RNA, 18 nt, Artificial Sequence
  Synthetic
auguuuuauuaccaaaac

SEQ ID NO: 251707 - RNA, 19 nt, Artificial Sequence
  Synthetic
uauguuuuauuaccaaaac

SEQ ID NO: 251708 - RNA, 20 nt, Artificial Sequence
  Synthetic
cuauguuuuauuaccaaaac

SEQ ID NO: 251709 - RNA, 21 nt, Artificial Sequence
  Synthetic
ccuauguuuuauuaccaaaac

SEQ ID NO: 251710 - RNA, 22 nt, Artificial Sequence
  Synthetic
cccuauguuuuauuaccaaaac

SEQ ID NO: 251711 - RNA, 23 nt, Artificial Sequence
  Synthetic
ucccuauguuuuauuaccaaaac

SEQ ID NO: 251712 - RNA, 24 nt, Artificial Sequence
  Synthetic
uucccuauguuuuauuaccaaaac

SEQ ID NO: 251713 - RNA, 18 nt, Artificial Sequence
  Synthetic
acuuuuauuacccaaaac

SEQ ID NO: 251714 - RNA, 19 nt, Artificial Sequence
  Synthetic
aacuuuuauuacccaaaac

SEQ ID NO: 251715 - RNA, 20 nt, Artificial Sequence
  Synthetic
gaacuuuuauuacccaaaac

SEQ ID NO: 251716 - RNA, 21 nt, Artificial Sequence
  Synthetic
ggaacuuuuauuacccaaaac

SEQ ID NO: 251717 - RNA, 22 nt, Artificial Sequence
  Synthetic
uggaacuuuuauuacccaaaac

SEQ ID NO: 251718 - RNA, 23 nt, Artificial Sequence
  Synthetic
guggaacuuuuauuacccaaaac

SEQ ID NO: 251719 - RNA, 24 nt, Artificial Sequence
  Synthetic
gguggaacuuuuauuacccaaaac

SEQ ID NO: 251720 - RNA, 18 nt, Artificial Sequence
  Synthetic
guaggaaggcuccaaaac

SEQ ID NO: 251721 - RNA, 19 nt, Artificial Sequence
  Synthetic
gguaggaaggcuccaaaac

SEQ ID NO: 251722 - RNA, 20 nt, Artificial Sequence
  Synthetic
ugguaggaaggcuccaaaac

SEQ ID NO: 251723 - RNA, 21 nt, Artificial Sequence
  Synthetic
augguaggaaggcuccaaaac

SEQ ID NO: 251724 - RNA, 22 nt, Artificial Sequence
  Synthetic
caugguaggaaggcuccaaaac

SEQ ID NO: 251725 - RNA, 23 nt, Artificial Sequence
  Synthetic
acaugguaggaaggcuccaaaac

SEQ ID NO: 251726 - RNA, 24 nt, Artificial Sequence
  Synthetic
cacaugguaggaaggcuccaaaac

SEQ ID NO: 251727 - RNA, 18 nt, Artificial Sequence
  Synthetic
augcaaauauuccaaaac

SEQ ID NO: 251728 - RNA, 19 nt, Artificial Sequence
  Synthetic
aaugcaaauauuccaaaac

SEQ ID NO: 251729 - RNA, 20 nt, Artificial Sequence
  Synthetic
uaaugcaaauauuccaaaac

SEQ ID NO: 251730 - RNA, 21 nt, Artificial Sequence
  Synthetic
guaaugcaaauauuccaaaac

SEQ ID NO: 251731 - RNA, 22 nt, Artificial Sequence
  Synthetic
gguaaugcaaauauuccaaaac

SEQ ID NO: 251732 - RNA, 23 nt, Artificial Sequence
  Synthetic
ggguaaugcaaauauuccaaaac

SEQ ID NO: 251733 - RNA, 24 nt, Artificial Sequence
  Synthetic
aggguaaugcaaauauuccaaaac

SEQ ID NO: 251734 - RNA, 18 nt, Artificial Sequence
  Synthetic
aagaaccuuuagcaaaac

SEQ ID NO: 251735 - RNA, 19 nt, Artificial Sequence
  Synthetic
aaagaaccuuuagcaaaac

SEQ ID NO: 251736 - RNA, 20 nt, Artificial Sequence
  Synthetic
uaaagaaccuuuagcaaaac

SEQ ID NO: 251737 - RNA, 21 nt, Artificial Sequence
  Synthetic
auaaagaaccuuuagcaaaac

SEQ ID NO: 251738 - RNA, 22 nt, Artificial Sequence
  Synthetic
uauaaagaaccuuuagcaaaac

SEQ ID NO: 251739 - RNA, 23 nt, Artificial Sequence
  Synthetic
auauaaagaaccuuuagcaaaac

SEQ ID NO: 251740 - RNA, 24 nt, Artificial Sequence
  Synthetic
cauauaaagaaccuuuagcaaaac

SEQ ID NO: 251741 - RNA, 18 nt, Artificial Sequence
  Synthetic
gcauuaagaaggcaaaac

SEQ ID NO: 251742 - RNA, 19 nt, Artificial Sequence
  Synthetic
agcauuaagaaggcaaaac

SEQ ID NO: 251743 - RNA, 20 nt, Artificial Sequence
  Synthetic
aagcauuaagaaggcaaaac

SEQ ID NO: 251744 - RNA, 21 nt, Artificial Sequence
  Synthetic
uaagcauuaagaaggcaaaac

SEQ ID NO: 251745 - RNA, 22 nt, Artificial Sequence
  Synthetic
guaagcauuaagaaggcaaaac

SEQ ID NO: 251746 - RNA, 23 nt, Artificial Sequence
  Synthetic
gguaagcauuaagaaggcaaaac

SEQ ID NO: 251747 - RNA, 24 nt, Artificial Sequence
  Synthetic
ugguaagcauuaagaaggcaaaac

SEQ ID NO: 251748 - RNA, 18 nt, Artificial Sequence
  Synthetic
uuucuacauaugcaaaac

SEQ ID NO: 251749 - RNA, 19 nt, Artificial Sequence
  Synthetic
auuucuacauaugcaaaac

SEQ ID NO: 251750 - RNA, 20 nt, Artificial Sequence
  Synthetic
gauuucuacauaugcaaaac

SEQ ID NO: 251751 - RNA, 21 nt, Artificial Sequence
  Synthetic
ugauuucuacauaugcaaaac

SEQ ID NO: 251752 - RNA, 22 nt, Artificial Sequence
  Synthetic
uugauuucuacauaugcaaaac

SEQ ID NO: 251753 - RNA, 23 nt, Artificial Sequence
  Synthetic
cuugauuucuacauaugcaaaac

SEQ ID NO: 251754 - RNA, 24 nt, Artificial Sequence
  Synthetic
ucuugauuucuacauaugcaaaac

SEQ ID NO: 251755 - RNA, 18 nt, Artificial Sequence
  Synthetic
aaacaaaacuaucaaaac

SEQ ID NO: 251756 - RNA, 19 nt, Artificial Sequence
  Synthetic
aaaacaaaacuaucaaaac

SEQ ID NO: 251757 - RNA, 20 nt, Artificial Sequence
  Synthetic
uaaaacaaaacuaucaaaac

SEQ ID NO: 251758 - RNA, 21 nt, Artificial Sequence
  Synthetic
guaaaacaaaacuaucaaaac

SEQ ID NO: 251759 - RNA, 22 nt, Artificial Sequence
  Synthetic
uguaaaacaaaacuaucaaaac

SEQ ID NO: 251760 - RNA, 23 nt, Artificial Sequence
  Synthetic
auguaaaacaaaacuaucaaaac

SEQ ID NO: 251761 - RNA, 24 nt, Artificial Sequence
  Synthetic
gauguaaaacaaaacuaucaaaac

SEQ ID NO: 251762 - RNA, 18 nt, Artificial Sequence
  Synthetic
aaacucaguauucaaaac

SEQ ID NO: 251763 - RNA, 19 nt, Artificial Sequence
  Synthetic
caaacucaguauucaaaac

SEQ ID NO: 251764 - RNA, 20 nt, Artificial Sequence
  Synthetic
acaaacucaguauucaaaac

SEQ ID NO: 251765 - RNA, 21 nt, Artificial Sequence
  Synthetic
gacaaacucaguauucaaaac

SEQ ID NO: 251766 - RNA, 22 nt, Artificial Sequence
  Synthetic
agacaaacucaguauucaaaac

SEQ ID NO: 251767 - RNA, 23 nt, Artificial Sequence
  Synthetic
gagacaaacucaguauucaaaac

SEQ ID NO: 251768 - RNA, 24 nt, Artificial Sequence
  Synthetic
ggagacaaacucaguauucaaaac

SEQ ID NO: 251769 - RNA, 18 nt, Artificial Sequence
  Synthetic
gacugcaccuuucaaaac

SEQ ID NO: 251770 - RNA, 19 nt, Artificial Sequence
  Synthetic
ugacugcaccuuucaaaac

SEQ ID NO: 251771 - RNA, 20 nt, Artificial Sequence
  Synthetic
uugacugcaccuuucaaaac

SEQ ID NO: 251772 - RNA, 21 nt, Artificial Sequence
  Synthetic
auugacugcaccuuucaaaac

SEQ ID NO: 251773 - RNA, 22 nt, Artificial Sequence
  Synthetic
aauugacugcaccuuucaaaac

SEQ ID NO: 251774 - RNA, 23 nt, Artificial Sequence
  Synthetic
gaauugacugcaccuuucaaaac

SEQ ID NO: 251775 - RNA, 24 nt, Artificial Sequence
  Synthetic
agaauugacugcaccuuucaaaac

SEQ ID NO: 251776 - RNA, 18 nt, Artificial Sequence
  Synthetic
gcauucgugaaagaaaac

SEQ ID NO: 251777 - RNA, 19 nt, Artificial Sequence
  Synthetic
ugcauucgugaaagaaaac

SEQ ID NO: 251778 - RNA, 20 nt, Artificial Sequence
  Synthetic
uugcauucgugaaagaaaac

SEQ ID NO: 251779 - RNA, 21 nt, Artificial Sequence
  Synthetic
cuugcauucgugaaagaaaac

SEQ ID NO: 251780 - RNA, 22 nt, Artificial Sequence
  Synthetic
gcuugcauucgugaaagaaaac

SEQ ID NO: 251781 - RNA, 23 nt, Artificial Sequence
  Synthetic
ugcuugcauucgugaaagaaaac

SEQ ID NO: 251782 - RNA, 24 nt, Artificial Sequence
  Synthetic
gugcuugcauucgugaaagaaaac

SEQ ID NO: 251783 - RNA, 18 nt, Artificial Sequence
  Synthetic
augcauccugaagaaaac

SEQ ID NO: 251784 - RNA, 19 nt, Artificial Sequence
  Synthetic
uaugcauccugaagaaaac

SEQ ID NO: 251785 - RNA, 20 nt, Artificial Sequence
  Synthetic
guaugcauccugaagaaaac

SEQ ID NO: 251786 - RNA, 21 nt, Artificial Sequence
  Synthetic
gguaugcauccugaagaaaac

SEQ ID NO: 251787 - RNA, 22 nt, Artificial Sequence
  Synthetic
ugguaugcauccugaagaaaac

SEQ ID NO: 251788 - RNA, 23 nt, Artificial Sequence
  Synthetic
gugguaugcauccugaagaaaac

SEQ ID NO: 251789 - RNA, 24 nt, Artificial Sequence
  Synthetic
ugugguaugcauccugaagaaaac

SEQ ID NO: 251790 - RNA, 18 nt, Artificial Sequence
  Synthetic
uuuuccauagcagaaaac

SEQ ID NO: 251791 - RNA, 19 nt, Artificial Sequence
  Synthetic
cuuuuccauagcagaaaac

SEQ ID NO: 251792 - RNA, 20 nt, Artificial Sequence
  Synthetic
ucuuuuccauagcagaaaac

SEQ ID NO: 251793 - RNA, 21 nt, Artificial Sequence
  Synthetic
cucuuuuccauagcagaaaac

SEQ ID NO: 251794 - RNA, 22 nt, Artificial Sequence
  Synthetic
gcucuuuuccauagcagaaaac

SEQ ID NO: 251795 - RNA, 23 nt, Artificial Sequence
  Synthetic
agcucuuuuccauagcagaaaac

SEQ ID NO: 251796 - RNA, 24 nt, Artificial Sequence
  Synthetic
gagcucuuuuccauagcagaaaac

SEQ ID NO: 251797 - RNA, 18 nt, Artificial Sequence
  Synthetic
aaaauguugagagaaaac

SEQ ID NO: 251798 - RNA, 19 nt, Artificial Sequence
  Synthetic
caaaauguugagagaaaac

SEQ ID NO: 251799 - RNA, 20 nt, Artificial Sequence
  Synthetic
acaaaauguugagagaaaac

SEQ ID NO: 251800 - RNA, 21 nt, Artificial Sequence
  Synthetic
uacaaaauguugagagaaaac

SEQ ID NO: 251801 - RNA, 22 nt, Artificial Sequence
  Synthetic
uuacaaaauguugagagaaaac

SEQ ID NO: 251802 - RNA, 23 nt, Artificial Sequence
  Synthetic
auuacaaaauguugagagaaaac

SEQ ID NO: 251803 - RNA, 24 nt, Artificial Sequence
  Synthetic
uauuacaaaauguugagagaaaac

SEQ ID NO: 251804 - RNA, 18 nt, Artificial Sequence
  Synthetic
uuauuuuauagagaaaac

SEQ ID NO: 251805 - RNA, 19 nt, Artificial Sequence
  Synthetic
cuuauuuuauagagaaaac

SEQ ID NO: 251806 - RNA, 20 nt, Artificial Sequence
  Synthetic
ucuuauuuuauagagaaaac

SEQ ID NO: 251807 - RNA, 21 nt, Artificial Sequence
  Synthetic
gucuuauuuuauagagaaaac

SEQ ID NO: 251808 - RNA, 22 nt, Artificial Sequence
  Synthetic
agucuuauuuuauagagaaaac

SEQ ID NO: 251809 - RNA, 23 nt, Artificial Sequence
  Synthetic
aagucuuauuuuauagagaaaac

SEQ ID NO: 251810 - RNA, 24 nt, Artificial Sequence
  Synthetic
uaagucuuauuuuauagagaaaac

SEQ ID NO: 251811 - RNA, 18 nt, Artificial Sequence
  Synthetic
uaaaaacuaugagaaaac

SEQ ID NO: 251812 - RNA, 19 nt, Artificial Sequence
  Synthetic
auaaaaacuaugagaaaac

SEQ ID NO: 251813 - RNA, 20 nt, Artificial Sequence
  Synthetic
gauaaaaacuaugagaaaac

SEQ ID NO: 251814 - RNA, 21 nt, Artificial Sequence
  Synthetic
ugauaaaaacuaugagaaaac

SEQ ID NO: 251815 - RNA, 22 nt, Artificial Sequence
  Synthetic
augauaaaaacuaugagaaaac

SEQ ID NO: 251816 - RNA, 23 nt, Artificial Sequence
  Synthetic
caugauaaaaacuaugagaaaac

SEQ ID NO: 251817 - RNA, 24 nt, Artificial Sequence
  Synthetic
ucaugauaaaaacuaugagaaaac

SEQ ID NO: 251818 - RNA, 18 nt, Artificial Sequence
  Synthetic
cacagugaauuagaaaac

SEQ ID NO: 251819 - RNA, 19 nt, Artificial Sequence
  Synthetic
gcacagugaauuagaaaac

SEQ ID NO: 251820 - RNA, 20 nt, Artificial Sequence
  Synthetic
ugcacagugaauuagaaaac

SEQ ID NO: 251821 - RNA, 21 nt, Artificial Sequence
  Synthetic
uugcacagugaauuagaaaac

SEQ ID NO: 251822 - RNA, 22 nt, Artificial Sequence
  Synthetic
cuugcacagugaauuagaaaac

SEQ ID NO: 251823 - RNA, 23 nt, Artificial Sequence
  Synthetic
ucuugcacagugaauuagaaaac

SEQ ID NO: 251824 - RNA, 24 nt, Artificial Sequence
  Synthetic
gucuugcacagugaauuagaaaac

SEQ ID NO: 251825 - RNA, 18 nt, Artificial Sequence
  Synthetic
accuuuaucuuagaaaac

SEQ ID NO: 251826 - RNA, 19 nt, Artificial Sequence
  Synthetic
uaccuuuaucuuagaaaac

SEQ ID NO: 251827 - RNA, 20 nt, Artificial Sequence
  Synthetic
uuaccuuuaucuuagaaaac

SEQ ID NO: 251828 - RNA, 21 nt, Artificial Sequence
  Synthetic
auuaccuuuaucuuagaaaac

SEQ ID NO: 251829 - RNA, 22 nt, Artificial Sequence
  Synthetic
gauuaccuuuaucuuagaaaac

SEQ ID NO: 251830 - RNA, 23 nt, Artificial Sequence
  Synthetic
agauuaccuuuaucuuagaaaac

SEQ ID NO: 251831 - RNA, 24 nt, Artificial Sequence
  Synthetic
gagauuaccuuuaucuuagaaaac

SEQ ID NO: 251832 - RNA, 18 nt, Artificial Sequence
  Synthetic
aguacaagaaaggaaaac

SEQ ID NO: 251833 - RNA, 19 nt, Artificial Sequence
  Synthetic
gaguacaagaaaggaaaac

SEQ ID NO: 251834 - RNA, 20 nt, Artificial Sequence
  Synthetic
ugaguacaagaaaggaaaac

SEQ ID NO: 251835 - RNA, 21 nt, Artificial Sequence
  Synthetic
uugaguacaagaaaggaaaac

SEQ ID NO: 251836 - RNA, 22 nt, Artificial Sequence
  Synthetic
auugaguacaagaaaggaaaac

SEQ ID NO: 251837 - RNA, 23 nt, Artificial Sequence
  Synthetic
aauugaguacaagaaaggaaaac

SEQ ID NO: 251838 - RNA, 24 nt, Artificial Sequence
  Synthetic
aaauugaguacaagaaaggaaaac

SEQ ID NO: 251839 - RNA, 18 nt, Artificial Sequence
  Synthetic
aaccaggaauuggaaaac

SEQ ID NO: 251840 - RNA, 19 nt, Artificial Sequence
  Synthetic
aaaccaggaauuggaaaac

SEQ ID NO: 251841 - RNA, 20 nt, Artificial Sequence
  Synthetic
aaaaccaggaauuggaaaac

SEQ ID NO: 251842 - RNA, 21 nt, Artificial Sequence
  Synthetic
gaaaaccaggaauuggaaaac

SEQ ID NO: 251843 - RNA, 22 nt, Artificial Sequence
  Synthetic
agaaaaccaggaauuggaaaac

SEQ ID NO: 251844 - RNA, 23 nt, Artificial Sequence
  Synthetic
uagaaaaccaggaauuggaaaac

SEQ ID NO: 251845 - RNA, 24 nt, Artificial Sequence
  Synthetic
uuagaaaaccaggaauuggaaaac

SEQ ID NO: 251846 - RNA, 18 nt, Artificial Sequence
  Synthetic
gauaaugaguuggaaaac

SEQ ID NO: 251847 - RNA, 19 nt, Artificial Sequence
  Synthetic
agauaaugaguuggaaaac

SEQ ID NO: 251848 - RNA, 20 nt, Artificial Sequence
  Synthetic
cagauaaugaguuggaaaac

SEQ ID NO: 251849 - RNA, 21 nt, Artificial Sequence
  Synthetic
acagauaaugaguuggaaaac

SEQ ID NO: 251850 - RNA, 22 nt, Artificial Sequence
  Synthetic
aacagauaaugaguuggaaaac

SEQ ID NO: 251851 - RNA, 23 nt, Artificial Sequence
  Synthetic
caacagauaaugaguuggaaaac

SEQ ID NO: 251852 - RNA, 24 nt, Artificial Sequence
  Synthetic
acaacagauaaugaguuggaaaac

SEQ ID NO: 251853 - RNA, 18 nt, Artificial Sequence
  Synthetic
aagauacaagaugaaaac

SEQ ID NO: 251854 - RNA, 19 nt, Artificial Sequence
  Synthetic
gaagauacaagaugaaaac

SEQ ID NO: 251855 - RNA, 20 nt, Artificial Sequence
  Synthetic
ggaagauacaagaugaaaac

SEQ ID NO: 251856 - RNA, 21 nt, Artificial Sequence
  Synthetic
uggaagauacaagaugaaaac

SEQ ID NO: 251857 - RNA, 22 nt, Artificial Sequence
  Synthetic
guggaagauacaagaugaaaac

SEQ ID NO: 251858 - RNA, 23 nt, Artificial Sequence
  Synthetic
aguggaagauacaagaugaaaac

SEQ ID NO: 251859 - RNA, 24 nt, Artificial Sequence
  Synthetic
aaguggaagauacaagaugaaaac

SEQ ID NO: 251860 - RNA, 18 nt, Artificial Sequence
  Synthetic
uuuucaaauuaugaaaac

SEQ ID NO: 251861 - RNA, 19 nt, Artificial Sequence
  Synthetic
auuuucaaauuaugaaaac

SEQ ID NO: 251862 - RNA, 20 nt, Artificial Sequence
  Synthetic
cauuuucaaauuaugaaaac

SEQ ID NO: 251863 - RNA, 21 nt, Artificial Sequence
  Synthetic
ccauuuucaaauuaugaaaac

SEQ ID NO: 251864 - RNA, 22 nt, Artificial Sequence
  Synthetic
uccauuuucaaauuaugaaaac

SEQ ID NO: 251865 - RNA, 23 nt, Artificial Sequence
  Synthetic
guccauuuucaaauuaugaaaac

SEQ ID NO: 251866 - RNA, 24 nt, Artificial Sequence
  Synthetic
aguccauuuucaaauuaugaaaac

SEQ ID NO: 251867 - RNA, 18 nt, Artificial Sequence
  Synthetic
ccaccacuuuaugaaaac

SEQ ID NO: 251868 - RNA, 19 nt, Artificial Sequence
  Synthetic
accaccacuuuaugaaaac

SEQ ID NO: 251869 - RNA, 20 nt, Artificial Sequence
  Synthetic
caccaccacuuuaugaaaac

SEQ ID NO: 251870 - RNA, 21 nt, Artificial Sequence
  Synthetic
gcaccaccacuuuaugaaaac

SEQ ID NO: 251871 - RNA, 22 nt, Artificial Sequence
  Synthetic
agcaccaccacuuuaugaaaac

SEQ ID NO: 251872 - RNA, 23 nt, Artificial Sequence
  Synthetic
cagcaccaccacuuuaugaaaac

SEQ ID NO: 251873 - RNA, 24 nt, Artificial Sequence
  Synthetic
ccagcaccaccacuuuaugaaaac

SEQ ID NO: 251874 - RNA, 18 nt, Artificial Sequence
  Synthetic
guagauaugacugaaaac

SEQ ID NO: 251875 - RNA, 19 nt, Artificial Sequence
  Synthetic
uguagauaugacugaaaac

SEQ ID NO: 251876 - RNA, 20 nt, Artificial Sequence
  Synthetic
cuguagauaugacugaaaac

SEQ ID NO: 251877 - RNA, 21 nt, Artificial Sequence
  Synthetic
ccuguagauaugacugaaaac

SEQ ID NO: 251878 - RNA, 22 nt, Artificial Sequence
  Synthetic
accuguagauaugacugaaaac

SEQ ID NO: 251879 - RNA, 23 nt, Artificial Sequence
  Synthetic
aaccuguagauaugacugaaaac

SEQ ID NO: 251880 - RNA, 24 nt, Artificial Sequence
  Synthetic
gaaccuguagauaugacugaaaac

SEQ ID NO: 251881 - RNA, 18 nt, Artificial Sequence
  Synthetic
gaggcuguggcugaaaac

SEQ ID NO: 251882 - RNA, 19 nt, Artificial Sequence
  Synthetic
agaggcuguggcugaaaac

SEQ ID NO: 251883 - RNA, 20 nt, Artificial Sequence
  Synthetic
aagaggcuguggcugaaaac

SEQ ID NO: 251884 - RNA, 21 nt, Artificial Sequence
  Synthetic
uaagaggcuguggcugaaaac

SEQ ID NO: 251885 - RNA, 22 nt, Artificial Sequence
  Synthetic
uuaagaggcuguggcugaaaac

SEQ ID NO: 251886 - RNA, 23 nt, Artificial Sequence
  Synthetic
cuuaagaggcuguggcugaaaac

SEQ ID NO: 251887 - RNA, 24 nt, Artificial Sequence
  Synthetic
ucuuaagaggcuguggcugaaaac

SEQ ID NO: 251888 - RNA, 18 nt, Artificial Sequence
  Synthetic
uugugaagacuugaaaac

SEQ ID NO: 251889 - RNA, 19 nt, Artificial Sequence
  Synthetic
uuugugaagacuugaaaac

SEQ ID NO: 251890 - RNA, 20 nt, Artificial Sequence
  Synthetic
auuugugaagacuugaaaac

SEQ ID NO: 251891 - RNA, 21 nt, Artificial Sequence
  Synthetic
cauuugugaagacuugaaaac

SEQ ID NO: 251892 - RNA, 22 nt, Artificial Sequence
  Synthetic
acauuugugaagacuugaaaac

SEQ ID NO: 251893 - RNA, 23 nt, Artificial Sequence
  Synthetic
cacauuugugaagacuugaaaac

SEQ ID NO: 251894 - RNA, 24 nt, Artificial Sequence
  Synthetic
ccacauuugugaagacuugaaaac

SEQ ID NO: 251895 - RNA, 18 nt, Artificial Sequence
  Synthetic
aacagucugcuugaaaac

SEQ ID NO: 251896 - RNA, 19 nt, Artificial Sequence
  Synthetic
gaacagucugcuugaaaac

SEQ ID NO: 251897 - RNA, 20 nt, Artificial Sequence
  Synthetic
agaacagucugcuugaaaac

SEQ ID NO: 251898 - RNA, 21 nt, Artificial Sequence
  Synthetic
cagaacagucugcuugaaaac

SEQ ID NO: 251899 - RNA, 22 nt, Artificial Sequence
  Synthetic
ccagaacagucugcuugaaaac

SEQ ID NO: 251900 - RNA, 23 nt, Artificial Sequence
  Synthetic
accagaacagucugcuugaaaac

SEQ ID NO: 251901 - RNA, 24 nt, Artificial Sequence
  Synthetic
aaccagaacagucugcuugaaaac

SEQ ID NO: 251902 - RNA, 18 nt, Artificial Sequence
  Synthetic
aaggugcuaaaauaaaac

SEQ ID NO: 251903 - RNA, 19 nt, Artificial Sequence
  Synthetic
caaggugcuaaaauaaaac

SEQ ID NO: 251904 - RNA, 20 nt, Artificial Sequence
  Synthetic
gcaaggugcuaaaauaaaac

SEQ ID NO: 251905 - RNA, 21 nt, Artificial Sequence
  Synthetic
ugcaaggugcuaaaauaaaac

SEQ ID NO: 251906 - RNA, 22 nt, Artificial Sequence
  Synthetic
augcaaggugcuaaaauaaaac

SEQ ID NO: 251907 - RNA, 23 nt, Artificial Sequence
  Synthetic
aaugcaaggugcuaaaauaaaac

SEQ ID NO: 251908 - RNA, 24 nt, Artificial Sequence
  Synthetic
aaaugcaaggugcuaaaauaaaac

SEQ ID NO: 251909 - RNA, 18 nt, Artificial Sequence
  Synthetic
acagaacagaaauaaaac

SEQ ID NO: 251910 - RNA, 19 nt, Artificial Sequence
  Synthetic
cacagaacagaaauaaaac

SEQ ID NO: 251911 - RNA, 20 nt, Artificial Sequence
  Synthetic
ucacagaacagaaauaaaac

SEQ ID NO: 251912 - RNA, 21 nt, Artificial Sequence
  Synthetic
uucacagaacagaaauaaaac

SEQ ID NO: 251913 - RNA, 22 nt, Artificial Sequence
  Synthetic
auucacagaacagaaauaaaac

SEQ ID NO: 251914 - RNA, 23 nt, Artificial Sequence
  Synthetic
uauucacagaacagaaauaaaac

SEQ ID NO: 251915 - RNA, 24 nt, Artificial Sequence
  Synthetic
cuauucacagaacagaaauaaaac

SEQ ID NO: 251916 - RNA, 18 nt, Artificial Sequence
  Synthetic
uaccuagcuagauaaaac

SEQ ID NO: 251917 - RNA, 19 nt, Artificial Sequence
  Synthetic
uuaccuagcuagauaaaac

SEQ ID NO: 251918 - RNA, 20 nt, Artificial Sequence
  Synthetic
auuaccuagcuagauaaaac

SEQ ID NO: 251919 - RNA, 21 nt, Artificial Sequence
  Synthetic
aauuaccuagcuagauaaaac

SEQ ID NO: 251920 - RNA, 22 nt, Artificial Sequence
  Synthetic
gaauuaccuagcuagauaaaac

SEQ ID NO: 251921 - RNA, 23 nt, Artificial Sequence
  Synthetic
ggaauuaccuagcuagauaaaac

SEQ ID NO: 251922 - RNA, 24 nt, Artificial Sequence
  Synthetic
uggaauuaccuagcuagauaaaac

SEQ ID NO: 251923 - RNA, 18 nt, Artificial Sequence
  Synthetic
aacauuugcauauaaaac

SEQ ID NO: 251924 - RNA, 19 nt, Artificial Sequence
  Synthetic
aaacauuugcauauaaaac

SEQ ID NO: 251925 - RNA, 20 nt, Artificial Sequence
  Synthetic
aaaacauuugcauauaaaac

SEQ ID NO: 251926 - RNA, 21 nt, Artificial Sequence
  Synthetic
gaaaacauuugcauauaaaac

SEQ ID NO: 251927 - RNA, 22 nt, Artificial Sequence
  Synthetic
ggaaaacauuugcauauaaaac

SEQ ID NO: 251928 - RNA, 23 nt, Artificial Sequence
  Synthetic
aggaaaacauuugcauauaaaac

SEQ ID NO: 251929 - RNA, 24 nt, Artificial Sequence
  Synthetic
caggaaaacauuugcauauaaaac

SEQ ID NO: 251930 - RNA, 18 nt, Artificial Sequence
  Synthetic
uuuuuucucauauaaaac

SEQ ID NO: 251931 - RNA, 19 nt, Artificial Sequence
  Synthetic
cuuuuuucucauauaaaac

SEQ ID NO: 251932 - RNA, 20 nt, Artificial Sequence
  Synthetic
gcuuuuuucucauauaaaac

SEQ ID NO: 251933 - RNA, 21 nt, Artificial Sequence
  Synthetic
agcuuuuuucucauauaaaac

SEQ ID NO: 251934 - RNA, 22 nt, Artificial Sequence
  Synthetic
gagcuuuuuucucauauaaaac

SEQ ID NO: 251935 - RNA, 23 nt, Artificial Sequence
  Synthetic
ggagcuuuuuucucauauaaaac

SEQ ID NO: 251936 - RNA, 24 nt, Artificial Sequence
  Synthetic
aggagcuuuuuucucauauaaaac

SEQ ID NO: 251937 - RNA, 18 nt, Artificial Sequence
  Synthetic
gacuaaccacuauaaaac

SEQ ID NO: 251938 - RNA, 19 nt, Artificial Sequence
  Synthetic
ugacuaaccacuauaaaac

SEQ ID NO: 251939 - RNA, 20 nt, Artificial Sequence
  Synthetic
cugacuaaccacuauaaaac

SEQ ID NO: 251940 - RNA, 21 nt, Artificial Sequence
  Synthetic
acugacuaaccacuauaaaac

SEQ ID NO: 251941 - RNA, 22 nt, Artificial Sequence
  Synthetic
cacugacuaaccacuauaaaac

SEQ ID NO: 251942 - RNA, 23 nt, Artificial Sequence
  Synthetic
ucacugacuaaccacuauaaaac

SEQ ID NO: 251943 - RNA, 24 nt, Artificial Sequence
  Synthetic
uucacugacuaaccacuauaaaac

SEQ ID NO: 251944 - RNA, 18 nt, Artificial Sequence
  Synthetic
gaugaugccaacuaaaac

SEQ ID NO: 251945 - RNA, 19 nt, Artificial Sequence
  Synthetic
agaugaugccaacuaaaac

SEQ ID NO: 251946 - RNA, 20 nt, Artificial Sequence
  Synthetic
uagaugaugccaacuaaaac

SEQ ID NO: 251947 - RNA, 21 nt, Artificial Sequence
  Synthetic
uuagaugaugccaacuaaaac

SEQ ID NO: 251948 - RNA, 22 nt, Artificial Sequence
  Synthetic
cuuagaugaugccaacuaaaac

SEQ ID NO: 251949 - RNA, 23 nt, Artificial Sequence
  Synthetic
acuuagaugaugccaacuaaaac

SEQ ID NO: 251950 - RNA, 24 nt, Artificial Sequence
  Synthetic
cacuuagaugaugccaacuaaaac

SEQ ID NO: 251951 - RNA, 18 nt, Artificial Sequence
  Synthetic
cuuaauugucucuaaaac

SEQ ID NO: 251952 - RNA, 19 nt, Artificial Sequence
  Synthetic
acuuaauugucucuaaaac

SEQ ID NO: 251953 - RNA, 20 nt, Artificial Sequence
  Synthetic
aacuuaauugucucuaaaac

SEQ ID NO: 251954 - RNA, 21 nt, Artificial Sequence
  Synthetic
uaacuuaauugucucuaaaac

SEQ ID NO: 251955 - RNA, 22 nt, Artificial Sequence
  Synthetic
cuaacuuaauugucucuaaaac

SEQ ID NO: 251956 - RNA, 23 nt, Artificial Sequence
  Synthetic
ucuaacuuaauugucucuaaaac

SEQ ID NO: 251957 - RNA, 24 nt, Artificial Sequence
  Synthetic
gucuaacuuaauugucucuaaaac

SEQ ID NO: 251958 - RNA, 18 nt, Artificial Sequence
  Synthetic
ccuaccguucaguaaaac

SEQ ID NO: 251959 - RNA, 19 nt, Artificial Sequence
  Synthetic
uccuaccguucaguaaaac

SEQ ID NO: 251960 - RNA, 20 nt, Artificial Sequence
  Synthetic
cuccuaccguucaguaaaac

SEQ ID NO: 251961 - RNA, 21 nt, Artificial Sequence
  Synthetic
ucuccuaccguucaguaaaac

SEQ ID NO: 251962 - RNA, 22 nt, Artificial Sequence
  Synthetic
cucuccuaccguucaguaaaac

SEQ ID NO: 251963 - RNA, 23 nt, Artificial Sequence
  Synthetic
acucuccuaccguucaguaaaac

SEQ ID NO: 251964 - RNA, 24 nt, Artificial Sequence
  Synthetic
uacucuccuaccguucaguaaaac

SEQ ID NO: 251965 - RNA, 18 nt, Artificial Sequence
  Synthetic
aaaacugcaagguaaaac

SEQ ID NO: 251966 - RNA, 19 nt, Artificial Sequence
  Synthetic
caaaacugcaagguaaaac

SEQ ID NO: 251967 - RNA, 20 nt, Artificial Sequence
  Synthetic
ucaaaacugcaagguaaaac

SEQ ID NO: 251968 - RNA, 21 nt, Artificial Sequence
  Synthetic
cucaaaacugcaagguaaaac

SEQ ID NO: 251969 - RNA, 22 nt, Artificial Sequence
  Synthetic
ucucaaaacugcaagguaaaac

SEQ ID NO: 251970 - RNA, 23 nt, Artificial Sequence
  Synthetic
cucucaaaacugcaagguaaaac

SEQ ID NO: 251971 - RNA, 24 nt, Artificial Sequence
  Synthetic
acucucaaaacugcaagguaaaac

SEQ ID NO: 251972 - RNA, 18 nt, Artificial Sequence
  Synthetic
uggugguguauguaaaac

SEQ ID NO: 251973 - RNA, 19 nt, Artificial Sequence
  Synthetic
uuggugguguauguaaaac

SEQ ID NO: 251974 - RNA, 20 nt, Artificial Sequence
  Synthetic
uuuggugguguauguaaaac

SEQ ID NO: 251975 - RNA, 21 nt, Artificial Sequence
  Synthetic
auuuggugguguauguaaaac

SEQ ID NO: 251976 - RNA, 22 nt, Artificial Sequence
  Synthetic
cauuuggugguguauguaaaac

SEQ ID NO: 251977 - RNA, 23 nt, Artificial Sequence
  Synthetic
gcauuuggugguguauguaaaac

SEQ ID NO: 251978 - RNA, 24 nt, Artificial Sequence
  Synthetic
ugcauuuggugguguauguaaaac

SEQ ID NO: 251979 - RNA, 18 nt, Artificial Sequence
  Synthetic
uaguaccugguguaaaac

SEQ ID NO: 251980 - RNA, 19 nt, Artificial Sequence
  Synthetic
auaguaccugguguaaaac

SEQ ID NO: 251981 - RNA, 20 nt, Artificial Sequence
  Synthetic
uauaguaccugguguaaaac

SEQ ID NO: 251982 - RNA, 21 nt, Artificial Sequence
  Synthetic
guauaguaccugguguaaaac

SEQ ID NO: 251983 - RNA, 22 nt, Artificial Sequence
  Synthetic
aguauaguaccugguguaaaac

SEQ ID NO: 251984 - RNA, 23 nt, Artificial Sequence
  Synthetic
caguauaguaccugguguaaaac

SEQ ID NO: 251985 - RNA, 24 nt, Artificial Sequence
  Synthetic
ucaguauaguaccugguguaaaac

SEQ ID NO: 251986 - RNA, 18 nt, Artificial Sequence
  Synthetic
uauuuaucauuguaaaac

SEQ ID NO: 251987 - RNA, 19 nt, Artificial Sequence
  Synthetic
uuauuuaucauuguaaaac

SEQ ID NO: 251988 - RNA, 20 nt, Artificial Sequence
  Synthetic
cuuauuuaucauuguaaaac

SEQ ID NO: 251989 - RNA, 21 nt, Artificial Sequence
  Synthetic
gcuuauuuaucauuguaaaac

SEQ ID NO: 251990 - RNA, 22 nt, Artificial Sequence
  Synthetic
agcuuauuuaucauuguaaaac

SEQ ID NO: 251991 - RNA, 23 nt, Artificial Sequence
  Synthetic
aagcuuauuuaucauuguaaaac

SEQ ID NO: 251992 - RNA, 24 nt, Artificial Sequence
  Synthetic
caagcuuauuuaucauuguaaaac

SEQ ID NO: 251993 - RNA, 18 nt, Artificial Sequence
  Synthetic
aaucuaacuuuguaaaac

SEQ ID NO: 251994 - RNA, 19 nt, Artificial Sequence
  Synthetic
aaaucuaacuuuguaaaac

SEQ ID NO: 251995 - RNA, 20 nt, Artificial Sequence
  Synthetic
uaaaucuaacuuuguaaaac

SEQ ID NO: 251996 - RNA, 21 nt, Artificial Sequence
  Synthetic
guaaaucuaacuuuguaaaac

SEQ ID NO: 251997 - RNA, 22 nt, Artificial Sequence
  Synthetic
gguaaaucuaacuuuguaaaac

SEQ ID NO: 251998 - RNA, 23 nt, Artificial Sequence
  Synthetic
ugguaaaucuaacuuuguaaaac

SEQ ID NO: 251999 - RNA, 24 nt, Artificial Sequence
  Synthetic
uugguaaaucuaacuuuguaaaac

SEQ ID NO: 252000 - RNA, 18 nt, Artificial Sequence
  Synthetic
caaacagaacauuaaaac

SEQ ID NO: 252001 - RNA, 19 nt, Artificial Sequence
  Synthetic
gcaaacagaacauuaaaac

SEQ ID NO: 252002 - RNA, 20 nt, Artificial Sequence
  Synthetic
agcaaacagaacauuaaaac

SEQ ID NO: 252003 - RNA, 21 nt, Artificial Sequence
  Synthetic
uagcaaacagaacauuaaaac

SEQ ID NO: 252004 - RNA, 22 nt, Artificial Sequence
  Synthetic
uuagcaaacagaacauuaaaac

SEQ ID NO: 252005 - RNA, 23 nt, Artificial Sequence
  Synthetic
uuuagcaaacagaacauuaaaac

SEQ ID NO: 252006 - RNA, 24 nt, Artificial Sequence
  Synthetic
auuuagcaaacagaacauuaaaac

SEQ ID NO: 252007 - RNA, 18 nt, Artificial Sequence
  Synthetic
uuaucagauacuuaaaac

SEQ ID NO: 252008 - RNA, 19 nt, Artificial Sequence
  Synthetic
guuaucagauacuuaaaac

SEQ ID NO: 252009 - RNA, 20 nt, Artificial Sequence
  Synthetic
uguuaucagauacuuaaaac

SEQ ID NO: 252010 - RNA, 21 nt, Artificial Sequence
  Synthetic
cuguuaucagauacuuaaaac

SEQ ID NO: 252011 - RNA, 22 nt, Artificial Sequence
  Synthetic
acuguuaucagauacuuaaaac

SEQ ID NO: 252012 - RNA, 23 nt, Artificial Sequence
  Synthetic
cacuguuaucagauacuuaaaac

SEQ ID NO: 252013 - RNA, 24 nt, Artificial Sequence
  Synthetic
ucacuguuaucagauacuuaaaac

SEQ ID NO: 252014 - RNA, 18 nt, Artificial Sequence
  Synthetic
uaacacuuagcuuaaaac

SEQ ID NO: 252015 - RNA, 19 nt, Artificial Sequence
  Synthetic
auaacacuuagcuuaaaac

SEQ ID NO: 252016 - RNA, 20 nt, Artificial Sequence
  Synthetic
aauaacacuuagcuuaaaac

SEQ ID NO: 252017 - RNA, 21 nt, Artificial Sequence
  Synthetic
uaauaacacuuagcuuaaaac

SEQ ID NO: 252018 - RNA, 22 nt, Artificial Sequence
  Synthetic
guaauaacacuuagcuuaaaac

SEQ ID NO: 252019 - RNA, 23 nt, Artificial Sequence
  Synthetic
uguaauaacacuuagcuuaaaac

SEQ ID NO: 252020 - RNA, 24 nt, Artificial Sequence
  Synthetic
cuguaauaacacuuagcuuaaaac

SEQ ID NO: 252021 - RNA, 18 nt, Artificial Sequence
  Synthetic
gaggcuggaucuuaaaac

SEQ ID NO: 252022 - RNA, 19 nt, Artificial Sequence
  Synthetic
agaggcuggaucuuaaaac

SEQ ID NO: 252023 - RNA, 20 nt, Artificial Sequence
  Synthetic
cagaggcuggaucuuaaaac

SEQ ID NO: 252024 - RNA, 21 nt, Artificial Sequence
  Synthetic
ucagaggcuggaucuuaaaac

SEQ ID NO: 252025 - RNA, 22 nt, Artificial Sequence
  Synthetic
aucagaggcuggaucuuaaaac

SEQ ID NO: 252026 - RNA, 23 nt, Artificial Sequence
  Synthetic
gaucagaggcuggaucuuaaaac

SEQ ID NO: 252027 - RNA, 24 nt, Artificial Sequence
  Synthetic
agaucagaggcuggaucuuaaaac

SEQ ID NO: 252028 - RNA, 18 nt, Artificial Sequence
  Synthetic
uguaaacuuucuuaaaac

SEQ ID NO: 252029 - RNA, 19 nt, Artificial Sequence
  Synthetic
uuguaaacuuucuuaaaac

SEQ ID NO: 252030 - RNA, 20 nt, Artificial Sequence
  Synthetic
uuuguaaacuuucuuaaaac

SEQ ID NO: 252031 - RNA, 21 nt, Artificial Sequence
  Synthetic
auuuguaaacuuucuuaaaac

SEQ ID NO: 252032 - RNA, 22 nt, Artificial Sequence
  Synthetic
aauuuguaaacuuucuuaaaac

SEQ ID NO: 252033 - RNA, 23 nt, Artificial Sequence
  Synthetic
aaauuuguaaacuuucuuaaaac

SEQ ID NO: 252034 - RNA, 24 nt, Artificial Sequence
  Synthetic
caaauuuguaaacuuucuuaaaac

SEQ ID NO: 252035 - RNA, 18 nt, Artificial Sequence
  Synthetic
aacaguuuucuuuaaaac

SEQ ID NO: 252036 - RNA, 19 nt, Artificial Sequence
  Synthetic
caacaguuuucuuuaaaac

SEQ ID NO: 252037 - RNA, 20 nt, Artificial Sequence
  Synthetic
acaacaguuuucuuuaaaac

SEQ ID NO: 252038 - RNA, 21 nt, Artificial Sequence
  Synthetic
aacaacaguuuucuuuaaaac

SEQ ID NO: 252039 - RNA, 22 nt, Artificial Sequence
  Synthetic
uaacaacaguuuucuuuaaaac

SEQ ID NO: 252040 - RNA, 23 nt, Artificial Sequence
  Synthetic
guaacaacaguuuucuuuaaaac

SEQ ID NO: 252041 - RNA, 24 nt, Artificial Sequence
  Synthetic
uguaacaacaguuuucuuuaaaac

SEQ ID NO: 252042 - RNA, 18 nt, Artificial Sequence
  Synthetic
aaaaauaaguuuuaaaac

SEQ ID NO: 252043 - RNA, 19 nt, Artificial Sequence
  Synthetic
aaaaaauaaguuuuaaaac

SEQ ID NO: 252044 - RNA, 20 nt, Artificial Sequence
  Synthetic
gaaaaaauaaguuuuaaaac

SEQ ID NO: 252045 - RNA, 21 nt, Artificial Sequence
  Synthetic
ggaaaaaauaaguuuuaaaac

SEQ ID NO: 252046 - RNA, 22 nt, Artificial Sequence
  Synthetic
aggaaaaaauaaguuuuaaaac

SEQ ID NO: 252047 - RNA, 23 nt, Artificial Sequence
  Synthetic
uaggaaaaaauaaguuuuaaaac

SEQ ID NO: 252048 - RNA, 24 nt, Artificial Sequence
  Synthetic
cuaggaaaaaauaaguuuuaaaac

SEQ ID NO: 252049 - RNA, 18 nt, Artificial Sequence
  Synthetic
ucaaaauguuuuuaaaac

SEQ ID NO: 252050 - RNA, 19 nt, Artificial Sequence
  Synthetic
uucaaaauguuuuuaaaac

SEQ ID NO: 252051 - RNA, 20 nt, Artificial Sequence
  Synthetic
cuucaaaauguuuuuaaaac

SEQ ID NO: 252052 - RNA, 21 nt, Artificial Sequence
  Synthetic
ucuucaaaauguuuuuaaaac

SEQ ID NO: 252053 - RNA, 22 nt, Artificial Sequence
  Synthetic
aucuucaaaauguuuuuaaaac

SEQ ID NO: 252054 - RNA, 23 nt, Artificial Sequence
  Synthetic
uaucuucaaaauguuuuuaaaac

SEQ ID NO: 252055 - RNA, 24 nt, Artificial Sequence
  Synthetic
auaucuucaaaauguuuuuaaaac

SEQ ID NO: 252056 - RNA, 18 nt, Artificial Sequence
  Synthetic
ucaguggcuaaaacaaac

SEQ ID NO: 252057 - RNA, 19 nt, Artificial Sequence
  Synthetic
uucaguggcuaaaacaaac

SEQ ID NO: 252058 - RNA, 20 nt, Artificial Sequence
  Synthetic
cuucaguggcuaaaacaaac

SEQ ID NO: 252059 - RNA, 21 nt, Artificial Sequence
  Synthetic
acuucaguggcuaaaacaaac

SEQ ID NO: 252060 - RNA, 22 nt, Artificial Sequence
  Synthetic
uacuucaguggcuaaaacaaac

SEQ ID NO: 252061 - RNA, 23 nt, Artificial Sequence
  Synthetic
uuacuucaguggcuaaaacaaac

SEQ ID NO: 252062 - RNA, 24 nt, Artificial Sequence
  Synthetic
auuacuucaguggcuaaaacaaac

SEQ ID NO: 252063 - RNA, 18 nt, Artificial Sequence
  Synthetic
uacauauuuaaaacaaac

SEQ ID NO: 252064 - RNA, 19 nt, Artificial Sequence
  Synthetic
guacauauuuaaaacaaac

SEQ ID NO: 252065 - RNA, 20 nt, Artificial Sequence
  Synthetic
uguacauauuuaaaacaaac

SEQ ID NO: 252066 - RNA, 21 nt, Artificial Sequence
  Synthetic
auguacauauuuaaaacaaac

SEQ ID NO: 252067 - RNA, 22 nt, Artificial Sequence
  Synthetic
uauguacauauuuaaaacaaac

SEQ ID NO: 252068 - RNA, 23 nt, Artificial Sequence
  Synthetic
auauguacauauuuaaaacaaac

SEQ ID NO: 252069 - RNA, 24 nt, Artificial Sequence
  Synthetic
uauauguacauauuuaaaacaaac

SEQ ID NO: 252070 - RNA, 18 nt, Artificial Sequence
  Synthetic
acaauacacacaacaaac

SEQ ID NO: 252071 - RNA, 19 nt, Artificial Sequence
  Synthetic
uacaauacacacaacaaac

SEQ ID NO: 252072 - RNA, 20 nt, Artificial Sequence
  Synthetic
auacaauacacacaacaaac

SEQ ID NO: 252073 - RNA, 21 nt, Artificial Sequence
  Synthetic
cauacaauacacacaacaaac

SEQ ID NO: 252074 - RNA, 22 nt, Artificial Sequence
  Synthetic
acauacaauacacacaacaaac

SEQ ID NO: 252075 - RNA, 23 nt, Artificial Sequence
  Synthetic
cacauacaauacacacaacaaac

SEQ ID NO: 252076 - RNA, 24 nt, Artificial Sequence
  Synthetic
acacauacaauacacacaacaaac

SEQ ID NO: 252077 - RNA, 18 nt, Artificial Sequence
  Synthetic
uuuguuuggacaacaaac

SEQ ID NO: 252078 - RNA, 19 nt, Artificial Sequence
  Synthetic
auuuguuuggacaacaaac

SEQ ID NO: 252079 - RNA, 20 nt, Artificial Sequence
  Synthetic
uauuuguuuggacaacaaac

SEQ ID NO: 252080 - RNA, 21 nt, Artificial Sequence
  Synthetic
auauuuguuuggacaacaaac

SEQ ID NO: 252081 - RNA, 22 nt, Artificial Sequence
  Synthetic
cauauuuguuuggacaacaaac

SEQ ID NO: 252082 - RNA, 23 nt, Artificial Sequence
  Synthetic
acauauuuguuuggacaacaaac

SEQ ID NO: 252083 - RNA, 24 nt, Artificial Sequence
  Synthetic
aacauauuuguuuggacaacaaac

SEQ ID NO: 252084 - RNA, 18 nt, Artificial Sequence
  Synthetic
gagaaugugacaacaaac

SEQ ID NO: 252085 - RNA, 19 nt, Artificial Sequence
  Synthetic
ugagaaugugacaacaaac

SEQ ID NO: 252086 - RNA, 20 nt, Artificial Sequence
  Synthetic
gugagaaugugacaacaaac

SEQ ID NO: 252087 - RNA, 21 nt, Artificial Sequence
  Synthetic
agugagaaugugacaacaaac

SEQ ID NO: 252088 - RNA, 22 nt, Artificial Sequence
  Synthetic
uagugagaaugugacaacaaac

SEQ ID NO: 252089 - RNA, 23 nt, Artificial Sequence
  Synthetic
cuagugagaaugugacaacaaac

SEQ ID NO: 252090 - RNA, 24 nt, Artificial Sequence
  Synthetic
ucuagugagaaugugacaacaaac

SEQ ID NO: 252091 - RNA, 18 nt, Artificial Sequence
  Synthetic
uuuaugcggccaacaaac

SEQ ID NO: 252092 - RNA, 19 nt, Artificial Sequence
  Synthetic
auuuaugcggccaacaaac

SEQ ID NO: 252093 - RNA, 20 nt, Artificial Sequence
  Synthetic
cauuuaugcggccaacaaac

SEQ ID NO: 252094 - RNA, 21 nt, Artificial Sequence
  Synthetic
acauuuaugcggccaacaaac

SEQ ID NO: 252095 - RNA, 22 nt, Artificial Sequence
  Synthetic
gacauuuaugcggccaacaaac

SEQ ID NO: 252096 - RNA, 23 nt, Artificial Sequence
  Synthetic
agacauuuaugcggccaacaaac

SEQ ID NO: 252097 - RNA, 24 nt, Artificial Sequence
  Synthetic
aagacauuuaugcggccaacaaac

SEQ ID NO: 252098 - RNA, 18 nt, Artificial Sequence
  Synthetic
aacagugcuucaacaaac

SEQ ID NO: 252099 - RNA, 19 nt, Artificial Sequence
  Synthetic
gaacagugcuucaacaaac

SEQ ID NO: 252100 - RNA, 20 nt, Artificial Sequence
  Synthetic
ugaacagugcuucaacaaac

SEQ ID NO: 252101 - RNA, 21 nt, Artificial Sequence
  Synthetic
augaacagugcuucaacaaac

SEQ ID NO: 252102 - RNA, 22 nt, Artificial Sequence
  Synthetic
uaugaacagugcuucaacaaac

SEQ ID NO: 252103 - RNA, 23 nt, Artificial Sequence
  Synthetic
uuaugaacagugcuucaacaaac

SEQ ID NO: 252104 - RNA, 24 nt, Artificial Sequence
  Synthetic
auuaugaacagugcuucaacaaac

SEQ ID NO: 252105 - RNA, 18 nt, Artificial Sequence
  Synthetic
ucaccauagagaacaaac

SEQ ID NO: 252106 - RNA, 19 nt, Artificial Sequence
  Synthetic
aucaccauagagaacaaac

SEQ ID NO: 252107 - RNA, 20 nt, Artificial Sequence
  Synthetic
caucaccauagagaacaaac

SEQ ID NO: 252108 - RNA, 21 nt, Artificial Sequence
  Synthetic
acaucaccauagagaacaaac

SEQ ID NO: 252109 - RNA, 22 nt, Artificial Sequence
  Synthetic
aacaucaccauagagaacaaac

SEQ ID NO: 252110 - RNA, 23 nt, Artificial Sequence
  Synthetic
aaacaucaccauagagaacaaac

SEQ ID NO: 252111 - RNA, 24 nt, Artificial Sequence
  Synthetic
uaaacaucaccauagagaacaaac

SEQ ID NO: 252112 - RNA, 18 nt, Artificial Sequence
  Synthetic
uauauccagguaacaaac

SEQ ID NO: 252113 - RNA, 19 nt, Artificial Sequence
  Synthetic
auauauccagguaacaaac

SEQ ID NO: 252114 - RNA, 20 nt, Artificial Sequence
  Synthetic
cauauauccagguaacaaac

SEQ ID NO: 252115 - RNA, 21 nt, Artificial Sequence
  Synthetic
ccauauauccagguaacaaac

SEQ ID NO: 252116 - RNA, 22 nt, Artificial Sequence
  Synthetic
gccauauauccagguaacaaac

SEQ ID NO: 252117 - RNA, 23 nt, Artificial Sequence
  Synthetic
cgccauauauccagguaacaaac

SEQ ID NO: 252118 - RNA, 24 nt, Artificial Sequence
  Synthetic
acgccauauauccagguaacaaac

SEQ ID NO: 252119 - RNA, 18 nt, Artificial Sequence
  Synthetic
aucugaucuuuaacaaac

SEQ ID NO: 252120 - RNA, 19 nt, Artificial Sequence
  Synthetic
uaucugaucuuuaacaaac

SEQ ID NO: 252121 - RNA, 20 nt, Artificial Sequence
  Synthetic
cuaucugaucuuuaacaaac

SEQ ID NO: 252122 - RNA, 21 nt, Artificial Sequence
  Synthetic
acuaucugaucuuuaacaaac

SEQ ID NO: 252123 - RNA, 22 nt, Artificial Sequence
  Synthetic
aacuaucugaucuuuaacaaac

SEQ ID NO: 252124 - RNA, 23 nt, Artificial Sequence
  Synthetic
caacuaucugaucuuuaacaaac

SEQ ID NO: 252125 - RNA, 24 nt, Artificial Sequence
  Synthetic
acaacuaucugaucuuuaacaaac

SEQ ID NO: 252126 - RNA, 18 nt, Artificial Sequence
  Synthetic
acacacacacacacaaac

SEQ ID NO: 252127 - RNA, 19 nt, Artificial Sequence
  Synthetic
cacacacacacacacaaac

SEQ ID NO: 252128 - RNA, 20 nt, Artificial Sequence
  Synthetic
acacacacacacacacaaac

SEQ ID NO: 252129 - RNA, 21 nt, Artificial Sequence
  Synthetic
cacacacacacacacacaaac

SEQ ID NO: 252130 - RNA, 22 nt, Artificial Sequence
  Synthetic
acacacacacacacacacaaac

SEQ ID NO: 252131 - RNA, 23 nt, Artificial Sequence
  Synthetic
cacacacacacacacacacaaac

SEQ ID NO: 252132 - RNA, 24 nt, Artificial Sequence
  Synthetic
acacacacacacacacacacaaac

SEQ ID NO: 252133 - RNA, 18 nt, Artificial Sequence
  Synthetic
ucaaucaaucacacaaac

SEQ ID NO: 252134 - RNA, 19 nt, Artificial Sequence
  Synthetic
uucaaucaaucacacaaac

SEQ ID NO: 252135 - RNA, 20 nt, Artificial Sequence
  Synthetic
cuucaaucaaucacacaaac

SEQ ID NO: 252136 - RNA, 21 nt, Artificial Sequence
  Synthetic
acuucaaucaaucacacaaac

SEQ ID NO: 252137 - RNA, 22 nt, Artificial Sequence
  Synthetic
aacuucaaucaaucacacaaac

SEQ ID NO: 252138 - RNA, 23 nt, Artificial Sequence
  Synthetic
gaacuucaaucaaucacacaaac

SEQ ID NO: 252139 - RNA, 24 nt, Artificial Sequence
  Synthetic
ggaacuucaaucaaucacacaaac

SEQ ID NO: 252140 - RNA, 18 nt, Artificial Sequence
  Synthetic
agagaacaagacacaaac

SEQ ID NO: 252141 - RNA, 19 nt, Artificial Sequence
  Synthetic
gagagaacaagacacaaac

SEQ ID NO: 252142 - RNA, 20 nt, Artificial Sequence
  Synthetic
agagagaacaagacacaaac

SEQ ID NO: 252143 - RNA, 21 nt, Artificial Sequence
  Synthetic
gagagagaacaagacacaaac

SEQ ID NO: 252144 - RNA, 22 nt, Artificial Sequence
  Synthetic
ggagagagaacaagacacaaac

SEQ ID NO: 252145 - RNA, 23 nt, Artificial Sequence
  Synthetic
aggagagagaacaagacacaaac

SEQ ID NO: 252146 - RNA, 24 nt, Artificial Sequence
  Synthetic
gaggagagagaacaagacacaaac

SEQ ID NO: 252147 - RNA, 18 nt, Artificial Sequence
  Synthetic
accagcaucaccacaaac

SEQ ID NO: 252148 - RNA, 19 nt, Artificial Sequence
  Synthetic
caccagcaucaccacaaac

SEQ ID NO: 252149 - RNA, 20 nt, Artificial Sequence
  Synthetic
acaccagcaucaccacaaac

SEQ ID NO: 252150 - RNA, 21 nt, Artificial Sequence
  Synthetic
uacaccagcaucaccacaaac

SEQ ID NO: 252151 - RNA, 22 nt, Artificial Sequence
  Synthetic
uuacaccagcaucaccacaaac

SEQ ID NO: 252152 - RNA, 23 nt, Artificial Sequence
  Synthetic
cuuacaccagcaucaccacaaac

SEQ ID NO: 252153 - RNA, 24 nt, Artificial Sequence
  Synthetic
gcuuacaccagcaucaccacaaac

SEQ ID NO: 252154 - RNA, 18 nt, Artificial Sequence
  Synthetic
uccucguggaccacaaac

SEQ ID NO: 252155 - RNA, 19 nt, Artificial Sequence
  Synthetic
guccucguggaccacaaac

SEQ ID NO: 252156 - RNA, 20 nt, Artificial Sequence
  Synthetic
aguccucguggaccacaaac

SEQ ID NO: 252157 - RNA, 21 nt, Artificial Sequence
  Synthetic
aaguccucguggaccacaaac

SEQ ID NO: 252158 - RNA, 22 nt, Artificial Sequence
  Synthetic
caaguccucguggaccacaaac

SEQ ID NO: 252159 - RNA, 23 nt, Artificial Sequence
  Synthetic
gcaaguccucguggaccacaaac

SEQ ID NO: 252160 - RNA, 24 nt, Artificial Sequence
  Synthetic
ggcaaguccucguggaccacaaac

SEQ ID NO: 252161 - RNA, 18 nt, Artificial Sequence
  Synthetic
gcauuaugggucacaaac

SEQ ID NO: 252162 - RNA, 19 nt, Artificial Sequence
  Synthetic
ugcauuaugggucacaaac

SEQ ID NO: 252163 - RNA, 20 nt, Artificial Sequence
  Synthetic
uugcauuaugggucacaaac

SEQ ID NO: 252164 - RNA, 21 nt, Artificial Sequence
  Synthetic
cuugcauuaugggucacaaac

SEQ ID NO: 252165 - RNA, 22 nt, Artificial Sequence
  Synthetic
ccuugcauuaugggucacaaac

SEQ ID NO: 252166 - RNA, 23 nt, Artificial Sequence
  Synthetic
accuugcauuaugggucacaaac

SEQ ID NO: 252167 - RNA, 24 nt, Artificial Sequence
  Synthetic
caccuugcauuaugggucacaaac

SEQ ID NO: 252168 - RNA, 18 nt, Artificial Sequence
  Synthetic
aaauuacuagugacaaac

SEQ ID NO: 252169 - RNA, 19 nt, Artificial Sequence
  Synthetic
aaaauuacuagugacaaac

SEQ ID NO: 252170 - RNA, 20 nt, Artificial Sequence
  Synthetic
gaaaauuacuagugacaaac

SEQ ID NO: 252171 - RNA, 21 nt, Artificial Sequence
  Synthetic
agaaaauuacuagugacaaac

SEQ ID NO: 252172 - RNA, 22 nt, Artificial Sequence
  Synthetic
aagaaaauuacuagugacaaac

SEQ ID NO: 252173 - RNA, 23 nt, Artificial Sequence
  Synthetic
aaagaaaauuacuagugacaaac

SEQ ID NO: 252174 - RNA, 24 nt, Artificial Sequence
  Synthetic
caaagaaaauuacuagugacaaac

SEQ ID NO: 252175 - RNA, 18 nt, Artificial Sequence
  Synthetic
aucugaucuuugacaaac

SEQ ID NO: 252176 - RNA, 19 nt, Artificial Sequence
  Synthetic
uaucugaucuuugacaaac

SEQ ID NO: 252177 - RNA, 20 nt, Artificial Sequence
  Synthetic
cuaucugaucuuugacaaac

SEQ ID NO: 252178 - RNA, 24 nt, Artificial Sequence
  Synthetic
acaacuaucugaucuuugacaaac

SEQ ID NO: 252179 - RNA, 22 nt, Artificial Sequence
  Synthetic
cacuaucugaucuuugacaaac

SEQ ID NO: 252180 - RNA, 23 nt, Artificial Sequence
  Synthetic
ccacuaucugaucuuugacaaac

SEQ ID NO: 252181 - RNA, 24 nt, Artificial Sequence
  Synthetic
accacuaucugaucuuugacaaac

SEQ ID NO: 252182 - RNA, 18 nt, Artificial Sequence
  Synthetic
aucagacacuuuacaaac

SEQ ID NO: 252183 - RNA, 19 nt, Artificial Sequence
  Synthetic
gaucagacacuuuacaaac

SEQ ID NO: 252184 - RNA, 20 nt, Artificial Sequence
  Synthetic
ggaucagacacuuuacaaac

SEQ ID NO: 252185 - RNA, 21 nt, Artificial Sequence
  Synthetic
uggaucagacacuuuacaaac

SEQ ID NO: 252186 - RNA, 22 nt, Artificial Sequence
  Synthetic
auggaucagacacuuuacaaac

SEQ ID NO: 252187 - RNA, 23 nt, Artificial Sequence
  Synthetic
uauggaucagacacuuuacaaac

SEQ ID NO: 252188 - RNA, 24 nt, Artificial Sequence
  Synthetic
auauggaucagacacuuuacaaac

SEQ ID NO: 252189 - RNA, 18 nt, Artificial Sequence
  Synthetic
aguccugagaagccaaac

SEQ ID NO: 252190 - RNA, 19 nt, Artificial Sequence
  Synthetic
gaguccugagaagccaaac

SEQ ID NO: 252191 - RNA, 20 nt, Artificial Sequence
  Synthetic
agaguccugagaagccaaac

SEQ ID NO: 252192 - RNA, 21 nt, Artificial Sequence
  Synthetic
gagaguccugagaagccaaac

SEQ ID NO: 252193 - RNA, 22 nt, Artificial Sequence
  Synthetic
ugagaguccugagaagccaaac

SEQ ID NO: 252194 - RNA, 23 nt, Artificial Sequence
  Synthetic
augagaguccugagaagccaaac

SEQ ID NO: 252195 - RNA, 24 nt, Artificial Sequence
  Synthetic
gaugagaguccugagaagccaaac

SEQ ID NO: 252196 - RNA, 18 nt, Artificial Sequence
  Synthetic
aaauggaagacgccaaac

SEQ ID NO: 252197 - RNA, 19 nt, Artificial Sequence
  Synthetic
gaaauggaagacgccaaac

SEQ ID NO: 252198 - RNA, 20 nt, Artificial Sequence
  Synthetic
agaaauggaagacgccaaac

SEQ ID NO: 252199 - RNA, 21 nt, Artificial Sequence
  Synthetic
gagaaauggaagacgccaaac

SEQ ID NO: 252200 - RNA, 22 nt, Artificial Sequence
  Synthetic
ugagaaauggaagacgccaaac

SEQ ID NO: 252201 - RNA, 23 nt, Artificial Sequence
  Synthetic
cugagaaauggaagacgccaaac

SEQ ID NO: 252202 - RNA, 24 nt, Artificial Sequence
  Synthetic
ucugagaaauggaagacgccaaac

SEQ ID NO: 252203 - RNA, 18 nt, Artificial Sequence
  Synthetic
aaccauagaaauccaaac

SEQ ID NO: 252204 - RNA, 19 nt, Artificial Sequence
  Synthetic
gaaccauagaaauccaaac

SEQ ID NO: 252205 - RNA, 20 nt, Artificial Sequence
  Synthetic
agaaccauagaaauccaaac

SEQ ID NO: 252206 - RNA, 21 nt, Artificial Sequence
  Synthetic
uagaaccauagaaauccaaac

SEQ ID NO: 252207 - RNA, 22 nt, Artificial Sequence
  Synthetic
uuagaaccauagaaauccaaac

SEQ ID NO: 252208 - RNA, 23 nt, Artificial Sequence
  Synthetic
cuuagaaccauagaaauccaaac

SEQ ID NO: 252209 - RNA, 24 nt, Artificial Sequence
  Synthetic
ucuuagaaccauagaaauccaaac

SEQ ID NO: 252210 - RNA, 18 nt, Artificial Sequence
  Synthetic
aguguuucagcuccaaac

SEQ ID NO: 252211 - RNA, 19 nt, Artificial Sequence
  Synthetic
aaguguuucagcuccaaac

SEQ ID NO: 252212 - RNA, 20 nt, Artificial Sequence
  Synthetic
aaaguguuucagcuccaaac

SEQ ID NO: 252213 - RNA, 21 nt, Artificial Sequence
  Synthetic
aaaaguguuucagcuccaaac

SEQ ID NO: 252214 - RNA, 22 nt, Artificial Sequence
  Synthetic
aaaaaguguuucagcuccaaac

SEQ ID NO: 252215 - RNA, 23 nt, Artificial Sequence
  Synthetic
caaaaaguguuucagcuccaaac

SEQ ID NO: 252216 - RNA, 24 nt, Artificial Sequence
  Synthetic
ucaaaaaguguuucagcuccaaac

SEQ ID NO: 252217 - RNA, 18 nt, Artificial Sequence
  Synthetic
cacuuacugcuuccaaac

SEQ ID NO: 252218 - RNA, 19 nt, Artificial Sequence
  Synthetic
ucacuuacugcuuccaaac

SEQ ID NO: 252219 - RNA, 20 nt, Artificial Sequence
  Synthetic
cucacuuacugcuuccaaac

SEQ ID NO: 252220 - RNA, 21 nt, Artificial Sequence
  Synthetic
ucucacuuacugcuuccaaac

SEQ ID NO: 252221 - RNA, 22 nt, Artificial Sequence
  Synthetic
uucucacuuacugcuuccaaac

SEQ ID NO: 252222 - RNA, 23 nt, Artificial Sequence
  Synthetic
uuucucacuuacugcuuccaaac

SEQ ID NO: 252223 - RNA, 24 nt, Artificial Sequence
  Synthetic
uuuucucacuuacugcuuccaaac

SEQ ID NO: 252224 - RNA, 18 nt, Artificial Sequence
  Synthetic
ucacagugagaagcaaac

SEQ ID NO: 252225 - RNA, 19 nt, Artificial Sequence
  Synthetic
aucacagugagaagcaaac

SEQ ID NO: 252226 - RNA, 20 nt, Artificial Sequence
  Synthetic
aaucacagugagaagcaaac

SEQ ID NO: 252227 - RNA, 21 nt, Artificial Sequence
  Synthetic
aaaucacagugagaagcaaac

SEQ ID NO: 252228 - RNA, 22 nt, Artificial Sequence
  Synthetic
aaaaucacagugagaagcaaac

SEQ ID NO: 252229 - RNA, 23 nt, Artificial Sequence
  Synthetic
uaaaaucacagugagaagcaaac

SEQ ID NO: 252230 - RNA, 24 nt, Artificial Sequence
  Synthetic
uuaaaaucacagugagaagcaaac

SEQ ID NO: 252231 - RNA, 18 nt, Artificial Sequence
  Synthetic
aagaaagaaucagcaaac

SEQ ID NO: 252232 - RNA, 19 nt, Artificial Sequence
  Synthetic
aaagaaagaaucagcaaac

SEQ ID NO: 252233 - RNA, 20 nt, Artificial Sequence
  Synthetic
aaaagaaagaaucagcaaac

SEQ ID NO: 252234 - RNA, 21 nt, Artificial Sequence
  Synthetic
caaaagaaagaaucagcaaac

SEQ ID NO: 252235 - RNA, 22 nt, Artificial Sequence
  Synthetic
gcaaaagaaagaaucagcaaac

SEQ ID NO: 252236 - RNA, 23 nt, Artificial Sequence
  Synthetic
ugcaaaagaaagaaucagcaaac

SEQ ID NO: 252237 - RNA, 24 nt, Artificial Sequence
  Synthetic
cugcaaaagaaagaaucagcaaac

SEQ ID NO: 252238 - RNA, 18 nt, Artificial Sequence
  Synthetic
acucagaaaauagcaaac

SEQ ID NO: 252239 - RNA, 19 nt, Artificial Sequence
  Synthetic
gacucagaaaauagcaaac

SEQ ID NO: 252240 - RNA, 20 nt, Artificial Sequence
  Synthetic
ggacucagaaaauagcaaac

SEQ ID NO: 252241 - RNA, 21 nt, Artificial Sequence
  Synthetic
uggacucagaaaauagcaaac

SEQ ID NO: 252242 - RNA, 22 nt, Artificial Sequence
  Synthetic
auggacucagaaaauagcaaac

SEQ ID NO: 252243 - RNA, 23 nt, Artificial Sequence
  Synthetic
aauggacucagaaaauagcaaac

SEQ ID NO: 252244 - RNA, 24 nt, Artificial Sequence
  Synthetic
gaauggacucagaaaauagcaaac

SEQ ID NO: 252245 - RNA, 18 nt, Artificial Sequence
  Synthetic
augaaggaaguagcaaac

SEQ ID NO: 252246 - RNA, 19 nt, Artificial Sequence
  Synthetic
aaugaaggaaguagcaaac

SEQ ID NO: 252247 - RNA, 20 nt, Artificial Sequence
  Synthetic
caaugaaggaaguagcaaac

SEQ ID NO: 252248 - RNA, 21 nt, Artificial Sequence
  Synthetic
acaaugaaggaaguagcaaac

SEQ ID NO: 252249 - RNA, 22 nt, Artificial Sequence
  Synthetic
aacaaugaaggaaguagcaaac

SEQ ID NO: 252250 - RNA, 23 nt, Artificial Sequence
  Synthetic
uaacaaugaaggaaguagcaaac

SEQ ID NO: 252251 - RNA, 24 nt, Artificial Sequence
  Synthetic
auaacaaugaaggaaguagcaaac

SEQ ID NO: 252252 - RNA, 18 nt, Artificial Sequence
  Synthetic
agaggaagcuuagcaaac

SEQ ID NO: 252253 - RNA, 19 nt, Artificial Sequence
  Synthetic
uagaggaagcuuagcaaac

SEQ ID NO: 252254 - RNA, 20 nt, Artificial Sequence
  Synthetic
cuagaggaagcuuagcaaac

SEQ ID NO: 252255 - RNA, 21 nt, Artificial Sequence
  Synthetic
acuagaggaagcuuagcaaac

SEQ ID NO: 252256 - RNA, 22 nt, Artificial Sequence
  Synthetic
gacuagaggaagcuuagcaaac

SEQ ID NO: 252257 - RNA, 23 nt, Artificial Sequence
  Synthetic
ggacuagaggaagcuuagcaaac

SEQ ID NO: 252258 - RNA, 24 nt, Artificial Sequence
  Synthetic
gggacuagaggaagcuuagcaaac

SEQ ID NO: 252259 - RNA, 18 nt, Artificial Sequence
  Synthetic
gugguccucagggcaaac

SEQ ID NO: 252260 - RNA, 19 nt, Artificial Sequence
  Synthetic
ugugguccucagggcaaac

SEQ ID NO: 252261 - RNA, 20 nt, Artificial Sequence
  Synthetic
uugugguccucagggcaaac

SEQ ID NO: 252262 - RNA, 21 nt, Artificial Sequence
  Synthetic
auugugguccucagggcaaac

SEQ ID NO: 252263 - RNA, 22 nt, Artificial Sequence
  Synthetic
aauugugguccucagggcaaac

SEQ ID NO: 252264 - RNA, 23 nt, Artificial Sequence
  Synthetic
aaauugugguccucagggcaaac

SEQ ID NO: 252265 - RNA, 24 nt, Artificial Sequence
  Synthetic
caaauugugguccucagggcaaac

SEQ ID NO: 252266 - RNA, 18 nt, Artificial Sequence
  Synthetic
aauuguggugaugcaaac

SEQ ID NO: 252267 - RNA, 19 nt, Artificial Sequence
  Synthetic
aaauuguggugaugcaaac

SEQ ID NO: 252268 - RNA, 20 nt, Artificial Sequence
  Synthetic
caaauuguggugaugcaaac

SEQ ID NO: 252269 - RNA, 21 nt, Artificial Sequence
  Synthetic
ucaaauuguggugaugcaaac

SEQ ID NO: 252270 - RNA, 22 nt, Artificial Sequence
  Synthetic
uucaaauuguggugaugcaaac

SEQ ID NO: 252271 - RNA, 23 nt, Artificial Sequence
  Synthetic
guucaaauuguggugaugcaaac

SEQ ID NO: 252272 - RNA, 24 nt, Artificial Sequence
  Synthetic
aguucaaauuguggugaugcaaac

SEQ ID NO: 252273 - RNA, 18 nt, Artificial Sequence
  Synthetic
aucaugucgucugcaaac

SEQ ID NO: 252274 - RNA, 19 nt, Artificial Sequence
  Synthetic
aaucaugucgucugcaaac

SEQ ID NO: 252275 - RNA, 20 nt, Artificial Sequence
  Synthetic
caaucaugucgucugcaaac

SEQ ID NO: 252276 - RNA, 22 nt, Artificial Sequence
  Synthetic
aacaaucaugucgucugcaaac

SEQ ID NO: 252277 - RNA, 23 nt, Artificial Sequence
  Synthetic
aaacaaucaugucgucugcaaac

SEQ ID NO: 252278 - RNA, 24 nt, Artificial Sequence
  Synthetic
uaaacaaucaugucgucugcaaac

SEQ ID NO: 252279 - RNA, 18 nt, Artificial Sequence
  Synthetic
uuuucaaauauugcaaac

SEQ ID NO: 252280 - RNA, 19 nt, Artificial Sequence
  Synthetic
cuuuucaaauauugcaaac

SEQ ID NO: 252281 - RNA, 20 nt, Artificial Sequence
  Synthetic
ucuuuucaaauauugcaaac

SEQ ID NO: 252282 - RNA, 21 nt, Artificial Sequence
  Synthetic
cucuuuucaaauauugcaaac

SEQ ID NO: 252283 - RNA, 22 nt, Artificial Sequence
  Synthetic
acucuuuucaaauauugcaaac

SEQ ID NO: 252284 - RNA, 23 nt, Artificial Sequence
  Synthetic
gacucuuuucaaauauugcaaac

SEQ ID NO: 252285 - RNA, 24 nt, Artificial Sequence
  Synthetic
agacucuuuucaaauauugcaaac

SEQ ID NO: 252286 - RNA, 18 nt, Artificial Sequence
  Synthetic
aacgacagccaaucaaac

SEQ ID NO: 252287 - RNA, 19 nt, Artificial Sequence
  Synthetic
aaacgacagccaaucaaac

SEQ ID NO: 252288 - RNA, 20 nt, Artificial Sequence
  Synthetic
uaaacgacagccaaucaaac

SEQ ID NO: 252289 - RNA, 21 nt, Artificial Sequence
  Synthetic
guaaacgacagccaaucaaac

SEQ ID NO: 252290 - RNA, 22 nt, Artificial Sequence
  Synthetic
gguaaacgacagccaaucaaac

SEQ ID NO: 252291 - RNA, 23 nt, Artificial Sequence
  Synthetic
agguaaacgacagccaaucaaac

SEQ ID NO: 252292 - RNA, 24 nt, Artificial Sequence
  Synthetic
uagguaaacgacagccaaucaaac

SEQ ID NO: 252293 - RNA, 18 nt, Artificial Sequence
  Synthetic
uagcaaugauaaucaaac

SEQ ID NO: 252294 - RNA, 19 nt, Artificial Sequence
  Synthetic
cuagcaaugauaaucaaac

SEQ ID NO: 252295 - RNA, 20 nt, Artificial Sequence
  Synthetic
ucuagcaaugauaaucaaac

SEQ ID NO: 252296 - RNA, 21 nt, Artificial Sequence
  Synthetic
uucuagcaaugauaaucaaac

SEQ ID NO: 252297 - RNA, 22 nt, Artificial Sequence
  Synthetic
guucuagcaaugauaaucaaac

SEQ ID NO: 252298 - RNA, 23 nt, Artificial Sequence
  Synthetic
aguucuagcaaugauaaucaaac

SEQ ID NO: 252299 - RNA, 24 nt, Artificial Sequence
  Synthetic
caguucuagcaaugauaaucaaac

SEQ ID NO: 252300 - RNA, 18 nt, Artificial Sequence
  Synthetic
aaugucaauggaucaaac

SEQ ID NO: 252301 - RNA, 19 nt, Artificial Sequence
  Synthetic
gaaugucaauggaucaaac

SEQ ID NO: 252302 - RNA, 20 nt, Artificial Sequence
  Synthetic
agaaugucaauggaucaaac

SEQ ID NO: 252303 - RNA, 21 nt, Artificial Sequence
  Synthetic
uagaaugucaauggaucaaac

SEQ ID NO: 252304 - RNA, 22 nt, Artificial Sequence
  Synthetic
cuagaaugucaauggaucaaac

SEQ ID NO: 252305 - RNA, 23 nt, Artificial Sequence
  Synthetic
ccuagaaugucaauggaucaaac

SEQ ID NO: 252306 - RNA, 24 nt, Artificial Sequence
  Synthetic
gccuagaaugucaauggaucaaac

SEQ ID NO: 252307 - RNA, 18 nt, Artificial Sequence
  Synthetic
auuuuugaacacucaaac

SEQ ID NO: 252308 - RNA, 19 nt, Artificial Sequence
  Synthetic
uauuuuugaacacucaaac

SEQ ID NO: 252309 - RNA, 20 nt, Artificial Sequence
  Synthetic
uuauuuuugaacacucaaac

SEQ ID NO: 252310 - RNA, 21 nt, Artificial Sequence
  Synthetic
auuauuuuugaacacucaaac

SEQ ID NO: 252311 - RNA, 22 nt, Artificial Sequence
  Synthetic
aauuauuuuugaacacucaaac

SEQ ID NO: 252312 - RNA, 23 nt, Artificial Sequence
  Synthetic
gaauuauuuuugaacacucaaac

SEQ ID NO: 252313 - RNA, 24 nt, Artificial Sequence
  Synthetic
agaauuauuuuugaacacucaaac

SEQ ID NO: 252314 - RNA, 18 nt, Artificial Sequence
  Synthetic
uacaauaaaaucucaaac

SEQ ID NO: 252315 - RNA, 19 nt, Artificial Sequence
  Synthetic
auacaauaaaaucucaaac

SEQ ID NO: 252316 - RNA, 20 nt, Artificial Sequence
  Synthetic
aauacaauaaaaucucaaac

SEQ ID NO: 252317 - RNA, 21 nt, Artificial Sequence
  Synthetic
caauacaauaaaaucucaaac

SEQ ID NO: 252318 - RNA, 22 nt, Artificial Sequence
  Synthetic
acaauacaauaaaaucucaaac

SEQ ID NO: 252319 - RNA, 23 nt, Artificial Sequence
  Synthetic
uacaauacaauaaaaucucaaac

SEQ ID NO: 252320 - RNA, 24 nt, Artificial Sequence
  Synthetic
auacaauacaauaaaaucucaaac

SEQ ID NO: 252321 - RNA, 18 nt, Artificial Sequence
  Synthetic
gcccgacugccuucaaac

SEQ ID NO: 252322 - RNA, 19 nt, Artificial Sequence
  Synthetic
ugcccgacugccuucaaac

SEQ ID NO: 252323 - RNA, 20 nt, Artificial Sequence
  Synthetic
cugcccgacugccuucaaac

SEQ ID NO: 252324 - RNA, 21 nt, Artificial Sequence
  Synthetic
ucugcccgacugccuucaaac

SEQ ID NO: 252325 - RNA, 22 nt, Artificial Sequence
  Synthetic
uucugcccgacugccuucaaac

SEQ ID NO: 252326 - RNA, 23 nt, Artificial Sequence
  Synthetic
guucugcccgacugccuucaaac

SEQ ID NO: 252327 - RNA, 24 nt, Artificial Sequence
  Synthetic
cguucugcccgacugccuucaaac

SEQ ID NO: 252328 - RNA, 18 nt, Artificial Sequence
  Synthetic
aauacaaaaauuucaaac

SEQ ID NO: 252329 - RNA, 19 nt, Artificial Sequence
  Synthetic
gaauacaaaaauuucaaac

SEQ ID NO: 252330 - RNA, 20 nt, Artificial Sequence
  Synthetic
ugaauacaaaaauuucaaac

SEQ ID NO: 252331 - RNA, 21 nt, Artificial Sequence
  Synthetic
augaauacaaaaauuucaaac

SEQ ID NO: 252332 - RNA, 22 nt, Artificial Sequence
  Synthetic
uaugaauacaaaaauuucaaac

SEQ ID NO: 252333 - RNA, 23 nt, Artificial Sequence
  Synthetic
auaugaauacaaaaauuucaaac

SEQ ID NO: 252334 - RNA, 24 nt, Artificial Sequence
  Synthetic
uauaugaauacaaaaauuucaaac

SEQ ID NO: 252335 - RNA, 18 nt, Artificial Sequence
  Synthetic
uaucuagacuuuucaaac

SEQ ID NO: 252336 - RNA, 19 nt, Artificial Sequence
  Synthetic
auaucuagacuuuucaaac

SEQ ID NO: 252337 - RNA, 20 nt, Artificial Sequence
  Synthetic
uauaucuagacuuuucaaac

SEQ ID NO: 252338 - RNA, 21 nt, Artificial Sequence
  Synthetic
uuauaucuagacuuuucaaac

SEQ ID NO: 252339 - RNA, 22 nt, Artificial Sequence
  Synthetic
cuuauaucuagacuuuucaaac

SEQ ID NO: 252340 - RNA, 23 nt, Artificial Sequence
  Synthetic
ucuuauaucuagacuuuucaaac

SEQ ID NO: 252341 - RNA, 24 nt, Artificial Sequence
  Synthetic
cucuuauaucuagacuuuucaaac

SEQ ID NO: 252342 - RNA, 18 nt, Artificial Sequence
  Synthetic
ggcuuagacuuuucaaac

SEQ ID NO: 252343 - RNA, 19 nt, Artificial Sequence
  Synthetic
aggcuuagacuuuucaaac

SEQ ID NO: 252344 - RNA, 20 nt, Artificial Sequence
  Synthetic
caggcuuagacuuuucaaac

SEQ ID NO: 252345 - RNA, 21 nt, Artificial Sequence
  Synthetic
ccaggcuuagacuuuucaaac

SEQ ID NO: 252346 - RNA, 22 nt, Artificial Sequence
  Synthetic
accaggcuuagacuuuucaaac

SEQ ID NO: 252347 - RNA, 23 nt, Artificial Sequence
  Synthetic
uaccaggcuuagacuuuucaaac

SEQ ID NO: 252348 - RNA, 24 nt, Artificial Sequence
  Synthetic
uuaccaggcuuagacuuuucaaac

SEQ ID NO: 252349 - RNA, 18 nt, Artificial Sequence
  Synthetic
uguggguucaaaagaaac

SEQ ID NO: 252350 - RNA, 19 nt, Artificial Sequence
  Synthetic
auguggguucaaaagaaac

SEQ ID NO: 252351 - RNA, 20 nt, Artificial Sequence
  Synthetic
cauguggguucaaaagaaac

SEQ ID NO: 252352 - RNA, 21 nt, Artificial Sequence
  Synthetic
acauguggguucaaaagaaac

SEQ ID NO: 252353 - RNA, 22 nt, Artificial Sequence
  Synthetic
uacauguggguucaaaagaaac

SEQ ID NO: 252354 - RNA, 23 nt, Artificial Sequence
  Synthetic
cuacauguggguucaaaagaaac

SEQ ID NO: 252355 - RNA, 24 nt, Artificial Sequence
  Synthetic
gcuacauguggguucaaaagaaac

SEQ ID NO: 252356 - RNA, 18 nt, Artificial Sequence
  Synthetic
uguguuuuacaaagaaac

SEQ ID NO: 252357 - RNA, 19 nt, Artificial Sequence
  Synthetic
uuguguuuuacaaagaaac

SEQ ID NO: 252358 - RNA, 20 nt, Artificial Sequence
  Synthetic
guuguguuuuacaaagaaac

SEQ ID NO: 252359 - RNA, 21 nt, Artificial Sequence
  Synthetic
uguuguguuuuacaaagaaac

SEQ ID NO: 252360 - RNA, 22 nt, Artificial Sequence
  Synthetic
auguuguguuuuacaaagaaac

SEQ ID NO: 252361 - RNA, 23 nt, Artificial Sequence
  Synthetic
uauguuguguuuuacaaagaaac

SEQ ID NO: 252362 - RNA, 24 nt, Artificial Sequence
  Synthetic
auauguuguguuuuacaaagaaac

SEQ ID NO: 252363 - RNA, 18 nt, Artificial Sequence
  Synthetic
uuguuucuugaaagaaac

SEQ ID NO: 252364 - RNA, 19 nt, Artificial Sequence
  Synthetic
uuuguuucuugaaagaaac

SEQ ID NO: 252365 - RNA, 20 nt, Artificial Sequence
  Synthetic
uuuuguuucuugaaagaaac

SEQ ID NO: 252366 - RNA, 21 nt, Artificial Sequence
  Synthetic
uuuuuguuucuugaaagaaac

SEQ ID NO: 252367 - RNA, 22 nt, Artificial Sequence
  Synthetic
guuuuuguuucuugaaagaaac

SEQ ID NO: 252368 - RNA, 23 nt, Artificial Sequence
  Synthetic
uguuuuuguuucuugaaagaaac

SEQ ID NO: 252369 - RNA, 24 nt, Artificial Sequence
  Synthetic
guguuuuuguuucuugaaagaaac

SEQ ID NO: 252370 - RNA, 18 nt, Artificial Sequence
  Synthetic
cuguuacuguaaagaaac

SEQ ID NO: 252371 - RNA, 19 nt, Artificial Sequence
  Synthetic
gcuguuacuguaaagaaac

SEQ ID NO: 252372 - RNA, 20 nt, Artificial Sequence
  Synthetic
ugcuguuacuguaaagaaac

SEQ ID NO: 252373 - RNA, 21 nt, Artificial Sequence
  Synthetic
uugcuguuacuguaaagaaac

SEQ ID NO: 252374 - RNA, 22 nt, Artificial Sequence
  Synthetic
auugcuguuacuguaaagaaac

SEQ ID NO: 252375 - RNA, 23 nt, Artificial Sequence
  Synthetic
aauugcuguuacuguaaagaaac

SEQ ID NO: 252376 - RNA, 24 nt, Artificial Sequence
  Synthetic
uaauugcuguuacuguaaagaaac

SEQ ID NO: 252377 - RNA, 18 nt, Artificial Sequence
  Synthetic
auacucugaccaagaaac

SEQ ID NO: 252378 - RNA, 19 nt, Artificial Sequence
  Synthetic
cauacucugaccaagaaac

SEQ ID NO: 252379 - RNA, 20 nt, Artificial Sequence
  Synthetic
ucauacucugaccaagaaac

SEQ ID NO: 252380 - RNA, 21 nt, Artificial Sequence
  Synthetic
gucauacucugaccaagaaac

SEQ ID NO: 252381 - RNA, 22 nt, Artificial Sequence
  Synthetic
ugucauacucugaccaagaaac

SEQ ID NO: 252382 - RNA, 23 nt, Artificial Sequence
  Synthetic
cugucauacucugaccaagaaac

SEQ ID NO: 252383 - RNA, 24 nt, Artificial Sequence
  Synthetic
acugucauacucugaccaagaaac

SEQ ID NO: 252384 - RNA, 18 nt, Artificial Sequence
  Synthetic
cagcagaagccaagaaac

SEQ ID NO: 252385 - RNA, 19 nt, Artificial Sequence
  Synthetic
gcagcagaagccaagaaac

SEQ ID NO: 252386 - RNA, 20 nt, Artificial Sequence
  Synthetic
ggcagcagaagccaagaaac

SEQ ID NO: 252387 - RNA, 21 nt, Artificial Sequence
  Synthetic
aggcagcagaagccaagaaac

SEQ ID NO: 252388 - RNA, 22 nt, Artificial Sequence
  Synthetic
caggcagcagaagccaagaaac

SEQ ID NO: 252389 - RNA, 23 nt, Artificial Sequence
  Synthetic
acaggcagcagaagccaagaaac

SEQ ID NO: 252390 - RNA, 24 nt, Artificial Sequence
  Synthetic
aacaggcagcagaagccaagaaac

SEQ ID NO: 252391 - RNA, 18 nt, Artificial Sequence
  Synthetic
gacuggaugagaagaaac

SEQ ID NO: 252392 - RNA, 19 nt, Artificial Sequence
  Synthetic
ugacuggaugagaagaaac

SEQ ID NO: 252393 - RNA, 20 nt, Artificial Sequence
  Synthetic
gugacuggaugagaagaaac

SEQ ID NO: 252394 - RNA, 21 nt, Artificial Sequence
  Synthetic
ugugacuggaugagaagaaac

SEQ ID NO: 252395 - RNA, 22 nt, Artificial Sequence
  Synthetic
uugugacuggaugagaagaaac

SEQ ID NO: 252396 - RNA, 23 nt, Artificial Sequence
  Synthetic
auugugacuggaugagaagaaac

SEQ ID NO: 252397 - RNA, 24 nt, Artificial Sequence
  Synthetic
cauugugacuggaugagaagaaac

SEQ ID NO: 252398 - RNA, 18 nt, Artificial Sequence
  Synthetic
aguggcaguggaagaaac

SEQ ID NO: 252399 - RNA, 19 nt, Artificial Sequence
  Synthetic
aaguggcaguggaagaaac

SEQ ID NO: 252400 - RNA, 20 nt, Artificial Sequence
  Synthetic
uaaguggcaguggaagaaac

SEQ ID NO: 252401 - RNA, 21 nt, Artificial Sequence
  Synthetic
cuaaguggcaguggaagaaac

SEQ ID NO: 252402 - RNA, 22 nt, Artificial Sequence
  Synthetic
ucuaaguggcaguggaagaaac

SEQ ID NO: 252403 - RNA, 23 nt, Artificial Sequence
  Synthetic
uucuaaguggcaguggaagaaac

SEQ ID NO: 252404 - RNA, 24 nt, Artificial Sequence
  Synthetic
uuucuaaguggcaguggaagaaac

SEQ ID NO: 252405 - RNA, 18 nt, Artificial Sequence
  Synthetic
gcuuucgccauaagaaac

SEQ ID NO: 252406 - RNA, 19 nt, Artificial Sequence
  Synthetic
agcuuucgccauaagaaac

SEQ ID NO: 252407 - RNA, 20 nt, Artificial Sequence
  Synthetic
aagcuuucgccauaagaaac

SEQ ID NO: 252408 - RNA, 21 nt, Artificial Sequence
  Synthetic
caagcuuucgccauaagaaac

SEQ ID NO: 252409 - RNA, 22 nt, Artificial Sequence
  Synthetic
ucaagcuuucgccauaagaaac

SEQ ID NO: 252410 - RNA, 23 nt, Artificial Sequence
  Synthetic
cucaagcuuucgccauaagaaac

SEQ ID NO: 252411 - RNA, 24 nt, Artificial Sequence
  Synthetic
acucaagcuuucgccauaagaaac

SEQ ID NO: 252412 - RNA, 18 nt, Artificial Sequence
  Synthetic
gcuucuaccuuaagaaac

SEQ ID NO: 252413 - RNA, 19 nt, Artificial Sequence
  Synthetic
agcuucuaccuuaagaaac

SEQ ID NO: 252414 - RNA, 20 nt, Artificial Sequence
  Synthetic
aagcuucuaccuuaagaaac

SEQ ID NO: 252415 - RNA, 21 nt, Artificial Sequence
  Synthetic
uaagcuucuaccuuaagaaac

SEQ ID NO: 252416 - RNA, 22 nt, Artificial Sequence
  Synthetic
cuaagcuucuaccuuaagaaac

SEQ ID NO: 252417 - RNA, 23 nt, Artificial Sequence
  Synthetic
ccuaagcuucuaccuuaagaaac

SEQ ID NO: 252418 - RNA, 24 nt, Artificial Sequence
  Synthetic
gccuaagcuucuaccuuaagaaac

SEQ ID NO: 252419 - RNA, 18 nt, Artificial Sequence
  Synthetic
uucuacaaaaacagaaac

SEQ ID NO: 252420 - RNA, 19 nt, Artificial Sequence
  Synthetic
cuucuacaaaaacagaaac

SEQ ID NO: 252421 - RNA, 20 nt, Artificial Sequence
  Synthetic
acuucuacaaaaacagaaac

SEQ ID NO: 252422 - RNA, 21 nt, Artificial Sequence
  Synthetic
gacuucuacaaaaacagaaac

SEQ ID NO: 252423 - RNA, 22 nt, Artificial Sequence
  Synthetic
ggacuucuacaaaaacagaaac

SEQ ID NO: 252424 - RNA, 23 nt, Artificial Sequence
  Synthetic
gggacuucuacaaaaacagaaac

SEQ ID NO: 252425 - RNA, 24 nt, Artificial Sequence
  Synthetic
ugggacuucuacaaaaacagaaac

SEQ ID NO: 252426 - RNA, 18 nt, Artificial Sequence
  Synthetic
acugauacauacagaaac

SEQ ID NO: 252427 - RNA, 19 nt, Artificial Sequence
  Synthetic
uacugauacauacagaaac

SEQ ID NO: 252428 - RNA, 20 nt, Artificial Sequence
  Synthetic
guacugauacauacagaaac

SEQ ID NO: 252429 - RNA, 21 nt, Artificial Sequence
  Synthetic
uguacugauacauacagaaac

SEQ ID NO: 252430 - RNA, 22 nt, Artificial Sequence
  Synthetic
auguacugauacauacagaaac

SEQ ID NO: 252431 - RNA, 23 nt, Artificial Sequence
  Synthetic
uauguacugauacauacagaaac

SEQ ID NO: 252432 - RNA, 24 nt, Artificial Sequence
  Synthetic
cuauguacugauacauacagaaac

SEQ ID NO: 252433 - RNA, 18 nt, Artificial Sequence
  Synthetic
uuaccaaagcccagaaac

SEQ ID NO: 252434 - RNA, 19 nt, Artificial Sequence
  Synthetic
uuuaccaaagcccagaaac

SEQ ID NO: 252435 - RNA, 20 nt, Artificial Sequence
  Synthetic
uuuuaccaaagcccagaaac

SEQ ID NO: 252436 - RNA, 21 nt, Artificial Sequence
  Synthetic
guuuuaccaaagcccagaaac

SEQ ID NO: 252437 - RNA, 22 nt, Artificial Sequence
  Synthetic
aguuuuaccaaagcccagaaac

SEQ ID NO: 252438 - RNA, 23 nt, Artificial Sequence
  Synthetic
aaguuuuaccaaagcccagaaac

SEQ ID NO: 252439 - RNA, 24 nt, Artificial Sequence
  Synthetic
caaguuuuaccaaagcccagaaac

SEQ ID NO: 252440 - RNA, 18 nt, Artificial Sequence
  Synthetic
agcacaaaaagcagaaac

SEQ ID NO: 252441 - RNA, 19 nt, Artificial Sequence
  Synthetic
cagcacaaaaagcagaaac

SEQ ID NO: 252442 - RNA, 20 nt, Artificial Sequence
  Synthetic
gcagcacaaaaagcagaaac

SEQ ID NO: 252443 - RNA, 21 nt, Artificial Sequence
  Synthetic
agcagcacaaaaagcagaaac

SEQ ID NO: 252444 - RNA, 22 nt, Artificial Sequence
  Synthetic
aagcagcacaaaaagcagaaac

SEQ ID NO: 252445 - RNA, 23 nt, Artificial Sequence
  Synthetic
aaagcagcacaaaaagcagaaac

SEQ ID NO: 252446 - RNA, 24 nt, Artificial Sequence
  Synthetic
gaaagcagcacaaaaagcagaaac

SEQ ID NO: 252447 - RNA, 18 nt, Artificial Sequence
  Synthetic
uaggauauucagagaaac

SEQ ID NO: 252448 - RNA, 19 nt, Artificial Sequence
  Synthetic
auaggauauucagagaaac

SEQ ID NO: 252449 - RNA, 20 nt, Artificial Sequence
  Synthetic
cauaggauauucagagaaac

SEQ ID NO: 252450 - RNA, 21 nt, Artificial Sequence
  Synthetic
acauaggauauucagagaaac

SEQ ID NO: 252451 - RNA, 22 nt, Artificial Sequence
  Synthetic
aacauaggauauucagagaaac

SEQ ID NO: 252452 - RNA, 23 nt, Artificial Sequence
  Synthetic
caacauaggauauucagagaaac

SEQ ID NO: 252453 - RNA, 24 nt, Artificial Sequence
  Synthetic
acaacauaggauauucagagaaac

SEQ ID NO: 252454 - RNA, 18 nt, Artificial Sequence
  Synthetic
uaaaauaaggagagaaac

SEQ ID NO: 252455 - RNA, 19 nt, Artificial Sequence
  Synthetic
auaaaauaaggagagaaac

SEQ ID NO: 252456 - RNA, 20 nt, Artificial Sequence
  Synthetic
aauaaaauaaggagagaaac

SEQ ID NO: 252457 - RNA, 21 nt, Artificial Sequence
  Synthetic
aaauaaaauaaggagagaaac

SEQ ID NO: 252458 - RNA, 22 nt, Artificial Sequence
  Synthetic
gaaauaaaauaaggagagaaac

SEQ ID NO: 252459 - RNA, 23 nt, Artificial Sequence
  Synthetic
agaaauaaaauaaggagagaaac

SEQ ID NO: 252460 - RNA, 24 nt, Artificial Sequence
  Synthetic
aagaaauaaaauaaggagagaaac

SEQ ID NO: 252461 - RNA, 18 nt, Artificial Sequence
  Synthetic
gugcaguaaaggagaaac

SEQ ID NO: 252462 - RNA, 19 nt, Artificial Sequence
  Synthetic
agugcaguaaaggagaaac

SEQ ID NO: 252463 - RNA, 20 nt, Artificial Sequence
  Synthetic
cagugcaguaaaggagaaac

SEQ ID NO: 252464 - RNA, 21 nt, Artificial Sequence
  Synthetic
acagugcaguaaaggagaaac

SEQ ID NO: 252465 - RNA, 22 nt, Artificial Sequence
  Synthetic
gacagugcaguaaaggagaaac

SEQ ID NO: 252466 - RNA, 23 nt, Artificial Sequence
  Synthetic
agacagugcaguaaaggagaaac

SEQ ID NO: 252467 - RNA, 24 nt, Artificial Sequence
  Synthetic
aagacagugcaguaaaggagaaac

SEQ ID NO: 252468 - RNA, 18 nt, Artificial Sequence
  Synthetic
uaaauauaugggagaaac

SEQ ID NO: 252469 - RNA, 19 nt, Artificial Sequence
  Synthetic
guaaauauaugggagaaac

SEQ ID NO: 252470 - RNA, 20 nt, Artificial Sequence
  Synthetic
gguaaauauaugggagaaac

SEQ ID NO: 252471 - RNA, 21 nt, Artificial Sequence
  Synthetic
agguaaauauaugggagaaac

SEQ ID NO: 252472 - RNA, 22 nt, Artificial Sequence
  Synthetic
aagguaaauauaugggagaaac

SEQ ID NO: 252473 - RNA, 23 nt, Artificial Sequence
  Synthetic
gaagguaaauauaugggagaaac

SEQ ID NO: 252474 - RNA, 24 nt, Artificial Sequence
  Synthetic
ggaagguaaauauaugggagaaac

SEQ ID NO: 252475 - RNA, 18 nt, Artificial Sequence
  Synthetic
gugaggauguggagaaac

SEQ ID NO: 252476 - RNA, 19 nt, Artificial Sequence
  Synthetic
ggugaggauguggagaaac

SEQ ID NO: 252477 - RNA, 20 nt, Artificial Sequence
  Synthetic
uggugaggauguggagaaac

SEQ ID NO: 252478 - RNA, 21 nt, Artificial Sequence
  Synthetic
cuggugaggauguggagaaac

SEQ ID NO: 252479 - RNA, 22 nt, Artificial Sequence
  Synthetic
gcuggugaggauguggagaaac

SEQ ID NO: 252480 - RNA, 23 nt, Artificial Sequence
  Synthetic
ugcuggugaggauguggagaaac

SEQ ID NO: 252481 - RNA, 24 nt, Artificial Sequence
  Synthetic
gugcuggugaggauguggagaaac

SEQ ID NO: 252482 - RNA, 18 nt, Artificial Sequence
  Synthetic
gagcuuuaccugagaaac

SEQ ID NO: 252483 - RNA, 19 nt, Artificial Sequence
  Synthetic
agagcuuuaccugagaaac

SEQ ID NO: 252484 - RNA, 20 nt, Artificial Sequence
  Synthetic
cagagcuuuaccugagaaac

SEQ ID NO: 252485 - RNA, 21 nt, Artificial Sequence
  Synthetic
ccagagcuuuaccugagaaac

SEQ ID NO: 252486 - RNA, 22 nt, Artificial Sequence
  Synthetic
uccagagcuuuaccugagaaac

SEQ ID NO: 252487 - RNA, 23 nt, Artificial Sequence
  Synthetic
uuccagagcuuuaccugagaaac

SEQ ID NO: 252488 - RNA, 24 nt, Artificial Sequence
  Synthetic
uuuccagagcuuuaccugagaaac

SEQ ID NO: 252489 - RNA, 18 nt, Artificial Sequence
  Synthetic
accaucucauugagaaac

SEQ ID NO: 252490 - RNA, 19 nt, Artificial Sequence
  Synthetic
uaccaucucauugagaaac

SEQ ID NO: 252491 - RNA, 20 nt, Artificial Sequence
  Synthetic
auaccaucucauugagaaac

SEQ ID NO: 252492 - RNA, 21 nt, Artificial Sequence
  Synthetic
aauaccaucucauugagaaac

SEQ ID NO: 252493 - RNA, 22 nt, Artificial Sequence
  Synthetic
uaauaccaucucauugagaaac

SEQ ID NO: 252494 - RNA, 23 nt, Artificial Sequence
  Synthetic
uuaauaccaucucauugagaaac

SEQ ID NO: 252495 - RNA, 24 nt, Artificial Sequence
  Synthetic
auuaauaccaucucauugagaaac

SEQ ID NO: 252496 - RNA, 18 nt, Artificial Sequence
  Synthetic
gauggcaacaguagaaac

SEQ ID NO: 252497 - RNA, 19 nt, Artificial Sequence
  Synthetic
agauggcaacaguagaaac

SEQ ID NO: 252498 - RNA, 20 nt, Artificial Sequence
  Synthetic
aagauggcaacaguagaaac

SEQ ID NO: 252499 - RNA, 21 nt, Artificial Sequence
  Synthetic
gaagauggcaacaguagaaac

SEQ ID NO: 252500 - RNA, 22 nt, Artificial Sequence
  Synthetic
ugaagauggcaacaguagaaac

SEQ ID NO: 252501 - RNA, 23 nt, Artificial Sequence
  Synthetic
uugaagauggcaacaguagaaac

SEQ ID NO: 252502 - RNA, 24 nt, Artificial Sequence
  Synthetic
auugaagauggcaacaguagaaac

SEQ ID NO: 252503 - RNA, 18 nt, Artificial Sequence
  Synthetic
gauggauuccguagaaac

SEQ ID NO: 252504 - RNA, 19 nt, Artificial Sequence
  Synthetic
ggauggauuccguagaaac

SEQ ID NO: 252505 - RNA, 20 nt, Artificial Sequence
  Synthetic
aggauggauuccguagaaac

SEQ ID NO: 252506 - RNA, 21 nt, Artificial Sequence
  Synthetic
gaggauggauuccguagaaac

SEQ ID NO: 252507 - RNA, 22 nt, Artificial Sequence
  Synthetic
ugaggauggauuccguagaaac

SEQ ID NO: 252508 - RNA, 23 nt, Artificial Sequence
  Synthetic
cugaggauggauuccguagaaac

SEQ ID NO: 252509 - RNA, 24 nt, Artificial Sequence
  Synthetic
acugaggauggauuccguagaaac

SEQ ID NO: 252510 - RNA, 18 nt, Artificial Sequence
  Synthetic
ggagugaggcuuagaaac

SEQ ID NO: 252511 - RNA, 19 nt, Artificial Sequence
  Synthetic
uggagugaggcuuagaaac

SEQ ID NO: 252512 - RNA, 20 nt, Artificial Sequence
  Synthetic
auggagugaggcuuagaaac

SEQ ID NO: 252513 - RNA, 21 nt, Artificial Sequence
  Synthetic
aauggagugaggcuuagaaac

SEQ ID NO: 252514 - RNA, 22 nt, Artificial Sequence
  Synthetic
uaauggagugaggcuuagaaac

SEQ ID NO: 252515 - RNA, 23 nt, Artificial Sequence
  Synthetic
guaauggagugaggcuuagaaac

SEQ ID NO: 252516 - RNA, 24 nt, Artificial Sequence
  Synthetic
uguaauggagugaggcuuagaaac

SEQ ID NO: 252517 - RNA, 18 nt, Artificial Sequence
  Synthetic
accauaaaaguuagaaac

SEQ ID NO: 252518 - RNA, 19 nt, Artificial Sequence
  Synthetic
aaccauaaaaguuagaaac

SEQ ID NO: 252519 - RNA, 20 nt, Artificial Sequence
  Synthetic
aaaccauaaaaguuagaaac

SEQ ID NO: 252520 - RNA, 21 nt, Artificial Sequence
  Synthetic
gaaaccauaaaaguuagaaac

SEQ ID NO: 252521 - RNA, 22 nt, Artificial Sequence
  Synthetic
agaaaccauaaaaguuagaaac

SEQ ID NO: 252522 - RNA, 23 nt, Artificial Sequence
  Synthetic
aagaaaccauaaaaguuagaaac

SEQ ID NO: 252523 - RNA, 24 nt, Artificial Sequence
  Synthetic
aaagaaaccauaaaaguuagaaac

SEQ ID NO: 252524 - RNA, 18 nt, Artificial Sequence
  Synthetic
aagccuccucuccgaaac

SEQ ID NO: 252525 - RNA, 19 nt, Artificial Sequence
  Synthetic
caagccuccucuccgaaac

SEQ ID NO: 252526 - RNA, 20 nt, Artificial Sequence
  Synthetic
ucaagccuccucuccgaaac

SEQ ID NO: 252527 - RNA, 21 nt, Artificial Sequence
  Synthetic
cucaagccuccucuccgaaac

SEQ ID NO: 252528 - RNA, 22 nt, Artificial Sequence
  Synthetic
acucaagccuccucuccgaaac

SEQ ID NO: 252529 - RNA, 23 nt, Artificial Sequence
  Synthetic
gacucaagccuccucuccgaaac

SEQ ID NO: 252530 - RNA, 24 nt, Artificial Sequence
  Synthetic
ggacucaagccuccucuccgaaac

SEQ ID NO: 252531 - RNA, 18 nt, Artificial Sequence
  Synthetic
aagauuaaaaugcgaaac

SEQ ID NO: 252532 - RNA, 19 nt, Artificial Sequence
  Synthetic
aaagauuaaaaugcgaaac

SEQ ID NO: 252533 - RNA, 20 nt, Artificial Sequence
  Synthetic
caaagauuaaaaugcgaaac

SEQ ID NO: 252534 - RNA, 21 nt, Artificial Sequence
  Synthetic
ucaaagauuaaaaugcgaaac

SEQ ID NO: 252535 - RNA, 22 nt, Artificial Sequence
  Synthetic
uucaaagauuaaaaugcgaaac

SEQ ID NO: 252536 - RNA, 23 nt, Artificial Sequence
  Synthetic
uuucaaagauuaaaaugcgaaac

SEQ ID NO: 252537 - RNA, 24 nt, Artificial Sequence
  Synthetic
uuuucaaagauuaaaaugcgaaac

SEQ ID NO: 252538 - RNA, 18 nt, Artificial Sequence
  Synthetic
cuaaagcaucaaggaaac

SEQ ID NO: 252539 - RNA, 19 nt, Artificial Sequence
  Synthetic
ccuaaagcaucaaggaaac

SEQ ID NO: 252540 - RNA, 20 nt, Artificial Sequence
  Synthetic
uccuaaagcaucaaggaaac

SEQ ID NO: 252541 - RNA, 21 nt, Artificial Sequence
  Synthetic
cuccuaaagcaucaaggaaac

SEQ ID NO: 252542 - RNA, 22 nt, Artificial Sequence
  Synthetic
acuccuaaagcaucaaggaaac

SEQ ID NO: 252543 - RNA, 23 nt, Artificial Sequence
  Synthetic
uacuccuaaagcaucaaggaaac

SEQ ID NO: 252544 - RNA, 24 nt, Artificial Sequence
  Synthetic
auacuccuaaagcaucaaggaaac

SEQ ID NO: 252545 - RNA, 18 nt, Artificial Sequence
  Synthetic
agguagggggaaggaaac

SEQ ID NO: 252546 - RNA, 19 nt, Artificial Sequence
  Synthetic
cagguagggggaaggaaac

SEQ ID NO: 252547 - RNA, 20 nt, Artificial Sequence
  Synthetic
ucagguagggggaaggaaac

SEQ ID NO: 252548 - RNA, 21 nt, Artificial Sequence
  Synthetic
gucagguagggggaaggaaac

SEQ ID NO: 252549 - RNA, 22 nt, Artificial Sequence
  Synthetic
ggucagguagggggaaggaaac

SEQ ID NO: 252550 - RNA, 23 nt, Artificial Sequence
  Synthetic
uggucagguagggggaaggaaac

SEQ ID NO: 252551 - RNA, 24 nt, Artificial Sequence
  Synthetic
uuggucagguagggggaaggaaac

SEQ ID NO: 252552 - RNA, 18 nt, Artificial Sequence
  Synthetic
auaucaaagccaggaaac

SEQ ID NO: 252553 - RNA, 19 nt, Artificial Sequence
  Synthetic
aauaucaaagccaggaaac

SEQ ID NO: 252554 - RNA, 20 nt, Artificial Sequence
  Synthetic
uaauaucaaagccaggaaac

SEQ ID NO: 252555 - RNA, 21 nt, Artificial Sequence
  Synthetic
guaauaucaaagccaggaaac

SEQ ID NO: 252556 - RNA, 22 nt, Artificial Sequence
  Synthetic
uguaauaucaaagccaggaaac

SEQ ID NO: 252557 - RNA, 23 nt, Artificial Sequence
  Synthetic
auguaauaucaaagccaggaaac

SEQ ID NO: 252558 - RNA, 24 nt, Artificial Sequence
  Synthetic
uauguaauaucaaagccaggaaac

SEQ ID NO: 252559 - RNA, 18 nt, Artificial Sequence
  Synthetic
cacauaagagcaggaaac

SEQ ID NO: 252560 - RNA, 19 nt, Artificial Sequence
  Synthetic
ucacauaagagcaggaaac

SEQ ID NO: 252561 - RNA, 20 nt, Artificial Sequence
  Synthetic
uucacauaagagcaggaaac

SEQ ID NO: 252562 - RNA, 21 nt, Artificial Sequence
  Synthetic
auucacauaagagcaggaaac

SEQ ID NO: 252563 - RNA, 22 nt, Artificial Sequence
  Synthetic
uauucacauaagagcaggaaac

SEQ ID NO: 252564 - RNA, 23 nt, Artificial Sequence
  Synthetic
auauucacauaagagcaggaaac

SEQ ID NO: 252565 - RNA, 24 nt, Artificial Sequence
  Synthetic
uauauucacauaagagcaggaaac

SEQ ID NO: 252566 - RNA, 18 nt, Artificial Sequence
  Synthetic
auuccaggcagaggaaac

SEQ ID NO: 252567 - RNA, 19 nt, Artificial Sequence
  Synthetic
cauuccaggcagaggaaac

SEQ ID NO: 252568 - RNA, 20 nt, Artificial Sequence
  Synthetic
acauuccaggcagaggaaac

SEQ ID NO: 252569 - RNA, 21 nt, Artificial Sequence
  Synthetic
aacauuccaggcagaggaaac

SEQ ID NO: 252570 - RNA, 22 nt, Artificial Sequence
  Synthetic
aaacauuccaggcagaggaaac

SEQ ID NO: 252571 - RNA, 23 nt, Artificial Sequence
  Synthetic
aaaacauuccaggcagaggaaac

SEQ ID NO: 252572 - RNA, 24 nt, Artificial Sequence
  Synthetic
aaaaacauuccaggcagaggaaac

SEQ ID NO: 252573 - RNA, 18 nt, Artificial Sequence
  Synthetic
uuuugugucagaggaaac

SEQ ID NO: 252574 - RNA, 19 nt, Artificial Sequence
  Synthetic
guuuugugucagaggaaac

SEQ ID NO: 252575 - RNA, 20 nt, Artificial Sequence
  Synthetic
uguuuugugucagaggaaac

SEQ ID NO: 252576 - RNA, 21 nt, Artificial Sequence
  Synthetic
auguuuugugucagaggaaac

SEQ ID NO: 252577 - RNA, 22 nt, Artificial Sequence
  Synthetic
aauguuuugugucagaggaaac

SEQ ID NO: 252578 - RNA, 23 nt, Artificial Sequence
  Synthetic
aaauguuuugugucagaggaaac

SEQ ID NO: 252579 - RNA, 24 nt, Artificial Sequence
  Synthetic
aaaauguuuugugucagaggaaac

SEQ ID NO: 252580 - RNA, 18 nt, Artificial Sequence
  Synthetic
aggcauucuuuaggaaac

SEQ ID NO: 252581 - RNA, 19 nt, Artificial Sequence
  Synthetic
aaggcauucuuuaggaaac

SEQ ID NO: 252582 - RNA, 20 nt, Artificial Sequence
  Synthetic
gaaggcauucuuuaggaaac

SEQ ID NO: 252583 - RNA, 21 nt, Artificial Sequence
  Synthetic
ugaaggcauucuuuaggaaac

SEQ ID NO: 252584 - RNA, 22 nt, Artificial Sequence
  Synthetic
uugaaggcauucuuuaggaaac

SEQ ID NO: 252585 - RNA, 23 nt, Artificial Sequence
  Synthetic
uuugaaggcauucuuuaggaaac

SEQ ID NO: 252586 - RNA, 24 nt, Artificial Sequence
  Synthetic
uuuugaaggcauucuuuaggaaac

SEQ ID NO: 252587 - RNA, 18 nt, Artificial Sequence
  Synthetic
augccgcucuucggaaac

SEQ ID NO: 252588 - RNA, 19 nt, Artificial Sequence
  Synthetic
aaugccgcucuucggaaac

SEQ ID NO: 252589 - RNA, 20 nt, Artificial Sequence
  Synthetic
caaugccgcucuucggaaac

SEQ ID NO: 252590 - RNA, 21 nt, Artificial Sequence
  Synthetic
acaaugccgcucuucggaaac

SEQ ID NO: 252591 - RNA, 22 nt, Artificial Sequence
  Synthetic
cacaaugccgcucuucggaaac

SEQ ID NO: 252592 - RNA, 23 nt, Artificial Sequence
  Synthetic
gcacaaugccgcucuucggaaac

SEQ ID NO: 252593 - RNA, 24 nt, Artificial Sequence
  Synthetic
agcacaaugccgcucuucggaaac

SEQ ID NO: 252594 - RNA, 18 nt, Artificial Sequence
  Synthetic
gaaacuucacagggaaac

SEQ ID NO: 252595 - RNA, 19 nt, Artificial Sequence
  Synthetic
agaaacuucacagggaaac

SEQ ID NO: 252596 - RNA, 20 nt, Artificial Sequence
  Synthetic
cagaaacuucacagggaaac

SEQ ID NO: 252597 - RNA, 21 nt, Artificial Sequence
  Synthetic
acagaaacuucacagggaaac

SEQ ID NO: 252598 - RNA, 22 nt, Artificial Sequence
  Synthetic
uacagaaacuucacagggaaac

SEQ ID NO: 252599 - RNA, 23 nt, Artificial Sequence
  Synthetic
uuacagaaacuucacagggaaac

SEQ ID NO: 252600 - RNA, 24 nt, Artificial Sequence
  Synthetic
guuacagaaacuucacagggaaac

SEQ ID NO: 252601 - RNA, 18 nt, Artificial Sequence
  Synthetic
ggggaaaaggagggaaac

SEQ ID NO: 252602 - RNA, 19 nt, Artificial Sequence
  Synthetic
uggggaaaaggagggaaac

SEQ ID NO: 252603 - RNA, 20 nt, Artificial Sequence
  Synthetic
uuggggaaaaggagggaaac

SEQ ID NO: 252604 - RNA, 21 nt, Artificial Sequence
  Synthetic
auuggggaaaaggagggaaac

SEQ ID NO: 252605 - RNA, 22 nt, Artificial Sequence
  Synthetic
cauuggggaaaaggagggaaac

SEQ ID NO: 252606 - RNA, 23 nt, Artificial Sequence
  Synthetic
acauuggggaaaaggagggaaac

SEQ ID NO: 252607 - RNA, 24 nt, Artificial Sequence
  Synthetic
uacauuggggaaaaggagggaaac

SEQ ID NO: 252608 - RNA, 18 nt, Artificial Sequence
  Synthetic
cuaaucucagauggaaac

SEQ ID NO: 252609 - RNA, 19 nt, Artificial Sequence
  Synthetic
ucuaaucucagauggaaac

SEQ ID NO: 252610 - RNA, 20 nt, Artificial Sequence
  Synthetic
aucuaaucucagauggaaac

SEQ ID NO: 252611 - RNA, 21 nt, Artificial Sequence
  Synthetic
uaucuaaucucagauggaaac

SEQ ID NO: 252612 - RNA, 22 nt, Artificial Sequence
  Synthetic
uuaucuaaucucagauggaaac

SEQ ID NO: 252613 - RNA, 23 nt, Artificial Sequence
  Synthetic
auuaucuaaucucagauggaaac

SEQ ID NO: 252614 - RNA, 24 nt, Artificial Sequence
  Synthetic
cauuaucuaaucucagauggaaac

SEQ ID NO: 252615 - RNA, 18 nt, Artificial Sequence
  Synthetic
guuuucucaccuggaaac

SEQ ID NO: 252616 - RNA, 19 nt, Artificial Sequence
  Synthetic
aguuuucucaccuggaaac

SEQ ID NO: 252617 - RNA, 20 nt, Artificial Sequence
  Synthetic
caguuuucucaccuggaaac

SEQ ID NO: 252618 - RNA, 21 nt, Artificial Sequence
  Synthetic
ucaguuuucucaccuggaaac

SEQ ID NO: 252619 - RNA, 22 nt, Artificial Sequence
  Synthetic
cucaguuuucucaccuggaaac

SEQ ID NO: 252620 - RNA, 23 nt, Artificial Sequence
  Synthetic
ucucaguuuucucaccuggaaac

SEQ ID NO: 252621 - RNA, 24 nt, Artificial Sequence
  Synthetic
gucucaguuuucucaccuggaaac

SEQ ID NO: 252622 - RNA, 18 nt, Artificial Sequence
  Synthetic
cagcucucuccuggaaac

SEQ ID NO: 252623 - RNA, 19 nt, Artificial Sequence
  Synthetic
ucagcucucuccuggaaac

SEQ ID NO: 252624 - RNA, 20 nt, Artificial Sequence
  Synthetic
cucagcucucuccuggaaac

SEQ ID NO: 252625 - RNA, 21 nt, Artificial Sequence
  Synthetic
ucucagcucucuccuggaaac

SEQ ID NO: 252626 - RNA, 22 nt, Artificial Sequence
  Synthetic
gucucagcucucuccuggaaac

SEQ ID NO: 252627 - RNA, 23 nt, Artificial Sequence
  Synthetic
ugucucagcucucuccuggaaac

SEQ ID NO: 252628 - RNA, 24 nt, Artificial Sequence
  Synthetic
gugucucagcucucuccuggaaac

SEQ ID NO: 252629 - RNA, 18 nt, Artificial Sequence
  Synthetic
agauuuuugucuggaaac

SEQ ID NO: 252630 - RNA, 19 nt, Artificial Sequence
  Synthetic
gagauuuuugucuggaaac

SEQ ID NO: 252631 - RNA, 20 nt, Artificial Sequence
  Synthetic
ugagauuuuugucuggaaac

SEQ ID NO: 252632 - RNA, 21 nt, Artificial Sequence
  Synthetic
augagauuuuugucuggaaac

SEQ ID NO: 252633 - RNA, 22 nt, Artificial Sequence
  Synthetic
aaugagauuuuugucuggaaac

SEQ ID NO: 252634 - RNA, 23 nt, Artificial Sequence
  Synthetic
aaaugagauuuuugucuggaaac

SEQ ID NO: 252635 - RNA, 24 nt, Artificial Sequence
  Synthetic
aaaaugagauuuuugucuggaaac

SEQ ID NO: 252636 - RNA, 18 nt, Artificial Sequence
  Synthetic
ucagagucuucuggaaac

SEQ ID NO: 252637 - RNA, 19 nt, Artificial Sequence
  Synthetic
aucagagucuucuggaaac

SEQ ID NO: 252638 - RNA, 20 nt, Artificial Sequence
  Synthetic
gaucagagucuucuggaaac

SEQ ID NO: 252639 - RNA, 21 nt, Artificial Sequence
  Synthetic
ggaucagagucuucuggaaac

SEQ ID NO: 252640 - RNA, 22 nt, Artificial Sequence
  Synthetic
gggaucagagucuucuggaaac

SEQ ID NO: 252641 - RNA, 23 nt, Artificial Sequence
  Synthetic
ggggaucagagucuucuggaaac

SEQ ID NO: 252642 - RNA, 24 nt, Artificial Sequence
  Synthetic
uggggaucagagucuucuggaaac

SEQ ID NO: 252643 - RNA, 18 nt, Artificial Sequence
  Synthetic
uguaaaauaaaaugaaac

SEQ ID NO: 252644 - RNA, 19 nt, Artificial Sequence
  Synthetic
guguaaaauaaaaugaaac

SEQ ID NO: 252645 - RNA, 20 nt, Artificial Sequence
  Synthetic
uguguaaaauaaaaugaaac

SEQ ID NO: 252646 - RNA, 21 nt, Artificial Sequence
  Synthetic
uuguguaaaauaaaaugaaac

SEQ ID NO: 252647 - RNA, 22 nt, Artificial Sequence
  Synthetic
uuuguguaaaauaaaaugaaac

SEQ ID NO: 252648 - RNA, 23 nt, Artificial Sequence
  Synthetic
auuuguguaaaauaaaaugaaac

SEQ ID NO: 252649 - RNA, 24 nt, Artificial Sequence
  Synthetic
uauuuguguaaaauaaaaugaaac

SEQ ID NO: 252650 - RNA, 18 nt, Artificial Sequence
  Synthetic
augaagccuaaaugaaac

SEQ ID NO: 252651 - RNA, 19 nt, Artificial Sequence
  Synthetic
uaugaagccuaaaugaaac

SEQ ID NO: 252652 - RNA, 20 nt, Artificial Sequence
  Synthetic
auaugaagccuaaaugaaac

SEQ ID NO: 252653 - RNA, 21 nt, Artificial Sequence
  Synthetic
uauaugaagccuaaaugaaac

SEQ ID NO: 252654 - RNA, 22 nt, Artificial Sequence
  Synthetic
auauaugaagccuaaaugaaac

SEQ ID NO: 252655 - RNA, 23 nt, Artificial Sequence
  Synthetic
uauauaugaagccuaaaugaaac

SEQ ID NO: 252656 - RNA, 24 nt, Artificial Sequence
  Synthetic
uuauauaugaagccuaaaugaaac

SEQ ID NO: 252657 - RNA, 18 nt, Artificial Sequence
  Synthetic
gcuggacaucaaugaaac

SEQ ID NO: 252658 - RNA, 19 nt, Artificial Sequence
  Synthetic
ugcuggacaucaaugaaac

SEQ ID NO: 252659 - RNA, 20 nt, Artificial Sequence
  Synthetic
augcuggacaucaaugaaac

SEQ ID NO: 252660 - RNA, 21 nt, Artificial Sequence
  Synthetic
aaugcuggacaucaaugaaac

SEQ ID NO: 252661 - RNA, 22 nt, Artificial Sequence
  Synthetic
aaaugcuggacaucaaugaaac

SEQ ID NO: 252662 - RNA, 23 nt, Artificial Sequence
  Synthetic
aaaaugcuggacaucaaugaaac

SEQ ID NO: 252663 - RNA, 24 nt, Artificial Sequence
  Synthetic
aaaaaugcuggacaucaaugaaac

SEQ ID NO: 252664 - RNA, 18 nt, Artificial Sequence
  Synthetic
gaauaggguuaaugaaac

SEQ ID NO: 252665 - RNA, 19 nt, Artificial Sequence
  Synthetic
agaauaggguuaaugaaac

SEQ ID NO: 252666 - RNA, 20 nt, Artificial Sequence
  Synthetic
aagaauaggguuaaugaaac

SEQ ID NO: 252667 - RNA, 21 nt, Artificial Sequence
  Synthetic
aaagaauaggguuaaugaaac

SEQ ID NO: 252668 - RNA, 22 nt, Artificial Sequence
  Synthetic
gaaagaauaggguuaaugaaac

SEQ ID NO: 252669 - RNA, 23 nt, Artificial Sequence
  Synthetic
ugaaagaauaggguuaaugaaac

SEQ ID NO: 252670 - RNA, 24 nt, Artificial Sequence
  Synthetic
gugaaagaauaggguuaaugaaac

SEQ ID NO: 252671 - RNA, 18 nt, Artificial Sequence
  Synthetic
uagggacauggaugaaac

SEQ ID NO: 252672 - RNA, 19 nt, Artificial Sequence
  Synthetic
guagggacauggaugaaac

SEQ ID NO: 252673 - RNA, 20 nt, Artificial Sequence
  Synthetic
uguagggacauggaugaaac

SEQ ID NO: 252674 - RNA, 21 nt, Artificial Sequence
  Synthetic
uuguagggacauggaugaaac

SEQ ID NO: 252675 - RNA, 22 nt, Artificial Sequence
  Synthetic
uuuguagggacauggaugaaac

SEQ ID NO: 252676 - RNA, 23 nt, Artificial Sequence
  Synthetic
cuuuguagggacauggaugaaac

SEQ ID NO: 252677 - RNA, 24 nt, Artificial Sequence
  Synthetic
ccuuuguagggacauggaugaaac

SEQ ID NO: 252678 - RNA, 18 nt, Artificial Sequence
  Synthetic
uugcucaugguaugaaac

SEQ ID NO: 252679 - RNA, 19 nt, Artificial Sequence
  Synthetic
cuugcucaugguaugaaac

SEQ ID NO: 252680 - RNA, 20 nt, Artificial Sequence
  Synthetic
gcuugcucaugguaugaaac

SEQ ID NO: 252681 - RNA, 21 nt, Artificial Sequence
  Synthetic
agcuugcucaugguaugaaac

SEQ ID NO: 252682 - RNA, 22 nt, Artificial Sequence
  Synthetic
aagcuugcucaugguaugaaac

SEQ ID NO: 252683 - RNA, 23 nt, Artificial Sequence
  Synthetic
aaagcuugcucaugguaugaaac

SEQ ID NO: 252684 - RNA, 24 nt, Artificial Sequence
  Synthetic
aaaagcuugcucaugguaugaaac

SEQ ID NO: 252685 - RNA, 18 nt, Artificial Sequence
  Synthetic
ggaauaaaugacugaaac

SEQ ID NO: 252686 - RNA, 19 nt, Artificial Sequence
  Synthetic
aggaauaaaugacugaaac

SEQ ID NO: 252687 - RNA, 20 nt, Artificial Sequence
  Synthetic
aaggaauaaaugacugaaac

SEQ ID NO: 252688 - RNA, 21 nt, Artificial Sequence
  Synthetic
gaaggaauaaaugacugaaac

SEQ ID NO: 252689 - RNA, 22 nt, Artificial Sequence
  Synthetic
agaaggaauaaaugacugaaac

SEQ ID NO: 252690 - RNA, 23 nt, Artificial Sequence
  Synthetic
cagaaggaauaaaugacugaaac

SEQ ID NO: 252691 - RNA, 24 nt, Artificial Sequence
  Synthetic
acagaaggaauaaaugacugaaac

SEQ ID NO: 252692 - RNA, 18 nt, Artificial Sequence
  Synthetic
auuuaaagauacugaaac

SEQ ID NO: 252693 - RNA, 19 nt, Artificial Sequence
  Synthetic
uauuuaaagauacugaaac

SEQ ID NO: 252694 - RNA, 20 nt, Artificial Sequence
  Synthetic
auauuuaaagauacugaaac

SEQ ID NO: 252695 - RNA, 21 nt, Artificial Sequence
  Synthetic
uauauuuaaagauacugaaac

SEQ ID NO: 252696 - RNA, 22 nt, Artificial Sequence
  Synthetic
uuauauuuaaagauacugaaac

SEQ ID NO: 252697 - RNA, 23 nt, Artificial Sequence
  Synthetic
uuuauauuuaaagauacugaaac

SEQ ID NO: 252698 - RNA, 24 nt, Artificial Sequence
  Synthetic
uuuuauauuuaaagauacugaaac

SEQ ID NO: 252699 - RNA, 18 nt, Artificial Sequence
  Synthetic
aauucuccuuacugaaac

SEQ ID NO: 252700 - RNA, 19 nt, Artificial Sequence
  Synthetic
aaauucuccuuacugaaac

SEQ ID NO: 252701 - RNA, 20 nt, Artificial Sequence
  Synthetic
aaaauucuccuuacugaaac

SEQ ID NO: 252702 - RNA, 21 nt, Artificial Sequence
  Synthetic
uaaaauucuccuuacugaaac

SEQ ID NO: 252703 - RNA, 22 nt, Artificial Sequence
  Synthetic
guaaaauucuccuuacugaaac

SEQ ID NO: 252704 - RNA, 23 nt, Artificial Sequence
  Synthetic
aguaaaauucuccuuacugaaac

SEQ ID NO: 252705 - RNA, 24 nt, Artificial Sequence
  Synthetic
aaguaaaauucuccuuacugaaac

SEQ ID NO: 252706 - RNA, 18 nt, Artificial Sequence
  Synthetic
cauuuaagaagcugaaac

SEQ ID NO: 252707 - RNA, 19 nt, Artificial Sequence
  Synthetic
acauuuaagaagcugaaac

SEQ ID NO: 252708 - RNA, 20 nt, Artificial Sequence
  Synthetic
cacauuuaagaagcugaaac

SEQ ID NO: 252709 - RNA, 21 nt, Artificial Sequence
  Synthetic
acacauuuaagaagcugaaac

SEQ ID NO: 252710 - RNA, 22 nt, Artificial Sequence
  Synthetic
gacacauuuaagaagcugaaac

SEQ ID NO: 252711 - RNA, 23 nt, Artificial Sequence
  Synthetic
ugacacauuuaagaagcugaaac

SEQ ID NO: 252712 - RNA, 24 nt, Artificial Sequence
  Synthetic
augacacauuuaagaagcugaaac

SEQ ID NO: 252713 - RNA, 18 nt, Artificial Sequence
  Synthetic
gaucugguuuucugaaac

SEQ ID NO: 252714 - RNA, 19 nt, Artificial Sequence
  Synthetic
agaucugguuuucugaaac

SEQ ID NO: 252715 - RNA, 20 nt, Artificial Sequence
  Synthetic
uagaucugguuuucugaaac

SEQ ID NO: 252716 - RNA, 21 nt, Artificial Sequence
  Synthetic
guagaucugguuuucugaaac

SEQ ID NO: 252717 - RNA, 22 nt, Artificial Sequence
  Synthetic
gguagaucugguuuucugaaac

SEQ ID NO: 252718 - RNA, 23 nt, Artificial Sequence
  Synthetic
agguagaucugguuuucugaaac

SEQ ID NO: 252719 - RNA, 24 nt, Artificial Sequence
  Synthetic
gagguagaucugguuuucugaaac

SEQ ID NO: 252720 - RNA, 18 nt, Artificial Sequence
  Synthetic
ucaggugacuggugaaac

SEQ ID NO: 252721 - RNA, 19 nt, Artificial Sequence
  Synthetic
gucaggugacuggugaaac

SEQ ID NO: 252722 - RNA, 20 nt, Artificial Sequence
  Synthetic
ggucaggugacuggugaaac

SEQ ID NO: 252723 - RNA, 21 nt, Artificial Sequence
  Synthetic
uggucaggugacuggugaaac

SEQ ID NO: 252724 - RNA, 22 nt, Artificial Sequence
  Synthetic
uuggucaggugacuggugaaac

SEQ ID NO: 252725 - RNA, 23 nt, Artificial Sequence
  Synthetic
uuuggucaggugacuggugaaac

SEQ ID NO: 252726 - RNA, 24 nt, Artificial Sequence
  Synthetic
auuuggucaggugacuggugaaac

SEQ ID NO: 252727 - RNA, 18 nt, Artificial Sequence
  Synthetic
cguuuauuucugugaaac

SEQ ID NO: 252728 - RNA, 19 nt, Artificial Sequence
  Synthetic
acguuuauuucugugaaac

SEQ ID NO: 252729 - RNA, 20 nt, Artificial Sequence
  Synthetic
aacguuuauuucugugaaac

SEQ ID NO: 252730 - RNA, 21 nt, Artificial Sequence
  Synthetic
aaacguuuauuucugugaaac

SEQ ID NO: 252731 - RNA, 22 nt, Artificial Sequence
  Synthetic
caaacguuuauuucugugaaac

SEQ ID NO: 252732 - RNA, 23 nt, Artificial Sequence
  Synthetic
ucaaacguuuauuucugugaaac

SEQ ID NO: 252733 - RNA, 24 nt, Artificial Sequence
  Synthetic
gucaaacguuuauuucugugaaac

SEQ ID NO: 252734 - RNA, 18 nt, Artificial Sequence
  Synthetic
auggugauagugugaaac

SEQ ID NO: 252735 - RNA, 19 nt, Artificial Sequence
  Synthetic
gauggugauagugugaaac

SEQ ID NO: 252736 - RNA, 20 nt, Artificial Sequence
  Synthetic
ugauggugauagugugaaac

SEQ ID NO: 252737 - RNA, 21 nt, Artificial Sequence
  Synthetic
gugauggugauagugugaaac

SEQ ID NO: 252738 - RNA, 22 nt, Artificial Sequence
  Synthetic
ugugauggugauagugugaaac

SEQ ID NO: 252739 - RNA, 23 nt, Artificial Sequence
  Synthetic
cugugauggugauagugugaaac

SEQ ID NO: 252740 - RNA, 24 nt, Artificial Sequence
  Synthetic
ucugugauggugauagugugaaac

SEQ ID NO: 252741 - RNA, 18 nt, Artificial Sequence
  Synthetic
gaaaagugccauugaaac

SEQ ID NO: 252742 - RNA, 19 nt, Artificial Sequence
  Synthetic
agaaaagugccauugaaac

SEQ ID NO: 252743 - RNA, 20 nt, Artificial Sequence
  Synthetic
uagaaaagugccauugaaac

SEQ ID NO: 252744 - RNA, 21 nt, Artificial Sequence
  Synthetic
guagaaaagugccauugaaac

SEQ ID NO: 252745 - RNA, 22 nt, Artificial Sequence
  Synthetic
gguagaaaagugccauugaaac

SEQ ID NO: 252746 - RNA, 23 nt, Artificial Sequence
  Synthetic
ugguagaaaagugccauugaaac

SEQ ID NO: 252747 - RNA, 24 nt, Artificial Sequence
  Synthetic
cugguagaaaagugccauugaaac

SEQ ID NO: 252748 - RNA, 18 nt, Artificial Sequence
  Synthetic
ugguauaggcauugaaac

SEQ ID NO: 252749 - RNA, 19 nt, Artificial Sequence
  Synthetic
uugguauaggcauugaaac

SEQ ID NO: 252750 - RNA, 20 nt, Artificial Sequence
  Synthetic
auugguauaggcauugaaac

SEQ ID NO: 252751 - RNA, 21 nt, Artificial Sequence
  Synthetic
uauugguauaggcauugaaac

SEQ ID NO: 252752 - RNA, 22 nt, Artificial Sequence
  Synthetic
guauugguauaggcauugaaac

SEQ ID NO: 252753 - RNA, 23 nt, Artificial Sequence
  Synthetic
gguauugguauaggcauugaaac

SEQ ID NO: 252754 - RNA, 24 nt, Artificial Sequence
  Synthetic
agguauugguauaggcauugaaac

SEQ ID NO: 252755 - RNA, 18 nt, Artificial Sequence
  Synthetic
uacaugguugauugaaac

SEQ ID NO: 252756 - RNA, 19 nt, Artificial Sequence
  Synthetic
cuacaugguugauugaaac

SEQ ID NO: 252757 - RNA, 20 nt, Artificial Sequence
  Synthetic
acuacaugguugauugaaac

SEQ ID NO: 252758 - RNA, 21 nt, Artificial Sequence
  Synthetic
cacuacaugguugauugaaac

SEQ ID NO: 252759 - RNA, 22 nt, Artificial Sequence
  Synthetic
ccacuacaugguugauugaaac

SEQ ID NO: 252760 - RNA, 23 nt, Artificial Sequence
  Synthetic
uccacuacaugguugauugaaac

SEQ ID NO: 252761 - RNA, 24 nt, Artificial Sequence
  Synthetic
cuccacuacaugguugauugaaac

SEQ ID NO: 252762 - RNA, 18 nt, Artificial Sequence
  Synthetic
augagaauugcuugaaac

SEQ ID NO: 252763 - RNA, 19 nt, Artificial Sequence
  Synthetic
caugagaauugcuugaaac

SEQ ID NO: 252764 - RNA, 20 nt, Artificial Sequence
  Synthetic
gcaugagaauugcuugaaac

SEQ ID NO: 252765 - RNA, 21 nt, Artificial Sequence
  Synthetic
ggcaugagaauugcuugaaac

SEQ ID NO: 252766 - RNA, 22 nt, Artificial Sequence
  Synthetic
aggcaugagaauugcuugaaac

SEQ ID NO: 252767 - RNA, 23 nt, Artificial Sequence
  Synthetic
gaggcaugagaauugcuugaaac

SEQ ID NO: 252768 - RNA, 24 nt, Artificial Sequence
  Synthetic
ugaggcaugagaauugcuugaaac

SEQ ID NO: 252769 - RNA, 18 nt, Artificial Sequence
  Synthetic
cucagcuuucuuugaaac

SEQ ID NO: 252770 - RNA, 19 nt, Artificial Sequence
  Synthetic
ucucagcuuucuuugaaac

SEQ ID NO: 252771 - RNA, 20 nt, Artificial Sequence
  Synthetic
aucucagcuuucuuugaaac

SEQ ID NO: 252772 - RNA, 21 nt, Artificial Sequence
  Synthetic
caucucagcuuucuuugaaac

SEQ ID NO: 252773 - RNA, 22 nt, Artificial Sequence
  Synthetic
acaucucagcuuucuuugaaac

SEQ ID NO: 252774 - RNA, 23 nt, Artificial Sequence
  Synthetic
cacaucucagcuuucuuugaaac

SEQ ID NO: 252775 - RNA, 24 nt, Artificial Sequence
  Synthetic
ccacaucucagcuuucuuugaaac

SEQ ID NO: 252776 - RNA, 18 nt, Artificial Sequence
  Synthetic
accucuacacaaauaaac

SEQ ID NO: 252777 - RNA, 19 nt, Artificial Sequence
  Synthetic
caccucuacacaaauaaac

SEQ ID NO: 252778 - RNA, 20 nt, Artificial Sequence
  Synthetic
acaccucuacacaaauaaac

SEQ ID NO: 252779 - RNA, 21 nt, Artificial Sequence
  Synthetic
aacaccucuacacaaauaaac

SEQ ID NO: 252780 - RNA, 22 nt, Artificial Sequence
  Synthetic
aaacaccucuacacaaauaaac

SEQ ID NO: 252781 - RNA, 23 nt, Artificial Sequence
  Synthetic
caaacaccucuacacaaauaaac

SEQ ID NO: 252782 - RNA, 24 nt, Artificial Sequence
  Synthetic
acaaacaccucuacacaaauaaac

SEQ ID NO: 252783 - RNA, 18 nt, Artificial Sequence
  Synthetic
accucuacgcaaauaaac

SEQ ID NO: 252784 - RNA, 19 nt, Artificial Sequence
  Synthetic
caccucuacgcaaauaaac

SEQ ID NO: 252785 - RNA, 20 nt, Artificial Sequence
  Synthetic
acaccucuacgcaaauaaac

SEQ ID NO: 252786 - RNA, 21 nt, Artificial Sequence
  Synthetic
aacaccucuacgcaaauaaac

SEQ ID NO: 252787 - RNA, 22 nt, Artificial Sequence
  Synthetic
aaacaccucuacgcaaauaaac

SEQ ID NO: 252788 - RNA, 23 nt, Artificial Sequence
  Synthetic
uaaacaccucuacgcaaauaaac

SEQ ID NO: 252789 - RNA, 24 nt, Artificial Sequence
  Synthetic
auaaacaccucuacgcaaauaaac

SEQ ID NO: 252790 - RNA, 18 nt, Artificial Sequence
  Synthetic
gcuaaauugcaaauaaac

SEQ ID NO: 252791 - RNA, 19 nt, Artificial Sequence
  Synthetic
ggcuaaauugcaaauaaac

SEQ ID NO: 252792 - RNA, 20 nt, Artificial Sequence
  Synthetic
uggcuaaauugcaaauaaac

SEQ ID NO: 252793 - RNA, 21 nt, Artificial Sequence
  Synthetic
guggcuaaauugcaaauaaac

SEQ ID NO: 252794 - RNA, 22 nt, Artificial Sequence
  Synthetic
aguggcuaaauugcaaauaaac

SEQ ID NO: 252795 - RNA, 23 nt, Artificial Sequence
  Synthetic
uaguggcuaaauugcaaauaaac

SEQ ID NO: 252796 - RNA, 24 nt, Artificial Sequence
  Synthetic
auaguggcuaaauugcaaauaaac

SEQ ID NO: 252797 - RNA, 18 nt, Artificial Sequence
  Synthetic
aaaaaugcuacaauaaac

SEQ ID NO: 252798 - RNA, 19 nt, Artificial Sequence
  Synthetic
uaaaaaugcuacaauaaac

SEQ ID NO: 252799 - RNA, 20 nt, Artificial Sequence
  Synthetic
guaaaaaugcuacaauaaac

SEQ ID NO: 252800 - RNA, 21 nt, Artificial Sequence
  Synthetic
uguaaaaaugcuacaauaaac

SEQ ID NO: 252801 - RNA, 22 nt, Artificial Sequence
  Synthetic
cuguaaaaaugcuacaauaaac

SEQ ID NO: 252802 - RNA, 23 nt, Artificial Sequence
  Synthetic
acuguaaaaaugcuacaauaaac

SEQ ID NO: 252803 - RNA, 24 nt, Artificial Sequence
  Synthetic
uacuguaaaaaugcuacaauaaac

SEQ ID NO: 252804 - RNA, 18 nt, Artificial Sequence
  Synthetic
uacacgcagccaauaaac

SEQ ID NO: 252805 - RNA, 19 nt, Artificial Sequence
  Synthetic
auacacgcagccaauaaac

SEQ ID NO: 252806 - RNA, 20 nt, Artificial Sequence
  Synthetic
uauacacgcagccaauaaac

SEQ ID NO: 252807 - RNA, 21 nt, Artificial Sequence
  Synthetic
auauacacgcagccaauaaac

SEQ ID NO: 252808 - RNA, 22 nt, Artificial Sequence
  Synthetic
gauauacacgcagccaauaaac

SEQ ID NO: 252809 - RNA, 23 nt, Artificial Sequence
  Synthetic
agauauacacgcagccaauaaac

SEQ ID NO: 252810 - RNA, 24 nt, Artificial Sequence
  Synthetic
aagauauacacgcagccaauaaac

SEQ ID NO: 252811 - RNA, 18 nt, Artificial Sequence
  Synthetic
aauagagcugcaauaaac

SEQ ID NO: 252812 - RNA, 19 nt, Artificial Sequence
  Synthetic
gaauagagcugcaauaaac

SEQ ID NO: 252813 - RNA, 20 nt, Artificial Sequence
  Synthetic
ugaauagagcugcaauaaac

SEQ ID NO: 252814 - RNA, 21 nt, Artificial Sequence
  Synthetic
gugaauagagcugcaauaaac

SEQ ID NO: 252815 - RNA, 22 nt, Artificial Sequence
  Synthetic
ugugaauagagcugcaauaaac

SEQ ID NO: 252816 - RNA, 23 nt, Artificial Sequence
  Synthetic
uugugaauagagcugcaauaaac

SEQ ID NO: 252817 - RNA, 24 nt, Artificial Sequence
  Synthetic
auugugaauagagcugcaauaaac

SEQ ID NO: 252818 - RNA, 18 nt, Artificial Sequence
  Synthetic
aauagcgcugcaauaaac

SEQ ID NO: 252819 - RNA, 19 nt, Artificial Sequence
  Synthetic
gaauagcgcugcaauaaac

SEQ ID NO: 252820 - RNA, 20 nt, Artificial Sequence
  Synthetic
ugaauagcgcugcaauaaac

SEQ ID NO: 252821 - RNA, 21 nt, Artificial Sequence
  Synthetic
gugaauagcgcugcaauaaac

SEQ ID NO: 252822 - RNA, 22 nt, Artificial Sequence
  Synthetic
ugugaauagcgcugcaauaaac

SEQ ID NO: 252823 - RNA, 23 nt, Artificial Sequence
  Synthetic
uugugaauagcgcugcaauaaac

SEQ ID NO: 252824 - RNA, 24 nt, Artificial Sequence
  Synthetic
auugugaauagcgcugcaauaaac

SEQ ID NO: 252825 - RNA, 18 nt, Artificial Sequence
  Synthetic
aauaaugcugcaauaaac

SEQ ID NO: 252826 - RNA, 19 nt, Artificial Sequence
  Synthetic
gaauaaugcugcaauaaac

SEQ ID NO: 252827 - RNA, 20 nt, Artificial Sequence
  Synthetic
ugaauaaugcugcaauaaac

SEQ ID NO: 252828 - RNA, 21 nt, Artificial Sequence
  Synthetic
gugaauaaugcugcaauaaac

SEQ ID NO: 252829 - RNA, 22 nt, Artificial Sequence
  Synthetic
ugugaauaaugcugcaauaaac

SEQ ID NO: 252830 - RNA, 23 nt, Artificial Sequence
  Synthetic
uugugaauaaugcugcaauaaac

SEQ ID NO: 252831 - RNA, 24 nt, Artificial Sequence
  Synthetic
auugugaauaaugcugcaauaaac

SEQ ID NO: 252832 - RNA, 18 nt, Artificial Sequence
  Synthetic
accccaaauagaauaaac

SEQ ID NO: 252833 - RNA, 19 nt, Artificial Sequence
  Synthetic
aaccccaaauagaauaaac

SEQ ID NO: 252834 - RNA, 20 nt, Artificial Sequence
  Synthetic
aaaccccaaauagaauaaac

SEQ ID NO: 252835 - RNA, 21 nt, Artificial Sequence
  Synthetic
caaaccccaaauagaauaaac

SEQ ID NO: 252836 - RNA, 22 nt, Artificial Sequence
  Synthetic
acaaaccccaaauagaauaaac

SEQ ID NO: 252837 - RNA, 23 nt, Artificial Sequence
  Synthetic
aacaaaccccaaauagaauaaac

SEQ ID NO: 252838 - RNA, 24 nt, Artificial Sequence
  Synthetic
caacaaaccccaaauagaauaaac

SEQ ID NO: 252839 - RNA, 18 nt, Artificial Sequence
  Synthetic
aaguaaaguagaauaaac

SEQ ID NO: 252840 - RNA, 19 nt, Artificial Sequence
  Synthetic
aaaguaaaguagaauaaac

SEQ ID NO: 252841 - RNA, 20 nt, Artificial Sequence
  Synthetic
aaaaguaaaguagaauaaac

SEQ ID NO: 252842 - RNA, 21 nt, Artificial Sequence
  Synthetic
uaaaaguaaaguagaauaaac

SEQ ID NO: 252843 - RNA, 22 nt, Artificial Sequence
  Synthetic
guaaaaguaaaguagaauaaac

SEQ ID NO: 252844 - RNA, 23 nt, Artificial Sequence
  Synthetic
uguaaaaguaaaguagaauaaac

SEQ ID NO: 252845 - RNA, 24 nt, Artificial Sequence
  Synthetic
uuguaaaaguaaaguagaauaaac

SEQ ID NO: 252846 - RNA, 18 nt, Artificial Sequence
  Synthetic
aauaugucaggaauaaac

SEQ ID NO: 252847 - RNA, 19 nt, Artificial Sequence
  Synthetic
caauaugucaggaauaaac

SEQ ID NO: 252848 - RNA, 20 nt, Artificial Sequence
  Synthetic
ucaauaugucaggaauaaac

SEQ ID NO: 252849 - RNA, 21 nt, Artificial Sequence
  Synthetic
uucaauaugucaggaauaaac

SEQ ID NO: 252850 - RNA, 22 nt, Artificial Sequence
  Synthetic
auucaauaugucaggaauaaac

SEQ ID NO: 252851 - RNA, 23 nt, Artificial Sequence
  Synthetic
uauucaauaugucaggaauaaac

SEQ ID NO: 252852 - RNA, 24 nt, Artificial Sequence
  Synthetic
guauucaauaugucaggaauaaac

SEQ ID NO: 252853 - RNA, 18 nt, Artificial Sequence
  Synthetic
gauugggaauuaauaaac

SEQ ID NO: 252854 - RNA, 19 nt, Artificial Sequence
  Synthetic
ggauugggaauuaauaaac

SEQ ID NO: 252855 - RNA, 20 nt, Artificial Sequence
  Synthetic
uggauugggaauuaauaaac

SEQ ID NO: 252856 - RNA, 21 nt, Artificial Sequence
  Synthetic
cuggauugggaauuaauaaac

SEQ ID NO: 252857 - RNA, 22 nt, Artificial Sequence
  Synthetic
acuggauugggaauuaauaaac

SEQ ID NO: 252858 - RNA, 23 nt, Artificial Sequence
  Synthetic
cacuggauugggaauuaauaaac

SEQ ID NO: 252859 - RNA, 24 nt, Artificial Sequence
  Synthetic
ucacuggauugggaauuaauaaac

SEQ ID NO: 252860 - RNA, 18 nt, Artificial Sequence
  Synthetic
ugguuagagagcauaaac

SEQ ID NO: 252861 - RNA, 19 nt, Artificial Sequence
  Synthetic
augguuagagagcauaaac

SEQ ID NO: 252862 - RNA, 20 nt, Artificial Sequence
  Synthetic
caugguuagagagcauaaac

SEQ ID NO: 252863 - RNA, 21 nt, Artificial Sequence
  Synthetic
acaugguuagagagcauaaac

SEQ ID NO: 252864 - RNA, 22 nt, Artificial Sequence
  Synthetic
cacaugguuagagagcauaaac

SEQ ID NO: 252865 - RNA, 23 nt, Artificial Sequence
  Synthetic
ucacaugguuagagagcauaaac

SEQ ID NO: 252866 - RNA, 24 nt, Artificial Sequence
  Synthetic
aucacaugguuagagagcauaaac

SEQ ID NO: 252867 - RNA, 18 nt, Artificial Sequence
  Synthetic
uaaucccaaugcauaaac

SEQ ID NO: 252868 - RNA, 19 nt, Artificial Sequence
  Synthetic
cuaaucccaaugcauaaac

SEQ ID NO: 252869 - RNA, 20 nt, Artificial Sequence
  Synthetic
gcuaaucccaaugcauaaac

SEQ ID NO: 252870 - RNA, 21 nt, Artificial Sequence
  Synthetic
ugcuaaucccaaugcauaaac

SEQ ID NO: 252871 - RNA, 22 nt, Artificial Sequence
  Synthetic
augcuaaucccaaugcauaaac

SEQ ID NO: 252872 - RNA, 23 nt, Artificial Sequence
  Synthetic
aaugcuaaucccaaugcauaaac

SEQ ID NO: 252873 - RNA, 24 nt, Artificial Sequence
  Synthetic
aaaugcuaaucccaaugcauaaac

SEQ ID NO: 252874 - RNA, 18 nt, Artificial Sequence
  Synthetic
auaaggaaaaggauaaac

SEQ ID NO: 252875 - RNA, 19 nt, Artificial Sequence
  Synthetic
uauaaggaaaaggauaaac

SEQ ID NO: 252876 - RNA, 20 nt, Artificial Sequence
  Synthetic
auauaaggaaaaggauaaac

SEQ ID NO: 252877 - RNA, 21 nt, Artificial Sequence
  Synthetic
cauauaaggaaaaggauaaac

SEQ ID NO: 252878 - RNA, 22 nt, Artificial Sequence
  Synthetic
ccauauaaggaaaaggauaaac

SEQ ID NO: 252879 - RNA, 23 nt, Artificial Sequence
  Synthetic
cccauauaaggaaaaggauaaac

SEQ ID NO: 252880 - RNA, 24 nt, Artificial Sequence
  Synthetic
gcccauauaaggaaaaggauaaac

SEQ ID NO: 252881 - RNA, 18 nt, Artificial Sequence
  Synthetic
aaauguuacaugauaaac

SEQ ID NO: 252882 - RNA, 19 nt, Artificial Sequence
  Synthetic
caaauguuacaugauaaac

SEQ ID NO: 252883 - RNA, 20 nt, Artificial Sequence
  Synthetic
acaaauguuacaugauaaac

SEQ ID NO: 252884 - RNA, 21 nt, Artificial Sequence
  Synthetic
aacaaauguuacaugauaaac

SEQ ID NO: 252885 - RNA, 22 nt, Artificial Sequence
  Synthetic
uaacaaauguuacaugauaaac

SEQ ID NO: 252886 - RNA, 23 nt, Artificial Sequence
  Synthetic
auaacaaauguuacaugauaaac

SEQ ID NO: 252887 - RNA, 24 nt, Artificial Sequence
  Synthetic
cauaacaaauguuacaugauaaac

SEQ ID NO: 252888 - RNA, 18 nt, Artificial Sequence
  Synthetic
uccuuuucuuauauaaac

SEQ ID NO: 252889 - RNA, 19 nt, Artificial Sequence
  Synthetic
uuccuuuucuuauauaaac

SEQ ID NO: 252890 - RNA, 20 nt, Artificial Sequence
  Synthetic
guuccuuuucuuauauaaac

SEQ ID NO: 252891 - RNA, 21 nt, Artificial Sequence
  Synthetic
aguuccuuuucuuauauaaac

SEQ ID NO: 252892 - RNA, 22 nt, Artificial Sequence
  Synthetic
uaguuccuuuucuuauauaaac

SEQ ID NO: 252893 - RNA, 23 nt, Artificial Sequence
  Synthetic
uuaguuccuuuucuuauauaaac

SEQ ID NO: 252894 - RNA, 24 nt, Artificial Sequence
  Synthetic
auuaguuccuuuucuuauauaaac

SEQ ID NO: 252895 - RNA, 18 nt, Artificial Sequence
  Synthetic
agauuuguuaaacuaaac

SEQ ID NO: 252896 - RNA, 19 nt, Artificial Sequence
  Synthetic
uagauuuguuaaacuaaac

SEQ ID NO: 252897 - RNA, 20 nt, Artificial Sequence
  Synthetic
guagauuuguuaaacuaaac

SEQ ID NO: 252898 - RNA, 21 nt, Artificial Sequence
  Synthetic
aguagauuuguuaaacuaaac

SEQ ID NO: 252899 - RNA, 22 nt, Artificial Sequence
  Synthetic
uaguagauuuguuaaacuaaac

SEQ ID NO: 252900 - RNA, 23 nt, Artificial Sequence
  Synthetic
auaguagauuuguuaaacuaaac

SEQ ID NO: 252901 - RNA, 24 nt, Artificial Sequence
  Synthetic
uauaguagauuuguuaaacuaaac

SEQ ID NO: 252902 - RNA, 18 nt, Artificial Sequence
  Synthetic
uaccaccaacaacuaaac

SEQ ID NO: 252903 - RNA, 19 nt, Artificial Sequence
  Synthetic
cuaccaccaacaacuaaac

SEQ ID NO: 252904 - RNA, 20 nt, Artificial Sequence
  Synthetic
acuaccaccaacaacuaaac

SEQ ID NO: 252905 - RNA, 21 nt, Artificial Sequence
  Synthetic
aacuaccaccaacaacuaaac

SEQ ID NO: 252906 - RNA, 22 nt, Artificial Sequence
  Synthetic
aaacuaccaccaacaacuaaac

SEQ ID NO: 252907 - RNA, 23 nt, Artificial Sequence
  Synthetic
aaaacuaccaccaacaacuaaac

SEQ ID NO: 252908 - RNA, 24 nt, Artificial Sequence
  Synthetic
aaaaacuaccaccaacaacuaaac

SEQ ID NO: 252909 - RNA, 18 nt, Artificial Sequence
  Synthetic
cugaaggaaucacuaaac

SEQ ID NO: 252910 - RNA, 19 nt, Artificial Sequence
  Synthetic
ccugaaggaaucacuaaac

SEQ ID NO: 252911 - RNA, 20 nt, Artificial Sequence
  Synthetic
uccugaaggaaucacuaaac

SEQ ID NO: 252912 - RNA, 21 nt, Artificial Sequence
  Synthetic
cuccugaaggaaucacuaaac

SEQ ID NO: 252913 - RNA, 22 nt, Artificial Sequence
  Synthetic
gcuccugaaggaaucacuaaac

SEQ ID NO: 252914 - RNA, 23 nt, Artificial Sequence
  Synthetic
agcuccugaaggaaucacuaaac

SEQ ID NO: 252915 - RNA, 24 nt, Artificial Sequence
  Synthetic
gagcuccugaaggaaucacuaaac

SEQ ID NO: 252916 - RNA, 18 nt, Artificial Sequence
  Synthetic
acccucccaagacuaaac

SEQ ID NO: 252917 - RNA, 19 nt, Artificial Sequence
  Synthetic
cacccucccaagacuaaac

SEQ ID NO: 252918 - RNA, 20 nt, Artificial Sequence
  Synthetic
acacccucccaagacuaaac

SEQ ID NO: 252919 - RNA, 18 nt, Artificial Sequence
  Synthetic
acucucccaagacuaaac

SEQ ID NO: 252920 - RNA, 19 nt, Artificial Sequence
  Synthetic
cacucucccaagacuaaac

SEQ ID NO: 252921 - RNA, 20 nt, Artificial Sequence
  Synthetic
acacucucccaagacuaaac

SEQ ID NO: 252922 - RNA, 18 nt, Artificial Sequence
  Synthetic
ucuaacaggcaccuaaac

SEQ ID NO: 252923 - RNA, 19 nt, Artificial Sequence
  Synthetic
aucuaacaggcaccuaaac

SEQ ID NO: 252924 - RNA, 20 nt, Artificial Sequence
  Synthetic
uaucuaacaggcaccuaaac

SEQ ID NO: 252925 - RNA, 21 nt, Artificial Sequence
  Synthetic
cuaucuaacaggcaccuaaac

SEQ ID NO: 252926 - RNA, 22 nt, Artificial Sequence
  Synthetic
acuaucuaacaggcaccuaaac

SEQ ID NO: 252927 - RNA, 23 nt, Artificial Sequence
  Synthetic
cacuaucuaacaggcaccuaaac

SEQ ID NO: 252928 - RNA, 24 nt, Artificial Sequence
  Synthetic
ccacuaucuaacaggcaccuaaac

SEQ ID NO: 252929 - RNA, 18 nt, Artificial Sequence
  Synthetic
uugauggauugccuaaac

SEQ ID NO: 252930 - RNA, 19 nt, Artificial Sequence
  Synthetic
auugauggauugccuaaac

SEQ ID NO: 252931 - RNA, 20 nt, Artificial Sequence
  Synthetic
aauugauggauugccuaaac

SEQ ID NO: 252932 - RNA, 21 nt, Artificial Sequence
  Synthetic
aaauugauggauugccuaaac

SEQ ID NO: 252933 - RNA, 22 nt, Artificial Sequence
  Synthetic
uaaauugauggauugccuaaac

SEQ ID NO: 252934 - RNA, 23 nt, Artificial Sequence
  Synthetic
guaaauugauggauugccuaaac

SEQ ID NO: 252935 - RNA, 24 nt, Artificial Sequence
  Synthetic
gguaaauugauggauugccuaaac

SEQ ID NO: 252936 - RNA, 18 nt, Artificial Sequence
  Synthetic
gaaagagauguccuaaac

SEQ ID NO: 252937 - RNA, 19 nt, Artificial Sequence
  Synthetic
ugaaagagauguccuaaac

SEQ ID NO: 252938 - RNA, 20 nt, Artificial Sequence
  Synthetic
augaaagagauguccuaaac

SEQ ID NO: 252939 - RNA, 21 nt, Artificial Sequence
  Synthetic
uaugaaagagauguccuaaac

SEQ ID NO: 252940 - RNA, 22 nt, Artificial Sequence
  Synthetic
auaugaaagagauguccuaaac

SEQ ID NO: 252941 - RNA, 23 nt, Artificial Sequence
  Synthetic
cauaugaaagagauguccuaaac

SEQ ID NO: 252942 - RNA, 24 nt, Artificial Sequence
  Synthetic
acauaugaaagagauguccuaaac

SEQ ID NO: 252943 - RNA, 18 nt, Artificial Sequence
  Synthetic
aaugauuuacagcuaaac

SEQ ID NO: 252944 - RNA, 19 nt, Artificial Sequence
  Synthetic
aaaugauuuacagcuaaac

SEQ ID NO: 252945 - RNA, 20 nt, Artificial Sequence
  Synthetic
caaaugauuuacagcuaaac

SEQ ID NO: 252946 - RNA, 21 nt, Artificial Sequence
  Synthetic
acaaaugauuuacagcuaaac

SEQ ID NO: 252947 - RNA, 22 nt, Artificial Sequence
  Synthetic
cacaaaugauuuacagcuaaac

SEQ ID NO: 252948 - RNA, 23 nt, Artificial Sequence
  Synthetic
ucacaaaugauuuacagcuaaac

SEQ ID NO: 252949 - RNA, 24 nt, Artificial Sequence
  Synthetic
uucacaaaugauuuacagcuaaac

SEQ ID NO: 252950 - RNA, 18 nt, Artificial Sequence
  Synthetic
uuuccaauccagcuaaac

SEQ ID NO: 252951 - RNA, 19 nt, Artificial Sequence
  Synthetic
uuuuccaauccagcuaaac

SEQ ID NO: 252952 - RNA, 20 nt, Artificial Sequence
  Synthetic
uuuuuccaauccagcuaaac

SEQ ID NO: 252953 - RNA, 21 nt, Artificial Sequence
  Synthetic
guuuuuccaauccagcuaaac

SEQ ID NO: 252954 - RNA, 22 nt, Artificial Sequence
  Synthetic
uguuuuuccaauccagcuaaac

SEQ ID NO: 252955 - RNA, 23 nt, Artificial Sequence
  Synthetic
uuguuuuuccaauccagcuaaac

SEQ ID NO: 252956 - RNA, 24 nt, Artificial Sequence
  Synthetic
uuuguuuuuccaauccagcuaaac

SEQ ID NO: 252957 - RNA, 18 nt, Artificial Sequence
  Synthetic
cuugauuauaugcuaaac

SEQ ID NO: 252958 - RNA, 19 nt, Artificial Sequence
  Synthetic
ucuugauuauaugcuaaac

SEQ ID NO: 252959 - RNA, 20 nt, Artificial Sequence
  Synthetic
uucuugauuauaugcuaaac

SEQ ID NO: 252960 - RNA, 21 nt, Artificial Sequence
  Synthetic
uuucuugauuauaugcuaaac

SEQ ID NO: 252961 - RNA, 22 nt, Artificial Sequence
  Synthetic
auuucuugauuauaugcuaaac

SEQ ID NO: 252962 - RNA, 23 nt, Artificial Sequence
  Synthetic
uauuucuugauuauaugcuaaac

SEQ ID NO: 252963 - RNA, 24 nt, Artificial Sequence
  Synthetic
uuauuucuugauuauaugcuaaac

SEQ ID NO: 252964 - RNA, 18 nt, Artificial Sequence
  Synthetic
auaauggugauucuaaac

SEQ ID NO: 252965 - RNA, 19 nt, Artificial Sequence
  Synthetic
aauaauggugauucuaaac

SEQ ID NO: 252966 - RNA, 20 nt, Artificial Sequence
  Synthetic
aaauaauggugauucuaaac

SEQ ID NO: 252967 - RNA, 21 nt, Artificial Sequence
  Synthetic
gaaauaauggugauucuaaac

SEQ ID NO: 252968 - RNA, 22 nt, Artificial Sequence
  Synthetic
agaaauaauggugauucuaaac

SEQ ID NO: 252969 - RNA, 23 nt, Artificial Sequence
  Synthetic
gagaaauaauggugauucuaaac

SEQ ID NO: 252970 - RNA, 24 nt, Artificial Sequence
  Synthetic
ugagaaauaauggugauucuaaac

SEQ ID NO: 252971 - RNA, 18 nt, Artificial Sequence
  Synthetic
cuuuuugaucuucuaaac

SEQ ID NO: 252972 - RNA, 19 nt, Artificial Sequence
  Synthetic
ccuuuuugaucuucuaaac

SEQ ID NO: 252973 - RNA, 20 nt, Artificial Sequence
  Synthetic
accuuuuugaucuucuaaac

SEQ ID NO: 252974 - RNA, 21 nt, Artificial Sequence
  Synthetic
aaccuuuuugaucuucuaaac

SEQ ID NO: 252975 - RNA, 22 nt, Artificial Sequence
  Synthetic
caaccuuuuugaucuucuaaac

SEQ ID NO: 252976 - RNA, 23 nt, Artificial Sequence
  Synthetic
ucaaccuuuuugaucuucuaaac

SEQ ID NO: 252977 - RNA, 24 nt, Artificial Sequence
  Synthetic
aucaaccuuuuugaucuucuaaac

SEQ ID NO: 252978 - RNA, 18 nt, Artificial Sequence
  Synthetic
auuuagaauuuucuaaac

SEQ ID NO: 252979 - RNA, 19 nt, Artificial Sequence
  Synthetic
gauuuagaauuuucuaaac

SEQ ID NO: 252980 - RNA, 20 nt, Artificial Sequence
  Synthetic
ugauuuagaauuuucuaaac

SEQ ID NO: 252981 - RNA, 21 nt, Artificial Sequence
  Synthetic
uugauuuagaauuuucuaaac

SEQ ID NO: 252982 - RNA, 22 nt, Artificial Sequence
  Synthetic
uuugauuuagaauuuucuaaac

SEQ ID NO: 252983 - RNA, 23 nt, Artificial Sequence
  Synthetic
guuugauuuagaauuuucuaaac

SEQ ID NO: 252984 - RNA, 24 nt, Artificial Sequence
  Synthetic
uguuugauuuagaauuuucuaaac

SEQ ID NO: 252985 - RNA, 18 nt, Artificial Sequence
  Synthetic
aucccccucaaaguaaac

SEQ ID NO: 252986 - RNA, 19 nt, Artificial Sequence
  Synthetic
caucccccucaaaguaaac

SEQ ID NO: 252987 - RNA, 20 nt, Artificial Sequence
  Synthetic
ccaucccccucaaaguaaac

SEQ ID NO: 252988 - RNA, 21 nt, Artificial Sequence
  Synthetic
cccaucccccucaaaguaaac

SEQ ID NO: 252989 - RNA, 22 nt, Artificial Sequence
  Synthetic
ccccaucccccucaaaguaaac

SEQ ID NO: 252990 - RNA, 23 nt, Artificial Sequence
  Synthetic
uccccaucccccucaaaguaaac

SEQ ID NO: 252991 - RNA, 24 nt, Artificial Sequence
  Synthetic
cuccccaucccccucaaaguaaac

SEQ ID NO: 252992 - RNA, 18 nt, Artificial Sequence
  Synthetic
agaaugguguaaguaaac

SEQ ID NO: 252993 - RNA, 19 nt, Artificial Sequence
  Synthetic
gagaaugguguaaguaaac

SEQ ID NO: 252994 - RNA, 20 nt, Artificial Sequence
  Synthetic
agagaaugguguaaguaaac

SEQ ID NO: 252995 - RNA, 21 nt, Artificial Sequence
  Synthetic
aagagaaugguguaaguaaac

SEQ ID NO: 252996 - RNA, 22 nt, Artificial Sequence
  Synthetic
caagagaaugguguaaguaaac

SEQ ID NO: 252997 - RNA, 23 nt, Artificial Sequence
  Synthetic
gcaagagaaugguguaaguaaac

SEQ ID NO: 252998 - RNA, 24 nt, Artificial Sequence
  Synthetic
ggcaagagaaugguguaaguaaac

SEQ ID NO: 252999 - RNA, 18 nt, Artificial Sequence
  Synthetic
aauagugccgcaguaaac

SEQ ID NO: 253000 - RNA, 19 nt, Artificial Sequence
  Synthetic
aaauagugccgcaguaaac

SEQ ID NO: 253001 - RNA, 20 nt, Artificial Sequence
  Synthetic
caaauagugccgcaguaaac

SEQ ID NO: 253002 - RNA, 21 nt, Artificial Sequence
  Synthetic
gcaaauagugccgcaguaaac

SEQ ID NO: 253003 - RNA, 22 nt, Artificial Sequence
  Synthetic
ugcaaauagugccgcaguaaac

SEQ ID NO: 253004 - RNA, 23 nt, Artificial Sequence
  Synthetic
uugcaaauagugccgcaguaaac

SEQ ID NO: 253005 - RNA, 24 nt, Artificial Sequence
  Synthetic
auugcaaauagugccgcaguaaac

SEQ ID NO: 253006 - RNA, 18 nt, Artificial Sequence
  Synthetic
cugacauauugaguaaac

SEQ ID NO: 253007 - RNA, 19 nt, Artificial Sequence
  Synthetic
acugacauauugaguaaac

SEQ ID NO: 253008 - RNA, 20 nt, Artificial Sequence
  Synthetic
gacugacauauugaguaaac

SEQ ID NO: 253009 - RNA, 21 nt, Artificial Sequence
  Synthetic
agacugacauauugaguaaac

SEQ ID NO: 253010 - RNA, 22 nt, Artificial Sequence
  Synthetic
aagacugacauauugaguaaac

SEQ ID NO: 253011 - RNA, 23 nt, Artificial Sequence
  Synthetic
gaagacugacauauugaguaaac

SEQ ID NO: 253012 - RNA, 24 nt, Artificial Sequence
  Synthetic
ugaagacugacauauugaguaaac

SEQ ID NO: 253013 - RNA, 18 nt, Artificial Sequence
  Synthetic
ucugaauuucuaguaaac

SEQ ID NO: 253014 - RNA, 19 nt, Artificial Sequence
  Synthetic
cucugaauuucuaguaaac

SEQ ID NO: 253015 - RNA, 20 nt, Artificial Sequence
  Synthetic
ucucugaauuucuaguaaac

SEQ ID NO: 253016 - RNA, 21 nt, Artificial Sequence
  Synthetic
gucucugaauuucuaguaaac

SEQ ID NO: 253017 - RNA, 22 nt, Artificial Sequence
  Synthetic
agucucugaauuucuaguaaac

SEQ ID NO: 253018 - RNA, 23 nt, Artificial Sequence
  Synthetic
uagucucugaauuucuaguaaac

SEQ ID NO: 253019 - RNA, 24 nt, Artificial Sequence
  Synthetic
guagucucugaauuucuaguaaac

SEQ ID NO: 253020 - RNA, 18 nt, Artificial Sequence
  Synthetic
uuauagucuccuguaaac

SEQ ID NO: 253021 - RNA, 19 nt, Artificial Sequence
  Synthetic
uuuauagucuccuguaaac

SEQ ID NO: 253022 - RNA, 20 nt, Artificial Sequence
  Synthetic
uuuuauagucuccuguaaac

SEQ ID NO: 253023 - RNA, 21 nt, Artificial Sequence
  Synthetic
guuuuauagucuccuguaaac

SEQ ID NO: 253024 - RNA, 22 nt, Artificial Sequence
  Synthetic
gguuuuauagucuccuguaaac

SEQ ID NO: 253025 - RNA, 23 nt, Artificial Sequence
  Synthetic
agguuuuauagucuccuguaaac

SEQ ID NO: 253026 - RNA, 24 nt, Artificial Sequence
  Synthetic
aagguuuuauagucuccuguaaac

SEQ ID NO: 253027 - RNA, 18 nt, Artificial Sequence
  Synthetic
ucugaaaggauuguaaac

SEQ ID NO: 253028 - RNA, 19 nt, Artificial Sequence
  Synthetic
cucugaaaggauuguaaac

SEQ ID NO: 253029 - RNA, 20 nt, Artificial Sequence
  Synthetic
acucugaaaggauuguaaac

SEQ ID NO: 253030 - RNA, 21 nt, Artificial Sequence
  Synthetic
aacucugaaaggauuguaaac

SEQ ID NO: 253031 - RNA, 22 nt, Artificial Sequence
  Synthetic
caacucugaaaggauuguaaac

SEQ ID NO: 253032 - RNA, 23 nt, Artificial Sequence
  Synthetic
gcaacucugaaaggauuguaaac

SEQ ID NO: 253033 - RNA, 24 nt, Artificial Sequence
  Synthetic
ggcaacucugaaaggauuguaaac

SEQ ID NO: 253034 - RNA, 18 nt, Artificial Sequence
  Synthetic
augagagaucaauuaaac

SEQ ID NO: 253035 - RNA, 19 nt, Artificial Sequence
  Synthetic
uaugagagaucaauuaaac

SEQ ID NO: 253036 - RNA, 20 nt, Artificial Sequence
  Synthetic
guaugagagaucaauuaaac

SEQ ID NO: 253037 - RNA, 21 nt, Artificial Sequence
  Synthetic
aguaugagagaucaauuaaac

SEQ ID NO: 253038 - RNA, 22 nt, Artificial Sequence
  Synthetic
uaguaugagagaucaauuaaac

SEQ ID NO: 253039 - RNA, 23 nt, Artificial Sequence
  Synthetic
cuaguaugagagaucaauuaaac

SEQ ID NO: 253040 - RNA, 24 nt, Artificial Sequence
  Synthetic
ccuaguaugagagaucaauuaaac

SEQ ID NO: 253041 - RNA, 18 nt, Artificial Sequence
  Synthetic
auauguguucaauuaaac

SEQ ID NO: 253042 - RNA, 19 nt, Artificial Sequence
  Synthetic
uauauguguucaauuaaac

SEQ ID NO: 253043 - RNA, 20 nt, Artificial Sequence
  Synthetic
uuauauguguucaauuaaac

SEQ ID NO: 253044 - RNA, 21 nt, Artificial Sequence
  Synthetic
cuuauauguguucaauuaaac

SEQ ID NO: 253045 - RNA, 22 nt, Artificial Sequence
  Synthetic
ucuuauauguguucaauuaaac

SEQ ID NO: 253046 - RNA, 23 nt, Artificial Sequence
  Synthetic
aucuuauauguguucaauuaaac

SEQ ID NO: 253047 - RNA, 24 nt, Artificial Sequence
  Synthetic
gaucuuauauguguucaauuaaac

SEQ ID NO: 253048 - RNA, 18 nt, Artificial Sequence
  Synthetic
cuccuggaaauauuaaac

SEQ ID NO: 253049 - RNA, 19 nt, Artificial Sequence
  Synthetic
ucuccuggaaauauuaaac

SEQ ID NO: 253050 - RNA, 20 nt, Artificial Sequence
  Synthetic
gucuccuggaaauauuaaac

SEQ ID NO: 253051 - RNA, 21 nt, Artificial Sequence
  Synthetic
agucuccuggaaauauuaaac

SEQ ID NO: 253052 - RNA, 22 nt, Artificial Sequence
  Synthetic
cagucuccuggaaauauuaaac

SEQ ID NO: 253053 - RNA, 23 nt, Artificial Sequence
  Synthetic
ccagucuccuggaaauauuaaac

SEQ ID NO: 253054 - RNA, 24 nt, Artificial Sequence
  Synthetic
cccagucuccuggaaauauuaaac

SEQ ID NO: 253055 - RNA, 18 nt, Artificial Sequence
  Synthetic
uuucauagacuauuaaac

SEQ ID NO: 253056 - RNA, 19 nt, Artificial Sequence
  Synthetic
auuucauagacuauuaaac

SEQ ID NO: 253057 - RNA, 20 nt, Artificial Sequence
  Synthetic
cauuucauagacuauuaaac

SEQ ID NO: 253058 - RNA, 21 nt, Artificial Sequence
  Synthetic
acauuucauagacuauuaaac

SEQ ID NO: 253059 - RNA, 22 nt, Artificial Sequence
  Synthetic
aacauuucauagacuauuaaac

SEQ ID NO: 253060 - RNA, 23 nt, Artificial Sequence
  Synthetic
caacauuucauagacuauuaaac

SEQ ID NO: 253061 - RNA, 24 nt, Artificial Sequence
  Synthetic
acaacauuucauagacuauuaaac

SEQ ID NO: 253062 - RNA, 18 nt, Artificial Sequence
  Synthetic
gaguuauuggccuuaaac

SEQ ID NO: 253063 - RNA, 19 nt, Artificial Sequence
  Synthetic
agaguuauuggccuuaaac

SEQ ID NO: 253064 - RNA, 20 nt, Artificial Sequence
  Synthetic
aagaguuauuggccuuaaac

SEQ ID NO: 253065 - RNA, 21 nt, Artificial Sequence
  Synthetic
uaagaguuauuggccuuaaac

SEQ ID NO: 253066 - RNA, 22 nt, Artificial Sequence
  Synthetic
cuaagaguuauuggccuuaaac

SEQ ID NO: 253067 - RNA, 23 nt, Artificial Sequence
  Synthetic
ucuaagaguuauuggccuuaaac

SEQ ID NO: 253068 - RNA, 24 nt, Artificial Sequence
  Synthetic
aucuaagaguuauuggccuuaaac

SEQ ID NO: 253069 - RNA, 18 nt, Artificial Sequence
  Synthetic
uucucauccaucuuaaac

SEQ ID NO: 253070 - RNA, 19 nt, Artificial Sequence
  Synthetic
uuucucauccaucuuaaac

SEQ ID NO: 253071 - RNA, 20 nt, Artificial Sequence
  Synthetic
cuuucucauccaucuuaaac

SEQ ID NO: 253072 - RNA, 21 nt, Artificial Sequence
  Synthetic
gcuuucucauccaucuuaaac

SEQ ID NO: 253073 - RNA, 22 nt, Artificial Sequence
  Synthetic
ugcuuucucauccaucuuaaac

SEQ ID NO: 253074 - RNA, 23 nt, Artificial Sequence
  Synthetic
gugcuuucucauccaucuuaaac

SEQ ID NO: 253075 - RNA, 24 nt, Artificial Sequence
  Synthetic
cgugcuuucucauccaucuuaaac

SEQ ID NO: 253076 - RNA, 18 nt, Artificial Sequence
  Synthetic
uuucuucuugauuuaaac

SEQ ID NO: 253077 - RNA, 19 nt, Artificial Sequence
  Synthetic
auuucuucuugauuuaaac

SEQ ID NO: 253078 - RNA, 20 nt, Artificial Sequence
  Synthetic
uauuucuucuugauuuaaac

SEQ ID NO: 253079 - RNA, 21 nt, Artificial Sequence
  Synthetic
cuauuucuucuugauuuaaac

SEQ ID NO: 253080 - RNA, 22 nt, Artificial Sequence
  Synthetic
ucuauuucuucuugauuuaaac

SEQ ID NO: 253081 - RNA, 23 nt, Artificial Sequence
  Synthetic
uucuauuucuucuugauuuaaac

SEQ ID NO: 253082 - RNA, 24 nt, Artificial Sequence
  Synthetic
uuucuauuucuucuugauuuaaac

SEQ ID NO: 253083 - RNA, 18 nt, Artificial Sequence
  Synthetic
uugcuuuuaacuuuaaac

SEQ ID NO: 253084 - RNA, 19 nt, Artificial Sequence
  Synthetic
uuugcuuuuaacuuuaaac

SEQ ID NO: 253085 - RNA, 20 nt, Artificial Sequence
  Synthetic
auuugcuuuuaacuuuaaac

SEQ ID NO: 253086 - RNA, 21 nt, Artificial Sequence
  Synthetic
aauuugcuuuuaacuuuaaac

SEQ ID NO: 253087 - RNA, 22 nt, Artificial Sequence
  Synthetic
aaauuugcuuuuaacuuuaaac

SEQ ID NO: 253088 - RNA, 23 nt, Artificial Sequence
  Synthetic
aaaauuugcuuuuaacuuuaaac

SEQ ID NO: 253089 - RNA, 24 nt, Artificial Sequence
  Synthetic
uaaaauuugcuuuuaacuuuaaac

SEQ ID NO: 253090 - RNA, 18 nt, Artificial Sequence
  Synthetic
caggaucacucuuuaaac

SEQ ID NO: 253091 - RNA, 19 nt, Artificial Sequence
  Synthetic
ccaggaucacucuuuaaac

SEQ ID NO: 253092 - RNA, 20 nt, Artificial Sequence
  Synthetic
uccaggaucacucuuuaaac

SEQ ID NO: 253093 - RNA, 21 nt, Artificial Sequence
  Synthetic
uuccaggaucacucuuuaaac

SEQ ID NO: 253094 - RNA, 22 nt, Artificial Sequence
  Synthetic
guuccaggaucacucuuuaaac

SEQ ID NO: 253095 - RNA, 23 nt, Artificial Sequence
  Synthetic
uguuccaggaucacucuuuaaac

SEQ ID NO: 253096 - RNA, 24 nt, Artificial Sequence
  Synthetic
cuguuccaggaucacucuuuaaac

SEQ ID NO: 253097 - RNA, 18 nt, Artificial Sequence
  Synthetic
uuuucugcuauuuuaaac

SEQ ID NO: 253098 - RNA, 19 nt, Artificial Sequence
  Synthetic
guuuucugcuauuuuaaac

SEQ ID NO: 253099 - RNA, 20 nt, Artificial Sequence
  Synthetic
gguuuucugcuauuuuaaac

SEQ ID NO: 253100 - RNA, 21 nt, Artificial Sequence
  Synthetic
ugguuuucugcuauuuuaaac

SEQ ID NO: 253101 - RNA, 22 nt, Artificial Sequence
  Synthetic
gugguuuucugcuauuuuaaac

SEQ ID NO: 253102 - RNA, 23 nt, Artificial Sequence
  Synthetic
agugguuuucugcuauuuuaaac

SEQ ID NO: 253103 - RNA, 24 nt, Artificial Sequence
  Synthetic
uagugguuuucugcuauuuuaaac

SEQ ID NO: 253104 - RNA, 18 nt, Artificial Sequence
  Synthetic
uuuuaaaauguuuuaaac

SEQ ID NO: 253105 - RNA, 19 nt, Artificial Sequence
  Synthetic
auuuuaaaauguuuuaaac

SEQ ID NO: 253106 - RNA, 20 nt, Artificial Sequence
  Synthetic
cauuuuaaaauguuuuaaac

SEQ ID NO: 253107 - RNA, 21 nt, Artificial Sequence
  Synthetic
ccauuuuaaaauguuuuaaac

SEQ ID NO: 253108 - RNA, 22 nt, Artificial Sequence
  Synthetic
accauuuuaaaauguuuuaaac

SEQ ID NO: 253109 - RNA, 23 nt, Artificial Sequence
  Synthetic
gaccauuuuaaaauguuuuaaac

SEQ ID NO: 253110 - RNA, 24 nt, Artificial Sequence
  Synthetic
ggaccauuuuaaaauguuuuaaac

SEQ ID NO: 253111 - RNA, 18 nt, Artificial Sequence
  Synthetic
uccaauuuuguuuuaaac

SEQ ID NO: 253112 - RNA, 19 nt, Artificial Sequence
  Synthetic
auccaauuuuguuuuaaac

SEQ ID NO: 253113 - RNA, 20 nt, Artificial Sequence
  Synthetic
aauccaauuuuguuuuaaac

SEQ ID NO: 253114 - RNA, 21 nt, Artificial Sequence
  Synthetic
gaauccaauuuuguuuuaaac

SEQ ID NO: 253115 - RNA, 22 nt, Artificial Sequence
  Synthetic
agaauccaauuuuguuuuaaac

SEQ ID NO: 253116 - RNA, 23 nt, Artificial Sequence
  Synthetic
gagaauccaauuuuguuuuaaac

SEQ ID NO: 253117 - RNA, 24 nt, Artificial Sequence
  Synthetic
ugagaauccaauuuuguuuuaaac

SEQ ID NO: 253118 - RNA, 18 nt, Artificial Sequence
  Synthetic
gaaagucuuuaaaacaac

SEQ ID NO: 253119 - RNA, 19 nt, Artificial Sequence
  Synthetic
ggaaagucuuuaaaacaac

SEQ ID NO: 253120 - RNA, 20 nt, Artificial Sequence
  Synthetic
gggaaagucuuuaaaacaac

SEQ ID NO: 253121 - RNA, 21 nt, Artificial Sequence
  Synthetic
ugggaaagucuuuaaaacaac

SEQ ID NO: 253122 - RNA, 22 nt, Artificial Sequence
  Synthetic
augggaaagucuuuaaaacaac

SEQ ID NO: 253123 - RNA, 23 nt, Artificial Sequence
  Synthetic
aaugggaaagucuuuaaaacaac

SEQ ID NO: 253124 - RNA, 24 nt, Artificial Sequence
  Synthetic
aaaugggaaagucuuuaaaacaac

SEQ ID NO: 253125 - RNA, 18 nt, Artificial Sequence
  Synthetic
gguguuugaccaaacaac

SEQ ID NO: 253126 - RNA, 19 nt, Artificial Sequence
  Synthetic
ugguguuugaccaaacaac

SEQ ID NO: 253127 - RNA, 20 nt, Artificial Sequence
  Synthetic
uugguguuugaccaaacaac

SEQ ID NO: 253128 - RNA, 21 nt, Artificial Sequence
  Synthetic
auugguguuugaccaaacaac

SEQ ID NO: 253129 - RNA, 22 nt, Artificial Sequence
  Synthetic
gauugguguuugaccaaacaac

SEQ ID NO: 253130 - RNA, 23 nt, Artificial Sequence
  Synthetic
agauugguguuugaccaaacaac

SEQ ID NO: 253131 - RNA, 24 nt, Artificial Sequence
  Synthetic
uagauugguguuugaccaaacaac

SEQ ID NO: 253132 - RNA, 18 nt, Artificial Sequence
  Synthetic
ucaucugauaagaacaac

SEQ ID NO: 253133 - RNA, 19 nt, Artificial Sequence
  Synthetic
cucaucugauaagaacaac

SEQ ID NO: 253134 - RNA, 20 nt, Artificial Sequence
  Synthetic
acucaucugauaagaacaac

SEQ ID NO: 253135 - RNA, 21 nt, Artificial Sequence
  Synthetic
aacucaucugauaagaacaac

SEQ ID NO: 253136 - RNA, 22 nt, Artificial Sequence
  Synthetic
aaacucaucugauaagaacaac

SEQ ID NO: 253137 - RNA, 23 nt, Artificial Sequence
  Synthetic
caaacucaucugauaagaacaac

SEQ ID NO: 253138 - RNA, 24 nt, Artificial Sequence
  Synthetic
acaaacucaucugauaagaacaac

SEQ ID NO: 253139 - RNA, 18 nt, Artificial Sequence
  Synthetic
aagugggaguugaacaac

SEQ ID NO: 253140 - RNA, 19 nt, Artificial Sequence
  Synthetic
uaagugggaguugaacaac

SEQ ID NO: 253141 - RNA, 20 nt, Artificial Sequence
  Synthetic
guaagugggaguugaacaac

SEQ ID NO: 253142 - RNA, 21 nt, Artificial Sequence
  Synthetic
cguaagugggaguugaacaac

SEQ ID NO: 253143 - RNA, 22 nt, Artificial Sequence
  Synthetic
ucguaagugggaguugaacaac

SEQ ID NO: 253144 - RNA, 23 nt, Artificial Sequence
  Synthetic
cucguaagugggaguugaacaac

SEQ ID NO: 253145 - RNA, 24 nt, Artificial Sequence
  Synthetic
acucguaagugggaguugaacaac

SEQ ID NO: 253146 - RNA, 18 nt, Artificial Sequence
  Synthetic
uauuaugccuuacacaac

SEQ ID NO: 253147 - RNA, 19 nt, Artificial Sequence
  Synthetic
guauuaugccuuacacaac

SEQ ID NO: 253148 - RNA, 20 nt, Artificial Sequence
  Synthetic
aguauuaugccuuacacaac

SEQ ID NO: 253149 - RNA, 21 nt, Artificial Sequence
  Synthetic
caguauuaugccuuacacaac

SEQ ID NO: 253150 - RNA, 22 nt, Artificial Sequence
  Synthetic
ccaguauuaugccuuacacaac

SEQ ID NO: 253151 - RNA, 23 nt, Artificial Sequence
  Synthetic
accaguauuaugccuuacacaac

SEQ ID NO: 253152 - RNA, 24 nt, Artificial Sequence
  Synthetic
caccaguauuaugccuuacacaac

SEQ ID NO: 253153 - RNA, 18 nt, Artificial Sequence
  Synthetic
cucaucauaucccacaac

SEQ ID NO: 253154 - RNA, 19 nt, Artificial Sequence
  Synthetic
ccucaucauaucccacaac

SEQ ID NO: 253155 - RNA, 20 nt, Artificial Sequence
  Synthetic
accucaucauaucccacaac

SEQ ID NO: 253156 - RNA, 21 nt, Artificial Sequence
  Synthetic
aaccucaucauaucccacaac

SEQ ID NO: 253157 - RNA, 22 nt, Artificial Sequence
  Synthetic
aaaccucaucauaucccacaac

SEQ ID NO: 253158 - RNA, 23 nt, Artificial Sequence
  Synthetic
gaaaccucaucauaucccacaac

SEQ ID NO: 253159 - RNA, 24 nt, Artificial Sequence
  Synthetic
agaaaccucaucauaucccacaac

SEQ ID NO: 253160 - RNA, 18 nt, Artificial Sequence
  Synthetic
cauuuuccuucccacaac

SEQ ID NO: 253161 - RNA, 19 nt, Artificial Sequence
  Synthetic
ucauuuuccuucccacaac

SEQ ID NO: 253162 - RNA, 20 nt, Artificial Sequence
  Synthetic
cucauuuuccuucccacaac

SEQ ID NO: 253163 - RNA, 21 nt, Artificial Sequence
  Synthetic
ccucauuuuccuucccacaac

SEQ ID NO: 253164 - RNA, 22 nt, Artificial Sequence
  Synthetic
cccucauuuuccuucccacaac

SEQ ID NO: 253165 - RNA, 23 nt, Artificial Sequence
  Synthetic
ccccucauuuuccuucccacaac

SEQ ID NO: 253166 - RNA, 24 nt, Artificial Sequence
  Synthetic
uccccucauuuuccuucccacaac

SEQ ID NO: 253167 - RNA, 18 nt, Artificial Sequence
  Synthetic
gaacaaagcuuccacaac

SEQ ID NO: 253168 - RNA, 19 nt, Artificial Sequence
  Synthetic
agaacaaagcuuccacaac

SEQ ID NO: 253169 - RNA, 20 nt, Artificial Sequence
  Synthetic
aagaacaaagcuuccacaac

SEQ ID NO: 253170 - RNA, 21 nt, Artificial Sequence
  Synthetic
aaagaacaaagcuuccacaac

SEQ ID NO: 253171 - RNA, 22 nt, Artificial Sequence
  Synthetic
aaaagaacaaagcuuccacaac

SEQ ID NO: 253172 - RNA, 23 nt, Artificial Sequence
  Synthetic
caaaagaacaaagcuuccacaac

SEQ ID NO: 253173 - RNA, 24 nt, Artificial Sequence
  Synthetic
gcaaaagaacaaagcuuccacaac

SEQ ID NO: 253174 - RNA, 18 nt, Artificial Sequence
  Synthetic
acagauguuuaucacaac

SEQ ID NO: 253175 - RNA, 19 nt, Artificial Sequence
  Synthetic
cacagauguuuaucacaac

SEQ ID NO: 253176 - RNA, 20 nt, Artificial Sequence
  Synthetic
acacagauguuuaucacaac

SEQ ID NO: 253177 - RNA, 21 nt, Artificial Sequence
  Synthetic
cacacagauguuuaucacaac

SEQ ID NO: 253178 - RNA, 22 nt, Artificial Sequence
  Synthetic
ucacacagauguuuaucacaac

SEQ ID NO: 253179 - RNA, 23 nt, Artificial Sequence
  Synthetic
cucacacagauguuuaucacaac

SEQ ID NO: 253180 - RNA, 24 nt, Artificial Sequence
  Synthetic
gcucacacagauguuuaucacaac

SEQ ID NO: 253181 - RNA, 18 nt, Artificial Sequence
  Synthetic
acauuccauccucacaac

SEQ ID NO: 253182 - RNA, 19 nt, Artificial Sequence
  Synthetic
uacauuccauccucacaac

SEQ ID NO: 253183 - RNA, 20 nt, Artificial Sequence
  Synthetic
uuacauuccauccucacaac

SEQ ID NO: 253184 - RNA, 21 nt, Artificial Sequence
  Synthetic
auuacauuccauccucacaac

SEQ ID NO: 253185 - RNA, 22 nt, Artificial Sequence
  Synthetic
uauuacauuccauccucacaac

SEQ ID NO: 253186 - RNA, 23 nt, Artificial Sequence
  Synthetic
guauuacauuccauccucacaac

SEQ ID NO: 253187 - RNA, 24 nt, Artificial Sequence
  Synthetic
aguauuacauuccauccucacaac

SEQ ID NO: 253188 - RNA, 18 nt, Artificial Sequence
  Synthetic
auuacagucagucacaac

SEQ ID NO: 253189 - RNA, 19 nt, Artificial Sequence
  Synthetic
aauuacagucagucacaac

SEQ ID NO: 253190 - RNA, 20 nt, Artificial Sequence
  Synthetic
caauuacagucagucacaac

SEQ ID NO: 253191 - RNA, 21 nt, Artificial Sequence
  Synthetic
ucaauuacagucagucacaac

SEQ ID NO: 253192 - RNA, 22 nt, Artificial Sequence
  Synthetic
uucaauuacagucagucacaac

SEQ ID NO: 253193 - RNA, 23 nt, Artificial Sequence
  Synthetic
uuucaauuacagucagucacaac

SEQ ID NO: 253194 - RNA, 24 nt, Artificial Sequence
  Synthetic
uuuucaauuacagucagucacaac

SEQ ID NO: 253195 - RNA, 18 nt, Artificial Sequence
  Synthetic
ugagaguggaaggacaac

SEQ ID NO: 253196 - RNA, 19 nt, Artificial Sequence
  Synthetic
cugagaguggaaggacaac

SEQ ID NO: 253197 - RNA, 20 nt, Artificial Sequence
  Synthetic
ccugagaguggaaggacaac

SEQ ID NO: 253198 - RNA, 21 nt, Artificial Sequence
  Synthetic
gccugagaguggaaggacaac

SEQ ID NO: 253199 - RNA, 22 nt, Artificial Sequence
  Synthetic
ugccugagaguggaaggacaac

SEQ ID NO: 253200 - RNA, 23 nt, Artificial Sequence
  Synthetic
cugccugagaguggaaggacaac

SEQ ID NO: 253201 - RNA, 24 nt, Artificial Sequence
  Synthetic
gcugccugagaguggaaggacaac

SEQ ID NO: 253202 - RNA, 18 nt, Artificial Sequence
  Synthetic
cuuuaucugcaggacaac

SEQ ID NO: 253203 - RNA, 19 nt, Artificial Sequence
  Synthetic
ccuuuaucugcaggacaac

SEQ ID NO: 253204 - RNA, 20 nt, Artificial Sequence
  Synthetic
accuuuaucugcaggacaac

SEQ ID NO: 253205 - RNA, 21 nt, Artificial Sequence
  Synthetic
gaccuuuaucugcaggacaac

SEQ ID NO: 253206 - RNA, 22 nt, Artificial Sequence
  Synthetic
ggaccuuuaucugcaggacaac

SEQ ID NO: 253207 - RNA, 23 nt, Artificial Sequence
  Synthetic
gggaccuuuaucugcaggacaac

SEQ ID NO: 253208 - RNA, 24 nt, Artificial Sequence
  Synthetic
ugggaccuuuaucugcaggacaac

SEQ ID NO: 253209 - RNA, 18 nt, Artificial Sequence
  Synthetic
uucacauuucaggacaac

SEQ ID NO: 253210 - RNA, 19 nt, Artificial Sequence
  Synthetic
cuucacauuucaggacaac

SEQ ID NO: 253211 - RNA, 20 nt, Artificial Sequence
  Synthetic
ucuucacauuucaggacaac

SEQ ID NO: 253212 - RNA, 21 nt, Artificial Sequence
  Synthetic
uucuucacauuucaggacaac

SEQ ID NO: 253213 - RNA, 22 nt, Artificial Sequence
  Synthetic
uuucuucacauuucaggacaac

SEQ ID NO: 253214 - RNA, 23 nt, Artificial Sequence
  Synthetic
auuucuucacauuucaggacaac

SEQ ID NO: 253215 - RNA, 24 nt, Artificial Sequence
  Synthetic
cauuucuucacauuucaggacaac

SEQ ID NO: 253216 - RNA, 18 nt, Artificial Sequence
  Synthetic
caaggaguccgggacaac

SEQ ID NO: 253217 - RNA, 19 nt, Artificial Sequence
  Synthetic
gcaaggaguccgggacaac

SEQ ID NO: 253218 - RNA, 20 nt, Artificial Sequence
  Synthetic
ugcaaggaguccgggacaac

SEQ ID NO: 253219 - RNA, 21 nt, Artificial Sequence
  Synthetic
uugcaaggaguccgggacaac

SEQ ID NO: 253220 - RNA, 22 nt, Artificial Sequence
  Synthetic
auugcaaggaguccgggacaac

SEQ ID NO: 253221 - RNA, 23 nt, Artificial Sequence
  Synthetic
gauugcaaggaguccgggacaac

SEQ ID NO: 253222 - RNA, 24 nt, Artificial Sequence
  Synthetic
ugauugcaaggaguccgggacaac

SEQ ID NO: 253223 - RNA, 18 nt, Artificial Sequence
  Synthetic
uauaaacuaaaugacaac

SEQ ID NO: 253224 - RNA, 19 nt, Artificial Sequence
  Synthetic
uuauaaacuaaaugacaac

SEQ ID NO: 253225 - RNA, 20 nt, Artificial Sequence
  Synthetic
uuuauaaacuaaaugacaac

SEQ ID NO: 253226 - RNA, 21 nt, Artificial Sequence
  Synthetic
auuuauaaacuaaaugacaac

SEQ ID NO: 253227 - RNA, 22 nt, Artificial Sequence
  Synthetic
uauuuauaaacuaaaugacaac

SEQ ID NO: 253228 - RNA, 23 nt, Artificial Sequence
  Synthetic
cuauuuauaaacuaaaugacaac

SEQ ID NO: 253229 - RNA, 24 nt, Artificial Sequence
  Synthetic
gcuauuuauaaacuaaaugacaac

SEQ ID NO: 253230 - RNA, 18 nt, Artificial Sequence
  Synthetic
cuccuuagggaugacaac

SEQ ID NO: 253231 - RNA, 19 nt, Artificial Sequence
  Synthetic
gcuccuuagggaugacaac

SEQ ID NO: 253232 - RNA, 20 nt, Artificial Sequence
  Synthetic
ugcuccuuagggaugacaac

SEQ ID NO: 253233 - RNA, 21 nt, Artificial Sequence
  Synthetic
augcuccuuagggaugacaac

SEQ ID NO: 253234 - RNA, 22 nt, Artificial Sequence
  Synthetic
caugcuccuuagggaugacaac

SEQ ID NO: 253235 - RNA, 23 nt, Artificial Sequence
  Synthetic
ccaugcuccuuagggaugacaac

SEQ ID NO: 253236 - RNA, 24 nt, Artificial Sequence
  Synthetic
cccaugcuccuuagggaugacaac

SEQ ID NO: 253237 - RNA, 18 nt, Artificial Sequence
  Synthetic
gaacaggcaaccuacaac

SEQ ID NO: 253238 - RNA, 19 nt, Artificial Sequence
  Synthetic
ugaacaggcaaccuacaac

SEQ ID NO: 253239 - RNA, 20 nt, Artificial Sequence
  Synthetic
gugaacaggcaaccuacaac

SEQ ID NO: 253240 - RNA, 21 nt, Artificial Sequence
  Synthetic
agugaacaggcaaccuacaac

SEQ ID NO: 253241 - RNA, 22 nt, Artificial Sequence
  Synthetic
gagugaacaggcaaccuacaac

SEQ ID NO: 253242 - RNA, 23 nt, Artificial Sequence
  Synthetic
agagugaacaggcaaccuacaac

SEQ ID NO: 253243 - RNA, 24 nt, Artificial Sequence
  Synthetic
cagagugaacaggcaaccuacaac

SEQ ID NO: 253244 - RNA, 18 nt, Artificial Sequence
  Synthetic
gaacagggaaccuacaac

SEQ ID NO: 253245 - RNA, 19 nt, Artificial Sequence
  Synthetic
ugaacagggaaccuacaac

SEQ ID NO: 253246 - RNA, 20 nt, Artificial Sequence
  Synthetic
gugaacagggaaccuacaac

SEQ ID NO: 253247 - RNA, 21 nt, Artificial Sequence
  Synthetic
agugaacagggaaccuacaac

SEQ ID NO: 253248 - RNA, 22 nt, Artificial Sequence
  Synthetic
gagugaacagggaaccuacaac

SEQ ID NO: 253249 - RNA, 23 nt, Artificial Sequence
  Synthetic
agagugaacagggaaccuacaac

SEQ ID NO: 253250 - RNA, 24 nt, Artificial Sequence
  Synthetic
cagagugaacagggaaccuacaac

SEQ ID NO: 253251 - RNA, 18 nt, Artificial Sequence
  Synthetic
uccucaaggaucuacaac

SEQ ID NO: 253252 - RNA, 19 nt, Artificial Sequence
  Synthetic
uuccucaaggaucuacaac

SEQ ID NO: 253253 - RNA, 20 nt, Artificial Sequence
  Synthetic
auuccucaaggaucuacaac

SEQ ID NO: 253254 - RNA, 21 nt, Artificial Sequence
  Synthetic
gauuccucaaggaucuacaac

SEQ ID NO: 253255 - RNA, 22 nt, Artificial Sequence
  Synthetic
cgauuccucaaggaucuacaac

SEQ ID NO: 253256 - RNA, 23 nt, Artificial Sequence
  Synthetic
gcgauuccucaaggaucuacaac

SEQ ID NO: 253257 - RNA, 24 nt, Artificial Sequence
  Synthetic
ggcgauuccucaaggaucuacaac

SEQ ID NO: 253258 - RNA, 18 nt, Artificial Sequence
  Synthetic
gcaaauauaguuuacaac

SEQ ID NO: 253259 - RNA, 19 nt, Artificial Sequence
  Synthetic
ggcaaauauaguuuacaac

SEQ ID NO: 253260 - RNA, 20 nt, Artificial Sequence
  Synthetic
aggcaaauauaguuuacaac

SEQ ID NO: 253261 - RNA, 21 nt, Artificial Sequence
  Synthetic
aaggcaaauauaguuuacaac

SEQ ID NO: 253262 - RNA, 22 nt, Artificial Sequence
  Synthetic
uaaggcaaauauaguuuacaac

SEQ ID NO: 253263 - RNA, 23 nt, Artificial Sequence
  Synthetic
cuaaggcaaauauaguuuacaac

SEQ ID NO: 253264 - RNA, 24 nt, Artificial Sequence
  Synthetic
acuaaggcaaauauaguuuacaac

SEQ ID NO: 253265 - RNA, 18 nt, Artificial Sequence
  Synthetic
cacugcagaaaaaccaac

SEQ ID NO: 253266 - RNA, 19 nt, Artificial Sequence
  Synthetic
acacugcagaaaaaccaac

SEQ ID NO: 253267 - RNA, 20 nt, Artificial Sequence
  Synthetic
cacacugcagaaaaaccaac

SEQ ID NO: 253268 - RNA, 21 nt, Artificial Sequence
  Synthetic
ccacacugcagaaaaaccaac

SEQ ID NO: 253269 - RNA, 22 nt, Artificial Sequence
  Synthetic
uccacacugcagaaaaaccaac

SEQ ID NO: 253270 - RNA, 23 nt, Artificial Sequence
  Synthetic
auccacacugcagaaaaaccaac

SEQ ID NO: 253271 - RNA, 24 nt, Artificial Sequence
  Synthetic
cauccacacugcagaaaaaccaac

SEQ ID NO: 253272 - RNA, 18 nt, Artificial Sequence
  Synthetic
uuacguagggcaaccaac

SEQ ID NO: 253273 - RNA, 19 nt, Artificial Sequence
  Synthetic
uuuacguagggcaaccaac

SEQ ID NO: 253274 - RNA, 20 nt, Artificial Sequence
  Synthetic
cuuuacguagggcaaccaac

SEQ ID NO: 253275 - RNA, 21 nt, Artificial Sequence
  Synthetic
acuuuacguagggcaaccaac

SEQ ID NO: 253276 - RNA, 22 nt, Artificial Sequence
  Synthetic
cacuuuacguagggcaaccaac

SEQ ID NO: 253277 - RNA, 23 nt, Artificial Sequence
  Synthetic
acacuuuacguagggcaaccaac

SEQ ID NO: 253278 - RNA, 24 nt, Artificial Sequence
  Synthetic
gacacuuuacguagggcaaccaac

SEQ ID NO: 253279 - RNA, 18 nt, Artificial Sequence
  Synthetic
caauaaaggucaaccaac

SEQ ID NO: 253280 - RNA, 19 nt, Artificial Sequence
  Synthetic
ucaauaaaggucaaccaac

SEQ ID NO: 253281 - RNA, 20 nt, Artificial Sequence
  Synthetic
uucaauaaaggucaaccaac

SEQ ID NO: 253282 - RNA, 21 nt, Artificial Sequence
  Synthetic
auucaauaaaggucaaccaac

SEQ ID NO: 253283 - RNA, 22 nt, Artificial Sequence
  Synthetic
aauucaauaaaggucaaccaac

SEQ ID NO: 253284 - RNA, 23 nt, Artificial Sequence
  Synthetic
aaauucaauaaaggucaaccaac

SEQ ID NO: 253285 - RNA, 24 nt, Artificial Sequence
  Synthetic
caaauucaauaaaggucaaccaac

SEQ ID NO: 253286 - RNA, 18 nt, Artificial Sequence
  Synthetic
ugagcagauagaaccaac

SEQ ID NO: 253287 - RNA, 19 nt, Artificial Sequence
  Synthetic
augagcagauagaaccaac

SEQ ID NO: 253288 - RNA, 20 nt, Artificial Sequence
  Synthetic
aaugagcagauagaaccaac

SEQ ID NO: 253289 - RNA, 21 nt, Artificial Sequence
  Synthetic
gaaugagcagauagaaccaac

SEQ ID NO: 253290 - RNA, 22 nt, Artificial Sequence
  Synthetic
ugaaugagcagauagaaccaac

SEQ ID NO: 253291 - RNA, 23 nt, Artificial Sequence
  Synthetic
augaaugagcagauagaaccaac

SEQ ID NO: 253292 - RNA, 24 nt, Artificial Sequence
  Synthetic
gaugaaugagcagauagaaccaac

SEQ ID NO: 253293 - RNA, 18 nt, Artificial Sequence
  Synthetic
ucuuaaucaagcaccaac

SEQ ID NO: 253294 - RNA, 19 nt, Artificial Sequence
  Synthetic
aucuuaaucaagcaccaac

SEQ ID NO: 253295 - RNA, 20 nt, Artificial Sequence
  Synthetic
uaucuuaaucaagcaccaac

SEQ ID NO: 253296 - RNA, 21 nt, Artificial Sequence
  Synthetic
uuaucuuaaucaagcaccaac

SEQ ID NO: 253297 - RNA, 22 nt, Artificial Sequence
  Synthetic
cuuaucuuaaucaagcaccaac

SEQ ID NO: 253298 - RNA, 23 nt, Artificial Sequence
  Synthetic
gcuuaucuuaaucaagcaccaac

SEQ ID NO: 253299 - RNA, 24 nt, Artificial Sequence
  Synthetic
agcuuaucuuaaucaagcaccaac

SEQ ID NO: 253300 - RNA, 19 nt, Artificial Sequence
  Synthetic
ugagaccagccugaccaac

SEQ ID NO: 253301 - RNA, 20 nt, Artificial Sequence
  Synthetic
uugagaccagccugaccaac

SEQ ID NO: 253302 - RNA, 21 nt, Artificial Sequence
  Synthetic
uuugagaccagccugaccaac

SEQ ID NO: 253303 - RNA, 22 nt, Artificial Sequence
  Synthetic
guuugagaccagccugaccaac

SEQ ID NO: 253304 - RNA, 23 nt, Artificial Sequence
  Synthetic
aguuugagaccagccugaccaac

SEQ ID NO: 253305 - RNA, 24 nt, Artificial Sequence
  Synthetic
gaguuugagaccagccugaccaac

SEQ ID NO: 253306 - RNA, 18 nt, Artificial Sequence
  Synthetic
uucugucagaauaccaac

SEQ ID NO: 253307 - RNA, 19 nt, Artificial Sequence
  Synthetic
uuucugucagaauaccaac

SEQ ID NO: 253308 - RNA, 20 nt, Artificial Sequence
  Synthetic
uuuucugucagaauaccaac

SEQ ID NO: 253309 - RNA, 21 nt, Artificial Sequence
  Synthetic
uuuuucugucagaauaccaac

SEQ ID NO: 253310 - RNA, 22 nt, Artificial Sequence
  Synthetic
uuuuuucugucagaauaccaac

SEQ ID NO: 253311 - RNA, 23 nt, Artificial Sequence
  Synthetic
auuuuuucugucagaauaccaac

SEQ ID NO: 253312 - RNA, 24 nt, Artificial Sequence
  Synthetic
aauuuuuucugucagaauaccaac

SEQ ID NO: 253313 - RNA, 18 nt, Artificial Sequence
  Synthetic
gaaaacagagaacccaac

SEQ ID NO: 253314 - RNA, 19 nt, Artificial Sequence
  Synthetic
ggaaaacagagaacccaac

SEQ ID NO: 253315 - RNA, 20 nt, Artificial Sequence
  Synthetic
cggaaaacagagaacccaac

SEQ ID NO: 253316 - RNA, 21 nt, Artificial Sequence
  Synthetic
ccggaaaacagagaacccaac

SEQ ID NO: 253317 - RNA, 22 nt, Artificial Sequence
  Synthetic
uccggaaaacagagaacccaac

SEQ ID NO: 253318 - RNA, 23 nt, Artificial Sequence
  Synthetic
auccggaaaacagagaacccaac

SEQ ID NO: 253319 - RNA, 24 nt, Artificial Sequence
  Synthetic
gauccggaaaacagagaacccaac

SEQ ID NO: 253320 - RNA, 18 nt, Artificial Sequence
  Synthetic
auuagagaaucacccaac

SEQ ID NO: 253321 - RNA, 19 nt, Artificial Sequence
  Synthetic
aauuagagaaucacccaac

SEQ ID NO: 253322 - RNA, 20 nt, Artificial Sequence
  Synthetic
gaauuagagaaucacccaac

SEQ ID NO: 253323 - RNA, 21 nt, Artificial Sequence
  Synthetic
agaauuagagaaucacccaac

SEQ ID NO: 253324 - RNA, 22 nt, Artificial Sequence
  Synthetic
cagaauuagagaaucacccaac

SEQ ID NO: 253325 - RNA, 23 nt, Artificial Sequence
  Synthetic
gcagaauuagagaaucacccaac

SEQ ID NO: 253326 - RNA, 24 nt, Artificial Sequence
  Synthetic
agcagaauuagagaaucacccaac

SEQ ID NO: 253327 - RNA, 18 nt, Artificial Sequence
  Synthetic
aaagaacagucacccaac

SEQ ID NO: 253328 - RNA, 19 nt, Artificial Sequence
  Synthetic
aaaagaacagucacccaac

SEQ ID NO: 253329 - RNA, 20 nt, Artificial Sequence
  Synthetic
uaaaagaacagucacccaac

SEQ ID NO: 253330 - RNA, 21 nt, Artificial Sequence
  Synthetic
guaaaagaacagucacccaac

SEQ ID NO: 253331 - RNA, 22 nt, Artificial Sequence
  Synthetic
aguaaaagaacagucacccaac

SEQ ID NO: 253332 - RNA, 23 nt, Artificial Sequence
  Synthetic
aaguaaaagaacagucacccaac

SEQ ID NO: 253333 - RNA, 24 nt, Artificial Sequence
  Synthetic
uaaguaaaagaacagucacccaac

SEQ ID NO: 253334 - RNA, 18 nt, Artificial Sequence
  Synthetic
uuuaaucucugacccaac

SEQ ID NO: 253335 - RNA, 19 nt, Artificial Sequence
  Synthetic
cuuuaaucucugacccaac

SEQ ID NO: 253336 - RNA, 20 nt, Artificial Sequence
  Synthetic
ucuuuaaucucugacccaac

SEQ ID NO: 253337 - RNA, 21 nt, Artificial Sequence
  Synthetic
aucuuuaaucucugacccaac

SEQ ID NO: 253338 - RNA, 22 nt, Artificial Sequence
  Synthetic
aaucuuuaaucucugacccaac

SEQ ID NO: 253339 - RNA, 23 nt, Artificial Sequence
  Synthetic
uaaucuuuaaucucugacccaac

SEQ ID NO: 253340 - RNA, 24 nt, Artificial Sequence
  Synthetic
uuaaucuuuaaucucugacccaac

SEQ ID NO: 253341 - RNA, 18 nt, Artificial Sequence
  Synthetic
ucaauaaacaaccccaac

SEQ ID NO: 253342 - RNA, 19 nt, Artificial Sequence
  Synthetic
cucaauaaacaaccccaac

SEQ ID NO: 253343 - RNA, 20 nt, Artificial Sequence
  Synthetic
gcucaauaaacaaccccaac

SEQ ID NO: 253344 - RNA, 21 nt, Artificial Sequence
  Synthetic
ugcucaauaaacaaccccaac

SEQ ID NO: 253345 - RNA, 22 nt, Artificial Sequence
  Synthetic
cugcucaauaaacaaccccaac

SEQ ID NO: 253346 - RNA, 23 nt, Artificial Sequence
  Synthetic
acugcucaauaaacaaccccaac

SEQ ID NO: 253347 - RNA, 24 nt, Artificial Sequence
  Synthetic
cacugcucaauaaacaaccccaac

SEQ ID NO: 253348 - RNA, 18 nt, Artificial Sequence
  Synthetic
auguguugcaaccccaac

SEQ ID NO: 253349 - RNA, 19 nt, Artificial Sequence
  Synthetic
cauguguugcaaccccaac

SEQ ID NO: 253350 - RNA, 20 nt, Artificial Sequence
  Synthetic
gcauguguugcaaccccaac

SEQ ID NO: 253351 - RNA, 21 nt, Artificial Sequence
  Synthetic
agcauguguugcaaccccaac

SEQ ID NO: 253352 - RNA, 22 nt, Artificial Sequence
  Synthetic
cagcauguguugcaaccccaac

SEQ ID NO: 253353 - RNA, 23 nt, Artificial Sequence
  Synthetic
acagcauguguugcaaccccaac

SEQ ID NO: 253354 - RNA, 24 nt, Artificial Sequence
  Synthetic
cacagcauguguugcaaccccaac

SEQ ID NO: 253355 - RNA, 18 nt, Artificial Sequence
  Synthetic
cucaaucguugccccaac

SEQ ID NO: 253356 - RNA, 19 nt, Artificial Sequence
  Synthetic
gcucaaucguugccccaac

SEQ ID NO: 253357 - RNA, 20 nt, Artificial Sequence
  Synthetic
agcucaaucguugccccaac

SEQ ID NO: 253358 - RNA, 21 nt, Artificial Sequence
  Synthetic
cagcucaaucguugccccaac

SEQ ID NO: 253359 - RNA, 22 nt, Artificial Sequence
  Synthetic
ccagcucaaucguugccccaac

SEQ ID NO: 253360 - RNA, 23 nt, Artificial Sequence
  Synthetic
uccagcucaaucguugccccaac

SEQ ID NO: 253361 - RNA, 24 nt, Artificial Sequence
  Synthetic
auccagcucaaucguugccccaac

SEQ ID NO: 253362 - RNA, 18 nt, Artificial Sequence
  Synthetic
uacuuccuucuccccaac

SEQ ID NO: 253363 - RNA, 19 nt, Artificial Sequence
  Synthetic
cuacuuccuucuccccaac

SEQ ID NO: 253364 - RNA, 20 nt, Artificial Sequence
  Synthetic
ccuacuuccuucuccccaac

SEQ ID NO: 253365 - RNA, 21 nt, Artificial Sequence
  Synthetic
cccuacuuccuucuccccaac

SEQ ID NO: 253366 - RNA, 22 nt, Artificial Sequence
  Synthetic
gcccuacuuccuucuccccaac

SEQ ID NO: 253367 - RNA, 23 nt, Artificial Sequence
  Synthetic
ugcccuacuuccuucuccccaac

SEQ ID NO: 253368 - RNA, 24 nt, Artificial Sequence
  Synthetic
cugcccuacuuccuucuccccaac

SEQ ID NO: 253369 - RNA, 18 nt, Artificial Sequence
  Synthetic
uuaauuuauuugcccaac

SEQ ID NO: 253370 - RNA, 19 nt, Artificial Sequence
  Synthetic
uuuaauuuauuugcccaac

SEQ ID NO: 253371 - RNA, 20 nt, Artificial Sequence
  Synthetic
guuuaauuuauuugcccaac

SEQ ID NO: 253372 - RNA, 21 nt, Artificial Sequence
  Synthetic
gguuuaauuuauuugcccaac

SEQ ID NO: 253373 - RNA, 22 nt, Artificial Sequence
  Synthetic
agguuuaauuuauuugcccaac

SEQ ID NO: 253374 - RNA, 23 nt, Artificial Sequence
  Synthetic
gagguuuaauuuauuugcccaac

SEQ ID NO: 253375 - RNA, 24 nt, Artificial Sequence
  Synthetic
ugagguuuaauuuauuugcccaac

SEQ ID NO: 253376 - RNA, 18 nt, Artificial Sequence
  Synthetic
ugagaaauuuaucccaac

SEQ ID NO: 253377 - RNA, 19 nt, Artificial Sequence
  Synthetic
uugagaaauuuaucccaac

SEQ ID NO: 253378 - RNA, 20 nt, Artificial Sequence
  Synthetic
auugagaaauuuaucccaac

SEQ ID NO: 253379 - RNA, 21 nt, Artificial Sequence
  Synthetic
aauugagaaauuuaucccaac

SEQ ID NO: 253380 - RNA, 22 nt, Artificial Sequence
  Synthetic
gaauugagaaauuuaucccaac

SEQ ID NO: 253381 - RNA, 23 nt, Artificial Sequence
  Synthetic
agaauugagaaauuuaucccaac

SEQ ID NO: 253382 - RNA, 24 nt, Artificial Sequence
  Synthetic
aagaauugagaaauuuaucccaac

SEQ ID NO: 253383 - RNA, 18 nt, Artificial Sequence
  Synthetic
auucugaugacucccaac

SEQ ID NO: 253384 - RNA, 19 nt, Artificial Sequence
  Synthetic
cauucugaugacucccaac

SEQ ID NO: 253385 - RNA, 20 nt, Artificial Sequence
  Synthetic
ccauucugaugacucccaac

SEQ ID NO: 253386 - RNA, 21 nt, Artificial Sequence
  Synthetic
cccauucugaugacucccaac

SEQ ID NO: 253387 - RNA, 22 nt, Artificial Sequence
  Synthetic
ccccauucugaugacucccaac

SEQ ID NO: 253388 - RNA, 23 nt, Artificial Sequence
  Synthetic
uccccauucugaugacucccaac

SEQ ID NO: 253389 - RNA, 24 nt, Artificial Sequence
  Synthetic
uuccccauucugaugacucccaac

SEQ ID NO: 253390 - RNA, 18 nt, Artificial Sequence
  Synthetic
aaagucuuuccucccaac

SEQ ID NO: 253391 - RNA, 19 nt, Artificial Sequence
  Synthetic
uaaagucuuuccucccaac

SEQ ID NO: 253392 - RNA, 20 nt, Artificial Sequence
  Synthetic
auaaagucuuuccucccaac

SEQ ID NO: 253393 - RNA, 21 nt, Artificial Sequence
  Synthetic
cauaaagucuuuccucccaac

SEQ ID NO: 253394 - RNA, 22 nt, Artificial Sequence
  Synthetic
ucauaaagucuuuccucccaac

SEQ ID NO: 253395 - RNA, 23 nt, Artificial Sequence
  Synthetic
gucauaaagucuuuccucccaac

SEQ ID NO: 253396 - RNA, 24 nt, Artificial Sequence
  Synthetic
ggucauaaagucuuuccucccaac

SEQ ID NO: 253397 - RNA, 18 nt, Artificial Sequence
  Synthetic
gucagucagagucccaac

SEQ ID NO: 253398 - RNA, 19 nt, Artificial Sequence
  Synthetic
agucagucagagucccaac

SEQ ID NO: 253399 - RNA, 20 nt, Artificial Sequence
  Synthetic
cagucagucagagucccaac

SEQ ID NO: 253400 - RNA, 21 nt, Artificial Sequence
  Synthetic
ucagucagucagagucccaac

SEQ ID NO: 253401 - RNA, 22 nt, Artificial Sequence
  Synthetic
cucagucagucagagucccaac

SEQ ID NO: 253402 - RNA, 23 nt, Artificial Sequence
  Synthetic
ucucagucagucagagucccaac

SEQ ID NO: 253403 - RNA, 24 nt, Artificial Sequence
  Synthetic
aucucagucagucagagucccaac

SEQ ID NO: 253404 - RNA, 18 nt, Artificial Sequence
  Synthetic
caaaguugacuucccaac

SEQ ID NO: 253405 - RNA, 19 nt, Artificial Sequence
  Synthetic
ccaaaguugacuucccaac

SEQ ID NO: 253406 - RNA, 20 nt, Artificial Sequence
  Synthetic
accaaaguugacuucccaac

SEQ ID NO: 253407 - RNA, 21 nt, Artificial Sequence
  Synthetic
gaccaaaguugacuucccaac

SEQ ID NO: 253408 - RNA, 22 nt, Artificial Sequence
  Synthetic
ggaccaaaguugacuucccaac

SEQ ID NO: 253409 - RNA, 23 nt, Artificial Sequence
  Synthetic
aggaccaaaguugacuucccaac

SEQ ID NO: 253410 - RNA, 24 nt, Artificial Sequence
  Synthetic
aaggaccaaaguugacuucccaac

SEQ ID NO: 253411 - RNA, 18 nt, Artificial Sequence
  Synthetic
cuguuucuauuucccaac

SEQ ID NO: 253412 - RNA, 19 nt, Artificial Sequence
  Synthetic
ccuguuucuauuucccaac

SEQ ID NO: 253413 - RNA, 20 nt, Artificial Sequence
  Synthetic
uccuguuucuauuucccaac

SEQ ID NO: 253414 - RNA, 21 nt, Artificial Sequence
  Synthetic
auccuguuucuauuucccaac

SEQ ID NO: 253415 - RNA, 22 nt, Artificial Sequence
  Synthetic
uauccuguuucuauuucccaac

SEQ ID NO: 253416 - RNA, 23 nt, Artificial Sequence
  Synthetic
uuauccuguuucuauuucccaac

SEQ ID NO: 253417 - RNA, 24 nt, Artificial Sequence
  Synthetic
auuauccuguuucuauuucccaac

SEQ ID NO: 253418 - RNA, 18 nt, Artificial Sequence
  Synthetic
ugagucuuauuucccaac

SEQ ID NO: 253419 - RNA, 19 nt, Artificial Sequence
  Synthetic
cugagucuuauuucccaac

SEQ ID NO: 253420 - RNA, 20 nt, Artificial Sequence
  Synthetic
ucugagucuuauuucccaac

SEQ ID NO: 253421 - RNA, 21 nt, Artificial Sequence
  Synthetic
uucugagucuuauuucccaac

SEQ ID NO: 253422 - RNA, 22 nt, Artificial Sequence
  Synthetic
auucugagucuuauuucccaac

SEQ ID NO: 253423 - RNA, 23 nt, Artificial Sequence
  Synthetic
gauucugagucuuauuucccaac

SEQ ID NO: 253424 - RNA, 24 nt, Artificial Sequence
  Synthetic
ugauucugagucuuauuucccaac

SEQ ID NO: 253425 - RNA, 18 nt, Artificial Sequence
  Synthetic
aauacauucacugccaac

SEQ ID NO: 253426 - RNA, 19 nt, Artificial Sequence
  Synthetic
aaauacauucacugccaac

SEQ ID NO: 253427 - RNA, 20 nt, Artificial Sequence
  Synthetic
aaaauacauucacugccaac

SEQ ID NO: 253428 - RNA, 21 nt, Artificial Sequence
  Synthetic
aaaaauacauucacugccaac

SEQ ID NO: 253429 - RNA, 22 nt, Artificial Sequence
  Synthetic
aaaaaauacauucacugccaac

SEQ ID NO: 253430 - RNA, 23 nt, Artificial Sequence
  Synthetic
aaaaaaauacauucacugccaac

SEQ ID NO: 253431 - RNA, 24 nt, Artificial Sequence
  Synthetic
aaaaaaaauacauucacugccaac

SEQ ID NO: 253432 - RNA, 18 nt, Artificial Sequence
  Synthetic
auuuuaagacacuccaac

SEQ ID NO: 253433 - RNA, 19 nt, Artificial Sequence
  Synthetic
uauuuuaagacacuccaac

SEQ ID NO: 253434 - RNA, 20 nt, Artificial Sequence
  Synthetic
guauuuuaagacacuccaac

SEQ ID NO: 253435 - RNA, 21 nt, Artificial Sequence
  Synthetic
aguauuuuaagacacuccaac

SEQ ID NO: 253436 - RNA, 22 nt, Artificial Sequence
  Synthetic
aaguauuuuaagacacuccaac

SEQ ID NO: 253437 - RNA, 23 nt, Artificial Sequence
  Synthetic
gaaguauuuuaagacacuccaac

SEQ ID NO: 253438 - RNA, 24 nt, Artificial Sequence
  Synthetic
cgaaguauuuuaagacacuccaac

SEQ ID NO: 253439 - RNA, 18 nt, Artificial Sequence
  Synthetic
gcuggcuuacacuccaac

SEQ ID NO: 253440 - RNA, 19 nt, Artificial Sequence
  Synthetic
agcuggcuuacacuccaac

SEQ ID NO: 253441 - RNA, 20 nt, Artificial Sequence
  Synthetic
gagcuggcuuacacuccaac

SEQ ID NO: 253442 - RNA, 21 nt, Artificial Sequence
  Synthetic
agagcuggcuuacacuccaac

SEQ ID NO: 253443 - RNA, 22 nt, Artificial Sequence
  Synthetic
aagagcuggcuuacacuccaac

SEQ ID NO: 253444 - RNA, 23 nt, Artificial Sequence
  Synthetic
aaagagcuggcuuacacuccaac

SEQ ID NO: 253445 - RNA, 24 nt, Artificial Sequence
  Synthetic
caaagagcuggcuuacacuccaac

SEQ ID NO: 253446 - RNA, 18 nt, Artificial Sequence
  Synthetic
ugaaaaaggcacuccaac

SEQ ID NO: 253447 - RNA, 19 nt, Artificial Sequence
  Synthetic
uugaaaaaggcacuccaac

SEQ ID NO: 253448 - RNA, 20 nt, Artificial Sequence
  Synthetic
uuugaaaaaggcacuccaac

SEQ ID NO: 253449 - RNA, 21 nt, Artificial Sequence
  Synthetic
auuugaaaaaggcacuccaac

SEQ ID NO: 253450 - RNA, 22 nt, Artificial Sequence
  Synthetic
cauuugaaaaaggcacuccaac

SEQ ID NO: 253451 - RNA, 23 nt, Artificial Sequence
  Synthetic
acauuugaaaaaggcacuccaac

SEQ ID NO: 253452 - RNA, 24 nt, Artificial Sequence
  Synthetic
gacauuugaaaaaggcacuccaac

SEQ ID NO: 253453 - RNA, 18 nt, Artificial Sequence
  Synthetic
gugccacugcacuccaac

SEQ ID NO: 253454 - RNA, 19 nt, Artificial Sequence
  Synthetic
cgugccacugcacuccaac

SEQ ID NO: 253455 - RNA, 20 nt, Artificial Sequence
  Synthetic
ucgugccacugcacuccaac

SEQ ID NO: 253456 - RNA, 21 nt, Artificial Sequence
  Synthetic
aucgugccacugcacuccaac

SEQ ID NO: 253457 - RNA, 22 nt, Artificial Sequence
  Synthetic
gaucgugccacugcacuccaac

SEQ ID NO: 253458 - RNA, 23 nt, Artificial Sequence
  Synthetic
agaucgugccacugcacuccaac

SEQ ID NO: 253459 - RNA, 24 nt, Artificial Sequence
  Synthetic
gagaucgugccacugcacuccaac

SEQ ID NO: 253460 - RNA, 18 nt, Artificial Sequence
  Synthetic
agccuccuuuacuccaac

SEQ ID NO: 253461 - RNA, 19 nt, Artificial Sequence
  Synthetic
cagccuccuuuacuccaac

SEQ ID NO: 253462 - RNA, 20 nt, Artificial Sequence
  Synthetic
ucagccuccuuuacuccaac

SEQ ID NO: 253463 - RNA, 21 nt, Artificial Sequence
  Synthetic
uucagccuccuuuacuccaac

SEQ ID NO: 253464 - RNA, 22 nt, Artificial Sequence
  Synthetic
guucagccuccuuuacuccaac

SEQ ID NO: 253465 - RNA, 23 nt, Artificial Sequence
  Synthetic
aguucagccuccuuuacuccaac

SEQ ID NO: 253466 - RNA, 24 nt, Artificial Sequence
  Synthetic
aaguucagccuccuuuacuccaac

SEQ ID NO: 253467 - RNA, 18 nt, Artificial Sequence
  Synthetic
gugccacugcgcuccaac

SEQ ID NO: 253468 - RNA, 19 nt, Artificial Sequence
  Synthetic
ugugccacugcgcuccaac

SEQ ID NO: 253469 - RNA, 20 nt, Artificial Sequence
  Synthetic
uugugccacugcgcuccaac

SEQ ID NO: 253470 - RNA, 21 nt, Artificial Sequence
  Synthetic
auugugccacugcgcuccaac

SEQ ID NO: 253471 - RNA, 22 nt, Artificial Sequence
  Synthetic
gauugugccacugcgcuccaac

SEQ ID NO: 253472 - RNA, 23 nt, Artificial Sequence
  Synthetic
agauugugccacugcgcuccaac

SEQ ID NO: 253473 - RNA, 24 nt, Artificial Sequence
  Synthetic
aagauugugccacugcgcuccaac

SEQ ID NO: 253474 - RNA, 18 nt, Artificial Sequence
  Synthetic
accccagucaucuccaac

SEQ ID NO: 253475 - RNA, 19 nt, Artificial Sequence
  Synthetic
aaccccagucaucuccaac

SEQ ID NO: 253476 - RNA, 20 nt, Artificial Sequence
  Synthetic
caaccccagucaucuccaac

SEQ ID NO: 253477 - RNA, 21 nt, Artificial Sequence
  Synthetic
ccaaccccagucaucuccaac

SEQ ID NO: 253478 - RNA, 22 nt, Artificial Sequence
  Synthetic
uccaaccccagucaucuccaac

SEQ ID NO: 253479 - RNA, 23 nt, Artificial Sequence
  Synthetic
cuccaaccccagucaucuccaac

SEQ ID NO: 253480 - RNA, 24 nt, Artificial Sequence
  Synthetic
ccuccaaccccagucaucuccaac

SEQ ID NO: 253481 - RNA, 18 nt, Artificial Sequence
  Synthetic
uugacucaugucuccaac

SEQ ID NO: 253482 - RNA, 19 nt, Artificial Sequence
  Synthetic
cuugacucaugucuccaac

SEQ ID NO: 253483 - RNA, 20 nt, Artificial Sequence
  Synthetic
ucuugacucaugucuccaac

SEQ ID NO: 253484 - RNA, 21 nt, Artificial Sequence
  Synthetic
aucuugacucaugucuccaac

SEQ ID NO: 253485 - RNA, 22 nt, Artificial Sequence
  Synthetic
caucuugacucaugucuccaac

SEQ ID NO: 253486 - RNA, 23 nt, Artificial Sequence
  Synthetic
gcaucuugacucaugucuccaac

SEQ ID NO: 253487 - RNA, 24 nt, Artificial Sequence
  Synthetic
ggcaucuugacucaugucuccaac

SEQ ID NO: 253488 - RNA, 18 nt, Artificial Sequence
  Synthetic
ucugcucuugucuccaac

SEQ ID NO: 253489 - RNA, 19 nt, Artificial Sequence
  Synthetic
uucugcucuugucuccaac

SEQ ID NO: 253490 - RNA, 20 nt, Artificial Sequence
  Synthetic
uuucugcucuugucuccaac

SEQ ID NO: 253491 - RNA, 21 nt, Artificial Sequence
  Synthetic
auuucugcucuugucuccaac

SEQ ID NO: 253492 - RNA, 22 nt, Artificial Sequence
  Synthetic
aauuucugcucuugucuccaac

SEQ ID NO: 253493 - RNA, 23 nt, Artificial Sequence
  Synthetic
aaauuucugcucuugucuccaac

SEQ ID NO: 253494 - RNA, 24 nt, Artificial Sequence
  Synthetic
aaaauuucugcucuugucuccaac

SEQ ID NO: 253495 - RNA, 18 nt, Artificial Sequence
  Synthetic
auuuccaaccuguccaac

SEQ ID NO: 253496 - RNA, 19 nt, Artificial Sequence
  Synthetic
aauuuccaaccuguccaac

SEQ ID NO: 253497 - RNA, 20 nt, Artificial Sequence
  Synthetic
uaauuuccaaccuguccaac

SEQ ID NO: 253498 - RNA, 21 nt, Artificial Sequence
  Synthetic
uuaauuuccaaccuguccaac

SEQ ID NO: 253499 - RNA, 22 nt, Artificial Sequence
  Synthetic
uuuaauuuccaaccuguccaac

SEQ ID NO: 253500 - RNA, 23 nt, Artificial Sequence
  Synthetic
uuuuaauuuccaaccuguccaac

SEQ ID NO: 253501 - RNA, 24 nt, Artificial Sequence
  Synthetic
uuuuuaauuuccaaccuguccaac

SEQ ID NO: 253502 - RNA, 18 nt, Artificial Sequence
  Synthetic
gcgccacuggauuccaac

SEQ ID NO: 253503 - RNA, 19 nt, Artificial Sequence
  Synthetic
agcgccacuggauuccaac

SEQ ID NO: 253504 - RNA, 20 nt, Artificial Sequence
  Synthetic
uagcgccacuggauuccaac

SEQ ID NO: 253505 - RNA, 21 nt, Artificial Sequence
  Synthetic
auagcgccacuggauuccaac

SEQ ID NO: 253506 - RNA, 22 nt, Artificial Sequence
  Synthetic
gauagcgccacuggauuccaac

SEQ ID NO: 253507 - RNA, 23 nt, Artificial Sequence
  Synthetic
ugauagcgccacuggauuccaac

SEQ ID NO: 253508 - RNA, 24 nt, Artificial Sequence
  Synthetic
augauagcgccacuggauuccaac

SEQ ID NO: 253509 - RNA, 18 nt, Artificial Sequence
  Synthetic
gauuuuauuuauuccaac

SEQ ID NO: 253510 - RNA, 19 nt, Artificial Sequence
  Synthetic
ugauuuuauuuauuccaac

SEQ ID NO: 253511 - RNA, 20 nt, Artificial Sequence
  Synthetic
cugauuuuauuuauuccaac

SEQ ID NO: 253512 - RNA, 21 nt, Artificial Sequence
  Synthetic
gcugauuuuauuuauuccaac

SEQ ID NO: 253513 - RNA, 22 nt, Artificial Sequence
  Synthetic
ugcugauuuuauuuauuccaac

SEQ ID NO: 253514 - RNA, 23 nt, Artificial Sequence
  Synthetic
cugcugauuuuauuuauuccaac

SEQ ID NO: 253515 - RNA, 24 nt, Artificial Sequence
  Synthetic
ccugcugauuuuauuuauuccaac

SEQ ID NO: 253516 - RNA, 18 nt, Artificial Sequence
  Synthetic
uuuaggacugcuuccaac

SEQ ID NO: 253517 - RNA, 19 nt, Artificial Sequence
  Synthetic
guuuaggacugcuuccaac

SEQ ID NO: 253518 - RNA, 20 nt, Artificial Sequence
  Synthetic
gguuuaggacugcuuccaac

SEQ ID NO: 253519 - RNA, 21 nt, Artificial Sequence
  Synthetic
ugguuuaggacugcuuccaac

SEQ ID NO: 253520 - RNA, 22 nt, Artificial Sequence
  Synthetic
uugguuuaggacugcuuccaac

SEQ ID NO: 253521 - RNA, 23 nt, Artificial Sequence
  Synthetic
auugguuuaggacugcuuccaac

SEQ ID NO: 253522 - RNA, 24 nt, Artificial Sequence
  Synthetic
cauugguuuaggacugcuuccaac

SEQ ID NO: 253523 - RNA, 18 nt, Artificial Sequence
  Synthetic
aauugaguaguuuccaac

SEQ ID NO: 253524 - RNA, 19 nt, Artificial Sequence
  Synthetic
aaauugaguaguuuccaac

SEQ ID NO: 253525 - RNA, 20 nt, Artificial Sequence
  Synthetic
gaaauugaguaguuuccaac

SEQ ID NO: 253526 - RNA, 21 nt, Artificial Sequence
  Synthetic
agaaauugaguaguuuccaac

SEQ ID NO: 253527 - RNA, 22 nt, Artificial Sequence
  Synthetic
gagaaauugaguaguuuccaac

SEQ ID NO: 253528 - RNA, 23 nt, Artificial Sequence
  Synthetic
ugagaaauugaguaguuuccaac

SEQ ID NO: 253529 - RNA, 24 nt, Artificial Sequence
  Synthetic
augagaaauugaguaguuuccaac

SEQ ID NO: 253530 - RNA, 18 nt, Artificial Sequence
  Synthetic
guggaaagaaacagcaac

SEQ ID NO: 253531 - RNA, 19 nt, Artificial Sequence
  Synthetic
aguggaaagaaacagcaac

SEQ ID NO: 253532 - RNA, 20 nt, Artificial Sequence
  Synthetic
gaguggaaagaaacagcaac

SEQ ID NO: 253533 - RNA, 21 nt, Artificial Sequence
  Synthetic
agaguggaaagaaacagcaac

SEQ ID NO: 253534 - RNA, 22 nt, Artificial Sequence
  Synthetic
cagaguggaaagaaacagcaac

SEQ ID NO: 253535 - RNA, 23 nt, Artificial Sequence
  Synthetic
ucagaguggaaagaaacagcaac

SEQ ID NO: 253536 - RNA, 24 nt, Artificial Sequence
  Synthetic
gucagaguggaaagaaacagcaac

SEQ ID NO: 253537 - RNA, 18 nt, Artificial Sequence
  Synthetic
gauaacaaucccagcaac

SEQ ID NO: 253538 - RNA, 19 nt, Artificial Sequence
  Synthetic
agauaacaaucccagcaac

SEQ ID NO: 253539 - RNA, 20 nt, Artificial Sequence
  Synthetic
uagauaacaaucccagcaac

SEQ ID NO: 253540 - RNA, 21 nt, Artificial Sequence
  Synthetic
guagauaacaaucccagcaac

SEQ ID NO: 253541 - RNA, 22 nt, Artificial Sequence
  Synthetic
aguagauaacaaucccagcaac

SEQ ID NO: 253542 - RNA, 23 nt, Artificial Sequence
  Synthetic
uaguagauaacaaucccagcaac

SEQ ID NO: 253543 - RNA, 24 nt, Artificial Sequence
  Synthetic
uuaguagauaacaaucccagcaac

SEQ ID NO: 253544 - RNA, 18 nt, Artificial Sequence
  Synthetic
cagaaguucaagagcaac

SEQ ID NO: 253545 - RNA, 19 nt, Artificial Sequence
  Synthetic
ccagaaguucaagagcaac

SEQ ID NO: 253546 - RNA, 20 nt, Artificial Sequence
  Synthetic
gccagaaguucaagagcaac

SEQ ID NO: 253547 - RNA, 21 nt, Artificial Sequence
  Synthetic
ggccagaaguucaagagcaac

SEQ ID NO: 253548 - RNA, 22 nt, Artificial Sequence
  Synthetic
aggccagaaguucaagagcaac

SEQ ID NO: 253549 - RNA, 23 nt, Artificial Sequence
  Synthetic
gaggccagaaguucaagagcaac

SEQ ID NO: 253550 - RNA, 24 nt, Artificial Sequence
  Synthetic
ugaggccagaaguucaagagcaac

SEQ ID NO: 253551 - RNA, 18 nt, Artificial Sequence
  Synthetic
ccaaaaaguuggagcaac

SEQ ID NO: 253552 - RNA, 19 nt, Artificial Sequence
  Synthetic
uccaaaaaguuggagcaac

SEQ ID NO: 253553 - RNA, 20 nt, Artificial Sequence
  Synthetic
uuccaaaaaguuggagcaac

SEQ ID NO: 253554 - RNA, 21 nt, Artificial Sequence
  Synthetic
cuuccaaaaaguuggagcaac

SEQ ID NO: 253555 - RNA, 22 nt, Artificial Sequence
  Synthetic
ccuuccaaaaaguuggagcaac

SEQ ID NO: 253556 - RNA, 23 nt, Artificial Sequence
  Synthetic
gccuuccaaaaaguuggagcaac

SEQ ID NO: 253557 - RNA, 24 nt, Artificial Sequence
  Synthetic
ugccuuccaaaaaguuggagcaac

SEQ ID NO: 253558 - RNA, 18 nt, Artificial Sequence
  Synthetic
gagaccagacugagcaac

SEQ ID NO: 253559 - RNA, 19 nt, Artificial Sequence
  Synthetic
cgagaccagacugagcaac

SEQ ID NO: 253560 - RNA, 20 nt, Artificial Sequence
  Synthetic
ucgagaccagacugagcaac

SEQ ID NO: 253561 - RNA, 21 nt, Artificial Sequence
  Synthetic
uucgagaccagacugagcaac

SEQ ID NO: 253562 - RNA, 22 nt, Artificial Sequence
  Synthetic
guucgagaccagacugagcaac

SEQ ID NO: 253563 - RNA, 23 nt, Artificial Sequence
  Synthetic
aguucgagaccagacugagcaac

SEQ ID NO: 253564 - RNA, 24 nt, Artificial Sequence
  Synthetic
gaguucgagaccagacugagcaac

SEQ ID NO: 253565 - RNA, 18 nt, Artificial Sequence
  Synthetic
acagcaaacaguagcaac

SEQ ID NO: 253566 - RNA, 19 nt, Artificial Sequence
  Synthetic
aacagcaaacaguagcaac

SEQ ID NO: 253567 - RNA, 20 nt, Artificial Sequence
  Synthetic
uaacagcaaacaguagcaac

SEQ ID NO: 253568 - RNA, 21 nt, Artificial Sequence
  Synthetic
guaacagcaaacaguagcaac

SEQ ID NO: 253569 - RNA, 22 nt, Artificial Sequence
  Synthetic
uguaacagcaaacaguagcaac

SEQ ID NO: 253570 - RNA, 23 nt, Artificial Sequence
  Synthetic
uuguaacagcaaacaguagcaac

SEQ ID NO: 253571 - RNA, 24 nt, Artificial Sequence
  Synthetic
auuguaacagcaaacaguagcaac

SEQ ID NO: 253572 - RNA, 18 nt, Artificial Sequence
  Synthetic
cucuaaagucuuagcaac

SEQ ID NO: 253573 - RNA, 19 nt, Artificial Sequence
  Synthetic
gcucuaaagucuuagcaac

SEQ ID NO: 253574 - RNA, 20 nt, Artificial Sequence
  Synthetic
agcucuaaagucuuagcaac

SEQ ID NO: 253575 - RNA, 21 nt, Artificial Sequence
  Synthetic
uagcucuaaagucuuagcaac

SEQ ID NO: 253576 - RNA, 22 nt, Artificial Sequence
  Synthetic
cuagcucuaaagucuuagcaac

SEQ ID NO: 253577 - RNA, 23 nt, Artificial Sequence
  Synthetic
gcuagcucuaaagucuuagcaac

SEQ ID NO: 253578 - RNA, 24 nt, Artificial Sequence
  Synthetic
ggcuagcucuaaagucuuagcaac

SEQ ID NO: 253579 - RNA, 18 nt, Artificial Sequence
  Synthetic
uccuauuaauuuagcaac

SEQ ID NO: 253580 - RNA, 19 nt, Artificial Sequence
  Synthetic
auccuauuaauuuagcaac

SEQ ID NO: 253581 - RNA, 20 nt, Artificial Sequence
  Synthetic
uauccuauuaauuuagcaac

SEQ ID NO: 253582 - RNA, 21 nt, Artificial Sequence
  Synthetic
auauccuauuaauuuagcaac

SEQ ID NO: 253583 - RNA, 22 nt, Artificial Sequence
  Synthetic
uauauccuauuaauuuagcaac

SEQ ID NO: 253584 - RNA, 23 nt, Artificial Sequence
  Synthetic
auauauccuauuaauuuagcaac

SEQ ID NO: 253585 - RNA, 24 nt, Artificial Sequence
  Synthetic
aauauauccuauuaauuuagcaac

SEQ ID NO: 253586 - RNA, 18 nt, Artificial Sequence
  Synthetic
uaaagggagcaacgcaac

SEQ ID NO: 253587 - RNA, 19 nt, Artificial Sequence
  Synthetic
guaaagggagcaacgcaac

SEQ ID NO: 253588 - RNA, 20 nt, Artificial Sequence
  Synthetic
gguaaagggagcaacgcaac

SEQ ID NO: 253589 - RNA, 21 nt, Artificial Sequence
  Synthetic
ugguaaagggagcaacgcaac

SEQ ID NO: 253590 - RNA, 22 nt, Artificial Sequence
  Synthetic
augguaaagggagcaacgcaac

SEQ ID NO: 253591 - RNA, 23 nt, Artificial Sequence
  Synthetic
aaugguaaagggagcaacgcaac

SEQ ID NO: 253592 - RNA, 24 nt, Artificial Sequence
  Synthetic
uaaugguaaagggagcaacgcaac

SEQ ID NO: 253593 - RNA, 18 nt, Artificial Sequence
  Synthetic
uugcauaccuaaggcaac

SEQ ID NO: 253594 - RNA, 19 nt, Artificial Sequence
  Synthetic
cuugcauaccuaaggcaac

SEQ ID NO: 253595 - RNA, 20 nt, Artificial Sequence
  Synthetic
ucuugcauaccuaaggcaac

SEQ ID NO: 253596 - RNA, 21 nt, Artificial Sequence
  Synthetic
gucuugcauaccuaaggcaac

SEQ ID NO: 253597 - RNA, 22 nt, Artificial Sequence
  Synthetic
cgucuugcauaccuaaggcaac

SEQ ID NO: 253598 - RNA, 23 nt, Artificial Sequence
  Synthetic
acgucuugcauaccuaaggcaac

SEQ ID NO: 253599 - RNA, 24 nt, Artificial Sequence
  Synthetic
aacgucuugcauaccuaaggcaac

SEQ ID NO: 253600 - RNA, 18 nt, Artificial Sequence
  Synthetic
cacuccagcuggggcaac

SEQ ID NO: 253601 - RNA, 19 nt, Artificial Sequence
  Synthetic
gcacuccagcuggggcaac

SEQ ID NO: 253602 - RNA, 20 nt, Artificial Sequence
  Synthetic
ugcacuccagcuggggcaac

SEQ ID NO: 253603 - RNA, 21 nt, Artificial Sequence
  Synthetic
uugcacuccagcuggggcaac

SEQ ID NO: 253604 - RNA, 22 nt, Artificial Sequence
  Synthetic
auugcacuccagcuggggcaac

SEQ ID NO: 253605 - RNA, 23 nt, Artificial Sequence
  Synthetic
cauugcacuccagcuggggcaac

SEQ ID NO: 253606 - RNA, 24 nt, Artificial Sequence
  Synthetic
ccauugcacuccagcuggggcaac

SEQ ID NO: 253607 - RNA, 18 nt, Artificial Sequence
  Synthetic
cacuccagccugggcaac

SEQ ID NO: 253608 - RNA, 19 nt, Artificial Sequence
  Synthetic
gcacuccagccugggcaac

SEQ ID NO: 253609 - RNA, 20 nt, Artificial Sequence
  Synthetic
ugcacuccagccugggcaac

SEQ ID NO: 253610 - RNA, 24 nt, Artificial Sequence
  Synthetic
ccauugcacuccagccugggcaac

SEQ ID NO: 253611 - RNA, 18 nt, Artificial Sequence
  Synthetic
uacuccagccugggcaac

SEQ ID NO: 253612 - RNA, 19 nt, Artificial Sequence
  Synthetic
guacuccagccugggcaac

SEQ ID NO: 253613 - RNA, 20 nt, Artificial Sequence
  Synthetic
uguacuccagccugggcaac

SEQ ID NO: 253614 - RNA, 21 nt, Artificial Sequence
  Synthetic
uuguacuccagccugggcaac

SEQ ID NO: 253615 - RNA, 22 nt, Artificial Sequence
  Synthetic
auuguacuccagccugggcaac

SEQ ID NO: 253616 - RNA, 23 nt, Artificial Sequence
  Synthetic
cauuguacuccagccugggcaac

SEQ ID NO: 253617 - RNA, 24 nt, Artificial Sequence
  Synthetic
ccauuguacuccagccugggcaac

SEQ ID NO: 253618 - RNA, 18 nt, Artificial Sequence
  Synthetic
cauuccagccugggcaac

SEQ ID NO: 253619 - RNA, 19 nt, Artificial Sequence
  Synthetic
gcauuccagccugggcaac

SEQ ID NO: 253620 - RNA, 20 nt, Artificial Sequence
  Synthetic
ugcauuccagccugggcaac

SEQ ID NO: 253621 - RNA, 21 nt, Artificial Sequence
  Synthetic
uugcauuccagccugggcaac

SEQ ID NO: 253622 - RNA, 22 nt, Artificial Sequence
  Synthetic
auugcauuccagccugggcaac

SEQ ID NO: 253623 - RNA, 23 nt, Artificial Sequence
  Synthetic
cauugcauuccagccugggcaac

SEQ ID NO: 253624 - RNA, 24 nt, Artificial Sequence
  Synthetic
ccauugcauuccagccugggcaac

SEQ ID NO: 253625 - RNA, 18 nt, Artificial Sequence
  Synthetic
aauuucuguucuggcaac

SEQ ID NO: 253626 - RNA, 19 nt, Artificial Sequence
  Synthetic
gaauuucuguucuggcaac

SEQ ID NO: 253627 - RNA, 20 nt, Artificial Sequence
  Synthetic
agaauuucuguucuggcaac

SEQ ID NO: 253628 - RNA, 21 nt, Artificial Sequence
  Synthetic
cagaauuucuguucuggcaac

SEQ ID NO: 253629 - RNA, 22 nt, Artificial Sequence
  Synthetic
gcagaauuucuguucuggcaac

SEQ ID NO: 253630 - RNA, 23 nt, Artificial Sequence
  Synthetic
ggcagaauuucuguucuggcaac

SEQ ID NO: 253631 - RNA, 24 nt, Artificial Sequence
  Synthetic
uggcagaauuucuguucuggcaac

SEQ ID NO: 253632 - RNA, 18 nt, Artificial Sequence
  Synthetic
uaaagugaucaaugcaac

SEQ ID NO: 253633 - RNA, 19 nt, Artificial Sequence
  Synthetic
guaaagugaucaaugcaac

SEQ ID NO: 253634 - RNA, 20 nt, Artificial Sequence
  Synthetic
gguaaagugaucaaugcaac

SEQ ID NO: 253635 - RNA, 21 nt, Artificial Sequence
  Synthetic
ugguaaagugaucaaugcaac

SEQ ID NO: 253636 - RNA, 22 nt, Artificial Sequence
  Synthetic
augguaaagugaucaaugcaac

SEQ ID NO: 253637 - RNA, 23 nt, Artificial Sequence
  Synthetic
aaugguaaagugaucaaugcaac

SEQ ID NO: 253638 - RNA, 24 nt, Artificial Sequence
  Synthetic
uaaugguaaagugaucaaugcaac

SEQ ID NO: 253639 - RNA, 18 nt, Artificial Sequence
  Synthetic
uagcaacaugcaugcaac

SEQ ID NO: 253640 - RNA, 19 nt, Artificial Sequence
  Synthetic
guagcaacaugcaugcaac

SEQ ID NO: 253641 - RNA, 20 nt, Artificial Sequence
  Synthetic
uguagcaacaugcaugcaac

SEQ ID NO: 253642 - RNA, 21 nt, Artificial Sequence
  Synthetic
uuguagcaacaugcaugcaac

SEQ ID NO: 253643 - RNA, 22 nt, Artificial Sequence
  Synthetic
uuuguagcaacaugcaugcaac

SEQ ID NO: 253644 - RNA, 23 nt, Artificial Sequence
  Synthetic
cuuuguagcaacaugcaugcaac

SEQ ID NO: 253645 - RNA, 24 nt, Artificial Sequence
  Synthetic
ccuuuguagcaacaugcaugcaac

SEQ ID NO: 253646 - RNA, 18 nt, Artificial Sequence
  Synthetic
uugagagaaaacugcaac

SEQ ID NO: 253647 - RNA, 19 nt, Artificial Sequence
  Synthetic
uuugagagaaaacugcaac

SEQ ID NO: 253648 - RNA, 20 nt, Artificial Sequence
  Synthetic
cuuugagagaaaacugcaac

SEQ ID NO: 253649 - RNA, 21 nt, Artificial Sequence
  Synthetic
ccuuugagagaaaacugcaac

SEQ ID NO: 253650 - RNA, 22 nt, Artificial Sequence
  Synthetic
accuuugagagaaaacugcaac

SEQ ID NO: 253651 - RNA, 23 nt, Artificial Sequence
  Synthetic
uaccuuugagagaaaacugcaac

SEQ ID NO: 253652 - RNA, 24 nt, Artificial Sequence
  Synthetic
cuaccuuugagagaaaacugcaac

SEQ ID NO: 253653 - RNA, 18 nt, Artificial Sequence
  Synthetic
ucaaaacauggcugcaac

SEQ ID NO: 253654 - RNA, 19 nt, Artificial Sequence
  Synthetic
cucaaaacauggcugcaac

SEQ ID NO: 253655 - RNA, 20 nt, Artificial Sequence
  Synthetic
ucucaaaacauggcugcaac

SEQ ID NO: 253656 - RNA, 21 nt, Artificial Sequence
  Synthetic
gucucaaaacauggcugcaac

SEQ ID NO: 253657 - RNA, 22 nt, Artificial Sequence
  Synthetic
ugucucaaaacauggcugcaac

SEQ ID NO: 253658 - RNA, 23 nt, Artificial Sequence
  Synthetic
gugucucaaaacauggcugcaac

SEQ ID NO: 253659 - RNA, 24 nt, Artificial Sequence
  Synthetic
ggugucucaaaacauggcugcaac

SEQ ID NO: 253660 - RNA, 18 nt, Artificial Sequence
  Synthetic
gcaucagaccucugcaac

SEQ ID NO: 253661 - RNA, 19 nt, Artificial Sequence
  Synthetic
agcaucagaccucugcaac

SEQ ID NO: 253662 - RNA, 20 nt, Artificial Sequence
  Synthetic
cagcaucagaccucugcaac

SEQ ID NO: 253663 - RNA, 21 nt, Artificial Sequence
  Synthetic
ucagcaucagaccucugcaac

SEQ ID NO: 253664 - RNA, 22 nt, Artificial Sequence
  Synthetic
aucagcaucagaccucugcaac

SEQ ID NO: 253665 - RNA, 23 nt, Artificial Sequence
  Synthetic
caucagcaucagaccucugcaac

SEQ ID NO: 253666 - RNA, 24 nt, Artificial Sequence
  Synthetic
acaucagcaucagaccucugcaac

SEQ ID NO: 253667 - RNA, 18 nt, Artificial Sequence
  Synthetic
ucucaucuucauugcaac

SEQ ID NO: 253668 - RNA, 19 nt, Artificial Sequence
  Synthetic
uucucaucuucauugcaac

SEQ ID NO: 253669 - RNA, 20 nt, Artificial Sequence
  Synthetic
uuucucaucuucauugcaac

SEQ ID NO: 253670 - RNA, 21 nt, Artificial Sequence
  Synthetic
cuuucucaucuucauugcaac

SEQ ID NO: 253671 - RNA, 22 nt, Artificial Sequence
  Synthetic
ccuuucucaucuucauugcaac

SEQ ID NO: 253672 - RNA, 23 nt, Artificial Sequence
  Synthetic
uccuuucucaucuucauugcaac

SEQ ID NO: 253673 - RNA, 24 nt, Artificial Sequence
  Synthetic
guccuuucucaucuucauugcaac

SEQ ID NO: 253674 - RNA, 18 nt, Artificial Sequence
  Synthetic
agaacugagacuugcaac

SEQ ID NO: 253675 - RNA, 19 nt, Artificial Sequence
  Synthetic
cagaacugagacuugcaac

SEQ ID NO: 253676 - RNA, 20 nt, Artificial Sequence
  Synthetic
acagaacugagacuugcaac

SEQ ID NO: 253677 - RNA, 21 nt, Artificial Sequence
  Synthetic
aacagaacugagacuugcaac

SEQ ID NO: 253678 - RNA, 22 nt, Artificial Sequence
  Synthetic
aaacagaacugagacuugcaac

SEQ ID NO: 253679 - RNA, 23 nt, Artificial Sequence
  Synthetic
aaaacagaacugagacuugcaac

SEQ ID NO: 253680 - RNA, 24 nt, Artificial Sequence
  Synthetic
caaaacagaacugagacuugcaac

SEQ ID NO: 253681 - RNA, 18 nt, Artificial Sequence
  Synthetic
uugguauauacaaucaac

SEQ ID NO: 253682 - RNA, 19 nt, Artificial Sequence
  Synthetic
cuugguauauacaaucaac

SEQ ID NO: 253683 - RNA, 20 nt, Artificial Sequence
  Synthetic
ucuugguauauacaaucaac

SEQ ID NO: 253684 - RNA, 21 nt, Artificial Sequence
  Synthetic
cucuugguauauacaaucaac

SEQ ID NO: 253685 - RNA, 22 nt, Artificial Sequence
  Synthetic
gcucuugguauauacaaucaac

SEQ ID NO: 253686 - RNA, 23 nt, Artificial Sequence
  Synthetic
agcucuugguauauacaaucaac

SEQ ID NO: 253687 - RNA, 24 nt, Artificial Sequence
  Synthetic
aagcucuugguauauacaaucaac

SEQ ID NO: 253688 - RNA, 18 nt, Artificial Sequence
  Synthetic
ccauuuuaccuaaucaac

SEQ ID NO: 253689 - RNA, 19 nt, Artificial Sequence
  Synthetic
accauuuuaccuaaucaac

SEQ ID NO: 253690 - RNA, 20 nt, Artificial Sequence
  Synthetic
gaccauuuuaccuaaucaac

SEQ ID NO: 253691 - RNA, 21 nt, Artificial Sequence
  Synthetic
agaccauuuuaccuaaucaac

SEQ ID NO: 253692 - RNA, 22 nt, Artificial Sequence
  Synthetic
cagaccauuuuaccuaaucaac

SEQ ID NO: 253693 - RNA, 23 nt, Artificial Sequence
  Synthetic
ucagaccauuuuaccuaaucaac

SEQ ID NO: 253694 - RNA, 24 nt, Artificial Sequence
  Synthetic
gucagaccauuuuaccuaaucaac

SEQ ID NO: 253695 - RNA, 18 nt, Artificial Sequence
  Synthetic
aaauugaaggacaucaac

SEQ ID NO: 253696 - RNA, 19 nt, Artificial Sequence
  Synthetic
aaaauugaaggacaucaac

SEQ ID NO: 253697 - RNA, 20 nt, Artificial Sequence
  Synthetic
uaaaauugaaggacaucaac

SEQ ID NO: 253698 - RNA, 21 nt, Artificial Sequence
  Synthetic
uuaaaauugaaggacaucaac

SEQ ID NO: 253699 - RNA, 22 nt, Artificial Sequence
  Synthetic
uuuaaaauugaaggacaucaac

SEQ ID NO: 253700 - RNA, 23 nt, Artificial Sequence
  Synthetic
auuuaaaauugaaggacaucaac

SEQ ID NO: 253701 - RNA, 24 nt, Artificial Sequence
  Synthetic
gauuuaaaauugaaggacaucaac

SEQ ID NO: 253702 - RNA, 18 nt, Artificial Sequence
  Synthetic
uaaaauuaugacaucaac

SEQ ID NO: 253703 - RNA, 19 nt, Artificial Sequence
  Synthetic
guaaaauuaugacaucaac

SEQ ID NO: 253704 - RNA, 20 nt, Artificial Sequence
  Synthetic
gguaaaauuaugacaucaac

SEQ ID NO: 253705 - RNA, 21 nt, Artificial Sequence
  Synthetic
ugguaaaauuaugacaucaac

SEQ ID NO: 253706 - RNA, 22 nt, Artificial Sequence
  Synthetic
uugguaaaauuaugacaucaac

SEQ ID NO: 253707 - RNA, 23 nt, Artificial Sequence
  Synthetic
uuugguaaaauuaugacaucaac

SEQ ID NO: 253708 - RNA, 24 nt, Artificial Sequence
  Synthetic
auuugguaaaauuaugacaucaac

SEQ ID NO: 253709 - RNA, 18 nt, Artificial Sequence
  Synthetic
ugcaaugaagagaucaac

SEQ ID NO: 253710 - RNA, 19 nt, Artificial Sequence
  Synthetic
uugcaaugaagagaucaac

SEQ ID NO: 253711 - RNA, 20 nt, Artificial Sequence
  Synthetic
auugcaaugaagagaucaac

SEQ ID NO: 253712 - RNA, 21 nt, Artificial Sequence
  Synthetic
gauugcaaugaagagaucaac

SEQ ID NO: 253713 - RNA, 22 nt, Artificial Sequence
  Synthetic
agauugcaaugaagagaucaac

SEQ ID NO: 253714 - RNA, 23 nt, Artificial Sequence
  Synthetic
aagauugcaaugaagagaucaac

SEQ ID NO: 253715 - RNA, 24 nt, Artificial Sequence
  Synthetic
caagauugcaaugaagagaucaac

SEQ ID NO: 253716 - RNA, 18 nt, Artificial Sequence
  Synthetic
aaaugaaauuagaucaac

SEQ ID NO: 253717 - RNA, 19 nt, Artificial Sequence
  Synthetic
gaaaugaaauuagaucaac

SEQ ID NO: 253718 - RNA, 20 nt, Artificial Sequence
  Synthetic
agaaaugaaauuagaucaac

SEQ ID NO: 253719 - RNA, 21 nt, Artificial Sequence
  Synthetic
aagaaaugaaauuagaucaac

SEQ ID NO: 253720 - RNA, 22 nt, Artificial Sequence
  Synthetic
caagaaaugaaauuagaucaac

SEQ ID NO: 253721 - RNA, 23 nt, Artificial Sequence
  Synthetic
acaagaaaugaaauuagaucaac

SEQ ID NO: 253722 - RNA, 24 nt, Artificial Sequence
  Synthetic
uacaagaaaugaaauuagaucaac

SEQ ID NO: 253723 - RNA, 18 nt, Artificial Sequence
  Synthetic
agaugaugugggaucaac

SEQ ID NO: 253724 - RNA, 19 nt, Artificial Sequence
  Synthetic
gagaugaugugggaucaac

SEQ ID NO: 253725 - RNA, 20 nt, Artificial Sequence
  Synthetic
agagaugaugugggaucaac

SEQ ID NO: 253726 - RNA, 21 nt, Artificial Sequence
  Synthetic
uagagaugaugugggaucaac

SEQ ID NO: 253727 - RNA, 22 nt, Artificial Sequence
  Synthetic
auagagaugaugugggaucaac

SEQ ID NO: 253728 - RNA, 23 nt, Artificial Sequence
  Synthetic
aauagagaugaugugggaucaac

SEQ ID NO: 253729 - RNA, 24 nt, Artificial Sequence
  Synthetic
aaauagagaugaugugggaucaac

SEQ ID NO: 253730 - RNA, 18 nt, Artificial Sequence
  Synthetic
uuguuaauacaacucaac

SEQ ID NO: 253731 - RNA, 19 nt, Artificial Sequence
  Synthetic
auuguuaauacaacucaac

SEQ ID NO: 253732 - RNA, 20 nt, Artificial Sequence
  Synthetic
gauuguuaauacaacucaac

SEQ ID NO: 253733 - RNA, 21 nt, Artificial Sequence
  Synthetic
ugauuguuaauacaacucaac

SEQ ID NO: 253734 - RNA, 22 nt, Artificial Sequence
  Synthetic
cugauuguuaauacaacucaac

SEQ ID NO: 253735 - RNA, 23 nt, Artificial Sequence
  Synthetic
gcugauuguuaauacaacucaac

SEQ ID NO: 253736 - RNA, 24 nt, Artificial Sequence
  Synthetic
agcugauuguuaauacaacucaac

SEQ ID NO: 253737 - RNA, 18 nt, Artificial Sequence
  Synthetic
aggcaacucagacucaac

SEQ ID NO: 253738 - RNA, 19 nt, Artificial Sequence
  Synthetic
gaggcaacucagacucaac

SEQ ID NO: 253739 - RNA, 20 nt, Artificial Sequence
  Synthetic
agaggcaacucagacucaac

SEQ ID NO: 253740 - RNA, 21 nt, Artificial Sequence
  Synthetic
cagaggcaacucagacucaac

SEQ ID NO: 253741 - RNA, 22 nt, Artificial Sequence
  Synthetic
ucagaggcaacucagacucaac

SEQ ID NO: 253742 - RNA, 23 nt, Artificial Sequence
  Synthetic
aucagaggcaacucagacucaac

SEQ ID NO: 253743 - RNA, 24 nt, Artificial Sequence
  Synthetic
uaucagaggcaacucagacucaac

SEQ ID NO: 253744 - RNA, 18 nt, Artificial Sequence
  Synthetic
agacauacagagcucaac

SEQ ID NO: 253745 - RNA, 19 nt, Artificial Sequence
  Synthetic
cagacauacagagcucaac

SEQ ID NO: 253746 - RNA, 20 nt, Artificial Sequence
  Synthetic
ucagacauacagagcucaac

SEQ ID NO: 253747 - RNA, 21 nt, Artificial Sequence
  Synthetic
aucagacauacagagcucaac

SEQ ID NO: 253748 - RNA, 22 nt, Artificial Sequence
  Synthetic
aaucagacauacagagcucaac

SEQ ID NO: 253749 - RNA, 23 nt, Artificial Sequence
  Synthetic
aaaucagacauacagagcucaac

SEQ ID NO: 253750 - RNA, 24 nt, Artificial Sequence
  Synthetic
caaaucagacauacagagcucaac

SEQ ID NO: 253751 - RNA, 18 nt, Artificial Sequence
  Synthetic
cuuuaguugguucucaac

SEQ ID NO: 253752 - RNA, 19 nt, Artificial Sequence
  Synthetic
acuuuaguugguucucaac

SEQ ID NO: 253753 - RNA, 20 nt, Artificial Sequence
  Synthetic
uacuuuaguugguucucaac

SEQ ID NO: 253754 - RNA, 21 nt, Artificial Sequence
  Synthetic
uuacuuuaguugguucucaac

SEQ ID NO: 253755 - RNA, 22 nt, Artificial Sequence
  Synthetic
cuuacuuuaguugguucucaac

SEQ ID NO: 253756 - RNA, 23 nt, Artificial Sequence
  Synthetic
acuuacuuuaguugguucucaac

SEQ ID NO: 253757 - RNA, 24 nt, Artificial Sequence
  Synthetic
uacuuacuuuaguugguucucaac

SEQ ID NO: 253758 - RNA, 18 nt, Artificial Sequence
  Synthetic
ugauaaaacccagucaac

SEQ ID NO: 253759 - RNA, 19 nt, Artificial Sequence
  Synthetic
gugauaaaacccagucaac

SEQ ID NO: 253760 - RNA, 20 nt, Artificial Sequence
  Synthetic
agugauaaaacccagucaac

SEQ ID NO: 253761 - RNA, 21 nt, Artificial Sequence
  Synthetic
aagugauaaaacccagucaac

SEQ ID NO: 253762 - RNA, 22 nt, Artificial Sequence
  Synthetic
gaagugauaaaacccagucaac

SEQ ID NO: 253763 - RNA, 23 nt, Artificial Sequence
  Synthetic
ugaagugauaaaacccagucaac

SEQ ID NO: 253764 - RNA, 24 nt, Artificial Sequence
  Synthetic
augaagugauaaaacccagucaac

SEQ ID NO: 253765 - RNA, 18 nt, Artificial Sequence
  Synthetic
agggcgugcccagucaac

SEQ ID NO: 253766 - RNA, 19 nt, Artificial Sequence
  Synthetic
gagggcgugcccagucaac

SEQ ID NO: 253767 - RNA, 20 nt, Artificial Sequence
  Synthetic
agagggcgugcccagucaac

SEQ ID NO: 253768 - RNA, 21 nt, Artificial Sequence
  Synthetic
cagagggcgugcccagucaac

SEQ ID NO: 253769 - RNA, 22 nt, Artificial Sequence
  Synthetic
gcagagggcgugcccagucaac

SEQ ID NO: 253770 - RNA, 23 nt, Artificial Sequence
  Synthetic
ugcagagggcgugcccagucaac

SEQ ID NO: 253771 - RNA, 24 nt, Artificial Sequence
  Synthetic
uugcagagggcgugcccagucaac

SEQ ID NO: 253772 - RNA, 18 nt, Artificial Sequence
  Synthetic
gagauuggaaaggucaac

SEQ ID NO: 253773 - RNA, 19 nt, Artificial Sequence
  Synthetic
ugagauuggaaaggucaac

SEQ ID NO: 253774 - RNA, 20 nt, Artificial Sequence
  Synthetic
cugagauuggaaaggucaac

SEQ ID NO: 253775 - RNA, 21 nt, Artificial Sequence
  Synthetic
ccugagauuggaaaggucaac

SEQ ID NO: 253776 - RNA, 22 nt, Artificial Sequence
  Synthetic
accugagauuggaaaggucaac

SEQ ID NO: 253777 - RNA, 23 nt, Artificial Sequence
  Synthetic
aaccugagauuggaaaggucaac

SEQ ID NO: 253778 - RNA, 24 nt, Artificial Sequence
  Synthetic
uaaccugagauuggaaaggucaac

SEQ ID NO: 253779 - RNA, 18 nt, Artificial Sequence
  Synthetic
aacacaugggaauucaac

SEQ ID NO: 253780 - RNA, 19 nt, Artificial Sequence
  Synthetic
uaacacaugggaauucaac

SEQ ID NO: 253781 - RNA, 20 nt, Artificial Sequence
  Synthetic
auaacacaugggaauucaac

SEQ ID NO: 253782 - RNA, 21 nt, Artificial Sequence
  Synthetic
cauaacacaugggaauucaac

SEQ ID NO: 253783 - RNA, 22 nt, Artificial Sequence
  Synthetic
ccauaacacaugggaauucaac

SEQ ID NO: 253784 - RNA, 23 nt, Artificial Sequence
  Synthetic
cccauaacacaugggaauucaac

SEQ ID NO: 253785 - RNA, 24 nt, Artificial Sequence
  Synthetic
ucccauaacacaugggaauucaac

SEQ ID NO: 253786 - RNA, 18 nt, Artificial Sequence
  Synthetic
uauaauuccacauucaac

SEQ ID NO: 253787 - RNA, 19 nt, Artificial Sequence
  Synthetic
uuauaauuccacauucaac

SEQ ID NO: 253788 - RNA, 20 nt, Artificial Sequence
  Synthetic
auuauaauuccacauucaac

SEQ ID NO: 253789 - RNA, 21 nt, Artificial Sequence
  Synthetic
aauuauaauuccacauucaac

SEQ ID NO: 253790 - RNA, 22 nt, Artificial Sequence
  Synthetic
uaauuauaauuccacauucaac

SEQ ID NO: 253791 - RNA, 23 nt, Artificial Sequence
  Synthetic
auaauuauaauuccacauucaac

SEQ ID NO: 253792 - RNA, 24 nt, Artificial Sequence
  Synthetic
gauaauuauaauuccacauucaac

SEQ ID NO: 253793 - RNA, 18 nt, Artificial Sequence
  Synthetic
gugcaggucaccuucaac

SEQ ID NO: 253794 - RNA, 19 nt, Artificial Sequence
  Synthetic
ugugcaggucaccuucaac

SEQ ID NO: 253795 - RNA, 20 nt, Artificial Sequence
  Synthetic
gugugcaggucaccuucaac

SEQ ID NO: 253796 - RNA, 21 nt, Artificial Sequence
  Synthetic
agugugcaggucaccuucaac

SEQ ID NO: 253797 - RNA, 22 nt, Artificial Sequence
  Synthetic
aagugugcaggucaccuucaac

SEQ ID NO: 253798 - RNA, 23 nt, Artificial Sequence
  Synthetic
gaagugugcaggucaccuucaac

SEQ ID NO: 253799 - RNA, 24 nt, Artificial Sequence
  Synthetic
agaagugugcaggucaccuucaac

SEQ ID NO: 253800 - RNA, 18 nt, Artificial Sequence
  Synthetic
ugaggaucaaauuucaac

SEQ ID NO: 253801 - RNA, 19 nt, Artificial Sequence
  Synthetic
uugaggaucaaauuucaac

SEQ ID NO: 253802 - RNA, 20 nt, Artificial Sequence
  Synthetic
auugaggaucaaauuucaac

SEQ ID NO: 253803 - RNA, 21 nt, Artificial Sequence
  Synthetic
uauugaggaucaaauuucaac

SEQ ID NO: 253804 - RNA, 22 nt, Artificial Sequence
  Synthetic
auauugaggaucaaauuucaac

SEQ ID NO: 253805 - RNA, 23 nt, Artificial Sequence
  Synthetic
aauauugaggaucaaauuucaac

SEQ ID NO: 253806 - RNA, 24 nt, Artificial Sequence
  Synthetic
caauauugaggaucaaauuucaac

SEQ ID NO: 253807 - RNA, 18 nt, Artificial Sequence
  Synthetic
uuggcauuauauuucaac

SEQ ID NO: 253808 - RNA, 19 nt, Artificial Sequence
  Synthetic
cuuggcauuauauuucaac

SEQ ID NO: 253809 - RNA, 20 nt, Artificial Sequence
  Synthetic
acuuggcauuauauuucaac

SEQ ID NO: 253810 - RNA, 21 nt, Artificial Sequence
  Synthetic
cacuuggcauuauauuucaac

SEQ ID NO: 253811 - RNA, 22 nt, Artificial Sequence
  Synthetic
acacuuggcauuauauuucaac

SEQ ID NO: 253812 - RNA, 23 nt, Artificial Sequence
  Synthetic
aacacuuggcauuauauuucaac

SEQ ID NO: 253813 - RNA, 24 nt, Artificial Sequence
  Synthetic
caacacuuggcauuauauuucaac

SEQ ID NO: 253814 - RNA, 18 nt, Artificial Sequence
  Synthetic
auaagaaugaaaaagaac

SEQ ID NO: 253815 - RNA, 19 nt, Artificial Sequence
  Synthetic
cauaagaaugaaaaagaac

SEQ ID NO: 253816 - RNA, 20 nt, Artificial Sequence
  Synthetic
acauaagaaugaaaaagaac

SEQ ID NO: 253817 - RNA, 21 nt, Artificial Sequence
  Synthetic
uacauaagaaugaaaaagaac

SEQ ID NO: 253818 - RNA, 22 nt, Artificial Sequence
  Synthetic
guacauaagaaugaaaaagaac

SEQ ID NO: 253819 - RNA, 23 nt, Artificial Sequence
  Synthetic
uguacauaagaaugaaaaagaac

SEQ ID NO: 253820 - RNA, 24 nt, Artificial Sequence
  Synthetic
uuguacauaagaaugaaaaagaac

SEQ ID NO: 253821 - RNA, 18 nt, Artificial Sequence
  Synthetic
caugucucuacaaagaac

SEQ ID NO: 253822 - RNA, 19 nt, Artificial Sequence
  Synthetic
ccaugucucuacaaagaac

SEQ ID NO: 253823 - RNA, 20 nt, Artificial Sequence
  Synthetic
uccaugucucuacaaagaac

SEQ ID NO: 253824 - RNA, 21 nt, Artificial Sequence
  Synthetic
auccaugucucuacaaagaac

SEQ ID NO: 253825 - RNA, 22 nt, Artificial Sequence
  Synthetic
cauccaugucucuacaaagaac

SEQ ID NO: 253826 - RNA, 23 nt, Artificial Sequence
  Synthetic
ucauccaugucucuacaaagaac

SEQ ID NO: 253827 - RNA, 24 nt, Artificial Sequence
  Synthetic
uucauccaugucucuacaaagaac

SEQ ID NO: 253828 - RNA, 18 nt, Artificial Sequence
  Synthetic
gaaauaaaaagaaagaac

SEQ ID NO: 253829 - RNA, 19 nt, Artificial Sequence
  Synthetic
ugaaauaaaaagaaagaac

SEQ ID NO: 253830 - RNA, 20 nt, Artificial Sequence
  Synthetic
cugaaauaaaaagaaagaac

SEQ ID NO: 253831 - RNA, 21 nt, Artificial Sequence
  Synthetic
ucugaaauaaaaagaaagaac

SEQ ID NO: 253832 - RNA, 22 nt, Artificial Sequence
  Synthetic
uucugaaauaaaaagaaagaac

SEQ ID NO: 253833 - RNA, 23 nt, Artificial Sequence
  Synthetic
uuucugaaauaaaaagaaagaac

SEQ ID NO: 253834 - RNA, 24 nt, Artificial Sequence
  Synthetic
uuuucugaaauaaaaagaaagaac

SEQ ID NO: 253835 - RNA, 18 nt, Artificial Sequence
  Synthetic
guauucauaagaaagaac

SEQ ID NO: 253836 - RNA, 19 nt, Artificial Sequence
  Synthetic
uguauucauaagaaagaac

SEQ ID NO: 253837 - RNA, 20 nt, Artificial Sequence
  Synthetic
cuguauucauaagaaagaac

SEQ ID NO: 253838 - RNA, 21 nt, Artificial Sequence
  Synthetic
acuguauucauaagaaagaac

SEQ ID NO: 253839 - RNA, 22 nt, Artificial Sequence
  Synthetic
cacuguauucauaagaaagaac

SEQ ID NO: 253840 - RNA, 23 nt, Artificial Sequence
  Synthetic
ucacuguauucauaagaaagaac

SEQ ID NO: 253841 - RNA, 24 nt, Artificial Sequence
  Synthetic
gucacuguauucauaagaaagaac

SEQ ID NO: 253842 - RNA, 18 nt, Artificial Sequence
  Synthetic
ccagauuuacccaagaac

SEQ ID NO: 253843 - RNA, 19 nt, Artificial Sequence
  Synthetic
accagauuuacccaagaac

SEQ ID NO: 253844 - RNA, 20 nt, Artificial Sequence
  Synthetic
caccagauuuacccaagaac

SEQ ID NO: 253845 - RNA, 21 nt, Artificial Sequence
  Synthetic
ccaccagauuuacccaagaac

SEQ ID NO: 253846 - RNA, 22 nt, Artificial Sequence
  Synthetic
accaccagauuuacccaagaac

SEQ ID NO: 253847 - RNA, 23 nt, Artificial Sequence
  Synthetic
uaccaccagauuuacccaagaac

SEQ ID NO: 253848 - RNA, 24 nt, Artificial Sequence
  Synthetic
cuaccaccagauuuacccaagaac

SEQ ID NO: 253849 - RNA, 18 nt, Artificial Sequence
  Synthetic
aaaauguuaggcaagaac

SEQ ID NO: 253850 - RNA, 19 nt, Artificial Sequence
  Synthetic
uaaaauguuaggcaagaac

SEQ ID NO: 253851 - RNA, 20 nt, Artificial Sequence
  Synthetic
cuaaaauguuaggcaagaac

SEQ ID NO: 253852 - RNA, 21 nt, Artificial Sequence
  Synthetic
gcuaaaauguuaggcaagaac

SEQ ID NO: 253853 - RNA, 22 nt, Artificial Sequence
  Synthetic
ggcuaaaauguuaggcaagaac

SEQ ID NO: 253854 - RNA, 23 nt, Artificial Sequence
  Synthetic
uggcuaaaauguuaggcaagaac

SEQ ID NO: 253855 - RNA, 24 nt, Artificial Sequence
  Synthetic
uuggcuaaaauguuaggcaagaac

SEQ ID NO: 253856 - RNA, 18 nt, Artificial Sequence
  Synthetic
ucaaauguaaucaagaac

SEQ ID NO: 253857 - RNA, 19 nt, Artificial Sequence
  Synthetic
gucaaauguaaucaagaac

SEQ ID NO: 253858 - RNA, 20 nt, Artificial Sequence
  Synthetic
ugucaaauguaaucaagaac

SEQ ID NO: 253859 - RNA, 21 nt, Artificial Sequence
  Synthetic
gugucaaauguaaucaagaac

SEQ ID NO: 253860 - RNA, 22 nt, Artificial Sequence
  Synthetic
ugugucaaauguaaucaagaac

SEQ ID NO: 253861 - RNA, 23 nt, Artificial Sequence
  Synthetic
uugugucaaauguaaucaagaac

SEQ ID NO: 253862 - RNA, 24 nt, Artificial Sequence
  Synthetic
auugugucaaauguaaucaagaac

SEQ ID NO: 253863 - RNA, 18 nt, Artificial Sequence
  Synthetic
aaaaauaaucucaagaac

SEQ ID NO: 253864 - RNA, 19 nt, Artificial Sequence
  Synthetic
gaaaaauaaucucaagaac

SEQ ID NO: 253865 - RNA, 20 nt, Artificial Sequence
  Synthetic
ggaaaaauaaucucaagaac

SEQ ID NO: 253866 - RNA, 21 nt, Artificial Sequence
  Synthetic
aggaaaaauaaucucaagaac

SEQ ID NO: 253867 - RNA, 22 nt, Artificial Sequence
  Synthetic
caggaaaaauaaucucaagaac

SEQ ID NO: 253868 - RNA, 23 nt, Artificial Sequence
  Synthetic
acaggaaaaauaaucucaagaac

SEQ ID NO: 253869 - RNA, 24 nt, Artificial Sequence
  Synthetic
uacaggaaaaauaaucucaagaac

SEQ ID NO: 253870 - RNA, 18 nt, Artificial Sequence
  Synthetic
cuaggcagagggaagaac

SEQ ID NO: 253871 - RNA, 19 nt, Artificial Sequence
  Synthetic
ucuaggcagagggaagaac

SEQ ID NO: 253872 - RNA, 20 nt, Artificial Sequence
  Synthetic
uucuaggcagagggaagaac

SEQ ID NO: 253873 - RNA, 21 nt, Artificial Sequence
  Synthetic
auucuaggcagagggaagaac

SEQ ID NO: 253874 - RNA, 22 nt, Artificial Sequence
  Synthetic
cauucuaggcagagggaagaac

SEQ ID NO: 253875 - RNA, 23 nt, Artificial Sequence
  Synthetic
gcauucuaggcagagggaagaac

SEQ ID NO: 253876 - RNA, 24 nt, Artificial Sequence
  Synthetic
ugcauucuaggcagagggaagaac

SEQ ID NO: 253877 - RNA, 18 nt, Artificial Sequence
  Synthetic
uucaaggucaugaagaac

SEQ ID NO: 253878 - RNA, 19 nt, Artificial Sequence
  Synthetic
uuucaaggucaugaagaac

SEQ ID NO: 253879 - RNA, 20 nt, Artificial Sequence
  Synthetic
guuucaaggucaugaagaac

SEQ ID NO: 253880 - RNA, 21 nt, Artificial Sequence
  Synthetic
aguuucaaggucaugaagaac

SEQ ID NO: 253881 - RNA, 22 nt, Artificial Sequence
  Synthetic
aaguuucaaggucaugaagaac

SEQ ID NO: 253882 - RNA, 23 nt, Artificial Sequence
  Synthetic
aaaguuucaaggucaugaagaac

SEQ ID NO: 253883 - RNA, 24 nt, Artificial Sequence
  Synthetic
aaaaguuucaaggucaugaagaac

SEQ ID NO: 253884 - RNA, 18 nt, Artificial Sequence
  Synthetic
ugucuucaccugaagaac

SEQ ID NO: 253885 - RNA, 19 nt, Artificial Sequence
  Synthetic
augucuucaccugaagaac

SEQ ID NO: 253886 - RNA, 20 nt, Artificial Sequence
  Synthetic
aaugucuucaccugaagaac

SEQ ID NO: 253887 - RNA, 21 nt, Artificial Sequence
  Synthetic
gaaugucuucaccugaagaac

SEQ ID NO: 253888 - RNA, 22 nt, Artificial Sequence
  Synthetic
agaaugucuucaccugaagaac

SEQ ID NO: 253889 - RNA, 23 nt, Artificial Sequence
  Synthetic
cagaaugucuucaccugaagaac

SEQ ID NO: 253890 - RNA, 24 nt, Artificial Sequence
  Synthetic
gcagaaugucuucaccugaagaac

SEQ ID NO: 253891 - RNA, 18 nt, Artificial Sequence
  Synthetic
caugugcuucugaagaac

SEQ ID NO: 253892 - RNA, 19 nt, Artificial Sequence
  Synthetic
ucaugugcuucugaagaac

SEQ ID NO: 253893 - RNA, 20 nt, Artificial Sequence
  Synthetic
uucaugugcuucugaagaac

SEQ ID NO: 253894 - RNA, 21 nt, Artificial Sequence
  Synthetic
guucaugugcuucugaagaac

SEQ ID NO: 253895 - RNA, 22 nt, Artificial Sequence
  Synthetic
aguucaugugcuucugaagaac

SEQ ID NO: 253896 - RNA, 23 nt, Artificial Sequence
  Synthetic
gaguucaugugcuucugaagaac

SEQ ID NO: 253897 - RNA, 24 nt, Artificial Sequence
  Synthetic
agaguucaugugcuucugaagaac

SEQ ID NO: 253898 - RNA, 18 nt, Artificial Sequence
  Synthetic
auuuauuauaauaagaac

SEQ ID NO: 253899 - RNA, 19 nt, Artificial Sequence
  Synthetic
uauuuauuauaauaagaac

SEQ ID NO: 253900 - RNA, 20 nt, Artificial Sequence
  Synthetic
guauuuauuauaauaagaac

SEQ ID NO: 253901 - RNA, 21 nt, Artificial Sequence
  Synthetic
gguauuuauuauaauaagaac

SEQ ID NO: 253902 - RNA, 22 nt, Artificial Sequence
  Synthetic
ugguauuuauuauaauaagaac

SEQ ID NO: 253903 - RNA, 23 nt, Artificial Sequence
  Synthetic
cugguauuuauuauaauaagaac

SEQ ID NO: 253904 - RNA, 24 nt, Artificial Sequence
  Synthetic
gcugguauuuauuauaauaagaac

SEQ ID NO: 253905 - RNA, 18 nt, Artificial Sequence
  Synthetic
augauggaagauaagaac

SEQ ID NO: 253906 - RNA, 19 nt, Artificial Sequence
  Synthetic
caugauggaagauaagaac

SEQ ID NO: 253907 - RNA, 20 nt, Artificial Sequence
  Synthetic
ucaugauggaagauaagaac

SEQ ID NO: 253908 - RNA, 21 nt, Artificial Sequence
  Synthetic
cucaugauggaagauaagaac

SEQ ID NO: 253909 - RNA, 22 nt, Artificial Sequence
  Synthetic
ucucaugauggaagauaagaac

SEQ ID NO: 253910 - RNA, 23 nt, Artificial Sequence
  Synthetic
cucucaugauggaagauaagaac

SEQ ID NO: 253911 - RNA, 24 nt, Artificial Sequence
  Synthetic
ucucucaugauggaagauaagaac

SEQ ID NO: 253912 - RNA, 18 nt, Artificial Sequence
  Synthetic
aaauauuacaguaagaac

SEQ ID NO: 253913 - RNA, 19 nt, Artificial Sequence
  Synthetic
aaaauauuacaguaagaac

SEQ ID NO: 253914 - RNA, 20 nt, Artificial Sequence
  Synthetic
aaaaauauuacaguaagaac

SEQ ID NO: 253915 - RNA, 21 nt, Artificial Sequence
  Synthetic
gaaaaauauuacaguaagaac

SEQ ID NO: 253916 - RNA, 22 nt, Artificial Sequence
  Synthetic
agaaaaauauuacaguaagaac

SEQ ID NO: 253917 - RNA, 23 nt, Artificial Sequence
  Synthetic
aagaaaaauauuacaguaagaac

SEQ ID NO: 253918 - RNA, 24 nt, Artificial Sequence
  Synthetic
caagaaaaauauuacaguaagaac

SEQ ID NO: 253919 - RNA, 18 nt, Artificial Sequence
  Synthetic
ccugaauacauuaagaac

SEQ ID NO: 253920 - RNA, 19 nt, Artificial Sequence
  Synthetic
cccugaauacauuaagaac

SEQ ID NO: 253921 - RNA, 20 nt, Artificial Sequence
  Synthetic
acccugaauacauuaagaac

SEQ ID NO: 253922 - RNA, 21 nt, Artificial Sequence
  Synthetic
aacccugaauacauuaagaac

SEQ ID NO: 253923 - RNA, 22 nt, Artificial Sequence
  Synthetic
caacccugaauacauuaagaac

SEQ ID NO: 253924 - RNA, 23 nt, Artificial Sequence
  Synthetic
acaacccugaauacauuaagaac

SEQ ID NO: 253925 - RNA, 24 nt, Artificial Sequence
  Synthetic
cacaacccugaauacauuaagaac

SEQ ID NO: 253926 - RNA, 18 nt, Artificial Sequence
  Synthetic
uuuaaguuuuuuaagaac

SEQ ID NO: 253927 - RNA, 19 nt, Artificial Sequence
  Synthetic
uuuuaaguuuuuuaagaac

SEQ ID NO: 253928 - RNA, 20 nt, Artificial Sequence
  Synthetic
auuuuaaguuuuuuaagaac

SEQ ID NO: 253929 - RNA, 21 nt, Artificial Sequence
  Synthetic
aauuuuaaguuuuuuaagaac

SEQ ID NO: 253930 - RNA, 22 nt, Artificial Sequence
  Synthetic
aaauuuuaaguuuuuuaagaac

SEQ ID NO: 253931 - RNA, 23 nt, Artificial Sequence
  Synthetic
aaaauuuuaaguuuuuuaagaac

SEQ ID NO: 253932 - RNA, 24 nt, Artificial Sequence
  Synthetic
gaaaauuuuaaguuuuuuaagaac

SEQ ID NO: 253933 - RNA, 18 nt, Artificial Sequence
  Synthetic
aaacagugaaaacagaac

SEQ ID NO: 253934 - RNA, 19 nt, Artificial Sequence
  Synthetic
uaaacagugaaaacagaac

SEQ ID NO: 253935 - RNA, 20 nt, Artificial Sequence
  Synthetic
auaaacagugaaaacagaac

SEQ ID NO: 253936 - RNA, 21 nt, Artificial Sequence
  Synthetic
cauaaacagugaaaacagaac

SEQ ID NO: 253937 - RNA, 22 nt, Artificial Sequence
  Synthetic
gcauaaacagugaaaacagaac

SEQ ID NO: 253938 - RNA, 23 nt, Artificial Sequence
  Synthetic
ugcauaaacagugaaaacagaac

SEQ ID NO: 253939 - RNA, 24 nt, Artificial Sequence
  Synthetic
augcauaaacagugaaaacagaac

SEQ ID NO: 253940 - RNA, 18 nt, Artificial Sequence
  Synthetic
ucaaaagguuuacagaac

SEQ ID NO: 253941 - RNA, 19 nt, Artificial Sequence
  Synthetic
uucaaaagguuuacagaac

SEQ ID NO: 253942 - RNA, 20 nt, Artificial Sequence
  Synthetic
uuucaaaagguuuacagaac

SEQ ID NO: 253943 - RNA, 21 nt, Artificial Sequence
  Synthetic
cuuucaaaagguuuacagaac

SEQ ID NO: 253944 - RNA, 22 nt, Artificial Sequence
  Synthetic
acuuucaaaagguuuacagaac

SEQ ID NO: 253945 - RNA, 23 nt, Artificial Sequence
  Synthetic
uacuuucaaaagguuuacagaac

SEQ ID NO: 253946 - RNA, 24 nt, Artificial Sequence
  Synthetic
cuacuuucaaaagguuuacagaac

SEQ ID NO: 253947 - RNA, 18 nt, Artificial Sequence
  Synthetic
uuguucuuggagcagaac

SEQ ID NO: 253948 - RNA, 19 nt, Artificial Sequence
  Synthetic
cuuguucuuggagcagaac

SEQ ID NO: 253949 - RNA, 20 nt, Artificial Sequence
  Synthetic
acuuguucuuggagcagaac

SEQ ID NO: 253950 - RNA, 21 nt, Artificial Sequence
  Synthetic
uacuuguucuuggagcagaac

SEQ ID NO: 253951 - RNA, 22 nt, Artificial Sequence
  Synthetic
guacuuguucuuggagcagaac

SEQ ID NO: 253952 - RNA, 23 nt, Artificial Sequence
  Synthetic
uguacuuguucuuggagcagaac

SEQ ID NO: 253953 - RNA, 24 nt, Artificial Sequence
  Synthetic
uuguacuuguucuuggagcagaac

SEQ ID NO: 253954 - RNA, 18 nt, Artificial Sequence
  Synthetic
ugaaggacaaggcagaac

SEQ ID NO: 253955 - RNA, 19 nt, Artificial Sequence
  Synthetic
uugaaggacaaggcagaac

SEQ ID NO: 253956 - RNA, 20 nt, Artificial Sequence
  Synthetic
uuugaaggacaaggcagaac

SEQ ID NO: 253957 - RNA, 21 nt, Artificial Sequence
  Synthetic
uuuugaaggacaaggcagaac

SEQ ID NO: 253958 - RNA, 22 nt, Artificial Sequence
  Synthetic
uuuuugaaggacaaggcagaac

SEQ ID NO: 253959 - RNA, 23 nt, Artificial Sequence
  Synthetic
uuuuuugaaggacaaggcagaac

SEQ ID NO: 253960 - RNA, 24 nt, Artificial Sequence
  Synthetic
guuuuuugaaggacaaggcagaac

SEQ ID NO: 253961 - RNA, 18 nt, Artificial Sequence
  Synthetic
cguggcagaaggcagaac

SEQ ID NO: 253962 - RNA, 19 nt, Artificial Sequence
  Synthetic
ucguggcagaaggcagaac

SEQ ID NO: 253963 - RNA, 20 nt, Artificial Sequence
  Synthetic
gucguggcagaaggcagaac

SEQ ID NO: 253964 - RNA, 21 nt, Artificial Sequence
  Synthetic
agucguggcagaaggcagaac

SEQ ID NO: 253965 - RNA, 22 nt, Artificial Sequence
  Synthetic
cagucguggcagaaggcagaac

SEQ ID NO: 253966 - RNA, 23 nt, Artificial Sequence
  Synthetic
ccagucguggcagaaggcagaac

SEQ ID NO: 253967 - RNA, 24 nt, Artificial Sequence
  Synthetic
uccagucguggcagaaggcagaac

SEQ ID NO: 253968 - RNA, 18 nt, Artificial Sequence
  Synthetic
gugagaugucugcagaac

SEQ ID NO: 253969 - RNA, 19 nt, Artificial Sequence
  Synthetic
ugugagaugucugcagaac

SEQ ID NO: 253970 - RNA, 20 nt, Artificial Sequence
  Synthetic
uugugagaugucugcagaac

SEQ ID NO: 253971 - RNA, 21 nt, Artificial Sequence
  Synthetic
guugugagaugucugcagaac

SEQ ID NO: 253972 - RNA, 22 nt, Artificial Sequence
  Synthetic
aguugugagaugucugcagaac

SEQ ID NO: 253973 - RNA, 23 nt, Artificial Sequence
  Synthetic
caguugugagaugucugcagaac

SEQ ID NO: 253974 - RNA, 24 nt, Artificial Sequence
  Synthetic
ucaguugugagaugucugcagaac

SEQ ID NO: 253975 - RNA, 18 nt, Artificial Sequence
  Synthetic
cccucauaaaaagagaac

SEQ ID NO: 253976 - RNA, 19 nt, Artificial Sequence
  Synthetic
ucccucauaaaaagagaac

SEQ ID NO: 253977 - RNA, 20 nt, Artificial Sequence
  Synthetic
aucccucauaaaaagagaac

SEQ ID NO: 253978 - RNA, 21 nt, Artificial Sequence
  Synthetic
caucccucauaaaaagagaac

SEQ ID NO: 253979 - RNA, 22 nt, Artificial Sequence
  Synthetic
ucaucccucauaaaaagagaac

SEQ ID NO: 253980 - RNA, 23 nt, Artificial Sequence
  Synthetic
aucaucccucauaaaaagagaac

SEQ ID NO: 253981 - RNA, 24 nt, Artificial Sequence
  Synthetic
aaucaucccucauaaaaagagaac

SEQ ID NO: 253982 - RNA, 18 nt, Artificial Sequence
  Synthetic
gcgccucugaaagagaac

SEQ ID NO: 253983 - RNA, 19 nt, Artificial Sequence
  Synthetic
ugcgccucugaaagagaac

SEQ ID NO: 253984 - RNA, 20 nt, Artificial Sequence
  Synthetic
uugcgccucugaaagagaac

SEQ ID NO: 253985 - RNA, 21 nt, Artificial Sequence
  Synthetic
auugcgccucugaaagagaac

SEQ ID NO: 253986 - RNA, 22 nt, Artificial Sequence
  Synthetic
aauugcgccucugaaagagaac

SEQ ID NO: 253987 - RNA, 23 nt, Artificial Sequence
  Synthetic
aaauugcgccucugaaagagaac

SEQ ID NO: 253988 - RNA, 24 nt, Artificial Sequence
  Synthetic
gaaauugcgccucugaaagagaac

SEQ ID NO: 253989 - RNA, 18 nt, Artificial Sequence
  Synthetic
auaaaaagggaagagaac

SEQ ID NO: 253990 - RNA, 19 nt, Artificial Sequence
  Synthetic
uauaaaaagggaagagaac

SEQ ID NO: 253991 - RNA, 20 nt, Artificial Sequence
  Synthetic
uuauaaaaagggaagagaac

SEQ ID NO: 253992 - RNA, 21 nt, Artificial Sequence
  Synthetic
auuauaaaaagggaagagaac

SEQ ID NO: 253993 - RNA, 22 nt, Artificial Sequence
  Synthetic
aauuauaaaaagggaagagaac

SEQ ID NO: 253994 - RNA, 23 nt, Artificial Sequence
  Synthetic
aaauuauaaaaagggaagagaac

SEQ ID NO: 253995 - RNA, 24 nt, Artificial Sequence
  Synthetic
gaaauuauaaaaagggaagagaac

SEQ ID NO: 253996 - RNA, 18 nt, Artificial Sequence
  Synthetic
uaucuucccacagagaac

SEQ ID NO: 253997 - RNA, 19 nt, Artificial Sequence
  Synthetic
cuaucuucccacagagaac

SEQ ID NO: 253998 - RNA, 20 nt, Artificial Sequence
  Synthetic
ucuaucuucccacagagaac

SEQ ID NO: 253999 - RNA, 21 nt, Artificial Sequence
  Synthetic
uucuaucuucccacagagaac

SEQ ID NO: 254000 - RNA, 22 nt, Artificial Sequence
  Synthetic
auucuaucuucccacagagaac

SEQ ID NO: 254001 - RNA, 23 nt, Artificial Sequence
  Synthetic
gauucuaucuucccacagagaac

SEQ ID NO: 254002 - RNA, 24 nt, Artificial Sequence
  Synthetic
ggauucuaucuucccacagagaac

SEQ ID NO: 254003 - RNA, 18 nt, Artificial Sequence
  Synthetic
auuugguacagagagaac

SEQ ID NO: 254004 - RNA, 19 nt, Artificial Sequence
  Synthetic
gauuugguacagagagaac

SEQ ID NO: 254005 - RNA, 20 nt, Artificial Sequence
  Synthetic
ggauuugguacagagagaac

SEQ ID NO: 254006 - RNA, 21 nt, Artificial Sequence
  Synthetic
uggauuugguacagagagaac

SEQ ID NO: 254007 - RNA, 22 nt, Artificial Sequence
  Synthetic
auggauuugguacagagagaac

SEQ ID NO: 254008 - RNA, 23 nt, Artificial Sequence
  Synthetic
gauggauuugguacagagagaac

SEQ ID NO: 254009 - RNA, 24 nt, Artificial Sequence
  Synthetic
agauggauuugguacagagagaac

SEQ ID NO: 254010 - RNA, 18 nt, Artificial Sequence
  Synthetic
ugggcggagggagagaac

SEQ ID NO: 254011 - RNA, 19 nt, Artificial Sequence
  Synthetic
uugggcggagggagagaac

SEQ ID NO: 254012 - RNA, 20 nt, Artificial Sequence
  Synthetic
guugggcggagggagagaac

SEQ ID NO: 254013 - RNA, 21 nt, Artificial Sequence
  Synthetic
gguugggcggagggagagaac

SEQ ID NO: 254014 - RNA, 22 nt, Artificial Sequence
  Synthetic
agguugggcggagggagagaac

SEQ ID NO: 254015 - RNA, 23 nt, Artificial Sequence
  Synthetic
gagguugggcggagggagagaac

SEQ ID NO: 254016 - RNA, 24 nt, Artificial Sequence
  Synthetic
ggagguugggcggagggagagaac

SEQ ID NO: 254017 - RNA, 18 nt, Artificial Sequence
  Synthetic
ggugaaugcugagagaac

SEQ ID NO: 254018 - RNA, 19 nt, Artificial Sequence
  Synthetic
uggugaaugcugagagaac

SEQ ID NO: 254019 - RNA, 20 nt, Artificial Sequence
  Synthetic
guggugaaugcugagagaac

SEQ ID NO: 254020 - RNA, 21 nt, Artificial Sequence
  Synthetic
uguggugaaugcugagagaac

SEQ ID NO: 254021 - RNA, 22 nt, Artificial Sequence
  Synthetic
uuguggugaaugcugagagaac

SEQ ID NO: 254022 - RNA, 23 nt, Artificial Sequence
  Synthetic
cuuguggugaaugcugagagaac

SEQ ID NO: 254023 - RNA, 24 nt, Artificial Sequence
  Synthetic
gcuuguggugaaugcugagagaac

SEQ ID NO: 254024 - RNA, 18 nt, Artificial Sequence
  Synthetic
aaaggagagagggagaac

SEQ ID NO: 254025 - RNA, 19 nt, Artificial Sequence
  Synthetic
gaaaggagagagggagaac

SEQ ID NO: 254026 - RNA, 20 nt, Artificial Sequence
  Synthetic
agaaaggagagagggagaac

SEQ ID NO: 254027 - RNA, 21 nt, Artificial Sequence
  Synthetic
uagaaaggagagagggagaac

SEQ ID NO: 254028 - RNA, 22 nt, Artificial Sequence
  Synthetic
auagaaaggagagagggagaac

SEQ ID NO: 254029 - RNA, 23 nt, Artificial Sequence
  Synthetic
gauagaaaggagagagggagaac

SEQ ID NO: 254030 - RNA, 24 nt, Artificial Sequence
  Synthetic
ggauagaaaggagagagggagaac

SEQ ID NO: 254031 - RNA, 18 nt, Artificial Sequence
  Synthetic
aaucacaucauggagaac

SEQ ID NO: 254032 - RNA, 19 nt, Artificial Sequence
  Synthetic
uaaucacaucauggagaac

SEQ ID NO: 254033 - RNA, 20 nt, Artificial Sequence
  Synthetic
auaaucacaucauggagaac

SEQ ID NO: 254034 - RNA, 21 nt, Artificial Sequence
  Synthetic
aauaaucacaucauggagaac

SEQ ID NO: 254035 - RNA, 22 nt, Artificial Sequence
  Synthetic
uaauaaucacaucauggagaac

SEQ ID NO: 254036 - RNA, 23 nt, Artificial Sequence
  Synthetic
auaauaaucacaucauggagaac

SEQ ID NO: 254037 - RNA, 24 nt, Artificial Sequence
  Synthetic
cauaauaaucacaucauggagaac

SEQ ID NO: 254038 - RNA, 18 nt, Artificial Sequence
  Synthetic
ccacuuauaaaugagaac

SEQ ID NO: 254039 - RNA, 19 nt, Artificial Sequence
  Synthetic
cccacuuauaaaugagaac

SEQ ID NO: 254040 - RNA, 20 nt, Artificial Sequence
  Synthetic
ucccacuuauaaaugagaac

SEQ ID NO: 254041 - RNA, 21 nt, Artificial Sequence
  Synthetic
cucccacuuauaaaugagaac

SEQ ID NO: 254042 - RNA, 22 nt, Artificial Sequence
  Synthetic
gcucccacuuauaaaugagaac

SEQ ID NO: 254043 - RNA, 23 nt, Artificial Sequence
  Synthetic
agcucccacuuauaaaugagaac

SEQ ID NO: 254044 - RNA, 24 nt, Artificial Sequence
  Synthetic
uagcucccacuuauaaaugagaac

SEQ ID NO: 254045 - RNA, 18 nt, Artificial Sequence
  Synthetic
uacgcuuuagaugagaac

SEQ ID NO: 254046 - RNA, 19 nt, Artificial Sequence
  Synthetic
uuacgcuuuagaugagaac

SEQ ID NO: 254047 - RNA, 20 nt, Artificial Sequence
  Synthetic
auuacgcuuuagaugagaac

SEQ ID NO: 254048 - RNA, 21 nt, Artificial Sequence
  Synthetic
cauuacgcuuuagaugagaac

SEQ ID NO: 254049 - RNA, 22 nt, Artificial Sequence
  Synthetic
acauuacgcuuuagaugagaac

SEQ ID NO: 254050 - RNA, 23 nt, Artificial Sequence
  Synthetic
gacauuacgcuuuagaugagaac

SEQ ID NO: 254051 - RNA, 24 nt, Artificial Sequence
  Synthetic
agacauuacgcuuuagaugagaac

SEQ ID NO: 254052 - RNA, 18 nt, Artificial Sequence
  Synthetic
uccuauugaucugagaac

SEQ ID NO: 254053 - RNA, 19 nt, Artificial Sequence
  Synthetic
guccuauugaucugagaac

SEQ ID NO: 254054 - RNA, 20 nt, Artificial Sequence
  Synthetic
uguccuauugaucugagaac

SEQ ID NO: 254055 - RNA, 21 nt, Artificial Sequence
  Synthetic
auguccuauugaucugagaac

SEQ ID NO: 254056 - RNA, 22 nt, Artificial Sequence
  Synthetic
uauguccuauugaucugagaac

SEQ ID NO: 254057 - RNA, 23 nt, Artificial Sequence
  Synthetic
guauguccuauugaucugagaac

SEQ ID NO: 254058 - RNA, 24 nt, Artificial Sequence
  Synthetic
uguauguccuauugaucugagaac

SEQ ID NO: 254059 - RNA, 18 nt, Artificial Sequence
  Synthetic
ccccuguuuucugagaac

SEQ ID NO: 254060 - RNA, 19 nt, Artificial Sequence
  Synthetic
cccccuguuuucugagaac

SEQ ID NO: 254061 - RNA, 20 nt, Artificial Sequence
  Synthetic
acccccuguuuucugagaac

SEQ ID NO: 254062 - RNA, 21 nt, Artificial Sequence
  Synthetic
aacccccuguuuucugagaac

SEQ ID NO: 254063 - RNA, 22 nt, Artificial Sequence
  Synthetic
caacccccuguuuucugagaac

SEQ ID NO: 254064 - RNA, 23 nt, Artificial Sequence
  Synthetic
ucaacccccuguuuucugagaac

SEQ ID NO: 254065 - RNA, 24 nt, Artificial Sequence
  Synthetic
gucaacccccuguuuucugagaac

SEQ ID NO: 254066 - RNA, 18 nt, Artificial Sequence
  Synthetic
cugcaaauaagugagaac

SEQ ID NO: 254067 - RNA, 19 nt, Artificial Sequence
  Synthetic
ucugcaaauaagugagaac

SEQ ID NO: 254068 - RNA, 20 nt, Artificial Sequence
  Synthetic
uucugcaaauaagugagaac

SEQ ID NO: 254069 - RNA, 21 nt, Artificial Sequence
  Synthetic
auucugcaaauaagugagaac

SEQ ID NO: 254070 - RNA, 22 nt, Artificial Sequence
  Synthetic
gauucugcaaauaagugagaac

SEQ ID NO: 254071 - RNA, 23 nt, Artificial Sequence
  Synthetic
agauucugcaaauaagugagaac

SEQ ID NO: 254072 - RNA, 24 nt, Artificial Sequence
  Synthetic
uagauucugcaaauaagugagaac

SEQ ID NO: 254073 - RNA, 18 nt, Artificial Sequence
  Synthetic
aaacaccacugugagaac

SEQ ID NO: 254074 - RNA, 19 nt, Artificial Sequence
  Synthetic
caaacaccacugugagaac

SEQ ID NO: 254075 - RNA, 20 nt, Artificial Sequence
  Synthetic
ccaaacaccacugugagaac

SEQ ID NO: 254076 - RNA, 21 nt, Artificial Sequence
  Synthetic
gccaaacaccacugugagaac

SEQ ID NO: 254077 - RNA, 22 nt, Artificial Sequence
  Synthetic
agccaaacaccacugugagaac

SEQ ID NO: 254078 - RNA, 23 nt, Artificial Sequence
  Synthetic
aagccaaacaccacugugagaac

SEQ ID NO: 254079 - RNA, 24 nt, Artificial Sequence
  Synthetic
caagccaaacaccacugugagaac

SEQ ID NO: 254080 - RNA, 18 nt, Artificial Sequence
  Synthetic
aauguggccauugagaac

SEQ ID NO: 254081 - RNA, 19 nt, Artificial Sequence
  Synthetic
uaauguggccauugagaac

SEQ ID NO: 254082 - RNA, 20 nt, Artificial Sequence
  Synthetic
auaauguggccauugagaac

SEQ ID NO: 254083 - RNA, 21 nt, Artificial Sequence
  Synthetic
uauaauguggccauugagaac

SEQ ID NO: 254084 - RNA, 22 nt, Artificial Sequence
  Synthetic
guauaauguggccauugagaac

SEQ ID NO: 254085 - RNA, 23 nt, Artificial Sequence
  Synthetic
aguauaauguggccauugagaac

SEQ ID NO: 254086 - RNA, 24 nt, Artificial Sequence
  Synthetic
caguauaauguggccauugagaac

SEQ ID NO: 254087 - RNA, 18 nt, Artificial Sequence
  Synthetic
aaugggauaggauagaac

SEQ ID NO: 254088 - RNA, 19 nt, Artificial Sequence
  Synthetic
aaaugggauaggauagaac

SEQ ID NO: 254089 - RNA, 20 nt, Artificial Sequence
  Synthetic
gaaaugggauaggauagaac

SEQ ID NO: 254090 - RNA, 21 nt, Artificial Sequence
  Synthetic
ggaaaugggauaggauagaac

SEQ ID NO: 254091 - RNA, 22 nt, Artificial Sequence
  Synthetic
aggaaaugggauaggauagaac

SEQ ID NO: 254092 - RNA, 23 nt, Artificial Sequence
  Synthetic
caggaaaugggauaggauagaac

SEQ ID NO: 254093 - RNA, 24 nt, Artificial Sequence
  Synthetic
gcaggaaaugggauaggauagaac

SEQ ID NO: 254094 - RNA, 18 nt, Artificial Sequence
  Synthetic
ccauugcucugauagaac

SEQ ID NO: 254095 - RNA, 19 nt, Artificial Sequence
  Synthetic
uccauugcucugauagaac

SEQ ID NO: 254096 - RNA, 20 nt, Artificial Sequence
  Synthetic
cuccauugcucugauagaac

SEQ ID NO: 254097 - RNA, 21 nt, Artificial Sequence
  Synthetic
acuccauugcucugauagaac

SEQ ID NO: 254098 - RNA, 22 nt, Artificial Sequence
  Synthetic
cacuccauugcucugauagaac

SEQ ID NO: 254099 - RNA, 23 nt, Artificial Sequence
  Synthetic
acacuccauugcucugauagaac

SEQ ID NO: 254100 - RNA, 24 nt, Artificial Sequence
  Synthetic
gacacuccauugcucugauagaac

SEQ ID NO: 254101 - RNA, 18 nt, Artificial Sequence
  Synthetic
aggagauggggcuagaac

SEQ ID NO: 254102 - RNA, 19 nt, Artificial Sequence
  Synthetic
gaggagauggggcuagaac

SEQ ID NO: 254103 - RNA, 20 nt, Artificial Sequence
  Synthetic
agaggagauggggcuagaac

SEQ ID NO: 254104 - RNA, 21 nt, Artificial Sequence
  Synthetic
aagaggagauggggcuagaac

SEQ ID NO: 254105 - RNA, 22 nt, Artificial Sequence
  Synthetic
aaagaggagauggggcuagaac

SEQ ID NO: 254106 - RNA, 23 nt, Artificial Sequence
  Synthetic
uaaagaggagauggggcuagaac

SEQ ID NO: 254107 - RNA, 24 nt, Artificial Sequence
  Synthetic
cuaaagaggagauggggcuagaac

SEQ ID NO: 254108 - RNA, 18 nt, Artificial Sequence
  Synthetic
uccucaaggaucuagaac

SEQ ID NO: 254109 - RNA, 19 nt, Artificial Sequence
  Synthetic
uuccucaaggaucuagaac

SEQ ID NO: 254110 - RNA, 20 nt, Artificial Sequence
  Synthetic
auuccucaaggaucuagaac

SEQ ID NO: 254111 - RNA, 21 nt, Artificial Sequence
  Synthetic
aauuccucaaggaucuagaac

SEQ ID NO: 254112 - RNA, 22 nt, Artificial Sequence
  Synthetic
caauuccucaaggaucuagaac

SEQ ID NO: 254113 - RNA, 23 nt, Artificial Sequence
  Synthetic
gcaauuccucaaggaucuagaac

SEQ ID NO: 254114 - RNA, 24 nt, Artificial Sequence
  Synthetic
ggcaauuccucaaggaucuagaac

SEQ ID NO: 254115 - RNA, 18 nt, Artificial Sequence
  Synthetic
uccucagggaucuagaac

SEQ ID NO: 254116 - RNA, 19 nt, Artificial Sequence
  Synthetic
uuccucagggaucuagaac

SEQ ID NO: 254117 - RNA, 20 nt, Artificial Sequence
  Synthetic
auuccucagggaucuagaac

SEQ ID NO: 254118 - RNA, 21 nt, Artificial Sequence
  Synthetic
gauuccucagggaucuagaac

SEQ ID NO: 254119 - RNA, 22 nt, Artificial Sequence
  Synthetic
cgauuccucagggaucuagaac

SEQ ID NO: 254120 - RNA, 23 nt, Artificial Sequence
  Synthetic
gcgauuccucagggaucuagaac

SEQ ID NO: 254121 - RNA, 24 nt, Artificial Sequence
  Synthetic
ggcgauuccucagggaucuagaac

SEQ ID NO: 254122 - RNA, 18 nt, Artificial Sequence
  Synthetic
cagucaaacucguagaac

SEQ ID NO: 254123 - RNA, 19 nt, Artificial Sequence
  Synthetic
acagucaaacucguagaac

SEQ ID NO: 254124 - RNA, 20 nt, Artificial Sequence
  Synthetic
gacagucaaacucguagaac

SEQ ID NO: 254125 - RNA, 21 nt, Artificial Sequence
  Synthetic
agacagucaaacucguagaac

SEQ ID NO: 254126 - RNA, 22 nt, Artificial Sequence
  Synthetic
gagacagucaaacucguagaac

SEQ ID NO: 254127 - RNA, 23 nt, Artificial Sequence
  Synthetic
ugagacagucaaacucguagaac

SEQ ID NO: 254128 - RNA, 24 nt, Artificial Sequence
  Synthetic
cugagacagucaaacucguagaac

SEQ ID NO: 254129 - RNA, 18 nt, Artificial Sequence
  Synthetic
uguuauucaagguagaac

SEQ ID NO: 254130 - RNA, 19 nt, Artificial Sequence
  Synthetic
auguuauucaagguagaac

SEQ ID NO: 254131 - RNA, 20 nt, Artificial Sequence
  Synthetic
gauguuauucaagguagaac

SEQ ID NO: 254132 - RNA, 21 nt, Artificial Sequence
  Synthetic
ugauguuauucaagguagaac

SEQ ID NO: 254133 - RNA, 22 nt, Artificial Sequence
  Synthetic
augauguuauucaagguagaac

SEQ ID NO: 254134 - RNA, 23 nt, Artificial Sequence
  Synthetic
aaugauguuauucaagguagaac

SEQ ID NO: 254135 - RNA, 24 nt, Artificial Sequence
  Synthetic
aaaugauguuauucaagguagaac

SEQ ID NO: 254136 - RNA, 18 nt, Artificial Sequence
  Synthetic
gaagugaagugguagaac

SEQ ID NO: 254137 - RNA, 19 nt, Artificial Sequence
  Synthetic
ugaagugaagugguagaac

SEQ ID NO: 254138 - RNA, 20 nt, Artificial Sequence
  Synthetic
augaagugaagugguagaac

SEQ ID NO: 254139 - RNA, 21 nt, Artificial Sequence
  Synthetic
caugaagugaagugguagaac

SEQ ID NO: 254140 - RNA, 22 nt, Artificial Sequence
  Synthetic
ccaugaagugaagugguagaac

SEQ ID NO: 254141 - RNA, 23 nt, Artificial Sequence
  Synthetic
accaugaagugaagugguagaac

SEQ ID NO: 254142 - RNA, 24 nt, Artificial Sequence
  Synthetic
gaccaugaagugaagugguagaac

SEQ ID NO: 254143 - RNA, 18 nt, Artificial Sequence
  Synthetic
cccauacgaauguagaac

SEQ ID NO: 254144 - RNA, 19 nt, Artificial Sequence
  Synthetic
ucccauacgaauguagaac

SEQ ID NO: 254145 - RNA, 20 nt, Artificial Sequence
  Synthetic
aucccauacgaauguagaac

SEQ ID NO: 254146 - RNA, 21 nt, Artificial Sequence
  Synthetic
aaucccauacgaauguagaac

SEQ ID NO: 254147 - RNA, 22 nt, Artificial Sequence
  Synthetic
aaaucccauacgaauguagaac

SEQ ID NO: 254148 - RNA, 23 nt, Artificial Sequence
  Synthetic
aaaaucccauacgaauguagaac

SEQ ID NO: 254149 - RNA, 24 nt, Artificial Sequence
  Synthetic
uaaaaucccauacgaauguagaac

SEQ ID NO: 254150 - RNA, 18 nt, Artificial Sequence
  Synthetic
ugucaggagaauuagaac

SEQ ID NO: 254151 - RNA, 19 nt, Artificial Sequence
  Synthetic
augucaggagaauuagaac

SEQ ID NO: 254152 - RNA, 20 nt, Artificial Sequence
  Synthetic
caugucaggagaauuagaac

SEQ ID NO: 254153 - RNA, 21 nt, Artificial Sequence
  Synthetic
ucaugucaggagaauuagaac

SEQ ID NO: 254154 - RNA, 22 nt, Artificial Sequence
  Synthetic
uucaugucaggagaauuagaac

SEQ ID NO: 254155 - RNA, 23 nt, Artificial Sequence
  Synthetic
guucaugucaggagaauuagaac

SEQ ID NO: 254156 - RNA, 24 nt, Artificial Sequence
  Synthetic
gguucaugucaggagaauuagaac

SEQ ID NO: 254157 - RNA, 18 nt, Artificial Sequence
  Synthetic
uaaauacauaauuagaac

SEQ ID NO: 254158 - RNA, 19 nt, Artificial Sequence
  Synthetic
guaaauacauaauuagaac

SEQ ID NO: 254159 - RNA, 20 nt, Artificial Sequence
  Synthetic
uguaaauacauaauuagaac

SEQ ID NO: 254160 - RNA, 21 nt, Artificial Sequence
  Synthetic
uuguaaauacauaauuagaac

SEQ ID NO: 254161 - RNA, 22 nt, Artificial Sequence
  Synthetic
cuuguaaauacauaauuagaac

SEQ ID NO: 254162 - RNA, 23 nt, Artificial Sequence
  Synthetic
ccuuguaaauacauaauuagaac

SEQ ID NO: 254163 - RNA, 24 nt, Artificial Sequence
  Synthetic
gccuuguaaauacauaauuagaac

SEQ ID NO: 254164 - RNA, 18 nt, Artificial Sequence
  Synthetic
uuugaucuccauuagaac

SEQ ID NO: 254165 - RNA, 19 nt, Artificial Sequence
  Synthetic
cuuugaucuccauuagaac

SEQ ID NO: 254166 - RNA, 20 nt, Artificial Sequence
  Synthetic
ucuuugaucuccauuagaac

SEQ ID NO: 254167 - RNA, 21 nt, Artificial Sequence
  Synthetic
uucuuugaucuccauuagaac

SEQ ID NO: 254168 - RNA, 22 nt, Artificial Sequence
  Synthetic
uuucuuugaucuccauuagaac

SEQ ID NO: 254169 - RNA, 23 nt, Artificial Sequence
  Synthetic
cuuucuuugaucuccauuagaac

SEQ ID NO: 254170 - RNA, 24 nt, Artificial Sequence
  Synthetic
acuuucuuugaucuccauuagaac

SEQ ID NO: 254171 - RNA, 18 nt, Artificial Sequence
  Synthetic
auuccaaguacuuagaac

SEQ ID NO: 254172 - RNA, 19 nt, Artificial Sequence
  Synthetic
aauuccaaguacuuagaac

SEQ ID NO: 254173 - RNA, 20 nt, Artificial Sequence
  Synthetic
gaauuccaaguacuuagaac

SEQ ID NO: 254174 - RNA, 21 nt, Artificial Sequence
  Synthetic
ugaauuccaaguacuuagaac

SEQ ID NO: 254175 - RNA, 22 nt, Artificial Sequence
  Synthetic
cugaauuccaaguacuuagaac

SEQ ID NO: 254176 - RNA, 23 nt, Artificial Sequence
  Synthetic
ccugaauuccaaguacuuagaac

SEQ ID NO: 254177 - RNA, 24 nt, Artificial Sequence
  Synthetic
accugaauuccaaguacuuagaac

SEQ ID NO: 254178 - RNA, 18 nt, Artificial Sequence
  Synthetic
cugaaagcuuguuagaac

SEQ ID NO: 254179 - RNA, 19 nt, Artificial Sequence
  Synthetic
ccugaaagcuuguuagaac

SEQ ID NO: 254180 - RNA, 20 nt, Artificial Sequence
  Synthetic
accugaaagcuuguuagaac

SEQ ID NO: 254181 - RNA, 21 nt, Artificial Sequence
  Synthetic
caccugaaagcuuguuagaac

SEQ ID NO: 254182 - RNA, 22 nt, Artificial Sequence
  Synthetic
ucaccugaaagcuuguuagaac

SEQ ID NO: 254183 - RNA, 23 nt, Artificial Sequence
  Synthetic
aucaccugaaagcuuguuagaac

SEQ ID NO: 254184 - RNA, 24 nt, Artificial Sequence
  Synthetic
caucaccugaaagcuuguuagaac

SEQ ID NO: 254185 - RNA, 18 nt, Artificial Sequence
  Synthetic
uuugaagacauuuagaac

SEQ ID NO: 254186 - RNA, 19 nt, Artificial Sequence
  Synthetic
cuuugaagacauuuagaac

SEQ ID NO: 254187 - RNA, 20 nt, Artificial Sequence
  Synthetic
ucuuugaagacauuuagaac

SEQ ID NO: 254188 - RNA, 21 nt, Artificial Sequence
  Synthetic
gucuuugaagacauuuagaac

SEQ ID NO: 254189 - RNA, 22 nt, Artificial Sequence
  Synthetic
agucuuugaagacauuuagaac

SEQ ID NO: 254190 - RNA, 23 nt, Artificial Sequence
  Synthetic
aagucuuugaagacauuuagaac

SEQ ID NO: 254191 - RNA, 24 nt, Artificial Sequence
  Synthetic
gaagucuuugaagacauuuagaac

SEQ ID NO: 254192 - RNA, 18 nt, Artificial Sequence
  Synthetic
cugccguaucuuuagaac

SEQ ID NO: 254193 - RNA, 19 nt, Artificial Sequence
  Synthetic
acugccguaucuuuagaac

SEQ ID NO: 254194 - RNA, 20 nt, Artificial Sequence
  Synthetic
cacugccguaucuuuagaac

SEQ ID NO: 254195 - RNA, 21 nt, Artificial Sequence
  Synthetic
ucacugccguaucuuuagaac

SEQ ID NO: 254196 - RNA, 22 nt, Artificial Sequence
  Synthetic
cucacugccguaucuuuagaac

SEQ ID NO: 254197 - RNA, 23 nt, Artificial Sequence
  Synthetic
gcucacugccguaucuuuagaac

SEQ ID NO: 254198 - RNA, 24 nt, Artificial Sequence
  Synthetic
agcucacugccguaucuuuagaac

SEQ ID NO: 254199 - RNA, 18 nt, Artificial Sequence
  Synthetic
uuuacugaguuuuagaac

SEQ ID NO: 254200 - RNA, 19 nt, Artificial Sequence
  Synthetic
auuuacugaguuuuagaac

SEQ ID NO: 254201 - RNA, 20 nt, Artificial Sequence
  Synthetic
aauuuacugaguuuuagaac

SEQ ID NO: 254202 - RNA, 21 nt, Artificial Sequence
  Synthetic
aaauuuacugaguuuuagaac

SEQ ID NO: 254203 - RNA, 22 nt, Artificial Sequence
  Synthetic
aaaauuuacugaguuuuagaac

SEQ ID NO: 254204 - RNA, 23 nt, Artificial Sequence
  Synthetic
uaaaauuuacugaguuuuagaac

SEQ ID NO: 254205 - RNA, 24 nt, Artificial Sequence
  Synthetic
auaaaauuuacugaguuuuagaac

SEQ ID NO: 254206 - RNA, 18 nt, Artificial Sequence
  Synthetic
ucuuaauugauuccgaac

SEQ ID NO: 254207 - RNA, 19 nt, Artificial Sequence
  Synthetic
cucuuaauugauuccgaac

SEQ ID NO: 254208 - RNA, 20 nt, Artificial Sequence
  Synthetic
ucucuuaauugauuccgaac

SEQ ID NO: 254209 - RNA, 21 nt, Artificial Sequence
  Synthetic
gucucuuaauugauuccgaac

SEQ ID NO: 254210 - RNA, 22 nt, Artificial Sequence
  Synthetic
agucucuuaauugauuccgaac

SEQ ID NO: 254211 - RNA, 23 nt, Artificial Sequence
  Synthetic
uagucucuuaauugauuccgaac

SEQ ID NO: 254212 - RNA, 24 nt, Artificial Sequence
  Synthetic
cuagucucuuaauugauuccgaac

SEQ ID NO: 254213 - RNA, 18 nt, Artificial Sequence
  Synthetic
cagaagaauugcucgaac

SEQ ID NO: 254214 - RNA, 19 nt, Artificial Sequence
  Synthetic
gcagaagaauugcucgaac

SEQ ID NO: 254215 - RNA, 20 nt, Artificial Sequence
  Synthetic
agcagaagaauugcucgaac

SEQ ID NO: 254216 - RNA, 21 nt, Artificial Sequence
  Synthetic
aagcagaagaauugcucgaac

SEQ ID NO: 254217 - RNA, 22 nt, Artificial Sequence
  Synthetic
gaagcagaagaauugcucgaac

SEQ ID NO: 254218 - RNA, 23 nt, Artificial Sequence
  Synthetic
ugaagcagaagaauugcucgaac

SEQ ID NO: 254219 - RNA, 24 nt, Artificial Sequence
  Synthetic
cugaagcagaagaauugcucgaac

SEQ ID NO: 254220 - RNA, 18 nt, Artificial Sequence
  Synthetic
ugggagaguugcucgaac

SEQ ID NO: 254221 - RNA, 19 nt, Artificial Sequence
  Synthetic
gugggagaguugcucgaac

SEQ ID NO: 254222 - RNA, 20 nt, Artificial Sequence
  Synthetic
ggugggagaguugcucgaac

SEQ ID NO: 254223 - RNA, 21 nt, Artificial Sequence
  Synthetic
aggugggagaguugcucgaac

SEQ ID NO: 254224 - RNA, 22 nt, Artificial Sequence
  Synthetic
gaggugggagaguugcucgaac

SEQ ID NO: 254225 - RNA, 23 nt, Artificial Sequence
  Synthetic
ugaggugggagaguugcucgaac

SEQ ID NO: 254226 - RNA, 24 nt, Artificial Sequence
  Synthetic
cugaggugggagaguugcucgaac

SEQ ID NO: 254227 - RNA, 18 nt, Artificial Sequence
  Synthetic
gggguaaaggcaaggaac

SEQ ID NO: 254228 - RNA, 19 nt, Artificial Sequence
  Synthetic
ggggguaaaggcaaggaac

SEQ ID NO: 254229 - RNA, 20 nt, Artificial Sequence
  Synthetic
aggggguaaaggcaaggaac

SEQ ID NO: 254230 - RNA, 21 nt, Artificial Sequence
  Synthetic
aaggggguaaaggcaaggaac

SEQ ID NO: 254231 - RNA, 22 nt, Artificial Sequence
  Synthetic
caaggggguaaaggcaaggaac

SEQ ID NO: 254232 - RNA, 23 nt, Artificial Sequence
  Synthetic
acaaggggguaaaggcaaggaac

SEQ ID NO: 254233 - RNA, 24 nt, Artificial Sequence
  Synthetic
cacaaggggguaaaggcaaggaac

SEQ ID NO: 254234 - RNA, 18 nt, Artificial Sequence
  Synthetic
cucauagagugaaggaac

SEQ ID NO: 254235 - RNA, 19 nt, Artificial Sequence
  Synthetic
ccucauagagugaaggaac

SEQ ID NO: 254236 - RNA, 20 nt, Artificial Sequence
  Synthetic
cccucauagagugaaggaac

SEQ ID NO: 254237 - RNA, 21 nt, Artificial Sequence
  Synthetic
ucccucauagagugaaggaac

SEQ ID NO: 254238 - RNA, 22 nt, Artificial Sequence
  Synthetic
cucccucauagagugaaggaac

SEQ ID NO: 254239 - RNA, 23 nt, Artificial Sequence
  Synthetic
ccucccucauagagugaaggaac

SEQ ID NO: 254240 - RNA, 24 nt, Artificial Sequence
  Synthetic
accucccucauagagugaaggaac

SEQ ID NO: 254241 - RNA, 18 nt, Artificial Sequence
  Synthetic
guucgggagguaaggaac

SEQ ID NO: 254242 - RNA, 19 nt, Artificial Sequence
  Synthetic
uguucgggagguaaggaac

SEQ ID NO: 254243 - RNA, 20 nt, Artificial Sequence
  Synthetic
guguucgggagguaaggaac

SEQ ID NO: 254244 - RNA, 21 nt, Artificial Sequence
  Synthetic
gguguucgggagguaaggaac

SEQ ID NO: 254245 - RNA, 22 nt, Artificial Sequence
  Synthetic
ugguguucgggagguaaggaac

SEQ ID NO: 254246 - RNA, 23 nt, Artificial Sequence
  Synthetic
gugguguucgggagguaaggaac

SEQ ID NO: 254247 - RNA, 24 nt, Artificial Sequence
  Synthetic
agugguguucgggagguaaggaac

SEQ ID NO: 254248 - RNA, 18 nt, Artificial Sequence
  Synthetic
uuccuugaacccaggaac

SEQ ID NO: 254249 - RNA, 19 nt, Artificial Sequence
  Synthetic
auuccuugaacccaggaac

SEQ ID NO: 254250 - RNA, 20 nt, Artificial Sequence
  Synthetic
gauuccuugaacccaggaac

SEQ ID NO: 254251 - RNA, 21 nt, Artificial Sequence
  Synthetic
ggauuccuugaacccaggaac

SEQ ID NO: 254252 - RNA, 22 nt, Artificial Sequence
  Synthetic
aggauuccuugaacccaggaac

SEQ ID NO: 254253 - RNA, 23 nt, Artificial Sequence
  Synthetic
gaggauuccuugaacccaggaac

SEQ ID NO: 254254 - RNA, 24 nt, Artificial Sequence
  Synthetic
ggaggauuccuugaacccaggaac

SEQ ID NO: 254255 - RNA, 18 nt, Artificial Sequence
  Synthetic
gaaaugcuauccaggaac

SEQ ID NO: 254256 - RNA, 19 nt, Artificial Sequence
  Synthetic
agaaaugcuauccaggaac

SEQ ID NO: 254257 - RNA, 20 nt, Artificial Sequence
  Synthetic
uagaaaugcuauccaggaac

SEQ ID NO: 254258 - RNA, 21 nt, Artificial Sequence
  Synthetic
cuagaaaugcuauccaggaac

SEQ ID NO: 254259 - RNA, 22 nt, Artificial Sequence
  Synthetic
ucuagaaaugcuauccaggaac

SEQ ID NO: 254260 - RNA, 23 nt, Artificial Sequence
  Synthetic
gucuagaaaugcuauccaggaac

SEQ ID NO: 254261 - RNA, 24 nt, Artificial Sequence
  Synthetic
ugucuagaaaugcuauccaggaac

SEQ ID NO: 254262 - RNA, 18 nt, Artificial Sequence
  Synthetic
gagaaaaggaagaggaac

SEQ ID NO: 254263 - RNA, 19 nt, Artificial Sequence
  Synthetic
ggagaaaaggaagaggaac

SEQ ID NO: 254264 - RNA, 20 nt, Artificial Sequence
  Synthetic
uggagaaaaggaagaggaac

SEQ ID NO: 254265 - RNA, 21 nt, Artificial Sequence
  Synthetic
auggagaaaaggaagaggaac

SEQ ID NO: 254266 - RNA, 22 nt, Artificial Sequence
  Synthetic
cauggagaaaaggaagaggaac

SEQ ID NO: 254267 - RNA, 23 nt, Artificial Sequence
  Synthetic
acauggagaaaaggaagaggaac

SEQ ID NO: 254268 - RNA, 24 nt, Artificial Sequence
  Synthetic
cacauggagaaaaggaagaggaac

SEQ ID NO: 254269 - RNA, 18 nt, Artificial Sequence
  Synthetic
agaacuagggagaggaac

SEQ ID NO: 254270 - RNA, 19 nt, Artificial Sequence
  Synthetic
cagaacuagggagaggaac

SEQ ID NO: 254271 - RNA, 20 nt, Artificial Sequence
  Synthetic
acagaacuagggagaggaac

SEQ ID NO: 254272 - RNA, 21 nt, Artificial Sequence
  Synthetic
uacagaacuagggagaggaac

SEQ ID NO: 254273 - RNA, 22 nt, Artificial Sequence
  Synthetic
uuacagaacuagggagaggaac

SEQ ID NO: 254274 - RNA, 23 nt, Artificial Sequence
  Synthetic
uuuacagaacuagggagaggaac

SEQ ID NO: 254275 - RNA, 24 nt, Artificial Sequence
  Synthetic
guuuacagaacuagggagaggaac

SEQ ID NO: 254276 - RNA, 18 nt, Artificial Sequence
  Synthetic
caguguuauaugaggaac

SEQ ID NO: 254277 - RNA, 19 nt, Artificial Sequence
  Synthetic
acaguguuauaugaggaac

SEQ ID NO: 254278 - RNA, 20 nt, Artificial Sequence
  Synthetic
uacaguguuauaugaggaac

SEQ ID NO: 254279 - RNA, 21 nt, Artificial Sequence
  Synthetic
auacaguguuauaugaggaac

SEQ ID NO: 254280 - RNA, 22 nt, Artificial Sequence
  Synthetic
gauacaguguuauaugaggaac

SEQ ID NO: 254281 - RNA, 23 nt, Artificial Sequence
  Synthetic
ugauacaguguuauaugaggaac

SEQ ID NO: 254282 - RNA, 24 nt, Artificial Sequence
  Synthetic
gugauacaguguuauaugaggaac

SEQ ID NO: 254283 - RNA, 18 nt, Artificial Sequence
  Synthetic
gucgugugacugaggaac

SEQ ID NO: 254284 - RNA, 19 nt, Artificial Sequence
  Synthetic
ggucgugugacugaggaac

SEQ ID NO: 254285 - RNA, 20 nt, Artificial Sequence
  Synthetic
uggucgugugacugaggaac

SEQ ID NO: 254286 - RNA, 21 nt, Artificial Sequence
  Synthetic
uuggucgugugacugaggaac

SEQ ID NO: 254287 - RNA, 22 nt, Artificial Sequence
  Synthetic
guuggucgugugacugaggaac

SEQ ID NO: 254288 - RNA, 23 nt, Artificial Sequence
  Synthetic
aguuggucgugugacugaggaac

SEQ ID NO: 254289 - RNA, 24 nt, Artificial Sequence
  Synthetic
gaguuggucgugugacugaggaac

SEQ ID NO: 254290 - RNA, 18 nt, Artificial Sequence
  Synthetic
uacuuuguaaauaggaac

SEQ ID NO: 254291 - RNA, 19 nt, Artificial Sequence
  Synthetic
auacuuuguaaauaggaac

SEQ ID NO: 254292 - RNA, 20 nt, Artificial Sequence
  Synthetic
cauacuuuguaaauaggaac

SEQ ID NO: 254293 - RNA, 21 nt, Artificial Sequence
  Synthetic
acauacuuuguaaauaggaac

SEQ ID NO: 254294 - RNA, 22 nt, Artificial Sequence
  Synthetic
aacauacuuuguaaauaggaac

SEQ ID NO: 254295 - RNA, 23 nt, Artificial Sequence
  Synthetic
gaacauacuuuguaaauaggaac

SEQ ID NO: 254296 - RNA, 24 nt, Artificial Sequence
  Synthetic
agaacauacuuuguaaauaggaac

SEQ ID NO: 254297 - RNA, 18 nt, Artificial Sequence
  Synthetic
aaaugaaugaauaggaac

SEQ ID NO: 254298 - RNA, 19 nt, Artificial Sequence
  Synthetic
caaaugaaugaauaggaac

SEQ ID NO: 254299 - RNA, 20 nt, Artificial Sequence
  Synthetic
acaaaugaaugaauaggaac

SEQ ID NO: 254300 - RNA, 21 nt, Artificial Sequence
  Synthetic
gacaaaugaaugaauaggaac

SEQ ID NO: 254301 - RNA, 22 nt, Artificial Sequence
  Synthetic
agacaaaugaaugaauaggaac

SEQ ID NO: 254302 - RNA, 23 nt, Artificial Sequence
  Synthetic
aagacaaaugaaugaauaggaac

SEQ ID NO: 254303 - RNA, 24 nt, Artificial Sequence
  Synthetic
aaagacaaaugaaugaauaggaac

SEQ ID NO: 254304 - RNA, 18 nt, Artificial Sequence
  Synthetic
uaaauaggaacuaggaac

SEQ ID NO: 254305 - RNA, 19 nt, Artificial Sequence
  Synthetic
guaaauaggaacuaggaac

SEQ ID NO: 254306 - RNA, 20 nt, Artificial Sequence
  Synthetic
uguaaauaggaacuaggaac

SEQ ID NO: 254307 - RNA, 21 nt, Artificial Sequence
  Synthetic
uuguaaauaggaacuaggaac

SEQ ID NO: 254308 - RNA, 22 nt, Artificial Sequence
  Synthetic
uuuguaaauaggaacuaggaac

SEQ ID NO: 254309 - RNA, 23 nt, Artificial Sequence
  Synthetic
cuuuguaaauaggaacuaggaac

SEQ ID NO: 254310 - RNA, 24 nt, Artificial Sequence
  Synthetic
acuuuguaaauaggaacuaggaac

SEQ ID NO: 254311 - RNA, 18 nt, Artificial Sequence
  Synthetic
agaagaaugacuaggaac

SEQ ID NO: 254312 - RNA, 19 nt, Artificial Sequence
  Synthetic
gagaagaaugacuaggaac

SEQ ID NO: 254313 - RNA, 20 nt, Artificial Sequence
  Synthetic
ggagaagaaugacuaggaac

SEQ ID NO: 254314 - RNA, 21 nt, Artificial Sequence
  Synthetic
aggagaagaaugacuaggaac

SEQ ID NO: 254315 - RNA, 22 nt, Artificial Sequence
  Synthetic
aaggagaagaaugacuaggaac

SEQ ID NO: 254316 - RNA, 23 nt, Artificial Sequence
  Synthetic
aaaggagaagaaugacuaggaac

SEQ ID NO: 254317 - RNA, 24 nt, Artificial Sequence
  Synthetic
caaaggagaagaaugacuaggaac

SEQ ID NO: 254318 - RNA, 18 nt, Artificial Sequence
  Synthetic
cagugaccuguuaggaac

SEQ ID NO: 254319 - RNA, 19 nt, Artificial Sequence
  Synthetic
ucagugaccuguuaggaac

SEQ ID NO: 254320 - RNA, 20 nt, Artificial Sequence
  Synthetic
gucagugaccuguuaggaac

SEQ ID NO: 254321 - RNA, 21 nt, Artificial Sequence
  Synthetic
ggucagugaccuguuaggaac

SEQ ID NO: 254322 - RNA, 22 nt, Artificial Sequence
  Synthetic
aggucagugaccuguuaggaac

SEQ ID NO: 254323 - RNA, 23 nt, Artificial Sequence
  Synthetic
caggucagugaccuguuaggaac

SEQ ID NO: 254324 - RNA, 24 nt, Artificial Sequence
  Synthetic
acaggucagugaccuguuaggaac

SEQ ID NO: 254325 - RNA, 18 nt, Artificial Sequence
  Synthetic
acgaaaccucaagggaac

SEQ ID NO: 254326 - RNA, 19 nt, Artificial Sequence
  Synthetic
cacgaaaccucaagggaac

SEQ ID NO: 254327 - RNA, 20 nt, Artificial Sequence
  Synthetic
ucacgaaaccucaagggaac

SEQ ID NO: 254328 - RNA, 21 nt, Artificial Sequence
  Synthetic
cucacgaaaccucaagggaac

SEQ ID NO: 254329 - RNA, 22 nt, Artificial Sequence
  Synthetic
acucacgaaaccucaagggaac

SEQ ID NO: 254330 - RNA, 23 nt, Artificial Sequence
  Synthetic
cacucacgaaaccucaagggaac

SEQ ID NO: 254331 - RNA, 24 nt, Artificial Sequence
  Synthetic
gcacucacgaaaccucaagggaac

SEQ ID NO: 254332 - RNA, 18 nt, Artificial Sequence
  Synthetic
gaucaaaccugagggaac

SEQ ID NO: 254333 - RNA, 19 nt, Artificial Sequence
  Synthetic
ggaucaaaccugagggaac

SEQ ID NO: 254334 - RNA, 20 nt, Artificial Sequence
  Synthetic
uggaucaaaccugagggaac

SEQ ID NO: 254335 - RNA, 21 nt, Artificial Sequence
  Synthetic
auggaucaaaccugagggaac

SEQ ID NO: 254336 - RNA, 22 nt, Artificial Sequence
  Synthetic
aauggaucaaaccugagggaac

SEQ ID NO: 254337 - RNA, 23 nt, Artificial Sequence
  Synthetic
caauggaucaaaccugagggaac

SEQ ID NO: 254338 - RNA, 24 nt, Artificial Sequence
  Synthetic
ucaauggaucaaaccugagggaac

SEQ ID NO: 254339 - RNA, 18 nt, Artificial Sequence
  Synthetic
acauucuugaaggggaac

SEQ ID NO: 254340 - RNA, 19 nt, Artificial Sequence
  Synthetic
uacauucuugaaggggaac

SEQ ID NO: 254341 - RNA, 20 nt, Artificial Sequence
  Synthetic
auacauucuugaaggggaac

SEQ ID NO: 254342 - RNA, 21 nt, Artificial Sequence
  Synthetic
aauacauucuugaaggggaac

SEQ ID NO: 254343 - RNA, 22 nt, Artificial Sequence
  Synthetic
gaauacauucuugaaggggaac

SEQ ID NO: 254344 - RNA, 23 nt, Artificial Sequence
  Synthetic
ugaauacauucuugaaggggaac

SEQ ID NO: 254345 - RNA, 24 nt, Artificial Sequence
  Synthetic
gugaauacauucuugaaggggaac

SEQ ID NO: 254346 - RNA, 18 nt, Artificial Sequence
  Synthetic
gcugggcgaagggggaac

SEQ ID NO: 254347 - RNA, 19 nt, Artificial Sequence
  Synthetic
ggcugggcgaagggggaac

SEQ ID NO: 254348 - RNA, 20 nt, Artificial Sequence
  Synthetic
gggcugggcgaagggggaac

SEQ ID NO: 254349 - RNA, 21 nt, Artificial Sequence
  Synthetic
ggggcugggcgaagggggaac

SEQ ID NO: 254350 - RNA, 22 nt, Artificial Sequence
  Synthetic
aggggcugggcgaagggggaac

SEQ ID NO: 254351 - RNA, 23 nt, Artificial Sequence
  Synthetic
caggggcugggcgaagggggaac

SEQ ID NO: 254352 - RNA, 24 nt, Artificial Sequence
  Synthetic
ccaggggcugggcgaagggggaac

SEQ ID NO: 254353 - RNA, 18 nt, Artificial Sequence
  Synthetic
gacagaugcccugggaac

SEQ ID NO: 254354 - RNA, 19 nt, Artificial Sequence
  Synthetic
agacagaugcccugggaac

SEQ ID NO: 254355 - RNA, 20 nt, Artificial Sequence
  Synthetic
uagacagaugcccugggaac

SEQ ID NO: 254356 - RNA, 21 nt, Artificial Sequence
  Synthetic
auagacagaugcccugggaac

SEQ ID NO: 254357 - RNA, 22 nt, Artificial Sequence
  Synthetic
cauagacagaugcccugggaac

SEQ ID NO: 254358 - RNA, 23 nt, Artificial Sequence
  Synthetic
ucauagacagaugcccugggaac

SEQ ID NO: 254359 - RNA, 24 nt, Artificial Sequence
  Synthetic
cucauagacagaugcccugggaac

SEQ ID NO: 254360 - RNA, 18 nt, Artificial Sequence
  Synthetic
gacuauucugcugggaac

SEQ ID NO: 254361 - RNA, 19 nt, Artificial Sequence
  Synthetic
ugacuauucugcugggaac

SEQ ID NO: 254362 - RNA, 20 nt, Artificial Sequence
  Synthetic
uugacuauucugcugggaac

SEQ ID NO: 254363 - RNA, 21 nt, Artificial Sequence
  Synthetic
uuugacuauucugcugggaac

SEQ ID NO: 254364 - RNA, 22 nt, Artificial Sequence
  Synthetic
cuuugacuauucugcugggaac

SEQ ID NO: 254365 - RNA, 23 nt, Artificial Sequence
  Synthetic
gcuuugacuauucugcugggaac

SEQ ID NO: 254366 - RNA, 24 nt, Artificial Sequence
  Synthetic
ggcuuugacuauucugcugggaac

SEQ ID NO: 254367 - RNA, 18 nt, Artificial Sequence
  Synthetic
uaggaacuucuugggaac

SEQ ID NO: 254368 - RNA, 19 nt, Artificial Sequence
  Synthetic
uuaggaacuucuugggaac

SEQ ID NO: 254369 - RNA, 20 nt, Artificial Sequence
  Synthetic
auuaggaacuucuugggaac

SEQ ID NO: 254370 - RNA, 21 nt, Artificial Sequence
  Synthetic
gauuaggaacuucuugggaac

SEQ ID NO: 254371 - RNA, 22 nt, Artificial Sequence
  Synthetic
agauuaggaacuucuugggaac

SEQ ID NO: 254372 - RNA, 23 nt, Artificial Sequence
  Synthetic
gagauuaggaacuucuugggaac

SEQ ID NO: 254373 - RNA, 24 nt, Artificial Sequence
  Synthetic
ggagauuaggaacuucuugggaac

SEQ ID NO: 254374 - RNA, 18 nt, Artificial Sequence
  Synthetic
gaauagauuaacuggaac

SEQ ID NO: 254375 - RNA, 19 nt, Artificial Sequence
  Synthetic
ugaauagauuaacuggaac

SEQ ID NO: 254376 - RNA, 20 nt, Artificial Sequence
  Synthetic
augaauagauuaacuggaac

SEQ ID NO: 254377 - RNA, 21 nt, Artificial Sequence
  Synthetic
aaugaauagauuaacuggaac

SEQ ID NO: 254378 - RNA, 22 nt, Artificial Sequence
  Synthetic
aaaugaauagauuaacuggaac

SEQ ID NO: 254379 - RNA, 23 nt, Artificial Sequence
  Synthetic
aaaaugaauagauuaacuggaac

SEQ ID NO: 254380 - RNA, 24 nt, Artificial Sequence
  Synthetic
gaaaaugaauagauuaacuggaac

SEQ ID NO: 254381 - RNA, 18 nt, Artificial Sequence
  Synthetic
aagaauuuacacuggaac

SEQ ID NO: 254382 - RNA, 19 nt, Artificial Sequence
  Synthetic
aaagaauuuacacuggaac

SEQ ID NO: 254383 - RNA, 20 nt, Artificial Sequence
  Synthetic
caaagaauuuacacuggaac

SEQ ID NO: 254384 - RNA, 21 nt, Artificial Sequence
  Synthetic
ucaaagaauuuacacuggaac

SEQ ID NO: 254385 - RNA, 22 nt, Artificial Sequence
  Synthetic
aucaaagaauuuacacuggaac

SEQ ID NO: 254386 - RNA, 23 nt, Artificial Sequence
  Synthetic
aaucaaagaauuuacacuggaac

SEQ ID NO: 254387 - RNA, 24 nt, Artificial Sequence
  Synthetic
caaucaaagaauuuacacuggaac

SEQ ID NO: 254388 - RNA, 18 nt, Artificial Sequence
  Synthetic
aagaauuuacaguggaac

SEQ ID NO: 254389 - RNA, 19 nt, Artificial Sequence
  Synthetic
aaagaauuuacaguggaac

SEQ ID NO: 254390 - RNA, 20 nt, Artificial Sequence
  Synthetic
caaagaauuuacaguggaac

SEQ ID NO: 254391 - RNA, 21 nt, Artificial Sequence
  Synthetic
ucaaagaauuuacaguggaac

SEQ ID NO: 254392 - RNA, 22 nt, Artificial Sequence
  Synthetic
cucaaagaauuuacaguggaac

SEQ ID NO: 254393 - RNA, 23 nt, Artificial Sequence
  Synthetic
ccucaaagaauuuacaguggaac

SEQ ID NO: 254394 - RNA, 24 nt, Artificial Sequence
  Synthetic
gccucaaagaauuuacaguggaac

SEQ ID NO: 254395 - RNA, 18 nt, Artificial Sequence
  Synthetic
ucaagcaagguguggaac

SEQ ID NO: 254396 - RNA, 19 nt, Artificial Sequence
  Synthetic
uucaagcaagguguggaac

SEQ ID NO: 254397 - RNA, 20 nt, Artificial Sequence
  Synthetic
cuucaagcaagguguggaac

SEQ ID NO: 254398 - RNA, 21 nt, Artificial Sequence
  Synthetic
gcuucaagcaagguguggaac

SEQ ID NO: 254399 - RNA, 22 nt, Artificial Sequence
  Synthetic
ugcuucaagcaagguguggaac

SEQ ID NO: 254400 - RNA, 23 nt, Artificial Sequence
  Synthetic
uugcuucaagcaagguguggaac

SEQ ID NO: 254401 - RNA, 24 nt, Artificial Sequence
  Synthetic
auugcuucaagcaagguguggaac

SEQ ID NO: 254402 - RNA, 18 nt, Artificial Sequence
  Synthetic
aaaguacuguauuggaac

SEQ ID NO: 254403 - RNA, 19 nt, Artificial Sequence
  Synthetic
caaaguacuguauuggaac

SEQ ID NO: 254404 - RNA, 20 nt, Artificial Sequence
  Synthetic
gcaaaguacuguauuggaac

SEQ ID NO: 254405 - RNA, 21 nt, Artificial Sequence
  Synthetic
agcaaaguacuguauuggaac

SEQ ID NO: 254406 - RNA, 22 nt, Artificial Sequence
  Synthetic
uagcaaaguacuguauuggaac

SEQ ID NO: 254407 - RNA, 23 nt, Artificial Sequence
  Synthetic
uuagcaaaguacuguauuggaac

SEQ ID NO: 254408 - RNA, 24 nt, Artificial Sequence
  Synthetic
uuuagcaaaguacuguauuggaac

SEQ ID NO: 254409 - RNA, 18 nt, Artificial Sequence
  Synthetic
aauggggauuauuggaac

SEQ ID NO: 254410 - RNA, 19 nt, Artificial Sequence
  Synthetic
gaauggggauuauuggaac

SEQ ID NO: 254411 - RNA, 20 nt, Artificial Sequence
  Synthetic
ugaauggggauuauuggaac

SEQ ID NO: 254412 - RNA, 21 nt, Artificial Sequence
  Synthetic
uugaauggggauuauuggaac

SEQ ID NO: 254413 - RNA, 22 nt, Artificial Sequence
  Synthetic
cuugaauggggauuauuggaac

SEQ ID NO: 254414 - RNA, 23 nt, Artificial Sequence
  Synthetic
acuugaauggggauuauuggaac

SEQ ID NO: 254415 - RNA, 24 nt, Artificial Sequence
  Synthetic
uacuugaauggggauuauuggaac

SEQ ID NO: 254416 - RNA, 18 nt, Artificial Sequence
  Synthetic
gaggauauuacaaugaac

SEQ ID NO: 254417 - RNA, 19 nt, Artificial Sequence
  Synthetic
ugaggauauuacaaugaac

SEQ ID NO: 254418 - RNA, 20 nt, Artificial Sequence
  Synthetic
cugaggauauuacaaugaac

SEQ ID NO: 254419 - RNA, 21 nt, Artificial Sequence
  Synthetic
gcugaggauauuacaaugaac

SEQ ID NO: 254420 - RNA, 22 nt, Artificial Sequence
  Synthetic
ggcugaggauauuacaaugaac

SEQ ID NO: 254421 - RNA, 23 nt, Artificial Sequence
  Synthetic
aggcugaggauauuacaaugaac

SEQ ID NO: 254422 - RNA, 24 nt, Artificial Sequence
  Synthetic
aaggcugaggauauuacaaugaac

SEQ ID NO: 254423 - RNA, 18 nt, Artificial Sequence
  Synthetic
gcuucaaaggccaugaac

SEQ ID NO: 254424 - RNA, 19 nt, Artificial Sequence
  Synthetic
ugcuucaaaggccaugaac

SEQ ID NO: 254425 - RNA, 20 nt, Artificial Sequence
  Synthetic
gugcuucaaaggccaugaac

SEQ ID NO: 254426 - RNA, 21 nt, Artificial Sequence
  Synthetic
ggugcuucaaaggccaugaac

SEQ ID NO: 254427 - RNA, 22 nt, Artificial Sequence
  Synthetic
gggugcuucaaaggccaugaac

SEQ ID NO: 254428 - RNA, 23 nt, Artificial Sequence
  Synthetic
agggugcuucaaaggccaugaac

SEQ ID NO: 254429 - RNA, 24 nt, Artificial Sequence
  Synthetic
aagggugcuucaaaggccaugaac

SEQ ID NO: 254430 - RNA, 18 nt, Artificial Sequence
  Synthetic
cuggggaaaggcaugaac

SEQ ID NO: 254431 - RNA, 19 nt, Artificial Sequence
  Synthetic
ccuggggaaaggcaugaac

SEQ ID NO: 254432 - RNA, 20 nt, Artificial Sequence
  Synthetic
gccuggggaaaggcaugaac

SEQ ID NO: 254433 - RNA, 21 nt, Artificial Sequence
  Synthetic
ugccuggggaaaggcaugaac

SEQ ID NO: 254434 - RNA, 22 nt, Artificial Sequence
  Synthetic
cugccuggggaaaggcaugaac

SEQ ID NO: 254435 - RNA, 23 nt, Artificial Sequence
  Synthetic
gcugccuggggaaaggcaugaac

SEQ ID NO: 254436 - RNA, 24 nt, Artificial Sequence
  Synthetic
ggcugccuggggaaaggcaugaac

SEQ ID NO: 254437 - RNA, 18 nt, Artificial Sequence
  Synthetic
augacagcguggaugaac

SEQ ID NO: 254438 - RNA, 19 nt, Artificial Sequence
  Synthetic
uaugacagcguggaugaac

SEQ ID NO: 254439 - RNA, 20 nt, Artificial Sequence
  Synthetic
uuaugacagcguggaugaac

SEQ ID NO: 254440 - RNA, 21 nt, Artificial Sequence
  Synthetic
uuuaugacagcguggaugaac

SEQ ID NO: 254441 - RNA, 22 nt, Artificial Sequence
  Synthetic
guuuaugacagcguggaugaac

SEQ ID NO: 254442 - RNA, 23 nt, Artificial Sequence
  Synthetic
uguuuaugacagcguggaugaac

SEQ ID NO: 254443 - RNA, 24 nt, Artificial Sequence
  Synthetic
uuguuuaugacagcguggaugaac

SEQ ID NO: 254444 - RNA, 18 nt, Artificial Sequence
  Synthetic
ugcaauaguuugaugaac

SEQ ID NO: 254445 - RNA, 19 nt, Artificial Sequence
  Synthetic
cugcaauaguuugaugaac

SEQ ID NO: 254446 - RNA, 20 nt, Artificial Sequence
  Synthetic
ucugcaauaguuugaugaac

SEQ ID NO: 254447 - RNA, 21 nt, Artificial Sequence
  Synthetic
aucugcaauaguuugaugaac

SEQ ID NO: 254448 - RNA, 22 nt, Artificial Sequence
  Synthetic
aaucugcaauaguuugaugaac

SEQ ID NO: 254449 - RNA, 23 nt, Artificial Sequence
  Synthetic
aaaucugcaauaguuugaugaac

SEQ ID NO: 254450 - RNA, 24 nt, Artificial Sequence
  Synthetic
aaaaucugcaauaguuugaugaac

SEQ ID NO: 254451 - RNA, 18 nt, Artificial Sequence
  Synthetic
uggacuauggauaugaac

SEQ ID NO: 254452 - RNA, 19 nt, Artificial Sequence
  Synthetic
uuggacuauggauaugaac

SEQ ID NO: 254453 - RNA, 20 nt, Artificial Sequence
  Synthetic
guuggacuauggauaugaac

SEQ ID NO: 254454 - RNA, 21 nt, Artificial Sequence
  Synthetic
gguuggacuauggauaugaac

SEQ ID NO: 254455 - RNA, 22 nt, Artificial Sequence
  Synthetic
ggguuggacuauggauaugaac

SEQ ID NO: 254456 - RNA, 23 nt, Artificial Sequence
  Synthetic
uggguuggacuauggauaugaac

SEQ ID NO: 254457 - RNA, 24 nt, Artificial Sequence
  Synthetic
auggguuggacuauggauaugaac

SEQ ID NO: 254458 - RNA, 18 nt, Artificial Sequence
  Synthetic
uugacaauauguaugaac

SEQ ID NO: 254459 - RNA, 19 nt, Artificial Sequence
  Synthetic
uuugacaauauguaugaac

SEQ ID NO: 254460 - RNA, 20 nt, Artificial Sequence
  Synthetic
auuugacaauauguaugaac

SEQ ID NO: 254461 - RNA, 21 nt, Artificial Sequence
  Synthetic
uauuugacaauauguaugaac

SEQ ID NO: 254462 - RNA, 22 nt, Artificial Sequence
  Synthetic
auauuugacaauauguaugaac

SEQ ID NO: 254463 - RNA, 23 nt, Artificial Sequence
  Synthetic
cauauuugacaauauguaugaac

SEQ ID NO: 254464 - RNA, 24 nt, Artificial Sequence
  Synthetic
ccauauuugacaauauguaugaac

SEQ ID NO: 254465 - RNA, 18 nt, Artificial Sequence
  Synthetic
caaucacacuuuaugaac

SEQ ID NO: 254466 - RNA, 19 nt, Artificial Sequence
  Synthetic
gcaaucacacuuuaugaac

SEQ ID NO: 254467 - RNA, 20 nt, Artificial Sequence
  Synthetic
ugcaaucacacuuuaugaac

SEQ ID NO: 254468 - RNA, 21 nt, Artificial Sequence
  Synthetic
cugcaaucacacuuuaugaac

SEQ ID NO: 254469 - RNA, 22 nt, Artificial Sequence
  Synthetic
ucugcaaucacacuuuaugaac

SEQ ID NO: 254470 - RNA, 23 nt, Artificial Sequence
  Synthetic
uucugcaaucacacuuuaugaac

SEQ ID NO: 254471 - RNA, 24 nt, Artificial Sequence
  Synthetic
guucugcaaucacacuuuaugaac

SEQ ID NO: 254472 - RNA, 18 nt, Artificial Sequence
  Synthetic
cuuugcuuucaacugaac

SEQ ID NO: 254473 - RNA, 19 nt, Artificial Sequence
  Synthetic
ucuuugcuuucaacugaac

SEQ ID NO: 254474 - RNA, 20 nt, Artificial Sequence
  Synthetic
cucuuugcuuucaacugaac

SEQ ID NO: 254475 - RNA, 21 nt, Artificial Sequence
  Synthetic
acucuuugcuuucaacugaac

SEQ ID NO: 254476 - RNA, 22 nt, Artificial Sequence
  Synthetic
aacucuuugcuuucaacugaac

SEQ ID NO: 254477 - RNA, 23 nt, Artificial Sequence
  Synthetic
uaacucuuugcuuucaacugaac

SEQ ID NO: 254478 - RNA, 24 nt, Artificial Sequence
  Synthetic
cuaacucuuugcuuucaacugaac

SEQ ID NO: 254479 - RNA, 18 nt, Artificial Sequence
  Synthetic
aguagaaaaauacugaac

SEQ ID NO: 254480 - RNA, 19 nt, Artificial Sequence
  Synthetic
aaguagaaaaauacugaac

SEQ ID NO: 254481 - RNA, 20 nt, Artificial Sequence
  Synthetic
caaguagaaaaauacugaac

SEQ ID NO: 254482 - RNA, 21 nt, Artificial Sequence
  Synthetic
ucaaguagaaaaauacugaac

SEQ ID NO: 254483 - RNA, 22 nt, Artificial Sequence
  Synthetic
gucaaguagaaaaauacugaac

SEQ ID NO: 254484 - RNA, 23 nt, Artificial Sequence
  Synthetic
ugucaaguagaaaaauacugaac

SEQ ID NO: 254485 - RNA, 24 nt, Artificial Sequence
  Synthetic
augucaaguagaaaaauacugaac

SEQ ID NO: 254486 - RNA, 18 nt, Artificial Sequence
  Synthetic
agagguuuacaccugaac

SEQ ID NO: 254487 - RNA, 19 nt, Artificial Sequence
  Synthetic
aagagguuuacaccugaac

SEQ ID NO: 254488 - RNA, 20 nt, Artificial Sequence
  Synthetic
caagagguuuacaccugaac

SEQ ID NO: 254489 - RNA, 21 nt, Artificial Sequence
  Synthetic
acaagagguuuacaccugaac

SEQ ID NO: 254490 - RNA, 22 nt, Artificial Sequence
  Synthetic
aacaagagguuuacaccugaac

SEQ ID NO: 254491 - RNA, 23 nt, Artificial Sequence
  Synthetic
aaacaagagguuuacaccugaac

SEQ ID NO: 254492 - RNA, 24 nt, Artificial Sequence
  Synthetic
gaaacaagagguuuacaccugaac

SEQ ID NO: 254493 - RNA, 18 nt, Artificial Sequence
  Synthetic
gguuguguuccgcugaac

SEQ ID NO: 254494 - RNA, 19 nt, Artificial Sequence
  Synthetic
agguuguguuccgcugaac

SEQ ID NO: 254495 - RNA, 20 nt, Artificial Sequence
  Synthetic
aagguuguguuccgcugaac

SEQ ID NO: 254496 - RNA, 21 nt, Artificial Sequence
  Synthetic
caagguuguguuccgcugaac

SEQ ID NO: 254497 - RNA, 22 nt, Artificial Sequence
  Synthetic
acaagguuguguuccgcugaac

SEQ ID NO: 254498 - RNA, 23 nt, Artificial Sequence
  Synthetic
gacaagguuguguuccgcugaac

SEQ ID NO: 254499 - RNA, 24 nt, Artificial Sequence
  Synthetic
agacaagguuguguuccgcugaac

SEQ ID NO: 254500 - RNA, 18 nt, Artificial Sequence
  Synthetic
auuucaacaccucugaac

SEQ ID NO: 254501 - RNA, 19 nt, Artificial Sequence
  Synthetic
uauuucaacaccucugaac

SEQ ID NO: 254502 - RNA, 20 nt, Artificial Sequence
  Synthetic
guauuucaacaccucugaac

SEQ ID NO: 254503 - RNA, 21 nt, Artificial Sequence
  Synthetic
aguauuucaacaccucugaac

SEQ ID NO: 254504 - RNA, 22 nt, Artificial Sequence
  Synthetic
uaguauuucaacaccucugaac

SEQ ID NO: 254505 - RNA, 23 nt, Artificial Sequence
  Synthetic
uuaguauuucaacaccucugaac

SEQ ID NO: 254506 - RNA, 24 nt, Artificial Sequence
  Synthetic
uuuaguauuucaacaccucugaac

SEQ ID NO: 254507 - RNA, 18 nt, Artificial Sequence
  Synthetic
guuaucuagcaagugaac

SEQ ID NO: 254508 - RNA, 19 nt, Artificial Sequence
  Synthetic
aguuaucuagcaagugaac

SEQ ID NO: 254509 - RNA, 20 nt, Artificial Sequence
  Synthetic
caguuaucuagcaagugaac

SEQ ID NO: 254510 - RNA, 21 nt, Artificial Sequence
  Synthetic
gcaguuaucuagcaagugaac

SEQ ID NO: 254511 - RNA, 22 nt, Artificial Sequence
  Synthetic
ugcaguuaucuagcaagugaac

SEQ ID NO: 254512 - RNA, 23 nt, Artificial Sequence
  Synthetic
augcaguuaucuagcaagugaac

SEQ ID NO: 254513 - RNA, 24 nt, Artificial Sequence
  Synthetic
gaugcaguuaucuagcaagugaac

SEQ ID NO: 254514 - RNA, 18 nt, Artificial Sequence
  Synthetic
acuaccaucagagugaac

SEQ ID NO: 254515 - RNA, 19 nt, Artificial Sequence
  Synthetic
aacuaccaucagagugaac

SEQ ID NO: 254516 - RNA, 20 nt, Artificial Sequence
  Synthetic
aaacuaccaucagagugaac

SEQ ID NO: 254517 - RNA, 21 nt, Artificial Sequence
  Synthetic
gaaacuaccaucagagugaac

SEQ ID NO: 254518 - RNA, 22 nt, Artificial Sequence
  Synthetic
agaaacuaccaucagagugaac

SEQ ID NO: 254519 - RNA, 23 nt, Artificial Sequence
  Synthetic
aagaaacuaccaucagagugaac

SEQ ID NO: 254520 - RNA, 24 nt, Artificial Sequence
  Synthetic
aaagaaacuaccaucagagugaac

SEQ ID NO: 254521 - RNA, 18 nt, Artificial Sequence
  Synthetic
uauaugaaaauagugaac

SEQ ID NO: 254522 - RNA, 19 nt, Artificial Sequence
  Synthetic
auauaugaaaauagugaac

SEQ ID NO: 254523 - RNA, 20 nt, Artificial Sequence
  Synthetic
gauauaugaaaauagugaac

SEQ ID NO: 254524 - RNA, 21 nt, Artificial Sequence
  Synthetic
agauauaugaaaauagugaac

SEQ ID NO: 254525 - RNA, 22 nt, Artificial Sequence
  Synthetic
gagauauaugaaaauagugaac

SEQ ID NO: 254526 - RNA, 23 nt, Artificial Sequence
  Synthetic
ugagauauaugaaaauagugaac

SEQ ID NO: 254527 - RNA, 24 nt, Artificial Sequence
  Synthetic
gugagauauaugaaaauagugaac

SEQ ID NO: 254528 - RNA, 18 nt, Artificial Sequence
  Synthetic
gugcuaaaaguagugaac

SEQ ID NO: 254529 - RNA, 19 nt, Artificial Sequence
  Synthetic
ugugcuaaaaguagugaac

SEQ ID NO: 254530 - RNA, 20 nt, Artificial Sequence
  Synthetic
cugugcuaaaaguagugaac

SEQ ID NO: 254531 - RNA, 21 nt, Artificial Sequence
  Synthetic
gcugugcuaaaaguagugaac

SEQ ID NO: 254532 - RNA, 22 nt, Artificial Sequence
  Synthetic
agcugugcuaaaaguagugaac

SEQ ID NO: 254533 - RNA, 23 nt, Artificial Sequence
  Synthetic
cagcugugcuaaaaguagugaac

SEQ ID NO: 254534 - RNA, 24 nt, Artificial Sequence
  Synthetic
ccagcugugcuaaaaguagugaac

SEQ ID NO: 254535 - RNA, 18 nt, Artificial Sequence
  Synthetic
caagacacaaacgugaac

SEQ ID NO: 254536 - RNA, 19 nt, Artificial Sequence
  Synthetic
acaagacacaaacgugaac

SEQ ID NO: 254537 - RNA, 20 nt, Artificial Sequence
  Synthetic
aacaagacacaaacgugaac

SEQ ID NO: 254538 - RNA, 21 nt, Artificial Sequence
  Synthetic
gaacaagacacaaacgugaac

SEQ ID NO: 254539 - RNA, 22 nt, Artificial Sequence
  Synthetic
agaacaagacacaaacgugaac

SEQ ID NO: 254540 - RNA, 23 nt, Artificial Sequence
  Synthetic
gagaacaagacacaaacgugaac

SEQ ID NO: 254541 - RNA, 24 nt, Artificial Sequence
  Synthetic
agagaacaagacacaaacgugaac

SEQ ID NO: 254542 - RNA, 18 nt, Artificial Sequence
  Synthetic
uauaagccuuacgugaac

SEQ ID NO: 254543 - RNA, 19 nt, Artificial Sequence
  Synthetic
uuauaagccuuacgugaac

SEQ ID NO: 254544 - RNA, 20 nt, Artificial Sequence
  Synthetic
guuauaagccuuacgugaac

SEQ ID NO: 254545 - RNA, 21 nt, Artificial Sequence
  Synthetic
aguuauaagccuuacgugaac

SEQ ID NO: 254546 - RNA, 22 nt, Artificial Sequence
  Synthetic
caguuauaagccuuacgugaac

SEQ ID NO: 254547 - RNA, 23 nt, Artificial Sequence
  Synthetic
acaguuauaagccuuacgugaac

SEQ ID NO: 254548 - RNA, 24 nt, Artificial Sequence
  Synthetic
uacaguuauaagccuuacgugaac

SEQ ID NO: 254549 - RNA, 18 nt, Artificial Sequence
  Synthetic
cgggagaaaggcgugaac

SEQ ID NO: 254550 - RNA, 19 nt, Artificial Sequence
  Synthetic
gcgggagaaaggcgugaac

SEQ ID NO: 254551 - RNA, 20 nt, Artificial Sequence
  Synthetic
ggcgggagaaaggcgugaac

SEQ ID NO: 254552 - RNA, 21 nt, Artificial Sequence
  Synthetic
aggcgggagaaaggcgugaac

SEQ ID NO: 254553 - RNA, 22 nt, Artificial Sequence
  Synthetic
gaggcgggagaaaggcgugaac

SEQ ID NO: 254554 - RNA, 23 nt, Artificial Sequence
  Synthetic
ugaggcgggagaaaggcgugaac

SEQ ID NO: 254555 - RNA, 24 nt, Artificial Sequence
  Synthetic
cugaggcgggagaaaggcgugaac

SEQ ID NO: 254556 - RNA, 21 nt, Artificial Sequence
  Synthetic
aggcaggagaauggcgugaac

SEQ ID NO: 254557 - RNA, 22 nt, Artificial Sequence
  Synthetic
aaggcaggagaauggcgugaac

SEQ ID NO: 254558 - RNA, 23 nt, Artificial Sequence
  Synthetic
uaaggcaggagaauggcgugaac

SEQ ID NO: 254559 - RNA, 24 nt, Artificial Sequence
  Synthetic
uuaaggcaggagaauggcgugaac

SEQ ID NO: 254560 - RNA, 18 nt, Artificial Sequence
  Synthetic
cuagagggagaggugaac

SEQ ID NO: 254561 - RNA, 19 nt, Artificial Sequence
  Synthetic
gcuagagggagaggugaac

SEQ ID NO: 254562 - RNA, 20 nt, Artificial Sequence
  Synthetic
agcuagagggagaggugaac

SEQ ID NO: 254563 - RNA, 21 nt, Artificial Sequence
  Synthetic
aagcuagagggagaggugaac

SEQ ID NO: 254564 - RNA, 22 nt, Artificial Sequence
  Synthetic
aaagcuagagggagaggugaac

SEQ ID NO: 254565 - RNA, 23 nt, Artificial Sequence
  Synthetic
aaaagcuagagggagaggugaac

SEQ ID NO: 254566 - RNA, 24 nt, Artificial Sequence
  Synthetic
gaaaagcuagagggagaggugaac

SEQ ID NO: 254567 - RNA, 18 nt, Artificial Sequence
  Synthetic
caggaaaauggugugaac

SEQ ID NO: 254568 - RNA, 19 nt, Artificial Sequence
  Synthetic
gcaggaaaauggugugaac

SEQ ID NO: 254569 - RNA, 20 nt, Artificial Sequence
  Synthetic
ggcaggaaaauggugugaac

SEQ ID NO: 254570 - RNA, 21 nt, Artificial Sequence
  Synthetic
aggcaggaaaauggugugaac

SEQ ID NO: 254571 - RNA, 22 nt, Artificial Sequence
  Synthetic
gaggcaggaaaauggugugaac

SEQ ID NO: 254572 - RNA, 23 nt, Artificial Sequence
  Synthetic
ugaggcaggaaaauggugugaac

SEQ ID NO: 254573 - RNA, 24 nt, Artificial Sequence
  Synthetic
cugaggcaggaaaauggugugaac

SEQ ID NO: 254574 - RNA, 18 nt, Artificial Sequence
  Synthetic
uuuauuagcugugugaac

SEQ ID NO: 254575 - RNA, 19 nt, Artificial Sequence
  Synthetic
auuuauuagcugugugaac

SEQ ID NO: 254576 - RNA, 20 nt, Artificial Sequence
  Synthetic
cauuuauuagcugugugaac

SEQ ID NO: 254577 - RNA, 21 nt, Artificial Sequence
  Synthetic
gcauuuauuagcugugugaac

SEQ ID NO: 254578 - RNA, 22 nt, Artificial Sequence
  Synthetic
ugcauuuauuagcugugugaac

SEQ ID NO: 254579 - RNA, 23 nt, Artificial Sequence
  Synthetic
cugcauuuauuagcugugugaac

SEQ ID NO: 254580 - RNA, 24 nt, Artificial Sequence
  Synthetic
gcugcauuuauuagcugugugaac

SEQ ID NO: 254581 - RNA, 18 nt, Artificial Sequence
  Synthetic
guugcuuauaaauugaac

SEQ ID NO: 254582 - RNA, 19 nt, Artificial Sequence
  Synthetic
aguugcuuauaaauugaac

SEQ ID NO: 254583 - RNA, 20 nt, Artificial Sequence
  Synthetic
uaguugcuuauaaauugaac

SEQ ID NO: 254584 - RNA, 21 nt, Artificial Sequence
  Synthetic
uuaguugcuuauaaauugaac

SEQ ID NO: 254585 - RNA, 22 nt, Artificial Sequence
  Synthetic
auuaguugcuuauaaauugaac

SEQ ID NO: 254586 - RNA, 23 nt, Artificial Sequence
  Synthetic
aauuaguugcuuauaaauugaac

SEQ ID NO: 254587 - RNA, 24 nt, Artificial Sequence
  Synthetic
uaauuaguugcuuauaaauugaac

SEQ ID NO: 254588 - RNA, 18 nt, Artificial Sequence
  Synthetic
ggucucucugaauugaac

SEQ ID NO: 254589 - RNA, 19 nt, Artificial Sequence
  Synthetic
uggucucucugaauugaac

SEQ ID NO: 254590 - RNA, 20 nt, Artificial Sequence
  Synthetic
auggucucucugaauugaac

SEQ ID NO: 254591 - RNA, 21 nt, Artificial Sequence
  Synthetic
uauggucucucugaauugaac

SEQ ID NO: 254592 - RNA, 22 nt, Artificial Sequence
  Synthetic
auauggucucucugaauugaac

SEQ ID NO: 254593 - RNA, 23 nt, Artificial Sequence
  Synthetic
aauauggucucucugaauugaac

SEQ ID NO: 254594 - RNA, 24 nt, Artificial Sequence
  Synthetic
gaauauggucucucugaauugaac

SEQ ID NO: 254595 - RNA, 18 nt, Artificial Sequence
  Synthetic
uuugugauugaauugaac

SEQ ID NO: 254596 - RNA, 19 nt, Artificial Sequence
  Synthetic
auuugugauugaauugaac

SEQ ID NO: 254597 - RNA, 20 nt, Artificial Sequence
  Synthetic
cauuugugauugaauugaac

SEQ ID NO: 254598 - RNA, 21 nt, Artificial Sequence
  Synthetic
acauuugugauugaauugaac

SEQ ID NO: 254599 - RNA, 22 nt, Artificial Sequence
  Synthetic
uacauuugugauugaauugaac

SEQ ID NO: 254600 - RNA, 23 nt, Artificial Sequence
  Synthetic
uuacauuugugauugaauugaac

SEQ ID NO: 254601 - RNA, 24 nt, Artificial Sequence
  Synthetic
uuuacauuugugauugaauugaac

SEQ ID NO: 254602 - RNA, 18 nt, Artificial Sequence
  Synthetic
uacauuauuccauugaac

SEQ ID NO: 254603 - RNA, 19 nt, Artificial Sequence
  Synthetic
auacauuauuccauugaac

SEQ ID NO: 254604 - RNA, 20 nt, Artificial Sequence
  Synthetic
uauacauuauuccauugaac

SEQ ID NO: 254605 - RNA, 21 nt, Artificial Sequence
  Synthetic
auauacauuauuccauugaac

SEQ ID NO: 254606 - RNA, 22 nt, Artificial Sequence
  Synthetic
uauauacauuauuccauugaac

SEQ ID NO: 254607 - RNA, 23 nt, Artificial Sequence
  Synthetic
auauauacauuauuccauugaac

SEQ ID NO: 254608 - RNA, 24 nt, Artificial Sequence
  Synthetic
uauauauacauuauuccauugaac

SEQ ID NO: 254609 - RNA, 18 nt, Artificial Sequence
  Synthetic
cacgagaaucacuugaac

SEQ ID NO: 254610 - RNA, 19 nt, Artificial Sequence
  Synthetic
gcacgagaaucacuugaac

SEQ ID NO: 254611 - RNA, 20 nt, Artificial Sequence
  Synthetic
ggcacgagaaucacuugaac

SEQ ID NO: 254612 - RNA, 21 nt, Artificial Sequence
  Synthetic
aggcacgagaaucacuugaac

SEQ ID NO: 254613 - RNA, 22 nt, Artificial Sequence
  Synthetic
gaggcacgagaaucacuugaac

SEQ ID NO: 254614 - RNA, 23 nt, Artificial Sequence
  Synthetic
ugaggcacgagaaucacuugaac

SEQ ID NO: 254615 - RNA, 24 nt, Artificial Sequence
  Synthetic
cugaggcacgagaaucacuugaac

SEQ ID NO: 254616 - RNA, 18 nt, Artificial Sequence
  Synthetic
uaggagaaucacuugaac

SEQ ID NO: 254617 - RNA, 19 nt, Artificial Sequence
  Synthetic
guaggagaaucacuugaac

SEQ ID NO: 254618 - RNA, 20 nt, Artificial Sequence
  Synthetic
gguaggagaaucacuugaac

SEQ ID NO: 254619 - RNA, 21 nt, Artificial Sequence
  Synthetic
agguaggagaaucacuugaac

SEQ ID NO: 254620 - RNA, 22 nt, Artificial Sequence
  Synthetic
gagguaggagaaucacuugaac

SEQ ID NO: 254621 - RNA, 23 nt, Artificial Sequence
  Synthetic
ugagguaggagaaucacuugaac

SEQ ID NO: 254622 - RNA, 24 nt, Artificial Sequence
  Synthetic
cugagguaggagaaucacuugaac

SEQ ID NO: 254623 - RNA, 18 nt, Artificial Sequence
  Synthetic
uauuuuggugacuugaac

SEQ ID NO: 254624 - RNA, 19 nt, Artificial Sequence
  Synthetic
cuauuuuggugacuugaac

SEQ ID NO: 254625 - RNA, 20 nt, Artificial Sequence
  Synthetic
gcuauuuuggugacuugaac

SEQ ID NO: 254626 - RNA, 21 nt, Artificial Sequence
  Synthetic
ggcuauuuuggugacuugaac

SEQ ID NO: 254627 - RNA, 22 nt, Artificial Sequence
  Synthetic
gggcuauuuuggugacuugaac

SEQ ID NO: 254628 - RNA, 23 nt, Artificial Sequence
  Synthetic
agggcuauuuuggugacuugaac

SEQ ID NO: 254629 - RNA, 24 nt, Artificial Sequence
  Synthetic
uagggcuauuuuggugacuugaac

SEQ ID NO: 254630 - RNA, 18 nt, Artificial Sequence
  Synthetic
caggagaaucccuugaac

SEQ ID NO: 254631 - RNA, 19 nt, Artificial Sequence
  Synthetic
gcaggagaaucccuugaac

SEQ ID NO: 254632 - RNA, 20 nt, Artificial Sequence
  Synthetic
ggcaggagaaucccuugaac

SEQ ID NO: 254633 - RNA, 18 nt, Artificial Sequence
  Synthetic
uucugcaugagcuugaac

SEQ ID NO: 254634 - RNA, 19 nt, Artificial Sequence
  Synthetic
guucugcaugagcuugaac

SEQ ID NO: 254635 - RNA, 20 nt, Artificial Sequence
  Synthetic
aguucugcaugagcuugaac

SEQ ID NO: 254636 - RNA, 21 nt, Artificial Sequence
  Synthetic
uaguucugcaugagcuugaac

SEQ ID NO: 254637 - RNA, 22 nt, Artificial Sequence
  Synthetic
auaguucugcaugagcuugaac

SEQ ID NO: 254638 - RNA, 23 nt, Artificial Sequence
  Synthetic
aauaguucugcaugagcuugaac

SEQ ID NO: 254639 - RNA, 24 nt, Artificial Sequence
  Synthetic
aaauaguucugcaugagcuugaac

SEQ ID NO: 254640 - RNA, 18 nt, Artificial Sequence
  Synthetic
caggaggauagcuugaac

SEQ ID NO: 254641 - RNA, 19 nt, Artificial Sequence
  Synthetic
acaggaggauagcuugaac

SEQ ID NO: 254642 - RNA, 20 nt, Artificial Sequence
  Synthetic
gacaggaggauagcuugaac

SEQ ID NO: 254643 - RNA, 21 nt, Artificial Sequence
  Synthetic
agacaggaggauagcuugaac

SEQ ID NO: 254644 - RNA, 22 nt, Artificial Sequence
  Synthetic
gagacaggaggauagcuugaac

SEQ ID NO: 254645 - RNA, 23 nt, Artificial Sequence
  Synthetic
ugagacaggaggauagcuugaac

SEQ ID NO: 254646 - RNA, 24 nt, Artificial Sequence
  Synthetic
cugagacaggaggauagcuugaac

SEQ ID NO: 254647 - RNA, 18 nt, Artificial Sequence
  Synthetic
uaccagaaucgcuugaac

SEQ ID NO: 254648 - RNA, 19 nt, Artificial Sequence
  Synthetic
guaccagaaucgcuugaac

SEQ ID NO: 254649 - RNA, 20 nt, Artificial Sequence
  Synthetic
gguaccagaaucgcuugaac

SEQ ID NO: 254650 - RNA, 21 nt, Artificial Sequence
  Synthetic
agguaccagaaucgcuugaac

SEQ ID NO: 254651 - RNA, 22 nt, Artificial Sequence
  Synthetic
gagguaccagaaucgcuugaac

SEQ ID NO: 254652 - RNA, 23 nt, Artificial Sequence
  Synthetic
ugagguaccagaaucgcuugaac

SEQ ID NO: 254653 - RNA, 24 nt, Artificial Sequence
  Synthetic
cugagguaccagaaucgcuugaac

SEQ ID NO: 254654 - RNA, 18 nt, Artificial Sequence
  Synthetic
caggagaaucgcuugaac

SEQ ID NO: 254655 - RNA, 19 nt, Artificial Sequence
  Synthetic
gcaggagaaucgcuugaac

SEQ ID NO: 254656 - RNA, 20 nt, Artificial Sequence
  Synthetic
ggcaggagaaucgcuugaac

SEQ ID NO: 254657 - RNA, 21 nt, Artificial Sequence
  Synthetic
aggcaggagaaucgcuugaac

SEQ ID NO: 254658 - RNA, 22 nt, Artificial Sequence
  Synthetic
gaggcaggagaaucgcuugaac

SEQ ID NO: 254659 - RNA, 23 nt, Artificial Sequence
  Synthetic
ugaggcaggagaaucgcuugaac

SEQ ID NO: 254660 - RNA, 24 nt, Artificial Sequence
  Synthetic
cugaggcaggagaaucgcuugaac

SEQ ID NO: 254661 - RNA, 18 nt, Artificial Sequence
  Synthetic
caggggaaucgcuugaac

SEQ ID NO: 254662 - RNA, 19 nt, Artificial Sequence
  Synthetic
gcaggggaaucgcuugaac

SEQ ID NO: 254663 - RNA, 20 nt, Artificial Sequence
  Synthetic
ggcaggggaaucgcuugaac

SEQ ID NO: 254664 - RNA, 21 nt, Artificial Sequence
  Synthetic
aggcaggggaaucgcuugaac

SEQ ID NO: 254665 - RNA, 22 nt, Artificial Sequence
  Synthetic
gaggcaggggaaucgcuugaac

SEQ ID NO: 254666 - RNA, 23 nt, Artificial Sequence
  Synthetic
ugaggcaggggaaucgcuugaac

SEQ ID NO: 254667 - RNA, 24 nt, Artificial Sequence
  Synthetic
cugaggcaggggaaucgcuugaac

SEQ ID NO: 254668 - RNA, 18 nt, Artificial Sequence
  Synthetic
caggaguaucgcuugaac

SEQ ID NO: 254669 - RNA, 19 nt, Artificial Sequence
  Synthetic
gcaggaguaucgcuugaac

SEQ ID NO: 254670 - RNA, 20 nt, Artificial Sequence
  Synthetic
ggcaggaguaucgcuugaac

SEQ ID NO: 254671 - RNA, 21 nt, Artificial Sequence
  Synthetic
aggcaggaguaucgcuugaac

SEQ ID NO: 254672 - RNA, 22 nt, Artificial Sequence
  Synthetic
gaggcaggaguaucgcuugaac

SEQ ID NO: 254673 - RNA, 23 nt, Artificial Sequence
  Synthetic
ugaggcaggaguaucgcuugaac

SEQ ID NO: 254674 - RNA, 24 nt, Artificial Sequence
  Synthetic
cugaggcaggaguaucgcuugaac

SEQ ID NO: 254675 - RNA, 18 nt, Artificial Sequence
  Synthetic
cagcagaauugcuugaac

SEQ ID NO: 254676 - RNA, 19 nt, Artificial Sequence
  Synthetic
gcagcagaauugcuugaac

SEQ ID NO: 254677 - RNA, 20 nt, Artificial Sequence
  Synthetic
ggcagcagaauugcuugaac

SEQ ID NO: 254678 - RNA, 21 nt, Artificial Sequence
  Synthetic
aggcagcagaauugcuugaac

SEQ ID NO: 254679 - RNA, 22 nt, Artificial Sequence
  Synthetic
gaggcagcagaauugcuugaac

SEQ ID NO: 254680 - RNA, 23 nt, Artificial Sequence
  Synthetic
ugaggcagcagaauugcuugaac

SEQ ID NO: 254681 - RNA, 24 nt, Artificial Sequence
  Synthetic
cugaggcagcagaauugcuugaac

SEQ ID NO: 254682 - RNA, 18 nt, Artificial Sequence
  Synthetic
caggagaauugcuugaac

SEQ ID NO: 254683 - RNA, 19 nt, Artificial Sequence
  Synthetic
gcaggagaauugcuugaac

SEQ ID NO: 254684 - RNA, 20 nt, Artificial Sequence
  Synthetic
ugcaggagaauugcuugaac

SEQ ID NO: 254685 - RNA, 21 nt, Artificial Sequence
  Synthetic
augcaggagaauugcuugaac

SEQ ID NO: 254686 - RNA, 22 nt, Artificial Sequence
  Synthetic
gaugcaggagaauugcuugaac

SEQ ID NO: 254687 - RNA, 23 nt, Artificial Sequence
  Synthetic
ugaugcaggagaauugcuugaac

SEQ ID NO: 254688 - RNA, 24 nt, Artificial Sequence
  Synthetic
cugaugcaggagaauugcuugaac

SEQ ID NO: 254689 - RNA, 18 nt, Artificial Sequence
  Synthetic
cgggaagauugcuugaac

SEQ ID NO: 254690 - RNA, 19 nt, Artificial Sequence
  Synthetic
gcgggaagauugcuugaac

SEQ ID NO: 254691 - RNA, 20 nt, Artificial Sequence
  Synthetic
ggcgggaagauugcuugaac

SEQ ID NO: 254692 - RNA, 21 nt, Artificial Sequence
  Synthetic
aggcgggaagauugcuugaac

SEQ ID NO: 254693 - RNA, 22 nt, Artificial Sequence
  Synthetic
gaggcgggaagauugcuugaac

SEQ ID NO: 254694 - RNA, 23 nt, Artificial Sequence
  Synthetic
ugaggcgggaagauugcuugaac

SEQ ID NO: 254695 - RNA, 24 nt, Artificial Sequence
  Synthetic
cugaggcgggaagauugcuugaac

SEQ ID NO: 254696 - RNA, 18 nt, Artificial Sequence
  Synthetic
cagaacaucaucuugaac

SEQ ID NO: 254697 - RNA, 19 nt, Artificial Sequence
  Synthetic
ccagaacaucaucuugaac

SEQ ID NO: 254698 - RNA, 20 nt, Artificial Sequence
  Synthetic
gccagaacaucaucuugaac

SEQ ID NO: 254699 - RNA, 21 nt, Artificial Sequence
  Synthetic
agccagaacaucaucuugaac

SEQ ID NO: 254700 - RNA, 22 nt, Artificial Sequence
  Synthetic
gagccagaacaucaucuugaac

SEQ ID NO: 254701 - RNA, 23 nt, Artificial Sequence
  Synthetic
agagccagaacaucaucuugaac

SEQ ID NO: 254702 - RNA, 24 nt, Artificial Sequence
  Synthetic
aagagccagaacaucaucuugaac

SEQ ID NO: 254703 - RNA, 18 nt, Artificial Sequence
  Synthetic
aucuguggaaauuugaac

SEQ ID NO: 254704 - RNA, 19 nt, Artificial Sequence
  Synthetic
gaucuguggaaauuugaac

SEQ ID NO: 254705 - RNA, 20 nt, Artificial Sequence
  Synthetic
agaucuguggaaauuugaac

SEQ ID NO: 254706 - RNA, 21 nt, Artificial Sequence
  Synthetic
gagaucuguggaaauuugaac

SEQ ID NO: 254707 - RNA, 22 nt, Artificial Sequence
  Synthetic
agagaucuguggaaauuugaac

SEQ ID NO: 254708 - RNA, 23 nt, Artificial Sequence
  Synthetic
uagagaucuguggaaauuugaac

SEQ ID NO: 254709 - RNA, 24 nt, Artificial Sequence
  Synthetic
cuagagaucuguggaaauuugaac

SEQ ID NO: 254710 - RNA, 18 nt, Artificial Sequence
  Synthetic
acacuguacccuuugaac

SEQ ID NO: 254711 - RNA, 19 nt, Artificial Sequence
  Synthetic
uacacuguacccuuugaac

SEQ ID NO: 254712 - RNA, 20 nt, Artificial Sequence
  Synthetic
cuacacuguacccuuugaac

SEQ ID NO: 254713 - RNA, 21 nt, Artificial Sequence
  Synthetic
gcuacacuguacccuuugaac

SEQ ID NO: 254714 - RNA, 22 nt, Artificial Sequence
  Synthetic
ggcuacacuguacccuuugaac

SEQ ID NO: 254715 - RNA, 23 nt, Artificial Sequence
  Synthetic
uggcuacacuguacccuuugaac

SEQ ID NO: 254716 - RNA, 24 nt, Artificial Sequence
  Synthetic
uuggcuacacuguacccuuugaac

SEQ ID NO: 254717 - RNA, 18 nt, Artificial Sequence
  Synthetic
caggagaauuguuugaac

SEQ ID NO: 254718 - RNA, 19 nt, Artificial Sequence
  Synthetic
gcaggagaauuguuugaac

SEQ ID NO: 254719 - RNA, 20 nt, Artificial Sequence
  Synthetic
ggcaggagaauuguuugaac

SEQ ID NO: 254720 - RNA, 21 nt, Artificial Sequence
  Synthetic
aggcaggagaauuguuugaac

SEQ ID NO: 254721 - RNA, 22 nt, Artificial Sequence
  Synthetic
gaggcaggagaauuguuugaac

SEQ ID NO: 254722 - RNA, 23 nt, Artificial Sequence
  Synthetic
ugaggcaggagaauuguuugaac

SEQ ID NO: 254723 - RNA, 24 nt, Artificial Sequence
  Synthetic
cugaggcaggagaauuguuugaac

SEQ ID NO: 254724 - RNA, 18 nt, Artificial Sequence
  Synthetic
guggaaaggauuuugaac

SEQ ID NO: 254725 - RNA, 19 nt, Artificial Sequence
  Synthetic
aguggaaaggauuuugaac

SEQ ID NO: 254726 - RNA, 20 nt, Artificial Sequence
  Synthetic
uaguggaaaggauuuugaac

SEQ ID NO: 254727 - RNA, 21 nt, Artificial Sequence
  Synthetic
auaguggaaaggauuuugaac

SEQ ID NO: 254728 - RNA, 22 nt, Artificial Sequence
  Synthetic
uauaguggaaaggauuuugaac

SEQ ID NO: 254729 - RNA, 23 nt, Artificial Sequence
  Synthetic
guauaguggaaaggauuuugaac

SEQ ID NO: 254730 - RNA, 24 nt, Artificial Sequence
  Synthetic
aguauaguggaaaggauuuugaac

SEQ ID NO: 254731 - RNA, 18 nt, Artificial Sequence
  Synthetic
cacaaauggaaaaauaac

SEQ ID NO: 254732 - RNA, 19 nt, Artificial Sequence
  Synthetic
gcacaaauggaaaaauaac

SEQ ID NO: 254733 - RNA, 20 nt, Artificial Sequence
  Synthetic
ugcacaaauggaaaaauaac

SEQ ID NO: 254734 - RNA, 21 nt, Artificial Sequence
  Synthetic
cugcacaaauggaaaaauaac

SEQ ID NO: 254735 - RNA, 22 nt, Artificial Sequence
  Synthetic
acugcacaaauggaaaaauaac

SEQ ID NO: 254736 - RNA, 23 nt, Artificial Sequence
  Synthetic
aacugcacaaauggaaaaauaac

SEQ ID NO: 254737 - RNA, 24 nt, Artificial Sequence
  Synthetic
aaacugcacaaauggaaaaauaac

SEQ ID NO: 254738 - RNA, 18 nt, Artificial Sequence
  Synthetic
ucacauuuuaaaaauaac

SEQ ID NO: 254739 - RNA, 19 nt, Artificial Sequence
  Synthetic
aucacauuuuaaaaauaac

SEQ ID NO: 254740 - RNA, 20 nt, Artificial Sequence
  Synthetic
uaucacauuuuaaaaauaac

SEQ ID NO: 254741 - RNA, 21 nt, Artificial Sequence
  Synthetic
uuaucacauuuuaaaaauaac

SEQ ID NO: 254742 - RNA, 22 nt, Artificial Sequence
  Synthetic
uuuaucacauuuuaaaaauaac

SEQ ID NO: 254743 - RNA, 23 nt, Artificial Sequence
  Synthetic
auuuaucacauuuuaaaaauaac

SEQ ID NO: 254744 - RNA, 24 nt, Artificial Sequence
  Synthetic
aauuuaucacauuuuaaaaauaac

SEQ ID NO: 254745 - RNA, 18 nt, Artificial Sequence
  Synthetic
gacagaaaacaaaauaac

SEQ ID NO: 254746 - RNA, 19 nt, Artificial Sequence
  Synthetic
agacagaaaacaaaauaac

SEQ ID NO: 254747 - RNA, 20 nt, Artificial Sequence
  Synthetic
gagacagaaaacaaaauaac

SEQ ID NO: 254748 - RNA, 21 nt, Artificial Sequence
  Synthetic
ggagacagaaaacaaaauaac

SEQ ID NO: 254749 - RNA, 22 nt, Artificial Sequence
  Synthetic
aggagacagaaaacaaaauaac

SEQ ID NO: 254750 - RNA, 23 nt, Artificial Sequence
  Synthetic
caggagacagaaaacaaaauaac

SEQ ID NO: 254751 - RNA, 24 nt, Artificial Sequence
  Synthetic
acaggagacagaaaacaaaauaac

SEQ ID NO: 254752 - RNA, 18 nt, Artificial Sequence
  Synthetic
ucucugcugcaaaauaac

SEQ ID NO: 254753 - RNA, 19 nt, Artificial Sequence
  Synthetic
aucucugcugcaaaauaac

SEQ ID NO: 254754 - RNA, 20 nt, Artificial Sequence
  Synthetic
aaucucugcugcaaaauaac

SEQ ID NO: 254755 - RNA, 21 nt, Artificial Sequence
  Synthetic
uaaucucugcugcaaaauaac

SEQ ID NO: 254756 - RNA, 22 nt, Artificial Sequence
  Synthetic
cuaaucucugcugcaaaauaac

SEQ ID NO: 254757 - RNA, 23 nt, Artificial Sequence
  Synthetic
acuaaucucugcugcaaaauaac

SEQ ID NO: 254758 - RNA, 24 nt, Artificial Sequence
  Synthetic
uacuaaucucugcugcaaaauaac

SEQ ID NO: 254759 - RNA, 18 nt, Artificial Sequence
  Synthetic
cuccgccucccaaauaac

SEQ ID NO: 254760 - RNA, 19 nt, Artificial Sequence
  Synthetic
ccuccgccucccaaauaac

SEQ ID NO: 254761 - RNA, 20 nt, Artificial Sequence
  Synthetic
gccuccgccucccaaauaac

SEQ ID NO: 254762 - RNA, 21 nt, Artificial Sequence
  Synthetic
ugccuccgccucccaaauaac

SEQ ID NO: 254763 - RNA, 22 nt, Artificial Sequence
  Synthetic
gugccuccgccucccaaauaac

SEQ ID NO: 254764 - RNA, 23 nt, Artificial Sequence
  Synthetic
ugugccuccgccucccaaauaac

SEQ ID NO: 254765 - RNA, 24 nt, Artificial Sequence
  Synthetic
gugugccuccgccucccaaauaac

SEQ ID NO: 254766 - RNA, 18 nt, Artificial Sequence
  Synthetic
cagucugaaucaaauaac

SEQ ID NO: 254767 - RNA, 19 nt, Artificial Sequence
  Synthetic
acagucugaaucaaauaac

SEQ ID NO: 254768 - RNA, 20 nt, Artificial Sequence
  Synthetic
cacagucugaaucaaauaac

SEQ ID NO: 254769 - RNA, 21 nt, Artificial Sequence
  Synthetic
acacagucugaaucaaauaac

SEQ ID NO: 254770 - RNA, 22 nt, Artificial Sequence
  Synthetic
aacacagucugaaucaaauaac

SEQ ID NO: 254771 - RNA, 23 nt, Artificial Sequence
  Synthetic
aaacacagucugaaucaaauaac

SEQ ID NO: 254772 - RNA, 24 nt, Artificial Sequence
  Synthetic
gaaacacagucugaaucaaauaac

SEQ ID NO: 254773 - RNA, 18 nt, Artificial Sequence
  Synthetic
uuagaaaggaacaauaac

SEQ ID NO: 254774 - RNA, 19 nt, Artificial Sequence
  Synthetic
uuuagaaaggaacaauaac

SEQ ID NO: 254775 - RNA, 20 nt, Artificial Sequence
  Synthetic
uuuuagaaaggaacaauaac

SEQ ID NO: 254776 - RNA, 21 nt, Artificial Sequence
  Synthetic
cuuuuagaaaggaacaauaac

SEQ ID NO: 254777 - RNA, 22 nt, Artificial Sequence
  Synthetic
ucuuuuagaaaggaacaauaac

SEQ ID NO: 254778 - RNA, 23 nt, Artificial Sequence
  Synthetic
uucuuuuagaaaggaacaauaac

SEQ ID NO: 254779 - RNA, 24 nt, Artificial Sequence
  Synthetic
auucuuuuagaaaggaacaauaac

SEQ ID NO: 254780 - RNA, 18 nt, Artificial Sequence
  Synthetic
ucugaauagaccaauaac

SEQ ID NO: 254781 - RNA, 19 nt, Artificial Sequence
  Synthetic
cucugaauagaccaauaac

SEQ ID NO: 254782 - RNA, 20 nt, Artificial Sequence
  Synthetic
ucucugaauagaccaauaac

SEQ ID NO: 254783 - RNA, 21 nt, Artificial Sequence
  Synthetic
aucucugaauagaccaauaac

SEQ ID NO: 254784 - RNA, 22 nt, Artificial Sequence
  Synthetic
aaucucugaauagaccaauaac

SEQ ID NO: 254785 - RNA, 23 nt, Artificial Sequence
  Synthetic
gaaucucugaauagaccaauaac

SEQ ID NO: 254786 - RNA, 24 nt, Artificial Sequence
  Synthetic
ugaaucucugaauagaccaauaac

SEQ ID NO: 254787 - RNA, 18 nt, Artificial Sequence
  Synthetic
gaacuccauuccaauaac

SEQ ID NO: 254788 - RNA, 19 nt, Artificial Sequence
  Synthetic
agaacuccauuccaauaac

SEQ ID NO: 254789 - RNA, 20 nt, Artificial Sequence
  Synthetic
gagaacuccauuccaauaac

SEQ ID NO: 254790 - RNA, 21 nt, Artificial Sequence
  Synthetic
agagaacuccauuccaauaac

SEQ ID NO: 254791 - RNA, 22 nt, Artificial Sequence
  Synthetic
cagagaacuccauuccaauaac

SEQ ID NO: 254792 - RNA, 23 nt, Artificial Sequence
  Synthetic
acagagaacuccauuccaauaac

SEQ ID NO: 254793 - RNA, 24 nt, Artificial Sequence
  Synthetic
aacagagaacuccauuccaauaac

SEQ ID NO: 254794 - RNA, 18 nt, Artificial Sequence
  Synthetic
auuguuguaaucaauaac

SEQ ID NO: 254795 - RNA, 19 nt, Artificial Sequence
  Synthetic
cauuguuguaaucaauaac

SEQ ID NO: 254796 - RNA, 20 nt, Artificial Sequence
  Synthetic
acauuguuguaaucaauaac

SEQ ID NO: 254797 - RNA, 21 nt, Artificial Sequence
  Synthetic
gacauuguuguaaucaauaac

SEQ ID NO: 254798 - RNA, 22 nt, Artificial Sequence
  Synthetic
agacauuguuguaaucaauaac

SEQ ID NO: 254799 - RNA, 23 nt, Artificial Sequence
  Synthetic
gagacauuguuguaaucaauaac

SEQ ID NO: 254800 - RNA, 24 nt, Artificial Sequence
  Synthetic
ugagacauuguuguaaucaauaac

SEQ ID NO: 254801 - RNA, 18 nt, Artificial Sequence
  Synthetic
ugauuuuuauucaauaac

SEQ ID NO: 254802 - RNA, 19 nt, Artificial Sequence
  Synthetic
uugauuuuuauucaauaac

SEQ ID NO: 254803 - RNA, 20 nt, Artificial Sequence
  Synthetic
guugauuuuuauucaauaac

SEQ ID NO: 254804 - RNA, 21 nt, Artificial Sequence
  Synthetic
uguugauuuuuauucaauaac

SEQ ID NO: 254805 - RNA, 22 nt, Artificial Sequence
  Synthetic
uuguugauuuuuauucaauaac

SEQ ID NO: 254806 - RNA, 23 nt, Artificial Sequence
  Synthetic
cuuguugauuuuuauucaauaac

SEQ ID NO: 254807 - RNA, 24 nt, Artificial Sequence
  Synthetic
ucuuguugauuuuuauucaauaac

SEQ ID NO: 254808 - RNA, 18 nt, Artificial Sequence
  Synthetic
uuaaaucuacauaauaac

SEQ ID NO: 254809 - RNA, 19 nt, Artificial Sequence
  Synthetic
uuuaaaucuacauaauaac

SEQ ID NO: 254810 - RNA, 20 nt, Artificial Sequence
  Synthetic
uuuuaaaucuacauaauaac

SEQ ID NO: 254811 - RNA, 21 nt, Artificial Sequence
  Synthetic
auuuuaaaucuacauaauaac

SEQ ID NO: 254812 - RNA, 22 nt, Artificial Sequence
  Synthetic
cauuuuaaaucuacauaauaac

SEQ ID NO: 254813 - RNA, 23 nt, Artificial Sequence
  Synthetic
ccauuuuaaaucuacauaauaac

SEQ ID NO: 254814 - RNA, 24 nt, Artificial Sequence
  Synthetic
cccauuuuaaaucuacauaauaac

SEQ ID NO: 254815 - RNA, 18 nt, Artificial Sequence
  Synthetic
uuugugguggguaauaac

SEQ ID NO: 254816 - RNA, 19 nt, Artificial Sequence
  Synthetic
guuugugguggguaauaac

SEQ ID NO: 254817 - RNA, 20 nt, Artificial Sequence
  Synthetic
uguuugugguggguaauaac

SEQ ID NO: 254818 - RNA, 21 nt, Artificial Sequence
  Synthetic
uuguuugugguggguaauaac

SEQ ID NO: 254819 - RNA, 22 nt, Artificial Sequence
  Synthetic
uuuguuugugguggguaauaac

SEQ ID NO: 254820 - RNA, 23 nt, Artificial Sequence
  Synthetic
cuuuguuugugguggguaauaac

SEQ ID NO: 254821 - RNA, 24 nt, Artificial Sequence
  Synthetic
gcuuuguuugugguggguaauaac

SEQ ID NO: 254822 - RNA, 18 nt, Artificial Sequence
  Synthetic
agacuagaauguaauaac

SEQ ID NO: 254823 - RNA, 19 nt, Artificial Sequence
  Synthetic
aagacuagaauguaauaac

SEQ ID NO: 254824 - RNA, 20 nt, Artificial Sequence
  Synthetic
aaagacuagaauguaauaac

SEQ ID NO: 254825 - RNA, 21 nt, Artificial Sequence
  Synthetic
gaaagacuagaauguaauaac

SEQ ID NO: 254826 - RNA, 22 nt, Artificial Sequence
  Synthetic
agaaagacuagaauguaauaac

SEQ ID NO: 254827 - RNA, 23 nt, Artificial Sequence
  Synthetic
uagaaagacuagaauguaauaac

SEQ ID NO: 254828 - RNA, 24 nt, Artificial Sequence
  Synthetic
uuagaaagacuagaauguaauaac

SEQ ID NO: 254829 - RNA, 18 nt, Artificial Sequence
  Synthetic
uuuuagaauauuaauaac

SEQ ID NO: 254830 - RNA, 19 nt, Artificial Sequence
  Synthetic
auuuuagaauauuaauaac

SEQ ID NO: 254831 - RNA, 20 nt, Artificial Sequence
  Synthetic
aauuuuagaauauuaauaac

SEQ ID NO: 254832 - RNA, 21 nt, Artificial Sequence
  Synthetic
uaauuuuagaauauuaauaac

SEQ ID NO: 254833 - RNA, 22 nt, Artificial Sequence
  Synthetic
uuaauuuuagaauauuaauaac

SEQ ID NO: 254834 - RNA, 23 nt, Artificial Sequence
  Synthetic
uuuaauuuuagaauauuaauaac

SEQ ID NO: 254835 - RNA, 24 nt, Artificial Sequence
  Synthetic
uuuuaauuuuagaauauuaauaac

SEQ ID NO: 254836 - RNA, 18 nt, Artificial Sequence
  Synthetic
auauucaaacuuaauaac

SEQ ID NO: 254837 - RNA, 19 nt, Artificial Sequence
  Synthetic
aauauucaaacuuaauaac

SEQ ID NO: 254838 - RNA, 20 nt, Artificial Sequence
  Synthetic
gaauauucaaacuuaauaac

SEQ ID NO: 254839 - RNA, 21 nt, Artificial Sequence
  Synthetic
agaauauucaaacuuaauaac

SEQ ID NO: 254840 - RNA, 22 nt, Artificial Sequence
  Synthetic
gagaauauucaaacuuaauaac

SEQ ID NO: 254841 - RNA, 23 nt, Artificial Sequence
  Synthetic
ugagaauauucaaacuuaauaac

SEQ ID NO: 254842 - RNA, 24 nt, Artificial Sequence
  Synthetic
augagaauauucaaacuuaauaac

SEQ ID NO: 254843 - RNA, 18 nt, Artificial Sequence
  Synthetic
uaauucaacucacauaac

SEQ ID NO: 254844 - RNA, 19 nt, Artificial Sequence
  Synthetic
auaauucaacucacauaac

SEQ ID NO: 254845 - RNA, 20 nt, Artificial Sequence
  Synthetic
aauaauucaacucacauaac

SEQ ID NO: 254846 - RNA, 21 nt, Artificial Sequence
  Synthetic
gaauaauucaacucacauaac

SEQ ID NO: 254847 - RNA, 22 nt, Artificial Sequence
  Synthetic
agaauaauucaacucacauaac

SEQ ID NO: 254848 - RNA, 23 nt, Artificial Sequence
  Synthetic
aagaauaauucaacucacauaac

SEQ ID NO: 254849 - RNA, 24 nt, Artificial Sequence
  Synthetic
uaagaauaauucaacucacauaac

SEQ ID NO: 254850 - RNA, 18 nt, Artificial Sequence
  Synthetic
uugaagccuugacauaac

SEQ ID NO: 254851 - RNA, 19 nt, Artificial Sequence
  Synthetic
auugaagccuugacauaac

SEQ ID NO: 254852 - RNA, 20 nt, Artificial Sequence
  Synthetic
gauugaagccuugacauaac

SEQ ID NO: 254853 - RNA, 21 nt, Artificial Sequence
  Synthetic
ugauugaagccuugacauaac

SEQ ID NO: 254854 - RNA, 22 nt, Artificial Sequence
  Synthetic
gugauugaagccuugacauaac

SEQ ID NO: 254855 - RNA, 23 nt, Artificial Sequence
  Synthetic
ugugauugaagccuugacauaac

SEQ ID NO: 254856 - RNA, 24 nt, Artificial Sequence
  Synthetic
gugugauugaagccuugacauaac

SEQ ID NO: 254857 - RNA, 18 nt, Artificial Sequence
  Synthetic
cauaugucucaccauaac

SEQ ID NO: 254858 - RNA, 19 nt, Artificial Sequence
  Synthetic
ucauaugucucaccauaac

SEQ ID NO: 254859 - RNA, 20 nt, Artificial Sequence
  Synthetic
aucauaugucucaccauaac

SEQ ID NO: 254860 - RNA, 21 nt, Artificial Sequence
  Synthetic
caucauaugucucaccauaac

SEQ ID NO: 254861 - RNA, 22 nt, Artificial Sequence
  Synthetic
acaucauaugucucaccauaac

SEQ ID NO: 254862 - RNA, 23 nt, Artificial Sequence
  Synthetic
aacaucauaugucucaccauaac

SEQ ID NO: 254863 - RNA, 24 nt, Artificial Sequence
  Synthetic
gaacaucauaugucucaccauaac

SEQ ID NO: 254864 - RNA, 18 nt, Artificial Sequence
  Synthetic
agcuacagagcccauaac

SEQ ID NO: 254865 - RNA, 19 nt, Artificial Sequence
  Synthetic
uagcuacagagcccauaac

SEQ ID NO: 254866 - RNA, 20 nt, Artificial Sequence
  Synthetic
guagcuacagagcccauaac

SEQ ID NO: 254867 - RNA, 21 nt, Artificial Sequence
  Synthetic
gguagcuacagagcccauaac

SEQ ID NO: 254868 - RNA, 22 nt, Artificial Sequence
  Synthetic
ggguagcuacagagcccauaac

SEQ ID NO: 254869 - RNA, 23 nt, Artificial Sequence
  Synthetic
aggguagcuacagagcccauaac

SEQ ID NO: 254870 - RNA, 24 nt, Artificial Sequence
  Synthetic
aaggguagcuacagagcccauaac

SEQ ID NO: 254871 - RNA, 18 nt, Artificial Sequence
  Synthetic
gaaaggugcaaucauaac

SEQ ID NO: 254872 - RNA, 19 nt, Artificial Sequence
  Synthetic
ggaaaggugcaaucauaac

SEQ ID NO: 254873 - RNA, 20 nt, Artificial Sequence
  Synthetic
uggaaaggugcaaucauaac

SEQ ID NO: 254874 - RNA, 21 nt, Artificial Sequence
  Synthetic
uuggaaaggugcaaucauaac

SEQ ID NO: 254875 - RNA, 22 nt, Artificial Sequence
  Synthetic
auuggaaaggugcaaucauaac

SEQ ID NO: 254876 - RNA, 23 nt, Artificial Sequence
  Synthetic
aauuggaaaggugcaaucauaac

SEQ ID NO: 254877 - RNA, 24 nt, Artificial Sequence
  Synthetic
aaauuggaaaggugcaaucauaac

SEQ ID NO: 254878 - RNA, 18 nt, Artificial Sequence
  Synthetic
gaagauuaaugucauaac

SEQ ID NO: 254879 - RNA, 19 nt, Artificial Sequence
  Synthetic
ggaagauuaaugucauaac

SEQ ID NO: 254880 - RNA, 20 nt, Artificial Sequence
  Synthetic
uggaagauuaaugucauaac

SEQ ID NO: 254881 - RNA, 21 nt, Artificial Sequence
  Synthetic
uuggaagauuaaugucauaac

SEQ ID NO: 254882 - RNA, 22 nt, Artificial Sequence
  Synthetic
uuuggaagauuaaugucauaac

SEQ ID NO: 254883 - RNA, 23 nt, Artificial Sequence
  Synthetic
cuuuggaagauuaaugucauaac

SEQ ID NO: 254884 - RNA, 24 nt, Artificial Sequence
  Synthetic
ucuuuggaagauuaaugucauaac

SEQ ID NO: 254885 - RNA, 18 nt, Artificial Sequence
  Synthetic
gaaguugauguucauaac

SEQ ID NO: 254886 - RNA, 19 nt, Artificial Sequence
  Synthetic
ugaaguugauguucauaac

SEQ ID NO: 254887 - RNA, 20 nt, Artificial Sequence
  Synthetic
augaaguugauguucauaac

SEQ ID NO: 254888 - RNA, 21 nt, Artificial Sequence
  Synthetic
caugaaguugauguucauaac

SEQ ID NO: 254889 - RNA, 22 nt, Artificial Sequence
  Synthetic
gcaugaaguugauguucauaac

SEQ ID NO: 254890 - RNA, 23 nt, Artificial Sequence
  Synthetic
ugcaugaaguugauguucauaac

SEQ ID NO: 254891 - RNA, 24 nt, Artificial Sequence
  Synthetic
augcaugaaguugauguucauaac

SEQ ID NO: 254892 - RNA, 18 nt, Artificial Sequence
  Synthetic
gaaaaaaaaaaagauaac

SEQ ID NO: 254893 - RNA, 19 nt, Artificial Sequence
  Synthetic
ugaaaaaaaaaaagauaac

SEQ ID NO: 254894 - RNA, 20 nt, Artificial Sequence
  Synthetic
uugaaaaaaaaaaagauaac

SEQ ID NO: 254895 - RNA, 21 nt, Artificial Sequence
  Synthetic
auugaaaaaaaaaaagauaac

SEQ ID NO: 254896 - RNA, 22 nt, Artificial Sequence
  Synthetic
aauugaaaaaaaaaaagauaac

SEQ ID NO: 254897 - RNA, 23 nt, Artificial Sequence
  Synthetic
aaauugaaaaaaaaaaagauaac

SEQ ID NO: 254898 - RNA, 24 nt, Artificial Sequence
  Synthetic
gaaauugaaaaaaaaaaagauaac

SEQ ID NO: 254899 - RNA, 18 nt, Artificial Sequence
  Synthetic
cuaccccauaaagauaac

SEQ ID NO: 254900 - RNA, 19 nt, Artificial Sequence
  Synthetic
ucuaccccauaaagauaac

SEQ ID NO: 254901 - RNA, 20 nt, Artificial Sequence
  Synthetic
aucuaccccauaaagauaac

SEQ ID NO: 254902 - RNA, 21 nt, Artificial Sequence
  Synthetic
uaucuaccccauaaagauaac

SEQ ID NO: 254903 - RNA, 22 nt, Artificial Sequence
  Synthetic
uuaucuaccccauaaagauaac

SEQ ID NO: 254904 - RNA, 23 nt, Artificial Sequence
  Synthetic
uuuaucuaccccauaaagauaac

SEQ ID NO: 254905 - RNA, 24 nt, Artificial Sequence
  Synthetic
guuuaucuaccccauaaagauaac

SEQ ID NO: 254906 - RNA, 18 nt, Artificial Sequence
  Synthetic
accaugacagaagauaac

SEQ ID NO: 254907 - RNA, 19 nt, Artificial Sequence
  Synthetic
uaccaugacagaagauaac

SEQ ID NO: 254908 - RNA, 20 nt, Artificial Sequence
  Synthetic
auaccaugacagaagauaac

SEQ ID NO: 254909 - RNA, 21 nt, Artificial Sequence
  Synthetic
aauaccaugacagaagauaac

SEQ ID NO: 254910 - RNA, 22 nt, Artificial Sequence
  Synthetic
uaauaccaugacagaagauaac

SEQ ID NO: 254911 - RNA, 23 nt, Artificial Sequence
  Synthetic
guaauaccaugacagaagauaac

SEQ ID NO: 254912 - RNA, 24 nt, Artificial Sequence
  Synthetic
uguaauaccaugacagaagauaac

SEQ ID NO: 254913 - RNA, 18 nt, Artificial Sequence
  Synthetic
uacuuuugggaagauaac

SEQ ID NO: 254914 - RNA, 19 nt, Artificial Sequence
  Synthetic
auacuuuugggaagauaac

SEQ ID NO: 254915 - RNA, 20 nt, Artificial Sequence
  Synthetic
cauacuuuugggaagauaac

SEQ ID NO: 254916 - RNA, 21 nt, Artificial Sequence
  Synthetic
ccauacuuuugggaagauaac

SEQ ID NO: 254917 - RNA, 22 nt, Artificial Sequence
  Synthetic
accauacuuuugggaagauaac

SEQ ID NO: 254918 - RNA, 23 nt, Artificial Sequence
  Synthetic
caccauacuuuugggaagauaac

SEQ ID NO: 254919 - RNA, 24 nt, Artificial Sequence
  Synthetic
ucaccauacuuuugggaagauaac

SEQ ID NO: 254920 - RNA, 18 nt, Artificial Sequence
  Synthetic
uuuuauccuuaagauaac

SEQ ID NO: 254921 - RNA, 19 nt, Artificial Sequence
  Synthetic
uuuuuauccuuaagauaac

SEQ ID NO: 254922 - RNA, 20 nt, Artificial Sequence
  Synthetic
uuuuuuauccuuaagauaac

SEQ ID NO: 254923 - RNA, 21 nt, Artificial Sequence
  Synthetic
auuuuuuauccuuaagauaac

SEQ ID NO: 254924 - RNA, 22 nt, Artificial Sequence
  Synthetic
aauuuuuuauccuuaagauaac

SEQ ID NO: 254925 - RNA, 23 nt, Artificial Sequence
  Synthetic
gaauuuuuuauccuuaagauaac

SEQ ID NO: 254926 - RNA, 24 nt, Artificial Sequence
  Synthetic
ggaauuuuuuauccuuaagauaac

SEQ ID NO: 254927 - RNA, 18 nt, Artificial Sequence
  Synthetic
aagaaauuaacagauaac

SEQ ID NO: 254928 - RNA, 19 nt, Artificial Sequence
  Synthetic
caagaaauuaacagauaac

SEQ ID NO: 254929 - RNA, 20 nt, Artificial Sequence
  Synthetic
acaagaaauuaacagauaac

SEQ ID NO: 254930 - RNA, 21 nt, Artificial Sequence
  Synthetic
cacaagaaauuaacagauaac

SEQ ID NO: 254931 - RNA, 22 nt, Artificial Sequence
  Synthetic
acacaagaaauuaacagauaac

SEQ ID NO: 254932 - RNA, 23 nt, Artificial Sequence
  Synthetic
gacacaagaaauuaacagauaac

SEQ ID NO: 254933 - RNA, 24 nt, Artificial Sequence
  Synthetic
agacacaagaaauuaacagauaac

SEQ ID NO: 254934 - RNA, 18 nt, Artificial Sequence
  Synthetic
ucuucuuuuagggauaac

SEQ ID NO: 254935 - RNA, 19 nt, Artificial Sequence
  Synthetic
aucuucuuuuagggauaac

SEQ ID NO: 254936 - RNA, 20 nt, Artificial Sequence
  Synthetic
caucuucuuuuagggauaac

SEQ ID NO: 254937 - RNA, 21 nt, Artificial Sequence
  Synthetic
acaucuucuuuuagggauaac

SEQ ID NO: 254938 - RNA, 22 nt, Artificial Sequence
  Synthetic
uacaucuucuuuuagggauaac

SEQ ID NO: 254939 - RNA, 23 nt, Artificial Sequence
  Synthetic
cuacaucuucuuuuagggauaac

SEQ ID NO: 254940 - RNA, 24 nt, Artificial Sequence
  Synthetic
ccuacaucuucuuuuagggauaac

SEQ ID NO: 254941 - RNA, 18 nt, Artificial Sequence
  Synthetic
ggccuguaguuugauaac

SEQ ID NO: 254942 - RNA, 19 nt, Artificial Sequence
  Synthetic
gggccuguaguuugauaac

SEQ ID NO: 254943 - RNA, 20 nt, Artificial Sequence
  Synthetic
agggccuguaguuugauaac

SEQ ID NO: 254944 - RNA, 21 nt, Artificial Sequence
  Synthetic
cagggccuguaguuugauaac

SEQ ID NO: 254945 - RNA, 22 nt, Artificial Sequence
  Synthetic
ccagggccuguaguuugauaac

SEQ ID NO: 254946 - RNA, 23 nt, Artificial Sequence
  Synthetic
uccagggccuguaguuugauaac

SEQ ID NO: 254947 - RNA, 24 nt, Artificial Sequence
  Synthetic
cuccagggccuguaguuugauaac

SEQ ID NO: 254948 - RNA, 18 nt, Artificial Sequence
  Synthetic
auccauuaacaauauaac

SEQ ID NO: 254949 - RNA, 19 nt, Artificial Sequence
  Synthetic
uauccauuaacaauauaac

SEQ ID NO: 254950 - RNA, 20 nt, Artificial Sequence
  Synthetic
guauccauuaacaauauaac

SEQ ID NO: 254951 - RNA, 21 nt, Artificial Sequence
  Synthetic
aguauccauuaacaauauaac

SEQ ID NO: 254952 - RNA, 22 nt, Artificial Sequence
  Synthetic
aaguauccauuaacaauauaac

SEQ ID NO: 254953 - RNA, 23 nt, Artificial Sequence
  Synthetic
gaaguauccauuaacaauauaac

SEQ ID NO: 254954 - RNA, 24 nt, Artificial Sequence
  Synthetic
ugaaguauccauuaacaauauaac

SEQ ID NO: 254955 - RNA, 18 nt, Artificial Sequence
  Synthetic
uauaagaaaccauauaac

SEQ ID NO: 254956 - RNA, 19 nt, Artificial Sequence
  Synthetic
cuauaagaaaccauauaac

SEQ ID NO: 254957 - RNA, 20 nt, Artificial Sequence
  Synthetic
gcuauaagaaaccauauaac

SEQ ID NO: 254958 - RNA, 21 nt, Artificial Sequence
  Synthetic
ggcuauaagaaaccauauaac

SEQ ID NO: 254959 - RNA, 22 nt, Artificial Sequence
  Synthetic
aggcuauaagaaaccauauaac

SEQ ID NO: 254960 - RNA, 23 nt, Artificial Sequence
  Synthetic
uaggcuauaagaaaccauauaac

SEQ ID NO: 254961 - RNA, 24 nt, Artificial Sequence
  Synthetic
cuaggcuauaagaaaccauauaac

SEQ ID NO: 254962 - RNA, 18 nt, Artificial Sequence
  Synthetic
ugaggucauucauauaac

SEQ ID NO: 254963 - RNA, 19 nt, Artificial Sequence
  Synthetic
uugaggucauucauauaac

SEQ ID NO: 254964 - RNA, 20 nt, Artificial Sequence
  Synthetic
uuugaggucauucauauaac

SEQ ID NO: 254965 - RNA, 21 nt, Artificial Sequence
  Synthetic
uuuugaggucauucauauaac

SEQ ID NO: 254966 - RNA, 22 nt, Artificial Sequence
  Synthetic
auuuugaggucauucauauaac

SEQ ID NO: 254967 - RNA, 23 nt, Artificial Sequence
  Synthetic
cauuuugaggucauucauauaac

SEQ ID NO: 254968 - RNA, 24 nt, Artificial Sequence
  Synthetic
ucauuuugaggucauucauauaac

SEQ ID NO: 254969 - RNA, 18 nt, Artificial Sequence
  Synthetic
gccuauguaugauauaac

SEQ ID NO: 254970 - RNA, 19 nt, Artificial Sequence
  Synthetic
agccuauguaugauauaac

SEQ ID NO: 254971 - RNA, 20 nt, Artificial Sequence
  Synthetic
cagccuauguaugauauaac

SEQ ID NO: 254972 - RNA, 21 nt, Artificial Sequence
  Synthetic
acagccuauguaugauauaac

SEQ ID NO: 254973 - RNA, 22 nt, Artificial Sequence
  Synthetic
aacagccuauguaugauauaac

SEQ ID NO: 254974 - RNA, 23 nt, Artificial Sequence
  Synthetic
caacagccuauguaugauauaac

SEQ ID NO: 254975 - RNA, 24 nt, Artificial Sequence
  Synthetic
ccaacagccuauguaugauauaac

SEQ ID NO: 254976 - RNA, 18 nt, Artificial Sequence
  Synthetic
uuuaaacaaguauauaac

SEQ ID NO: 254977 - RNA, 19 nt, Artificial Sequence
  Synthetic
uuuuaaacaaguauauaac

SEQ ID NO: 254978 - RNA, 20 nt, Artificial Sequence
  Synthetic
uuuuuaaacaaguauauaac

SEQ ID NO: 254979 - RNA, 21 nt, Artificial Sequence
  Synthetic
guuuuuaaacaaguauauaac

SEQ ID NO: 254980 - RNA, 22 nt, Artificial Sequence
  Synthetic
gguuuuuaaacaaguauauaac

SEQ ID NO: 254981 - RNA, 23 nt, Artificial Sequence
  Synthetic
ugguuuuuaaacaaguauauaac

SEQ ID NO: 254982 - RNA, 24 nt, Artificial Sequence
  Synthetic
cugguuuuuaaacaaguauauaac

SEQ ID NO: 254983 - RNA, 18 nt, Artificial Sequence
  Synthetic
ccuggauagaccuauaac

SEQ ID NO: 254984 - RNA, 19 nt, Artificial Sequence
  Synthetic
accuggauagaccuauaac

SEQ ID NO: 254985 - RNA, 20 nt, Artificial Sequence
  Synthetic
aaccuggauagaccuauaac

SEQ ID NO: 254986 - RNA, 21 nt, Artificial Sequence
  Synthetic
uaaccuggauagaccuauaac

SEQ ID NO: 254987 - RNA, 22 nt, Artificial Sequence
  Synthetic
auaaccuggauagaccuauaac

SEQ ID NO: 254988 - RNA, 23 nt, Artificial Sequence
  Synthetic
gauaaccuggauagaccuauaac

SEQ ID NO: 254989 - RNA, 24 nt, Artificial Sequence
  Synthetic
agauaaccuggauagaccuauaac

SEQ ID NO: 254990 - RNA, 18 nt, Artificial Sequence
  Synthetic
aauguauaacuguauaac

SEQ ID NO: 254991 - RNA, 19 nt, Artificial Sequence
  Synthetic
uaauguauaacuguauaac

SEQ ID NO: 254992 - RNA, 20 nt, Artificial Sequence
  Synthetic
guaauguauaacuguauaac

SEQ ID NO: 254993 - RNA, 21 nt, Artificial Sequence
  Synthetic
uguaauguauaacuguauaac

SEQ ID NO: 254994 - RNA, 22 nt, Artificial Sequence
  Synthetic
cuguaauguauaacuguauaac

SEQ ID NO: 254995 - RNA, 23 nt, Artificial Sequence
  Synthetic
acuguaauguauaacuguauaac

SEQ ID NO: 254996 - RNA, 24 nt, Artificial Sequence
  Synthetic
aacuguaauguauaacuguauaac

SEQ ID NO: 254997 - RNA, 18 nt, Artificial Sequence
  Synthetic
ugccuacuccuguauaac

SEQ ID NO: 254998 - RNA, 19 nt, Artificial Sequence
  Synthetic
gugccuacuccuguauaac

SEQ ID NO: 254999 - RNA, 20 nt, Artificial Sequence
  Synthetic
ggugccuacuccuguauaac

SEQ ID NO: 255000 - RNA, 21 nt, Artificial Sequence
  Synthetic
aggugccuacuccuguauaac

SEQ ID NO: 255001 - RNA, 22 nt, Artificial Sequence
  Synthetic
caggugccuacuccuguauaac

SEQ ID NO: 255002 - RNA, 23 nt, Artificial Sequence
  Synthetic
gcaggugccuacuccuguauaac

SEQ ID NO: 255003 - RNA, 24 nt, Artificial Sequence
  Synthetic
agcaggugccuacuccuguauaac

SEQ ID NO: 255004 - RNA, 18 nt, Artificial Sequence
  Synthetic
agcaaaagaaauuauaac

SEQ ID NO: 255005 - RNA, 19 nt, Artificial Sequence
  Synthetic
cagcaaaagaaauuauaac

SEQ ID NO: 255006 - RNA, 20 nt, Artificial Sequence
  Synthetic
ccagcaaaagaaauuauaac

SEQ ID NO: 255007 - RNA, 21 nt, Artificial Sequence
  Synthetic
accagcaaaagaaauuauaac

SEQ ID NO: 255008 - RNA, 22 nt, Artificial Sequence
  Synthetic
aaccagcaaaagaaauuauaac

SEQ ID NO: 255009 - RNA, 23 nt, Artificial Sequence
  Synthetic
aaaccagcaaaagaaauuauaac

SEQ ID NO: 255010 - RNA, 24 nt, Artificial Sequence
  Synthetic
aaaaccagcaaaagaaauuauaac

SEQ ID NO: 255011 - RNA, 18 nt, Artificial Sequence
  Synthetic
uauguauaauauuauaac

SEQ ID NO: 255012 - RNA, 19 nt, Artificial Sequence
  Synthetic
uuauguauaauauuauaac

SEQ ID NO: 255013 - RNA, 20 nt, Artificial Sequence
  Synthetic
auuauguauaauauuauaac

SEQ ID NO: 255014 - RNA, 21 nt, Artificial Sequence
  Synthetic
uauuauguauaauauuauaac

SEQ ID NO: 255015 - RNA, 22 nt, Artificial Sequence
  Synthetic
auauuauguauaauauuauaac

SEQ ID NO: 255016 - RNA, 23 nt, Artificial Sequence
  Synthetic
gauauuauguauaauauuauaac

SEQ ID NO: 255017 - RNA, 24 nt, Artificial Sequence
  Synthetic
ugauauuauguauaauauuauaac

SEQ ID NO: 255018 - RNA, 18 nt, Artificial Sequence
  Synthetic
uagucuuaagguuauaac

SEQ ID NO: 255019 - RNA, 19 nt, Artificial Sequence
  Synthetic
cuagucuuaagguuauaac

SEQ ID NO: 255020 - RNA, 20 nt, Artificial Sequence
  Synthetic
ucuagucuuaagguuauaac

SEQ ID NO: 255021 - RNA, 21 nt, Artificial Sequence
  Synthetic
uucuagucuuaagguuauaac

SEQ ID NO: 255022 - RNA, 22 nt, Artificial Sequence
  Synthetic
auucuagucuuaagguuauaac

SEQ ID NO: 255023 - RNA, 23 nt, Artificial Sequence
  Synthetic
gauucuagucuuaagguuauaac

SEQ ID NO: 255024 - RNA, 24 nt, Artificial Sequence
  Synthetic
agauucuagucuuaagguuauaac

SEQ ID NO: 255025 - RNA, 18 nt, Artificial Sequence
  Synthetic
uuuauugcuauuuauaac

SEQ ID NO: 255026 - RNA, 19 nt, Artificial Sequence
  Synthetic
uuuuauugcuauuuauaac

SEQ ID NO: 255027 - RNA, 20 nt, Artificial Sequence
  Synthetic
auuuuauugcuauuuauaac

SEQ ID NO: 255028 - RNA, 21 nt, Artificial Sequence
  Synthetic
aauuuuauugcuauuuauaac

SEQ ID NO: 255029 - RNA, 22 nt, Artificial Sequence
  Synthetic
aaauuuuauugcuauuuauaac

SEQ ID NO: 255030 - RNA, 23 nt, Artificial Sequence
  Synthetic
uaaauuuuauugcuauuuauaac

SEQ ID NO: 255031 - RNA, 24 nt, Artificial Sequence
  Synthetic
cuaaauuuuauugcuauuuauaac

SEQ ID NO: 255032 - RNA, 18 nt, Artificial Sequence
  Synthetic
aguaaaaaucaaacuaac

SEQ ID NO: 255033 - RNA, 19 nt, Artificial Sequence
  Synthetic
uaguaaaaaucaaacuaac

SEQ ID NO: 255034 - RNA, 20 nt, Artificial Sequence
  Synthetic
uuaguaaaaaucaaacuaac

SEQ ID NO: 255035 - RNA, 21 nt, Artificial Sequence
  Synthetic
uuuaguaaaaaucaaacuaac

SEQ ID NO: 255036 - RNA, 22 nt, Artificial Sequence
  Synthetic
cuuuaguaaaaaucaaacuaac

SEQ ID NO: 255037 - RNA, 23 nt, Artificial Sequence
  Synthetic
ucuuuaguaaaaaucaaacuaac

SEQ ID NO: 255038 - RNA, 24 nt, Artificial Sequence
  Synthetic
aucuuuaguaaaaaucaaacuaac

SEQ ID NO: 255039 - RNA, 18 nt, Artificial Sequence
  Synthetic
cagugacauuccacuaac

SEQ ID NO: 255040 - RNA, 19 nt, Artificial Sequence
  Synthetic
ccagugacauuccacuaac

SEQ ID NO: 255041 - RNA, 20 nt, Artificial Sequence
  Synthetic
uccagugacauuccacuaac

SEQ ID NO: 255042 - RNA, 21 nt, Artificial Sequence
  Synthetic
uuccagugacauuccacuaac

SEQ ID NO: 255043 - RNA, 22 nt, Artificial Sequence
  Synthetic
auuccagugacauuccacuaac

SEQ ID NO: 255044 - RNA, 23 nt, Artificial Sequence
  Synthetic
gauuccagugacauuccacuaac

SEQ ID NO: 255045 - RNA, 24 nt, Artificial Sequence
  Synthetic
ugauuccagugacauuccacuaac

SEQ ID NO: 255046 - RNA, 18 nt, Artificial Sequence
  Synthetic
uuuguaacucagacuaac

SEQ ID NO: 255047 - RNA, 19 nt, Artificial Sequence
  Synthetic
auuuguaacucagacuaac

SEQ ID NO: 255048 - RNA, 20 nt, Artificial Sequence
  Synthetic
cauuuguaacucagacuaac

SEQ ID NO: 255049 - RNA, 21 nt, Artificial Sequence
  Synthetic
ucauuuguaacucagacuaac

SEQ ID NO: 255050 - RNA, 22 nt, Artificial Sequence
  Synthetic
aucauuuguaacucagacuaac

SEQ ID NO: 255051 - RNA, 23 nt, Artificial Sequence
  Synthetic
uaucauuuguaacucagacuaac

SEQ ID NO: 255052 - RNA, 24 nt, Artificial Sequence
  Synthetic
auaucauuuguaacucagacuaac

SEQ ID NO: 255053 - RNA, 18 nt, Artificial Sequence
  Synthetic
gaguauuaagauacuaac

SEQ ID NO: 255054 - RNA, 19 nt, Artificial Sequence
  Synthetic
ugaguauuaagauacuaac

SEQ ID NO: 255055 - RNA, 20 nt, Artificial Sequence
  Synthetic
augaguauuaagauacuaac

SEQ ID NO: 255056 - RNA, 21 nt, Artificial Sequence
  Synthetic
aaugaguauuaagauacuaac

SEQ ID NO: 255057 - RNA, 22 nt, Artificial Sequence
  Synthetic
uaaugaguauuaagauacuaac

SEQ ID NO: 255058 - RNA, 23 nt, Artificial Sequence
  Synthetic
auaaugaguauuaagauacuaac

SEQ ID NO: 255059 - RNA, 24 nt, Artificial Sequence
  Synthetic
aauaaugaguauuaagauacuaac

SEQ ID NO: 255060 - RNA, 18 nt, Artificial Sequence
  Synthetic
aaauaaaaauaaccuaac

SEQ ID NO: 255061 - RNA, 19 nt, Artificial Sequence
  Synthetic
aaaauaaaaauaaccuaac

SEQ ID NO: 255062 - RNA, 20 nt, Artificial Sequence
  Synthetic
caaaauaaaaauaaccuaac

SEQ ID NO: 255063 - RNA, 21 nt, Artificial Sequence
  Synthetic
acaaaauaaaaauaaccuaac

SEQ ID NO: 255064 - RNA, 22 nt, Artificial Sequence
  Synthetic
aacaaaauaaaaauaaccuaac

SEQ ID NO: 255065 - RNA, 23 nt, Artificial Sequence
  Synthetic
gaacaaaauaaaaauaaccuaac

SEQ ID NO: 255066 - RNA, 24 nt, Artificial Sequence
  Synthetic
agaacaaaauaaaaauaaccuaac

SEQ ID NO: 255067 - RNA, 18 nt, Artificial Sequence
  Synthetic
cuagauuaaggagcuaac

SEQ ID NO: 255068 - RNA, 19 nt, Artificial Sequence
  Synthetic
acuagauuaaggagcuaac

SEQ ID NO: 255069 - RNA, 20 nt, Artificial Sequence
  Synthetic
uacuagauuaaggagcuaac

SEQ ID NO: 255070 - RNA, 21 nt, Artificial Sequence
  Synthetic
cuacuagauuaaggagcuaac

SEQ ID NO: 255071 - RNA, 22 nt, Artificial Sequence
  Synthetic
ccuacuagauuaaggagcuaac

SEQ ID NO: 255072 - RNA, 23 nt, Artificial Sequence
  Synthetic
cccuacuagauuaaggagcuaac

SEQ ID NO: 255073 - RNA, 24 nt, Artificial Sequence
  Synthetic
gcccuacuagauuaaggagcuaac

SEQ ID NO: 255074 - RNA, 18 nt, Artificial Sequence
  Synthetic
acucauuuccuagcuaac

SEQ ID NO: 255075 - RNA, 19 nt, Artificial Sequence
  Synthetic
uacucauuuccuagcuaac

SEQ ID NO: 255076 - RNA, 20 nt, Artificial Sequence
  Synthetic
cuacucauuuccuagcuaac

SEQ ID NO: 255077 - RNA, 21 nt, Artificial Sequence
  Synthetic
ccuacucauuuccuagcuaac

SEQ ID NO: 255078 - RNA, 22 nt, Artificial Sequence
  Synthetic
gccuacucauuuccuagcuaac

SEQ ID NO: 255079 - RNA, 23 nt, Artificial Sequence
  Synthetic
ugccuacucauuuccuagcuaac

SEQ ID NO: 255080 - RNA, 24 nt, Artificial Sequence
  Synthetic
cugccuacucauuuccuagcuaac

SEQ ID NO: 255081 - RNA, 18 nt, Artificial Sequence
  Synthetic
cuuguaguccuggcuaac

SEQ ID NO: 255082 - RNA, 19 nt, Artificial Sequence
  Synthetic
gcuuguaguccuggcuaac

SEQ ID NO: 255083 - RNA, 20 nt, Artificial Sequence
  Synthetic
ugcuuguaguccuggcuaac

SEQ ID NO: 255084 - RNA, 21 nt, Artificial Sequence
  Synthetic
gugcuuguaguccuggcuaac

SEQ ID NO: 255085 - RNA, 22 nt, Artificial Sequence
  Synthetic
ugugcuuguaguccuggcuaac

SEQ ID NO: 255086 - RNA, 23 nt, Artificial Sequence
  Synthetic
gugugcuuguaguccuggcuaac

SEQ ID NO: 255087 - RNA, 24 nt, Artificial Sequence
  Synthetic
ugugugcuuguaguccuggcuaac

SEQ ID NO: 255088 - RNA, 18 nt, Artificial Sequence
  Synthetic
acgccauugcacucuaac

SEQ ID NO: 255089 - RNA, 19 nt, Artificial Sequence
  Synthetic
cacgccauugcacucuaac

SEQ ID NO: 255090 - RNA, 20 nt, Artificial Sequence
  Synthetic
ucacgccauugcacucuaac

SEQ ID NO: 255091 - RNA, 21 nt, Artificial Sequence
  Synthetic
aucacgccauugcacucuaac

SEQ ID NO: 255092 - RNA, 22 nt, Artificial Sequence
  Synthetic
gaucacgccauugcacucuaac

SEQ ID NO: 255093 - RNA, 23 nt, Artificial Sequence
  Synthetic
agaucacgccauugcacucuaac

SEQ ID NO: 255094 - RNA, 24 nt, Artificial Sequence
  Synthetic
gagaucacgccauugcacucuaac

SEQ ID NO: 255095 - RNA, 18 nt, Artificial Sequence
  Synthetic
auggugggacccucuaac

SEQ ID NO: 255096 - RNA, 19 nt, Artificial Sequence
  Synthetic
uauggugggacccucuaac

SEQ ID NO: 255097 - RNA, 20 nt, Artificial Sequence
  Synthetic
auauggugggacccucuaac

SEQ ID NO: 255098 - RNA, 21 nt, Artificial Sequence
  Synthetic
uauauggugggacccucuaac

SEQ ID NO: 255099 - RNA, 22 nt, Artificial Sequence
  Synthetic
guauauggugggacccucuaac

SEQ ID NO: 255100 - RNA, 23 nt, Artificial Sequence
  Synthetic
gguauauggugggacccucuaac

SEQ ID NO: 255101 - RNA, 24 nt, Artificial Sequence
  Synthetic
ggguauauggugggacccucuaac

SEQ ID NO: 255102 - RNA, 18 nt, Artificial Sequence
  Synthetic
gagguacccaagucuaac

SEQ ID NO: 255103 - RNA, 19 nt, Artificial Sequence
  Synthetic
agagguacccaagucuaac

SEQ ID NO: 255104 - RNA, 20 nt, Artificial Sequence
  Synthetic
aagagguacccaagucuaac

SEQ ID NO: 255105 - RNA, 21 nt, Artificial Sequence
  Synthetic
gaagagguacccaagucuaac

SEQ ID NO: 255106 - RNA, 22 nt, Artificial Sequence
  Synthetic
ggaagagguacccaagucuaac

SEQ ID NO: 255107 - RNA, 23 nt, Artificial Sequence
  Synthetic
uggaagagguacccaagucuaac

SEQ ID NO: 255108 - RNA, 24 nt, Artificial Sequence
  Synthetic
auggaagagguacccaagucuaac

SEQ ID NO: 255109 - RNA, 18 nt, Artificial Sequence
  Synthetic
gaggaagugaugucuaac

SEQ ID NO: 255110 - RNA, 19 nt, Artificial Sequence
  Synthetic
agaggaagugaugucuaac

SEQ ID NO: 255111 - RNA, 20 nt, Artificial Sequence
  Synthetic
uagaggaagugaugucuaac

SEQ ID NO: 255112 - RNA, 21 nt, Artificial Sequence
  Synthetic
guagaggaagugaugucuaac

SEQ ID NO: 255113 - RNA, 22 nt, Artificial Sequence
  Synthetic
uguagaggaagugaugucuaac

SEQ ID NO: 255114 - RNA, 23 nt, Artificial Sequence
  Synthetic
uuguagaggaagugaugucuaac

SEQ ID NO: 255115 - RNA, 24 nt, Artificial Sequence
  Synthetic
uuuguagaggaagugaugucuaac

SEQ ID NO: 255116 - RNA, 18 nt, Artificial Sequence
  Synthetic
uuauuccuccugucuaac

SEQ ID NO: 255117 - RNA, 19 nt, Artificial Sequence
  Synthetic
cuuauuccuccugucuaac

SEQ ID NO: 255118 - RNA, 20 nt, Artificial Sequence
  Synthetic
acuuauuccuccugucuaac

SEQ ID NO: 255119 - RNA, 21 nt, Artificial Sequence
  Synthetic
aacuuauuccuccugucuaac

SEQ ID NO: 255120 - RNA, 22 nt, Artificial Sequence
  Synthetic
gaacuuauuccuccugucuaac

SEQ ID NO: 255121 - RNA, 23 nt, Artificial Sequence
  Synthetic
agaacuuauuccuccugucuaac

SEQ ID NO: 255122 - RNA, 24 nt, Artificial Sequence
  Synthetic
cagaacuuauuccuccugucuaac

SEQ ID NO: 255123 - RNA, 18 nt, Artificial Sequence
  Synthetic
aaaaaaagcugaaguaac

SEQ ID NO: 255124 - RNA, 19 nt, Artificial Sequence
  Synthetic
uaaaaaaagcugaaguaac

SEQ ID NO: 255125 - RNA, 20 nt, Artificial Sequence
  Synthetic
uuaaaaaaagcugaaguaac

SEQ ID NO: 255126 - RNA, 21 nt, Artificial Sequence
  Synthetic
uuuaaaaaaagcugaaguaac

SEQ ID NO: 255127 - RNA, 22 nt, Artificial Sequence
  Synthetic
auuuaaaaaaagcugaaguaac

SEQ ID NO: 255128 - RNA, 23 nt, Artificial Sequence
  Synthetic
cauuuaaaaaaagcugaaguaac

SEQ ID NO: 255129 - RNA, 24 nt, Artificial Sequence
  Synthetic
ucauuuaaaaaaagcugaaguaac

SEQ ID NO: 255130 - RNA, 18 nt, Artificial Sequence
  Synthetic
gcgugacuagacaguaac

SEQ ID NO: 255131 - RNA, 19 nt, Artificial Sequence
  Synthetic
ugcgugacuagacaguaac

SEQ ID NO: 255132 - RNA, 20 nt, Artificial Sequence
  Synthetic
augcgugacuagacaguaac

SEQ ID NO: 255133 - RNA, 21 nt, Artificial Sequence
  Synthetic
aaugcgugacuagacaguaac

SEQ ID NO: 255134 - RNA, 22 nt, Artificial Sequence
  Synthetic
uaaugcgugacuagacaguaac

SEQ ID NO: 255135 - RNA, 23 nt, Artificial Sequence
  Synthetic
auaaugcgugacuagacaguaac

SEQ ID NO: 255136 - RNA, 24 nt, Artificial Sequence
  Synthetic
uauaaugcgugacuagacaguaac

SEQ ID NO: 255137 - RNA, 18 nt, Artificial Sequence
  Synthetic
gaagugauauucaguaac

SEQ ID NO: 255138 - RNA, 19 nt, Artificial Sequence
  Synthetic
agaagugauauucaguaac

SEQ ID NO: 255139 - RNA, 20 nt, Artificial Sequence
  Synthetic
aagaagugauauucaguaac

SEQ ID NO: 255140 - RNA, 21 nt, Artificial Sequence
  Synthetic
aaagaagugauauucaguaac

SEQ ID NO: 255141 - RNA, 22 nt, Artificial Sequence
  Synthetic
aaaagaagugauauucaguaac

SEQ ID NO: 255142 - RNA, 23 nt, Artificial Sequence
  Synthetic
gaaaagaagugauauucaguaac

SEQ ID NO: 255143 - RNA, 24 nt, Artificial Sequence
  Synthetic
ugaaaagaagugauauucaguaac

SEQ ID NO: 255144 - RNA, 18 nt, Artificial Sequence
  Synthetic
auauaacuauagaguaac

SEQ ID NO: 255145 - RNA, 19 nt, Artificial Sequence
  Synthetic
uauauaacuauagaguaac

SEQ ID NO: 255146 - RNA, 20 nt, Artificial Sequence
  Synthetic
auauauaacuauagaguaac

SEQ ID NO: 255147 - RNA, 21 nt, Artificial Sequence
  Synthetic
aauauauaacuauagaguaac

SEQ ID NO: 255148 - RNA, 22 nt, Artificial Sequence
  Synthetic
uaauauauaacuauagaguaac

SEQ ID NO: 255149 - RNA, 23 nt, Artificial Sequence
  Synthetic
guaauauauaacuauagaguaac

SEQ ID NO: 255150 - RNA, 24 nt, Artificial Sequence
  Synthetic
uguaauauauaacuauagaguaac

SEQ ID NO: 255151 - RNA, 18 nt, Artificial Sequence
  Synthetic
aaagagaaaaggaguaac

SEQ ID NO: 255152 - RNA, 19 nt, Artificial Sequence
  Synthetic
aaaagagaaaaggaguaac

SEQ ID NO: 255153 - RNA, 20 nt, Artificial Sequence
  Synthetic
aaaaagagaaaaggaguaac

SEQ ID NO: 255154 - RNA, 21 nt, Artificial Sequence
  Synthetic
aaaaaagagaaaaggaguaac

SEQ ID NO: 255155 - RNA, 22 nt, Artificial Sequence
  Synthetic
gaaaaaagagaaaaggaguaac

SEQ ID NO: 255156 - RNA, 23 nt, Artificial Sequence
  Synthetic
cgaaaaaagagaaaaggaguaac

SEQ ID NO: 255157 - RNA, 24 nt, Artificial Sequence
  Synthetic
gcgaaaaaagagaaaaggaguaac

SEQ ID NO: 255158 - RNA, 18 nt, Artificial Sequence
  Synthetic
uccucacaguggaguaac

SEQ ID NO: 255159 - RNA, 19 nt, Artificial Sequence
  Synthetic
guccucacaguggaguaac

SEQ ID NO: 255160 - RNA, 20 nt, Artificial Sequence
  Synthetic
uguccucacaguggaguaac

SEQ ID NO: 255161 - RNA, 21 nt, Artificial Sequence
  Synthetic
cuguccucacaguggaguaac

SEQ ID NO: 255162 - RNA, 22 nt, Artificial Sequence
  Synthetic
gcuguccucacaguggaguaac

SEQ ID NO: 255163 - RNA, 23 nt, Artificial Sequence
  Synthetic
agcuguccucacaguggaguaac

SEQ ID NO: 255164 - RNA, 24 nt, Artificial Sequence
  Synthetic
cagcuguccucacaguggaguaac

SEQ ID NO: 255165 - RNA, 18 nt, Artificial Sequence
  Synthetic
aagaugggcaugaguaac

SEQ ID NO: 255166 - RNA, 19 nt, Artificial Sequence
  Synthetic
gaagaugggcaugaguaac

SEQ ID NO: 255167 - RNA, 20 nt, Artificial Sequence
  Synthetic
ggaagaugggcaugaguaac

SEQ ID NO: 255168 - RNA, 21 nt, Artificial Sequence
  Synthetic
gggaagaugggcaugaguaac

SEQ ID NO: 255169 - RNA, 22 nt, Artificial Sequence
  Synthetic
cgggaagaugggcaugaguaac

SEQ ID NO: 255170 - RNA, 23 nt, Artificial Sequence
  Synthetic
ucgggaagaugggcaugaguaac

SEQ ID NO: 255171 - RNA, 24 nt, Artificial Sequence
  Synthetic
uucgggaagaugggcaugaguaac

SEQ ID NO: 255172 - RNA, 18 nt, Artificial Sequence
  Synthetic
gaguagaaugauaguaac

SEQ ID NO: 255173 - RNA, 19 nt, Artificial Sequence
  Synthetic
agaguagaaugauaguaac

SEQ ID NO: 255174 - RNA, 20 nt, Artificial Sequence
  Synthetic
gagaguagaaugauaguaac

SEQ ID NO: 255175 - RNA, 21 nt, Artificial Sequence
  Synthetic
agagaguagaaugauaguaac

SEQ ID NO: 255176 - RNA, 22 nt, Artificial Sequence
  Synthetic
cagagaguagaaugauaguaac

SEQ ID NO: 255177 - RNA, 23 nt, Artificial Sequence
  Synthetic
ccagagaguagaaugauaguaac

SEQ ID NO: 255178 - RNA, 24 nt, Artificial Sequence
  Synthetic
accagagaguagaaugauaguaac

SEQ ID NO: 255179 - RNA, 18 nt, Artificial Sequence
  Synthetic
gaacaguaaucagguaac

SEQ ID NO: 255180 - RNA, 19 nt, Artificial Sequence
  Synthetic
ugaacaguaaucagguaac

SEQ ID NO: 255181 - RNA, 20 nt, Artificial Sequence
  Synthetic
augaacaguaaucagguaac

SEQ ID NO: 255182 - RNA, 21 nt, Artificial Sequence
  Synthetic
aaugaacaguaaucagguaac

SEQ ID NO: 255183 - RNA, 22 nt, Artificial Sequence
  Synthetic
gaaugaacaguaaucagguaac

SEQ ID NO: 255184 - RNA, 23 nt, Artificial Sequence
  Synthetic
ugaaugaacaguaaucagguaac

SEQ ID NO: 255185 - RNA, 24 nt, Artificial Sequence
  Synthetic
uugaaugaacaguaaucagguaac

SEQ ID NO: 255186 - RNA, 18 nt, Artificial Sequence
  Synthetic
uaaaacccuuucgguaac

SEQ ID NO: 255187 - RNA, 19 nt, Artificial Sequence
  Synthetic
guaaaacccuuucgguaac

SEQ ID NO: 255188 - RNA, 20 nt, Artificial Sequence
  Synthetic
aguaaaacccuuucgguaac

SEQ ID NO: 255189 - RNA, 21 nt, Artificial Sequence
  Synthetic
caguaaaacccuuucgguaac

SEQ ID NO: 255190 - RNA, 22 nt, Artificial Sequence
  Synthetic
ccaguaaaacccuuucgguaac

SEQ ID NO: 255191 - RNA, 23 nt, Artificial Sequence
  Synthetic
accaguaaaacccuuucgguaac

SEQ ID NO: 255192 - RNA, 24 nt, Artificial Sequence
  Synthetic
caccaguaaaacccuuucgguaac

SEQ ID NO: 255193 - RNA, 18 nt, Artificial Sequence
  Synthetic
ccauguuaccaugguaac

SEQ ID NO: 255194 - RNA, 19 nt, Artificial Sequence
  Synthetic
accauguuaccaugguaac

SEQ ID NO: 255195 - RNA, 20 nt, Artificial Sequence
  Synthetic
gaccauguuaccaugguaac

SEQ ID NO: 255196 - RNA, 21 nt, Artificial Sequence
  Synthetic
ggaccauguuaccaugguaac

SEQ ID NO: 255197 - RNA, 22 nt, Artificial Sequence
  Synthetic
uggaccauguuaccaugguaac

SEQ ID NO: 255198 - RNA, 23 nt, Artificial Sequence
  Synthetic
uuggaccauguuaccaugguaac

SEQ ID NO: 255199 - RNA, 24 nt, Artificial Sequence
  Synthetic
uuuggaccauguuaccaugguaac

SEQ ID NO: 255200 - RNA, 18 nt, Artificial Sequence
  Synthetic
uucaaagugugugguaac

SEQ ID NO: 255201 - RNA, 19 nt, Artificial Sequence
  Synthetic
uuucaaagugugugguaac

SEQ ID NO: 255202 - RNA, 20 nt, Artificial Sequence
  Synthetic
uuuucaaagugugugguaac

SEQ ID NO: 255203 - RNA, 21 nt, Artificial Sequence
  Synthetic
cuuuucaaagugugugguaac

SEQ ID NO: 255204 - RNA, 22 nt, Artificial Sequence
  Synthetic
gcuuuucaaagugugugguaac

SEQ ID NO: 255205 - RNA, 23 nt, Artificial Sequence
  Synthetic
agcuuuucaaagugugugguaac

SEQ ID NO: 255206 - RNA, 24 nt, Artificial Sequence
  Synthetic
gagcuuuucaaagugugugguaac

SEQ ID NO: 255207 - RNA, 18 nt, Artificial Sequence
  Synthetic
uaugacaaaauauguaac

SEQ ID NO: 255208 - RNA, 19 nt, Artificial Sequence
  Synthetic
uuaugacaaaauauguaac

SEQ ID NO: 255209 - RNA, 20 nt, Artificial Sequence
  Synthetic
uuuaugacaaaauauguaac

SEQ ID NO: 255210 - RNA, 21 nt, Artificial Sequence
  Synthetic
cuuuaugacaaaauauguaac

SEQ ID NO: 255211 - RNA, 22 nt, Artificial Sequence
  Synthetic
acuuuaugacaaaauauguaac

SEQ ID NO: 255212 - RNA, 23 nt, Artificial Sequence
  Synthetic
gacuuuaugacaaaauauguaac

SEQ ID NO: 255213 - RNA, 24 nt, Artificial Sequence
  Synthetic
agacuuuaugacaaaauauguaac

SEQ ID NO: 255214 - RNA, 18 nt, Artificial Sequence
  Synthetic
auaacaaaaaacuguaac

SEQ ID NO: 255215 - RNA, 19 nt, Artificial Sequence
  Synthetic
uauaacaaaaaacuguaac

SEQ ID NO: 255216 - RNA, 20 nt, Artificial Sequence
  Synthetic
uuauaacaaaaaacuguaac

SEQ ID NO: 255217 - RNA, 21 nt, Artificial Sequence
  Synthetic
auuauaacaaaaaacuguaac

SEQ ID NO: 255218 - RNA, 22 nt, Artificial Sequence
  Synthetic
cauuauaacaaaaaacuguaac

SEQ ID NO: 255219 - RNA, 23 nt, Artificial Sequence
  Synthetic
acauuauaacaaaaaacuguaac

SEQ ID NO: 255220 - RNA, 24 nt, Artificial Sequence
  Synthetic
aacauuauaacaaaaaacuguaac

SEQ ID NO: 255221 - RNA, 18 nt, Artificial Sequence
  Synthetic
gaggagaacugcuguaac

SEQ ID NO: 255222 - RNA, 19 nt, Artificial Sequence
  Synthetic
ugaggagaacugcuguaac

SEQ ID NO: 255223 - RNA, 20 nt, Artificial Sequence
  Synthetic
gugaggagaacugcuguaac

SEQ ID NO: 255224 - RNA, 21 nt, Artificial Sequence
  Synthetic
agugaggagaacugcuguaac

SEQ ID NO: 255225 - RNA, 22 nt, Artificial Sequence
  Synthetic
uagugaggagaacugcuguaac

SEQ ID NO: 255226 - RNA, 23 nt, Artificial Sequence
  Synthetic
guagugaggagaacugcuguaac

SEQ ID NO: 255227 - RNA, 24 nt, Artificial Sequence
  Synthetic
gguagugaggagaacugcuguaac

SEQ ID NO: 255228 - RNA, 18 nt, Artificial Sequence
  Synthetic
uauccugguuucuguaac

SEQ ID NO: 255229 - RNA, 19 nt, Artificial Sequence
  Synthetic
cuauccugguuucuguaac

SEQ ID NO: 255230 - RNA, 20 nt, Artificial Sequence
  Synthetic
gcuauccugguuucuguaac

SEQ ID NO: 255231 - RNA, 21 nt, Artificial Sequence
  Synthetic
agcuauccugguuucuguaac

SEQ ID NO: 255232 - RNA, 22 nt, Artificial Sequence
  Synthetic
aagcuauccugguuucuguaac

SEQ ID NO: 255233 - RNA, 23 nt, Artificial Sequence
  Synthetic
aaagcuauccugguuucuguaac

SEQ ID NO: 255234 - RNA, 24 nt, Artificial Sequence
  Synthetic
caaagcuauccugguuucuguaac

SEQ ID NO: 255235 - RNA, 18 nt, Artificial Sequence
  Synthetic
ucacugucauuuuguaac

SEQ ID NO: 255236 - RNA, 19 nt, Artificial Sequence
  Synthetic
uucacugucauuuuguaac

SEQ ID NO: 255237 - RNA, 20 nt, Artificial Sequence
  Synthetic
uuucacugucauuuuguaac

SEQ ID NO: 255238 - RNA, 21 nt, Artificial Sequence
  Synthetic
uuuucacugucauuuuguaac

SEQ ID NO: 255239 - RNA, 22 nt, Artificial Sequence
  Synthetic
uuuuucacugucauuuuguaac

SEQ ID NO: 255240 - RNA, 23 nt, Artificial Sequence
  Synthetic
uuuuuucacugucauuuuguaac

SEQ ID NO: 255241 - RNA, 24 nt, Artificial Sequence
  Synthetic
uuuuuuucacugucauuuuguaac

SEQ ID NO: 255242 - RNA, 18 nt, Artificial Sequence
  Synthetic
agaacuaggcaaauuaac

SEQ ID NO: 255243 - RNA, 19 nt, Artificial Sequence
  Synthetic
aagaacuaggcaaauuaac

SEQ ID NO: 255244 - RNA, 20 nt, Artificial Sequence
  Synthetic
aaagaacuaggcaaauuaac

SEQ ID NO: 255245 - RNA, 21 nt, Artificial Sequence
  Synthetic
aaaagaacuaggcaaauuaac

SEQ ID NO: 255246 - RNA, 22 nt, Artificial Sequence
  Synthetic
uaaaagaacuaggcaaauuaac

SEQ ID NO: 255247 - RNA, 23 nt, Artificial Sequence
  Synthetic
guaaaagaacuaggcaaauuaac

SEQ ID NO: 255248 - RNA, 24 nt, Artificial Sequence
  Synthetic
gguaaaagaacuaggcaaauuaac

SEQ ID NO: 255249 - RNA, 18 nt, Artificial Sequence
  Synthetic
ucgccagaauaaauuaac

SEQ ID NO: 255250 - RNA, 19 nt, Artificial Sequence
  Synthetic
cucgccagaauaaauuaac

SEQ ID NO: 255251 - RNA, 20 nt, Artificial Sequence
  Synthetic
ucucgccagaauaaauuaac

SEQ ID NO: 255252 - RNA, 21 nt, Artificial Sequence
  Synthetic
uucucgccagaauaaauuaac

SEQ ID NO: 255253 - RNA, 22 nt, Artificial Sequence
  Synthetic
cuucucgccagaauaaauuaac

SEQ ID NO: 255254 - RNA, 23 nt, Artificial Sequence
  Synthetic
acuucucgccagaauaaauuaac

SEQ ID NO: 255255 - RNA, 24 nt, Artificial Sequence
  Synthetic
cacuucucgccagaauaaauuaac

SEQ ID NO: 255256 - RNA, 18 nt, Artificial Sequence
  Synthetic
aaaauuauuuaaauuaac

SEQ ID NO: 255257 - RNA, 19 nt, Artificial Sequence
  Synthetic
gaaaauuauuuaaauuaac

SEQ ID NO: 255258 - RNA, 20 nt, Artificial Sequence
  Synthetic
ugaaaauuauuuaaauuaac

SEQ ID NO: 255259 - RNA, 21 nt, Artificial Sequence
  Synthetic
augaaaauuauuuaaauuaac

SEQ ID NO: 255260 - RNA, 22 nt, Artificial Sequence
  Synthetic
gaugaaaauuauuuaaauuaac

SEQ ID NO: 255261 - RNA, 23 nt, Artificial Sequence
  Synthetic
agaugaaaauuauuuaaauuaac

SEQ ID NO: 255262 - RNA, 24 nt, Artificial Sequence
  Synthetic
gagaugaaaauuauuuaaauuaac

SEQ ID NO: 255263 - RNA, 18 nt, Artificial Sequence
  Synthetic
ugcauguaccacauuaac

SEQ ID NO: 255264 - RNA, 19 nt, Artificial Sequence
  Synthetic
gugcauguaccacauuaac

SEQ ID NO: 255265 - RNA, 20 nt, Artificial Sequence
  Synthetic
ugugcauguaccacauuaac

SEQ ID NO: 255266 - RNA, 21 nt, Artificial Sequence
  Synthetic
augugcauguaccacauuaac

SEQ ID NO: 255267 - RNA, 22 nt, Artificial Sequence
  Synthetic
caugugcauguaccacauuaac

SEQ ID NO: 255268 - RNA, 23 nt, Artificial Sequence
  Synthetic
acaugugcauguaccacauuaac

SEQ ID NO: 255269 - RNA, 24 nt, Artificial Sequence
  Synthetic
uacaugugcauguaccacauuaac

SEQ ID NO: 255270 - RNA, 18 nt, Artificial Sequence
  Synthetic
cuugaacagugcauuaac

SEQ ID NO: 255271 - RNA, 19 nt, Artificial Sequence
  Synthetic
acuugaacagugcauuaac

SEQ ID NO: 255272 - RNA, 20 nt, Artificial Sequence
  Synthetic
uacuugaacagugcauuaac

SEQ ID NO: 255273 - RNA, 21 nt, Artificial Sequence
  Synthetic
cuacuugaacagugcauuaac

SEQ ID NO: 255274 - RNA, 22 nt, Artificial Sequence
  Synthetic
ucuacuugaacagugcauuaac

SEQ ID NO: 255275 - RNA, 23 nt, Artificial Sequence
  Synthetic
uucuacuugaacagugcauuaac

SEQ ID NO: 255276 - RNA, 24 nt, Artificial Sequence
  Synthetic
uuucuacuugaacagugcauuaac

SEQ ID NO: 255277 - RNA, 18 nt, Artificial Sequence
  Synthetic
aauccuuagaucauuaac

SEQ ID NO: 255278 - RNA, 19 nt, Artificial Sequence
  Synthetic
aaauccuuagaucauuaac

SEQ ID NO: 255279 - RNA, 20 nt, Artificial Sequence
  Synthetic
uaaauccuuagaucauuaac

SEQ ID NO: 255280 - RNA, 21 nt, Artificial Sequence
  Synthetic
cuaaauccuuagaucauuaac

SEQ ID NO: 255281 - RNA, 22 nt, Artificial Sequence
  Synthetic
gcuaaauccuuagaucauuaac

SEQ ID NO: 255282 - RNA, 23 nt, Artificial Sequence
  Synthetic
agcuaaauccuuagaucauuaac

SEQ ID NO: 255283 - RNA, 24 nt, Artificial Sequence
  Synthetic
aagcuaaauccuuagaucauuaac

SEQ ID NO: 255284 - RNA, 18 nt, Artificial Sequence
  Synthetic
aacaugcaugucauuaac

SEQ ID NO: 255285 - RNA, 19 nt, Artificial Sequence
  Synthetic
caacaugcaugucauuaac

SEQ ID NO: 255286 - RNA, 20 nt, Artificial Sequence
  Synthetic
ucaacaugcaugucauuaac

SEQ ID NO: 255287 - RNA, 21 nt, Artificial Sequence
  Synthetic
uucaacaugcaugucauuaac

SEQ ID NO: 255288 - RNA, 22 nt, Artificial Sequence
  Synthetic
cuucaacaugcaugucauuaac

SEQ ID NO: 255289 - RNA, 23 nt, Artificial Sequence
  Synthetic
ucuucaacaugcaugucauuaac

SEQ ID NO: 255290 - RNA, 24 nt, Artificial Sequence
  Synthetic
uucuucaacaugcaugucauuaac

SEQ ID NO: 255291 - RNA, 18 nt, Artificial Sequence
  Synthetic
acacggguaaagauuaac

SEQ ID NO: 255292 - RNA, 19 nt, Artificial Sequence
  Synthetic
uacacggguaaagauuaac

SEQ ID NO: 255293 - RNA, 20 nt, Artificial Sequence
  Synthetic
uuacacggguaaagauuaac

SEQ ID NO: 255294 - RNA, 21 nt, Artificial Sequence
  Synthetic
uuuacacggguaaagauuaac

SEQ ID NO: 255295 - RNA, 22 nt, Artificial Sequence
  Synthetic
uuuuacacggguaaagauuaac

SEQ ID NO: 255296 - RNA, 23 nt, Artificial Sequence
  Synthetic
cuuuuacacggguaaagauuaac

SEQ ID NO: 255297 - RNA, 24 nt, Artificial Sequence
  Synthetic
ucuuuuacacggguaaagauuaac

SEQ ID NO: 255298 - RNA, 18 nt, Artificial Sequence
  Synthetic
ugugugccuaagauuaac

SEQ ID NO: 255299 - RNA, 19 nt, Artificial Sequence
  Synthetic
cugugugccuaagauuaac

SEQ ID NO: 255300 - RNA, 20 nt, Artificial Sequence
  Synthetic
ucugugugccuaagauuaac

SEQ ID NO: 255301 - RNA, 21 nt, Artificial Sequence
  Synthetic
gucugugugccuaagauuaac

SEQ ID NO: 255302 - RNA, 22 nt, Artificial Sequence
  Synthetic
agucugugugccuaagauuaac

SEQ ID NO: 255303 - RNA, 23 nt, Artificial Sequence
  Synthetic
gagucugugugccuaagauuaac

SEQ ID NO: 255304 - RNA, 24 nt, Artificial Sequence
  Synthetic
ugagucugugugccuaagauuaac

SEQ ID NO: 255305 - RNA, 18 nt, Artificial Sequence
  Synthetic
gacaaaagacagauuaac

SEQ ID NO: 255306 - RNA, 19 nt, Artificial Sequence
  Synthetic
ugacaaaagacagauuaac

SEQ ID NO: 255307 - RNA, 20 nt, Artificial Sequence
  Synthetic
gugacaaaagacagauuaac

SEQ ID NO: 255308 - RNA, 21 nt, Artificial Sequence
  Synthetic
agugacaaaagacagauuaac

SEQ ID NO: 255309 - RNA, 22 nt, Artificial Sequence
  Synthetic
gagugacaaaagacagauuaac

SEQ ID NO: 255310 - RNA, 23 nt, Artificial Sequence
  Synthetic
agagugacaaaagacagauuaac

SEQ ID NO: 255311 - RNA, 24 nt, Artificial Sequence
  Synthetic
uagagugacaaaagacagauuaac

SEQ ID NO: 255312 - RNA, 18 nt, Artificial Sequence
  Synthetic
gaaaaugaauagauuaac

SEQ ID NO: 255313 - RNA, 19 nt, Artificial Sequence
  Synthetic
ggaaaaugaauagauuaac

SEQ ID NO: 255314 - RNA, 20 nt, Artificial Sequence
  Synthetic
uggaaaaugaauagauuaac

SEQ ID NO: 255315 - RNA, 21 nt, Artificial Sequence
  Synthetic
cuggaaaaugaauagauuaac

SEQ ID NO: 255316 - RNA, 22 nt, Artificial Sequence
  Synthetic
ucuggaaaaugaauagauuaac

SEQ ID NO: 255317 - RNA, 23 nt, Artificial Sequence
  Synthetic
uucuggaaaaugaauagauuaac

SEQ ID NO: 255318 - RNA, 24 nt, Artificial Sequence
  Synthetic
cuucuggaaaaugaauagauuaac

SEQ ID NO: 255319 - RNA, 18 nt, Artificial Sequence
  Synthetic
guuuuugcucugauuaac

SEQ ID NO: 255320 - RNA, 19 nt, Artificial Sequence
  Synthetic
cguuuuugcucugauuaac

SEQ ID NO: 255321 - RNA, 20 nt, Artificial Sequence
  Synthetic
acguuuuugcucugauuaac

SEQ ID NO: 255322 - RNA, 21 nt, Artificial Sequence
  Synthetic
aacguuuuugcucugauuaac

SEQ ID NO: 255323 - RNA, 22 nt, Artificial Sequence
  Synthetic
caacguuuuugcucugauuaac

SEQ ID NO: 255324 - RNA, 23 nt, Artificial Sequence
  Synthetic
ccaacguuuuugcucugauuaac

SEQ ID NO: 255325 - RNA, 24 nt, Artificial Sequence
  Synthetic
uccaacguuuuugcucugauuaac

SEQ ID NO: 255326 - RNA, 18 nt, Artificial Sequence
  Synthetic
uugugaguugugauuaac

SEQ ID NO: 255327 - RNA, 19 nt, Artificial Sequence
  Synthetic
uuugugaguugugauuaac

SEQ ID NO: 255328 - RNA, 20 nt, Artificial Sequence
  Synthetic
cuuugugaguugugauuaac

SEQ ID NO: 255329 - RNA, 21 nt, Artificial Sequence
  Synthetic
ccuuugugaguugugauuaac

SEQ ID NO: 255330 - RNA, 22 nt, Artificial Sequence
  Synthetic
accuuugugaguugugauuaac

SEQ ID NO: 255331 - RNA, 23 nt, Artificial Sequence
  Synthetic
uaccuuugugaguugugauuaac

SEQ ID NO: 255332 - RNA, 24 nt, Artificial Sequence
  Synthetic
uuaccuuugugaguugugauuaac

SEQ ID NO: 255333 - RNA, 18 nt, Artificial Sequence
  Synthetic
aagugacaggguauuaac

SEQ ID NO: 255334 - RNA, 19 nt, Artificial Sequence
  Synthetic
aaagugacaggguauuaac

SEQ ID NO: 255335 - RNA, 20 nt, Artificial Sequence
  Synthetic
caaagugacaggguauuaac

SEQ ID NO: 255336 - RNA, 21 nt, Artificial Sequence
  Synthetic
ccaaagugacaggguauuaac

SEQ ID NO: 255337 - RNA, 22 nt, Artificial Sequence
  Synthetic
cccaaagugacaggguauuaac

SEQ ID NO: 255338 - RNA, 23 nt, Artificial Sequence
  Synthetic
gcccaaagugacaggguauuaac

SEQ ID NO: 255339 - RNA, 24 nt, Artificial Sequence
  Synthetic
agcccaaagugacaggguauuaac

SEQ ID NO: 255340 - RNA, 18 nt, Artificial Sequence
  Synthetic
guuacuucgcaacuuaac

SEQ ID NO: 255341 - RNA, 19 nt, Artificial Sequence
  Synthetic
aguuacuucgcaacuuaac

SEQ ID NO: 255342 - RNA, 20 nt, Artificial Sequence
  Synthetic
aaguuacuucgcaacuuaac

SEQ ID NO: 255343 - RNA, 21 nt, Artificial Sequence
  Synthetic
aaaguuacuucgcaacuuaac

SEQ ID NO: 255344 - RNA, 22 nt, Artificial Sequence
  Synthetic
aaaaguuacuucgcaacuuaac

SEQ ID NO: 255345 - RNA, 23 nt, Artificial Sequence
  Synthetic
uaaaaguuacuucgcaacuuaac

SEQ ID NO: 255346 - RNA, 24 nt, Artificial Sequence
  Synthetic
cuaaaaguuacuucgcaacuuaac

SEQ ID NO: 255347 - RNA, 18 nt, Artificial Sequence
  Synthetic
uuaaaauauugacuuaac

SEQ ID NO: 255348 - RNA, 19 nt, Artificial Sequence
  Synthetic
uuuaaaauauugacuuaac

SEQ ID NO: 255349 - RNA, 20 nt, Artificial Sequence
  Synthetic
uuuuaaaauauugacuuaac

SEQ ID NO: 255350 - RNA, 21 nt, Artificial Sequence
  Synthetic
cuuuuaaaauauugacuuaac

SEQ ID NO: 255351 - RNA, 22 nt, Artificial Sequence
  Synthetic
ucuuuuaaaauauugacuuaac

SEQ ID NO: 255352 - RNA, 23 nt, Artificial Sequence
  Synthetic
gucuuuuaaaauauugacuuaac

SEQ ID NO: 255353 - RNA, 24 nt, Artificial Sequence
  Synthetic
agucuuuuaaaauauugacuuaac

SEQ ID NO: 255354 - RNA, 18 nt, Artificial Sequence
  Synthetic
uuguuaaauauacuuaac

SEQ ID NO: 255355 - RNA, 19 nt, Artificial Sequence
  Synthetic
guuguuaaauauacuuaac

SEQ ID NO: 255356 - RNA, 20 nt, Artificial Sequence
  Synthetic
aguuguuaaauauacuuaac

SEQ ID NO: 255357 - RNA, 21 nt, Artificial Sequence
  Synthetic
aaguuguuaaauauacuuaac

SEQ ID NO: 255358 - RNA, 22 nt, Artificial Sequence
  Synthetic
uaaguuguuaaauauacuuaac

SEQ ID NO: 255359 - RNA, 23 nt, Artificial Sequence
  Synthetic
cuaaguuguuaaauauacuuaac

SEQ ID NO: 255360 - RNA, 24 nt, Artificial Sequence
  Synthetic
ucuaaguuguuaaauauacuuaac

SEQ ID NO: 255361 - RNA, 18 nt, Artificial Sequence
  Synthetic
cgcucucuucuccuuaac

SEQ ID NO: 255362 - RNA, 19 nt, Artificial Sequence
  Synthetic
ucgcucucuucuccuuaac

SEQ ID NO: 255363 - RNA, 20 nt, Artificial Sequence
  Synthetic
uucgcucucuucuccuuaac

SEQ ID NO: 255364 - RNA, 21 nt, Artificial Sequence
  Synthetic
uuucgcucucuucuccuuaac

SEQ ID NO: 255365 - RNA, 22 nt, Artificial Sequence
  Synthetic
uuuucgcucucuucuccuuaac

SEQ ID NO: 255366 - RNA, 23 nt, Artificial Sequence
  Synthetic
cuuuucgcucucuucuccuuaac

SEQ ID NO: 255367 - RNA, 24 nt, Artificial Sequence
  Synthetic
acuuuucgcucucuucuccuuaac

SEQ ID NO: 255368 - RNA, 18 nt, Artificial Sequence
  Synthetic
caaaguaaugugcuuaac

SEQ ID NO: 255369 - RNA, 19 nt, Artificial Sequence
  Synthetic
acaaaguaaugugcuuaac

SEQ ID NO: 255370 - RNA, 20 nt, Artificial Sequence
  Synthetic
gacaaaguaaugugcuuaac

SEQ ID NO: 255371 - RNA, 21 nt, Artificial Sequence
  Synthetic
agacaaaguaaugugcuuaac

SEQ ID NO: 255372 - RNA, 22 nt, Artificial Sequence
  Synthetic
gagacaaaguaaugugcuuaac

SEQ ID NO: 255373 - RNA, 23 nt, Artificial Sequence
  Synthetic
ggagacaaaguaaugugcuuaac

SEQ ID NO: 255374 - RNA, 24 nt, Artificial Sequence
  Synthetic
gggagacaaaguaaugugcuuaac

SEQ ID NO: 255375 - RNA, 18 nt, Artificial Sequence
  Synthetic
uguauguagaagguuaac

SEQ ID NO: 255376 - RNA, 19 nt, Artificial Sequence
  Synthetic
uuguauguagaagguuaac

SEQ ID NO: 255377 - RNA, 20 nt, Artificial Sequence
  Synthetic
uuuguauguagaagguuaac

SEQ ID NO: 255378 - RNA, 21 nt, Artificial Sequence
  Synthetic
auuuguauguagaagguuaac

SEQ ID NO: 255379 - RNA, 22 nt, Artificial Sequence
  Synthetic
gauuuguauguagaagguuaac

SEQ ID NO: 255380 - RNA, 23 nt, Artificial Sequence
  Synthetic
agauuuguauguagaagguuaac

SEQ ID NO: 255381 - RNA, 24 nt, Artificial Sequence
  Synthetic
gagauuuguauguagaagguuaac

SEQ ID NO: 255382 - RNA, 18 nt, Artificial Sequence
  Synthetic
caaugcucacugguuaac

SEQ ID NO: 255383 - RNA, 19 nt, Artificial Sequence
  Synthetic
acaaugcucacugguuaac

SEQ ID NO: 255384 - RNA, 20 nt, Artificial Sequence
  Synthetic
aacaaugcucacugguuaac

SEQ ID NO: 255385 - RNA, 21 nt, Artificial Sequence
  Synthetic
caacaaugcucacugguuaac

SEQ ID NO: 255386 - RNA, 22 nt, Artificial Sequence
  Synthetic
ucaacaaugcucacugguuaac

SEQ ID NO: 255387 - RNA, 23 nt, Artificial Sequence
  Synthetic
uucaacaaugcucacugguuaac

SEQ ID NO: 255388 - RNA, 24 nt, Artificial Sequence
  Synthetic
cuucaacaaugcucacugguuaac

SEQ ID NO: 255389 - RNA, 18 nt, Artificial Sequence
  Synthetic
caggugaaauugguuaac

SEQ ID NO: 255390 - RNA, 19 nt, Artificial Sequence
  Synthetic
gcaggugaaauugguuaac

SEQ ID NO: 255391 - RNA, 20 nt, Artificial Sequence
  Synthetic
ugcaggugaaauugguuaac

SEQ ID NO: 255392 - RNA, 21 nt, Artificial Sequence
  Synthetic
gugcaggugaaauugguuaac

SEQ ID NO: 255393 - RNA, 22 nt, Artificial Sequence
  Synthetic
ugugcaggugaaauugguuaac

SEQ ID NO: 255394 - RNA, 23 nt, Artificial Sequence
  Synthetic
gugugcaggugaaauugguuaac

SEQ ID NO: 255395 - RNA, 24 nt, Artificial Sequence
  Synthetic
agugugcaggugaaauugguuaac

SEQ ID NO: 255396 - RNA, 18 nt, Artificial Sequence
  Synthetic
auacuuucagauguuaac

SEQ ID NO: 255397 - RNA, 19 nt, Artificial Sequence
  Synthetic
aauacuuucagauguuaac

SEQ ID NO: 255398 - RNA, 20 nt, Artificial Sequence
  Synthetic
gaauacuuucagauguuaac

SEQ ID NO: 255399 - RNA, 21 nt, Artificial Sequence
  Synthetic
ugaauacuuucagauguuaac

SEQ ID NO: 255400 - RNA, 22 nt, Artificial Sequence
  Synthetic
gugaauacuuucagauguuaac

SEQ ID NO: 255401 - RNA, 23 nt, Artificial Sequence
  Synthetic
ggugaauacuuucagauguuaac

SEQ ID NO: 255402 - RNA, 24 nt, Artificial Sequence
  Synthetic
gggugaauacuuucagauguuaac

SEQ ID NO: 255403 - RNA, 18 nt, Artificial Sequence
  Synthetic
auuguaaauuaauuuaac

SEQ ID NO: 255404 - RNA, 19 nt, Artificial Sequence
  Synthetic
cauuguaaauuaauuuaac

SEQ ID NO: 255405 - RNA, 20 nt, Artificial Sequence
  Synthetic
gcauuguaaauuaauuuaac

SEQ ID NO: 255406 - RNA, 21 nt, Artificial Sequence
  Synthetic
agcauuguaaauuaauuuaac

SEQ ID NO: 255407 - RNA, 22 nt, Artificial Sequence
  Synthetic
uagcauuguaaauuaauuuaac

SEQ ID NO: 255408 - RNA, 23 nt, Artificial Sequence
  Synthetic
auagcauuguaaauuaauuuaac

SEQ ID NO: 255409 - RNA, 24 nt, Artificial Sequence
  Synthetic
uauagcauuguaaauuaauuuaac

SEQ ID NO: 255410 - RNA, 18 nt, Artificial Sequence
  Synthetic
guguuaaugacauuuaac

SEQ ID NO: 255411 - RNA, 19 nt, Artificial Sequence
  Synthetic
uguguuaaugacauuuaac

SEQ ID NO: 255412 - RNA, 20 nt, Artificial Sequence
  Synthetic
cuguguuaaugacauuuaac

SEQ ID NO: 255413 - RNA, 21 nt, Artificial Sequence
  Synthetic
acuguguuaaugacauuuaac

SEQ ID NO: 255414 - RNA, 22 nt, Artificial Sequence
  Synthetic
uacuguguuaaugacauuuaac

SEQ ID NO: 255415 - RNA, 23 nt, Artificial Sequence
  Synthetic
uuacuguguuaaugacauuuaac

SEQ ID NO: 255416 - RNA, 24 nt, Artificial Sequence
  Synthetic
uuuacuguguuaaugacauuuaac

SEQ ID NO: 255417 - RNA, 18 nt, Artificial Sequence
  Synthetic
uaauuaaaguuauuuaac

SEQ ID NO: 255418 - RNA, 19 nt, Artificial Sequence
  Synthetic
uuaauuaaaguuauuuaac

SEQ ID NO: 255419 - RNA, 20 nt, Artificial Sequence
  Synthetic
guuaauuaaaguuauuuaac

SEQ ID NO: 255420 - RNA, 21 nt, Artificial Sequence
  Synthetic
uguuaauuaaaguuauuuaac

SEQ ID NO: 255421 - RNA, 22 nt, Artificial Sequence
  Synthetic
cuguuaauuaaaguuauuuaac

SEQ ID NO: 255422 - RNA, 23 nt, Artificial Sequence
  Synthetic
ucuguuaauuaaaguuauuuaac

SEQ ID NO: 255423 - RNA, 24 nt, Artificial Sequence
  Synthetic
gucuguuaauuaaaguuauuuaac

SEQ ID NO: 255424 - RNA, 18 nt, Artificial Sequence
  Synthetic
agagaaggccccuuuaac

SEQ ID NO: 255425 - RNA, 19 nt, Artificial Sequence
  Synthetic
uagagaaggccccuuuaac

SEQ ID NO: 255426 - RNA, 20 nt, Artificial Sequence
  Synthetic
guagagaaggccccuuuaac

SEQ ID NO: 255427 - RNA, 21 nt, Artificial Sequence
  Synthetic
aguagagaaggccccuuuaac

SEQ ID NO: 255428 - RNA, 22 nt, Artificial Sequence
  Synthetic
uaguagagaaggccccuuuaac

SEQ ID NO: 255429 - RNA, 23 nt, Artificial Sequence
  Synthetic
guaguagagaaggccccuuuaac

SEQ ID NO: 255430 - RNA, 24 nt, Artificial Sequence
  Synthetic
aguaguagagaaggccccuuuaac

SEQ ID NO: 255431 - RNA, 18 nt, Artificial Sequence
  Synthetic
ugcugguaaauguuuaac

SEQ ID NO: 255432 - RNA, 19 nt, Artificial Sequence
  Synthetic
uugcugguaaauguuuaac

SEQ ID NO: 255433 - RNA, 20 nt, Artificial Sequence
  Synthetic
uuugcugguaaauguuuaac

SEQ ID NO: 255434 - RNA, 21 nt, Artificial Sequence
  Synthetic
guuugcugguaaauguuuaac

SEQ ID NO: 255435 - RNA, 22 nt, Artificial Sequence
  Synthetic
gguuugcugguaaauguuuaac

SEQ ID NO: 255436 - RNA, 23 nt, Artificial Sequence
  Synthetic
ugguuugcugguaaauguuuaac

SEQ ID NO: 255437 - RNA, 24 nt, Artificial Sequence
  Synthetic
gugguuugcugguaaauguuuaac

SEQ ID NO: 255438 - RNA, 18 nt, Artificial Sequence
  Synthetic
agcucggugauuuuuaac

SEQ ID NO: 255439 - RNA, 19 nt, Artificial Sequence
  Synthetic
aagcucggugauuuuuaac

SEQ ID NO: 255440 - RNA, 20 nt, Artificial Sequence
  Synthetic
uaagcucggugauuuuuaac

SEQ ID NO: 255441 - RNA, 21 nt, Artificial Sequence
  Synthetic
auaagcucggugauuuuuaac

SEQ ID NO: 255442 - RNA, 22 nt, Artificial Sequence
  Synthetic
aauaagcucggugauuuuuaac

SEQ ID NO: 255443 - RNA, 23 nt, Artificial Sequence
  Synthetic
aaauaagcucggugauuuuuaac

SEQ ID NO: 255444 - RNA, 24 nt, Artificial Sequence
  Synthetic
aaaauaagcucggugauuuuuaac

SEQ ID NO: 255445 - RNA, 18 nt, Artificial Sequence
  Synthetic
gccauugggguuuuuaac

SEQ ID NO: 255446 - RNA, 19 nt, Artificial Sequence
  Synthetic
agccauugggguuuuuaac

SEQ ID NO: 255447 - RNA, 20 nt, Artificial Sequence
  Synthetic
aagccauugggguuuuuaac

SEQ ID NO: 255448 - RNA, 21 nt, Artificial Sequence
  Synthetic
uaagccauugggguuuuuaac

SEQ ID NO: 255449 - RNA, 22 nt, Artificial Sequence
  Synthetic
uuaagccauugggguuuuuaac

SEQ ID NO: 255450 - RNA, 23 nt, Artificial Sequence
  Synthetic
guuaagccauugggguuuuuaac

SEQ ID NO: 255451 - RNA, 24 nt, Artificial Sequence
  Synthetic
uguuaagccauugggguuuuuaac

SEQ ID NO: 255452 - RNA, 18 nt, Artificial Sequence
  Synthetic
uuauugaguguuuuuaac

SEQ ID NO: 255453 - RNA, 19 nt, Artificial Sequence
  Synthetic
uuuauugaguguuuuuaac

SEQ ID NO: 255454 - RNA, 20 nt, Artificial Sequence
  Synthetic
guuuauugaguguuuuuaac

SEQ ID NO: 255455 - RNA, 21 nt, Artificial Sequence
  Synthetic
aguuuauugaguguuuuuaac

SEQ ID NO: 255456 - RNA, 22 nt, Artificial Sequence
  Synthetic
uaguuuauugaguguuuuuaac

SEQ ID NO: 255457 - RNA, 23 nt, Artificial Sequence
  Synthetic
cuaguuuauugaguguuuuuaac

SEQ ID NO: 255458 - RNA, 24 nt, Artificial Sequence
  Synthetic
acuaguuuauugaguguuuuuaac

SEQ ID NO: 255459 - RNA, 18 nt, Artificial Sequence
  Synthetic
uaugcagccaaaaaacac

SEQ ID NO: 255460 - RNA, 19 nt, Artificial Sequence
  Synthetic
uuaugcagccaaaaaacac

SEQ ID NO: 255461 - RNA, 20 nt, Artificial Sequence
  Synthetic
uuuaugcagccaaaaaacac

SEQ ID NO: 255462 - RNA, 21 nt, Artificial Sequence
  Synthetic
auuuaugcagccaaaaaacac

SEQ ID NO: 255463 - RNA, 22 nt, Artificial Sequence
  Synthetic
cauuuaugcagccaaaaaacac

SEQ ID NO: 255464 - RNA, 23 nt, Artificial Sequence
  Synthetic
acauuuaugcagccaaaaaacac

SEQ ID NO: 255465 - RNA, 24 nt, Artificial Sequence
  Synthetic
gacauuuaugcagccaaaaaacac

SEQ ID NO: 255466 - RNA, 18 nt, Artificial Sequence
  Synthetic
uguaaaagagaaaaacac

SEQ ID NO: 255467 - RNA, 19 nt, Artificial Sequence
  Synthetic
auguaaaagagaaaaacac

SEQ ID NO: 255468 - RNA, 20 nt, Artificial Sequence
  Synthetic
gauguaaaagagaaaaacac

SEQ ID NO: 255469 - RNA, 21 nt, Artificial Sequence
  Synthetic
cgauguaaaagagaaaaacac

SEQ ID NO: 255470 - RNA, 22 nt, Artificial Sequence
  Synthetic
acgauguaaaagagaaaaacac

SEQ ID NO: 255471 - RNA, 23 nt, Artificial Sequence
  Synthetic
uacgauguaaaagagaaaaacac

SEQ ID NO: 255472 - RNA, 24 nt, Artificial Sequence
  Synthetic
uuacgauguaaaagagaaaaacac

SEQ ID NO: 255473 - RNA, 18 nt, Artificial Sequence
  Synthetic
uucaaaggaacaaaacac

SEQ ID NO: 255474 - RNA, 19 nt, Artificial Sequence
  Synthetic
uuucaaaggaacaaaacac

SEQ ID NO: 255475 - RNA, 20 nt, Artificial Sequence
  Synthetic
auuucaaaggaacaaaacac

SEQ ID NO: 255476 - RNA, 21 nt, Artificial Sequence
  Synthetic
uauuucaaaggaacaaaacac

SEQ ID NO: 255477 - RNA, 22 nt, Artificial Sequence
  Synthetic
auauuucaaaggaacaaaacac

SEQ ID NO: 255478 - RNA, 23 nt, Artificial Sequence
  Synthetic
cauauuucaaaggaacaaaacac

SEQ ID NO: 255479 - RNA, 24 nt, Artificial Sequence
  Synthetic
acauauuucaaaggaacaaaacac

SEQ ID NO: 255480 - RNA, 18 nt, Artificial Sequence
  Synthetic
aucccuuauccaaaacac

SEQ ID NO: 255481 - RNA, 19 nt, Artificial Sequence
  Synthetic
uaucccuuauccaaaacac

SEQ ID NO: 255482 - RNA, 20 nt, Artificial Sequence
  Synthetic
guaucccuuauccaaaacac

SEQ ID NO: 255483 - RNA, 21 nt, Artificial Sequence
  Synthetic
aguaucccuuauccaaaacac

SEQ ID NO: 255484 - RNA, 22 nt, Artificial Sequence
  Synthetic
gaguaucccuuauccaaaacac

SEQ ID NO: 255485 - RNA, 23 nt, Artificial Sequence
  Synthetic
ugaguaucccuuauccaaaacac

SEQ ID NO: 255486 - RNA, 24 nt, Artificial Sequence
  Synthetic
uugaguaucccuuauccaaaacac

SEQ ID NO: 255487 - RNA, 18 nt, Artificial Sequence
  Synthetic
agagcaaaugcaaaacac

SEQ ID NO: 255488 - RNA, 19 nt, Artificial Sequence
  Synthetic
cagagcaaaugcaaaacac

SEQ ID NO: 255489 - RNA, 20 nt, Artificial Sequence
  Synthetic
acagagcaaaugcaaaacac

SEQ ID NO: 255490 - RNA, 21 nt, Artificial Sequence
  Synthetic
cacagagcaaaugcaaaacac

SEQ ID NO: 255491 - RNA, 22 nt, Artificial Sequence
  Synthetic
ucacagagcaaaugcaaaacac

SEQ ID NO: 255492 - RNA, 23 nt, Artificial Sequence
  Synthetic
gucacagagcaaaugcaaaacac

SEQ ID NO: 255493 - RNA, 24 nt, Artificial Sequence
  Synthetic
ggucacagagcaaaugcaaaacac

SEQ ID NO: 255494 - RNA, 18 nt, Artificial Sequence
  Synthetic
agaaaaaccucaaaacac

SEQ ID NO: 255495 - RNA, 19 nt, Artificial Sequence
  Synthetic
aagaaaaaccucaaaacac

SEQ ID NO: 255496 - RNA, 20 nt, Artificial Sequence
  Synthetic
aaagaaaaaccucaaaacac

SEQ ID NO: 255497 - RNA, 21 nt, Artificial Sequence
  Synthetic
aaaagaaaaaccucaaaacac

SEQ ID NO: 255498 - RNA, 22 nt, Artificial Sequence
  Synthetic
caaaagaaaaaccucaaaacac

SEQ ID NO: 255499 - RNA, 23 nt, Artificial Sequence
  Synthetic
acaaaagaaaaaccucaaaacac

SEQ ID NO: 255500 - RNA, 24 nt, Artificial Sequence
  Synthetic
gacaaaagaaaaaccucaaaacac

SEQ ID NO: 255501 - RNA, 18 nt, Artificial Sequence
  Synthetic
uuaaaaauaggaaaacac

SEQ ID NO: 255502 - RNA, 19 nt, Artificial Sequence
  Synthetic
cuuaaaaauaggaaaacac

SEQ ID NO: 255503 - RNA, 20 nt, Artificial Sequence
  Synthetic
ucuuaaaaauaggaaaacac

SEQ ID NO: 255504 - RNA, 21 nt, Artificial Sequence
  Synthetic
cucuuaaaaauaggaaaacac

SEQ ID NO: 255505 - RNA, 22 nt, Artificial Sequence
  Synthetic
gcucuuaaaaauaggaaaacac

SEQ ID NO: 255506 - RNA, 23 nt, Artificial Sequence
  Synthetic
agcucuuaaaaauaggaaaacac

SEQ ID NO: 255507 - RNA, 24 nt, Artificial Sequence
  Synthetic
gagcucuuaaaaauaggaaaacac

SEQ ID NO: 255508 - RNA, 18 nt, Artificial Sequence
  Synthetic
uguccagagugaaaacac

SEQ ID NO: 255509 - RNA, 19 nt, Artificial Sequence
  Synthetic
auguccagagugaaaacac

SEQ ID NO: 255510 - RNA, 20 nt, Artificial Sequence
  Synthetic
cauguccagagugaaaacac

SEQ ID NO: 255511 - RNA, 21 nt, Artificial Sequence
  Synthetic
ucauguccagagugaaaacac

SEQ ID NO: 255512 - RNA, 22 nt, Artificial Sequence
  Synthetic
gucauguccagagugaaaacac

SEQ ID NO: 255513 - RNA, 23 nt, Artificial Sequence
  Synthetic
cgucauguccagagugaaaacac

SEQ ID NO: 255514 - RNA, 24 nt, Artificial Sequence
  Synthetic
ccgucauguccagagugaaaacac

SEQ ID NO: 255515 - RNA, 18 nt, Artificial Sequence
  Synthetic
ugagugauagccaaacac

SEQ ID NO: 255516 - RNA, 19 nt, Artificial Sequence
  Synthetic
cugagugauagccaaacac

SEQ ID NO: 255517 - RNA, 20 nt, Artificial Sequence
  Synthetic
acugagugauagccaaacac

SEQ ID NO: 255518 - RNA, 21 nt, Artificial Sequence
  Synthetic
cacugagugauagccaaacac

SEQ ID NO: 255519 - RNA, 22 nt, Artificial Sequence
  Synthetic
ccacugagugauagccaaacac

SEQ ID NO: 255520 - RNA, 23 nt, Artificial Sequence
  Synthetic
accacugagugauagccaaacac

SEQ ID NO: 255521 - RNA, 24 nt, Artificial Sequence
  Synthetic
aaccacugagugauagccaaacac

SEQ ID NO: 255522 - RNA, 18 nt, Artificial Sequence
  Synthetic
gaaguguucuucaaacac

SEQ ID NO: 255523 - RNA, 19 nt, Artificial Sequence
  Synthetic
agaaguguucuucaaacac

SEQ ID NO: 255524 - RNA, 20 nt, Artificial Sequence
  Synthetic
gagaaguguucuucaaacac

SEQ ID NO: 255525 - RNA, 21 nt, Artificial Sequence
  Synthetic
agagaaguguucuucaaacac

SEQ ID NO: 255526 - RNA, 22 nt, Artificial Sequence
  Synthetic
uagagaaguguucuucaaacac

SEQ ID NO: 255527 - RNA, 23 nt, Artificial Sequence
  Synthetic
cuagagaaguguucuucaaacac

SEQ ID NO: 255528 - RNA, 24 nt, Artificial Sequence
  Synthetic
acuagagaaguguucuucaaacac

SEQ ID NO: 255529 - RNA, 18 nt, Artificial Sequence
  Synthetic
aaauaacaggggaaacac

SEQ ID NO: 255530 - RNA, 19 nt, Artificial Sequence
  Synthetic
aaaauaacaggggaaacac

SEQ ID NO: 255531 - RNA, 20 nt, Artificial Sequence
  Synthetic
aaaaauaacaggggaaacac

SEQ ID NO: 255532 - RNA, 21 nt, Artificial Sequence
  Synthetic
gaaaaauaacaggggaaacac

SEQ ID NO: 255533 - RNA, 22 nt, Artificial Sequence
  Synthetic
ggaaaaauaacaggggaaacac

SEQ ID NO: 255534 - RNA, 23 nt, Artificial Sequence
  Synthetic
uggaaaaauaacaggggaaacac

SEQ ID NO: 255535 - RNA, 24 nt, Artificial Sequence
  Synthetic
auggaaaaauaacaggggaaacac

SEQ ID NO: 255536 - RNA, 18 nt, Artificial Sequence
  Synthetic
gauucacagaauaaacac

SEQ ID NO: 255537 - RNA, 19 nt, Artificial Sequence
  Synthetic
agauucacagaauaaacac

SEQ ID NO: 255538 - RNA, 20 nt, Artificial Sequence
  Synthetic
uagauucacagaauaaacac

SEQ ID NO: 255539 - RNA, 21 nt, Artificial Sequence
  Synthetic
cuagauucacagaauaaacac

SEQ ID NO: 255540 - RNA, 22 nt, Artificial Sequence
  Synthetic
ucuagauucacagaauaaacac

SEQ ID NO: 255541 - RNA, 23 nt, Artificial Sequence
  Synthetic
cucuagauucacagaauaaacac

SEQ ID NO: 255542 - RNA, 24 nt, Artificial Sequence
  Synthetic
ucucuagauucacagaauaaacac

SEQ ID NO: 255543 - RNA, 18 nt, Artificial Sequence
  Synthetic
uugcugaaaauuaaacac

SEQ ID NO: 255544 - RNA, 19 nt, Artificial Sequence
  Synthetic
guugcugaaaauuaaacac

SEQ ID NO: 255545 - RNA, 20 nt, Artificial Sequence
  Synthetic
cguugcugaaaauuaaacac

SEQ ID NO: 255546 - RNA, 21 nt, Artificial Sequence
  Synthetic
ccguugcugaaaauuaaacac

SEQ ID NO: 255547 - RNA, 22 nt, Artificial Sequence
  Synthetic
uccguugcugaaaauuaaacac

SEQ ID NO: 255548 - RNA, 23 nt, Artificial Sequence
  Synthetic
auccguugcugaaaauuaaacac

SEQ ID NO: 255549 - RNA, 24 nt, Artificial Sequence
  Synthetic
uauccguugcugaaaauuaaacac

SEQ ID NO: 255550 - RNA, 18 nt, Artificial Sequence
  Synthetic
uggucccucccacaacac

SEQ ID NO: 255551 - RNA, 19 nt, Artificial Sequence
  Synthetic
auggucccucccacaacac

SEQ ID NO: 255552 - RNA, 20 nt, Artificial Sequence
  Synthetic
cauggucccucccacaacac

SEQ ID NO: 255553 - RNA, 21 nt, Artificial Sequence
  Synthetic
acauggucccucccacaacac

SEQ ID NO: 255554 - RNA, 22 nt, Artificial Sequence
  Synthetic
cacauggucccucccacaacac

SEQ ID NO: 255555 - RNA, 23 nt, Artificial Sequence
  Synthetic
ccacauggucccucccacaacac

SEQ ID NO: 255556 - RNA, 24 nt, Artificial Sequence
  Synthetic
cccacauggucccucccacaacac

SEQ ID NO: 255557 - RNA, 18 nt, Artificial Sequence
  Synthetic
cacuaguaaucccaacac

SEQ ID NO: 255558 - RNA, 19 nt, Artificial Sequence
  Synthetic
acacuaguaaucccaacac

SEQ ID NO: 255559 - RNA, 20 nt, Artificial Sequence
  Synthetic
cacacuaguaaucccaacac

SEQ ID NO: 255560 - RNA, 21 nt, Artificial Sequence
  Synthetic
ucacacuaguaaucccaacac

SEQ ID NO: 255561 - RNA, 22 nt, Artificial Sequence
  Synthetic
cucacacuaguaaucccaacac

SEQ ID NO: 255562 - RNA, 23 nt, Artificial Sequence
  Synthetic
ccucacacuaguaaucccaacac

SEQ ID NO: 255563 - RNA, 24 nt, Artificial Sequence
  Synthetic
gccucacacuaguaaucccaacac

SEQ ID NO: 255564 - RNA, 18 nt, Artificial Sequence
  Synthetic
aggccccaccuccaacac

SEQ ID NO: 255565 - RNA, 19 nt, Artificial Sequence
  Synthetic
caggccccaccuccaacac

SEQ ID NO: 255566 - RNA, 20 nt, Artificial Sequence
  Synthetic
ccaggccccaccuccaacac

SEQ ID NO: 255567 - RNA, 21 nt, Artificial Sequence
  Synthetic
accaggccccaccuccaacac

SEQ ID NO: 255568 - RNA, 22 nt, Artificial Sequence
  Synthetic
caccaggccccaccuccaacac

SEQ ID NO: 255569 - RNA, 23 nt, Artificial Sequence
  Synthetic
ccaccaggccccaccuccaacac

SEQ ID NO: 255570 - RNA, 24 nt, Artificial Sequence
  Synthetic
cccaccaggccccaccuccaacac

SEQ ID NO: 255571 - RNA, 18 nt, Artificial Sequence
  Synthetic
ggauuaaguuuccaacac

SEQ ID NO: 255572 - RNA, 19 nt, Artificial Sequence
  Synthetic
gggauuaaguuuccaacac

SEQ ID NO: 255573 - RNA, 20 nt, Artificial Sequence
  Synthetic
ggggauuaaguuuccaacac

SEQ ID NO: 255574 - RNA, 21 nt, Artificial Sequence
  Synthetic
uggggauuaaguuuccaacac

SEQ ID NO: 255575 - RNA, 22 nt, Artificial Sequence
  Synthetic
uuggggauuaaguuuccaacac

SEQ ID NO: 255576 - RNA, 23 nt, Artificial Sequence
  Synthetic
guuggggauuaaguuuccaacac

SEQ ID NO: 255577 - RNA, 24 nt, Artificial Sequence
  Synthetic
cguuggggauuaaguuuccaacac

SEQ ID NO: 255578 - RNA, 18 nt, Artificial Sequence
  Synthetic
acuccaaaagggcaacac

SEQ ID NO: 255579 - RNA, 19 nt, Artificial Sequence
  Synthetic
gacuccaaaagggcaacac

SEQ ID NO: 255580 - RNA, 20 nt, Artificial Sequence
  Synthetic
ugacuccaaaagggcaacac

SEQ ID NO: 255581 - RNA, 21 nt, Artificial Sequence
  Synthetic
gugacuccaaaagggcaacac

SEQ ID NO: 255582 - RNA, 22 nt, Artificial Sequence
  Synthetic
ugugacuccaaaagggcaacac

SEQ ID NO: 255583 - RNA, 23 nt, Artificial Sequence
  Synthetic
augugacuccaaaagggcaacac

SEQ ID NO: 255584 - RNA, 24 nt, Artificial Sequence
  Synthetic
gaugugacuccaaaagggcaacac

SEQ ID NO: 255585 - RNA, 18 nt, Artificial Sequence
  Synthetic
ccuuuuucuauucaacac

SEQ ID NO: 255586 - RNA, 19 nt, Artificial Sequence
  Synthetic
cccuuuuucuauucaacac

SEQ ID NO: 255587 - RNA, 20 nt, Artificial Sequence
  Synthetic
ucccuuuuucuauucaacac

SEQ ID NO: 255588 - RNA, 21 nt, Artificial Sequence
  Synthetic
aucccuuuuucuauucaacac

SEQ ID NO: 255589 - RNA, 22 nt, Artificial Sequence
  Synthetic
uaucccuuuuucuauucaacac

SEQ ID NO: 255590 - RNA, 23 nt, Artificial Sequence
  Synthetic
uuaucccuuuuucuauucaacac

SEQ ID NO: 255591 - RNA, 24 nt, Artificial Sequence
  Synthetic
uuuaucccuuuuucuauucaacac

SEQ ID NO: 255592 - RNA, 18 nt, Artificial Sequence
  Synthetic
uaaucuuuuuuucaacac

SEQ ID NO: 255593 - RNA, 19 nt, Artificial Sequence
  Synthetic
uuaaucuuuuuuucaacac

SEQ ID NO: 255594 - RNA, 20 nt, Artificial Sequence
  Synthetic
cuuaaucuuuuuuucaacac

SEQ ID NO: 255595 - RNA, 21 nt, Artificial Sequence
  Synthetic
ucuuaaucuuuuuuucaacac

SEQ ID NO: 255596 - RNA, 22 nt, Artificial Sequence
  Synthetic
aucuuaaucuuuuuuucaacac

SEQ ID NO: 255597 - RNA, 23 nt, Artificial Sequence
  Synthetic
caucuuaaucuuuuuuucaacac

SEQ ID NO: 255598 - RNA, 24 nt, Artificial Sequence
  Synthetic
ccaucuuaaucuuuuuuucaacac

SEQ ID NO: 255599 - RNA, 18 nt, Artificial Sequence
  Synthetic
ugcugugcaaaagaacac

SEQ ID NO: 255600 - RNA, 19 nt, Artificial Sequence
  Synthetic
gugcugugcaaaagaacac

SEQ ID NO: 255601 - RNA, 20 nt, Artificial Sequence
  Synthetic
ugugcugugcaaaagaacac

SEQ ID NO: 255602 - RNA, 21 nt, Artificial Sequence
  Synthetic
cugugcugugcaaaagaacac

SEQ ID NO: 255603 - RNA, 22 nt, Artificial Sequence
  Synthetic
ccugugcugugcaaaagaacac

SEQ ID NO: 255604 - RNA, 23 nt, Artificial Sequence
  Synthetic
uccugugcugugcaaaagaacac

SEQ ID NO: 255605 - RNA, 24 nt, Artificial Sequence
  Synthetic
uuccugugcugugcaaaagaacac

SEQ ID NO: 255606 - RNA, 18 nt, Artificial Sequence
  Synthetic
guaagugguaaagaacac

SEQ ID NO: 255607 - RNA, 19 nt, Artificial Sequence
  Synthetic
cguaagugguaaagaacac

SEQ ID NO: 255608 - RNA, 20 nt, Artificial Sequence
  Synthetic
acguaagugguaaagaacac

SEQ ID NO: 255609 - RNA, 21 nt, Artificial Sequence
  Synthetic
cacguaagugguaaagaacac

SEQ ID NO: 255610 - RNA, 22 nt, Artificial Sequence
  Synthetic
ucacguaagugguaaagaacac

SEQ ID NO: 255611 - RNA, 23 nt, Artificial Sequence
  Synthetic
aucacguaagugguaaagaacac

SEQ ID NO: 255612 - RNA, 24 nt, Artificial Sequence
  Synthetic
uaucacguaagugguaaagaacac

SEQ ID NO: 255613 - RNA, 18 nt, Artificial Sequence
  Synthetic
auauucuggagagaacac

SEQ ID NO: 255614 - RNA, 19 nt, Artificial Sequence
  Synthetic
cauauucuggagagaacac

SEQ ID NO: 255615 - RNA, 20 nt, Artificial Sequence
  Synthetic
ucauauucuggagagaacac

SEQ ID NO: 255616 - RNA, 21 nt, Artificial Sequence
  Synthetic
uucauauucuggagagaacac

SEQ ID NO: 255617 - RNA, 22 nt, Artificial Sequence
  Synthetic
cuucauauucuggagagaacac

SEQ ID NO: 255618 - RNA, 23 nt, Artificial Sequence
  Synthetic
acuucauauucuggagagaacac

SEQ ID NO: 255619 - RNA, 24 nt, Artificial Sequence
  Synthetic
gacuucauauucuggagagaacac

SEQ ID NO: 255620 - RNA, 18 nt, Artificial Sequence
  Synthetic
gcugaacaaugagaacac

SEQ ID NO: 255621 - RNA, 19 nt, Artificial Sequence
  Synthetic
agcugaacaaugagaacac

SEQ ID NO: 255622 - RNA, 20 nt, Artificial Sequence
  Synthetic
gagcugaacaaugagaacac

SEQ ID NO: 255623 - RNA, 21 nt, Artificial Sequence
  Synthetic
ggagcugaacaaugagaacac

SEQ ID NO: 255624 - RNA, 22 nt, Artificial Sequence
  Synthetic
gggagcugaacaaugagaacac

SEQ ID NO: 255625 - RNA, 23 nt, Artificial Sequence
  Synthetic
ugggagcugaacaaugagaacac

SEQ ID NO: 255626 - RNA, 24 nt, Artificial Sequence
  Synthetic
gugggagcugaacaaugagaacac

SEQ ID NO: 255627 - RNA, 18 nt, Artificial Sequence
  Synthetic
auugaacaaugagaacac

SEQ ID NO: 255628 - RNA, 19 nt, Artificial Sequence
  Synthetic
aauugaacaaugagaacac

SEQ ID NO: 255629 - RNA, 20 nt, Artificial Sequence
  Synthetic
gaauugaacaaugagaacac

SEQ ID NO: 255630 - RNA, 21 nt, Artificial Sequence
  Synthetic
ggaauugaacaaugagaacac

SEQ ID NO: 255631 - RNA, 22 nt, Artificial Sequence
  Synthetic
gggaauugaacaaugagaacac

SEQ ID NO: 255632 - RNA, 23 nt, Artificial Sequence
  Synthetic
ugggaauugaacaaugagaacac

SEQ ID NO: 255633 - RNA, 24 nt, Artificial Sequence
  Synthetic
gugggaauugaacaaugagaacac

SEQ ID NO: 255634 - RNA, 18 nt, Artificial Sequence
  Synthetic
auugagcaaugagaacac

SEQ ID NO: 255635 - RNA, 19 nt, Artificial Sequence
  Synthetic
aauugagcaaugagaacac

SEQ ID NO: 255636 - RNA, 20 nt, Artificial Sequence
  Synthetic
gaauugagcaaugagaacac

SEQ ID NO: 255637 - RNA, 21 nt, Artificial Sequence
  Synthetic
ggaauugagcaaugagaacac

SEQ ID NO: 255638 - RNA, 22 nt, Artificial Sequence
  Synthetic
gggaauugagcaaugagaacac

SEQ ID NO: 255639 - RNA, 23 nt, Artificial Sequence
  Synthetic
cgggaauugagcaaugagaacac

SEQ ID NO: 255640 - RNA, 24 nt, Artificial Sequence
  Synthetic
gcgggaauugagcaaugagaacac

SEQ ID NO: 255641 - RNA, 18 nt, Artificial Sequence
  Synthetic
guugagcaaugagaacac

SEQ ID NO: 255642 - RNA, 19 nt, Artificial Sequence
  Synthetic
aguugagcaaugagaacac

SEQ ID NO: 255643 - RNA, 20 nt, Artificial Sequence
  Synthetic
gaguugagcaaugagaacac

SEQ ID NO: 255644 - RNA, 21 nt, Artificial Sequence
  Synthetic
ggaguugagcaaugagaacac

SEQ ID NO: 255645 - RNA, 22 nt, Artificial Sequence
  Synthetic
gggaguugagcaaugagaacac

SEQ ID NO: 255646 - RNA, 23 nt, Artificial Sequence
  Synthetic
ugggaguugagcaaugagaacac

SEQ ID NO: 255647 - RNA, 24 nt, Artificial Sequence
  Synthetic
uugggaguugagcaaugagaacac

SEQ ID NO: 255648 - RNA, 18 nt, Artificial Sequence
  Synthetic
guugaacgaugagaacac

SEQ ID NO: 255649 - RNA, 19 nt, Artificial Sequence
  Synthetic
aguugaacgaugagaacac

SEQ ID NO: 255650 - RNA, 20 nt, Artificial Sequence
  Synthetic
gaguugaacgaugagaacac

SEQ ID NO: 255651 - RNA, 21 nt, Artificial Sequence
  Synthetic
ggaguugaacgaugagaacac

SEQ ID NO: 255652 - RNA, 22 nt, Artificial Sequence
  Synthetic
gggaguugaacgaugagaacac

SEQ ID NO: 255653 - RNA, 23 nt, Artificial Sequence
  Synthetic
ugggaguugaacgaugagaacac

SEQ ID NO: 255654 - RNA, 24 nt, Artificial Sequence
  Synthetic
gugggaguugaacgaugagaacac

SEQ ID NO: 255655 - RNA, 18 nt, Artificial Sequence
  Synthetic
gcuaagugaugagaacac

SEQ ID NO: 255656 - RNA, 19 nt, Artificial Sequence
  Synthetic
agcuaagugaugagaacac

SEQ ID NO: 255657 - RNA, 20 nt, Artificial Sequence
  Synthetic
gagcuaagugaugagaacac

SEQ ID NO: 255658 - RNA, 21 nt, Artificial Sequence
  Synthetic
ggagcuaagugaugagaacac

SEQ ID NO: 255659 - RNA, 22 nt, Artificial Sequence
  Synthetic
gggagcuaagugaugagaacac

SEQ ID NO: 255660 - RNA, 23 nt, Artificial Sequence
  Synthetic
ugggagcuaagugaugagaacac

SEQ ID NO: 255661 - RNA, 24 nt, Artificial Sequence
  Synthetic
gugggagcuaagugaugagaacac

SEQ ID NO: 255662 - RNA, 18 nt, Artificial Sequence
  Synthetic
uacuaugcaauagaacac

SEQ ID NO: 255663 - RNA, 19 nt, Artificial Sequence
  Synthetic
uuacuaugcaauagaacac

SEQ ID NO: 255664 - RNA, 20 nt, Artificial Sequence
  Synthetic
auuacuaugcaauagaacac

SEQ ID NO: 255665 - RNA, 21 nt, Artificial Sequence
  Synthetic
uauuacuaugcaauagaacac

SEQ ID NO: 255666 - RNA, 22 nt, Artificial Sequence
  Synthetic
auauuacuaugcaauagaacac

SEQ ID NO: 255667 - RNA, 23 nt, Artificial Sequence
  Synthetic
cauauuacuaugcaauagaacac

SEQ ID NO: 255668 - RNA, 24 nt, Artificial Sequence
  Synthetic
ucauauuacuaugcaauagaacac

SEQ ID NO: 255669 - RNA, 18 nt, Artificial Sequence
  Synthetic
uuuauugaauacgaacac

SEQ ID NO: 255670 - RNA, 19 nt, Artificial Sequence
  Synthetic
cuuuauugaauacgaacac

SEQ ID NO: 255671 - RNA, 20 nt, Artificial Sequence
  Synthetic
ucuuuauugaauacgaacac

SEQ ID NO: 255672 - RNA, 21 nt, Artificial Sequence
  Synthetic
uucuuuauugaauacgaacac

SEQ ID NO: 255673 - RNA, 22 nt, Artificial Sequence
  Synthetic
uuucuuuauugaauacgaacac

SEQ ID NO: 255674 - RNA, 23 nt, Artificial Sequence
  Synthetic
uuuucuuuauugaauacgaacac

SEQ ID NO: 255675 - RNA, 24 nt, Artificial Sequence
  Synthetic
uuuuucuuuauugaauacgaacac

SEQ ID NO: 255676 - RNA, 18 nt, Artificial Sequence
  Synthetic
cugagguggguggaacac

SEQ ID NO: 255677 - RNA, 19 nt, Artificial Sequence
  Synthetic
ucugagguggguggaacac

SEQ ID NO: 255678 - RNA, 20 nt, Artificial Sequence
  Synthetic
gucugagguggguggaacac

SEQ ID NO: 255679 - RNA, 21 nt, Artificial Sequence
  Synthetic
agucugagguggguggaacac

SEQ ID NO: 255680 - RNA, 22 nt, Artificial Sequence
  Synthetic
gagucugagguggguggaacac

SEQ ID NO: 255681 - RNA, 23 nt, Artificial Sequence
  Synthetic
ggagucugagguggguggaacac

SEQ ID NO: 255682 - RNA, 24 nt, Artificial Sequence
  Synthetic
gggagucugagguggguggaacac

SEQ ID NO: 255683 - RNA, 18 nt, Artificial Sequence
  Synthetic
agcagaaaguuggaacac

SEQ ID NO: 255684 - RNA, 19 nt, Artificial Sequence
  Synthetic
aagcagaaaguuggaacac

SEQ ID NO: 255685 - RNA, 20 nt, Artificial Sequence
  Synthetic
caagcagaaaguuggaacac

SEQ ID NO: 255686 - RNA, 21 nt, Artificial Sequence
  Synthetic
ucaagcagaaaguuggaacac

SEQ ID NO: 255687 - RNA, 22 nt, Artificial Sequence
  Synthetic
gucaagcagaaaguuggaacac

SEQ ID NO: 255688 - RNA, 23 nt, Artificial Sequence
  Synthetic
cgucaagcagaaaguuggaacac

SEQ ID NO: 255689 - RNA, 24 nt, Artificial Sequence
  Synthetic
gcgucaagcagaaaguuggaacac

SEQ ID NO: 255690 - RNA, 18 nt, Artificial Sequence
  Synthetic
uuaauuugguuggaacac

SEQ ID NO: 255691 - RNA, 19 nt, Artificial Sequence
  Synthetic
uuuaauuugguuggaacac

SEQ ID NO: 255692 - RNA, 20 nt, Artificial Sequence
  Synthetic
uuuuaauuugguuggaacac

SEQ ID NO: 255693 - RNA, 21 nt, Artificial Sequence
  Synthetic
guuuuaauuugguuggaacac

SEQ ID NO: 255694 - RNA, 22 nt, Artificial Sequence
  Synthetic
aguuuuaauuugguuggaacac

SEQ ID NO: 255695 - RNA, 23 nt, Artificial Sequence
  Synthetic
caguuuuaauuugguuggaacac

SEQ ID NO: 255696 - RNA, 24 nt, Artificial Sequence
  Synthetic
ucaguuuuaauuugguuggaacac

SEQ ID NO: 255697 - RNA, 18 nt, Artificial Sequence
  Synthetic
ccugaggacauugaacac

SEQ ID NO: 255698 - RNA, 19 nt, Artificial Sequence
  Synthetic
uccugaggacauugaacac

SEQ ID NO: 255699 - RNA, 20 nt, Artificial Sequence
  Synthetic
auccugaggacauugaacac

SEQ ID NO: 255700 - RNA, 21 nt, Artificial Sequence
  Synthetic
aauccugaggacauugaacac

SEQ ID NO: 255701 - RNA, 22 nt, Artificial Sequence
  Synthetic
aaauccugaggacauugaacac

SEQ ID NO: 255702 - RNA, 23 nt, Artificial Sequence
  Synthetic
aaaauccugaggacauugaacac

SEQ ID NO: 255703 - RNA, 24 nt, Artificial Sequence
  Synthetic
caaaauccugaggacauugaacac

SEQ ID NO: 255704 - RNA, 18 nt, Artificial Sequence
  Synthetic
auaagguagaaauaacac

SEQ ID NO: 255705 - RNA, 19 nt, Artificial Sequence
  Synthetic
aauaagguagaaauaacac

SEQ ID NO: 255706 - RNA, 20 nt, Artificial Sequence
  Synthetic
aaauaagguagaaauaacac

SEQ ID NO: 255707 - RNA, 21 nt, Artificial Sequence
  Synthetic
aaaauaagguagaaauaacac

SEQ ID NO: 255708 - RNA, 22 nt, Artificial Sequence
  Synthetic
aaaaauaagguagaaauaacac

SEQ ID NO: 255709 - RNA, 23 nt, Artificial Sequence
  Synthetic
aaaaaauaagguagaaauaacac

SEQ ID NO: 255710 - RNA, 24 nt, Artificial Sequence
  Synthetic
uaaaaaauaagguagaaauaacac

SEQ ID NO: 255711 - RNA, 18 nt, Artificial Sequence
  Synthetic
aauagaauagaauaacac

SEQ ID NO: 255712 - RNA, 19 nt, Artificial Sequence
  Synthetic
aaauagaauagaauaacac

SEQ ID NO: 255713 - RNA, 20 nt, Artificial Sequence
  Synthetic
gaaauagaauagaauaacac

SEQ ID NO: 255714 - RNA, 21 nt, Artificial Sequence
  Synthetic
ugaaauagaauagaauaacac

SEQ ID NO: 255715 - RNA, 22 nt, Artificial Sequence
  Synthetic
augaaauagaauagaauaacac

SEQ ID NO: 255716 - RNA, 23 nt, Artificial Sequence
  Synthetic
uaugaaauagaauagaauaacac

SEQ ID NO: 255717 - RNA, 24 nt, Artificial Sequence
  Synthetic
uuaugaaauagaauagaauaacac

SEQ ID NO: 255718 - RNA, 18 nt, Artificial Sequence
  Synthetic
gcacugugcuaauaacac

SEQ ID NO: 255719 - RNA, 19 nt, Artificial Sequence
  Synthetic
ugcacugugcuaauaacac

SEQ ID NO: 255720 - RNA, 20 nt, Artificial Sequence
  Synthetic
gugcacugugcuaauaacac

SEQ ID NO: 255721 - RNA, 21 nt, Artificial Sequence
  Synthetic
agugcacugugcuaauaacac

SEQ ID NO: 255722 - RNA, 22 nt, Artificial Sequence
  Synthetic
cagugcacugugcuaauaacac

SEQ ID NO: 255723 - RNA, 23 nt, Artificial Sequence
  Synthetic
ucagugcacugugcuaauaacac

SEQ ID NO: 255724 - RNA, 24 nt, Artificial Sequence
  Synthetic
aucagugcacugugcuaauaacac

SEQ ID NO: 255725 - RNA, 18 nt, Artificial Sequence
  Synthetic
gggucccucccauaacac

SEQ ID NO: 255726 - RNA, 19 nt, Artificial Sequence
  Synthetic
ugggucccucccauaacac

SEQ ID NO: 255727 - RNA, 20 nt, Artificial Sequence
  Synthetic
cugggucccucccauaacac

SEQ ID NO: 255728 - RNA, 21 nt, Artificial Sequence
  Synthetic
acugggucccucccauaacac

SEQ ID NO: 255729 - RNA, 22 nt, Artificial Sequence
  Synthetic
cacugggucccucccauaacac

SEQ ID NO: 255730 - RNA, 23 nt, Artificial Sequence
  Synthetic
ccacugggucccucccauaacac

SEQ ID NO: 255731 - RNA, 24 nt, Artificial Sequence
  Synthetic
cccacugggucccucccauaacac

SEQ ID NO: 255732 - RNA, 18 nt, Artificial Sequence
  Synthetic
uugcacucaagauaacac

SEQ ID NO: 255733 - RNA, 19 nt, Artificial Sequence
  Synthetic
uuugcacucaagauaacac

SEQ ID NO: 255734 - RNA, 20 nt, Artificial Sequence
  Synthetic
auuugcacucaagauaacac

SEQ ID NO: 255735 - RNA, 21 nt, Artificial Sequence
  Synthetic
uauuugcacucaagauaacac

SEQ ID NO: 255736 - RNA, 22 nt, Artificial Sequence
  Synthetic
auauuugcacucaagauaacac

SEQ ID NO: 255737 - RNA, 23 nt, Artificial Sequence
  Synthetic
uauauuugcacucaagauaacac

SEQ ID NO: 255738 - RNA, 24 nt, Artificial Sequence
  Synthetic
uuauauuugcacucaagauaacac

SEQ ID NO: 255739 - RNA, 18 nt, Artificial Sequence
  Synthetic
uccucagcaaacuaacac

SEQ ID NO: 255740 - RNA, 19 nt, Artificial Sequence
  Synthetic
auccucagcaaacuaacac

SEQ ID NO: 255741 - RNA, 20 nt, Artificial Sequence
  Synthetic
uauccucagcaaacuaacac

SEQ ID NO: 255742 - RNA, 21 nt, Artificial Sequence
  Synthetic
uuauccucagcaaacuaacac

SEQ ID NO: 255743 - RNA, 22 nt, Artificial Sequence
  Synthetic
auuauccucagcaaacuaacac

SEQ ID NO: 255744 - RNA, 23 nt, Artificial Sequence
  Synthetic
cauuauccucagcaaacuaacac

SEQ ID NO: 255745 - RNA, 24 nt, Artificial Sequence
  Synthetic
ccauuauccucagcaaacuaacac

SEQ ID NO: 255746 - RNA, 18 nt, Artificial Sequence
  Synthetic
aucucagcaaacuaacac

SEQ ID NO: 255747 - RNA, 19 nt, Artificial Sequence
  Synthetic
aaucucagcaaacuaacac

SEQ ID NO: 255748 - RNA, 20 nt, Artificial Sequence
  Synthetic
caaucucagcaaacuaacac

SEQ ID NO: 255749 - RNA, 21 nt, Artificial Sequence
  Synthetic
ucaaucucagcaaacuaacac

SEQ ID NO: 255750 - RNA, 22 nt, Artificial Sequence
  Synthetic
aucaaucucagcaaacuaacac

SEQ ID NO: 255751 - RNA, 23 nt, Artificial Sequence
  Synthetic
caucaaucucagcaaacuaacac

SEQ ID NO: 255752 - RNA, 24 nt, Artificial Sequence
  Synthetic
ccaucaaucucagcaaacuaacac

SEQ ID NO: 255753 - RNA, 18 nt, Artificial Sequence
  Synthetic
uucucagcaaacuaacac

SEQ ID NO: 255754 - RNA, 19 nt, Artificial Sequence
  Synthetic
auucucagcaaacuaacac

SEQ ID NO: 255755 - RNA, 20 nt, Artificial Sequence
  Synthetic
cauucucagcaaacuaacac

SEQ ID NO: 255756 - RNA, 22 nt, Artificial Sequence
  Synthetic
aucauucucagcaaacuaacac

SEQ ID NO: 255757 - RNA, 23 nt, Artificial Sequence
  Synthetic
caucauucucagcaaacuaacac

SEQ ID NO: 255758 - RNA, 24 nt, Artificial Sequence
  Synthetic
ccaucauucucagcaaacuaacac

SEQ ID NO: 255759 - RNA, 18 nt, Artificial Sequence
  Synthetic
aggaaacagaacuaacac

SEQ ID NO: 255760 - RNA, 19 nt, Artificial Sequence
  Synthetic
aaggaaacagaacuaacac

SEQ ID NO: 255761 - RNA, 20 nt, Artificial Sequence
  Synthetic
gaaggaaacagaacuaacac

SEQ ID NO: 255762 - RNA, 21 nt, Artificial Sequence
  Synthetic
cgaaggaaacagaacuaacac

SEQ ID NO: 255763 - RNA, 22 nt, Artificial Sequence
  Synthetic
ucgaaggaaacagaacuaacac

SEQ ID NO: 255764 - RNA, 23 nt, Artificial Sequence
  Synthetic
uucgaaggaaacagaacuaacac

SEQ ID NO: 255765 - RNA, 24 nt, Artificial Sequence
  Synthetic
auucgaaggaaacagaacuaacac

SEQ ID NO: 255766 - RNA, 18 nt, Artificial Sequence
  Synthetic
aguuucacauucuaacac

SEQ ID NO: 255767 - RNA, 19 nt, Artificial Sequence
  Synthetic
gaguuucacauucuaacac

SEQ ID NO: 255768 - RNA, 20 nt, Artificial Sequence
  Synthetic
agaguuucacauucuaacac

SEQ ID NO: 255769 - RNA, 21 nt, Artificial Sequence
  Synthetic
cagaguuucacauucuaacac

SEQ ID NO: 255770 - RNA, 22 nt, Artificial Sequence
  Synthetic
ccagaguuucacauucuaacac

SEQ ID NO: 255771 - RNA, 23 nt, Artificial Sequence
  Synthetic
accagaguuucacauucuaacac

SEQ ID NO: 255772 - RNA, 24 nt, Artificial Sequence
  Synthetic
gaccagaguuucacauucuaacac

SEQ ID NO: 255773 - RNA, 18 nt, Artificial Sequence
  Synthetic
aaacauccugaguaacac

SEQ ID NO: 255774 - RNA, 19 nt, Artificial Sequence
  Synthetic
caaacauccugaguaacac

SEQ ID NO: 255775 - RNA, 20 nt, Artificial Sequence
  Synthetic
ccaaacauccugaguaacac

SEQ ID NO: 255776 - RNA, 21 nt, Artificial Sequence
  Synthetic
cccaaacauccugaguaacac

SEQ ID NO: 255777 - RNA, 22 nt, Artificial Sequence
  Synthetic
ucccaaacauccugaguaacac

SEQ ID NO: 255778 - RNA, 23 nt, Artificial Sequence
  Synthetic
uucccaaacauccugaguaacac

SEQ ID NO: 255779 - RNA, 24 nt, Artificial Sequence
  Synthetic
uuucccaaacauccugaguaacac

SEQ ID NO: 255780 - RNA, 18 nt, Artificial Sequence
  Synthetic
gcaugaaaucuguaacac

SEQ ID NO: 255781 - RNA, 19 nt, Artificial Sequence
  Synthetic
ggcaugaaaucuguaacac

SEQ ID NO: 255782 - RNA, 20 nt, Artificial Sequence
  Synthetic
uggcaugaaaucuguaacac

SEQ ID NO: 255783 - RNA, 21 nt, Artificial Sequence
  Synthetic
uuggcaugaaaucuguaacac

SEQ ID NO: 255784 - RNA, 22 nt, Artificial Sequence
  Synthetic
uuuggcaugaaaucuguaacac

SEQ ID NO: 255785 - RNA, 23 nt, Artificial Sequence
  Synthetic
uuuuggcaugaaaucuguaacac

SEQ ID NO: 255786 - RNA, 24 nt, Artificial Sequence
  Synthetic
uuuuuggcaugaaaucuguaacac

SEQ ID NO: 255787 - RNA, 18 nt, Artificial Sequence
  Synthetic
auacauaaccauuaacac

SEQ ID NO: 255788 - RNA, 19 nt, Artificial Sequence
  Synthetic
cauacauaaccauuaacac

SEQ ID NO: 255789 - RNA, 20 nt, Artificial Sequence
  Synthetic
gcauacauaaccauuaacac

SEQ ID NO: 255790 - RNA, 21 nt, Artificial Sequence
  Synthetic
ugcauacauaaccauuaacac

SEQ ID NO: 255791 - RNA, 22 nt, Artificial Sequence
  Synthetic
uugcauacauaaccauuaacac

SEQ ID NO: 255792 - RNA, 23 nt, Artificial Sequence
  Synthetic
uuugcauacauaaccauuaacac

SEQ ID NO: 255793 - RNA, 24 nt, Artificial Sequence
  Synthetic
auuugcauacauaaccauuaacac

SEQ ID NO: 255794 - RNA, 18 nt, Artificial Sequence
  Synthetic
auuacauugauuuaacac

SEQ ID NO: 255795 - RNA, 19 nt, Artificial Sequence
  Synthetic
gauuacauugauuuaacac

SEQ ID NO: 255796 - RNA, 20 nt, Artificial Sequence
  Synthetic
ggauuacauugauuuaacac

SEQ ID NO: 255797 - RNA, 21 nt, Artificial Sequence
  Synthetic
gggauuacauugauuuaacac

SEQ ID NO: 255798 - RNA, 22 nt, Artificial Sequence
  Synthetic
ugggauuacauugauuuaacac

SEQ ID NO: 255799 - RNA, 23 nt, Artificial Sequence
  Synthetic
cugggauuacauugauuuaacac

SEQ ID NO: 255800 - RNA, 24 nt, Artificial Sequence
  Synthetic
acugggauuacauugauuuaacac

SEQ ID NO: 255801 - RNA, 18 nt, Artificial Sequence
  Synthetic
ugagucuaggaaacacac

SEQ ID NO: 255802 - RNA, 19 nt, Artificial Sequence
  Synthetic
augagucuaggaaacacac

SEQ ID NO: 255803 - RNA, 20 nt, Artificial Sequence
  Synthetic
aaugagucuaggaaacacac

SEQ ID NO: 255804 - RNA, 21 nt, Artificial Sequence
  Synthetic
caaugagucuaggaaacacac

SEQ ID NO: 255805 - RNA, 22 nt, Artificial Sequence
  Synthetic
ucaaugagucuaggaaacacac

SEQ ID NO: 255806 - RNA, 23 nt, Artificial Sequence
  Synthetic
uucaaugagucuaggaaacacac

SEQ ID NO: 255807 - RNA, 24 nt, Artificial Sequence
  Synthetic
uuucaaugagucuaggaaacacac

SEQ ID NO: 255808 - RNA, 18 nt, Artificial Sequence
  Synthetic
agacaaucauaaacacac

SEQ ID NO: 255809 - RNA, 19 nt, Artificial Sequence
  Synthetic
uagacaaucauaaacacac

SEQ ID NO: 255810 - RNA, 20 nt, Artificial Sequence
  Synthetic
cuagacaaucauaaacacac

SEQ ID NO: 255811 - RNA, 21 nt, Artificial Sequence
  Synthetic
ucuagacaaucauaaacacac

SEQ ID NO: 255812 - RNA, 22 nt, Artificial Sequence
  Synthetic
aucuagacaaucauaaacacac

SEQ ID NO: 255813 - RNA, 23 nt, Artificial Sequence
  Synthetic
uaucuagacaaucauaaacacac

SEQ ID NO: 255814 - RNA, 24 nt, Artificial Sequence
  Synthetic
guaucuagacaaucauaaacacac

SEQ ID NO: 255815 - RNA, 18 nt, Artificial Sequence
  Synthetic
guggaaagaaacacacac

SEQ ID NO: 255816 - RNA, 19 nt, Artificial Sequence
  Synthetic
aguggaaagaaacacacac

SEQ ID NO: 255817 - RNA, 20 nt, Artificial Sequence
  Synthetic
uaguggaaagaaacacacac

SEQ ID NO: 255818 - RNA, 21 nt, Artificial Sequence
  Synthetic
auaguggaaagaaacacacac

SEQ ID NO: 255819 - RNA, 22 nt, Artificial Sequence
  Synthetic
uauaguggaaagaaacacacac

SEQ ID NO: 255820 - RNA, 23 nt, Artificial Sequence
  Synthetic
guauaguggaaagaaacacacac

SEQ ID NO: 255821 - RNA, 24 nt, Artificial Sequence
  Synthetic
aguauaguggaaagaaacacacac

SEQ ID NO: 255822 - RNA, 18 nt, Artificial Sequence
  Synthetic
gaggggaauaacacacac

SEQ ID NO: 255823 - RNA, 19 nt, Artificial Sequence
  Synthetic
agaggggaauaacacacac

SEQ ID NO: 255824 - RNA, 20 nt, Artificial Sequence
  Synthetic
aagaggggaauaacacacac

SEQ ID NO: 255825 - RNA, 21 nt, Artificial Sequence
  Synthetic
aaagaggggaauaacacacac

SEQ ID NO: 255826 - RNA, 22 nt, Artificial Sequence
  Synthetic
caaagaggggaauaacacacac

SEQ ID NO: 255827 - RNA, 23 nt, Artificial Sequence
  Synthetic
acaaagaggggaauaacacacac

SEQ ID NO: 255828 - RNA, 24 nt, Artificial Sequence
  Synthetic
cacaaagaggggaauaacacacac

SEQ ID NO: 255829 - RNA, 18 nt, Artificial Sequence
  Synthetic
acacagacacacacacac

SEQ ID NO: 255830 - RNA, 19 nt, Artificial Sequence
  Synthetic
cacacagacacacacacac

SEQ ID NO: 255831 - RNA, 20 nt, Artificial Sequence
  Synthetic
acacacagacacacacacac

SEQ ID NO: 255832 - RNA, 21 nt, Artificial Sequence
  Synthetic
cacacacagacacacacacac

SEQ ID NO: 255833 - RNA, 22 nt, Artificial Sequence
  Synthetic
acacacacagacacacacacac

SEQ ID NO: 255834 - RNA, 23 nt, Artificial Sequence
  Synthetic
cacacacacagacacacacacac

SEQ ID NO: 255835 - RNA, 24 nt, Artificial Sequence
  Synthetic
acacacacacagacacacacacac

SEQ ID NO: 255836 - RNA, 18 nt, Artificial Sequence
  Synthetic
caccauauacccacacac

SEQ ID NO: 255837 - RNA, 19 nt, Artificial Sequence
  Synthetic
ucaccauauacccacacac

SEQ ID NO: 255838 - RNA, 20 nt, Artificial Sequence
  Synthetic
cucaccauauacccacacac

SEQ ID NO: 255839 - RNA, 21 nt, Artificial Sequence
  Synthetic
gcucaccauauacccacacac

SEQ ID NO: 255840 - RNA, 22 nt, Artificial Sequence
  Synthetic
agcucaccauauacccacacac

SEQ ID NO: 255841 - RNA, 23 nt, Artificial Sequence
  Synthetic
uagcucaccauauacccacacac

SEQ ID NO: 255842 - RNA, 24 nt, Artificial Sequence
  Synthetic
uuagcucaccauauacccacacac

SEQ ID NO: 255843 - RNA, 18 nt, Artificial Sequence
  Synthetic
augaacaugugcacacac

SEQ ID NO: 255844 - RNA, 19 nt, Artificial Sequence
  Synthetic
uaugaacaugugcacacac

SEQ ID NO: 255845 - RNA, 20 nt, Artificial Sequence
  Synthetic
auaugaacaugugcacacac

SEQ ID NO: 255846 - RNA, 21 nt, Artificial Sequence
  Synthetic
cauaugaacaugugcacacac

SEQ ID NO: 255847 - RNA, 22 nt, Artificial Sequence
  Synthetic
gcauaugaacaugugcacacac

SEQ ID NO: 255848 - RNA, 23 nt, Artificial Sequence
  Synthetic
ugcauaugaacaugugcacacac

SEQ ID NO: 255849 - RNA, 24 nt, Artificial Sequence
  Synthetic
augcauaugaacaugugcacacac

SEQ ID NO: 255850 - RNA, 18 nt, Artificial Sequence
  Synthetic
gacgggaacaucacacac

SEQ ID NO: 255851 - RNA, 19 nt, Artificial Sequence
  Synthetic
ggacgggaacaucacacac

SEQ ID NO: 255852 - RNA, 20 nt, Artificial Sequence
  Synthetic
gggacgggaacaucacacac

SEQ ID NO: 255853 - RNA, 21 nt, Artificial Sequence
  Synthetic
agggacgggaacaucacacac

SEQ ID NO: 255854 - RNA, 22 nt, Artificial Sequence
  Synthetic
cagggacgggaacaucacacac

SEQ ID NO: 255855 - RNA, 23 nt, Artificial Sequence
  Synthetic
acagggacgggaacaucacacac

SEQ ID NO: 255856 - RNA, 24 nt, Artificial Sequence
  Synthetic
cacagggacgggaacaucacacac

SEQ ID NO: 255857 - RNA, 18 nt, Artificial Sequence
  Synthetic
guggggaacaucacacac

SEQ ID NO: 255858 - RNA, 19 nt, Artificial Sequence
  Synthetic
gguggggaacaucacacac

SEQ ID NO: 255859 - RNA, 20 nt, Artificial Sequence
  Synthetic
ggguggggaacaucacacac

SEQ ID NO: 255860 - RNA, 21 nt, Artificial Sequence
  Synthetic
aggguggggaacaucacacac

SEQ ID NO: 255861 - RNA, 22 nt, Artificial Sequence
  Synthetic
caggguggggaacaucacacac

SEQ ID NO: 255862 - RNA, 23 nt, Artificial Sequence
  Synthetic
acaggguggggaacaucacacac

SEQ ID NO: 255863 - RNA, 24 nt, Artificial Sequence
  Synthetic
cacaggguggggaacaucacacac

SEQ ID NO: 255864 - RNA, 18 nt, Artificial Sequence
  Synthetic
uuguagucccagacacac

SEQ ID NO: 255865 - RNA, 19 nt, Artificial Sequence
  Synthetic
cuuguagucccagacacac

SEQ ID NO: 255866 - RNA, 20 nt, Artificial Sequence
  Synthetic
gcuuguagucccagacacac

SEQ ID NO: 255867 - RNA, 21 nt, Artificial Sequence
  Synthetic
ugcuuguagucccagacacac

SEQ ID NO: 255868 - RNA, 22 nt, Artificial Sequence
  Synthetic
augcuuguagucccagacacac

SEQ ID NO: 255869 - RNA, 23 nt, Artificial Sequence
  Synthetic
caugcuuguagucccagacacac

SEQ ID NO: 255870 - RNA, 24 nt, Artificial Sequence
  Synthetic
ucaugcuuguagucccagacacac

SEQ ID NO: 255871 - RNA, 18 nt, Artificial Sequence
  Synthetic
caguaaaaugggacacac

SEQ ID NO: 255872 - RNA, 19 nt, Artificial Sequence
  Synthetic
ucaguaaaaugggacacac

SEQ ID NO: 255873 - RNA, 20 nt, Artificial Sequence
  Synthetic
aucaguaaaaugggacacac

SEQ ID NO: 255874 - RNA, 21 nt, Artificial Sequence
  Synthetic
aaucaguaaaaugggacacac

SEQ ID NO: 255875 - RNA, 22 nt, Artificial Sequence
  Synthetic
gaaucaguaaaaugggacacac

SEQ ID NO: 255876 - RNA, 23 nt, Artificial Sequence
  Synthetic
agaaucaguaaaaugggacacac

SEQ ID NO: 255877 - RNA, 24 nt, Artificial Sequence
  Synthetic
aagaaucaguaaaaugggacacac

SEQ ID NO: 255878 - RNA, 18 nt, Artificial Sequence
  Synthetic
cccaacucucacccacac

SEQ ID NO: 255879 - RNA, 19 nt, Artificial Sequence
  Synthetic
gcccaacucucacccacac

SEQ ID NO: 255880 - RNA, 20 nt, Artificial Sequence
  Synthetic
ugcccaacucucacccacac

SEQ ID NO: 255881 - RNA, 21 nt, Artificial Sequence
  Synthetic
uugcccaacucucacccacac

SEQ ID NO: 255882 - RNA, 22 nt, Artificial Sequence
  Synthetic
uuugcccaacucucacccacac

SEQ ID NO: 255883 - RNA, 23 nt, Artificial Sequence
  Synthetic
uuuugcccaacucucacccacac

SEQ ID NO: 255884 - RNA, 24 nt, Artificial Sequence
  Synthetic
cuuuugcccaacucucacccacac

SEQ ID NO: 255885 - RNA, 18 nt, Artificial Sequence
  Synthetic
aucaauauagggccacac

SEQ ID NO: 255886 - RNA, 19 nt, Artificial Sequence
  Synthetic
aaucaauauagggccacac

SEQ ID NO: 255887 - RNA, 20 nt, Artificial Sequence
  Synthetic
caaucaauauagggccacac

SEQ ID NO: 255888 - RNA, 21 nt, Artificial Sequence
  Synthetic
ucaaucaauauagggccacac

SEQ ID NO: 255889 - RNA, 22 nt, Artificial Sequence
  Synthetic
uucaaucaauauagggccacac

SEQ ID NO: 255890 - RNA, 23 nt, Artificial Sequence
  Synthetic
cuucaaucaauauagggccacac

SEQ ID NO: 255891 - RNA, 24 nt, Artificial Sequence
  Synthetic
ucuucaaucaauauagggccacac

SEQ ID NO: 255892 - RNA, 18 nt, Artificial Sequence
  Synthetic
auugugaacuguccacac

SEQ ID NO: 255893 - RNA, 19 nt, Artificial Sequence
  Synthetic
uauugugaacuguccacac

SEQ ID NO: 255894 - RNA, 20 nt, Artificial Sequence
  Synthetic
cuauugugaacuguccacac

SEQ ID NO: 255895 - RNA, 21 nt, Artificial Sequence
  Synthetic
ccuauugugaacuguccacac

SEQ ID NO: 255896 - RNA, 22 nt, Artificial Sequence
  Synthetic
cccuauugugaacuguccacac

SEQ ID NO: 255897 - RNA, 23 nt, Artificial Sequence
  Synthetic
acccuauugugaacuguccacac

SEQ ID NO: 255898 - RNA, 24 nt, Artificial Sequence
  Synthetic
aacccuauugugaacuguccacac

SEQ ID NO: 255899 - RNA, 18 nt, Artificial Sequence
  Synthetic
uuuagaaguaaagcacac

SEQ ID NO: 255900 - RNA, 19 nt, Artificial Sequence
  Synthetic
cuuuagaaguaaagcacac

SEQ ID NO: 255901 - RNA, 20 nt, Artificial Sequence
  Synthetic
ccuuuagaaguaaagcacac

SEQ ID NO: 255902 - RNA, 21 nt, Artificial Sequence
  Synthetic
gccuuuagaaguaaagcacac

SEQ ID NO: 255903 - RNA, 22 nt, Artificial Sequence
  Synthetic
agccuuuagaaguaaagcacac

SEQ ID NO: 255904 - RNA, 23 nt, Artificial Sequence
  Synthetic
aagccuuuagaaguaaagcacac

SEQ ID NO: 255905 - RNA, 24 nt, Artificial Sequence
  Synthetic
uaagccuuuagaaguaaagcacac

SEQ ID NO: 255906 - RNA, 18 nt, Artificial Sequence
  Synthetic
guugccaugagagcacac

SEQ ID NO: 255907 - RNA, 19 nt, Artificial Sequence
  Synthetic
aguugccaugagagcacac

SEQ ID NO: 255908 - RNA, 20 nt, Artificial Sequence
  Synthetic
caguugccaugagagcacac

SEQ ID NO: 255909 - RNA, 21 nt, Artificial Sequence
  Synthetic
ccaguugccaugagagcacac

SEQ ID NO: 255910 - RNA, 22 nt, Artificial Sequence
  Synthetic
gccaguugccaugagagcacac

SEQ ID NO: 255911 - RNA, 23 nt, Artificial Sequence
  Synthetic
ggccaguugccaugagagcacac

SEQ ID NO: 255912 - RNA, 24 nt, Artificial Sequence
  Synthetic
uggccaguugccaugagagcacac

SEQ ID NO: 255913 - RNA, 18 nt, Artificial Sequence
  Synthetic
cuagaauaucgggcacac

SEQ ID NO: 255914 - RNA, 19 nt, Artificial Sequence
  Synthetic
acuagaauaucgggcacac

SEQ ID NO: 255915 - RNA, 20 nt, Artificial Sequence
  Synthetic
uacuagaauaucgggcacac

SEQ ID NO: 255916 - RNA, 21 nt, Artificial Sequence
  Synthetic
uuacuagaauaucgggcacac

SEQ ID NO: 255917 - RNA, 22 nt, Artificial Sequence
  Synthetic
auuacuagaauaucgggcacac

SEQ ID NO: 255918 - RNA, 23 nt, Artificial Sequence
  Synthetic
aauuacuagaauaucgggcacac

SEQ ID NO: 255919 - RNA, 24 nt, Artificial Sequence
  Synthetic
gaauuacuagaauaucgggcacac

SEQ ID NO: 255920 - RNA, 18 nt, Artificial Sequence
  Synthetic
agucauuuggcugcacac

SEQ ID NO: 255921 - RNA, 19 nt, Artificial Sequence
  Synthetic
uagucauuuggcugcacac

SEQ ID NO: 255922 - RNA, 20 nt, Artificial Sequence
  Synthetic
cuagucauuuggcugcacac

SEQ ID NO: 255923 - RNA, 21 nt, Artificial Sequence
  Synthetic
gcuagucauuuggcugcacac

SEQ ID NO: 255924 - RNA, 22 nt, Artificial Sequence
  Synthetic
ugcuagucauuuggcugcacac

SEQ ID NO: 255925 - RNA, 23 nt, Artificial Sequence
  Synthetic
augcuagucauuuggcugcacac

SEQ ID NO: 255926 - RNA, 24 nt, Artificial Sequence
  Synthetic
gaugcuagucauuuggcugcacac

SEQ ID NO: 255927 - RNA, 18 nt, Artificial Sequence
  Synthetic
ugcaggacagaaucacac

SEQ ID NO: 255928 - RNA, 19 nt, Artificial Sequence
  Synthetic
gugcaggacagaaucacac

SEQ ID NO: 255929 - RNA, 20 nt, Artificial Sequence
  Synthetic
ugugcaggacagaaucacac

SEQ ID NO: 255930 - RNA, 21 nt, Artificial Sequence
  Synthetic
cugugcaggacagaaucacac

SEQ ID NO: 255931 - RNA, 22 nt, Artificial Sequence
  Synthetic
gcugugcaggacagaaucacac

SEQ ID NO: 255932 - RNA, 23 nt, Artificial Sequence
  Synthetic
agcugugcaggacagaaucacac

SEQ ID NO: 255933 - RNA, 24 nt, Artificial Sequence
  Synthetic
cagcugugcaggacagaaucacac

SEQ ID NO: 255934 - RNA, 18 nt, Artificial Sequence
  Synthetic
auucaggcaggaucacac

SEQ ID NO: 255935 - RNA, 19 nt, Artificial Sequence
  Synthetic
uauucaggcaggaucacac

SEQ ID NO: 255936 - RNA, 20 nt, Artificial Sequence
  Synthetic
uuauucaggcaggaucacac

SEQ ID NO: 255937 - RNA, 21 nt, Artificial Sequence
  Synthetic
guuauucaggcaggaucacac

SEQ ID NO: 255938 - RNA, 22 nt, Artificial Sequence
  Synthetic
aguuauucaggcaggaucacac

SEQ ID NO: 255939 - RNA, 23 nt, Artificial Sequence
  Synthetic
caguuauucaggcaggaucacac

SEQ ID NO: 255940 - RNA, 24 nt, Artificial Sequence
  Synthetic
gcaguuauucaggcaggaucacac

SEQ ID NO: 255941 - RNA, 18 nt, Artificial Sequence
  Synthetic
uaaacugaaauaucacac

SEQ ID NO: 255942 - RNA, 19 nt, Artificial Sequence
  Synthetic
guaaacugaaauaucacac

SEQ ID NO: 255943 - RNA, 20 nt, Artificial Sequence
  Synthetic
aguaaacugaaauaucacac

SEQ ID NO: 255944 - RNA, 21 nt, Artificial Sequence
  Synthetic
gaguaaacugaaauaucacac

SEQ ID NO: 255945 - RNA, 22 nt, Artificial Sequence
  Synthetic
ugaguaaacugaaauaucacac

SEQ ID NO: 255946 - RNA, 23 nt, Artificial Sequence
  Synthetic
cugaguaaacugaaauaucacac

SEQ ID NO: 255947 - RNA, 24 nt, Artificial Sequence
  Synthetic
acugaguaaacugaaauaucacac

SEQ ID NO: 255948 - RNA, 18 nt, Artificial Sequence
  Synthetic
auugucuuaagcucacac

SEQ ID NO: 255949 - RNA, 19 nt, Artificial Sequence
  Synthetic
aauugucuuaagcucacac

SEQ ID NO: 255950 - RNA, 20 nt, Artificial Sequence
  Synthetic
uaauugucuuaagcucacac

SEQ ID NO: 255951 - RNA, 21 nt, Artificial Sequence
  Synthetic
auaauugucuuaagcucacac

SEQ ID NO: 255952 - RNA, 22 nt, Artificial Sequence
  Synthetic
aauaauugucuuaagcucacac

SEQ ID NO: 255953 - RNA, 23 nt, Artificial Sequence
  Synthetic
aaauaauugucuuaagcucacac

SEQ ID NO: 255954 - RNA, 24 nt, Artificial Sequence
  Synthetic
uaaauaauugucuuaagcucacac

SEQ ID NO: 255955 - RNA, 18 nt, Artificial Sequence
  Synthetic
auauguucauagucacac

SEQ ID NO: 255956 - RNA, 19 nt, Artificial Sequence
  Synthetic
cauauguucauagucacac

SEQ ID NO: 255957 - RNA, 20 nt, Artificial Sequence
  Synthetic
gcauauguucauagucacac

SEQ ID NO: 255958 - RNA, 21 nt, Artificial Sequence
  Synthetic
ggcauauguucauagucacac

SEQ ID NO: 255959 - RNA, 22 nt, Artificial Sequence
  Synthetic
gggcauauguucauagucacac

SEQ ID NO: 255960 - RNA, 23 nt, Artificial Sequence
  Synthetic
agggcauauguucauagucacac

SEQ ID NO: 255961 - RNA, 24 nt, Artificial Sequence
  Synthetic
gagggcauauguucauagucacac

SEQ ID NO: 255962 - RNA, 18 nt, Artificial Sequence
  Synthetic
ggagucagagggucacac

SEQ ID NO: 255963 - RNA, 19 nt, Artificial Sequence
  Synthetic
uggagucagagggucacac

SEQ ID NO: 255964 - RNA, 20 nt, Artificial Sequence
  Synthetic
auggagucagagggucacac

SEQ ID NO: 255965 - RNA, 21 nt, Artificial Sequence
  Synthetic
aauggagucagagggucacac

SEQ ID NO: 255966 - RNA, 22 nt, Artificial Sequence
  Synthetic
gaauggagucagagggucacac

SEQ ID NO: 255967 - RNA, 23 nt, Artificial Sequence
  Synthetic
agaauggagucagagggucacac

SEQ ID NO: 255968 - RNA, 24 nt, Artificial Sequence
  Synthetic
aagaauggagucagagggucacac

SEQ ID NO: 255969 - RNA, 18 nt, Artificial Sequence
  Synthetic
uauuugugguugucacac

SEQ ID NO: 255970 - RNA, 19 nt, Artificial Sequence
  Synthetic
auauuugugguugucacac

SEQ ID NO: 255971 - RNA, 20 nt, Artificial Sequence
  Synthetic
gauauuugugguugucacac

SEQ ID NO: 255972 - RNA, 21 nt, Artificial Sequence
  Synthetic
agauauuugugguugucacac

SEQ ID NO: 255973 - RNA, 22 nt, Artificial Sequence
  Synthetic
gagauauuugugguugucacac

SEQ ID NO: 255974 - RNA, 23 nt, Artificial Sequence
  Synthetic
ggagauauuugugguugucacac

SEQ ID NO: 255975 - RNA, 24 nt, Artificial Sequence
  Synthetic
uggagauauuugugguugucacac

SEQ ID NO: 255976 - RNA, 18 nt, Artificial Sequence
  Synthetic
ggucguuuuaauucacac

SEQ ID NO: 255977 - RNA, 19 nt, Artificial Sequence
  Synthetic
aggucguuuuaauucacac

SEQ ID NO: 255978 - RNA, 20 nt, Artificial Sequence
  Synthetic
uaggucguuuuaauucacac

SEQ ID NO: 255979 - RNA, 21 nt, Artificial Sequence
  Synthetic
auaggucguuuuaauucacac

SEQ ID NO: 255980 - RNA, 22 nt, Artificial Sequence
  Synthetic
uauaggucguuuuaauucacac

SEQ ID NO: 255981 - RNA, 23 nt, Artificial Sequence
  Synthetic
uuauaggucguuuuaauucacac

SEQ ID NO: 255982 - RNA, 24 nt, Artificial Sequence
  Synthetic
uuuauaggucguuuuaauucacac

SEQ ID NO: 255983 - RNA, 18 nt, Artificial Sequence
  Synthetic
guuguuaccucuucacac

SEQ ID NO: 255984 - RNA, 19 nt, Artificial Sequence
  Synthetic
aguuguuaccucuucacac

SEQ ID NO: 255985 - RNA, 20 nt, Artificial Sequence
  Synthetic
caguuguuaccucuucacac

SEQ ID NO: 255986 - RNA, 21 nt, Artificial Sequence
  Synthetic
ccaguuguuaccucuucacac

SEQ ID NO: 255987 - RNA, 22 nt, Artificial Sequence
  Synthetic
uccaguuguuaccucuucacac

SEQ ID NO: 255988 - RNA, 23 nt, Artificial Sequence
  Synthetic
uuccaguuguuaccucuucacac

SEQ ID NO: 255989 - RNA, 24 nt, Artificial Sequence
  Synthetic
auuccaguuguuaccucuucacac

SEQ ID NO: 255990 - RNA, 18 nt, Artificial Sequence
  Synthetic
uaugcagccaaaagacac

SEQ ID NO: 255991 - RNA, 19 nt, Artificial Sequence
  Synthetic
uuaugcagccaaaagacac

SEQ ID NO: 255992 - RNA, 20 nt, Artificial Sequence
  Synthetic
uuuaugcagccaaaagacac

SEQ ID NO: 255993 - RNA, 18 nt, Artificial Sequence
  Synthetic
uauguggccaaaagacac

SEQ ID NO: 255994 - RNA, 19 nt, Artificial Sequence
  Synthetic
uuauguggccaaaagacac

SEQ ID NO: 255995 - RNA, 20 nt, Artificial Sequence
  Synthetic
uuuauguggccaaaagacac

SEQ ID NO: 255996 - RNA, 21 nt, Artificial Sequence
  Synthetic
auuuauguggccaaaagacac

SEQ ID NO: 255997 - RNA, 22 nt, Artificial Sequence
  Synthetic
cauuuauguggccaaaagacac

SEQ ID NO: 255998 - RNA, 23 nt, Artificial Sequence
  Synthetic
acauuuauguggccaaaagacac

SEQ ID NO: 255999 - RNA, 24 nt, Artificial Sequence
  Synthetic
gacauuuauguggccaaaagacac

SEQ ID NO: 256000 - RNA, 18 nt, Artificial Sequence
  Synthetic
uuugccaauuaaagacac

SEQ ID NO: 256001 - RNA, 19 nt, Artificial Sequence
  Synthetic
uuuugccaauuaaagacac

SEQ ID NO: 256002 - RNA, 20 nt, Artificial Sequence
  Synthetic
auuuugccaauuaaagacac

SEQ ID NO: 256003 - RNA, 21 nt, Artificial Sequence
  Synthetic
aauuuugccaauuaaagacac

SEQ ID NO: 256004 - RNA, 22 nt, Artificial Sequence
  Synthetic
uaauuuugccaauuaaagacac

SEQ ID NO: 256005 - RNA, 23 nt, Artificial Sequence
  Synthetic
uuaauuuugccaauuaaagacac

SEQ ID NO: 256006 - RNA, 24 nt, Artificial Sequence
  Synthetic
cuuaauuuugccaauuaaagacac

SEQ ID NO: 256007 - RNA, 18 nt, Artificial Sequence
  Synthetic
gugaaguuuuaaagacac

SEQ ID NO: 256008 - RNA, 19 nt, Artificial Sequence
  Synthetic
ugugaaguuuuaaagacac

SEQ ID NO: 256009 - RNA, 20 nt, Artificial Sequence
  Synthetic
augugaaguuuuaaagacac

SEQ ID NO: 256010 - RNA, 21 nt, Artificial Sequence
  Synthetic
aaugugaaguuuuaaagacac

SEQ ID NO: 256011 - RNA, 22 nt, Artificial Sequence
  Synthetic
aaaugugaaguuuuaaagacac

SEQ ID NO: 256012 - RNA, 23 nt, Artificial Sequence
  Synthetic
uaaaugugaaguuuuaaagacac

SEQ ID NO: 256013 - RNA, 24 nt, Artificial Sequence
  Synthetic
auaaaugugaaguuuuaaagacac

SEQ ID NO: 256014 - RNA, 18 nt, Artificial Sequence
  Synthetic
ugauaucaaccaagacac

SEQ ID NO: 256015 - RNA, 19 nt, Artificial Sequence
  Synthetic
cugauaucaaccaagacac

SEQ ID NO: 256016 - RNA, 20 nt, Artificial Sequence
  Synthetic
ccugauaucaaccaagacac

SEQ ID NO: 256017 - RNA, 21 nt, Artificial Sequence
  Synthetic
accugauaucaaccaagacac

SEQ ID NO: 256018 - RNA, 22 nt, Artificial Sequence
  Synthetic
caccugauaucaaccaagacac

SEQ ID NO: 256019 - RNA, 23 nt, Artificial Sequence
  Synthetic
ucaccugauaucaaccaagacac

SEQ ID NO: 256020 - RNA, 24 nt, Artificial Sequence
  Synthetic
uucaccugauaucaaccaagacac

SEQ ID NO: 256021 - RNA, 18 nt, Artificial Sequence
  Synthetic
uuucaaaucccaagacac

SEQ ID NO: 256022 - RNA, 19 nt, Artificial Sequence
  Synthetic
guuucaaaucccaagacac

SEQ ID NO: 256023 - RNA, 20 nt, Artificial Sequence
  Synthetic
uguuucaaaucccaagacac

SEQ ID NO: 256024 - RNA, 21 nt, Artificial Sequence
  Synthetic
uuguuucaaaucccaagacac

SEQ ID NO: 256025 - RNA, 22 nt, Artificial Sequence
  Synthetic
auuguuucaaaucccaagacac

SEQ ID NO: 256026 - RNA, 23 nt, Artificial Sequence
  Synthetic
aauuguuucaaaucccaagacac

SEQ ID NO: 256027 - RNA, 24 nt, Artificial Sequence
  Synthetic
aaauuguuucaaaucccaagacac

SEQ ID NO: 256028 - RNA, 18 nt, Artificial Sequence
  Synthetic
aauggauggggaagacac

SEQ ID NO: 256029 - RNA, 19 nt, Artificial Sequence
  Synthetic
uaauggauggggaagacac

SEQ ID NO: 256030 - RNA, 20 nt, Artificial Sequence
  Synthetic
uuaauggauggggaagacac

SEQ ID NO: 256031 - RNA, 21 nt, Artificial Sequence
  Synthetic
uuuaauggauggggaagacac

SEQ ID NO: 256032 - RNA, 22 nt, Artificial Sequence
  Synthetic
auuuaauggauggggaagacac

SEQ ID NO: 256033 - RNA, 23 nt, Artificial Sequence
  Synthetic
uauuuaauggauggggaagacac

SEQ ID NO: 256034 - RNA, 24 nt, Artificial Sequence
  Synthetic
guauuuaauggauggggaagacac

SEQ ID NO: 256035 - RNA, 18 nt, Artificial Sequence
  Synthetic
agcugauaaauaagacac

SEQ ID NO: 256036 - RNA, 19 nt, Artificial Sequence
  Synthetic
gagcugauaaauaagacac

SEQ ID NO: 256037 - RNA, 20 nt, Artificial Sequence
  Synthetic
ugagcugauaaauaagacac

SEQ ID NO: 256038 - RNA, 21 nt, Artificial Sequence
  Synthetic
cugagcugauaaauaagacac

SEQ ID NO: 256039 - RNA, 22 nt, Artificial Sequence
  Synthetic
gcugagcugauaaauaagacac

SEQ ID NO: 256040 - RNA, 23 nt, Artificial Sequence
  Synthetic
ugcugagcugauaaauaagacac

SEQ ID NO: 256041 - RNA, 24 nt, Artificial Sequence
  Synthetic
uugcugagcugauaaauaagacac

SEQ ID NO: 256042 - RNA, 18 nt, Artificial Sequence
  Synthetic
gaagaaucagacagacac

SEQ ID NO: 256043 - RNA, 19 nt, Artificial Sequence
  Synthetic
agaagaaucagacagacac

SEQ ID NO: 256044 - RNA, 20 nt, Artificial Sequence
  Synthetic
gagaagaaucagacagacac

SEQ ID NO: 256045 - RNA, 21 nt, Artificial Sequence
  Synthetic
agagaagaaucagacagacac

SEQ ID NO: 256046 - RNA, 22 nt, Artificial Sequence
  Synthetic
gagagaagaaucagacagacac

SEQ ID NO: 256047 - RNA, 23 nt, Artificial Sequence
  Synthetic
agagagaagaaucagacagacac

SEQ ID NO: 256048 - RNA, 24 nt, Artificial Sequence
  Synthetic
aagagagaagaaucagacagacac

SEQ ID NO: 256049 - RNA, 18 nt, Artificial Sequence
  Synthetic
aauaaggcugacagacac

SEQ ID NO: 256050 - RNA, 19 nt, Artificial Sequence
  Synthetic
aaauaaggcugacagacac

SEQ ID NO: 256051 - RNA, 20 nt, Artificial Sequence
  Synthetic
gaaauaaggcugacagacac

SEQ ID NO: 256052 - RNA, 21 nt, Artificial Sequence
  Synthetic
ugaaauaaggcugacagacac

SEQ ID NO: 256053 - RNA, 22 nt, Artificial Sequence
  Synthetic
cugaaauaaggcugacagacac

SEQ ID NO: 256054 - RNA, 23 nt, Artificial Sequence
  Synthetic
ccugaaauaaggcugacagacac

SEQ ID NO: 256055 - RNA, 24 nt, Artificial Sequence
  Synthetic
accugaaauaaggcugacagacac

SEQ ID NO: 256056 - RNA, 18 nt, Artificial Sequence
  Synthetic
uaacaaggaaauagacac

SEQ ID NO: 256057 - RNA, 19 nt, Artificial Sequence
  Synthetic
uuaacaaggaaauagacac

SEQ ID NO: 256058 - RNA, 20 nt, Artificial Sequence
  Synthetic
auuaacaaggaaauagacac

SEQ ID NO: 256059 - RNA, 21 nt, Artificial Sequence
  Synthetic
aauuaacaaggaaauagacac

SEQ ID NO: 256060 - RNA, 22 nt, Artificial Sequence
  Synthetic
aaauuaacaaggaaauagacac

SEQ ID NO: 256061 - RNA, 23 nt, Artificial Sequence
  Synthetic
caaauuaacaaggaaauagacac

SEQ ID NO: 256062 - RNA, 24 nt, Artificial Sequence
  Synthetic
gcaaauuaacaaggaaauagacac

SEQ ID NO: 256063 - RNA, 18 nt, Artificial Sequence
  Synthetic
gugaaaaaugauagacac

SEQ ID NO: 256064 - RNA, 19 nt, Artificial Sequence
  Synthetic
ggugaaaaaugauagacac

SEQ ID NO: 256065 - RNA, 20 nt, Artificial Sequence
  Synthetic
uggugaaaaaugauagacac

SEQ ID NO: 256066 - RNA, 21 nt, Artificial Sequence
  Synthetic
uuggugaaaaaugauagacac

SEQ ID NO: 256067 - RNA, 22 nt, Artificial Sequence
  Synthetic
cuuggugaaaaaugauagacac

SEQ ID NO: 256068 - RNA, 23 nt, Artificial Sequence
  Synthetic
ccuuggugaaaaaugauagacac

SEQ ID NO: 256069 - RNA, 24 nt, Artificial Sequence
  Synthetic
uccuuggugaaaaaugauagacac

SEQ ID NO: 256070 - RNA, 18 nt, Artificial Sequence
  Synthetic
aaacauuaggcuagacac

SEQ ID NO: 256071 - RNA, 19 nt, Artificial Sequence
  Synthetic
caaacauuaggcuagacac

SEQ ID NO: 256072 - RNA, 20 nt, Artificial Sequence
  Synthetic
ccaaacauuaggcuagacac

SEQ ID NO: 256073 - RNA, 21 nt, Artificial Sequence
  Synthetic
uccaaacauuaggcuagacac

SEQ ID NO: 256074 - RNA, 22 nt, Artificial Sequence
  Synthetic
uuccaaacauuaggcuagacac

SEQ ID NO: 256075 - RNA, 23 nt, Artificial Sequence
  Synthetic
guuccaaacauuaggcuagacac

SEQ ID NO: 256076 - RNA, 24 nt, Artificial Sequence
  Synthetic
uguuccaaacauuaggcuagacac

SEQ ID NO: 256077 - RNA, 18 nt, Artificial Sequence
  Synthetic
auaaucuaugguagacac

SEQ ID NO: 256078 - RNA, 19 nt, Artificial Sequence
  Synthetic
aauaaucuaugguagacac

SEQ ID NO: 256079 - RNA, 20 nt, Artificial Sequence
  Synthetic
uaauaaucuaugguagacac

SEQ ID NO: 256080 - RNA, 21 nt, Artificial Sequence
  Synthetic
auaauaaucuaugguagacac

SEQ ID NO: 256081 - RNA, 22 nt, Artificial Sequence
  Synthetic
uauaauaaucuaugguagacac

SEQ ID NO: 256082 - RNA, 23 nt, Artificial Sequence
  Synthetic
auauaauaaucuaugguagacac

SEQ ID NO: 256083 - RNA, 24 nt, Artificial Sequence
  Synthetic
uauauaauaaucuaugguagacac

SEQ ID NO: 256084 - RNA, 18 nt, Artificial Sequence
  Synthetic
ugucugccacaaggacac

SEQ ID NO: 256085 - RNA, 19 nt, Artificial Sequence
  Synthetic
augucugccacaaggacac

SEQ ID NO: 256086 - RNA, 20 nt, Artificial Sequence
  Synthetic
caugucugccacaaggacac

SEQ ID NO: 256087 - RNA, 21 nt, Artificial Sequence
  Synthetic
ccaugucugccacaaggacac

SEQ ID NO: 256088 - RNA, 22 nt, Artificial Sequence
  Synthetic
accaugucugccacaaggacac

SEQ ID NO: 256089 - RNA, 23 nt, Artificial Sequence
  Synthetic
aaccaugucugccacaaggacac

SEQ ID NO: 256090 - RNA, 24 nt, Artificial Sequence
  Synthetic
aaaccaugucugccacaaggacac

SEQ ID NO: 256091 - RNA, 18 nt, Artificial Sequence
  Synthetic
agacacuguacaggacac

SEQ ID NO: 256092 - RNA, 19 nt, Artificial Sequence
  Synthetic
uagacacuguacaggacac

SEQ ID NO: 256093 - RNA, 20 nt, Artificial Sequence
  Synthetic
guagacacuguacaggacac

SEQ ID NO: 256094 - RNA, 21 nt, Artificial Sequence
  Synthetic
gguagacacuguacaggacac

SEQ ID NO: 256095 - RNA, 22 nt, Artificial Sequence
  Synthetic
ugguagacacuguacaggacac

SEQ ID NO: 256096 - RNA, 23 nt, Artificial Sequence
  Synthetic
uugguagacacuguacaggacac

SEQ ID NO: 256097 - RNA, 24 nt, Artificial Sequence
  Synthetic
auugguagacacuguacaggacac

SEQ ID NO: 256098 - RNA, 18 nt, Artificial Sequence
  Synthetic
cccaugugacagggacac

SEQ ID NO: 256099 - RNA, 19 nt, Artificial Sequence
  Synthetic
gcccaugugacagggacac

SEQ ID NO: 256100 - RNA, 20 nt, Artificial Sequence
  Synthetic
agcccaugugacagggacac

SEQ ID NO: 256101 - RNA, 21 nt, Artificial Sequence
  Synthetic
cagcccaugugacagggacac

SEQ ID NO: 256102 - RNA, 22 nt, Artificial Sequence
  Synthetic
ucagcccaugugacagggacac

SEQ ID NO: 256103 - RNA, 23 nt, Artificial Sequence
  Synthetic
uucagcccaugugacagggacac

SEQ ID NO: 256104 - RNA, 24 nt, Artificial Sequence
  Synthetic
cuucagcccaugugacagggacac

SEQ ID NO: 256105 - RNA, 21 nt, Artificial Sequence
  Synthetic
acaaugagaacacauggacac

SEQ ID NO: 256106 - RNA, 22 nt, Artificial Sequence
  Synthetic
aacaaugagaacacauggacac

SEQ ID NO: 256107 - RNA, 23 nt, Artificial Sequence
  Synthetic
gaacaaugagaacacauggacac

SEQ ID NO: 256108 - RNA, 24 nt, Artificial Sequence
  Synthetic
ugaacaaugagaacacauggacac

SEQ ID NO: 256109 - RNA, 21 nt, Artificial Sequence
  Synthetic
gcaaugagaacacauggacac

SEQ ID NO: 256110 - RNA, 22 nt, Artificial Sequence
  Synthetic
agcaaugagaacacauggacac

SEQ ID NO: 256111 - RNA, 23 nt, Artificial Sequence
  Synthetic
gagcaaugagaacacauggacac

SEQ ID NO: 256112 - RNA, 24 nt, Artificial Sequence
  Synthetic
ugagcaaugagaacacauggacac

SEQ ID NO: 256113 - RNA, 18 nt, Artificial Sequence
  Synthetic
augagaucacauggacac

SEQ ID NO: 256114 - RNA, 19 nt, Artificial Sequence
  Synthetic
aaugagaucacauggacac

SEQ ID NO: 256115 - RNA, 20 nt, Artificial Sequence
  Synthetic
caaugagaucacauggacac

SEQ ID NO: 256116 - RNA, 21 nt, Artificial Sequence
  Synthetic
acaaugagaucacauggacac

SEQ ID NO: 256117 - RNA, 22 nt, Artificial Sequence
  Synthetic
aacaaugagaucacauggacac

SEQ ID NO: 256118 - RNA, 23 nt, Artificial Sequence
  Synthetic
gaacaaugagaucacauggacac

SEQ ID NO: 256119 - RNA, 24 nt, Artificial Sequence
  Synthetic
ugaacaaugagaucacauggacac

SEQ ID NO: 256120 - RNA, 18 nt, Artificial Sequence
  Synthetic
acgagagcccauggacac

SEQ ID NO: 256121 - RNA, 19 nt, Artificial Sequence
  Synthetic
aacgagagcccauggacac

SEQ ID NO: 256122 - RNA, 20 nt, Artificial Sequence
  Synthetic
caacgagagcccauggacac

SEQ ID NO: 256123 - RNA, 21 nt, Artificial Sequence
  Synthetic
acaacgagagcccauggacac

SEQ ID NO: 256124 - RNA, 22 nt, Artificial Sequence
  Synthetic
aacaacgagagcccauggacac

SEQ ID NO: 256125 - RNA, 23 nt, Artificial Sequence
  Synthetic
gaacaacgagagcccauggacac

SEQ ID NO: 256126 - RNA, 24 nt, Artificial Sequence
  Synthetic
ugaacaacgagagcccauggacac

SEQ ID NO: 256127 - RNA, 18 nt, Artificial Sequence
  Synthetic
gcaggauaaauuggacac

SEQ ID NO: 256128 - RNA, 19 nt, Artificial Sequence
  Synthetic
ggcaggauaaauuggacac

SEQ ID NO: 256129 - RNA, 20 nt, Artificial Sequence
  Synthetic
uggcaggauaaauuggacac

SEQ ID NO: 256130 - RNA, 21 nt, Artificial Sequence
  Synthetic
auggcaggauaaauuggacac

SEQ ID NO: 256131 - RNA, 22 nt, Artificial Sequence
  Synthetic
aauggcaggauaaauuggacac

SEQ ID NO: 256132 - RNA, 23 nt, Artificial Sequence
  Synthetic
aaauggcaggauaaauuggacac

SEQ ID NO: 256133 - RNA, 24 nt, Artificial Sequence
  Synthetic
aaaauggcaggauaaauuggacac

SEQ ID NO: 256134 - RNA, 18 nt, Artificial Sequence
  Synthetic
gggucccucacaugacac

SEQ ID NO: 256135 - RNA, 19 nt, Artificial Sequence
  Synthetic
ugggucccucacaugacac

SEQ ID NO: 256136 - RNA, 20 nt, Artificial Sequence
  Synthetic
cugggucccucacaugacac

SEQ ID NO: 256137 - RNA, 21 nt, Artificial Sequence
  Synthetic
acugggucccucacaugacac

SEQ ID NO: 256138 - RNA, 22 nt, Artificial Sequence
  Synthetic
aacugggucccucacaugacac

SEQ ID NO: 256139 - RNA, 23 nt, Artificial Sequence
  Synthetic
caacugggucccucacaugacac

SEQ ID NO: 256140 - RNA, 24 nt, Artificial Sequence
  Synthetic
ccaacugggucccucacaugacac

SEQ ID NO: 256141 - RNA, 18 nt, Artificial Sequence
  Synthetic
auaaguuucacaugacac

SEQ ID NO: 256142 - RNA, 19 nt, Artificial Sequence
  Synthetic
uauaaguuucacaugacac

SEQ ID NO: 256143 - RNA, 20 nt, Artificial Sequence
  Synthetic
auauaaguuucacaugacac

SEQ ID NO: 256144 - RNA, 21 nt, Artificial Sequence
  Synthetic
aauauaaguuucacaugacac

SEQ ID NO: 256145 - RNA, 22 nt, Artificial Sequence
  Synthetic
uaauauaaguuucacaugacac

SEQ ID NO: 256146 - RNA, 23 nt, Artificial Sequence
  Synthetic
uuaauauaaguuucacaugacac

SEQ ID NO: 256147 - RNA, 24 nt, Artificial Sequence
  Synthetic
uuuaauauaaguuucacaugacac

SEQ ID NO: 256148 - RNA, 18 nt, Artificial Sequence
  Synthetic
aggucacucccaugacac

SEQ ID NO: 256149 - RNA, 19 nt, Artificial Sequence
  Synthetic
caggucacucccaugacac

SEQ ID NO: 256150 - RNA, 20 nt, Artificial Sequence
  Synthetic
ccaggucacucccaugacac

SEQ ID NO: 256151 - RNA, 21 nt, Artificial Sequence
  Synthetic
accaggucacucccaugacac

SEQ ID NO: 256152 - RNA, 22 nt, Artificial Sequence
  Synthetic
caccaggucacucccaugacac

SEQ ID NO: 256153 - RNA, 23 nt, Artificial Sequence
  Synthetic
ccaccaggucacucccaugacac

SEQ ID NO: 256154 - RNA, 24 nt, Artificial Sequence
  Synthetic
cccaccaggucacucccaugacac

SEQ ID NO: 256155 - RNA, 18 nt, Artificial Sequence
  Synthetic
caacaaggucccugacac

SEQ ID NO: 256156 - RNA, 19 nt, Artificial Sequence
  Synthetic
ccaacaaggucccugacac

SEQ ID NO: 256157 - RNA, 20 nt, Artificial Sequence
  Synthetic
accaacaaggucccugacac

SEQ ID NO: 256158 - RNA, 21 nt, Artificial Sequence
  Synthetic
gaccaacaaggucccugacac

SEQ ID NO: 256159 - RNA, 22 nt, Artificial Sequence
  Synthetic
ugaccaacaaggucccugacac

SEQ ID NO: 256160 - RNA, 23 nt, Artificial Sequence
  Synthetic
cugaccaacaaggucccugacac

SEQ ID NO: 256161 - RNA, 24 nt, Artificial Sequence
  Synthetic
ucugaccaacaaggucccugacac

SEQ ID NO: 256162 - RNA, 18 nt, Artificial Sequence
  Synthetic
cauucauagcgcugacac

SEQ ID NO: 256163 - RNA, 19 nt, Artificial Sequence
  Synthetic
ccauucauagcgcugacac

SEQ ID NO: 256164 - RNA, 20 nt, Artificial Sequence
  Synthetic
cccauucauagcgcugacac

SEQ ID NO: 256165 - RNA, 21 nt, Artificial Sequence
  Synthetic
acccauucauagcgcugacac

SEQ ID NO: 256166 - RNA, 22 nt, Artificial Sequence
  Synthetic
gacccauucauagcgcugacac

SEQ ID NO: 256167 - RNA, 23 nt, Artificial Sequence
  Synthetic
agacccauucauagcgcugacac

SEQ ID NO: 256168 - RNA, 24 nt, Artificial Sequence
  Synthetic
gagacccauucauagcgcugacac

SEQ ID NO: 256169 - RNA, 18 nt, Artificial Sequence
  Synthetic
ugcaugggaggcugacac

SEQ ID NO: 256170 - RNA, 19 nt, Artificial Sequence
  Synthetic
cugcaugggaggcugacac

SEQ ID NO: 256171 - RNA, 20 nt, Artificial Sequence
  Synthetic
gcugcaugggaggcugacac

SEQ ID NO: 256172 - RNA, 21 nt, Artificial Sequence
  Synthetic
agcugcaugggaggcugacac

SEQ ID NO: 256173 - RNA, 22 nt, Artificial Sequence
  Synthetic
cagcugcaugggaggcugacac

SEQ ID NO: 256174 - RNA, 23 nt, Artificial Sequence
  Synthetic
ccagcugcaugggaggcugacac

SEQ ID NO: 256175 - RNA, 24 nt, Artificial Sequence
  Synthetic
gccagcugcaugggaggcugacac

SEQ ID NO: 256176 - RNA, 18 nt, Artificial Sequence
  Synthetic
acaguggucugcugacac

SEQ ID NO: 256177 - RNA, 19 nt, Artificial Sequence
  Synthetic
cacaguggucugcugacac

SEQ ID NO: 256178 - RNA, 20 nt, Artificial Sequence
  Synthetic
gcacaguggucugcugacac

SEQ ID NO: 256179 - RNA, 21 nt, Artificial Sequence
  Synthetic
ugcacaguggucugcugacac

SEQ ID NO: 256180 - RNA, 22 nt, Artificial Sequence
  Synthetic
augcacaguggucugcugacac

SEQ ID NO: 256181 - RNA, 23 nt, Artificial Sequence
  Synthetic
caugcacaguggucugcugacac

SEQ ID NO: 256182 - RNA, 24 nt, Artificial Sequence
  Synthetic
gcaugcacaguggucugcugacac

SEQ ID NO: 256183 - RNA, 18 nt, Artificial Sequence
  Synthetic
cuucaccaaaugugacac

SEQ ID NO: 256184 - RNA, 19 nt, Artificial Sequence
  Synthetic
gcuucaccaaaugugacac

SEQ ID NO: 256185 - RNA, 20 nt, Artificial Sequence
  Synthetic
ugcuucaccaaaugugacac

SEQ ID NO: 256186 - RNA, 21 nt, Artificial Sequence
  Synthetic
gugcuucaccaaaugugacac

SEQ ID NO: 256187 - RNA, 22 nt, Artificial Sequence
  Synthetic
ggugcuucaccaaaugugacac

SEQ ID NO: 256188 - RNA, 23 nt, Artificial Sequence
  Synthetic
uggugcuucaccaaaugugacac

SEQ ID NO: 256189 - RNA, 24 nt, Artificial Sequence
  Synthetic
cuggugcuucaccaaaugugacac

SEQ ID NO: 256190 - RNA, 18 nt, Artificial Sequence
  Synthetic
uggucucucccuugacac

SEQ ID NO: 256191 - RNA, 19 nt, Artificial Sequence
  Synthetic
cuggucucucccuugacac

SEQ ID NO: 256192 - RNA, 20 nt, Artificial Sequence
  Synthetic
ccuggucucucccuugacac

SEQ ID NO: 256193 - RNA, 24 nt, Artificial Sequence
  Synthetic
uccaccuggucucucccuugacac

SEQ ID NO: 256194 - RNA, 18 nt, Artificial Sequence
  Synthetic
uacacugugauuugacac

SEQ ID NO: 256195 - RNA, 19 nt, Artificial Sequence
  Synthetic
auacacugugauuugacac

SEQ ID NO: 256196 - RNA, 20 nt, Artificial Sequence
  Synthetic
cauacacugugauuugacac

SEQ ID NO: 256197 - RNA, 21 nt, Artificial Sequence
  Synthetic
acauacacugugauuugacac

SEQ ID NO: 256198 - RNA, 22 nt, Artificial Sequence
  Synthetic
aacauacacugugauuugacac

SEQ ID NO: 256199 - RNA, 23 nt, Artificial Sequence
  Synthetic
uaacauacacugugauuugacac

SEQ ID NO: 256200 - RNA, 24 nt, Artificial Sequence
  Synthetic
cuaacauacacugugauuugacac

SEQ ID NO: 256201 - RNA, 18 nt, Artificial Sequence
  Synthetic
uagccucuccuuugacac

SEQ ID NO: 256202 - RNA, 19 nt, Artificial Sequence
  Synthetic
auagccucuccuuugacac

SEQ ID NO: 256203 - RNA, 20 nt, Artificial Sequence
  Synthetic
cauagccucuccuuugacac

SEQ ID NO: 256204 - RNA, 21 nt, Artificial Sequence
  Synthetic
acauagccucuccuuugacac

SEQ ID NO: 256205 - RNA, 22 nt, Artificial Sequence
  Synthetic
cacauagccucuccuuugacac

SEQ ID NO: 256206 - RNA, 23 nt, Artificial Sequence
  Synthetic
ccacauagccucuccuuugacac

SEQ ID NO: 256207 - RNA, 24 nt, Artificial Sequence
  Synthetic
uccacauagccucuccuuugacac

SEQ ID NO: 256208 - RNA, 18 nt, Artificial Sequence
  Synthetic
uuugagggccaaauacac

SEQ ID NO: 256209 - RNA, 19 nt, Artificial Sequence
  Synthetic
guuugagggccaaauacac

SEQ ID NO: 256210 - RNA, 20 nt, Artificial Sequence
  Synthetic
gguuugagggccaaauacac

SEQ ID NO: 256211 - RNA, 21 nt, Artificial Sequence
  Synthetic
ugguuugagggccaaauacac

SEQ ID NO: 256212 - RNA, 22 nt, Artificial Sequence
  Synthetic
uugguuugagggccaaauacac

SEQ ID NO: 256213 - RNA, 23 nt, Artificial Sequence
  Synthetic
cuugguuugagggccaaauacac

SEQ ID NO: 256214 - RNA, 24 nt, Artificial Sequence
  Synthetic
gcuugguuugagggccaaauacac

SEQ ID NO: 256215 - RNA, 18 nt, Artificial Sequence
  Synthetic
uaagguauagaaauacac

SEQ ID NO: 256216 - RNA, 19 nt, Artificial Sequence
  Synthetic
guaagguauagaaauacac

SEQ ID NO: 256217 - RNA, 20 nt, Artificial Sequence
  Synthetic
uguaagguauagaaauacac

SEQ ID NO: 256218 - RNA, 21 nt, Artificial Sequence
  Synthetic
uuguaagguauagaaauacac

SEQ ID NO: 256219 - RNA, 22 nt, Artificial Sequence
  Synthetic
uuuguaagguauagaaauacac

SEQ ID NO: 256220 - RNA, 23 nt, Artificial Sequence
  Synthetic
cuuuguaagguauagaaauacac

SEQ ID NO: 256221 - RNA, 24 nt, Artificial Sequence
  Synthetic
acuuuguaagguauagaaauacac

SEQ ID NO: 256222 - RNA, 18 nt, Artificial Sequence
  Synthetic
uaucucuacacaauacac

SEQ ID NO: 256223 - RNA, 19 nt, Artificial Sequence
  Synthetic
cuaucucuacacaauacac

SEQ ID NO: 256224 - RNA, 20 nt, Artificial Sequence
  Synthetic
ccuaucucuacacaauacac

SEQ ID NO: 256225 - RNA, 21 nt, Artificial Sequence
  Synthetic
gccuaucucuacacaauacac

SEQ ID NO: 256226 - RNA, 22 nt, Artificial Sequence
  Synthetic
agccuaucucuacacaauacac

SEQ ID NO: 256227 - RNA, 23 nt, Artificial Sequence
  Synthetic
uagccuaucucuacacaauacac

SEQ ID NO: 256228 - RNA, 24 nt, Artificial Sequence
  Synthetic
uuagccuaucucuacacaauacac

SEQ ID NO: 256229 - RNA, 18 nt, Artificial Sequence
  Synthetic
auucauaucaggauacac

SEQ ID NO: 256230 - RNA, 19 nt, Artificial Sequence
  Synthetic
gauucauaucaggauacac

SEQ ID NO: 256231 - RNA, 20 nt, Artificial Sequence
  Synthetic
ggauucauaucaggauacac

SEQ ID NO: 256232 - RNA, 21 nt, Artificial Sequence
  Synthetic
gggauucauaucaggauacac

SEQ ID NO: 256233 - RNA, 22 nt, Artificial Sequence
  Synthetic
agggauucauaucaggauacac

SEQ ID NO: 256234 - RNA, 23 nt, Artificial Sequence
  Synthetic
aagggauucauaucaggauacac

SEQ ID NO: 256235 - RNA, 24 nt, Artificial Sequence
  Synthetic
aaagggauucauaucaggauacac

SEQ ID NO: 256236 - RNA, 18 nt, Artificial Sequence
  Synthetic
ccauauaugaauauacac

SEQ ID NO: 256237 - RNA, 19 nt, Artificial Sequence
  Synthetic
uccauauaugaauauacac

SEQ ID NO: 256238 - RNA, 20 nt, Artificial Sequence
  Synthetic
uuccauauaugaauauacac

SEQ ID NO: 256239 - RNA, 21 nt, Artificial Sequence
  Synthetic
auuccauauaugaauauacac

SEQ ID NO: 256240 - RNA, 22 nt, Artificial Sequence
  Synthetic
uauuccauauaugaauauacac

SEQ ID NO: 256241 - RNA, 23 nt, Artificial Sequence
  Synthetic
uuauuccauauaugaauauacac

SEQ ID NO: 256242 - RNA, 24 nt, Artificial Sequence
  Synthetic
uuuauuccauauaugaauauacac

SEQ ID NO: 256243 - RNA, 18 nt, Artificial Sequence
  Synthetic
gaauaacuggauauacac

SEQ ID NO: 256244 - RNA, 19 nt, Artificial Sequence
  Synthetic
agaauaacuggauauacac

SEQ ID NO: 256245 - RNA, 20 nt, Artificial Sequence
  Synthetic
uagaauaacuggauauacac

SEQ ID NO: 256246 - RNA, 21 nt, Artificial Sequence
  Synthetic
cuagaauaacuggauauacac

SEQ ID NO: 256247 - RNA, 22 nt, Artificial Sequence
  Synthetic
gcuagaauaacuggauauacac

SEQ ID NO: 256248 - RNA, 23 nt, Artificial Sequence
  Synthetic
ugcuagaauaacuggauauacac

SEQ ID NO: 256249 - RNA, 24 nt, Artificial Sequence
  Synthetic
gugcuagaauaacuggauauacac

SEQ ID NO: 256250 - RNA, 18 nt, Artificial Sequence
  Synthetic
uuucuguuggauauacac

SEQ ID NO: 256251 - RNA, 19 nt, Artificial Sequence
  Synthetic
auuucuguuggauauacac

SEQ ID NO: 256252 - RNA, 20 nt, Artificial Sequence
  Synthetic
cauuucuguuggauauacac

SEQ ID NO: 256253 - RNA, 21 nt, Artificial Sequence
  Synthetic
gcauuucuguuggauauacac

SEQ ID NO: 256254 - RNA, 22 nt, Artificial Sequence
  Synthetic
ugcauuucuguuggauauacac

SEQ ID NO: 256255 - RNA, 23 nt, Artificial Sequence
  Synthetic
augcauuucuguuggauauacac

SEQ ID NO: 256256 - RNA, 24 nt, Artificial Sequence
  Synthetic
uaugcauuucuguuggauauacac

SEQ ID NO: 256257 - RNA, 18 nt, Artificial Sequence
  Synthetic
uuuauauuuuuuauacac

SEQ ID NO: 256258 - RNA, 19 nt, Artificial Sequence
  Synthetic
cuuuauauuuuuuauacac

SEQ ID NO: 256259 - RNA, 20 nt, Artificial Sequence
  Synthetic
ucuuuauauuuuuuauacac

SEQ ID NO: 256260 - RNA, 21 nt, Artificial Sequence
  Synthetic
uucuuuauauuuuuuauacac

SEQ ID NO: 256261 - RNA, 22 nt, Artificial Sequence
  Synthetic
uuucuuuauauuuuuuauacac

SEQ ID NO: 256262 - RNA, 23 nt, Artificial Sequence
  Synthetic
uuuucuuuauauuuuuuauacac

SEQ ID NO: 256263 - RNA, 24 nt, Artificial Sequence
  Synthetic
cuuuucuuuauauuuuuuauacac

SEQ ID NO: 256264 - RNA, 18 nt, Artificial Sequence
  Synthetic
uucugaaaggcacuacac

SEQ ID NO: 256265 - RNA, 19 nt, Artificial Sequence
  Synthetic
uuucugaaaggcacuacac

SEQ ID NO: 256266 - RNA, 20 nt, Artificial Sequence
  Synthetic
uuuucugaaaggcacuacac

SEQ ID NO: 256267 - RNA, 21 nt, Artificial Sequence
  Synthetic
auuuucugaaaggcacuacac

SEQ ID NO: 256268 - RNA, 22 nt, Artificial Sequence
  Synthetic
gauuuucugaaaggcacuacac

SEQ ID NO: 256269 - RNA, 23 nt, Artificial Sequence
  Synthetic
agauuuucugaaaggcacuacac

SEQ ID NO: 256270 - RNA, 24 nt, Artificial Sequence
  Synthetic
gagauuuucugaaaggcacuacac

SEQ ID NO: 256271 - RNA, 18 nt, Artificial Sequence
  Synthetic
uauaaggagguccuacac

SEQ ID NO: 256272 - RNA, 19 nt, Artificial Sequence
  Synthetic
cuauaaggagguccuacac

SEQ ID NO: 256273 - RNA, 20 nt, Artificial Sequence
  Synthetic
ucuauaaggagguccuacac

SEQ ID NO: 256274 - RNA, 21 nt, Artificial Sequence
  Synthetic
uucuauaaggagguccuacac

SEQ ID NO: 256275 - RNA, 22 nt, Artificial Sequence
  Synthetic
uuucuauaaggagguccuacac

SEQ ID NO: 256276 - RNA, 23 nt, Artificial Sequence
  Synthetic
uuuucuauaaggagguccuacac

SEQ ID NO: 256277 - RNA, 24 nt, Artificial Sequence
  Synthetic
uuuuucuauaaggagguccuacac

SEQ ID NO: 256278 - RNA, 18 nt, Artificial Sequence
  Synthetic
caagucacaugcguacac

SEQ ID NO: 256279 - RNA, 19 nt, Artificial Sequence
  Synthetic
acaagucacaugcguacac

SEQ ID NO: 256280 - RNA, 20 nt, Artificial Sequence
  Synthetic
uacaagucacaugcguacac

SEQ ID NO: 256281 - RNA, 21 nt, Artificial Sequence
  Synthetic
guacaagucacaugcguacac

SEQ ID NO: 256282 - RNA, 22 nt, Artificial Sequence
  Synthetic
uguacaagucacaugcguacac

SEQ ID NO: 256283 - RNA, 23 nt, Artificial Sequence
  Synthetic
uuguacaagucacaugcguacac

SEQ ID NO: 256284 - RNA, 24 nt, Artificial Sequence
  Synthetic
cuuguacaagucacaugcguacac

SEQ ID NO: 256285 - RNA, 18 nt, Artificial Sequence
  Synthetic
cagaagaugaggguacac

SEQ ID NO: 256286 - RNA, 19 nt, Artificial Sequence
  Synthetic
ucagaagaugaggguacac

SEQ ID NO: 256287 - RNA, 20 nt, Artificial Sequence
  Synthetic
aucagaagaugaggguacac

SEQ ID NO: 256288 - RNA, 21 nt, Artificial Sequence
  Synthetic
uaucagaagaugaggguacac

SEQ ID NO: 256289 - RNA, 22 nt, Artificial Sequence
  Synthetic
guaucagaagaugaggguacac

SEQ ID NO: 256290 - RNA, 23 nt, Artificial Sequence
  Synthetic
aguaucagaagaugaggguacac

SEQ ID NO: 256291 - RNA, 24 nt, Artificial Sequence
  Synthetic
caguaucagaagaugaggguacac

SEQ ID NO: 256292 - RNA, 18 nt, Artificial Sequence
  Synthetic
agauuaaauaggguacac

SEQ ID NO: 256293 - RNA, 19 nt, Artificial Sequence
  Synthetic
aagauuaaauaggguacac

SEQ ID NO: 256294 - RNA, 20 nt, Artificial Sequence
  Synthetic
uaagauuaaauaggguacac

SEQ ID NO: 256295 - RNA, 21 nt, Artificial Sequence
  Synthetic
uuaagauuaaauaggguacac

SEQ ID NO: 256296 - RNA, 22 nt, Artificial Sequence
  Synthetic
guuaagauuaaauaggguacac

SEQ ID NO: 256297 - RNA, 23 nt, Artificial Sequence
  Synthetic
gguuaagauuaaauaggguacac

SEQ ID NO: 256298 - RNA, 24 nt, Artificial Sequence
  Synthetic
ggguuaagauuaaauaggguacac

SEQ ID NO: 256299 - RNA, 18 nt, Artificial Sequence
  Synthetic
aacuugguggugguacac

SEQ ID NO: 256300 - RNA, 19 nt, Artificial Sequence
  Synthetic
caacuugguggugguacac

SEQ ID NO: 256301 - RNA, 20 nt, Artificial Sequence
  Synthetic
ucaacuugguggugguacac

SEQ ID NO: 256302 - RNA, 21 nt, Artificial Sequence
  Synthetic
gucaacuugguggugguacac

SEQ ID NO: 256303 - RNA, 22 nt, Artificial Sequence
  Synthetic
ugucaacuugguggugguacac

SEQ ID NO: 256304 - RNA, 23 nt, Artificial Sequence
  Synthetic
gugucaacuugguggugguacac

SEQ ID NO: 256305 - RNA, 24 nt, Artificial Sequence
  Synthetic
ugugucaacuugguggugguacac

SEQ ID NO: 256306 - RNA, 18 nt, Artificial Sequence
  Synthetic
auguauaaacauguacac

SEQ ID NO: 256307 - RNA, 19 nt, Artificial Sequence
  Synthetic
aauguauaaacauguacac

SEQ ID NO: 256308 - RNA, 20 nt, Artificial Sequence
  Synthetic
uaauguauaaacauguacac

SEQ ID NO: 256309 - RNA, 21 nt, Artificial Sequence
  Synthetic
auaauguauaaacauguacac

SEQ ID NO: 256310 - RNA, 22 nt, Artificial Sequence
  Synthetic
aauaauguauaaacauguacac

SEQ ID NO: 256311 - RNA, 23 nt, Artificial Sequence
  Synthetic
aaauaauguauaaacauguacac

SEQ ID NO: 256312 - RNA, 24 nt, Artificial Sequence
  Synthetic
caaauaauguauaaacauguacac

SEQ ID NO: 256313 - RNA, 18 nt, Artificial Sequence
  Synthetic
uauuuuauaucuguacac

SEQ ID NO: 256314 - RNA, 19 nt, Artificial Sequence
  Synthetic
auauuuuauaucuguacac

SEQ ID NO: 256315 - RNA, 20 nt, Artificial Sequence
  Synthetic
aauauuuuauaucuguacac

SEQ ID NO: 256316 - RNA, 21 nt, Artificial Sequence
  Synthetic
gaauauuuuauaucuguacac

SEQ ID NO: 256317 - RNA, 22 nt, Artificial Sequence
  Synthetic
ugaauauuuuauaucuguacac

SEQ ID NO: 256318 - RNA, 23 nt, Artificial Sequence
  Synthetic
augaauauuuuauaucuguacac

SEQ ID NO: 256319 - RNA, 24 nt, Artificial Sequence
  Synthetic
caugaauauuuuauaucuguacac

SEQ ID NO: 256320 - RNA, 18 nt, Artificial Sequence
  Synthetic
ggcaaaauuuuuguacac

SEQ ID NO: 256321 - RNA, 19 nt, Artificial Sequence
  Synthetic
aggcaaaauuuuuguacac

SEQ ID NO: 256322 - RNA, 20 nt, Artificial Sequence
  Synthetic
uaggcaaaauuuuuguacac

SEQ ID NO: 256323 - RNA, 21 nt, Artificial Sequence
  Synthetic
cuaggcaaaauuuuuguacac

SEQ ID NO: 256324 - RNA, 22 nt, Artificial Sequence
  Synthetic
ccuaggcaaaauuuuuguacac

SEQ ID NO: 256325 - RNA, 23 nt, Artificial Sequence
  Synthetic
accuaggcaaaauuuuuguacac

SEQ ID NO: 256326 - RNA, 24 nt, Artificial Sequence
  Synthetic
aaccuaggcaaaauuuuuguacac

SEQ ID NO: 256327 - RNA, 18 nt, Artificial Sequence
  Synthetic
cuguggaguaaauuacac

SEQ ID NO: 256328 - RNA, 19 nt, Artificial Sequence
  Synthetic
acuguggaguaaauuacac

SEQ ID NO: 256329 - RNA, 20 nt, Artificial Sequence
  Synthetic
gacuguggaguaaauuacac

SEQ ID NO: 256330 - RNA, 21 nt, Artificial Sequence
  Synthetic
agacuguggaguaaauuacac

SEQ ID NO: 256331 - RNA, 22 nt, Artificial Sequence
  Synthetic
aagacuguggaguaaauuacac

SEQ ID NO: 256332 - RNA, 23 nt, Artificial Sequence
  Synthetic
gaagacuguggaguaaauuacac

SEQ ID NO: 256333 - RNA, 24 nt, Artificial Sequence
  Synthetic
agaagacuguggaguaaauuacac

SEQ ID NO: 256334 - RNA, 18 nt, Artificial Sequence
  Synthetic
cuaacucaguuauuacac

SEQ ID NO: 256335 - RNA, 19 nt, Artificial Sequence
  Synthetic
ccuaacucaguuauuacac

SEQ ID NO: 256336 - RNA, 20 nt, Artificial Sequence
  Synthetic
cccuaacucaguuauuacac

SEQ ID NO: 256337 - RNA, 21 nt, Artificial Sequence
  Synthetic
ucccuaacucaguuauuacac

SEQ ID NO: 256338 - RNA, 22 nt, Artificial Sequence
  Synthetic
uucccuaacucaguuauuacac

SEQ ID NO: 256339 - RNA, 23 nt, Artificial Sequence
  Synthetic
cuucccuaacucaguuauuacac

SEQ ID NO: 256340 - RNA, 24 nt, Artificial Sequence
  Synthetic
ccuucccuaacucaguuauuacac

SEQ ID NO: 256341 - RNA, 18 nt, Artificial Sequence
  Synthetic
cuauauugcuccuuacac

SEQ ID NO: 256342 - RNA, 19 nt, Artificial Sequence
  Synthetic
gcuauauugcuccuuacac

SEQ ID NO: 256343 - RNA, 20 nt, Artificial Sequence
  Synthetic
ugcuauauugcuccuuacac

SEQ ID NO: 256344 - RNA, 21 nt, Artificial Sequence
  Synthetic
cugcuauauugcuccuuacac

SEQ ID NO: 256345 - RNA, 22 nt, Artificial Sequence
  Synthetic
ucugcuauauugcuccuuacac

SEQ ID NO: 256346 - RNA, 23 nt, Artificial Sequence
  Synthetic
uucugcuauauugcuccuuacac

SEQ ID NO: 256347 - RNA, 24 nt, Artificial Sequence
  Synthetic
uuucugcuauauugcuccuuacac

SEQ ID NO: 256348 - RNA, 18 nt, Artificial Sequence
  Synthetic
aagcugaaaauguuacac

SEQ ID NO: 256349 - RNA, 19 nt, Artificial Sequence
  Synthetic
caagcugaaaauguuacac

SEQ ID NO: 256350 - RNA, 20 nt, Artificial Sequence
  Synthetic
ucaagcugaaaauguuacac

SEQ ID NO: 256351 - RNA, 21 nt, Artificial Sequence
  Synthetic
uucaagcugaaaauguuacac

SEQ ID NO: 256352 - RNA, 22 nt, Artificial Sequence
  Synthetic
guucaagcugaaaauguuacac

SEQ ID NO: 256353 - RNA, 23 nt, Artificial Sequence
  Synthetic
gguucaagcugaaaauguuacac

SEQ ID NO: 256354 - RNA, 24 nt, Artificial Sequence
  Synthetic
cgguucaagcugaaaauguuacac

SEQ ID NO: 256355 - RNA, 18 nt, Artificial Sequence
  Synthetic
caaucaaagaauuuacac

SEQ ID NO: 256356 - RNA, 19 nt, Artificial Sequence
  Synthetic
gcaaucaaagaauuuacac

SEQ ID NO: 256357 - RNA, 20 nt, Artificial Sequence
  Synthetic
ugcaaucaaagaauuuacac

SEQ ID NO: 256358 - RNA, 21 nt, Artificial Sequence
  Synthetic
augcaaucaaagaauuuacac

SEQ ID NO: 256359 - RNA, 22 nt, Artificial Sequence
  Synthetic
gaugcaaucaaagaauuuacac

SEQ ID NO: 256360 - RNA, 23 nt, Artificial Sequence
  Synthetic
ugaugcaaucaaagaauuuacac

SEQ ID NO: 256361 - RNA, 24 nt, Artificial Sequence
  Synthetic
augaugcaaucaaagaauuuacac

SEQ ID NO: 256362 - RNA, 18 nt, Artificial Sequence
  Synthetic
aauguuacaccuuuacac

SEQ ID NO: 256363 - RNA, 19 nt, Artificial Sequence
  Synthetic
caauguuacaccuuuacac

SEQ ID NO: 256364 - RNA, 20 nt, Artificial Sequence
  Synthetic
acaauguuacaccuuuacac

SEQ ID NO: 256365 - RNA, 21 nt, Artificial Sequence
  Synthetic
cacaauguuacaccuuuacac

SEQ ID NO: 256366 - RNA, 22 nt, Artificial Sequence
  Synthetic
ucacaauguuacaccuuuacac

SEQ ID NO: 256367 - RNA, 23 nt, Artificial Sequence
  Synthetic
uucacaauguuacaccuuuacac

SEQ ID NO: 256368 - RNA, 24 nt, Artificial Sequence
  Synthetic
uuucacaauguuacaccuuuacac

SEQ ID NO: 256369 - RNA, 18 nt, Artificial Sequence
  Synthetic
gaaacaagagguuuacac

SEQ ID NO: 256370 - RNA, 19 nt, Artificial Sequence
  Synthetic
ugaaacaagagguuuacac

SEQ ID NO: 256371 - RNA, 20 nt, Artificial Sequence
  Synthetic
gugaaacaagagguuuacac

SEQ ID NO: 256372 - RNA, 21 nt, Artificial Sequence
  Synthetic
ugugaaacaagagguuuacac

SEQ ID NO: 256373 - RNA, 22 nt, Artificial Sequence
  Synthetic
cugugaaacaagagguuuacac

SEQ ID NO: 256374 - RNA, 23 nt, Artificial Sequence
  Synthetic
ucugugaaacaagagguuuacac

SEQ ID NO: 256375 - RNA, 24 nt, Artificial Sequence
  Synthetic
uucugugaaacaagagguuuacac

SEQ ID NO: 256376 - RNA, 18 nt, Artificial Sequence
  Synthetic
guguucuguuuuuuacac

SEQ ID NO: 256377 - RNA, 19 nt, Artificial Sequence
  Synthetic
uguguucuguuuuuuacac

SEQ ID NO: 256378 - RNA, 20 nt, Artificial Sequence
  Synthetic
uuguguucuguuuuuuacac

SEQ ID NO: 256379 - RNA, 21 nt, Artificial Sequence
  Synthetic
auuguguucuguuuuuuacac

SEQ ID NO: 256380 - RNA, 22 nt, Artificial Sequence
  Synthetic
aauuguguucuguuuuuuacac

SEQ ID NO: 256381 - RNA, 23 nt, Artificial Sequence
  Synthetic
aaauuguguucuguuuuuuacac

SEQ ID NO: 256382 - RNA, 24 nt, Artificial Sequence
  Synthetic
aaaauuguguucuguuuuuuacac

SEQ ID NO: 256383 - RNA, 18 nt, Artificial Sequence
  Synthetic
aaugcaaaugaaaaccac

SEQ ID NO: 256384 - RNA, 19 nt, Artificial Sequence
  Synthetic
aaaugcaaaugaaaaccac

SEQ ID NO: 256385 - RNA, 20 nt, Artificial Sequence
  Synthetic
aaaaugcaaaugaaaaccac

SEQ ID NO: 256386 - RNA, 21 nt, Artificial Sequence
  Synthetic
aaaaaugcaaaugaaaaccac

SEQ ID NO: 256387 - RNA, 22 nt, Artificial Sequence
  Synthetic
aaaaaaugcaaaugaaaaccac

SEQ ID NO: 256388 - RNA, 23 nt, Artificial Sequence
  Synthetic
uaaaaaaugcaaaugaaaaccac

SEQ ID NO: 256389 - RNA, 24 nt, Artificial Sequence
  Synthetic
uuaaaaaaugcaaaugaaaaccac

SEQ ID NO: 256390 - RNA, 18 nt, Artificial Sequence
  Synthetic
cuucucucuuaaaaccac

SEQ ID NO: 256391 - RNA, 19 nt, Artificial Sequence
  Synthetic
ccuucucucuuaaaaccac

SEQ ID NO: 256392 - RNA, 20 nt, Artificial Sequence
  Synthetic
accuucucucuuaaaaccac

SEQ ID NO: 256393 - RNA, 21 nt, Artificial Sequence
  Synthetic
caccuucucucuuaaaaccac

SEQ ID NO: 256394 - RNA, 22 nt, Artificial Sequence
  Synthetic
acaccuucucucuuaaaaccac

SEQ ID NO: 256395 - RNA, 23 nt, Artificial Sequence
  Synthetic
cacaccuucucucuuaaaaccac

SEQ ID NO: 256396 - RNA, 24 nt, Artificial Sequence
  Synthetic
ccacaccuucucucuuaaaaccac

SEQ ID NO: 256397 - RNA, 18 nt, Artificial Sequence
  Synthetic
uuuaaagcaauaaaccac

SEQ ID NO: 256398 - RNA, 19 nt, Artificial Sequence
  Synthetic
uuuuaaagcaauaaaccac

SEQ ID NO: 256399 - RNA, 20 nt, Artificial Sequence
  Synthetic
auuuuaaagcaauaaaccac

SEQ ID NO: 256400 - RNA, 21 nt, Artificial Sequence
  Synthetic
gauuuuaaagcaauaaaccac

SEQ ID NO: 256401 - RNA, 22 nt, Artificial Sequence
  Synthetic
agauuuuaaagcaauaaaccac

SEQ ID NO: 256402 - RNA, 23 nt, Artificial Sequence
  Synthetic
gagauuuuaaagcaauaaaccac

SEQ ID NO: 256403 - RNA, 24 nt, Artificial Sequence
  Synthetic
ugagauuuuaaagcaauaaaccac

SEQ ID NO: 256404 - RNA, 18 nt, Artificial Sequence
  Synthetic
agaaaucuuuuaaaccac

SEQ ID NO: 256405 - RNA, 19 nt, Artificial Sequence
  Synthetic
aagaaaucuuuuaaaccac

SEQ ID NO: 256406 - RNA, 20 nt, Artificial Sequence
  Synthetic
caagaaaucuuuuaaaccac

SEQ ID NO: 256407 - RNA, 21 nt, Artificial Sequence
  Synthetic
ccaagaaaucuuuuaaaccac

SEQ ID NO: 256408 - RNA, 22 nt, Artificial Sequence
  Synthetic
uccaagaaaucuuuuaaaccac

SEQ ID NO: 256409 - RNA, 23 nt, Artificial Sequence
  Synthetic
cuccaagaaaucuuuuaaaccac

SEQ ID NO: 256410 - RNA, 24 nt, Artificial Sequence
  Synthetic
acuccaagaaaucuuuuaaaccac

SEQ ID NO: 256411 - RNA, 18 nt, Artificial Sequence
  Synthetic
ggcaggaccugcaaccac

SEQ ID NO: 256412 - RNA, 19 nt, Artificial Sequence
  Synthetic
cggcaggaccugcaaccac

SEQ ID NO: 256413 - RNA, 20 nt, Artificial Sequence
  Synthetic
ucggcaggaccugcaaccac

SEQ ID NO: 256414 - RNA, 21 nt, Artificial Sequence
  Synthetic
uucggcaggaccugcaaccac

SEQ ID NO: 256415 - RNA, 22 nt, Artificial Sequence
  Synthetic
guucggcaggaccugcaaccac

SEQ ID NO: 256416 - RNA, 23 nt, Artificial Sequence
  Synthetic
uguucggcaggaccugcaaccac

SEQ ID NO: 256417 - RNA, 24 nt, Artificial Sequence
  Synthetic
cuguucggcaggaccugcaaccac

SEQ ID NO: 256418 - RNA, 18 nt, Artificial Sequence
  Synthetic
cucaaaguugucaaccac

SEQ ID NO: 256419 - RNA, 19 nt, Artificial Sequence
  Synthetic
ccucaaaguugucaaccac

SEQ ID NO: 256420 - RNA, 20 nt, Artificial Sequence
  Synthetic
gccucaaaguugucaaccac

SEQ ID NO: 256421 - RNA, 21 nt, Artificial Sequence
  Synthetic
ugccucaaaguugucaaccac

SEQ ID NO: 256422 - RNA, 22 nt, Artificial Sequence
  Synthetic
augccucaaaguugucaaccac

SEQ ID NO: 256423 - RNA, 23 nt, Artificial Sequence
  Synthetic
caugccucaaaguugucaaccac

SEQ ID NO: 256424 - RNA, 24 nt, Artificial Sequence
  Synthetic
acaugccucaaaguugucaaccac

SEQ ID NO: 256425 - RNA, 18 nt, Artificial Sequence
  Synthetic
cucaaguuaaagaaccac

SEQ ID NO: 256426 - RNA, 19 nt, Artificial Sequence
  Synthetic
acucaaguuaaagaaccac

SEQ ID NO: 256427 - RNA, 20 nt, Artificial Sequence
  Synthetic
cacucaaguuaaagaaccac

SEQ ID NO: 256428 - RNA, 21 nt, Artificial Sequence
  Synthetic
acacucaaguuaaagaaccac

SEQ ID NO: 256429 - RNA, 22 nt, Artificial Sequence
  Synthetic
cacacucaaguuaaagaaccac

SEQ ID NO: 256430 - RNA, 23 nt, Artificial Sequence
  Synthetic
gcacacucaaguuaaagaaccac

SEQ ID NO: 256431 - RNA, 24 nt, Artificial Sequence
  Synthetic
cgcacacucaaguuaaagaaccac

SEQ ID NO: 256432 - RNA, 18 nt, Artificial Sequence
  Synthetic
agggcuucccugaaccac

SEQ ID NO: 256433 - RNA, 19 nt, Artificial Sequence
  Synthetic
gagggcuucccugaaccac

SEQ ID NO: 256434 - RNA, 20 nt, Artificial Sequence
  Synthetic
ugagggcuucccugaaccac

SEQ ID NO: 256435 - RNA, 21 nt, Artificial Sequence
  Synthetic
gugagggcuucccugaaccac

SEQ ID NO: 256436 - RNA, 22 nt, Artificial Sequence
  Synthetic
ugugagggcuucccugaaccac

SEQ ID NO: 256437 - RNA, 23 nt, Artificial Sequence
  Synthetic
cugugagggcuucccugaaccac

SEQ ID NO: 256438 - RNA, 24 nt, Artificial Sequence
  Synthetic
ucugugagggcuucccugaaccac

SEQ ID NO: 256439 - RNA, 18 nt, Artificial Sequence
  Synthetic
aggccagaaauuaaccac

SEQ ID NO: 256440 - RNA, 19 nt, Artificial Sequence
  Synthetic
gaggccagaaauuaaccac

SEQ ID NO: 256441 - RNA, 20 nt, Artificial Sequence
  Synthetic
ggaggccagaaauuaaccac

SEQ ID NO: 256442 - RNA, 21 nt, Artificial Sequence
  Synthetic
uggaggccagaaauuaaccac

SEQ ID NO: 256443 - RNA, 22 nt, Artificial Sequence
  Synthetic
auggaggccagaaauuaaccac

SEQ ID NO: 256444 - RNA, 23 nt, Artificial Sequence
  Synthetic
cauggaggccagaaauuaaccac

SEQ ID NO: 256445 - RNA, 24 nt, Artificial Sequence
  Synthetic
acauggaggccagaaauuaaccac

SEQ ID NO: 256446 - RNA, 18 nt, Artificial Sequence
  Synthetic
auguguauuauuaaccac

SEQ ID NO: 256447 - RNA, 19 nt, Artificial Sequence
  Synthetic
aauguguauuauuaaccac

SEQ ID NO: 256448 - RNA, 20 nt, Artificial Sequence
  Synthetic
aaauguguauuauuaaccac

SEQ ID NO: 256449 - RNA, 21 nt, Artificial Sequence
  Synthetic
caaauguguauuauuaaccac

SEQ ID NO: 256450 - RNA, 22 nt, Artificial Sequence
  Synthetic
ucaaauguguauuauuaaccac

SEQ ID NO: 256451 - RNA, 23 nt, Artificial Sequence
  Synthetic
uucaaauguguauuauuaaccac

SEQ ID NO: 256452 - RNA, 24 nt, Artificial Sequence
  Synthetic
uuucaaauguguauuauuaaccac

SEQ ID NO: 256453 - RNA, 18 nt, Artificial Sequence
  Synthetic
aaaguuaauguuaaccac

SEQ ID NO: 256454 - RNA, 19 nt, Artificial Sequence
  Synthetic
caaaguuaauguuaaccac

SEQ ID NO: 256455 - RNA, 20 nt, Artificial Sequence
  Synthetic
ccaaaguuaauguuaaccac

SEQ ID NO: 256456 - RNA, 21 nt, Artificial Sequence
  Synthetic
accaaaguuaauguuaaccac

SEQ ID NO: 256457 - RNA, 22 nt, Artificial Sequence
  Synthetic
caccaaaguuaauguuaaccac

SEQ ID NO: 256458 - RNA, 23 nt, Artificial Sequence
  Synthetic
ccaccaaaguuaauguuaaccac

SEQ ID NO: 256459 - RNA, 24 nt, Artificial Sequence
  Synthetic
cccaccaaaguuaauguuaaccac

SEQ ID NO: 256460 - RNA, 18 nt, Artificial Sequence
  Synthetic
aaucagcaucaacaccac

SEQ ID NO: 256461 - RNA, 19 nt, Artificial Sequence
  Synthetic
caaucagcaucaacaccac

SEQ ID NO: 256462 - RNA, 20 nt, Artificial Sequence
  Synthetic
acaaucagcaucaacaccac

SEQ ID NO: 256463 - RNA, 21 nt, Artificial Sequence
  Synthetic
aacaaucagcaucaacaccac

SEQ ID NO: 256464 - RNA, 22 nt, Artificial Sequence
  Synthetic
gaacaaucagcaucaacaccac

SEQ ID NO: 256465 - RNA, 23 nt, Artificial Sequence
  Synthetic
ugaacaaucagcaucaacaccac

SEQ ID NO: 256466 - RNA, 24 nt, Artificial Sequence
  Synthetic
augaacaaucagcaucaacaccac

SEQ ID NO: 256467 - RNA, 18 nt, Artificial Sequence
  Synthetic
ccacaggcucaacaccac

SEQ ID NO: 256468 - RNA, 19 nt, Artificial Sequence
  Synthetic
cccacaggcucaacaccac

SEQ ID NO: 256469 - RNA, 20 nt, Artificial Sequence
  Synthetic
acccacaggcucaacaccac

SEQ ID NO: 256470 - RNA, 21 nt, Artificial Sequence
  Synthetic
uacccacaggcucaacaccac

SEQ ID NO: 256471 - RNA, 22 nt, Artificial Sequence
  Synthetic
guacccacaggcucaacaccac

SEQ ID NO: 256472 - RNA, 23 nt, Artificial Sequence
  Synthetic
uguacccacaggcucaacaccac

SEQ ID NO: 256473 - RNA, 24 nt, Artificial Sequence
  Synthetic
guguacccacaggcucaacaccac

SEQ ID NO: 256474 - RNA, 18 nt, Artificial Sequence
  Synthetic
acaaaaauggaacaccac

SEQ ID NO: 256475 - RNA, 19 nt, Artificial Sequence
  Synthetic
uacaaaaauggaacaccac

SEQ ID NO: 256476 - RNA, 20 nt, Artificial Sequence
  Synthetic
uuacaaaaauggaacaccac

SEQ ID NO: 256477 - RNA, 21 nt, Artificial Sequence
  Synthetic
uuuacaaaaauggaacaccac

SEQ ID NO: 256478 - RNA, 22 nt, Artificial Sequence
  Synthetic
auuuacaaaaauggaacaccac

SEQ ID NO: 256479 - RNA, 23 nt, Artificial Sequence
  Synthetic
uauuuacaaaaauggaacaccac

SEQ ID NO: 256480 - RNA, 24 nt, Artificial Sequence
  Synthetic
cuauuuacaaaaauggaacaccac

SEQ ID NO: 256481 - RNA, 18 nt, Artificial Sequence
  Synthetic
uucacauacacacaccac

SEQ ID NO: 256482 - RNA, 19 nt, Artificial Sequence
  Synthetic
cuucacauacacacaccac

SEQ ID NO: 256483 - RNA, 20 nt, Artificial Sequence
  Synthetic
ccuucacauacacacaccac

SEQ ID NO: 256484 - RNA, 21 nt, Artificial Sequence
  Synthetic
cccuucacauacacacaccac

SEQ ID NO: 256485 - RNA, 22 nt, Artificial Sequence
  Synthetic
acccuucacauacacacaccac

SEQ ID NO: 256486 - RNA, 23 nt, Artificial Sequence
  Synthetic
uacccuucacauacacacaccac

SEQ ID NO: 256487 - RNA, 24 nt, Artificial Sequence
  Synthetic
uuacccuucacauacacacaccac

SEQ ID NO: 256488 - RNA, 18 nt, Artificial Sequence
  Synthetic
ccugggacagagcaccac

SEQ ID NO: 256489 - RNA, 19 nt, Artificial Sequence
  Synthetic
cccugggacagagcaccac

SEQ ID NO: 256490 - RNA, 20 nt, Artificial Sequence
  Synthetic
ucccugggacagagcaccac

SEQ ID NO: 256491 - RNA, 21 nt, Artificial Sequence
  Synthetic
cucccugggacagagcaccac

SEQ ID NO: 256492 - RNA, 22 nt, Artificial Sequence
  Synthetic
ucucccugggacagagcaccac

SEQ ID NO: 256493 - RNA, 23 nt, Artificial Sequence
  Synthetic
aucucccugggacagagcaccac

SEQ ID NO: 256494 - RNA, 24 nt, Artificial Sequence
  Synthetic
caucucccugggacagagcaccac

SEQ ID NO: 256495 - RNA, 18 nt, Artificial Sequence
  Synthetic
aagcagcuucaucaccac

SEQ ID NO: 256496 - RNA, 19 nt, Artificial Sequence
  Synthetic
uaagcagcuucaucaccac

SEQ ID NO: 256497 - RNA, 20 nt, Artificial Sequence
  Synthetic
auaagcagcuucaucaccac

SEQ ID NO: 256498 - RNA, 21 nt, Artificial Sequence
  Synthetic
aauaagcagcuucaucaccac

SEQ ID NO: 256499 - RNA, 22 nt, Artificial Sequence
  Synthetic
aaauaagcagcuucaucaccac

SEQ ID NO: 256500 - RNA, 23 nt, Artificial Sequence
  Synthetic
gaaauaagcagcuucaucaccac

SEQ ID NO: 256501 - RNA, 24 nt, Artificial Sequence
  Synthetic
ggaaauaagcagcuucaucaccac

SEQ ID NO: 256502 - RNA, 18 nt, Artificial Sequence
  Synthetic
agaaguaaaagucaccac

SEQ ID NO: 256503 - RNA, 19 nt, Artificial Sequence
  Synthetic
aagaaguaaaagucaccac

SEQ ID NO: 256504 - RNA, 20 nt, Artificial Sequence
  Synthetic
caagaaguaaaagucaccac

SEQ ID NO: 256505 - RNA, 21 nt, Artificial Sequence
  Synthetic
acaagaaguaaaagucaccac

SEQ ID NO: 256506 - RNA, 22 nt, Artificial Sequence
  Synthetic
aacaagaaguaaaagucaccac

SEQ ID NO: 256507 - RNA, 23 nt, Artificial Sequence
  Synthetic
uaacaagaaguaaaagucaccac

SEQ ID NO: 256508 - RNA, 24 nt, Artificial Sequence
  Synthetic
uuaacaagaaguaaaagucaccac

SEQ ID NO: 256509 - RNA, 18 nt, Artificial Sequence
  Synthetic
uuuguuuucuuucaccac

SEQ ID NO: 256510 - RNA, 19 nt, Artificial Sequence
  Synthetic
guuuguuuucuuucaccac

SEQ ID NO: 256511 - RNA, 20 nt, Artificial Sequence
  Synthetic
uguuuguuuucuuucaccac

SEQ ID NO: 256512 - RNA, 21 nt, Artificial Sequence
  Synthetic
guguuuguuuucuuucaccac

SEQ ID NO: 256513 - RNA, 22 nt, Artificial Sequence
  Synthetic
uguguuuguuuucuuucaccac

SEQ ID NO: 256514 - RNA, 23 nt, Artificial Sequence
  Synthetic
auguguuuguuuucuuucaccac

SEQ ID NO: 256515 - RNA, 24 nt, Artificial Sequence
  Synthetic
aauguguuuguuuucuuucaccac

SEQ ID NO: 256516 - RNA, 18 nt, Artificial Sequence
  Synthetic
guucaaguucgagaccac

SEQ ID NO: 256517 - RNA, 19 nt, Artificial Sequence
  Synthetic
uguucaaguucgagaccac

SEQ ID NO: 256518 - RNA, 20 nt, Artificial Sequence
  Synthetic
uuguucaaguucgagaccac

SEQ ID NO: 256519 - RNA, 21 nt, Artificial Sequence
  Synthetic
cuuguucaaguucgagaccac

SEQ ID NO: 256520 - RNA, 22 nt, Artificial Sequence
  Synthetic
ccuuguucaaguucgagaccac

SEQ ID NO: 256521 - RNA, 23 nt, Artificial Sequence
  Synthetic
cccuuguucaaguucgagaccac

SEQ ID NO: 256522 - RNA, 24 nt, Artificial Sequence
  Synthetic
acccuuguucaaguucgagaccac

SEQ ID NO: 256523 - RNA, 18 nt, Artificial Sequence
  Synthetic
cauuuggaacaggaccac

SEQ ID NO: 256524 - RNA, 19 nt, Artificial Sequence
  Synthetic
gcauuuggaacaggaccac

SEQ ID NO: 256525 - RNA, 20 nt, Artificial Sequence
  Synthetic
ggcauuuggaacaggaccac

SEQ ID NO: 256526 - RNA, 21 nt, Artificial Sequence
  Synthetic
uggcauuuggaacaggaccac

SEQ ID NO: 256527 - RNA, 22 nt, Artificial Sequence
  Synthetic
auggcauuuggaacaggaccac

SEQ ID NO: 256528 - RNA, 23 nt, Artificial Sequence
  Synthetic
uauggcauuuggaacaggaccac

SEQ ID NO: 256529 - RNA, 24 nt, Artificial Sequence
  Synthetic
guauggcauuuggaacaggaccac

SEQ ID NO: 256530 - RNA, 18 nt, Artificial Sequence
  Synthetic
cauaaaggcacugaccac

SEQ ID NO: 256531 - RNA, 19 nt, Artificial Sequence
  Synthetic
acauaaaggcacugaccac

SEQ ID NO: 256532 - RNA, 20 nt, Artificial Sequence
  Synthetic
cacauaaaggcacugaccac

SEQ ID NO: 256533 - RNA, 21 nt, Artificial Sequence
  Synthetic
ccacauaaaggcacugaccac

SEQ ID NO: 256534 - RNA, 22 nt, Artificial Sequence
  Synthetic
gccacauaaaggcacugaccac

SEQ ID NO: 256535 - RNA, 23 nt, Artificial Sequence
  Synthetic
ugccacauaaaggcacugaccac

SEQ ID NO: 256536 - RNA, 24 nt, Artificial Sequence
  Synthetic
augccacauaaaggcacugaccac

SEQ ID NO: 256537 - RNA, 18 nt, Artificial Sequence
  Synthetic
aguagagaccuugaccac

SEQ ID NO: 256538 - RNA, 19 nt, Artificial Sequence
  Synthetic
gaguagagaccuugaccac

SEQ ID NO: 256539 - RNA, 20 nt, Artificial Sequence
  Synthetic
agaguagagaccuugaccac

SEQ ID NO: 256540 - RNA, 21 nt, Artificial Sequence
  Synthetic
aagaguagagaccuugaccac

SEQ ID NO: 256541 - RNA, 22 nt, Artificial Sequence
  Synthetic
uaagaguagagaccuugaccac

SEQ ID NO: 256542 - RNA, 23 nt, Artificial Sequence
  Synthetic
uuaagaguagagaccuugaccac

SEQ ID NO: 256543 - RNA, 24 nt, Artificial Sequence
  Synthetic
auuaagaguagagaccuugaccac

SEQ ID NO: 256544 - RNA, 18 nt, Artificial Sequence
  Synthetic
uuguuauaauacuaccac

SEQ ID NO: 256545 - RNA, 19 nt, Artificial Sequence
  Synthetic
auuguuauaauacuaccac

SEQ ID NO: 256546 - RNA, 20 nt, Artificial Sequence
  Synthetic
cauuguuauaauacuaccac

SEQ ID NO: 256547 - RNA, 21 nt, Artificial Sequence
  Synthetic
ccauuguuauaauacuaccac

SEQ ID NO: 256548 - RNA, 22 nt, Artificial Sequence
  Synthetic
uccauuguuauaauacuaccac

SEQ ID NO: 256549 - RNA, 23 nt, Artificial Sequence
  Synthetic
auccauuguuauaauacuaccac

SEQ ID NO: 256550 - RNA, 24 nt, Artificial Sequence
  Synthetic
uauccauuguuauaauacuaccac

SEQ ID NO: 256551 - RNA, 18 nt, Artificial Sequence
  Synthetic
ggaaagaauuacuaccac

SEQ ID NO: 256552 - RNA, 19 nt, Artificial Sequence
  Synthetic
uggaaagaauuacuaccac

SEQ ID NO: 256553 - RNA, 20 nt, Artificial Sequence
  Synthetic
guggaaagaauuacuaccac

SEQ ID NO: 256554 - RNA, 21 nt, Artificial Sequence
  Synthetic
gguggaaagaauuacuaccac

SEQ ID NO: 256555 - RNA, 22 nt, Artificial Sequence
  Synthetic
ggguggaaagaauuacuaccac

SEQ ID NO: 256556 - RNA, 23 nt, Artificial Sequence
  Synthetic
gggguggaaagaauuacuaccac

SEQ ID NO: 256557 - RNA, 24 nt, Artificial Sequence
  Synthetic
ggggguggaaagaauuacuaccac

SEQ ID NO: 256558 - RNA, 18 nt, Artificial Sequence
  Synthetic
cuagccagucccuaccac

SEQ ID NO: 256559 - RNA, 19 nt, Artificial Sequence
  Synthetic
gcuagccagucccuaccac

SEQ ID NO: 256560 - RNA, 20 nt, Artificial Sequence
  Synthetic
agcuagccagucccuaccac

SEQ ID NO: 256561 - RNA, 21 nt, Artificial Sequence
  Synthetic
cagcuagccagucccuaccac

SEQ ID NO: 256562 - RNA, 22 nt, Artificial Sequence
  Synthetic
gcagcuagccagucccuaccac

SEQ ID NO: 256563 - RNA, 23 nt, Artificial Sequence
  Synthetic
agcagcuagccagucccuaccac

SEQ ID NO: 256564 - RNA, 24 nt, Artificial Sequence
  Synthetic
gagcagcuagccagucccuaccac

SEQ ID NO: 256565 - RNA, 18 nt, Artificial Sequence
  Synthetic
gaaugaagugccuaccac

SEQ ID NO: 256566 - RNA, 19 nt, Artificial Sequence
  Synthetic
ggaaugaagugccuaccac

SEQ ID NO: 256567 - RNA, 20 nt, Artificial Sequence
  Synthetic
uggaaugaagugccuaccac

SEQ ID NO: 256568 - RNA, 21 nt, Artificial Sequence
  Synthetic
uuggaaugaagugccuaccac

SEQ ID NO: 256569 - RNA, 22 nt, Artificial Sequence
  Synthetic
auuggaaugaagugccuaccac

SEQ ID NO: 256570 - RNA, 23 nt, Artificial Sequence
  Synthetic
aauuggaaugaagugccuaccac

SEQ ID NO: 256571 - RNA, 24 nt, Artificial Sequence
  Synthetic
aaauuggaaugaagugccuaccac

SEQ ID NO: 256572 - RNA, 18 nt, Artificial Sequence
  Synthetic
uugcuaaaugucuaccac

SEQ ID NO: 256573 - RNA, 19 nt, Artificial Sequence
  Synthetic
auugcuaaaugucuaccac

SEQ ID NO: 256574 - RNA, 20 nt, Artificial Sequence
  Synthetic
uauugcuaaaugucuaccac

SEQ ID NO: 256575 - RNA, 21 nt, Artificial Sequence
  Synthetic
uuauugcuaaaugucuaccac

SEQ ID NO: 256576 - RNA, 22 nt, Artificial Sequence
  Synthetic
guuauugcuaaaugucuaccac

SEQ ID NO: 256577 - RNA, 23 nt, Artificial Sequence
  Synthetic
uguuauugcuaaaugucuaccac

SEQ ID NO: 256578 - RNA, 24 nt, Artificial Sequence
  Synthetic
uuguuauugcuaaaugucuaccac

SEQ ID NO: 256579 - RNA, 18 nt, Artificial Sequence
  Synthetic
acagagcagcaguaccac

SEQ ID NO: 256580 - RNA, 19 nt, Artificial Sequence
  Synthetic
cacagagcagcaguaccac

SEQ ID NO: 256581 - RNA, 20 nt, Artificial Sequence
  Synthetic
ccacagagcagcaguaccac

SEQ ID NO: 256582 - RNA, 21 nt, Artificial Sequence
  Synthetic
uccacagagcagcaguaccac

SEQ ID NO: 256583 - RNA, 22 nt, Artificial Sequence
  Synthetic
guccacagagcagcaguaccac

SEQ ID NO: 256584 - RNA, 23 nt, Artificial Sequence
  Synthetic
gguccacagagcagcaguaccac

SEQ ID NO: 256585 - RNA, 24 nt, Artificial Sequence
  Synthetic
ggguccacagagcagcaguaccac

SEQ ID NO: 256586 - RNA, 18 nt, Artificial Sequence
  Synthetic
gaaaauguuugguaccac

SEQ ID NO: 256587 - RNA, 19 nt, Artificial Sequence
  Synthetic
agaaaauguuugguaccac

SEQ ID NO: 256588 - RNA, 20 nt, Artificial Sequence
  Synthetic
uagaaaauguuugguaccac

SEQ ID NO: 256589 - RNA, 21 nt, Artificial Sequence
  Synthetic
cuagaaaauguuugguaccac

SEQ ID NO: 256590 - RNA, 22 nt, Artificial Sequence
  Synthetic
ucuagaaaauguuugguaccac

SEQ ID NO: 256591 - RNA, 23 nt, Artificial Sequence
  Synthetic
uucuagaaaauguuugguaccac

SEQ ID NO: 256592 - RNA, 24 nt, Artificial Sequence
  Synthetic
cuucuagaaaauguuugguaccac

SEQ ID NO: 256593 - RNA, 18 nt, Artificial Sequence
  Synthetic
ggccgccagcauuaccac

SEQ ID NO: 256594 - RNA, 19 nt, Artificial Sequence
  Synthetic
gggccgccagcauuaccac

SEQ ID NO: 256595 - RNA, 20 nt, Artificial Sequence
  Synthetic
agggccgccagcauuaccac

SEQ ID NO: 256596 - RNA, 21 nt, Artificial Sequence
  Synthetic
cagggccgccagcauuaccac

SEQ ID NO: 256597 - RNA, 22 nt, Artificial Sequence
  Synthetic
gcagggccgccagcauuaccac

SEQ ID NO: 256598 - RNA, 23 nt, Artificial Sequence
  Synthetic
ugcagggccgccagcauuaccac

SEQ ID NO: 256599 - RNA, 24 nt, Artificial Sequence
  Synthetic
cugcagggccgccagcauuaccac

SEQ ID NO: 256600 - RNA, 18 nt, Artificial Sequence
  Synthetic
acauaguaccgaacccac

SEQ ID NO: 256601 - RNA, 19 nt, Artificial Sequence
  Synthetic
cacauaguaccgaacccac

SEQ ID NO: 256602 - RNA, 20 nt, Artificial Sequence
  Synthetic
acacauaguaccgaacccac

SEQ ID NO: 256603 - RNA, 21 nt, Artificial Sequence
  Synthetic
gacacauaguaccgaacccac

SEQ ID NO: 256604 - RNA, 22 nt, Artificial Sequence
  Synthetic
ugacacauaguaccgaacccac

SEQ ID NO: 256605 - RNA, 23 nt, Artificial Sequence
  Synthetic
augacacauaguaccgaacccac

SEQ ID NO: 256606 - RNA, 24 nt, Artificial Sequence
  Synthetic
gaugacacauaguaccgaacccac

SEQ ID NO: 256607 - RNA, 18 nt, Artificial Sequence
  Synthetic
aauguucaaauaacccac

SEQ ID NO: 256608 - RNA, 19 nt, Artificial Sequence
  Synthetic
aaauguucaaauaacccac

SEQ ID NO: 256609 - RNA, 20 nt, Artificial Sequence
  Synthetic
gaaauguucaaauaacccac

SEQ ID NO: 256610 - RNA, 21 nt, Artificial Sequence
  Synthetic
agaaauguucaaauaacccac

SEQ ID NO: 256611 - RNA, 22 nt, Artificial Sequence
  Synthetic
aagaaauguucaaauaacccac

SEQ ID NO: 256612 - RNA, 23 nt, Artificial Sequence
  Synthetic
uaagaaauguucaaauaacccac

SEQ ID NO: 256613 - RNA, 24 nt, Artificial Sequence
  Synthetic
uuaagaaauguucaaauaacccac

SEQ ID NO: 256614 - RNA, 18 nt, Artificial Sequence
  Synthetic
cucuggagauacacccac

SEQ ID NO: 256615 - RNA, 19 nt, Artificial Sequence
  Synthetic
ucucuggagauacacccac

SEQ ID NO: 256616 - RNA, 20 nt, Artificial Sequence
  Synthetic
uucucuggagauacacccac

SEQ ID NO: 256617 - RNA, 21 nt, Artificial Sequence
  Synthetic
guucucuggagauacacccac

SEQ ID NO: 256618 - RNA, 22 nt, Artificial Sequence
  Synthetic
uguucucuggagauacacccac

SEQ ID NO: 256619 - RNA, 23 nt, Artificial Sequence
  Synthetic
guguucucuggagauacacccac

SEQ ID NO: 256620 - RNA, 24 nt, Artificial Sequence
  Synthetic
aguguucucuggagauacacccac

SEQ ID NO: 256621 - RNA, 18 nt, Artificial Sequence
  Synthetic
aaaguguuuaggacccac

SEQ ID NO: 256622 - RNA, 19 nt, Artificial Sequence
  Synthetic
aaaaguguuuaggacccac

SEQ ID NO: 256623 - RNA, 20 nt, Artificial Sequence
  Synthetic
aaaaaguguuuaggacccac

SEQ ID NO: 256624 - RNA, 21 nt, Artificial Sequence
  Synthetic
uaaaaaguguuuaggacccac

SEQ ID NO: 256625 - RNA, 22 nt, Artificial Sequence
  Synthetic
cuaaaaaguguuuaggacccac

SEQ ID NO: 256626 - RNA, 23 nt, Artificial Sequence
  Synthetic
acuaaaaaguguuuaggacccac

SEQ ID NO: 256627 - RNA, 24 nt, Artificial Sequence
  Synthetic
gacuaaaaaguguuuaggacccac

SEQ ID NO: 256628 - RNA, 18 nt, Artificial Sequence
  Synthetic
uaaugaacuggaccccac

SEQ ID NO: 256629 - RNA, 19 nt, Artificial Sequence
  Synthetic
auaaugaacuggaccccac

SEQ ID NO: 256630 - RNA, 20 nt, Artificial Sequence
  Synthetic
aauaaugaacuggaccccac

SEQ ID NO: 256631 - RNA, 21 nt, Artificial Sequence
  Synthetic
aaauaaugaacuggaccccac

SEQ ID NO: 256632 - RNA, 22 nt, Artificial Sequence
  Synthetic
gaaauaaugaacuggaccccac

SEQ ID NO: 256633 - RNA, 23 nt, Artificial Sequence
  Synthetic
ugaaauaaugaacuggaccccac

SEQ ID NO: 256634 - RNA, 24 nt, Artificial Sequence
  Synthetic
cugaaauaaugaacuggaccccac

SEQ ID NO: 256635 - RNA, 18 nt, Artificial Sequence
  Synthetic
ccacaugcugucccccac

SEQ ID NO: 256636 - RNA, 19 nt, Artificial Sequence
  Synthetic
uccacaugcugucccccac

SEQ ID NO: 256637 - RNA, 20 nt, Artificial Sequence
  Synthetic
uuccacaugcugucccccac

SEQ ID NO: 256638 - RNA, 21 nt, Artificial Sequence
  Synthetic
cuuccacaugcugucccccac

SEQ ID NO: 256639 - RNA, 22 nt, Artificial Sequence
  Synthetic
acuuccacaugcugucccccac

SEQ ID NO: 256640 - RNA, 23 nt, Artificial Sequence
  Synthetic
cacuuccacaugcugucccccac

SEQ ID NO: 256641 - RNA, 24 nt, Artificial Sequence
  Synthetic
ccacuuccacaugcugucccccac

SEQ ID NO: 256642 - RNA, 18 nt, Artificial Sequence
  Synthetic
acagcugagaagccccac

SEQ ID NO: 256643 - RNA, 19 nt, Artificial Sequence
  Synthetic
gacagcugagaagccccac

SEQ ID NO: 256644 - RNA, 20 nt, Artificial Sequence
  Synthetic
agacagcugagaagccccac

SEQ ID NO: 256645 - RNA, 21 nt, Artificial Sequence
  Synthetic
aagacagcugagaagccccac

SEQ ID NO: 256646 - RNA, 22 nt, Artificial Sequence
  Synthetic
aaagacagcugagaagccccac

SEQ ID NO: 256647 - RNA, 23 nt, Artificial Sequence
  Synthetic
caaagacagcugagaagccccac

SEQ ID NO: 256648 - RNA, 24 nt, Artificial Sequence
  Synthetic
ucaaagacagcugagaagccccac

SEQ ID NO: 256649 - RNA, 18 nt, Artificial Sequence
  Synthetic
cagcauuaaaauccccac

SEQ ID NO: 256650 - RNA, 19 nt, Artificial Sequence
  Synthetic
acagcauuaaaauccccac

SEQ ID NO: 256651 - RNA, 20 nt, Artificial Sequence
  Synthetic
uacagcauuaaaauccccac

SEQ ID NO: 256652 - RNA, 21 nt, Artificial Sequence
  Synthetic
uuacagcauuaaaauccccac

SEQ ID NO: 256653 - RNA, 22 nt, Artificial Sequence
  Synthetic
uuuacagcauuaaaauccccac

SEQ ID NO: 256654 - RNA, 23 nt, Artificial Sequence
  Synthetic
auuuacagcauuaaaauccccac

SEQ ID NO: 256655 - RNA, 24 nt, Artificial Sequence
  Synthetic
aauuuacagcauuaaaauccccac

SEQ ID NO: 256656 - RNA, 18 nt, Artificial Sequence
  Synthetic
uccacacagaguccccac

SEQ ID NO: 256657 - RNA, 19 nt, Artificial Sequence
  Synthetic
cuccacacagaguccccac

SEQ ID NO: 256658 - RNA, 20 nt, Artificial Sequence
  Synthetic
gcuccacacagaguccccac

SEQ ID NO: 256659 - RNA, 21 nt, Artificial Sequence
  Synthetic
agcuccacacagaguccccac

SEQ ID NO: 256660 - RNA, 22 nt, Artificial Sequence
  Synthetic
gagcuccacacagaguccccac

SEQ ID NO: 256661 - RNA, 23 nt, Artificial Sequence
  Synthetic
ggagcuccacacagaguccccac

SEQ ID NO: 256662 - RNA, 24 nt, Artificial Sequence
  Synthetic
cggagcuccacacagaguccccac

SEQ ID NO: 256663 - RNA, 18 nt, Artificial Sequence
  Synthetic
ggugggucuauuccccac

SEQ ID NO: 256664 - RNA, 19 nt, Artificial Sequence
  Synthetic
gggugggucuauuccccac

SEQ ID NO: 256665 - RNA, 20 nt, Artificial Sequence
  Synthetic
ugggugggucuauuccccac

SEQ ID NO: 256666 - RNA, 21 nt, Artificial Sequence
  Synthetic
augggugggucuauuccccac

SEQ ID NO: 256667 - RNA, 22 nt, Artificial Sequence
  Synthetic
uaugggugggucuauuccccac

SEQ ID NO: 256668 - RNA, 23 nt, Artificial Sequence
  Synthetic
uuaugggugggucuauuccccac

SEQ ID NO: 256669 - RNA, 24 nt, Artificial Sequence
  Synthetic
uuuaugggugggucuauuccccac

SEQ ID NO: 256670 - RNA, 18 nt, Artificial Sequence
  Synthetic
ucccaucagucagcccac

SEQ ID NO: 256671 - RNA, 19 nt, Artificial Sequence
  Synthetic
uucccaucagucagcccac

SEQ ID NO: 256672 - RNA, 20 nt, Artificial Sequence
  Synthetic
uuucccaucagucagcccac

SEQ ID NO: 256673 - RNA, 21 nt, Artificial Sequence
  Synthetic
cuuucccaucagucagcccac

SEQ ID NO: 256674 - RNA, 22 nt, Artificial Sequence
  Synthetic
ccuuucccaucagucagcccac

SEQ ID NO: 256675 - RNA, 23 nt, Artificial Sequence
  Synthetic
cccuuucccaucagucagcccac

SEQ ID NO: 256676 - RNA, 24 nt, Artificial Sequence
  Synthetic
gcccuuucccaucagucagcccac

SEQ ID NO: 256677 - RNA, 18 nt, Artificial Sequence
  Synthetic
aguggaguuuaaucccac

SEQ ID NO: 256678 - RNA, 19 nt, Artificial Sequence
  Synthetic
uaguggaguuuaaucccac

SEQ ID NO: 256679 - RNA, 20 nt, Artificial Sequence
  Synthetic
cuaguggaguuuaaucccac

SEQ ID NO: 256680 - RNA, 21 nt, Artificial Sequence
  Synthetic
ucuaguggaguuuaaucccac

SEQ ID NO: 256681 - RNA, 22 nt, Artificial Sequence
  Synthetic
gucuaguggaguuuaaucccac

SEQ ID NO: 256682 - RNA, 23 nt, Artificial Sequence
  Synthetic
ggucuaguggaguuuaaucccac

SEQ ID NO: 256683 - RNA, 24 nt, Artificial Sequence
  Synthetic
uggucuaguggaguuuaaucccac

SEQ ID NO: 256684 - RNA, 18 nt, Artificial Sequence
  Synthetic
acaauuuguugaucccac

SEQ ID NO: 256685 - RNA, 19 nt, Artificial Sequence
  Synthetic
uacaauuuguugaucccac

SEQ ID NO: 256686 - RNA, 20 nt, Artificial Sequence
  Synthetic
uuacaauuuguugaucccac

SEQ ID NO: 256687 - RNA, 21 nt, Artificial Sequence
  Synthetic
cuuacaauuuguugaucccac

SEQ ID NO: 256688 - RNA, 22 nt, Artificial Sequence
  Synthetic
acuuacaauuuguugaucccac

SEQ ID NO: 256689 - RNA, 23 nt, Artificial Sequence
  Synthetic
aacuuacaauuuguugaucccac

SEQ ID NO: 256690 - RNA, 24 nt, Artificial Sequence
  Synthetic
caacuuacaauuuguugaucccac

SEQ ID NO: 256691 - RNA, 18 nt, Artificial Sequence
  Synthetic
ggcuaaugacuaucccac

SEQ ID NO: 256692 - RNA, 19 nt, Artificial Sequence
  Synthetic
uggcuaaugacuaucccac

SEQ ID NO: 256693 - RNA, 20 nt, Artificial Sequence
  Synthetic
guggcuaaugacuaucccac

SEQ ID NO: 256694 - RNA, 21 nt, Artificial Sequence
  Synthetic
uguggcuaaugacuaucccac

SEQ ID NO: 256695 - RNA, 22 nt, Artificial Sequence
  Synthetic
auguggcuaaugacuaucccac

SEQ ID NO: 256696 - RNA, 23 nt, Artificial Sequence
  Synthetic
cauguggcuaaugacuaucccac

SEQ ID NO: 256697 - RNA, 24 nt, Artificial Sequence
  Synthetic
acauguggcuaaugacuaucccac

SEQ ID NO: 256698 - RNA, 18 nt, Artificial Sequence
  Synthetic
ucgauguuaaugucccac

SEQ ID NO: 256699 - RNA, 19 nt, Artificial Sequence
  Synthetic
uucgauguuaaugucccac

SEQ ID NO: 256700 - RNA, 20 nt, Artificial Sequence
  Synthetic
uuucgauguuaaugucccac

SEQ ID NO: 256701 - RNA, 21 nt, Artificial Sequence
  Synthetic
cuuucgauguuaaugucccac

SEQ ID NO: 256702 - RNA, 22 nt, Artificial Sequence
  Synthetic
ucuuucgauguuaaugucccac

SEQ ID NO: 256703 - RNA, 23 nt, Artificial Sequence
  Synthetic
uucuuucgauguuaaugucccac

SEQ ID NO: 256704 - RNA, 24 nt, Artificial Sequence
  Synthetic
uuucuuucgauguuaaugucccac

SEQ ID NO: 256705 - RNA, 18 nt, Artificial Sequence
  Synthetic
uuuccugagacuucccac

SEQ ID NO: 256706 - RNA, 19 nt, Artificial Sequence
  Synthetic
uuuuccugagacuucccac

SEQ ID NO: 256707 - RNA, 20 nt, Artificial Sequence
  Synthetic
uuuuuccugagacuucccac

SEQ ID NO: 256708 - RNA, 21 nt, Artificial Sequence
  Synthetic
uuuuuuccugagacuucccac

SEQ ID NO: 256709 - RNA, 22 nt, Artificial Sequence
  Synthetic
uuuuuuuccugagacuucccac

SEQ ID NO: 256710 - RNA, 23 nt, Artificial Sequence
  Synthetic
uuuuuuuuccugagacuucccac

SEQ ID NO: 256711 - RNA, 24 nt, Artificial Sequence
  Synthetic
uuuuuuuuuccugagacuucccac

SEQ ID NO: 256712 - RNA, 18 nt, Artificial Sequence
  Synthetic
uuauuguuuacuucccac

SEQ ID NO: 256713 - RNA, 19 nt, Artificial Sequence
  Synthetic
cuuauuguuuacuucccac

SEQ ID NO: 256714 - RNA, 20 nt, Artificial Sequence
  Synthetic
ccuuauuguuuacuucccac

SEQ ID NO: 256715 - RNA, 21 nt, Artificial Sequence
  Synthetic
cccuuauuguuuacuucccac

SEQ ID NO: 256716 - RNA, 22 nt, Artificial Sequence
  Synthetic
ucccuuauuguuuacuucccac

SEQ ID NO: 256717 - RNA, 23 nt, Artificial Sequence
  Synthetic
uucccuuauuguuuacuucccac

SEQ ID NO: 256718 - RNA, 24 nt, Artificial Sequence
  Synthetic
uuucccuuauuguuuacuucccac

SEQ ID NO: 256719 - RNA, 18 nt, Artificial Sequence
  Synthetic
aagaaaacauguucccac

SEQ ID NO: 256720 - RNA, 19 nt, Artificial Sequence
  Synthetic
gaagaaaacauguucccac

SEQ ID NO: 256721 - RNA, 20 nt, Artificial Sequence
  Synthetic
ggaagaaaacauguucccac

SEQ ID NO: 256722 - RNA, 21 nt, Artificial Sequence
  Synthetic
uggaagaaaacauguucccac

SEQ ID NO: 256723 - RNA, 22 nt, Artificial Sequence
  Synthetic
auggaagaaaacauguucccac

SEQ ID NO: 256724 - RNA, 23 nt, Artificial Sequence
  Synthetic
aauggaagaaaacauguucccac

SEQ ID NO: 256725 - RNA, 24 nt, Artificial Sequence
  Synthetic
aaauggaagaaaacauguucccac

SEQ ID NO: 256726 - RNA, 18 nt, Artificial Sequence
  Synthetic
ucaucuaaaauuucccac

SEQ ID NO: 256727 - RNA, 19 nt, Artificial Sequence
  Synthetic
gucaucuaaaauuucccac

SEQ ID NO: 256728 - RNA, 20 nt, Artificial Sequence
  Synthetic
agucaucuaaaauuucccac

SEQ ID NO: 256729 - RNA, 21 nt, Artificial Sequence
  Synthetic
aagucaucuaaaauuucccac

SEQ ID NO: 256730 - RNA, 22 nt, Artificial Sequence
  Synthetic
gaagucaucuaaaauuucccac

SEQ ID NO: 256731 - RNA, 23 nt, Artificial Sequence
  Synthetic
ugaagucaucuaaaauuucccac

SEQ ID NO: 256732 - RNA, 24 nt, Artificial Sequence
  Synthetic
augaagucaucuaaaauuucccac

SEQ ID NO: 256733 - RNA, 18 nt, Artificial Sequence
  Synthetic
acauaaaucauuucccac

SEQ ID NO: 256734 - RNA, 19 nt, Artificial Sequence
  Synthetic
gacauaaaucauuucccac

SEQ ID NO: 256735 - RNA, 20 nt, Artificial Sequence
  Synthetic
agacauaaaucauuucccac

SEQ ID NO: 256736 - RNA, 21 nt, Artificial Sequence
  Synthetic
gagacauaaaucauuucccac

SEQ ID NO: 256737 - RNA, 22 nt, Artificial Sequence
  Synthetic
agagacauaaaucauuucccac

SEQ ID NO: 256738 - RNA, 23 nt, Artificial Sequence
  Synthetic
aagagacauaaaucauuucccac

SEQ ID NO: 256739 - RNA, 24 nt, Artificial Sequence
  Synthetic
uaagagacauaaaucauuucccac

SEQ ID NO: 256740 - RNA, 18 nt, Artificial Sequence
  Synthetic
uguacccugcaaagccac

SEQ ID NO: 256741 - RNA, 19 nt, Artificial Sequence
  Synthetic
cuguacccugcaaagccac

SEQ ID NO: 256742 - RNA, 20 nt, Artificial Sequence
  Synthetic
gcuguacccugcaaagccac

SEQ ID NO: 256743 - RNA, 21 nt, Artificial Sequence
  Synthetic
ggcuguacccugcaaagccac

SEQ ID NO: 256744 - RNA, 22 nt, Artificial Sequence
  Synthetic
gggcuguacccugcaaagccac

SEQ ID NO: 256745 - RNA, 23 nt, Artificial Sequence
  Synthetic
ggggcuguacccugcaaagccac

SEQ ID NO: 256746 - RNA, 24 nt, Artificial Sequence
  Synthetic
gggggcuguacccugcaaagccac

SEQ ID NO: 256747 - RNA, 18 nt, Artificial Sequence
  Synthetic
agauguguauaaagccac

SEQ ID NO: 256748 - RNA, 19 nt, Artificial Sequence
  Synthetic
gagauguguauaaagccac

SEQ ID NO: 256749 - RNA, 20 nt, Artificial Sequence
  Synthetic
ugagauguguauaaagccac

SEQ ID NO: 256750 - RNA, 21 nt, Artificial Sequence
  Synthetic
augagauguguauaaagccac

SEQ ID NO: 256751 - RNA, 22 nt, Artificial Sequence
  Synthetic
aaugagauguguauaaagccac

SEQ ID NO: 256752 - RNA, 23 nt, Artificial Sequence
  Synthetic
aaaugagauguguauaaagccac

SEQ ID NO: 256753 - RNA, 24 nt, Artificial Sequence
  Synthetic
uaaaugagauguguauaaagccac

SEQ ID NO: 256754 - RNA, 18 nt, Artificial Sequence
  Synthetic
guuguaaacagaagccac

SEQ ID NO: 256755 - RNA, 19 nt, Artificial Sequence
  Synthetic
uguuguaaacagaagccac

SEQ ID NO: 256756 - RNA, 20 nt, Artificial Sequence
  Synthetic
uuguuguaaacagaagccac

SEQ ID NO: 256757 - RNA, 21 nt, Artificial Sequence
  Synthetic
auuguuguaaacagaagccac

SEQ ID NO: 256758 - RNA, 22 nt, Artificial Sequence
  Synthetic
cauuguuguaaacagaagccac

SEQ ID NO: 256759 - RNA, 23 nt, Artificial Sequence
  Synthetic
gcauuguuguaaacagaagccac

SEQ ID NO: 256760 - RNA, 24 nt, Artificial Sequence
  Synthetic
ggcauuguuguaaacagaagccac

SEQ ID NO: 256761 - RNA, 18 nt, Artificial Sequence
  Synthetic
auacauacacacagccac

SEQ ID NO: 256762 - RNA, 19 nt, Artificial Sequence
  Synthetic
gauacauacacacagccac

SEQ ID NO: 256763 - RNA, 20 nt, Artificial Sequence
  Synthetic
ugauacauacacacagccac

SEQ ID NO: 256764 - RNA, 21 nt, Artificial Sequence
  Synthetic
gugauacauacacacagccac

SEQ ID NO: 256765 - RNA, 22 nt, Artificial Sequence
  Synthetic
ggugauacauacacacagccac

SEQ ID NO: 256766 - RNA, 23 nt, Artificial Sequence
  Synthetic
aggugauacauacacacagccac

SEQ ID NO: 256767 - RNA, 24 nt, Artificial Sequence
  Synthetic
aaggugauacauacacacagccac

SEQ ID NO: 256768 - RNA, 19 nt, Artificial Sequence
  Synthetic
cgccuguaaucccagccac

SEQ ID NO: 256769 - RNA, 20 nt, Artificial Sequence
  Synthetic
gcgccuguaaucccagccac

SEQ ID NO: 256770 - RNA, 21 nt, Artificial Sequence
  Synthetic
ggcgccuguaaucccagccac

SEQ ID NO: 256771 - RNA, 22 nt, Artificial Sequence
  Synthetic
gggcgccuguaaucccagccac

SEQ ID NO: 256772 - RNA, 23 nt, Artificial Sequence
  Synthetic
ugggcgccuguaaucccagccac

SEQ ID NO: 256773 - RNA, 24 nt, Artificial Sequence
  Synthetic
gugggcgccuguaaucccagccac

SEQ ID NO: 256774 - RNA, 18 nt, Artificial Sequence
  Synthetic
ucugugaugaagagccac

SEQ ID NO: 256775 - RNA, 19 nt, Artificial Sequence
  Synthetic
cucugugaugaagagccac

SEQ ID NO: 256776 - RNA, 20 nt, Artificial Sequence
  Synthetic
acucugugaugaagagccac

SEQ ID NO: 256777 - RNA, 21 nt, Artificial Sequence
  Synthetic
aacucugugaugaagagccac

SEQ ID NO: 256778 - RNA, 22 nt, Artificial Sequence
  Synthetic
gaacucugugaugaagagccac

SEQ ID NO: 256779 - RNA, 23 nt, Artificial Sequence
  Synthetic
ugaacucugugaugaagagccac

SEQ ID NO: 256780 - RNA, 24 nt, Artificial Sequence
  Synthetic
uugaacucugugaugaagagccac

SEQ ID NO: 256781 - RNA, 18 nt, Artificial Sequence
  Synthetic
uccuaaaugaauagccac

SEQ ID NO: 256782 - RNA, 19 nt, Artificial Sequence
  Synthetic
auccuaaaugaauagccac

SEQ ID NO: 256783 - RNA, 20 nt, Artificial Sequence
  Synthetic
uauccuaaaugaauagccac

SEQ ID NO: 256784 - RNA, 21 nt, Artificial Sequence
  Synthetic
auauccuaaaugaauagccac

SEQ ID NO: 256785 - RNA, 22 nt, Artificial Sequence
  Synthetic
gauauccuaaaugaauagccac

SEQ ID NO: 256786 - RNA, 23 nt, Artificial Sequence
  Synthetic
ggauauccuaaaugaauagccac

SEQ ID NO: 256787 - RNA, 24 nt, Artificial Sequence
  Synthetic
aggauauccuaaaugaauagccac

SEQ ID NO: 256788 - RNA, 18 nt, Artificial Sequence
  Synthetic
uagcagccuuuuagccac

SEQ ID NO: 256789 - RNA, 19 nt, Artificial Sequence
  Synthetic
cuagcagccuuuuagccac

SEQ ID NO: 256790 - RNA, 20 nt, Artificial Sequence
  Synthetic
acuagcagccuuuuagccac

SEQ ID NO: 256791 - RNA, 21 nt, Artificial Sequence
  Synthetic
aacuagcagccuuuuagccac

SEQ ID NO: 256792 - RNA, 22 nt, Artificial Sequence
  Synthetic
aaacuagcagccuuuuagccac

SEQ ID NO: 256793 - RNA, 23 nt, Artificial Sequence
  Synthetic
aaaacuagcagccuuuuagccac

SEQ ID NO: 256794 - RNA, 24 nt, Artificial Sequence
  Synthetic
gaaaacuagcagccuuuuagccac

SEQ ID NO: 256795 - RNA, 18 nt, Artificial Sequence
  Synthetic
cucgggugccuacgccac

SEQ ID NO: 256796 - RNA, 19 nt, Artificial Sequence
  Synthetic
ccucgggugccuacgccac

SEQ ID NO: 256797 - RNA, 20 nt, Artificial Sequence
  Synthetic
cccucgggugccuacgccac

SEQ ID NO: 256798 - RNA, 21 nt, Artificial Sequence
  Synthetic
ucccucgggugccuacgccac

SEQ ID NO: 256799 - RNA, 22 nt, Artificial Sequence
  Synthetic
uucccucgggugccuacgccac

SEQ ID NO: 256800 - RNA, 23 nt, Artificial Sequence
  Synthetic
auucccucgggugccuacgccac

SEQ ID NO: 256801 - RNA, 24 nt, Artificial Sequence
  Synthetic
gauucccucgggugccuacgccac

SEQ ID NO: 256802 - RNA, 18 nt, Artificial Sequence
  Synthetic
cauaacucacaaggccac

SEQ ID NO: 256803 - RNA, 19 nt, Artificial Sequence
  Synthetic
ccauaacucacaaggccac

SEQ ID NO: 256804 - RNA, 20 nt, Artificial Sequence
  Synthetic
accauaacucacaaggccac

SEQ ID NO: 256805 - RNA, 21 nt, Artificial Sequence
  Synthetic
uaccauaacucacaaggccac

SEQ ID NO: 256806 - RNA, 22 nt, Artificial Sequence
  Synthetic
uuaccauaacucacaaggccac

SEQ ID NO: 256807 - RNA, 23 nt, Artificial Sequence
  Synthetic
uuuaccauaacucacaaggccac

SEQ ID NO: 256808 - RNA, 24 nt, Artificial Sequence
  Synthetic
cuuuaccauaacucacaaggccac

SEQ ID NO: 256809 - RNA, 18 nt, Artificial Sequence
  Synthetic
aaagaguuuacaggccac

SEQ ID NO: 256810 - RNA, 19 nt, Artificial Sequence
  Synthetic
aaaagaguuuacaggccac

SEQ ID NO: 256811 - RNA, 20 nt, Artificial Sequence
  Synthetic
caaaagaguuuacaggccac

SEQ ID NO: 256812 - RNA, 21 nt, Artificial Sequence
  Synthetic
ucaaaagaguuuacaggccac

SEQ ID NO: 256813 - RNA, 22 nt, Artificial Sequence
  Synthetic
uucaaaagaguuuacaggccac

SEQ ID NO: 256814 - RNA, 23 nt, Artificial Sequence
  Synthetic
auucaaaagaguuuacaggccac

SEQ ID NO: 256815 - RNA, 24 nt, Artificial Sequence
  Synthetic
uauucaaaagaguuuacaggccac

SEQ ID NO: 256816 - RNA, 18 nt, Artificial Sequence
  Synthetic
ccaaggagggcaggccac

SEQ ID NO: 256817 - RNA, 19 nt, Artificial Sequence
  Synthetic
gccaaggagggcaggccac

SEQ ID NO: 256818 - RNA, 20 nt, Artificial Sequence
  Synthetic
ggccaaggagggcaggccac

SEQ ID NO: 256819 - RNA, 21 nt, Artificial Sequence
  Synthetic
aggccaaggagggcaggccac

SEQ ID NO: 256820 - RNA, 22 nt, Artificial Sequence
  Synthetic
gaggccaaggagggcaggccac

SEQ ID NO: 256821 - RNA, 23 nt, Artificial Sequence
  Synthetic
ggaggccaaggagggcaggccac

SEQ ID NO: 256822 - RNA, 24 nt, Artificial Sequence
  Synthetic
gggaggccaaggagggcaggccac

SEQ ID NO: 256823 - RNA, 18 nt, Artificial Sequence
  Synthetic
acucaacuacugggccac

SEQ ID NO: 256824 - RNA, 19 nt, Artificial Sequence
  Synthetic
cacucaacuacugggccac

SEQ ID NO: 256825 - RNA, 20 nt, Artificial Sequence
  Synthetic
acacucaacuacugggccac

SEQ ID NO: 256826 - RNA, 21 nt, Artificial Sequence
  Synthetic
cacacucaacuacugggccac

SEQ ID NO: 256827 - RNA, 22 nt, Artificial Sequence
  Synthetic
acacacucaacuacugggccac

SEQ ID NO: 256828 - RNA, 23 nt, Artificial Sequence
  Synthetic
cacacacucaacuacugggccac

SEQ ID NO: 256829 - RNA, 24 nt, Artificial Sequence
  Synthetic
ccacacacucaacuacugggccac

SEQ ID NO: 256830 - RNA, 18 nt, Artificial Sequence
  Synthetic
aauucccuaaauggccac

SEQ ID NO: 256831 - RNA, 19 nt, Artificial Sequence
  Synthetic
uaauucccuaaauggccac

SEQ ID NO: 256832 - RNA, 20 nt, Artificial Sequence
  Synthetic
cuaauucccuaaauggccac

SEQ ID NO: 256833 - RNA, 21 nt, Artificial Sequence
  Synthetic
ccuaauucccuaaauggccac

SEQ ID NO: 256834 - RNA, 22 nt, Artificial Sequence
  Synthetic
accuaauucccuaaauggccac

SEQ ID NO: 256835 - RNA, 23 nt, Artificial Sequence
  Synthetic
gaccuaauucccuaaauggccac

SEQ ID NO: 256836 - RNA, 24 nt, Artificial Sequence
  Synthetic
agaccuaauucccuaaauggccac

SEQ ID NO: 256837 - RNA, 18 nt, Artificial Sequence
  Synthetic
acaagugaguuuggccac

SEQ ID NO: 256838 - RNA, 19 nt, Artificial Sequence
  Synthetic
aacaagugaguuuggccac

SEQ ID NO: 256839 - RNA, 20 nt, Artificial Sequence
  Synthetic
aaacaagugaguuuggccac

SEQ ID NO: 256840 - RNA, 21 nt, Artificial Sequence
  Synthetic
aaaacaagugaguuuggccac

SEQ ID NO: 256841 - RNA, 22 nt, Artificial Sequence
  Synthetic
gaaaacaagugaguuuggccac

SEQ ID NO: 256842 - RNA, 23 nt, Artificial Sequence
  Synthetic
ugaaaacaagugaguuuggccac

SEQ ID NO: 256843 - RNA, 24 nt, Artificial Sequence
  Synthetic
gugaaaacaagugaguuuggccac

SEQ ID NO: 256844 - RNA, 18 nt, Artificial Sequence
  Synthetic
auuuucuguuaaugccac

SEQ ID NO: 256845 - RNA, 19 nt, Artificial Sequence
  Synthetic
aauuuucuguuaaugccac

SEQ ID NO: 256846 - RNA, 20 nt, Artificial Sequence
  Synthetic
uaauuuucuguuaaugccac

SEQ ID NO: 256847 - RNA, 21 nt, Artificial Sequence
  Synthetic
cuaauuuucuguuaaugccac

SEQ ID NO: 256848 - RNA, 22 nt, Artificial Sequence
  Synthetic
acuaauuuucuguuaaugccac

SEQ ID NO: 256849 - RNA, 23 nt, Artificial Sequence
  Synthetic
aacuaauuuucuguuaaugccac

SEQ ID NO: 256850 - RNA, 24 nt, Artificial Sequence
  Synthetic
gaacuaauuuucuguuaaugccac

SEQ ID NO: 256851 - RNA, 18 nt, Artificial Sequence
  Synthetic
uuccgagagcuaugccac

SEQ ID NO: 256852 - RNA, 19 nt, Artificial Sequence
  Synthetic
auuccgagagcuaugccac

SEQ ID NO: 256853 - RNA, 20 nt, Artificial Sequence
  Synthetic
uauuccgagagcuaugccac

SEQ ID NO: 256854 - RNA, 21 nt, Artificial Sequence
  Synthetic
auauuccgagagcuaugccac

SEQ ID NO: 256855 - RNA, 22 nt, Artificial Sequence
  Synthetic
aauauuccgagagcuaugccac

SEQ ID NO: 256856 - RNA, 23 nt, Artificial Sequence
  Synthetic
uaauauuccgagagcuaugccac

SEQ ID NO: 256857 - RNA, 24 nt, Artificial Sequence
  Synthetic
guaauauuccgagagcuaugccac

SEQ ID NO: 256858 - RNA, 18 nt, Artificial Sequence
  Synthetic
aggcuugccuuaugccac

SEQ ID NO: 256859 - RNA, 19 nt, Artificial Sequence
  Synthetic
caggcuugccuuaugccac

SEQ ID NO: 256860 - RNA, 20 nt, Artificial Sequence
  Synthetic
acaggcuugccuuaugccac

SEQ ID NO: 256861 - RNA, 21 nt, Artificial Sequence
  Synthetic
uacaggcuugccuuaugccac

SEQ ID NO: 256862 - RNA, 22 nt, Artificial Sequence
  Synthetic
auacaggcuugccuuaugccac

SEQ ID NO: 256863 - RNA, 23 nt, Artificial Sequence
  Synthetic
uauacaggcuugccuuaugccac

SEQ ID NO: 256864 - RNA, 24 nt, Artificial Sequence
  Synthetic
auauacaggcuugccuuaugccac

SEQ ID NO: 256865 - RNA, 18 nt, Artificial Sequence
  Synthetic
uuaaaccaugucugccac

SEQ ID NO: 256866 - RNA, 19 nt, Artificial Sequence
  Synthetic
guuaaaccaugucugccac

SEQ ID NO: 256867 - RNA, 20 nt, Artificial Sequence
  Synthetic
gguuaaaccaugucugccac

SEQ ID NO: 256868 - RNA, 21 nt, Artificial Sequence
  Synthetic
ugguuaaaccaugucugccac

SEQ ID NO: 256869 - RNA, 22 nt, Artificial Sequence
  Synthetic
uugguuaaaccaugucugccac

SEQ ID NO: 256870 - RNA, 23 nt, Artificial Sequence
  Synthetic
uuugguuaaaccaugucugccac

SEQ ID NO: 256871 - RNA, 24 nt, Artificial Sequence
  Synthetic
cuuugguuaaaccaugucugccac

SEQ ID NO: 256872 - RNA, 18 nt, Artificial Sequence
  Synthetic
uugaaauacauuugccac

SEQ ID NO: 256873 - RNA, 19 nt, Artificial Sequence
  Synthetic
uuugaaauacauuugccac

SEQ ID NO: 256874 - RNA, 20 nt, Artificial Sequence
  Synthetic
auuugaaauacauuugccac

SEQ ID NO: 256875 - RNA, 21 nt, Artificial Sequence
  Synthetic
uauuugaaauacauuugccac

SEQ ID NO: 256876 - RNA, 22 nt, Artificial Sequence
  Synthetic
guauuugaaauacauuugccac

SEQ ID NO: 256877 - RNA, 23 nt, Artificial Sequence
  Synthetic
gguauuugaaauacauuugccac

SEQ ID NO: 256878 - RNA, 24 nt, Artificial Sequence
  Synthetic
ugguauuugaaauacauuugccac

SEQ ID NO: 256879 - RNA, 18 nt, Artificial Sequence
  Synthetic
aucagaauucuuugccac

SEQ ID NO: 256880 - RNA, 19 nt, Artificial Sequence
  Synthetic
gaucagaauucuuugccac

SEQ ID NO: 256881 - RNA, 20 nt, Artificial Sequence
  Synthetic
ugaucagaauucuuugccac

SEQ ID NO: 256882 - RNA, 21 nt, Artificial Sequence
  Synthetic
augaucagaauucuuugccac

SEQ ID NO: 256883 - RNA, 22 nt, Artificial Sequence
  Synthetic
caugaucagaauucuuugccac

SEQ ID NO: 256884 - RNA, 23 nt, Artificial Sequence
  Synthetic
ucaugaucagaauucuuugccac

SEQ ID NO: 256885 - RNA, 24 nt, Artificial Sequence
  Synthetic
cucaugaucagaauucuuugccac

SEQ ID NO: 256886 - RNA, 18 nt, Artificial Sequence
  Synthetic
gcaauccaacaaauccac

SEQ ID NO: 256887 - RNA, 19 nt, Artificial Sequence
  Synthetic
agcaauccaacaaauccac

SEQ ID NO: 256888 - RNA, 20 nt, Artificial Sequence
  Synthetic
aagcaauccaacaaauccac

SEQ ID NO: 256889 - RNA, 21 nt, Artificial Sequence
  Synthetic
aaagcaauccaacaaauccac

SEQ ID NO: 256890 - RNA, 22 nt, Artificial Sequence
  Synthetic
aaaagcaauccaacaaauccac

SEQ ID NO: 256891 - RNA, 23 nt, Artificial Sequence
  Synthetic
gaaaagcaauccaacaaauccac

SEQ ID NO: 256892 - RNA, 24 nt, Artificial Sequence
  Synthetic
cgaaaagcaauccaacaaauccac

SEQ ID NO: 256893 - RNA, 18 nt, Artificial Sequence
  Synthetic
aagggagaauaaauccac

SEQ ID NO: 256894 - RNA, 19 nt, Artificial Sequence
  Synthetic
uaagggagaauaaauccac

SEQ ID NO: 256895 - RNA, 20 nt, Artificial Sequence
  Synthetic
uuaagggagaauaaauccac

SEQ ID NO: 256896 - RNA, 21 nt, Artificial Sequence
  Synthetic
cuuaagggagaauaaauccac

SEQ ID NO: 256897 - RNA, 22 nt, Artificial Sequence
  Synthetic
gcuuaagggagaauaaauccac

SEQ ID NO: 256898 - RNA, 23 nt, Artificial Sequence
  Synthetic
agcuuaagggagaauaaauccac

SEQ ID NO: 256899 - RNA, 24 nt, Artificial Sequence
  Synthetic
aagcuuaagggagaauaaauccac

SEQ ID NO: 256900 - RNA, 18 nt, Artificial Sequence
  Synthetic
aaaacagugacaauccac

SEQ ID NO: 256901 - RNA, 19 nt, Artificial Sequence
  Synthetic
caaaacagugacaauccac

SEQ ID NO: 256902 - RNA, 20 nt, Artificial Sequence
  Synthetic
ccaaaacagugacaauccac

SEQ ID NO: 256903 - RNA, 21 nt, Artificial Sequence
  Synthetic
accaaaacagugacaauccac

SEQ ID NO: 256904 - RNA, 22 nt, Artificial Sequence
  Synthetic
caccaaaacagugacaauccac

SEQ ID NO: 256905 - RNA, 23 nt, Artificial Sequence
  Synthetic
ccaccaaaacagugacaauccac

SEQ ID NO: 256906 - RNA, 24 nt, Artificial Sequence
  Synthetic
uccaccaaaacagugacaauccac

SEQ ID NO: 256907 - RNA, 18 nt, Artificial Sequence
  Synthetic
guuguaaaaagaauccac

SEQ ID NO: 256908 - RNA, 19 nt, Artificial Sequence
  Synthetic
uguuguaaaaagaauccac

SEQ ID NO: 256909 - RNA, 20 nt, Artificial Sequence
  Synthetic
uuguuguaaaaagaauccac

SEQ ID NO: 256910 - RNA, 21 nt, Artificial Sequence
  Synthetic
auuguuguaaaaagaauccac

SEQ ID NO: 256911 - RNA, 22 nt, Artificial Sequence
  Synthetic
cauuguuguaaaaagaauccac

SEQ ID NO: 256912 - RNA, 23 nt, Artificial Sequence
  Synthetic
gcauuguuguaaaaagaauccac

SEQ ID NO: 256913 - RNA, 24 nt, Artificial Sequence
  Synthetic
ggcauuguuguaaaaagaauccac

SEQ ID NO: 256914 - RNA, 18 nt, Artificial Sequence
  Synthetic
uagaaagucagaauccac

SEQ ID NO: 256915 - RNA, 19 nt, Artificial Sequence
  Synthetic
guagaaagucagaauccac

SEQ ID NO: 256916 - RNA, 20 nt, Artificial Sequence
  Synthetic
uguagaaagucagaauccac

SEQ ID NO: 256917 - RNA, 21 nt, Artificial Sequence
  Synthetic
guguagaaagucagaauccac

SEQ ID NO: 256918 - RNA, 22 nt, Artificial Sequence
  Synthetic
gguguagaaagucagaauccac

SEQ ID NO: 256919 - RNA, 23 nt, Artificial Sequence
  Synthetic
ugguguagaaagucagaauccac

SEQ ID NO: 256920 - RNA, 24 nt, Artificial Sequence
  Synthetic
augguguagaaagucagaauccac

SEQ ID NO: 256921 - RNA, 18 nt, Artificial Sequence
  Synthetic
uuugagcagggaauccac

SEQ ID NO: 256922 - RNA, 19 nt, Artificial Sequence
  Synthetic
uuuugagcagggaauccac

SEQ ID NO: 256923 - RNA, 20 nt, Artificial Sequence
  Synthetic
uuuuugagcagggaauccac

SEQ ID NO: 256924 - RNA, 21 nt, Artificial Sequence
  Synthetic
auuuuugagcagggaauccac

SEQ ID NO: 256925 - RNA, 22 nt, Artificial Sequence
  Synthetic
aauuuuugagcagggaauccac

SEQ ID NO: 256926 - RNA, 23 nt, Artificial Sequence
  Synthetic
aaauuuuugagcagggaauccac

SEQ ID NO: 256927 - RNA, 24 nt, Artificial Sequence
  Synthetic
uaaauuuuugagcagggaauccac

SEQ ID NO: 256928 - RNA, 18 nt, Artificial Sequence
  Synthetic
gcaguuucagacauccac

SEQ ID NO: 256929 - RNA, 19 nt, Artificial Sequence
  Synthetic
ugcaguuucagacauccac

SEQ ID NO: 256930 - RNA, 20 nt, Artificial Sequence
  Synthetic
cugcaguuucagacauccac

SEQ ID NO: 256931 - RNA, 21 nt, Artificial Sequence
  Synthetic
ucugcaguuucagacauccac

SEQ ID NO: 256932 - RNA, 22 nt, Artificial Sequence
  Synthetic
aucugcaguuucagacauccac

SEQ ID NO: 256933 - RNA, 23 nt, Artificial Sequence
  Synthetic
uaucugcaguuucagacauccac

SEQ ID NO: 256934 - RNA, 24 nt, Artificial Sequence
  Synthetic
cuaucugcaguuucagacauccac

SEQ ID NO: 256935 - RNA, 18 nt, Artificial Sequence
  Synthetic
cauaggauagcccuccac

SEQ ID NO: 256936 - RNA, 19 nt, Artificial Sequence
  Synthetic
gcauaggauagcccuccac

SEQ ID NO: 256937 - RNA, 20 nt, Artificial Sequence
  Synthetic
ugcauaggauagcccuccac

SEQ ID NO: 256938 - RNA, 21 nt, Artificial Sequence
  Synthetic
augcauaggauagcccuccac

SEQ ID NO: 256939 - RNA, 22 nt, Artificial Sequence
  Synthetic
aaugcauaggauagcccuccac

SEQ ID NO: 256940 - RNA, 23 nt, Artificial Sequence
  Synthetic
caaugcauaggauagcccuccac

SEQ ID NO: 256941 - RNA, 24 nt, Artificial Sequence
  Synthetic
acaaugcauaggauagcccuccac

SEQ ID NO: 256942 - RNA, 18 nt, Artificial Sequence
  Synthetic
cgcacuguuuagcuccac

SEQ ID NO: 256943 - RNA, 19 nt, Artificial Sequence
  Synthetic
acgcacuguuuagcuccac

SEQ ID NO: 256944 - RNA, 20 nt, Artificial Sequence
  Synthetic
aacgcacuguuuagcuccac

SEQ ID NO: 256945 - RNA, 21 nt, Artificial Sequence
  Synthetic
caacgcacuguuuagcuccac

SEQ ID NO: 256946 - RNA, 22 nt, Artificial Sequence
  Synthetic
acaacgcacuguuuagcuccac

SEQ ID NO: 256947 - RNA, 23 nt, Artificial Sequence
  Synthetic
gacaacgcacuguuuagcuccac

SEQ ID NO: 256948 - RNA, 24 nt, Artificial Sequence
  Synthetic
ugacaacgcacuguuuagcuccac

SEQ ID NO: 256949 - RNA, 18 nt, Artificial Sequence
  Synthetic
cacucagccuggcuccac

SEQ ID NO: 256950 - RNA, 19 nt, Artificial Sequence
  Synthetic
ccacucagccuggcuccac

SEQ ID NO: 256951 - RNA, 20 nt, Artificial Sequence
  Synthetic
uccacucagccuggcuccac

SEQ ID NO: 256952 - RNA, 21 nt, Artificial Sequence
  Synthetic
guccacucagccuggcuccac

SEQ ID NO: 256953 - RNA, 22 nt, Artificial Sequence
  Synthetic
gguccacucagccuggcuccac

SEQ ID NO: 256954 - RNA, 23 nt, Artificial Sequence
  Synthetic
agguccacucagccuggcuccac

SEQ ID NO: 256955 - RNA, 24 nt, Artificial Sequence
  Synthetic
cagguccacucagccuggcuccac

SEQ ID NO: 256956 - RNA, 18 nt, Artificial Sequence
  Synthetic
uucuaucuuuuucuccac

SEQ ID NO: 256957 - RNA, 19 nt, Artificial Sequence
  Synthetic
cuucuaucuuuuucuccac

SEQ ID NO: 256958 - RNA, 20 nt, Artificial Sequence
  Synthetic
ccuucuaucuuuuucuccac

SEQ ID NO: 256959 - RNA, 21 nt, Artificial Sequence
  Synthetic
uccuucuaucuuuuucuccac

SEQ ID NO: 256960 - RNA, 22 nt, Artificial Sequence
  Synthetic
auccuucuaucuuuuucuccac

SEQ ID NO: 256961 - RNA, 23 nt, Artificial Sequence
  Synthetic
cauccuucuaucuuuuucuccac

SEQ ID NO: 256962 - RNA, 24 nt, Artificial Sequence
  Synthetic
ccauccuucuaucuuuuucuccac

SEQ ID NO: 256963 - RNA, 18 nt, Artificial Sequence
  Synthetic
cuauugugaacuguccac

SEQ ID NO: 256964 - RNA, 19 nt, Artificial Sequence
  Synthetic
ccuauugugaacuguccac

SEQ ID NO: 256965 - RNA, 20 nt, Artificial Sequence
  Synthetic
cccuauugugaacuguccac

SEQ ID NO: 256966 - RNA, 21 nt, Artificial Sequence
  Synthetic
acccuauugugaacuguccac

SEQ ID NO: 256967 - RNA, 22 nt, Artificial Sequence
  Synthetic
aacccuauugugaacuguccac

SEQ ID NO: 256968 - RNA, 23 nt, Artificial Sequence
  Synthetic
gaacccuauugugaacuguccac

SEQ ID NO: 256969 - RNA, 24 nt, Artificial Sequence
  Synthetic
cgaacccuauugugaacuguccac

SEQ ID NO: 256970 - RNA, 18 nt, Artificial Sequence
  Synthetic
augugauuuucauuccac

SEQ ID NO: 256971 - RNA, 19 nt, Artificial Sequence
  Synthetic
caugugauuuucauuccac

SEQ ID NO: 256972 - RNA, 20 nt, Artificial Sequence
  Synthetic
gcaugugauuuucauuccac

SEQ ID NO: 256973 - RNA, 21 nt, Artificial Sequence
  Synthetic
agcaugugauuuucauuccac

SEQ ID NO: 256974 - RNA, 22 nt, Artificial Sequence
  Synthetic
cagcaugugauuuucauuccac

SEQ ID NO: 256975 - RNA, 23 nt, Artificial Sequence
  Synthetic
ucagcaugugauuuucauuccac

SEQ ID NO: 256976 - RNA, 24 nt, Artificial Sequence
  Synthetic
aucagcaugugauuuucauuccac

SEQ ID NO: 256977 - RNA, 18 nt, Artificial Sequence
  Synthetic
aauguauucauauuccac

SEQ ID NO: 256978 - RNA, 19 nt, Artificial Sequence
  Synthetic
uaauguauucauauuccac

SEQ ID NO: 256979 - RNA, 20 nt, Artificial Sequence
  Synthetic
auaauguauucauauuccac

SEQ ID NO: 256980 - RNA, 21 nt, Artificial Sequence
  Synthetic
uauaauguauucauauuccac

SEQ ID NO: 256981 - RNA, 22 nt, Artificial Sequence
  Synthetic
auauaauguauucauauuccac

SEQ ID NO: 256982 - RNA, 23 nt, Artificial Sequence
  Synthetic
uauauaauguauucauauuccac

SEQ ID NO: 256983 - RNA, 24 nt, Artificial Sequence
  Synthetic
cuauauaauguauucauauuccac

SEQ ID NO: 256984 - RNA, 18 nt, Artificial Sequence
  Synthetic
ggccaaacugccuuccac

SEQ ID NO: 256985 - RNA, 19 nt, Artificial Sequence
  Synthetic
uggccaaacugccuuccac

SEQ ID NO: 256986 - RNA, 20 nt, Artificial Sequence
  Synthetic
auggccaaacugccuuccac

SEQ ID NO: 256987 - RNA, 21 nt, Artificial Sequence
  Synthetic
uauggccaaacugccuuccac

SEQ ID NO: 256988 - RNA, 22 nt, Artificial Sequence
  Synthetic
auauggccaaacugccuuccac

SEQ ID NO: 256989 - RNA, 23 nt, Artificial Sequence
  Synthetic
gauauggccaaacugccuuccac

SEQ ID NO: 256990 - RNA, 24 nt, Artificial Sequence
  Synthetic
agauauggccaaacugccuuccac

SEQ ID NO: 256991 - RNA, 18 nt, Artificial Sequence
  Synthetic
aaaagguuguucuuccac

SEQ ID NO: 256992 - RNA, 19 nt, Artificial Sequence
  Synthetic
gaaaagguuguucuuccac

SEQ ID NO: 256993 - RNA, 20 nt, Artificial Sequence
  Synthetic
ggaaaagguuguucuuccac

SEQ ID NO: 256994 - RNA, 21 nt, Artificial Sequence
  Synthetic
aggaaaagguuguucuuccac

SEQ ID NO: 256995 - RNA, 22 nt, Artificial Sequence
  Synthetic
gaggaaaagguuguucuuccac

SEQ ID NO: 256996 - RNA, 23 nt, Artificial Sequence
  Synthetic
agaggaaaagguuguucuuccac

SEQ ID NO: 256997 - RNA, 24 nt, Artificial Sequence
  Synthetic
gagaggaaaagguuguucuuccac

SEQ ID NO: 256998 - RNA, 18 nt, Artificial Sequence
  Synthetic
gggaccagauaguuccac

SEQ ID NO: 256999 - RNA, 19 nt, Artificial Sequence
  Synthetic
agggaccagauaguuccac

SEQ ID NO: 257000 - RNA, 20 nt, Artificial Sequence
  Synthetic
cagggaccagauaguuccac

SEQ ID NO: 257001 - RNA, 21 nt, Artificial Sequence
  Synthetic
gcagggaccagauaguuccac

SEQ ID NO: 257002 - RNA, 22 nt, Artificial Sequence
  Synthetic
agcagggaccagauaguuccac

SEQ ID NO: 257003 - RNA, 23 nt, Artificial Sequence
  Synthetic
uagcagggaccagauaguuccac

SEQ ID NO: 257004 - RNA, 24 nt, Artificial Sequence
  Synthetic
uuagcagggaccagauaguuccac

SEQ ID NO: 257005 - RNA, 18 nt, Artificial Sequence
  Synthetic
uucuaaauacauuuccac

SEQ ID NO: 257006 - RNA, 19 nt, Artificial Sequence
  Synthetic
uuucuaaauacauuuccac

SEQ ID NO: 257007 - RNA, 20 nt, Artificial Sequence
  Synthetic
uuuucuaaauacauuuccac

SEQ ID NO: 257008 - RNA, 21 nt, Artificial Sequence
  Synthetic
auuuucuaaauacauuuccac

SEQ ID NO: 257009 - RNA, 22 nt, Artificial Sequence
  Synthetic
cauuuucuaaauacauuuccac

SEQ ID NO: 257010 - RNA, 23 nt, Artificial Sequence
  Synthetic
ccauuuucuaaauacauuuccac

SEQ ID NO: 257011 - RNA, 24 nt, Artificial Sequence
  Synthetic
uccauuuucuaaauacauuuccac

SEQ ID NO: 257012 - RNA, 18 nt, Artificial Sequence
  Synthetic
ugggaauuauauuuccac

SEQ ID NO: 257013 - RNA, 19 nt, Artificial Sequence
  Synthetic
uugggaauuauauuuccac

SEQ ID NO: 257014 - RNA, 20 nt, Artificial Sequence
  Synthetic
auugggaauuauauuuccac

SEQ ID NO: 257015 - RNA, 21 nt, Artificial Sequence
  Synthetic
cauugggaauuauauuuccac

SEQ ID NO: 257016 - RNA, 22 nt, Artificial Sequence
  Synthetic
acauugggaauuauauuuccac

SEQ ID NO: 257017 - RNA, 23 nt, Artificial Sequence
  Synthetic
aacauugggaauuauauuuccac

SEQ ID NO: 257018 - RNA, 24 nt, Artificial Sequence
  Synthetic
caacauugggaauuauauuuccac

SEQ ID NO: 257019 - RNA, 18 nt, Artificial Sequence
  Synthetic
uaacaacuucaaaagcac

SEQ ID NO: 257020 - RNA, 19 nt, Artificial Sequence
  Synthetic
auaacaacuucaaaagcac

SEQ ID NO: 257021 - RNA, 20 nt, Artificial Sequence
  Synthetic
cauaacaacuucaaaagcac

SEQ ID NO: 257022 - RNA, 21 nt, Artificial Sequence
  Synthetic
ucauaacaacuucaaaagcac

SEQ ID NO: 257023 - RNA, 22 nt, Artificial Sequence
  Synthetic
gucauaacaacuucaaaagcac

SEQ ID NO: 257024 - RNA, 23 nt, Artificial Sequence
  Synthetic
ggucauaacaacuucaaaagcac

SEQ ID NO: 257025 - RNA, 24 nt, Artificial Sequence
  Synthetic
uggucauaacaacuucaaaagcac

SEQ ID NO: 257026 - RNA, 18 nt, Artificial Sequence
  Synthetic
auuauaauuccaaagcac

SEQ ID NO: 257027 - RNA, 19 nt, Artificial Sequence
  Synthetic
gauuauaauuccaaagcac

SEQ ID NO: 257028 - RNA, 20 nt, Artificial Sequence
  Synthetic
ggauuauaauuccaaagcac

SEQ ID NO: 257029 - RNA, 21 nt, Artificial Sequence
  Synthetic
aggauuauaauuccaaagcac

SEQ ID NO: 257030 - RNA, 22 nt, Artificial Sequence
  Synthetic
gaggauuauaauuccaaagcac

SEQ ID NO: 257031 - RNA, 23 nt, Artificial Sequence
  Synthetic
ugaggauuauaauuccaaagcac

SEQ ID NO: 257032 - RNA, 24 nt, Artificial Sequence
  Synthetic
gugaggauuauaauuccaaagcac

SEQ ID NO: 257033 - RNA, 18 nt, Artificial Sequence
  Synthetic
ucucugcuggcaaagcac

SEQ ID NO: 257034 - RNA, 19 nt, Artificial Sequence
  Synthetic
gucucugcuggcaaagcac

SEQ ID NO: 257035 - RNA, 20 nt, Artificial Sequence
  Synthetic
ugucucugcuggcaaagcac

SEQ ID NO: 257036 - RNA, 21 nt, Artificial Sequence
  Synthetic
gugucucugcuggcaaagcac

SEQ ID NO: 257037 - RNA, 22 nt, Artificial Sequence
  Synthetic
agugucucugcuggcaaagcac

SEQ ID NO: 257038 - RNA, 23 nt, Artificial Sequence
  Synthetic
aagugucucugcuggcaaagcac

SEQ ID NO: 257039 - RNA, 24 nt, Artificial Sequence
  Synthetic
caagugucucugcuggcaaagcac

SEQ ID NO: 257040 - RNA, 18 nt, Artificial Sequence
  Synthetic
auuaagguaacgaagcac

SEQ ID NO: 257041 - RNA, 19 nt, Artificial Sequence
  Synthetic
aauuaagguaacgaagcac

SEQ ID NO: 257042 - RNA, 20 nt, Artificial Sequence
  Synthetic
aaauuaagguaacgaagcac

SEQ ID NO: 257043 - RNA, 21 nt, Artificial Sequence
  Synthetic
gaaauuaagguaacgaagcac

SEQ ID NO: 257044 - RNA, 22 nt, Artificial Sequence
  Synthetic
ugaaauuaagguaacgaagcac

SEQ ID NO: 257045 - RNA, 23 nt, Artificial Sequence
  Synthetic
augaaauuaagguaacgaagcac

SEQ ID NO: 257046 - RNA, 24 nt, Artificial Sequence
  Synthetic
aaugaaauuaagguaacgaagcac

SEQ ID NO: 257047 - RNA, 18 nt, Artificial Sequence
  Synthetic
gccucaccccggaagcac

SEQ ID NO: 257048 - RNA, 19 nt, Artificial Sequence
  Synthetic
cgccucaccccggaagcac

SEQ ID NO: 257049 - RNA, 20 nt, Artificial Sequence
  Synthetic
ucgccucaccccggaagcac

SEQ ID NO: 257050 - RNA, 21 nt, Artificial Sequence
  Synthetic
gucgccucaccccggaagcac

SEQ ID NO: 257051 - RNA, 22 nt, Artificial Sequence
  Synthetic
ugucgccucaccccggaagcac

SEQ ID NO: 257052 - RNA, 23 nt, Artificial Sequence
  Synthetic
augucgccucaccccggaagcac

SEQ ID NO: 257053 - RNA, 24 nt, Artificial Sequence
  Synthetic
gaugucgccucaccccggaagcac

SEQ ID NO: 257054 - RNA, 18 nt, Artificial Sequence
  Synthetic
uuuagacaagggaagcac

SEQ ID NO: 257055 - RNA, 19 nt, Artificial Sequence
  Synthetic
auuuagacaagggaagcac

SEQ ID NO: 257056 - RNA, 20 nt, Artificial Sequence
  Synthetic
uauuuagacaagggaagcac

SEQ ID NO: 257057 - RNA, 21 nt, Artificial Sequence
  Synthetic
uuauuuagacaagggaagcac

SEQ ID NO: 257058 - RNA, 22 nt, Artificial Sequence
  Synthetic
uuuauuuagacaagggaagcac

SEQ ID NO: 257059 - RNA, 23 nt, Artificial Sequence
  Synthetic
uuuuauuuagacaagggaagcac

SEQ ID NO: 257060 - RNA, 24 nt, Artificial Sequence
  Synthetic
cuuuuauuuagacaagggaagcac

SEQ ID NO: 257061 - RNA, 18 nt, Artificial Sequence
  Synthetic
gauuaugugaauaagcac

SEQ ID NO: 257062 - RNA, 19 nt, Artificial Sequence
  Synthetic
ugauuaugugaauaagcac

SEQ ID NO: 257063 - RNA, 20 nt, Artificial Sequence
  Synthetic
uugauuaugugaauaagcac

SEQ ID NO: 257064 - RNA, 21 nt, Artificial Sequence
  Synthetic
cuugauuaugugaauaagcac

SEQ ID NO: 257065 - RNA, 22 nt, Artificial Sequence
  Synthetic
ccuugauuaugugaauaagcac

SEQ ID NO: 257066 - RNA, 23 nt, Artificial Sequence
  Synthetic
gccuugauuaugugaauaagcac

SEQ ID NO: 257067 - RNA, 24 nt, Artificial Sequence
  Synthetic
ugccuugauuaugugaauaagcac

SEQ ID NO: 257068 - RNA, 18 nt, Artificial Sequence
  Synthetic
auagaucuccauaagcac

SEQ ID NO: 257069 - RNA, 19 nt, Artificial Sequence
  Synthetic
uauagaucuccauaagcac

SEQ ID NO: 257070 - RNA, 20 nt, Artificial Sequence
  Synthetic
guauagaucuccauaagcac

SEQ ID NO: 257071 - RNA, 21 nt, Artificial Sequence
  Synthetic
uguauagaucuccauaagcac

SEQ ID NO: 257072 - RNA, 22 nt, Artificial Sequence
  Synthetic
auguauagaucuccauaagcac

SEQ ID NO: 257073 - RNA, 23 nt, Artificial Sequence
  Synthetic
gauguauagaucuccauaagcac

SEQ ID NO: 257074 - RNA, 24 nt, Artificial Sequence
  Synthetic
agauguauagaucuccauaagcac

SEQ ID NO: 257075 - RNA, 18 nt, Artificial Sequence
  Synthetic
uuuuaucuauguaagcac

SEQ ID NO: 257076 - RNA, 19 nt, Artificial Sequence
  Synthetic
cuuuuaucuauguaagcac

SEQ ID NO: 257077 - RNA, 20 nt, Artificial Sequence
  Synthetic
acuuuuaucuauguaagcac

SEQ ID NO: 257078 - RNA, 21 nt, Artificial Sequence
  Synthetic
uacuuuuaucuauguaagcac

SEQ ID NO: 257079 - RNA, 22 nt, Artificial Sequence
  Synthetic
auacuuuuaucuauguaagcac

SEQ ID NO: 257080 - RNA, 23 nt, Artificial Sequence
  Synthetic
aauacuuuuaucuauguaagcac

SEQ ID NO: 257081 - RNA, 24 nt, Artificial Sequence
  Synthetic
aaauacuuuuaucuauguaagcac

SEQ ID NO: 257082 - RNA, 18 nt, Artificial Sequence
  Synthetic
aauuaccacauuaagcac

SEQ ID NO: 257083 - RNA, 19 nt, Artificial Sequence
  Synthetic
aaauuaccacauuaagcac

SEQ ID NO: 257084 - RNA, 20 nt, Artificial Sequence
  Synthetic
caaauuaccacauuaagcac

SEQ ID NO: 257085 - RNA, 21 nt, Artificial Sequence
  Synthetic
acaaauuaccacauuaagcac

SEQ ID NO: 257086 - RNA, 22 nt, Artificial Sequence
  Synthetic
uacaaauuaccacauuaagcac

SEQ ID NO: 257087 - RNA, 23 nt, Artificial Sequence
  Synthetic
uuacaaauuaccacauuaagcac

SEQ ID NO: 257088 - RNA, 24 nt, Artificial Sequence
  Synthetic
uuuacaaauuaccacauuaagcac

SEQ ID NO: 257089 - RNA, 18 nt, Artificial Sequence
  Synthetic
cuaucaggagaacagcac

SEQ ID NO: 257090 - RNA, 19 nt, Artificial Sequence
  Synthetic
acuaucaggagaacagcac

SEQ ID NO: 257091 - RNA, 20 nt, Artificial Sequence
  Synthetic
cacuaucaggagaacagcac

SEQ ID NO: 257092 - RNA, 21 nt, Artificial Sequence
  Synthetic
ucacuaucaggagaacagcac

SEQ ID NO: 257093 - RNA, 22 nt, Artificial Sequence
  Synthetic
uucacuaucaggagaacagcac

SEQ ID NO: 257094 - RNA, 23 nt, Artificial Sequence
  Synthetic
auucacuaucaggagaacagcac

SEQ ID NO: 257095 - RNA, 24 nt, Artificial Sequence
  Synthetic
uauucacuaucaggagaacagcac

SEQ ID NO: 257096 - RNA, 18 nt, Artificial Sequence
  Synthetic
caaucacuagaacagcac

SEQ ID NO: 257097 - RNA, 19 nt, Artificial Sequence
  Synthetic
acaaucacuagaacagcac

SEQ ID NO: 257098 - RNA, 20 nt, Artificial Sequence
  Synthetic
cacaaucacuagaacagcac

SEQ ID NO: 257099 - RNA, 21 nt, Artificial Sequence
  Synthetic
ucacaaucacuagaacagcac

SEQ ID NO: 257100 - RNA, 22 nt, Artificial Sequence
  Synthetic
uucacaaucacuagaacagcac

SEQ ID NO: 257101 - RNA, 23 nt, Artificial Sequence
  Synthetic
auucacaaucacuagaacagcac

SEQ ID NO: 257102 - RNA, 24 nt, Artificial Sequence
  Synthetic
uauucacaaucacuagaacagcac

SEQ ID NO: 257103 - RNA, 18 nt, Artificial Sequence
  Synthetic
agcugagaaacacagcac

SEQ ID NO: 257104 - RNA, 19 nt, Artificial Sequence
  Synthetic
gagcugagaaacacagcac

SEQ ID NO: 257105 - RNA, 20 nt, Artificial Sequence
  Synthetic
ggagcugagaaacacagcac

SEQ ID NO: 257106 - RNA, 21 nt, Artificial Sequence
  Synthetic
aggagcugagaaacacagcac

SEQ ID NO: 257107 - RNA, 22 nt, Artificial Sequence
  Synthetic
aaggagcugagaaacacagcac

SEQ ID NO: 257108 - RNA, 23 nt, Artificial Sequence
  Synthetic
gaaggagcugagaaacacagcac

SEQ ID NO: 257109 - RNA, 24 nt, Artificial Sequence
  Synthetic
ugaaggagcugagaaacacagcac

SEQ ID NO: 257110 - RNA, 18 nt, Artificial Sequence
  Synthetic
gaucucccagcacagcac

SEQ ID NO: 257111 - RNA, 19 nt, Artificial Sequence
  Synthetic
agaucucccagcacagcac

SEQ ID NO: 257112 - RNA, 20 nt, Artificial Sequence
  Synthetic
cagaucucccagcacagcac

SEQ ID NO: 257113 - RNA, 21 nt, Artificial Sequence
  Synthetic
gcagaucucccagcacagcac

SEQ ID NO: 257114 - RNA, 22 nt, Artificial Sequence
  Synthetic
agcagaucucccagcacagcac

SEQ ID NO: 257115 - RNA, 23 nt, Artificial Sequence
  Synthetic
cagcagaucucccagcacagcac

SEQ ID NO: 257116 - RNA, 24 nt, Artificial Sequence
  Synthetic
gcagcagaucucccagcacagcac

SEQ ID NO: 257117 - RNA, 18 nt, Artificial Sequence
  Synthetic
uggggguaaggacagcac

SEQ ID NO: 257118 - RNA, 19 nt, Artificial Sequence
  Synthetic
auggggguaaggacagcac

SEQ ID NO: 257119 - RNA, 20 nt, Artificial Sequence
  Synthetic
gauggggguaaggacagcac

SEQ ID NO: 257120 - RNA, 21 nt, Artificial Sequence
  Synthetic
agauggggguaaggacagcac

SEQ ID NO: 257121 - RNA, 22 nt, Artificial Sequence
  Synthetic
gagauggggguaaggacagcac

SEQ ID NO: 257122 - RNA, 23 nt, Artificial Sequence
  Synthetic
ugagauggggguaaggacagcac

SEQ ID NO: 257123 - RNA, 24 nt, Artificial Sequence
  Synthetic
gugagauggggguaaggacagcac

SEQ ID NO: 257124 - RNA, 18 nt, Artificial Sequence
  Synthetic
cgccuguaaucccagcac

SEQ ID NO: 257125 - RNA, 19 nt, Artificial Sequence
  Synthetic
acgccuguaaucccagcac

SEQ ID NO: 257126 - RNA, 20 nt, Artificial Sequence
  Synthetic
cacgccuguaaucccagcac

SEQ ID NO: 257127 - RNA, 18 nt, Artificial Sequence
  Synthetic
cuucacauuucccagcac

SEQ ID NO: 257128 - RNA, 19 nt, Artificial Sequence
  Synthetic
gcuucacauuucccagcac

SEQ ID NO: 257129 - RNA, 20 nt, Artificial Sequence
  Synthetic
ugcuucacauuucccagcac

SEQ ID NO: 257130 - RNA, 21 nt, Artificial Sequence
  Synthetic
cugcuucacauuucccagcac

SEQ ID NO: 257131 - RNA, 22 nt, Artificial Sequence
  Synthetic
ccugcuucacauuucccagcac

SEQ ID NO: 257132 - RNA, 23 nt, Artificial Sequence
  Synthetic
uccugcuucacauuucccagcac

SEQ ID NO: 257133 - RNA, 24 nt, Artificial Sequence
  Synthetic
cuccugcuucacauuucccagcac

SEQ ID NO: 257134 - RNA, 18 nt, Artificial Sequence
  Synthetic
aaccgaauccagcagcac

SEQ ID NO: 257135 - RNA, 19 nt, Artificial Sequence
  Synthetic
aaaccgaauccagcagcac

SEQ ID NO: 257136 - RNA, 20 nt, Artificial Sequence
  Synthetic
caaaccgaauccagcagcac

SEQ ID NO: 257137 - RNA, 21 nt, Artificial Sequence
  Synthetic
gcaaaccgaauccagcagcac

SEQ ID NO: 257138 - RNA, 22 nt, Artificial Sequence
  Synthetic
ggcaaaccgaauccagcagcac

SEQ ID NO: 257139 - RNA, 23 nt, Artificial Sequence
  Synthetic
uggcaaaccgaauccagcagcac

SEQ ID NO: 257140 - RNA, 24 nt, Artificial Sequence
  Synthetic
cuggcaaaccgaauccagcagcac

SEQ ID NO: 257141 - RNA, 18 nt, Artificial Sequence
  Synthetic
caaggaagagaagagcac

SEQ ID NO: 257142 - RNA, 19 nt, Artificial Sequence
  Synthetic
acaaggaagagaagagcac

SEQ ID NO: 257143 - RNA, 20 nt, Artificial Sequence
  Synthetic
cacaaggaagagaagagcac

SEQ ID NO: 257144 - RNA, 21 nt, Artificial Sequence
  Synthetic
ccacaaggaagagaagagcac

SEQ ID NO: 257145 - RNA, 22 nt, Artificial Sequence
  Synthetic
cccacaaggaagagaagagcac

SEQ ID NO: 257146 - RNA, 23 nt, Artificial Sequence
  Synthetic
acccacaaggaagagaagagcac

SEQ ID NO: 257147 - RNA, 24 nt, Artificial Sequence
  Synthetic
cacccacaaggaagagaagagcac

SEQ ID NO: 257148 - RNA, 18 nt, Artificial Sequence
  Synthetic
agagagaaaugagagcac

SEQ ID NO: 257149 - RNA, 19 nt, Artificial Sequence
  Synthetic
gagagagaaaugagagcac

SEQ ID NO: 257150 - RNA, 20 nt, Artificial Sequence
  Synthetic
agagagagaaaugagagcac

SEQ ID NO: 257151 - RNA, 21 nt, Artificial Sequence
  Synthetic
cagagagagaaaugagagcac

SEQ ID NO: 257152 - RNA, 22 nt, Artificial Sequence
  Synthetic
acagagagagaaaugagagcac

SEQ ID NO: 257153 - RNA, 23 nt, Artificial Sequence
  Synthetic
gacagagagagaaaugagagcac

SEQ ID NO: 257154 - RNA, 24 nt, Artificial Sequence
  Synthetic
agacagagagagaaaugagagcac

SEQ ID NO: 257155 - RNA, 18 nt, Artificial Sequence
  Synthetic
uucagucguauagagcac

SEQ ID NO: 257156 - RNA, 19 nt, Artificial Sequence
  Synthetic
auucagucguauagagcac

SEQ ID NO: 257157 - RNA, 20 nt, Artificial Sequence
  Synthetic
cauucagucguauagagcac

SEQ ID NO: 257158 - RNA, 21 nt, Artificial Sequence
  Synthetic
ccauucagucguauagagcac

SEQ ID NO: 257159 - RNA, 22 nt, Artificial Sequence
  Synthetic
accauucagucguauagagcac

SEQ ID NO: 257160 - RNA, 23 nt, Artificial Sequence
  Synthetic
caccauucagucguauagagcac

SEQ ID NO: 257161 - RNA, 24 nt, Artificial Sequence
  Synthetic
ucaccauucagucguauagagcac

SEQ ID NO: 257162 - RNA, 18 nt, Artificial Sequence
  Synthetic
ggaggacuguuugagcac

SEQ ID NO: 257163 - RNA, 19 nt, Artificial Sequence
  Synthetic
aggaggacuguuugagcac

SEQ ID NO: 257164 - RNA, 20 nt, Artificial Sequence
  Synthetic
caggaggacuguuugagcac

SEQ ID NO: 257165 - RNA, 21 nt, Artificial Sequence
  Synthetic
gcaggaggacuguuugagcac

SEQ ID NO: 257166 - RNA, 22 nt, Artificial Sequence
  Synthetic
ggcaggaggacuguuugagcac

SEQ ID NO: 257167 - RNA, 23 nt, Artificial Sequence
  Synthetic
gggcaggaggacuguuugagcac

SEQ ID NO: 257168 - RNA, 24 nt, Artificial Sequence
  Synthetic
ggggcaggaggacuguuugagcac

SEQ ID NO: 257169 - RNA, 18 nt, Artificial Sequence
  Synthetic
auucucaguacauagcac

SEQ ID NO: 257170 - RNA, 19 nt, Artificial Sequence
  Synthetic
cauucucaguacauagcac

SEQ ID NO: 257171 - RNA, 20 nt, Artificial Sequence
  Synthetic
gcauucucaguacauagcac

SEQ ID NO: 257172 - RNA, 21 nt, Artificial Sequence
  Synthetic
cgcauucucaguacauagcac

SEQ ID NO: 257173 - RNA, 22 nt, Artificial Sequence
  Synthetic
gcgcauucucaguacauagcac

SEQ ID NO: 257174 - RNA, 23 nt, Artificial Sequence
  Synthetic
ggcgcauucucaguacauagcac

SEQ ID NO: 257175 - RNA, 24 nt, Artificial Sequence
  Synthetic
gggcgcauucucaguacauagcac

SEQ ID NO: 257176 - RNA, 18 nt, Artificial Sequence
  Synthetic
aauacagggagauagcac

SEQ ID NO: 257177 - RNA, 19 nt, Artificial Sequence
  Synthetic
gaauacagggagauagcac

SEQ ID NO: 257178 - RNA, 20 nt, Artificial Sequence
  Synthetic
ugaauacagggagauagcac

SEQ ID NO: 257179 - RNA, 21 nt, Artificial Sequence
  Synthetic
gugaauacagggagauagcac

SEQ ID NO: 257180 - RNA, 22 nt, Artificial Sequence
  Synthetic
agugaauacagggagauagcac

SEQ ID NO: 257181 - RNA, 23 nt, Artificial Sequence
  Synthetic
uagugaauacagggagauagcac

SEQ ID NO: 257182 - RNA, 24 nt, Artificial Sequence
  Synthetic
auagugaauacagggagauagcac

SEQ ID NO: 257183 - RNA, 18 nt, Artificial Sequence
  Synthetic
ugccucucaaacuagcac

SEQ ID NO: 257184 - RNA, 19 nt, Artificial Sequence
  Synthetic
uugccucucaaacuagcac

SEQ ID NO: 257185 - RNA, 20 nt, Artificial Sequence
  Synthetic
auugccucucaaacuagcac

SEQ ID NO: 257186 - RNA, 21 nt, Artificial Sequence
  Synthetic
aauugccucucaaacuagcac

SEQ ID NO: 257187 - RNA, 22 nt, Artificial Sequence
  Synthetic
aaauugccucucaaacuagcac

SEQ ID NO: 257188 - RNA, 23 nt, Artificial Sequence
  Synthetic
uaaauugccucucaaacuagcac

SEQ ID NO: 257189 - RNA, 24 nt, Artificial Sequence
  Synthetic
auaaauugccucucaaacuagcac

SEQ ID NO: 257190 - RNA, 18 nt, Artificial Sequence
  Synthetic
aauuaauacaucuagcac

SEQ ID NO: 257191 - RNA, 19 nt, Artificial Sequence
  Synthetic
uaauuaauacaucuagcac

SEQ ID NO: 257192 - RNA, 20 nt, Artificial Sequence
  Synthetic
uuaauuaauacaucuagcac

SEQ ID NO: 257193 - RNA, 21 nt, Artificial Sequence
  Synthetic
auuaauuaauacaucuagcac

SEQ ID NO: 257194 - RNA, 22 nt, Artificial Sequence
  Synthetic
aauuaauuaauacaucuagcac

SEQ ID NO: 257195 - RNA, 23 nt, Artificial Sequence
  Synthetic
aaauuaauuaauacaucuagcac

SEQ ID NO: 257196 - RNA, 24 nt, Artificial Sequence
  Synthetic
caaauuaauuaauacaucuagcac

SEQ ID NO: 257197 - RNA, 18 nt, Artificial Sequence
  Synthetic
ucuggcacagaguagcac

SEQ ID NO: 257198 - RNA, 19 nt, Artificial Sequence
  Synthetic
gucuggcacagaguagcac

SEQ ID NO: 257199 - RNA, 20 nt, Artificial Sequence
  Synthetic
agucuggcacagaguagcac

SEQ ID NO: 257200 - RNA, 21 nt, Artificial Sequence
  Synthetic
aagucuggcacagaguagcac

SEQ ID NO: 257201 - RNA, 22 nt, Artificial Sequence
  Synthetic
aaagucuggcacagaguagcac

SEQ ID NO: 257202 - RNA, 23 nt, Artificial Sequence
  Synthetic
caaagucuggcacagaguagcac

SEQ ID NO: 257203 - RNA, 24 nt, Artificial Sequence
  Synthetic
acaaagucuggcacagaguagcac

SEQ ID NO: 257204 - RNA, 18 nt, Artificial Sequence
  Synthetic
uaaaacacaaacacgcac

SEQ ID NO: 257205 - RNA, 19 nt, Artificial Sequence
  Synthetic
guaaaacacaaacacgcac

SEQ ID NO: 257206 - RNA, 20 nt, Artificial Sequence
  Synthetic
aguaaaacacaaacacgcac

SEQ ID NO: 257207 - RNA, 21 nt, Artificial Sequence
  Synthetic
aaguaaaacacaaacacgcac

SEQ ID NO: 257208 - RNA, 22 nt, Artificial Sequence
  Synthetic
aaaguaaaacacaaacacgcac

SEQ ID NO: 257209 - RNA, 23 nt, Artificial Sequence
  Synthetic
aaaaguaaaacacaaacacgcac

SEQ ID NO: 257210 - RNA, 24 nt, Artificial Sequence
  Synthetic
aaaaaguaaaacacaaacacgcac

SEQ ID NO: 257211 - RNA, 18 nt, Artificial Sequence
  Synthetic
uaagcccuacauacgcac

SEQ ID NO: 257212 - RNA, 19 nt, Artificial Sequence
  Synthetic
auaagcccuacauacgcac

SEQ ID NO: 257213 - RNA, 20 nt, Artificial Sequence
  Synthetic
uauaagcccuacauacgcac

SEQ ID NO: 257214 - RNA, 21 nt, Artificial Sequence
  Synthetic
guauaagcccuacauacgcac

SEQ ID NO: 257215 - RNA, 22 nt, Artificial Sequence
  Synthetic
aguauaagcccuacauacgcac

SEQ ID NO: 257216 - RNA, 23 nt, Artificial Sequence
  Synthetic
aaguauaagcccuacauacgcac

SEQ ID NO: 257217 - RNA, 24 nt, Artificial Sequence
  Synthetic
caaguauaagcccuacauacgcac

SEQ ID NO: 257218 - RNA, 18 nt, Artificial Sequence
  Synthetic
auuagcauacaaccgcac

SEQ ID NO: 257219 - RNA, 19 nt, Artificial Sequence
  Synthetic
gauuagcauacaaccgcac

SEQ ID NO: 257220 - RNA, 20 nt, Artificial Sequence
  Synthetic
ggauuagcauacaaccgcac

SEQ ID NO: 257221 - RNA, 21 nt, Artificial Sequence
  Synthetic
aggauuagcauacaaccgcac

SEQ ID NO: 257222 - RNA, 22 nt, Artificial Sequence
  Synthetic
uaggauuagcauacaaccgcac

SEQ ID NO: 257223 - RNA, 23 nt, Artificial Sequence
  Synthetic
cuaggauuagcauacaaccgcac

SEQ ID NO: 257224 - RNA, 24 nt, Artificial Sequence
  Synthetic
acuaggauuagcauacaaccgcac

SEQ ID NO: 257225 - RNA, 18 nt, Artificial Sequence
  Synthetic
uugccucuuagugcgcac

SEQ ID NO: 257226 - RNA, 19 nt, Artificial Sequence
  Synthetic
uuugccucuuagugcgcac

SEQ ID NO: 257227 - RNA, 20 nt, Artificial Sequence
  Synthetic
uuuugccucuuagugcgcac

SEQ ID NO: 257228 - RNA, 21 nt, Artificial Sequence
  Synthetic
auuuugccucuuagugcgcac

SEQ ID NO: 257229 - RNA, 22 nt, Artificial Sequence
  Synthetic
cauuuugccucuuagugcgcac

SEQ ID NO: 257230 - RNA, 23 nt, Artificial Sequence
  Synthetic
acauuuugccucuuagugcgcac

SEQ ID NO: 257231 - RNA, 24 nt, Artificial Sequence
  Synthetic
gacauuuugccucuuagugcgcac

SEQ ID NO: 257232 - RNA, 18 nt, Artificial Sequence
  Synthetic
cuagccaagagcaggcac

SEQ ID NO: 257233 - RNA, 19 nt, Artificial Sequence
  Synthetic
acuagccaagagcaggcac

SEQ ID NO: 257234 - RNA, 20 nt, Artificial Sequence
  Synthetic
cacuagccaagagcaggcac

SEQ ID NO: 257235 - RNA, 21 nt, Artificial Sequence
  Synthetic
gcacuagccaagagcaggcac

SEQ ID NO: 257236 - RNA, 22 nt, Artificial Sequence
  Synthetic
ugcacuagccaagagcaggcac

SEQ ID NO: 257237 - RNA, 23 nt, Artificial Sequence
  Synthetic
uugcacuagccaagagcaggcac

SEQ ID NO: 257238 - RNA, 24 nt, Artificial Sequence
  Synthetic
uuugcacuagccaagagcaggcac

SEQ ID NO: 257239 - RNA, 18 nt, Artificial Sequence
  Synthetic
aagcauauaaagaggcac

SEQ ID NO: 257240 - RNA, 19 nt, Artificial Sequence
  Synthetic
aaagcauauaaagaggcac

SEQ ID NO: 257241 - RNA, 20 nt, Artificial Sequence
  Synthetic
aaaagcauauaaagaggcac

SEQ ID NO: 257242 - RNA, 21 nt, Artificial Sequence
  Synthetic
aaaaagcauauaaagaggcac

SEQ ID NO: 257243 - RNA, 22 nt, Artificial Sequence
  Synthetic
gaaaaagcauauaaagaggcac

SEQ ID NO: 257244 - RNA, 23 nt, Artificial Sequence
  Synthetic
agaaaaagcauauaaagaggcac

SEQ ID NO: 257245 - RNA, 24 nt, Artificial Sequence
  Synthetic
cagaaaaagcauauaaagaggcac

SEQ ID NO: 257246 - RNA, 18 nt, Artificial Sequence
  Synthetic
cucuggaggcugaggcac

SEQ ID NO: 257247 - RNA, 19 nt, Artificial Sequence
  Synthetic
acucuggaggcugaggcac

SEQ ID NO: 257248 - RNA, 20 nt, Artificial Sequence
  Synthetic
uacucuggaggcugaggcac

SEQ ID NO: 257249 - RNA, 21 nt, Artificial Sequence
  Synthetic
cuacucuggaggcugaggcac

SEQ ID NO: 257250 - RNA, 22 nt, Artificial Sequence
  Synthetic
gcuacucuggaggcugaggcac

SEQ ID NO: 257251 - RNA, 23 nt, Artificial Sequence
  Synthetic
agcuacucuggaggcugaggcac

SEQ ID NO: 257252 - RNA, 24 nt, Artificial Sequence
  Synthetic
cagcuacucuggaggcugaggcac

SEQ ID NO: 257253 - RNA, 18 nt, Artificial Sequence
  Synthetic
cauuuuuaaaauaggcac

SEQ ID NO: 257254 - RNA, 19 nt, Artificial Sequence
  Synthetic
ucauuuuuaaaauaggcac

SEQ ID NO: 257255 - RNA, 20 nt, Artificial Sequence
  Synthetic
cucauuuuuaaaauaggcac

SEQ ID NO: 257256 - RNA, 21 nt, Artificial Sequence
  Synthetic
ccucauuuuuaaaauaggcac

SEQ ID NO: 257257 - RNA, 22 nt, Artificial Sequence
  Synthetic
uccucauuuuuaaaauaggcac

SEQ ID NO: 257258 - RNA, 23 nt, Artificial Sequence
  Synthetic
uuccucauuuuuaaaauaggcac

SEQ ID NO: 257259 - RNA, 24 nt, Artificial Sequence
  Synthetic
cuuccucauuuuuaaaauaggcac

SEQ ID NO: 257260 - RNA, 18 nt, Artificial Sequence
  Synthetic
gauaaccacaauaggcac

SEQ ID NO: 257261 - RNA, 19 nt, Artificial Sequence
  Synthetic
ggauaaccacaauaggcac

SEQ ID NO: 257262 - RNA, 20 nt, Artificial Sequence
  Synthetic
aggauaaccacaauaggcac

SEQ ID NO: 257263 - RNA, 21 nt, Artificial Sequence
  Synthetic
caggauaaccacaauaggcac

SEQ ID NO: 257264 - RNA, 22 nt, Artificial Sequence
  Synthetic
ucaggauaaccacaauaggcac

SEQ ID NO: 257265 - RNA, 23 nt, Artificial Sequence
  Synthetic
uucaggauaaccacaauaggcac

SEQ ID NO: 257266 - RNA, 24 nt, Artificial Sequence
  Synthetic
auucaggauaaccacaauaggcac

SEQ ID NO: 257267 - RNA, 18 nt, Artificial Sequence
  Synthetic
guaauagauguuaggcac

SEQ ID NO: 257268 - RNA, 19 nt, Artificial Sequence
  Synthetic
uguaauagauguuaggcac

SEQ ID NO: 257269 - RNA, 20 nt, Artificial Sequence
  Synthetic
auguaauagauguuaggcac

SEQ ID NO: 257270 - RNA, 21 nt, Artificial Sequence
  Synthetic
uauguaauagauguuaggcac

SEQ ID NO: 257271 - RNA, 22 nt, Artificial Sequence
  Synthetic
uuauguaauagauguuaggcac

SEQ ID NO: 257272 - RNA, 23 nt, Artificial Sequence
  Synthetic
guuauguaauagauguuaggcac

SEQ ID NO: 257273 - RNA, 24 nt, Artificial Sequence
  Synthetic
aguuauguaauagauguuaggcac

SEQ ID NO: 257274 - RNA, 18 nt, Artificial Sequence
  Synthetic
aacuuagcuaacgggcac

SEQ ID NO: 257275 - RNA, 19 nt, Artificial Sequence
  Synthetic
caacuuagcuaacgggcac

SEQ ID NO: 257276 - RNA, 20 nt, Artificial Sequence
  Synthetic
acaacuuagcuaacgggcac

SEQ ID NO: 257277 - RNA, 21 nt, Artificial Sequence
  Synthetic
cacaacuuagcuaacgggcac

SEQ ID NO: 257278 - RNA, 22 nt, Artificial Sequence
  Synthetic
ucacaacuuagcuaacgggcac

SEQ ID NO: 257279 - RNA, 23 nt, Artificial Sequence
  Synthetic
uucacaacuuagcuaacgggcac

SEQ ID NO: 257280 - RNA, 24 nt, Artificial Sequence
  Synthetic
auucacaacuuagcuaacgggcac

SEQ ID NO: 257281 - RNA, 18 nt, Artificial Sequence
  Synthetic
gcaaagcauuccgggcac

SEQ ID NO: 257282 - RNA, 19 nt, Artificial Sequence
  Synthetic
ggcaaagcauuccgggcac

SEQ ID NO: 257283 - RNA, 20 nt, Artificial Sequence
  Synthetic
gggcaaagcauuccgggcac

SEQ ID NO: 257284 - RNA, 21 nt, Artificial Sequence
  Synthetic
ggggcaaagcauuccgggcac

SEQ ID NO: 257285 - RNA, 22 nt, Artificial Sequence
  Synthetic
aggggcaaagcauuccgggcac

SEQ ID NO: 257286 - RNA, 23 nt, Artificial Sequence
  Synthetic
uaggggcaaagcauuccgggcac

SEQ ID NO: 257287 - RNA, 24 nt, Artificial Sequence
  Synthetic
guaggggcaaagcauuccgggcac

SEQ ID NO: 257288 - RNA, 18 nt, Artificial Sequence
  Synthetic
auuauaguagaugggcac

SEQ ID NO: 257289 - RNA, 19 nt, Artificial Sequence
  Synthetic
aauuauaguagaugggcac

SEQ ID NO: 257290 - RNA, 20 nt, Artificial Sequence
  Synthetic
aaauuauaguagaugggcac

SEQ ID NO: 257291 - RNA, 21 nt, Artificial Sequence
  Synthetic
aaaauuauaguagaugggcac

SEQ ID NO: 257292 - RNA, 22 nt, Artificial Sequence
  Synthetic
aaaaauuauaguagaugggcac

SEQ ID NO: 257293 - RNA, 23 nt, Artificial Sequence
  Synthetic
uaaaaauuauaguagaugggcac

SEQ ID NO: 257294 - RNA, 24 nt, Artificial Sequence
  Synthetic
auaaaaauuauaguagaugggcac

SEQ ID NO: 257295 - RNA, 18 nt, Artificial Sequence
  Synthetic
ggggugguagaugggcac

SEQ ID NO: 257296 - RNA, 19 nt, Artificial Sequence
  Synthetic
uggggugguagaugggcac

SEQ ID NO: 257297 - RNA, 20 nt, Artificial Sequence
  Synthetic
uuggggugguagaugggcac

SEQ ID NO: 257298 - RNA, 21 nt, Artificial Sequence
  Synthetic
uuuggggugguagaugggcac

SEQ ID NO: 257299 - RNA, 22 nt, Artificial Sequence
  Synthetic
cuuuggggugguagaugggcac

SEQ ID NO: 257300 - RNA, 23 nt, Artificial Sequence
  Synthetic
gcuuuggggugguagaugggcac

SEQ ID NO: 257301 - RNA, 24 nt, Artificial Sequence
  Synthetic
agcuuuggggugguagaugggcac

SEQ ID NO: 257302 - RNA, 18 nt, Artificial Sequence
  Synthetic
aguagaaaauaugggcac

SEQ ID NO: 257303 - RNA, 19 nt, Artificial Sequence
  Synthetic
gaguagaaaauaugggcac

SEQ ID NO: 257304 - RNA, 20 nt, Artificial Sequence
  Synthetic
ggaguagaaaauaugggcac

SEQ ID NO: 257305 - RNA, 21 nt, Artificial Sequence
  Synthetic
gggaguagaaaauaugggcac

SEQ ID NO: 257306 - RNA, 22 nt, Artificial Sequence
  Synthetic
ugggaguagaaaauaugggcac

SEQ ID NO: 257307 - RNA, 23 nt, Artificial Sequence
  Synthetic
uugggaguagaaaauaugggcac

SEQ ID NO: 257308 - RNA, 24 nt, Artificial Sequence
  Synthetic
uuugggaguagaaaauaugggcac

SEQ ID NO: 257309 - RNA, 18 nt, Artificial Sequence
  Synthetic
aauuuagggaaauggcac

SEQ ID NO: 257310 - RNA, 19 nt, Artificial Sequence
  Synthetic
gaauuuagggaaauggcac

SEQ ID NO: 257311 - RNA, 20 nt, Artificial Sequence
  Synthetic
ugaauuuagggaaauggcac

SEQ ID NO: 257312 - RNA, 21 nt, Artificial Sequence
  Synthetic
cugaauuuagggaaauggcac

SEQ ID NO: 257313 - RNA, 22 nt, Artificial Sequence
  Synthetic
ucugaauuuagggaaauggcac

SEQ ID NO: 257314 - RNA, 23 nt, Artificial Sequence
  Synthetic
uucugaauuuagggaaauggcac

SEQ ID NO: 257315 - RNA, 24 nt, Artificial Sequence
  Synthetic
uuucugaauuuagggaaauggcac

SEQ ID NO: 257316 - RNA, 18 nt, Artificial Sequence
  Synthetic
aacauugcaucauggcac

SEQ ID NO: 257317 - RNA, 19 nt, Artificial Sequence
  Synthetic
gaacauugcaucauggcac

SEQ ID NO: 257318 - RNA, 20 nt, Artificial Sequence
  Synthetic
agaacauugcaucauggcac

SEQ ID NO: 257319 - RNA, 21 nt, Artificial Sequence
  Synthetic
aagaacauugcaucauggcac

SEQ ID NO: 257320 - RNA, 22 nt, Artificial Sequence
  Synthetic
aaagaacauugcaucauggcac

SEQ ID NO: 257321 - RNA, 23 nt, Artificial Sequence
  Synthetic
aaaagaacauugcaucauggcac

SEQ ID NO: 257322 - RNA, 24 nt, Artificial Sequence
  Synthetic
gaaaagaacauugcaucauggcac

SEQ ID NO: 257323 - RNA, 18 nt, Artificial Sequence
  Synthetic
gcaaugaaaugcuggcac

SEQ ID NO: 257324 - RNA, 19 nt, Artificial Sequence
  Synthetic
ggcaaugaaaugcuggcac

SEQ ID NO: 257325 - RNA, 20 nt, Artificial Sequence
  Synthetic
aggcaaugaaaugcuggcac

SEQ ID NO: 257326 - RNA, 21 nt, Artificial Sequence
  Synthetic
caggcaaugaaaugcuggcac

SEQ ID NO: 257327 - RNA, 22 nt, Artificial Sequence
  Synthetic
ucaggcaaugaaaugcuggcac

SEQ ID NO: 257328 - RNA, 23 nt, Artificial Sequence
  Synthetic
uucaggcaaugaaaugcuggcac

SEQ ID NO: 257329 - RNA, 24 nt, Artificial Sequence
  Synthetic
cuucaggcaaugaaaugcuggcac

SEQ ID NO: 257330 - RNA, 18 nt, Artificial Sequence
  Synthetic
uuauuugcuuucuggcac

SEQ ID NO: 257331 - RNA, 19 nt, Artificial Sequence
  Synthetic
guuauuugcuuucuggcac

SEQ ID NO: 257332 - RNA, 20 nt, Artificial Sequence
  Synthetic
gguuauuugcuuucuggcac

SEQ ID NO: 257333 - RNA, 21 nt, Artificial Sequence
  Synthetic
ggguuauuugcuuucuggcac

SEQ ID NO: 257334 - RNA, 22 nt, Artificial Sequence
  Synthetic
aggguuauuugcuuucuggcac

SEQ ID NO: 257335 - RNA, 23 nt, Artificial Sequence
  Synthetic
aaggguuauuugcuuucuggcac

SEQ ID NO: 257336 - RNA, 24 nt, Artificial Sequence
  Synthetic
aaaggguuauuugcuuucuggcac

SEQ ID NO: 257337 - RNA, 18 nt, Artificial Sequence
  Synthetic
ucaagugauacuuggcac

SEQ ID NO: 257338 - RNA, 19 nt, Artificial Sequence
  Synthetic
uucaagugauacuuggcac

SEQ ID NO: 257339 - RNA, 20 nt, Artificial Sequence
  Synthetic
auucaagugauacuuggcac

SEQ ID NO: 257340 - RNA, 21 nt, Artificial Sequence
  Synthetic
gauucaagugauacuuggcac

SEQ ID NO: 257341 - RNA, 22 nt, Artificial Sequence
  Synthetic
agauucaagugauacuuggcac

SEQ ID NO: 257342 - RNA, 23 nt, Artificial Sequence
  Synthetic
cagauucaagugauacuuggcac

SEQ ID NO: 257343 - RNA, 24 nt, Artificial Sequence
  Synthetic
acagauucaagugauacuuggcac

SEQ ID NO: 257344 - RNA, 18 nt, Artificial Sequence
  Synthetic
acauaacauuuaaugcac

SEQ ID NO: 257345 - RNA, 19 nt, Artificial Sequence
  Synthetic
aacauaacauuuaaugcac

SEQ ID NO: 257346 - RNA, 20 nt, Artificial Sequence
  Synthetic
aaacauaacauuuaaugcac

SEQ ID NO: 257347 - RNA, 21 nt, Artificial Sequence
  Synthetic
uaaacauaacauuuaaugcac

SEQ ID NO: 257348 - RNA, 22 nt, Artificial Sequence
  Synthetic
guaaacauaacauuuaaugcac

SEQ ID NO: 257349 - RNA, 23 nt, Artificial Sequence
  Synthetic
uguaaacauaacauuuaaugcac

SEQ ID NO: 257350 - RNA, 24 nt, Artificial Sequence
  Synthetic
guguaaacauaacauuuaaugcac

SEQ ID NO: 257351 - RNA, 18 nt, Artificial Sequence
  Synthetic
aaauuuaaccccaugcac

SEQ ID NO: 257352 - RNA, 19 nt, Artificial Sequence
  Synthetic
gaaauuuaaccccaugcac

SEQ ID NO: 257353 - RNA, 20 nt, Artificial Sequence
  Synthetic
ugaaauuuaaccccaugcac

SEQ ID NO: 257354 - RNA, 21 nt, Artificial Sequence
  Synthetic
gugaaauuuaaccccaugcac

SEQ ID NO: 257355 - RNA, 22 nt, Artificial Sequence
  Synthetic
ugugaaauuuaaccccaugcac

SEQ ID NO: 257356 - RNA, 23 nt, Artificial Sequence
  Synthetic
augugaaauuuaaccccaugcac

SEQ ID NO: 257357 - RNA, 24 nt, Artificial Sequence
  Synthetic
aaugugaaauuuaaccccaugcac

SEQ ID NO: 257358 - RNA, 18 nt, Artificial Sequence
  Synthetic
aucagagauuggaugcac

SEQ ID NO: 257359 - RNA, 19 nt, Artificial Sequence
  Synthetic
gaucagagauuggaugcac

SEQ ID NO: 257360 - RNA, 20 nt, Artificial Sequence
  Synthetic
ggaucagagauuggaugcac

SEQ ID NO: 257361 - RNA, 21 nt, Artificial Sequence
  Synthetic
gggaucagagauuggaugcac

SEQ ID NO: 257362 - RNA, 22 nt, Artificial Sequence
  Synthetic
agggaucagagauuggaugcac

SEQ ID NO: 257363 - RNA, 23 nt, Artificial Sequence
  Synthetic
uagggaucagagauuggaugcac

SEQ ID NO: 257364 - RNA, 24 nt, Artificial Sequence
  Synthetic
cuagggaucagagauuggaugcac

SEQ ID NO: 257365 - RNA, 18 nt, Artificial Sequence
  Synthetic
uuaaccuugcuuaugcac

SEQ ID NO: 257366 - RNA, 19 nt, Artificial Sequence
  Synthetic
uuuaaccuugcuuaugcac

SEQ ID NO: 257367 - RNA, 20 nt, Artificial Sequence
  Synthetic
uuuuaaccuugcuuaugcac

SEQ ID NO: 257368 - RNA, 21 nt, Artificial Sequence
  Synthetic
auuuuaaccuugcuuaugcac

SEQ ID NO: 257369 - RNA, 22 nt, Artificial Sequence
  Synthetic
gauuuuaaccuugcuuaugcac

SEQ ID NO: 257370 - RNA, 23 nt, Artificial Sequence
  Synthetic
ggauuuuaaccuugcuuaugcac

SEQ ID NO: 257371 - RNA, 24 nt, Artificial Sequence
  Synthetic
uggauuuuaaccuugcuuaugcac

SEQ ID NO: 257372 - RNA, 18 nt, Artificial Sequence
  Synthetic
ugagcuagaggacugcac

SEQ ID NO: 257373 - RNA, 19 nt, Artificial Sequence
  Synthetic
augagcuagaggacugcac

SEQ ID NO: 257374 - RNA, 20 nt, Artificial Sequence
  Synthetic
aaugagcuagaggacugcac

SEQ ID NO: 257375 - RNA, 21 nt, Artificial Sequence
  Synthetic
gaaugagcuagaggacugcac

SEQ ID NO: 257376 - RNA, 22 nt, Artificial Sequence
  Synthetic
ggaaugagcuagaggacugcac

SEQ ID NO: 257377 - RNA, 23 nt, Artificial Sequence
  Synthetic
gggaaugagcuagaggacugcac

SEQ ID NO: 257378 - RNA, 24 nt, Artificial Sequence
  Synthetic
ggggaaugagcuagaggacugcac

SEQ ID NO: 257379 - RNA, 18 nt, Artificial Sequence
  Synthetic
cuaugugugucucugcac

SEQ ID NO: 257380 - RNA, 19 nt, Artificial Sequence
  Synthetic
ccuaugugugucucugcac

SEQ ID NO: 257381 - RNA, 20 nt, Artificial Sequence
  Synthetic
gccuaugugugucucugcac

SEQ ID NO: 257382 - RNA, 24 nt, Artificial Sequence
  Synthetic
uugagccuaugugugucucugcac

SEQ ID NO: 257383 - RNA, 18 nt, Artificial Sequence
  Synthetic
uauuauuuuaaagugcac

SEQ ID NO: 257384 - RNA, 19 nt, Artificial Sequence
  Synthetic
auauuauuuuaaagugcac

SEQ ID NO: 257385 - RNA, 20 nt, Artificial Sequence
  Synthetic
cauauuauuuuaaagugcac

SEQ ID NO: 257386 - RNA, 21 nt, Artificial Sequence
  Synthetic
acauauuauuuuaaagugcac

SEQ ID NO: 257387 - RNA, 22 nt, Artificial Sequence
  Synthetic
uacauauuauuuuaaagugcac

SEQ ID NO: 257388 - RNA, 23 nt, Artificial Sequence
  Synthetic
auacauauuauuuuaaagugcac

SEQ ID NO: 257389 - RNA, 24 nt, Artificial Sequence
  Synthetic
aauacauauuauuuuaaagugcac

SEQ ID NO: 257390 - RNA, 18 nt, Artificial Sequence
  Synthetic
cauucuuaucaagugcac

SEQ ID NO: 257391 - RNA, 19 nt, Artificial Sequence
  Synthetic
acauucuuaucaagugcac

SEQ ID NO: 257392 - RNA, 20 nt, Artificial Sequence
  Synthetic
uacauucuuaucaagugcac

SEQ ID NO: 257393 - RNA, 21 nt, Artificial Sequence
  Synthetic
auacauucuuaucaagugcac

SEQ ID NO: 257394 - RNA, 22 nt, Artificial Sequence
  Synthetic
uauacauucuuaucaagugcac

SEQ ID NO: 257395 - RNA, 23 nt, Artificial Sequence
  Synthetic
auauacauucuuaucaagugcac

SEQ ID NO: 257396 - RNA, 24 nt, Artificial Sequence
  Synthetic
aauauacauucuuaucaagugcac

SEQ ID NO: 257397 - RNA, 18 nt, Artificial Sequence
  Synthetic
augacaucucaggugcac

SEQ ID NO: 257398 - RNA, 19 nt, Artificial Sequence
  Synthetic
caugacaucucaggugcac

SEQ ID NO: 257399 - RNA, 20 nt, Artificial Sequence
  Synthetic
ucaugacaucucaggugcac

SEQ ID NO: 257400 - RNA, 21 nt, Artificial Sequence
  Synthetic
cucaugacaucucaggugcac

SEQ ID NO: 257401 - RNA, 22 nt, Artificial Sequence
  Synthetic
ucucaugacaucucaggugcac

SEQ ID NO: 257402 - RNA, 23 nt, Artificial Sequence
  Synthetic
cucucaugacaucucaggugcac

SEQ ID NO: 257403 - RNA, 24 nt, Artificial Sequence
  Synthetic
ucucucaugacaucucaggugcac

SEQ ID NO: 257404 - RNA, 18 nt, Artificial Sequence
  Synthetic
aucacuggacaugugcac

SEQ ID NO: 257405 - RNA, 19 nt, Artificial Sequence
  Synthetic
aaucacuggacaugugcac

SEQ ID NO: 257406 - RNA, 20 nt, Artificial Sequence
  Synthetic
gaaucacuggacaugugcac

SEQ ID NO: 257407 - RNA, 21 nt, Artificial Sequence
  Synthetic
ugaaucacuggacaugugcac

SEQ ID NO: 257408 - RNA, 22 nt, Artificial Sequence
  Synthetic
augaaucacuggacaugugcac

SEQ ID NO: 257409 - RNA, 23 nt, Artificial Sequence
  Synthetic
aaugaaucacuggacaugugcac

SEQ ID NO: 257410 - RNA, 24 nt, Artificial Sequence
  Synthetic
aaaugaaucacuggacaugugcac

SEQ ID NO: 257411 - RNA, 18 nt, Artificial Sequence
  Synthetic
aaccugcauguugugcac

SEQ ID NO: 257412 - RNA, 19 nt, Artificial Sequence
  Synthetic
uaaccugcauguugugcac

SEQ ID NO: 257413 - RNA, 20 nt, Artificial Sequence
  Synthetic
cuaaccugcauguugugcac

SEQ ID NO: 257414 - RNA, 21 nt, Artificial Sequence
  Synthetic
acuaaccugcauguugugcac

SEQ ID NO: 257415 - RNA, 22 nt, Artificial Sequence
  Synthetic
aacuaaccugcauguugugcac

SEQ ID NO: 257416 - RNA, 23 nt, Artificial Sequence
  Synthetic
uaacuaaccugcauguugugcac

SEQ ID NO: 257417 - RNA, 24 nt, Artificial Sequence
  Synthetic
guaacuaaccugcauguugugcac

SEQ ID NO: 257418 - RNA, 18 nt, Artificial Sequence
  Synthetic
uugguccuaaaauugcac

SEQ ID NO: 257419 - RNA, 19 nt, Artificial Sequence
  Synthetic
auugguccuaaaauugcac

SEQ ID NO: 257420 - RNA, 20 nt, Artificial Sequence
  Synthetic
cauugguccuaaaauugcac

SEQ ID NO: 257421 - RNA, 21 nt, Artificial Sequence
  Synthetic
ucauugguccuaaaauugcac

SEQ ID NO: 257422 - RNA, 22 nt, Artificial Sequence
  Synthetic
uucauugguccuaaaauugcac

SEQ ID NO: 257423 - RNA, 23 nt, Artificial Sequence
  Synthetic
uuucauugguccuaaaauugcac

SEQ ID NO: 257424 - RNA, 24 nt, Artificial Sequence
  Synthetic
uuuucauugguccuaaaauugcac

SEQ ID NO: 257425 - RNA, 18 nt, Artificial Sequence
  Synthetic
gcaauuaggagauugcac

SEQ ID NO: 257426 - RNA, 19 nt, Artificial Sequence
  Synthetic
ugcaauuaggagauugcac

SEQ ID NO: 257427 - RNA, 20 nt, Artificial Sequence
  Synthetic
augcaauuaggagauugcac

SEQ ID NO: 257428 - RNA, 21 nt, Artificial Sequence
  Synthetic
gaugcaauuaggagauugcac

SEQ ID NO: 257429 - RNA, 22 nt, Artificial Sequence
  Synthetic
agaugcaauuaggagauugcac

SEQ ID NO: 257430 - RNA, 23 nt, Artificial Sequence
  Synthetic
aagaugcaauuaggagauugcac

SEQ ID NO: 257431 - RNA, 24 nt, Artificial Sequence
  Synthetic
aaagaugcaauuaggagauugcac

SEQ ID NO: 257432 - RNA, 18 nt, Artificial Sequence
  Synthetic
ugaaaugaagcuuugcac

SEQ ID NO: 257433 - RNA, 19 nt, Artificial Sequence
  Synthetic
uugaaaugaagcuuugcac

SEQ ID NO: 257434 - RNA, 20 nt, Artificial Sequence
  Synthetic
uuugaaaugaagcuuugcac

SEQ ID NO: 257435 - RNA, 21 nt, Artificial Sequence
  Synthetic
uuuugaaaugaagcuuugcac

SEQ ID NO: 257436 - RNA, 22 nt, Artificial Sequence
  Synthetic
auuuugaaaugaagcuuugcac

SEQ ID NO: 257437 - RNA, 23 nt, Artificial Sequence
  Synthetic
gauuuugaaaugaagcuuugcac

SEQ ID NO: 257438 - RNA, 24 nt, Artificial Sequence
  Synthetic
agauuuugaaaugaagcuuugcac

SEQ ID NO: 257439 - RNA, 18 nt, Artificial Sequence
  Synthetic
uagaguugaaguuugcac

SEQ ID NO: 257440 - RNA, 19 nt, Artificial Sequence
  Synthetic
guagaguugaaguuugcac

SEQ ID NO: 257441 - RNA, 20 nt, Artificial Sequence
  Synthetic
gguagaguugaaguuugcac

SEQ ID NO: 257442 - RNA, 21 nt, Artificial Sequence
  Synthetic
agguagaguugaaguuugcac

SEQ ID NO: 257443 - RNA, 22 nt, Artificial Sequence
  Synthetic
uagguagaguugaaguuugcac

SEQ ID NO: 257444 - RNA, 23 nt, Artificial Sequence
  Synthetic
uuagguagaguugaaguuugcac

SEQ ID NO: 257445 - RNA, 24 nt, Artificial Sequence
  Synthetic
cuuagguagaguugaaguuugcac

SEQ ID NO: 257446 - RNA, 18 nt, Artificial Sequence
  Synthetic
cuguuccaaauuuugcac

SEQ ID NO: 257447 - RNA, 19 nt, Artificial Sequence
  Synthetic
ucuguuccaaauuuugcac

SEQ ID NO: 257448 - RNA, 20 nt, Artificial Sequence
  Synthetic
uucuguuccaaauuuugcac

SEQ ID NO: 257449 - RNA, 21 nt, Artificial Sequence
  Synthetic
uuucuguuccaaauuuugcac

SEQ ID NO: 257450 - RNA, 22 nt, Artificial Sequence
  Synthetic
auuucuguuccaaauuuugcac

SEQ ID NO: 257451 - RNA, 23 nt, Artificial Sequence
  Synthetic
uauuucuguuccaaauuuugcac

SEQ ID NO: 257452 - RNA, 24 nt, Artificial Sequence
  Synthetic
uuauuucuguuccaaauuuugcac

SEQ ID NO: 257453 - RNA, 18 nt, Artificial Sequence
  Synthetic
uuuaaaaaauuaaaucac

SEQ ID NO: 257454 - RNA, 19 nt, Artificial Sequence
  Synthetic
uuuuaaaaaauuaaaucac

SEQ ID NO: 257455 - RNA, 20 nt, Artificial Sequence
  Synthetic
uuuuuaaaaaauuaaaucac

SEQ ID NO: 257456 - RNA, 21 nt, Artificial Sequence
  Synthetic
uuuuuuaaaaaauuaaaucac

SEQ ID NO: 257457 - RNA, 22 nt, Artificial Sequence
  Synthetic
uuuuuuuaaaaaauuaaaucac

SEQ ID NO: 257458 - RNA, 23 nt, Artificial Sequence
  Synthetic
guuuuuuuaaaaaauuaaaucac

SEQ ID NO: 257459 - RNA, 24 nt, Artificial Sequence
  Synthetic
uguuuuuuuaaaaaauuaaaucac

SEQ ID NO: 257460 - RNA, 18 nt, Artificial Sequence
  Synthetic
uauugguaauuaaaucac

SEQ ID NO: 257461 - RNA, 19 nt, Artificial Sequence
  Synthetic
uuauugguaauuaaaucac

SEQ ID NO: 257462 - RNA, 20 nt, Artificial Sequence
  Synthetic
auuauugguaauuaaaucac

SEQ ID NO: 257463 - RNA, 21 nt, Artificial Sequence
  Synthetic
gauuauugguaauuaaaucac

SEQ ID NO: 257464 - RNA, 22 nt, Artificial Sequence
  Synthetic
agauuauugguaauuaaaucac

SEQ ID NO: 257465 - RNA, 23 nt, Artificial Sequence
  Synthetic
aagauuauugguaauuaaaucac

SEQ ID NO: 257466 - RNA, 24 nt, Artificial Sequence
  Synthetic
aaagauuauugguaauuaaaucac

SEQ ID NO: 257467 - RNA, 18 nt, Artificial Sequence
  Synthetic
agacuuauucacaaucac

SEQ ID NO: 257468 - RNA, 19 nt, Artificial Sequence
  Synthetic
gagacuuauucacaaucac

SEQ ID NO: 257469 - RNA, 20 nt, Artificial Sequence
  Synthetic
ugagacuuauucacaaucac

SEQ ID NO: 257470 - RNA, 21 nt, Artificial Sequence
  Synthetic
augagacuuauucacaaucac

SEQ ID NO: 257471 - RNA, 22 nt, Artificial Sequence
  Synthetic
caugagacuuauucacaaucac

SEQ ID NO: 257472 - RNA, 23 nt, Artificial Sequence
  Synthetic
ucaugagacuuauucacaaucac

SEQ ID NO: 257473 - RNA, 24 nt, Artificial Sequence
  Synthetic
cucaugagacuuauucacaaucac

SEQ ID NO: 257474 - RNA, 18 nt, Artificial Sequence
  Synthetic
agcauacaucagaaucac

SEQ ID NO: 257475 - RNA, 19 nt, Artificial Sequence
  Synthetic
cagcauacaucagaaucac

SEQ ID NO: 257476 - RNA, 20 nt, Artificial Sequence
  Synthetic
ucagcauacaucagaaucac

SEQ ID NO: 257477 - RNA, 21 nt, Artificial Sequence
  Synthetic
cucagcauacaucagaaucac

SEQ ID NO: 257478 - RNA, 22 nt, Artificial Sequence
  Synthetic
ccucagcauacaucagaaucac

SEQ ID NO: 257479 - RNA, 23 nt, Artificial Sequence
  Synthetic
accucagcauacaucagaaucac

SEQ ID NO: 257480 - RNA, 24 nt, Artificial Sequence
  Synthetic
caccucagcauacaucagaaucac

SEQ ID NO: 257481 - RNA, 18 nt, Artificial Sequence
  Synthetic
gaugugcaucagaaucac

SEQ ID NO: 257482 - RNA, 19 nt, Artificial Sequence
  Synthetic
ugaugugcaucagaaucac

SEQ ID NO: 257483 - RNA, 20 nt, Artificial Sequence
  Synthetic
uugaugugcaucagaaucac

SEQ ID NO: 257484 - RNA, 21 nt, Artificial Sequence
  Synthetic
uuugaugugcaucagaaucac

SEQ ID NO: 257485 - RNA, 22 nt, Artificial Sequence
  Synthetic
cuuugaugugcaucagaaucac

SEQ ID NO: 257486 - RNA, 23 nt, Artificial Sequence
  Synthetic
acuuugaugugcaucagaaucac

SEQ ID NO: 257487 - RNA, 24 nt, Artificial Sequence
  Synthetic
aacuuugaugugcaucagaaucac

SEQ ID NO: 257488 - RNA, 18 nt, Artificial Sequence
  Synthetic
cugaggcacgagaaucac

SEQ ID NO: 257489 - RNA, 19 nt, Artificial Sequence
  Synthetic
ccugaggcacgagaaucac

SEQ ID NO: 257490 - RNA, 20 nt, Artificial Sequence
  Synthetic
gccugaggcacgagaaucac

SEQ ID NO: 257491 - RNA, 21 nt, Artificial Sequence
  Synthetic
agccugaggcacgagaaucac

SEQ ID NO: 257492 - RNA, 22 nt, Artificial Sequence
  Synthetic
gagccugaggcacgagaaucac

SEQ ID NO: 257493 - RNA, 23 nt, Artificial Sequence
  Synthetic
ggagccugaggcacgagaaucac

SEQ ID NO: 257494 - RNA, 24 nt, Artificial Sequence
  Synthetic
aggagccugaggcacgagaaucac

SEQ ID NO: 257495 - RNA, 18 nt, Artificial Sequence
  Synthetic
cugaagcaggagaaucac

SEQ ID NO: 257496 - RNA, 19 nt, Artificial Sequence
  Synthetic
gcugaagcaggagaaucac

SEQ ID NO: 257497 - RNA, 20 nt, Artificial Sequence
  Synthetic
ggcugaagcaggagaaucac

SEQ ID NO: 257498 - RNA, 21 nt, Artificial Sequence
  Synthetic
aggcugaagcaggagaaucac

SEQ ID NO: 257499 - RNA, 22 nt, Artificial Sequence
  Synthetic
gaggcugaagcaggagaaucac

SEQ ID NO: 257500 - RNA, 23 nt, Artificial Sequence
  Synthetic
ggaggcugaagcaggagaaucac

SEQ ID NO: 257501 - RNA, 24 nt, Artificial Sequence
  Synthetic
gggaggcugaagcaggagaaucac

SEQ ID NO: 257502 - RNA, 24 nt, Artificial Sequence
  Synthetic
aggaggcugaggcaggagaaucac

SEQ ID NO: 257503 - RNA, 18 nt, Artificial Sequence
  Synthetic
cugagguaggagaaucac

SEQ ID NO: 257504 - RNA, 19 nt, Artificial Sequence
  Synthetic
gcugagguaggagaaucac

SEQ ID NO: 257505 - RNA, 20 nt, Artificial Sequence
  Synthetic
ggcugagguaggagaaucac

SEQ ID NO: 257506 - RNA, 21 nt, Artificial Sequence
  Synthetic
aggcugagguaggagaaucac

SEQ ID NO: 257507 - RNA, 22 nt, Artificial Sequence
  Synthetic
gaggcugagguaggagaaucac

SEQ ID NO: 257508 - RNA, 23 nt, Artificial Sequence
  Synthetic
ggaggcugagguaggagaaucac

SEQ ID NO: 257509 - RNA, 24 nt, Artificial Sequence
  Synthetic
gggaggcugagguaggagaaucac

SEQ ID NO: 257510 - RNA, 18 nt, Artificial Sequence
  Synthetic
gcugcacguuagaaucac

SEQ ID NO: 257511 - RNA, 19 nt, Artificial Sequence
  Synthetic
ggcugcacguuagaaucac

SEQ ID NO: 257512 - RNA, 20 nt, Artificial Sequence
  Synthetic
uggcugcacguuagaaucac

SEQ ID NO: 257513 - RNA, 21 nt, Artificial Sequence
  Synthetic
cuggcugcacguuagaaucac

SEQ ID NO: 257514 - RNA, 22 nt, Artificial Sequence
  Synthetic
ccuggcugcacguuagaaucac

SEQ ID NO: 257515 - RNA, 23 nt, Artificial Sequence
  Synthetic
cccuggcugcacguuagaaucac

SEQ ID NO: 257516 - RNA, 24 nt, Artificial Sequence
  Synthetic
ucccuggcugcacguuagaaucac

SEQ ID NO: 257517 - RNA, 18 nt, Artificial Sequence
  Synthetic
cacagaaaaaggaaucac

SEQ ID NO: 257518 - RNA, 19 nt, Artificial Sequence
  Synthetic
acacagaaaaaggaaucac

SEQ ID NO: 257519 - RNA, 20 nt, Artificial Sequence
  Synthetic
aacacagaaaaaggaaucac

SEQ ID NO: 257520 - RNA, 21 nt, Artificial Sequence
  Synthetic
aaacacagaaaaaggaaucac

SEQ ID NO: 257521 - RNA, 22 nt, Artificial Sequence
  Synthetic
aaaacacagaaaaaggaaucac

SEQ ID NO: 257522 - RNA, 23 nt, Artificial Sequence
  Synthetic
uaaaacacagaaaaaggaaucac

SEQ ID NO: 257523 - RNA, 24 nt, Artificial Sequence
  Synthetic
auaaaacacagaaaaaggaaucac

SEQ ID NO: 257524 - RNA, 18 nt, Artificial Sequence
  Synthetic
auugcguaucugaaucac

SEQ ID NO: 257525 - RNA, 19 nt, Artificial Sequence
  Synthetic
gauugcguaucugaaucac

SEQ ID NO: 257526 - RNA, 20 nt, Artificial Sequence
  Synthetic
ugauugcguaucugaaucac

SEQ ID NO: 257527 - RNA, 21 nt, Artificial Sequence
  Synthetic
uugauugcguaucugaaucac

SEQ ID NO: 257528 - RNA, 22 nt, Artificial Sequence
  Synthetic
uuugauugcguaucugaaucac

SEQ ID NO: 257529 - RNA, 23 nt, Artificial Sequence
  Synthetic
cuuugauugcguaucugaaucac

SEQ ID NO: 257530 - RNA, 24 nt, Artificial Sequence
  Synthetic
gcuuugauugcguaucugaaucac

SEQ ID NO: 257531 - RNA, 18 nt, Artificial Sequence
  Synthetic
aaguucaaaaguaaucac

SEQ ID NO: 257532 - RNA, 19 nt, Artificial Sequence
  Synthetic
caaguucaaaaguaaucac

SEQ ID NO: 257533 - RNA, 20 nt, Artificial Sequence
  Synthetic
ccaaguucaaaaguaaucac

SEQ ID NO: 257534 - RNA, 21 nt, Artificial Sequence
  Synthetic
accaaguucaaaaguaaucac

SEQ ID NO: 257535 - RNA, 22 nt, Artificial Sequence
  Synthetic
uaccaaguucaaaaguaaucac

SEQ ID NO: 257536 - RNA, 23 nt, Artificial Sequence
  Synthetic
cuaccaaguucaaaaguaaucac

SEQ ID NO: 257537 - RNA, 24 nt, Artificial Sequence
  Synthetic
gcuaccaaguucaaaaguaaucac

SEQ ID NO: 257538 - RNA, 18 nt, Artificial Sequence
  Synthetic
uucucaaaauguaaucac

SEQ ID NO: 257539 - RNA, 19 nt, Artificial Sequence
  Synthetic
cuucucaaaauguaaucac

SEQ ID NO: 257540 - RNA, 20 nt, Artificial Sequence
  Synthetic
gcuucucaaaauguaaucac

SEQ ID NO: 257541 - RNA, 21 nt, Artificial Sequence
  Synthetic
ugcuucucaaaauguaaucac

SEQ ID NO: 257542 - RNA, 22 nt, Artificial Sequence
  Synthetic
uugcuucucaaaauguaaucac

SEQ ID NO: 257543 - RNA, 23 nt, Artificial Sequence
  Synthetic
auugcuucucaaaauguaaucac

SEQ ID NO: 257544 - RNA, 24 nt, Artificial Sequence
  Synthetic
uauugcuucucaaaauguaaucac

SEQ ID NO: 257545 - RNA, 18 nt, Artificial Sequence
  Synthetic
uacuuucaucuuaaucac

SEQ ID NO: 257546 - RNA, 19 nt, Artificial Sequence
  Synthetic
auacuuucaucuuaaucac

SEQ ID NO: 257547 - RNA, 20 nt, Artificial Sequence
  Synthetic
aauacuuucaucuuaaucac

SEQ ID NO: 257548 - RNA, 21 nt, Artificial Sequence
  Synthetic
aaauacuuucaucuuaaucac

SEQ ID NO: 257549 - RNA, 22 nt, Artificial Sequence
  Synthetic
gaaauacuuucaucuuaaucac

SEQ ID NO: 257550 - RNA, 23 nt, Artificial Sequence
  Synthetic
ugaaauacuuucaucuuaaucac

SEQ ID NO: 257551 - RNA, 24 nt, Artificial Sequence
  Synthetic
cugaaauacuuucaucuuaaucac

SEQ ID NO: 257552 - RNA, 18 nt, Artificial Sequence
  Synthetic
gaaguaaggaaacaucac

SEQ ID NO: 257553 - RNA, 19 nt, Artificial Sequence
  Synthetic
ggaaguaaggaaacaucac

SEQ ID NO: 257554 - RNA, 20 nt, Artificial Sequence
  Synthetic
uggaaguaaggaaacaucac

SEQ ID NO: 257555 - RNA, 21 nt, Artificial Sequence
  Synthetic
cuggaaguaaggaaacaucac

SEQ ID NO: 257556 - RNA, 22 nt, Artificial Sequence
  Synthetic
acuggaaguaaggaaacaucac

SEQ ID NO: 257557 - RNA, 23 nt, Artificial Sequence
  Synthetic
cacuggaaguaaggaaacaucac

SEQ ID NO: 257558 - RNA, 24 nt, Artificial Sequence
  Synthetic
ucacuggaaguaaggaaacaucac

SEQ ID NO: 257559 - RNA, 18 nt, Artificial Sequence
  Synthetic
uauuuagcuucacaucac

SEQ ID NO: 257560 - RNA, 19 nt, Artificial Sequence
  Synthetic
uuauuuagcuucacaucac

SEQ ID NO: 257561 - RNA, 20 nt, Artificial Sequence
  Synthetic
auuauuuagcuucacaucac

SEQ ID NO: 257562 - RNA, 21 nt, Artificial Sequence
  Synthetic
cauuauuuagcuucacaucac

SEQ ID NO: 257563 - RNA, 22 nt, Artificial Sequence
  Synthetic
acauuauuuagcuucacaucac

SEQ ID NO: 257564 - RNA, 23 nt, Artificial Sequence
  Synthetic
uacauuauuuagcuucacaucac

SEQ ID NO: 257565 - RNA, 24 nt, Artificial Sequence
  Synthetic
uuacauuauuuagcuucacaucac

SEQ ID NO: 257566 - RNA, 18 nt, Artificial Sequence
  Synthetic
ccagagcacagacaucac

SEQ ID NO: 257567 - RNA, 19 nt, Artificial Sequence
  Synthetic
uccagagcacagacaucac

SEQ ID NO: 257568 - RNA, 20 nt, Artificial Sequence
  Synthetic
guccagagcacagacaucac

SEQ ID NO: 257569 - RNA, 21 nt, Artificial Sequence
  Synthetic
gguccagagcacagacaucac

SEQ ID NO: 257570 - RNA, 22 nt, Artificial Sequence
  Synthetic
ugguccagagcacagacaucac

SEQ ID NO: 257571 - RNA, 23 nt, Artificial Sequence
  Synthetic
cugguccagagcacagacaucac

SEQ ID NO: 257572 - RNA, 24 nt, Artificial Sequence
  Synthetic
ucugguccagagcacagacaucac

SEQ ID NO: 257573 - RNA, 18 nt, Artificial Sequence
  Synthetic
ugaguaaagagacaucac

SEQ ID NO: 257574 - RNA, 19 nt, Artificial Sequence
  Synthetic
gugaguaaagagacaucac

SEQ ID NO: 257575 - RNA, 20 nt, Artificial Sequence
  Synthetic
ugugaguaaagagacaucac

SEQ ID NO: 257576 - RNA, 21 nt, Artificial Sequence
  Synthetic
cugugaguaaagagacaucac

SEQ ID NO: 257577 - RNA, 22 nt, Artificial Sequence
  Synthetic
ucugugaguaaagagacaucac

SEQ ID NO: 257578 - RNA, 23 nt, Artificial Sequence
  Synthetic
uucugugaguaaagagacaucac

SEQ ID NO: 257579 - RNA, 24 nt, Artificial Sequence
  Synthetic
auucugugaguaaagagacaucac

SEQ ID NO: 257580 - RNA, 18 nt, Artificial Sequence
  Synthetic
cagcagcguuagcaucac

SEQ ID NO: 257581 - RNA, 19 nt, Artificial Sequence
  Synthetic
ucagcagcguuagcaucac

SEQ ID NO: 257582 - RNA, 20 nt, Artificial Sequence
  Synthetic
aucagcagcguuagcaucac

SEQ ID NO: 257583 - RNA, 21 nt, Artificial Sequence
  Synthetic
gaucagcagcguuagcaucac

SEQ ID NO: 257584 - RNA, 22 nt, Artificial Sequence
  Synthetic
ggaucagcagcguuagcaucac

SEQ ID NO: 257585 - RNA, 23 nt, Artificial Sequence
  Synthetic
gggaucagcagcguuagcaucac

SEQ ID NO: 257586 - RNA, 24 nt, Artificial Sequence
  Synthetic
cgggaucagcagcguuagcaucac

SEQ ID NO: 257587 - RNA, 18 nt, Artificial Sequence
  Synthetic
uagcaguaucggcaucac

SEQ ID NO: 257588 - RNA, 19 nt, Artificial Sequence
  Synthetic
cuagcaguaucggcaucac

SEQ ID NO: 257589 - RNA, 20 nt, Artificial Sequence
  Synthetic
acuagcaguaucggcaucac

SEQ ID NO: 257590 - RNA, 21 nt, Artificial Sequence
  Synthetic
gacuagcaguaucggcaucac

SEQ ID NO: 257591 - RNA, 22 nt, Artificial Sequence
  Synthetic
ggacuagcaguaucggcaucac

SEQ ID NO: 257592 - RNA, 23 nt, Artificial Sequence
  Synthetic
uggacuagcaguaucggcaucac

SEQ ID NO: 257593 - RNA, 24 nt, Artificial Sequence
  Synthetic
cuggacuagcaguaucggcaucac

SEQ ID NO: 257594 - RNA, 18 nt, Artificial Sequence
  Synthetic
caucaugcucggcaucac

SEQ ID NO: 257595 - RNA, 19 nt, Artificial Sequence
  Synthetic
ccaucaugcucggcaucac

SEQ ID NO: 257596 - RNA, 20 nt, Artificial Sequence
  Synthetic
gccaucaugcucggcaucac

SEQ ID NO: 257597 - RNA, 21 nt, Artificial Sequence
  Synthetic
ggccaucaugcucggcaucac

SEQ ID NO: 257598 - RNA, 22 nt, Artificial Sequence
  Synthetic
aggccaucaugcucggcaucac

SEQ ID NO: 257599 - RNA, 23 nt, Artificial Sequence
  Synthetic
caggccaucaugcucggcaucac

SEQ ID NO: 257600 - RNA, 24 nt, Artificial Sequence
  Synthetic
acaggccaucaugcucggcaucac

SEQ ID NO: 257601 - RNA, 18 nt, Artificial Sequence
  Synthetic
uaugugcuuucucaucac

SEQ ID NO: 257602 - RNA, 19 nt, Artificial Sequence
  Synthetic
guaugugcuuucucaucac

SEQ ID NO: 257603 - RNA, 20 nt, Artificial Sequence
  Synthetic
uguaugugcuuucucaucac

SEQ ID NO: 257604 - RNA, 21 nt, Artificial Sequence
  Synthetic
uuguaugugcuuucucaucac

SEQ ID NO: 257605 - RNA, 22 nt, Artificial Sequence
  Synthetic
uuuguaugugcuuucucaucac

SEQ ID NO: 257606 - RNA, 23 nt, Artificial Sequence
  Synthetic
uuuuguaugugcuuucucaucac

SEQ ID NO: 257607 - RNA, 24 nt, Artificial Sequence
  Synthetic
auuuuguaugugcuuucucaucac

SEQ ID NO: 257608 - RNA, 18 nt, Artificial Sequence
  Synthetic
aggcaagggcaagaucac

SEQ ID NO: 257609 - RNA, 19 nt, Artificial Sequence
  Synthetic
uaggcaagggcaagaucac

SEQ ID NO: 257610 - RNA, 20 nt, Artificial Sequence
  Synthetic
auaggcaagggcaagaucac

SEQ ID NO: 257611 - RNA, 21 nt, Artificial Sequence
  Synthetic
uauaggcaagggcaagaucac

SEQ ID NO: 257612 - RNA, 22 nt, Artificial Sequence
  Synthetic
guauaggcaagggcaagaucac

SEQ ID NO: 257613 - RNA, 23 nt, Artificial Sequence
  Synthetic
aguauaggcaagggcaagaucac

SEQ ID NO: 257614 - RNA, 24 nt, Artificial Sequence
  Synthetic
aaguauaggcaagggcaagaucac

SEQ ID NO: 257615 - RNA, 18 nt, Artificial Sequence
  Synthetic
uaacucacugaagaucac

SEQ ID NO: 257616 - RNA, 19 nt, Artificial Sequence
  Synthetic
uuaacucacugaagaucac

SEQ ID NO: 257617 - RNA, 20 nt, Artificial Sequence
  Synthetic
auuaacucacugaagaucac

SEQ ID NO: 257618 - RNA, 21 nt, Artificial Sequence
  Synthetic
aauuaacucacugaagaucac

SEQ ID NO: 257619 - RNA, 22 nt, Artificial Sequence
  Synthetic
aaauuaacucacugaagaucac

SEQ ID NO: 257620 - RNA, 23 nt, Artificial Sequence
  Synthetic
gaaauuaacucacugaagaucac

SEQ ID NO: 257621 - RNA, 24 nt, Artificial Sequence
  Synthetic
agaaauuaacucacugaagaucac

SEQ ID NO: 257622 - RNA, 18 nt, Artificial Sequence
  Synthetic
cugaggagggcagaucac

SEQ ID NO: 257623 - RNA, 19 nt, Artificial Sequence
  Synthetic
gcugaggagggcagaucac

SEQ ID NO: 257624 - RNA, 20 nt, Artificial Sequence
  Synthetic
ggcugaggagggcagaucac

SEQ ID NO: 257625 - RNA, 21 nt, Artificial Sequence
  Synthetic
aggcugaggagggcagaucac

SEQ ID NO: 257626 - RNA, 22 nt, Artificial Sequence
  Synthetic
gaggcugaggagggcagaucac

SEQ ID NO: 257627 - RNA, 23 nt, Artificial Sequence
  Synthetic
ggaggcugaggagggcagaucac

SEQ ID NO: 257628 - RNA, 24 nt, Artificial Sequence
  Synthetic
gggaggcugaggagggcagaucac

SEQ ID NO: 257629 - RNA, 18 nt, Artificial Sequence
  Synthetic
ccgaggugggcagaucac

SEQ ID NO: 257630 - RNA, 19 nt, Artificial Sequence
  Synthetic
gccgaggugggcagaucac

SEQ ID NO: 257631 - RNA, 20 nt, Artificial Sequence
  Synthetic
ggccgaggugggcagaucac

SEQ ID NO: 257632 - RNA, 21 nt, Artificial Sequence
  Synthetic
aggccgaggugggcagaucac

SEQ ID NO: 257633 - RNA, 22 nt, Artificial Sequence
  Synthetic
gaggccgaggugggcagaucac

SEQ ID NO: 257634 - RNA, 23 nt, Artificial Sequence
  Synthetic
agaggccgaggugggcagaucac

SEQ ID NO: 257635 - RNA, 24 nt, Artificial Sequence
  Synthetic
gagaggccgaggugggcagaucac

SEQ ID NO: 257636 - RNA, 18 nt, Artificial Sequence
  Synthetic
cugaggugggcagaucac

SEQ ID NO: 257637 - RNA, 19 nt, Artificial Sequence
  Synthetic
gcugaggugggcagaucac

SEQ ID NO: 257638 - RNA, 20 nt, Artificial Sequence
  Synthetic
ggcugaggugggcagaucac

SEQ ID NO: 257639 - RNA, 18 nt, Artificial Sequence
  Synthetic
aacacuuguggagaucac

SEQ ID NO: 257640 - RNA, 19 nt, Artificial Sequence
  Synthetic
caacacuuguggagaucac

SEQ ID NO: 257641 - RNA, 20 nt, Artificial Sequence
  Synthetic
ccaacacuuguggagaucac

SEQ ID NO: 257642 - RNA, 21 nt, Artificial Sequence
  Synthetic
uccaacacuuguggagaucac

SEQ ID NO: 257643 - RNA, 22 nt, Artificial Sequence
  Synthetic
uuccaacacuuguggagaucac

SEQ ID NO: 257644 - RNA, 23 nt, Artificial Sequence
  Synthetic
cuuccaacacuuguggagaucac

SEQ ID NO: 257645 - RNA, 24 nt, Artificial Sequence
  Synthetic
ccuuccaacacuuguggagaucac

SEQ ID NO: 257646 - RNA, 18 nt, Artificial Sequence
  Synthetic
auugaacaaugagaucac

SEQ ID NO: 257647 - RNA, 19 nt, Artificial Sequence
  Synthetic
aauugaacaaugagaucac

SEQ ID NO: 257648 - RNA, 20 nt, Artificial Sequence
  Synthetic
gaauugaacaaugagaucac

SEQ ID NO: 257649 - RNA, 21 nt, Artificial Sequence
  Synthetic
ggaauugaacaaugagaucac

SEQ ID NO: 257650 - RNA, 22 nt, Artificial Sequence
  Synthetic
gggaauugaacaaugagaucac

SEQ ID NO: 257651 - RNA, 23 nt, Artificial Sequence
  Synthetic
ugggaauugaacaaugagaucac

SEQ ID NO: 257652 - RNA, 24 nt, Artificial Sequence
  Synthetic
gugggaauugaacaaugagaucac

SEQ ID NO: 257653 - RNA, 18 nt, Artificial Sequence
  Synthetic
cugagguagaaggaucac

SEQ ID NO: 257654 - RNA, 19 nt, Artificial Sequence
  Synthetic
ccugagguagaaggaucac

SEQ ID NO: 257655 - RNA, 20 nt, Artificial Sequence
  Synthetic
gccugagguagaaggaucac

SEQ ID NO: 257656 - RNA, 21 nt, Artificial Sequence
  Synthetic
agccugagguagaaggaucac

SEQ ID NO: 257657 - RNA, 22 nt, Artificial Sequence
  Synthetic
gagccugagguagaaggaucac

SEQ ID NO: 257658 - RNA, 23 nt, Artificial Sequence
  Synthetic
ggagccugagguagaaggaucac

SEQ ID NO: 257659 - RNA, 24 nt, Artificial Sequence
  Synthetic
gggagccugagguagaaggaucac

SEQ ID NO: 257660 - RNA, 18 nt, Artificial Sequence
  Synthetic
ccgaggcugaaggaucac

SEQ ID NO: 257661 - RNA, 19 nt, Artificial Sequence
  Synthetic
gccgaggcugaaggaucac

SEQ ID NO: 257662 - RNA, 20 nt, Artificial Sequence
  Synthetic
ggccgaggcugaaggaucac

SEQ ID NO: 257663 - RNA, 21 nt, Artificial Sequence
  Synthetic
aggccgaggcugaaggaucac

SEQ ID NO: 257664 - RNA, 22 nt, Artificial Sequence
  Synthetic
gaggccgaggcugaaggaucac

SEQ ID NO: 257665 - RNA, 23 nt, Artificial Sequence
  Synthetic
ggaggccgaggcugaaggaucac

SEQ ID NO: 257666 - RNA, 24 nt, Artificial Sequence
  Synthetic
aggaggccgaggcugaaggaucac

SEQ ID NO: 257667 - RNA, 18 nt, Artificial Sequence
  Synthetic
cugacacaggaggaucac

SEQ ID NO: 257668 - RNA, 19 nt, Artificial Sequence
  Synthetic
gcugacacaggaggaucac

SEQ ID NO: 257669 - RNA, 20 nt, Artificial Sequence
  Synthetic
ggcugacacaggaggaucac

SEQ ID NO: 257670 - RNA, 21 nt, Artificial Sequence
  Synthetic
aggcugacacaggaggaucac

SEQ ID NO: 257671 - RNA, 22 nt, Artificial Sequence
  Synthetic
gaggcugacacaggaggaucac

SEQ ID NO: 257672 - RNA, 23 nt, Artificial Sequence
  Synthetic
ggaggcugacacaggaggaucac

SEQ ID NO: 257673 - RNA, 24 nt, Artificial Sequence
  Synthetic
gggaggcugacacaggaggaucac

SEQ ID NO: 257674 - RNA, 18 nt, Artificial Sequence
  Synthetic
cuaaagcaggaggaucac

SEQ ID NO: 257675 - RNA, 19 nt, Artificial Sequence
  Synthetic
gcuaaagcaggaggaucac

SEQ ID NO: 257676 - RNA, 20 nt, Artificial Sequence
  Synthetic
ggcuaaagcaggaggaucac

SEQ ID NO: 257677 - RNA, 21 nt, Artificial Sequence
  Synthetic
aggcuaaagcaggaggaucac

SEQ ID NO: 257678 - RNA, 22 nt, Artificial Sequence
  Synthetic
gaggcuaaagcaggaggaucac

SEQ ID NO: 257679 - RNA, 23 nt, Artificial Sequence
  Synthetic
ggaggcuaaagcaggaggaucac

SEQ ID NO: 257680 - RNA, 24 nt, Artificial Sequence
  Synthetic
gggaggcuaaagcaggaggaucac

SEQ ID NO: 257681 - RNA, 18 nt, Artificial Sequence
  Synthetic
ccgaagugggaggaucac

SEQ ID NO: 257682 - RNA, 19 nt, Artificial Sequence
  Synthetic
gccgaagugggaggaucac

SEQ ID NO: 257683 - RNA, 20 nt, Artificial Sequence
  Synthetic
ggccgaagugggaggaucac

SEQ ID NO: 257684 - RNA, 21 nt, Artificial Sequence
  Synthetic
aggccgaagugggaggaucac

SEQ ID NO: 257685 - RNA, 22 nt, Artificial Sequence
  Synthetic
gaggccgaagugggaggaucac

SEQ ID NO: 257686 - RNA, 23 nt, Artificial Sequence
  Synthetic
ggaggccgaagugggaggaucac

SEQ ID NO: 257687 - RNA, 24 nt, Artificial Sequence
  Synthetic
gggaggccgaagugggaggaucac

SEQ ID NO: 257688 - RNA, 18 nt, Artificial Sequence
  Synthetic
ugggggugggaggaucac

SEQ ID NO: 257689 - RNA, 19 nt, Artificial Sequence
  Synthetic
gugggggugggaggaucac

SEQ ID NO: 257690 - RNA, 20 nt, Artificial Sequence
  Synthetic
ggugggggugggaggaucac

SEQ ID NO: 257691 - RNA, 21 nt, Artificial Sequence
  Synthetic
aggugggggugggaggaucac

SEQ ID NO: 257692 - RNA, 22 nt, Artificial Sequence
  Synthetic
gaggugggggugggaggaucac

SEQ ID NO: 257693 - RNA, 23 nt, Artificial Sequence
  Synthetic
cgaggugggggugggaggaucac

SEQ ID NO: 257694 - RNA, 24 nt, Artificial Sequence
  Synthetic
ccgaggugggggugggaggaucac

SEQ ID NO: 257695 - RNA, 18 nt, Artificial Sequence
  Synthetic
gcugagguggaggaucac

SEQ ID NO: 257696 - RNA, 19 nt, Artificial Sequence
  Synthetic
ggcugagguggaggaucac

SEQ ID NO: 257697 - RNA, 20 nt, Artificial Sequence
  Synthetic
aggcugagguggaggaucac

SEQ ID NO: 257698 - RNA, 21 nt, Artificial Sequence
  Synthetic
gaggcugagguggaggaucac

SEQ ID NO: 257699 - RNA, 22 nt, Artificial Sequence
  Synthetic
agaggcugagguggaggaucac

SEQ ID NO: 257700 - RNA, 23 nt, Artificial Sequence
  Synthetic
aagaggcugagguggaggaucac

SEQ ID NO: 257701 - RNA, 24 nt, Artificial Sequence
  Synthetic
caagaggcugagguggaggaucac

SEQ ID NO: 257702 - RNA, 18 nt, Artificial Sequence
  Synthetic
ccgaggcaaacggaucac

SEQ ID NO: 257703 - RNA, 19 nt, Artificial Sequence
  Synthetic
gccgaggcaaacggaucac

SEQ ID NO: 257704 - RNA, 20 nt, Artificial Sequence
  Synthetic
ggccgaggcaaacggaucac

SEQ ID NO: 257705 - RNA, 21 nt, Artificial Sequence
  Synthetic
aggccgaggcaaacggaucac

SEQ ID NO: 257706 - RNA, 22 nt, Artificial Sequence
  Synthetic
gaggccgaggcaaacggaucac

SEQ ID NO: 257707 - RNA, 23 nt, Artificial Sequence
  Synthetic
cgaggccgaggcaaacggaucac

SEQ ID NO: 257708 - RNA, 24 nt, Artificial Sequence
  Synthetic
gcgaggccgaggcaaacggaucac

SEQ ID NO: 257709 - RNA, 18 nt, Artificial Sequence
  Synthetic
ccaaggcaggcggaucac

SEQ ID NO: 257710 - RNA, 19 nt, Artificial Sequence
  Synthetic
gccaaggcaggcggaucac

SEQ ID NO: 257711 - RNA, 20 nt, Artificial Sequence
  Synthetic
ggccaaggcaggcggaucac

SEQ ID NO: 257712 - RNA, 21 nt, Artificial Sequence
  Synthetic
aggccaaggcaggcggaucac

SEQ ID NO: 257713 - RNA, 22 nt, Artificial Sequence
  Synthetic
gaggccaaggcaggcggaucac

SEQ ID NO: 257714 - RNA, 23 nt, Artificial Sequence
  Synthetic
ggaggccaaggcaggcggaucac

SEQ ID NO: 257715 - RNA, 24 nt, Artificial Sequence
  Synthetic
gggaggccaaggcaggcggaucac

SEQ ID NO: 257716 - RNA, 18 nt, Artificial Sequence
  Synthetic
ccgaggcaggcggaucac

SEQ ID NO: 257717 - RNA, 19 nt, Artificial Sequence
  Synthetic
gccgaggcaggcggaucac

SEQ ID NO: 257718 - RNA, 20 nt, Artificial Sequence
  Synthetic
ggccgaggcaggcggaucac

SEQ ID NO: 257719 - RNA, 21 nt, Artificial Sequence
  Synthetic
aggccgaggcaggcggaucac

SEQ ID NO: 257720 - RNA, 22 nt, Artificial Sequence
  Synthetic
gaggccgaggcaggcggaucac

SEQ ID NO: 257721 - RNA, 23 nt, Artificial Sequence
  Synthetic
cgaggccgaggcaggcggaucac

SEQ ID NO: 257722 - RNA, 24 nt, Artificial Sequence
  Synthetic
gcgaggccgaggcaggcggaucac

SEQ ID NO: 257723 - RNA, 20 nt, Artificial Sequence
  Synthetic
ugcugaggcaggcggaucac

SEQ ID NO: 257724 - RNA, 21 nt, Artificial Sequence
  Synthetic
augcugaggcaggcggaucac

SEQ ID NO: 257725 - RNA, 22 nt, Artificial Sequence
  Synthetic
gaugcugaggcaggcggaucac

SEQ ID NO: 257726 - RNA, 23 nt, Artificial Sequence
  Synthetic
ggaugcugaggcaggcggaucac

SEQ ID NO: 257727 - RNA, 24 nt, Artificial Sequence
  Synthetic
gggaugcugaggcaggcggaucac

SEQ ID NO: 257728 - RNA, 18 nt, Artificial Sequence
  Synthetic
ccaaggugggcggaucac

SEQ ID NO: 257729 - RNA, 19 nt, Artificial Sequence
  Synthetic
accaaggugggcggaucac

SEQ ID NO: 257730 - RNA, 20 nt, Artificial Sequence
  Synthetic
gaccaaggugggcggaucac

SEQ ID NO: 257731 - RNA, 21 nt, Artificial Sequence
  Synthetic
agaccaaggugggcggaucac

SEQ ID NO: 257732 - RNA, 22 nt, Artificial Sequence
  Synthetic
gagaccaaggugggcggaucac

SEQ ID NO: 257733 - RNA, 23 nt, Artificial Sequence
  Synthetic
agagaccaaggugggcggaucac

SEQ ID NO: 257734 - RNA, 24 nt, Artificial Sequence
  Synthetic
gagagaccaaggugggcggaucac

SEQ ID NO: 257735 - RNA, 19 nt, Artificial Sequence
  Synthetic
gccaaggugggcggaucac

SEQ ID NO: 257736 - RNA, 20 nt, Artificial Sequence
  Synthetic
ggccaaggugggcggaucac

SEQ ID NO: 257737 - RNA, 21 nt, Artificial Sequence
  Synthetic
aggccaaggugggcggaucac

SEQ ID NO: 257738 - RNA, 22 nt, Artificial Sequence
  Synthetic
gaggccaaggugggcggaucac

SEQ ID NO: 257739 - RNA, 23 nt, Artificial Sequence
  Synthetic
ggaggccaaggugggcggaucac

SEQ ID NO: 257740 - RNA, 24 nt, Artificial Sequence
  Synthetic
gggaggccaaggugggcggaucac

SEQ ID NO: 257741 - RNA, 18 nt, Artificial Sequence
  Synthetic
ccgaggugggcggaucac

SEQ ID NO: 257742 - RNA, 19 nt, Artificial Sequence
  Synthetic
gccgaggugggcggaucac

SEQ ID NO: 257743 - RNA, 20 nt, Artificial Sequence
  Synthetic
ggccgaggugggcggaucac

SEQ ID NO: 257744 - RNA, 21 nt, Artificial Sequence
  Synthetic
aggccgaggugggcggaucac

SEQ ID NO: 257745 - RNA, 22 nt, Artificial Sequence
  Synthetic
gaggccgaggugggcggaucac

SEQ ID NO: 257746 - RNA, 23 nt, Artificial Sequence
  Synthetic
ugaggccgaggugggcggaucac

SEQ ID NO: 257747 - RNA, 24 nt, Artificial Sequence
  Synthetic
gugaggccgaggugggcggaucac

SEQ ID NO: 257748 - RNA, 18 nt, Artificial Sequence
  Synthetic
gcugaagcgauggaucac

SEQ ID NO: 257749 - RNA, 19 nt, Artificial Sequence
  Synthetic
ggcugaagcgauggaucac

SEQ ID NO: 257750 - RNA, 20 nt, Artificial Sequence
  Synthetic
aggcugaagcgauggaucac

SEQ ID NO: 257751 - RNA, 21 nt, Artificial Sequence
  Synthetic
gaggcugaagcgauggaucac

SEQ ID NO: 257752 - RNA, 22 nt, Artificial Sequence
  Synthetic
ggaggcugaagcgauggaucac

SEQ ID NO: 257753 - RNA, 23 nt, Artificial Sequence
  Synthetic
gggaggcugaagcgauggaucac

SEQ ID NO: 257754 - RNA, 24 nt, Artificial Sequence
  Synthetic
ugggaggcugaagcgauggaucac

SEQ ID NO: 257755 - RNA, 18 nt, Artificial Sequence
  Synthetic
ccgaggcagguggaucac

SEQ ID NO: 257756 - RNA, 19 nt, Artificial Sequence
  Synthetic
gccgaggcagguggaucac

SEQ ID NO: 257757 - RNA, 20 nt, Artificial Sequence
  Synthetic
ggccgaggcagguggaucac

SEQ ID NO: 257758 - RNA, 21 nt, Artificial Sequence
  Synthetic
aggccgaggcagguggaucac

SEQ ID NO: 257759 - RNA, 22 nt, Artificial Sequence
  Synthetic
gaggccgaggcagguggaucac

SEQ ID NO: 257760 - RNA, 23 nt, Artificial Sequence
  Synthetic
ggaggccgaggcagguggaucac

SEQ ID NO: 257761 - RNA, 24 nt, Artificial Sequence
  Synthetic
gggaggccgaggcagguggaucac

SEQ ID NO: 257762 - RNA, 18 nt, Artificial Sequence
  Synthetic
ccgaaauggguggaucac

SEQ ID NO: 257763 - RNA, 19 nt, Artificial Sequence
  Synthetic
gccgaaauggguggaucac

SEQ ID NO: 257764 - RNA, 20 nt, Artificial Sequence
  Synthetic
ggccgaaauggguggaucac

SEQ ID NO: 257765 - RNA, 21 nt, Artificial Sequence
  Synthetic
aggccgaaauggguggaucac

SEQ ID NO: 257766 - RNA, 22 nt, Artificial Sequence
  Synthetic
gaggccgaaauggguggaucac

SEQ ID NO: 257767 - RNA, 23 nt, Artificial Sequence
  Synthetic
agaggccgaaauggguggaucac

SEQ ID NO: 257768 - RNA, 24 nt, Artificial Sequence
  Synthetic
gagaggccgaaauggguggaucac

SEQ ID NO: 257769 - RNA, 18 nt, Artificial Sequence
  Synthetic
ccgagauggguggaucac

SEQ ID NO: 257770 - RNA, 19 nt, Artificial Sequence
  Synthetic
gccgagauggguggaucac

SEQ ID NO: 257771 - RNA, 20 nt, Artificial Sequence
  Synthetic
ggccgagauggguggaucac

SEQ ID NO: 257772 - RNA, 21 nt, Artificial Sequence
  Synthetic
aggccgagauggguggaucac

SEQ ID NO: 257773 - RNA, 22 nt, Artificial Sequence
  Synthetic
gaggccgagauggguggaucac

SEQ ID NO: 257774 - RNA, 23 nt, Artificial Sequence
  Synthetic
ggaggccgagauggguggaucac

SEQ ID NO: 257775 - RNA, 24 nt, Artificial Sequence
  Synthetic
gggaggccgagauggguggaucac

SEQ ID NO: 257776 - RNA, 18 nt, Artificial Sequence
  Synthetic
ccuacguggguggaucac

SEQ ID NO: 257777 - RNA, 19 nt, Artificial Sequence
  Synthetic
gccuacguggguggaucac

SEQ ID NO: 257778 - RNA, 20 nt, Artificial Sequence
  Synthetic
ggccuacguggguggaucac

SEQ ID NO: 257779 - RNA, 21 nt, Artificial Sequence
  Synthetic
aggccuacguggguggaucac

SEQ ID NO: 257780 - RNA, 22 nt, Artificial Sequence
  Synthetic
gaggccuacguggguggaucac

SEQ ID NO: 257781 - RNA, 23 nt, Artificial Sequence
  Synthetic
ggaggccuacguggguggaucac

SEQ ID NO: 257782 - RNA, 24 nt, Artificial Sequence
  Synthetic
gggaggccuacguggguggaucac

SEQ ID NO: 257783 - RNA, 21 nt, Artificial Sequence
  Synthetic
gggccgagguggguggaucac

SEQ ID NO: 257784 - RNA, 22 nt, Artificial Sequence
  Synthetic
ggggccgagguggguggaucac

SEQ ID NO: 257785 - RNA, 23 nt, Artificial Sequence
  Synthetic
gggggccgagguggguggaucac

SEQ ID NO: 257786 - RNA, 24 nt, Artificial Sequence
  Synthetic
ggggggccgagguggguggaucac

SEQ ID NO: 257787 - RNA, 18 nt, Artificial Sequence
  Synthetic
uuagucauacaugaucac

SEQ ID NO: 257788 - RNA, 19 nt, Artificial Sequence
  Synthetic
uuuagucauacaugaucac

SEQ ID NO: 257789 - RNA, 20 nt, Artificial Sequence
  Synthetic
uuuuagucauacaugaucac

SEQ ID NO: 257790 - RNA, 21 nt, Artificial Sequence
  Synthetic
auuuuagucauacaugaucac

SEQ ID NO: 257791 - RNA, 22 nt, Artificial Sequence
  Synthetic
aauuuuagucauacaugaucac

SEQ ID NO: 257792 - RNA, 23 nt, Artificial Sequence
  Synthetic
gaauuuuagucauacaugaucac

SEQ ID NO: 257793 - RNA, 24 nt, Artificial Sequence
  Synthetic
ugaauuuuagucauacaugaucac

SEQ ID NO: 257794 - RNA, 18 nt, Artificial Sequence
  Synthetic
ugagccaguaaauaucac

SEQ ID NO: 257795 - RNA, 19 nt, Artificial Sequence
  Synthetic
uugagccaguaaauaucac

SEQ ID NO: 257796 - RNA, 20 nt, Artificial Sequence
  Synthetic
guugagccaguaaauaucac

SEQ ID NO: 257797 - RNA, 21 nt, Artificial Sequence
  Synthetic
uguugagccaguaaauaucac

SEQ ID NO: 257798 - RNA, 22 nt, Artificial Sequence
  Synthetic
auguugagccaguaaauaucac

SEQ ID NO: 257799 - RNA, 23 nt, Artificial Sequence
  Synthetic
gauguugagccaguaaauaucac

SEQ ID NO: 257800 - RNA, 24 nt, Artificial Sequence
  Synthetic
agauguugagccaguaaauaucac

SEQ ID NO: 257801 - RNA, 18 nt, Artificial Sequence
  Synthetic
cuucaguguuaauaucac

SEQ ID NO: 257802 - RNA, 19 nt, Artificial Sequence
  Synthetic
ucuucaguguuaauaucac

SEQ ID NO: 257803 - RNA, 20 nt, Artificial Sequence
  Synthetic
cucuucaguguuaauaucac

SEQ ID NO: 257804 - RNA, 21 nt, Artificial Sequence
  Synthetic
ccucuucaguguuaauaucac

SEQ ID NO: 257805 - RNA, 22 nt, Artificial Sequence
  Synthetic
cccucuucaguguuaauaucac

SEQ ID NO: 257806 - RNA, 23 nt, Artificial Sequence
  Synthetic
gcccucuucaguguuaauaucac

SEQ ID NO: 257807 - RNA, 24 nt, Artificial Sequence
  Synthetic
agcccucuucaguguuaauaucac

SEQ ID NO: 257808 - RNA, 18 nt, Artificial Sequence
  Synthetic
uuuuauuaaucauaucac

SEQ ID NO: 257809 - RNA, 19 nt, Artificial Sequence
  Synthetic
uuuuuauuaaucauaucac

SEQ ID NO: 257810 - RNA, 20 nt, Artificial Sequence
  Synthetic
auuuuuauuaaucauaucac

SEQ ID NO: 257811 - RNA, 21 nt, Artificial Sequence
  Synthetic
uauuuuuauuaaucauaucac

SEQ ID NO: 257812 - RNA, 22 nt, Artificial Sequence
  Synthetic
auauuuuuauuaaucauaucac

SEQ ID NO: 257813 - RNA, 23 nt, Artificial Sequence
  Synthetic
cauauuuuuauuaaucauaucac

SEQ ID NO: 257814 - RNA, 24 nt, Artificial Sequence
  Synthetic
acauauuuuuauuaaucauaucac

SEQ ID NO: 257815 - RNA, 18 nt, Artificial Sequence
  Synthetic
accagacaaagauaucac

SEQ ID NO: 257816 - RNA, 19 nt, Artificial Sequence
  Synthetic
aaccagacaaagauaucac

SEQ ID NO: 257817 - RNA, 20 nt, Artificial Sequence
  Synthetic
uaaccagacaaagauaucac

SEQ ID NO: 257818 - RNA, 21 nt, Artificial Sequence
  Synthetic
cuaaccagacaaagauaucac

SEQ ID NO: 257819 - RNA, 22 nt, Artificial Sequence
  Synthetic
ccuaaccagacaaagauaucac

SEQ ID NO: 257820 - RNA, 23 nt, Artificial Sequence
  Synthetic
uccuaaccagacaaagauaucac

SEQ ID NO: 257821 - RNA, 24 nt, Artificial Sequence
  Synthetic
uuccuaaccagacaaagauaucac

SEQ ID NO: 257822 - RNA, 18 nt, Artificial Sequence
  Synthetic
uucugagcaaacuaucac

SEQ ID NO: 257823 - RNA, 19 nt, Artificial Sequence
  Synthetic
auucugagcaaacuaucac

SEQ ID NO: 257824 - RNA, 20 nt, Artificial Sequence
  Synthetic
cauucugagcaaacuaucac

SEQ ID NO: 257825 - RNA, 21 nt, Artificial Sequence
  Synthetic
ucauucugagcaaacuaucac

SEQ ID NO: 257826 - RNA, 22 nt, Artificial Sequence
  Synthetic
aucauucugagcaaacuaucac

SEQ ID NO: 257827 - RNA, 23 nt, Artificial Sequence
  Synthetic
caucauucugagcaaacuaucac

SEQ ID NO: 257828 - RNA, 24 nt, Artificial Sequence
  Synthetic
ccaucauucugagcaaacuaucac

SEQ ID NO: 257829 - RNA, 18 nt, Artificial Sequence
  Synthetic
uucucaguaaacuaucac

SEQ ID NO: 257830 - RNA, 19 nt, Artificial Sequence
  Synthetic
auucucaguaaacuaucac

SEQ ID NO: 257831 - RNA, 20 nt, Artificial Sequence
  Synthetic
uauucucaguaaacuaucac

SEQ ID NO: 257832 - RNA, 21 nt, Artificial Sequence
  Synthetic
uuauucucaguaaacuaucac

SEQ ID NO: 257833 - RNA, 22 nt, Artificial Sequence
  Synthetic
auuauucucaguaaacuaucac

SEQ ID NO: 257834 - RNA, 23 nt, Artificial Sequence
  Synthetic
cauuauucucaguaaacuaucac

SEQ ID NO: 257835 - RNA, 24 nt, Artificial Sequence
  Synthetic
ucauuauucucaguaaacuaucac

SEQ ID NO: 257836 - RNA, 18 nt, Artificial Sequence
  Synthetic
uauaucaauaacuaucac

SEQ ID NO: 257837 - RNA, 19 nt, Artificial Sequence
  Synthetic
cuauaucaauaacuaucac

SEQ ID NO: 257838 - RNA, 20 nt, Artificial Sequence
  Synthetic
gcuauaucaauaacuaucac

SEQ ID NO: 257839 - RNA, 21 nt, Artificial Sequence
  Synthetic
agcuauaucaauaacuaucac

SEQ ID NO: 257840 - RNA, 22 nt, Artificial Sequence
  Synthetic
uagcuauaucaauaacuaucac

SEQ ID NO: 257841 - RNA, 23 nt, Artificial Sequence
  Synthetic
uuagcuauaucaauaacuaucac

SEQ ID NO: 257842 - RNA, 24 nt, Artificial Sequence
  Synthetic
auuagcuauaucaauaacuaucac

SEQ ID NO: 257843 - RNA, 18 nt, Artificial Sequence
  Synthetic
augagaacucacuaucac

SEQ ID NO: 257844 - RNA, 19 nt, Artificial Sequence
  Synthetic
caugagaacucacuaucac

SEQ ID NO: 257845 - RNA, 20 nt, Artificial Sequence
  Synthetic
ucaugagaacucacuaucac

SEQ ID NO: 257846 - RNA, 21 nt, Artificial Sequence
  Synthetic
cucaugagaacucacuaucac

SEQ ID NO: 257847 - RNA, 22 nt, Artificial Sequence
  Synthetic
ucucaugagaacucacuaucac

SEQ ID NO: 257848 - RNA, 23 nt, Artificial Sequence
  Synthetic
aucucaugagaacucacuaucac

SEQ ID NO: 257849 - RNA, 24 nt, Artificial Sequence
  Synthetic
gaucucaugagaacucacuaucac

SEQ ID NO: 257850 - RNA, 18 nt, Artificial Sequence
  Synthetic
gaacucacucacuaucac

SEQ ID NO: 257851 - RNA, 19 nt, Artificial Sequence
  Synthetic
agaacucacucacuaucac

SEQ ID NO: 257852 - RNA, 20 nt, Artificial Sequence
  Synthetic
gagaacucacucacuaucac

SEQ ID NO: 257853 - RNA, 21 nt, Artificial Sequence
  Synthetic
ugagaacucacucacuaucac

SEQ ID NO: 257854 - RNA, 22 nt, Artificial Sequence
  Synthetic
augagaacucacucacuaucac

SEQ ID NO: 257855 - RNA, 23 nt, Artificial Sequence
  Synthetic
caugagaacucacucacuaucac

SEQ ID NO: 257856 - RNA, 24 nt, Artificial Sequence
  Synthetic
ucaugagaacucacucacuaucac

SEQ ID NO: 257857 - RNA, 18 nt, Artificial Sequence
  Synthetic
agacuaauuuacuaucac

SEQ ID NO: 257858 - RNA, 19 nt, Artificial Sequence
  Synthetic
gagacuaauuuacuaucac

SEQ ID NO: 257859 - RNA, 20 nt, Artificial Sequence
  Synthetic
ugagacuaauuuacuaucac

SEQ ID NO: 257860 - RNA, 21 nt, Artificial Sequence
  Synthetic
augagacuaauuuacuaucac

SEQ ID NO: 257861 - RNA, 22 nt, Artificial Sequence
  Synthetic
caugagacuaauuuacuaucac

SEQ ID NO: 257862 - RNA, 23 nt, Artificial Sequence
  Synthetic
ucaugagacuaauuuacuaucac

SEQ ID NO: 257863 - RNA, 24 nt, Artificial Sequence
  Synthetic
cucaugagacuaauuuacuaucac

SEQ ID NO: 257864 - RNA, 18 nt, Artificial Sequence
  Synthetic
auuaaaacugucuaucac

SEQ ID NO: 257865 - RNA, 19 nt, Artificial Sequence
  Synthetic
gauuaaaacugucuaucac

SEQ ID NO: 257866 - RNA, 20 nt, Artificial Sequence
  Synthetic
ugauuaaaacugucuaucac

SEQ ID NO: 257867 - RNA, 21 nt, Artificial Sequence
  Synthetic
uugauuaaaacugucuaucac

SEQ ID NO: 257868 - RNA, 22 nt, Artificial Sequence
  Synthetic
uuugauuaaaacugucuaucac

SEQ ID NO: 257869 - RNA, 23 nt, Artificial Sequence
  Synthetic
cuuugauuaaaacugucuaucac

SEQ ID NO: 257870 - RNA, 24 nt, Artificial Sequence
  Synthetic
gcuuugauuaaaacugucuaucac

SEQ ID NO: 257871 - RNA, 18 nt, Artificial Sequence
  Synthetic
ucacucuacaaguaucac

SEQ ID NO: 257872 - RNA, 19 nt, Artificial Sequence
  Synthetic
gucacucuacaaguaucac

SEQ ID NO: 257873 - RNA, 20 nt, Artificial Sequence
  Synthetic
agucacucuacaaguaucac

SEQ ID NO: 257874 - RNA, 21 nt, Artificial Sequence
  Synthetic
cagucacucuacaaguaucac

SEQ ID NO: 257875 - RNA, 22 nt, Artificial Sequence
  Synthetic
ucagucacucuacaaguaucac

SEQ ID NO: 257876 - RNA, 23 nt, Artificial Sequence
  Synthetic
uucagucacucuacaaguaucac

SEQ ID NO: 257877 - RNA, 24 nt, Artificial Sequence
  Synthetic
cuucagucacucuacaaguaucac

SEQ ID NO: 257878 - RNA, 18 nt, Artificial Sequence
  Synthetic
uuuccauuuacguaucac

SEQ ID NO: 257879 - RNA, 19 nt, Artificial Sequence
  Synthetic
cuuuccauuuacguaucac

SEQ ID NO: 257880 - RNA, 20 nt, Artificial Sequence
  Synthetic
ucuuuccauuuacguaucac

SEQ ID NO: 257881 - RNA, 21 nt, Artificial Sequence
  Synthetic
uucuuuccauuuacguaucac

SEQ ID NO: 257882 - RNA, 22 nt, Artificial Sequence
  Synthetic
cuucuuuccauuuacguaucac

SEQ ID NO: 257883 - RNA, 23 nt, Artificial Sequence
  Synthetic
gcuucuuuccauuuacguaucac

SEQ ID NO: 257884 - RNA, 24 nt, Artificial Sequence
  Synthetic
ugcuucuuuccauuuacguaucac

SEQ ID NO: 257885 - RNA, 18 nt, Artificial Sequence
  Synthetic
cugaggcggguguaucac

SEQ ID NO: 257886 - RNA, 19 nt, Artificial Sequence
  Synthetic
gcugaggcggguguaucac

SEQ ID NO: 257887 - RNA, 20 nt, Artificial Sequence
  Synthetic
ggcugaggcggguguaucac

SEQ ID NO: 257888 - RNA, 21 nt, Artificial Sequence
  Synthetic
aggcugaggcggguguaucac

SEQ ID NO: 257889 - RNA, 22 nt, Artificial Sequence
  Synthetic
gaggcugaggcggguguaucac

SEQ ID NO: 257890 - RNA, 23 nt, Artificial Sequence
  Synthetic
ggaggcugaggcggguguaucac

SEQ ID NO: 257891 - RNA, 24 nt, Artificial Sequence
  Synthetic
gggaggcugaggcggguguaucac

SEQ ID NO: 257892 - RNA, 18 nt, Artificial Sequence
  Synthetic
aacauuuucaguuaucac

SEQ ID NO: 257893 - RNA, 19 nt, Artificial Sequence
  Synthetic
gaacauuuucaguuaucac

SEQ ID NO: 257894 - RNA, 20 nt, Artificial Sequence
  Synthetic
ugaacauuuucaguuaucac

SEQ ID NO: 257895 - RNA, 21 nt, Artificial Sequence
  Synthetic
gugaacauuuucaguuaucac

SEQ ID NO: 257896 - RNA, 22 nt, Artificial Sequence
  Synthetic
ugugaacauuuucaguuaucac

SEQ ID NO: 257897 - RNA, 23 nt, Artificial Sequence
  Synthetic
uugugaacauuuucaguuaucac

SEQ ID NO: 257898 - RNA, 24 nt, Artificial Sequence
  Synthetic
uuugugaacauuuucaguuaucac

SEQ ID NO: 257899 - RNA, 18 nt, Artificial Sequence
  Synthetic
aauuugguuauuuaucac

SEQ ID NO: 257900 - RNA, 19 nt, Artificial Sequence
  Synthetic
uaauuugguuauuuaucac

SEQ ID NO: 257901 - RNA, 20 nt, Artificial Sequence
  Synthetic
guaauuugguuauuuaucac

SEQ ID NO: 257902 - RNA, 21 nt, Artificial Sequence
  Synthetic
uguaauuugguuauuuaucac

SEQ ID NO: 257903 - RNA, 22 nt, Artificial Sequence
  Synthetic
uuguaauuugguuauuuaucac

SEQ ID NO: 257904 - RNA, 23 nt, Artificial Sequence
  Synthetic
auuguaauuugguuauuuaucac

SEQ ID NO: 257905 - RNA, 24 nt, Artificial Sequence
  Synthetic
gauuguaauuugguuauuuaucac

SEQ ID NO: 257906 - RNA, 18 nt, Artificial Sequence
  Synthetic
auacauacaugaacucac

SEQ ID NO: 257907 - RNA, 19 nt, Artificial Sequence
  Synthetic
uauacauacaugaacucac

SEQ ID NO: 257908 - RNA, 20 nt, Artificial Sequence
  Synthetic
auauacauacaugaacucac

SEQ ID NO: 257909 - RNA, 21 nt, Artificial Sequence
  Synthetic
aauauacauacaugaacucac

SEQ ID NO: 257910 - RNA, 22 nt, Artificial Sequence
  Synthetic
caauauacauacaugaacucac

SEQ ID NO: 257911 - RNA, 23 nt, Artificial Sequence
  Synthetic
gcaauauacauacaugaacucac

SEQ ID NO: 257912 - RNA, 24 nt, Artificial Sequence
  Synthetic
agcaauauacauacaugaacucac

SEQ ID NO: 257913 - RNA, 18 nt, Artificial Sequence
  Synthetic
uacugauaauccacucac

SEQ ID NO: 257914 - RNA, 19 nt, Artificial Sequence
  Synthetic
auacugauaauccacucac

SEQ ID NO: 257915 - RNA, 20 nt, Artificial Sequence
  Synthetic
aauacugauaauccacucac

SEQ ID NO: 257916 - RNA, 21 nt, Artificial Sequence
  Synthetic
aaauacugauaauccacucac

SEQ ID NO: 257917 - RNA, 22 nt, Artificial Sequence
  Synthetic
caaauacugauaauccacucac

SEQ ID NO: 257918 - RNA, 23 nt, Artificial Sequence
  Synthetic
acaaauacugauaauccacucac

SEQ ID NO: 257919 - RNA, 24 nt, Artificial Sequence
  Synthetic
aacaaauacugauaauccacucac

SEQ ID NO: 257920 - RNA, 18 nt, Artificial Sequence
  Synthetic
aaauauucauagacucac

SEQ ID NO: 257921 - RNA, 19 nt, Artificial Sequence
  Synthetic
gaaauauucauagacucac

SEQ ID NO: 257922 - RNA, 20 nt, Artificial Sequence
  Synthetic
ugaaauauucauagacucac

SEQ ID NO: 257923 - RNA, 21 nt, Artificial Sequence
  Synthetic
gugaaauauucauagacucac

SEQ ID NO: 257924 - RNA, 22 nt, Artificial Sequence
  Synthetic
ugugaaauauucauagacucac

SEQ ID NO: 257925 - RNA, 23 nt, Artificial Sequence
  Synthetic
uugugaaauauucauagacucac

SEQ ID NO: 257926 - RNA, 24 nt, Artificial Sequence
  Synthetic
auugugaaauauucauagacucac

SEQ ID NO: 257927 - RNA, 18 nt, Artificial Sequence
  Synthetic
caagcuuaaaauacucac

SEQ ID NO: 257928 - RNA, 19 nt, Artificial Sequence
  Synthetic
ucaagcuuaaaauacucac

SEQ ID NO: 257929 - RNA, 20 nt, Artificial Sequence
  Synthetic
uucaagcuuaaaauacucac

SEQ ID NO: 257930 - RNA, 21 nt, Artificial Sequence
  Synthetic
cuucaagcuuaaaauacucac

SEQ ID NO: 257931 - RNA, 22 nt, Artificial Sequence
  Synthetic
gcuucaagcuuaaaauacucac

SEQ ID NO: 257932 - RNA, 23 nt, Artificial Sequence
  Synthetic
ugcuucaagcuuaaaauacucac

SEQ ID NO: 257933 - RNA, 24 nt, Artificial Sequence
  Synthetic
gugcuucaagcuuaaaauacucac

SEQ ID NO: 257934 - RNA, 18 nt, Artificial Sequence
  Synthetic
auugaaaguuauacucac

SEQ ID NO: 257935 - RNA, 19 nt, Artificial Sequence
  Synthetic
aauugaaaguuauacucac

SEQ ID NO: 257936 - RNA, 20 nt, Artificial Sequence
  Synthetic
uaauugaaaguuauacucac

SEQ ID NO: 257937 - RNA, 21 nt, Artificial Sequence
  Synthetic
auaauugaaaguuauacucac

SEQ ID NO: 257938 - RNA, 22 nt, Artificial Sequence
  Synthetic
gauaauugaaaguuauacucac

SEQ ID NO: 257939 - RNA, 23 nt, Artificial Sequence
  Synthetic
agauaauugaaaguuauacucac

SEQ ID NO: 257940 - RNA, 24 nt, Artificial Sequence
  Synthetic
gagauaauugaaaguuauacucac

SEQ ID NO: 257941 - RNA, 18 nt, Artificial Sequence
  Synthetic
auaguaauauguacucac

SEQ ID NO: 257942 - RNA, 19 nt, Artificial Sequence
  Synthetic
aauaguaauauguacucac

SEQ ID NO: 257943 - RNA, 20 nt, Artificial Sequence
  Synthetic
uaauaguaauauguacucac

SEQ ID NO: 257944 - RNA, 21 nt, Artificial Sequence
  Synthetic
auaauaguaauauguacucac

SEQ ID NO: 257945 - RNA, 22 nt, Artificial Sequence
  Synthetic
uauaauaguaauauguacucac

SEQ ID NO: 257946 - RNA, 23 nt, Artificial Sequence
  Synthetic
guauaauaguaauauguacucac

SEQ ID NO: 257947 - RNA, 24 nt, Artificial Sequence
  Synthetic
aguauaauaguaauauguacucac

SEQ ID NO: 257948 - RNA, 18 nt, Artificial Sequence
  Synthetic
aagucuucaauaccucac

SEQ ID NO: 257949 - RNA, 19 nt, Artificial Sequence
  Synthetic
aaagucuucaauaccucac

SEQ ID NO: 257950 - RNA, 20 nt, Artificial Sequence
  Synthetic
aaaagucuucaauaccucac

SEQ ID NO: 257951 - RNA, 21 nt, Artificial Sequence
  Synthetic
aaaaagucuucaauaccucac

SEQ ID NO: 257952 - RNA, 22 nt, Artificial Sequence
  Synthetic
gaaaaagucuucaauaccucac

SEQ ID NO: 257953 - RNA, 23 nt, Artificial Sequence
  Synthetic
ugaaaaagucuucaauaccucac

SEQ ID NO: 257954 - RNA, 24 nt, Artificial Sequence
  Synthetic
uugaaaaagucuucaauaccucac

SEQ ID NO: 257955 - RNA, 18 nt, Artificial Sequence
  Synthetic
ucuacuauuauaccucac

SEQ ID NO: 257956 - RNA, 19 nt, Artificial Sequence
  Synthetic
aucuacuauuauaccucac

SEQ ID NO: 257957 - RNA, 20 nt, Artificial Sequence
  Synthetic
uaucuacuauuauaccucac

SEQ ID NO: 257958 - RNA, 21 nt, Artificial Sequence
  Synthetic
auaucuacuauuauaccucac

SEQ ID NO: 257959 - RNA, 22 nt, Artificial Sequence
  Synthetic
cauaucuacuauuauaccucac

SEQ ID NO: 257960 - RNA, 23 nt, Artificial Sequence
  Synthetic
gcauaucuacuauuauaccucac

SEQ ID NO: 257961 - RNA, 24 nt, Artificial Sequence
  Synthetic
agcauaucuacuauuauaccucac

SEQ ID NO: 257962 - RNA, 18 nt, Artificial Sequence
  Synthetic
aaaucccaguuaccucac

SEQ ID NO: 257963 - RNA, 19 nt, Artificial Sequence
  Synthetic
uaaaucccaguuaccucac

SEQ ID NO: 257964 - RNA, 20 nt, Artificial Sequence
  Synthetic
uuaaaucccaguuaccucac

SEQ ID NO: 257965 - RNA, 21 nt, Artificial Sequence
  Synthetic
cuuaaaucccaguuaccucac

SEQ ID NO: 257966 - RNA, 22 nt, Artificial Sequence
  Synthetic
ucuuaaaucccaguuaccucac

SEQ ID NO: 257967 - RNA, 23 nt, Artificial Sequence
  Synthetic
uucuuaaaucccaguuaccucac

SEQ ID NO: 257968 - RNA, 24 nt, Artificial Sequence
  Synthetic
cuucuuaaaucccaguuaccucac

SEQ ID NO: 257969 - RNA, 18 nt, Artificial Sequence
  Synthetic
uggugcucccacccucac

SEQ ID NO: 257970 - RNA, 19 nt, Artificial Sequence
  Synthetic
auggugcucccacccucac

SEQ ID NO: 257971 - RNA, 20 nt, Artificial Sequence
  Synthetic
uauggugcucccacccucac

SEQ ID NO: 257972 - RNA, 21 nt, Artificial Sequence
  Synthetic
uuauggugcucccacccucac

SEQ ID NO: 257973 - RNA, 22 nt, Artificial Sequence
  Synthetic
uuuauggugcucccacccucac

SEQ ID NO: 257974 - RNA, 23 nt, Artificial Sequence
  Synthetic
guuuauggugcucccacccucac

SEQ ID NO: 257975 - RNA, 24 nt, Artificial Sequence
  Synthetic
uguuuauggugcucccacccucac

SEQ ID NO: 257976 - RNA, 18 nt, Artificial Sequence
  Synthetic
aaccccugcccuccucac

SEQ ID NO: 257977 - RNA, 19 nt, Artificial Sequence
  Synthetic
caaccccugcccuccucac

SEQ ID NO: 257978 - RNA, 20 nt, Artificial Sequence
  Synthetic
ucaaccccugcccuccucac

SEQ ID NO: 257979 - RNA, 21 nt, Artificial Sequence
  Synthetic
cucaaccccugcccuccucac

SEQ ID NO: 257980 - RNA, 22 nt, Artificial Sequence
  Synthetic
gcucaaccccugcccuccucac

SEQ ID NO: 257981 - RNA, 23 nt, Artificial Sequence
  Synthetic
ugcucaaccccugcccuccucac

SEQ ID NO: 257982 - RNA, 24 nt, Artificial Sequence
  Synthetic
augcucaaccccugcccuccucac

SEQ ID NO: 257983 - RNA, 18 nt, Artificial Sequence
  Synthetic
uucuucuuaggagcucac

SEQ ID NO: 257984 - RNA, 19 nt, Artificial Sequence
  Synthetic
uuucuucuuaggagcucac

SEQ ID NO: 257985 - RNA, 20 nt, Artificial Sequence
  Synthetic
auuucuucuuaggagcucac

SEQ ID NO: 257986 - RNA, 21 nt, Artificial Sequence
  Synthetic
gauuucuucuuaggagcucac

SEQ ID NO: 257987 - RNA, 22 nt, Artificial Sequence
  Synthetic
ggauuucuucuuaggagcucac

SEQ ID NO: 257988 - RNA, 23 nt, Artificial Sequence
  Synthetic
cggauuucuucuuaggagcucac

SEQ ID NO: 257989 - RNA, 24 nt, Artificial Sequence
  Synthetic
ccggauuucuucuuaggagcucac

SEQ ID NO: 257990 - RNA, 18 nt, Artificial Sequence
  Synthetic
uaucaccuaugagcucac

SEQ ID NO: 257991 - RNA, 19 nt, Artificial Sequence
  Synthetic
guaucaccuaugagcucac

SEQ ID NO: 257992 - RNA, 20 nt, Artificial Sequence
  Synthetic
gguaucaccuaugagcucac

SEQ ID NO: 257993 - RNA, 21 nt, Artificial Sequence
  Synthetic
ugguaucaccuaugagcucac

SEQ ID NO: 257994 - RNA, 22 nt, Artificial Sequence
  Synthetic
uugguaucaccuaugagcucac

SEQ ID NO: 257995 - RNA, 23 nt, Artificial Sequence
  Synthetic
auugguaucaccuaugagcucac

SEQ ID NO: 257996 - RNA, 24 nt, Artificial Sequence
  Synthetic
cauugguaucaccuaugagcucac

SEQ ID NO: 257997 - RNA, 18 nt, Artificial Sequence
  Synthetic
uuuuguacguaggcucac

SEQ ID NO: 257998 - RNA, 19 nt, Artificial Sequence
  Synthetic
auuuuguacguaggcucac

SEQ ID NO: 257999 - RNA, 20 nt, Artificial Sequence
  Synthetic
cauuuuguacguaggcucac

SEQ ID NO: 258000 - RNA, 21 nt, Artificial Sequence
  Synthetic
ucauuuuguacguaggcucac

SEQ ID NO: 258001 - RNA, 22 nt, Artificial Sequence
  Synthetic
gucauuuuguacguaggcucac

SEQ ID NO: 258002 - RNA, 23 nt, Artificial Sequence
  Synthetic
ggucauuuuguacguaggcucac

SEQ ID NO: 258003 - RNA, 24 nt, Artificial Sequence
  Synthetic
gggucauuuuguacguaggcucac

SEQ ID NO: 258004 - RNA, 18 nt, Artificial Sequence
  Synthetic
uuuccuucaaaaucucac

SEQ ID NO: 258005 - RNA, 19 nt, Artificial Sequence
  Synthetic
uuuuccuucaaaaucucac

SEQ ID NO: 258006 - RNA, 20 nt, Artificial Sequence
  Synthetic
cuuuuccuucaaaaucucac

SEQ ID NO: 258007 - RNA, 21 nt, Artificial Sequence
  Synthetic
acuuuuccuucaaaaucucac

SEQ ID NO: 258008 - RNA, 22 nt, Artificial Sequence
  Synthetic
uacuuuuccuucaaaaucucac

SEQ ID NO: 258009 - RNA, 23 nt, Artificial Sequence
  Synthetic
uuacuuuuccuucaaaaucucac

SEQ ID NO: 258010 - RNA, 24 nt, Artificial Sequence
  Synthetic
uuuacuuuuccuucaaaaucucac

SEQ ID NO: 258011 - RNA, 18 nt, Artificial Sequence
  Synthetic
guacccggcucaucucac

SEQ ID NO: 258012 - RNA, 19 nt, Artificial Sequence
  Synthetic
aguacccggcucaucucac

SEQ ID NO: 258013 - RNA, 20 nt, Artificial Sequence
  Synthetic
caguacccggcucaucucac

SEQ ID NO: 258014 - RNA, 21 nt, Artificial Sequence
  Synthetic
gcaguacccggcucaucucac

SEQ ID NO: 258015 - RNA, 22 nt, Artificial Sequence
  Synthetic
ugcaguacccggcucaucucac

SEQ ID NO: 258016 - RNA, 23 nt, Artificial Sequence
  Synthetic
cugcaguacccggcucaucucac

SEQ ID NO: 258017 - RNA, 24 nt, Artificial Sequence
  Synthetic
acugcaguacccggcucaucucac

SEQ ID NO: 258018 - RNA, 18 nt, Artificial Sequence
  Synthetic
ccccauuccagaucucac

SEQ ID NO: 258019 - RNA, 19 nt, Artificial Sequence
  Synthetic
gccccauuccagaucucac

SEQ ID NO: 258020 - RNA, 20 nt, Artificial Sequence
  Synthetic
ggccccauuccagaucucac

SEQ ID NO: 258021 - RNA, 21 nt, Artificial Sequence
  Synthetic
gggccccauuccagaucucac

SEQ ID NO: 258022 - RNA, 22 nt, Artificial Sequence
  Synthetic
ugggccccauuccagaucucac

SEQ ID NO: 258023 - RNA, 23 nt, Artificial Sequence
  Synthetic
augggccccauuccagaucucac

SEQ ID NO: 258024 - RNA, 24 nt, Artificial Sequence
  Synthetic
caugggccccauuccagaucucac

SEQ ID NO: 258025 - RNA, 18 nt, Artificial Sequence
  Synthetic
auuuauuagcuaucucac

SEQ ID NO: 258026 - RNA, 19 nt, Artificial Sequence
  Synthetic
gauuuauuagcuaucucac

SEQ ID NO: 258027 - RNA, 20 nt, Artificial Sequence
  Synthetic
ugauuuauuagcuaucucac

SEQ ID NO: 258028 - RNA, 21 nt, Artificial Sequence
  Synthetic
gugauuuauuagcuaucucac

SEQ ID NO: 258029 - RNA, 22 nt, Artificial Sequence
  Synthetic
ugugauuuauuagcuaucucac

SEQ ID NO: 258030 - RNA, 23 nt, Artificial Sequence
  Synthetic
uugugauuuauuagcuaucucac

SEQ ID NO: 258031 - RNA, 24 nt, Artificial Sequence
  Synthetic
uuugugauuuauuagcuaucucac

SEQ ID NO: 258032 - RNA, 18 nt, Artificial Sequence
  Synthetic
acuuccugaggcucucac

SEQ ID NO: 258033 - RNA, 19 nt, Artificial Sequence
  Synthetic
aacuuccugaggcucucac

SEQ ID NO: 258034 - RNA, 20 nt, Artificial Sequence
  Synthetic
aaacuuccugaggcucucac

SEQ ID NO: 258035 - RNA, 21 nt, Artificial Sequence
  Synthetic
uaaacuuccugaggcucucac

SEQ ID NO: 258036 - RNA, 22 nt, Artificial Sequence
  Synthetic
guaaacuuccugaggcucucac

SEQ ID NO: 258037 - RNA, 23 nt, Artificial Sequence
  Synthetic
uguaaacuuccugaggcucucac

SEQ ID NO: 258038 - RNA, 24 nt, Artificial Sequence
  Synthetic
uuguaaacuuccugaggcucucac

SEQ ID NO: 258039 - RNA, 18 nt, Artificial Sequence
  Synthetic
gauauuacauucucucac

SEQ ID NO: 258040 - RNA, 19 nt, Artificial Sequence
  Synthetic
ggauauuacauucucucac

SEQ ID NO: 258041 - RNA, 20 nt, Artificial Sequence
  Synthetic
uggauauuacauucucucac

SEQ ID NO: 258042 - RNA, 21 nt, Artificial Sequence
  Synthetic
auggauauuacauucucucac

SEQ ID NO: 258043 - RNA, 22 nt, Artificial Sequence
  Synthetic
cauggauauuacauucucucac

SEQ ID NO: 258044 - RNA, 23 nt, Artificial Sequence
  Synthetic
acauggauauuacauucucucac

SEQ ID NO: 258045 - RNA, 24 nt, Artificial Sequence
  Synthetic
gacauggauauuacauucucucac

SEQ ID NO: 258046 - RNA, 18 nt, Artificial Sequence
  Synthetic
uggucucaguuuucucac

SEQ ID NO: 258047 - RNA, 19 nt, Artificial Sequence
  Synthetic
guggucucaguuuucucac

SEQ ID NO: 258048 - RNA, 20 nt, Artificial Sequence
  Synthetic
uguggucucaguuuucucac

SEQ ID NO: 258049 - RNA, 21 nt, Artificial Sequence
  Synthetic
cuguggucucaguuuucucac

SEQ ID NO: 258050 - RNA, 22 nt, Artificial Sequence
  Synthetic
ucuguggucucaguuuucucac

SEQ ID NO: 258051 - RNA, 23 nt, Artificial Sequence
  Synthetic
cucuguggucucaguuuucucac

SEQ ID NO: 258052 - RNA, 24 nt, Artificial Sequence
  Synthetic
ucucuguggucucaguuuucucac

SEQ ID NO: 258053 - RNA, 18 nt, Artificial Sequence
  Synthetic
uagaaaguguuuucucac

SEQ ID NO: 258054 - RNA, 19 nt, Artificial Sequence
  Synthetic
uuagaaaguguuuucucac

SEQ ID NO: 258055 - RNA, 20 nt, Artificial Sequence
  Synthetic
uuuagaaaguguuuucucac

SEQ ID NO: 258056 - RNA, 21 nt, Artificial Sequence
  Synthetic
guuuagaaaguguuuucucac

SEQ ID NO: 258057 - RNA, 22 nt, Artificial Sequence
  Synthetic
uguuuagaaaguguuuucucac

SEQ ID NO: 258058 - RNA, 23 nt, Artificial Sequence
  Synthetic
guguuuagaaaguguuuucucac

SEQ ID NO: 258059 - RNA, 24 nt, Artificial Sequence
  Synthetic
uguguuuagaaaguguuuucucac

SEQ ID NO: 258060 - RNA, 18 nt, Artificial Sequence
  Synthetic
acugagacuuucagucac

SEQ ID NO: 258061 - RNA, 19 nt, Artificial Sequence
  Synthetic
cacugagacuuucagucac

SEQ ID NO: 258062 - RNA, 20 nt, Artificial Sequence
  Synthetic
gcacugagacuuucagucac

SEQ ID NO: 258063 - RNA, 21 nt, Artificial Sequence
  Synthetic
ugcacugagacuuucagucac

SEQ ID NO: 258064 - RNA, 22 nt, Artificial Sequence
  Synthetic
cugcacugagacuuucagucac

SEQ ID NO: 258065 - RNA, 23 nt, Artificial Sequence
  Synthetic
ccugcacugagacuuucagucac

SEQ ID NO: 258066 - RNA, 24 nt, Artificial Sequence
  Synthetic
gccugcacugagacuuucagucac

SEQ ID NO: 258067 - RNA, 18 nt, Artificial Sequence
  Synthetic
aagaguguagggagucac

SEQ ID NO: 258068 - RNA, 19 nt, Artificial Sequence
  Synthetic
aaagaguguagggagucac

SEQ ID NO: 258069 - RNA, 20 nt, Artificial Sequence
  Synthetic
uaaagaguguagggagucac

SEQ ID NO: 258070 - RNA, 21 nt, Artificial Sequence
  Synthetic
guaaagaguguagggagucac

SEQ ID NO: 258071 - RNA, 22 nt, Artificial Sequence
  Synthetic
aguaaagaguguagggagucac

SEQ ID NO: 258072 - RNA, 23 nt, Artificial Sequence
  Synthetic
caguaaagaguguagggagucac

SEQ ID NO: 258073 - RNA, 24 nt, Artificial Sequence
  Synthetic
ucaguaaagaguguagggagucac

SEQ ID NO: 258074 - RNA, 18 nt, Artificial Sequence
  Synthetic
aguacuagcaugagucac

SEQ ID NO: 258075 - RNA, 19 nt, Artificial Sequence
  Synthetic
caguacuagcaugagucac

SEQ ID NO: 258076 - RNA, 20 nt, Artificial Sequence
  Synthetic
ccaguacuagcaugagucac

SEQ ID NO: 258077 - RNA, 21 nt, Artificial Sequence
  Synthetic
uccaguacuagcaugagucac

SEQ ID NO: 258078 - RNA, 22 nt, Artificial Sequence
  Synthetic
uuccaguacuagcaugagucac

SEQ ID NO: 258079 - RNA, 23 nt, Artificial Sequence
  Synthetic
auuccaguacuagcaugagucac

SEQ ID NO: 258080 - RNA, 24 nt, Artificial Sequence
  Synthetic
aauuccaguacuagcaugagucac

SEQ ID NO: 258081 - RNA, 18 nt, Artificial Sequence
  Synthetic
cauaauaaagugagucac

SEQ ID NO: 258082 - RNA, 19 nt, Artificial Sequence
  Synthetic
ccauaauaaagugagucac

SEQ ID NO: 258083 - RNA, 20 nt, Artificial Sequence
  Synthetic
accauaauaaagugagucac

SEQ ID NO: 258084 - RNA, 21 nt, Artificial Sequence
  Synthetic
caccauaauaaagugagucac

SEQ ID NO: 258085 - RNA, 22 nt, Artificial Sequence
  Synthetic
ccaccauaauaaagugagucac

SEQ ID NO: 258086 - RNA, 23 nt, Artificial Sequence
  Synthetic
accaccauaauaaagugagucac

SEQ ID NO: 258087 - RNA, 24 nt, Artificial Sequence
  Synthetic
gaccaccauaauaaagugagucac

SEQ ID NO: 258088 - RNA, 18 nt, Artificial Sequence
  Synthetic
ucuacuuagcuuagucac

SEQ ID NO: 258089 - RNA, 19 nt, Artificial Sequence
  Synthetic
uucuacuuagcuuagucac

SEQ ID NO: 258090 - RNA, 20 nt, Artificial Sequence
  Synthetic
auucuacuuagcuuagucac

SEQ ID NO: 258091 - RNA, 21 nt, Artificial Sequence
  Synthetic
cauucuacuuagcuuagucac

SEQ ID NO: 258092 - RNA, 22 nt, Artificial Sequence
  Synthetic
gcauucuacuuagcuuagucac

SEQ ID NO: 258093 - RNA, 23 nt, Artificial Sequence
  Synthetic
agcauucuacuuagcuuagucac

SEQ ID NO: 258094 - RNA, 24 nt, Artificial Sequence
  Synthetic
gagcauucuacuuagcuuagucac

SEQ ID NO: 258095 - RNA, 18 nt, Artificial Sequence
  Synthetic
aguccuucuacacgucac

SEQ ID NO: 258096 - RNA, 19 nt, Artificial Sequence
  Synthetic
gaguccuucuacacgucac

SEQ ID NO: 258097 - RNA, 20 nt, Artificial Sequence
  Synthetic
agaguccuucuacacgucac

SEQ ID NO: 258098 - RNA, 21 nt, Artificial Sequence
  Synthetic
aagaguccuucuacacgucac

SEQ ID NO: 258099 - RNA, 22 nt, Artificial Sequence
  Synthetic
uaagaguccuucuacacgucac

SEQ ID NO: 258100 - RNA, 23 nt, Artificial Sequence
  Synthetic
guaagaguccuucuacacgucac

SEQ ID NO: 258101 - RNA, 24 nt, Artificial Sequence
  Synthetic
aguaagaguccuucuacacgucac

SEQ ID NO: 258102 - RNA, 18 nt, Artificial Sequence
  Synthetic
uucauaucccagcgucac

SEQ ID NO: 258103 - RNA, 19 nt, Artificial Sequence
  Synthetic
uuucauaucccagcgucac

SEQ ID NO: 258104 - RNA, 20 nt, Artificial Sequence
  Synthetic
uuuucauaucccagcgucac

SEQ ID NO: 258105 - RNA, 21 nt, Artificial Sequence
  Synthetic
uuuuucauaucccagcgucac

SEQ ID NO: 258106 - RNA, 22 nt, Artificial Sequence
  Synthetic
uuuuuucauaucccagcgucac

SEQ ID NO: 258107 - RNA, 23 nt, Artificial Sequence
  Synthetic
uuuuuuucauaucccagcgucac

SEQ ID NO: 258108 - RNA, 24 nt, Artificial Sequence
  Synthetic
guuuuuuucauaucccagcgucac

SEQ ID NO: 258109 - RNA, 18 nt, Artificial Sequence
  Synthetic
uuagccuuggcucgucac

SEQ ID NO: 258110 - RNA, 19 nt, Artificial Sequence
  Synthetic
uuuagccuuggcucgucac

SEQ ID NO: 258111 - RNA, 20 nt, Artificial Sequence
  Synthetic
cuuuagccuuggcucgucac

SEQ ID NO: 258112 - RNA, 21 nt, Artificial Sequence
  Synthetic
ccuuuagccuuggcucgucac

SEQ ID NO: 258113 - RNA, 22 nt, Artificial Sequence
  Synthetic
cccuuuagccuuggcucgucac

SEQ ID NO: 258114 - RNA, 23 nt, Artificial Sequence
  Synthetic
ucccuuuagccuuggcucgucac

SEQ ID NO: 258115 - RNA, 24 nt, Artificial Sequence
  Synthetic
aucccuuuagccuuggcucgucac

SEQ ID NO: 258116 - RNA, 18 nt, Artificial Sequence
  Synthetic
cugaggcaggagggucac

SEQ ID NO: 258117 - RNA, 19 nt, Artificial Sequence
  Synthetic
gcugaggcaggagggucac

SEQ ID NO: 258118 - RNA, 20 nt, Artificial Sequence
  Synthetic
ggcugaggcaggagggucac

SEQ ID NO: 258119 - RNA, 21 nt, Artificial Sequence
  Synthetic
aggcugaggcaggagggucac

SEQ ID NO: 258120 - RNA, 22 nt, Artificial Sequence
  Synthetic
gaggcugaggcaggagggucac

SEQ ID NO: 258121 - RNA, 23 nt, Artificial Sequence
  Synthetic
ggaggcugaggcaggagggucac

SEQ ID NO: 258122 - RNA, 24 nt, Artificial Sequence
  Synthetic
gggaggcugaggcaggagggucac

SEQ ID NO: 258123 - RNA, 18 nt, Artificial Sequence
  Synthetic
gcaaaaaauaugggucac

SEQ ID NO: 258124 - RNA, 19 nt, Artificial Sequence
  Synthetic
ggcaaaaaauaugggucac

SEQ ID NO: 258125 - RNA, 20 nt, Artificial Sequence
  Synthetic
uggcaaaaaauaugggucac

SEQ ID NO: 258126 - RNA, 21 nt, Artificial Sequence
  Synthetic
auggcaaaaaauaugggucac

SEQ ID NO: 258127 - RNA, 22 nt, Artificial Sequence
  Synthetic
aauggcaaaaaauaugggucac

SEQ ID NO: 258128 - RNA, 23 nt, Artificial Sequence
  Synthetic
aaauggcaaaaaauaugggucac

SEQ ID NO: 258129 - RNA, 24 nt, Artificial Sequence
  Synthetic
caaauggcaaaaaauaugggucac

SEQ ID NO: 258130 - RNA, 18 nt, Artificial Sequence
  Synthetic
uuaacgaauaugggucac

SEQ ID NO: 258131 - RNA, 19 nt, Artificial Sequence
  Synthetic
uuuaacgaauaugggucac

SEQ ID NO: 258132 - RNA, 20 nt, Artificial Sequence
  Synthetic
cuuuaacgaauaugggucac

SEQ ID NO: 258133 - RNA, 21 nt, Artificial Sequence
  Synthetic
ucuuuaacgaauaugggucac

SEQ ID NO: 258134 - RNA, 22 nt, Artificial Sequence
  Synthetic
cucuuuaacgaauaugggucac

SEQ ID NO: 258135 - RNA, 23 nt, Artificial Sequence
  Synthetic
acucuuuaacgaauaugggucac

SEQ ID NO: 258136 - RNA, 24 nt, Artificial Sequence
  Synthetic
aacucuuuaacgaauaugggucac

SEQ ID NO: 258137 - RNA, 18 nt, Artificial Sequence
  Synthetic
gcugcuguugugggucac

SEQ ID NO: 258138 - RNA, 19 nt, Artificial Sequence
  Synthetic
agcugcuguugugggucac

SEQ ID NO: 258139 - RNA, 20 nt, Artificial Sequence
  Synthetic
cagcugcuguugugggucac

SEQ ID NO: 258140 - RNA, 21 nt, Artificial Sequence
  Synthetic
ccagcugcuguugugggucac

SEQ ID NO: 258141 - RNA, 22 nt, Artificial Sequence
  Synthetic
gccagcugcuguugugggucac

SEQ ID NO: 258142 - RNA, 23 nt, Artificial Sequence
  Synthetic
agccagcugcuguugugggucac

SEQ ID NO: 258143 - RNA, 24 nt, Artificial Sequence
  Synthetic
aagccagcugcuguugugggucac

SEQ ID NO: 258144 - RNA, 18 nt, Artificial Sequence
  Synthetic
gucccccaacauggucac

SEQ ID NO: 258145 - RNA, 19 nt, Artificial Sequence
  Synthetic
ugucccccaacauggucac

SEQ ID NO: 258146 - RNA, 20 nt, Artificial Sequence
  Synthetic
cugucccccaacauggucac

SEQ ID NO: 258147 - RNA, 21 nt, Artificial Sequence
  Synthetic
gcugucccccaacauggucac

SEQ ID NO: 258148 - RNA, 22 nt, Artificial Sequence
  Synthetic
agcugucccccaacauggucac

SEQ ID NO: 258149 - RNA, 23 nt, Artificial Sequence
  Synthetic
gagcugucccccaacauggucac

SEQ ID NO: 258150 - RNA, 24 nt, Artificial Sequence
  Synthetic
ggagcugucccccaacauggucac

SEQ ID NO: 258151 - RNA, 18 nt, Artificial Sequence
  Synthetic
ugcauucuaaaaugucac

SEQ ID NO: 258152 - RNA, 19 nt, Artificial Sequence
  Synthetic
gugcauucuaaaaugucac

SEQ ID NO: 258153 - RNA, 20 nt, Artificial Sequence
  Synthetic
agugcauucuaaaaugucac

SEQ ID NO: 258154 - RNA, 21 nt, Artificial Sequence
  Synthetic
cagugcauucuaaaaugucac

SEQ ID NO: 258155 - RNA, 22 nt, Artificial Sequence
  Synthetic
gcagugcauucuaaaaugucac

SEQ ID NO: 258156 - RNA, 23 nt, Artificial Sequence
  Synthetic
ugcagugcauucuaaaaugucac

SEQ ID NO: 258157 - RNA, 24 nt, Artificial Sequence
  Synthetic
augcagugcauucuaaaaugucac

SEQ ID NO: 258158 - RNA, 18 nt, Artificial Sequence
  Synthetic
gaugacuucaaaugucac

SEQ ID NO: 258159 - RNA, 19 nt, Artificial Sequence
  Synthetic
agaugacuucaaaugucac

SEQ ID NO: 258160 - RNA, 20 nt, Artificial Sequence
  Synthetic
gagaugacuucaaaugucac

SEQ ID NO: 258161 - RNA, 21 nt, Artificial Sequence
  Synthetic
agagaugacuucaaaugucac

SEQ ID NO: 258162 - RNA, 22 nt, Artificial Sequence
  Synthetic
cagagaugacuucaaaugucac

SEQ ID NO: 258163 - RNA, 23 nt, Artificial Sequence
  Synthetic
acagagaugacuucaaaugucac

SEQ ID NO: 258164 - RNA, 24 nt, Artificial Sequence
  Synthetic
aacagagaugacuucaaaugucac

SEQ ID NO: 258165 - RNA, 18 nt, Artificial Sequence
  Synthetic
gagcaaagauaaugucac

SEQ ID NO: 258166 - RNA, 19 nt, Artificial Sequence
  Synthetic
agagcaaagauaaugucac

SEQ ID NO: 258167 - RNA, 20 nt, Artificial Sequence
  Synthetic
gagagcaaagauaaugucac

SEQ ID NO: 258168 - RNA, 21 nt, Artificial Sequence
  Synthetic
ugagagcaaagauaaugucac

SEQ ID NO: 258169 - RNA, 22 nt, Artificial Sequence
  Synthetic
cugagagcaaagauaaugucac

SEQ ID NO: 258170 - RNA, 23 nt, Artificial Sequence
  Synthetic
ccugagagcaaagauaaugucac

SEQ ID NO: 258171 - RNA, 24 nt, Artificial Sequence
  Synthetic
uccugagagcaaagauaaugucac

SEQ ID NO: 258172 - RNA, 18 nt, Artificial Sequence
  Synthetic
ugucauuuuauaugucac

SEQ ID NO: 258173 - RNA, 19 nt, Artificial Sequence
  Synthetic
augucauuuuauaugucac

SEQ ID NO: 258174 - RNA, 20 nt, Artificial Sequence
  Synthetic
uaugucauuuuauaugucac

SEQ ID NO: 258175 - RNA, 21 nt, Artificial Sequence
  Synthetic
guaugucauuuuauaugucac

SEQ ID NO: 258176 - RNA, 22 nt, Artificial Sequence
  Synthetic
aguaugucauuuuauaugucac

SEQ ID NO: 258177 - RNA, 23 nt, Artificial Sequence
  Synthetic
uaguaugucauuuuauaugucac

SEQ ID NO: 258178 - RNA, 24 nt, Artificial Sequence
  Synthetic
auaguaugucauuuuauaugucac

SEQ ID NO: 258179 - RNA, 18 nt, Artificial Sequence
  Synthetic
agaauaacgcuaugucac

SEQ ID NO: 258180 - RNA, 19 nt, Artificial Sequence
  Synthetic
cagaauaacgcuaugucac

SEQ ID NO: 258181 - RNA, 20 nt, Artificial Sequence
  Synthetic
acagaauaacgcuaugucac

SEQ ID NO: 258182 - RNA, 21 nt, Artificial Sequence
  Synthetic
cacagaauaacgcuaugucac

SEQ ID NO: 258183 - RNA, 22 nt, Artificial Sequence
  Synthetic
acacagaauaacgcuaugucac

SEQ ID NO: 258184 - RNA, 23 nt, Artificial Sequence
  Synthetic
uacacagaauaacgcuaugucac

SEQ ID NO: 258185 - RNA, 24 nt, Artificial Sequence
  Synthetic
uuacacagaauaacgcuaugucac

SEQ ID NO: 258186 - RNA, 18 nt, Artificial Sequence
  Synthetic
gugagaacucacugucac

SEQ ID NO: 258187 - RNA, 19 nt, Artificial Sequence
  Synthetic
cgugagaacucacugucac

SEQ ID NO: 258188 - RNA, 20 nt, Artificial Sequence
  Synthetic
ucgugagaacucacugucac

SEQ ID NO: 258189 - RNA, 21 nt, Artificial Sequence
  Synthetic
cucgugagaacucacugucac

SEQ ID NO: 258190 - RNA, 22 nt, Artificial Sequence
  Synthetic
ccucgugagaacucacugucac

SEQ ID NO: 258191 - RNA, 23 nt, Artificial Sequence
  Synthetic
accucgugagaacucacugucac

SEQ ID NO: 258192 - RNA, 24 nt, Artificial Sequence
  Synthetic
gaccucgugagaacucacugucac

SEQ ID NO: 258193 - RNA, 18 nt, Artificial Sequence
  Synthetic
ccaguuagucugugucac

SEQ ID NO: 258194 - RNA, 19 nt, Artificial Sequence
  Synthetic
uccaguuagucugugucac

SEQ ID NO: 258195 - RNA, 20 nt, Artificial Sequence
  Synthetic
cuccaguuagucugugucac

SEQ ID NO: 258196 - RNA, 21 nt, Artificial Sequence
  Synthetic
ucuccaguuagucugugucac

SEQ ID NO: 258197 - RNA, 22 nt, Artificial Sequence
  Synthetic
uucuccaguuagucugugucac

SEQ ID NO: 258198 - RNA, 23 nt, Artificial Sequence
  Synthetic
uuucuccaguuagucugugucac

SEQ ID NO: 258199 - RNA, 24 nt, Artificial Sequence
  Synthetic
uuuucuccaguuagucugugucac

SEQ ID NO: 258200 - RNA, 18 nt, Artificial Sequence
  Synthetic
caagacugugugugucac

SEQ ID NO: 258201 - RNA, 19 nt, Artificial Sequence
  Synthetic
ccaagacugugugugucac

SEQ ID NO: 258202 - RNA, 20 nt, Artificial Sequence
  Synthetic
uccaagacugugugugucac

SEQ ID NO: 258203 - RNA, 21 nt, Artificial Sequence
  Synthetic
guccaagacugugugugucac

SEQ ID NO: 258204 - RNA, 22 nt, Artificial Sequence
  Synthetic
uguccaagacugugugugucac

SEQ ID NO: 258205 - RNA, 23 nt, Artificial Sequence
  Synthetic
uuguccaagacugugugugucac

SEQ ID NO: 258206 - RNA, 24 nt, Artificial Sequence
  Synthetic
auuguccaagacugugugugucac

SEQ ID NO: 258207 - RNA, 18 nt, Artificial Sequence
  Synthetic
uuucacuugcauugucac

SEQ ID NO: 258208 - RNA, 19 nt, Artificial Sequence
  Synthetic
uuuucacuugcauugucac

SEQ ID NO: 258209 - RNA, 20 nt, Artificial Sequence
  Synthetic
uuuuucacuugcauugucac

SEQ ID NO: 258210 - RNA, 21 nt, Artificial Sequence
  Synthetic
guuuuucacuugcauugucac

SEQ ID NO: 258211 - RNA, 22 nt, Artificial Sequence
  Synthetic
gguuuuucacuugcauugucac

SEQ ID NO: 258212 - RNA, 23 nt, Artificial Sequence
  Synthetic
ugguuuuucacuugcauugucac

SEQ ID NO: 258213 - RNA, 24 nt, Artificial Sequence
  Synthetic
uugguuuuucacuugcauugucac

SEQ ID NO: 258214 - RNA, 18 nt, Artificial Sequence
  Synthetic
cauguacaggcuugucac

SEQ ID NO: 258215 - RNA, 19 nt, Artificial Sequence
  Synthetic
acauguacaggcuugucac

SEQ ID NO: 258216 - RNA, 20 nt, Artificial Sequence
  Synthetic
uacauguacaggcuugucac

SEQ ID NO: 258217 - RNA, 21 nt, Artificial Sequence
  Synthetic
guacauguacaggcuugucac

SEQ ID NO: 258218 - RNA, 22 nt, Artificial Sequence
  Synthetic
gguacauguacaggcuugucac

SEQ ID NO: 258219 - RNA, 23 nt, Artificial Sequence
  Synthetic
ggguacauguacaggcuugucac

SEQ ID NO: 258220 - RNA, 24 nt, Artificial Sequence
  Synthetic
aggguacauguacaggcuugucac

SEQ ID NO: 258221 - RNA, 18 nt, Artificial Sequence
  Synthetic
caugugcagauuugucac

SEQ ID NO: 258222 - RNA, 19 nt, Artificial Sequence
  Synthetic
gcaugugcagauuugucac

SEQ ID NO: 258223 - RNA, 20 nt, Artificial Sequence
  Synthetic
ugcaugugcagauuugucac

SEQ ID NO: 258224 - RNA, 21 nt, Artificial Sequence
  Synthetic
gugcaugugcagauuugucac

SEQ ID NO: 258225 - RNA, 22 nt, Artificial Sequence
  Synthetic
ggugcaugugcagauuugucac

SEQ ID NO: 258226 - RNA, 23 nt, Artificial Sequence
  Synthetic
aggugcaugugcagauuugucac

SEQ ID NO: 258227 - RNA, 24 nt, Artificial Sequence
  Synthetic
aaggugcaugugcagauuugucac

SEQ ID NO: 258228 - RNA, 18 nt, Artificial Sequence
  Synthetic
ggaacacaguuaauucac

SEQ ID NO: 258229 - RNA, 19 nt, Artificial Sequence
  Synthetic
uggaacacaguuaauucac

SEQ ID NO: 258230 - RNA, 20 nt, Artificial Sequence
  Synthetic
cuggaacacaguuaauucac

SEQ ID NO: 258231 - RNA, 21 nt, Artificial Sequence
  Synthetic
ucuggaacacaguuaauucac

SEQ ID NO: 258232 - RNA, 22 nt, Artificial Sequence
  Synthetic
uucuggaacacaguuaauucac

SEQ ID NO: 258233 - RNA, 23 nt, Artificial Sequence
  Synthetic
guucuggaacacaguuaauucac

SEQ ID NO: 258234 - RNA, 24 nt, Artificial Sequence
  Synthetic
cguucuggaacacaguuaauucac

SEQ ID NO: 258235 - RNA, 18 nt, Artificial Sequence
  Synthetic
gauuaaguguuaauucac

SEQ ID NO: 258236 - RNA, 19 nt, Artificial Sequence
  Synthetic
agauuaaguguuaauucac

SEQ ID NO: 258237 - RNA, 20 nt, Artificial Sequence
  Synthetic
aagauuaaguguuaauucac

SEQ ID NO: 258238 - RNA, 21 nt, Artificial Sequence
  Synthetic
aaagauuaaguguuaauucac

SEQ ID NO: 258239 - RNA, 22 nt, Artificial Sequence
  Synthetic
uaaagauuaaguguuaauucac

SEQ ID NO: 258240 - RNA, 23 nt, Artificial Sequence
  Synthetic
auaaagauuaaguguuaauucac

SEQ ID NO: 258241 - RNA, 24 nt, Artificial Sequence
  Synthetic
cauaaagauuaaguguuaauucac

SEQ ID NO: 258242 - RNA, 18 nt, Artificial Sequence
  Synthetic
auguaaaugcacauucac

SEQ ID NO: 258243 - RNA, 19 nt, Artificial Sequence
  Synthetic
aauguaaaugcacauucac

SEQ ID NO: 258244 - RNA, 20 nt, Artificial Sequence
  Synthetic
aaauguaaaugcacauucac

SEQ ID NO: 258245 - RNA, 21 nt, Artificial Sequence
  Synthetic
aaaauguaaaugcacauucac

SEQ ID NO: 258246 - RNA, 22 nt, Artificial Sequence
  Synthetic
uaaaauguaaaugcacauucac

SEQ ID NO: 258247 - RNA, 23 nt, Artificial Sequence
  Synthetic
cuaaaauguaaaugcacauucac

SEQ ID NO: 258248 - RNA, 24 nt, Artificial Sequence
  Synthetic
ucuaaaauguaaaugcacauucac

SEQ ID NO: 258249 - RNA, 18 nt, Artificial Sequence
  Synthetic
uaugcaauguucauucac

SEQ ID NO: 258250 - RNA, 19 nt, Artificial Sequence
  Synthetic
guaugcaauguucauucac

SEQ ID NO: 258251 - RNA, 20 nt, Artificial Sequence
  Synthetic
aguaugcaauguucauucac

SEQ ID NO: 258252 - RNA, 21 nt, Artificial Sequence
  Synthetic
gaguaugcaauguucauucac

SEQ ID NO: 258253 - RNA, 22 nt, Artificial Sequence
  Synthetic
ugaguaugcaauguucauucac

SEQ ID NO: 258254 - RNA, 23 nt, Artificial Sequence
  Synthetic
gugaguaugcaauguucauucac

SEQ ID NO: 258255 - RNA, 24 nt, Artificial Sequence
  Synthetic
ugugaguaugcaauguucauucac

SEQ ID NO: 258256 - RNA, 18 nt, Artificial Sequence
  Synthetic
uugaaguguaagauucac

SEQ ID NO: 258257 - RNA, 19 nt, Artificial Sequence
  Synthetic
cuugaaguguaagauucac

SEQ ID NO: 258258 - RNA, 20 nt, Artificial Sequence
  Synthetic
acuugaaguguaagauucac

SEQ ID NO: 258259 - RNA, 21 nt, Artificial Sequence
  Synthetic
uacuugaaguguaagauucac

SEQ ID NO: 258260 - RNA, 22 nt, Artificial Sequence
  Synthetic
uuacuugaaguguaagauucac

SEQ ID NO: 258261 - RNA, 23 nt, Artificial Sequence
  Synthetic
auuacuugaaguguaagauucac

SEQ ID NO: 258262 - RNA, 24 nt, Artificial Sequence
  Synthetic
cauuacuugaaguguaagauucac

SEQ ID NO: 258263 - RNA, 18 nt, Artificial Sequence
  Synthetic
agucucuuacagauucac

SEQ ID NO: 258264 - RNA, 19 nt, Artificial Sequence
  Synthetic
aagucucuuacagauucac

SEQ ID NO: 258265 - RNA, 20 nt, Artificial Sequence
  Synthetic
uaagucucuuacagauucac

SEQ ID NO: 258266 - RNA, 21 nt, Artificial Sequence
  Synthetic
uuaagucucuuacagauucac

SEQ ID NO: 258267 - RNA, 22 nt, Artificial Sequence
  Synthetic
guuaagucucuuacagauucac

SEQ ID NO: 258268 - RNA, 23 nt, Artificial Sequence
  Synthetic
uguuaagucucuuacagauucac

SEQ ID NO: 258269 - RNA, 24 nt, Artificial Sequence
  Synthetic
uuguuaagucucuuacagauucac

SEQ ID NO: 258270 - RNA, 18 nt, Artificial Sequence
  Synthetic
ucaggaagaauuauucac

SEQ ID NO: 258271 - RNA, 19 nt, Artificial Sequence
  Synthetic
uucaggaagaauuauucac

SEQ ID NO: 258272 - RNA, 20 nt, Artificial Sequence
  Synthetic
guucaggaagaauuauucac

SEQ ID NO: 258273 - RNA, 21 nt, Artificial Sequence
  Synthetic
gguucaggaagaauuauucac

SEQ ID NO: 258274 - RNA, 22 nt, Artificial Sequence
  Synthetic
agguucaggaagaauuauucac

SEQ ID NO: 258275 - RNA, 23 nt, Artificial Sequence
  Synthetic
uagguucaggaagaauuauucac

SEQ ID NO: 258276 - RNA, 24 nt, Artificial Sequence
  Synthetic
uuagguucaggaagaauuauucac

SEQ ID NO: 258277 - RNA, 18 nt, Artificial Sequence
  Synthetic
ggguuacagaaacuucac

SEQ ID NO: 258278 - RNA, 19 nt, Artificial Sequence
  Synthetic
aggguuacagaaacuucac

SEQ ID NO: 258279 - RNA, 20 nt, Artificial Sequence
  Synthetic
uaggguuacagaaacuucac

SEQ ID NO: 258280 - RNA, 21 nt, Artificial Sequence
  Synthetic
guaggguuacagaaacuucac

SEQ ID NO: 258281 - RNA, 22 nt, Artificial Sequence
  Synthetic
uguaggguuacagaaacuucac

SEQ ID NO: 258282 - RNA, 23 nt, Artificial Sequence
  Synthetic
uuguaggguuacagaaacuucac

SEQ ID NO: 258283 - RNA, 24 nt, Artificial Sequence
  Synthetic
uuuguaggguuacagaaacuucac

SEQ ID NO: 258284 - RNA, 18 nt, Artificial Sequence
  Synthetic
uugcuuuuuucacuucac

SEQ ID NO: 258285 - RNA, 19 nt, Artificial Sequence
  Synthetic
uuugcuuuuuucacuucac

SEQ ID NO: 258286 - RNA, 20 nt, Artificial Sequence
  Synthetic
uuuugcuuuuuucacuucac

SEQ ID NO: 258287 - RNA, 21 nt, Artificial Sequence
  Synthetic
uuuuugcuuuuuucacuucac

SEQ ID NO: 258288 - RNA, 22 nt, Artificial Sequence
  Synthetic
uuuuuugcuuuuuucacuucac

SEQ ID NO: 258289 - RNA, 23 nt, Artificial Sequence
  Synthetic
uuuuuuugcuuuuuucacuucac

SEQ ID NO: 258290 - RNA, 24 nt, Artificial Sequence
  Synthetic
uuuuuuuugcuuuuuucacuucac

SEQ ID NO: 258291 - RNA, 18 nt, Artificial Sequence
  Synthetic
guggagcccugacuucac

SEQ ID NO: 258292 - RNA, 19 nt, Artificial Sequence
  Synthetic
uguggagcccugacuucac

SEQ ID NO: 258293 - RNA, 20 nt, Artificial Sequence
  Synthetic
auguggagcccugacuucac

SEQ ID NO: 258294 - RNA, 21 nt, Artificial Sequence
  Synthetic
aauguggagcccugacuucac

SEQ ID NO: 258295 - RNA, 22 nt, Artificial Sequence
  Synthetic
caauguggagcccugacuucac

SEQ ID NO: 258296 - RNA, 23 nt, Artificial Sequence
  Synthetic
ccaauguggagcccugacuucac

SEQ ID NO: 258297 - RNA, 24 nt, Artificial Sequence
  Synthetic
uccaauguggagcccugacuucac

SEQ ID NO: 258298 - RNA, 18 nt, Artificial Sequence
  Synthetic
ccauuauauuuacuucac

SEQ ID NO: 258299 - RNA, 19 nt, Artificial Sequence
  Synthetic
uccauuauauuuacuucac

SEQ ID NO: 258300 - RNA, 20 nt, Artificial Sequence
  Synthetic
auccauuauauuuacuucac

SEQ ID NO: 258301 - RNA, 21 nt, Artificial Sequence
  Synthetic
uauccauuauauuuacuucac

SEQ ID NO: 258302 - RNA, 22 nt, Artificial Sequence
  Synthetic
auauccauuauauuuacuucac

SEQ ID NO: 258303 - RNA, 23 nt, Artificial Sequence
  Synthetic
aauauccauuauauuuacuucac

SEQ ID NO: 258304 - RNA, 24 nt, Artificial Sequence
  Synthetic
uaauauccauuauauuuacuucac

SEQ ID NO: 258305 - RNA, 18 nt, Artificial Sequence
  Synthetic
aauuauaacuaccuucac

SEQ ID NO: 258306 - RNA, 19 nt, Artificial Sequence
  Synthetic
uaauuauaacuaccuucac

SEQ ID NO: 258307 - RNA, 20 nt, Artificial Sequence
  Synthetic
uuaauuauaacuaccuucac

SEQ ID NO: 258308 - RNA, 21 nt, Artificial Sequence
  Synthetic
guuaauuauaacuaccuucac

SEQ ID NO: 258309 - RNA, 22 nt, Artificial Sequence
  Synthetic
uguuaauuauaacuaccuucac

SEQ ID NO: 258310 - RNA, 23 nt, Artificial Sequence
  Synthetic
uuguuaauuauaacuaccuucac

SEQ ID NO: 258311 - RNA, 24 nt, Artificial Sequence
  Synthetic
cuuguuaauuauaacuaccuucac

SEQ ID NO: 258312 - RNA, 18 nt, Artificial Sequence
  Synthetic
ccaucuguugcccuucac

SEQ ID NO: 258313 - RNA, 19 nt, Artificial Sequence
  Synthetic
accaucuguugcccuucac

SEQ ID NO: 258314 - RNA, 20 nt, Artificial Sequence
  Synthetic
uaccaucuguugcccuucac

SEQ ID NO: 258315 - RNA, 21 nt, Artificial Sequence
  Synthetic
cuaccaucuguugcccuucac

SEQ ID NO: 258316 - RNA, 22 nt, Artificial Sequence
  Synthetic
ucuaccaucuguugcccuucac

SEQ ID NO: 258317 - RNA, 23 nt, Artificial Sequence
  Synthetic
uucuaccaucuguugcccuucac

SEQ ID NO: 258318 - RNA, 24 nt, Artificial Sequence
  Synthetic
uuucuaccaucuguugcccuucac

SEQ ID NO: 258319 - RNA, 18 nt, Artificial Sequence
  Synthetic
gggcgccaugcucuucac

SEQ ID NO: 258320 - RNA, 19 nt, Artificial Sequence
  Synthetic
ggggcgccaugcucuucac

SEQ ID NO: 258321 - RNA, 20 nt, Artificial Sequence
  Synthetic
aggggcgccaugcucuucac

SEQ ID NO: 258322 - RNA, 21 nt, Artificial Sequence
  Synthetic
aaggggcgccaugcucuucac

SEQ ID NO: 258323 - RNA, 22 nt, Artificial Sequence
  Synthetic
caaggggcgccaugcucuucac

SEQ ID NO: 258324 - RNA, 23 nt, Artificial Sequence
  Synthetic
gcaaggggcgccaugcucuucac

SEQ ID NO: 258325 - RNA, 24 nt, Artificial Sequence
  Synthetic
agcaaggggcgccaugcucuucac

SEQ ID NO: 258326 - RNA, 18 nt, Artificial Sequence
  Synthetic
uguuuacagcgucuucac

SEQ ID NO: 258327 - RNA, 19 nt, Artificial Sequence
  Synthetic
uuguuuacagcgucuucac

SEQ ID NO: 258328 - RNA, 20 nt, Artificial Sequence
  Synthetic
auuguuuacagcgucuucac

SEQ ID NO: 258329 - RNA, 21 nt, Artificial Sequence
  Synthetic
cauuguuuacagcgucuucac

SEQ ID NO: 258330 - RNA, 22 nt, Artificial Sequence
  Synthetic
acauuguuuacagcgucuucac

SEQ ID NO: 258331 - RNA, 23 nt, Artificial Sequence
  Synthetic
aacauuguuuacagcgucuucac

SEQ ID NO: 258332 - RNA, 24 nt, Artificial Sequence
  Synthetic
caacauuguuuacagcgucuucac

SEQ ID NO: 258333 - RNA, 18 nt, Artificial Sequence
  Synthetic
agagcagaaugucuucac

SEQ ID NO: 258334 - RNA, 19 nt, Artificial Sequence
  Synthetic
uagagcagaaugucuucac

SEQ ID NO: 258335 - RNA, 20 nt, Artificial Sequence
  Synthetic
guagagcagaaugucuucac

SEQ ID NO: 258336 - RNA, 21 nt, Artificial Sequence
  Synthetic
gguagagcagaaugucuucac

SEQ ID NO: 258337 - RNA, 22 nt, Artificial Sequence
  Synthetic
ugguagagcagaaugucuucac

SEQ ID NO: 258338 - RNA, 23 nt, Artificial Sequence
  Synthetic
augguagagcagaaugucuucac

SEQ ID NO: 258339 - RNA, 24 nt, Artificial Sequence
  Synthetic
uaugguagagcagaaugucuucac

SEQ ID NO: 258340 - RNA, 18 nt, Artificial Sequence
  Synthetic
auuuaaguaauaguucac

SEQ ID NO: 258341 - RNA, 19 nt, Artificial Sequence
  Synthetic
aauuuaaguaauaguucac

SEQ ID NO: 258342 - RNA, 20 nt, Artificial Sequence
  Synthetic
aaauuuaaguaauaguucac

SEQ ID NO: 258343 - RNA, 21 nt, Artificial Sequence
  Synthetic
aaaauuuaaguaauaguucac

SEQ ID NO: 258344 - RNA, 22 nt, Artificial Sequence
  Synthetic
aaaaauuuaaguaauaguucac

SEQ ID NO: 258345 - RNA, 23 nt, Artificial Sequence
  Synthetic
uaaaaauuuaaguaauaguucac

SEQ ID NO: 258346 - RNA, 24 nt, Artificial Sequence
  Synthetic
uuaaaaauuuaaguaauaguucac

SEQ ID NO: 258347 - RNA, 18 nt, Artificial Sequence
  Synthetic
aguauuuuaagcguucac

SEQ ID NO: 258348 - RNA, 19 nt, Artificial Sequence
  Synthetic
aaguauuuuaagcguucac

SEQ ID NO: 258349 - RNA, 20 nt, Artificial Sequence
  Synthetic
caaguauuuuaagcguucac

SEQ ID NO: 258350 - RNA, 21 nt, Artificial Sequence
  Synthetic
ucaaguauuuuaagcguucac

SEQ ID NO: 258351 - RNA, 22 nt, Artificial Sequence
  Synthetic
aucaaguauuuuaagcguucac

SEQ ID NO: 258352 - RNA, 23 nt, Artificial Sequence
  Synthetic
aaucaaguauuuuaagcguucac

SEQ ID NO: 258353 - RNA, 24 nt, Artificial Sequence
  Synthetic
aaaucaaguauuuuaagcguucac

SEQ ID NO: 258354 - RNA, 18 nt, Artificial Sequence
  Synthetic
ccaaaccugcuuguucac

SEQ ID NO: 258355 - RNA, 19 nt, Artificial Sequence
  Synthetic
uccaaaccugcuuguucac

SEQ ID NO: 258356 - RNA, 20 nt, Artificial Sequence
  Synthetic
uuccaaaccugcuuguucac

SEQ ID NO: 258357 - RNA, 21 nt, Artificial Sequence
  Synthetic
auuccaaaccugcuuguucac

SEQ ID NO: 258358 - RNA, 22 nt, Artificial Sequence
  Synthetic
gauuccaaaccugcuuguucac

SEQ ID NO: 258359 - RNA, 23 nt, Artificial Sequence
  Synthetic
ugauuccaaaccugcuuguucac

SEQ ID NO: 258360 - RNA, 24 nt, Artificial Sequence
  Synthetic
uugauuccaaaccugcuuguucac

SEQ ID NO: 258361 - RNA, 18 nt, Artificial Sequence
  Synthetic
uuggaaaaauaauuucac

SEQ ID NO: 258362 - RNA, 19 nt, Artificial Sequence
  Synthetic
cuuggaaaaauaauuucac

SEQ ID NO: 258363 - RNA, 20 nt, Artificial Sequence
  Synthetic
ucuuggaaaaauaauuucac

SEQ ID NO: 258364 - RNA, 21 nt, Artificial Sequence
  Synthetic
aucuuggaaaaauaauuucac

SEQ ID NO: 258365 - RNA, 22 nt, Artificial Sequence
  Synthetic
caucuuggaaaaauaauuucac

SEQ ID NO: 258366 - RNA, 23 nt, Artificial Sequence
  Synthetic
ucaucuuggaaaaauaauuucac

SEQ ID NO: 258367 - RNA, 24 nt, Artificial Sequence
  Synthetic
uucaucuuggaaaaauaauuucac

SEQ ID NO: 258368 - RNA, 18 nt, Artificial Sequence
  Synthetic
gauagugggugauuucac

SEQ ID NO: 258369 - RNA, 19 nt, Artificial Sequence
  Synthetic
ugauagugggugauuucac

SEQ ID NO: 258370 - RNA, 20 nt, Artificial Sequence
  Synthetic
augauagugggugauuucac

SEQ ID NO: 258371 - RNA, 21 nt, Artificial Sequence
  Synthetic
caugauagugggugauuucac

SEQ ID NO: 258372 - RNA, 22 nt, Artificial Sequence
  Synthetic
ucaugauagugggugauuucac

SEQ ID NO: 258373 - RNA, 23 nt, Artificial Sequence
  Synthetic
cucaugauagugggugauuucac

SEQ ID NO: 258374 - RNA, 24 nt, Artificial Sequence
  Synthetic
ucucaugauagugggugauuucac

SEQ ID NO: 258375 - RNA, 18 nt, Artificial Sequence
  Synthetic
caaguucaauuauuucac

SEQ ID NO: 258376 - RNA, 19 nt, Artificial Sequence
  Synthetic
acaaguucaauuauuucac

SEQ ID NO: 258377 - RNA, 20 nt, Artificial Sequence
  Synthetic
cacaaguucaauuauuucac

SEQ ID NO: 258378 - RNA, 21 nt, Artificial Sequence
  Synthetic
ucacaaguucaauuauuucac

SEQ ID NO: 258379 - RNA, 22 nt, Artificial Sequence
  Synthetic
aucacaaguucaauuauuucac

SEQ ID NO: 258380 - RNA, 23 nt, Artificial Sequence
  Synthetic
caucacaaguucaauuauuucac

SEQ ID NO: 258381 - RNA, 24 nt, Artificial Sequence
  Synthetic
ucaucacaaguucaauuauuucac

SEQ ID NO: 258382 - RNA, 18 nt, Artificial Sequence
  Synthetic
gccauuuagaacuuucac

SEQ ID NO: 258383 - RNA, 19 nt, Artificial Sequence
  Synthetic
ugccauuuagaacuuucac

SEQ ID NO: 258384 - RNA, 20 nt, Artificial Sequence
  Synthetic
augccauuuagaacuuucac

SEQ ID NO: 258385 - RNA, 21 nt, Artificial Sequence
  Synthetic
gaugccauuuagaacuuucac

SEQ ID NO: 258386 - RNA, 22 nt, Artificial Sequence
  Synthetic
ugaugccauuuagaacuuucac

SEQ ID NO: 258387 - RNA, 23 nt, Artificial Sequence
  Synthetic
augaugccauuuagaacuuucac

SEQ ID NO: 258388 - RNA, 24 nt, Artificial Sequence
  Synthetic
gaugaugccauuuagaacuuucac

SEQ ID NO: 258389 - RNA, 18 nt, Artificial Sequence
  Synthetic
uggcauuuugacuuucac

SEQ ID NO: 258390 - RNA, 19 nt, Artificial Sequence
  Synthetic
auggcauuuugacuuucac

SEQ ID NO: 258391 - RNA, 20 nt, Artificial Sequence
  Synthetic
gauggcauuuugacuuucac

SEQ ID NO: 258392 - RNA, 21 nt, Artificial Sequence
  Synthetic
ugauggcauuuugacuuucac

SEQ ID NO: 258393 - RNA, 22 nt, Artificial Sequence
  Synthetic
augauggcauuuugacuuucac

SEQ ID NO: 258394 - RNA, 23 nt, Artificial Sequence
  Synthetic
caugauggcauuuugacuuucac

SEQ ID NO: 258395 - RNA, 24 nt, Artificial Sequence
  Synthetic
ucaugauggcauuuugacuuucac

SEQ ID NO: 258396 - RNA, 18 nt, Artificial Sequence
  Synthetic
gucaggacccaguuucac

SEQ ID NO: 258397 - RNA, 19 nt, Artificial Sequence
  Synthetic
ggucaggacccaguuucac

SEQ ID NO: 258398 - RNA, 20 nt, Artificial Sequence
  Synthetic
aggucaggacccaguuucac

SEQ ID NO: 258399 - RNA, 21 nt, Artificial Sequence
  Synthetic
aaggucaggacccaguuucac

SEQ ID NO: 258400 - RNA, 22 nt, Artificial Sequence
  Synthetic
caaggucaggacccaguuucac

SEQ ID NO: 258401 - RNA, 23 nt, Artificial Sequence
  Synthetic
ucaaggucaggacccaguuucac

SEQ ID NO: 258402 - RNA, 24 nt, Artificial Sequence
  Synthetic
uucaaggucaggacccaguuucac

SEQ ID NO: 258403 - RNA, 18 nt, Artificial Sequence
  Synthetic
acauacagcuaguuucac

SEQ ID NO: 258404 - RNA, 19 nt, Artificial Sequence
  Synthetic
gacauacagcuaguuucac

SEQ ID NO: 258405 - RNA, 20 nt, Artificial Sequence
  Synthetic
agacauacagcuaguuucac

SEQ ID NO: 258406 - RNA, 21 nt, Artificial Sequence
  Synthetic
cagacauacagcuaguuucac

SEQ ID NO: 258407 - RNA, 22 nt, Artificial Sequence
  Synthetic
ucagacauacagcuaguuucac

SEQ ID NO: 258408 - RNA, 23 nt, Artificial Sequence
  Synthetic
cucagacauacagcuaguuucac

SEQ ID NO: 258409 - RNA, 24 nt, Artificial Sequence
  Synthetic
ucucagacauacagcuaguuucac

SEQ ID NO: 258410 - RNA, 18 nt, Artificial Sequence
  Synthetic
gauaaacaacgguuucac

SEQ ID NO: 258411 - RNA, 19 nt, Artificial Sequence
  Synthetic
agauaaacaacgguuucac

SEQ ID NO: 258412 - RNA, 20 nt, Artificial Sequence
  Synthetic
aagauaaacaacgguuucac

SEQ ID NO: 258413 - RNA, 21 nt, Artificial Sequence
  Synthetic
caagauaaacaacgguuucac

SEQ ID NO: 258414 - RNA, 22 nt, Artificial Sequence
  Synthetic
gcaagauaaacaacgguuucac

SEQ ID NO: 258415 - RNA, 23 nt, Artificial Sequence
  Synthetic
ugcaagauaaacaacgguuucac

SEQ ID NO: 258416 - RNA, 24 nt, Artificial Sequence
  Synthetic
uugcaagauaaacaacgguuucac

SEQ ID NO: 258417 - RNA, 18 nt, Artificial Sequence
  Synthetic
ucauagggaaauuuucac

SEQ ID NO: 258418 - RNA, 19 nt, Artificial Sequence
  Synthetic
uucauagggaaauuuucac

SEQ ID NO: 258419 - RNA, 20 nt, Artificial Sequence
  Synthetic
uuucauagggaaauuuucac

SEQ ID NO: 258420 - RNA, 21 nt, Artificial Sequence
  Synthetic
guuucauagggaaauuuucac

SEQ ID NO: 258421 - RNA, 22 nt, Artificial Sequence
  Synthetic
aguuucauagggaaauuuucac

SEQ ID NO: 258422 - RNA, 23 nt, Artificial Sequence
  Synthetic
caguuucauagggaaauuuucac

SEQ ID NO: 258423 - RNA, 24 nt, Artificial Sequence
  Synthetic
ucaguuucauagggaaauuuucac

SEQ ID NO: 258424 - RNA, 18 nt, Artificial Sequence
  Synthetic
gauaaaagacauuuucac

SEQ ID NO: 258425 - RNA, 19 nt, Artificial Sequence
  Synthetic
ugauaaaagacauuuucac

SEQ ID NO: 258426 - RNA, 20 nt, Artificial Sequence
  Synthetic
uugauaaaagacauuuucac

SEQ ID NO: 258427 - RNA, 21 nt, Artificial Sequence
  Synthetic
cuugauaaaagacauuuucac

SEQ ID NO: 258428 - RNA, 22 nt, Artificial Sequence
  Synthetic
ccuugauaaaagacauuuucac

SEQ ID NO: 258429 - RNA, 23 nt, Artificial Sequence
  Synthetic
accuugauaaaagacauuuucac

SEQ ID NO: 258430 - RNA, 24 nt, Artificial Sequence
  Synthetic
gaccuugauaaaagacauuuucac

SEQ ID NO: 258431 - RNA, 18 nt, Artificial Sequence
  Synthetic
ugaacauuugauuuucac

SEQ ID NO: 258432 - RNA, 19 nt, Artificial Sequence
  Synthetic
uugaacauuugauuuucac

SEQ ID NO: 258433 - RNA, 20 nt, Artificial Sequence
  Synthetic
auugaacauuugauuuucac

SEQ ID NO: 258434 - RNA, 21 nt, Artificial Sequence
  Synthetic
aauugaacauuugauuuucac

SEQ ID NO: 258435 - RNA, 22 nt, Artificial Sequence
  Synthetic
aaauugaacauuugauuuucac

SEQ ID NO: 258436 - RNA, 23 nt, Artificial Sequence
  Synthetic
aaaauugaacauuugauuuucac

SEQ ID NO: 258437 - RNA, 24 nt, Artificial Sequence
  Synthetic
gaaaauugaacauuugauuuucac

SEQ ID NO: 258438 - RNA, 18 nt, Artificial Sequence
  Synthetic
gaauaaauuaguuuucac

SEQ ID NO: 258439 - RNA, 19 nt, Artificial Sequence
  Synthetic
agaauaaauuaguuuucac

SEQ ID NO: 258440 - RNA, 20 nt, Artificial Sequence
  Synthetic
aagaauaaauuaguuuucac

SEQ ID NO: 258441 - RNA, 21 nt, Artificial Sequence
  Synthetic
caagaauaaauuaguuuucac

SEQ ID NO: 258442 - RNA, 22 nt, Artificial Sequence
  Synthetic
gcaagaauaaauuaguuuucac

SEQ ID NO: 258443 - RNA, 23 nt, Artificial Sequence
  Synthetic
agcaagaauaaauuaguuuucac

SEQ ID NO: 258444 - RNA, 24 nt, Artificial Sequence
  Synthetic
aagcaagaauaaauuaguuuucac

SEQ ID NO: 258445 - RNA, 18 nt, Artificial Sequence
  Synthetic
cuggaaauauguuuucac

SEQ ID NO: 258446 - RNA, 19 nt, Artificial Sequence
  Synthetic
ucuggaaauauguuuucac

SEQ ID NO: 258447 - RNA, 20 nt, Artificial Sequence
  Synthetic
gucuggaaauauguuuucac

SEQ ID NO: 258448 - RNA, 21 nt, Artificial Sequence
  Synthetic
ggucuggaaauauguuuucac

SEQ ID NO: 258449 - RNA, 22 nt, Artificial Sequence
  Synthetic
uggucuggaaauauguuuucac

SEQ ID NO: 258450 - RNA, 23 nt, Artificial Sequence
  Synthetic
uuggucuggaaauauguuuucac

SEQ ID NO: 258451 - RNA, 24 nt, Artificial Sequence
  Synthetic
auuggucuggaaauauguuuucac

SEQ ID NO: 258452 - RNA, 18 nt, Artificial Sequence
  Synthetic
aaugauaaaauuuuucac

SEQ ID NO: 258453 - RNA, 19 nt, Artificial Sequence
  Synthetic
gaaugauaaaauuuuucac

SEQ ID NO: 258454 - RNA, 20 nt, Artificial Sequence
  Synthetic
ugaaugauaaaauuuuucac

SEQ ID NO: 258455 - RNA, 21 nt, Artificial Sequence
  Synthetic
gugaaugauaaaauuuuucac

SEQ ID NO: 258456 - RNA, 22 nt, Artificial Sequence
  Synthetic
ugugaaugauaaaauuuuucac

SEQ ID NO: 258457 - RNA, 23 nt, Artificial Sequence
  Synthetic
cugugaaugauaaaauuuuucac

SEQ ID NO: 258458 - RNA, 24 nt, Artificial Sequence
  Synthetic
ccugugaaugauaaaauuuuucac

SEQ ID NO: 258459 - RNA, 18 nt, Artificial Sequence
  Synthetic
aaggaaagaaaaaaagac

SEQ ID NO: 258460 - RNA, 19 nt, Artificial Sequence
  Synthetic
caaggaaagaaaaaaagac

SEQ ID NO: 258461 - RNA, 20 nt, Artificial Sequence
  Synthetic
gcaaggaaagaaaaaaagac

SEQ ID NO: 258462 - RNA, 21 nt, Artificial Sequence
  Synthetic
agcaaggaaagaaaaaaagac

SEQ ID NO: 258463 - RNA, 22 nt, Artificial Sequence
  Synthetic
uagcaaggaaagaaaaaaagac

SEQ ID NO: 258464 - RNA, 23 nt, Artificial Sequence
  Synthetic
guagcaaggaaagaaaaaaagac

SEQ ID NO: 258465 - RNA, 24 nt, Artificial Sequence
  Synthetic
gguagcaaggaaagaaaaaaagac

SEQ ID NO: 258466 - RNA, 18 nt, Artificial Sequence
  Synthetic
ccuccauggaaaaaagac

SEQ ID NO: 258467 - RNA, 19 nt, Artificial Sequence
  Synthetic
cccuccauggaaaaaagac

SEQ ID NO: 258468 - RNA, 20 nt, Artificial Sequence
  Synthetic
acccuccauggaaaaaagac

SEQ ID NO: 258469 - RNA, 21 nt, Artificial Sequence
  Synthetic
uacccuccauggaaaaaagac

SEQ ID NO: 258470 - RNA, 22 nt, Artificial Sequence
  Synthetic
guacccuccauggaaaaaagac

SEQ ID NO: 258471 - RNA, 23 nt, Artificial Sequence
  Synthetic
aguacccuccauggaaaaaagac

SEQ ID NO: 258472 - RNA, 24 nt, Artificial Sequence
  Synthetic
caguacccuccauggaaaaaagac

SEQ ID NO: 258473 - RNA, 18 nt, Artificial Sequence
  Synthetic
uuucucaaauaaaaagac

SEQ ID NO: 258474 - RNA, 19 nt, Artificial Sequence
  Synthetic
uuuucucaaauaaaaagac

SEQ ID NO: 258475 - RNA, 20 nt, Artificial Sequence
  Synthetic
cuuuucucaaauaaaaagac

SEQ ID NO: 258476 - RNA, 21 nt, Artificial Sequence
  Synthetic
ucuuuucucaaauaaaaagac

SEQ ID NO: 258477 - RNA, 22 nt, Artificial Sequence
  Synthetic
aucuuuucucaaauaaaaagac

SEQ ID NO: 258478 - RNA, 23 nt, Artificial Sequence
  Synthetic
aaucuuuucucaaauaaaaagac

SEQ ID NO: 258479 - RNA, 24 nt, Artificial Sequence
  Synthetic
uaaucuuuucucaaauaaaaagac

SEQ ID NO: 258480 - RNA, 18 nt, Artificial Sequence
  Synthetic
aaaaaaugggcaaaagac

SEQ ID NO: 258481 - RNA, 19 nt, Artificial Sequence
  Synthetic
uaaaaaaugggcaaaagac

SEQ ID NO: 258482 - RNA, 20 nt, Artificial Sequence
  Synthetic
uuaaaaaaugggcaaaagac

SEQ ID NO: 258483 - RNA, 21 nt, Artificial Sequence
  Synthetic
uuuaaaaaaugggcaaaagac

SEQ ID NO: 258484 - RNA, 22 nt, Artificial Sequence
  Synthetic
auuuaaaaaaugggcaaaagac

SEQ ID NO: 258485 - RNA, 23 nt, Artificial Sequence
  Synthetic
cauuuaaaaaaugggcaaaagac

SEQ ID NO: 258486 - RNA, 24 nt, Artificial Sequence
  Synthetic
ucauuuaaaaaaugggcaaaagac

SEQ ID NO: 258487 - RNA, 18 nt, Artificial Sequence
  Synthetic
augaugaccagaaaagac

SEQ ID NO: 258488 - RNA, 19 nt, Artificial Sequence
  Synthetic
aaugaugaccagaaaagac

SEQ ID NO: 258489 - RNA, 20 nt, Artificial Sequence
  Synthetic
uaaugaugaccagaaaagac

SEQ ID NO: 258490 - RNA, 21 nt, Artificial Sequence
  Synthetic
uuaaugaugaccagaaaagac

SEQ ID NO: 258491 - RNA, 22 nt, Artificial Sequence
  Synthetic
cuuaaugaugaccagaaaagac

SEQ ID NO: 258492 - RNA, 23 nt, Artificial Sequence
  Synthetic
ccuuaaugaugaccagaaaagac

SEQ ID NO: 258493 - RNA, 24 nt, Artificial Sequence
  Synthetic
uccuuaaugaugaccagaaaagac

SEQ ID NO: 258494 - RNA, 18 nt, Artificial Sequence
  Synthetic
aggaaaacgauaaaagac

SEQ ID NO: 258495 - RNA, 19 nt, Artificial Sequence
  Synthetic
caggaaaacgauaaaagac

SEQ ID NO: 258496 - RNA, 20 nt, Artificial Sequence
  Synthetic
ucaggaaaacgauaaaagac

SEQ ID NO: 258497 - RNA, 21 nt, Artificial Sequence
  Synthetic
cucaggaaaacgauaaaagac

SEQ ID NO: 258498 - RNA, 22 nt, Artificial Sequence
  Synthetic
ucucaggaaaacgauaaaagac

SEQ ID NO: 258499 - RNA, 23 nt, Artificial Sequence
  Synthetic
gucucaggaaaacgauaaaagac

SEQ ID NO: 258500 - RNA, 24 nt, Artificial Sequence
  Synthetic
ggucucaggaaaacgauaaaagac

SEQ ID NO: 258501 - RNA, 18 nt, Artificial Sequence
  Synthetic
aagcaaauucuaaaagac

SEQ ID NO: 258502 - RNA, 19 nt, Artificial Sequence
  Synthetic
uaagcaaauucuaaaagac

SEQ ID NO: 258503 - RNA, 20 nt, Artificial Sequence
  Synthetic
uuaagcaaauucuaaaagac

SEQ ID NO: 258504 - RNA, 21 nt, Artificial Sequence
  Synthetic
uuuaagcaaauucuaaaagac

SEQ ID NO: 258505 - RNA, 22 nt, Artificial Sequence
  Synthetic
auuuaagcaaauucuaaaagac

SEQ ID NO: 258506 - RNA, 23 nt, Artificial Sequence
  Synthetic
cauuuaagcaaauucuaaaagac

SEQ ID NO: 258507 - RNA, 24 nt, Artificial Sequence
  Synthetic
gcauuuaagcaaauucuaaaagac

SEQ ID NO: 258508 - RNA, 18 nt, Artificial Sequence
  Synthetic
auucacaauaacaaagac

SEQ ID NO: 258509 - RNA, 19 nt, Artificial Sequence
  Synthetic
uauucacaauaacaaagac

SEQ ID NO: 258510 - RNA, 20 nt, Artificial Sequence
  Synthetic
cuauucacaauaacaaagac

SEQ ID NO: 258511 - RNA, 21 nt, Artificial Sequence
  Synthetic
acuauucacaauaacaaagac

SEQ ID NO: 258512 - RNA, 22 nt, Artificial Sequence
  Synthetic
cacuauucacaauaacaaagac

SEQ ID NO: 258513 - RNA, 23 nt, Artificial Sequence
  Synthetic
gcacuauucacaauaacaaagac

SEQ ID NO: 258514 - RNA, 24 nt, Artificial Sequence
  Synthetic
agcacuauucacaauaacaaagac

SEQ ID NO: 258515 - RNA, 18 nt, Artificial Sequence
  Synthetic
cuauacaguaacaaagac

SEQ ID NO: 258516 - RNA, 19 nt, Artificial Sequence
  Synthetic
acuauacaguaacaaagac

SEQ ID NO: 258517 - RNA, 20 nt, Artificial Sequence
  Synthetic
cacuauacaguaacaaagac

SEQ ID NO: 258518 - RNA, 21 nt, Artificial Sequence
  Synthetic
gcacuauacaguaacaaagac

SEQ ID NO: 258519 - RNA, 22 nt, Artificial Sequence
  Synthetic
agcacuauacaguaacaaagac

SEQ ID NO: 258520 - RNA, 23 nt, Artificial Sequence
  Synthetic
cagcacuauacaguaacaaagac

SEQ ID NO: 258521 - RNA, 24 nt, Artificial Sequence
  Synthetic
gcagcacuauacaguaacaaagac

SEQ ID NO: 258522 - RNA, 18 nt, Artificial Sequence
  Synthetic
aauaaaauuaacaaagac

SEQ ID NO: 258523 - RNA, 19 nt, Artificial Sequence
  Synthetic
aaauaaaauuaacaaagac

SEQ ID NO: 258524 - RNA, 20 nt, Artificial Sequence
  Synthetic
uaaauaaaauuaacaaagac

SEQ ID NO: 258525 - RNA, 21 nt, Artificial Sequence
  Synthetic
uuaaauaaaauuaacaaagac

SEQ ID NO: 258526 - RNA, 22 nt, Artificial Sequence
  Synthetic
auuaaauaaaauuaacaaagac

SEQ ID NO: 258527 - RNA, 23 nt, Artificial Sequence
  Synthetic
uauuaaauaaaauuaacaaagac

SEQ ID NO: 258528 - RNA, 24 nt, Artificial Sequence
  Synthetic
auauuaaauaaaauuaacaaagac

SEQ ID NO: 258529 - RNA, 18 nt, Artificial Sequence
  Synthetic
auucacaauagcaaagac

SEQ ID NO: 258530 - RNA, 19 nt, Artificial Sequence
  Synthetic
uauucacaauagcaaagac

SEQ ID NO: 258531 - RNA, 20 nt, Artificial Sequence
  Synthetic
cuauucacaauagcaaagac

SEQ ID NO: 258532 - RNA, 24 nt, Artificial Sequence
  Synthetic
ggcacuauucacaauagcaaagac

SEQ ID NO: 258533 - RNA, 22 nt, Artificial Sequence
  Synthetic
cgcuauucacaauagcaaagac

SEQ ID NO: 258534 - RNA, 23 nt, Artificial Sequence
  Synthetic
gcgcuauucacaauagcaaagac

SEQ ID NO: 258535 - RNA, 24 nt, Artificial Sequence
  Synthetic
ggcgcuauucacaauagcaaagac

SEQ ID NO: 258536 - RNA, 18 nt, Artificial Sequence
  Synthetic
guucacaauagcaaagac

SEQ ID NO: 258537 - RNA, 19 nt, Artificial Sequence
  Synthetic
uguucacaauagcaaagac

SEQ ID NO: 258538 - RNA, 20 nt, Artificial Sequence
  Synthetic
cuguucacaauagcaaagac

SEQ ID NO: 258539 - RNA, 21 nt, Artificial Sequence
  Synthetic
acuguucacaauagcaaagac

SEQ ID NO: 258540 - RNA, 22 nt, Artificial Sequence
  Synthetic
cacuguucacaauagcaaagac

SEQ ID NO: 258541 - RNA, 23 nt, Artificial Sequence
  Synthetic
gcacuguucacaauagcaaagac

SEQ ID NO: 258542 - RNA, 24 nt, Artificial Sequence
  Synthetic
agcacuguucacaauagcaaagac

SEQ ID NO: 258543 - RNA, 18 nt, Artificial Sequence
  Synthetic
auuuacaauagcaaagac

SEQ ID NO: 258544 - RNA, 19 nt, Artificial Sequence
  Synthetic
uauuuacaauagcaaagac

SEQ ID NO: 258545 - RNA, 20 nt, Artificial Sequence
  Synthetic
cuauuuacaauagcaaagac

SEQ ID NO: 258546 - RNA, 24 nt, Artificial Sequence
  Synthetic
ggcacuauuuacaauagcaaagac

SEQ ID NO: 258547 - RNA, 18 nt, Artificial Sequence
  Synthetic
guuuacaauagcaaagac

SEQ ID NO: 258548 - RNA, 19 nt, Artificial Sequence
  Synthetic
uguuuacaauagcaaagac

SEQ ID NO: 258549 - RNA, 20 nt, Artificial Sequence
  Synthetic
cuguuuacaauagcaaagac

SEQ ID NO: 258550 - RNA, 21 nt, Artificial Sequence
  Synthetic
acuguuuacaauagcaaagac

SEQ ID NO: 258551 - RNA, 22 nt, Artificial Sequence
  Synthetic
cacuguuuacaauagcaaagac

SEQ ID NO: 258552 - RNA, 23 nt, Artificial Sequence
  Synthetic
gcacuguuuacaauagcaaagac

SEQ ID NO: 258553 - RNA, 24 nt, Artificial Sequence
  Synthetic
agcacuguuuacaauagcaaagac

SEQ ID NO: 258554 - RNA, 18 nt, Artificial Sequence
  Synthetic
augggcaauagcaaagac

SEQ ID NO: 258555 - RNA, 19 nt, Artificial Sequence
  Synthetic
gaugggcaauagcaaagac

SEQ ID NO: 258556 - RNA, 20 nt, Artificial Sequence
  Synthetic
ugaugggcaauagcaaagac

SEQ ID NO: 258557 - RNA, 21 nt, Artificial Sequence
  Synthetic
gugaugggcaauagcaaagac

SEQ ID NO: 258558 - RNA, 22 nt, Artificial Sequence
  Synthetic
ggugaugggcaauagcaaagac

SEQ ID NO: 258559 - RNA, 23 nt, Artificial Sequence
  Synthetic
aggugaugggcaauagcaaagac

SEQ ID NO: 258560 - RNA, 24 nt, Artificial Sequence
  Synthetic
uaggugaugggcaauagcaaagac

SEQ ID NO: 258561 - RNA, 18 nt, Artificial Sequence
  Synthetic
auuuacaguagcaaagac

SEQ ID NO: 258562 - RNA, 19 nt, Artificial Sequence
  Synthetic
uauuuacaguagcaaagac

SEQ ID NO: 258563 - RNA, 20 nt, Artificial Sequence
  Synthetic
cuauuuacaguagcaaagac

SEQ ID NO: 258564 - RNA, 21 nt, Artificial Sequence
  Synthetic
acuauuuacaguagcaaagac

SEQ ID NO: 258565 - RNA, 22 nt, Artificial Sequence
  Synthetic
cacuauuuacaguagcaaagac

SEQ ID NO: 258566 - RNA, 23 nt, Artificial Sequence
  Synthetic
gcacuauuuacaguagcaaagac

SEQ ID NO: 258567 - RNA, 24 nt, Artificial Sequence
  Synthetic
ggcacuauuuacaguagcaaagac

SEQ ID NO: 258568 - RNA, 18 nt, Artificial Sequence
  Synthetic
ggagaaagucucaaagac

SEQ ID NO: 258569 - RNA, 19 nt, Artificial Sequence
  Synthetic
aggagaaagucucaaagac

SEQ ID NO: 258570 - RNA, 20 nt, Artificial Sequence
  Synthetic
aaggagaaagucucaaagac

SEQ ID NO: 258571 - RNA, 21 nt, Artificial Sequence
  Synthetic
caaggagaaagucucaaagac

SEQ ID NO: 258572 - RNA, 22 nt, Artificial Sequence
  Synthetic
gcaaggagaaagucucaaagac

SEQ ID NO: 258573 - RNA, 23 nt, Artificial Sequence
  Synthetic
agcaaggagaaagucucaaagac

SEQ ID NO: 258574 - RNA, 24 nt, Artificial Sequence
  Synthetic
gagcaaggagaaagucucaaagac

SEQ ID NO: 258575 - RNA, 18 nt, Artificial Sequence
  Synthetic
uugccaucugagaaagac

SEQ ID NO: 258576 - RNA, 19 nt, Artificial Sequence
  Synthetic
guugccaucugagaaagac

SEQ ID NO: 258577 - RNA, 20 nt, Artificial Sequence
  Synthetic
uguugccaucugagaaagac

SEQ ID NO: 258578 - RNA, 21 nt, Artificial Sequence
  Synthetic
auguugccaucugagaaagac

SEQ ID NO: 258579 - RNA, 22 nt, Artificial Sequence
  Synthetic
gauguugccaucugagaaagac

SEQ ID NO: 258580 - RNA, 23 nt, Artificial Sequence
  Synthetic
ugauguugccaucugagaaagac

SEQ ID NO: 258581 - RNA, 24 nt, Artificial Sequence
  Synthetic
augauguugccaucugagaaagac

SEQ ID NO: 258582 - RNA, 18 nt, Artificial Sequence
  Synthetic
augguagaguagaaagac

SEQ ID NO: 258583 - RNA, 19 nt, Artificial Sequence
  Synthetic
uaugguagaguagaaagac

SEQ ID NO: 258584 - RNA, 20 nt, Artificial Sequence
  Synthetic
guaugguagaguagaaagac

SEQ ID NO: 258585 - RNA, 21 nt, Artificial Sequence
  Synthetic
aguaugguagaguagaaagac

SEQ ID NO: 258586 - RNA, 22 nt, Artificial Sequence
  Synthetic
gaguaugguagaguagaaagac

SEQ ID NO: 258587 - RNA, 23 nt, Artificial Sequence
  Synthetic
ugaguaugguagaguagaaagac

SEQ ID NO: 258588 - RNA, 24 nt, Artificial Sequence
  Synthetic
gugaguaugguagaguagaaagac

SEQ ID NO: 258589 - RNA, 18 nt, Artificial Sequence
  Synthetic
cagaagaaaaggaaagac

SEQ ID NO: 258590 - RNA, 19 nt, Artificial Sequence
  Synthetic
ccagaagaaaaggaaagac

SEQ ID NO: 258591 - RNA, 20 nt, Artificial Sequence
  Synthetic
accagaagaaaaggaaagac

SEQ ID NO: 258592 - RNA, 21 nt, Artificial Sequence
  Synthetic
gaccagaagaaaaggaaagac

SEQ ID NO: 258593 - RNA, 22 nt, Artificial Sequence
  Synthetic
ugaccagaagaaaaggaaagac

SEQ ID NO: 258594 - RNA, 23 nt, Artificial Sequence
  Synthetic
augaccagaagaaaaggaaagac

SEQ ID NO: 258595 - RNA, 24 nt, Artificial Sequence
  Synthetic
caugaccagaagaaaaggaaagac

SEQ ID NO: 258596 - RNA, 18 nt, Artificial Sequence
  Synthetic
gaucuuuugaugaaagac

SEQ ID NO: 258597 - RNA, 19 nt, Artificial Sequence
  Synthetic
ugaucuuuugaugaaagac

SEQ ID NO: 258598 - RNA, 20 nt, Artificial Sequence
  Synthetic
augaucuuuugaugaaagac

SEQ ID NO: 258599 - RNA, 21 nt, Artificial Sequence
  Synthetic
aaugaucuuuugaugaaagac

SEQ ID NO: 258600 - RNA, 22 nt, Artificial Sequence
  Synthetic
uaaugaucuuuugaugaaagac

SEQ ID NO: 258601 - RNA, 23 nt, Artificial Sequence
  Synthetic
auaaugaucuuuugaugaaagac

SEQ ID NO: 258602 - RNA, 24 nt, Artificial Sequence
  Synthetic
gauaaugaucuuuugaugaaagac

SEQ ID NO: 258603 - RNA, 18 nt, Artificial Sequence
  Synthetic
ucccaccagcugaaagac

SEQ ID NO: 258604 - RNA, 19 nt, Artificial Sequence
  Synthetic
cucccaccagcugaaagac

SEQ ID NO: 258605 - RNA, 20 nt, Artificial Sequence
  Synthetic
acucccaccagcugaaagac

SEQ ID NO: 258606 - RNA, 21 nt, Artificial Sequence
  Synthetic
cacucccaccagcugaaagac

SEQ ID NO: 258607 - RNA, 22 nt, Artificial Sequence
  Synthetic
ccacucccaccagcugaaagac

SEQ ID NO: 258608 - RNA, 23 nt, Artificial Sequence
  Synthetic
uccacucccaccagcugaaagac

SEQ ID NO: 258609 - RNA, 24 nt, Artificial Sequence
  Synthetic
auccacucccaccagcugaaagac

SEQ ID NO: 258610 - RNA, 18 nt, Artificial Sequence
  Synthetic
uaggaacuuuauaaagac

SEQ ID NO: 258611 - RNA, 19 nt, Artificial Sequence
  Synthetic
cuaggaacuuuauaaagac

SEQ ID NO: 258612 - RNA, 20 nt, Artificial Sequence
  Synthetic
ucuaggaacuuuauaaagac

SEQ ID NO: 258613 - RNA, 21 nt, Artificial Sequence
  Synthetic
cucuaggaacuuuauaaagac

SEQ ID NO: 258614 - RNA, 22 nt, Artificial Sequence
  Synthetic
acucuaggaacuuuauaaagac

SEQ ID NO: 258615 - RNA, 23 nt, Artificial Sequence
  Synthetic
aacucuaggaacuuuauaaagac

SEQ ID NO: 258616 - RNA, 24 nt, Artificial Sequence
  Synthetic
aaacucuaggaacuuuauaaagac

SEQ ID NO: 258617 - RNA, 18 nt, Artificial Sequence
  Synthetic
uuuagaaaggguaaagac

SEQ ID NO: 258618 - RNA, 19 nt, Artificial Sequence
  Synthetic
uuuuagaaaggguaaagac

SEQ ID NO: 258619 - RNA, 20 nt, Artificial Sequence
  Synthetic
auuuuagaaaggguaaagac

SEQ ID NO: 258620 - RNA, 21 nt, Artificial Sequence
  Synthetic
cauuuuagaaaggguaaagac

SEQ ID NO: 258621 - RNA, 22 nt, Artificial Sequence
  Synthetic
gcauuuuagaaaggguaaagac

SEQ ID NO: 258622 - RNA, 23 nt, Artificial Sequence
  Synthetic
ugcauuuuagaaaggguaaagac

SEQ ID NO: 258623 - RNA, 24 nt, Artificial Sequence
  Synthetic
gugcauuuuagaaaggguaaagac

SEQ ID NO: 258624 - RNA, 18 nt, Artificial Sequence
  Synthetic
ugaacuuugcuuaaagac

SEQ ID NO: 258625 - RNA, 19 nt, Artificial Sequence
  Synthetic
augaacuuugcuuaaagac

SEQ ID NO: 258626 - RNA, 20 nt, Artificial Sequence
  Synthetic
aaugaacuuugcuuaaagac

SEQ ID NO: 258627 - RNA, 21 nt, Artificial Sequence
  Synthetic
gaaugaacuuugcuuaaagac

SEQ ID NO: 258628 - RNA, 22 nt, Artificial Sequence
  Synthetic
ugaaugaacuuugcuuaaagac

SEQ ID NO: 258629 - RNA, 23 nt, Artificial Sequence
  Synthetic
cugaaugaacuuugcuuaaagac

SEQ ID NO: 258630 - RNA, 24 nt, Artificial Sequence
  Synthetic
acugaaugaacuuugcuuaaagac

SEQ ID NO: 258631 - RNA, 18 nt, Artificial Sequence
  Synthetic
uaugagguucuuaaagac

SEQ ID NO: 258632 - RNA, 19 nt, Artificial Sequence
  Synthetic
cuaugagguucuuaaagac

SEQ ID NO: 258633 - RNA, 20 nt, Artificial Sequence
  Synthetic
ucuaugagguucuuaaagac

SEQ ID NO: 258634 - RNA, 21 nt, Artificial Sequence
  Synthetic
gucuaugagguucuuaaagac

SEQ ID NO: 258635 - RNA, 22 nt, Artificial Sequence
  Synthetic
ugucuaugagguucuuaaagac

SEQ ID NO: 258636 - RNA, 23 nt, Artificial Sequence
  Synthetic
cugucuaugagguucuuaaagac

SEQ ID NO: 258637 - RNA, 24 nt, Artificial Sequence
  Synthetic
ucugucuaugagguucuuaaagac

SEQ ID NO: 258638 - RNA, 18 nt, Artificial Sequence
  Synthetic
uagaugguuuuuaaagac

SEQ ID NO: 258639 - RNA, 19 nt, Artificial Sequence
  Synthetic
uuagaugguuuuuaaagac

SEQ ID NO: 258640 - RNA, 20 nt, Artificial Sequence
  Synthetic
cuuagaugguuuuuaaagac

SEQ ID NO: 258641 - RNA, 21 nt, Artificial Sequence
  Synthetic
ccuuagaugguuuuuaaagac

SEQ ID NO: 258642 - RNA, 22 nt, Artificial Sequence
  Synthetic
cccuuagaugguuuuuaaagac

SEQ ID NO: 258643 - RNA, 23 nt, Artificial Sequence
  Synthetic
gcccuuagaugguuuuuaaagac

SEQ ID NO: 258644 - RNA, 24 nt, Artificial Sequence
  Synthetic
ggcccuuagaugguuuuuaaagac

SEQ ID NO: 258645 - RNA, 18 nt, Artificial Sequence
  Synthetic
uuauacuuagcacaagac

SEQ ID NO: 258646 - RNA, 19 nt, Artificial Sequence
  Synthetic
auuauacuuagcacaagac

SEQ ID NO: 258647 - RNA, 20 nt, Artificial Sequence
  Synthetic
aauuauacuuagcacaagac

SEQ ID NO: 258648 - RNA, 21 nt, Artificial Sequence
  Synthetic
aaauuauacuuagcacaagac

SEQ ID NO: 258649 - RNA, 22 nt, Artificial Sequence
  Synthetic
caaauuauacuuagcacaagac

SEQ ID NO: 258650 - RNA, 23 nt, Artificial Sequence
  Synthetic
acaaauuauacuuagcacaagac

SEQ ID NO: 258651 - RNA, 24 nt, Artificial Sequence
  Synthetic
uacaaauuauacuuagcacaagac

SEQ ID NO: 258652 - RNA, 18 nt, Artificial Sequence
  Synthetic
uaauguaaaagccaagac

SEQ ID NO: 258653 - RNA, 19 nt, Artificial Sequence
  Synthetic
auaauguaaaagccaagac

SEQ ID NO: 258654 - RNA, 20 nt, Artificial Sequence
  Synthetic
cauaauguaaaagccaagac

SEQ ID NO: 258655 - RNA, 21 nt, Artificial Sequence
  Synthetic
gcauaauguaaaagccaagac

SEQ ID NO: 258656 - RNA, 22 nt, Artificial Sequence
  Synthetic
ggcauaauguaaaagccaagac

SEQ ID NO: 258657 - RNA, 23 nt, Artificial Sequence
  Synthetic
uggcauaauguaaaagccaagac

SEQ ID NO: 258658 - RNA, 24 nt, Artificial Sequence
  Synthetic
cuggcauaauguaaaagccaagac

SEQ ID NO: 258659 - RNA, 18 nt, Artificial Sequence
  Synthetic
uuaggaaggcagcaagac

SEQ ID NO: 258660 - RNA, 19 nt, Artificial Sequence
  Synthetic
cuuaggaaggcagcaagac

SEQ ID NO: 258661 - RNA, 20 nt, Artificial Sequence
  Synthetic
acuuaggaaggcagcaagac

SEQ ID NO: 258662 - RNA, 21 nt, Artificial Sequence
  Synthetic
gacuuaggaaggcagcaagac

SEQ ID NO: 258663 - RNA, 22 nt, Artificial Sequence
  Synthetic
ggacuuaggaaggcagcaagac

SEQ ID NO: 258664 - RNA, 23 nt, Artificial Sequence
  Synthetic
aggacuuaggaaggcagcaagac

SEQ ID NO: 258665 - RNA, 24 nt, Artificial Sequence
  Synthetic
aaggacuuaggaaggcagcaagac

SEQ ID NO: 258666 - RNA, 18 nt, Artificial Sequence
  Synthetic
uuuucuagaaugcaagac

SEQ ID NO: 258667 - RNA, 19 nt, Artificial Sequence
  Synthetic
cuuuucuagaaugcaagac

SEQ ID NO: 258668 - RNA, 20 nt, Artificial Sequence
  Synthetic
ucuuuucuagaaugcaagac

SEQ ID NO: 258669 - RNA, 21 nt, Artificial Sequence
  Synthetic
uucuuuucuagaaugcaagac

SEQ ID NO: 258670 - RNA, 22 nt, Artificial Sequence
  Synthetic
cuucuuuucuagaaugcaagac

SEQ ID NO: 258671 - RNA, 23 nt, Artificial Sequence
  Synthetic
acuucuuuucuagaaugcaagac

SEQ ID NO: 258672 - RNA, 24 nt, Artificial Sequence
  Synthetic
aacuucuuuucuagaaugcaagac

SEQ ID NO: 258673 - RNA, 18 nt, Artificial Sequence
  Synthetic
ugcuggagaagagaagac

SEQ ID NO: 258674 - RNA, 19 nt, Artificial Sequence
  Synthetic
augcuggagaagagaagac

SEQ ID NO: 258675 - RNA, 20 nt, Artificial Sequence
  Synthetic
caugcuggagaagagaagac

SEQ ID NO: 258676 - RNA, 21 nt, Artificial Sequence
  Synthetic
gcaugcuggagaagagaagac

SEQ ID NO: 258677 - RNA, 22 nt, Artificial Sequence
  Synthetic
ugcaugcuggagaagagaagac

SEQ ID NO: 258678 - RNA, 23 nt, Artificial Sequence
  Synthetic
gugcaugcuggagaagagaagac

SEQ ID NO: 258679 - RNA, 24 nt, Artificial Sequence
  Synthetic
ggugcaugcuggagaagagaagac

SEQ ID NO: 258680 - RNA, 18 nt, Artificial Sequence
  Synthetic
auuauuuaguuagaagac

SEQ ID NO: 258681 - RNA, 19 nt, Artificial Sequence
  Synthetic
gauuauuuaguuagaagac

SEQ ID NO: 258682 - RNA, 20 nt, Artificial Sequence
  Synthetic
agauuauuuaguuagaagac

SEQ ID NO: 258683 - RNA, 21 nt, Artificial Sequence
  Synthetic
uagauuauuuaguuagaagac

SEQ ID NO: 258684 - RNA, 22 nt, Artificial Sequence
  Synthetic
uuagauuauuuaguuagaagac

SEQ ID NO: 258685 - RNA, 23 nt, Artificial Sequence
  Synthetic
auuagauuauuuaguuagaagac

SEQ ID NO: 258686 - RNA, 24 nt, Artificial Sequence
  Synthetic
cauuagauuauuuaguuagaagac

SEQ ID NO: 258687 - RNA, 18 nt, Artificial Sequence
  Synthetic
uuuuugucguuagaagac

SEQ ID NO: 258688 - RNA, 19 nt, Artificial Sequence
  Synthetic
guuuuugucguuagaagac

SEQ ID NO: 258689 - RNA, 20 nt, Artificial Sequence
  Synthetic
uguuuuugucguuagaagac

SEQ ID NO: 258690 - RNA, 21 nt, Artificial Sequence
  Synthetic
cuguuuuugucguuagaagac

SEQ ID NO: 258691 - RNA, 22 nt, Artificial Sequence
  Synthetic
gcuguuuuugucguuagaagac

SEQ ID NO: 258692 - RNA, 23 nt, Artificial Sequence
  Synthetic
ugcuguuuuugucguuagaagac

SEQ ID NO: 258693 - RNA, 24 nt, Artificial Sequence
  Synthetic
uugcuguuuuugucguuagaagac

SEQ ID NO: 258694 - RNA, 18 nt, Artificial Sequence
  Synthetic
gaacaucaggaggaagac

SEQ ID NO: 258695 - RNA, 19 nt, Artificial Sequence
  Synthetic
ugaacaucaggaggaagac

SEQ ID NO: 258696 - RNA, 20 nt, Artificial Sequence
  Synthetic
cugaacaucaggaggaagac

SEQ ID NO: 258697 - RNA, 21 nt, Artificial Sequence
  Synthetic
ucugaacaucaggaggaagac

SEQ ID NO: 258698 - RNA, 22 nt, Artificial Sequence
  Synthetic
gucugaacaucaggaggaagac

SEQ ID NO: 258699 - RNA, 23 nt, Artificial Sequence
  Synthetic
agucugaacaucaggaggaagac

SEQ ID NO: 258700 - RNA, 24 nt, Artificial Sequence
  Synthetic
aagucugaacaucaggaggaagac

SEQ ID NO: 258701 - RNA, 18 nt, Artificial Sequence
  Synthetic
aauauuuagagggaagac

SEQ ID NO: 258702 - RNA, 19 nt, Artificial Sequence
  Synthetic
aaauauuuagagggaagac

SEQ ID NO: 258703 - RNA, 20 nt, Artificial Sequence
  Synthetic
uaaauauuuagagggaagac

SEQ ID NO: 258704 - RNA, 21 nt, Artificial Sequence
  Synthetic
guaaauauuuagagggaagac

SEQ ID NO: 258705 - RNA, 22 nt, Artificial Sequence
  Synthetic
uguaaauauuuagagggaagac

SEQ ID NO: 258706 - RNA, 23 nt, Artificial Sequence
  Synthetic
cuguaaauauuuagagggaagac

SEQ ID NO: 258707 - RNA, 24 nt, Artificial Sequence
  Synthetic
acuguaaauauuuagagggaagac

SEQ ID NO: 258708 - RNA, 18 nt, Artificial Sequence
  Synthetic
aggaauggagaugaagac

SEQ ID NO: 258709 - RNA, 19 nt, Artificial Sequence
  Synthetic
aaggaauggagaugaagac

SEQ ID NO: 258710 - RNA, 20 nt, Artificial Sequence
  Synthetic
uaaggaauggagaugaagac

SEQ ID NO: 258711 - RNA, 21 nt, Artificial Sequence
  Synthetic
auaaggaauggagaugaagac

SEQ ID NO: 258712 - RNA, 22 nt, Artificial Sequence
  Synthetic
aauaaggaauggagaugaagac

SEQ ID NO: 258713 - RNA, 23 nt, Artificial Sequence
  Synthetic
aaauaaggaauggagaugaagac

SEQ ID NO: 258714 - RNA, 24 nt, Artificial Sequence
  Synthetic
gaaauaaggaauggagaugaagac

SEQ ID NO: 258715 - RNA, 18 nt, Artificial Sequence
  Synthetic
agccacauuugugaagac

SEQ ID NO: 258716 - RNA, 19 nt, Artificial Sequence
  Synthetic
uagccacauuugugaagac

SEQ ID NO: 258717 - RNA, 20 nt, Artificial Sequence
  Synthetic
cuagccacauuugugaagac

SEQ ID NO: 258718 - RNA, 21 nt, Artificial Sequence
  Synthetic
gcuagccacauuugugaagac

SEQ ID NO: 258719 - RNA, 22 nt, Artificial Sequence
  Synthetic
agcuagccacauuugugaagac

SEQ ID NO: 258720 - RNA, 23 nt, Artificial Sequence
  Synthetic
cagcuagccacauuugugaagac

SEQ ID NO: 258721 - RNA, 24 nt, Artificial Sequence
  Synthetic
ucagcuagccacauuugugaagac

SEQ ID NO: 258722 - RNA, 18 nt, Artificial Sequence
  Synthetic
uagaaggaaauugaagac

SEQ ID NO: 258723 - RNA, 19 nt, Artificial Sequence
  Synthetic
cuagaaggaaauugaagac

SEQ ID NO: 258724 - RNA, 20 nt, Artificial Sequence
  Synthetic
ccuagaaggaaauugaagac

SEQ ID NO: 258725 - RNA, 21 nt, Artificial Sequence
  Synthetic
cccuagaaggaaauugaagac

SEQ ID NO: 258726 - RNA, 22 nt, Artificial Sequence
  Synthetic
gcccuagaaggaaauugaagac

SEQ ID NO: 258727 - RNA, 23 nt, Artificial Sequence
  Synthetic
agcccuagaaggaaauugaagac

SEQ ID NO: 258728 - RNA, 24 nt, Artificial Sequence
  Synthetic
gagcccuagaaggaaauugaagac

SEQ ID NO: 258729 - RNA, 18 nt, Artificial Sequence
  Synthetic
uucauauaacuugaagac

SEQ ID NO: 258730 - RNA, 19 nt, Artificial Sequence
  Synthetic
auucauauaacuugaagac

SEQ ID NO: 258731 - RNA, 20 nt, Artificial Sequence
  Synthetic
cauucauauaacuugaagac

SEQ ID NO: 258732 - RNA, 21 nt, Artificial Sequence
  Synthetic
ucauucauauaacuugaagac

SEQ ID NO: 258733 - RNA, 22 nt, Artificial Sequence
  Synthetic
gucauucauauaacuugaagac

SEQ ID NO: 258734 - RNA, 23 nt, Artificial Sequence
  Synthetic
ggucauucauauaacuugaagac

SEQ ID NO: 258735 - RNA, 24 nt, Artificial Sequence
  Synthetic
aggucauucauauaacuugaagac

SEQ ID NO: 258736 - RNA, 18 nt, Artificial Sequence
  Synthetic
ugagcugauaaauaagac

SEQ ID NO: 258737 - RNA, 19 nt, Artificial Sequence
  Synthetic
cugagcugauaaauaagac

SEQ ID NO: 258738 - RNA, 20 nt, Artificial Sequence
  Synthetic
gcugagcugauaaauaagac

SEQ ID NO: 258739 - RNA, 21 nt, Artificial Sequence
  Synthetic
ugcugagcugauaaauaagac

SEQ ID NO: 258740 - RNA, 22 nt, Artificial Sequence
  Synthetic
uugcugagcugauaaauaagac

SEQ ID NO: 258741 - RNA, 23 nt, Artificial Sequence
  Synthetic
guugcugagcugauaaauaagac

SEQ ID NO: 258742 - RNA, 24 nt, Artificial Sequence
  Synthetic
uguugcugagcugauaaauaagac

SEQ ID NO: 258743 - RNA, 18 nt, Artificial Sequence
  Synthetic
cuuuuuaaagaauaagac

SEQ ID NO: 258744 - RNA, 19 nt, Artificial Sequence
  Synthetic
acuuuuuaaagaauaagac

SEQ ID NO: 258745 - RNA, 20 nt, Artificial Sequence
  Synthetic
uacuuuuuaaagaauaagac

SEQ ID NO: 258746 - RNA, 21 nt, Artificial Sequence
  Synthetic
guacuuuuuaaagaauaagac

SEQ ID NO: 258747 - RNA, 22 nt, Artificial Sequence
  Synthetic
uguacuuuuuaaagaauaagac

SEQ ID NO: 258748 - RNA, 23 nt, Artificial Sequence
  Synthetic
auguacuuuuuaaagaauaagac

SEQ ID NO: 258749 - RNA, 24 nt, Artificial Sequence
  Synthetic
aauguacuuuuuaaagaauaagac

SEQ ID NO: 258750 - RNA, 18 nt, Artificial Sequence
  Synthetic
guagaaacauuauaagac

SEQ ID NO: 258751 - RNA, 19 nt, Artificial Sequence
  Synthetic
aguagaaacauuauaagac

SEQ ID NO: 258752 - RNA, 20 nt, Artificial Sequence
  Synthetic
aaguagaaacauuauaagac

SEQ ID NO: 258753 - RNA, 21 nt, Artificial Sequence
  Synthetic
uaaguagaaacauuauaagac

SEQ ID NO: 258754 - RNA, 22 nt, Artificial Sequence
  Synthetic
cuaaguagaaacauuauaagac

SEQ ID NO: 258755 - RNA, 23 nt, Artificial Sequence
  Synthetic
acuaaguagaaacauuauaagac

SEQ ID NO: 258756 - RNA, 24 nt, Artificial Sequence
  Synthetic
cacuaaguagaaacauuauaagac

SEQ ID NO: 258757 - RNA, 18 nt, Artificial Sequence
  Synthetic
agcggcccagacuaagac

SEQ ID NO: 258758 - RNA, 19 nt, Artificial Sequence
  Synthetic
uagcggcccagacuaagac

SEQ ID NO: 258759 - RNA, 20 nt, Artificial Sequence
  Synthetic
auagcggcccagacuaagac

SEQ ID NO: 258760 - RNA, 21 nt, Artificial Sequence
  Synthetic
uauagcggcccagacuaagac

SEQ ID NO: 258761 - RNA, 22 nt, Artificial Sequence
  Synthetic
cuauagcggcccagacuaagac

SEQ ID NO: 258762 - RNA, 23 nt, Artificial Sequence
  Synthetic
gcuauagcggcccagacuaagac

SEQ ID NO: 258763 - RNA, 24 nt, Artificial Sequence
  Synthetic
agcuauagcggcccagacuaagac

SEQ ID NO: 258764 - RNA, 18 nt, Artificial Sequence
  Synthetic
acaaaugaaagcuaagac

SEQ ID NO: 258765 - RNA, 19 nt, Artificial Sequence
  Synthetic
aacaaaugaaagcuaagac

SEQ ID NO: 258766 - RNA, 20 nt, Artificial Sequence
  Synthetic
caacaaaugaaagcuaagac

SEQ ID NO: 258767 - RNA, 21 nt, Artificial Sequence
  Synthetic
ccaacaaaugaaagcuaagac

SEQ ID NO: 258768 - RNA, 22 nt, Artificial Sequence
  Synthetic
gccaacaaaugaaagcuaagac

SEQ ID NO: 258769 - RNA, 23 nt, Artificial Sequence
  Synthetic
agccaacaaaugaaagcuaagac

SEQ ID NO: 258770 - RNA, 24 nt, Artificial Sequence
  Synthetic
uagccaacaaaugaaagcuaagac

SEQ ID NO: 258771 - RNA, 18 nt, Artificial Sequence
  Synthetic
aaaauacagagcuaagac

SEQ ID NO: 258772 - RNA, 19 nt, Artificial Sequence
  Synthetic
uaaaauacagagcuaagac

SEQ ID NO: 258773 - RNA, 20 nt, Artificial Sequence
  Synthetic
auaaaauacagagcuaagac

SEQ ID NO: 258774 - RNA, 21 nt, Artificial Sequence
  Synthetic
uauaaaauacagagcuaagac

SEQ ID NO: 258775 - RNA, 22 nt, Artificial Sequence
  Synthetic
guauaaaauacagagcuaagac

SEQ ID NO: 258776 - RNA, 23 nt, Artificial Sequence
  Synthetic
aguauaaaauacagagcuaagac

SEQ ID NO: 258777 - RNA, 24 nt, Artificial Sequence
  Synthetic
caguauaaaauacagagcuaagac

SEQ ID NO: 258778 - RNA, 18 nt, Artificial Sequence
  Synthetic
accucagauuucuaagac

SEQ ID NO: 258779 - RNA, 19 nt, Artificial Sequence
  Synthetic
caccucagauuucuaagac

SEQ ID NO: 258780 - RNA, 20 nt, Artificial Sequence
  Synthetic
acaccucagauuucuaagac

SEQ ID NO: 258781 - RNA, 21 nt, Artificial Sequence
  Synthetic
gacaccucagauuucuaagac

SEQ ID NO: 258782 - RNA, 22 nt, Artificial Sequence
  Synthetic
ugacaccucagauuucuaagac

SEQ ID NO: 258783 - RNA, 23 nt, Artificial Sequence
  Synthetic
cugacaccucagauuucuaagac

SEQ ID NO: 258784 - RNA, 24 nt, Artificial Sequence
  Synthetic
acugacaccucagauuucuaagac

SEQ ID NO: 258785 - RNA, 18 nt, Artificial Sequence
  Synthetic
cuuuaucuggaguaagac

SEQ ID NO: 258786 - RNA, 19 nt, Artificial Sequence
  Synthetic
ucuuuaucuggaguaagac

SEQ ID NO: 258787 - RNA, 20 nt, Artificial Sequence
  Synthetic
gucuuuaucuggaguaagac

SEQ ID NO: 258788 - RNA, 21 nt, Artificial Sequence
  Synthetic
ggucuuuaucuggaguaagac

SEQ ID NO: 258789 - RNA, 22 nt, Artificial Sequence
  Synthetic
gggucuuuaucuggaguaagac

SEQ ID NO: 258790 - RNA, 23 nt, Artificial Sequence
  Synthetic
agggucuuuaucuggaguaagac

SEQ ID NO: 258791 - RNA, 24 nt, Artificial Sequence
  Synthetic
aagggucuuuaucuggaguaagac

SEQ ID NO: 258792 - RNA, 18 nt, Artificial Sequence
  Synthetic
aagaacagaauguaagac

SEQ ID NO: 258793 - RNA, 19 nt, Artificial Sequence
  Synthetic
caagaacagaauguaagac

SEQ ID NO: 258794 - RNA, 20 nt, Artificial Sequence
  Synthetic
ucaagaacagaauguaagac

SEQ ID NO: 258795 - RNA, 21 nt, Artificial Sequence
  Synthetic
cucaagaacagaauguaagac

SEQ ID NO: 258796 - RNA, 22 nt, Artificial Sequence
  Synthetic
acucaagaacagaauguaagac

SEQ ID NO: 258797 - RNA, 23 nt, Artificial Sequence
  Synthetic
cacucaagaacagaauguaagac

SEQ ID NO: 258798 - RNA, 24 nt, Artificial Sequence
  Synthetic
acacucaagaacagaauguaagac

SEQ ID NO: 258799 - RNA, 18 nt, Artificial Sequence
  Synthetic
caauuagacuuguaagac

SEQ ID NO: 258800 - RNA, 19 nt, Artificial Sequence
  Synthetic
ccaauuagacuuguaagac

SEQ ID NO: 258801 - RNA, 20 nt, Artificial Sequence
  Synthetic
cccaauuagacuuguaagac

SEQ ID NO: 258802 - RNA, 21 nt, Artificial Sequence
  Synthetic
ccccaauuagacuuguaagac

SEQ ID NO: 258803 - RNA, 22 nt, Artificial Sequence
  Synthetic
uccccaauuagacuuguaagac

SEQ ID NO: 258804 - RNA, 23 nt, Artificial Sequence
  Synthetic
uuccccaauuagacuuguaagac

SEQ ID NO: 258805 - RNA, 24 nt, Artificial Sequence
  Synthetic
uuuccccaauuagacuuguaagac

SEQ ID NO: 258806 - RNA, 18 nt, Artificial Sequence
  Synthetic
acaauccucuuguaagac

SEQ ID NO: 258807 - RNA, 19 nt, Artificial Sequence
  Synthetic
uacaauccucuuguaagac

SEQ ID NO: 258808 - RNA, 20 nt, Artificial Sequence
  Synthetic
uuacaauccucuuguaagac

SEQ ID NO: 258809 - RNA, 21 nt, Artificial Sequence
  Synthetic
uuuacaauccucuuguaagac

SEQ ID NO: 258810 - RNA, 22 nt, Artificial Sequence
  Synthetic
uuuuacaauccucuuguaagac

SEQ ID NO: 258811 - RNA, 23 nt, Artificial Sequence
  Synthetic
guuuuacaauccucuuguaagac

SEQ ID NO: 258812 - RNA, 24 nt, Artificial Sequence
  Synthetic
cguuuuacaauccucuuguaagac

SEQ ID NO: 258813 - RNA, 18 nt, Artificial Sequence
  Synthetic
uaggucuacauuuaagac

SEQ ID NO: 258814 - RNA, 19 nt, Artificial Sequence
  Synthetic
guaggucuacauuuaagac

SEQ ID NO: 258815 - RNA, 20 nt, Artificial Sequence
  Synthetic
aguaggucuacauuuaagac

SEQ ID NO: 258816 - RNA, 21 nt, Artificial Sequence
  Synthetic
uaguaggucuacauuuaagac

SEQ ID NO: 258817 - RNA, 22 nt, Artificial Sequence
  Synthetic
uuaguaggucuacauuuaagac

SEQ ID NO: 258818 - RNA, 23 nt, Artificial Sequence
  Synthetic
uuuaguaggucuacauuuaagac

SEQ ID NO: 258819 - RNA, 24 nt, Artificial Sequence
  Synthetic
uuuuaguaggucuacauuuaagac

SEQ ID NO: 258820 - RNA, 18 nt, Artificial Sequence
  Synthetic
uuguucuaauuuuaagac

SEQ ID NO: 258821 - RNA, 19 nt, Artificial Sequence
  Synthetic
auuguucuaauuuuaagac

SEQ ID NO: 258822 - RNA, 20 nt, Artificial Sequence
  Synthetic
uauuguucuaauuuuaagac

SEQ ID NO: 258823 - RNA, 21 nt, Artificial Sequence
  Synthetic
uuauuguucuaauuuuaagac

SEQ ID NO: 258824 - RNA, 22 nt, Artificial Sequence
  Synthetic
uuuauuguucuaauuuuaagac

SEQ ID NO: 258825 - RNA, 23 nt, Artificial Sequence
  Synthetic
guuuauuguucuaauuuuaagac

SEQ ID NO: 258826 - RNA, 24 nt, Artificial Sequence
  Synthetic
uguuuauuguucuaauuuuaagac

SEQ ID NO: 258827 - RNA, 18 nt, Artificial Sequence
  Synthetic
agugucccaaaaacagac

SEQ ID NO: 258828 - RNA, 19 nt, Artificial Sequence
  Synthetic
aagugucccaaaaacagac

SEQ ID NO: 258829 - RNA, 20 nt, Artificial Sequence
  Synthetic
aaagugucccaaaaacagac

SEQ ID NO: 258830 - RNA, 21 nt, Artificial Sequence
  Synthetic
caaagugucccaaaaacagac

SEQ ID NO: 258831 - RNA, 22 nt, Artificial Sequence
  Synthetic
acaaagugucccaaaaacagac

SEQ ID NO: 258832 - RNA, 23 nt, Artificial Sequence
  Synthetic
uacaaagugucccaaaaacagac

SEQ ID NO: 258833 - RNA, 24 nt, Artificial Sequence
  Synthetic
cuacaaagugucccaaaaacagac

SEQ ID NO: 258834 - RNA, 18 nt, Artificial Sequence
  Synthetic
uagcacuagacaacagac

SEQ ID NO: 258835 - RNA, 19 nt, Artificial Sequence
  Synthetic
auagcacuagacaacagac

SEQ ID NO: 258836 - RNA, 20 nt, Artificial Sequence
  Synthetic
aauagcacuagacaacagac

SEQ ID NO: 258837 - RNA, 21 nt, Artificial Sequence
  Synthetic
aaauagcacuagacaacagac

SEQ ID NO: 258838 - RNA, 22 nt, Artificial Sequence
  Synthetic
aaaauagcacuagacaacagac

SEQ ID NO: 258839 - RNA, 23 nt, Artificial Sequence
  Synthetic
aaaaauagcacuagacaacagac

SEQ ID NO: 258840 - RNA, 24 nt, Artificial Sequence
  Synthetic
gaaaaauagcacuagacaacagac

SEQ ID NO: 258841 - RNA, 18 nt, Artificial Sequence
  Synthetic
gcccaggcaugaacagac

SEQ ID NO: 258842 - RNA, 19 nt, Artificial Sequence
  Synthetic
ugcccaggcaugaacagac

SEQ ID NO: 258843 - RNA, 20 nt, Artificial Sequence
  Synthetic
augcccaggcaugaacagac

SEQ ID NO: 258844 - RNA, 21 nt, Artificial Sequence
  Synthetic
aaugcccaggcaugaacagac

SEQ ID NO: 258845 - RNA, 22 nt, Artificial Sequence
  Synthetic
gaaugcccaggcaugaacagac

SEQ ID NO: 258846 - RNA, 23 nt, Artificial Sequence
  Synthetic
ugaaugcccaggcaugaacagac

SEQ ID NO: 258847 - RNA, 24 nt, Artificial Sequence
  Synthetic
gugaaugcccaggcaugaacagac

SEQ ID NO: 258848 - RNA, 18 nt, Artificial Sequence
  Synthetic
guagcugggaccacagac

SEQ ID NO: 258849 - RNA, 19 nt, Artificial Sequence
  Synthetic
aguagcugggaccacagac

SEQ ID NO: 258850 - RNA, 20 nt, Artificial Sequence
  Synthetic
gaguagcugggaccacagac

SEQ ID NO: 258851 - RNA, 21 nt, Artificial Sequence
  Synthetic
ugaguagcugggaccacagac

SEQ ID NO: 258852 - RNA, 22 nt, Artificial Sequence
  Synthetic
cugaguagcugggaccacagac

SEQ ID NO: 258853 - RNA, 23 nt, Artificial Sequence
  Synthetic
ccugaguagcugggaccacagac

SEQ ID NO: 258854 - RNA, 24 nt, Artificial Sequence
  Synthetic
uccugaguagcugggaccacagac

SEQ ID NO: 258855 - RNA, 18 nt, Artificial Sequence
  Synthetic
auacauuauuccacagac

SEQ ID NO: 258856 - RNA, 19 nt, Artificial Sequence
  Synthetic
uauacauuauuccacagac

SEQ ID NO: 258857 - RNA, 20 nt, Artificial Sequence
  Synthetic
cuauacauuauuccacagac

SEQ ID NO: 258858 - RNA, 21 nt, Artificial Sequence
  Synthetic
ccuauacauuauuccacagac

SEQ ID NO: 258859 - RNA, 22 nt, Artificial Sequence
  Synthetic
gccuauacauuauuccacagac

SEQ ID NO: 258860 - RNA, 23 nt, Artificial Sequence
  Synthetic
ugccuauacauuauuccacagac

SEQ ID NO: 258861 - RNA, 24 nt, Artificial Sequence
  Synthetic
augccuauacauuauuccacagac

SEQ ID NO: 258862 - RNA, 18 nt, Artificial Sequence
  Synthetic
agugcuaaaaucacagac

SEQ ID NO: 258863 - RNA, 19 nt, Artificial Sequence
  Synthetic
aagugcuaaaaucacagac

SEQ ID NO: 258864 - RNA, 20 nt, Artificial Sequence
  Synthetic
aaagugcuaaaaucacagac

SEQ ID NO: 258865 - RNA, 21 nt, Artificial Sequence
  Synthetic
caaagugcuaaaaucacagac

SEQ ID NO: 258866 - RNA, 22 nt, Artificial Sequence
  Synthetic
ccaaagugcuaaaaucacagac

SEQ ID NO: 258867 - RNA, 23 nt, Artificial Sequence
  Synthetic
cccaaagugcuaaaaucacagac

SEQ ID NO: 258868 - RNA, 24 nt, Artificial Sequence
  Synthetic
ucccaaagugcuaaaaucacagac

SEQ ID NO: 258869 - RNA, 18 nt, Artificial Sequence
  Synthetic
aaagaccccaucacagac

SEQ ID NO: 258870 - RNA, 19 nt, Artificial Sequence
  Synthetic
uaaagaccccaucacagac

SEQ ID NO: 258871 - RNA, 20 nt, Artificial Sequence
  Synthetic
uuaaagaccccaucacagac

SEQ ID NO: 258872 - RNA, 21 nt, Artificial Sequence
  Synthetic
guuaaagaccccaucacagac

SEQ ID NO: 258873 - RNA, 22 nt, Artificial Sequence
  Synthetic
gguuaaagaccccaucacagac

SEQ ID NO: 258874 - RNA, 23 nt, Artificial Sequence
  Synthetic
agguuaaagaccccaucacagac

SEQ ID NO: 258875 - RNA, 24 nt, Artificial Sequence
  Synthetic
cagguuaaagaccccaucacagac

SEQ ID NO: 258876 - RNA, 18 nt, Artificial Sequence
  Synthetic
cuuuaaauagucacagac

SEQ ID NO: 258877 - RNA, 19 nt, Artificial Sequence
  Synthetic
ccuuuaaauagucacagac

SEQ ID NO: 258878 - RNA, 20 nt, Artificial Sequence
  Synthetic
uccuuuaaauagucacagac

SEQ ID NO: 258879 - RNA, 21 nt, Artificial Sequence
  Synthetic
auccuuuaaauagucacagac

SEQ ID NO: 258880 - RNA, 22 nt, Artificial Sequence
  Synthetic
aauccuuuaaauagucacagac

SEQ ID NO: 258881 - RNA, 23 nt, Artificial Sequence
  Synthetic
aaauccuuuaaauagucacagac

SEQ ID NO: 258882 - RNA, 24 nt, Artificial Sequence
  Synthetic
uaaauccuuuaaauagucacagac

SEQ ID NO: 258883 - RNA, 18 nt, Artificial Sequence
  Synthetic
ugagagacugucacagac

SEQ ID NO: 258884 - RNA, 19 nt, Artificial Sequence
  Synthetic
cugagagacugucacagac

SEQ ID NO: 258885 - RNA, 20 nt, Artificial Sequence
  Synthetic
acugagagacugucacagac

SEQ ID NO: 258886 - RNA, 21 nt, Artificial Sequence
  Synthetic
aacugagagacugucacagac

SEQ ID NO: 258887 - RNA, 22 nt, Artificial Sequence
  Synthetic
aaacugagagacugucacagac

SEQ ID NO: 258888 - RNA, 23 nt, Artificial Sequence
  Synthetic
gaaacugagagacugucacagac

SEQ ID NO: 258889 - RNA, 24 nt, Artificial Sequence
  Synthetic
agaaacugagagacugucacagac

SEQ ID NO: 258890 - RNA, 18 nt, Artificial Sequence
  Synthetic
agaguaucaaggacagac

SEQ ID NO: 258891 - RNA, 19 nt, Artificial Sequence
  Synthetic
aagaguaucaaggacagac

SEQ ID NO: 258892 - RNA, 20 nt, Artificial Sequence
  Synthetic
caagaguaucaaggacagac

SEQ ID NO: 258893 - RNA, 21 nt, Artificial Sequence
  Synthetic
acaagaguaucaaggacagac

SEQ ID NO: 258894 - RNA, 22 nt, Artificial Sequence
  Synthetic
aacaagaguaucaaggacagac

SEQ ID NO: 258895 - RNA, 23 nt, Artificial Sequence
  Synthetic
aaacaagaguaucaaggacagac

SEQ ID NO: 258896 - RNA, 24 nt, Artificial Sequence
  Synthetic
aaaacaagaguaucaaggacagac

SEQ ID NO: 258897 - RNA, 18 nt, Artificial Sequence
  Synthetic
agugcugggauuacagac

SEQ ID NO: 258898 - RNA, 19 nt, Artificial Sequence
  Synthetic
aagugcugggauuacagac

SEQ ID NO: 258899 - RNA, 20 nt, Artificial Sequence
  Synthetic
aaagugcugggauuacagac

SEQ ID NO: 258900 - RNA, 21 nt, Artificial Sequence
  Synthetic
caaagugcugggauuacagac

SEQ ID NO: 258901 - RNA, 22 nt, Artificial Sequence
  Synthetic
ccaaagugcugggauuacagac

SEQ ID NO: 258902 - RNA, 23 nt, Artificial Sequence
  Synthetic
cccaaagugcugggauuacagac

SEQ ID NO: 258903 - RNA, 24 nt, Artificial Sequence
  Synthetic
ucccaaagugcugggauuacagac

SEQ ID NO: 258904 - RNA, 18 nt, Artificial Sequence
  Synthetic
gcugcuauuaaaccagac

SEQ ID NO: 258905 - RNA, 19 nt, Artificial Sequence
  Synthetic
ugcugcuauuaaaccagac

SEQ ID NO: 258906 - RNA, 20 nt, Artificial Sequence
  Synthetic
gugcugcuauuaaaccagac

SEQ ID NO: 258907 - RNA, 21 nt, Artificial Sequence
  Synthetic
ugugcugcuauuaaaccagac

SEQ ID NO: 258908 - RNA, 22 nt, Artificial Sequence
  Synthetic
cugugcugcuauuaaaccagac

SEQ ID NO: 258909 - RNA, 23 nt, Artificial Sequence
  Synthetic
ccugugcugcuauuaaaccagac

SEQ ID NO: 258910 - RNA, 24 nt, Artificial Sequence
  Synthetic
uccugugcugcuauuaaaccagac

SEQ ID NO: 258911 - RNA, 18 nt, Artificial Sequence
  Synthetic
cgugagucuggaccagac

SEQ ID NO: 258912 - RNA, 19 nt, Artificial Sequence
  Synthetic
gcgugagucuggaccagac

SEQ ID NO: 258913 - RNA, 20 nt, Artificial Sequence
  Synthetic
ugcgugagucuggaccagac

SEQ ID NO: 258914 - RNA, 21 nt, Artificial Sequence
  Synthetic
augcgugagucuggaccagac

SEQ ID NO: 258915 - RNA, 22 nt, Artificial Sequence
  Synthetic
aaugcgugagucuggaccagac

SEQ ID NO: 258916 - RNA, 23 nt, Artificial Sequence
  Synthetic
caaugcgugagucuggaccagac

SEQ ID NO: 258917 - RNA, 24 nt, Artificial Sequence
  Synthetic
gcaaugcgugagucuggaccagac

SEQ ID NO: 258918 - RNA, 18 nt, Artificial Sequence
  Synthetic
cccccaauuugaccagac

SEQ ID NO: 258919 - RNA, 19 nt, Artificial Sequence
  Synthetic
ucccccaauuugaccagac

SEQ ID NO: 258920 - RNA, 20 nt, Artificial Sequence
  Synthetic
uucccccaauuugaccagac

SEQ ID NO: 258921 - RNA, 21 nt, Artificial Sequence
  Synthetic
cuucccccaauuugaccagac

SEQ ID NO: 258922 - RNA, 22 nt, Artificial Sequence
  Synthetic
ccuucccccaauuugaccagac

SEQ ID NO: 258923 - RNA, 23 nt, Artificial Sequence
  Synthetic
uccuucccccaauuugaccagac

SEQ ID NO: 258924 - RNA, 24 nt, Artificial Sequence
  Synthetic
uuccuucccccaauuugaccagac

SEQ ID NO: 258925 - RNA, 18 nt, Artificial Sequence
  Synthetic
aagucuguauacccagac

SEQ ID NO: 258926 - RNA, 19 nt, Artificial Sequence
  Synthetic
uaagucuguauacccagac

SEQ ID NO: 258927 - RNA, 20 nt, Artificial Sequence
  Synthetic
auaagucuguauacccagac

SEQ ID NO: 258928 - RNA, 21 nt, Artificial Sequence
  Synthetic
cauaagucuguauacccagac

SEQ ID NO: 258929 - RNA, 22 nt, Artificial Sequence
  Synthetic
gcauaagucuguauacccagac

SEQ ID NO: 258930 - RNA, 23 nt, Artificial Sequence
  Synthetic
ugcauaagucuguauacccagac

SEQ ID NO: 258931 - RNA, 24 nt, Artificial Sequence
  Synthetic
gugcauaagucuguauacccagac

SEQ ID NO: 258932 - RNA, 18 nt, Artificial Sequence
  Synthetic
aauagccuuggcccagac

SEQ ID NO: 258933 - RNA, 19 nt, Artificial Sequence
  Synthetic
aaauagccuuggcccagac

SEQ ID NO: 258934 - RNA, 20 nt, Artificial Sequence
  Synthetic
aaaauagccuuggcccagac

SEQ ID NO: 258935 - RNA, 21 nt, Artificial Sequence
  Synthetic
aaaaauagccuuggcccagac

SEQ ID NO: 258936 - RNA, 22 nt, Artificial Sequence
  Synthetic
aaaaaauagccuuggcccagac

SEQ ID NO: 258937 - RNA, 23 nt, Artificial Sequence
  Synthetic
aaaaaaauagccuuggcccagac

SEQ ID NO: 258938 - RNA, 24 nt, Artificial Sequence
  Synthetic
caaaaaaauagccuuggcccagac

SEQ ID NO: 258939 - RNA, 18 nt, Artificial Sequence
  Synthetic
ucgaaggugcagccagac

SEQ ID NO: 258940 - RNA, 19 nt, Artificial Sequence
  Synthetic
gucgaaggugcagccagac

SEQ ID NO: 258941 - RNA, 20 nt, Artificial Sequence
  Synthetic
agucgaaggugcagccagac

SEQ ID NO: 258942 - RNA, 21 nt, Artificial Sequence
  Synthetic
gagucgaaggugcagccagac

SEQ ID NO: 258943 - RNA, 22 nt, Artificial Sequence
  Synthetic
ugagucgaaggugcagccagac

SEQ ID NO: 258944 - RNA, 23 nt, Artificial Sequence
  Synthetic
gugagucgaaggugcagccagac

SEQ ID NO: 258945 - RNA, 24 nt, Artificial Sequence
  Synthetic
ugugagucgaaggugcagccagac

SEQ ID NO: 258946 - RNA, 18 nt, Artificial Sequence
  Synthetic
uacaaaacuuagccagac

SEQ ID NO: 258947 - RNA, 19 nt, Artificial Sequence
  Synthetic
auacaaaacuuagccagac

SEQ ID NO: 258948 - RNA, 20 nt, Artificial Sequence
  Synthetic
aauacaaaacuuagccagac

SEQ ID NO: 258949 - RNA, 21 nt, Artificial Sequence
  Synthetic
aaauacaaaacuuagccagac

SEQ ID NO: 258950 - RNA, 22 nt, Artificial Sequence
  Synthetic
aaaauacaaaacuuagccagac

SEQ ID NO: 258951 - RNA, 23 nt, Artificial Sequence
  Synthetic
gaaaauacaaaacuuagccagac

SEQ ID NO: 258952 - RNA, 24 nt, Artificial Sequence
  Synthetic
agaaaauacaaaacuuagccagac

SEQ ID NO: 258953 - RNA, 18 nt, Artificial Sequence
  Synthetic
agcacuggaauuccagac

SEQ ID NO: 258954 - RNA, 19 nt, Artificial Sequence
  Synthetic
aagcacuggaauuccagac

SEQ ID NO: 258955 - RNA, 20 nt, Artificial Sequence
  Synthetic
aaagcacuggaauuccagac

SEQ ID NO: 258956 - RNA, 21 nt, Artificial Sequence
  Synthetic
caaagcacuggaauuccagac

SEQ ID NO: 258957 - RNA, 22 nt, Artificial Sequence
  Synthetic
ccaaagcacuggaauuccagac

SEQ ID NO: 258958 - RNA, 23 nt, Artificial Sequence
  Synthetic
cccaaagcacuggaauuccagac

SEQ ID NO: 258959 - RNA, 24 nt, Artificial Sequence
  Synthetic
ucccaaagcacuggaauuccagac

SEQ ID NO: 258960 - RNA, 18 nt, Artificial Sequence
  Synthetic
aacaaauguuaagcagac

SEQ ID NO: 258961 - RNA, 19 nt, Artificial Sequence
  Synthetic
caacaaauguuaagcagac

SEQ ID NO: 258962 - RNA, 20 nt, Artificial Sequence
  Synthetic
ucaacaaauguuaagcagac

SEQ ID NO: 258963 - RNA, 21 nt, Artificial Sequence
  Synthetic
aucaacaaauguuaagcagac

SEQ ID NO: 258964 - RNA, 22 nt, Artificial Sequence
  Synthetic
aaucaacaaauguuaagcagac

SEQ ID NO: 258965 - RNA, 23 nt, Artificial Sequence
  Synthetic
aaaucaacaaauguuaagcagac

SEQ ID NO: 258966 - RNA, 24 nt, Artificial Sequence
  Synthetic
uaaaucaacaaauguuaagcagac

SEQ ID NO: 258967 - RNA, 18 nt, Artificial Sequence
  Synthetic
aacaugggcugagcagac

SEQ ID NO: 258968 - RNA, 19 nt, Artificial Sequence
  Synthetic
aaacaugggcugagcagac

SEQ ID NO: 258969 - RNA, 20 nt, Artificial Sequence
  Synthetic
gaaacaugggcugagcagac

SEQ ID NO: 258970 - RNA, 21 nt, Artificial Sequence
  Synthetic
agaaacaugggcugagcagac

SEQ ID NO: 258971 - RNA, 22 nt, Artificial Sequence
  Synthetic
aagaaacaugggcugagcagac

SEQ ID NO: 258972 - RNA, 23 nt, Artificial Sequence
  Synthetic
aaagaaacaugggcugagcagac

SEQ ID NO: 258973 - RNA, 24 nt, Artificial Sequence
  Synthetic
caaagaaacaugggcugagcagac

SEQ ID NO: 258974 - RNA, 18 nt, Artificial Sequence
  Synthetic
aagaaaaggaaggcagac

SEQ ID NO: 258975 - RNA, 19 nt, Artificial Sequence
  Synthetic
uaagaaaaggaaggcagac

SEQ ID NO: 258976 - RNA, 20 nt, Artificial Sequence
  Synthetic
guaagaaaaggaaggcagac

SEQ ID NO: 258977 - RNA, 21 nt, Artificial Sequence
  Synthetic
gguaagaaaaggaaggcagac

SEQ ID NO: 258978 - RNA, 22 nt, Artificial Sequence
  Synthetic
agguaagaaaaggaaggcagac

SEQ ID NO: 258979 - RNA, 23 nt, Artificial Sequence
  Synthetic
aagguaagaaaaggaaggcagac

SEQ ID NO: 258980 - RNA, 24 nt, Artificial Sequence
  Synthetic
aaagguaagaaaaggaaggcagac

SEQ ID NO: 258981 - RNA, 18 nt, Artificial Sequence
  Synthetic
ccuccgcaacaugcagac

SEQ ID NO: 258982 - RNA, 19 nt, Artificial Sequence
  Synthetic
gccuccgcaacaugcagac

SEQ ID NO: 258983 - RNA, 20 nt, Artificial Sequence
  Synthetic
agccuccgcaacaugcagac

SEQ ID NO: 258984 - RNA, 21 nt, Artificial Sequence
  Synthetic
cagccuccgcaacaugcagac

SEQ ID NO: 258985 - RNA, 22 nt, Artificial Sequence
  Synthetic
acagccuccgcaacaugcagac

SEQ ID NO: 258986 - RNA, 23 nt, Artificial Sequence
  Synthetic
cacagccuccgcaacaugcagac

SEQ ID NO: 258987 - RNA, 24 nt, Artificial Sequence
  Synthetic
ccacagccuccgcaacaugcagac

SEQ ID NO: 258988 - RNA, 18 nt, Artificial Sequence
  Synthetic
agugcugggauugcagac

SEQ ID NO: 258989 - RNA, 19 nt, Artificial Sequence
  Synthetic
aagugcugggauugcagac

SEQ ID NO: 258990 - RNA, 20 nt, Artificial Sequence
  Synthetic
aaagugcugggauugcagac

SEQ ID NO: 258991 - RNA, 21 nt, Artificial Sequence
  Synthetic
caaagugcugggauugcagac

SEQ ID NO: 258992 - RNA, 22 nt, Artificial Sequence
  Synthetic
ccaaagugcugggauugcagac

SEQ ID NO: 258993 - RNA, 23 nt, Artificial Sequence
  Synthetic
cccaaagugcugggauugcagac

SEQ ID NO: 258994 - RNA, 24 nt, Artificial Sequence
  Synthetic
ucccaaagugcugggauugcagac

SEQ ID NO: 258995 - RNA, 18 nt, Artificial Sequence
  Synthetic
augccuuuggacucagac

SEQ ID NO: 258996 - RNA, 19 nt, Artificial Sequence
  Synthetic
caugccuuuggacucagac

SEQ ID NO: 258997 - RNA, 20 nt, Artificial Sequence
  Synthetic
ucaugccuuuggacucagac

SEQ ID NO: 258998 - RNA, 21 nt, Artificial Sequence
  Synthetic
cucaugccuuuggacucagac

SEQ ID NO: 258999 - RNA, 22 nt, Artificial Sequence
  Synthetic
ucucaugccuuuggacucagac

SEQ ID NO: 259000 - RNA, 23 nt, Artificial Sequence
  Synthetic
uucucaugccuuuggacucagac

SEQ ID NO: 259001 - RNA, 24 nt, Artificial Sequence
  Synthetic
guucucaugccuuuggacucagac

SEQ ID NO: 259002 - RNA, 18 nt, Artificial Sequence
  Synthetic
guaccuucccccucagac

SEQ ID NO: 259003 - RNA, 19 nt, Artificial Sequence
  Synthetic
aguaccuucccccucagac

SEQ ID NO: 259004 - RNA, 20 nt, Artificial Sequence
  Synthetic
caguaccuucccccucagac

SEQ ID NO: 259005 - RNA, 21 nt, Artificial Sequence
  Synthetic
ucaguaccuucccccucagac

SEQ ID NO: 259006 - RNA, 22 nt, Artificial Sequence
  Synthetic
uucaguaccuucccccucagac

SEQ ID NO: 259007 - RNA, 23 nt, Artificial Sequence
  Synthetic
uuucaguaccuucccccucagac

SEQ ID NO: 259008 - RNA, 24 nt, Artificial Sequence
  Synthetic
uuuucaguaccuucccccucagac

SEQ ID NO: 259009 - RNA, 18 nt, Artificial Sequence
  Synthetic
uccaaagugcugucagac

SEQ ID NO: 259010 - RNA, 19 nt, Artificial Sequence
  Synthetic
uuccaaagugcugucagac

SEQ ID NO: 259011 - RNA, 20 nt, Artificial Sequence
  Synthetic
auuccaaagugcugucagac

SEQ ID NO: 259012 - RNA, 21 nt, Artificial Sequence
  Synthetic
uauuccaaagugcugucagac

SEQ ID NO: 259013 - RNA, 22 nt, Artificial Sequence
  Synthetic
auauuccaaagugcugucagac

SEQ ID NO: 259014 - RNA, 23 nt, Artificial Sequence
  Synthetic
gauauuccaaagugcugucagac

SEQ ID NO: 259015 - RNA, 24 nt, Artificial Sequence
  Synthetic
ggauauuccaaagugcugucagac

SEQ ID NO: 259016 - RNA, 18 nt, Artificial Sequence
  Synthetic
acgcagaauucuucagac

SEQ ID NO: 259017 - RNA, 19 nt, Artificial Sequence
  Synthetic
cacgcagaauucuucagac

SEQ ID NO: 259018 - RNA, 20 nt, Artificial Sequence
  Synthetic
acacgcagaauucuucagac

SEQ ID NO: 259019 - RNA, 21 nt, Artificial Sequence
  Synthetic
gacacgcagaauucuucagac

SEQ ID NO: 259020 - RNA, 22 nt, Artificial Sequence
  Synthetic
agacacgcagaauucuucagac

SEQ ID NO: 259021 - RNA, 23 nt, Artificial Sequence
  Synthetic
uagacacgcagaauucuucagac

SEQ ID NO: 259022 - RNA, 24 nt, Artificial Sequence
  Synthetic
auagacacgcagaauucuucagac

SEQ ID NO: 259023 - RNA, 18 nt, Artificial Sequence
  Synthetic
aacucugauucuucagac

SEQ ID NO: 259024 - RNA, 19 nt, Artificial Sequence
  Synthetic
caacucugauucuucagac

SEQ ID NO: 259025 - RNA, 20 nt, Artificial Sequence
  Synthetic
ccaacucugauucuucagac

SEQ ID NO: 259026 - RNA, 21 nt, Artificial Sequence
  Synthetic
uccaacucugauucuucagac

SEQ ID NO: 259027 - RNA, 22 nt, Artificial Sequence
  Synthetic
uuccaacucugauucuucagac

SEQ ID NO: 259028 - RNA, 23 nt, Artificial Sequence
  Synthetic
uuuccaacucugauucuucagac

SEQ ID NO: 259029 - RNA, 24 nt, Artificial Sequence
  Synthetic
uuuuccaacucugauucuucagac

SEQ ID NO: 259030 - RNA, 18 nt, Artificial Sequence
  Synthetic
ccaauuaaauuuucagac

SEQ ID NO: 259031 - RNA, 19 nt, Artificial Sequence
  Synthetic
accaauuaaauuuucagac

SEQ ID NO: 259032 - RNA, 20 nt, Artificial Sequence
  Synthetic
aaccaauuaaauuuucagac

SEQ ID NO: 259033 - RNA, 21 nt, Artificial Sequence
  Synthetic
aaaccaauuaaauuuucagac

SEQ ID NO: 259034 - RNA, 22 nt, Artificial Sequence
  Synthetic
gaaaccaauuaaauuuucagac

SEQ ID NO: 259035 - RNA, 23 nt, Artificial Sequence
  Synthetic
ugaaaccaauuaaauuuucagac

SEQ ID NO: 259036 - RNA, 24 nt, Artificial Sequence
  Synthetic
cugaaaccaauuaaauuuucagac

SEQ ID NO: 259037 - RNA, 18 nt, Artificial Sequence
  Synthetic
uaacuuuaaacaagagac

SEQ ID NO: 259038 - RNA, 19 nt, Artificial Sequence
  Synthetic
uuaacuuuaaacaagagac

SEQ ID NO: 259039 - RNA, 20 nt, Artificial Sequence
  Synthetic
uuuaacuuuaaacaagagac

SEQ ID NO: 259040 - RNA, 21 nt, Artificial Sequence
  Synthetic
uuuuaacuuuaaacaagagac

SEQ ID NO: 259041 - RNA, 22 nt, Artificial Sequence
  Synthetic
cuuuuaacuuuaaacaagagac

SEQ ID NO: 259042 - RNA, 23 nt, Artificial Sequence
  Synthetic
gcuuuuaacuuuaaacaagagac

SEQ ID NO: 259043 - RNA, 24 nt, Artificial Sequence
  Synthetic
ugcuuuuaacuuuaaacaagagac

SEQ ID NO: 259044 - RNA, 18 nt, Artificial Sequence
  Synthetic
auagaagauggaagagac

SEQ ID NO: 259045 - RNA, 19 nt, Artificial Sequence
  Synthetic
cauagaagauggaagagac

SEQ ID NO: 259046 - RNA, 20 nt, Artificial Sequence
  Synthetic
ucauagaagauggaagagac

SEQ ID NO: 259047 - RNA, 21 nt, Artificial Sequence
  Synthetic
cucauagaagauggaagagac

SEQ ID NO: 259048 - RNA, 22 nt, Artificial Sequence
  Synthetic
ucucauagaagauggaagagac

SEQ ID NO: 259049 - RNA, 23 nt, Artificial Sequence
  Synthetic
uucucauagaagauggaagagac

SEQ ID NO: 259050 - RNA, 24 nt, Artificial Sequence
  Synthetic
cuucucauagaagauggaagagac

SEQ ID NO: 259051 - RNA, 18 nt, Artificial Sequence
  Synthetic
uguggacuaugaagagac

SEQ ID NO: 259052 - RNA, 19 nt, Artificial Sequence
  Synthetic
uuguggacuaugaagagac

SEQ ID NO: 259053 - RNA, 20 nt, Artificial Sequence
  Synthetic
guuguggacuaugaagagac

SEQ ID NO: 259054 - RNA, 21 nt, Artificial Sequence
  Synthetic
uguuguggacuaugaagagac

SEQ ID NO: 259055 - RNA, 22 nt, Artificial Sequence
  Synthetic
guguuguggacuaugaagagac

SEQ ID NO: 259056 - RNA, 23 nt, Artificial Sequence
  Synthetic
aguguuguggacuaugaagagac

SEQ ID NO: 259057 - RNA, 24 nt, Artificial Sequence
  Synthetic
aaguguuguggacuaugaagagac

SEQ ID NO: 259058 - RNA, 18 nt, Artificial Sequence
  Synthetic
aaauugugacacagagac

SEQ ID NO: 259059 - RNA, 19 nt, Artificial Sequence
  Synthetic
caaauugugacacagagac

SEQ ID NO: 259060 - RNA, 20 nt, Artificial Sequence
  Synthetic
ucaaauugugacacagagac

SEQ ID NO: 259061 - RNA, 21 nt, Artificial Sequence
  Synthetic
aucaaauugugacacagagac

SEQ ID NO: 259062 - RNA, 22 nt, Artificial Sequence
  Synthetic
uaucaaauugugacacagagac

SEQ ID NO: 259063 - RNA, 23 nt, Artificial Sequence
  Synthetic
uuaucaaauugugacacagagac

SEQ ID NO: 259064 - RNA, 24 nt, Artificial Sequence
  Synthetic
auuaucaaauugugacacagagac

SEQ ID NO: 259065 - RNA, 18 nt, Artificial Sequence
  Synthetic
gcaaucauaaccagagac

SEQ ID NO: 259066 - RNA, 19 nt, Artificial Sequence
  Synthetic
ugcaaucauaaccagagac

SEQ ID NO: 259067 - RNA, 20 nt, Artificial Sequence
  Synthetic
gugcaaucauaaccagagac

SEQ ID NO: 259068 - RNA, 21 nt, Artificial Sequence
  Synthetic
ggugcaaucauaaccagagac

SEQ ID NO: 259069 - RNA, 22 nt, Artificial Sequence
  Synthetic
aggugcaaucauaaccagagac

SEQ ID NO: 259070 - RNA, 23 nt, Artificial Sequence
  Synthetic
aaggugcaaucauaaccagagac

SEQ ID NO: 259071 - RNA, 24 nt, Artificial Sequence
  Synthetic
aaaggugcaaucauaaccagagac

SEQ ID NO: 259072 - RNA, 18 nt, Artificial Sequence
  Synthetic
cuuuggccucccagagac

SEQ ID NO: 259073 - RNA, 19 nt, Artificial Sequence
  Synthetic
gcuuuggccucccagagac

SEQ ID NO: 259074 - RNA, 20 nt, Artificial Sequence
  Synthetic
cgcuuuggccucccagagac

SEQ ID NO: 259075 - RNA, 21 nt, Artificial Sequence
  Synthetic
ccgcuuuggccucccagagac

SEQ ID NO: 259076 - RNA, 22 nt, Artificial Sequence
  Synthetic
cccgcuuuggccucccagagac

SEQ ID NO: 259077 - RNA, 23 nt, Artificial Sequence
  Synthetic
acccgcuuuggccucccagagac

SEQ ID NO: 259078 - RNA, 24 nt, Artificial Sequence
  Synthetic
cacccgcuuuggccucccagagac

SEQ ID NO: 259079 - RNA, 18 nt, Artificial Sequence
  Synthetic
uggcaaggccgcagagac

SEQ ID NO: 259080 - RNA, 19 nt, Artificial Sequence
  Synthetic
cuggcaaggccgcagagac

SEQ ID NO: 259081 - RNA, 20 nt, Artificial Sequence
  Synthetic
gcuggcaaggccgcagagac

SEQ ID NO: 259082 - RNA, 21 nt, Artificial Sequence
  Synthetic
ugcuggcaaggccgcagagac

SEQ ID NO: 259083 - RNA, 22 nt, Artificial Sequence
  Synthetic
augcuggcaaggccgcagagac

SEQ ID NO: 259084 - RNA, 23 nt, Artificial Sequence
  Synthetic
aaugcuggcaaggccgcagagac

SEQ ID NO: 259085 - RNA, 24 nt, Artificial Sequence
  Synthetic
caaugcuggcaaggccgcagagac

SEQ ID NO: 259086 - RNA, 18 nt, Artificial Sequence
  Synthetic
agaaaguuuaagagagac

SEQ ID NO: 259087 - RNA, 19 nt, Artificial Sequence
  Synthetic
aagaaaguuuaagagagac

SEQ ID NO: 259088 - RNA, 20 nt, Artificial Sequence
  Synthetic
gaagaaaguuuaagagagac

SEQ ID NO: 259089 - RNA, 21 nt, Artificial Sequence
  Synthetic
agaagaaaguuuaagagagac

SEQ ID NO: 259090 - RNA, 22 nt, Artificial Sequence
  Synthetic
aagaagaaaguuuaagagagac

SEQ ID NO: 259091 - RNA, 23 nt, Artificial Sequence
  Synthetic
aaagaagaaaguuuaagagagac

SEQ ID NO: 259092 - RNA, 24 nt, Artificial Sequence
  Synthetic
uaaagaagaaaguuuaagagagac

SEQ ID NO: 259093 - RNA, 18 nt, Artificial Sequence
  Synthetic
uagcuuuuggggagagac

SEQ ID NO: 259094 - RNA, 19 nt, Artificial Sequence
  Synthetic
cuagcuuuuggggagagac

SEQ ID NO: 259095 - RNA, 20 nt, Artificial Sequence
  Synthetic
ucuagcuuuuggggagagac

SEQ ID NO: 259096 - RNA, 21 nt, Artificial Sequence
  Synthetic
uucuagcuuuuggggagagac

SEQ ID NO: 259097 - RNA, 22 nt, Artificial Sequence
  Synthetic
auucuagcuuuuggggagagac

SEQ ID NO: 259098 - RNA, 23 nt, Artificial Sequence
  Synthetic
uauucuagcuuuuggggagagac

SEQ ID NO: 259099 - RNA, 24 nt, Artificial Sequence
  Synthetic
guauucuagcuuuuggggagagac

SEQ ID NO: 259100 - RNA, 18 nt, Artificial Sequence
  Synthetic
cugagaagcuugagagac

SEQ ID NO: 259101 - RNA, 19 nt, Artificial Sequence
  Synthetic
ccugagaagcuugagagac

SEQ ID NO: 259102 - RNA, 20 nt, Artificial Sequence
  Synthetic
cccugagaagcuugagagac

SEQ ID NO: 259103 - RNA, 21 nt, Artificial Sequence
  Synthetic
ucccugagaagcuugagagac

SEQ ID NO: 259104 - RNA, 22 nt, Artificial Sequence
  Synthetic
gucccugagaagcuugagagac

SEQ ID NO: 259105 - RNA, 23 nt, Artificial Sequence
  Synthetic
ugucccugagaagcuugagagac

SEQ ID NO: 259106 - RNA, 24 nt, Artificial Sequence
  Synthetic
gugucccugagaagcuugagagac

SEQ ID NO: 259107 - RNA, 18 nt, Artificial Sequence
  Synthetic
acugaaggagauagagac

SEQ ID NO: 259108 - RNA, 19 nt, Artificial Sequence
  Synthetic
aacugaaggagauagagac

SEQ ID NO: 259109 - RNA, 20 nt, Artificial Sequence
  Synthetic
gaacugaaggagauagagac

SEQ ID NO: 259110 - RNA, 21 nt, Artificial Sequence
  Synthetic
agaacugaaggagauagagac

SEQ ID NO: 259111 - RNA, 22 nt, Artificial Sequence
  Synthetic
cagaacugaaggagauagagac

SEQ ID NO: 259112 - RNA, 23 nt, Artificial Sequence
  Synthetic
gcagaacugaaggagauagagac

SEQ ID NO: 259113 - RNA, 24 nt, Artificial Sequence
  Synthetic
agcagaacugaaggagauagagac

SEQ ID NO: 259114 - RNA, 18 nt, Artificial Sequence
  Synthetic
auuacagcagguagagac

SEQ ID NO: 259115 - RNA, 19 nt, Artificial Sequence
  Synthetic
aauuacagcagguagagac

SEQ ID NO: 259116 - RNA, 20 nt, Artificial Sequence
  Synthetic
gaauuacagcagguagagac

SEQ ID NO: 259117 - RNA, 21 nt, Artificial Sequence
  Synthetic
ugaauuacagcagguagagac

SEQ ID NO: 259118 - RNA, 22 nt, Artificial Sequence
  Synthetic
uugaauuacagcagguagagac

SEQ ID NO: 259119 - RNA, 23 nt, Artificial Sequence
  Synthetic
guugaauuacagcagguagagac

SEQ ID NO: 259120 - RNA, 24 nt, Artificial Sequence
  Synthetic
gguugaauuacagcagguagagac

SEQ ID NO: 259121 - RNA, 18 nt, Artificial Sequence
  Synthetic
gagacagaaaaccgagac

SEQ ID NO: 259122 - RNA, 19 nt, Artificial Sequence
  Synthetic
agagacagaaaaccgagac

SEQ ID NO: 259123 - RNA, 20 nt, Artificial Sequence
  Synthetic
uagagacagaaaaccgagac

SEQ ID NO: 259124 - RNA, 21 nt, Artificial Sequence
  Synthetic
uuagagacagaaaaccgagac

SEQ ID NO: 259125 - RNA, 22 nt, Artificial Sequence
  Synthetic
uuuagagacagaaaaccgagac

SEQ ID NO: 259126 - RNA, 23 nt, Artificial Sequence
  Synthetic
uuuuagagacagaaaaccgagac

SEQ ID NO: 259127 - RNA, 24 nt, Artificial Sequence
  Synthetic
auuuuagagacagaaaaccgagac

SEQ ID NO: 259128 - RNA, 18 nt, Artificial Sequence
  Synthetic
auuuuucuggugcgagac

SEQ ID NO: 259129 - RNA, 19 nt, Artificial Sequence
  Synthetic
gauuuuucuggugcgagac

SEQ ID NO: 259130 - RNA, 20 nt, Artificial Sequence
  Synthetic
ugauuuuucuggugcgagac

SEQ ID NO: 259131 - RNA, 21 nt, Artificial Sequence
  Synthetic
uugauuuuucuggugcgagac

SEQ ID NO: 259132 - RNA, 22 nt, Artificial Sequence
  Synthetic
uuugauuuuucuggugcgagac

SEQ ID NO: 259133 - RNA, 23 nt, Artificial Sequence
  Synthetic
auuugauuuuucuggugcgagac

SEQ ID NO: 259134 - RNA, 24 nt, Artificial Sequence
  Synthetic
gauuugauuuuucuggugcgagac

SEQ ID NO: 259135 - RNA, 18 nt, Artificial Sequence
  Synthetic
uggauuauacgaggagac

SEQ ID NO: 259136 - RNA, 19 nt, Artificial Sequence
  Synthetic
uuggauuauacgaggagac

SEQ ID NO: 259137 - RNA, 20 nt, Artificial Sequence
  Synthetic
uuuggauuauacgaggagac

SEQ ID NO: 259138 - RNA, 21 nt, Artificial Sequence
  Synthetic
guuuggauuauacgaggagac

SEQ ID NO: 259139 - RNA, 22 nt, Artificial Sequence
  Synthetic
aguuuggauuauacgaggagac

SEQ ID NO: 259140 - RNA, 23 nt, Artificial Sequence
  Synthetic
aaguuuggauuauacgaggagac

SEQ ID NO: 259141 - RNA, 24 nt, Artificial Sequence
  Synthetic
aaaguuuggauuauacgaggagac

SEQ ID NO: 259142 - RNA, 18 nt, Artificial Sequence
  Synthetic
acuaauggcaagggagac

SEQ ID NO: 259143 - RNA, 19 nt, Artificial Sequence
  Synthetic
aacuaauggcaagggagac

SEQ ID NO: 259144 - RNA, 20 nt, Artificial Sequence
  Synthetic
aaacuaauggcaagggagac

SEQ ID NO: 259145 - RNA, 21 nt, Artificial Sequence
  Synthetic
caaacuaauggcaagggagac

SEQ ID NO: 259146 - RNA, 22 nt, Artificial Sequence
  Synthetic
ccaaacuaauggcaagggagac

SEQ ID NO: 259147 - RNA, 23 nt, Artificial Sequence
  Synthetic
gccaaacuaauggcaagggagac

SEQ ID NO: 259148 - RNA, 24 nt, Artificial Sequence
  Synthetic
agccaaacuaauggcaagggagac

SEQ ID NO: 259149 - RNA, 18 nt, Artificial Sequence
  Synthetic
gguucaaucaagggagac

SEQ ID NO: 259150 - RNA, 19 nt, Artificial Sequence
  Synthetic
agguucaaucaagggagac

SEQ ID NO: 259151 - RNA, 20 nt, Artificial Sequence
  Synthetic
aagguucaaucaagggagac

SEQ ID NO: 259152 - RNA, 21 nt, Artificial Sequence
  Synthetic
aaagguucaaucaagggagac

SEQ ID NO: 259153 - RNA, 22 nt, Artificial Sequence
  Synthetic
aaaagguucaaucaagggagac

SEQ ID NO: 259154 - RNA, 23 nt, Artificial Sequence
  Synthetic
uaaaagguucaaucaagggagac

SEQ ID NO: 259155 - RNA, 24 nt, Artificial Sequence
  Synthetic
auaaaagguucaaucaagggagac

SEQ ID NO: 259156 - RNA, 18 nt, Artificial Sequence
  Synthetic
uuacuggagcagggagac

SEQ ID NO: 259157 - RNA, 19 nt, Artificial Sequence
  Synthetic
uuuacuggagcagggagac

SEQ ID NO: 259158 - RNA, 20 nt, Artificial Sequence
  Synthetic
uuuuacuggagcagggagac

SEQ ID NO: 259159 - RNA, 21 nt, Artificial Sequence
  Synthetic
uuuuuacuggagcagggagac

SEQ ID NO: 259160 - RNA, 22 nt, Artificial Sequence
  Synthetic
uuuuuuacuggagcagggagac

SEQ ID NO: 259161 - RNA, 23 nt, Artificial Sequence
  Synthetic
guuuuuuacuggagcagggagac

SEQ ID NO: 259162 - RNA, 24 nt, Artificial Sequence
  Synthetic
uguuuuuuacuggagcagggagac

SEQ ID NO: 259163 - RNA, 18 nt, Artificial Sequence
  Synthetic
acuccauaagugggagac

SEQ ID NO: 259164 - RNA, 19 nt, Artificial Sequence
  Synthetic
uacuccauaagugggagac

SEQ ID NO: 259165 - RNA, 20 nt, Artificial Sequence
  Synthetic
guacuccauaagugggagac

SEQ ID NO: 259166 - RNA, 21 nt, Artificial Sequence
  Synthetic
gguacuccauaagugggagac

SEQ ID NO: 259167 - RNA, 22 nt, Artificial Sequence
  Synthetic
ggguacuccauaagugggagac

SEQ ID NO: 259168 - RNA, 23 nt, Artificial Sequence
  Synthetic
uggguacuccauaagugggagac

SEQ ID NO: 259169 - RNA, 24 nt, Artificial Sequence
  Synthetic
cuggguacuccauaagugggagac

SEQ ID NO: 259170 - RNA, 18 nt, Artificial Sequence
  Synthetic
agagggauggugggagac

SEQ ID NO: 259171 - RNA, 19 nt, Artificial Sequence
  Synthetic
aagagggauggugggagac

SEQ ID NO: 259172 - RNA, 20 nt, Artificial Sequence
  Synthetic
gaagagggauggugggagac

SEQ ID NO: 259173 - RNA, 21 nt, Artificial Sequence
  Synthetic
ggaagagggauggugggagac

SEQ ID NO: 259174 - RNA, 22 nt, Artificial Sequence
  Synthetic
uggaagagggauggugggagac

SEQ ID NO: 259175 - RNA, 23 nt, Artificial Sequence
  Synthetic
auggaagagggauggugggagac

SEQ ID NO: 259176 - RNA, 24 nt, Artificial Sequence
  Synthetic
aauggaagagggauggugggagac

SEQ ID NO: 259177 - RNA, 18 nt, Artificial Sequence
  Synthetic
cagcuaacugcuggagac

SEQ ID NO: 259178 - RNA, 19 nt, Artificial Sequence
  Synthetic
gcagcuaacugcuggagac

SEQ ID NO: 259179 - RNA, 20 nt, Artificial Sequence
  Synthetic
agcagcuaacugcuggagac

SEQ ID NO: 259180 - RNA, 21 nt, Artificial Sequence
  Synthetic
uagcagcuaacugcuggagac

SEQ ID NO: 259181 - RNA, 22 nt, Artificial Sequence
  Synthetic
guagcagcuaacugcuggagac

SEQ ID NO: 259182 - RNA, 23 nt, Artificial Sequence
  Synthetic
uguagcagcuaacugcuggagac

SEQ ID NO: 259183 - RNA, 24 nt, Artificial Sequence
  Synthetic
cuguagcagcuaacugcuggagac

SEQ ID NO: 259184 - RNA, 18 nt, Artificial Sequence
  Synthetic
gcucacaguucuggagac

SEQ ID NO: 259185 - RNA, 19 nt, Artificial Sequence
  Synthetic
ggcucacaguucuggagac

SEQ ID NO: 259186 - RNA, 20 nt, Artificial Sequence
  Synthetic
uggcucacaguucuggagac

SEQ ID NO: 259187 - RNA, 21 nt, Artificial Sequence
  Synthetic
uuggcucacaguucuggagac

SEQ ID NO: 259188 - RNA, 22 nt, Artificial Sequence
  Synthetic
auuggcucacaguucuggagac

SEQ ID NO: 259189 - RNA, 23 nt, Artificial Sequence
  Synthetic
uauuggcucacaguucuggagac

SEQ ID NO: 259190 - RNA, 24 nt, Artificial Sequence
  Synthetic
guauuggcucacaguucuggagac

SEQ ID NO: 259191 - RNA, 18 nt, Artificial Sequence
  Synthetic
cauuuucuuucuggagac

SEQ ID NO: 259192 - RNA, 19 nt, Artificial Sequence
  Synthetic
acauuuucuuucuggagac

SEQ ID NO: 259193 - RNA, 20 nt, Artificial Sequence
  Synthetic
gacauuuucuuucuggagac

SEQ ID NO: 259194 - RNA, 21 nt, Artificial Sequence
  Synthetic
agacauuuucuuucuggagac

SEQ ID NO: 259195 - RNA, 22 nt, Artificial Sequence
  Synthetic
aagacauuuucuuucuggagac

SEQ ID NO: 259196 - RNA, 23 nt, Artificial Sequence
  Synthetic
caagacauuuucuuucuggagac

SEQ ID NO: 259197 - RNA, 24 nt, Artificial Sequence
  Synthetic
ucaagacauuuucuuucuggagac

SEQ ID NO: 259198 - RNA, 18 nt, Artificial Sequence
  Synthetic
uaagcuuucaguggagac

SEQ ID NO: 259199 - RNA, 19 nt, Artificial Sequence
  Synthetic
auaagcuuucaguggagac

SEQ ID NO: 259200 - RNA, 20 nt, Artificial Sequence
  Synthetic
aauaagcuuucaguggagac

SEQ ID NO: 259201 - RNA, 21 nt, Artificial Sequence
  Synthetic
aaauaagcuuucaguggagac

SEQ ID NO: 259202 - RNA, 22 nt, Artificial Sequence
  Synthetic
aaaauaagcuuucaguggagac

SEQ ID NO: 259203 - RNA, 23 nt, Artificial Sequence
  Synthetic
aaaaauaagcuuucaguggagac

SEQ ID NO: 259204 - RNA, 24 nt, Artificial Sequence
  Synthetic
gaaaaauaagcuuucaguggagac

SEQ ID NO: 259205 - RNA, 18 nt, Artificial Sequence
  Synthetic
uagcauguucuuggagac

SEQ ID NO: 259206 - RNA, 19 nt, Artificial Sequence
  Synthetic
cuagcauguucuuggagac

SEQ ID NO: 259207 - RNA, 20 nt, Artificial Sequence
  Synthetic
gcuagcauguucuuggagac

SEQ ID NO: 259208 - RNA, 21 nt, Artificial Sequence
  Synthetic
agcuagcauguucuuggagac

SEQ ID NO: 259209 - RNA, 22 nt, Artificial Sequence
  Synthetic
aagcuagcauguucuuggagac

SEQ ID NO: 259210 - RNA, 23 nt, Artificial Sequence
  Synthetic
aaagcuagcauguucuuggagac

SEQ ID NO: 259211 - RNA, 24 nt, Artificial Sequence
  Synthetic
uaaagcuagcauguucuuggagac

SEQ ID NO: 259212 - RNA, 18 nt, Artificial Sequence
  Synthetic
gcuaguaagaaaugagac

SEQ ID NO: 259213 - RNA, 19 nt, Artificial Sequence
  Synthetic
ugcuaguaagaaaugagac

SEQ ID NO: 259214 - RNA, 20 nt, Artificial Sequence
  Synthetic
augcuaguaagaaaugagac

SEQ ID NO: 259215 - RNA, 21 nt, Artificial Sequence
  Synthetic
aaugcuaguaagaaaugagac

SEQ ID NO: 259216 - RNA, 22 nt, Artificial Sequence
  Synthetic
aaaugcuaguaagaaaugagac

SEQ ID NO: 259217 - RNA, 23 nt, Artificial Sequence
  Synthetic
aaaaugcuaguaagaaaugagac

SEQ ID NO: 259218 - RNA, 24 nt, Artificial Sequence
  Synthetic
aaaaaugcuaguaagaaaugagac

SEQ ID NO: 259219 - RNA, 18 nt, Artificial Sequence
  Synthetic
caguuuggaccaugagac

SEQ ID NO: 259220 - RNA, 19 nt, Artificial Sequence
  Synthetic
acaguuuggaccaugagac

SEQ ID NO: 259221 - RNA, 20 nt, Artificial Sequence
  Synthetic
uacaguuuggaccaugagac

SEQ ID NO: 259222 - RNA, 21 nt, Artificial Sequence
  Synthetic
auacaguuuggaccaugagac

SEQ ID NO: 259223 - RNA, 22 nt, Artificial Sequence
  Synthetic
cauacaguuuggaccaugagac

SEQ ID NO: 259224 - RNA, 23 nt, Artificial Sequence
  Synthetic
acauacaguuuggaccaugagac

SEQ ID NO: 259225 - RNA, 24 nt, Artificial Sequence
  Synthetic
cacauacaguuuggaccaugagac

SEQ ID NO: 259226 - RNA, 18 nt, Artificial Sequence
  Synthetic
aagaaagaggcaugagac

SEQ ID NO: 259227 - RNA, 19 nt, Artificial Sequence
  Synthetic
aaagaaagaggcaugagac

SEQ ID NO: 259228 - RNA, 20 nt, Artificial Sequence
  Synthetic
uaaagaaagaggcaugagac

SEQ ID NO: 259229 - RNA, 21 nt, Artificial Sequence
  Synthetic
auaaagaaagaggcaugagac

SEQ ID NO: 259230 - RNA, 22 nt, Artificial Sequence
  Synthetic
gauaaagaaagaggcaugagac

SEQ ID NO: 259231 - RNA, 23 nt, Artificial Sequence
  Synthetic
ugauaaagaaagaggcaugagac

SEQ ID NO: 259232 - RNA, 24 nt, Artificial Sequence
  Synthetic
augauaaagaaagaggcaugagac

SEQ ID NO: 259233 - RNA, 18 nt, Artificial Sequence
  Synthetic
gaaauuugaagaugagac

SEQ ID NO: 259234 - RNA, 19 nt, Artificial Sequence
  Synthetic
ggaaauuugaagaugagac

SEQ ID NO: 259235 - RNA, 20 nt, Artificial Sequence
  Synthetic
aggaaauuugaagaugagac

SEQ ID NO: 259236 - RNA, 21 nt, Artificial Sequence
  Synthetic
aaggaaauuugaagaugagac

SEQ ID NO: 259237 - RNA, 22 nt, Artificial Sequence
  Synthetic
aaaggaaauuugaagaugagac

SEQ ID NO: 259238 - RNA, 23 nt, Artificial Sequence
  Synthetic
aaaaggaaauuugaagaugagac

SEQ ID NO: 259239 - RNA, 24 nt, Artificial Sequence
  Synthetic
aaaaaggaaauuugaagaugagac

SEQ ID NO: 259240 - RNA, 18 nt, Artificial Sequence
  Synthetic
uagcaccaacccugagac

SEQ ID NO: 259241 - RNA, 19 nt, Artificial Sequence
  Synthetic
auagcaccaacccugagac

SEQ ID NO: 259242 - RNA, 20 nt, Artificial Sequence
  Synthetic
cauagcaccaacccugagac

SEQ ID NO: 259243 - RNA, 21 nt, Artificial Sequence
  Synthetic
acauagcaccaacccugagac

SEQ ID NO: 259244 - RNA, 22 nt, Artificial Sequence
  Synthetic
uacauagcaccaacccugagac

SEQ ID NO: 259245 - RNA, 23 nt, Artificial Sequence
  Synthetic
uuacauagcaccaacccugagac

SEQ ID NO: 259246 - RNA, 24 nt, Artificial Sequence
  Synthetic
cuuacauagcaccaacccugagac

SEQ ID NO: 259247 - RNA, 18 nt, Artificial Sequence
  Synthetic
ccuuaccucagcugagac

SEQ ID NO: 259248 - RNA, 19 nt, Artificial Sequence
  Synthetic
gccuuaccucagcugagac

SEQ ID NO: 259249 - RNA, 20 nt, Artificial Sequence
  Synthetic
agccuuaccucagcugagac

SEQ ID NO: 259250 - RNA, 21 nt, Artificial Sequence
  Synthetic
aagccuuaccucagcugagac

SEQ ID NO: 259251 - RNA, 22 nt, Artificial Sequence
  Synthetic
gaagccuuaccucagcugagac

SEQ ID NO: 259252 - RNA, 23 nt, Artificial Sequence
  Synthetic
ggaagccuuaccucagcugagac

SEQ ID NO: 259253 - RNA, 24 nt, Artificial Sequence
  Synthetic
aggaagccuuaccucagcugagac

SEQ ID NO: 259254 - RNA, 18 nt, Artificial Sequence
  Synthetic
uacucgggaggcugagac

SEQ ID NO: 259255 - RNA, 19 nt, Artificial Sequence
  Synthetic
cuacucgggaggcugagac

SEQ ID NO: 259256 - RNA, 20 nt, Artificial Sequence
  Synthetic
gcuacucgggaggcugagac

SEQ ID NO: 259257 - RNA, 21 nt, Artificial Sequence
  Synthetic
ugcuacucgggaggcugagac

SEQ ID NO: 259258 - RNA, 22 nt, Artificial Sequence
  Synthetic
cugcuacucgggaggcugagac

SEQ ID NO: 259259 - RNA, 23 nt, Artificial Sequence
  Synthetic
ccugcuacucgggaggcugagac

SEQ ID NO: 259260 - RNA, 24 nt, Artificial Sequence
  Synthetic
uccugcuacucgggaggcugagac

SEQ ID NO: 259261 - RNA, 18 nt, Artificial Sequence
  Synthetic
ggcauccucaucugagac

SEQ ID NO: 259262 - RNA, 19 nt, Artificial Sequence
  Synthetic
aggcauccucaucugagac

SEQ ID NO: 259263 - RNA, 20 nt, Artificial Sequence
  Synthetic
caggcauccucaucugagac

SEQ ID NO: 259264 - RNA, 21 nt, Artificial Sequence
  Synthetic
ccaggcauccucaucugagac

SEQ ID NO: 259265 - RNA, 22 nt, Artificial Sequence
  Synthetic
accaggcauccucaucugagac

SEQ ID NO: 259266 - RNA, 23 nt, Artificial Sequence
  Synthetic
caccaggcauccucaucugagac

SEQ ID NO: 259267 - RNA, 24 nt, Artificial Sequence
  Synthetic
ccaccaggcauccucaucugagac

SEQ ID NO: 259268 - RNA, 18 nt, Artificial Sequence
  Synthetic
cgccucuuccucugagac

SEQ ID NO: 259269 - RNA, 19 nt, Artificial Sequence
  Synthetic
ucgccucuuccucugagac

SEQ ID NO: 259270 - RNA, 20 nt, Artificial Sequence
  Synthetic
gucgccucuuccucugagac

SEQ ID NO: 259271 - RNA, 21 nt, Artificial Sequence
  Synthetic
agucgccucuuccucugagac

SEQ ID NO: 259272 - RNA, 22 nt, Artificial Sequence
  Synthetic
aagucgccucuuccucugagac

SEQ ID NO: 259273 - RNA, 23 nt, Artificial Sequence
  Synthetic
aaagucgccucuuccucugagac

SEQ ID NO: 259274 - RNA, 24 nt, Artificial Sequence
  Synthetic
aaaagucgccucuuccucugagac

SEQ ID NO: 259275 - RNA, 18 nt, Artificial Sequence
  Synthetic
uaaggagaucagugagac

SEQ ID NO: 259276 - RNA, 19 nt, Artificial Sequence
  Synthetic
uuaaggagaucagugagac

SEQ ID NO: 259277 - RNA, 20 nt, Artificial Sequence
  Synthetic
auuaaggagaucagugagac

SEQ ID NO: 259278 - RNA, 21 nt, Artificial Sequence
  Synthetic
uauuaaggagaucagugagac

SEQ ID NO: 259279 - RNA, 22 nt, Artificial Sequence
  Synthetic
auauuaaggagaucagugagac

SEQ ID NO: 259280 - RNA, 23 nt, Artificial Sequence
  Synthetic
aauauuaaggagaucagugagac

SEQ ID NO: 259281 - RNA, 24 nt, Artificial Sequence
  Synthetic
gaauauuaaggagaucagugagac

SEQ ID NO: 259282 - RNA, 18 nt, Artificial Sequence
  Synthetic
guagcuguggggugagac

SEQ ID NO: 259283 - RNA, 19 nt, Artificial Sequence
  Synthetic
gguagcuguggggugagac

SEQ ID NO: 259284 - RNA, 20 nt, Artificial Sequence
  Synthetic
agguagcuguggggugagac

SEQ ID NO: 259285 - RNA, 21 nt, Artificial Sequence
  Synthetic
aagguagcuguggggugagac

SEQ ID NO: 259286 - RNA, 22 nt, Artificial Sequence
  Synthetic
uaagguagcuguggggugagac

SEQ ID NO: 259287 - RNA, 23 nt, Artificial Sequence
  Synthetic
auaagguagcuguggggugagac

SEQ ID NO: 259288 - RNA, 24 nt, Artificial Sequence
  Synthetic
gauaagguagcuguggggugagac

SEQ ID NO: 259289 - RNA, 18 nt, Artificial Sequence
  Synthetic
aaaagugugaaaauagac

SEQ ID NO: 259290 - RNA, 19 nt, Artificial Sequence
  Synthetic
aaaaagugugaaaauagac

SEQ ID NO: 259291 - RNA, 20 nt, Artificial Sequence
  Synthetic
aaaaaagugugaaaauagac

SEQ ID NO: 259292 - RNA, 21 nt, Artificial Sequence
  Synthetic
gaaaaaagugugaaaauagac

SEQ ID NO: 259293 - RNA, 22 nt, Artificial Sequence
  Synthetic
ggaaaaaagugugaaaauagac

SEQ ID NO: 259294 - RNA, 23 nt, Artificial Sequence
  Synthetic
aggaaaaaagugugaaaauagac

SEQ ID NO: 259295 - RNA, 24 nt, Artificial Sequence
  Synthetic
uaggaaaaaagugugaaaauagac

SEQ ID NO: 259296 - RNA, 18 nt, Artificial Sequence
  Synthetic
auaugauguaaaauagac

SEQ ID NO: 259297 - RNA, 19 nt, Artificial Sequence
  Synthetic
gauaugauguaaaauagac

SEQ ID NO: 259298 - RNA, 20 nt, Artificial Sequence
  Synthetic
agauaugauguaaaauagac

SEQ ID NO: 259299 - RNA, 21 nt, Artificial Sequence
  Synthetic
uagauaugauguaaaauagac

SEQ ID NO: 259300 - RNA, 22 nt, Artificial Sequence
  Synthetic
uuagauaugauguaaaauagac

SEQ ID NO: 259301 - RNA, 23 nt, Artificial Sequence
  Synthetic
uuuagauaugauguaaaauagac

SEQ ID NO: 259302 - RNA, 24 nt, Artificial Sequence
  Synthetic
cuuuagauaugauguaaaauagac

SEQ ID NO: 259303 - RNA, 18 nt, Artificial Sequence
  Synthetic
gacaugugcuaaauagac

SEQ ID NO: 259304 - RNA, 19 nt, Artificial Sequence
  Synthetic
cgacaugugcuaaauagac

SEQ ID NO: 259305 - RNA, 20 nt, Artificial Sequence
  Synthetic
acgacaugugcuaaauagac

SEQ ID NO: 259306 - RNA, 21 nt, Artificial Sequence
  Synthetic
uacgacaugugcuaaauagac

SEQ ID NO: 259307 - RNA, 22 nt, Artificial Sequence
  Synthetic
cuacgacaugugcuaaauagac

SEQ ID NO: 259308 - RNA, 23 nt, Artificial Sequence
  Synthetic
acuacgacaugugcuaaauagac

SEQ ID NO: 259309 - RNA, 24 nt, Artificial Sequence
  Synthetic
cacuacgacaugugcuaaauagac

SEQ ID NO: 259310 - RNA, 18 nt, Artificial Sequence
  Synthetic
acuauuacguaaauagac

SEQ ID NO: 259311 - RNA, 19 nt, Artificial Sequence
  Synthetic
aacuauuacguaaauagac

SEQ ID NO: 259312 - RNA, 20 nt, Artificial Sequence
  Synthetic
aaacuauuacguaaauagac

SEQ ID NO: 259313 - RNA, 21 nt, Artificial Sequence
  Synthetic
caaacuauuacguaaauagac

SEQ ID NO: 259314 - RNA, 22 nt, Artificial Sequence
  Synthetic
acaaacuauuacguaaauagac

SEQ ID NO: 259315 - RNA, 23 nt, Artificial Sequence
  Synthetic
aacaaacuauuacguaaauagac

SEQ ID NO: 259316 - RNA, 24 nt, Artificial Sequence
  Synthetic
aaacaaacuauuacguaaauagac

SEQ ID NO: 259317 - RNA, 18 nt, Artificial Sequence
  Synthetic
aguggugugggaauagac

SEQ ID NO: 259318 - RNA, 19 nt, Artificial Sequence
  Synthetic
caguggugugggaauagac

SEQ ID NO: 259319 - RNA, 20 nt, Artificial Sequence
  Synthetic
gcaguggugugggaauagac

SEQ ID NO: 259320 - RNA, 21 nt, Artificial Sequence
  Synthetic
agcaguggugugggaauagac

SEQ ID NO: 259321 - RNA, 22 nt, Artificial Sequence
  Synthetic
uagcaguggugugggaauagac

SEQ ID NO: 259322 - RNA, 23 nt, Artificial Sequence
  Synthetic
cuagcaguggugugggaauagac

SEQ ID NO: 259323 - RNA, 24 nt, Artificial Sequence
  Synthetic
ucuagcaguggugugggaauagac

SEQ ID NO: 259324 - RNA, 18 nt, Artificial Sequence
  Synthetic
cacaagguguacauagac

SEQ ID NO: 259325 - RNA, 19 nt, Artificial Sequence
  Synthetic
ucacaagguguacauagac

SEQ ID NO: 259326 - RNA, 20 nt, Artificial Sequence
  Synthetic
aucacaagguguacauagac

SEQ ID NO: 259327 - RNA, 21 nt, Artificial Sequence
  Synthetic
caucacaagguguacauagac

SEQ ID NO: 259328 - RNA, 22 nt, Artificial Sequence
  Synthetic
ccaucacaagguguacauagac

SEQ ID NO: 259329 - RNA, 23 nt, Artificial Sequence
  Synthetic
uccaucacaagguguacauagac

SEQ ID NO: 259330 - RNA, 24 nt, Artificial Sequence
  Synthetic
uuccaucacaagguguacauagac

SEQ ID NO: 259331 - RNA, 18 nt, Artificial Sequence
  Synthetic
uacauuuuguccauagac

SEQ ID NO: 259332 - RNA, 19 nt, Artificial Sequence
  Synthetic
auacauuuuguccauagac

SEQ ID NO: 259333 - RNA, 20 nt, Artificial Sequence
  Synthetic
aauacauuuuguccauagac

SEQ ID NO: 259334 - RNA, 21 nt, Artificial Sequence
  Synthetic
uaauacauuuuguccauagac

SEQ ID NO: 259335 - RNA, 22 nt, Artificial Sequence
  Synthetic
auaauacauuuuguccauagac

SEQ ID NO: 259336 - RNA, 23 nt, Artificial Sequence
  Synthetic
aauaauacauuuuguccauagac

SEQ ID NO: 259337 - RNA, 24 nt, Artificial Sequence
  Synthetic
aaauaauacauuuuguccauagac

SEQ ID NO: 259338 - RNA, 18 nt, Artificial Sequence
  Synthetic
aaauaaggguugauagac

SEQ ID NO: 259339 - RNA, 19 nt, Artificial Sequence
  Synthetic
aaaauaaggguugauagac

SEQ ID NO: 259340 - RNA, 20 nt, Artificial Sequence
  Synthetic
uaaaauaaggguugauagac

SEQ ID NO: 259341 - RNA, 21 nt, Artificial Sequence
  Synthetic
guaaaauaaggguugauagac

SEQ ID NO: 259342 - RNA, 22 nt, Artificial Sequence
  Synthetic
aguaaaauaaggguugauagac

SEQ ID NO: 259343 - RNA, 23 nt, Artificial Sequence
  Synthetic
caguaaaauaaggguugauagac

SEQ ID NO: 259344 - RNA, 24 nt, Artificial Sequence
  Synthetic
ccaguaaaauaaggguugauagac

SEQ ID NO: 259345 - RNA, 18 nt, Artificial Sequence
  Synthetic
ugccuuaugaauauagac

SEQ ID NO: 259346 - RNA, 19 nt, Artificial Sequence
  Synthetic
augccuuaugaauauagac

SEQ ID NO: 259347 - RNA, 20 nt, Artificial Sequence
  Synthetic
uaugccuuaugaauauagac

SEQ ID NO: 259348 - RNA, 21 nt, Artificial Sequence
  Synthetic
auaugccuuaugaauauagac

SEQ ID NO: 259349 - RNA, 22 nt, Artificial Sequence
  Synthetic
aauaugccuuaugaauauagac

SEQ ID NO: 259350 - RNA, 23 nt, Artificial Sequence
  Synthetic
caauaugccuuaugaauauagac

SEQ ID NO: 259351 - RNA, 24 nt, Artificial Sequence
  Synthetic
gcaauaugccuuaugaauauagac

SEQ ID NO: 259352 - RNA, 18 nt, Artificial Sequence
  Synthetic
uauggcauguuuauagac

SEQ ID NO: 259353 - RNA, 19 nt, Artificial Sequence
  Synthetic
auauggcauguuuauagac

SEQ ID NO: 259354 - RNA, 20 nt, Artificial Sequence
  Synthetic
uauauggcauguuuauagac

SEQ ID NO: 259355 - RNA, 21 nt, Artificial Sequence
  Synthetic
uuauauggcauguuuauagac

SEQ ID NO: 259356 - RNA, 22 nt, Artificial Sequence
  Synthetic
auuauauggcauguuuauagac

SEQ ID NO: 259357 - RNA, 23 nt, Artificial Sequence
  Synthetic
gauuauauggcauguuuauagac

SEQ ID NO: 259358 - RNA, 24 nt, Artificial Sequence
  Synthetic
ggauuauauggcauguuuauagac

SEQ ID NO: 259359 - RNA, 18 nt, Artificial Sequence
  Synthetic
aauccccauuuuauagac

SEQ ID NO: 259360 - RNA, 19 nt, Artificial Sequence
  Synthetic
uaauccccauuuuauagac

SEQ ID NO: 259361 - RNA, 20 nt, Artificial Sequence
  Synthetic
auaauccccauuuuauagac

SEQ ID NO: 259362 - RNA, 21 nt, Artificial Sequence
  Synthetic
uauaauccccauuuuauagac

SEQ ID NO: 259363 - RNA, 22 nt, Artificial Sequence
  Synthetic
uuauaauccccauuuuauagac

SEQ ID NO: 259364 - RNA, 23 nt, Artificial Sequence
  Synthetic
uuuauaauccccauuuuauagac

SEQ ID NO: 259365 - RNA, 24 nt, Artificial Sequence
  Synthetic
uuuuauaauccccauuuuauagac

SEQ ID NO: 259366 - RNA, 18 nt, Artificial Sequence
  Synthetic
auaaauacuaaacuagac

SEQ ID NO: 259367 - RNA, 19 nt, Artificial Sequence
  Synthetic
uauaaauacuaaacuagac

SEQ ID NO: 259368 - RNA, 20 nt, Artificial Sequence
  Synthetic
auauaaauacuaaacuagac

SEQ ID NO: 259369 - RNA, 21 nt, Artificial Sequence
  Synthetic
aauauaaauacuaaacuagac

SEQ ID NO: 259370 - RNA, 22 nt, Artificial Sequence
  Synthetic
aaauauaaauacuaaacuagac

SEQ ID NO: 259371 - RNA, 23 nt, Artificial Sequence
  Synthetic
uaaauauaaauacuaaacuagac

SEQ ID NO: 259372 - RNA, 24 nt, Artificial Sequence
  Synthetic
auaaauauaaauacuaaacuagac

SEQ ID NO: 259373 - RNA, 18 nt, Artificial Sequence
  Synthetic
ccagcagaagaacuagac

SEQ ID NO: 259374 - RNA, 19 nt, Artificial Sequence
  Synthetic
gccagcagaagaacuagac

SEQ ID NO: 259375 - RNA, 20 nt, Artificial Sequence
  Synthetic
ggccagcagaagaacuagac

SEQ ID NO: 259376 - RNA, 21 nt, Artificial Sequence
  Synthetic
aggccagcagaagaacuagac

SEQ ID NO: 259377 - RNA, 22 nt, Artificial Sequence
  Synthetic
caggccagcagaagaacuagac

SEQ ID NO: 259378 - RNA, 23 nt, Artificial Sequence
  Synthetic
acaggccagcagaagaacuagac

SEQ ID NO: 259379 - RNA, 24 nt, Artificial Sequence
  Synthetic
cacaggccagcagaagaacuagac

SEQ ID NO: 259380 - RNA, 18 nt, Artificial Sequence
  Synthetic
cugucaccucuccuagac

SEQ ID NO: 259381 - RNA, 19 nt, Artificial Sequence
  Synthetic
gcugucaccucuccuagac

SEQ ID NO: 259382 - RNA, 20 nt, Artificial Sequence
  Synthetic
agcugucaccucuccuagac

SEQ ID NO: 259383 - RNA, 21 nt, Artificial Sequence
  Synthetic
gagcugucaccucuccuagac

SEQ ID NO: 259384 - RNA, 22 nt, Artificial Sequence
  Synthetic
agagcugucaccucuccuagac

SEQ ID NO: 259385 - RNA, 23 nt, Artificial Sequence
  Synthetic
cagagcugucaccucuccuagac

SEQ ID NO: 259386 - RNA, 24 nt, Artificial Sequence
  Synthetic
gcagagcugucaccucuccuagac

SEQ ID NO: 259387 - RNA, 18 nt, Artificial Sequence
  Synthetic
cugugcauccaaguagac

SEQ ID NO: 259388 - RNA, 19 nt, Artificial Sequence
  Synthetic
gcugugcauccaaguagac

SEQ ID NO: 259389 - RNA, 20 nt, Artificial Sequence
  Synthetic
agcugugcauccaaguagac

SEQ ID NO: 259390 - RNA, 21 nt, Artificial Sequence
  Synthetic
cagcugugcauccaaguagac

SEQ ID NO: 259391 - RNA, 22 nt, Artificial Sequence
  Synthetic
gcagcugugcauccaaguagac

SEQ ID NO: 259392 - RNA, 23 nt, Artificial Sequence
  Synthetic
ggcagcugugcauccaaguagac

SEQ ID NO: 259393 - RNA, 24 nt, Artificial Sequence
  Synthetic
gggcagcugugcauccaaguagac

SEQ ID NO: 259394 - RNA, 18 nt, Artificial Sequence
  Synthetic
acuucacaacguguagac

SEQ ID NO: 259395 - RNA, 19 nt, Artificial Sequence
  Synthetic
aacuucacaacguguagac

SEQ ID NO: 259396 - RNA, 20 nt, Artificial Sequence
  Synthetic
caacuucacaacguguagac

SEQ ID NO: 259397 - RNA, 21 nt, Artificial Sequence
  Synthetic
ucaacuucacaacguguagac

SEQ ID NO: 259398 - RNA, 22 nt, Artificial Sequence
  Synthetic
cucaacuucacaacguguagac

SEQ ID NO: 259399 - RNA, 23 nt, Artificial Sequence
  Synthetic
acucaacuucacaacguguagac

SEQ ID NO: 259400 - RNA, 24 nt, Artificial Sequence
  Synthetic
uacucaacuucacaacguguagac

SEQ ID NO: 259401 - RNA, 18 nt, Artificial Sequence
  Synthetic
caaacuuguuuuguagac

SEQ ID NO: 259402 - RNA, 19 nt, Artificial Sequence
  Synthetic
gcaaacuuguuuuguagac

SEQ ID NO: 259403 - RNA, 20 nt, Artificial Sequence
  Synthetic
agcaaacuuguuuuguagac

SEQ ID NO: 259404 - RNA, 21 nt, Artificial Sequence
  Synthetic
gagcaaacuuguuuuguagac

SEQ ID NO: 259405 - RNA, 22 nt, Artificial Sequence
  Synthetic
agagcaaacuuguuuuguagac

SEQ ID NO: 259406 - RNA, 23 nt, Artificial Sequence
  Synthetic
gagagcaaacuuguuuuguagac

SEQ ID NO: 259407 - RNA, 24 nt, Artificial Sequence
  Synthetic
ugagagcaaacuuguuuuguagac

SEQ ID NO: 259408 - RNA, 18 nt, Artificial Sequence
  Synthetic
cacuucacuucauuagac

SEQ ID NO: 259409 - RNA, 19 nt, Artificial Sequence
  Synthetic
ucacuucacuucauuagac

SEQ ID NO: 259410 - RNA, 20 nt, Artificial Sequence
  Synthetic
uucacuucacuucauuagac

SEQ ID NO: 259411 - RNA, 21 nt, Artificial Sequence
  Synthetic
cuucacuucacuucauuagac

SEQ ID NO: 259412 - RNA, 22 nt, Artificial Sequence
  Synthetic
gcuucacuucacuucauuagac

SEQ ID NO: 259413 - RNA, 23 nt, Artificial Sequence
  Synthetic
ugcuucacuucacuucauuagac

SEQ ID NO: 259414 - RNA, 24 nt, Artificial Sequence
  Synthetic
gugcuucacuucacuucauuagac

SEQ ID NO: 259415 - RNA, 18 nt, Artificial Sequence
  Synthetic
gaaaaccccggauuagac

SEQ ID NO: 259416 - RNA, 19 nt, Artificial Sequence
  Synthetic
agaaaaccccggauuagac

SEQ ID NO: 259417 - RNA, 20 nt, Artificial Sequence
  Synthetic
cagaaaaccccggauuagac

SEQ ID NO: 259418 - RNA, 21 nt, Artificial Sequence
  Synthetic
acagaaaaccccggauuagac

SEQ ID NO: 259419 - RNA, 22 nt, Artificial Sequence
  Synthetic
aacagaaaaccccggauuagac

SEQ ID NO: 259420 - RNA, 23 nt, Artificial Sequence
  Synthetic
uaacagaaaaccccggauuagac

SEQ ID NO: 259421 - RNA, 24 nt, Artificial Sequence
  Synthetic
auaacagaaaaccccggauuagac

SEQ ID NO: 259422 - RNA, 18 nt, Artificial Sequence
  Synthetic
uucugcuuuuauuuagac

SEQ ID NO: 259423 - RNA, 19 nt, Artificial Sequence
  Synthetic
uuucugcuuuuauuuagac

SEQ ID NO: 259424 - RNA, 20 nt, Artificial Sequence
  Synthetic
guuucugcuuuuauuuagac

SEQ ID NO: 259425 - RNA, 21 nt, Artificial Sequence
  Synthetic
aguuucugcuuuuauuuagac

SEQ ID NO: 259426 - RNA, 22 nt, Artificial Sequence
  Synthetic
aaguuucugcuuuuauuuagac

SEQ ID NO: 259427 - RNA, 23 nt, Artificial Sequence
  Synthetic
gaaguuucugcuuuuauuuagac

SEQ ID NO: 259428 - RNA, 24 nt, Artificial Sequence
  Synthetic
agaaguuucugcuuuuauuuagac

SEQ ID NO: 259429 - RNA, 18 nt, Artificial Sequence
  Synthetic
cuugacaacuguuuagac

SEQ ID NO: 259430 - RNA, 19 nt, Artificial Sequence
  Synthetic
gcuugacaacuguuuagac

SEQ ID NO: 259431 - RNA, 20 nt, Artificial Sequence
  Synthetic
ggcuugacaacuguuuagac

SEQ ID NO: 259432 - RNA, 21 nt, Artificial Sequence
  Synthetic
gggcuugacaacuguuuagac

SEQ ID NO: 259433 - RNA, 22 nt, Artificial Sequence
  Synthetic
ggggcuugacaacuguuuagac

SEQ ID NO: 259434 - RNA, 23 nt, Artificial Sequence
  Synthetic
gggggcuugacaacuguuuagac

SEQ ID NO: 259435 - RNA, 24 nt, Artificial Sequence
  Synthetic
ggggggcuugacaacuguuuagac

SEQ ID NO: 259436 - RNA, 18 nt, Artificial Sequence
  Synthetic
gcuuuugguguuuuagac

SEQ ID NO: 259437 - RNA, 19 nt, Artificial Sequence
  Synthetic
ugcuuuugguguuuuagac

SEQ ID NO: 259438 - RNA, 20 nt, Artificial Sequence
  Synthetic
uugcuuuugguguuuuagac

SEQ ID NO: 259439 - RNA, 18 nt, Artificial Sequence
  Synthetic
uuauuauuauuuuuagac

SEQ ID NO: 259440 - RNA, 19 nt, Artificial Sequence
  Synthetic
uuuauuauuauuuuuagac

SEQ ID NO: 259441 - RNA, 20 nt, Artificial Sequence
  Synthetic
auuuauuauuauuuuuagac

SEQ ID NO: 259442 - RNA, 21 nt, Artificial Sequence
  Synthetic
gauuuauuauuauuuuuagac

SEQ ID NO: 259443 - RNA, 22 nt, Artificial Sequence
  Synthetic
ggauuuauuauuauuuuuagac

SEQ ID NO: 259444 - RNA, 23 nt, Artificial Sequence
  Synthetic
uggauuuauuauuauuuuuagac

SEQ ID NO: 259445 - RNA, 24 nt, Artificial Sequence
  Synthetic
uuggauuuauuauuauuuuuagac

SEQ ID NO: 259446 - RNA, 18 nt, Artificial Sequence
  Synthetic
gagauuuaaaagaccgac

SEQ ID NO: 259447 - RNA, 19 nt, Artificial Sequence
  Synthetic
agagauuuaaaagaccgac

SEQ ID NO: 259448 - RNA, 20 nt, Artificial Sequence
  Synthetic
gagagauuuaaaagaccgac

SEQ ID NO: 259449 - RNA, 21 nt, Artificial Sequence
  Synthetic
ggagagauuuaaaagaccgac

SEQ ID NO: 259450 - RNA, 22 nt, Artificial Sequence
  Synthetic
aggagagauuuaaaagaccgac

SEQ ID NO: 259451 - RNA, 23 nt, Artificial Sequence
  Synthetic
aaggagagauuuaaaagaccgac

SEQ ID NO: 259452 - RNA, 24 nt, Artificial Sequence
  Synthetic
aaaggagagauuuaaaagaccgac

SEQ ID NO: 259453 - RNA, 18 nt, Artificial Sequence
  Synthetic
cacaggguagcucccgac

SEQ ID NO: 259454 - RNA, 19 nt, Artificial Sequence
  Synthetic
acacaggguagcucccgac

SEQ ID NO: 259455 - RNA, 20 nt, Artificial Sequence
  Synthetic
uacacaggguagcucccgac

SEQ ID NO: 259456 - RNA, 21 nt, Artificial Sequence
  Synthetic
guacacaggguagcucccgac

SEQ ID NO: 259457 - RNA, 22 nt, Artificial Sequence
  Synthetic
aguacacaggguagcucccgac

SEQ ID NO: 259458 - RNA, 23 nt, Artificial Sequence
  Synthetic
caguacacaggguagcucccgac

SEQ ID NO: 259459 - RNA, 24 nt, Artificial Sequence
  Synthetic
gcaguacacaggguagcucccgac

SEQ ID NO: 259460 - RNA, 18 nt, Artificial Sequence
  Synthetic
aacccauucucggccgac

SEQ ID NO: 259461 - RNA, 19 nt, Artificial Sequence
  Synthetic
aaacccauucucggccgac

SEQ ID NO: 259462 - RNA, 20 nt, Artificial Sequence
  Synthetic
aaaacccauucucggccgac

SEQ ID NO: 259463 - RNA, 21 nt, Artificial Sequence
  Synthetic
gaaaacccauucucggccgac

SEQ ID NO: 259464 - RNA, 22 nt, Artificial Sequence
  Synthetic
ugaaaacccauucucggccgac

SEQ ID NO: 259465 - RNA, 23 nt, Artificial Sequence
  Synthetic
augaaaacccauucucggccgac

SEQ ID NO: 259466 - RNA, 24 nt, Artificial Sequence
  Synthetic
uaugaaaacccauucucggccgac

SEQ ID NO: 259467 - RNA, 18 nt, Artificial Sequence
  Synthetic
caacacuuuagggccgac

SEQ ID NO: 259468 - RNA, 19 nt, Artificial Sequence
  Synthetic
ccaacacuuuagggccgac

SEQ ID NO: 259469 - RNA, 20 nt, Artificial Sequence
  Synthetic
uccaacacuuuagggccgac

SEQ ID NO: 259470 - RNA, 21 nt, Artificial Sequence
  Synthetic
auccaacacuuuagggccgac

SEQ ID NO: 259471 - RNA, 22 nt, Artificial Sequence
  Synthetic
aauccaacacuuuagggccgac

SEQ ID NO: 259472 - RNA, 23 nt, Artificial Sequence
  Synthetic
aaauccaacacuuuagggccgac

SEQ ID NO: 259473 - RNA, 24 nt, Artificial Sequence
  Synthetic
uaaauccaacacuuuagggccgac

SEQ ID NO: 259474 - RNA, 18 nt, Artificial Sequence
  Synthetic
agcgaaggagacagcgac

SEQ ID NO: 259475 - RNA, 19 nt, Artificial Sequence
  Synthetic
gagcgaaggagacagcgac

SEQ ID NO: 259476 - RNA, 20 nt, Artificial Sequence
  Synthetic
ggagcgaaggagacagcgac

SEQ ID NO: 259477 - RNA, 21 nt, Artificial Sequence
  Synthetic
aggagcgaaggagacagcgac

SEQ ID NO: 259478 - RNA, 22 nt, Artificial Sequence
  Synthetic
aaggagcgaaggagacagcgac

SEQ ID NO: 259479 - RNA, 23 nt, Artificial Sequence
  Synthetic
gaaggagcgaaggagacagcgac

SEQ ID NO: 259480 - RNA, 24 nt, Artificial Sequence
  Synthetic
agaaggagcgaaggagacagcgac

SEQ ID NO: 259481 - RNA, 18 nt, Artificial Sequence
  Synthetic
cacuccagccggggcgac

SEQ ID NO: 259482 - RNA, 19 nt, Artificial Sequence
  Synthetic
gcacuccagccggggcgac

SEQ ID NO: 259483 - RNA, 20 nt, Artificial Sequence
  Synthetic
ugcacuccagccggggcgac

SEQ ID NO: 259484 - RNA, 21 nt, Artificial Sequence
  Synthetic
uugcacuccagccggggcgac

SEQ ID NO: 259485 - RNA, 22 nt, Artificial Sequence
  Synthetic
auugcacuccagccggggcgac

SEQ ID NO: 259486 - RNA, 23 nt, Artificial Sequence
  Synthetic
cauugcacuccagccggggcgac

SEQ ID NO: 259487 - RNA, 24 nt, Artificial Sequence
  Synthetic
ccauugcacuccagccggggcgac

SEQ ID NO: 259488 - RNA, 21 nt, Artificial Sequence
  Synthetic
uugcacuccagccugggcgac

SEQ ID NO: 259489 - RNA, 22 nt, Artificial Sequence
  Synthetic
auugcacuccagccugggcgac

SEQ ID NO: 259490 - RNA, 23 nt, Artificial Sequence
  Synthetic
cauugcacuccagccugggcgac

SEQ ID NO: 259491 - RNA, 24 nt, Artificial Sequence
  Synthetic
ccauugcacuccagccugggcgac

SEQ ID NO: 259492 - RNA, 22 nt, Artificial Sequence
  Synthetic
guugcacuccagccugggcgac

SEQ ID NO: 259493 - RNA, 23 nt, Artificial Sequence
  Synthetic
uguugcacuccagccugggcgac

SEQ ID NO: 259494 - RNA, 24 nt, Artificial Sequence
  Synthetic
cuguugcacuccagccugggcgac

SEQ ID NO: 259495 - RNA, 18 nt, Artificial Sequence
  Synthetic
gggggccaagugggcgac

SEQ ID NO: 259496 - RNA, 19 nt, Artificial Sequence
  Synthetic
agggggccaagugggcgac

SEQ ID NO: 259497 - RNA, 20 nt, Artificial Sequence
  Synthetic
aagggggccaagugggcgac

SEQ ID NO: 259498 - RNA, 21 nt, Artificial Sequence
  Synthetic
gaagggggccaagugggcgac

SEQ ID NO: 259499 - RNA, 22 nt, Artificial Sequence
  Synthetic
ggaagggggccaagugggcgac

SEQ ID NO: 259500 - RNA, 23 nt, Artificial Sequence
  Synthetic
uggaagggggccaagugggcgac

SEQ ID NO: 259501 - RNA, 24 nt, Artificial Sequence
  Synthetic
cuggaagggggccaagugggcgac

SEQ ID NO: 259502 - RNA, 18 nt, Artificial Sequence
  Synthetic
gcagucaauauaugcgac

SEQ ID NO: 259503 - RNA, 19 nt, Artificial Sequence
  Synthetic
ugcagucaauauaugcgac

SEQ ID NO: 259504 - RNA, 20 nt, Artificial Sequence
  Synthetic
gugcagucaauauaugcgac

SEQ ID NO: 259505 - RNA, 21 nt, Artificial Sequence
  Synthetic
agugcagucaauauaugcgac

SEQ ID NO: 259506 - RNA, 22 nt, Artificial Sequence
  Synthetic
uagugcagucaauauaugcgac

SEQ ID NO: 259507 - RNA, 23 nt, Artificial Sequence
  Synthetic
auagugcagucaauauaugcgac

SEQ ID NO: 259508 - RNA, 24 nt, Artificial Sequence
  Synthetic
gauagugcagucaauauaugcgac

SEQ ID NO: 259509 - RNA, 18 nt, Artificial Sequence
  Synthetic
aaaguggauuaaaucgac

SEQ ID NO: 259510 - RNA, 19 nt, Artificial Sequence
  Synthetic
uaaaguggauuaaaucgac

SEQ ID NO: 259511 - RNA, 20 nt, Artificial Sequence
  Synthetic
auaaaguggauuaaaucgac

SEQ ID NO: 259512 - RNA, 21 nt, Artificial Sequence
  Synthetic
cauaaaguggauuaaaucgac

SEQ ID NO: 259513 - RNA, 22 nt, Artificial Sequence
  Synthetic
ucauaaaguggauuaaaucgac

SEQ ID NO: 259514 - RNA, 23 nt, Artificial Sequence
  Synthetic
uucauaaaguggauuaaaucgac

SEQ ID NO: 259515 - RNA, 24 nt, Artificial Sequence
  Synthetic
auucauaaaguggauuaaaucgac

SEQ ID NO: 259516 - RNA, 18 nt, Artificial Sequence
  Synthetic
agaucugauucauucgac

SEQ ID NO: 259517 - RNA, 19 nt, Artificial Sequence
  Synthetic
aagaucugauucauucgac

SEQ ID NO: 259518 - RNA, 20 nt, Artificial Sequence
  Synthetic
aaagaucugauucauucgac

SEQ ID NO: 259519 - RNA, 21 nt, Artificial Sequence
  Synthetic
uaaagaucugauucauucgac

SEQ ID NO: 259520 - RNA, 22 nt, Artificial Sequence
  Synthetic
uuaaagaucugauucauucgac

SEQ ID NO: 259521 - RNA, 23 nt, Artificial Sequence
  Synthetic
auuaaagaucugauucauucgac

SEQ ID NO: 259522 - RNA, 24 nt, Artificial Sequence
  Synthetic
aauuaaagaucugauucauucgac

SEQ ID NO: 259523 - RNA, 18 nt, Artificial Sequence
  Synthetic
gagcggaggaaaaaggac

SEQ ID NO: 259524 - RNA, 19 nt, Artificial Sequence
  Synthetic
ggagcggaggaaaaaggac

SEQ ID NO: 259525 - RNA, 20 nt, Artificial Sequence
  Synthetic
gggagcggaggaaaaaggac

SEQ ID NO: 259526 - RNA, 21 nt, Artificial Sequence
  Synthetic
agggagcggaggaaaaaggac

SEQ ID NO: 259527 - RNA, 22 nt, Artificial Sequence
  Synthetic
cagggagcggaggaaaaaggac

SEQ ID NO: 259528 - RNA, 23 nt, Artificial Sequence
  Synthetic
gcagggagcggaggaaaaaggac

SEQ ID NO: 259529 - RNA, 24 nt, Artificial Sequence
  Synthetic
agcagggagcggaggaaaaaggac

SEQ ID NO: 259530 - RNA, 18 nt, Artificial Sequence
  Synthetic
gaggaaacagaaaaggac

SEQ ID NO: 259531 - RNA, 19 nt, Artificial Sequence
  Synthetic
ugaggaaacagaaaaggac

SEQ ID NO: 259532 - RNA, 20 nt, Artificial Sequence
  Synthetic
uugaggaaacagaaaaggac

SEQ ID NO: 259533 - RNA, 21 nt, Artificial Sequence
  Synthetic
guugaggaaacagaaaaggac

SEQ ID NO: 259534 - RNA, 22 nt, Artificial Sequence
  Synthetic
gguugaggaaacagaaaaggac

SEQ ID NO: 259535 - RNA, 23 nt, Artificial Sequence
  Synthetic
agguugaggaaacagaaaaggac

SEQ ID NO: 259536 - RNA, 24 nt, Artificial Sequence
  Synthetic
uagguugaggaaacagaaaaggac

SEQ ID NO: 259537 - RNA, 18 nt, Artificial Sequence
  Synthetic
guaguuauauaaaaggac

SEQ ID NO: 259538 - RNA, 19 nt, Artificial Sequence
  Synthetic
aguaguuauauaaaaggac

SEQ ID NO: 259539 - RNA, 20 nt, Artificial Sequence
  Synthetic
uaguaguuauauaaaaggac

SEQ ID NO: 259540 - RNA, 21 nt, Artificial Sequence
  Synthetic
guaguaguuauauaaaaggac

SEQ ID NO: 259541 - RNA, 22 nt, Artificial Sequence
  Synthetic
aguaguaguuauauaaaaggac

SEQ ID NO: 259542 - RNA, 23 nt, Artificial Sequence
  Synthetic
gaguaguaguuauauaaaaggac

SEQ ID NO: 259543 - RNA, 24 nt, Artificial Sequence
  Synthetic
ugaguaguaguuauauaaaaggac

SEQ ID NO: 259544 - RNA, 18 nt, Artificial Sequence
  Synthetic
cauaucccuacaaaggac

SEQ ID NO: 259545 - RNA, 19 nt, Artificial Sequence
  Synthetic
ccauaucccuacaaaggac

SEQ ID NO: 259546 - RNA, 20 nt, Artificial Sequence
  Synthetic
uccauaucccuacaaaggac

SEQ ID NO: 259547 - RNA, 21 nt, Artificial Sequence
  Synthetic
auccauaucccuacaaaggac

SEQ ID NO: 259548 - RNA, 22 nt, Artificial Sequence
  Synthetic
cauccauaucccuacaaaggac

SEQ ID NO: 259549 - RNA, 23 nt, Artificial Sequence
  Synthetic
ucauccauaucccuacaaaggac

SEQ ID NO: 259550 - RNA, 24 nt, Artificial Sequence
  Synthetic
uucauccauaucccuacaaaggac

SEQ ID NO: 259551 - RNA, 18 nt, Artificial Sequence
  Synthetic
caugucccuacaaaggac

SEQ ID NO: 259552 - RNA, 19 nt, Artificial Sequence
  Synthetic
ccaugucccuacaaaggac

SEQ ID NO: 259553 - RNA, 20 nt, Artificial Sequence
  Synthetic
uccaugucccuacaaaggac

SEQ ID NO: 259554 - RNA, 18 nt, Artificial Sequence
  Synthetic
caugucccugcaaaggac

SEQ ID NO: 259555 - RNA, 19 nt, Artificial Sequence
  Synthetic
ccaugucccugcaaaggac

SEQ ID NO: 259556 - RNA, 20 nt, Artificial Sequence
  Synthetic
uccaugucccugcaaaggac

SEQ ID NO: 259557 - RNA, 21 nt, Artificial Sequence
  Synthetic
auccaugucccugcaaaggac

SEQ ID NO: 259558 - RNA, 22 nt, Artificial Sequence
  Synthetic
cauccaugucccugcaaaggac

SEQ ID NO: 259559 - RNA, 23 nt, Artificial Sequence
  Synthetic
ucauccaugucccugcaaaggac

SEQ ID NO: 259560 - RNA, 24 nt, Artificial Sequence
  Synthetic
uucauccaugucccugcaaaggac

SEQ ID NO: 259561 - RNA, 18 nt, Artificial Sequence
  Synthetic
cauguuccugcaaaggac

SEQ ID NO: 259562 - RNA, 19 nt, Artificial Sequence
  Synthetic
ccauguuccugcaaaggac

SEQ ID NO: 259563 - RNA, 20 nt, Artificial Sequence
  Synthetic
uccauguuccugcaaaggac

SEQ ID NO: 259564 - RNA, 21 nt, Artificial Sequence
  Synthetic
auccauguuccugcaaaggac

SEQ ID NO: 259565 - RNA, 22 nt, Artificial Sequence
  Synthetic
cauccauguuccugcaaaggac

SEQ ID NO: 259566 - RNA, 23 nt, Artificial Sequence
  Synthetic
ucauccauguuccugcaaaggac

SEQ ID NO: 259567 - RNA, 24 nt, Artificial Sequence
  Synthetic
uucauccauguuccugcaaaggac

SEQ ID NO: 259568 - RNA, 18 nt, Artificial Sequence
  Synthetic
cauguccgugcaaaggac

SEQ ID NO: 259569 - RNA, 19 nt, Artificial Sequence
  Synthetic
ccauguccgugcaaaggac

SEQ ID NO: 259570 - RNA, 20 nt, Artificial Sequence
  Synthetic
uccauguccgugcaaaggac

SEQ ID NO: 259571 - RNA, 21 nt, Artificial Sequence
  Synthetic
auccauguccgugcaaaggac

SEQ ID NO: 259572 - RNA, 22 nt, Artificial Sequence
  Synthetic
cauccauguccgugcaaaggac

SEQ ID NO: 259573 - RNA, 23 nt, Artificial Sequence
  Synthetic
ucauccauguccgugcaaaggac

SEQ ID NO: 259574 - RNA, 24 nt, Artificial Sequence
  Synthetic
uucauccauguccgugcaaaggac

SEQ ID NO: 259575 - RNA, 18 nt, Artificial Sequence
  Synthetic
aaugaaaguugaaaggac

SEQ ID NO: 259576 - RNA, 19 nt, Artificial Sequence
  Synthetic
uaaugaaaguugaaaggac

SEQ ID NO: 259577 - RNA, 20 nt, Artificial Sequence
  Synthetic
auaaugaaaguugaaaggac

SEQ ID NO: 259578 - RNA, 21 nt, Artificial Sequence
  Synthetic
gauaaugaaaguugaaaggac

SEQ ID NO: 259579 - RNA, 22 nt, Artificial Sequence
  Synthetic
agauaaugaaaguugaaaggac

SEQ ID NO: 259580 - RNA, 23 nt, Artificial Sequence
  Synthetic
aagauaaugaaaguugaaaggac

SEQ ID NO: 259581 - RNA, 24 nt, Artificial Sequence
  Synthetic
gaagauaaugaaaguugaaaggac

SEQ ID NO: 259582 - RNA, 18 nt, Artificial Sequence
  Synthetic
augagcagugagaaggac

SEQ ID NO: 259583 - RNA, 19 nt, Artificial Sequence
  Synthetic
aaugagcagugagaaggac

SEQ ID NO: 259584 - RNA, 20 nt, Artificial Sequence
  Synthetic
uaaugagcagugagaaggac

SEQ ID NO: 259585 - RNA, 21 nt, Artificial Sequence
  Synthetic
auaaugagcagugagaaggac

SEQ ID NO: 259586 - RNA, 22 nt, Artificial Sequence
  Synthetic
uauaaugagcagugagaaggac

SEQ ID NO: 259587 - RNA, 23 nt, Artificial Sequence
  Synthetic
guauaaugagcagugagaaggac

SEQ ID NO: 259588 - RNA, 24 nt, Artificial Sequence
  Synthetic
uguauaaugagcagugagaaggac

SEQ ID NO: 259589 - RNA, 18 nt, Artificial Sequence
  Synthetic
aaaaagugagcgaaggac

SEQ ID NO: 259590 - RNA, 19 nt, Artificial Sequence
  Synthetic
caaaaagugagcgaaggac

SEQ ID NO: 259591 - RNA, 20 nt, Artificial Sequence
  Synthetic
ucaaaaagugagcgaaggac

SEQ ID NO: 259592 - RNA, 21 nt, Artificial Sequence
  Synthetic
aucaaaaagugagcgaaggac

SEQ ID NO: 259593 - RNA, 22 nt, Artificial Sequence
  Synthetic
caucaaaaagugagcgaaggac

SEQ ID NO: 259594 - RNA, 23 nt, Artificial Sequence
  Synthetic
ccaucaaaaagugagcgaaggac

SEQ ID NO: 259595 - RNA, 24 nt, Artificial Sequence
  Synthetic
cccaucaaaaagugagcgaaggac

SEQ ID NO: 259596 - RNA, 18 nt, Artificial Sequence
  Synthetic
aaaaagugggcgaaggac

SEQ ID NO: 259597 - RNA, 19 nt, Artificial Sequence
  Synthetic
caaaaagugggcgaaggac

SEQ ID NO: 259598 - RNA, 20 nt, Artificial Sequence
  Synthetic
ucaaaaagugggcgaaggac

SEQ ID NO: 259599 - RNA, 21 nt, Artificial Sequence
  Synthetic
aucaaaaagugggcgaaggac

SEQ ID NO: 259600 - RNA, 22 nt, Artificial Sequence
  Synthetic
caucaaaaagugggcgaaggac

SEQ ID NO: 259601 - RNA, 23 nt, Artificial Sequence
  Synthetic
ccaucaaaaagugggcgaaggac

SEQ ID NO: 259602 - RNA, 24 nt, Artificial Sequence
  Synthetic
cccaucaaaaagugggcgaaggac

SEQ ID NO: 259603 - RNA, 18 nt, Artificial Sequence
  Synthetic
caaaagugggcgaaggac

SEQ ID NO: 259604 - RNA, 19 nt, Artificial Sequence
  Synthetic
ccaaaagugggcgaaggac

SEQ ID NO: 259605 - RNA, 20 nt, Artificial Sequence
  Synthetic
uccaaaagugggcgaaggac

SEQ ID NO: 259606 - RNA, 21 nt, Artificial Sequence
  Synthetic
auccaaaagugggcgaaggac

SEQ ID NO: 259607 - RNA, 22 nt, Artificial Sequence
  Synthetic
cauccaaaagugggcgaaggac

SEQ ID NO: 259608 - RNA, 23 nt, Artificial Sequence
  Synthetic
ccauccaaaagugggcgaaggac

SEQ ID NO: 259609 - RNA, 24 nt, Artificial Sequence
  Synthetic
cccauccaaaagugggcgaaggac

SEQ ID NO: 259610 - RNA, 18 nt, Artificial Sequence
  Synthetic
agcagccuuuggaaggac

SEQ ID NO: 259611 - RNA, 19 nt, Artificial Sequence
  Synthetic
gagcagccuuuggaaggac

SEQ ID NO: 259612 - RNA, 20 nt, Artificial Sequence
  Synthetic
agagcagccuuuggaaggac

SEQ ID NO: 259613 - RNA, 18 nt, Artificial Sequence
  Synthetic
aaaaagugggugaaggac

SEQ ID NO: 259614 - RNA, 19 nt, Artificial Sequence
  Synthetic
caaaaagugggugaaggac

SEQ ID NO: 259615 - RNA, 20 nt, Artificial Sequence
  Synthetic
ucaaaaagugggugaaggac

SEQ ID NO: 259616 - RNA, 18 nt, Artificial Sequence
  Synthetic
ggcccagauaauaaggac

SEQ ID NO: 259617 - RNA, 19 nt, Artificial Sequence
  Synthetic
uggcccagauaauaaggac

SEQ ID NO: 259618 - RNA, 20 nt, Artificial Sequence
  Synthetic
guggcccagauaauaaggac

SEQ ID NO: 259619 - RNA, 21 nt, Artificial Sequence
  Synthetic
gguggcccagauaauaaggac

SEQ ID NO: 259620 - RNA, 22 nt, Artificial Sequence
  Synthetic
cgguggcccagauaauaaggac

SEQ ID NO: 259621 - RNA, 23 nt, Artificial Sequence
  Synthetic
ccgguggcccagauaauaaggac

SEQ ID NO: 259622 - RNA, 24 nt, Artificial Sequence
  Synthetic
uccgguggcccagauaauaaggac

SEQ ID NO: 259623 - RNA, 18 nt, Artificial Sequence
  Synthetic
agguucugaugucaggac

SEQ ID NO: 259624 - RNA, 19 nt, Artificial Sequence
  Synthetic
uagguucugaugucaggac

SEQ ID NO: 259625 - RNA, 20 nt, Artificial Sequence
  Synthetic
uuagguucugaugucaggac

SEQ ID NO: 259626 - RNA, 21 nt, Artificial Sequence
  Synthetic
uuuagguucugaugucaggac

SEQ ID NO: 259627 - RNA, 22 nt, Artificial Sequence
  Synthetic
guuuagguucugaugucaggac

SEQ ID NO: 259628 - RNA, 23 nt, Artificial Sequence
  Synthetic
uguuuagguucugaugucaggac

SEQ ID NO: 259629 - RNA, 24 nt, Artificial Sequence
  Synthetic
guguuuagguucugaugucaggac

SEQ ID NO: 259630 - RNA, 18 nt, Artificial Sequence
  Synthetic
agguugaauagagaggac

SEQ ID NO: 259631 - RNA, 19 nt, Artificial Sequence
  Synthetic
gagguugaauagagaggac

SEQ ID NO: 259632 - RNA, 20 nt, Artificial Sequence
  Synthetic
ugagguugaauagagaggac

SEQ ID NO: 259633 - RNA, 21 nt, Artificial Sequence
  Synthetic
augagguugaauagagaggac

SEQ ID NO: 259634 - RNA, 22 nt, Artificial Sequence
  Synthetic
gaugagguugaauagagaggac

SEQ ID NO: 259635 - RNA, 23 nt, Artificial Sequence
  Synthetic
ugaugagguugaauagagaggac

SEQ ID NO: 259636 - RNA, 24 nt, Artificial Sequence
  Synthetic
uugaugagguugaauagagaggac

SEQ ID NO: 259637 - RNA, 18 nt, Artificial Sequence
  Synthetic
ggcugucaaauggaggac

SEQ ID NO: 259638 - RNA, 19 nt, Artificial Sequence
  Synthetic
cggcugucaaauggaggac

SEQ ID NO: 259639 - RNA, 20 nt, Artificial Sequence
  Synthetic
gcggcugucaaauggaggac

SEQ ID NO: 259640 - RNA, 21 nt, Artificial Sequence
  Synthetic
agcggcugucaaauggaggac

SEQ ID NO: 259641 - RNA, 22 nt, Artificial Sequence
  Synthetic
aagcggcugucaaauggaggac

SEQ ID NO: 259642 - RNA, 23 nt, Artificial Sequence
  Synthetic
caagcggcugucaaauggaggac

SEQ ID NO: 259643 - RNA, 24 nt, Artificial Sequence
  Synthetic
gcaagcggcugucaaauggaggac

SEQ ID NO: 259644 - RNA, 18 nt, Artificial Sequence
  Synthetic
aggccagauaaugaggac

SEQ ID NO: 259645 - RNA, 19 nt, Artificial Sequence
  Synthetic
gaggccagauaaugaggac

SEQ ID NO: 259646 - RNA, 20 nt, Artificial Sequence
  Synthetic
agaggccagauaaugaggac

SEQ ID NO: 259647 - RNA, 21 nt, Artificial Sequence
  Synthetic
cagaggccagauaaugaggac

SEQ ID NO: 259648 - RNA, 22 nt, Artificial Sequence
  Synthetic
gcagaggccagauaaugaggac

SEQ ID NO: 259649 - RNA, 23 nt, Artificial Sequence
  Synthetic
agcagaggccagauaaugaggac

SEQ ID NO: 259650 - RNA, 24 nt, Artificial Sequence
  Synthetic
aagcagaggccagauaaugaggac

SEQ ID NO: 259651 - RNA, 18 nt, Artificial Sequence
  Synthetic
aaacacacacaugaggac

SEQ ID NO: 259652 - RNA, 19 nt, Artificial Sequence
  Synthetic
gaaacacacacaugaggac

SEQ ID NO: 259653 - RNA, 20 nt, Artificial Sequence
  Synthetic
agaaacacacacaugaggac

SEQ ID NO: 259654 - RNA, 21 nt, Artificial Sequence
  Synthetic
aagaaacacacacaugaggac

SEQ ID NO: 259655 - RNA, 22 nt, Artificial Sequence
  Synthetic
aaagaaacacacacaugaggac

SEQ ID NO: 259656 - RNA, 23 nt, Artificial Sequence
  Synthetic
gaaagaaacacacacaugaggac

SEQ ID NO: 259657 - RNA, 24 nt, Artificial Sequence
  Synthetic
ggaaagaaacacacacaugaggac

SEQ ID NO: 259658 - RNA, 18 nt, Artificial Sequence
  Synthetic
caacacuuuccauaggac

SEQ ID NO: 259659 - RNA, 19 nt, Artificial Sequence
  Synthetic
ccaacacuuuccauaggac

SEQ ID NO: 259660 - RNA, 20 nt, Artificial Sequence
  Synthetic
uccaacacuuuccauaggac

SEQ ID NO: 259661 - RNA, 21 nt, Artificial Sequence
  Synthetic
cuccaacacuuuccauaggac

SEQ ID NO: 259662 - RNA, 22 nt, Artificial Sequence
  Synthetic
acuccaacacuuuccauaggac

SEQ ID NO: 259663 - RNA, 23 nt, Artificial Sequence
  Synthetic
aacuccaacacuuuccauaggac

SEQ ID NO: 259664 - RNA, 24 nt, Artificial Sequence
  Synthetic
aaacuccaacacuuuccauaggac

SEQ ID NO: 259665 - RNA, 18 nt, Artificial Sequence
  Synthetic
auggcucuugcauaggac

SEQ ID NO: 259666 - RNA, 19 nt, Artificial Sequence
  Synthetic
aauggcucuugcauaggac

SEQ ID NO: 259667 - RNA, 20 nt, Artificial Sequence
  Synthetic
caauggcucuugcauaggac

SEQ ID NO: 259668 - RNA, 21 nt, Artificial Sequence
  Synthetic
ucaauggcucuugcauaggac

SEQ ID NO: 259669 - RNA, 22 nt, Artificial Sequence
  Synthetic
uucaauggcucuugcauaggac

SEQ ID NO: 259670 - RNA, 23 nt, Artificial Sequence
  Synthetic
auucaauggcucuugcauaggac

SEQ ID NO: 259671 - RNA, 24 nt, Artificial Sequence
  Synthetic
gauucaauggcucuugcauaggac

SEQ ID NO: 259672 - RNA, 18 nt, Artificial Sequence
  Synthetic
accuuccaaagguaggac

SEQ ID NO: 259673 - RNA, 19 nt, Artificial Sequence
  Synthetic
uaccuuccaaagguaggac

SEQ ID NO: 259674 - RNA, 20 nt, Artificial Sequence
  Synthetic
cuaccuuccaaagguaggac

SEQ ID NO: 259675 - RNA, 21 nt, Artificial Sequence
  Synthetic
ucuaccuuccaaagguaggac

SEQ ID NO: 259676 - RNA, 22 nt, Artificial Sequence
  Synthetic
uucuaccuuccaaagguaggac

SEQ ID NO: 259677 - RNA, 23 nt, Artificial Sequence
  Synthetic
auucuaccuuccaaagguaggac

SEQ ID NO: 259678 - RNA, 24 nt, Artificial Sequence
  Synthetic
aauucuaccuuccaaagguaggac

SEQ ID NO: 259679 - RNA, 18 nt, Artificial Sequence
  Synthetic
uuacagauaggguaggac

SEQ ID NO: 259680 - RNA, 19 nt, Artificial Sequence
  Synthetic
guuacagauaggguaggac

SEQ ID NO: 259681 - RNA, 20 nt, Artificial Sequence
  Synthetic
aguuacagauaggguaggac

SEQ ID NO: 259682 - RNA, 21 nt, Artificial Sequence
  Synthetic
caguuacagauaggguaggac

SEQ ID NO: 259683 - RNA, 22 nt, Artificial Sequence
  Synthetic
ucaguuacagauaggguaggac

SEQ ID NO: 259684 - RNA, 23 nt, Artificial Sequence
  Synthetic
uucaguuacagauaggguaggac

SEQ ID NO: 259685 - RNA, 24 nt, Artificial Sequence
  Synthetic
auucaguuacagauaggguaggac

SEQ ID NO: 259686 - RNA, 18 nt, Artificial Sequence
  Synthetic
uuugagccaauuuaggac

SEQ ID NO: 259687 - RNA, 19 nt, Artificial Sequence
  Synthetic
auuugagccaauuuaggac

SEQ ID NO: 259688 - RNA, 20 nt, Artificial Sequence
  Synthetic
cauuugagccaauuuaggac

SEQ ID NO: 259689 - RNA, 21 nt, Artificial Sequence
  Synthetic
ccauuugagccaauuuaggac

SEQ ID NO: 259690 - RNA, 22 nt, Artificial Sequence
  Synthetic
uccauuugagccaauuuaggac

SEQ ID NO: 259691 - RNA, 23 nt, Artificial Sequence
  Synthetic
auccauuugagccaauuuaggac

SEQ ID NO: 259692 - RNA, 24 nt, Artificial Sequence
  Synthetic
aauccauuugagccaauuuaggac

SEQ ID NO: 259693 - RNA, 18 nt, Artificial Sequence
  Synthetic
uaaucugucauuuaggac

SEQ ID NO: 259694 - RNA, 19 nt, Artificial Sequence
  Synthetic
guaaucugucauuuaggac

SEQ ID NO: 259695 - RNA, 20 nt, Artificial Sequence
  Synthetic
aguaaucugucauuuaggac

SEQ ID NO: 259696 - RNA, 21 nt, Artificial Sequence
  Synthetic
uaguaaucugucauuuaggac

SEQ ID NO: 259697 - RNA, 22 nt, Artificial Sequence
  Synthetic
auaguaaucugucauuuaggac

SEQ ID NO: 259698 - RNA, 23 nt, Artificial Sequence
  Synthetic
gauaguaaucugucauuuaggac

SEQ ID NO: 259699 - RNA, 24 nt, Artificial Sequence
  Synthetic
ugauaguaaucugucauuuaggac

SEQ ID NO: 259700 - RNA, 18 nt, Artificial Sequence
  Synthetic
caagggcauauuuaggac

SEQ ID NO: 259701 - RNA, 19 nt, Artificial Sequence
  Synthetic
ucaagggcauauuuaggac

SEQ ID NO: 259702 - RNA, 20 nt, Artificial Sequence
  Synthetic
gucaagggcauauuuaggac

SEQ ID NO: 259703 - RNA, 21 nt, Artificial Sequence
  Synthetic
agucaagggcauauuuaggac

SEQ ID NO: 259704 - RNA, 22 nt, Artificial Sequence
  Synthetic
aagucaagggcauauuuaggac

SEQ ID NO: 259705 - RNA, 23 nt, Artificial Sequence
  Synthetic
aaagucaagggcauauuuaggac

SEQ ID NO: 259706 - RNA, 24 nt, Artificial Sequence
  Synthetic
aaaagucaagggcauauuuaggac

SEQ ID NO: 259707 - RNA, 18 nt, Artificial Sequence
  Synthetic
auuuauauuguuuaggac

SEQ ID NO: 259708 - RNA, 19 nt, Artificial Sequence
  Synthetic
aauuuauauuguuuaggac

SEQ ID NO: 259709 - RNA, 20 nt, Artificial Sequence
  Synthetic
uaauuuauauuguuuaggac

SEQ ID NO: 259710 - RNA, 21 nt, Artificial Sequence
  Synthetic
auaauuuauauuguuuaggac

SEQ ID NO: 259711 - RNA, 22 nt, Artificial Sequence
  Synthetic
uauaauuuauauuguuuaggac

SEQ ID NO: 259712 - RNA, 23 nt, Artificial Sequence
  Synthetic
cuauaauuuauauuguuuaggac

SEQ ID NO: 259713 - RNA, 24 nt, Artificial Sequence
  Synthetic
gcuauaauuuauauuguuuaggac

SEQ ID NO: 259714 - RNA, 18 nt, Artificial Sequence
  Synthetic
aacguacucccaucggac

SEQ ID NO: 259715 - RNA, 19 nt, Artificial Sequence
  Synthetic
uaacguacucccaucggac

SEQ ID NO: 259716 - RNA, 20 nt, Artificial Sequence
  Synthetic
auaacguacucccaucggac

SEQ ID NO: 259717 - RNA, 21 nt, Artificial Sequence
  Synthetic
gauaacguacucccaucggac

SEQ ID NO: 259718 - RNA, 22 nt, Artificial Sequence
  Synthetic
agauaacguacucccaucggac

SEQ ID NO: 259719 - RNA, 23 nt, Artificial Sequence
  Synthetic
gagauaacguacucccaucggac

SEQ ID NO: 259720 - RNA, 24 nt, Artificial Sequence
  Synthetic
ugagauaacguacucccaucggac

SEQ ID NO: 259721 - RNA, 18 nt, Artificial Sequence
  Synthetic
uccacagaucucucggac

SEQ ID NO: 259722 - RNA, 19 nt, Artificial Sequence
  Synthetic
uuccacagaucucucggac

SEQ ID NO: 259723 - RNA, 20 nt, Artificial Sequence
  Synthetic
auuccacagaucucucggac

SEQ ID NO: 259724 - RNA, 21 nt, Artificial Sequence
  Synthetic
aauuccacagaucucucggac

SEQ ID NO: 259725 - RNA, 22 nt, Artificial Sequence
  Synthetic
aaauuccacagaucucucggac

SEQ ID NO: 259726 - RNA, 23 nt, Artificial Sequence
  Synthetic
aaaauuccacagaucucucggac

SEQ ID NO: 259727 - RNA, 24 nt, Artificial Sequence
  Synthetic
caaaauuccacagaucucucggac

SEQ ID NO: 259728 - RNA, 18 nt, Artificial Sequence
  Synthetic
uaaucacaggcaagggac

SEQ ID NO: 259729 - RNA, 19 nt, Artificial Sequence
  Synthetic
cuaaucacaggcaagggac

SEQ ID NO: 259730 - RNA, 20 nt, Artificial Sequence
  Synthetic
acuaaucacaggcaagggac

SEQ ID NO: 259731 - RNA, 21 nt, Artificial Sequence
  Synthetic
cacuaaucacaggcaagggac

SEQ ID NO: 259732 - RNA, 22 nt, Artificial Sequence
  Synthetic
ucacuaaucacaggcaagggac

SEQ ID NO: 259733 - RNA, 23 nt, Artificial Sequence
  Synthetic
uucacuaaucacaggcaagggac

SEQ ID NO: 259734 - RNA, 24 nt, Artificial Sequence
  Synthetic
auucacuaaucacaggcaagggac

SEQ ID NO: 259735 - RNA, 18 nt, Artificial Sequence
  Synthetic
cauguuauuucaagggac

SEQ ID NO: 259736 - RNA, 19 nt, Artificial Sequence
  Synthetic
ucauguuauuucaagggac

SEQ ID NO: 259737 - RNA, 20 nt, Artificial Sequence
  Synthetic
gucauguuauuucaagggac

SEQ ID NO: 259738 - RNA, 21 nt, Artificial Sequence
  Synthetic
ugucauguuauuucaagggac

SEQ ID NO: 259739 - RNA, 22 nt, Artificial Sequence
  Synthetic
augucauguuauuucaagggac

SEQ ID NO: 259740 - RNA, 23 nt, Artificial Sequence
  Synthetic
caugucauguuauuucaagggac

SEQ ID NO: 259741 - RNA, 24 nt, Artificial Sequence
  Synthetic
ucaugucauguuauuucaagggac

SEQ ID NO: 259742 - RNA, 18 nt, Artificial Sequence
  Synthetic
ccauuuuaucgaagggac

SEQ ID NO: 259743 - RNA, 19 nt, Artificial Sequence
  Synthetic
gccauuuuaucgaagggac

SEQ ID NO: 259744 - RNA, 20 nt, Artificial Sequence
  Synthetic
agccauuuuaucgaagggac

SEQ ID NO: 259745 - RNA, 21 nt, Artificial Sequence
  Synthetic
uagccauuuuaucgaagggac

SEQ ID NO: 259746 - RNA, 22 nt, Artificial Sequence
  Synthetic
auagccauuuuaucgaagggac

SEQ ID NO: 259747 - RNA, 23 nt, Artificial Sequence
  Synthetic
cauagccauuuuaucgaagggac

SEQ ID NO: 259748 - RNA, 24 nt, Artificial Sequence
  Synthetic
ucauagccauuuuaucgaagggac

SEQ ID NO: 259749 - RNA, 18 nt, Artificial Sequence
  Synthetic
gcaauuauccuaagggac

SEQ ID NO: 259750 - RNA, 19 nt, Artificial Sequence
  Synthetic
agcaauuauccuaagggac

SEQ ID NO: 259751 - RNA, 20 nt, Artificial Sequence
  Synthetic
gagcaauuauccuaagggac

SEQ ID NO: 259752 - RNA, 21 nt, Artificial Sequence
  Synthetic
agagcaauuauccuaagggac

SEQ ID NO: 259753 - RNA, 22 nt, Artificial Sequence
  Synthetic
aagagcaauuauccuaagggac

SEQ ID NO: 259754 - RNA, 23 nt, Artificial Sequence
  Synthetic
caagagcaauuauccuaagggac

SEQ ID NO: 259755 - RNA, 24 nt, Artificial Sequence
  Synthetic
ccaagagcaauuauccuaagggac

SEQ ID NO: 259756 - RNA, 18 nt, Artificial Sequence
  Synthetic
gcccauggacacagggac

SEQ ID NO: 259757 - RNA, 19 nt, Artificial Sequence
  Synthetic
agcccauggacacagggac

SEQ ID NO: 259758 - RNA, 20 nt, Artificial Sequence
  Synthetic
gagcccauggacacagggac

SEQ ID NO: 259759 - RNA, 21 nt, Artificial Sequence
  Synthetic
agagcccauggacacagggac

SEQ ID NO: 259760 - RNA, 22 nt, Artificial Sequence
  Synthetic
gagagcccauggacacagggac

SEQ ID NO: 259761 - RNA, 23 nt, Artificial Sequence
  Synthetic
cgagagcccauggacacagggac

SEQ ID NO: 259762 - RNA, 24 nt, Artificial Sequence
  Synthetic
acgagagcccauggacacagggac

SEQ ID NO: 259763 - RNA, 18 nt, Artificial Sequence
  Synthetic
ugcaugguugccagggac

SEQ ID NO: 259764 - RNA, 19 nt, Artificial Sequence
  Synthetic
uugcaugguugccagggac

SEQ ID NO: 259765 - RNA, 20 nt, Artificial Sequence
  Synthetic
guugcaugguugccagggac

SEQ ID NO: 259766 - RNA, 21 nt, Artificial Sequence
  Synthetic
aguugcaugguugccagggac

SEQ ID NO: 259767 - RNA, 22 nt, Artificial Sequence
  Synthetic
uaguugcaugguugccagggac

SEQ ID NO: 259768 - RNA, 23 nt, Artificial Sequence
  Synthetic
auaguugcaugguugccagggac

SEQ ID NO: 259769 - RNA, 24 nt, Artificial Sequence
  Synthetic
aauaguugcaugguugccagggac

SEQ ID NO: 259770 - RNA, 18 nt, Artificial Sequence
  Synthetic
cacacucuuuucagggac

SEQ ID NO: 259771 - RNA, 19 nt, Artificial Sequence
  Synthetic
ccacacucuuuucagggac

SEQ ID NO: 259772 - RNA, 20 nt, Artificial Sequence
  Synthetic
cccacacucuuuucagggac

SEQ ID NO: 259773 - RNA, 21 nt, Artificial Sequence
  Synthetic
ucccacacucuuuucagggac

SEQ ID NO: 259774 - RNA, 22 nt, Artificial Sequence
  Synthetic
cucccacacucuuuucagggac

SEQ ID NO: 259775 - RNA, 23 nt, Artificial Sequence
  Synthetic
acucccacacucuuuucagggac

SEQ ID NO: 259776 - RNA, 24 nt, Artificial Sequence
  Synthetic
aacucccacacucuuuucagggac

SEQ ID NO: 259777 - RNA, 18 nt, Artificial Sequence
  Synthetic
aauaaaaaagagagggac

SEQ ID NO: 259778 - RNA, 19 nt, Artificial Sequence
  Synthetic
aaauaaaaaagagagggac

SEQ ID NO: 259779 - RNA, 20 nt, Artificial Sequence
  Synthetic
aaaauaaaaaagagagggac

SEQ ID NO: 259780 - RNA, 21 nt, Artificial Sequence
  Synthetic
uaaaauaaaaaagagagggac

SEQ ID NO: 259781 - RNA, 22 nt, Artificial Sequence
  Synthetic
uuaaaauaaaaaagagagggac

SEQ ID NO: 259782 - RNA, 23 nt, Artificial Sequence
  Synthetic
auuaaaauaaaaaagagagggac

SEQ ID NO: 259783 - RNA, 24 nt, Artificial Sequence
  Synthetic
aauuaaaauaaaaaagagagggac

SEQ ID NO: 259784 - RNA, 18 nt, Artificial Sequence
  Synthetic
ugagagaaagagagggac

SEQ ID NO: 259785 - RNA, 19 nt, Artificial Sequence
  Synthetic
uugagagaaagagagggac

SEQ ID NO: 259786 - RNA, 20 nt, Artificial Sequence
  Synthetic
cuugagagaaagagagggac

SEQ ID NO: 259787 - RNA, 21 nt, Artificial Sequence
  Synthetic
acuugagagaaagagagggac

SEQ ID NO: 259788 - RNA, 22 nt, Artificial Sequence
  Synthetic
aacuugagagaaagagagggac

SEQ ID NO: 259789 - RNA, 23 nt, Artificial Sequence
  Synthetic
caacuugagagaaagagagggac

SEQ ID NO: 259790 - RNA, 24 nt, Artificial Sequence
  Synthetic
ucaacuugagagaaagagagggac

SEQ ID NO: 259791 - RNA, 18 nt, Artificial Sequence
  Synthetic
auuccucugaauagggac

SEQ ID NO: 259792 - RNA, 19 nt, Artificial Sequence
  Synthetic
gauuccucugaauagggac

SEQ ID NO: 259793 - RNA, 20 nt, Artificial Sequence
  Synthetic
agauuccucugaauagggac

SEQ ID NO: 259794 - RNA, 21 nt, Artificial Sequence
  Synthetic
uagauuccucugaauagggac

SEQ ID NO: 259795 - RNA, 22 nt, Artificial Sequence
  Synthetic
auagauuccucugaauagggac

SEQ ID NO: 259796 - RNA, 23 nt, Artificial Sequence
  Synthetic
uauagauuccucugaauagggac

SEQ ID NO: 259797 - RNA, 24 nt, Artificial Sequence
  Synthetic
guauagauuccucugaauagggac

SEQ ID NO: 259798 - RNA, 18 nt, Artificial Sequence
  Synthetic
aacaauaauaaaggggac

SEQ ID NO: 259799 - RNA, 19 nt, Artificial Sequence
  Synthetic
caacaauaauaaaggggac

SEQ ID NO: 259800 - RNA, 20 nt, Artificial Sequence
  Synthetic
acaacaauaauaaaggggac

SEQ ID NO: 259801 - RNA, 21 nt, Artificial Sequence
  Synthetic
aacaacaauaauaaaggggac

SEQ ID NO: 259802 - RNA, 22 nt, Artificial Sequence
  Synthetic
uaacaacaauaauaaaggggac

SEQ ID NO: 259803 - RNA, 23 nt, Artificial Sequence
  Synthetic
guaacaacaauaauaaaggggac

SEQ ID NO: 259804 - RNA, 24 nt, Artificial Sequence
  Synthetic
aguaacaacaauaauaaaggggac

SEQ ID NO: 259805 - RNA, 18 nt, Artificial Sequence
  Synthetic
gccuaacucugaggggac

SEQ ID NO: 259806 - RNA, 19 nt, Artificial Sequence
  Synthetic
ugccuaacucugaggggac

SEQ ID NO: 259807 - RNA, 20 nt, Artificial Sequence
  Synthetic
augccuaacucugaggggac

SEQ ID NO: 259808 - RNA, 21 nt, Artificial Sequence
  Synthetic
caugccuaacucugaggggac

SEQ ID NO: 259809 - RNA, 22 nt, Artificial Sequence
  Synthetic
ucaugccuaacucugaggggac

SEQ ID NO: 259810 - RNA, 23 nt, Artificial Sequence
  Synthetic
gucaugccuaacucugaggggac

SEQ ID NO: 259811 - RNA, 24 nt, Artificial Sequence
  Synthetic
ggucaugccuaacucugaggggac

SEQ ID NO: 259812 - RNA, 18 nt, Artificial Sequence
  Synthetic
agaaagugagagggggac

SEQ ID NO: 259813 - RNA, 19 nt, Artificial Sequence
  Synthetic
cagaaagugagagggggac

SEQ ID NO: 259814 - RNA, 20 nt, Artificial Sequence
  Synthetic
gcagaaagugagagggggac

SEQ ID NO: 259815 - RNA, 21 nt, Artificial Sequence
  Synthetic
ggcagaaagugagagggggac

SEQ ID NO: 259816 - RNA, 22 nt, Artificial Sequence
  Synthetic
uggcagaaagugagagggggac

SEQ ID NO: 259817 - RNA, 23 nt, Artificial Sequence
  Synthetic
auggcagaaagugagagggggac

SEQ ID NO: 259818 - RNA, 24 nt, Artificial Sequence
  Synthetic
cauggcagaaagugagagggggac

SEQ ID NO: 259819 - RNA, 18 nt, Artificial Sequence
  Synthetic
uccucccacuguggggac

SEQ ID NO: 259820 - RNA, 19 nt, Artificial Sequence
  Synthetic
cuccucccacuguggggac

SEQ ID NO: 259821 - RNA, 20 nt, Artificial Sequence
  Synthetic
gcuccucccacuguggggac

SEQ ID NO: 259822 - RNA, 21 nt, Artificial Sequence
  Synthetic
ugcuccucccacuguggggac

SEQ ID NO: 259823 - RNA, 22 nt, Artificial Sequence
  Synthetic
augcuccucccacuguggggac

SEQ ID NO: 259824 - RNA, 23 nt, Artificial Sequence
  Synthetic
caugcuccucccacuguggggac

SEQ ID NO: 259825 - RNA, 24 nt, Artificial Sequence
  Synthetic
ucaugcuccucccacuguggggac

SEQ ID NO: 259826 - RNA, 18 nt, Artificial Sequence
  Synthetic
gaacauccuuguggggac

SEQ ID NO: 259827 - RNA, 19 nt, Artificial Sequence
  Synthetic
ggaacauccuuguggggac

SEQ ID NO: 259828 - RNA, 20 nt, Artificial Sequence
  Synthetic
uggaacauccuuguggggac

SEQ ID NO: 259829 - RNA, 21 nt, Artificial Sequence
  Synthetic
auggaacauccuuguggggac

SEQ ID NO: 259830 - RNA, 22 nt, Artificial Sequence
  Synthetic
cauggaacauccuuguggggac

SEQ ID NO: 259831 - RNA, 23 nt, Artificial Sequence
  Synthetic
acauggaacauccuuguggggac

SEQ ID NO: 259832 - RNA, 24 nt, Artificial Sequence
  Synthetic
aacauggaacauccuuguggggac

SEQ ID NO: 259833 - RNA, 18 nt, Artificial Sequence
  Synthetic
caugucucauuuggggac

SEQ ID NO: 259834 - RNA, 19 nt, Artificial Sequence
  Synthetic
acaugucucauuuggggac

SEQ ID NO: 259835 - RNA, 20 nt, Artificial Sequence
  Synthetic
cacaugucucauuuggggac

SEQ ID NO: 259836 - RNA, 21 nt, Artificial Sequence
  Synthetic
acacaugucucauuuggggac

SEQ ID NO: 259837 - RNA, 22 nt, Artificial Sequence
  Synthetic
uacacaugucucauuuggggac

SEQ ID NO: 259838 - RNA, 23 nt, Artificial Sequence
  Synthetic
cuacacaugucucauuuggggac

SEQ ID NO: 259839 - RNA, 24 nt, Artificial Sequence
  Synthetic
acuacacaugucucauuuggggac

SEQ ID NO: 259840 - RNA, 18 nt, Artificial Sequence
  Synthetic
uugcugcagagaugggac

SEQ ID NO: 259841 - RNA, 19 nt, Artificial Sequence
  Synthetic
cuugcugcagagaugggac

SEQ ID NO: 259842 - RNA, 20 nt, Artificial Sequence
  Synthetic
acuugcugcagagaugggac

SEQ ID NO: 259843 - RNA, 21 nt, Artificial Sequence
  Synthetic
cacuugcugcagagaugggac

SEQ ID NO: 259844 - RNA, 22 nt, Artificial Sequence
  Synthetic
gcacuugcugcagagaugggac

SEQ ID NO: 259845 - RNA, 23 nt, Artificial Sequence
  Synthetic
agcacuugcugcagagaugggac

SEQ ID NO: 259846 - RNA, 24 nt, Artificial Sequence
  Synthetic
aagcacuugcugcagagaugggac

SEQ ID NO: 259847 - RNA, 18 nt, Artificial Sequence
  Synthetic
aaucucuggggaugggac

SEQ ID NO: 259848 - RNA, 19 nt, Artificial Sequence
  Synthetic
gaaucucuggggaugggac

SEQ ID NO: 259849 - RNA, 20 nt, Artificial Sequence
  Synthetic
agaaucucuggggaugggac

SEQ ID NO: 259850 - RNA, 21 nt, Artificial Sequence
  Synthetic
cagaaucucuggggaugggac

SEQ ID NO: 259851 - RNA, 22 nt, Artificial Sequence
  Synthetic
ucagaaucucuggggaugggac

SEQ ID NO: 259852 - RNA, 23 nt, Artificial Sequence
  Synthetic
aucagaaucucuggggaugggac

SEQ ID NO: 259853 - RNA, 24 nt, Artificial Sequence
  Synthetic
aaucagaaucucuggggaugggac

SEQ ID NO: 259854 - RNA, 18 nt, Artificial Sequence
  Synthetic
cugccuucaaacugggac

SEQ ID NO: 259855 - RNA, 19 nt, Artificial Sequence
  Synthetic
acugccuucaaacugggac

SEQ ID NO: 259856 - RNA, 20 nt, Artificial Sequence
  Synthetic
gacugccuucaaacugggac

SEQ ID NO: 259857 - RNA, 21 nt, Artificial Sequence
  Synthetic
cgacugccuucaaacugggac

SEQ ID NO: 259858 - RNA, 22 nt, Artificial Sequence
  Synthetic
ccgacugccuucaaacugggac

SEQ ID NO: 259859 - RNA, 23 nt, Artificial Sequence
  Synthetic
cccgacugccuucaaacugggac

SEQ ID NO: 259860 - RNA, 24 nt, Artificial Sequence
  Synthetic
gcccgacugccuucaaacugggac

SEQ ID NO: 259861 - RNA, 18 nt, Artificial Sequence
  Synthetic
cucccaaauaacugggac

SEQ ID NO: 259862 - RNA, 19 nt, Artificial Sequence
  Synthetic
ccucccaaauaacugggac

SEQ ID NO: 259863 - RNA, 20 nt, Artificial Sequence
  Synthetic
gccucccaaauaacugggac

SEQ ID NO: 259864 - RNA, 21 nt, Artificial Sequence
  Synthetic
cgccucccaaauaacugggac

SEQ ID NO: 259865 - RNA, 22 nt, Artificial Sequence
  Synthetic
ccgccucccaaauaacugggac

SEQ ID NO: 259866 - RNA, 23 nt, Artificial Sequence
  Synthetic
uccgccucccaaauaacugggac

SEQ ID NO: 259867 - RNA, 24 nt, Artificial Sequence
  Synthetic
cuccgccucccaaauaacugggac

SEQ ID NO: 259868 - RNA, 18 nt, Artificial Sequence
  Synthetic
aaaugacuucagugggac

SEQ ID NO: 259869 - RNA, 19 nt, Artificial Sequence
  Synthetic
aaaaugacuucagugggac

SEQ ID NO: 259870 - RNA, 20 nt, Artificial Sequence
  Synthetic
caaaaugacuucagugggac

SEQ ID NO: 259871 - RNA, 21 nt, Artificial Sequence
  Synthetic
ccaaaaugacuucagugggac

SEQ ID NO: 259872 - RNA, 22 nt, Artificial Sequence
  Synthetic
uccaaaaugacuucagugggac

SEQ ID NO: 259873 - RNA, 23 nt, Artificial Sequence
  Synthetic
uuccaaaaugacuucagugggac

SEQ ID NO: 259874 - RNA, 24 nt, Artificial Sequence
  Synthetic
uuuccaaaaugacuucagugggac

SEQ ID NO: 259875 - RNA, 18 nt, Artificial Sequence
  Synthetic
auugguguucugugggac

SEQ ID NO: 259876 - RNA, 19 nt, Artificial Sequence
  Synthetic
uauugguguucugugggac

SEQ ID NO: 259877 - RNA, 20 nt, Artificial Sequence
  Synthetic
uuauugguguucugugggac

SEQ ID NO: 259878 - RNA, 21 nt, Artificial Sequence
  Synthetic
uuuauugguguucugugggac

SEQ ID NO: 259879 - RNA, 22 nt, Artificial Sequence
  Synthetic
uuuuauugguguucugugggac

SEQ ID NO: 259880 - RNA, 23 nt, Artificial Sequence
  Synthetic
auuuuauugguguucugugggac

SEQ ID NO: 259881 - RNA, 24 nt, Artificial Sequence
  Synthetic
uauuuuauugguguucugugggac

SEQ ID NO: 259882 - RNA, 18 nt, Artificial Sequence
  Synthetic
uaacucccguugugggac

SEQ ID NO: 259883 - RNA, 19 nt, Artificial Sequence
  Synthetic
auaacucccguugugggac

SEQ ID NO: 259884 - RNA, 20 nt, Artificial Sequence
  Synthetic
uauaacucccguugugggac

SEQ ID NO: 259885 - RNA, 21 nt, Artificial Sequence
  Synthetic
auauaacucccguugugggac

SEQ ID NO: 259886 - RNA, 22 nt, Artificial Sequence
  Synthetic
gauauaacucccguugugggac

SEQ ID NO: 259887 - RNA, 23 nt, Artificial Sequence
  Synthetic
agauauaacucccguugugggac

SEQ ID NO: 259888 - RNA, 24 nt, Artificial Sequence
  Synthetic
cagauauaacucccguugugggac

SEQ ID NO: 259889 - RNA, 18 nt, Artificial Sequence
  Synthetic
auaaugaaaaauugggac

SEQ ID NO: 259890 - RNA, 19 nt, Artificial Sequence
  Synthetic
gauaaugaaaaauugggac

SEQ ID NO: 259891 - RNA, 20 nt, Artificial Sequence
  Synthetic
agauaaugaaaaauugggac

SEQ ID NO: 259892 - RNA, 21 nt, Artificial Sequence
  Synthetic
aagauaaugaaaaauugggac

SEQ ID NO: 259893 - RNA, 22 nt, Artificial Sequence
  Synthetic
caagauaaugaaaaauugggac

SEQ ID NO: 259894 - RNA, 23 nt, Artificial Sequence
  Synthetic
gcaagauaaugaaaaauugggac

SEQ ID NO: 259895 - RNA, 24 nt, Artificial Sequence
  Synthetic
ggcaagauaaugaaaaauugggac

SEQ ID NO: 259896 - RNA, 18 nt, Artificial Sequence
  Synthetic
uuuuuuaaaguuugggac

SEQ ID NO: 259897 - RNA, 19 nt, Artificial Sequence
  Synthetic
guuuuuuaaaguuugggac

SEQ ID NO: 259898 - RNA, 20 nt, Artificial Sequence
  Synthetic
uguuuuuuaaaguuugggac

SEQ ID NO: 259899 - RNA, 21 nt, Artificial Sequence
  Synthetic
auguuuuuuaaaguuugggac

SEQ ID NO: 259900 - RNA, 22 nt, Artificial Sequence
  Synthetic
aauguuuuuuaaaguuugggac

SEQ ID NO: 259901 - RNA, 23 nt, Artificial Sequence
  Synthetic
aaauguuuuuuaaaguuugggac

SEQ ID NO: 259902 - RNA, 24 nt, Artificial Sequence
  Synthetic
aaaauguuuuuuaaaguuugggac

SEQ ID NO: 259903 - RNA, 18 nt, Artificial Sequence
  Synthetic
acaauuccuccaauggac

SEQ ID NO: 259904 - RNA, 19 nt, Artificial Sequence
  Synthetic
gacaauuccuccaauggac

SEQ ID NO: 259905 - RNA, 20 nt, Artificial Sequence
  Synthetic
agacaauuccuccaauggac

SEQ ID NO: 259906 - RNA, 21 nt, Artificial Sequence
  Synthetic
aagacaauuccuccaauggac

SEQ ID NO: 259907 - RNA, 22 nt, Artificial Sequence
  Synthetic
aaagacaauuccuccaauggac

SEQ ID NO: 259908 - RNA, 23 nt, Artificial Sequence
  Synthetic
aaaagacaauuccuccaauggac

SEQ ID NO: 259909 - RNA, 24 nt, Artificial Sequence
  Synthetic
gaaaagacaauuccuccaauggac

SEQ ID NO: 259910 - RNA, 18 nt, Artificial Sequence
  Synthetic
acgcuaugucacauggac

SEQ ID NO: 259911 - RNA, 19 nt, Artificial Sequence
  Synthetic
aacgcuaugucacauggac

SEQ ID NO: 259912 - RNA, 20 nt, Artificial Sequence
  Synthetic
uaacgcuaugucacauggac

SEQ ID NO: 259913 - RNA, 21 nt, Artificial Sequence
  Synthetic
auaacgcuaugucacauggac

SEQ ID NO: 259914 - RNA, 22 nt, Artificial Sequence
  Synthetic
aauaacgcuaugucacauggac

SEQ ID NO: 259915 - RNA, 23 nt, Artificial Sequence
  Synthetic
gaauaacgcuaugucacauggac

SEQ ID NO: 259916 - RNA, 24 nt, Artificial Sequence
  Synthetic
agaauaacgcuaugucacauggac

SEQ ID NO: 259917 - RNA, 18 nt, Artificial Sequence
  Synthetic
uacauuuaagacauggac

SEQ ID NO: 259918 - RNA, 19 nt, Artificial Sequence
  Synthetic
cuacauuuaagacauggac

SEQ ID NO: 259919 - RNA, 20 nt, Artificial Sequence
  Synthetic
ucuacauuuaagacauggac

SEQ ID NO: 259920 - RNA, 21 nt, Artificial Sequence
  Synthetic
gucuacauuuaagacauggac

SEQ ID NO: 259921 - RNA, 22 nt, Artificial Sequence
  Synthetic
ggucuacauuuaagacauggac

SEQ ID NO: 259922 - RNA, 23 nt, Artificial Sequence
  Synthetic
aggucuacauuuaagacauggac

SEQ ID NO: 259923 - RNA, 24 nt, Artificial Sequence
  Synthetic
uaggucuacauuuaagacauggac

SEQ ID NO: 259924 - RNA, 18 nt, Artificial Sequence
  Synthetic
aucucugaucucauggac

SEQ ID NO: 259925 - RNA, 19 nt, Artificial Sequence
  Synthetic
caucucugaucucauggac

SEQ ID NO: 259926 - RNA, 20 nt, Artificial Sequence
  Synthetic
acaucucugaucucauggac

SEQ ID NO: 259927 - RNA, 21 nt, Artificial Sequence
  Synthetic
aacaucucugaucucauggac

SEQ ID NO: 259928 - RNA, 22 nt, Artificial Sequence
  Synthetic
aaacaucucugaucucauggac

SEQ ID NO: 259929 - RNA, 23 nt, Artificial Sequence
  Synthetic
aaaacaucucugaucucauggac

SEQ ID NO: 259930 - RNA, 24 nt, Artificial Sequence
  Synthetic
gaaaacaucucugaucucauggac

SEQ ID NO: 259931 - RNA, 18 nt, Artificial Sequence
  Synthetic
accaagacuuagauggac

SEQ ID NO: 259932 - RNA, 19 nt, Artificial Sequence
  Synthetic
gaccaagacuuagauggac

SEQ ID NO: 259933 - RNA, 20 nt, Artificial Sequence
  Synthetic
ggaccaagacuuagauggac

SEQ ID NO: 259934 - RNA, 21 nt, Artificial Sequence
  Synthetic
aggaccaagacuuagauggac

SEQ ID NO: 259935 - RNA, 22 nt, Artificial Sequence
  Synthetic
caggaccaagacuuagauggac

SEQ ID NO: 259936 - RNA, 23 nt, Artificial Sequence
  Synthetic
gcaggaccaagacuuagauggac

SEQ ID NO: 259937 - RNA, 24 nt, Artificial Sequence
  Synthetic
ggcaggaccaagacuuagauggac

SEQ ID NO: 259938 - RNA, 18 nt, Artificial Sequence
  Synthetic
gucccaacauggauggac

SEQ ID NO: 259939 - RNA, 19 nt, Artificial Sequence
  Synthetic
ugucccaacauggauggac

SEQ ID NO: 259940 - RNA, 20 nt, Artificial Sequence
  Synthetic
uugucccaacauggauggac

SEQ ID NO: 259941 - RNA, 21 nt, Artificial Sequence
  Synthetic
uuugucccaacauggauggac

SEQ ID NO: 259942 - RNA, 22 nt, Artificial Sequence
  Synthetic
auuugucccaacauggauggac

SEQ ID NO: 259943 - RNA, 23 nt, Artificial Sequence
  Synthetic
cauuugucccaacauggauggac

SEQ ID NO: 259944 - RNA, 24 nt, Artificial Sequence
  Synthetic
ucauuugucccaacauggauggac

SEQ ID NO: 259945 - RNA, 18 nt, Artificial Sequence
  Synthetic
uugaauauguauauggac

SEQ ID NO: 259946 - RNA, 19 nt, Artificial Sequence
  Synthetic
auugaauauguauauggac

SEQ ID NO: 259947 - RNA, 20 nt, Artificial Sequence
  Synthetic
cauugaauauguauauggac

SEQ ID NO: 259948 - RNA, 21 nt, Artificial Sequence
  Synthetic
ccauugaauauguauauggac

SEQ ID NO: 259949 - RNA, 22 nt, Artificial Sequence
  Synthetic
accauugaauauguauauggac

SEQ ID NO: 259950 - RNA, 23 nt, Artificial Sequence
  Synthetic
aaccauugaauauguauauggac

SEQ ID NO: 259951 - RNA, 24 nt, Artificial Sequence
  Synthetic
uaaccauugaauauguauauggac

SEQ ID NO: 259952 - RNA, 18 nt, Artificial Sequence
  Synthetic
cauuugccuuauauggac

SEQ ID NO: 259953 - RNA, 19 nt, Artificial Sequence
  Synthetic
gcauuugccuuauauggac

SEQ ID NO: 259954 - RNA, 20 nt, Artificial Sequence
  Synthetic
ggcauuugccuuauauggac

SEQ ID NO: 259955 - RNA, 21 nt, Artificial Sequence
  Synthetic
aggcauuugccuuauauggac

SEQ ID NO: 259956 - RNA, 22 nt, Artificial Sequence
  Synthetic
uaggcauuugccuuauauggac

SEQ ID NO: 259957 - RNA, 23 nt, Artificial Sequence
  Synthetic
auaggcauuugccuuauauggac

SEQ ID NO: 259958 - RNA, 24 nt, Artificial Sequence
  Synthetic
aauaggcauuugccuuauauggac

SEQ ID NO: 259959 - RNA, 18 nt, Artificial Sequence
  Synthetic
gcacauucaccuauggac

SEQ ID NO: 259960 - RNA, 19 nt, Artificial Sequence
  Synthetic
agcacauucaccuauggac

SEQ ID NO: 259961 - RNA, 20 nt, Artificial Sequence
  Synthetic
cagcacauucaccuauggac

SEQ ID NO: 259962 - RNA, 21 nt, Artificial Sequence
  Synthetic
ucagcacauucaccuauggac

SEQ ID NO: 259963 - RNA, 22 nt, Artificial Sequence
  Synthetic
uucagcacauucaccuauggac

SEQ ID NO: 259964 - RNA, 23 nt, Artificial Sequence
  Synthetic
uuucagcacauucaccuauggac

SEQ ID NO: 259965 - RNA, 24 nt, Artificial Sequence
  Synthetic
cuuucagcacauucaccuauggac

SEQ ID NO: 259966 - RNA, 18 nt, Artificial Sequence
  Synthetic
cagaacaaguaacuggac

SEQ ID NO: 259967 - RNA, 19 nt, Artificial Sequence
  Synthetic
ccagaacaaguaacuggac

SEQ ID NO: 259968 - RNA, 20 nt, Artificial Sequence
  Synthetic
gccagaacaaguaacuggac

SEQ ID NO: 259969 - RNA, 21 nt, Artificial Sequence
  Synthetic
agccagaacaaguaacuggac

SEQ ID NO: 259970 - RNA, 22 nt, Artificial Sequence
  Synthetic
uagccagaacaaguaacuggac

SEQ ID NO: 259971 - RNA, 23 nt, Artificial Sequence
  Synthetic
auagccagaacaaguaacuggac

SEQ ID NO: 259972 - RNA, 24 nt, Artificial Sequence
  Synthetic
aauagccagaacaaguaacuggac

SEQ ID NO: 259973 - RNA, 18 nt, Artificial Sequence
  Synthetic
aucacuugaauccuggac

SEQ ID NO: 259974 - RNA, 19 nt, Artificial Sequence
  Synthetic
aaucacuugaauccuggac

SEQ ID NO: 259975 - RNA, 20 nt, Artificial Sequence
  Synthetic
gaaucacuugaauccuggac

SEQ ID NO: 259976 - RNA, 21 nt, Artificial Sequence
  Synthetic
agaaucacuugaauccuggac

SEQ ID NO: 259977 - RNA, 22 nt, Artificial Sequence
  Synthetic
gagaaucacuugaauccuggac

SEQ ID NO: 259978 - RNA, 23 nt, Artificial Sequence
  Synthetic
ggagaaucacuugaauccuggac

SEQ ID NO: 259979 - RNA, 24 nt, Artificial Sequence
  Synthetic
aggagaaucacuugaauccuggac

SEQ ID NO: 259980 - RNA, 18 nt, Artificial Sequence
  Synthetic
uuucccuagaugcuggac

SEQ ID NO: 259981 - RNA, 19 nt, Artificial Sequence
  Synthetic
uuuucccuagaugcuggac

SEQ ID NO: 259982 - RNA, 20 nt, Artificial Sequence
  Synthetic
auuuucccuagaugcuggac

SEQ ID NO: 259983 - RNA, 21 nt, Artificial Sequence
  Synthetic
cauuuucccuagaugcuggac

SEQ ID NO: 259984 - RNA, 22 nt, Artificial Sequence
  Synthetic
ucauuuucccuagaugcuggac

SEQ ID NO: 259985 - RNA, 23 nt, Artificial Sequence
  Synthetic
cucauuuucccuagaugcuggac

SEQ ID NO: 259986 - RNA, 24 nt, Artificial Sequence
  Synthetic
ccucauuuucccuagaugcuggac

SEQ ID NO: 259987 - RNA, 18 nt, Artificial Sequence
  Synthetic
uuuuuuggugaucuggac

SEQ ID NO: 259988 - RNA, 19 nt, Artificial Sequence
  Synthetic
auuuuuuggugaucuggac

SEQ ID NO: 259989 - RNA, 20 nt, Artificial Sequence
  Synthetic
aauuuuuuggugaucuggac

SEQ ID NO: 259990 - RNA, 21 nt, Artificial Sequence
  Synthetic
uaauuuuuuggugaucuggac

SEQ ID NO: 259991 - RNA, 22 nt, Artificial Sequence
  Synthetic
auaauuuuuuggugaucuggac

SEQ ID NO: 259992 - RNA, 23 nt, Artificial Sequence
  Synthetic
uauaauuuuuuggugaucuggac

SEQ ID NO: 259993 - RNA, 24 nt, Artificial Sequence
  Synthetic
auauaauuuuuuggugaucuggac

SEQ ID NO: 259994 - RNA, 18 nt, Artificial Sequence
  Synthetic
cagcagucugaaguggac

SEQ ID NO: 259995 - RNA, 19 nt, Artificial Sequence
  Synthetic
acagcagucugaaguggac

SEQ ID NO: 259996 - RNA, 20 nt, Artificial Sequence
  Synthetic
cacagcagucugaaguggac

SEQ ID NO: 259997 - RNA, 21 nt, Artificial Sequence
  Synthetic
gcacagcagucugaaguggac

SEQ ID NO: 259998 - RNA, 22 nt, Artificial Sequence
  Synthetic
agcacagcagucugaaguggac

SEQ ID NO: 259999 - RNA, 23 nt, Artificial Sequence
  Synthetic
cagcacagcagucugaaguggac

SEQ ID NO: 260000 - RNA, 24 nt, Artificial Sequence
  Synthetic
ccagcacagcagucugaaguggac

SEQ ID NO: 260001 - RNA, 18 nt, Artificial Sequence
  Synthetic
caacgcaaugcaguggac

SEQ ID NO: 260002 - RNA, 19 nt, Artificial Sequence
  Synthetic
gcaacgcaaugcaguggac

SEQ ID NO: 260003 - RNA, 20 nt, Artificial Sequence
  Synthetic
ugcaacgcaaugcaguggac

SEQ ID NO: 260004 - RNA, 21 nt, Artificial Sequence
  Synthetic
augcaacgcaaugcaguggac

SEQ ID NO: 260005 - RNA, 22 nt, Artificial Sequence
  Synthetic
gaugcaacgcaaugcaguggac

SEQ ID NO: 260006 - RNA, 23 nt, Artificial Sequence
  Synthetic
agaugcaacgcaaugcaguggac

SEQ ID NO: 260007 - RNA, 24 nt, Artificial Sequence
  Synthetic
aagaugcaacgcaaugcaguggac

SEQ ID NO: 260008 - RNA, 18 nt, Artificial Sequence
  Synthetic
gggagagaggagguggac

SEQ ID NO: 260009 - RNA, 19 nt, Artificial Sequence
  Synthetic
agggagagaggagguggac

SEQ ID NO: 260010 - RNA, 20 nt, Artificial Sequence
  Synthetic
gagggagagaggagguggac

SEQ ID NO: 260011 - RNA, 21 nt, Artificial Sequence
  Synthetic
ggagggagagaggagguggac

SEQ ID NO: 260012 - RNA, 22 nt, Artificial Sequence
  Synthetic
gggagggagagaggagguggac

SEQ ID NO: 260013 - RNA, 23 nt, Artificial Sequence
  Synthetic
ugggagggagagaggagguggac

SEQ ID NO: 260014 - RNA, 24 nt, Artificial Sequence
  Synthetic
augggagggagagaggagguggac

SEQ ID NO: 260015 - RNA, 18 nt, Artificial Sequence
  Synthetic
agaggcagacuauuggac

SEQ ID NO: 260016 - RNA, 19 nt, Artificial Sequence
  Synthetic
gagaggcagacuauuggac

SEQ ID NO: 260017 - RNA, 20 nt, Artificial Sequence
  Synthetic
agagaggcagacuauuggac

SEQ ID NO: 260018 - RNA, 21 nt, Artificial Sequence
  Synthetic
cagagaggcagacuauuggac

SEQ ID NO: 260019 - RNA, 22 nt, Artificial Sequence
  Synthetic
ccagagaggcagacuauuggac

SEQ ID NO: 260020 - RNA, 23 nt, Artificial Sequence
  Synthetic
accagagaggcagacuauuggac

SEQ ID NO: 260021 - RNA, 24 nt, Artificial Sequence
  Synthetic
uaccagagaggcagacuauuggac

SEQ ID NO: 260022 - RNA, 18 nt, Artificial Sequence
  Synthetic
ugcccugggaacuuggac

SEQ ID NO: 260023 - RNA, 19 nt, Artificial Sequence
  Synthetic
augcccugggaacuuggac

SEQ ID NO: 260024 - RNA, 20 nt, Artificial Sequence
  Synthetic
gaugcccugggaacuuggac

SEQ ID NO: 260025 - RNA, 21 nt, Artificial Sequence
  Synthetic
agaugcccugggaacuuggac

SEQ ID NO: 260026 - RNA, 22 nt, Artificial Sequence
  Synthetic
cagaugcccugggaacuuggac

SEQ ID NO: 260027 - RNA, 23 nt, Artificial Sequence
  Synthetic
acagaugcccugggaacuuggac

SEQ ID NO: 260028 - RNA, 24 nt, Artificial Sequence
  Synthetic
gacagaugcccugggaacuuggac

SEQ ID NO: 260029 - RNA, 18 nt, Artificial Sequence
  Synthetic
gaugauaguggcuuggac

SEQ ID NO: 260030 - RNA, 19 nt, Artificial Sequence
  Synthetic
agaugauaguggcuuggac

SEQ ID NO: 260031 - RNA, 20 nt, Artificial Sequence
  Synthetic
gagaugauaguggcuuggac

SEQ ID NO: 260032 - RNA, 21 nt, Artificial Sequence
  Synthetic
agagaugauaguggcuuggac

SEQ ID NO: 260033 - RNA, 22 nt, Artificial Sequence
  Synthetic
gagagaugauaguggcuuggac

SEQ ID NO: 260034 - RNA, 23 nt, Artificial Sequence
  Synthetic
ugagagaugauaguggcuuggac

SEQ ID NO: 260035 - RNA, 24 nt, Artificial Sequence
  Synthetic
gugagagaugauaguggcuuggac

SEQ ID NO: 260036 - RNA, 18 nt, Artificial Sequence
  Synthetic
acuaacaauuuguuggac

SEQ ID NO: 260037 - RNA, 19 nt, Artificial Sequence
  Synthetic
gacuaacaauuuguuggac

SEQ ID NO: 260038 - RNA, 20 nt, Artificial Sequence
  Synthetic
ggacuaacaauuuguuggac

SEQ ID NO: 260039 - RNA, 21 nt, Artificial Sequence
  Synthetic
aggacuaacaauuuguuggac

SEQ ID NO: 260040 - RNA, 22 nt, Artificial Sequence
  Synthetic
uaggacuaacaauuuguuggac

SEQ ID NO: 260041 - RNA, 23 nt, Artificial Sequence
  Synthetic
auaggacuaacaauuuguuggac

SEQ ID NO: 260042 - RNA, 24 nt, Artificial Sequence
  Synthetic
aauaggacuaacaauuuguuggac

SEQ ID NO: 260043 - RNA, 18 nt, Artificial Sequence
  Synthetic
guauuucgguauuuggac

SEQ ID NO: 260044 - RNA, 19 nt, Artificial Sequence
  Synthetic
uguauuucgguauuuggac

SEQ ID NO: 260045 - RNA, 20 nt, Artificial Sequence
  Synthetic
auguauuucgguauuuggac

SEQ ID NO: 260046 - RNA, 21 nt, Artificial Sequence
  Synthetic
gauguauuucgguauuuggac

SEQ ID NO: 260047 - RNA, 22 nt, Artificial Sequence
  Synthetic
ugauguauuucgguauuuggac

SEQ ID NO: 260048 - RNA, 23 nt, Artificial Sequence
  Synthetic
cugauguauuucgguauuuggac

SEQ ID NO: 260049 - RNA, 24 nt, Artificial Sequence
  Synthetic
ccugauguauuucgguauuuggac

SEQ ID NO: 260050 - RNA, 18 nt, Artificial Sequence
  Synthetic
uuagaugaaacuuuggac

SEQ ID NO: 260051 - RNA, 19 nt, Artificial Sequence
  Synthetic
cuuagaugaaacuuuggac

SEQ ID NO: 260052 - RNA, 20 nt, Artificial Sequence
  Synthetic
ccuuagaugaaacuuuggac

SEQ ID NO: 260053 - RNA, 21 nt, Artificial Sequence
  Synthetic
gccuuagaugaaacuuuggac

SEQ ID NO: 260054 - RNA, 22 nt, Artificial Sequence
  Synthetic
ugccuuagaugaaacuuuggac

SEQ ID NO: 260055 - RNA, 23 nt, Artificial Sequence
  Synthetic
uugccuuagaugaaacuuuggac

SEQ ID NO: 260056 - RNA, 24 nt, Artificial Sequence
  Synthetic
uuugccuuagaugaaacuuuggac

SEQ ID NO: 260057 - RNA, 18 nt, Artificial Sequence
  Synthetic
acuucugaguguuuggac

SEQ ID NO: 260058 - RNA, 19 nt, Artificial Sequence
  Synthetic
aacuucugaguguuuggac

SEQ ID NO: 260059 - RNA, 20 nt, Artificial Sequence
  Synthetic
gaacuucugaguguuuggac

SEQ ID NO: 260060 - RNA, 21 nt, Artificial Sequence
  Synthetic
ggaacuucugaguguuuggac

SEQ ID NO: 260061 - RNA, 22 nt, Artificial Sequence
  Synthetic
uggaacuucugaguguuuggac

SEQ ID NO: 260062 - RNA, 23 nt, Artificial Sequence
  Synthetic
auggaacuucugaguguuuggac

SEQ ID NO: 260063 - RNA, 24 nt, Artificial Sequence
  Synthetic
cauggaacuucugaguguuuggac

SEQ ID NO: 260064 - RNA, 18 nt, Artificial Sequence
  Synthetic
gcuuuugguguuuuggac

SEQ ID NO: 260065 - RNA, 19 nt, Artificial Sequence
  Synthetic
ugcuuuugguguuuuggac

SEQ ID NO: 260066 - RNA, 20 nt, Artificial Sequence
  Synthetic
uugcuuuugguguuuuggac

SEQ ID NO: 260067 - RNA, 21 nt, Artificial Sequence
  Synthetic
auugcuuuugguguuuuggac

SEQ ID NO: 260068 - RNA, 22 nt, Artificial Sequence
  Synthetic
cauugcuuuugguguuuuggac

SEQ ID NO: 260069 - RNA, 23 nt, Artificial Sequence
  Synthetic
ccauugcuuuugguguuuuggac

SEQ ID NO: 260070 - RNA, 24 nt, Artificial Sequence
  Synthetic
gccauugcuuuugguguuuuggac

SEQ ID NO: 260071 - RNA, 18 nt, Artificial Sequence
  Synthetic
aaggaaaaaacaaaugac

SEQ ID NO: 260072 - RNA, 19 nt, Artificial Sequence
  Synthetic
aaaggaaaaaacaaaugac

SEQ ID NO: 260073 - RNA, 20 nt, Artificial Sequence
  Synthetic
gaaaggaaaaaacaaaugac

SEQ ID NO: 260074 - RNA, 21 nt, Artificial Sequence
  Synthetic
ugaaaggaaaaaacaaaugac

SEQ ID NO: 260075 - RNA, 22 nt, Artificial Sequence
  Synthetic
augaaaggaaaaaacaaaugac

SEQ ID NO: 260076 - RNA, 23 nt, Artificial Sequence
  Synthetic
gaugaaaggaaaaaacaaaugac

SEQ ID NO: 260077 - RNA, 24 nt, Artificial Sequence
  Synthetic
agaugaaaggaaaaaacaaaugac

SEQ ID NO: 260078 - RNA, 18 nt, Artificial Sequence
  Synthetic
ucaucuuuaugaaaugac

SEQ ID NO: 260079 - RNA, 19 nt, Artificial Sequence
  Synthetic
aucaucuuuaugaaaugac

SEQ ID NO: 260080 - RNA, 20 nt, Artificial Sequence
  Synthetic
aaucaucuuuaugaaaugac

SEQ ID NO: 260081 - RNA, 21 nt, Artificial Sequence
  Synthetic
gaaucaucuuuaugaaaugac

SEQ ID NO: 260082 - RNA, 22 nt, Artificial Sequence
  Synthetic
ugaaucaucuuuaugaaaugac

SEQ ID NO: 260083 - RNA, 23 nt, Artificial Sequence
  Synthetic
cugaaucaucuuuaugaaaugac

SEQ ID NO: 260084 - RNA, 24 nt, Artificial Sequence
  Synthetic
ucugaaucaucuuuaugaaaugac

SEQ ID NO: 260085 - RNA, 18 nt, Artificial Sequence
  Synthetic
gagaggaacauaaaugac

SEQ ID NO: 260086 - RNA, 19 nt, Artificial Sequence
  Synthetic
agagaggaacauaaaugac

SEQ ID NO: 260087 - RNA, 20 nt, Artificial Sequence
  Synthetic
uagagaggaacauaaaugac

SEQ ID NO: 260088 - RNA, 21 nt, Artificial Sequence
  Synthetic
uuagagaggaacauaaaugac

SEQ ID NO: 260089 - RNA, 22 nt, Artificial Sequence
  Synthetic
uuuagagaggaacauaaaugac

SEQ ID NO: 260090 - RNA, 23 nt, Artificial Sequence
  Synthetic
guuuagagaggaacauaaaugac

SEQ ID NO: 260091 - RNA, 24 nt, Artificial Sequence
  Synthetic
aguuuagagaggaacauaaaugac

SEQ ID NO: 260092 - RNA, 18 nt, Artificial Sequence
  Synthetic
ucugcaguuuucaaugac

SEQ ID NO: 260093 - RNA, 19 nt, Artificial Sequence
  Synthetic
uucugcaguuuucaaugac

SEQ ID NO: 260094 - RNA, 20 nt, Artificial Sequence
  Synthetic
cuucugcaguuuucaaugac

SEQ ID NO: 260095 - RNA, 21 nt, Artificial Sequence
  Synthetic
ccuucugcaguuuucaaugac

SEQ ID NO: 260096 - RNA, 22 nt, Artificial Sequence
  Synthetic
cccuucugcaguuuucaaugac

SEQ ID NO: 260097 - RNA, 23 nt, Artificial Sequence
  Synthetic
ccccuucugcaguuuucaaugac

SEQ ID NO: 260098 - RNA, 24 nt, Artificial Sequence
  Synthetic
cccccuucugcaguuuucaaugac

SEQ ID NO: 260099 - RNA, 18 nt, Artificial Sequence
  Synthetic
acaaaggagaagaaugac

SEQ ID NO: 260100 - RNA, 19 nt, Artificial Sequence
  Synthetic
uacaaaggagaagaaugac

SEQ ID NO: 260101 - RNA, 20 nt, Artificial Sequence
  Synthetic
cuacaaaggagaagaaugac

SEQ ID NO: 260102 - RNA, 21 nt, Artificial Sequence
  Synthetic
gcuacaaaggagaagaaugac

SEQ ID NO: 260103 - RNA, 22 nt, Artificial Sequence
  Synthetic
ggcuacaaaggagaagaaugac

SEQ ID NO: 260104 - RNA, 23 nt, Artificial Sequence
  Synthetic
aggcuacaaaggagaagaaugac

SEQ ID NO: 260105 - RNA, 24 nt, Artificial Sequence
  Synthetic
caggcuacaaaggagaagaaugac

SEQ ID NO: 260106 - RNA, 18 nt, Artificial Sequence
  Synthetic
aaaggucuggagaaugac

SEQ ID NO: 260107 - RNA, 19 nt, Artificial Sequence
  Synthetic
caaaggucuggagaaugac

SEQ ID NO: 260108 - RNA, 20 nt, Artificial Sequence
  Synthetic
ucaaaggucuggagaaugac

SEQ ID NO: 260109 - RNA, 21 nt, Artificial Sequence
  Synthetic
gucaaaggucuggagaaugac

SEQ ID NO: 260110 - RNA, 22 nt, Artificial Sequence
  Synthetic
agucaaaggucuggagaaugac

SEQ ID NO: 260111 - RNA, 23 nt, Artificial Sequence
  Synthetic
uagucaaaggucuggagaaugac

SEQ ID NO: 260112 - RNA, 24 nt, Artificial Sequence
  Synthetic
auagucaaaggucuggagaaugac

SEQ ID NO: 260113 - RNA, 18 nt, Artificial Sequence
  Synthetic
aacagagaucugaaugac

SEQ ID NO: 260114 - RNA, 19 nt, Artificial Sequence
  Synthetic
aaacagagaucugaaugac

SEQ ID NO: 260115 - RNA, 20 nt, Artificial Sequence
  Synthetic
uaaacagagaucugaaugac

SEQ ID NO: 260116 - RNA, 21 nt, Artificial Sequence
  Synthetic
uuaaacagagaucugaaugac

SEQ ID NO: 260117 - RNA, 22 nt, Artificial Sequence
  Synthetic
uuuaaacagagaucugaaugac

SEQ ID NO: 260118 - RNA, 23 nt, Artificial Sequence
  Synthetic
auuuaaacagagaucugaaugac

SEQ ID NO: 260119 - RNA, 24 nt, Artificial Sequence
  Synthetic
uauuuaaacagagaucugaaugac

SEQ ID NO: 260120 - RNA, 18 nt, Artificial Sequence
  Synthetic
agauuaaaauugaaugac

SEQ ID NO: 260121 - RNA, 19 nt, Artificial Sequence
  Synthetic
gagauuaaaauugaaugac

SEQ ID NO: 260122 - RNA, 20 nt, Artificial Sequence
  Synthetic
agagauuaaaauugaaugac

SEQ ID NO: 260123 - RNA, 21 nt, Artificial Sequence
  Synthetic
uagagauuaaaauugaaugac

SEQ ID NO: 260124 - RNA, 22 nt, Artificial Sequence
  Synthetic
auagagauuaaaauugaaugac

SEQ ID NO: 260125 - RNA, 23 nt, Artificial Sequence
  Synthetic
gauagagauuaaaauugaaugac

SEQ ID NO: 260126 - RNA, 24 nt, Artificial Sequence
  Synthetic
ugauagagauuaaaauugaaugac

SEQ ID NO: 260127 - RNA, 18 nt, Artificial Sequence
  Synthetic
ucugaagcuuugaaugac

SEQ ID NO: 260128 - RNA, 19 nt, Artificial Sequence
  Synthetic
gucugaagcuuugaaugac

SEQ ID NO: 260129 - RNA, 20 nt, Artificial Sequence
  Synthetic
ugucugaagcuuugaaugac

SEQ ID NO: 260130 - RNA, 21 nt, Artificial Sequence
  Synthetic
augucugaagcuuugaaugac

SEQ ID NO: 260131 - RNA, 22 nt, Artificial Sequence
  Synthetic
uaugucugaagcuuugaaugac

SEQ ID NO: 260132 - RNA, 23 nt, Artificial Sequence
  Synthetic
uuaugucugaagcuuugaaugac

SEQ ID NO: 260133 - RNA, 24 nt, Artificial Sequence
  Synthetic
uuuaugucugaagcuuugaaugac

SEQ ID NO: 260134 - RNA, 18 nt, Artificial Sequence
  Synthetic
caugacaaagaacaugac

SEQ ID NO: 260135 - RNA, 19 nt, Artificial Sequence
  Synthetic
ucaugacaaagaacaugac

SEQ ID NO: 260136 - RNA, 20 nt, Artificial Sequence
  Synthetic
cucaugacaaagaacaugac

SEQ ID NO: 260137 - RNA, 21 nt, Artificial Sequence
  Synthetic
ucucaugacaaagaacaugac

SEQ ID NO: 260138 - RNA, 22 nt, Artificial Sequence
  Synthetic
aucucaugacaaagaacaugac

SEQ ID NO: 260139 - RNA, 23 nt, Artificial Sequence
  Synthetic
aaucucaugacaaagaacaugac

SEQ ID NO: 260140 - RNA, 24 nt, Artificial Sequence
  Synthetic
gaaucucaugacaaagaacaugac

SEQ ID NO: 260141 - RNA, 18 nt, Artificial Sequence
  Synthetic
cucacagucucacaugac

SEQ ID NO: 260142 - RNA, 19 nt, Artificial Sequence
  Synthetic
acucacagucucacaugac

SEQ ID NO: 260143 - RNA, 20 nt, Artificial Sequence
  Synthetic
gacucacagucucacaugac

SEQ ID NO: 260144 - RNA, 21 nt, Artificial Sequence
  Synthetic
ggacucacagucucacaugac

SEQ ID NO: 260145 - RNA, 22 nt, Artificial Sequence
  Synthetic
uggacucacagucucacaugac

SEQ ID NO: 260146 - RNA, 23 nt, Artificial Sequence
  Synthetic
auggacucacagucucacaugac

SEQ ID NO: 260147 - RNA, 24 nt, Artificial Sequence
  Synthetic
aauggacucacagucucacaugac

SEQ ID NO: 260148 - RNA, 18 nt, Artificial Sequence
  Synthetic
ggaagcauuauacaugac

SEQ ID NO: 260149 - RNA, 19 nt, Artificial Sequence
  Synthetic
aggaagcauuauacaugac

SEQ ID NO: 260150 - RNA, 20 nt, Artificial Sequence
  Synthetic
gaggaagcauuauacaugac

SEQ ID NO: 260151 - RNA, 21 nt, Artificial Sequence
  Synthetic
ugaggaagcauuauacaugac

SEQ ID NO: 260152 - RNA, 22 nt, Artificial Sequence
  Synthetic
augaggaagcauuauacaugac

SEQ ID NO: 260153 - RNA, 23 nt, Artificial Sequence
  Synthetic
gaugaggaagcauuauacaugac

SEQ ID NO: 260154 - RNA, 24 nt, Artificial Sequence
  Synthetic
agaugaggaagcauuauacaugac

SEQ ID NO: 260155 - RNA, 18 nt, Artificial Sequence
  Synthetic
ucaucuuucauccaugac

SEQ ID NO: 260156 - RNA, 19 nt, Artificial Sequence
  Synthetic
uucaucuuucauccaugac

SEQ ID NO: 260157 - RNA, 20 nt, Artificial Sequence
  Synthetic
auucaucuuucauccaugac

SEQ ID NO: 260158 - RNA, 21 nt, Artificial Sequence
  Synthetic
aauucaucuuucauccaugac

SEQ ID NO: 260159 - RNA, 22 nt, Artificial Sequence
  Synthetic
aaauucaucuuucauccaugac

SEQ ID NO: 260160 - RNA, 23 nt, Artificial Sequence
  Synthetic
uaaauucaucuuucauccaugac

SEQ ID NO: 260161 - RNA, 24 nt, Artificial Sequence
  Synthetic
cuaaauucaucuuucauccaugac

SEQ ID NO: 260162 - RNA, 18 nt, Artificial Sequence
  Synthetic
agaacuaggcagcaugac

SEQ ID NO: 260163 - RNA, 19 nt, Artificial Sequence
  Synthetic
aagaacuaggcagcaugac

SEQ ID NO: 260164 - RNA, 20 nt, Artificial Sequence
  Synthetic
caagaacuaggcagcaugac

SEQ ID NO: 260165 - RNA, 21 nt, Artificial Sequence
  Synthetic
ccaagaacuaggcagcaugac

SEQ ID NO: 260166 - RNA, 22 nt, Artificial Sequence
  Synthetic
uccaagaacuaggcagcaugac

SEQ ID NO: 260167 - RNA, 23 nt, Artificial Sequence
  Synthetic
cuccaagaacuaggcagcaugac

SEQ ID NO: 260168 - RNA, 24 nt, Artificial Sequence
  Synthetic
acuccaagaacuaggcagcaugac

SEQ ID NO: 260169 - RNA, 18 nt, Artificial Sequence
  Synthetic
acuguaguauggcaugac

SEQ ID NO: 260170 - RNA, 19 nt, Artificial Sequence
  Synthetic
gacuguaguauggcaugac

SEQ ID NO: 260171 - RNA, 20 nt, Artificial Sequence
  Synthetic
agacuguaguauggcaugac

SEQ ID NO: 260172 - RNA, 21 nt, Artificial Sequence
  Synthetic
uagacuguaguauggcaugac

SEQ ID NO: 260173 - RNA, 22 nt, Artificial Sequence
  Synthetic
auagacuguaguauggcaugac

SEQ ID NO: 260174 - RNA, 23 nt, Artificial Sequence
  Synthetic
aauagacuguaguauggcaugac

SEQ ID NO: 260175 - RNA, 24 nt, Artificial Sequence
  Synthetic
uaauagacuguaguauggcaugac

SEQ ID NO: 260176 - RNA, 18 nt, Artificial Sequence
  Synthetic
cucaauaaagugcaugac

SEQ ID NO: 260177 - RNA, 19 nt, Artificial Sequence
  Synthetic
ucucaauaaagugcaugac

SEQ ID NO: 260178 - RNA, 20 nt, Artificial Sequence
  Synthetic
uucucaauaaagugcaugac

SEQ ID NO: 260179 - RNA, 21 nt, Artificial Sequence
  Synthetic
uuucucaauaaagugcaugac

SEQ ID NO: 260180 - RNA, 22 nt, Artificial Sequence
  Synthetic
uuuucucaauaaagugcaugac

SEQ ID NO: 260181 - RNA, 23 nt, Artificial Sequence
  Synthetic
uuuuucucaauaaagugcaugac

SEQ ID NO: 260182 - RNA, 24 nt, Artificial Sequence
  Synthetic
auuuuucucaauaaagugcaugac

SEQ ID NO: 260183 - RNA, 18 nt, Artificial Sequence
  Synthetic
gaguugaggaaucaugac

SEQ ID NO: 260184 - RNA, 19 nt, Artificial Sequence
  Synthetic
ggaguugaggaaucaugac

SEQ ID NO: 260185 - RNA, 20 nt, Artificial Sequence
  Synthetic
gggaguugaggaaucaugac

SEQ ID NO: 260186 - RNA, 21 nt, Artificial Sequence
  Synthetic
ugggaguugaggaaucaugac

SEQ ID NO: 260187 - RNA, 22 nt, Artificial Sequence
  Synthetic
uugggaguugaggaaucaugac

SEQ ID NO: 260188 - RNA, 23 nt, Artificial Sequence
  Synthetic
cuugggaguugaggaaucaugac

SEQ ID NO: 260189 - RNA, 24 nt, Artificial Sequence
  Synthetic
gcuugggaguugaggaaucaugac

SEQ ID NO: 260190 - RNA, 18 nt, Artificial Sequence
  Synthetic
ggagggcuagaagaugac

SEQ ID NO: 260191 - RNA, 19 nt, Artificial Sequence
  Synthetic
uggagggcuagaagaugac

SEQ ID NO: 260192 - RNA, 20 nt, Artificial Sequence
  Synthetic
uuggagggcuagaagaugac

SEQ ID NO: 260193 - RNA, 21 nt, Artificial Sequence
  Synthetic
uuuggagggcuagaagaugac

SEQ ID NO: 260194 - RNA, 22 nt, Artificial Sequence
  Synthetic
guuuggagggcuagaagaugac

SEQ ID NO: 260195 - RNA, 23 nt, Artificial Sequence
  Synthetic
aguuuggagggcuagaagaugac

SEQ ID NO: 260196 - RNA, 24 nt, Artificial Sequence
  Synthetic
caguuuggagggcuagaagaugac

SEQ ID NO: 260197 - RNA, 18 nt, Artificial Sequence
  Synthetic
ucuagggcugucgaugac

SEQ ID NO: 260198 - RNA, 19 nt, Artificial Sequence
  Synthetic
cucuagggcugucgaugac

SEQ ID NO: 260199 - RNA, 20 nt, Artificial Sequence
  Synthetic
ucucuagggcugucgaugac

SEQ ID NO: 260200 - RNA, 21 nt, Artificial Sequence
  Synthetic
uucucuagggcugucgaugac

SEQ ID NO: 260201 - RNA, 22 nt, Artificial Sequence
  Synthetic
cuucucuagggcugucgaugac

SEQ ID NO: 260202 - RNA, 23 nt, Artificial Sequence
  Synthetic
acuucucuagggcugucgaugac

SEQ ID NO: 260203 - RNA, 24 nt, Artificial Sequence
  Synthetic
aacuucucuagggcugucgaugac

SEQ ID NO: 260204 - RNA, 18 nt, Artificial Sequence
  Synthetic
uguuuccuuaaugaugac

SEQ ID NO: 260205 - RNA, 19 nt, Artificial Sequence
  Synthetic
uuguuuccuuaaugaugac

SEQ ID NO: 260206 - RNA, 20 nt, Artificial Sequence
  Synthetic
uuuguuuccuuaaugaugac

SEQ ID NO: 260207 - RNA, 21 nt, Artificial Sequence
  Synthetic
cuuuguuuccuuaaugaugac

SEQ ID NO: 260208 - RNA, 22 nt, Artificial Sequence
  Synthetic
acuuuguuuccuuaaugaugac

SEQ ID NO: 260209 - RNA, 23 nt, Artificial Sequence
  Synthetic
gacuuuguuuccuuaaugaugac

SEQ ID NO: 260210 - RNA, 24 nt, Artificial Sequence
  Synthetic
ggacuuuguuuccuuaaugaugac

SEQ ID NO: 260211 - RNA, 18 nt, Artificial Sequence
  Synthetic
guuuugaaaugugaugac

SEQ ID NO: 260212 - RNA, 19 nt, Artificial Sequence
  Synthetic
uguuuugaaaugugaugac

SEQ ID NO: 260213 - RNA, 20 nt, Artificial Sequence
  Synthetic
guguuuugaaaugugaugac

SEQ ID NO: 260214 - RNA, 21 nt, Artificial Sequence
  Synthetic
uguguuuugaaaugugaugac

SEQ ID NO: 260215 - RNA, 22 nt, Artificial Sequence
  Synthetic
uuguguuuugaaaugugaugac

SEQ ID NO: 260216 - RNA, 23 nt, Artificial Sequence
  Synthetic
auuguguuuugaaaugugaugac

SEQ ID NO: 260217 - RNA, 24 nt, Artificial Sequence
  Synthetic
uauuguguuuugaaaugugaugac

SEQ ID NO: 260218 - RNA, 18 nt, Artificial Sequence
  Synthetic
auuucaggaauugaugac

SEQ ID NO: 260219 - RNA, 19 nt, Artificial Sequence
  Synthetic
uauuucaggaauugaugac

SEQ ID NO: 260220 - RNA, 20 nt, Artificial Sequence
  Synthetic
guauuucaggaauugaugac

SEQ ID NO: 260221 - RNA, 21 nt, Artificial Sequence
  Synthetic
gguauuucaggaauugaugac

SEQ ID NO: 260222 - RNA, 22 nt, Artificial Sequence
  Synthetic
ggguauuucaggaauugaugac

SEQ ID NO: 260223 - RNA, 23 nt, Artificial Sequence
  Synthetic
aggguauuucaggaauugaugac

SEQ ID NO: 260224 - RNA, 24 nt, Artificial Sequence
  Synthetic
aaggguauuucaggaauugaugac

SEQ ID NO: 260225 - RNA, 18 nt, Artificial Sequence
  Synthetic
aaucauagauuugaugac

SEQ ID NO: 260226 - RNA, 19 nt, Artificial Sequence
  Synthetic
aaaucauagauuugaugac

SEQ ID NO: 260227 - RNA, 20 nt, Artificial Sequence
  Synthetic
aaaaucauagauuugaugac

SEQ ID NO: 260228 - RNA, 21 nt, Artificial Sequence
  Synthetic
uaaaaucauagauuugaugac

SEQ ID NO: 260229 - RNA, 22 nt, Artificial Sequence
  Synthetic
auaaaaucauagauuugaugac

SEQ ID NO: 260230 - RNA, 23 nt, Artificial Sequence
  Synthetic
cauaaaaucauagauuugaugac

SEQ ID NO: 260231 - RNA, 24 nt, Artificial Sequence
  Synthetic
acauaaaaucauagauuugaugac

SEQ ID NO: 260232 - RNA, 18 nt, Artificial Sequence
  Synthetic
uucaacagcuuauaugac

SEQ ID NO: 260233 - RNA, 19 nt, Artificial Sequence
  Synthetic
cuucaacagcuuauaugac

SEQ ID NO: 260234 - RNA, 20 nt, Artificial Sequence
  Synthetic
ucuucaacagcuuauaugac

SEQ ID NO: 260235 - RNA, 21 nt, Artificial Sequence
  Synthetic
uucuucaacagcuuauaugac

SEQ ID NO: 260236 - RNA, 22 nt, Artificial Sequence
  Synthetic
uuucuucaacagcuuauaugac

SEQ ID NO: 260237 - RNA, 23 nt, Artificial Sequence
  Synthetic
guuucuucaacagcuuauaugac

SEQ ID NO: 260238 - RNA, 24 nt, Artificial Sequence
  Synthetic
uguuucuucaacagcuuauaugac

SEQ ID NO: 260239 - RNA, 18 nt, Artificial Sequence
  Synthetic
cuuagcccaggcuaugac

SEQ ID NO: 260240 - RNA, 19 nt, Artificial Sequence
  Synthetic
ucuuagcccaggcuaugac

SEQ ID NO: 260241 - RNA, 20 nt, Artificial Sequence
  Synthetic
cucuuagcccaggcuaugac

SEQ ID NO: 260242 - RNA, 21 nt, Artificial Sequence
  Synthetic
gcucuuagcccaggcuaugac

SEQ ID NO: 260243 - RNA, 22 nt, Artificial Sequence
  Synthetic
agcucuuagcccaggcuaugac

SEQ ID NO: 260244 - RNA, 23 nt, Artificial Sequence
  Synthetic
uagcucuuagcccaggcuaugac

SEQ ID NO: 260245 - RNA, 24 nt, Artificial Sequence
  Synthetic
cuagcucuuagcccaggcuaugac

SEQ ID NO: 260246 - RNA, 18 nt, Artificial Sequence
  Synthetic
uaaguucuugguuaugac

SEQ ID NO: 260247 - RNA, 19 nt, Artificial Sequence
  Synthetic
uuaaguucuugguuaugac

SEQ ID NO: 260248 - RNA, 20 nt, Artificial Sequence
  Synthetic
cuuaaguucuugguuaugac

SEQ ID NO: 260249 - RNA, 21 nt, Artificial Sequence
  Synthetic
acuuaaguucuugguuaugac

SEQ ID NO: 260250 - RNA, 22 nt, Artificial Sequence
  Synthetic
uacuuaaguucuugguuaugac

SEQ ID NO: 260251 - RNA, 23 nt, Artificial Sequence
  Synthetic
guacuuaaguucuugguuaugac

SEQ ID NO: 260252 - RNA, 24 nt, Artificial Sequence
  Synthetic
aguacuuaaguucuugguuaugac

SEQ ID NO: 260253 - RNA, 18 nt, Artificial Sequence
  Synthetic
uuuaugcuuuguuaugac

SEQ ID NO: 260254 - RNA, 19 nt, Artificial Sequence
  Synthetic
uuuuaugcuuuguuaugac

SEQ ID NO: 260255 - RNA, 20 nt, Artificial Sequence
  Synthetic
cuuuuaugcuuuguuaugac

SEQ ID NO: 260256 - RNA, 21 nt, Artificial Sequence
  Synthetic
ccuuuuaugcuuuguuaugac

SEQ ID NO: 260257 - RNA, 22 nt, Artificial Sequence
  Synthetic
uccuuuuaugcuuuguuaugac

SEQ ID NO: 260258 - RNA, 23 nt, Artificial Sequence
  Synthetic
uuccuuuuaugcuuuguuaugac

SEQ ID NO: 260259 - RNA, 24 nt, Artificial Sequence
  Synthetic
cuuccuuuuaugcuuuguuaugac

SEQ ID NO: 260260 - RNA, 18 nt, Artificial Sequence
  Synthetic
cucagucucuuuuaugac

SEQ ID NO: 260261 - RNA, 19 nt, Artificial Sequence
  Synthetic
ccucagucucuuuuaugac

SEQ ID NO: 260262 - RNA, 20 nt, Artificial Sequence
  Synthetic
gccucagucucuuuuaugac

SEQ ID NO: 260263 - RNA, 21 nt, Artificial Sequence
  Synthetic
ugccucagucucuuuuaugac

SEQ ID NO: 260264 - RNA, 22 nt, Artificial Sequence
  Synthetic
cugccucagucucuuuuaugac

SEQ ID NO: 260265 - RNA, 23 nt, Artificial Sequence
  Synthetic
ucugccucagucucuuuuaugac

SEQ ID NO: 260266 - RNA, 24 nt, Artificial Sequence
  Synthetic
uucugccucagucucuuuuaugac

SEQ ID NO: 260267 - RNA, 18 nt, Artificial Sequence
  Synthetic
aggugacuaaaaacugac

SEQ ID NO: 260268 - RNA, 19 nt, Artificial Sequence
  Synthetic
caggugacuaaaaacugac

SEQ ID NO: 260269 - RNA, 20 nt, Artificial Sequence
  Synthetic
ccaggugacuaaaaacugac

SEQ ID NO: 260270 - RNA, 21 nt, Artificial Sequence
  Synthetic
cccaggugacuaaaaacugac

SEQ ID NO: 260271 - RNA, 22 nt, Artificial Sequence
  Synthetic
ucccaggugacuaaaaacugac

SEQ ID NO: 260272 - RNA, 23 nt, Artificial Sequence
  Synthetic
aucccaggugacuaaaaacugac

SEQ ID NO: 260273 - RNA, 24 nt, Artificial Sequence
  Synthetic
aaucccaggugacuaaaaacugac

SEQ ID NO: 260274 - RNA, 18 nt, Artificial Sequence
  Synthetic
uauauuugaaacacugac

SEQ ID NO: 260275 - RNA, 19 nt, Artificial Sequence
  Synthetic
auauauuugaaacacugac

SEQ ID NO: 260276 - RNA, 20 nt, Artificial Sequence
  Synthetic
aauauauuugaaacacugac

SEQ ID NO: 260277 - RNA, 21 nt, Artificial Sequence
  Synthetic
aaauauauuugaaacacugac

SEQ ID NO: 260278 - RNA, 22 nt, Artificial Sequence
  Synthetic
aaaauauauuugaaacacugac

SEQ ID NO: 260279 - RNA, 23 nt, Artificial Sequence
  Synthetic
uaaaauauauuugaaacacugac

SEQ ID NO: 260280 - RNA, 24 nt, Artificial Sequence
  Synthetic
uuaaaauauauuugaaacacugac

SEQ ID NO: 260281 - RNA, 18 nt, Artificial Sequence
  Synthetic
cuauaauuucacacugac

SEQ ID NO: 260282 - RNA, 19 nt, Artificial Sequence
  Synthetic
ccuauaauuucacacugac

SEQ ID NO: 260283 - RNA, 20 nt, Artificial Sequence
  Synthetic
uccuauaauuucacacugac

SEQ ID NO: 260284 - RNA, 21 nt, Artificial Sequence
  Synthetic
cuccuauaauuucacacugac

SEQ ID NO: 260285 - RNA, 22 nt, Artificial Sequence
  Synthetic
ccuccuauaauuucacacugac

SEQ ID NO: 260286 - RNA, 23 nt, Artificial Sequence
  Synthetic
gccuccuauaauuucacacugac

SEQ ID NO: 260287 - RNA, 24 nt, Artificial Sequence
  Synthetic
ugccuccuauaauuucacacugac

SEQ ID NO: 260288 - RNA, 18 nt, Artificial Sequence
  Synthetic
uguucacauagcacugac

SEQ ID NO: 260289 - RNA, 19 nt, Artificial Sequence
  Synthetic
auguucacauagcacugac

SEQ ID NO: 260290 - RNA, 20 nt, Artificial Sequence
  Synthetic
uauguucacauagcacugac

SEQ ID NO: 260291 - RNA, 21 nt, Artificial Sequence
  Synthetic
auauguucacauagcacugac

SEQ ID NO: 260292 - RNA, 22 nt, Artificial Sequence
  Synthetic
uauauguucacauagcacugac

SEQ ID NO: 260293 - RNA, 23 nt, Artificial Sequence
  Synthetic
auauauguucacauagcacugac

SEQ ID NO: 260294 - RNA, 24 nt, Artificial Sequence
  Synthetic
uauauauguucacauagcacugac

SEQ ID NO: 260295 - RNA, 18 nt, Artificial Sequence
  Synthetic
gccaaagugaagacugac

SEQ ID NO: 260296 - RNA, 19 nt, Artificial Sequence
  Synthetic
ugccaaagugaagacugac

SEQ ID NO: 260297 - RNA, 20 nt, Artificial Sequence
  Synthetic
augccaaagugaagacugac

SEQ ID NO: 260298 - RNA, 21 nt, Artificial Sequence
  Synthetic
aaugccaaagugaagacugac

SEQ ID NO: 260299 - RNA, 22 nt, Artificial Sequence
  Synthetic
aaaugccaaagugaagacugac

SEQ ID NO: 260300 - RNA, 23 nt, Artificial Sequence
  Synthetic
caaaugccaaagugaagacugac

SEQ ID NO: 260301 - RNA, 24 nt, Artificial Sequence
  Synthetic
ucaaaugccaaagugaagacugac

SEQ ID NO: 260302 - RNA, 18 nt, Artificial Sequence
  Synthetic
cagaguuaaaauacugac

SEQ ID NO: 260303 - RNA, 19 nt, Artificial Sequence
  Synthetic
gcagaguuaaaauacugac

SEQ ID NO: 260304 - RNA, 20 nt, Artificial Sequence
  Synthetic
agcagaguuaaaauacugac

SEQ ID NO: 260305 - RNA, 21 nt, Artificial Sequence
  Synthetic
uagcagaguuaaaauacugac

SEQ ID NO: 260306 - RNA, 22 nt, Artificial Sequence
  Synthetic
guagcagaguuaaaauacugac

SEQ ID NO: 260307 - RNA, 23 nt, Artificial Sequence
  Synthetic
aguagcagaguuaaaauacugac

SEQ ID NO: 260308 - RNA, 24 nt, Artificial Sequence
  Synthetic
caguagcagaguuaaaauacugac

SEQ ID NO: 260309 - RNA, 18 nt, Artificial Sequence
  Synthetic
auuuuauuauuuacugac

SEQ ID NO: 260310 - RNA, 19 nt, Artificial Sequence
  Synthetic
aauuuuauuauuuacugac

SEQ ID NO: 260311 - RNA, 20 nt, Artificial Sequence
  Synthetic
caauuuuauuauuuacugac

SEQ ID NO: 260312 - RNA, 21 nt, Artificial Sequence
  Synthetic
acaauuuuauuauuuacugac

SEQ ID NO: 260313 - RNA, 22 nt, Artificial Sequence
  Synthetic
cacaauuuuauuauuuacugac

SEQ ID NO: 260314 - RNA, 23 nt, Artificial Sequence
  Synthetic
ucacaauuuuauuauuuacugac

SEQ ID NO: 260315 - RNA, 24 nt, Artificial Sequence
  Synthetic
gucacaauuuuauuauuuacugac

SEQ ID NO: 260316 - RNA, 18 nt, Artificial Sequence
  Synthetic
ggccacuguuuuacugac

SEQ ID NO: 260317 - RNA, 19 nt, Artificial Sequence
  Synthetic
uggccacuguuuuacugac

SEQ ID NO: 260318 - RNA, 20 nt, Artificial Sequence
  Synthetic
auggccacuguuuuacugac

SEQ ID NO: 260319 - RNA, 21 nt, Artificial Sequence
  Synthetic
cauggccacuguuuuacugac

SEQ ID NO: 260320 - RNA, 22 nt, Artificial Sequence
  Synthetic
ccauggccacuguuuuacugac

SEQ ID NO: 260321 - RNA, 23 nt, Artificial Sequence
  Synthetic
uccauggccacuguuuuacugac

SEQ ID NO: 260322 - RNA, 24 nt, Artificial Sequence
  Synthetic
uuccauggccacuguuuuacugac

SEQ ID NO: 260323 - RNA, 18 nt, Artificial Sequence
  Synthetic
acccccgugccuccugac

SEQ ID NO: 260324 - RNA, 19 nt, Artificial Sequence
  Synthetic
gacccccgugccuccugac

SEQ ID NO: 260325 - RNA, 20 nt, Artificial Sequence
  Synthetic
ugacccccgugccuccugac

SEQ ID NO: 260326 - RNA, 21 nt, Artificial Sequence
  Synthetic
cugacccccgugccuccugac

SEQ ID NO: 260327 - RNA, 22 nt, Artificial Sequence
  Synthetic
ccugacccccgugccuccugac

SEQ ID NO: 260328 - RNA, 23 nt, Artificial Sequence
  Synthetic
uccugacccccgugccuccugac

SEQ ID NO: 260329 - RNA, 24 nt, Artificial Sequence
  Synthetic
guccugacccccgugccuccugac

SEQ ID NO: 260330 - RNA, 18 nt, Artificial Sequence
  Synthetic
auaaaguuccuuccugac

SEQ ID NO: 260331 - RNA, 19 nt, Artificial Sequence
  Synthetic
uauaaaguuccuuccugac

SEQ ID NO: 260332 - RNA, 20 nt, Artificial Sequence
  Synthetic
auauaaaguuccuuccugac

SEQ ID NO: 260333 - RNA, 21 nt, Artificial Sequence
  Synthetic
cauauaaaguuccuuccugac

SEQ ID NO: 260334 - RNA, 22 nt, Artificial Sequence
  Synthetic
gcauauaaaguuccuuccugac

SEQ ID NO: 260335 - RNA, 23 nt, Artificial Sequence
  Synthetic
ggcauauaaaguuccuuccugac

SEQ ID NO: 260336 - RNA, 24 nt, Artificial Sequence
  Synthetic
aggcauauaaaguuccuuccugac

SEQ ID NO: 260337 - RNA, 18 nt, Artificial Sequence
  Synthetic
ggaggaccacaagcugac

SEQ ID NO: 260338 - RNA, 19 nt, Artificial Sequence
  Synthetic
gggaggaccacaagcugac

SEQ ID NO: 260339 - RNA, 20 nt, Artificial Sequence
  Synthetic
ugggaggaccacaagcugac

SEQ ID NO: 260340 - RNA, 21 nt, Artificial Sequence
  Synthetic
uugggaggaccacaagcugac

SEQ ID NO: 260341 - RNA, 22 nt, Artificial Sequence
  Synthetic
auugggaggaccacaagcugac

SEQ ID NO: 260342 - RNA, 23 nt, Artificial Sequence
  Synthetic
gauugggaggaccacaagcugac

SEQ ID NO: 260343 - RNA, 24 nt, Artificial Sequence
  Synthetic
ggauugggaggaccacaagcugac

SEQ ID NO: 260344 - RNA, 18 nt, Artificial Sequence
  Synthetic
cagucgcuggaggcugac

SEQ ID NO: 260345 - RNA, 19 nt, Artificial Sequence
  Synthetic
acagucgcuggaggcugac

SEQ ID NO: 260346 - RNA, 20 nt, Artificial Sequence
  Synthetic
uacagucgcuggaggcugac

SEQ ID NO: 260347 - RNA, 21 nt, Artificial Sequence
  Synthetic
cuacagucgcuggaggcugac

SEQ ID NO: 260348 - RNA, 22 nt, Artificial Sequence
  Synthetic
ccuacagucgcuggaggcugac

SEQ ID NO: 260349 - RNA, 23 nt, Artificial Sequence
  Synthetic
accuacagucgcuggaggcugac

SEQ ID NO: 260350 - RNA, 24 nt, Artificial Sequence
  Synthetic
caccuacagucgcuggaggcugac

SEQ ID NO: 260351 - RNA, 18 nt, Artificial Sequence
  Synthetic
guaaauguuaccucugac

SEQ ID NO: 260352 - RNA, 19 nt, Artificial Sequence
  Synthetic
uguaaauguuaccucugac

SEQ ID NO: 260353 - RNA, 20 nt, Artificial Sequence
  Synthetic
cuguaaauguuaccucugac

SEQ ID NO: 260354 - RNA, 21 nt, Artificial Sequence
  Synthetic
ucuguaaauguuaccucugac

SEQ ID NO: 260355 - RNA, 22 nt, Artificial Sequence
  Synthetic
uucuguaaauguuaccucugac

SEQ ID NO: 260356 - RNA, 23 nt, Artificial Sequence
  Synthetic
uuucuguaaauguuaccucugac

SEQ ID NO: 260357 - RNA, 24 nt, Artificial Sequence
  Synthetic
auuucuguaaauguuaccucugac

SEQ ID NO: 260358 - RNA, 18 nt, Artificial Sequence
  Synthetic
acccacauugccucugac

SEQ ID NO: 260359 - RNA, 19 nt, Artificial Sequence
  Synthetic
gacccacauugccucugac

SEQ ID NO: 260360 - RNA, 20 nt, Artificial Sequence
  Synthetic
ugacccacauugccucugac

SEQ ID NO: 260361 - RNA, 21 nt, Artificial Sequence
  Synthetic
augacccacauugccucugac

SEQ ID NO: 260362 - RNA, 22 nt, Artificial Sequence
  Synthetic
caugacccacauugccucugac

SEQ ID NO: 260363 - RNA, 23 nt, Artificial Sequence
  Synthetic
gcaugacccacauugccucugac

SEQ ID NO: 260364 - RNA, 24 nt, Artificial Sequence
  Synthetic
agcaugacccacauugccucugac

SEQ ID NO: 260365 - RNA, 18 nt, Artificial Sequence
  Synthetic
aaaaguacaugcucugac

SEQ ID NO: 260366 - RNA, 19 nt, Artificial Sequence
  Synthetic
aaaaaguacaugcucugac

SEQ ID NO: 260367 - RNA, 20 nt, Artificial Sequence
  Synthetic
gaaaaaguacaugcucugac

SEQ ID NO: 260368 - RNA, 21 nt, Artificial Sequence
  Synthetic
agaaaaaguacaugcucugac

SEQ ID NO: 260369 - RNA, 22 nt, Artificial Sequence
  Synthetic
uagaaaaaguacaugcucugac

SEQ ID NO: 260370 - RNA, 23 nt, Artificial Sequence
  Synthetic
uuagaaaaaguacaugcucugac

SEQ ID NO: 260371 - RNA, 24 nt, Artificial Sequence
  Synthetic
cuuagaaaaaguacaugcucugac

SEQ ID NO: 260372 - RNA, 18 nt, Artificial Sequence
  Synthetic
aagggcacauagucugac

SEQ ID NO: 260373 - RNA, 19 nt, Artificial Sequence
  Synthetic
gaagggcacauagucugac

SEQ ID NO: 260374 - RNA, 20 nt, Artificial Sequence
  Synthetic
cgaagggcacauagucugac

SEQ ID NO: 260375 - RNA, 21 nt, Artificial Sequence
  Synthetic
gcgaagggcacauagucugac

SEQ ID NO: 260376 - RNA, 22 nt, Artificial Sequence
  Synthetic
ugcgaagggcacauagucugac

SEQ ID NO: 260377 - RNA, 23 nt, Artificial Sequence
  Synthetic
uugcgaagggcacauagucugac

SEQ ID NO: 260378 - RNA, 24 nt, Artificial Sequence
  Synthetic
cuugcgaagggcacauagucugac

SEQ ID NO: 260379 - RNA, 18 nt, Artificial Sequence
  Synthetic
ugggauaccuagucugac

SEQ ID NO: 260380 - RNA, 19 nt, Artificial Sequence
  Synthetic
cugggauaccuagucugac

SEQ ID NO: 260381 - RNA, 20 nt, Artificial Sequence
  Synthetic
ucugggauaccuagucugac

SEQ ID NO: 260382 - RNA, 21 nt, Artificial Sequence
  Synthetic
cucugggauaccuagucugac

SEQ ID NO: 260383 - RNA, 22 nt, Artificial Sequence
  Synthetic
ccucugggauaccuagucugac

SEQ ID NO: 260384 - RNA, 23 nt, Artificial Sequence
  Synthetic
accucugggauaccuagucugac

SEQ ID NO: 260385 - RNA, 24 nt, Artificial Sequence
  Synthetic
caccucugggauaccuagucugac

SEQ ID NO: 260386 - RNA, 18 nt, Artificial Sequence
  Synthetic
uaauauauguauucugac

SEQ ID NO: 260387 - RNA, 19 nt, Artificial Sequence
  Synthetic
cuaauauauguauucugac

SEQ ID NO: 260388 - RNA, 20 nt, Artificial Sequence
  Synthetic
ucuaauauauguauucugac

SEQ ID NO: 260389 - RNA, 21 nt, Artificial Sequence
  Synthetic
aucuaauauauguauucugac

SEQ ID NO: 260390 - RNA, 22 nt, Artificial Sequence
  Synthetic
aaucuaauauauguauucugac

SEQ ID NO: 260391 - RNA, 23 nt, Artificial Sequence
  Synthetic
caaucuaauauauguauucugac

SEQ ID NO: 260392 - RNA, 24 nt, Artificial Sequence
  Synthetic
gcaaucuaauauauguauucugac

SEQ ID NO: 260393 - RNA, 18 nt, Artificial Sequence
  Synthetic
ccagaguuaucuucugac

SEQ ID NO: 260394 - RNA, 19 nt, Artificial Sequence
  Synthetic
gccagaguuaucuucugac

SEQ ID NO: 260395 - RNA, 20 nt, Artificial Sequence
  Synthetic
agccagaguuaucuucugac

SEQ ID NO: 260396 - RNA, 21 nt, Artificial Sequence
  Synthetic
cagccagaguuaucuucugac

SEQ ID NO: 260397 - RNA, 22 nt, Artificial Sequence
  Synthetic
ucagccagaguuaucuucugac

SEQ ID NO: 260398 - RNA, 23 nt, Artificial Sequence
  Synthetic
cucagccagaguuaucuucugac

SEQ ID NO: 260399 - RNA, 24 nt, Artificial Sequence
  Synthetic
ccucagccagaguuaucuucugac

SEQ ID NO: 260400 - RNA, 18 nt, Artificial Sequence
  Synthetic
uacggcagaauuucugac

SEQ ID NO: 260401 - RNA, 19 nt, Artificial Sequence
  Synthetic
auacggcagaauuucugac

SEQ ID NO: 260402 - RNA, 20 nt, Artificial Sequence
  Synthetic
aauacggcagaauuucugac

SEQ ID NO: 260403 - RNA, 21 nt, Artificial Sequence
  Synthetic
gaauacggcagaauuucugac

SEQ ID NO: 260404 - RNA, 22 nt, Artificial Sequence
  Synthetic
ugaauacggcagaauuucugac

SEQ ID NO: 260405 - RNA, 23 nt, Artificial Sequence
  Synthetic
uugaauacggcagaauuucugac

SEQ ID NO: 260406 - RNA, 24 nt, Artificial Sequence
  Synthetic
auugaauacggcagaauuucugac

SEQ ID NO: 260407 - RNA, 18 nt, Artificial Sequence
  Synthetic
ccaugucuacuuucugac

SEQ ID NO: 260408 - RNA, 19 nt, Artificial Sequence
  Synthetic
gccaugucuacuuucugac

SEQ ID NO: 260409 - RNA, 20 nt, Artificial Sequence
  Synthetic
ugccaugucuacuuucugac

SEQ ID NO: 260410 - RNA, 21 nt, Artificial Sequence
  Synthetic
uugccaugucuacuuucugac

SEQ ID NO: 260411 - RNA, 22 nt, Artificial Sequence
  Synthetic
uuugccaugucuacuuucugac

SEQ ID NO: 260412 - RNA, 23 nt, Artificial Sequence
  Synthetic
guuugccaugucuacuuucugac

SEQ ID NO: 260413 - RNA, 24 nt, Artificial Sequence
  Synthetic
aguuugccaugucuacuuucugac

SEQ ID NO: 260414 - RNA, 18 nt, Artificial Sequence
  Synthetic
uaaaugucucuuucugac

SEQ ID NO: 260415 - RNA, 19 nt, Artificial Sequence
  Synthetic
guaaaugucucuuucugac

SEQ ID NO: 260416 - RNA, 20 nt, Artificial Sequence
  Synthetic
uguaaaugucucuuucugac

SEQ ID NO: 260417 - RNA, 21 nt, Artificial Sequence
  Synthetic
uuguaaaugucucuuucugac

SEQ ID NO: 260418 - RNA, 22 nt, Artificial Sequence
  Synthetic
uuuguaaaugucucuuucugac

SEQ ID NO: 260419 - RNA, 23 nt, Artificial Sequence
  Synthetic
auuuguaaaugucucuuucugac

SEQ ID NO: 260420 - RNA, 24 nt, Artificial Sequence
  Synthetic
aauuuguaaaugucucuuucugac

SEQ ID NO: 260421 - RNA, 18 nt, Artificial Sequence
  Synthetic
ccagagagaaaaagugac

SEQ ID NO: 260422 - RNA, 19 nt, Artificial Sequence
  Synthetic
gccagagagaaaaagugac

SEQ ID NO: 260423 - RNA, 20 nt, Artificial Sequence
  Synthetic
ugccagagagaaaaagugac

SEQ ID NO: 260424 - RNA, 21 nt, Artificial Sequence
  Synthetic
augccagagagaaaaagugac

SEQ ID NO: 260425 - RNA, 22 nt, Artificial Sequence
  Synthetic
caugccagagagaaaaagugac

SEQ ID NO: 260426 - RNA, 23 nt, Artificial Sequence
  Synthetic
acaugccagagagaaaaagugac

SEQ ID NO: 260427 - RNA, 24 nt, Artificial Sequence
  Synthetic
gacaugccagagagaaaaagugac

SEQ ID NO: 260428 - RNA, 18 nt, Artificial Sequence
  Synthetic
agauagggaaaaagugac

SEQ ID NO: 260429 - RNA, 19 nt, Artificial Sequence
  Synthetic
aagauagggaaaaagugac

SEQ ID NO: 260430 - RNA, 20 nt, Artificial Sequence
  Synthetic
caagauagggaaaaagugac

SEQ ID NO: 260431 - RNA, 21 nt, Artificial Sequence
  Synthetic
acaagauagggaaaaagugac

SEQ ID NO: 260432 - RNA, 22 nt, Artificial Sequence
  Synthetic
aacaagauagggaaaaagugac

SEQ ID NO: 260433 - RNA, 23 nt, Artificial Sequence
  Synthetic
uaacaagauagggaaaaagugac

SEQ ID NO: 260434 - RNA, 24 nt, Artificial Sequence
  Synthetic
cuaacaagauagggaaaaagugac

SEQ ID NO: 260435 - RNA, 18 nt, Artificial Sequence
  Synthetic
ugaaaauguggaagugac

SEQ ID NO: 260436 - RNA, 19 nt, Artificial Sequence
  Synthetic
cugaaaauguggaagugac

SEQ ID NO: 260437 - RNA, 20 nt, Artificial Sequence
  Synthetic
ccugaaaauguggaagugac

SEQ ID NO: 260438 - RNA, 21 nt, Artificial Sequence
  Synthetic
accugaaaauguggaagugac

SEQ ID NO: 260439 - RNA, 22 nt, Artificial Sequence
  Synthetic
uaccugaaaauguggaagugac

SEQ ID NO: 260440 - RNA, 23 nt, Artificial Sequence
  Synthetic
auaccugaaaauguggaagugac

SEQ ID NO: 260441 - RNA, 24 nt, Artificial Sequence
  Synthetic
uauaccugaaaauguggaagugac

SEQ ID NO: 260442 - RNA, 18 nt, Artificial Sequence
  Synthetic
uguagagagacuagugac

SEQ ID NO: 260443 - RNA, 19 nt, Artificial Sequence
  Synthetic
uuguagagagacuagugac

SEQ ID NO: 260444 - RNA, 20 nt, Artificial Sequence
  Synthetic
auuguagagagacuagugac

SEQ ID NO: 260445 - RNA, 21 nt, Artificial Sequence
  Synthetic
cauuguagagagacuagugac

SEQ ID NO: 260446 - RNA, 22 nt, Artificial Sequence
  Synthetic
gcauuguagagagacuagugac

SEQ ID NO: 260447 - RNA, 23 nt, Artificial Sequence
  Synthetic
agcauuguagagagacuagugac

SEQ ID NO: 260448 - RNA, 24 nt, Artificial Sequence
  Synthetic
aagcauuguagagagacuagugac

SEQ ID NO: 260449 - RNA, 18 nt, Artificial Sequence
  Synthetic
cuuuaagcacaaggugac

SEQ ID NO: 260450 - RNA, 19 nt, Artificial Sequence
  Synthetic
gcuuuaagcacaaggugac

SEQ ID NO: 260451 - RNA, 20 nt, Artificial Sequence
  Synthetic
ggcuuuaagcacaaggugac

SEQ ID NO: 260452 - RNA, 21 nt, Artificial Sequence
  Synthetic
gggcuuuaagcacaaggugac

SEQ ID NO: 260453 - RNA, 22 nt, Artificial Sequence
  Synthetic
ggggcuuuaagcacaaggugac

SEQ ID NO: 260454 - RNA, 23 nt, Artificial Sequence
  Synthetic
uggggcuuuaagcacaaggugac

SEQ ID NO: 260455 - RNA, 24 nt, Artificial Sequence
  Synthetic
cuggggcuuuaagcacaaggugac

SEQ ID NO: 260456 - RNA, 18 nt, Artificial Sequence
  Synthetic
uagaugaguaagggugac

SEQ ID NO: 260457 - RNA, 19 nt, Artificial Sequence
  Synthetic
auagaugaguaagggugac

SEQ ID NO: 260458 - RNA, 20 nt, Artificial Sequence
  Synthetic
gauagaugaguaagggugac

SEQ ID NO: 260459 - RNA, 21 nt, Artificial Sequence
  Synthetic
ugauagaugaguaagggugac

SEQ ID NO: 260460 - RNA, 22 nt, Artificial Sequence
  Synthetic
gugauagaugaguaagggugac

SEQ ID NO: 260461 - RNA, 23 nt, Artificial Sequence
  Synthetic
ugugauagaugaguaagggugac

SEQ ID NO: 260462 - RNA, 24 nt, Artificial Sequence
  Synthetic
augugauagaugaguaagggugac

SEQ ID NO: 260463 - RNA, 18 nt, Artificial Sequence
  Synthetic
uaucauaguuugggugac

SEQ ID NO: 260464 - RNA, 19 nt, Artificial Sequence
  Synthetic
auaucauaguuugggugac

SEQ ID NO: 260465 - RNA, 20 nt, Artificial Sequence
  Synthetic
aauaucauaguuugggugac

SEQ ID NO: 260466 - RNA, 21 nt, Artificial Sequence
  Synthetic
uaauaucauaguuugggugac

SEQ ID NO: 260467 - RNA, 22 nt, Artificial Sequence
  Synthetic
auaauaucauaguuugggugac

SEQ ID NO: 260468 - RNA, 23 nt, Artificial Sequence
  Synthetic
gauaauaucauaguuugggugac

SEQ ID NO: 260469 - RNA, 24 nt, Artificial Sequence
  Synthetic
agauaauaucauaguuugggugac

SEQ ID NO: 260470 - RNA, 18 nt, Artificial Sequence
  Synthetic
aauauuuaauuuggugac

SEQ ID NO: 260471 - RNA, 19 nt, Artificial Sequence
  Synthetic
aaauauuuaauuuggugac

SEQ ID NO: 260472 - RNA, 20 nt, Artificial Sequence
  Synthetic
caaauauuuaauuuggugac

SEQ ID NO: 260473 - RNA, 21 nt, Artificial Sequence
  Synthetic
acaaauauuuaauuuggugac

SEQ ID NO: 260474 - RNA, 22 nt, Artificial Sequence
  Synthetic
gacaaauauuuaauuuggugac

SEQ ID NO: 260475 - RNA, 23 nt, Artificial Sequence
  Synthetic
agacaaauauuuaauuuggugac

SEQ ID NO: 260476 - RNA, 24 nt, Artificial Sequence
  Synthetic
aagacaaauauuuaauuuggugac

SEQ ID NO: 260477 - RNA, 18 nt, Artificial Sequence
  Synthetic
uagggcuauuuuggugac

SEQ ID NO: 260478 - RNA, 19 nt, Artificial Sequence
  Synthetic
cuagggcuauuuuggugac

SEQ ID NO: 260479 - RNA, 20 nt, Artificial Sequence
  Synthetic
ucuagggcuauuuuggugac

SEQ ID NO: 260480 - RNA, 21 nt, Artificial Sequence
  Synthetic
aucuagggcuauuuuggugac

SEQ ID NO: 260481 - RNA, 22 nt, Artificial Sequence
  Synthetic
aaucuagggcuauuuuggugac

SEQ ID NO: 260482 - RNA, 23 nt, Artificial Sequence
  Synthetic
aaaucuagggcuauuuuggugac

SEQ ID NO: 260483 - RNA, 24 nt, Artificial Sequence
  Synthetic
uaaaucuagggcuauuuuggugac

SEQ ID NO: 260484 - RNA, 18 nt, Artificial Sequence
  Synthetic
auguauuagaaaugugac

SEQ ID NO: 260485 - RNA, 19 nt, Artificial Sequence
  Synthetic
aauguauuagaaaugugac

SEQ ID NO: 260486 - RNA, 20 nt, Artificial Sequence
  Synthetic
aaauguauuagaaaugugac

SEQ ID NO: 260487 - RNA, 21 nt, Artificial Sequence
  Synthetic
uaaauguauuagaaaugugac

SEQ ID NO: 260488 - RNA, 22 nt, Artificial Sequence
  Synthetic
auaaauguauuagaaaugugac

SEQ ID NO: 260489 - RNA, 23 nt, Artificial Sequence
  Synthetic
gauaaauguauuagaaaugugac

SEQ ID NO: 260490 - RNA, 24 nt, Artificial Sequence
  Synthetic
cgauaaauguauuagaaaugugac

SEQ ID NO: 260491 - RNA, 18 nt, Artificial Sequence
  Synthetic
aauucacaagaaugugac

SEQ ID NO: 260492 - RNA, 19 nt, Artificial Sequence
  Synthetic
gaauucacaagaaugugac

SEQ ID NO: 260493 - RNA, 20 nt, Artificial Sequence
  Synthetic
agaauucacaagaaugugac

SEQ ID NO: 260494 - RNA, 21 nt, Artificial Sequence
  Synthetic
cagaauucacaagaaugugac

SEQ ID NO: 260495 - RNA, 22 nt, Artificial Sequence
  Synthetic
ccagaauucacaagaaugugac

SEQ ID NO: 260496 - RNA, 23 nt, Artificial Sequence
  Synthetic
gccagaauucacaagaaugugac

SEQ ID NO: 260497 - RNA, 24 nt, Artificial Sequence
  Synthetic
agccagaauucacaagaaugugac

SEQ ID NO: 260498 - RNA, 18 nt, Artificial Sequence
  Synthetic
ggcuucagcccaugugac

SEQ ID NO: 260499 - RNA, 19 nt, Artificial Sequence
  Synthetic
aggcuucagcccaugugac

SEQ ID NO: 260500 - RNA, 20 nt, Artificial Sequence
  Synthetic
gaggcuucagcccaugugac

SEQ ID NO: 260501 - RNA, 21 nt, Artificial Sequence
  Synthetic
ugaggcuucagcccaugugac

SEQ ID NO: 260502 - RNA, 22 nt, Artificial Sequence
  Synthetic
cugaggcuucagcccaugugac

SEQ ID NO: 260503 - RNA, 23 nt, Artificial Sequence
  Synthetic
acugaggcuucagcccaugugac

SEQ ID NO: 260504 - RNA, 24 nt, Artificial Sequence
  Synthetic
uacugaggcuucagcccaugugac

SEQ ID NO: 260505 - RNA, 18 nt, Artificial Sequence
  Synthetic
caggcacugugcugugac

SEQ ID NO: 260506 - RNA, 19 nt, Artificial Sequence
  Synthetic
gcaggcacugugcugugac

SEQ ID NO: 260507 - RNA, 20 nt, Artificial Sequence
  Synthetic
ugcaggcacugugcugugac

SEQ ID NO: 260508 - RNA, 21 nt, Artificial Sequence
  Synthetic
uugcaggcacugugcugugac

SEQ ID NO: 260509 - RNA, 22 nt, Artificial Sequence
  Synthetic
guugcaggcacugugcugugac

SEQ ID NO: 260510 - RNA, 23 nt, Artificial Sequence
  Synthetic
uguugcaggcacugugcugugac

SEQ ID NO: 260511 - RNA, 24 nt, Artificial Sequence
  Synthetic
cuguugcaggcacugugcugugac

SEQ ID NO: 260512 - RNA, 18 nt, Artificial Sequence
  Synthetic
uuuaugaaaaugugugac

SEQ ID NO: 260513 - RNA, 19 nt, Artificial Sequence
  Synthetic
auuuaugaaaaugugugac

SEQ ID NO: 260514 - RNA, 20 nt, Artificial Sequence
  Synthetic
cauuuaugaaaaugugugac

SEQ ID NO: 260515 - RNA, 21 nt, Artificial Sequence
  Synthetic
ucauuuaugaaaaugugugac

SEQ ID NO: 260516 - RNA, 22 nt, Artificial Sequence
  Synthetic
aucauuuaugaaaaugugugac

SEQ ID NO: 260517 - RNA, 23 nt, Artificial Sequence
  Synthetic
aaucauuuaugaaaaugugugac

SEQ ID NO: 260518 - RNA, 24 nt, Artificial Sequence
  Synthetic
caaucauuuaugaaaaugugugac

SEQ ID NO: 260519 - RNA, 18 nt, Artificial Sequence
  Synthetic
uuacaaguugauugugac

SEQ ID NO: 260520 - RNA, 19 nt, Artificial Sequence
  Synthetic
auuacaaguugauugugac

SEQ ID NO: 260521 - RNA, 20 nt, Artificial Sequence
  Synthetic
aauuacaaguugauugugac

SEQ ID NO: 260522 - RNA, 21 nt, Artificial Sequence
  Synthetic
caauuacaaguugauugugac

SEQ ID NO: 260523 - RNA, 22 nt, Artificial Sequence
  Synthetic
gcaauuacaaguugauugugac

SEQ ID NO: 260524 - RNA, 23 nt, Artificial Sequence
  Synthetic
agcaauuacaaguugauugugac

SEQ ID NO: 260525 - RNA, 24 nt, Artificial Sequence
  Synthetic
cagcaauuacaaguugauugugac

SEQ ID NO: 260526 - RNA, 18 nt, Artificial Sequence
  Synthetic
aaagagauagaaauugac

SEQ ID NO: 260527 - RNA, 19 nt, Artificial Sequence
  Synthetic
aaaagagauagaaauugac

SEQ ID NO: 260528 - RNA, 20 nt, Artificial Sequence
  Synthetic
uaaaagagauagaaauugac

SEQ ID NO: 260529 - RNA, 21 nt, Artificial Sequence
  Synthetic
auaaaagagauagaaauugac

SEQ ID NO: 260530 - RNA, 22 nt, Artificial Sequence
  Synthetic
aauaaaagagauagaaauugac

SEQ ID NO: 260531 - RNA, 23 nt, Artificial Sequence
  Synthetic
aaauaaaagagauagaaauugac

SEQ ID NO: 260532 - RNA, 24 nt, Artificial Sequence
  Synthetic
uaaauaaaagagauagaaauugac

SEQ ID NO: 260533 - RNA, 18 nt, Artificial Sequence
  Synthetic
uuuuauuuaagaauugac

SEQ ID NO: 260534 - RNA, 19 nt, Artificial Sequence
  Synthetic
auuuuauuuaagaauugac

SEQ ID NO: 260535 - RNA, 20 nt, Artificial Sequence
  Synthetic
aauuuuauuuaagaauugac

SEQ ID NO: 260536 - RNA, 21 nt, Artificial Sequence
  Synthetic
aaauuuuauuuaagaauugac

SEQ ID NO: 260537 - RNA, 22 nt, Artificial Sequence
  Synthetic
aaaauuuuauuuaagaauugac

SEQ ID NO: 260538 - RNA, 23 nt, Artificial Sequence
  Synthetic
aaaaauuuuauuuaagaauugac

SEQ ID NO: 260539 - RNA, 24 nt, Artificial Sequence
  Synthetic
aaaaaauuuuauuuaagaauugac

SEQ ID NO: 260540 - RNA, 18 nt, Artificial Sequence
  Synthetic
gacucugauauaauugac

SEQ ID NO: 260541 - RNA, 19 nt, Artificial Sequence
  Synthetic
agacucugauauaauugac

SEQ ID NO: 260542 - RNA, 20 nt, Artificial Sequence
  Synthetic
gagacucugauauaauugac

SEQ ID NO: 260543 - RNA, 21 nt, Artificial Sequence
  Synthetic
agagacucugauauaauugac

SEQ ID NO: 260544 - RNA, 22 nt, Artificial Sequence
  Synthetic
aagagacucugauauaauugac

SEQ ID NO: 260545 - RNA, 23 nt, Artificial Sequence
  Synthetic
uaagagacucugauauaauugac

SEQ ID NO: 260546 - RNA, 24 nt, Artificial Sequence
  Synthetic
uuaagagacucugauauaauugac

SEQ ID NO: 260547 - RNA, 18 nt, Artificial Sequence
  Synthetic
caauuacaagacauugac

SEQ ID NO: 260548 - RNA, 19 nt, Artificial Sequence
  Synthetic
ccaauuacaagacauugac

SEQ ID NO: 260549 - RNA, 20 nt, Artificial Sequence
  Synthetic
accaauuacaagacauugac

SEQ ID NO: 260550 - RNA, 21 nt, Artificial Sequence
  Synthetic
aaccaauuacaagacauugac

SEQ ID NO: 260551 - RNA, 22 nt, Artificial Sequence
  Synthetic
gaaccaauuacaagacauugac

SEQ ID NO: 260552 - RNA, 23 nt, Artificial Sequence
  Synthetic
agaaccaauuacaagacauugac

SEQ ID NO: 260553 - RNA, 24 nt, Artificial Sequence
  Synthetic
uagaaccaauuacaagacauugac

SEQ ID NO: 260554 - RNA, 18 nt, Artificial Sequence
  Synthetic
uguacauuugccauugac

SEQ ID NO: 260555 - RNA, 19 nt, Artificial Sequence
  Synthetic
uuguacauuugccauugac

SEQ ID NO: 260556 - RNA, 20 nt, Artificial Sequence
  Synthetic
guuguacauuugccauugac

SEQ ID NO: 260557 - RNA, 21 nt, Artificial Sequence
  Synthetic
uguuguacauuugccauugac

SEQ ID NO: 260558 - RNA, 22 nt, Artificial Sequence
  Synthetic
cuguuguacauuugccauugac

SEQ ID NO: 260559 - RNA, 23 nt, Artificial Sequence
  Synthetic
ccuguuguacauuugccauugac

SEQ ID NO: 260560 - RNA, 24 nt, Artificial Sequence
  Synthetic
cccuguuguacauuugccauugac

SEQ ID NO: 260561 - RNA, 18 nt, Artificial Sequence
  Synthetic
cuucaguaauccauugac

SEQ ID NO: 260562 - RNA, 19 nt, Artificial Sequence
  Synthetic
ucuucaguaauccauugac

SEQ ID NO: 260563 - RNA, 20 nt, Artificial Sequence
  Synthetic
cucuucaguaauccauugac

SEQ ID NO: 260564 - RNA, 21 nt, Artificial Sequence
  Synthetic
acucuucaguaauccauugac

SEQ ID NO: 260565 - RNA, 22 nt, Artificial Sequence
  Synthetic
uacucuucaguaauccauugac

SEQ ID NO: 260566 - RNA, 23 nt, Artificial Sequence
  Synthetic
guacucuucaguaauccauugac

SEQ ID NO: 260567 - RNA, 24 nt, Artificial Sequence
  Synthetic
uguacucuucaguaauccauugac

SEQ ID NO: 260568 - RNA, 18 nt, Artificial Sequence
  Synthetic
ccuagcuuuugcauugac

SEQ ID NO: 260569 - RNA, 19 nt, Artificial Sequence
  Synthetic
cccuagcuuuugcauugac

SEQ ID NO: 260570 - RNA, 20 nt, Artificial Sequence
  Synthetic
ccccuagcuuuugcauugac

SEQ ID NO: 260571 - RNA, 21 nt, Artificial Sequence
  Synthetic
cccccuagcuuuugcauugac

SEQ ID NO: 260572 - RNA, 22 nt, Artificial Sequence
  Synthetic
ucccccuagcuuuugcauugac

SEQ ID NO: 260573 - RNA, 23 nt, Artificial Sequence
  Synthetic
uucccccuagcuuuugcauugac

SEQ ID NO: 260574 - RNA, 24 nt, Artificial Sequence
  Synthetic
auucccccuagcuuuugcauugac

SEQ ID NO: 260575 - RNA, 18 nt, Artificial Sequence
  Synthetic
agccauuaucucauugac

SEQ ID NO: 260576 - RNA, 19 nt, Artificial Sequence
  Synthetic
aagccauuaucucauugac

SEQ ID NO: 260577 - RNA, 20 nt, Artificial Sequence
  Synthetic
uaagccauuaucucauugac

SEQ ID NO: 260578 - RNA, 21 nt, Artificial Sequence
  Synthetic
auaagccauuaucucauugac

SEQ ID NO: 260579 - RNA, 22 nt, Artificial Sequence
  Synthetic
cauaagccauuaucucauugac

SEQ ID NO: 260580 - RNA, 23 nt, Artificial Sequence
  Synthetic
gcauaagccauuaucucauugac

SEQ ID NO: 260581 - RNA, 24 nt, Artificial Sequence
  Synthetic
ugcauaagccauuaucucauugac

SEQ ID NO: 260582 - RNA, 18 nt, Artificial Sequence
  Synthetic
auuccaggucugauugac

SEQ ID NO: 260583 - RNA, 19 nt, Artificial Sequence
  Synthetic
aauuccaggucugauugac

SEQ ID NO: 260584 - RNA, 20 nt, Artificial Sequence
  Synthetic
gaauuccaggucugauugac

SEQ ID NO: 260585 - RNA, 21 nt, Artificial Sequence
  Synthetic
agaauuccaggucugauugac

SEQ ID NO: 260586 - RNA, 22 nt, Artificial Sequence
  Synthetic
gagaauuccaggucugauugac

SEQ ID NO: 260587 - RNA, 23 nt, Artificial Sequence
  Synthetic
ggagaauuccaggucugauugac

SEQ ID NO: 260588 - RNA, 24 nt, Artificial Sequence
  Synthetic
aggagaauuccaggucugauugac

SEQ ID NO: 260589 - RNA, 18 nt, Artificial Sequence
  Synthetic
uuugugucgaauauugac

SEQ ID NO: 260590 - RNA, 19 nt, Artificial Sequence
  Synthetic
uuuugugucgaauauugac

SEQ ID NO: 260591 - RNA, 20 nt, Artificial Sequence
  Synthetic
auuuugugucgaauauugac

SEQ ID NO: 260592 - RNA, 21 nt, Artificial Sequence
  Synthetic
cauuuugugucgaauauugac

SEQ ID NO: 260593 - RNA, 22 nt, Artificial Sequence
  Synthetic
ucauuuugugucgaauauugac

SEQ ID NO: 260594 - RNA, 23 nt, Artificial Sequence
  Synthetic
uucauuuugugucgaauauugac

SEQ ID NO: 260595 - RNA, 24 nt, Artificial Sequence
  Synthetic
cuucauuuugugucgaauauugac

SEQ ID NO: 260596 - RNA, 18 nt, Artificial Sequence
  Synthetic
gucauaugauggcuugac

SEQ ID NO: 260597 - RNA, 19 nt, Artificial Sequence
  Synthetic
agucauaugauggcuugac

SEQ ID NO: 260598 - RNA, 20 nt, Artificial Sequence
  Synthetic
cagucauaugauggcuugac

SEQ ID NO: 260599 - RNA, 21 nt, Artificial Sequence
  Synthetic
gcagucauaugauggcuugac

SEQ ID NO: 260600 - RNA, 22 nt, Artificial Sequence
  Synthetic
ugcagucauaugauggcuugac

SEQ ID NO: 260601 - RNA, 23 nt, Artificial Sequence
  Synthetic
cugcagucauaugauggcuugac

SEQ ID NO: 260602 - RNA, 24 nt, Artificial Sequence
  Synthetic
gcugcagucauaugauggcuugac

SEQ ID NO: 260603 - RNA, 18 nt, Artificial Sequence
  Synthetic
uaaguuaaaaaucuugac

SEQ ID NO: 260604 - RNA, 19 nt, Artificial Sequence
  Synthetic
uuaaguuaaaaaucuugac

SEQ ID NO: 260605 - RNA, 20 nt, Artificial Sequence
  Synthetic
guuaaguuaaaaaucuugac

SEQ ID NO: 260606 - RNA, 21 nt, Artificial Sequence
  Synthetic
gguuaaguuaaaaaucuugac

SEQ ID NO: 260607 - RNA, 22 nt, Artificial Sequence
  Synthetic
ugguuaaguuaaaaaucuugac

SEQ ID NO: 260608 - RNA, 23 nt, Artificial Sequence
  Synthetic
gugguuaaguuaaaaaucuugac

SEQ ID NO: 260609 - RNA, 24 nt, Artificial Sequence
  Synthetic
ugugguuaaguuaaaaaucuugac

SEQ ID NO: 260610 - RNA, 18 nt, Artificial Sequence
  Synthetic
uuacuuaugccaguugac

SEQ ID NO: 260611 - RNA, 19 nt, Artificial Sequence
  Synthetic
auuacuuaugccaguugac

SEQ ID NO: 260612 - RNA, 20 nt, Artificial Sequence
  Synthetic
cauuacuuaugccaguugac

SEQ ID NO: 260613 - RNA, 21 nt, Artificial Sequence
  Synthetic
ucauuacuuaugccaguugac

SEQ ID NO: 260614 - RNA, 22 nt, Artificial Sequence
  Synthetic
gucauuacuuaugccaguugac

SEQ ID NO: 260615 - RNA, 23 nt, Artificial Sequence
  Synthetic
ugucauuacuuaugccaguugac

SEQ ID NO: 260616 - RNA, 24 nt, Artificial Sequence
  Synthetic
cugucauuacuuaugccaguugac

SEQ ID NO: 260617 - RNA, 18 nt, Artificial Sequence
  Synthetic
cauugcucuccuguugac

SEQ ID NO: 260618 - RNA, 19 nt, Artificial Sequence
  Synthetic
acauugcucuccuguugac

SEQ ID NO: 260619 - RNA, 20 nt, Artificial Sequence
  Synthetic
aacauugcucuccuguugac

SEQ ID NO: 260620 - RNA, 21 nt, Artificial Sequence
  Synthetic
uaacauugcucuccuguugac

SEQ ID NO: 260621 - RNA, 22 nt, Artificial Sequence
  Synthetic
auaacauugcucuccuguugac

SEQ ID NO: 260622 - RNA, 23 nt, Artificial Sequence
  Synthetic
uauaacauugcucuccuguugac

SEQ ID NO: 260623 - RNA, 24 nt, Artificial Sequence
  Synthetic
auauaacauugcucuccuguugac

SEQ ID NO: 260624 - RNA, 18 nt, Artificial Sequence
  Synthetic
uaaguugagaguguugac

SEQ ID NO: 260625 - RNA, 19 nt, Artificial Sequence
  Synthetic
uuaaguugagaguguugac

SEQ ID NO: 260626 - RNA, 20 nt, Artificial Sequence
  Synthetic
auuaaguugagaguguugac

SEQ ID NO: 260627 - RNA, 21 nt, Artificial Sequence
  Synthetic
cauuaaguugagaguguugac

SEQ ID NO: 260628 - RNA, 22 nt, Artificial Sequence
  Synthetic
ccauuaaguugagaguguugac

SEQ ID NO: 260629 - RNA, 23 nt, Artificial Sequence
  Synthetic
cccauuaaguugagaguguugac

SEQ ID NO: 260630 - RNA, 24 nt, Artificial Sequence
  Synthetic
ccccauuaaguugagaguguugac

SEQ ID NO: 260631 - RNA, 18 nt, Artificial Sequence
  Synthetic
augccaauguuuguugac

SEQ ID NO: 260632 - RNA, 19 nt, Artificial Sequence
  Synthetic
gaugccaauguuuguugac

SEQ ID NO: 260633 - RNA, 20 nt, Artificial Sequence
  Synthetic
cgaugccaauguuuguugac

SEQ ID NO: 260634 - RNA, 21 nt, Artificial Sequence
  Synthetic
acgaugccaauguuuguugac

SEQ ID NO: 260635 - RNA, 22 nt, Artificial Sequence
  Synthetic
gacgaugccaauguuuguugac

SEQ ID NO: 260636 - RNA, 23 nt, Artificial Sequence
  Synthetic
cgacgaugccaauguuuguugac

SEQ ID NO: 260637 - RNA, 24 nt, Artificial Sequence
  Synthetic
acgacgaugccaauguuuguugac

SEQ ID NO: 260638 - RNA, 18 nt, Artificial Sequence
  Synthetic
uacagugauagauuugac

SEQ ID NO: 260639 - RNA, 19 nt, Artificial Sequence
  Synthetic
auacagugauagauuugac

SEQ ID NO: 260640 - RNA, 20 nt, Artificial Sequence
  Synthetic
cauacagugauagauuugac

SEQ ID NO: 260641 - RNA, 21 nt, Artificial Sequence
  Synthetic
gcauacagugauagauuugac

SEQ ID NO: 260642 - RNA, 22 nt, Artificial Sequence
  Synthetic
ggcauacagugauagauuugac

SEQ ID NO: 260643 - RNA, 23 nt, Artificial Sequence
  Synthetic
aggcauacagugauagauuugac

SEQ ID NO: 260644 - RNA, 24 nt, Artificial Sequence
  Synthetic
gaggcauacagugauagauuugac

SEQ ID NO: 260645 - RNA, 18 nt, Artificial Sequence
  Synthetic
gugcaauuucuauuugac

SEQ ID NO: 260646 - RNA, 19 nt, Artificial Sequence
  Synthetic
ugugcaauuucuauuugac

SEQ ID NO: 260647 - RNA, 20 nt, Artificial Sequence
  Synthetic
augugcaauuucuauuugac

SEQ ID NO: 260648 - RNA, 21 nt, Artificial Sequence
  Synthetic
gaugugcaauuucuauuugac

SEQ ID NO: 260649 - RNA, 22 nt, Artificial Sequence
  Synthetic
ugaugugcaauuucuauuugac

SEQ ID NO: 260650 - RNA, 23 nt, Artificial Sequence
  Synthetic
uugaugugcaauuucuauuugac

SEQ ID NO: 260651 - RNA, 24 nt, Artificial Sequence
  Synthetic
auugaugugcaauuucuauuugac

SEQ ID NO: 260652 - RNA, 18 nt, Artificial Sequence
  Synthetic
aauuauguuuccuuugac

SEQ ID NO: 260653 - RNA, 19 nt, Artificial Sequence
  Synthetic
caauuauguuuccuuugac

SEQ ID NO: 260654 - RNA, 20 nt, Artificial Sequence
  Synthetic
gcaauuauguuuccuuugac

SEQ ID NO: 260655 - RNA, 21 nt, Artificial Sequence
  Synthetic
ugcaauuauguuuccuuugac

SEQ ID NO: 260656 - RNA, 22 nt, Artificial Sequence
  Synthetic
uugcaauuauguuuccuuugac

SEQ ID NO: 260657 - RNA, 23 nt, Artificial Sequence
  Synthetic
auugcaauuauguuuccuuugac

SEQ ID NO: 260658 - RNA, 24 nt, Artificial Sequence
  Synthetic
cauugcaauuauguuuccuuugac

SEQ ID NO: 260659 - RNA, 18 nt, Artificial Sequence
  Synthetic
ugaaaugaagaguuugac

SEQ ID NO: 260660 - RNA, 19 nt, Artificial Sequence
  Synthetic
cugaaaugaagaguuugac

SEQ ID NO: 260661 - RNA, 20 nt, Artificial Sequence
  Synthetic
acugaaaugaagaguuugac

SEQ ID NO: 260662 - RNA, 21 nt, Artificial Sequence
  Synthetic
cacugaaaugaagaguuugac

SEQ ID NO: 260663 - RNA, 22 nt, Artificial Sequence
  Synthetic
ucacugaaaugaagaguuugac

SEQ ID NO: 260664 - RNA, 23 nt, Artificial Sequence
  Synthetic
uucacugaaaugaagaguuugac

SEQ ID NO: 260665 - RNA, 24 nt, Artificial Sequence
  Synthetic
cuucacugaaaugaagaguuugac

SEQ ID NO: 260666 - RNA, 18 nt, Artificial Sequence
  Synthetic
guuaaaaaauauuuugac

SEQ ID NO: 260667 - RNA, 19 nt, Artificial Sequence
  Synthetic
gguuaaaaaauauuuugac

SEQ ID NO: 260668 - RNA, 20 nt, Artificial Sequence
  Synthetic
ugguuaaaaaauauuuugac

SEQ ID NO: 260669 - RNA, 21 nt, Artificial Sequence
  Synthetic
gugguuaaaaaauauuuugac

SEQ ID NO: 260670 - RNA, 22 nt, Artificial Sequence
  Synthetic
agugguuaaaaaauauuuugac

SEQ ID NO: 260671 - RNA, 23 nt, Artificial Sequence
  Synthetic
aagugguuaaaaaauauuuugac

SEQ ID NO: 260672 - RNA, 24 nt, Artificial Sequence
  Synthetic
aaagugguuaaaaaauauuuugac

SEQ ID NO: 260673 - RNA, 18 nt, Artificial Sequence
  Synthetic
caaaccugagaaaaauac

SEQ ID NO: 260674 - RNA, 19 nt, Artificial Sequence
  Synthetic
acaaaccugagaaaaauac

SEQ ID NO: 260675 - RNA, 20 nt, Artificial Sequence
  Synthetic
aacaaaccugagaaaaauac

SEQ ID NO: 260676 - RNA, 21 nt, Artificial Sequence
  Synthetic
caacaaaccugagaaaaauac

SEQ ID NO: 260677 - RNA, 22 nt, Artificial Sequence
  Synthetic
acaacaaaccugagaaaaauac

SEQ ID NO: 260678 - RNA, 23 nt, Artificial Sequence
  Synthetic
gacaacaaaccugagaaaaauac

SEQ ID NO: 260679 - RNA, 24 nt, Artificial Sequence
  Synthetic
ugacaacaaaccugagaaaaauac

SEQ ID NO: 260680 - RNA, 18 nt, Artificial Sequence
  Synthetic
ucauauacuuaaaaauac

SEQ ID NO: 260681 - RNA, 19 nt, Artificial Sequence
  Synthetic
aucauauacuuaaaaauac

SEQ ID NO: 260682 - RNA, 20 nt, Artificial Sequence
  Synthetic
caucauauacuuaaaaauac

SEQ ID NO: 260683 - RNA, 21 nt, Artificial Sequence
  Synthetic
ccaucauauacuuaaaaauac

SEQ ID NO: 260684 - RNA, 22 nt, Artificial Sequence
  Synthetic
accaucauauacuuaaaaauac

SEQ ID NO: 260685 - RNA, 23 nt, Artificial Sequence
  Synthetic
uaccaucauauacuuaaaaauac

SEQ ID NO: 260686 - RNA, 24 nt, Artificial Sequence
  Synthetic
cuaccaucauauacuuaaaaauac

SEQ ID NO: 260687 - RNA, 18 nt, Artificial Sequence
  Synthetic
cuacaagggcuaaaauac

SEQ ID NO: 260688 - RNA, 19 nt, Artificial Sequence
  Synthetic
gcuacaagggcuaaaauac

SEQ ID NO: 260689 - RNA, 20 nt, Artificial Sequence
  Synthetic
ugcuacaagggcuaaaauac

SEQ ID NO: 260690 - RNA, 21 nt, Artificial Sequence
  Synthetic
uugcuacaagggcuaaaauac

SEQ ID NO: 260691 - RNA, 22 nt, Artificial Sequence
  Synthetic
auugcuacaagggcuaaaauac

SEQ ID NO: 260692 - RNA, 23 nt, Artificial Sequence
  Synthetic
cauugcuacaagggcuaaaauac

SEQ ID NO: 260693 - RNA, 24 nt, Artificial Sequence
  Synthetic
ucauugcuacaagggcuaaaauac

SEQ ID NO: 260694 - RNA, 18 nt, Artificial Sequence
  Synthetic
uuauaaugauuaaaauac

SEQ ID NO: 260695 - RNA, 19 nt, Artificial Sequence
  Synthetic
auuauaaugauuaaaauac

SEQ ID NO: 260696 - RNA, 20 nt, Artificial Sequence
  Synthetic
gauuauaaugauuaaaauac

SEQ ID NO: 260697 - RNA, 21 nt, Artificial Sequence
  Synthetic
ugauuauaaugauuaaaauac

SEQ ID NO: 260698 - RNA, 22 nt, Artificial Sequence
  Synthetic
cugauuauaaugauuaaaauac

SEQ ID NO: 260699 - RNA, 23 nt, Artificial Sequence
  Synthetic
ucugauuauaaugauuaaaauac

SEQ ID NO: 260700 - RNA, 24 nt, Artificial Sequence
  Synthetic
gucugauuauaaugauuaaaauac

SEQ ID NO: 260701 - RNA, 18 nt, Artificial Sequence
  Synthetic
caaccacaccacaaauac

SEQ ID NO: 260702 - RNA, 19 nt, Artificial Sequence
  Synthetic
gcaaccacaccacaaauac

SEQ ID NO: 260703 - RNA, 20 nt, Artificial Sequence
  Synthetic
ugcaaccacaccacaaauac

SEQ ID NO: 260704 - RNA, 21 nt, Artificial Sequence
  Synthetic
augcaaccacaccacaaauac

SEQ ID NO: 260705 - RNA, 22 nt, Artificial Sequence
  Synthetic
aaugcaaccacaccacaaauac

SEQ ID NO: 260706 - RNA, 23 nt, Artificial Sequence
  Synthetic
caaugcaaccacaccacaaauac

SEQ ID NO: 260707 - RNA, 24 nt, Artificial Sequence
  Synthetic
ucaaugcaaccacaccacaaauac

SEQ ID NO: 260708 - RNA, 18 nt, Artificial Sequence
  Synthetic
aacagagcuuccaaauac

SEQ ID NO: 260709 - RNA, 19 nt, Artificial Sequence
  Synthetic
caacagagcuuccaaauac

SEQ ID NO: 260710 - RNA, 20 nt, Artificial Sequence
  Synthetic
acaacagagcuuccaaauac

SEQ ID NO: 260711 - RNA, 21 nt, Artificial Sequence
  Synthetic
aacaacagagcuuccaaauac

SEQ ID NO: 260712 - RNA, 22 nt, Artificial Sequence
  Synthetic
uaacaacagagcuuccaaauac

SEQ ID NO: 260713 - RNA, 23 nt, Artificial Sequence
  Synthetic
cuaacaacagagcuuccaaauac

SEQ ID NO: 260714 - RNA, 24 nt, Artificial Sequence
  Synthetic
ccuaacaacagagcuuccaaauac

SEQ ID NO: 260715 - RNA, 18 nt, Artificial Sequence
  Synthetic
auuaaaggacucaaauac

SEQ ID NO: 260716 - RNA, 19 nt, Artificial Sequence
  Synthetic
uauuaaaggacucaaauac

SEQ ID NO: 260717 - RNA, 20 nt, Artificial Sequence
  Synthetic
uuauuaaaggacucaaauac

SEQ ID NO: 260718 - RNA, 21 nt, Artificial Sequence
  Synthetic
auuauuaaaggacucaaauac

SEQ ID NO: 260719 - RNA, 22 nt, Artificial Sequence
  Synthetic
aauuauuaaaggacucaaauac

SEQ ID NO: 260720 - RNA, 23 nt, Artificial Sequence
  Synthetic
aaauuauuaaaggacucaaauac

SEQ ID NO: 260721 - RNA, 24 nt, Artificial Sequence
  Synthetic
gaaauuauuaaaggacucaaauac

SEQ ID NO: 260722 - RNA, 18 nt, Artificial Sequence
  Synthetic
aauagacaauucaaauac

SEQ ID NO: 260723 - RNA, 19 nt, Artificial Sequence
  Synthetic
aaauagacaauucaaauac

SEQ ID NO: 260724 - RNA, 20 nt, Artificial Sequence
  Synthetic
uaaauagacaauucaaauac

SEQ ID NO: 260725 - RNA, 21 nt, Artificial Sequence
  Synthetic
auaaauagacaauucaaauac

SEQ ID NO: 260726 - RNA, 22 nt, Artificial Sequence
  Synthetic
uauaaauagacaauucaaauac

SEQ ID NO: 260727 - RNA, 23 nt, Artificial Sequence
  Synthetic
auauaaauagacaauucaaauac

SEQ ID NO: 260728 - RNA, 24 nt, Artificial Sequence
  Synthetic
cauauaaauagacaauucaaauac

SEQ ID NO: 260729 - RNA, 18 nt, Artificial Sequence
  Synthetic
caaagugacuucaaauac

SEQ ID NO: 260730 - RNA, 19 nt, Artificial Sequence
  Synthetic
gcaaagugacuucaaauac

SEQ ID NO: 260731 - RNA, 20 nt, Artificial Sequence
  Synthetic
agcaaagugacuucaaauac

SEQ ID NO: 260732 - RNA, 21 nt, Artificial Sequence
  Synthetic
uagcaaagugacuucaaauac

SEQ ID NO: 260733 - RNA, 22 nt, Artificial Sequence
  Synthetic
uuagcaaagugacuucaaauac

SEQ ID NO: 260734 - RNA, 23 nt, Artificial Sequence
  Synthetic
cuuagcaaagugacuucaaauac

SEQ ID NO: 260735 - RNA, 24 nt, Artificial Sequence
  Synthetic
gcuuagcaaagugacuucaaauac

SEQ ID NO: 260736 - RNA, 18 nt, Artificial Sequence
  Synthetic
auugcuauaaagaaauac

SEQ ID NO: 260737 - RNA, 19 nt, Artificial Sequence
  Synthetic
cauugcuauaaagaaauac

SEQ ID NO: 260738 - RNA, 20 nt, Artificial Sequence
  Synthetic
gcauugcuauaaagaaauac

SEQ ID NO: 260739 - RNA, 24 nt, Artificial Sequence
  Synthetic
ucuugcauugcuauaaagaaauac

SEQ ID NO: 260740 - RNA, 18 nt, Artificial Sequence
  Synthetic
acugcuaugaagaaauac

SEQ ID NO: 260741 - RNA, 19 nt, Artificial Sequence
  Synthetic
uacugcuaugaagaaauac

SEQ ID NO: 260742 - RNA, 20 nt, Artificial Sequence
  Synthetic
auacugcuaugaagaaauac

SEQ ID NO: 260743 - RNA, 21 nt, Artificial Sequence
  Synthetic
cauacugcuaugaagaaauac

SEQ ID NO: 260744 - RNA, 22 nt, Artificial Sequence
  Synthetic
ucauacugcuaugaagaaauac

SEQ ID NO: 260745 - RNA, 23 nt, Artificial Sequence
  Synthetic
uucauacugcuaugaagaaauac

SEQ ID NO: 260746 - RNA, 24 nt, Artificial Sequence
  Synthetic
uuucauacugcuaugaagaaauac

SEQ ID NO: 260747 - RNA, 18 nt, Artificial Sequence
  Synthetic
auaucagguaugaaauac

SEQ ID NO: 260748 - RNA, 19 nt, Artificial Sequence
  Synthetic
cauaucagguaugaaauac

SEQ ID NO: 260749 - RNA, 20 nt, Artificial Sequence
  Synthetic
acauaucagguaugaaauac

SEQ ID NO: 260750 - RNA, 21 nt, Artificial Sequence
  Synthetic
uacauaucagguaugaaauac

SEQ ID NO: 260751 - RNA, 22 nt, Artificial Sequence
  Synthetic
uuacauaucagguaugaaauac

SEQ ID NO: 260752 - RNA, 23 nt, Artificial Sequence
  Synthetic
auuacauaucagguaugaaauac

SEQ ID NO: 260753 - RNA, 24 nt, Artificial Sequence
  Synthetic
uauuacauaucagguaugaaauac

SEQ ID NO: 260754 - RNA, 18 nt, Artificial Sequence
  Synthetic
uugcagacacauaaauac

SEQ ID NO: 260755 - RNA, 19 nt, Artificial Sequence
  Synthetic
guugcagacacauaaauac

SEQ ID NO: 260756 - RNA, 20 nt, Artificial Sequence
  Synthetic
gguugcagacacauaaauac

SEQ ID NO: 260757 - RNA, 21 nt, Artificial Sequence
  Synthetic
ugguugcagacacauaaauac

SEQ ID NO: 260758 - RNA, 22 nt, Artificial Sequence
  Synthetic
cugguugcagacacauaaauac

SEQ ID NO: 260759 - RNA, 23 nt, Artificial Sequence
  Synthetic
gcugguugcagacacauaaauac

SEQ ID NO: 260760 - RNA, 24 nt, Artificial Sequence
  Synthetic
ugcugguugcagacacauaaauac

SEQ ID NO: 260761 - RNA, 18 nt, Artificial Sequence
  Synthetic
cauauaugguauaaauac

SEQ ID NO: 260762 - RNA, 19 nt, Artificial Sequence
  Synthetic
acauauaugguauaaauac

SEQ ID NO: 260763 - RNA, 20 nt, Artificial Sequence
  Synthetic
aacauauaugguauaaauac

SEQ ID NO: 260764 - RNA, 21 nt, Artificial Sequence
  Synthetic
uaacauauaugguauaaauac

SEQ ID NO: 260765 - RNA, 22 nt, Artificial Sequence
  Synthetic
auaacauauaugguauaaauac

SEQ ID NO: 260766 - RNA, 23 nt, Artificial Sequence
  Synthetic
aauaacauauaugguauaaauac

SEQ ID NO: 260767 - RNA, 24 nt, Artificial Sequence
  Synthetic
gaauaacauauaugguauaaauac

SEQ ID NO: 260768 - RNA, 18 nt, Artificial Sequence
  Synthetic
cucuuuuaagguaaauac

SEQ ID NO: 260769 - RNA, 19 nt, Artificial Sequence
  Synthetic
ccucuuuuaagguaaauac

SEQ ID NO: 260770 - RNA, 20 nt, Artificial Sequence
  Synthetic
uccucuuuuaagguaaauac

SEQ ID NO: 260771 - RNA, 21 nt, Artificial Sequence
  Synthetic
uuccucuuuuaagguaaauac

SEQ ID NO: 260772 - RNA, 22 nt, Artificial Sequence
  Synthetic
auuccucuuuuaagguaaauac

SEQ ID NO: 260773 - RNA, 23 nt, Artificial Sequence
  Synthetic
uauuccucuuuuaagguaaauac

SEQ ID NO: 260774 - RNA, 24 nt, Artificial Sequence
  Synthetic
uuauuccucuuuuaagguaaauac

SEQ ID NO: 260775 - RNA, 18 nt, Artificial Sequence
  Synthetic
ggagcauauguuaaauac

SEQ ID NO: 260776 - RNA, 19 nt, Artificial Sequence
  Synthetic
uggagcauauguuaaauac

SEQ ID NO: 260777 - RNA, 20 nt, Artificial Sequence
  Synthetic
uuggagcauauguuaaauac

SEQ ID NO: 260778 - RNA, 21 nt, Artificial Sequence
  Synthetic
auuggagcauauguuaaauac

SEQ ID NO: 260779 - RNA, 22 nt, Artificial Sequence
  Synthetic
cauuggagcauauguuaaauac

SEQ ID NO: 260780 - RNA, 23 nt, Artificial Sequence
  Synthetic
ccauuggagcauauguuaaauac

SEQ ID NO: 260781 - RNA, 24 nt, Artificial Sequence
  Synthetic
cccauuggagcauauguuaaauac

SEQ ID NO: 260782 - RNA, 18 nt, Artificial Sequence
  Synthetic
aguaucaauuuuaaauac

SEQ ID NO: 260783 - RNA, 19 nt, Artificial Sequence
  Synthetic
gaguaucaauuuuaaauac

SEQ ID NO: 260784 - RNA, 20 nt, Artificial Sequence
  Synthetic
agaguaucaauuuuaaauac

SEQ ID NO: 260785 - RNA, 21 nt, Artificial Sequence
  Synthetic
uagaguaucaauuuuaaauac

SEQ ID NO: 260786 - RNA, 22 nt, Artificial Sequence
  Synthetic
auagaguaucaauuuuaaauac

SEQ ID NO: 260787 - RNA, 23 nt, Artificial Sequence
  Synthetic
aauagaguaucaauuuuaaauac

SEQ ID NO: 260788 - RNA, 24 nt, Artificial Sequence
  Synthetic
aaauagaguaucaauuuuaaauac

SEQ ID NO: 260789 - RNA, 18 nt, Artificial Sequence
  Synthetic
cagacauagaaacaauac

SEQ ID NO: 260790 - RNA, 19 nt, Artificial Sequence
  Synthetic
ucagacauagaaacaauac

SEQ ID NO: 260791 - RNA, 20 nt, Artificial Sequence
  Synthetic
gucagacauagaaacaauac

SEQ ID NO: 260792 - RNA, 21 nt, Artificial Sequence
  Synthetic
ugucagacauagaaacaauac

SEQ ID NO: 260793 - RNA, 22 nt, Artificial Sequence
  Synthetic
uugucagacauagaaacaauac

SEQ ID NO: 260794 - RNA, 23 nt, Artificial Sequence
  Synthetic
cuugucagacauagaaacaauac

SEQ ID NO: 260795 - RNA, 24 nt, Artificial Sequence
  Synthetic
ucuugucagacauagaaacaauac

SEQ ID NO: 260796 - RNA, 18 nt, Artificial Sequence
  Synthetic
gaguuagggaaacaauac

SEQ ID NO: 260797 - RNA, 19 nt, Artificial Sequence
  Synthetic
ggaguuagggaaacaauac

SEQ ID NO: 260798 - RNA, 20 nt, Artificial Sequence
  Synthetic
uggaguuagggaaacaauac

SEQ ID NO: 260799 - RNA, 21 nt, Artificial Sequence
  Synthetic
uuggaguuagggaaacaauac

SEQ ID NO: 260800 - RNA, 22 nt, Artificial Sequence
  Synthetic
auuggaguuagggaaacaauac

SEQ ID NO: 260801 - RNA, 23 nt, Artificial Sequence
  Synthetic
uauuggaguuagggaaacaauac

SEQ ID NO: 260802 - RNA, 24 nt, Artificial Sequence
  Synthetic
guauuggaguuagggaaacaauac

SEQ ID NO: 260803 - RNA, 18 nt, Artificial Sequence
  Synthetic
augaguuaggaacaauac

SEQ ID NO: 260804 - RNA, 19 nt, Artificial Sequence
  Synthetic
aaugaguuaggaacaauac

SEQ ID NO: 260805 - RNA, 20 nt, Artificial Sequence
  Synthetic
gaaugaguuaggaacaauac

SEQ ID NO: 260806 - RNA, 21 nt, Artificial Sequence
  Synthetic
ugaaugaguuaggaacaauac

SEQ ID NO: 260807 - RNA, 22 nt, Artificial Sequence
  Synthetic
uugaaugaguuaggaacaauac

SEQ ID NO: 260808 - RNA, 23 nt, Artificial Sequence
  Synthetic
uuugaaugaguuaggaacaauac

SEQ ID NO: 260809 - RNA, 24 nt, Artificial Sequence
  Synthetic
cuuugaaugaguuaggaacaauac

SEQ ID NO: 260810 - RNA, 18 nt, Artificial Sequence
  Synthetic
ccauucauauaccaauac

SEQ ID NO: 260811 - RNA, 19 nt, Artificial Sequence
  Synthetic
accauucauauaccaauac

SEQ ID NO: 260812 - RNA, 20 nt, Artificial Sequence
  Synthetic
gaccauucauauaccaauac

SEQ ID NO: 260813 - RNA, 21 nt, Artificial Sequence
  Synthetic
agaccauucauauaccaauac

SEQ ID NO: 260814 - RNA, 22 nt, Artificial Sequence
  Synthetic
aagaccauucauauaccaauac

SEQ ID NO: 260815 - RNA, 23 nt, Artificial Sequence
  Synthetic
aaagaccauucauauaccaauac

SEQ ID NO: 260816 - RNA, 24 nt, Artificial Sequence
  Synthetic
uaaagaccauucauauaccaauac

SEQ ID NO: 260817 - RNA, 18 nt, Artificial Sequence
  Synthetic
gaccuuugaacccaauac

SEQ ID NO: 260818 - RNA, 19 nt, Artificial Sequence
  Synthetic
ggaccuuugaacccaauac

SEQ ID NO: 260819 - RNA, 20 nt, Artificial Sequence
  Synthetic
uggaccuuugaacccaauac

SEQ ID NO: 260820 - RNA, 21 nt, Artificial Sequence
  Synthetic
cuggaccuuugaacccaauac

SEQ ID NO: 260821 - RNA, 22 nt, Artificial Sequence
  Synthetic
ucuggaccuuugaacccaauac

SEQ ID NO: 260822 - RNA, 23 nt, Artificial Sequence
  Synthetic
aucuggaccuuugaacccaauac

SEQ ID NO: 260823 - RNA, 24 nt, Artificial Sequence
  Synthetic
gaucuggaccuuugaacccaauac

SEQ ID NO: 260824 - RNA, 18 nt, Artificial Sequence
  Synthetic
uauauaugcacccaauac

SEQ ID NO: 260825 - RNA, 19 nt, Artificial Sequence
  Synthetic
auauauaugcacccaauac

SEQ ID NO: 260826 - RNA, 20 nt, Artificial Sequence
  Synthetic
aauauauaugcacccaauac

SEQ ID NO: 260827 - RNA, 21 nt, Artificial Sequence
  Synthetic
aaauauauaugcacccaauac

SEQ ID NO: 260828 - RNA, 22 nt, Artificial Sequence
  Synthetic
uaaauauauaugcacccaauac

SEQ ID NO: 260829 - RNA, 23 nt, Artificial Sequence
  Synthetic
cuaaauauauaugcacccaauac

SEQ ID NO: 260830 - RNA, 24 nt, Artificial Sequence
  Synthetic
ucuaaauauauaugcacccaauac

SEQ ID NO: 260831 - RNA, 18 nt, Artificial Sequence
  Synthetic
uaaaaaaaaugccaauac

SEQ ID NO: 260832 - RNA, 19 nt, Artificial Sequence
  Synthetic
uuaaaaaaaaugccaauac

SEQ ID NO: 260833 - RNA, 20 nt, Artificial Sequence
  Synthetic
uuuaaaaaaaaugccaauac

SEQ ID NO: 260834 - RNA, 21 nt, Artificial Sequence
  Synthetic
guuuaaaaaaaaugccaauac

SEQ ID NO: 260835 - RNA, 22 nt, Artificial Sequence
  Synthetic
aguuuaaaaaaaaugccaauac

SEQ ID NO: 260836 - RNA, 23 nt, Artificial Sequence
  Synthetic
gaguuuaaaaaaaaugccaauac

SEQ ID NO: 260837 - RNA, 24 nt, Artificial Sequence
  Synthetic
ggaguuuaaaaaaaaugccaauac

SEQ ID NO: 260838 - RNA, 18 nt, Artificial Sequence
  Synthetic
uuuuagguccaagaauac

SEQ ID NO: 260839 - RNA, 19 nt, Artificial Sequence
  Synthetic
cuuuuagguccaagaauac

SEQ ID NO: 260840 - RNA, 20 nt, Artificial Sequence
  Synthetic
ucuuuuagguccaagaauac

SEQ ID NO: 260841 - RNA, 21 nt, Artificial Sequence
  Synthetic
gucuuuuagguccaagaauac

SEQ ID NO: 260842 - RNA, 22 nt, Artificial Sequence
  Synthetic
ggucuuuuagguccaagaauac

SEQ ID NO: 260843 - RNA, 23 nt, Artificial Sequence
  Synthetic
aggucuuuuagguccaagaauac

SEQ ID NO: 260844 - RNA, 24 nt, Artificial Sequence
  Synthetic
uaggucuuuuagguccaagaauac

SEQ ID NO: 260845 - RNA, 18 nt, Artificial Sequence
  Synthetic
gagcaauuggaagaauac

SEQ ID NO: 260846 - RNA, 19 nt, Artificial Sequence
  Synthetic
ugagcaauuggaagaauac

SEQ ID NO: 260847 - RNA, 20 nt, Artificial Sequence
  Synthetic
cugagcaauuggaagaauac

SEQ ID NO: 260848 - RNA, 21 nt, Artificial Sequence
  Synthetic
ucugagcaauuggaagaauac

SEQ ID NO: 260849 - RNA, 22 nt, Artificial Sequence
  Synthetic
uucugagcaauuggaagaauac

SEQ ID NO: 260850 - RNA, 23 nt, Artificial Sequence
  Synthetic
auucugagcaauuggaagaauac

SEQ ID NO: 260851 - RNA, 24 nt, Artificial Sequence
  Synthetic
uauucugagcaauuggaagaauac

SEQ ID NO: 260852 - RNA, 18 nt, Artificial Sequence
  Synthetic
uugcuuguaacagaauac

SEQ ID NO: 260853 - RNA, 19 nt, Artificial Sequence
  Synthetic
guugcuuguaacagaauac

SEQ ID NO: 260854 - RNA, 20 nt, Artificial Sequence
  Synthetic
uguugcuuguaacagaauac

SEQ ID NO: 260855 - RNA, 21 nt, Artificial Sequence
  Synthetic
cuguugcuuguaacagaauac

SEQ ID NO: 260856 - RNA, 22 nt, Artificial Sequence
  Synthetic
gcuguugcuuguaacagaauac

SEQ ID NO: 260857 - RNA, 23 nt, Artificial Sequence
  Synthetic
ugcuguugcuuguaacagaauac

SEQ ID NO: 260858 - RNA, 24 nt, Artificial Sequence
  Synthetic
uugcuguugcuuguaacagaauac

SEQ ID NO: 260859 - RNA, 18 nt, Artificial Sequence
  Synthetic
aaggaaaacacagaauac

SEQ ID NO: 260860 - RNA, 19 nt, Artificial Sequence
  Synthetic
caaggaaaacacagaauac

SEQ ID NO: 260861 - RNA, 20 nt, Artificial Sequence
  Synthetic
ccaaggaaaacacagaauac

SEQ ID NO: 260862 - RNA, 21 nt, Artificial Sequence
  Synthetic
accaaggaaaacacagaauac

SEQ ID NO: 260863 - RNA, 22 nt, Artificial Sequence
  Synthetic
caccaaggaaaacacagaauac

SEQ ID NO: 260864 - RNA, 23 nt, Artificial Sequence
  Synthetic
ccaccaaggaaaacacagaauac

SEQ ID NO: 260865 - RNA, 24 nt, Artificial Sequence
  Synthetic
gccaccaaggaaaacacagaauac

SEQ ID NO: 260866 - RNA, 18 nt, Artificial Sequence
  Synthetic
aaaucucuuucagaauac

SEQ ID NO: 260867 - RNA, 19 nt, Artificial Sequence
  Synthetic
caaaucucuuucagaauac

SEQ ID NO: 260868 - RNA, 20 nt, Artificial Sequence
  Synthetic
acaaaucucuuucagaauac

SEQ ID NO: 260869 - RNA, 21 nt, Artificial Sequence
  Synthetic
gacaaaucucuuucagaauac

SEQ ID NO: 260870 - RNA, 22 nt, Artificial Sequence
  Synthetic
ugacaaaucucuuucagaauac

SEQ ID NO: 260871 - RNA, 23 nt, Artificial Sequence
  Synthetic
uugacaaaucucuuucagaauac

SEQ ID NO: 260872 - RNA, 24 nt, Artificial Sequence
  Synthetic
cuugacaaaucucuuucagaauac

SEQ ID NO: 260873 - RNA, 18 nt, Artificial Sequence
  Synthetic
ugguucaaaagagaauac

SEQ ID NO: 260874 - RNA, 19 nt, Artificial Sequence
  Synthetic
cugguucaaaagagaauac

SEQ ID NO: 260875 - RNA, 20 nt, Artificial Sequence
  Synthetic
acugguucaaaagagaauac

SEQ ID NO: 260876 - RNA, 21 nt, Artificial Sequence
  Synthetic
aacugguucaaaagagaauac

SEQ ID NO: 260877 - RNA, 22 nt, Artificial Sequence
  Synthetic
aaacugguucaaaagagaauac

SEQ ID NO: 260878 - RNA, 23 nt, Artificial Sequence
  Synthetic
aaaacugguucaaaagagaauac

SEQ ID NO: 260879 - RNA, 24 nt, Artificial Sequence
  Synthetic
caaaacugguucaaaagagaauac

SEQ ID NO: 260880 - RNA, 18 nt, Artificial Sequence
  Synthetic
aaagaauuucuagaauac

SEQ ID NO: 260881 - RNA, 19 nt, Artificial Sequence
  Synthetic
caaagaauuucuagaauac

SEQ ID NO: 260882 - RNA, 20 nt, Artificial Sequence
  Synthetic
acaaagaauuucuagaauac

SEQ ID NO: 260883 - RNA, 21 nt, Artificial Sequence
  Synthetic
aacaaagaauuucuagaauac

SEQ ID NO: 260884 - RNA, 22 nt, Artificial Sequence
  Synthetic
aaacaaagaauuucuagaauac

SEQ ID NO: 260885 - RNA, 23 nt, Artificial Sequence
  Synthetic
gaaacaaagaauuucuagaauac

SEQ ID NO: 260886 - RNA, 24 nt, Artificial Sequence
  Synthetic
ggaaacaaagaauuucuagaauac

SEQ ID NO: 260887 - RNA, 18 nt, Artificial Sequence
  Synthetic
uacuaggauguagaauac

SEQ ID NO: 260888 - RNA, 19 nt, Artificial Sequence
  Synthetic
auacuaggauguagaauac

SEQ ID NO: 260889 - RNA, 20 nt, Artificial Sequence
  Synthetic
aauacuaggauguagaauac

SEQ ID NO: 260890 - RNA, 21 nt, Artificial Sequence
  Synthetic
aaauacuaggauguagaauac

SEQ ID NO: 260891 - RNA, 22 nt, Artificial Sequence
  Synthetic
caaauacuaggauguagaauac

SEQ ID NO: 260892 - RNA, 23 nt, Artificial Sequence
  Synthetic
acaaauacuaggauguagaauac

SEQ ID NO: 260893 - RNA, 24 nt, Artificial Sequence
  Synthetic
gacaaauacuaggauguagaauac

SEQ ID NO: 260894 - RNA, 18 nt, Artificial Sequence
  Synthetic
ggaagcaauagugaauac

SEQ ID NO: 260895 - RNA, 19 nt, Artificial Sequence
  Synthetic
uggaagcaauagugaauac

SEQ ID NO: 260896 - RNA, 20 nt, Artificial Sequence
  Synthetic
auggaagcaauagugaauac

SEQ ID NO: 260897 - RNA, 21 nt, Artificial Sequence
  Synthetic
aauggaagcaauagugaauac

SEQ ID NO: 260898 - RNA, 22 nt, Artificial Sequence
  Synthetic
aaauggaagcaauagugaauac

SEQ ID NO: 260899 - RNA, 23 nt, Artificial Sequence
  Synthetic
gaaauggaagcaauagugaauac

SEQ ID NO: 260900 - RNA, 24 nt, Artificial Sequence
  Synthetic
ugaaauggaagcaauagugaauac

SEQ ID NO: 260901 - RNA, 18 nt, Artificial Sequence
  Synthetic
gcccaauaauuugaauac

SEQ ID NO: 260902 - RNA, 19 nt, Artificial Sequence
  Synthetic
ugcccaauaauuugaauac

SEQ ID NO: 260903 - RNA, 20 nt, Artificial Sequence
  Synthetic
uugcccaauaauuugaauac

SEQ ID NO: 260904 - RNA, 21 nt, Artificial Sequence
  Synthetic
uuugcccaauaauuugaauac

SEQ ID NO: 260905 - RNA, 22 nt, Artificial Sequence
  Synthetic
auuugcccaauaauuugaauac

SEQ ID NO: 260906 - RNA, 23 nt, Artificial Sequence
  Synthetic
cauuugcccaauaauuugaauac

SEQ ID NO: 260907 - RNA, 24 nt, Artificial Sequence
  Synthetic
acauuugcccaauaauuugaauac

SEQ ID NO: 260908 - RNA, 18 nt, Artificial Sequence
  Synthetic
uuugugccuuuugaauac

SEQ ID NO: 260909 - RNA, 19 nt, Artificial Sequence
  Synthetic
auuugugccuuuugaauac

SEQ ID NO: 260910 - RNA, 20 nt, Artificial Sequence
  Synthetic
uauuugugccuuuugaauac

SEQ ID NO: 260911 - RNA, 21 nt, Artificial Sequence
  Synthetic
cuauuugugccuuuugaauac

SEQ ID NO: 260912 - RNA, 22 nt, Artificial Sequence
  Synthetic
gcuauuugugccuuuugaauac

SEQ ID NO: 260913 - RNA, 23 nt, Artificial Sequence
  Synthetic
agcuauuugugccuuuugaauac

SEQ ID NO: 260914 - RNA, 24 nt, Artificial Sequence
  Synthetic
uagcuauuugugccuuuugaauac

SEQ ID NO: 260915 - RNA, 18 nt, Artificial Sequence
  Synthetic
aaaguaaagaaauaauac

SEQ ID NO: 260916 - RNA, 19 nt, Artificial Sequence
  Synthetic
aaaaguaaagaaauaauac

SEQ ID NO: 260917 - RNA, 20 nt, Artificial Sequence
  Synthetic
uaaaaguaaagaaauaauac

SEQ ID NO: 260918 - RNA, 21 nt, Artificial Sequence
  Synthetic
auaaaaguaaagaaauaauac

SEQ ID NO: 260919 - RNA, 22 nt, Artificial Sequence
  Synthetic
aauaaaaguaaagaaauaauac

SEQ ID NO: 260920 - RNA, 23 nt, Artificial Sequence
  Synthetic
aaauaaaaguaaagaaauaauac

SEQ ID NO: 260921 - RNA, 24 nt, Artificial Sequence
  Synthetic
uaaauaaaaguaaagaaauaauac

SEQ ID NO: 260922 - RNA, 18 nt, Artificial Sequence
  Synthetic
ugaggaugaagauaauac

SEQ ID NO: 260923 - RNA, 19 nt, Artificial Sequence
  Synthetic
augaggaugaagauaauac

SEQ ID NO: 260924 - RNA, 20 nt, Artificial Sequence
  Synthetic
uaugaggaugaagauaauac

SEQ ID NO: 260925 - RNA, 21 nt, Artificial Sequence
  Synthetic
auaugaggaugaagauaauac

SEQ ID NO: 260926 - RNA, 22 nt, Artificial Sequence
  Synthetic
cauaugaggaugaagauaauac

SEQ ID NO: 260927 - RNA, 23 nt, Artificial Sequence
  Synthetic
ucauaugaggaugaagauaauac

SEQ ID NO: 260928 - RNA, 24 nt, Artificial Sequence
  Synthetic
gucauaugaggaugaagauaauac

SEQ ID NO: 260929 - RNA, 18 nt, Artificial Sequence
  Synthetic
uaaagucauuuauaauac

SEQ ID NO: 260930 - RNA, 19 nt, Artificial Sequence
  Synthetic
uuaaagucauuuauaauac

SEQ ID NO: 260931 - RNA, 20 nt, Artificial Sequence
  Synthetic
auuaaagucauuuauaauac

SEQ ID NO: 260932 - RNA, 21 nt, Artificial Sequence
  Synthetic
uauuaaagucauuuauaauac

SEQ ID NO: 260933 - RNA, 22 nt, Artificial Sequence
  Synthetic
auauuaaagucauuuauaauac

SEQ ID NO: 260934 - RNA, 23 nt, Artificial Sequence
  Synthetic
uauauuaaagucauuuauaauac

SEQ ID NO: 260935 - RNA, 24 nt, Artificial Sequence
  Synthetic
cuauauuaaagucauuuauaauac

SEQ ID NO: 260936 - RNA, 18 nt, Artificial Sequence
  Synthetic
uuuuauauaaacuaauac

SEQ ID NO: 260937 - RNA, 19 nt, Artificial Sequence
  Synthetic
auuuuauauaaacuaauac

SEQ ID NO: 260938 - RNA, 20 nt, Artificial Sequence
  Synthetic
aauuuuauauaaacuaauac

SEQ ID NO: 260939 - RNA, 21 nt, Artificial Sequence
  Synthetic
aaauuuuauauaaacuaauac

SEQ ID NO: 260940 - RNA, 22 nt, Artificial Sequence
  Synthetic
aaaauuuuauauaaacuaauac

SEQ ID NO: 260941 - RNA, 23 nt, Artificial Sequence
  Synthetic
caaaauuuuauauaaacuaauac

SEQ ID NO: 260942 - RNA, 24 nt, Artificial Sequence
  Synthetic
acaaaauuuuauauaaacuaauac

SEQ ID NO: 260943 - RNA, 18 nt, Artificial Sequence
  Synthetic
aucugaaccagcuaauac

SEQ ID NO: 260944 - RNA, 19 nt, Artificial Sequence
  Synthetic
gaucugaaccagcuaauac

SEQ ID NO: 260945 - RNA, 20 nt, Artificial Sequence
  Synthetic
agaucugaaccagcuaauac

SEQ ID NO: 260946 - RNA, 21 nt, Artificial Sequence
  Synthetic
gagaucugaaccagcuaauac

SEQ ID NO: 260947 - RNA, 22 nt, Artificial Sequence
  Synthetic
ugagaucugaaccagcuaauac

SEQ ID NO: 260948 - RNA, 23 nt, Artificial Sequence
  Synthetic
cugagaucugaaccagcuaauac

SEQ ID NO: 260949 - RNA, 24 nt, Artificial Sequence
  Synthetic
gcugagaucugaaccagcuaauac

SEQ ID NO: 260950 - RNA, 18 nt, Artificial Sequence
  Synthetic
acaaaaaccaaguaauac

SEQ ID NO: 260951 - RNA, 19 nt, Artificial Sequence
  Synthetic
aacaaaaaccaaguaauac

SEQ ID NO: 260952 - RNA, 20 nt, Artificial Sequence
  Synthetic
gaacaaaaaccaaguaauac

SEQ ID NO: 260953 - RNA, 21 nt, Artificial Sequence
  Synthetic
agaacaaaaaccaaguaauac

SEQ ID NO: 260954 - RNA, 22 nt, Artificial Sequence
  Synthetic
cagaacaaaaaccaaguaauac

SEQ ID NO: 260955 - RNA, 23 nt, Artificial Sequence
  Synthetic
acagaacaaaaaccaaguaauac

SEQ ID NO: 260956 - RNA, 24 nt, Artificial Sequence
  Synthetic
gacagaacaaaaaccaaguaauac

SEQ ID NO: 260957 - RNA, 18 nt, Artificial Sequence
  Synthetic
uggagcucuaaguaauac

SEQ ID NO: 260958 - RNA, 19 nt, Artificial Sequence
  Synthetic
uuggagcucuaaguaauac

SEQ ID NO: 260959 - RNA, 20 nt, Artificial Sequence
  Synthetic
uuuggagcucuaaguaauac

SEQ ID NO: 260960 - RNA, 21 nt, Artificial Sequence
  Synthetic
cuuuggagcucuaaguaauac

SEQ ID NO: 260961 - RNA, 22 nt, Artificial Sequence
  Synthetic
acuuuggagcucuaaguaauac

SEQ ID NO: 260962 - RNA, 23 nt, Artificial Sequence
  Synthetic
uacuuuggagcucuaaguaauac

SEQ ID NO: 260963 - RNA, 24 nt, Artificial Sequence
  Synthetic
guacuuuggagcucuaaguaauac

SEQ ID NO: 260964 - RNA, 18 nt, Artificial Sequence
  Synthetic
gcacuuccuguguaauac

SEQ ID NO: 260965 - RNA, 19 nt, Artificial Sequence
  Synthetic
agcacuuccuguguaauac

SEQ ID NO: 260966 - RNA, 20 nt, Artificial Sequence
  Synthetic
uagcacuuccuguguaauac

SEQ ID NO: 260967 - RNA, 21 nt, Artificial Sequence
  Synthetic
uuagcacuuccuguguaauac

SEQ ID NO: 260968 - RNA, 22 nt, Artificial Sequence
  Synthetic
uuuagcacuuccuguguaauac

SEQ ID NO: 260969 - RNA, 23 nt, Artificial Sequence
  Synthetic
uuuuagcacuuccuguguaauac

SEQ ID NO: 260970 - RNA, 24 nt, Artificial Sequence
  Synthetic
cuuuuagcacuuccuguguaauac

SEQ ID NO: 260971 - RNA, 18 nt, Artificial Sequence
  Synthetic
auaugcguauuguaauac

SEQ ID NO: 260972 - RNA, 19 nt, Artificial Sequence
  Synthetic
uauaugcguauuguaauac

SEQ ID NO: 260973 - RNA, 20 nt, Artificial Sequence
  Synthetic
uuauaugcguauuguaauac

SEQ ID NO: 260974 - RNA, 21 nt, Artificial Sequence
  Synthetic
uuuauaugcguauuguaauac

SEQ ID NO: 260975 - RNA, 22 nt, Artificial Sequence
  Synthetic
guuuauaugcguauuguaauac

SEQ ID NO: 260976 - RNA, 23 nt, Artificial Sequence
  Synthetic
uguuuauaugcguauuguaauac

SEQ ID NO: 260977 - RNA, 24 nt, Artificial Sequence
  Synthetic
uuguuuauaugcguauuguaauac

SEQ ID NO: 260978 - RNA, 18 nt, Artificial Sequence
  Synthetic
uuuauaaaauauuaauac

SEQ ID NO: 260979 - RNA, 19 nt, Artificial Sequence
  Synthetic
cuuuauaaaauauuaauac

SEQ ID NO: 260980 - RNA, 20 nt, Artificial Sequence
  Synthetic
ccuuuauaaaauauuaauac

SEQ ID NO: 260981 - RNA, 21 nt, Artificial Sequence
  Synthetic
uccuuuauaaaauauuaauac

SEQ ID NO: 260982 - RNA, 22 nt, Artificial Sequence
  Synthetic
auccuuuauaaaauauuaauac

SEQ ID NO: 260983 - RNA, 23 nt, Artificial Sequence
  Synthetic
aauccuuuauaaaauauuaauac

SEQ ID NO: 260984 - RNA, 24 nt, Artificial Sequence
  Synthetic
aaauccuuuauaaaauauuaauac

SEQ ID NO: 260985 - RNA, 18 nt, Artificial Sequence
  Synthetic
ugggucacauguuaauac

SEQ ID NO: 260986 - RNA, 19 nt, Artificial Sequence
  Synthetic
uugggucacauguuaauac

SEQ ID NO: 260987 - RNA, 20 nt, Artificial Sequence
  Synthetic
uuugggucacauguuaauac

SEQ ID NO: 260988 - RNA, 21 nt, Artificial Sequence
  Synthetic
guuugggucacauguuaauac

SEQ ID NO: 260989 - RNA, 22 nt, Artificial Sequence
  Synthetic
uguuugggucacauguuaauac

SEQ ID NO: 260990 - RNA, 23 nt, Artificial Sequence
  Synthetic
uuguuugggucacauguuaauac

SEQ ID NO: 260991 - RNA, 24 nt, Artificial Sequence
  Synthetic
cuuguuugggucacauguuaauac

SEQ ID NO: 260992 - RNA, 18 nt, Artificial Sequence
  Synthetic
aucaccauuguuuaauac

SEQ ID NO: 260993 - RNA, 19 nt, Artificial Sequence
  Synthetic
caucaccauuguuuaauac

SEQ ID NO: 260994 - RNA, 20 nt, Artificial Sequence
  Synthetic
ccaucaccauuguuuaauac

SEQ ID NO: 260995 - RNA, 21 nt, Artificial Sequence
  Synthetic
accaucaccauuguuuaauac

SEQ ID NO: 260996 - RNA, 22 nt, Artificial Sequence
  Synthetic
caccaucaccauuguuuaauac

SEQ ID NO: 260997 - RNA, 23 nt, Artificial Sequence
  Synthetic
ccaccaucaccauuguuuaauac

SEQ ID NO: 260998 - RNA, 24 nt, Artificial Sequence
  Synthetic
gccaccaucaccauuguuuaauac

SEQ ID NO: 260999 - RNA, 18 nt, Artificial Sequence
  Synthetic
gcuuaaaauuaaacauac

SEQ ID NO: 261000 - RNA, 19 nt, Artificial Sequence
  Synthetic
agcuuaaaauuaaacauac

SEQ ID NO: 261001 - RNA, 20 nt, Artificial Sequence
  Synthetic
uagcuuaaaauuaaacauac

SEQ ID NO: 261002 - RNA, 21 nt, Artificial Sequence
  Synthetic
auagcuuaaaauuaaacauac

SEQ ID NO: 261003 - RNA, 22 nt, Artificial Sequence
  Synthetic
gauagcuuaaaauuaaacauac

SEQ ID NO: 261004 - RNA, 23 nt, Artificial Sequence
  Synthetic
ugauagcuuaaaauuaaacauac

SEQ ID NO: 261005 - RNA, 24 nt, Artificial Sequence
  Synthetic
augauagcuuaaaauuaaacauac

SEQ ID NO: 261006 - RNA, 18 nt, Artificial Sequence
  Synthetic
aaaccuaccacaacauac

SEQ ID NO: 261007 - RNA, 19 nt, Artificial Sequence
  Synthetic
aaaaccuaccacaacauac

SEQ ID NO: 261008 - RNA, 20 nt, Artificial Sequence
  Synthetic
gaaaaccuaccacaacauac

SEQ ID NO: 261009 - RNA, 21 nt, Artificial Sequence
  Synthetic
ggaaaaccuaccacaacauac

SEQ ID NO: 261010 - RNA, 22 nt, Artificial Sequence
  Synthetic
gggaaaaccuaccacaacauac

SEQ ID NO: 261011 - RNA, 23 nt, Artificial Sequence
  Synthetic
agggaaaaccuaccacaacauac

SEQ ID NO: 261012 - RNA, 24 nt, Artificial Sequence
  Synthetic
cagggaaaaccuaccacaacauac

SEQ ID NO: 261013 - RNA, 18 nt, Artificial Sequence
  Synthetic
caggacaaaucaacauac

SEQ ID NO: 261014 - RNA, 19 nt, Artificial Sequence
  Synthetic
ucaggacaaaucaacauac

SEQ ID NO: 261015 - RNA, 20 nt, Artificial Sequence
  Synthetic
aucaggacaaaucaacauac

SEQ ID NO: 261016 - RNA, 21 nt, Artificial Sequence
  Synthetic
uaucaggacaaaucaacauac

SEQ ID NO: 261017 - RNA, 22 nt, Artificial Sequence
  Synthetic
uuaucaggacaaaucaacauac

SEQ ID NO: 261018 - RNA, 23 nt, Artificial Sequence
  Synthetic
auuaucaggacaaaucaacauac

SEQ ID NO: 261019 - RNA, 24 nt, Artificial Sequence
  Synthetic
aauuaucaggacaaaucaacauac

SEQ ID NO: 261020 - RNA, 18 nt, Artificial Sequence
  Synthetic
auaaauguuugaacauac

SEQ ID NO: 261021 - RNA, 19 nt, Artificial Sequence
  Synthetic
aauaaauguuugaacauac

SEQ ID NO: 261022 - RNA, 20 nt, Artificial Sequence
  Synthetic
aaauaaauguuugaacauac

SEQ ID NO: 261023 - RNA, 21 nt, Artificial Sequence
  Synthetic
uaaauaaauguuugaacauac

SEQ ID NO: 261024 - RNA, 22 nt, Artificial Sequence
  Synthetic
auaaauaaauguuugaacauac

SEQ ID NO: 261025 - RNA, 23 nt, Artificial Sequence
  Synthetic
aauaaauaaauguuugaacauac

SEQ ID NO: 261026 - RNA, 24 nt, Artificial Sequence
  Synthetic
aaauaaauaaauguuugaacauac

SEQ ID NO: 261027 - RNA, 18 nt, Artificial Sequence
  Synthetic
cuauaauuuuuaacauac

SEQ ID NO: 261028 - RNA, 19 nt, Artificial Sequence
  Synthetic
ucuauaauuuuuaacauac

SEQ ID NO: 261029 - RNA, 20 nt, Artificial Sequence
  Synthetic
cucuauaauuuuuaacauac

SEQ ID NO: 261030 - RNA, 21 nt, Artificial Sequence
  Synthetic
ucucuauaauuuuuaacauac

SEQ ID NO: 261031 - RNA, 22 nt, Artificial Sequence
  Synthetic
cucucuauaauuuuuaacauac

SEQ ID NO: 261032 - RNA, 23 nt, Artificial Sequence
  Synthetic
gcucucuauaauuuuuaacauac

SEQ ID NO: 261033 - RNA, 24 nt, Artificial Sequence
  Synthetic
ugcucucuauaauuuuuaacauac

SEQ ID NO: 261034 - RNA, 18 nt, Artificial Sequence
  Synthetic
gaacacauggacacauac

SEQ ID NO: 261035 - RNA, 19 nt, Artificial Sequence
  Synthetic
agaacacauggacacauac

SEQ ID NO: 261036 - RNA, 20 nt, Artificial Sequence
  Synthetic
gagaacacauggacacauac

SEQ ID NO: 261037 - RNA, 21 nt, Artificial Sequence
  Synthetic
ugagaacacauggacacauac

SEQ ID NO: 261038 - RNA, 22 nt, Artificial Sequence
  Synthetic
augagaacacauggacacauac

SEQ ID NO: 261039 - RNA, 23 nt, Artificial Sequence
  Synthetic
gaugagaacacauggacacauac

SEQ ID NO: 261040 - RNA, 24 nt, Artificial Sequence
  Synthetic
ugaugagaacacauggacacauac

SEQ ID NO: 261041 - RNA, 18 nt, Artificial Sequence
  Synthetic
cugcuaauaaagacauac

SEQ ID NO: 261042 - RNA, 19 nt, Artificial Sequence
  Synthetic
acugcuaauaaagacauac

SEQ ID NO: 261043 - RNA, 20 nt, Artificial Sequence
  Synthetic
cacugcuaauaaagacauac

SEQ ID NO: 261044 - RNA, 21 nt, Artificial Sequence
  Synthetic
acacugcuaauaaagacauac

SEQ ID NO: 261045 - RNA, 22 nt, Artificial Sequence
  Synthetic
cacacugcuaauaaagacauac

SEQ ID NO: 261046 - RNA, 23 nt, Artificial Sequence
  Synthetic
ucacacugcuaauaaagacauac

SEQ ID NO: 261047 - RNA, 24 nt, Artificial Sequence
  Synthetic
cucacacugcuaauaaagacauac

SEQ ID NO: 261048 - RNA, 18 nt, Artificial Sequence
  Synthetic
cugcggauaaagacauac

SEQ ID NO: 261049 - RNA, 19 nt, Artificial Sequence
  Synthetic
acugcggauaaagacauac

SEQ ID NO: 261050 - RNA, 20 nt, Artificial Sequence
  Synthetic
cacugcggauaaagacauac

SEQ ID NO: 261051 - RNA, 21 nt, Artificial Sequence
  Synthetic
acacugcggauaaagacauac

SEQ ID NO: 261052 - RNA, 22 nt, Artificial Sequence
  Synthetic
cacacugcggauaaagacauac

SEQ ID NO: 261053 - RNA, 23 nt, Artificial Sequence
  Synthetic
ucacacugcggauaaagacauac

SEQ ID NO: 261054 - RNA, 24 nt, Artificial Sequence
  Synthetic
uucacacugcggauaaagacauac

SEQ ID NO: 261055 - RNA, 18 nt, Artificial Sequence
  Synthetic
cugcugauaaagacauac

SEQ ID NO: 261056 - RNA, 19 nt, Artificial Sequence
  Synthetic
gcugcugauaaagacauac

SEQ ID NO: 261057 - RNA, 20 nt, Artificial Sequence
  Synthetic
ugcugcugauaaagacauac

SEQ ID NO: 261058 - RNA, 21 nt, Artificial Sequence
  Synthetic
augcugcugauaaagacauac

SEQ ID NO: 261059 - RNA, 22 nt, Artificial Sequence
  Synthetic
caugcugcugauaaagacauac

SEQ ID NO: 261060 - RNA, 23 nt, Artificial Sequence
  Synthetic
ucaugcugcugauaaagacauac

SEQ ID NO: 261061 - RNA, 24 nt, Artificial Sequence
  Synthetic
uucaugcugcugauaaagacauac

SEQ ID NO: 261062 - RNA, 18 nt, Artificial Sequence
  Synthetic
ugagagagacagacauac

SEQ ID NO: 261063 - RNA, 19 nt, Artificial Sequence
  Synthetic
gugagagagacagacauac

SEQ ID NO: 261064 - RNA, 20 nt, Artificial Sequence
  Synthetic
agugagagagacagacauac

SEQ ID NO: 261065 - RNA, 21 nt, Artificial Sequence
  Synthetic
aagugagagagacagacauac

SEQ ID NO: 261066 - RNA, 22 nt, Artificial Sequence
  Synthetic
aaagugagagagacagacauac

SEQ ID NO: 261067 - RNA, 23 nt, Artificial Sequence
  Synthetic
gaaagugagagagacagacauac

SEQ ID NO: 261068 - RNA, 24 nt, Artificial Sequence
  Synthetic
agaaagugagagagacagacauac

SEQ ID NO: 261069 - RNA, 18 nt, Artificial Sequence
  Synthetic
ccauuccucuugacauac

SEQ ID NO: 261070 - RNA, 19 nt, Artificial Sequence
  Synthetic
accauuccucuugacauac

SEQ ID NO: 261071 - RNA, 20 nt, Artificial Sequence
  Synthetic
uaccauuccucuugacauac

SEQ ID NO: 261072 - RNA, 21 nt, Artificial Sequence
  Synthetic
auaccauuccucuugacauac

SEQ ID NO: 261073 - RNA, 22 nt, Artificial Sequence
  Synthetic
aauaccauuccucuugacauac

SEQ ID NO: 261074 - RNA, 23 nt, Artificial Sequence
  Synthetic
gaauaccauuccucuugacauac

SEQ ID NO: 261075 - RNA, 24 nt, Artificial Sequence
  Synthetic
agaauaccauuccucuugacauac

SEQ ID NO: 261076 - RNA, 18 nt, Artificial Sequence
  Synthetic
ugugaccaagauacauac

SEQ ID NO: 261077 - RNA, 19 nt, Artificial Sequence
  Synthetic
cugugaccaagauacauac

SEQ ID NO: 261078 - RNA, 20 nt, Artificial Sequence
  Synthetic
ucugugaccaagauacauac

SEQ ID NO: 261079 - RNA, 21 nt, Artificial Sequence
  Synthetic
aucugugaccaagauacauac

SEQ ID NO: 261080 - RNA, 22 nt, Artificial Sequence
  Synthetic
uaucugugaccaagauacauac

SEQ ID NO: 261081 - RNA, 23 nt, Artificial Sequence
  Synthetic
auaucugugaccaagauacauac

SEQ ID NO: 261082 - RNA, 24 nt, Artificial Sequence
  Synthetic
aauaucugugaccaagauacauac

SEQ ID NO: 261083 - RNA, 18 nt, Artificial Sequence
  Synthetic
augaagcaauauacauac

SEQ ID NO: 261084 - RNA, 19 nt, Artificial Sequence
  Synthetic
aaugaagcaauauacauac

SEQ ID NO: 261085 - RNA, 20 nt, Artificial Sequence
  Synthetic
aaaugaagcaauauacauac

SEQ ID NO: 261086 - RNA, 21 nt, Artificial Sequence
  Synthetic
uaaaugaagcaauauacauac

SEQ ID NO: 261087 - RNA, 22 nt, Artificial Sequence
  Synthetic
guaaaugaagcaauauacauac

SEQ ID NO: 261088 - RNA, 23 nt, Artificial Sequence
  Synthetic
aguaaaugaagcaauauacauac

SEQ ID NO: 261089 - RNA, 24 nt, Artificial Sequence
  Synthetic
uaguaaaugaagcaauauacauac

SEQ ID NO: 261090 - RNA, 18 nt, Artificial Sequence
  Synthetic
gauggcaacaguacauac

SEQ ID NO: 261091 - RNA, 19 nt, Artificial Sequence
  Synthetic
agauggcaacaguacauac

SEQ ID NO: 261092 - RNA, 20 nt, Artificial Sequence
  Synthetic
aagauggcaacaguacauac

SEQ ID NO: 261093 - RNA, 21 nt, Artificial Sequence
  Synthetic
aaagauggcaacaguacauac

SEQ ID NO: 261094 - RNA, 22 nt, Artificial Sequence
  Synthetic
uaaagauggcaacaguacauac

SEQ ID NO: 261095 - RNA, 23 nt, Artificial Sequence
  Synthetic
auaaagauggcaacaguacauac

SEQ ID NO: 261096 - RNA, 24 nt, Artificial Sequence
  Synthetic
cauaaagauggcaacaguacauac

SEQ ID NO: 261097 - RNA, 18 nt, Artificial Sequence
  Synthetic
agcauuccuccaccauac

SEQ ID NO: 261098 - RNA, 19 nt, Artificial Sequence
  Synthetic
gagcauuccuccaccauac

SEQ ID NO: 261099 - RNA, 20 nt, Artificial Sequence
  Synthetic
agagcauuccuccaccauac

SEQ ID NO: 261100 - RNA, 21 nt, Artificial Sequence
  Synthetic
cagagcauuccuccaccauac

SEQ ID NO: 261101 - RNA, 22 nt, Artificial Sequence
  Synthetic
gcagagcauuccuccaccauac

SEQ ID NO: 261102 - RNA, 23 nt, Artificial Sequence
  Synthetic
agcagagcauuccuccaccauac

SEQ ID NO: 261103 - RNA, 24 nt, Artificial Sequence
  Synthetic
uagcagagcauuccuccaccauac

SEQ ID NO: 261104 - RNA, 18 nt, Artificial Sequence
  Synthetic
uugagccagucaccauac

SEQ ID NO: 261105 - RNA, 19 nt, Artificial Sequence
  Synthetic
uuugagccagucaccauac

SEQ ID NO: 261106 - RNA, 20 nt, Artificial Sequence
  Synthetic
auuugagccagucaccauac

SEQ ID NO: 261107 - RNA, 21 nt, Artificial Sequence
  Synthetic
aauuugagccagucaccauac

SEQ ID NO: 261108 - RNA, 22 nt, Artificial Sequence
  Synthetic
aaauuugagccagucaccauac

SEQ ID NO: 261109 - RNA, 23 nt, Artificial Sequence
  Synthetic
aaaauuugagccagucaccauac

SEQ ID NO: 261110 - RNA, 24 nt, Artificial Sequence
  Synthetic
uaaaauuugagccagucaccauac

SEQ ID NO: 261111 - RNA, 18 nt, Artificial Sequence
  Synthetic
aacugcugguauccauac

SEQ ID NO: 261112 - RNA, 19 nt, Artificial Sequence
  Synthetic
gaacugcugguauccauac

SEQ ID NO: 261113 - RNA, 20 nt, Artificial Sequence
  Synthetic
ugaacugcugguauccauac

SEQ ID NO: 261114 - RNA, 21 nt, Artificial Sequence
  Synthetic
uugaacugcugguauccauac

SEQ ID NO: 261115 - RNA, 22 nt, Artificial Sequence
  Synthetic
guugaacugcugguauccauac

SEQ ID NO: 261116 - RNA, 23 nt, Artificial Sequence
  Synthetic
aguugaacugcugguauccauac

SEQ ID NO: 261117 - RNA, 24 nt, Artificial Sequence
  Synthetic
aaguugaacugcugguauccauac

SEQ ID NO: 261118 - RNA, 18 nt, Artificial Sequence
  Synthetic
augaaaaccuaagcauac

SEQ ID NO: 261119 - RNA, 19 nt, Artificial Sequence
  Synthetic
uaugaaaaccuaagcauac

SEQ ID NO: 261120 - RNA, 20 nt, Artificial Sequence
  Synthetic
auaugaaaaccuaagcauac

SEQ ID NO: 261121 - RNA, 21 nt, Artificial Sequence
  Synthetic
aauaugaaaaccuaagcauac

SEQ ID NO: 261122 - RNA, 22 nt, Artificial Sequence
  Synthetic
uaauaugaaaaccuaagcauac

SEQ ID NO: 261123 - RNA, 23 nt, Artificial Sequence
  Synthetic
cuaauaugaaaaccuaagcauac

SEQ ID NO: 261124 - RNA, 24 nt, Artificial Sequence
  Synthetic
gcuaauaugaaaaccuaagcauac

SEQ ID NO: 261125 - RNA, 18 nt, Artificial Sequence
  Synthetic
aagauuuguagagcauac

SEQ ID NO: 261126 - RNA, 19 nt, Artificial Sequence
  Synthetic
aaagauuuguagagcauac

SEQ ID NO: 261127 - RNA, 20 nt, Artificial Sequence
  Synthetic
aaaagauuuguagagcauac

SEQ ID NO: 261128 - RNA, 21 nt, Artificial Sequence
  Synthetic
aaaaagauuuguagagcauac

SEQ ID NO: 261129 - RNA, 22 nt, Artificial Sequence
  Synthetic
aaaaaagauuuguagagcauac

SEQ ID NO: 261130 - RNA, 23 nt, Artificial Sequence
  Synthetic
aaaaaaagauuuguagagcauac

SEQ ID NO: 261131 - RNA, 24 nt, Artificial Sequence
  Synthetic
aaaaaaaagauuuguagagcauac

SEQ ID NO: 261132 - RNA, 18 nt, Artificial Sequence
  Synthetic
aacugcaguuuagcauac

SEQ ID NO: 261133 - RNA, 19 nt, Artificial Sequence
  Synthetic
aaacugcaguuuagcauac

SEQ ID NO: 261134 - RNA, 20 nt, Artificial Sequence
  Synthetic
aaaacugcaguuuagcauac

SEQ ID NO: 261135 - RNA, 21 nt, Artificial Sequence
  Synthetic
gaaaacugcaguuuagcauac

SEQ ID NO: 261136 - RNA, 22 nt, Artificial Sequence
  Synthetic
ggaaaacugcaguuuagcauac

SEQ ID NO: 261137 - RNA, 23 nt, Artificial Sequence
  Synthetic
aggaaaacugcaguuuagcauac

SEQ ID NO: 261138 - RNA, 24 nt, Artificial Sequence
  Synthetic
aaggaaaacugcaguuuagcauac

SEQ ID NO: 261139 - RNA, 18 nt, Artificial Sequence
  Synthetic
uauauguaaaaugcauac

SEQ ID NO: 261140 - RNA, 19 nt, Artificial Sequence
  Synthetic
auauauguaaaaugcauac

SEQ ID NO: 261141 - RNA, 20 nt, Artificial Sequence
  Synthetic
gauauauguaaaaugcauac

SEQ ID NO: 261142 - RNA, 21 nt, Artificial Sequence
  Synthetic
agauauauguaaaaugcauac

SEQ ID NO: 261143 - RNA, 22 nt, Artificial Sequence
  Synthetic
aagauauauguaaaaugcauac

SEQ ID NO: 261144 - RNA, 23 nt, Artificial Sequence
  Synthetic
uaagauauauguaaaaugcauac

SEQ ID NO: 261145 - RNA, 24 nt, Artificial Sequence
  Synthetic
auaagauauauguaaaaugcauac

SEQ ID NO: 261146 - RNA, 18 nt, Artificial Sequence
  Synthetic
auuagucuaaaugcauac

SEQ ID NO: 261147 - RNA, 19 nt, Artificial Sequence
  Synthetic
cauuagucuaaaugcauac

SEQ ID NO: 261148 - RNA, 20 nt, Artificial Sequence
  Synthetic
gcauuagucuaaaugcauac

SEQ ID NO: 261149 - RNA, 21 nt, Artificial Sequence
  Synthetic
ggcauuagucuaaaugcauac

SEQ ID NO: 261150 - RNA, 22 nt, Artificial Sequence
  Synthetic
uggcauuagucuaaaugcauac

SEQ ID NO: 261151 - RNA, 23 nt, Artificial Sequence
  Synthetic
uuggcauuagucuaaaugcauac

SEQ ID NO: 261152 - RNA, 24 nt, Artificial Sequence
  Synthetic
uuuggcauuagucuaaaugcauac

SEQ ID NO: 261153 - RNA, 18 nt, Artificial Sequence
  Synthetic
uggaauaauuaugcauac

SEQ ID NO: 261154 - RNA, 19 nt, Artificial Sequence
  Synthetic
guggaauaauuaugcauac

SEQ ID NO: 261155 - RNA, 20 nt, Artificial Sequence
  Synthetic
uguggaauaauuaugcauac

SEQ ID NO: 261156 - RNA, 21 nt, Artificial Sequence
  Synthetic
uuguggaauaauuaugcauac

SEQ ID NO: 261157 - RNA, 22 nt, Artificial Sequence
  Synthetic
auuguggaauaauuaugcauac

SEQ ID NO: 261158 - RNA, 23 nt, Artificial Sequence
  Synthetic
cauuguggaauaauuaugcauac

SEQ ID NO: 261159 - RNA, 24 nt, Artificial Sequence
  Synthetic
acauuguggaauaauuaugcauac

SEQ ID NO: 261160 - RNA, 18 nt, Artificial Sequence
  Synthetic
agugguuuucuugcauac

SEQ ID NO: 261161 - RNA, 19 nt, Artificial Sequence
  Synthetic
gagugguuuucuugcauac

SEQ ID NO: 261162 - RNA, 20 nt, Artificial Sequence
  Synthetic
ugagugguuuucuugcauac

SEQ ID NO: 261163 - RNA, 21 nt, Artificial Sequence
  Synthetic
uugagugguuuucuugcauac

SEQ ID NO: 261164 - RNA, 22 nt, Artificial Sequence
  Synthetic
uuugagugguuuucuugcauac

SEQ ID NO: 261165 - RNA, 23 nt, Artificial Sequence
  Synthetic
cuuugagugguuuucuugcauac

SEQ ID NO: 261166 - RNA, 24 nt, Artificial Sequence
  Synthetic
gcuuugagugguuuucuugcauac

SEQ ID NO: 261167 - RNA, 18 nt, Artificial Sequence
  Synthetic
ugacagacacccucauac

SEQ ID NO: 261168 - RNA, 19 nt, Artificial Sequence
  Synthetic
uugacagacacccucauac

SEQ ID NO: 261169 - RNA, 20 nt, Artificial Sequence
  Synthetic
guugacagacacccucauac

SEQ ID NO: 261170 - RNA, 21 nt, Artificial Sequence
  Synthetic
gguugacagacacccucauac

SEQ ID NO: 261171 - RNA, 22 nt, Artificial Sequence
  Synthetic
ggguugacagacacccucauac

SEQ ID NO: 261172 - RNA, 23 nt, Artificial Sequence
  Synthetic
gggguugacagacacccucauac

SEQ ID NO: 261173 - RNA, 24 nt, Artificial Sequence
  Synthetic
agggguugacagacacccucauac

SEQ ID NO: 261174 - RNA, 18 nt, Artificial Sequence
  Synthetic
aaugugguguauucauac

SEQ ID NO: 261175 - RNA, 19 nt, Artificial Sequence
  Synthetic
aaaugugguguauucauac

SEQ ID NO: 261176 - RNA, 20 nt, Artificial Sequence
  Synthetic
aaaaugugguguauucauac

SEQ ID NO: 261177 - RNA, 21 nt, Artificial Sequence
  Synthetic
gaaaaugugguguauucauac

SEQ ID NO: 261178 - RNA, 22 nt, Artificial Sequence
  Synthetic
agaaaaugugguguauucauac

SEQ ID NO: 261179 - RNA, 23 nt, Artificial Sequence
  Synthetic
aagaaaaugugguguauucauac

SEQ ID NO: 261180 - RNA, 24 nt, Artificial Sequence
  Synthetic
aaagaaaaugugguguauucauac

SEQ ID NO: 261181 - RNA, 18 nt, Artificial Sequence
  Synthetic
gauuuuucucuuucauac

SEQ ID NO: 261182 - RNA, 19 nt, Artificial Sequence
  Synthetic
agauuuuucucuuucauac

SEQ ID NO: 261183 - RNA, 20 nt, Artificial Sequence
  Synthetic
cagauuuuucucuuucauac

SEQ ID NO: 261184 - RNA, 21 nt, Artificial Sequence
  Synthetic
ucagauuuuucucuuucauac

SEQ ID NO: 261185 - RNA, 22 nt, Artificial Sequence
  Synthetic
gucagauuuuucucuuucauac

SEQ ID NO: 261186 - RNA, 23 nt, Artificial Sequence
  Synthetic
agucagauuuuucucuuucauac

SEQ ID NO: 261187 - RNA, 24 nt, Artificial Sequence
  Synthetic
gagucagauuuuucucuuucauac

SEQ ID NO: 261188 - RNA, 18 nt, Artificial Sequence
  Synthetic
aaugagaauaaaagauac

SEQ ID NO: 261189 - RNA, 19 nt, Artificial Sequence
  Synthetic
aaaugagaauaaaagauac

SEQ ID NO: 261190 - RNA, 20 nt, Artificial Sequence
  Synthetic
gaaaugagaauaaaagauac

SEQ ID NO: 261191 - RNA, 21 nt, Artificial Sequence
  Synthetic
ggaaaugagaauaaaagauac

SEQ ID NO: 261192 - RNA, 22 nt, Artificial Sequence
  Synthetic
uggaaaugagaauaaaagauac

SEQ ID NO: 261193 - RNA, 23 nt, Artificial Sequence
  Synthetic
uuggaaaugagaauaaaagauac

SEQ ID NO: 261194 - RNA, 24 nt, Artificial Sequence
  Synthetic
uuuggaaaugagaauaaaagauac

SEQ ID NO: 261195 - RNA, 18 nt, Artificial Sequence
  Synthetic
gucaauuuugaaagauac

SEQ ID NO: 261196 - RNA, 19 nt, Artificial Sequence
  Synthetic
ugucaauuuugaaagauac

SEQ ID NO: 261197 - RNA, 20 nt, Artificial Sequence
  Synthetic
augucaauuuugaaagauac

SEQ ID NO: 261198 - RNA, 21 nt, Artificial Sequence
  Synthetic
gaugucaauuuugaaagauac

SEQ ID NO: 261199 - RNA, 22 nt, Artificial Sequence
  Synthetic
ugaugucaauuuugaaagauac

SEQ ID NO: 261200 - RNA, 23 nt, Artificial Sequence
  Synthetic
augaugucaauuuugaaagauac

SEQ ID NO: 261201 - RNA, 24 nt, Artificial Sequence
  Synthetic
gaugaugucaauuuugaaagauac

SEQ ID NO: 261202 - RNA, 18 nt, Artificial Sequence
  Synthetic
gaaauaggauaaagauac

SEQ ID NO: 261203 - RNA, 19 nt, Artificial Sequence
  Synthetic
agaaauaggauaaagauac

SEQ ID NO: 261204 - RNA, 20 nt, Artificial Sequence
  Synthetic
gagaaauaggauaaagauac

SEQ ID NO: 261205 - RNA, 21 nt, Artificial Sequence
  Synthetic
ggagaaauaggauaaagauac

SEQ ID NO: 261206 - RNA, 22 nt, Artificial Sequence
  Synthetic
gggagaaauaggauaaagauac

SEQ ID NO: 261207 - RNA, 23 nt, Artificial Sequence
  Synthetic
ugggagaaauaggauaaagauac

SEQ ID NO: 261208 - RNA, 24 nt, Artificial Sequence
  Synthetic
uugggagaaauaggauaaagauac

SEQ ID NO: 261209 - RNA, 18 nt, Artificial Sequence
  Synthetic
uagcuugaguaaagauac

SEQ ID NO: 261210 - RNA, 19 nt, Artificial Sequence
  Synthetic
uuagcuugaguaaagauac

SEQ ID NO: 261211 - RNA, 20 nt, Artificial Sequence
  Synthetic
cuuagcuugaguaaagauac

SEQ ID NO: 261212 - RNA, 21 nt, Artificial Sequence
  Synthetic
acuuagcuugaguaaagauac

SEQ ID NO: 261213 - RNA, 22 nt, Artificial Sequence
  Synthetic
gacuuagcuugaguaaagauac

SEQ ID NO: 261214 - RNA, 23 nt, Artificial Sequence
  Synthetic
agacuuagcuugaguaaagauac

SEQ ID NO: 261215 - RNA, 24 nt, Artificial Sequence
  Synthetic
cagacuuagcuugaguaaagauac

SEQ ID NO: 261216 - RNA, 18 nt, Artificial Sequence
  Synthetic
aacaaacaaaacagauac

SEQ ID NO: 261217 - RNA, 19 nt, Artificial Sequence
  Synthetic
gaacaaacaaaacagauac

SEQ ID NO: 261218 - RNA, 20 nt, Artificial Sequence
  Synthetic
ugaacaaacaaaacagauac

SEQ ID NO: 261219 - RNA, 21 nt, Artificial Sequence
  Synthetic
uugaacaaacaaaacagauac

SEQ ID NO: 261220 - RNA, 22 nt, Artificial Sequence
  Synthetic
guugaacaaacaaaacagauac

SEQ ID NO: 261221 - RNA, 23 nt, Artificial Sequence
  Synthetic
gguugaacaaacaaaacagauac

SEQ ID NO: 261222 - RNA, 24 nt, Artificial Sequence
  Synthetic
agguugaacaaacaaaacagauac

SEQ ID NO: 261223 - RNA, 18 nt, Artificial Sequence
  Synthetic
uaaucaaagaggagauac

SEQ ID NO: 261224 - RNA, 19 nt, Artificial Sequence
  Synthetic
uuaaucaaagaggagauac

SEQ ID NO: 261225 - RNA, 20 nt, Artificial Sequence
  Synthetic
uuuaaucaaagaggagauac

SEQ ID NO: 261226 - RNA, 21 nt, Artificial Sequence
  Synthetic
auuuaaucaaagaggagauac

SEQ ID NO: 261227 - RNA, 22 nt, Artificial Sequence
  Synthetic
cauuuaaucaaagaggagauac

SEQ ID NO: 261228 - RNA, 23 nt, Artificial Sequence
  Synthetic
acauuuaaucaaagaggagauac

SEQ ID NO: 261229 - RNA, 24 nt, Artificial Sequence
  Synthetic
gacauuuaaucaaagaggagauac

SEQ ID NO: 261230 - RNA, 18 nt, Artificial Sequence
  Synthetic
uuagggaauuggagauac

SEQ ID NO: 261231 - RNA, 19 nt, Artificial Sequence
  Synthetic
auuagggaauuggagauac

SEQ ID NO: 261232 - RNA, 20 nt, Artificial Sequence
  Synthetic
aauuagggaauuggagauac

SEQ ID NO: 261233 - RNA, 21 nt, Artificial Sequence
  Synthetic
uaauuagggaauuggagauac

SEQ ID NO: 261234 - RNA, 22 nt, Artificial Sequence
  Synthetic
cuaauuagggaauuggagauac

SEQ ID NO: 261235 - RNA, 23 nt, Artificial Sequence
  Synthetic
ucuaauuagggaauuggagauac

SEQ ID NO: 261236 - RNA, 24 nt, Artificial Sequence
  Synthetic
uucuaauuagggaauuggagauac

SEQ ID NO: 261237 - RNA, 18 nt, Artificial Sequence
  Synthetic
caguguguucugagauac

SEQ ID NO: 261238 - RNA, 19 nt, Artificial Sequence
  Synthetic
acaguguguucugagauac

SEQ ID NO: 261239 - RNA, 20 nt, Artificial Sequence
  Synthetic
uacaguguguucugagauac

SEQ ID NO: 261240 - RNA, 21 nt, Artificial Sequence
  Synthetic
auacaguguguucugagauac

SEQ ID NO: 261241 - RNA, 22 nt, Artificial Sequence
  Synthetic
cauacaguguguucugagauac

SEQ ID NO: 261242 - RNA, 23 nt, Artificial Sequence
  Synthetic
gcauacaguguguucugagauac

SEQ ID NO: 261243 - RNA, 24 nt, Artificial Sequence
  Synthetic
ugcauacaguguguucugagauac

SEQ ID NO: 261244 - RNA, 18 nt, Artificial Sequence
  Synthetic
gaacuuuccuauagauac

SEQ ID NO: 261245 - RNA, 19 nt, Artificial Sequence
  Synthetic
ugaacuuuccuauagauac

SEQ ID NO: 261246 - RNA, 20 nt, Artificial Sequence
  Synthetic
gugaacuuuccuauagauac

SEQ ID NO: 261247 - RNA, 21 nt, Artificial Sequence
  Synthetic
agugaacuuuccuauagauac

SEQ ID NO: 261248 - RNA, 22 nt, Artificial Sequence
  Synthetic
cagugaacuuuccuauagauac

SEQ ID NO: 261249 - RNA, 23 nt, Artificial Sequence
  Synthetic
ucagugaacuuuccuauagauac

SEQ ID NO: 261250 - RNA, 24 nt, Artificial Sequence
  Synthetic
cucagugaacuuuccuauagauac

SEQ ID NO: 261251 - RNA, 18 nt, Artificial Sequence
  Synthetic
aaugcuagaugaggauac

SEQ ID NO: 261252 - RNA, 19 nt, Artificial Sequence
  Synthetic
aaaugcuagaugaggauac

SEQ ID NO: 261253 - RNA, 20 nt, Artificial Sequence
  Synthetic
uaaaugcuagaugaggauac

SEQ ID NO: 261254 - RNA, 21 nt, Artificial Sequence
  Synthetic
cuaaaugcuagaugaggauac

SEQ ID NO: 261255 - RNA, 22 nt, Artificial Sequence
  Synthetic
acuaaaugcuagaugaggauac

SEQ ID NO: 261256 - RNA, 23 nt, Artificial Sequence
  Synthetic
uacuaaaugcuagaugaggauac

SEQ ID NO: 261257 - RNA, 24 nt, Artificial Sequence
  Synthetic
cuacuaaaugcuagaugaggauac

SEQ ID NO: 261258 - RNA, 18 nt, Artificial Sequence
  Synthetic
uuuuaacuguuaggauac

SEQ ID NO: 261259 - RNA, 19 nt, Artificial Sequence
  Synthetic
uuuuuaacuguuaggauac

SEQ ID NO: 261260 - RNA, 20 nt, Artificial Sequence
  Synthetic
guuuuuaacuguuaggauac

SEQ ID NO: 261261 - RNA, 21 nt, Artificial Sequence
  Synthetic
uguuuuuaacuguuaggauac

SEQ ID NO: 261262 - RNA, 22 nt, Artificial Sequence
  Synthetic
guguuuuuaacuguuaggauac

SEQ ID NO: 261263 - RNA, 23 nt, Artificial Sequence
  Synthetic
uguguuuuuaacuguuaggauac

SEQ ID NO: 261264 - RNA, 24 nt, Artificial Sequence
  Synthetic
uuguguuuuuaacuguuaggauac

SEQ ID NO: 261265 - RNA, 18 nt, Artificial Sequence
  Synthetic
agaugguagaggggauac

SEQ ID NO: 261266 - RNA, 19 nt, Artificial Sequence
  Synthetic
gagaugguagaggggauac

SEQ ID NO: 261267 - RNA, 20 nt, Artificial Sequence
  Synthetic
agagaugguagaggggauac

SEQ ID NO: 261268 - RNA, 21 nt, Artificial Sequence
  Synthetic
cagagaugguagaggggauac

SEQ ID NO: 261269 - RNA, 22 nt, Artificial Sequence
  Synthetic
ucagagaugguagaggggauac

SEQ ID NO: 261270 - RNA, 23 nt, Artificial Sequence
  Synthetic
aucagagaugguagaggggauac

SEQ ID NO: 261271 - RNA, 24 nt, Artificial Sequence
  Synthetic
uaucagagaugguagaggggauac

SEQ ID NO: 261272 - RNA, 18 nt, Artificial Sequence
  Synthetic
uauauauuuaugggauac

SEQ ID NO: 261273 - RNA, 19 nt, Artificial Sequence
  Synthetic
auauauauuuaugggauac

SEQ ID NO: 261274 - RNA, 20 nt, Artificial Sequence
  Synthetic
uauauauauuuaugggauac

SEQ ID NO: 261275 - RNA, 21 nt, Artificial Sequence
  Synthetic
guauauauauuuaugggauac

SEQ ID NO: 261276 - RNA, 22 nt, Artificial Sequence
  Synthetic
gguauauauauuuaugggauac

SEQ ID NO: 261277 - RNA, 23 nt, Artificial Sequence
  Synthetic
agguauauauauuuaugggauac

SEQ ID NO: 261278 - RNA, 24 nt, Artificial Sequence
  Synthetic
uagguauauauauuuaugggauac

SEQ ID NO: 261279 - RNA, 18 nt, Artificial Sequence
  Synthetic
gagaagcaacauggauac

SEQ ID NO: 261280 - RNA, 19 nt, Artificial Sequence
  Synthetic
ugagaagcaacauggauac

SEQ ID NO: 261281 - RNA, 20 nt, Artificial Sequence
  Synthetic
uugagaagcaacauggauac

SEQ ID NO: 261282 - RNA, 21 nt, Artificial Sequence
  Synthetic
auugagaagcaacauggauac

SEQ ID NO: 261283 - RNA, 22 nt, Artificial Sequence
  Synthetic
gauugagaagcaacauggauac

SEQ ID NO: 261284 - RNA, 23 nt, Artificial Sequence
  Synthetic
ugauugagaagcaacauggauac

SEQ ID NO: 261285 - RNA, 24 nt, Artificial Sequence
  Synthetic
uugauugagaagcaacauggauac

SEQ ID NO: 261286 - RNA, 18 nt, Artificial Sequence
  Synthetic
agcaaagggcauggauac

SEQ ID NO: 261287 - RNA, 19 nt, Artificial Sequence
  Synthetic
uagcaaagggcauggauac

SEQ ID NO: 261288 - RNA, 20 nt, Artificial Sequence
  Synthetic
uuagcaaagggcauggauac

SEQ ID NO: 261289 - RNA, 21 nt, Artificial Sequence
  Synthetic
cuuagcaaagggcauggauac

SEQ ID NO: 261290 - RNA, 22 nt, Artificial Sequence
  Synthetic
acuuagcaaagggcauggauac

SEQ ID NO: 261291 - RNA, 23 nt, Artificial Sequence
  Synthetic
uacuuagcaaagggcauggauac

SEQ ID NO: 261292 - RNA, 24 nt, Artificial Sequence
  Synthetic
uuacuuagcaaagggcauggauac

SEQ ID NO: 261293 - RNA, 18 nt, Artificial Sequence
  Synthetic
uugguauggagaugauac

SEQ ID NO: 261294 - RNA, 19 nt, Artificial Sequence
  Synthetic
cuugguauggagaugauac

SEQ ID NO: 261295 - RNA, 20 nt, Artificial Sequence
  Synthetic
gcuugguauggagaugauac

SEQ ID NO: 261296 - RNA, 21 nt, Artificial Sequence
  Synthetic
ugcuugguauggagaugauac

SEQ ID NO: 261297 - RNA, 22 nt, Artificial Sequence
  Synthetic
uugcuugguauggagaugauac

SEQ ID NO: 261298 - RNA, 23 nt, Artificial Sequence
  Synthetic
uuugcuugguauggagaugauac

SEQ ID NO: 261299 - RNA, 24 nt, Artificial Sequence
  Synthetic
auuugcuugguauggagaugauac

SEQ ID NO: 261300 - RNA, 18 nt, Artificial Sequence
  Synthetic
uuugaaaauaaaauauac

SEQ ID NO: 261301 - RNA, 19 nt, Artificial Sequence
  Synthetic
cuuugaaaauaaaauauac

SEQ ID NO: 261302 - RNA, 20 nt, Artificial Sequence
  Synthetic
acuuugaaaauaaaauauac

SEQ ID NO: 261303 - RNA, 21 nt, Artificial Sequence
  Synthetic
uacuuugaaaauaaaauauac

SEQ ID NO: 261304 - RNA, 22 nt, Artificial Sequence
  Synthetic
uuacuuugaaaauaaaauauac

SEQ ID NO: 261305 - RNA, 23 nt, Artificial Sequence
  Synthetic
uuuacuuugaaaauaaaauauac

SEQ ID NO: 261306 - RNA, 24 nt, Artificial Sequence
  Synthetic
uuuuacuuugaaaauaaaauauac

SEQ ID NO: 261307 - RNA, 18 nt, Artificial Sequence
  Synthetic
guauugcuguaaauauac

SEQ ID NO: 261308 - RNA, 19 nt, Artificial Sequence
  Synthetic
gguauugcuguaaauauac

SEQ ID NO: 261309 - RNA, 20 nt, Artificial Sequence
  Synthetic
ggguauugcuguaaauauac

SEQ ID NO: 261310 - RNA, 21 nt, Artificial Sequence
  Synthetic
gggguauugcuguaaauauac

SEQ ID NO: 261311 - RNA, 22 nt, Artificial Sequence
  Synthetic
ugggguauugcuguaaauauac

SEQ ID NO: 261312 - RNA, 23 nt, Artificial Sequence
  Synthetic
gugggguauugcuguaaauauac

SEQ ID NO: 261313 - RNA, 24 nt, Artificial Sequence
  Synthetic
agugggguauugcuguaaauauac

SEQ ID NO: 261314 - RNA, 18 nt, Artificial Sequence
  Synthetic
uauuuauuuuuaauauac

SEQ ID NO: 261315 - RNA, 19 nt, Artificial Sequence
  Synthetic
auauuuauuuuuaauauac

SEQ ID NO: 261316 - RNA, 20 nt, Artificial Sequence
  Synthetic
uauauuuauuuuuaauauac

SEQ ID NO: 261317 - RNA, 21 nt, Artificial Sequence
  Synthetic
auauauuuauuuuuaauauac

SEQ ID NO: 261318 - RNA, 22 nt, Artificial Sequence
  Synthetic
uauauauuuauuuuuaauauac

SEQ ID NO: 261319 - RNA, 23 nt, Artificial Sequence
  Synthetic
guauauauuuauuuuuaauauac

SEQ ID NO: 261320 - RNA, 24 nt, Artificial Sequence
  Synthetic
uguauauauuuauuuuuaauauac

SEQ ID NO: 261321 - RNA, 18 nt, Artificial Sequence
  Synthetic
gacacugcuggcauauac

SEQ ID NO: 261322 - RNA, 19 nt, Artificial Sequence
  Synthetic
ggacacugcuggcauauac

SEQ ID NO: 261323 - RNA, 20 nt, Artificial Sequence
  Synthetic
aggacacugcuggcauauac

SEQ ID NO: 261324 - RNA, 21 nt, Artificial Sequence
  Synthetic
uaggacacugcuggcauauac

SEQ ID NO: 261325 - RNA, 22 nt, Artificial Sequence
  Synthetic
cuaggacacugcuggcauauac

SEQ ID NO: 261326 - RNA, 23 nt, Artificial Sequence
  Synthetic
acuaggacacugcuggcauauac

SEQ ID NO: 261327 - RNA, 24 nt, Artificial Sequence
  Synthetic
uacuaggacacugcuggcauauac

SEQ ID NO: 261328 - RNA, 18 nt, Artificial Sequence
  Synthetic
augcuuauauucauauac

SEQ ID NO: 261329 - RNA, 19 nt, Artificial Sequence
  Synthetic
aaugcuuauauucauauac

SEQ ID NO: 261330 - RNA, 20 nt, Artificial Sequence
  Synthetic
aaaugcuuauauucauauac

SEQ ID NO: 261331 - RNA, 21 nt, Artificial Sequence
  Synthetic
aaaaugcuuauauucauauac

SEQ ID NO: 261332 - RNA, 22 nt, Artificial Sequence
  Synthetic
caaaaugcuuauauucauauac

SEQ ID NO: 261333 - RNA, 23 nt, Artificial Sequence
  Synthetic
acaaaaugcuuauauucauauac

SEQ ID NO: 261334 - RNA, 24 nt, Artificial Sequence
  Synthetic
aacaaaaugcuuauauucauauac

SEQ ID NO: 261335 - RNA, 18 nt, Artificial Sequence
  Synthetic
auaguuucaaugauauac

SEQ ID NO: 261336 - RNA, 19 nt, Artificial Sequence
  Synthetic
aauaguuucaaugauauac

SEQ ID NO: 261337 - RNA, 20 nt, Artificial Sequence
  Synthetic
aaauaguuucaaugauauac

SEQ ID NO: 261338 - RNA, 21 nt, Artificial Sequence
  Synthetic
aaaauaguuucaaugauauac

SEQ ID NO: 261339 - RNA, 22 nt, Artificial Sequence
  Synthetic
aaaaauaguuucaaugauauac

SEQ ID NO: 261340 - RNA, 23 nt, Artificial Sequence
  Synthetic
aaaaaauaguuucaaugauauac

SEQ ID NO: 261341 - RNA, 24 nt, Artificial Sequence
  Synthetic
uaaaaaauaguuucaaugauauac

SEQ ID NO: 261342 - RNA, 18 nt, Artificial Sequence
  Synthetic
aucauuccacauauauac

SEQ ID NO: 261343 - RNA, 19 nt, Artificial Sequence
  Synthetic
gaucauuccacauauauac

SEQ ID NO: 261344 - RNA, 20 nt, Artificial Sequence
  Synthetic
agaucauuccacauauauac

SEQ ID NO: 261345 - RNA, 21 nt, Artificial Sequence
  Synthetic
cagaucauuccacauauauac

SEQ ID NO: 261346 - RNA, 22 nt, Artificial Sequence
  Synthetic
acagaucauuccacauauauac

SEQ ID NO: 261347 - RNA, 23 nt, Artificial Sequence
  Synthetic
aacagaucauuccacauauauac

SEQ ID NO: 261348 - RNA, 24 nt, Artificial Sequence
  Synthetic
caacagaucauuccacauauauac

SEQ ID NO: 261349 - RNA, 18 nt, Artificial Sequence
  Synthetic
auaaguauauauauauac

SEQ ID NO: 261350 - RNA, 19 nt, Artificial Sequence
  Synthetic
uauaaguauauauauauac

SEQ ID NO: 261351 - RNA, 20 nt, Artificial Sequence
  Synthetic
auauaaguauauauauauac

SEQ ID NO: 261352 - RNA, 21 nt, Artificial Sequence
  Synthetic
uauauaaguauauauauauac

SEQ ID NO: 261353 - RNA, 22 nt, Artificial Sequence
  Synthetic
auauauaaguauauauauauac

SEQ ID NO: 261354 - RNA, 23 nt, Artificial Sequence
  Synthetic
uauauauaaguauauauauauac

SEQ ID NO: 261355 - RNA, 24 nt, Artificial Sequence
  Synthetic
auauauauaaguauauauauauac

SEQ ID NO: 261356 - RNA, 18 nt, Artificial Sequence
  Synthetic
augcagcccucaguauac

SEQ ID NO: 261357 - RNA, 19 nt, Artificial Sequence
  Synthetic
gaugcagcccucaguauac

SEQ ID NO: 261358 - RNA, 20 nt, Artificial Sequence
  Synthetic
ugaugcagcccucaguauac

SEQ ID NO: 261359 - RNA, 21 nt, Artificial Sequence
  Synthetic
cugaugcagcccucaguauac

SEQ ID NO: 261360 - RNA, 22 nt, Artificial Sequence
  Synthetic
ucugaugcagcccucaguauac

SEQ ID NO: 261361 - RNA, 23 nt, Artificial Sequence
  Synthetic
uucugaugcagcccucaguauac

SEQ ID NO: 261362 - RNA, 24 nt, Artificial Sequence
  Synthetic
uuucugaugcagcccucaguauac

SEQ ID NO: 261363 - RNA, 18 nt, Artificial Sequence
  Synthetic
auuuuguucagaguauac

SEQ ID NO: 261364 - RNA, 19 nt, Artificial Sequence
  Synthetic
aauuuuguucagaguauac

SEQ ID NO: 261365 - RNA, 20 nt, Artificial Sequence
  Synthetic
uaauuuuguucagaguauac

SEQ ID NO: 261366 - RNA, 21 nt, Artificial Sequence
  Synthetic
uuaauuuuguucagaguauac

SEQ ID NO: 261367 - RNA, 22 nt, Artificial Sequence
  Synthetic
uuuaauuuuguucagaguauac

SEQ ID NO: 261368 - RNA, 23 nt, Artificial Sequence
  Synthetic
guuuaauuuuguucagaguauac

SEQ ID NO: 261369 - RNA, 24 nt, Artificial Sequence
  Synthetic
uguuuaauuuuguucagaguauac

SEQ ID NO: 261370 - RNA, 18 nt, Artificial Sequence
  Synthetic
gggggccagagaguauac

SEQ ID NO: 261371 - RNA, 19 nt, Artificial Sequence
  Synthetic
agggggccagagaguauac

SEQ ID NO: 261372 - RNA, 20 nt, Artificial Sequence
  Synthetic
aagggggccagagaguauac

SEQ ID NO: 261373 - RNA, 21 nt, Artificial Sequence
  Synthetic
gaagggggccagagaguauac

SEQ ID NO: 261374 - RNA, 22 nt, Artificial Sequence
  Synthetic
ggaagggggccagagaguauac

SEQ ID NO: 261375 - RNA, 23 nt, Artificial Sequence
  Synthetic
aggaagggggccagagaguauac

SEQ ID NO: 261376 - RNA, 24 nt, Artificial Sequence
  Synthetic
gaggaagggggccagagaguauac

SEQ ID NO: 261377 - RNA, 18 nt, Artificial Sequence
  Synthetic
uaaaaggagaauguauac

SEQ ID NO: 261378 - RNA, 19 nt, Artificial Sequence
  Synthetic
uuaaaaggagaauguauac

SEQ ID NO: 261379 - RNA, 20 nt, Artificial Sequence
  Synthetic
guuaaaaggagaauguauac

SEQ ID NO: 261380 - RNA, 21 nt, Artificial Sequence
  Synthetic
cguuaaaaggagaauguauac

SEQ ID NO: 261381 - RNA, 22 nt, Artificial Sequence
  Synthetic
acguuaaaaggagaauguauac

SEQ ID NO: 261382 - RNA, 23 nt, Artificial Sequence
  Synthetic
aacguuaaaaggagaauguauac

SEQ ID NO: 261383 - RNA, 24 nt, Artificial Sequence
  Synthetic
aaacguuaaaaggagaauguauac

SEQ ID NO: 261384 - RNA, 18 nt, Artificial Sequence
  Synthetic
caaaaguuuggauuauac

SEQ ID NO: 261385 - RNA, 19 nt, Artificial Sequence
  Synthetic
gcaaaaguuuggauuauac

SEQ ID NO: 261386 - RNA, 20 nt, Artificial Sequence
  Synthetic
ugcaaaaguuuggauuauac

SEQ ID NO: 261387 - RNA, 21 nt, Artificial Sequence
  Synthetic
augcaaaaguuuggauuauac

SEQ ID NO: 261388 - RNA, 22 nt, Artificial Sequence
  Synthetic
gaugcaaaaguuuggauuauac

SEQ ID NO: 261389 - RNA, 23 nt, Artificial Sequence
  Synthetic
ggaugcaaaaguuuggauuauac

SEQ ID NO: 261390 - RNA, 24 nt, Artificial Sequence
  Synthetic
aggaugcaaaaguuuggauuauac

SEQ ID NO: 261391 - RNA, 18 nt, Artificial Sequence
  Synthetic
uuuuagugcugauuauac

SEQ ID NO: 261392 - RNA, 19 nt, Artificial Sequence
  Synthetic
uuuuuagugcugauuauac

SEQ ID NO: 261393 - RNA, 20 nt, Artificial Sequence
  Synthetic
uuuuuuagugcugauuauac

SEQ ID NO: 261394 - RNA, 21 nt, Artificial Sequence
  Synthetic
guuuuuuagugcugauuauac

SEQ ID NO: 261395 - RNA, 22 nt, Artificial Sequence
  Synthetic
uguuuuuuagugcugauuauac

SEQ ID NO: 261396 - RNA, 23 nt, Artificial Sequence
  Synthetic
auguuuuuuagugcugauuauac

SEQ ID NO: 261397 - RNA, 24 nt, Artificial Sequence
  Synthetic
aauguuuuuuagugcugauuauac

SEQ ID NO: 261398 - RNA, 18 nt, Artificial Sequence
  Synthetic
auguguuaguuauuauac

SEQ ID NO: 261399 - RNA, 19 nt, Artificial Sequence
  Synthetic
uauguguuaguuauuauac

SEQ ID NO: 261400 - RNA, 20 nt, Artificial Sequence
  Synthetic
uuauguguuaguuauuauac

SEQ ID NO: 261401 - RNA, 21 nt, Artificial Sequence
  Synthetic
guuauguguuaguuauuauac

SEQ ID NO: 261402 - RNA, 22 nt, Artificial Sequence
  Synthetic
aguuauguguuaguuauuauac

SEQ ID NO: 261403 - RNA, 23 nt, Artificial Sequence
  Synthetic
caguuauguguuaguuauuauac

SEQ ID NO: 261404 - RNA, 24 nt, Artificial Sequence
  Synthetic
ucaguuauguguuaguuauuauac

SEQ ID NO: 261405 - RNA, 18 nt, Artificial Sequence
  Synthetic
auuuuugaguccuuauac

SEQ ID NO: 261406 - RNA, 19 nt, Artificial Sequence
  Synthetic
uauuuuugaguccuuauac

SEQ ID NO: 261407 - RNA, 20 nt, Artificial Sequence
  Synthetic
guauuuuugaguccuuauac

SEQ ID NO: 261408 - RNA, 21 nt, Artificial Sequence
  Synthetic
uguauuuuugaguccuuauac

SEQ ID NO: 261409 - RNA, 22 nt, Artificial Sequence
  Synthetic
cuguauuuuugaguccuuauac

SEQ ID NO: 261410 - RNA, 23 nt, Artificial Sequence
  Synthetic
gcuguauuuuugaguccuuauac

SEQ ID NO: 261411 - RNA, 24 nt, Artificial Sequence
  Synthetic
agcuguauuuuugaguccuuauac

SEQ ID NO: 261412 - RNA, 18 nt, Artificial Sequence
  Synthetic
gggaccugggaguuauac

SEQ ID NO: 261413 - RNA, 19 nt, Artificial Sequence
  Synthetic
ugggaccugggaguuauac

SEQ ID NO: 261414 - RNA, 20 nt, Artificial Sequence
  Synthetic
uugggaccugggaguuauac

SEQ ID NO: 261415 - RNA, 21 nt, Artificial Sequence
  Synthetic
auugggaccugggaguuauac

SEQ ID NO: 261416 - RNA, 22 nt, Artificial Sequence
  Synthetic
aauugggaccugggaguuauac

SEQ ID NO: 261417 - RNA, 23 nt, Artificial Sequence
  Synthetic
aaauugggaccugggaguuauac

SEQ ID NO: 261418 - RNA, 24 nt, Artificial Sequence
  Synthetic
aaaauugggaccugggaguuauac

SEQ ID NO: 261419 - RNA, 18 nt, Artificial Sequence
  Synthetic
acaggguacugguuauac

SEQ ID NO: 261420 - RNA, 19 nt, Artificial Sequence
  Synthetic
gacaggguacugguuauac

SEQ ID NO: 261421 - RNA, 20 nt, Artificial Sequence
  Synthetic
ugacaggguacugguuauac

SEQ ID NO: 261422 - RNA, 21 nt, Artificial Sequence
  Synthetic
uugacaggguacugguuauac

SEQ ID NO: 261423 - RNA, 22 nt, Artificial Sequence
  Synthetic
guugacaggguacugguuauac

SEQ ID NO: 261424 - RNA, 23 nt, Artificial Sequence
  Synthetic
aguugacaggguacugguuauac

SEQ ID NO: 261425 - RNA, 24 nt, Artificial Sequence
  Synthetic
aaguugacaggguacugguuauac

SEQ ID NO: 261426 - RNA, 18 nt, Artificial Sequence
  Synthetic
agacuggauaauuuauac

SEQ ID NO: 261427 - RNA, 19 nt, Artificial Sequence
  Synthetic
gagacuggauaauuuauac

SEQ ID NO: 261428 - RNA, 20 nt, Artificial Sequence
  Synthetic
cgagacuggauaauuuauac

SEQ ID NO: 261429 - RNA, 21 nt, Artificial Sequence
  Synthetic
ccgagacuggauaauuuauac

SEQ ID NO: 261430 - RNA, 22 nt, Artificial Sequence
  Synthetic
cccgagacuggauaauuuauac

SEQ ID NO: 261431 - RNA, 23 nt, Artificial Sequence
  Synthetic
acccgagacuggauaauuuauac

SEQ ID NO: 261432 - RNA, 24 nt, Artificial Sequence
  Synthetic
uacccgagacuggauaauuuauac

SEQ ID NO: 261433 - RNA, 18 nt, Artificial Sequence
  Synthetic
agacugggucauuuauac

SEQ ID NO: 261434 - RNA, 19 nt, Artificial Sequence
  Synthetic
gagacugggucauuuauac

SEQ ID NO: 261435 - RNA, 20 nt, Artificial Sequence
  Synthetic
ugagacugggucauuuauac

SEQ ID NO: 261436 - RNA, 21 nt, Artificial Sequence
  Synthetic
augagacugggucauuuauac

SEQ ID NO: 261437 - RNA, 22 nt, Artificial Sequence
  Synthetic
caugagacugggucauuuauac

SEQ ID NO: 261438 - RNA, 23 nt, Artificial Sequence
  Synthetic
acaugagacugggucauuuauac

SEQ ID NO: 261439 - RNA, 24 nt, Artificial Sequence
  Synthetic
uacaugagacugggucauuuauac

SEQ ID NO: 261440 - RNA, 18 nt, Artificial Sequence
  Synthetic
cauuuccaaauuuuauac

SEQ ID NO: 261441 - RNA, 19 nt, Artificial Sequence
  Synthetic
ucauuuccaaauuuuauac

SEQ ID NO: 261442 - RNA, 20 nt, Artificial Sequence
  Synthetic
cucauuuccaaauuuuauac

SEQ ID NO: 261443 - RNA, 21 nt, Artificial Sequence
  Synthetic
ccucauuuccaaauuuuauac

SEQ ID NO: 261444 - RNA, 22 nt, Artificial Sequence
  Synthetic
uccucauuuccaaauuuuauac

SEQ ID NO: 261445 - RNA, 23 nt, Artificial Sequence
  Synthetic
uuccucauuuccaaauuuuauac

SEQ ID NO: 261446 - RNA, 24 nt, Artificial Sequence
  Synthetic
guuccucauuuccaaauuuuauac

SEQ ID NO: 261447 - RNA, 18 nt, Artificial Sequence
  Synthetic
aucacaucccaaaacuac

SEQ ID NO: 261448 - RNA, 19 nt, Artificial Sequence
  Synthetic
aaucacaucccaaaacuac

SEQ ID NO: 261449 - RNA, 20 nt, Artificial Sequence
  Synthetic
gaaucacaucccaaaacuac

SEQ ID NO: 261450 - RNA, 21 nt, Artificial Sequence
  Synthetic
ggaaucacaucccaaaacuac

SEQ ID NO: 261451 - RNA, 22 nt, Artificial Sequence
  Synthetic
uggaaucacaucccaaaacuac

SEQ ID NO: 261452 - RNA, 23 nt, Artificial Sequence
  Synthetic
cuggaaucacaucccaaaacuac

SEQ ID NO: 261453 - RNA, 24 nt, Artificial Sequence
  Synthetic
ccuggaaucacaucccaaaacuac

SEQ ID NO: 261454 - RNA, 18 nt, Artificial Sequence
  Synthetic
ucaaaaccacacaacuac

SEQ ID NO: 261455 - RNA, 19 nt, Artificial Sequence
  Synthetic
cucaaaaccacacaacuac

SEQ ID NO: 261456 - RNA, 20 nt, Artificial Sequence
  Synthetic
acucaaaaccacacaacuac

SEQ ID NO: 261457 - RNA, 21 nt, Artificial Sequence
  Synthetic
cacucaaaaccacacaacuac

SEQ ID NO: 261458 - RNA, 22 nt, Artificial Sequence
  Synthetic
ucacucaaaaccacacaacuac

SEQ ID NO: 261459 - RNA, 23 nt, Artificial Sequence
  Synthetic
cucacucaaaaccacacaacuac

SEQ ID NO: 261460 - RNA, 24 nt, Artificial Sequence
  Synthetic
acucacucaaaaccacacaacuac

SEQ ID NO: 261461 - RNA, 18 nt, Artificial Sequence
  Synthetic
gccuguaaucccaacuac

SEQ ID NO: 261462 - RNA, 19 nt, Artificial Sequence
  Synthetic
cgccuguaaucccaacuac

SEQ ID NO: 261463 - RNA, 20 nt, Artificial Sequence
  Synthetic
acgccuguaaucccaacuac

SEQ ID NO: 261464 - RNA, 21 nt, Artificial Sequence
  Synthetic
cacgccuguaaucccaacuac

SEQ ID NO: 261465 - RNA, 22 nt, Artificial Sequence
  Synthetic
acacgccuguaaucccaacuac

SEQ ID NO: 261466 - RNA, 23 nt, Artificial Sequence
  Synthetic
cacacgccuguaaucccaacuac

SEQ ID NO: 261467 - RNA, 24 nt, Artificial Sequence
  Synthetic
gcacacgccuguaaucccaacuac

SEQ ID NO: 261468 - RNA, 18 nt, Artificial Sequence
  Synthetic
uaucgccauagcaacuac

SEQ ID NO: 261469 - RNA, 19 nt, Artificial Sequence
  Synthetic
auaucgccauagcaacuac

SEQ ID NO: 261470 - RNA, 20 nt, Artificial Sequence
  Synthetic
uauaucgccauagcaacuac

SEQ ID NO: 261471 - RNA, 21 nt, Artificial Sequence
  Synthetic
uuauaucgccauagcaacuac

SEQ ID NO: 261472 - RNA, 22 nt, Artificial Sequence
  Synthetic
uuuauaucgccauagcaacuac

SEQ ID NO: 261473 - RNA, 23 nt, Artificial Sequence
  Synthetic
guuuauaucgccauagcaacuac

SEQ ID NO: 261474 - RNA, 24 nt, Artificial Sequence
  Synthetic
uguuuauaucgccauagcaacuac

SEQ ID NO: 261475 - RNA, 18 nt, Artificial Sequence
  Synthetic
gcugcuauaaagaacuac

SEQ ID NO: 261476 - RNA, 19 nt, Artificial Sequence
  Synthetic
ugcugcuauaaagaacuac

SEQ ID NO: 261477 - RNA, 20 nt, Artificial Sequence
  Synthetic
augcugcuauaaagaacuac

SEQ ID NO: 261478 - RNA, 21 nt, Artificial Sequence
  Synthetic
caugcugcuauaaagaacuac

SEQ ID NO: 261479 - RNA, 22 nt, Artificial Sequence
  Synthetic
ucaugcugcuauaaagaacuac

SEQ ID NO: 261480 - RNA, 23 nt, Artificial Sequence
  Synthetic
cucaugcugcuauaaagaacuac

SEQ ID NO: 261481 - RNA, 24 nt, Artificial Sequence
  Synthetic
ucucaugcugcuauaaagaacuac

SEQ ID NO: 261482 - RNA, 18 nt, Artificial Sequence
  Synthetic
cguuagcccuugaacuac

SEQ ID NO: 261483 - RNA, 19 nt, Artificial Sequence
  Synthetic
acguuagcccuugaacuac

SEQ ID NO: 261484 - RNA, 20 nt, Artificial Sequence
  Synthetic
cacguuagcccuugaacuac

SEQ ID NO: 261485 - RNA, 21 nt, Artificial Sequence
  Synthetic
ccacguuagcccuugaacuac

SEQ ID NO: 261486 - RNA, 22 nt, Artificial Sequence
  Synthetic
uccacguuagcccuugaacuac

SEQ ID NO: 261487 - RNA, 23 nt, Artificial Sequence
  Synthetic
guccacguuagcccuugaacuac

SEQ ID NO: 261488 - RNA, 24 nt, Artificial Sequence
  Synthetic
aguccacguuagcccuugaacuac

SEQ ID NO: 261489 - RNA, 18 nt, Artificial Sequence
  Synthetic
aguagguugaaucacuac

SEQ ID NO: 261490 - RNA, 19 nt, Artificial Sequence
  Synthetic
aaguagguugaaucacuac

SEQ ID NO: 261491 - RNA, 20 nt, Artificial Sequence
  Synthetic
caaguagguugaaucacuac

SEQ ID NO: 261492 - RNA, 21 nt, Artificial Sequence
  Synthetic
acaaguagguugaaucacuac

SEQ ID NO: 261493 - RNA, 22 nt, Artificial Sequence
  Synthetic
gacaaguagguugaaucacuac

SEQ ID NO: 261494 - RNA, 23 nt, Artificial Sequence
  Synthetic
ggacaaguagguugaaucacuac

SEQ ID NO: 261495 - RNA, 24 nt, Artificial Sequence
  Synthetic
gggacaaguagguugaaucacuac

SEQ ID NO: 261496 - RNA, 18 nt, Artificial Sequence
  Synthetic
auagacauuggggacuac

SEQ ID NO: 261497 - RNA, 19 nt, Artificial Sequence
  Synthetic
aauagacauuggggacuac

SEQ ID NO: 261498 - RNA, 20 nt, Artificial Sequence
  Synthetic
caauagacauuggggacuac

SEQ ID NO: 261499 - RNA, 21 nt, Artificial Sequence
  Synthetic
acaauagacauuggggacuac

SEQ ID NO: 261500 - RNA, 22 nt, Artificial Sequence
  Synthetic
aacaauagacauuggggacuac

SEQ ID NO: 261501 - RNA, 23 nt, Artificial Sequence
  Synthetic
aaacaauagacauuggggacuac

SEQ ID NO: 261502 - RNA, 24 nt, Artificial Sequence
  Synthetic
aaaacaauagacauuggggacuac

SEQ ID NO: 261503 - RNA, 18 nt, Artificial Sequence
  Synthetic
gugaauguaugauacuac

SEQ ID NO: 261504 - RNA, 19 nt, Artificial Sequence
  Synthetic
cgugaauguaugauacuac

SEQ ID NO: 261505 - RNA, 20 nt, Artificial Sequence
  Synthetic
gcgugaauguaugauacuac

SEQ ID NO: 261506 - RNA, 21 nt, Artificial Sequence
  Synthetic
agcgugaauguaugauacuac

SEQ ID NO: 261507 - RNA, 22 nt, Artificial Sequence
  Synthetic
gagcgugaauguaugauacuac

SEQ ID NO: 261508 - RNA, 23 nt, Artificial Sequence
  Synthetic
ggagcgugaauguaugauacuac

SEQ ID NO: 261509 - RNA, 24 nt, Artificial Sequence
  Synthetic
uggagcgugaauguaugauacuac

SEQ ID NO: 261510 - RNA, 18 nt, Artificial Sequence
  Synthetic
uauuucuagcccuacuac

SEQ ID NO: 261511 - RNA, 19 nt, Artificial Sequence
  Synthetic
guauuucuagcccuacuac

SEQ ID NO: 261512 - RNA, 20 nt, Artificial Sequence
  Synthetic
uguauuucuagcccuacuac

SEQ ID NO: 261513 - RNA, 21 nt, Artificial Sequence
  Synthetic
cuguauuucuagcccuacuac

SEQ ID NO: 261514 - RNA, 22 nt, Artificial Sequence
  Synthetic
ccuguauuucuagcccuacuac

SEQ ID NO: 261515 - RNA, 23 nt, Artificial Sequence
  Synthetic
accuguauuucuagcccuacuac

SEQ ID NO: 261516 - RNA, 24 nt, Artificial Sequence
  Synthetic
aaccuguauuucuagcccuacuac

SEQ ID NO: 261517 - RNA, 18 nt, Artificial Sequence
  Synthetic
uagaaauaggaguacuac

SEQ ID NO: 261518 - RNA, 19 nt, Artificial Sequence
  Synthetic
cuagaaauaggaguacuac

SEQ ID NO: 261519 - RNA, 20 nt, Artificial Sequence
  Synthetic
ccuagaaauaggaguacuac

SEQ ID NO: 261520 - RNA, 21 nt, Artificial Sequence
  Synthetic
uccuagaaauaggaguacuac

SEQ ID NO: 261521 - RNA, 22 nt, Artificial Sequence
  Synthetic
uuccuagaaauaggaguacuac

SEQ ID NO: 261522 - RNA, 23 nt, Artificial Sequence
  Synthetic
uuuccuagaaauaggaguacuac

SEQ ID NO: 261523 - RNA, 24 nt, Artificial Sequence
  Synthetic
cuuuccuagaaauaggaguacuac

SEQ ID NO: 261524 - RNA, 18 nt, Artificial Sequence
  Synthetic
gugaaugaauauuacuac

SEQ ID NO: 261525 - RNA, 19 nt, Artificial Sequence
  Synthetic
cgugaaugaauauuacuac

SEQ ID NO: 261526 - RNA, 20 nt, Artificial Sequence
  Synthetic
acgugaaugaauauuacuac

SEQ ID NO: 261527 - RNA, 21 nt, Artificial Sequence
  Synthetic
uacgugaaugaauauuacuac

SEQ ID NO: 261528 - RNA, 22 nt, Artificial Sequence
  Synthetic
uuacgugaaugaauauuacuac

SEQ ID NO: 261529 - RNA, 23 nt, Artificial Sequence
  Synthetic
auuacgugaaugaauauuacuac

SEQ ID NO: 261530 - RNA, 24 nt, Artificial Sequence
  Synthetic
gauuacgugaaugaauauuacuac

SEQ ID NO: 261531 - RNA, 18 nt, Artificial Sequence
  Synthetic
acauggaaguuuuacuac

SEQ ID NO: 261532 - RNA, 19 nt, Artificial Sequence
  Synthetic
uacauggaaguuuuacuac

SEQ ID NO: 261533 - RNA, 20 nt, Artificial Sequence
  Synthetic
uuacauggaaguuuuacuac

SEQ ID NO: 261534 - RNA, 21 nt, Artificial Sequence
  Synthetic
auuacauggaaguuuuacuac

SEQ ID NO: 261535 - RNA, 22 nt, Artificial Sequence
  Synthetic
aauuacauggaaguuuuacuac

SEQ ID NO: 261536 - RNA, 23 nt, Artificial Sequence
  Synthetic
caauuacauggaaguuuuacuac

SEQ ID NO: 261537 - RNA, 24 nt, Artificial Sequence
  Synthetic
ccaauuacauggaaguuuuacuac

SEQ ID NO: 261538 - RNA, 18 nt, Artificial Sequence
  Synthetic
cagaacagaacaaccuac

SEQ ID NO: 261539 - RNA, 19 nt, Artificial Sequence
  Synthetic
acagaacagaacaaccuac

SEQ ID NO: 261540 - RNA, 20 nt, Artificial Sequence
  Synthetic
aacagaacagaacaaccuac

SEQ ID NO: 261541 - RNA, 21 nt, Artificial Sequence
  Synthetic
gaacagaacagaacaaccuac

SEQ ID NO: 261542 - RNA, 22 nt, Artificial Sequence
  Synthetic
agaacagaacagaacaaccuac

SEQ ID NO: 261543 - RNA, 23 nt, Artificial Sequence
  Synthetic
aagaacagaacagaacaaccuac

SEQ ID NO: 261544 - RNA, 24 nt, Artificial Sequence
  Synthetic
caagaacagaacagaacaaccuac

SEQ ID NO: 261545 - RNA, 18 nt, Artificial Sequence
  Synthetic
uaaauuaguacaaccuac

SEQ ID NO: 261546 - RNA, 19 nt, Artificial Sequence
  Synthetic
guaaauuaguacaaccuac

SEQ ID NO: 261547 - RNA, 20 nt, Artificial Sequence
  Synthetic
uguaaauuaguacaaccuac

SEQ ID NO: 261548 - RNA, 21 nt, Artificial Sequence
  Synthetic
uuguaaauuaguacaaccuac

SEQ ID NO: 261549 - RNA, 22 nt, Artificial Sequence
  Synthetic
auuguaaauuaguacaaccuac

SEQ ID NO: 261550 - RNA, 23 nt, Artificial Sequence
  Synthetic
gauuguaaauuaguacaaccuac

SEQ ID NO: 261551 - RNA, 24 nt, Artificial Sequence
  Synthetic
ugauuguaaauuaguacaaccuac

SEQ ID NO: 261552 - RNA, 18 nt, Artificial Sequence
  Synthetic
gagagcggguuaaccuac

SEQ ID NO: 261553 - RNA, 19 nt, Artificial Sequence
  Synthetic
ggagagcggguuaaccuac

SEQ ID NO: 261554 - RNA, 20 nt, Artificial Sequence
  Synthetic
gggagagcggguuaaccuac

SEQ ID NO: 261555 - RNA, 21 nt, Artificial Sequence
  Synthetic
ugggagagcggguuaaccuac

SEQ ID NO: 261556 - RNA, 22 nt, Artificial Sequence
  Synthetic
gugggagagcggguuaaccuac

SEQ ID NO: 261557 - RNA, 23 nt, Artificial Sequence
  Synthetic
agugggagagcggguuaaccuac

SEQ ID NO: 261558 - RNA, 24 nt, Artificial Sequence
  Synthetic
aagugggagagcggguuaaccuac

SEQ ID NO: 261559 - RNA, 18 nt, Artificial Sequence
  Synthetic
cacggaguguuaaccuac

SEQ ID NO: 261560 - RNA, 19 nt, Artificial Sequence
  Synthetic
ucacggaguguuaaccuac

SEQ ID NO: 261561 - RNA, 20 nt, Artificial Sequence
  Synthetic
cucacggaguguuaaccuac

SEQ ID NO: 261562 - RNA, 21 nt, Artificial Sequence
  Synthetic
ccucacggaguguuaaccuac

SEQ ID NO: 261563 - RNA, 22 nt, Artificial Sequence
  Synthetic
uccucacggaguguuaaccuac

SEQ ID NO: 261564 - RNA, 23 nt, Artificial Sequence
  Synthetic
uuccucacggaguguuaaccuac

SEQ ID NO: 261565 - RNA, 24 nt, Artificial Sequence
  Synthetic
uuuccucacggaguguuaaccuac

SEQ ID NO: 261566 - RNA, 18 nt, Artificial Sequence
  Synthetic
ucuguccugguuaccuac

SEQ ID NO: 261567 - RNA, 19 nt, Artificial Sequence
  Synthetic
aucuguccugguuaccuac

SEQ ID NO: 261568 - RNA, 20 nt, Artificial Sequence
  Synthetic
aaucuguccugguuaccuac

SEQ ID NO: 261569 - RNA, 21 nt, Artificial Sequence
  Synthetic
uaaucuguccugguuaccuac

SEQ ID NO: 261570 - RNA, 22 nt, Artificial Sequence
  Synthetic
uuaaucuguccugguuaccuac

SEQ ID NO: 261571 - RNA, 23 nt, Artificial Sequence
  Synthetic
uuuaaucuguccugguuaccuac

SEQ ID NO: 261572 - RNA, 24 nt, Artificial Sequence
  Synthetic
uuuuaaucuguccugguuaccuac

SEQ ID NO: 261573 - RNA, 18 nt, Artificial Sequence
  Synthetic
gagaaccacuuuaccuac

SEQ ID NO: 261574 - RNA, 19 nt, Artificial Sequence
  Synthetic
ugagaaccacuuuaccuac

SEQ ID NO: 261575 - RNA, 20 nt, Artificial Sequence
  Synthetic
uugagaaccacuuuaccuac

SEQ ID NO: 261576 - RNA, 21 nt, Artificial Sequence
  Synthetic
guugagaaccacuuuaccuac

SEQ ID NO: 261577 - RNA, 22 nt, Artificial Sequence
  Synthetic
uguugagaaccacuuuaccuac

SEQ ID NO: 261578 - RNA, 23 nt, Artificial Sequence
  Synthetic
uuguugagaaccacuuuaccuac

SEQ ID NO: 261579 - RNA, 24 nt, Artificial Sequence
  Synthetic
auuguugagaaccacuuuaccuac

SEQ ID NO: 261580 - RNA, 18 nt, Artificial Sequence
  Synthetic
ucaucauaacagcccuac

SEQ ID NO: 261581 - RNA, 19 nt, Artificial Sequence
  Synthetic
gucaucauaacagcccuac

SEQ ID NO: 261582 - RNA, 20 nt, Artificial Sequence
  Synthetic
ggucaucauaacagcccuac

SEQ ID NO: 261583 - RNA, 21 nt, Artificial Sequence
  Synthetic
uggucaucauaacagcccuac

SEQ ID NO: 261584 - RNA, 22 nt, Artificial Sequence
  Synthetic
auggucaucauaacagcccuac

SEQ ID NO: 261585 - RNA, 23 nt, Artificial Sequence
  Synthetic
uauggucaucauaacagcccuac

SEQ ID NO: 261586 - RNA, 24 nt, Artificial Sequence
  Synthetic
guauggucaucauaacagcccuac

SEQ ID NO: 261587 - RNA, 18 nt, Artificial Sequence
  Synthetic
aaaaauuagccagccuac

SEQ ID NO: 261588 - RNA, 19 nt, Artificial Sequence
  Synthetic
aaaaaauuagccagccuac

SEQ ID NO: 261589 - RNA, 20 nt, Artificial Sequence
  Synthetic
aaaaaaauuagccagccuac

SEQ ID NO: 261590 - RNA, 18 nt, Artificial Sequence
  Synthetic
auagucaacuuagccuac

SEQ ID NO: 261591 - RNA, 19 nt, Artificial Sequence
  Synthetic
cauagucaacuuagccuac

SEQ ID NO: 261592 - RNA, 20 nt, Artificial Sequence
  Synthetic
gcauagucaacuuagccuac

SEQ ID NO: 261593 - RNA, 21 nt, Artificial Sequence
  Synthetic
ugcauagucaacuuagccuac

SEQ ID NO: 261594 - RNA, 22 nt, Artificial Sequence
  Synthetic
uugcauagucaacuuagccuac

SEQ ID NO: 261595 - RNA, 23 nt, Artificial Sequence
  Synthetic
auugcauagucaacuuagccuac

SEQ ID NO: 261596 - RNA, 24 nt, Artificial Sequence
  Synthetic
aauugcauagucaacuuagccuac

SEQ ID NO: 261597 - RNA, 18 nt, Artificial Sequence
  Synthetic
acacacacuggggccuac

SEQ ID NO: 261598 - RNA, 19 nt, Artificial Sequence
  Synthetic
aacacacacuggggccuac

SEQ ID NO: 261599 - RNA, 20 nt, Artificial Sequence
  Synthetic
uaacacacacuggggccuac

SEQ ID NO: 261600 - RNA, 21 nt, Artificial Sequence
  Synthetic
auaacacacacuggggccuac

SEQ ID NO: 261601 - RNA, 22 nt, Artificial Sequence
  Synthetic
aauaacacacacuggggccuac

SEQ ID NO: 261602 - RNA, 23 nt, Artificial Sequence
  Synthetic
gaauaacacacacuggggccuac

SEQ ID NO: 261603 - RNA, 24 nt, Artificial Sequence
  Synthetic
ggaauaacacacacuggggccuac

SEQ ID NO: 261604 - RNA, 18 nt, Artificial Sequence
  Synthetic
guaaguuauucugccuac

SEQ ID NO: 261605 - RNA, 19 nt, Artificial Sequence
  Synthetic
aguaaguuauucugccuac

SEQ ID NO: 261606 - RNA, 20 nt, Artificial Sequence
  Synthetic
gaguaaguuauucugccuac

SEQ ID NO: 261607 - RNA, 21 nt, Artificial Sequence
  Synthetic
ugaguaaguuauucugccuac

SEQ ID NO: 261608 - RNA, 22 nt, Artificial Sequence
  Synthetic
uugaguaaguuauucugccuac

SEQ ID NO: 261609 - RNA, 23 nt, Artificial Sequence
  Synthetic
cuugaguaaguuauucugccuac

SEQ ID NO: 261610 - RNA, 24 nt, Artificial Sequence
  Synthetic
ccuugaguaaguuauucugccuac

SEQ ID NO: 261611 - RNA, 18 nt, Artificial Sequence
  Synthetic
uuuuuuuacugugccuac

SEQ ID NO: 261612 - RNA, 19 nt, Artificial Sequence
  Synthetic
uuuuuuuuacugugccuac

SEQ ID NO: 261613 - RNA, 20 nt, Artificial Sequence
  Synthetic
uuuuuuuuuacugugccuac

SEQ ID NO: 261614 - RNA, 21 nt, Artificial Sequence
  Synthetic
cuuuuuuuuuacugugccuac

SEQ ID NO: 261615 - RNA, 22 nt, Artificial Sequence
  Synthetic
acuuuuuuuuuacugugccuac

SEQ ID NO: 261616 - RNA, 23 nt, Artificial Sequence
  Synthetic
uacuuuuuuuuuacugugccuac

SEQ ID NO: 261617 - RNA, 24 nt, Artificial Sequence
  Synthetic
uuacuuuuuuuuuacugugccuac

SEQ ID NO: 261618 - RNA, 18 nt, Artificial Sequence
  Synthetic
aaucacuacccauccuac

SEQ ID NO: 261619 - RNA, 19 nt, Artificial Sequence
  Synthetic
caaucacuacccauccuac

SEQ ID NO: 261620 - RNA, 20 nt, Artificial Sequence
  Synthetic
acaaucacuacccauccuac

SEQ ID NO: 261621 - RNA, 21 nt, Artificial Sequence
  Synthetic
aacaaucacuacccauccuac

SEQ ID NO: 261622 - RNA, 22 nt, Artificial Sequence
  Synthetic
uaacaaucacuacccauccuac

SEQ ID NO: 261623 - RNA, 23 nt, Artificial Sequence
  Synthetic
guaacaaucacuacccauccuac

SEQ ID NO: 261624 - RNA, 24 nt, Artificial Sequence
  Synthetic
gguaacaaucacuacccauccuac

SEQ ID NO: 261625 - RNA, 18 nt, Artificial Sequence
  Synthetic
ccugccuaucccuccuac

SEQ ID NO: 261626 - RNA, 19 nt, Artificial Sequence
  Synthetic
cccugccuaucccuccuac

SEQ ID NO: 261627 - RNA, 20 nt, Artificial Sequence
  Synthetic
acccugccuaucccuccuac

SEQ ID NO: 261628 - RNA, 21 nt, Artificial Sequence
  Synthetic
uacccugccuaucccuccuac

SEQ ID NO: 261629 - RNA, 22 nt, Artificial Sequence
  Synthetic
uuacccugccuaucccuccuac

SEQ ID NO: 261630 - RNA, 23 nt, Artificial Sequence
  Synthetic
auuacccugccuaucccuccuac

SEQ ID NO: 261631 - RNA, 24 nt, Artificial Sequence
  Synthetic
gauuacccugccuaucccuccuac

SEQ ID NO: 261632 - RNA, 18 nt, Artificial Sequence
  Synthetic
aaccugcaggauuccuac

SEQ ID NO: 261633 - RNA, 19 nt, Artificial Sequence
  Synthetic
gaaccugcaggauuccuac

SEQ ID NO: 261634 - RNA, 20 nt, Artificial Sequence
  Synthetic
ugaaccugcaggauuccuac

SEQ ID NO: 261635 - RNA, 21 nt, Artificial Sequence
  Synthetic
augaaccugcaggauuccuac

SEQ ID NO: 261636 - RNA, 22 nt, Artificial Sequence
  Synthetic
uaugaaccugcaggauuccuac

SEQ ID NO: 261637 - RNA, 23 nt, Artificial Sequence
  Synthetic
guaugaaccugcaggauuccuac

SEQ ID NO: 261638 - RNA, 24 nt, Artificial Sequence
  Synthetic
gguaugaaccugcaggauuccuac

SEQ ID NO: 261639 - RNA, 18 nt, Artificial Sequence
  Synthetic
uuuaucuguucuuccuac

SEQ ID NO: 261640 - RNA, 19 nt, Artificial Sequence
  Synthetic
guuuaucuguucuuccuac

SEQ ID NO: 261641 - RNA, 20 nt, Artificial Sequence
  Synthetic
uguuuaucuguucuuccuac

SEQ ID NO: 261642 - RNA, 21 nt, Artificial Sequence
  Synthetic
auguuuaucuguucuuccuac

SEQ ID NO: 261643 - RNA, 22 nt, Artificial Sequence
  Synthetic
aauguuuaucuguucuuccuac

SEQ ID NO: 261644 - RNA, 23 nt, Artificial Sequence
  Synthetic
aaauguuuaucuguucuuccuac

SEQ ID NO: 261645 - RNA, 24 nt, Artificial Sequence
  Synthetic
gaaauguuuaucuguucuuccuac

SEQ ID NO: 261646 - RNA, 18 nt, Artificial Sequence
  Synthetic
uggaguacuuuuuccuac

SEQ ID NO: 261647 - RNA, 19 nt, Artificial Sequence
  Synthetic
guggaguacuuuuuccuac

SEQ ID NO: 261648 - RNA, 20 nt, Artificial Sequence
  Synthetic
aguggaguacuuuuuccuac

SEQ ID NO: 261649 - RNA, 21 nt, Artificial Sequence
  Synthetic
caguggaguacuuuuuccuac

SEQ ID NO: 261650 - RNA, 22 nt, Artificial Sequence
  Synthetic
ucaguggaguacuuuuuccuac

SEQ ID NO: 261651 - RNA, 23 nt, Artificial Sequence
  Synthetic
uucaguggaguacuuuuuccuac

SEQ ID NO: 261652 - RNA, 24 nt, Artificial Sequence
  Synthetic
auucaguggaguacuuuuuccuac

SEQ ID NO: 261653 - RNA, 18 nt, Artificial Sequence
  Synthetic
aacaugcaucaaagcuac

SEQ ID NO: 261654 - RNA, 19 nt, Artificial Sequence
  Synthetic
gaacaugcaucaaagcuac

SEQ ID NO: 261655 - RNA, 20 nt, Artificial Sequence
  Synthetic
ugaacaugcaucaaagcuac

SEQ ID NO: 261656 - RNA, 21 nt, Artificial Sequence
  Synthetic
uugaacaugcaucaaagcuac

SEQ ID NO: 261657 - RNA, 22 nt, Artificial Sequence
  Synthetic
cuugaacaugcaucaaagcuac

SEQ ID NO: 261658 - RNA, 23 nt, Artificial Sequence
  Synthetic
acuugaacaugcaucaaagcuac

SEQ ID NO: 261659 - RNA, 24 nt, Artificial Sequence
  Synthetic
gacuugaacaugcaucaaagcuac

SEQ ID NO: 261660 - RNA, 18 nt, Artificial Sequence
  Synthetic
gacuugaaucacagcuac

SEQ ID NO: 261661 - RNA, 19 nt, Artificial Sequence
  Synthetic
ugacuugaaucacagcuac

SEQ ID NO: 261662 - RNA, 20 nt, Artificial Sequence
  Synthetic
augacuugaaucacagcuac

SEQ ID NO: 261663 - RNA, 21 nt, Artificial Sequence
  Synthetic
caugacuugaaucacagcuac

SEQ ID NO: 261664 - RNA, 22 nt, Artificial Sequence
  Synthetic
acaugacuugaaucacagcuac

SEQ ID NO: 261665 - RNA, 23 nt, Artificial Sequence
  Synthetic
cacaugacuugaaucacagcuac

SEQ ID NO: 261666 - RNA, 24 nt, Artificial Sequence
  Synthetic
gcacaugacuugaaucacagcuac

SEQ ID NO: 261667 - RNA, 18 nt, Artificial Sequence
  Synthetic
caccauccagacagcuac

SEQ ID NO: 261668 - RNA, 19 nt, Artificial Sequence
  Synthetic
acaccauccagacagcuac

SEQ ID NO: 261669 - RNA, 20 nt, Artificial Sequence
  Synthetic
gacaccauccagacagcuac

SEQ ID NO: 261670 - RNA, 21 nt, Artificial Sequence
  Synthetic
ugacaccauccagacagcuac

SEQ ID NO: 261671 - RNA, 22 nt, Artificial Sequence
  Synthetic
uugacaccauccagacagcuac

SEQ ID NO: 261672 - RNA, 23 nt, Artificial Sequence
  Synthetic
guugacaccauccagacagcuac

SEQ ID NO: 261673 - RNA, 24 nt, Artificial Sequence
  Synthetic
gguugacaccauccagacagcuac

SEQ ID NO: 261674 - RNA, 18 nt, Artificial Sequence
  Synthetic
gccuauaaucccagcuac

SEQ ID NO: 261675 - RNA, 19 nt, Artificial Sequence
  Synthetic
ugccuauaaucccagcuac

SEQ ID NO: 261676 - RNA, 20 nt, Artificial Sequence
  Synthetic
augccuauaaucccagcuac

SEQ ID NO: 261677 - RNA, 21 nt, Artificial Sequence
  Synthetic
caugccuauaaucccagcuac

SEQ ID NO: 261678 - RNA, 22 nt, Artificial Sequence
  Synthetic
ccaugccuauaaucccagcuac

SEQ ID NO: 261679 - RNA, 23 nt, Artificial Sequence
  Synthetic
cccaugccuauaaucccagcuac

SEQ ID NO: 261680 - RNA, 24 nt, Artificial Sequence
  Synthetic
gcccaugccuauaaucccagcuac

SEQ ID NO: 261681 - RNA, 19 nt, Artificial Sequence
  Synthetic
ugccucuaaucccagcuac

SEQ ID NO: 261682 - RNA, 20 nt, Artificial Sequence
  Synthetic
gugccucuaaucccagcuac

SEQ ID NO: 261683 - RNA, 21 nt, Artificial Sequence
  Synthetic
agugccucuaaucccagcuac

SEQ ID NO: 261684 - RNA, 22 nt, Artificial Sequence
  Synthetic
gagugccucuaaucccagcuac

SEQ ID NO: 261685 - RNA, 23 nt, Artificial Sequence
  Synthetic
ugagugccucuaaucccagcuac

SEQ ID NO: 261686 - RNA, 24 nt, Artificial Sequence
  Synthetic
gugagugccucuaaucccagcuac

SEQ ID NO: 261687 - RNA, 18 nt, Artificial Sequence
  Synthetic
accuguaaucccagcuac

SEQ ID NO: 261688 - RNA, 19 nt, Artificial Sequence
  Synthetic
caccuguaaucccagcuac

SEQ ID NO: 261689 - RNA, 20 nt, Artificial Sequence
  Synthetic
acaccuguaaucccagcuac

SEQ ID NO: 261690 - RNA, 21 nt, Artificial Sequence
  Synthetic
cacaccuguaaucccagcuac

SEQ ID NO: 261691 - RNA, 22 nt, Artificial Sequence
  Synthetic
gcacaccuguaaucccagcuac

SEQ ID NO: 261692 - RNA, 23 nt, Artificial Sequence
  Synthetic
ugcacaccuguaaucccagcuac

SEQ ID NO: 261693 - RNA, 24 nt, Artificial Sequence
  Synthetic
gugcacaccuguaaucccagcuac

SEQ ID NO: 261694 - RNA, 23 nt, Artificial Sequence
  Synthetic
cgggcaccuguaaucccagcuac

SEQ ID NO: 261695 - RNA, 24 nt, Artificial Sequence
  Synthetic
gcgggcaccuguaaucccagcuac

SEQ ID NO: 261696 - RNA, 18 nt, Artificial Sequence
  Synthetic
cccuguaaucccagcuac

SEQ ID NO: 261697 - RNA, 19 nt, Artificial Sequence
  Synthetic
ucccuguaaucccagcuac

SEQ ID NO: 261698 - RNA, 20 nt, Artificial Sequence
  Synthetic
aucccuguaaucccagcuac

SEQ ID NO: 261699 - RNA, 21 nt, Artificial Sequence
  Synthetic
caucccuguaaucccagcuac

SEQ ID NO: 261700 - RNA, 22 nt, Artificial Sequence
  Synthetic
gcaucccuguaaucccagcuac

SEQ ID NO: 261701 - RNA, 23 nt, Artificial Sequence
  Synthetic
cgcaucccuguaaucccagcuac

SEQ ID NO: 261702 - RNA, 24 nt, Artificial Sequence
  Synthetic
gcgcaucccuguaaucccagcuac

SEQ ID NO: 261703 - RNA, 18 nt, Artificial Sequence
  Synthetic
gccuguaaucccagcuac

SEQ ID NO: 261704 - RNA, 19 nt, Artificial Sequence
  Synthetic
agccuguaaucccagcuac

SEQ ID NO: 261705 - RNA, 20 nt, Artificial Sequence
  Synthetic
gagccuguaaucccagcuac

SEQ ID NO: 261706 - RNA, 21 nt, Artificial Sequence
  Synthetic
cgagccuguaaucccagcuac

SEQ ID NO: 261707 - RNA, 22 nt, Artificial Sequence
  Synthetic
gcgagccuguaaucccagcuac

SEQ ID NO: 261708 - RNA, 23 nt, Artificial Sequence
  Synthetic
ugcgagccuguaaucccagcuac

SEQ ID NO: 261709 - RNA, 24 nt, Artificial Sequence
  Synthetic
gugcgagccuguaaucccagcuac

SEQ ID NO: 261710 - RNA, 21 nt, Artificial Sequence
  Synthetic
ggcgccuguaaucccagcuac

SEQ ID NO: 261711 - RNA, 22 nt, Artificial Sequence
  Synthetic
aggcgccuguaaucccagcuac

SEQ ID NO: 261712 - RNA, 23 nt, Artificial Sequence
  Synthetic
caggcgccuguaaucccagcuac

SEQ ID NO: 261713 - RNA, 24 nt, Artificial Sequence
  Synthetic
gcaggcgccuguaaucccagcuac

SEQ ID NO: 261714 - RNA, 22 nt, Artificial Sequence
  Synthetic
gggcgccuguaaucccagcuac

SEQ ID NO: 261715 - RNA, 23 nt, Artificial Sequence
  Synthetic
cgggcgccuguaaucccagcuac

SEQ ID NO: 261716 - RNA, 24 nt, Artificial Sequence
  Synthetic
gcgggcgccuguaaucccagcuac

SEQ ID NO: 261717 - RNA, 21 nt, Artificial Sequence
  Synthetic
ugcgccuguaaucccagcuac

SEQ ID NO: 261718 - RNA, 22 nt, Artificial Sequence
  Synthetic
gugcgccuguaaucccagcuac

SEQ ID NO: 261719 - RNA, 23 nt, Artificial Sequence
  Synthetic
ugugcgccuguaaucccagcuac

SEQ ID NO: 261720 - RNA, 24 nt, Artificial Sequence
  Synthetic
gugugcgccuguaaucccagcuac

SEQ ID NO: 261721 - RNA, 19 nt, Artificial Sequence
  Synthetic
ugccuguaaucccagcuac

SEQ ID NO: 261722 - RNA, 20 nt, Artificial Sequence
  Synthetic
augccuguaaucccagcuac

SEQ ID NO: 261723 - RNA, 23 nt, Artificial Sequence
  Synthetic
cgcaugccuguaaucccagcuac

SEQ ID NO: 261724 - RNA, 24 nt, Artificial Sequence
  Synthetic
gcgcaugccuguaaucccagcuac

SEQ ID NO: 261725 - RNA, 18 nt, Artificial Sequence
  Synthetic
gcuuguaaucccagcuac

SEQ ID NO: 261726 - RNA, 19 nt, Artificial Sequence
  Synthetic
ugcuuguaaucccagcuac

SEQ ID NO: 261727 - RNA, 20 nt, Artificial Sequence
  Synthetic
augcuuguaaucccagcuac

SEQ ID NO: 261728 - RNA, 21 nt, Artificial Sequence
  Synthetic
caugcuuguaaucccagcuac

SEQ ID NO: 261729 - RNA, 22 nt, Artificial Sequence
  Synthetic
gcaugcuuguaaucccagcuac

SEQ ID NO: 261730 - RNA, 23 nt, Artificial Sequence
  Synthetic
cgcaugcuuguaaucccagcuac

SEQ ID NO: 261731 - RNA, 24 nt, Artificial Sequence
  Synthetic
gcgcaugcuuguaaucccagcuac

SEQ ID NO: 261732 - RNA, 18 nt, Artificial Sequence
  Synthetic
cauuuuaaucccagcuac

SEQ ID NO: 261733 - RNA, 19 nt, Artificial Sequence
  Synthetic
gcauuuuaaucccagcuac

SEQ ID NO: 261734 - RNA, 20 nt, Artificial Sequence
  Synthetic
cgcauuuuaaucccagcuac

SEQ ID NO: 261735 - RNA, 21 nt, Artificial Sequence
  Synthetic
ucgcauuuuaaucccagcuac

SEQ ID NO: 261736 - RNA, 22 nt, Artificial Sequence
  Synthetic
aucgcauuuuaaucccagcuac

SEQ ID NO: 261737 - RNA, 23 nt, Artificial Sequence
  Synthetic
uaucgcauuuuaaucccagcuac

SEQ ID NO: 261738 - RNA, 24 nt, Artificial Sequence
  Synthetic
uuaucgcauuuuaaucccagcuac

SEQ ID NO: 261739 - RNA, 18 nt, Artificial Sequence
  Synthetic
gccuagagucccagcuac

SEQ ID NO: 261740 - RNA, 19 nt, Artificial Sequence
  Synthetic
ugccuagagucccagcuac

SEQ ID NO: 261741 - RNA, 20 nt, Artificial Sequence
  Synthetic
augccuagagucccagcuac

SEQ ID NO: 261742 - RNA, 21 nt, Artificial Sequence
  Synthetic
caugccuagagucccagcuac

SEQ ID NO: 261743 - RNA, 22 nt, Artificial Sequence
  Synthetic
gcaugccuagagucccagcuac

SEQ ID NO: 261744 - RNA, 23 nt, Artificial Sequence
  Synthetic
ugcaugccuagagucccagcuac

SEQ ID NO: 261745 - RNA, 24 nt, Artificial Sequence
  Synthetic
gugcaugccuagagucccagcuac

SEQ ID NO: 261746 - RNA, 18 nt, Artificial Sequence
  Synthetic
gccuauagucccagcuac

SEQ ID NO: 261747 - RNA, 19 nt, Artificial Sequence
  Synthetic
cgccuauagucccagcuac

SEQ ID NO: 261748 - RNA, 20 nt, Artificial Sequence
  Synthetic
acgccuauagucccagcuac

SEQ ID NO: 261749 - RNA, 21 nt, Artificial Sequence
  Synthetic
cacgccuauagucccagcuac

SEQ ID NO: 261750 - RNA, 22 nt, Artificial Sequence
  Synthetic
gcacgccuauagucccagcuac

SEQ ID NO: 261751 - RNA, 23 nt, Artificial Sequence
  Synthetic
ugcacgccuauagucccagcuac

SEQ ID NO: 261752 - RNA, 24 nt, Artificial Sequence
  Synthetic
gugcacgccuauagucccagcuac

SEQ ID NO: 261753 - RNA, 21 nt, Artificial Sequence
  Synthetic
ggcgccuauagucccagcuac

SEQ ID NO: 261754 - RNA, 22 nt, Artificial Sequence
  Synthetic
gggcgccuauagucccagcuac

SEQ ID NO: 261755 - RNA, 23 nt, Artificial Sequence
  Synthetic
cgggcgccuauagucccagcuac

SEQ ID NO: 261756 - RNA, 24 nt, Artificial Sequence
  Synthetic
gcgggcgccuauagucccagcuac

SEQ ID NO: 261757 - RNA, 23 nt, Artificial Sequence
  Synthetic
ugggcgccuauagucccagcuac

SEQ ID NO: 261758 - RNA, 24 nt, Artificial Sequence
  Synthetic
gugggcgccuauagucccagcuac

SEQ ID NO: 261759 - RNA, 18 nt, Artificial Sequence
  Synthetic
gccgguagucccagcuac

SEQ ID NO: 261760 - RNA, 19 nt, Artificial Sequence
  Synthetic
ugccgguagucccagcuac

SEQ ID NO: 261761 - RNA, 20 nt, Artificial Sequence
  Synthetic
gugccgguagucccagcuac

SEQ ID NO: 261762 - RNA, 21 nt, Artificial Sequence
  Synthetic
ugugccgguagucccagcuac

SEQ ID NO: 261763 - RNA, 22 nt, Artificial Sequence
  Synthetic
augugccgguagucccagcuac

SEQ ID NO: 261764 - RNA, 23 nt, Artificial Sequence
  Synthetic
caugugccgguagucccagcuac

SEQ ID NO: 261765 - RNA, 24 nt, Artificial Sequence
  Synthetic
gcaugugccgguagucccagcuac

SEQ ID NO: 261766 - RNA, 21 nt, Artificial Sequence
  Synthetic
cgcaccuguagucccagcuac

SEQ ID NO: 261767 - RNA, 22 nt, Artificial Sequence
  Synthetic
acgcaccuguagucccagcuac

SEQ ID NO: 261768 - RNA, 23 nt, Artificial Sequence
  Synthetic
cacgcaccuguagucccagcuac

SEQ ID NO: 261769 - RNA, 24 nt, Artificial Sequence
  Synthetic
gcacgcaccuguagucccagcuac

SEQ ID NO: 261770 - RNA, 21 nt, Artificial Sequence
  Synthetic
ggcaccuguagucccagcuac

SEQ ID NO: 261771 - RNA, 22 nt, Artificial Sequence
  Synthetic
aggcaccuguagucccagcuac

SEQ ID NO: 261772 - RNA, 23 nt, Artificial Sequence
  Synthetic
caggcaccuguagucccagcuac

SEQ ID NO: 261773 - RNA, 24 nt, Artificial Sequence
  Synthetic
gcaggcaccuguagucccagcuac

SEQ ID NO: 261774 - RNA, 21 nt, Artificial Sequence
  Synthetic
ggcgccuguagucccagcuac

SEQ ID NO: 261775 - RNA, 22 nt, Artificial Sequence
  Synthetic
aggcgccuguagucccagcuac

SEQ ID NO: 261776 - RNA, 23 nt, Artificial Sequence
  Synthetic
caggcgccuguagucccagcuac

SEQ ID NO: 261777 - RNA, 24 nt, Artificial Sequence
  Synthetic
gcaggcgccuguagucccagcuac

SEQ ID NO: 261778 - RNA, 23 nt, Artificial Sequence
  Synthetic
ugggcgccuguagucccagcuac

SEQ ID NO: 261779 - RNA, 24 nt, Artificial Sequence
  Synthetic
gugggcgccuguagucccagcuac

SEQ ID NO: 261780 - RNA, 19 nt, Artificial Sequence
  Synthetic
ggccuguagucccagcuac

SEQ ID NO: 261781 - RNA, 20 nt, Artificial Sequence
  Synthetic
gggccuguagucccagcuac

SEQ ID NO: 261782 - RNA, 21 nt, Artificial Sequence
  Synthetic
ugggccuguagucccagcuac

SEQ ID NO: 261783 - RNA, 22 nt, Artificial Sequence
  Synthetic
gugggccuguagucccagcuac

SEQ ID NO: 261784 - RNA, 23 nt, Artificial Sequence
  Synthetic
cgugggccuguagucccagcuac

SEQ ID NO: 261785 - RNA, 24 nt, Artificial Sequence
  Synthetic
acgugggccuguagucccagcuac

SEQ ID NO: 261786 - RNA, 19 nt, Artificial Sequence
  Synthetic
ugccuguagucccagcuac

SEQ ID NO: 261787 - RNA, 20 nt, Artificial Sequence
  Synthetic
augccuguagucccagcuac

SEQ ID NO: 261788 - RNA, 21 nt, Artificial Sequence
  Synthetic
caugccuguagucccagcuac

SEQ ID NO: 261789 - RNA, 22 nt, Artificial Sequence
  Synthetic
gcaugccuguagucccagcuac

SEQ ID NO: 261790 - RNA, 23 nt, Artificial Sequence
  Synthetic
ugcaugccuguagucccagcuac

SEQ ID NO: 261791 - RNA, 24 nt, Artificial Sequence
  Synthetic
cugcaugccuguagucccagcuac

SEQ ID NO: 261792 - RNA, 20 nt, Artificial Sequence
  Synthetic
gugccuguagucccagcuac

SEQ ID NO: 261793 - RNA, 21 nt, Artificial Sequence
  Synthetic
ggugccuguagucccagcuac

SEQ ID NO: 261794 - RNA, 22 nt, Artificial Sequence
  Synthetic
gggugccuguagucccagcuac

SEQ ID NO: 261795 - RNA, 23 nt, Artificial Sequence
  Synthetic
ugggugccuguagucccagcuac

SEQ ID NO: 261796 - RNA, 24 nt, Artificial Sequence
  Synthetic
gugggugccuguagucccagcuac

SEQ ID NO: 261797 - RNA, 21 nt, Artificial Sequence
  Synthetic
ugugccuguagucccagcuac

SEQ ID NO: 261798 - RNA, 22 nt, Artificial Sequence
  Synthetic
augugccuguagucccagcuac

SEQ ID NO: 261799 - RNA, 23 nt, Artificial Sequence
  Synthetic
caugugccuguagucccagcuac

SEQ ID NO: 261800 - RNA, 24 nt, Artificial Sequence
  Synthetic
gcaugugccuguagucccagcuac

SEQ ID NO: 261801 - RNA, 22 nt, Artificial Sequence
  Synthetic
gugugccuguagucccagcuac

SEQ ID NO: 261802 - RNA, 23 nt, Artificial Sequence
  Synthetic
ugugugccuguagucccagcuac

SEQ ID NO: 261803 - RNA, 24 nt, Artificial Sequence
  Synthetic
gugugugccuguagucccagcuac

SEQ ID NO: 261804 - RNA, 18 nt, Artificial Sequence
  Synthetic
aucuguagucccagcuac

SEQ ID NO: 261805 - RNA, 19 nt, Artificial Sequence
  Synthetic
caucuguagucccagcuac

SEQ ID NO: 261806 - RNA, 20 nt, Artificial Sequence
  Synthetic
gcaucuguagucccagcuac

SEQ ID NO: 261807 - RNA, 21 nt, Artificial Sequence
  Synthetic
ggcaucuguagucccagcuac

SEQ ID NO: 261808 - RNA, 22 nt, Artificial Sequence
  Synthetic
aggcaucuguagucccagcuac

SEQ ID NO: 261809 - RNA, 23 nt, Artificial Sequence
  Synthetic
caggcaucuguagucccagcuac

SEQ ID NO: 261810 - RNA, 24 nt, Artificial Sequence
  Synthetic
gcaggcaucuguagucccagcuac

SEQ ID NO: 261811 - RNA, 18 nt, Artificial Sequence
  Synthetic
gucuguagucccagcuac

SEQ ID NO: 261812 - RNA, 19 nt, Artificial Sequence
  Synthetic
ugucuguagucccagcuac

SEQ ID NO: 261813 - RNA, 20 nt, Artificial Sequence
  Synthetic
gugucuguagucccagcuac

SEQ ID NO: 261814 - RNA, 21 nt, Artificial Sequence
  Synthetic
ugugucuguagucccagcuac

SEQ ID NO: 261815 - RNA, 22 nt, Artificial Sequence
  Synthetic
augugucuguagucccagcuac

SEQ ID NO: 261816 - RNA, 23 nt, Artificial Sequence
  Synthetic
caugugucuguagucccagcuac

SEQ ID NO: 261817 - RNA, 24 nt, Artificial Sequence
  Synthetic
gcaugugucuguagucccagcuac

SEQ ID NO: 261818 - RNA, 18 nt, Artificial Sequence
  Synthetic
gcuuguagucccagcuac

SEQ ID NO: 261819 - RNA, 19 nt, Artificial Sequence
  Synthetic
cgcuuguagucccagcuac

SEQ ID NO: 261820 - RNA, 20 nt, Artificial Sequence
  Synthetic
gcgcuuguagucccagcuac

SEQ ID NO: 261821 - RNA, 21 nt, Artificial Sequence
  Synthetic
ugcgcuuguagucccagcuac

SEQ ID NO: 261822 - RNA, 22 nt, Artificial Sequence
  Synthetic
augcgcuuguagucccagcuac

SEQ ID NO: 261823 - RNA, 23 nt, Artificial Sequence
  Synthetic
caugcgcuuguagucccagcuac

SEQ ID NO: 261824 - RNA, 24 nt, Artificial Sequence
  Synthetic
gcaugcgcuuguagucccagcuac

SEQ ID NO: 261825 - RNA, 18 nt, Artificial Sequence
  Synthetic
guuuguagucccagcuac

SEQ ID NO: 261826 - RNA, 19 nt, Artificial Sequence
  Synthetic
aguuuguagucccagcuac

SEQ ID NO: 261827 - RNA, 20 nt, Artificial Sequence
  Synthetic
aaguuuguagucccagcuac

SEQ ID NO: 261828 - RNA, 21 nt, Artificial Sequence
  Synthetic
caaguuuguagucccagcuac

SEQ ID NO: 261829 - RNA, 22 nt, Artificial Sequence
  Synthetic
ccaaguuuguagucccagcuac

SEQ ID NO: 261830 - RNA, 23 nt, Artificial Sequence
  Synthetic
gccaaguuuguagucccagcuac

SEQ ID NO: 261831 - RNA, 24 nt, Artificial Sequence
  Synthetic
agccaaguuuguagucccagcuac

SEQ ID NO: 261832 - RNA, 18 nt, Artificial Sequence
  Synthetic
gccuguggucccagcuac

SEQ ID NO: 261833 - RNA, 19 nt, Artificial Sequence
  Synthetic
cgccuguggucccagcuac

SEQ ID NO: 261834 - RNA, 20 nt, Artificial Sequence
  Synthetic
gcgccuguggucccagcuac

SEQ ID NO: 261835 - RNA, 21 nt, Artificial Sequence
  Synthetic
ggcgccuguggucccagcuac

SEQ ID NO: 261836 - RNA, 22 nt, Artificial Sequence
  Synthetic
gggcgccuguggucccagcuac

SEQ ID NO: 261837 - RNA, 23 nt, Artificial Sequence
  Synthetic
cgggcgccuguggucccagcuac

SEQ ID NO: 261838 - RNA, 24 nt, Artificial Sequence
  Synthetic
gcgggcgccuguggucccagcuac

SEQ ID NO: 261839 - RNA, 19 nt, Artificial Sequence
  Synthetic
ugccuguggucccagcuac

SEQ ID NO: 261840 - RNA, 20 nt, Artificial Sequence
  Synthetic
gugccuguggucccagcuac

SEQ ID NO: 261841 - RNA, 21 nt, Artificial Sequence
  Synthetic
ggugccuguggucccagcuac

SEQ ID NO: 261842 - RNA, 22 nt, Artificial Sequence
  Synthetic
gggugccuguggucccagcuac

SEQ ID NO: 261843 - RNA, 23 nt, Artificial Sequence
  Synthetic
ugggugccuguggucccagcuac

SEQ ID NO: 261844 - RNA, 24 nt, Artificial Sequence
  Synthetic
gugggugccuguggucccagcuac

SEQ ID NO: 261845 - RNA, 18 nt, Artificial Sequence
  Synthetic
ugaagggacaucagcuac

SEQ ID NO: 261846 - RNA, 19 nt, Artificial Sequence
  Synthetic
cugaagggacaucagcuac

SEQ ID NO: 261847 - RNA, 20 nt, Artificial Sequence
  Synthetic
gcugaagggacaucagcuac

SEQ ID NO: 261848 - RNA, 21 nt, Artificial Sequence
  Synthetic
agcugaagggacaucagcuac

SEQ ID NO: 261849 - RNA, 22 nt, Artificial Sequence
  Synthetic
aagcugaagggacaucagcuac

SEQ ID NO: 261850 - RNA, 23 nt, Artificial Sequence
  Synthetic
caagcugaagggacaucagcuac

SEQ ID NO: 261851 - RNA, 24 nt, Artificial Sequence
  Synthetic
ucaagcugaagggacaucagcuac

SEQ ID NO: 261852 - RNA, 20 nt, Artificial Sequence
  Synthetic
gcaccuguaaucucagcuac

SEQ ID NO: 261853 - RNA, 21 nt, Artificial Sequence
  Synthetic
cgcaccuguaaucucagcuac

SEQ ID NO: 261854 - RNA, 22 nt, Artificial Sequence
  Synthetic
acgcaccuguaaucucagcuac

SEQ ID NO: 261855 - RNA, 23 nt, Artificial Sequence
  Synthetic
cacgcaccuguaaucucagcuac

SEQ ID NO: 261856 - RNA, 24 nt, Artificial Sequence
  Synthetic
gcacgcaccuguaaucucagcuac

SEQ ID NO: 261857 - RNA, 18 nt, Artificial Sequence
  Synthetic
accuguagucucagcuac

SEQ ID NO: 261858 - RNA, 19 nt, Artificial Sequence
  Synthetic
caccuguagucucagcuac

SEQ ID NO: 261859 - RNA, 20 nt, Artificial Sequence
  Synthetic
gcaccuguagucucagcuac

SEQ ID NO: 261860 - RNA, 21 nt, Artificial Sequence
  Synthetic
ggcaccuguagucucagcuac

SEQ ID NO: 261861 - RNA, 22 nt, Artificial Sequence
  Synthetic
aggcaccuguagucucagcuac

SEQ ID NO: 261862 - RNA, 23 nt, Artificial Sequence
  Synthetic
caggcaccuguagucucagcuac

SEQ ID NO: 261863 - RNA, 24 nt, Artificial Sequence
  Synthetic
gcaggcaccuguagucucagcuac

SEQ ID NO: 261864 - RNA, 18 nt, Artificial Sequence
  Synthetic
ccccaccuguucagcuac

SEQ ID NO: 261865 - RNA, 19 nt, Artificial Sequence
  Synthetic
uccccaccuguucagcuac

SEQ ID NO: 261866 - RNA, 20 nt, Artificial Sequence
  Synthetic
auccccaccuguucagcuac

SEQ ID NO: 261867 - RNA, 21 nt, Artificial Sequence
  Synthetic
aauccccaccuguucagcuac

SEQ ID NO: 261868 - RNA, 22 nt, Artificial Sequence
  Synthetic
gaauccccaccuguucagcuac

SEQ ID NO: 261869 - RNA, 23 nt, Artificial Sequence
  Synthetic
ggaauccccaccuguucagcuac

SEQ ID NO: 261870 - RNA, 24 nt, Artificial Sequence
  Synthetic
aggaauccccaccuguucagcuac

SEQ ID NO: 261871 - RNA, 18 nt, Artificial Sequence
  Synthetic
auguuacauuugagcuac

SEQ ID NO: 261872 - RNA, 19 nt, Artificial Sequence
  Synthetic
uauguuacauuugagcuac

SEQ ID NO: 261873 - RNA, 20 nt, Artificial Sequence
  Synthetic
auauguuacauuugagcuac

SEQ ID NO: 261874 - RNA, 21 nt, Artificial Sequence
  Synthetic
uauauguuacauuugagcuac

SEQ ID NO: 261875 - RNA, 22 nt, Artificial Sequence
  Synthetic
auauauguuacauuugagcuac

SEQ ID NO: 261876 - RNA, 23 nt, Artificial Sequence
  Synthetic
gauauauguuacauuugagcuac

SEQ ID NO: 261877 - RNA, 24 nt, Artificial Sequence
  Synthetic
ugauauauguuacauuugagcuac

SEQ ID NO: 261878 - RNA, 18 nt, Artificial Sequence
  Synthetic
gccuguaauccuagcuac

SEQ ID NO: 261879 - RNA, 19 nt, Artificial Sequence
  Synthetic
cgccuguaauccuagcuac

SEQ ID NO: 261880 - RNA, 20 nt, Artificial Sequence
  Synthetic
gcgccuguaauccuagcuac

SEQ ID NO: 261881 - RNA, 21 nt, Artificial Sequence
  Synthetic
ugcgccuguaauccuagcuac

SEQ ID NO: 261882 - RNA, 22 nt, Artificial Sequence
  Synthetic
cugcgccuguaauccuagcuac

SEQ ID NO: 261883 - RNA, 23 nt, Artificial Sequence
  Synthetic
ccugcgccuguaauccuagcuac

SEQ ID NO: 261884 - RNA, 24 nt, Artificial Sequence
  Synthetic
accugcgccuguaauccuagcuac

SEQ ID NO: 261885 - RNA, 18 nt, Artificial Sequence
  Synthetic
auauuuauuuguggcuac

SEQ ID NO: 261886 - RNA, 19 nt, Artificial Sequence
  Synthetic
gauauuuauuuguggcuac

SEQ ID NO: 261887 - RNA, 20 nt, Artificial Sequence
  Synthetic
ugauauuuauuuguggcuac

SEQ ID NO: 261888 - RNA, 21 nt, Artificial Sequence
  Synthetic
augauauuuauuuguggcuac

SEQ ID NO: 261889 - RNA, 22 nt, Artificial Sequence
  Synthetic
caugauauuuauuuguggcuac

SEQ ID NO: 261890 - RNA, 23 nt, Artificial Sequence
  Synthetic
acaugauauuuauuuguggcuac

SEQ ID NO: 261891 - RNA, 24 nt, Artificial Sequence
  Synthetic
cacaugauauuuauuuguggcuac

SEQ ID NO: 261892 - RNA, 18 nt, Artificial Sequence
  Synthetic
cagaacauucccugcuac

SEQ ID NO: 261893 - RNA, 19 nt, Artificial Sequence
  Synthetic
gcagaacauucccugcuac

SEQ ID NO: 261894 - RNA, 20 nt, Artificial Sequence
  Synthetic
agcagaacauucccugcuac

SEQ ID NO: 261895 - RNA, 21 nt, Artificial Sequence
  Synthetic
gagcagaacauucccugcuac

SEQ ID NO: 261896 - RNA, 22 nt, Artificial Sequence
  Synthetic
ggagcagaacauucccugcuac

SEQ ID NO: 261897 - RNA, 23 nt, Artificial Sequence
  Synthetic
gggagcagaacauucccugcuac

SEQ ID NO: 261898 - RNA, 24 nt, Artificial Sequence
  Synthetic
agggagcagaacauucccugcuac

SEQ ID NO: 261899 - RNA, 18 nt, Artificial Sequence
  Synthetic
gccuguaguuccugcuac

SEQ ID NO: 261900 - RNA, 19 nt, Artificial Sequence
  Synthetic
ugccuguaguuccugcuac

SEQ ID NO: 261901 - RNA, 20 nt, Artificial Sequence
  Synthetic
gugccuguaguuccugcuac

SEQ ID NO: 261902 - RNA, 21 nt, Artificial Sequence
  Synthetic
cgugccuguaguuccugcuac

SEQ ID NO: 261903 - RNA, 22 nt, Artificial Sequence
  Synthetic
acgugccuguaguuccugcuac

SEQ ID NO: 261904 - RNA, 23 nt, Artificial Sequence
  Synthetic
cacgugccuguaguuccugcuac

SEQ ID NO: 261905 - RNA, 24 nt, Artificial Sequence
  Synthetic
gcacgugccuguaguuccugcuac

SEQ ID NO: 261906 - RNA, 18 nt, Artificial Sequence
  Synthetic
agggauacauucugcuac

SEQ ID NO: 261907 - RNA, 19 nt, Artificial Sequence
  Synthetic
aagggauacauucugcuac

SEQ ID NO: 261908 - RNA, 20 nt, Artificial Sequence
  Synthetic
gaagggauacauucugcuac

SEQ ID NO: 261909 - RNA, 21 nt, Artificial Sequence
  Synthetic
ugaagggauacauucugcuac

SEQ ID NO: 261910 - RNA, 22 nt, Artificial Sequence
  Synthetic
augaagggauacauucugcuac

SEQ ID NO: 261911 - RNA, 23 nt, Artificial Sequence
  Synthetic
aaugaagggauacauucugcuac

SEQ ID NO: 261912 - RNA, 24 nt, Artificial Sequence
  Synthetic
aaaugaagggauacauucugcuac

SEQ ID NO: 261913 - RNA, 18 nt, Artificial Sequence
  Synthetic
ggcugccauuugugcuac

SEQ ID NO: 261914 - RNA, 19 nt, Artificial Sequence
  Synthetic
uggcugccauuugugcuac

SEQ ID NO: 261915 - RNA, 20 nt, Artificial Sequence
  Synthetic
cuggcugccauuugugcuac

SEQ ID NO: 261916 - RNA, 21 nt, Artificial Sequence
  Synthetic
ucuggcugccauuugugcuac

SEQ ID NO: 261917 - RNA, 22 nt, Artificial Sequence
  Synthetic
cucuggcugccauuugugcuac

SEQ ID NO: 261918 - RNA, 23 nt, Artificial Sequence
  Synthetic
gcucuggcugccauuugugcuac

SEQ ID NO: 261919 - RNA, 24 nt, Artificial Sequence
  Synthetic
ggcucuggcugccauuugugcuac

SEQ ID NO: 261920 - RNA, 18 nt, Artificial Sequence
  Synthetic
uucugaagucauugcuac

SEQ ID NO: 261921 - RNA, 19 nt, Artificial Sequence
  Synthetic
cuucugaagucauugcuac

SEQ ID NO: 261922 - RNA, 20 nt, Artificial Sequence
  Synthetic
ccuucugaagucauugcuac

SEQ ID NO: 261923 - RNA, 21 nt, Artificial Sequence
  Synthetic
gccuucugaagucauugcuac

SEQ ID NO: 261924 - RNA, 22 nt, Artificial Sequence
  Synthetic
agccuucugaagucauugcuac

SEQ ID NO: 261925 - RNA, 23 nt, Artificial Sequence
  Synthetic
gagccuucugaagucauugcuac

SEQ ID NO: 261926 - RNA, 24 nt, Artificial Sequence
  Synthetic
ggagccuucugaagucauugcuac

SEQ ID NO: 261927 - RNA, 18 nt, Artificial Sequence
  Synthetic
gaagaaugucauugcuac

SEQ ID NO: 261928 - RNA, 19 nt, Artificial Sequence
  Synthetic
ugaagaaugucauugcuac

SEQ ID NO: 261929 - RNA, 20 nt, Artificial Sequence
  Synthetic
gugaagaaugucauugcuac

SEQ ID NO: 261930 - RNA, 21 nt, Artificial Sequence
  Synthetic
ggugaagaaugucauugcuac

SEQ ID NO: 261931 - RNA, 22 nt, Artificial Sequence
  Synthetic
gggugaagaaugucauugcuac

SEQ ID NO: 261932 - RNA, 23 nt, Artificial Sequence
  Synthetic
ugggugaagaaugucauugcuac

SEQ ID NO: 261933 - RNA, 24 nt, Artificial Sequence
  Synthetic
cugggugaagaaugucauugcuac

SEQ ID NO: 261934 - RNA, 18 nt, Artificial Sequence
  Synthetic
cugggguaugguugcuac

SEQ ID NO: 261935 - RNA, 19 nt, Artificial Sequence
  Synthetic
gcugggguaugguugcuac

SEQ ID NO: 261936 - RNA, 20 nt, Artificial Sequence
  Synthetic
ggcugggguaugguugcuac

SEQ ID NO: 261937 - RNA, 21 nt, Artificial Sequence
  Synthetic
uggcugggguaugguugcuac

SEQ ID NO: 261938 - RNA, 22 nt, Artificial Sequence
  Synthetic
uuggcugggguaugguugcuac

SEQ ID NO: 261939 - RNA, 23 nt, Artificial Sequence
  Synthetic
cuuggcugggguaugguugcuac

SEQ ID NO: 261940 - RNA, 24 nt, Artificial Sequence
  Synthetic
acuuggcugggguaugguugcuac

SEQ ID NO: 261941 - RNA, 18 nt, Artificial Sequence
  Synthetic
auugaacauauuugcuac

SEQ ID NO: 261942 - RNA, 19 nt, Artificial Sequence
  Synthetic
aauugaacauauuugcuac

SEQ ID NO: 261943 - RNA, 20 nt, Artificial Sequence
  Synthetic
aaauugaacauauuugcuac

SEQ ID NO: 261944 - RNA, 21 nt, Artificial Sequence
  Synthetic
aaaauugaacauauuugcuac

SEQ ID NO: 261945 - RNA, 22 nt, Artificial Sequence
  Synthetic
uaaaauugaacauauuugcuac

SEQ ID NO: 261946 - RNA, 23 nt, Artificial Sequence
  Synthetic
uuaaaauugaacauauuugcuac

SEQ ID NO: 261947 - RNA, 24 nt, Artificial Sequence
  Synthetic
uuuaaaauugaacauauuugcuac

SEQ ID NO: 261948 - RNA, 18 nt, Artificial Sequence
  Synthetic
uauuucuggguuugcuac

SEQ ID NO: 261949 - RNA, 19 nt, Artificial Sequence
  Synthetic
uuauuucuggguuugcuac

SEQ ID NO: 261950 - RNA, 20 nt, Artificial Sequence
  Synthetic
uuuauuucuggguuugcuac

SEQ ID NO: 261951 - RNA, 21 nt, Artificial Sequence
  Synthetic
uuuuauuucuggguuugcuac

SEQ ID NO: 261952 - RNA, 22 nt, Artificial Sequence
  Synthetic
uuuuuauuucuggguuugcuac

SEQ ID NO: 261953 - RNA, 23 nt, Artificial Sequence
  Synthetic
auuuuuauuucuggguuugcuac

SEQ ID NO: 261954 - RNA, 24 nt, Artificial Sequence
  Synthetic
aauuuuuauuucuggguuugcuac

SEQ ID NO: 261955 - RNA, 18 nt, Artificial Sequence
  Synthetic
cugauauccagaaucuac

SEQ ID NO: 261956 - RNA, 19 nt, Artificial Sequence
  Synthetic
gcugauauccagaaucuac

SEQ ID NO: 261957 - RNA, 20 nt, Artificial Sequence
  Synthetic
ggcugauauccagaaucuac

SEQ ID NO: 261958 - RNA, 21 nt, Artificial Sequence
  Synthetic
gggcugauauccagaaucuac

SEQ ID NO: 261959 - RNA, 22 nt, Artificial Sequence
  Synthetic
agggcugauauccagaaucuac

SEQ ID NO: 261960 - RNA, 23 nt, Artificial Sequence
  Synthetic
aagggcugauauccagaaucuac

SEQ ID NO: 261961 - RNA, 24 nt, Artificial Sequence
  Synthetic
aaagggcugauauccagaaucuac

SEQ ID NO: 261962 - RNA, 18 nt, Artificial Sequence
  Synthetic
uacaucugaaacaucuac

SEQ ID NO: 261963 - RNA, 19 nt, Artificial Sequence
  Synthetic
auacaucugaaacaucuac

SEQ ID NO: 261964 - RNA, 20 nt, Artificial Sequence
  Synthetic
gauacaucugaaacaucuac

SEQ ID NO: 261965 - RNA, 21 nt, Artificial Sequence
  Synthetic
agauacaucugaaacaucuac

SEQ ID NO: 261966 - RNA, 22 nt, Artificial Sequence
  Synthetic
gagauacaucugaaacaucuac

SEQ ID NO: 261967 - RNA, 23 nt, Artificial Sequence
  Synthetic
ugagauacaucugaaacaucuac

SEQ ID NO: 261968 - RNA, 24 nt, Artificial Sequence
  Synthetic
uugagauacaucugaaacaucuac

SEQ ID NO: 261969 - RNA, 18 nt, Artificial Sequence
  Synthetic
agggcuuuaugcaucuac

SEQ ID NO: 261970 - RNA, 19 nt, Artificial Sequence
  Synthetic
uagggcuuuaugcaucuac

SEQ ID NO: 261971 - RNA, 20 nt, Artificial Sequence
  Synthetic
auagggcuuuaugcaucuac

SEQ ID NO: 261972 - RNA, 21 nt, Artificial Sequence
  Synthetic
uauagggcuuuaugcaucuac

SEQ ID NO: 261973 - RNA, 22 nt, Artificial Sequence
  Synthetic
guauagggcuuuaugcaucuac

SEQ ID NO: 261974 - RNA, 23 nt, Artificial Sequence
  Synthetic
gguauagggcuuuaugcaucuac

SEQ ID NO: 261975 - RNA, 24 nt, Artificial Sequence
  Synthetic
ugguauagggcuuuaugcaucuac

SEQ ID NO: 261976 - RNA, 18 nt, Artificial Sequence
  Synthetic
augaacauguucaucuac

SEQ ID NO: 261977 - RNA, 19 nt, Artificial Sequence
  Synthetic
gaugaacauguucaucuac

SEQ ID NO: 261978 - RNA, 20 nt, Artificial Sequence
  Synthetic
ugaugaacauguucaucuac

SEQ ID NO: 261979 - RNA, 21 nt, Artificial Sequence
  Synthetic
uugaugaacauguucaucuac

SEQ ID NO: 261980 - RNA, 22 nt, Artificial Sequence
  Synthetic
uuugaugaacauguucaucuac

SEQ ID NO: 261981 - RNA, 23 nt, Artificial Sequence
  Synthetic
uuuugaugaacauguucaucuac

SEQ ID NO: 261982 - RNA, 24 nt, Artificial Sequence
  Synthetic
auuuugaugaacauguucaucuac

SEQ ID NO: 261983 - RNA, 18 nt, Artificial Sequence
  Synthetic
caaguuauacugaucuac

SEQ ID NO: 261984 - RNA, 19 nt, Artificial Sequence
  Synthetic
acaaguuauacugaucuac

SEQ ID NO: 261985 - RNA, 20 nt, Artificial Sequence
  Synthetic
cacaaguuauacugaucuac

SEQ ID NO: 261986 - RNA, 21 nt, Artificial Sequence
  Synthetic
ccacaaguuauacugaucuac

SEQ ID NO: 261987 - RNA, 22 nt, Artificial Sequence
  Synthetic
accacaaguuauacugaucuac

SEQ ID NO: 261988 - RNA, 23 nt, Artificial Sequence
  Synthetic
gaccacaaguuauacugaucuac

SEQ ID NO: 261989 - RNA, 24 nt, Artificial Sequence
  Synthetic
ugaccacaaguuauacugaucuac

SEQ ID NO: 261990 - RNA, 18 nt, Artificial Sequence
  Synthetic
aacuacuaauauaucuac

SEQ ID NO: 261991 - RNA, 19 nt, Artificial Sequence
  Synthetic
caacuacuaauauaucuac

SEQ ID NO: 261992 - RNA, 20 nt, Artificial Sequence
  Synthetic
ucaacuacuaauauaucuac

SEQ ID NO: 261993 - RNA, 21 nt, Artificial Sequence
  Synthetic
aucaacuacuaauauaucuac

SEQ ID NO: 261994 - RNA, 22 nt, Artificial Sequence
  Synthetic
uaucaacuacuaauauaucuac

SEQ ID NO: 261995 - RNA, 23 nt, Artificial Sequence
  Synthetic
uuaucaacuacuaauauaucuac

SEQ ID NO: 261996 - RNA, 24 nt, Artificial Sequence
  Synthetic
auuaucaacuacuaauauaucuac

SEQ ID NO: 261997 - RNA, 18 nt, Artificial Sequence
  Synthetic
aauuucuucucuaucuac

SEQ ID NO: 261998 - RNA, 19 nt, Artificial Sequence
  Synthetic
uaauuucuucucuaucuac

SEQ ID NO: 261999 - RNA, 20 nt, Artificial Sequence
  Synthetic
uuaauuucuucucuaucuac

SEQ ID NO: 262000 - RNA, 21 nt, Artificial Sequence
  Synthetic
uuuaauuucuucucuaucuac

SEQ ID NO: 262001 - RNA, 22 nt, Artificial Sequence
  Synthetic
uuuuaauuucuucucuaucuac

SEQ ID NO: 262002 - RNA, 23 nt, Artificial Sequence
  Synthetic
cuuuuaauuucuucucuaucuac

SEQ ID NO: 262003 - RNA, 24 nt, Artificial Sequence
  Synthetic
ucuuuuaauuucuucucuaucuac

SEQ ID NO: 262004 - RNA, 18 nt, Artificial Sequence
  Synthetic
aaaauuuucauuaucuac

SEQ ID NO: 262005 - RNA, 19 nt, Artificial Sequence
  Synthetic
uaaaauuuucauuaucuac

SEQ ID NO: 262006 - RNA, 20 nt, Artificial Sequence
  Synthetic
auaaaauuuucauuaucuac

SEQ ID NO: 262007 - RNA, 21 nt, Artificial Sequence
  Synthetic
aauaaaauuuucauuaucuac

SEQ ID NO: 262008 - RNA, 22 nt, Artificial Sequence
  Synthetic
uaauaaaauuuucauuaucuac

SEQ ID NO: 262009 - RNA, 23 nt, Artificial Sequence
  Synthetic
auaauaaaauuuucauuaucuac

SEQ ID NO: 262010 - RNA, 24 nt, Artificial Sequence
  Synthetic
aauaauaaaauuuucauuaucuac

SEQ ID NO: 262011 - RNA, 18 nt, Artificial Sequence
  Synthetic
ggacuagagaaacucuac

SEQ ID NO: 262012 - RNA, 19 nt, Artificial Sequence
  Synthetic
aggacuagagaaacucuac

SEQ ID NO: 262013 - RNA, 20 nt, Artificial Sequence
  Synthetic
aaggacuagagaaacucuac

SEQ ID NO: 262014 - RNA, 21 nt, Artificial Sequence
  Synthetic
gaaggacuagagaaacucuac

SEQ ID NO: 262015 - RNA, 22 nt, Artificial Sequence
  Synthetic
ggaaggacuagagaaacucuac

SEQ ID NO: 262016 - RNA, 23 nt, Artificial Sequence
  Synthetic
uggaaggacuagagaaacucuac

SEQ ID NO: 262017 - RNA, 24 nt, Artificial Sequence
  Synthetic
uuggaaggacuagagaaacucuac

SEQ ID NO: 262018 - RNA, 18 nt, Artificial Sequence
  Synthetic
cgauucugcaggcucuac

SEQ ID NO: 262019 - RNA, 19 nt, Artificial Sequence
  Synthetic
acgauucugcaggcucuac

SEQ ID NO: 262020 - RNA, 20 nt, Artificial Sequence
  Synthetic
gacgauucugcaggcucuac

SEQ ID NO: 262021 - RNA, 21 nt, Artificial Sequence
  Synthetic
ugacgauucugcaggcucuac

SEQ ID NO: 262022 - RNA, 22 nt, Artificial Sequence
  Synthetic
cugacgauucugcaggcucuac

SEQ ID NO: 262023 - RNA, 23 nt, Artificial Sequence
  Synthetic
gcugacgauucugcaggcucuac

SEQ ID NO: 262024 - RNA, 24 nt, Artificial Sequence
  Synthetic
ggcugacgauucugcaggcucuac

SEQ ID NO: 262025 - RNA, 18 nt, Artificial Sequence
  Synthetic
aggauggaggggcucuac

SEQ ID NO: 262026 - RNA, 19 nt, Artificial Sequence
  Synthetic
uaggauggaggggcucuac

SEQ ID NO: 262027 - RNA, 20 nt, Artificial Sequence
  Synthetic
auaggauggaggggcucuac

SEQ ID NO: 262028 - RNA, 21 nt, Artificial Sequence
  Synthetic
gauaggauggaggggcucuac

SEQ ID NO: 262029 - RNA, 22 nt, Artificial Sequence
  Synthetic
agauaggauggaggggcucuac

SEQ ID NO: 262030 - RNA, 23 nt, Artificial Sequence
  Synthetic
gagauaggauggaggggcucuac

SEQ ID NO: 262031 - RNA, 24 nt, Artificial Sequence
  Synthetic
agagauaggauggaggggcucuac

SEQ ID NO: 262032 - RNA, 18 nt, Artificial Sequence
  Synthetic
auuugcuuuucucucuac

SEQ ID NO: 262033 - RNA, 19 nt, Artificial Sequence
  Synthetic
aauuugcuuuucucucuac

SEQ ID NO: 262034 - RNA, 20 nt, Artificial Sequence
  Synthetic
aaauuugcuuuucucucuac

SEQ ID NO: 262035 - RNA, 21 nt, Artificial Sequence
  Synthetic
uaaauuugcuuuucucucuac

SEQ ID NO: 262036 - RNA, 22 nt, Artificial Sequence
  Synthetic
uuaaauuugcuuuucucucuac

SEQ ID NO: 262037 - RNA, 23 nt, Artificial Sequence
  Synthetic
uuuaaauuugcuuuucucucuac

SEQ ID NO: 262038 - RNA, 24 nt, Artificial Sequence
  Synthetic
cuuuaaauuugcuuuucucucuac

SEQ ID NO: 262039 - RNA, 18 nt, Artificial Sequence
  Synthetic
ugucgagaaugucucuac

SEQ ID NO: 262040 - RNA, 19 nt, Artificial Sequence
  Synthetic
uugucgagaaugucucuac

SEQ ID NO: 262041 - RNA, 20 nt, Artificial Sequence
  Synthetic
auugucgagaaugucucuac

SEQ ID NO: 262042 - RNA, 21 nt, Artificial Sequence
  Synthetic
uauugucgagaaugucucuac

SEQ ID NO: 262043 - RNA, 22 nt, Artificial Sequence
  Synthetic
uuauugucgagaaugucucuac

SEQ ID NO: 262044 - RNA, 23 nt, Artificial Sequence
  Synthetic
uuuauugucgagaaugucucuac

SEQ ID NO: 262045 - RNA, 24 nt, Artificial Sequence
  Synthetic
auuuauugucgagaaugucucuac

SEQ ID NO: 262046 - RNA, 18 nt, Artificial Sequence
  Synthetic
uaugcauuuuuucucuac

SEQ ID NO: 262047 - RNA, 19 nt, Artificial Sequence
  Synthetic
auaugcauuuuuucucuac

SEQ ID NO: 262048 - RNA, 20 nt, Artificial Sequence
  Synthetic
aauaugcauuuuuucucuac

SEQ ID NO: 262049 - RNA, 21 nt, Artificial Sequence
  Synthetic
aaauaugcauuuuuucucuac

SEQ ID NO: 262050 - RNA, 22 nt, Artificial Sequence
  Synthetic
uaaauaugcauuuuuucucuac

SEQ ID NO: 262051 - RNA, 23 nt, Artificial Sequence
  Synthetic
cuaaauaugcauuuuuucucuac

SEQ ID NO: 262052 - RNA, 24 nt, Artificial Sequence
  Synthetic
ucuaaauaugcauuuuuucucuac

SEQ ID NO: 262053 - RNA, 18 nt, Artificial Sequence
  Synthetic
ucugccuuguaugucuac

SEQ ID NO: 262054 - RNA, 19 nt, Artificial Sequence
  Synthetic
cucugccuuguaugucuac

SEQ ID NO: 262055 - RNA, 20 nt, Artificial Sequence
  Synthetic
gcucugccuuguaugucuac

SEQ ID NO: 262056 - RNA, 21 nt, Artificial Sequence
  Synthetic
ggcucugccuuguaugucuac

SEQ ID NO: 262057 - RNA, 22 nt, Artificial Sequence
  Synthetic
uggcucugccuuguaugucuac

SEQ ID NO: 262058 - RNA, 23 nt, Artificial Sequence
  Synthetic
uuggcucugccuuguaugucuac

SEQ ID NO: 262059 - RNA, 24 nt, Artificial Sequence
  Synthetic
cuuggcucugccuuguaugucuac

SEQ ID NO: 262060 - RNA, 18 nt, Artificial Sequence
  Synthetic
aaagcuauuuaugucuac

SEQ ID NO: 262061 - RNA, 19 nt, Artificial Sequence
  Synthetic
caaagcuauuuaugucuac

SEQ ID NO: 262062 - RNA, 20 nt, Artificial Sequence
  Synthetic
acaaagcuauuuaugucuac

SEQ ID NO: 262063 - RNA, 21 nt, Artificial Sequence
  Synthetic
uacaaagcuauuuaugucuac

SEQ ID NO: 262064 - RNA, 22 nt, Artificial Sequence
  Synthetic
guacaaagcuauuuaugucuac

SEQ ID NO: 262065 - RNA, 23 nt, Artificial Sequence
  Synthetic
aguacaaagcuauuuaugucuac

SEQ ID NO: 262066 - RNA, 24 nt, Artificial Sequence
  Synthetic
caguacaaagcuauuuaugucuac

SEQ ID NO: 262067 - RNA, 18 nt, Artificial Sequence
  Synthetic
gauuuaggcugugucuac

SEQ ID NO: 262068 - RNA, 19 nt, Artificial Sequence
  Synthetic
agauuuaggcugugucuac

SEQ ID NO: 262069 - RNA, 20 nt, Artificial Sequence
  Synthetic
cagauuuaggcugugucuac

SEQ ID NO: 262070 - RNA, 21 nt, Artificial Sequence
  Synthetic
acagauuuaggcugugucuac

SEQ ID NO: 262071 - RNA, 22 nt, Artificial Sequence
  Synthetic
uacagauuuaggcugugucuac

SEQ ID NO: 262072 - RNA, 23 nt, Artificial Sequence
  Synthetic
uuacagauuuaggcugugucuac

SEQ ID NO: 262073 - RNA, 24 nt, Artificial Sequence
  Synthetic
cuuacagauuuaggcugugucuac

SEQ ID NO: 262074 - RNA, 18 nt, Artificial Sequence
  Synthetic
cuuucucuccuugucuac

SEQ ID NO: 262075 - RNA, 19 nt, Artificial Sequence
  Synthetic
ccuuucucuccuugucuac

SEQ ID NO: 262076 - RNA, 20 nt, Artificial Sequence
  Synthetic
cccuuucucuccuugucuac

SEQ ID NO: 262077 - RNA, 21 nt, Artificial Sequence
  Synthetic
acccuuucucuccuugucuac

SEQ ID NO: 262078 - RNA, 22 nt, Artificial Sequence
  Synthetic
uacccuuucucuccuugucuac

SEQ ID NO: 262079 - RNA, 23 nt, Artificial Sequence
  Synthetic
auacccuuucucuccuugucuac

SEQ ID NO: 262080 - RNA, 24 nt, Artificial Sequence
  Synthetic
aauacccuuucucuccuugucuac

SEQ ID NO: 262081 - RNA, 18 nt, Artificial Sequence
  Synthetic
uucacagccgaauucuac

SEQ ID NO: 262082 - RNA, 19 nt, Artificial Sequence
  Synthetic
auucacagccgaauucuac

SEQ ID NO: 262083 - RNA, 20 nt, Artificial Sequence
  Synthetic
gauucacagccgaauucuac

SEQ ID NO: 262084 - RNA, 18 nt, Artificial Sequence
  Synthetic
uucacagcugaauucuac

SEQ ID NO: 262085 - RNA, 19 nt, Artificial Sequence
  Synthetic
auucacagcugaauucuac

SEQ ID NO: 262086 - RNA, 20 nt, Artificial Sequence
  Synthetic
gauucacagcugaauucuac

SEQ ID NO: 262087 - RNA, 21 nt, Artificial Sequence
  Synthetic
ggauucacagcugaauucuac

SEQ ID NO: 262088 - RNA, 22 nt, Artificial Sequence
  Synthetic
uggauucacagcugaauucuac

SEQ ID NO: 262089 - RNA, 23 nt, Artificial Sequence
  Synthetic
auggauucacagcugaauucuac

SEQ ID NO: 262090 - RNA, 24 nt, Artificial Sequence
  Synthetic
gauggauucacagcugaauucuac

SEQ ID NO: 262091 - RNA, 18 nt, Artificial Sequence
  Synthetic
auuuccaaauaauucuac

SEQ ID NO: 262092 - RNA, 19 nt, Artificial Sequence
  Synthetic
aauuuccaaauaauucuac

SEQ ID NO: 262093 - RNA, 20 nt, Artificial Sequence
  Synthetic
aaauuuccaaauaauucuac

SEQ ID NO: 262094 - RNA, 21 nt, Artificial Sequence
  Synthetic
aaaauuuccaaauaauucuac

SEQ ID NO: 262095 - RNA, 22 nt, Artificial Sequence
  Synthetic
gaaaauuuccaaauaauucuac

SEQ ID NO: 262096 - RNA, 23 nt, Artificial Sequence
  Synthetic
agaaaauuuccaaauaauucuac

SEQ ID NO: 262097 - RNA, 24 nt, Artificial Sequence
  Synthetic
cagaaaauuuccaaauaauucuac

SEQ ID NO: 262098 - RNA, 18 nt, Artificial Sequence
  Synthetic
auugucuucucauucuac

SEQ ID NO: 262099 - RNA, 19 nt, Artificial Sequence
  Synthetic
cauugucuucucauucuac

SEQ ID NO: 262100 - RNA, 20 nt, Artificial Sequence
  Synthetic
ccauugucuucucauucuac

SEQ ID NO: 262101 - RNA, 21 nt, Artificial Sequence
  Synthetic
cccauugucuucucauucuac

SEQ ID NO: 262102 - RNA, 22 nt, Artificial Sequence
  Synthetic
ccccauugucuucucauucuac

SEQ ID NO: 262103 - RNA, 23 nt, Artificial Sequence
  Synthetic
uccccauugucuucucauucuac

SEQ ID NO: 262104 - RNA, 24 nt, Artificial Sequence
  Synthetic
uuccccauugucuucucauucuac

SEQ ID NO: 262105 - RNA, 18 nt, Artificial Sequence
  Synthetic
aaauauuguuuguucuac

SEQ ID NO: 262106 - RNA, 19 nt, Artificial Sequence
  Synthetic
uaaauauuguuuguucuac

SEQ ID NO: 262107 - RNA, 20 nt, Artificial Sequence
  Synthetic
guaaauauuguuuguucuac

SEQ ID NO: 262108 - RNA, 21 nt, Artificial Sequence
  Synthetic
uguaaauauuguuuguucuac

SEQ ID NO: 262109 - RNA, 22 nt, Artificial Sequence
  Synthetic
guguaaauauuguuuguucuac

SEQ ID NO: 262110 - RNA, 23 nt, Artificial Sequence
  Synthetic
aguguaaauauuguuuguucuac

SEQ ID NO: 262111 - RNA, 24 nt, Artificial Sequence
  Synthetic
caguguaaauauuguuuguucuac

SEQ ID NO: 262112 - RNA, 18 nt, Artificial Sequence
  Synthetic
uuccaguuucauuucuac

SEQ ID NO: 262113 - RNA, 19 nt, Artificial Sequence
  Synthetic
uuuccaguuucauuucuac

SEQ ID NO: 262114 - RNA, 20 nt, Artificial Sequence
  Synthetic
guuuccaguuucauuucuac

SEQ ID NO: 262115 - RNA, 21 nt, Artificial Sequence
  Synthetic
uguuuccaguuucauuucuac

SEQ ID NO: 262116 - RNA, 22 nt, Artificial Sequence
  Synthetic
guguuuccaguuucauuucuac

SEQ ID NO: 262117 - RNA, 23 nt, Artificial Sequence
  Synthetic
aguguuuccaguuucauuucuac

SEQ ID NO: 262118 - RNA, 24 nt, Artificial Sequence
  Synthetic
uaguguuuccaguuucauuucuac

SEQ ID NO: 262119 - RNA, 18 nt, Artificial Sequence
  Synthetic
uuugagaucgauuucuac

SEQ ID NO: 262120 - RNA, 19 nt, Artificial Sequence
  Synthetic
guuugagaucgauuucuac

SEQ ID NO: 262121 - RNA, 20 nt, Artificial Sequence
  Synthetic
aguuugagaucgauuucuac

SEQ ID NO: 262122 - RNA, 21 nt, Artificial Sequence
  Synthetic
aaguuugagaucgauuucuac

SEQ ID NO: 262123 - RNA, 22 nt, Artificial Sequence
  Synthetic
uaaguuugagaucgauuucuac

SEQ ID NO: 262124 - RNA, 23 nt, Artificial Sequence
  Synthetic
cuaaguuugagaucgauuucuac

SEQ ID NO: 262125 - RNA, 24 nt, Artificial Sequence
  Synthetic
ccuaaguuugagaucgauuucuac

SEQ ID NO: 262126 - RNA, 18 nt, Artificial Sequence
  Synthetic
agauugugaccuuucuac

SEQ ID NO: 262127 - RNA, 19 nt, Artificial Sequence
  Synthetic
uagauugugaccuuucuac

SEQ ID NO: 262128 - RNA, 20 nt, Artificial Sequence
  Synthetic
auagauugugaccuuucuac

SEQ ID NO: 262129 - RNA, 21 nt, Artificial Sequence
  Synthetic
aauagauugugaccuuucuac

SEQ ID NO: 262130 - RNA, 22 nt, Artificial Sequence
  Synthetic
uaauagauugugaccuuucuac

SEQ ID NO: 262131 - RNA, 23 nt, Artificial Sequence
  Synthetic
uuaauagauugugaccuuucuac

SEQ ID NO: 262132 - RNA, 24 nt, Artificial Sequence
  Synthetic
auuaauagauugugaccuuucuac

SEQ ID NO: 262133 - RNA, 18 nt, Artificial Sequence
  Synthetic
gacaugaccccuuucuac

SEQ ID NO: 262134 - RNA, 19 nt, Artificial Sequence
  Synthetic
ggacaugaccccuuucuac

SEQ ID NO: 262135 - RNA, 20 nt, Artificial Sequence
  Synthetic
uggacaugaccccuuucuac

SEQ ID NO: 262136 - RNA, 21 nt, Artificial Sequence
  Synthetic
auggacaugaccccuuucuac

SEQ ID NO: 262137 - RNA, 22 nt, Artificial Sequence
  Synthetic
gauggacaugaccccuuucuac

SEQ ID NO: 262138 - RNA, 23 nt, Artificial Sequence
  Synthetic
ggauggacaugaccccuuucuac

SEQ ID NO: 262139 - RNA, 24 nt, Artificial Sequence
  Synthetic
uggauggacaugaccccuuucuac

SEQ ID NO: 262140 - RNA, 18 nt, Artificial Sequence
  Synthetic
acacagaagaguuucuac

SEQ ID NO: 262141 - RNA, 19 nt, Artificial Sequence
  Synthetic
cacacagaagaguuucuac

SEQ ID NO: 262142 - RNA, 20 nt, Artificial Sequence
  Synthetic
ccacacagaagaguuucuac

SEQ ID NO: 262143 - RNA, 21 nt, Artificial Sequence
  Synthetic
cccacacagaagaguuucuac

SEQ ID NO: 262144 - RNA, 22 nt, Artificial Sequence
  Synthetic
ccccacacagaagaguuucuac

SEQ ID NO: 262145 - RNA, 23 nt, Artificial Sequence
  Synthetic
gccccacacagaagaguuucuac

SEQ ID NO: 262146 - RNA, 24 nt, Artificial Sequence
  Synthetic
agccccacacagaagaguuucuac

SEQ ID NO: 262147 - RNA, 18 nt, Artificial Sequence
  Synthetic
caccuuggcauuuucuac

SEQ ID NO: 262148 - RNA, 19 nt, Artificial Sequence
  Synthetic
ucaccuuggcauuuucuac

SEQ ID NO: 262149 - RNA, 20 nt, Artificial Sequence
  Synthetic
uucaccuuggcauuuucuac

SEQ ID NO: 262150 - RNA, 21 nt, Artificial Sequence
  Synthetic
uuucaccuuggcauuuucuac

SEQ ID NO: 262151 - RNA, 22 nt, Artificial Sequence
  Synthetic
cuuucaccuuggcauuuucuac

SEQ ID NO: 262152 - RNA, 23 nt, Artificial Sequence
  Synthetic
ccuuucaccuuggcauuuucuac

SEQ ID NO: 262153 - RNA, 24 nt, Artificial Sequence
  Synthetic
gccuuucaccuuggcauuuucuac

SEQ ID NO: 262154 - RNA, 18 nt, Artificial Sequence
  Synthetic
agcauauacguuuucuac

SEQ ID NO: 262155 - RNA, 19 nt, Artificial Sequence
  Synthetic
cagcauauacguuuucuac

SEQ ID NO: 262156 - RNA, 20 nt, Artificial Sequence
  Synthetic
ucagcauauacguuuucuac

SEQ ID NO: 262157 - RNA, 21 nt, Artificial Sequence
  Synthetic
uucagcauauacguuuucuac

SEQ ID NO: 262158 - RNA, 22 nt, Artificial Sequence
  Synthetic
uuucagcauauacguuuucuac

SEQ ID NO: 262159 - RNA, 23 nt, Artificial Sequence
  Synthetic
cuuucagcauauacguuuucuac

SEQ ID NO: 262160 - RNA, 24 nt, Artificial Sequence
  Synthetic
acuuucagcauauacguuuucuac

SEQ ID NO: 262161 - RNA, 18 nt, Artificial Sequence
  Synthetic
gcauccaauuuuuucuac

SEQ ID NO: 262162 - RNA, 19 nt, Artificial Sequence
  Synthetic
ugcauccaauuuuuucuac

SEQ ID NO: 262163 - RNA, 20 nt, Artificial Sequence
  Synthetic
cugcauccaauuuuuucuac

SEQ ID NO: 262164 - RNA, 21 nt, Artificial Sequence
  Synthetic
acugcauccaauuuuuucuac

SEQ ID NO: 262165 - RNA, 22 nt, Artificial Sequence
  Synthetic
cacugcauccaauuuuuucuac

SEQ ID NO: 262166 - RNA, 23 nt, Artificial Sequence
  Synthetic
ucacugcauccaauuuuuucuac

SEQ ID NO: 262167 - RNA, 24 nt, Artificial Sequence
  Synthetic
gucacugcauccaauuuuuucuac

SEQ ID NO: 262168 - RNA, 18 nt, Artificial Sequence
  Synthetic
uacauauuuuuuuucuac

SEQ ID NO: 262169 - RNA, 19 nt, Artificial Sequence
  Synthetic
uuacauauuuuuuuucuac

SEQ ID NO: 262170 - RNA, 20 nt, Artificial Sequence
  Synthetic
cuuacauauuuuuuuucuac

SEQ ID NO: 262171 - RNA, 21 nt, Artificial Sequence
  Synthetic
acuuacauauuuuuuuucuac

SEQ ID NO: 262172 - RNA, 22 nt, Artificial Sequence
  Synthetic
gacuuacauauuuuuuuucuac

SEQ ID NO: 262173 - RNA, 23 nt, Artificial Sequence
  Synthetic
agacuuacauauuuuuuuucuac

SEQ ID NO: 262174 - RNA, 24 nt, Artificial Sequence
  Synthetic
aagacuuacauauuuuuuuucuac

SEQ ID NO: 262175 - RNA, 18 nt, Artificial Sequence
  Synthetic
ucauauuucaaaaaguac

SEQ ID NO: 262176 - RNA, 19 nt, Artificial Sequence
  Synthetic
uucauauuucaaaaaguac

SEQ ID NO: 262177 - RNA, 20 nt, Artificial Sequence
  Synthetic
cuucauauuucaaaaaguac

SEQ ID NO: 262178 - RNA, 21 nt, Artificial Sequence
  Synthetic
ccuucauauuucaaaaaguac

SEQ ID NO: 262179 - RNA, 22 nt, Artificial Sequence
  Synthetic
uccuucauauuucaaaaaguac

SEQ ID NO: 262180 - RNA, 23 nt, Artificial Sequence
  Synthetic
uuccuucauauuucaaaaaguac

SEQ ID NO: 262181 - RNA, 24 nt, Artificial Sequence
  Synthetic
auuccuucauauuucaaaaaguac

SEQ ID NO: 262182 - RNA, 18 nt, Artificial Sequence
  Synthetic
gucaacucucgaaaguac

SEQ ID NO: 262183 - RNA, 19 nt, Artificial Sequence
  Synthetic
agucaacucucgaaaguac

SEQ ID NO: 262184 - RNA, 20 nt, Artificial Sequence
  Synthetic
cagucaacucucgaaaguac

SEQ ID NO: 262185 - RNA, 21 nt, Artificial Sequence
  Synthetic
acagucaacucucgaaaguac

SEQ ID NO: 262186 - RNA, 22 nt, Artificial Sequence
  Synthetic
uacagucaacucucgaaaguac

SEQ ID NO: 262187 - RNA, 23 nt, Artificial Sequence
  Synthetic
cuacagucaacucucgaaaguac

SEQ ID NO: 262188 - RNA, 24 nt, Artificial Sequence
  Synthetic
gcuacagucaacucucgaaaguac

SEQ ID NO: 262189 - RNA, 18 nt, Artificial Sequence
  Synthetic
gguugaucucccaaguac

SEQ ID NO: 262190 - RNA, 19 nt, Artificial Sequence
  Synthetic
ugguugaucucccaaguac

SEQ ID NO: 262191 - RNA, 20 nt, Artificial Sequence
  Synthetic
augguugaucucccaaguac

SEQ ID NO: 262192 - RNA, 21 nt, Artificial Sequence
  Synthetic
aaugguugaucucccaaguac

SEQ ID NO: 262193 - RNA, 22 nt, Artificial Sequence
  Synthetic
caaugguugaucucccaaguac

SEQ ID NO: 262194 - RNA, 23 nt, Artificial Sequence
  Synthetic
ucaaugguugaucucccaaguac

SEQ ID NO: 262195 - RNA, 24 nt, Artificial Sequence
  Synthetic
uucaaugguugaucucccaaguac

SEQ ID NO: 262196 - RNA, 18 nt, Artificial Sequence
  Synthetic
ccucagccuccgaaguac

SEQ ID NO: 262197 - RNA, 19 nt, Artificial Sequence
  Synthetic
gccucagccuccgaaguac

SEQ ID NO: 262198 - RNA, 20 nt, Artificial Sequence
  Synthetic
ugccucagccuccgaaguac

SEQ ID NO: 262199 - RNA, 21 nt, Artificial Sequence
  Synthetic
cugccucagccuccgaaguac

SEQ ID NO: 262200 - RNA, 22 nt, Artificial Sequence
  Synthetic
ccugccucagccuccgaaguac

SEQ ID NO: 262201 - RNA, 23 nt, Artificial Sequence
  Synthetic
cccugccucagccuccgaaguac

SEQ ID NO: 262202 - RNA, 24 nt, Artificial Sequence
  Synthetic
ccccugccucagccuccgaaguac

SEQ ID NO: 262203 - RNA, 18 nt, Artificial Sequence
  Synthetic
aaauccaucaugaaguac

SEQ ID NO: 262204 - RNA, 19 nt, Artificial Sequence
  Synthetic
aaaauccaucaugaaguac

SEQ ID NO: 262205 - RNA, 20 nt, Artificial Sequence
  Synthetic
uaaaauccaucaugaaguac

SEQ ID NO: 262206 - RNA, 21 nt, Artificial Sequence
  Synthetic
guaaaauccaucaugaaguac

SEQ ID NO: 262207 - RNA, 22 nt, Artificial Sequence
  Synthetic
aguaaaauccaucaugaaguac

SEQ ID NO: 262208 - RNA, 23 nt, Artificial Sequence
  Synthetic
aaguaaaauccaucaugaaguac

SEQ ID NO: 262209 - RNA, 24 nt, Artificial Sequence
  Synthetic
uaaguaaaauccaucaugaaguac

SEQ ID NO: 262210 - RNA, 18 nt, Artificial Sequence
  Synthetic
aucagugggaugaaguac

SEQ ID NO: 262211 - RNA, 19 nt, Artificial Sequence
  Synthetic
aaucagugggaugaaguac

SEQ ID NO: 262212 - RNA, 20 nt, Artificial Sequence
  Synthetic
gaaucagugggaugaaguac

SEQ ID NO: 262213 - RNA, 21 nt, Artificial Sequence
  Synthetic
agaaucagugggaugaaguac

SEQ ID NO: 262214 - RNA, 22 nt, Artificial Sequence
  Synthetic
cagaaucagugggaugaaguac

SEQ ID NO: 262215 - RNA, 23 nt, Artificial Sequence
  Synthetic
ucagaaucagugggaugaaguac

SEQ ID NO: 262216 - RNA, 24 nt, Artificial Sequence
  Synthetic
uucagaaucagugggaugaaguac

SEQ ID NO: 262217 - RNA, 18 nt, Artificial Sequence
  Synthetic
cauuugacucugaaguac

SEQ ID NO: 262218 - RNA, 19 nt, Artificial Sequence
  Synthetic
acauuugacucugaaguac

SEQ ID NO: 262219 - RNA, 20 nt, Artificial Sequence
  Synthetic
cacauuugacucugaaguac

SEQ ID NO: 262220 - RNA, 21 nt, Artificial Sequence
  Synthetic
ucacauuugacucugaaguac

SEQ ID NO: 262221 - RNA, 22 nt, Artificial Sequence
  Synthetic
uucacauuugacucugaaguac

SEQ ID NO: 262222 - RNA, 23 nt, Artificial Sequence
  Synthetic
cuucacauuugacucugaaguac

SEQ ID NO: 262223 - RNA, 24 nt, Artificial Sequence
  Synthetic
gcuucacauuugacucugaaguac

SEQ ID NO: 262224 - RNA, 18 nt, Artificial Sequence
  Synthetic
uguuuguucaauaaguac

SEQ ID NO: 262225 - RNA, 19 nt, Artificial Sequence
  Synthetic
cuguuuguucaauaaguac

SEQ ID NO: 262226 - RNA, 20 nt, Artificial Sequence
  Synthetic
ccuguuuguucaauaaguac

SEQ ID NO: 262227 - RNA, 21 nt, Artificial Sequence
  Synthetic
uccuguuuguucaauaaguac

SEQ ID NO: 262228 - RNA, 22 nt, Artificial Sequence
  Synthetic
cuccuguuuguucaauaaguac

SEQ ID NO: 262229 - RNA, 23 nt, Artificial Sequence
  Synthetic
gcuccuguuuguucaauaaguac

SEQ ID NO: 262230 - RNA, 24 nt, Artificial Sequence
  Synthetic
ugcuccuguuuguucaauaaguac

SEQ ID NO: 262231 - RNA, 18 nt, Artificial Sequence
  Synthetic
ugagcugccacuaaguac

SEQ ID NO: 262232 - RNA, 19 nt, Artificial Sequence
  Synthetic
uugagcugccacuaaguac

SEQ ID NO: 262233 - RNA, 20 nt, Artificial Sequence
  Synthetic
auugagcugccacuaaguac

SEQ ID NO: 262234 - RNA, 21 nt, Artificial Sequence
  Synthetic
uauugagcugccacuaaguac

SEQ ID NO: 262235 - RNA, 22 nt, Artificial Sequence
  Synthetic
cuauugagcugccacuaaguac

SEQ ID NO: 262236 - RNA, 23 nt, Artificial Sequence
  Synthetic
ucuauugagcugccacuaaguac

SEQ ID NO: 262237 - RNA, 24 nt, Artificial Sequence
  Synthetic
uucuauugagcugccacuaaguac

SEQ ID NO: 262238 - RNA, 18 nt, Artificial Sequence
  Synthetic
aauauguacuuuaaguac

SEQ ID NO: 262239 - RNA, 19 nt, Artificial Sequence
  Synthetic
aaauauguacuuuaaguac

SEQ ID NO: 262240 - RNA, 20 nt, Artificial Sequence
  Synthetic
uaaauauguacuuuaaguac

SEQ ID NO: 262241 - RNA, 21 nt, Artificial Sequence
  Synthetic
auaaauauguacuuuaaguac

SEQ ID NO: 262242 - RNA, 22 nt, Artificial Sequence
  Synthetic
aauaaauauguacuuuaaguac

SEQ ID NO: 262243 - RNA, 23 nt, Artificial Sequence
  Synthetic
uaauaaauauguacuuuaaguac

SEQ ID NO: 262244 - RNA, 24 nt, Artificial Sequence
  Synthetic
auaauaaauauguacuuuaaguac

SEQ ID NO: 262245 - RNA, 18 nt, Artificial Sequence
  Synthetic
auaauuaauauacaguac

SEQ ID NO: 262246 - RNA, 19 nt, Artificial Sequence
  Synthetic
aauaauuaauauacaguac

SEQ ID NO: 262247 - RNA, 20 nt, Artificial Sequence
  Synthetic
aaauaauuaauauacaguac

SEQ ID NO: 262248 - RNA, 21 nt, Artificial Sequence
  Synthetic
uaaauaauuaauauacaguac

SEQ ID NO: 262249 - RNA, 22 nt, Artificial Sequence
  Synthetic
uuaaauaauuaauauacaguac

SEQ ID NO: 262250 - RNA, 23 nt, Artificial Sequence
  Synthetic
uuuaaauaauuaauauacaguac

SEQ ID NO: 262251 - RNA, 24 nt, Artificial Sequence
  Synthetic
auuuaaauaauuaauauacaguac

SEQ ID NO: 262252 - RNA, 18 nt, Artificial Sequence
  Synthetic
aguaguaaaucagaguac

SEQ ID NO: 262253 - RNA, 19 nt, Artificial Sequence
  Synthetic
caguaguaaaucagaguac

SEQ ID NO: 262254 - RNA, 20 nt, Artificial Sequence
  Synthetic
gcaguaguaaaucagaguac

SEQ ID NO: 262255 - RNA, 21 nt, Artificial Sequence
  Synthetic
ggcaguaguaaaucagaguac

SEQ ID NO: 262256 - RNA, 22 nt, Artificial Sequence
  Synthetic
aggcaguaguaaaucagaguac

SEQ ID NO: 262257 - RNA, 23 nt, Artificial Sequence
  Synthetic
uaggcaguaguaaaucagaguac

SEQ ID NO: 262258 - RNA, 24 nt, Artificial Sequence
  Synthetic
cuaggcaguaguaaaucagaguac

SEQ ID NO: 262259 - RNA, 18 nt, Artificial Sequence
  Synthetic
uugaaauacugagaguac

SEQ ID NO: 262260 - RNA, 19 nt, Artificial Sequence
  Synthetic
auugaaauacugagaguac

SEQ ID NO: 262261 - RNA, 20 nt, Artificial Sequence
  Synthetic
aauugaaauacugagaguac

SEQ ID NO: 262262 - RNA, 21 nt, Artificial Sequence
  Synthetic
uaauugaaauacugagaguac

SEQ ID NO: 262263 - RNA, 22 nt, Artificial Sequence
  Synthetic
auaauugaaauacugagaguac

SEQ ID NO: 262264 - RNA, 23 nt, Artificial Sequence
  Synthetic
gauaauugaaauacugagaguac

SEQ ID NO: 262265 - RNA, 24 nt, Artificial Sequence
  Synthetic
ugauaauugaaauacugagaguac

SEQ ID NO: 262266 - RNA, 18 nt, Artificial Sequence
  Synthetic
ggaguaaccugggaguac

SEQ ID NO: 262267 - RNA, 19 nt, Artificial Sequence
  Synthetic
uggaguaaccugggaguac

SEQ ID NO: 262268 - RNA, 20 nt, Artificial Sequence
  Synthetic
guggaguaaccugggaguac

SEQ ID NO: 262269 - RNA, 21 nt, Artificial Sequence
  Synthetic
aguggaguaaccugggaguac

SEQ ID NO: 262270 - RNA, 22 nt, Artificial Sequence
  Synthetic
caguggaguaaccugggaguac

SEQ ID NO: 262271 - RNA, 23 nt, Artificial Sequence
  Synthetic
acaguggaguaaccugggaguac

SEQ ID NO: 262272 - RNA, 24 nt, Artificial Sequence
  Synthetic
cacaguggaguaaccugggaguac

SEQ ID NO: 262273 - RNA, 18 nt, Artificial Sequence
  Synthetic
uuuaaagaaauugaguac

SEQ ID NO: 262274 - RNA, 19 nt, Artificial Sequence
  Synthetic
auuuaaagaaauugaguac

SEQ ID NO: 262275 - RNA, 20 nt, Artificial Sequence
  Synthetic
aauuuaaagaaauugaguac

SEQ ID NO: 262276 - RNA, 21 nt, Artificial Sequence
  Synthetic
aaauuuaaagaaauugaguac

SEQ ID NO: 262277 - RNA, 22 nt, Artificial Sequence
  Synthetic
aaaauuuaaagaaauugaguac

SEQ ID NO: 262278 - RNA, 23 nt, Artificial Sequence
  Synthetic
gaaaauuuaaagaaauugaguac

SEQ ID NO: 262279 - RNA, 24 nt, Artificial Sequence
  Synthetic
ugaaaauuuaaagaaauugaguac

SEQ ID NO: 262280 - RNA, 18 nt, Artificial Sequence
  Synthetic
aaaauuauagcauaguac

SEQ ID NO: 262281 - RNA, 19 nt, Artificial Sequence
  Synthetic
caaaauuauagcauaguac

SEQ ID NO: 262282 - RNA, 20 nt, Artificial Sequence
  Synthetic
ucaaaauuauagcauaguac

SEQ ID NO: 262283 - RNA, 21 nt, Artificial Sequence
  Synthetic
uucaaaauuauagcauaguac

SEQ ID NO: 262284 - RNA, 22 nt, Artificial Sequence
  Synthetic
auucaaaauuauagcauaguac

SEQ ID NO: 262285 - RNA, 23 nt, Artificial Sequence
  Synthetic
uauucaaaauuauagcauaguac

SEQ ID NO: 262286 - RNA, 24 nt, Artificial Sequence
  Synthetic
auauucaaaauuauagcauaguac

SEQ ID NO: 262287 - RNA, 18 nt, Artificial Sequence
  Synthetic
aaucauauucuguaguac

SEQ ID NO: 262288 - RNA, 19 nt, Artificial Sequence
  Synthetic
gaaucauauucuguaguac

SEQ ID NO: 262289 - RNA, 20 nt, Artificial Sequence
  Synthetic
agaaucauauucuguaguac

SEQ ID NO: 262290 - RNA, 21 nt, Artificial Sequence
  Synthetic
gagaaucauauucuguaguac

SEQ ID NO: 262291 - RNA, 22 nt, Artificial Sequence
  Synthetic
ugagaaucauauucuguaguac

SEQ ID NO: 262292 - RNA, 23 nt, Artificial Sequence
  Synthetic
gugagaaucauauucuguaguac

SEQ ID NO: 262293 - RNA, 24 nt, Artificial Sequence
  Synthetic
ggugagaaucauauucuguaguac

SEQ ID NO: 262294 - RNA, 18 nt, Artificial Sequence
  Synthetic
gugcagggguuguaguac

SEQ ID NO: 262295 - RNA, 19 nt, Artificial Sequence
  Synthetic
agugcagggguuguaguac

SEQ ID NO: 262296 - RNA, 20 nt, Artificial Sequence
  Synthetic
gagugcagggguuguaguac

SEQ ID NO: 262297 - RNA, 21 nt, Artificial Sequence
  Synthetic
ugagugcagggguuguaguac

SEQ ID NO: 262298 - RNA, 22 nt, Artificial Sequence
  Synthetic
gugagugcagggguuguaguac

SEQ ID NO: 262299 - RNA, 23 nt, Artificial Sequence
  Synthetic
ugugagugcagggguuguaguac

SEQ ID NO: 262300 - RNA, 24 nt, Artificial Sequence
  Synthetic
cugugagugcagggguuguaguac

SEQ ID NO: 262301 - RNA, 18 nt, Artificial Sequence
  Synthetic
aggaacagcgcuuaguac

SEQ ID NO: 262302 - RNA, 19 nt, Artificial Sequence
  Synthetic
caggaacagcgcuuaguac

SEQ ID NO: 262303 - RNA, 20 nt, Artificial Sequence
  Synthetic
ccaggaacagcgcuuaguac

SEQ ID NO: 262304 - RNA, 21 nt, Artificial Sequence
  Synthetic
accaggaacagcgcuuaguac

SEQ ID NO: 262305 - RNA, 22 nt, Artificial Sequence
  Synthetic
uaccaggaacagcgcuuaguac

SEQ ID NO: 262306 - RNA, 23 nt, Artificial Sequence
  Synthetic
guaccaggaacagcgcuuaguac

SEQ ID NO: 262307 - RNA, 24 nt, Artificial Sequence
  Synthetic
uguaccaggaacagcgcuuaguac

SEQ ID NO: 262308 - RNA, 18 nt, Artificial Sequence
  Synthetic
aaaagauuauuuuaguac

SEQ ID NO: 262309 - RNA, 19 nt, Artificial Sequence
  Synthetic
aaaaagauuauuuuaguac

SEQ ID NO: 262310 - RNA, 20 nt, Artificial Sequence
  Synthetic
aaaaaagauuauuuuaguac

SEQ ID NO: 262311 - RNA, 21 nt, Artificial Sequence
  Synthetic
uaaaaaagauuauuuuaguac

SEQ ID NO: 262312 - RNA, 22 nt, Artificial Sequence
  Synthetic
auaaaaaagauuauuuuaguac

SEQ ID NO: 262313 - RNA, 23 nt, Artificial Sequence
  Synthetic
aauaaaaaagauuauuuuaguac

SEQ ID NO: 262314 - RNA, 24 nt, Artificial Sequence
  Synthetic
caauaaaaaagauuauuuuaguac

SEQ ID NO: 262315 - RNA, 18 nt, Artificial Sequence
  Synthetic
auccugcacacuacguac

SEQ ID NO: 262316 - RNA, 19 nt, Artificial Sequence
  Synthetic
uauccugcacacuacguac

SEQ ID NO: 262317 - RNA, 20 nt, Artificial Sequence
  Synthetic
auauccugcacacuacguac

SEQ ID NO: 262318 - RNA, 21 nt, Artificial Sequence
  Synthetic
aauauccugcacacuacguac

SEQ ID NO: 262319 - RNA, 22 nt, Artificial Sequence
  Synthetic
uaauauccugcacacuacguac

SEQ ID NO: 262320 - RNA, 23 nt, Artificial Sequence
  Synthetic
guaauauccugcacacuacguac

SEQ ID NO: 262321 - RNA, 24 nt, Artificial Sequence
  Synthetic
aguaauauccugcacacuacguac

SEQ ID NO: 262322 - RNA, 18 nt, Artificial Sequence
  Synthetic
aaauaacaaaauucguac

SEQ ID NO: 262323 - RNA, 19 nt, Artificial Sequence
  Synthetic
aaaauaacaaaauucguac

SEQ ID NO: 262324 - RNA, 20 nt, Artificial Sequence
  Synthetic
caaaauaacaaaauucguac

SEQ ID NO: 262325 - RNA, 21 nt, Artificial Sequence
  Synthetic
ucaaaauaacaaaauucguac

SEQ ID NO: 262326 - RNA, 22 nt, Artificial Sequence
  Synthetic
aucaaaauaacaaaauucguac

SEQ ID NO: 262327 - RNA, 23 nt, Artificial Sequence
  Synthetic
gaucaaaauaacaaaauucguac

SEQ ID NO: 262328 - RNA, 24 nt, Artificial Sequence
  Synthetic
ugaucaaaauaacaaaauucguac

SEQ ID NO: 262329 - RNA, 18 nt, Artificial Sequence
  Synthetic
accuaguuaauaagguac

SEQ ID NO: 262330 - RNA, 19 nt, Artificial Sequence
  Synthetic
uaccuaguuaauaagguac

SEQ ID NO: 262331 - RNA, 20 nt, Artificial Sequence
  Synthetic
guaccuaguuaauaagguac

SEQ ID NO: 262332 - RNA, 21 nt, Artificial Sequence
  Synthetic
aguaccuaguuaauaagguac

SEQ ID NO: 262333 - RNA, 22 nt, Artificial Sequence
  Synthetic
uaguaccuaguuaauaagguac

SEQ ID NO: 262334 - RNA, 23 nt, Artificial Sequence
  Synthetic
guaguaccuaguuaauaagguac

SEQ ID NO: 262335 - RNA, 24 nt, Artificial Sequence
  Synthetic
aguaguaccuaguuaauaagguac

SEQ ID NO: 262336 - RNA, 18 nt, Artificial Sequence
  Synthetic
aaucaauagcacagguac

SEQ ID NO: 262337 - RNA, 19 nt, Artificial Sequence
  Synthetic
uaaucaauagcacagguac

SEQ ID NO: 262338 - RNA, 20 nt, Artificial Sequence
  Synthetic
auaaucaauagcacagguac

SEQ ID NO: 262339 - RNA, 21 nt, Artificial Sequence
  Synthetic
gauaaucaauagcacagguac

SEQ ID NO: 262340 - RNA, 22 nt, Artificial Sequence
  Synthetic
agauaaucaauagcacagguac

SEQ ID NO: 262341 - RNA, 23 nt, Artificial Sequence
  Synthetic
gagauaaucaauagcacagguac

SEQ ID NO: 262342 - RNA, 24 nt, Artificial Sequence
  Synthetic
agagauaaucaauagcacagguac

SEQ ID NO: 262343 - RNA, 18 nt, Artificial Sequence
  Synthetic
gccuguaaucccagguac

SEQ ID NO: 262344 - RNA, 19 nt, Artificial Sequence
  Synthetic
ugccuguaaucccagguac

SEQ ID NO: 262345 - RNA, 20 nt, Artificial Sequence
  Synthetic
augccuguaaucccagguac

SEQ ID NO: 262346 - RNA, 21 nt, Artificial Sequence
  Synthetic
caugccuguaaucccagguac

SEQ ID NO: 262347 - RNA, 22 nt, Artificial Sequence
  Synthetic
acaugccuguaaucccagguac

SEQ ID NO: 262348 - RNA, 23 nt, Artificial Sequence
  Synthetic
cacaugccuguaaucccagguac

SEQ ID NO: 262349 - RNA, 24 nt, Artificial Sequence
  Synthetic
gcacaugccuguaaucccagguac

SEQ ID NO: 262350 - RNA, 18 nt, Artificial Sequence
  Synthetic
auucuguaagccagguac

SEQ ID NO: 262351 - RNA, 19 nt, Artificial Sequence
  Synthetic
aauucuguaagccagguac

SEQ ID NO: 262352 - RNA, 20 nt, Artificial Sequence
  Synthetic
gaauucuguaagccagguac

SEQ ID NO: 262353 - RNA, 21 nt, Artificial Sequence
  Synthetic
ggaauucuguaagccagguac

SEQ ID NO: 262354 - RNA, 22 nt, Artificial Sequence
  Synthetic
gggaauucuguaagccagguac

SEQ ID NO: 262355 - RNA, 23 nt, Artificial Sequence
  Synthetic
ugggaauucuguaagccagguac

SEQ ID NO: 262356 - RNA, 24 nt, Artificial Sequence
  Synthetic
uugggaauucuguaagccagguac

SEQ ID NO: 262357 - RNA, 18 nt, Artificial Sequence
  Synthetic
augauauaugccagguac

SEQ ID NO: 262358 - RNA, 19 nt, Artificial Sequence
  Synthetic
caugauauaugccagguac

SEQ ID NO: 262359 - RNA, 20 nt, Artificial Sequence
  Synthetic
acaugauauaugccagguac

SEQ ID NO: 262360 - RNA, 21 nt, Artificial Sequence
  Synthetic
uacaugauauaugccagguac

SEQ ID NO: 262361 - RNA, 22 nt, Artificial Sequence
  Synthetic
guacaugauauaugccagguac

SEQ ID NO: 262362 - RNA, 23 nt, Artificial Sequence
  Synthetic
aguacaugauauaugccagguac

SEQ ID NO: 262363 - RNA, 24 nt, Artificial Sequence
  Synthetic
aaguacaugauauaugccagguac

SEQ ID NO: 262364 - RNA, 18 nt, Artificial Sequence
  Synthetic
gaauucuaccagagguac

SEQ ID NO: 262365 - RNA, 19 nt, Artificial Sequence
  Synthetic
cgaauucuaccagagguac

SEQ ID NO: 262366 - RNA, 20 nt, Artificial Sequence
  Synthetic
ccgaauucuaccagagguac

SEQ ID NO: 262367 - RNA, 21 nt, Artificial Sequence
  Synthetic
gccgaauucuaccagagguac

SEQ ID NO: 262368 - RNA, 22 nt, Artificial Sequence
  Synthetic
agccgaauucuaccagagguac

SEQ ID NO: 262369 - RNA, 23 nt, Artificial Sequence
  Synthetic
cagccgaauucuaccagagguac

SEQ ID NO: 262370 - RNA, 24 nt, Artificial Sequence
  Synthetic
acagccgaauucuaccagagguac

SEQ ID NO: 262371 - RNA, 18 nt, Artificial Sequence
  Synthetic
ggucacauucugagguac

SEQ ID NO: 262372 - RNA, 19 nt, Artificial Sequence
  Synthetic
gggucacauucugagguac

SEQ ID NO: 262373 - RNA, 20 nt, Artificial Sequence
  Synthetic
agggucacauucugagguac

SEQ ID NO: 262374 - RNA, 21 nt, Artificial Sequence
  Synthetic
uagggucacauucugagguac

SEQ ID NO: 262375 - RNA, 22 nt, Artificial Sequence
  Synthetic
auagggucacauucugagguac

SEQ ID NO: 262376 - RNA, 23 nt, Artificial Sequence
  Synthetic
aauagggucacauucugagguac

SEQ ID NO: 262377 - RNA, 24 nt, Artificial Sequence
  Synthetic
aaauagggucacauucugagguac

SEQ ID NO: 262378 - RNA, 18 nt, Artificial Sequence
  Synthetic
uguuuacuucugagguac

SEQ ID NO: 262379 - RNA, 19 nt, Artificial Sequence
  Synthetic
guguuuacuucugagguac

SEQ ID NO: 262380 - RNA, 20 nt, Artificial Sequence
  Synthetic
uguguuuacuucugagguac

SEQ ID NO: 262381 - RNA, 21 nt, Artificial Sequence
  Synthetic
auguguuuacuucugagguac

SEQ ID NO: 262382 - RNA, 22 nt, Artificial Sequence
  Synthetic
aauguguuuacuucugagguac

SEQ ID NO: 262383 - RNA, 23 nt, Artificial Sequence
  Synthetic
aaauguguuuacuucugagguac

SEQ ID NO: 262384 - RNA, 24 nt, Artificial Sequence
  Synthetic
aaaauguguuuacuucugagguac

SEQ ID NO: 262385 - RNA, 18 nt, Artificial Sequence
  Synthetic
uaagauuaaauaggguac

SEQ ID NO: 262386 - RNA, 19 nt, Artificial Sequence
  Synthetic
uuaagauuaaauaggguac

SEQ ID NO: 262387 - RNA, 20 nt, Artificial Sequence
  Synthetic
guuaagauuaaauaggguac

SEQ ID NO: 262388 - RNA, 21 nt, Artificial Sequence
  Synthetic
gguuaagauuaaauaggguac

SEQ ID NO: 262389 - RNA, 22 nt, Artificial Sequence
  Synthetic
ggguuaagauuaaauaggguac

SEQ ID NO: 262390 - RNA, 23 nt, Artificial Sequence
  Synthetic
gggguuaagauuaaauaggguac

SEQ ID NO: 262391 - RNA, 24 nt, Artificial Sequence
  Synthetic
ugggguuaagauuaaauaggguac

SEQ ID NO: 262392 - RNA, 18 nt, Artificial Sequence
  Synthetic
uauaugucaacgggguac

SEQ ID NO: 262393 - RNA, 19 nt, Artificial Sequence
  Synthetic
guauaugucaacgggguac

SEQ ID NO: 262394 - RNA, 20 nt, Artificial Sequence
  Synthetic
uguauaugucaacgggguac

SEQ ID NO: 262395 - RNA, 21 nt, Artificial Sequence
  Synthetic
guguauaugucaacgggguac

SEQ ID NO: 262396 - RNA, 22 nt, Artificial Sequence
  Synthetic
gguguauaugucaacgggguac

SEQ ID NO: 262397 - RNA, 23 nt, Artificial Sequence
  Synthetic
agguguauaugucaacgggguac

SEQ ID NO: 262398 - RNA, 24 nt, Artificial Sequence
  Synthetic
uagguguauaugucaacgggguac

SEQ ID NO: 262399 - RNA, 18 nt, Artificial Sequence
  Synthetic
uauauauuuacgggguac

SEQ ID NO: 262400 - RNA, 19 nt, Artificial Sequence
  Synthetic
auauauauuuacgggguac

SEQ ID NO: 262401 - RNA, 20 nt, Artificial Sequence
  Synthetic
uauauauauuuacgggguac

SEQ ID NO: 262402 - RNA, 21 nt, Artificial Sequence
  Synthetic
guauauauauuuacgggguac

SEQ ID NO: 262403 - RNA, 22 nt, Artificial Sequence
  Synthetic
gguauauauauuuacgggguac

SEQ ID NO: 262404 - RNA, 23 nt, Artificial Sequence
  Synthetic
agguauauauauuuacgggguac

SEQ ID NO: 262405 - RNA, 24 nt, Artificial Sequence
  Synthetic
uagguauauauauuuacgggguac

SEQ ID NO: 262406 - RNA, 18 nt, Artificial Sequence
  Synthetic
uauauauugaugggguac

SEQ ID NO: 262407 - RNA, 19 nt, Artificial Sequence
  Synthetic
guauauauugaugggguac

SEQ ID NO: 262408 - RNA, 20 nt, Artificial Sequence
  Synthetic
uguauauauugaugggguac

SEQ ID NO: 262409 - RNA, 21 nt, Artificial Sequence
  Synthetic
guguauauauugaugggguac

SEQ ID NO: 262410 - RNA, 22 nt, Artificial Sequence
  Synthetic
gguguauauauugaugggguac

SEQ ID NO: 262411 - RNA, 23 nt, Artificial Sequence
  Synthetic
agguguauauauugaugggguac

SEQ ID NO: 262412 - RNA, 24 nt, Artificial Sequence
  Synthetic
aagguguauauauugaugggguac

SEQ ID NO: 262413 - RNA, 18 nt, Artificial Sequence
  Synthetic
uauauauauaugggguac

SEQ ID NO: 262414 - RNA, 19 nt, Artificial Sequence
  Synthetic
auauauauauaugggguac

SEQ ID NO: 262415 - RNA, 20 nt, Artificial Sequence
  Synthetic
cauauauauauaugggguac

SEQ ID NO: 262416 - RNA, 21 nt, Artificial Sequence
  Synthetic
acauauauauauaugggguac

SEQ ID NO: 262417 - RNA, 22 nt, Artificial Sequence
  Synthetic
uacauauauauauaugggguac

SEQ ID NO: 262418 - RNA, 23 nt, Artificial Sequence
  Synthetic
guacauauauauauaugggguac

SEQ ID NO: 262419 - RNA, 24 nt, Artificial Sequence
  Synthetic
gguacauauauauauaugggguac

SEQ ID NO: 262420 - RNA, 18 nt, Artificial Sequence
  Synthetic
uauguauuuaugggguac

SEQ ID NO: 262421 - RNA, 19 nt, Artificial Sequence
  Synthetic
guauguauuuaugggguac

SEQ ID NO: 262422 - RNA, 20 nt, Artificial Sequence
  Synthetic
uguauguauuuaugggguac

SEQ ID NO: 262423 - RNA, 21 nt, Artificial Sequence
  Synthetic
guguauguauuuaugggguac

SEQ ID NO: 262424 - RNA, 22 nt, Artificial Sequence
  Synthetic
gguguauguauuuaugggguac

SEQ ID NO: 262425 - RNA, 23 nt, Artificial Sequence
  Synthetic
agguguauguauuuaugggguac

SEQ ID NO: 262426 - RNA, 24 nt, Artificial Sequence
  Synthetic
uagguguauguauuuaugggguac

SEQ ID NO: 262427 - RNA, 18 nt, Artificial Sequence
  Synthetic
ucuccuuuaaaaugguac

SEQ ID NO: 262428 - RNA, 19 nt, Artificial Sequence
  Synthetic
uucuccuuuaaaaugguac

SEQ ID NO: 262429 - RNA, 20 nt, Artificial Sequence
  Synthetic
guucuccuuuaaaaugguac

SEQ ID NO: 262430 - RNA, 21 nt, Artificial Sequence
  Synthetic
gguucuccuuuaaaaugguac

SEQ ID NO: 262431 - RNA, 22 nt, Artificial Sequence
  Synthetic
ggguucuccuuuaaaaugguac

SEQ ID NO: 262432 - RNA, 23 nt, Artificial Sequence
  Synthetic
gggguucuccuuuaaaaugguac

SEQ ID NO: 262433 - RNA, 24 nt, Artificial Sequence
  Synthetic
ggggguucuccuuuaaaaugguac

SEQ ID NO: 262434 - RNA, 18 nt, Artificial Sequence
  Synthetic
uaguuuacaucaugguac

SEQ ID NO: 262435 - RNA, 19 nt, Artificial Sequence
  Synthetic
uuaguuuacaucaugguac

SEQ ID NO: 262436 - RNA, 20 nt, Artificial Sequence
  Synthetic
uuuaguuuacaucaugguac

SEQ ID NO: 262437 - RNA, 21 nt, Artificial Sequence
  Synthetic
cuuuaguuuacaucaugguac

SEQ ID NO: 262438 - RNA, 22 nt, Artificial Sequence
  Synthetic
acuuuaguuuacaucaugguac

SEQ ID NO: 262439 - RNA, 23 nt, Artificial Sequence
  Synthetic
gacuuuaguuuacaucaugguac

SEQ ID NO: 262440 - RNA, 24 nt, Artificial Sequence
  Synthetic
ggacuuuaguuuacaucaugguac

SEQ ID NO: 262441 - RNA, 18 nt, Artificial Sequence
  Synthetic
gucccucuuaccugguac

SEQ ID NO: 262442 - RNA, 19 nt, Artificial Sequence
  Synthetic
ugucccucuuaccugguac

SEQ ID NO: 262443 - RNA, 20 nt, Artificial Sequence
  Synthetic
augucccucuuaccugguac

SEQ ID NO: 262444 - RNA, 21 nt, Artificial Sequence
  Synthetic
aaugucccucuuaccugguac

SEQ ID NO: 262445 - RNA, 22 nt, Artificial Sequence
  Synthetic
caaugucccucuuaccugguac

SEQ ID NO: 262446 - RNA, 23 nt, Artificial Sequence
  Synthetic
ucaaugucccucuuaccugguac

SEQ ID NO: 262447 - RNA, 24 nt, Artificial Sequence
  Synthetic
aucaaugucccucuuaccugguac

SEQ ID NO: 262448 - RNA, 18 nt, Artificial Sequence
  Synthetic
aaaucacacaauugguac

SEQ ID NO: 262449 - RNA, 19 nt, Artificial Sequence
  Synthetic
aaaaucacacaauugguac

SEQ ID NO: 262450 - RNA, 20 nt, Artificial Sequence
  Synthetic
uaaaaucacacaauugguac

SEQ ID NO: 262451 - RNA, 21 nt, Artificial Sequence
  Synthetic
uuaaaaucacacaauugguac

SEQ ID NO: 262452 - RNA, 22 nt, Artificial Sequence
  Synthetic
guuaaaaucacacaauugguac

SEQ ID NO: 262453 - RNA, 23 nt, Artificial Sequence
  Synthetic
aguuaaaaucacacaauugguac

SEQ ID NO: 262454 - RNA, 24 nt, Artificial Sequence
  Synthetic
uaguuaaaaucacacaauugguac

SEQ ID NO: 262455 - RNA, 18 nt, Artificial Sequence
  Synthetic
aaaucucuagauugguac

SEQ ID NO: 262456 - RNA, 19 nt, Artificial Sequence
  Synthetic
aaaaucucuagauugguac

SEQ ID NO: 262457 - RNA, 20 nt, Artificial Sequence
  Synthetic
aaaaaucucuagauugguac

SEQ ID NO: 262458 - RNA, 21 nt, Artificial Sequence
  Synthetic
uaaaaaucucuagauugguac

SEQ ID NO: 262459 - RNA, 22 nt, Artificial Sequence
  Synthetic
auaaaaaucucuagauugguac

SEQ ID NO: 262460 - RNA, 23 nt, Artificial Sequence
  Synthetic
uauaaaaaucucuagauugguac

SEQ ID NO: 262461 - RNA, 24 nt, Artificial Sequence
  Synthetic
uuauaaaaaucucuagauugguac

SEQ ID NO: 262462 - RNA, 18 nt, Artificial Sequence
  Synthetic
acagcagcaaguugguac

SEQ ID NO: 262463 - RNA, 19 nt, Artificial Sequence
  Synthetic
uacagcagcaaguugguac

SEQ ID NO: 262464 - RNA, 20 nt, Artificial Sequence
  Synthetic
cuacagcagcaaguugguac

SEQ ID NO: 262465 - RNA, 21 nt, Artificial Sequence
  Synthetic
ccuacagcagcaaguugguac

SEQ ID NO: 262466 - RNA, 22 nt, Artificial Sequence
  Synthetic
cccuacagcagcaaguugguac

SEQ ID NO: 262467 - RNA, 23 nt, Artificial Sequence
  Synthetic
ccccuacagcagcaaguugguac

SEQ ID NO: 262468 - RNA, 24 nt, Artificial Sequence
  Synthetic
accccuacagcagcaaguugguac

SEQ ID NO: 262469 - RNA, 18 nt, Artificial Sequence
  Synthetic
gauuaaguugguugguac

SEQ ID NO: 262470 - RNA, 19 nt, Artificial Sequence
  Synthetic
ggauuaaguugguugguac

SEQ ID NO: 262471 - RNA, 20 nt, Artificial Sequence
  Synthetic
aggauuaaguugguugguac

SEQ ID NO: 262472 - RNA, 21 nt, Artificial Sequence
  Synthetic
caggauuaaguugguugguac

SEQ ID NO: 262473 - RNA, 22 nt, Artificial Sequence
  Synthetic
ucaggauuaaguugguugguac

SEQ ID NO: 262474 - RNA, 23 nt, Artificial Sequence
  Synthetic
aucaggauuaaguugguugguac

SEQ ID NO: 262475 - RNA, 24 nt, Artificial Sequence
  Synthetic
caucaggauuaaguugguugguac

SEQ ID NO: 262476 - RNA, 18 nt, Artificial Sequence
  Synthetic
uauauauuuauuugguac

SEQ ID NO: 262477 - RNA, 19 nt, Artificial Sequence
  Synthetic
guauauauuuauuugguac

SEQ ID NO: 262478 - RNA, 20 nt, Artificial Sequence
  Synthetic
uguauauauuuauuugguac

SEQ ID NO: 262479 - RNA, 21 nt, Artificial Sequence
  Synthetic
guguauauauuuauuugguac

SEQ ID NO: 262480 - RNA, 22 nt, Artificial Sequence
  Synthetic
gguguauauauuuauuugguac

SEQ ID NO: 262481 - RNA, 23 nt, Artificial Sequence
  Synthetic
agguguauauauuuauuugguac

SEQ ID NO: 262482 - RNA, 24 nt, Artificial Sequence
  Synthetic
cagguguauauauuuauuugguac

SEQ ID NO: 262483 - RNA, 18 nt, Artificial Sequence
  Synthetic
gaggagaugcuuugguac

SEQ ID NO: 262484 - RNA, 19 nt, Artificial Sequence
  Synthetic
ggaggagaugcuuugguac

SEQ ID NO: 262485 - RNA, 20 nt, Artificial Sequence
  Synthetic
gggaggagaugcuuugguac

SEQ ID NO: 262486 - RNA, 21 nt, Artificial Sequence
  Synthetic
ugggaggagaugcuuugguac

SEQ ID NO: 262487 - RNA, 22 nt, Artificial Sequence
  Synthetic
gugggaggagaugcuuugguac

SEQ ID NO: 262488 - RNA, 23 nt, Artificial Sequence
  Synthetic
ggugggaggagaugcuuugguac

SEQ ID NO: 262489 - RNA, 24 nt, Artificial Sequence
  Synthetic
gggugggaggagaugcuuugguac

SEQ ID NO: 262490 - RNA, 18 nt, Artificial Sequence
  Synthetic
aaaguuaacaaaauguac

SEQ ID NO: 262491 - RNA, 19 nt, Artificial Sequence
  Synthetic
aaaaguuaacaaaauguac

SEQ ID NO: 262492 - RNA, 20 nt, Artificial Sequence
  Synthetic
aaaaaguuaacaaaauguac

SEQ ID NO: 262493 - RNA, 21 nt, Artificial Sequence
  Synthetic
gaaaaaguuaacaaaauguac

SEQ ID NO: 262494 - RNA, 22 nt, Artificial Sequence
  Synthetic
ggaaaaaguuaacaaaauguac

SEQ ID NO: 262495 - RNA, 23 nt, Artificial Sequence
  Synthetic
gggaaaaaguuaacaaaauguac

SEQ ID NO: 262496 - RNA, 24 nt, Artificial Sequence
  Synthetic
ugggaaaaaguuaacaaaauguac

SEQ ID NO: 262497 - RNA, 18 nt, Artificial Sequence
  Synthetic
auaagauauaaaauguac

SEQ ID NO: 262498 - RNA, 19 nt, Artificial Sequence
  Synthetic
aauaagauauaaaauguac

SEQ ID NO: 262499 - RNA, 20 nt, Artificial Sequence
  Synthetic
aaauaagauauaaaauguac

SEQ ID NO: 262500 - RNA, 21 nt, Artificial Sequence
  Synthetic
uaaauaagauauaaaauguac

SEQ ID NO: 262501 - RNA, 22 nt, Artificial Sequence
  Synthetic
uuaaauaagauauaaaauguac

SEQ ID NO: 262502 - RNA, 23 nt, Artificial Sequence
  Synthetic
guuaaauaagauauaaaauguac

SEQ ID NO: 262503 - RNA, 24 nt, Artificial Sequence
  Synthetic
uguuaaauaagauauaaaauguac

SEQ ID NO: 262504 - RNA, 18 nt, Artificial Sequence
  Synthetic
gaacucaaacaaauguac

SEQ ID NO: 262505 - RNA, 19 nt, Artificial Sequence
  Synthetic
ugaacucaaacaaauguac

SEQ ID NO: 262506 - RNA, 20 nt, Artificial Sequence
  Synthetic
augaacucaaacaaauguac

SEQ ID NO: 262507 - RNA, 21 nt, Artificial Sequence
  Synthetic
aaugaacucaaacaaauguac

SEQ ID NO: 262508 - RNA, 22 nt, Artificial Sequence
  Synthetic
caaugaacucaaacaaauguac

SEQ ID NO: 262509 - RNA, 23 nt, Artificial Sequence
  Synthetic
acaaugaacucaaacaaauguac

SEQ ID NO: 262510 - RNA, 24 nt, Artificial Sequence
  Synthetic
uacaaugaacucaaacaaauguac

SEQ ID NO: 262511 - RNA, 18 nt, Artificial Sequence
  Synthetic
uguaguggaugcauguac

SEQ ID NO: 262512 - RNA, 19 nt, Artificial Sequence
  Synthetic
auguaguggaugcauguac

SEQ ID NO: 262513 - RNA, 20 nt, Artificial Sequence
  Synthetic
aauguaguggaugcauguac

SEQ ID NO: 262514 - RNA, 21 nt, Artificial Sequence
  Synthetic
gaauguaguggaugcauguac

SEQ ID NO: 262515 - RNA, 22 nt, Artificial Sequence
  Synthetic
ugaauguaguggaugcauguac

SEQ ID NO: 262516 - RNA, 23 nt, Artificial Sequence
  Synthetic
augaauguaguggaugcauguac

SEQ ID NO: 262517 - RNA, 24 nt, Artificial Sequence
  Synthetic
gaugaauguaguggaugcauguac

SEQ ID NO: 262518 - RNA, 18 nt, Artificial Sequence
  Synthetic
ucaacauuuaucauguac

SEQ ID NO: 262519 - RNA, 19 nt, Artificial Sequence
  Synthetic
uucaacauuuaucauguac

SEQ ID NO: 262520 - RNA, 20 nt, Artificial Sequence
  Synthetic
auucaacauuuaucauguac

SEQ ID NO: 262521 - RNA, 21 nt, Artificial Sequence
  Synthetic
uauucaacauuuaucauguac

SEQ ID NO: 262522 - RNA, 22 nt, Artificial Sequence
  Synthetic
guauucaacauuuaucauguac

SEQ ID NO: 262523 - RNA, 23 nt, Artificial Sequence
  Synthetic
uguauucaacauuuaucauguac

SEQ ID NO: 262524 - RNA, 24 nt, Artificial Sequence
  Synthetic
auguauucaacauuuaucauguac

SEQ ID NO: 262525 - RNA, 18 nt, Artificial Sequence
  Synthetic
cuuuuuguucucauguac

SEQ ID NO: 262526 - RNA, 19 nt, Artificial Sequence
  Synthetic
ucuuuuuguucucauguac

SEQ ID NO: 262527 - RNA, 20 nt, Artificial Sequence
  Synthetic
cucuuuuuguucucauguac

SEQ ID NO: 262528 - RNA, 21 nt, Artificial Sequence
  Synthetic
ucucuuuuuguucucauguac

SEQ ID NO: 262529 - RNA, 22 nt, Artificial Sequence
  Synthetic
cucucuuuuuguucucauguac

SEQ ID NO: 262530 - RNA, 23 nt, Artificial Sequence
  Synthetic
gcucucuuuuuguucucauguac

SEQ ID NO: 262531 - RNA, 24 nt, Artificial Sequence
  Synthetic
ugcucucuuuuuguucucauguac

SEQ ID NO: 262532 - RNA, 18 nt, Artificial Sequence
  Synthetic
aguacuaauuucauguac

SEQ ID NO: 262533 - RNA, 19 nt, Artificial Sequence
  Synthetic
caguacuaauuucauguac

SEQ ID NO: 262534 - RNA, 20 nt, Artificial Sequence
  Synthetic
ccaguacuaauuucauguac

SEQ ID NO: 262535 - RNA, 21 nt, Artificial Sequence
  Synthetic
uccaguacuaauuucauguac

SEQ ID NO: 262536 - RNA, 22 nt, Artificial Sequence
  Synthetic
cuccaguacuaauuucauguac

SEQ ID NO: 262537 - RNA, 23 nt, Artificial Sequence
  Synthetic
ccuccaguacuaauuucauguac

SEQ ID NO: 262538 - RNA, 24 nt, Artificial Sequence
  Synthetic
gccuccaguacuaauuucauguac

SEQ ID NO: 262539 - RNA, 18 nt, Artificial Sequence
  Synthetic
auuuaagcagagauguac

SEQ ID NO: 262540 - RNA, 19 nt, Artificial Sequence
  Synthetic
aauuuaagcagagauguac

SEQ ID NO: 262541 - RNA, 20 nt, Artificial Sequence
  Synthetic
aaauuuaagcagagauguac

SEQ ID NO: 262542 - RNA, 21 nt, Artificial Sequence
  Synthetic
uaaauuuaagcagagauguac

SEQ ID NO: 262543 - RNA, 22 nt, Artificial Sequence
  Synthetic
uuaaauuuaagcagagauguac

SEQ ID NO: 262544 - RNA, 23 nt, Artificial Sequence
  Synthetic
cuuaaauuuaagcagagauguac

SEQ ID NO: 262545 - RNA, 24 nt, Artificial Sequence
  Synthetic
ccuuaaauuuaagcagagauguac

SEQ ID NO: 262546 - RNA, 18 nt, Artificial Sequence
  Synthetic
gcuguuacagugauguac

SEQ ID NO: 262547 - RNA, 19 nt, Artificial Sequence
  Synthetic
ugcuguuacagugauguac

SEQ ID NO: 262548 - RNA, 20 nt, Artificial Sequence
  Synthetic
cugcuguuacagugauguac

SEQ ID NO: 262549 - RNA, 21 nt, Artificial Sequence
  Synthetic
gcugcuguuacagugauguac

SEQ ID NO: 262550 - RNA, 22 nt, Artificial Sequence
  Synthetic
ugcugcuguuacagugauguac

SEQ ID NO: 262551 - RNA, 23 nt, Artificial Sequence
  Synthetic
gugcugcuguuacagugauguac

SEQ ID NO: 262552 - RNA, 24 nt, Artificial Sequence
  Synthetic
ugugcugcuguuacagugauguac

SEQ ID NO: 262553 - RNA, 18 nt, Artificial Sequence
  Synthetic
uacguauucuguauguac

SEQ ID NO: 262554 - RNA, 19 nt, Artificial Sequence
  Synthetic
auacguauucuguauguac

SEQ ID NO: 262555 - RNA, 20 nt, Artificial Sequence
  Synthetic
aauacguauucuguauguac

SEQ ID NO: 262556 - RNA, 21 nt, Artificial Sequence
  Synthetic
aaauacguauucuguauguac

SEQ ID NO: 262557 - RNA, 22 nt, Artificial Sequence
  Synthetic
uaaauacguauucuguauguac

SEQ ID NO: 262558 - RNA, 23 nt, Artificial Sequence
  Synthetic
guaaauacguauucuguauguac

SEQ ID NO: 262559 - RNA, 24 nt, Artificial Sequence
  Synthetic
uguaaauacguauucuguauguac

SEQ ID NO: 262560 - RNA, 18 nt, Artificial Sequence
  Synthetic
aagcuacuguguauguac

SEQ ID NO: 262561 - RNA, 19 nt, Artificial Sequence
  Synthetic
aaagcuacuguguauguac

SEQ ID NO: 262562 - RNA, 20 nt, Artificial Sequence
  Synthetic
uaaagcuacuguguauguac

SEQ ID NO: 262563 - RNA, 21 nt, Artificial Sequence
  Synthetic
guaaagcuacuguguauguac

SEQ ID NO: 262564 - RNA, 22 nt, Artificial Sequence
  Synthetic
aguaaagcuacuguguauguac

SEQ ID NO: 262565 - RNA, 23 nt, Artificial Sequence
  Synthetic
uaguaaagcuacuguguauguac

SEQ ID NO: 262566 - RNA, 24 nt, Artificial Sequence
  Synthetic
auaguaaagcuacuguguauguac

SEQ ID NO: 262567 - RNA, 18 nt, Artificial Sequence
  Synthetic
cauucuuuucaacuguac

SEQ ID NO: 262568 - RNA, 19 nt, Artificial Sequence
  Synthetic
ucauucuuuucaacuguac

SEQ ID NO: 262569 - RNA, 20 nt, Artificial Sequence
  Synthetic
cucauucuuuucaacuguac

SEQ ID NO: 262570 - RNA, 21 nt, Artificial Sequence
  Synthetic
acucauucuuuucaacuguac

SEQ ID NO: 262571 - RNA, 22 nt, Artificial Sequence
  Synthetic
uacucauucuuuucaacuguac

SEQ ID NO: 262572 - RNA, 23 nt, Artificial Sequence
  Synthetic
auacucauucuuuucaacuguac

SEQ ID NO: 262573 - RNA, 24 nt, Artificial Sequence
  Synthetic
aauacucauucuuuucaacuguac

SEQ ID NO: 262574 - RNA, 18 nt, Artificial Sequence
  Synthetic
uucuuaugucuacuguac

SEQ ID NO: 262575 - RNA, 19 nt, Artificial Sequence
  Synthetic
guucuuaugucuacuguac

SEQ ID NO: 262576 - RNA, 20 nt, Artificial Sequence
  Synthetic
aguucuuaugucuacuguac

SEQ ID NO: 262577 - RNA, 21 nt, Artificial Sequence
  Synthetic
gaguucuuaugucuacuguac

SEQ ID NO: 262578 - RNA, 22 nt, Artificial Sequence
  Synthetic
agaguucuuaugucuacuguac

SEQ ID NO: 262579 - RNA, 23 nt, Artificial Sequence
  Synthetic
gagaguucuuaugucuacuguac

SEQ ID NO: 262580 - RNA, 24 nt, Artificial Sequence
  Synthetic
agagaguucuuaugucuacuguac

SEQ ID NO: 262581 - RNA, 18 nt, Artificial Sequence
  Synthetic
uucaggaacuaccuguac

SEQ ID NO: 262582 - RNA, 19 nt, Artificial Sequence
  Synthetic
guucaggaacuaccuguac

SEQ ID NO: 262583 - RNA, 20 nt, Artificial Sequence
  Synthetic
uguucaggaacuaccuguac

SEQ ID NO: 262584 - RNA, 21 nt, Artificial Sequence
  Synthetic
auguucaggaacuaccuguac

SEQ ID NO: 262585 - RNA, 22 nt, Artificial Sequence
  Synthetic
aauguucaggaacuaccuguac

SEQ ID NO: 262586 - RNA, 23 nt, Artificial Sequence
  Synthetic
uaauguucaggaacuaccuguac

SEQ ID NO: 262587 - RNA, 24 nt, Artificial Sequence
  Synthetic
guaauguucaggaacuaccuguac

SEQ ID NO: 262588 - RNA, 18 nt, Artificial Sequence
  Synthetic
gauagacuggagcuguac

SEQ ID NO: 262589 - RNA, 19 nt, Artificial Sequence
  Synthetic
ugauagacuggagcuguac

SEQ ID NO: 262590 - RNA, 20 nt, Artificial Sequence
  Synthetic
uugauagacuggagcuguac

SEQ ID NO: 262591 - RNA, 21 nt, Artificial Sequence
  Synthetic
guugauagacuggagcuguac

SEQ ID NO: 262592 - RNA, 22 nt, Artificial Sequence
  Synthetic
gguugauagacuggagcuguac

SEQ ID NO: 262593 - RNA, 23 nt, Artificial Sequence
  Synthetic
ggguugauagacuggagcuguac

SEQ ID NO: 262594 - RNA, 24 nt, Artificial Sequence
  Synthetic
aggguugauagacuggagcuguac

SEQ ID NO: 262595 - RNA, 18 nt, Artificial Sequence
  Synthetic
uugauucaguagcuguac

SEQ ID NO: 262596 - RNA, 19 nt, Artificial Sequence
  Synthetic
cuugauucaguagcuguac

SEQ ID NO: 262597 - RNA, 20 nt, Artificial Sequence
  Synthetic
ccuugauucaguagcuguac

SEQ ID NO: 262598 - RNA, 21 nt, Artificial Sequence
  Synthetic
cccuugauucaguagcuguac

SEQ ID NO: 262599 - RNA, 22 nt, Artificial Sequence
  Synthetic
acccuugauucaguagcuguac

SEQ ID NO: 262600 - RNA, 23 nt, Artificial Sequence
  Synthetic
uacccuugauucaguagcuguac

SEQ ID NO: 262601 - RNA, 24 nt, Artificial Sequence
  Synthetic
auacccuugauucaguagcuguac

SEQ ID NO: 262602 - RNA, 18 nt, Artificial Sequence
  Synthetic
caguucugcaggcuguac

SEQ ID NO: 262603 - RNA, 19 nt, Artificial Sequence
  Synthetic
acaguucugcaggcuguac

SEQ ID NO: 262604 - RNA, 20 nt, Artificial Sequence
  Synthetic
cacaguucugcaggcuguac

SEQ ID NO: 262605 - RNA, 21 nt, Artificial Sequence
  Synthetic
ucacaguucugcaggcuguac

SEQ ID NO: 262606 - RNA, 22 nt, Artificial Sequence
  Synthetic
cucacaguucugcaggcuguac

SEQ ID NO: 262607 - RNA, 23 nt, Artificial Sequence
  Synthetic
gcucacaguucugcaggcuguac

SEQ ID NO: 262608 - RNA, 24 nt, Artificial Sequence
  Synthetic
ggcucacaguucugcaggcuguac

SEQ ID NO: 262609 - RNA, 18 nt, Artificial Sequence
  Synthetic
ugguucugcaggcuguac

SEQ ID NO: 262610 - RNA, 19 nt, Artificial Sequence
  Synthetic
augguucugcaggcuguac

SEQ ID NO: 262611 - RNA, 20 nt, Artificial Sequence
  Synthetic
gaugguucugcaggcuguac

SEQ ID NO: 262612 - RNA, 21 nt, Artificial Sequence
  Synthetic
ugaugguucugcaggcuguac

SEQ ID NO: 262613 - RNA, 22 nt, Artificial Sequence
  Synthetic
cugaugguucugcaggcuguac

SEQ ID NO: 262614 - RNA, 23 nt, Artificial Sequence
  Synthetic
gcugaugguucugcaggcuguac

SEQ ID NO: 262615 - RNA, 24 nt, Artificial Sequence
  Synthetic
ggcugaugguucugcaggcuguac

SEQ ID NO: 262616 - RNA, 18 nt, Artificial Sequence
  Synthetic
uauaaguauuggcuguac

SEQ ID NO: 262617 - RNA, 19 nt, Artificial Sequence
  Synthetic
auauaaguauuggcuguac

SEQ ID NO: 262618 - RNA, 20 nt, Artificial Sequence
  Synthetic
uauauaaguauuggcuguac

SEQ ID NO: 262619 - RNA, 21 nt, Artificial Sequence
  Synthetic
auauauaaguauuggcuguac

SEQ ID NO: 262620 - RNA, 22 nt, Artificial Sequence
  Synthetic
cauauauaaguauuggcuguac

SEQ ID NO: 262621 - RNA, 23 nt, Artificial Sequence
  Synthetic
ucauauauaaguauuggcuguac

SEQ ID NO: 262622 - RNA, 24 nt, Artificial Sequence
  Synthetic
uucauauauaaguauuggcuguac

SEQ ID NO: 262623 - RNA, 18 nt, Artificial Sequence
  Synthetic
uaggaaaggaugcuguac

SEQ ID NO: 262624 - RNA, 19 nt, Artificial Sequence
  Synthetic
auaggaaaggaugcuguac

SEQ ID NO: 262625 - RNA, 20 nt, Artificial Sequence
  Synthetic
aauaggaaaggaugcuguac

SEQ ID NO: 262626 - RNA, 21 nt, Artificial Sequence
  Synthetic
aaauaggaaaggaugcuguac

SEQ ID NO: 262627 - RNA, 22 nt, Artificial Sequence
  Synthetic
aaaauaggaaaggaugcuguac

SEQ ID NO: 262628 - RNA, 23 nt, Artificial Sequence
  Synthetic
gaaaauaggaaaggaugcuguac

SEQ ID NO: 262629 - RNA, 24 nt, Artificial Sequence
  Synthetic
agaaaauaggaaaggaugcuguac

SEQ ID NO: 262630 - RNA, 18 nt, Artificial Sequence
  Synthetic
agauacuacaaucuguac

SEQ ID NO: 262631 - RNA, 19 nt, Artificial Sequence
  Synthetic
uagauacuacaaucuguac

SEQ ID NO: 262632 - RNA, 20 nt, Artificial Sequence
  Synthetic
auagauacuacaaucuguac

SEQ ID NO: 262633 - RNA, 21 nt, Artificial Sequence
  Synthetic
gauagauacuacaaucuguac

SEQ ID NO: 262634 - RNA, 22 nt, Artificial Sequence
  Synthetic
ugauagauacuacaaucuguac

SEQ ID NO: 262635 - RNA, 23 nt, Artificial Sequence
  Synthetic
uugauagauacuacaaucuguac

SEQ ID NO: 262636 - RNA, 24 nt, Artificial Sequence
  Synthetic
auugauagauacuacaaucuguac

SEQ ID NO: 262637 - RNA, 18 nt, Artificial Sequence
  Synthetic
agcguuuucaaaguguac

SEQ ID NO: 262638 - RNA, 19 nt, Artificial Sequence
  Synthetic
aagcguuuucaaaguguac

SEQ ID NO: 262639 - RNA, 20 nt, Artificial Sequence
  Synthetic
uaagcguuuucaaaguguac

SEQ ID NO: 262640 - RNA, 21 nt, Artificial Sequence
  Synthetic
auaagcguuuucaaaguguac

SEQ ID NO: 262641 - RNA, 22 nt, Artificial Sequence
  Synthetic
cauaagcguuuucaaaguguac

SEQ ID NO: 262642 - RNA, 23 nt, Artificial Sequence
  Synthetic
acauaagcguuuucaaaguguac

SEQ ID NO: 262643 - RNA, 24 nt, Artificial Sequence
  Synthetic
gacauaagcguuuucaaaguguac

SEQ ID NO: 262644 - RNA, 18 nt, Artificial Sequence
  Synthetic
aaaaaaguagaaguguac

SEQ ID NO: 262645 - RNA, 19 nt, Artificial Sequence
  Synthetic
aaaaaaaguagaaguguac

SEQ ID NO: 262646 - RNA, 20 nt, Artificial Sequence
  Synthetic
gaaaaaaaguagaaguguac

SEQ ID NO: 262647 - RNA, 21 nt, Artificial Sequence
  Synthetic
agaaaaaaaguagaaguguac

SEQ ID NO: 262648 - RNA, 22 nt, Artificial Sequence
  Synthetic
cagaaaaaaaguagaaguguac

SEQ ID NO: 262649 - RNA, 23 nt, Artificial Sequence
  Synthetic
ucagaaaaaaaguagaaguguac

SEQ ID NO: 262650 - RNA, 24 nt, Artificial Sequence
  Synthetic
uucagaaaaaaaguagaaguguac

SEQ ID NO: 262651 - RNA, 18 nt, Artificial Sequence
  Synthetic
acauaacuuucaguguac

SEQ ID NO: 262652 - RNA, 19 nt, Artificial Sequence
  Synthetic
cacauaacuuucaguguac

SEQ ID NO: 262653 - RNA, 20 nt, Artificial Sequence
  Synthetic
acacauaacuuucaguguac

SEQ ID NO: 262654 - RNA, 21 nt, Artificial Sequence
  Synthetic
uacacauaacuuucaguguac

SEQ ID NO: 262655 - RNA, 22 nt, Artificial Sequence
  Synthetic
uuacacauaacuuucaguguac

SEQ ID NO: 262656 - RNA, 23 nt, Artificial Sequence
  Synthetic
auuacacauaacuuucaguguac

SEQ ID NO: 262657 - RNA, 24 nt, Artificial Sequence
  Synthetic
uauuacacauaacuuucaguguac

SEQ ID NO: 262658 - RNA, 18 nt, Artificial Sequence
  Synthetic
aagagguacauaguguac

SEQ ID NO: 262659 - RNA, 19 nt, Artificial Sequence
  Synthetic
uaagagguacauaguguac

SEQ ID NO: 262660 - RNA, 20 nt, Artificial Sequence
  Synthetic
cuaagagguacauaguguac

SEQ ID NO: 262661 - RNA, 21 nt, Artificial Sequence
  Synthetic
ucuaagagguacauaguguac

SEQ ID NO: 262662 - RNA, 22 nt, Artificial Sequence
  Synthetic
uucuaagagguacauaguguac

SEQ ID NO: 262663 - RNA, 23 nt, Artificial Sequence
  Synthetic
auucuaagagguacauaguguac

SEQ ID NO: 262664 - RNA, 24 nt, Artificial Sequence
  Synthetic
uauucuaagagguacauaguguac

SEQ ID NO: 262665 - RNA, 18 nt, Artificial Sequence
  Synthetic
cuaucauuucuaguguac

SEQ ID NO: 262666 - RNA, 19 nt, Artificial Sequence
  Synthetic
acuaucauuucuaguguac

SEQ ID NO: 262667 - RNA, 20 nt, Artificial Sequence
  Synthetic
cacuaucauuucuaguguac

SEQ ID NO: 262668 - RNA, 21 nt, Artificial Sequence
  Synthetic
acacuaucauuucuaguguac

SEQ ID NO: 262669 - RNA, 22 nt, Artificial Sequence
  Synthetic
cacacuaucauuucuaguguac

SEQ ID NO: 262670 - RNA, 23 nt, Artificial Sequence
  Synthetic
ucacacuaucauuucuaguguac

SEQ ID NO: 262671 - RNA, 24 nt, Artificial Sequence
  Synthetic
uucacacuaucauuucuaguguac

SEQ ID NO: 262672 - RNA, 18 nt, Artificial Sequence
  Synthetic
uacauuugauugguguac

SEQ ID NO: 262673 - RNA, 19 nt, Artificial Sequence
  Synthetic
cuacauuugauugguguac

SEQ ID NO: 262674 - RNA, 20 nt, Artificial Sequence
  Synthetic
ccuacauuugauugguguac

SEQ ID NO: 262675 - RNA, 21 nt, Artificial Sequence
  Synthetic
accuacauuugauugguguac

SEQ ID NO: 262676 - RNA, 22 nt, Artificial Sequence
  Synthetic
aaccuacauuugauugguguac

SEQ ID NO: 262677 - RNA, 23 nt, Artificial Sequence
  Synthetic
aaaccuacauuugauugguguac

SEQ ID NO: 262678 - RNA, 24 nt, Artificial Sequence
  Synthetic
caaaccuacauuugauugguguac

SEQ ID NO: 262679 - RNA, 18 nt, Artificial Sequence
  Synthetic
uuuauccuacauguguac

SEQ ID NO: 262680 - RNA, 19 nt, Artificial Sequence
  Synthetic
cuuuauccuacauguguac

SEQ ID NO: 262681 - RNA, 20 nt, Artificial Sequence
  Synthetic
ccuuuauccuacauguguac

SEQ ID NO: 262682 - RNA, 21 nt, Artificial Sequence
  Synthetic
uccuuuauccuacauguguac

SEQ ID NO: 262683 - RNA, 22 nt, Artificial Sequence
  Synthetic
guccuuuauccuacauguguac

SEQ ID NO: 262684 - RNA, 23 nt, Artificial Sequence
  Synthetic
uguccuuuauccuacauguguac

SEQ ID NO: 262685 - RNA, 24 nt, Artificial Sequence
  Synthetic
auguccuuuauccuacauguguac

SEQ ID NO: 262686 - RNA, 18 nt, Artificial Sequence
  Synthetic
agaauguuacauguguac

SEQ ID NO: 262687 - RNA, 19 nt, Artificial Sequence
  Synthetic
gagaauguuacauguguac

SEQ ID NO: 262688 - RNA, 20 nt, Artificial Sequence
  Synthetic
ggagaauguuacauguguac

SEQ ID NO: 262689 - RNA, 21 nt, Artificial Sequence
  Synthetic
uggagaauguuacauguguac

SEQ ID NO: 262690 - RNA, 22 nt, Artificial Sequence
  Synthetic
cuggagaauguuacauguguac

SEQ ID NO: 262691 - RNA, 23 nt, Artificial Sequence
  Synthetic
ccuggagaauguuacauguguac

SEQ ID NO: 262692 - RNA, 24 nt, Artificial Sequence
  Synthetic
uccuggagaauguuacauguguac

SEQ ID NO: 262693 - RNA, 18 nt, Artificial Sequence
  Synthetic
auauacauucauguguac

SEQ ID NO: 262694 - RNA, 19 nt, Artificial Sequence
  Synthetic
cauauacauucauguguac

SEQ ID NO: 262695 - RNA, 20 nt, Artificial Sequence
  Synthetic
acauauacauucauguguac

SEQ ID NO: 262696 - RNA, 21 nt, Artificial Sequence
  Synthetic
uacauauacauucauguguac

SEQ ID NO: 262697 - RNA, 22 nt, Artificial Sequence
  Synthetic
uuacauauacauucauguguac

SEQ ID NO: 262698 - RNA, 23 nt, Artificial Sequence
  Synthetic
uuuacauauacauucauguguac

SEQ ID NO: 262699 - RNA, 24 nt, Artificial Sequence
  Synthetic
auuuacauauacauucauguguac

SEQ ID NO: 262700 - RNA, 18 nt, Artificial Sequence
  Synthetic
guuaaccuugcuguguac

SEQ ID NO: 262701 - RNA, 19 nt, Artificial Sequence
  Synthetic
gguuaaccuugcuguguac

SEQ ID NO: 262702 - RNA, 20 nt, Artificial Sequence
  Synthetic
ggguuaaccuugcuguguac

SEQ ID NO: 262703 - RNA, 21 nt, Artificial Sequence
  Synthetic
aggguuaaccuugcuguguac

SEQ ID NO: 262704 - RNA, 22 nt, Artificial Sequence
  Synthetic
aaggguuaaccuugcuguguac

SEQ ID NO: 262705 - RNA, 23 nt, Artificial Sequence
  Synthetic
uaaggguuaaccuugcuguguac

SEQ ID NO: 262706 - RNA, 24 nt, Artificial Sequence
  Synthetic
guaaggguuaaccuugcuguguac

SEQ ID NO: 262707 - RNA, 18 nt, Artificial Sequence
  Synthetic
aagaaaaagaaauuguac

SEQ ID NO: 262708 - RNA, 19 nt, Artificial Sequence
  Synthetic
aaagaaaaagaaauuguac

SEQ ID NO: 262709 - RNA, 20 nt, Artificial Sequence
  Synthetic
aaaagaaaaagaaauuguac

SEQ ID NO: 262710 - RNA, 21 nt, Artificial Sequence
  Synthetic
uaaaagaaaaagaaauuguac

SEQ ID NO: 262711 - RNA, 22 nt, Artificial Sequence
  Synthetic
auaaaagaaaaagaaauuguac

SEQ ID NO: 262712 - RNA, 23 nt, Artificial Sequence
  Synthetic
aauaaaagaaaaagaaauuguac

SEQ ID NO: 262713 - RNA, 24 nt, Artificial Sequence
  Synthetic
aaauaaaagaaaaagaaauuguac

SEQ ID NO: 262714 - RNA, 18 nt, Artificial Sequence
  Synthetic
ugggaaaugaaauuguac

SEQ ID NO: 262715 - RNA, 19 nt, Artificial Sequence
  Synthetic
uugggaaaugaaauuguac

SEQ ID NO: 262716 - RNA, 20 nt, Artificial Sequence
  Synthetic
uuugggaaaugaaauuguac

SEQ ID NO: 262717 - RNA, 21 nt, Artificial Sequence
  Synthetic
uuuugggaaaugaaauuguac

SEQ ID NO: 262718 - RNA, 22 nt, Artificial Sequence
  Synthetic
cuuuugggaaaugaaauuguac

SEQ ID NO: 262719 - RNA, 23 nt, Artificial Sequence
  Synthetic
acuuuugggaaaugaaauuguac

SEQ ID NO: 262720 - RNA, 24 nt, Artificial Sequence
  Synthetic
uacuuuugggaaaugaaauuguac

SEQ ID NO: 262721 - RNA, 18 nt, Artificial Sequence
  Synthetic
ggacaaggacgauuguac

SEQ ID NO: 262722 - RNA, 19 nt, Artificial Sequence
  Synthetic
uggacaaggacgauuguac

SEQ ID NO: 262723 - RNA, 20 nt, Artificial Sequence
  Synthetic
uuggacaaggacgauuguac

SEQ ID NO: 262724 - RNA, 21 nt, Artificial Sequence
  Synthetic
cuuggacaaggacgauuguac

SEQ ID NO: 262725 - RNA, 22 nt, Artificial Sequence
  Synthetic
gcuuggacaaggacgauuguac

SEQ ID NO: 262726 - RNA, 23 nt, Artificial Sequence
  Synthetic
ggcuuggacaaggacgauuguac

SEQ ID NO: 262727 - RNA, 24 nt, Artificial Sequence
  Synthetic
uggcuuggacaaggacgauuguac

SEQ ID NO: 262728 - RNA, 18 nt, Artificial Sequence
  Synthetic
uucuauucaguauuguac

SEQ ID NO: 262729 - RNA, 19 nt, Artificial Sequence
  Synthetic
cuucuauucaguauuguac

SEQ ID NO: 262730 - RNA, 20 nt, Artificial Sequence
  Synthetic
acuucuauucaguauuguac

SEQ ID NO: 262731 - RNA, 21 nt, Artificial Sequence
  Synthetic
cacuucuauucaguauuguac

SEQ ID NO: 262732 - RNA, 22 nt, Artificial Sequence
  Synthetic
ccacuucuauucaguauuguac

SEQ ID NO: 262733 - RNA, 23 nt, Artificial Sequence
  Synthetic
accacuucuauucaguauuguac

SEQ ID NO: 262734 - RNA, 24 nt, Artificial Sequence
  Synthetic
caccacuucuauucaguauuguac

SEQ ID NO: 262735 - RNA, 18 nt, Artificial Sequence
  Synthetic
uaccaauuuuccuuguac

SEQ ID NO: 262736 - RNA, 19 nt, Artificial Sequence
  Synthetic
uuaccaauuuuccuuguac

SEQ ID NO: 262737 - RNA, 20 nt, Artificial Sequence
  Synthetic
cuuaccaauuuuccuuguac

SEQ ID NO: 262738 - RNA, 21 nt, Artificial Sequence
  Synthetic
acuuaccaauuuuccuuguac

SEQ ID NO: 262739 - RNA, 22 nt, Artificial Sequence
  Synthetic
aacuuaccaauuuuccuuguac

SEQ ID NO: 262740 - RNA, 23 nt, Artificial Sequence
  Synthetic
uaacuuaccaauuuuccuuguac

SEQ ID NO: 262741 - RNA, 24 nt, Artificial Sequence
  Synthetic
auaacuuaccaauuuuccuuguac

SEQ ID NO: 262742 - RNA, 18 nt, Artificial Sequence
  Synthetic
uagggcaaaugcuuguac

SEQ ID NO: 262743 - RNA, 19 nt, Artificial Sequence
  Synthetic
guagggcaaaugcuuguac

SEQ ID NO: 262744 - RNA, 20 nt, Artificial Sequence
  Synthetic
aguagggcaaaugcuuguac

SEQ ID NO: 262745 - RNA, 21 nt, Artificial Sequence
  Synthetic
caguagggcaaaugcuuguac

SEQ ID NO: 262746 - RNA, 22 nt, Artificial Sequence
  Synthetic
gcaguagggcaaaugcuuguac

SEQ ID NO: 262747 - RNA, 23 nt, Artificial Sequence
  Synthetic
ugcaguagggcaaaugcuuguac

SEQ ID NO: 262748 - RNA, 24 nt, Artificial Sequence
  Synthetic
uugcaguagggcaaaugcuuguac

SEQ ID NO: 262749 - RNA, 18 nt, Artificial Sequence
  Synthetic
ugauucugcagguuguac

SEQ ID NO: 262750 - RNA, 19 nt, Artificial Sequence
  Synthetic
augauucugcagguuguac

SEQ ID NO: 262751 - RNA, 20 nt, Artificial Sequence
  Synthetic
caugauucugcagguuguac

SEQ ID NO: 262752 - RNA, 21 nt, Artificial Sequence
  Synthetic
ucaugauucugcagguuguac

SEQ ID NO: 262753 - RNA, 22 nt, Artificial Sequence
  Synthetic
uucaugauucugcagguuguac

SEQ ID NO: 262754 - RNA, 23 nt, Artificial Sequence
  Synthetic
auucaugauucugcagguuguac

SEQ ID NO: 262755 - RNA, 24 nt, Artificial Sequence
  Synthetic
gauucaugauucugcagguuguac

SEQ ID NO: 262756 - RNA, 18 nt, Artificial Sequence
  Synthetic
uuacaagaauuguuguac

SEQ ID NO: 262757 - RNA, 19 nt, Artificial Sequence
  Synthetic
guuacaagaauuguuguac

SEQ ID NO: 262758 - RNA, 20 nt, Artificial Sequence
  Synthetic
aguuacaagaauuguuguac

SEQ ID NO: 262759 - RNA, 21 nt, Artificial Sequence
  Synthetic
uaguuacaagaauuguuguac

SEQ ID NO: 262760 - RNA, 22 nt, Artificial Sequence
  Synthetic
uuaguuacaagaauuguuguac

SEQ ID NO: 262761 - RNA, 23 nt, Artificial Sequence
  Synthetic
cuuaguuacaagaauuguuguac

SEQ ID NO: 262762 - RNA, 24 nt, Artificial Sequence
  Synthetic
gcuuaguuacaagaauuguuguac

SEQ ID NO: 262763 - RNA, 18 nt, Artificial Sequence
  Synthetic
aaagggcagcauuuguac

SEQ ID NO: 262764 - RNA, 19 nt, Artificial Sequence
  Synthetic
uaaagggcagcauuuguac

SEQ ID NO: 262765 - RNA, 20 nt, Artificial Sequence
  Synthetic
cuaaagggcagcauuuguac

SEQ ID NO: 262766 - RNA, 18 nt, Artificial Sequence
  Synthetic
ccaaaacugucuuuguac

SEQ ID NO: 262767 - RNA, 19 nt, Artificial Sequence
  Synthetic
accaaaacugucuuuguac

SEQ ID NO: 262768 - RNA, 20 nt, Artificial Sequence
  Synthetic
caccaaaacugucuuuguac

SEQ ID NO: 262769 - RNA, 21 nt, Artificial Sequence
  Synthetic
ccaccaaaacugucuuuguac

SEQ ID NO: 262770 - RNA, 22 nt, Artificial Sequence
  Synthetic
gccaccaaaacugucuuuguac

SEQ ID NO: 262771 - RNA, 23 nt, Artificial Sequence
  Synthetic
agccaccaaaacugucuuuguac

SEQ ID NO: 262772 - RNA, 24 nt, Artificial Sequence
  Synthetic
uagccaccaaaacugucuuuguac

SEQ ID NO: 262773 - RNA, 18 nt, Artificial Sequence
  Synthetic
uauuuuggcuguuuguac

SEQ ID NO: 262774 - RNA, 19 nt, Artificial Sequence
  Synthetic
uuauuuuggcuguuuguac

SEQ ID NO: 262775 - RNA, 20 nt, Artificial Sequence
  Synthetic
auuauuuuggcuguuuguac

SEQ ID NO: 262776 - RNA, 21 nt, Artificial Sequence
  Synthetic
aauuauuuuggcuguuuguac

SEQ ID NO: 262777 - RNA, 22 nt, Artificial Sequence
  Synthetic
gaauuauuuuggcuguuuguac

SEQ ID NO: 262778 - RNA, 23 nt, Artificial Sequence
  Synthetic
ugaauuauuuuggcuguuuguac

SEQ ID NO: 262779 - RNA, 24 nt, Artificial Sequence
  Synthetic
uugaauuauuuuggcuguuuguac

SEQ ID NO: 262780 - RNA, 18 nt, Artificial Sequence
  Synthetic
agacauucauaaaauuac

SEQ ID NO: 262781 - RNA, 19 nt, Artificial Sequence
  Synthetic
aagacauucauaaaauuac

SEQ ID NO: 262782 - RNA, 20 nt, Artificial Sequence
  Synthetic
aaagacauucauaaaauuac

SEQ ID NO: 262783 - RNA, 21 nt, Artificial Sequence
  Synthetic
gaaagacauucauaaaauuac

SEQ ID NO: 262784 - RNA, 22 nt, Artificial Sequence
  Synthetic
cgaaagacauucauaaaauuac

SEQ ID NO: 262785 - RNA, 23 nt, Artificial Sequence
  Synthetic
acgaaagacauucauaaaauuac

SEQ ID NO: 262786 - RNA, 24 nt, Artificial Sequence
  Synthetic
uacgaaagacauucauaaaauuac

SEQ ID NO: 262787 - RNA, 18 nt, Artificial Sequence
  Synthetic
ugguaaaauacaaauuac

SEQ ID NO: 262788 - RNA, 19 nt, Artificial Sequence
  Synthetic
gugguaaaauacaaauuac

SEQ ID NO: 262789 - RNA, 20 nt, Artificial Sequence
  Synthetic
agugguaaaauacaaauuac

SEQ ID NO: 262790 - RNA, 21 nt, Artificial Sequence
  Synthetic
uagugguaaaauacaaauuac

SEQ ID NO: 262791 - RNA, 22 nt, Artificial Sequence
  Synthetic
auagugguaaaauacaaauuac

SEQ ID NO: 262792 - RNA, 23 nt, Artificial Sequence
  Synthetic
aauagugguaaaauacaaauuac

SEQ ID NO: 262793 - RNA, 24 nt, Artificial Sequence
  Synthetic
aaauagugguaaaauacaaauuac

SEQ ID NO: 262794 - RNA, 18 nt, Artificial Sequence
  Synthetic
caguauucaauaaauuac

SEQ ID NO: 262795 - RNA, 19 nt, Artificial Sequence
  Synthetic
acaguauucaauaaauuac

SEQ ID NO: 262796 - RNA, 20 nt, Artificial Sequence
  Synthetic
uacaguauucaauaaauuac

SEQ ID NO: 262797 - RNA, 21 nt, Artificial Sequence
  Synthetic
auacaguauucaauaaauuac

SEQ ID NO: 262798 - RNA, 22 nt, Artificial Sequence
  Synthetic
aauacaguauucaauaaauuac

SEQ ID NO: 262799 - RNA, 23 nt, Artificial Sequence
  Synthetic
caauacaguauucaauaaauuac

SEQ ID NO: 262800 - RNA, 24 nt, Artificial Sequence
  Synthetic
ucaauacaguauucaauaaauuac

SEQ ID NO: 262801 - RNA, 18 nt, Artificial Sequence
  Synthetic
uagaauuauauaaauuac

SEQ ID NO: 262802 - RNA, 19 nt, Artificial Sequence
  Synthetic
guagaauuauauaaauuac

SEQ ID NO: 262803 - RNA, 20 nt, Artificial Sequence
  Synthetic
gguagaauuauauaaauuac

SEQ ID NO: 262804 - RNA, 21 nt, Artificial Sequence
  Synthetic
agguagaauuauauaaauuac

SEQ ID NO: 262805 - RNA, 22 nt, Artificial Sequence
  Synthetic
uagguagaauuauauaaauuac

SEQ ID NO: 262806 - RNA, 23 nt, Artificial Sequence
  Synthetic
uuagguagaauuauauaaauuac

SEQ ID NO: 262807 - RNA, 24 nt, Artificial Sequence
  Synthetic
uuuagguagaauuauauaaauuac

SEQ ID NO: 262808 - RNA, 18 nt, Artificial Sequence
  Synthetic
acuauugaugccaauuac

SEQ ID NO: 262809 - RNA, 19 nt, Artificial Sequence
  Synthetic
gacuauugaugccaauuac

SEQ ID NO: 262810 - RNA, 20 nt, Artificial Sequence
  Synthetic
ugacuauugaugccaauuac

SEQ ID NO: 262811 - RNA, 21 nt, Artificial Sequence
  Synthetic
uugacuauugaugccaauuac

SEQ ID NO: 262812 - RNA, 22 nt, Artificial Sequence
  Synthetic
uuugacuauugaugccaauuac

SEQ ID NO: 262813 - RNA, 23 nt, Artificial Sequence
  Synthetic
auuugacuauugaugccaauuac

SEQ ID NO: 262814 - RNA, 24 nt, Artificial Sequence
  Synthetic
gauuugacuauugaugccaauuac

SEQ ID NO: 262815 - RNA, 18 nt, Artificial Sequence
  Synthetic
ccaggauaggagaauuac

SEQ ID NO: 262816 - RNA, 19 nt, Artificial Sequence
  Synthetic
gccaggauaggagaauuac

SEQ ID NO: 262817 - RNA, 20 nt, Artificial Sequence
  Synthetic
ggccaggauaggagaauuac

SEQ ID NO: 262818 - RNA, 21 nt, Artificial Sequence
  Synthetic
aggccaggauaggagaauuac

SEQ ID NO: 262819 - RNA, 22 nt, Artificial Sequence
  Synthetic
gaggccaggauaggagaauuac

SEQ ID NO: 262820 - RNA, 23 nt, Artificial Sequence
  Synthetic
ggaggccaggauaggagaauuac

SEQ ID NO: 262821 - RNA, 24 nt, Artificial Sequence
  Synthetic
gggaggccaggauaggagaauuac

SEQ ID NO: 262822 - RNA, 18 nt, Artificial Sequence
  Synthetic
uggaggcgucugaauuac

SEQ ID NO: 262823 - RNA, 19 nt, Artificial Sequence
  Synthetic
uuggaggcgucugaauuac

SEQ ID NO: 262824 - RNA, 20 nt, Artificial Sequence
  Synthetic
cuuggaggcgucugaauuac

SEQ ID NO: 262825 - RNA, 21 nt, Artificial Sequence
  Synthetic
ccuuggaggcgucugaauuac

SEQ ID NO: 262826 - RNA, 22 nt, Artificial Sequence
  Synthetic
uccuuggaggcgucugaauuac

SEQ ID NO: 262827 - RNA, 23 nt, Artificial Sequence
  Synthetic
uuccuuggaggcgucugaauuac

SEQ ID NO: 262828 - RNA, 24 nt, Artificial Sequence
  Synthetic
cuuccuuggaggcgucugaauuac

SEQ ID NO: 262829 - RNA, 18 nt, Artificial Sequence
  Synthetic
aggagaccugugaauuac

SEQ ID NO: 262830 - RNA, 19 nt, Artificial Sequence
  Synthetic
aaggagaccugugaauuac

SEQ ID NO: 262831 - RNA, 20 nt, Artificial Sequence
  Synthetic
aaaggagaccugugaauuac

SEQ ID NO: 262832 - RNA, 21 nt, Artificial Sequence
  Synthetic
caaaggagaccugugaauuac

SEQ ID NO: 262833 - RNA, 22 nt, Artificial Sequence
  Synthetic
ccaaaggagaccugugaauuac

SEQ ID NO: 262834 - RNA, 23 nt, Artificial Sequence
  Synthetic
accaaaggagaccugugaauuac

SEQ ID NO: 262835 - RNA, 24 nt, Artificial Sequence
  Synthetic
aaccaaaggagaccugugaauuac

SEQ ID NO: 262836 - RNA, 18 nt, Artificial Sequence
  Synthetic
uaggaucacccuaauuac

SEQ ID NO: 262837 - RNA, 19 nt, Artificial Sequence
  Synthetic
auaggaucacccuaauuac

SEQ ID NO: 262838 - RNA, 20 nt, Artificial Sequence
  Synthetic
uauaggaucacccuaauuac

SEQ ID NO: 262839 - RNA, 21 nt, Artificial Sequence
  Synthetic
cuauaggaucacccuaauuac

SEQ ID NO: 262840 - RNA, 22 nt, Artificial Sequence
  Synthetic
acuauaggaucacccuaauuac

SEQ ID NO: 262841 - RNA, 23 nt, Artificial Sequence
  Synthetic
aacuauaggaucacccuaauuac

SEQ ID NO: 262842 - RNA, 24 nt, Artificial Sequence
  Synthetic
gaacuauaggaucacccuaauuac

SEQ ID NO: 262843 - RNA, 18 nt, Artificial Sequence
  Synthetic
uuauuuuuucuuaauuac

SEQ ID NO: 262844 - RNA, 19 nt, Artificial Sequence
  Synthetic
uuuauuuuuucuuaauuac

SEQ ID NO: 262845 - RNA, 20 nt, Artificial Sequence
  Synthetic
guuuauuuuuucuuaauuac

SEQ ID NO: 262846 - RNA, 21 nt, Artificial Sequence
  Synthetic
gguuuauuuuuucuuaauuac

SEQ ID NO: 262847 - RNA, 22 nt, Artificial Sequence
  Synthetic
agguuuauuuuuucuuaauuac

SEQ ID NO: 262848 - RNA, 23 nt, Artificial Sequence
  Synthetic
aagguuuauuuuuucuuaauuac

SEQ ID NO: 262849 - RNA, 24 nt, Artificial Sequence
  Synthetic
uaagguuuauuuuuucuuaauuac

SEQ ID NO: 262850 - RNA, 18 nt, Artificial Sequence
  Synthetic
uacaucaucccccauuac

SEQ ID NO: 262851 - RNA, 19 nt, Artificial Sequence
  Synthetic
uuacaucaucccccauuac

SEQ ID NO: 262852 - RNA, 20 nt, Artificial Sequence
  Synthetic
uuuacaucaucccccauuac

SEQ ID NO: 262853 - RNA, 21 nt, Artificial Sequence
  Synthetic
auuuacaucaucccccauuac

SEQ ID NO: 262854 - RNA, 22 nt, Artificial Sequence
  Synthetic
aauuuacaucaucccccauuac

SEQ ID NO: 262855 - RNA, 23 nt, Artificial Sequence
  Synthetic
aaauuuacaucaucccccauuac

SEQ ID NO: 262856 - RNA, 24 nt, Artificial Sequence
  Synthetic
caaauuuacaucaucccccauuac

SEQ ID NO: 262857 - RNA, 18 nt, Artificial Sequence
  Synthetic
ucauugaauccccauuac

SEQ ID NO: 262858 - RNA, 19 nt, Artificial Sequence
  Synthetic
uucauugaauccccauuac

SEQ ID NO: 262859 - RNA, 20 nt, Artificial Sequence
  Synthetic
uuucauugaauccccauuac

SEQ ID NO: 262860 - RNA, 21 nt, Artificial Sequence
  Synthetic
uuuucauugaauccccauuac

SEQ ID NO: 262861 - RNA, 22 nt, Artificial Sequence
  Synthetic
auuuucauugaauccccauuac

SEQ ID NO: 262862 - RNA, 23 nt, Artificial Sequence
  Synthetic
gauuuucauugaauccccauuac

SEQ ID NO: 262863 - RNA, 24 nt, Artificial Sequence
  Synthetic
cgauuuucauugaauccccauuac

SEQ ID NO: 262864 - RNA, 18 nt, Artificial Sequence
  Synthetic
cucuguucaugccauuac

SEQ ID NO: 262865 - RNA, 19 nt, Artificial Sequence
  Synthetic
gcucuguucaugccauuac

SEQ ID NO: 262866 - RNA, 20 nt, Artificial Sequence
  Synthetic
agcucuguucaugccauuac

SEQ ID NO: 262867 - RNA, 21 nt, Artificial Sequence
  Synthetic
gagcucuguucaugccauuac

SEQ ID NO: 262868 - RNA, 22 nt, Artificial Sequence
  Synthetic
ugagcucuguucaugccauuac

SEQ ID NO: 262869 - RNA, 23 nt, Artificial Sequence
  Synthetic
augagcucuguucaugccauuac

SEQ ID NO: 262870 - RNA, 24 nt, Artificial Sequence
  Synthetic
aaugagcucuguucaugccauuac

SEQ ID NO: 262871 - RNA, 18 nt, Artificial Sequence
  Synthetic
acauugacucagcauuac

SEQ ID NO: 262872 - RNA, 19 nt, Artificial Sequence
  Synthetic
uacauugacucagcauuac

SEQ ID NO: 262873 - RNA, 20 nt, Artificial Sequence
  Synthetic
cuacauugacucagcauuac

SEQ ID NO: 262874 - RNA, 21 nt, Artificial Sequence
  Synthetic
ucuacauugacucagcauuac

SEQ ID NO: 262875 - RNA, 22 nt, Artificial Sequence
  Synthetic
cucuacauugacucagcauuac

SEQ ID NO: 262876 - RNA, 23 nt, Artificial Sequence
  Synthetic
acucuacauugacucagcauuac

SEQ ID NO: 262877 - RNA, 24 nt, Artificial Sequence
  Synthetic
uacucuacauugacucagcauuac

SEQ ID NO: 262878 - RNA, 18 nt, Artificial Sequence
  Synthetic
ugcaaaaaaaaucauuac

SEQ ID NO: 262879 - RNA, 19 nt, Artificial Sequence
  Synthetic
uugcaaaaaaaaucauuac

SEQ ID NO: 262880 - RNA, 20 nt, Artificial Sequence
  Synthetic
uuugcaaaaaaaaucauuac

SEQ ID NO: 262881 - RNA, 21 nt, Artificial Sequence
  Synthetic
uuuugcaaaaaaaaucauuac

SEQ ID NO: 262882 - RNA, 22 nt, Artificial Sequence
  Synthetic
auuuugcaaaaaaaaucauuac

SEQ ID NO: 262883 - RNA, 23 nt, Artificial Sequence
  Synthetic
aauuuugcaaaaaaaaucauuac

SEQ ID NO: 262884 - RNA, 24 nt, Artificial Sequence
  Synthetic
aaauuuugcaaaaaaaaucauuac

SEQ ID NO: 262885 - RNA, 18 nt, Artificial Sequence
  Synthetic
aaaauucuauaucauuac

SEQ ID NO: 262886 - RNA, 19 nt, Artificial Sequence
  Synthetic
aaaaauucuauaucauuac

SEQ ID NO: 262887 - RNA, 20 nt, Artificial Sequence
  Synthetic
aaaaaauucuauaucauuac

SEQ ID NO: 262888 - RNA, 21 nt, Artificial Sequence
  Synthetic
uaaaaaauucuauaucauuac

SEQ ID NO: 262889 - RNA, 22 nt, Artificial Sequence
  Synthetic
auaaaaaauucuauaucauuac

SEQ ID NO: 262890 - RNA, 23 nt, Artificial Sequence
  Synthetic
gauaaaaaauucuauaucauuac

SEQ ID NO: 262891 - RNA, 24 nt, Artificial Sequence
  Synthetic
agauaaaaaauucuauaucauuac

SEQ ID NO: 262892 - RNA, 18 nt, Artificial Sequence
  Synthetic
guauuaccuucucauuac

SEQ ID NO: 262893 - RNA, 19 nt, Artificial Sequence
  Synthetic
uguauuaccuucucauuac

SEQ ID NO: 262894 - RNA, 20 nt, Artificial Sequence
  Synthetic
guguauuaccuucucauuac

SEQ ID NO: 262895 - RNA, 21 nt, Artificial Sequence
  Synthetic
aguguauuaccuucucauuac

SEQ ID NO: 262896 - RNA, 22 nt, Artificial Sequence
  Synthetic
caguguauuaccuucucauuac

SEQ ID NO: 262897 - RNA, 23 nt, Artificial Sequence
  Synthetic
gcaguguauuaccuucucauuac

SEQ ID NO: 262898 - RNA, 24 nt, Artificial Sequence
  Synthetic
ugcaguguauuaccuucucauuac

SEQ ID NO: 262899 - RNA, 18 nt, Artificial Sequence
  Synthetic
auuauaaaaauucauuac

SEQ ID NO: 262900 - RNA, 19 nt, Artificial Sequence
  Synthetic
aauuauaaaaauucauuac

SEQ ID NO: 262901 - RNA, 20 nt, Artificial Sequence
  Synthetic
uaauuauaaaaauucauuac

SEQ ID NO: 262902 - RNA, 21 nt, Artificial Sequence
  Synthetic
uuaauuauaaaaauucauuac

SEQ ID NO: 262903 - RNA, 22 nt, Artificial Sequence
  Synthetic
uuuaauuauaaaaauucauuac

SEQ ID NO: 262904 - RNA, 23 nt, Artificial Sequence
  Synthetic
guuuaauuauaaaaauucauuac

SEQ ID NO: 262905 - RNA, 24 nt, Artificial Sequence
  Synthetic
aguuuaauuauaaaaauucauuac

SEQ ID NO: 262906 - RNA, 18 nt, Artificial Sequence
  Synthetic
cccucuuagguucauuac

SEQ ID NO: 262907 - RNA, 19 nt, Artificial Sequence
  Synthetic
ccccucuuagguucauuac

SEQ ID NO: 262908 - RNA, 20 nt, Artificial Sequence
  Synthetic
uccccucuuagguucauuac

SEQ ID NO: 262909 - RNA, 21 nt, Artificial Sequence
  Synthetic
cuccccucuuagguucauuac

SEQ ID NO: 262910 - RNA, 22 nt, Artificial Sequence
  Synthetic
acuccccucuuagguucauuac

SEQ ID NO: 262911 - RNA, 23 nt, Artificial Sequence
  Synthetic
cacuccccucuuagguucauuac

SEQ ID NO: 262912 - RNA, 24 nt, Artificial Sequence
  Synthetic
ucacuccccucuuagguucauuac

SEQ ID NO: 262913 - RNA, 18 nt, Artificial Sequence
  Synthetic
gaauuugcuuuagauuac

SEQ ID NO: 262914 - RNA, 19 nt, Artificial Sequence
  Synthetic
ugaauuugcuuuagauuac

SEQ ID NO: 262915 - RNA, 20 nt, Artificial Sequence
  Synthetic
augaauuugcuuuagauuac

SEQ ID NO: 262916 - RNA, 21 nt, Artificial Sequence
  Synthetic
uaugaauuugcuuuagauuac

SEQ ID NO: 262917 - RNA, 22 nt, Artificial Sequence
  Synthetic
cuaugaauuugcuuuagauuac

SEQ ID NO: 262918 - RNA, 23 nt, Artificial Sequence
  Synthetic
ccuaugaauuugcuuuagauuac

SEQ ID NO: 262919 - RNA, 24 nt, Artificial Sequence
  Synthetic
cccuaugaauuugcuuuagauuac

SEQ ID NO: 262920 - RNA, 18 nt, Artificial Sequence
  Synthetic
uccaagugacacgauuac

SEQ ID NO: 262921 - RNA, 19 nt, Artificial Sequence
  Synthetic
auccaagugacacgauuac

SEQ ID NO: 262922 - RNA, 20 nt, Artificial Sequence
  Synthetic
gauccaagugacacgauuac

SEQ ID NO: 262923 - RNA, 21 nt, Artificial Sequence
  Synthetic
ugauccaagugacacgauuac

SEQ ID NO: 262924 - RNA, 22 nt, Artificial Sequence
  Synthetic
cugauccaagugacacgauuac

SEQ ID NO: 262925 - RNA, 23 nt, Artificial Sequence
  Synthetic
gcugauccaagugacacgauuac

SEQ ID NO: 262926 - RNA, 24 nt, Artificial Sequence
  Synthetic
agcugauccaagugacacgauuac

SEQ ID NO: 262927 - RNA, 18 nt, Artificial Sequence
  Synthetic
augacacauggggauuac

SEQ ID NO: 262928 - RNA, 19 nt, Artificial Sequence
  Synthetic
caugacacauggggauuac

SEQ ID NO: 262929 - RNA, 20 nt, Artificial Sequence
  Synthetic
acaugacacauggggauuac

SEQ ID NO: 262930 - RNA, 21 nt, Artificial Sequence
  Synthetic
cacaugacacauggggauuac

SEQ ID NO: 262931 - RNA, 22 nt, Artificial Sequence
  Synthetic
ucacaugacacauggggauuac

SEQ ID NO: 262932 - RNA, 23 nt, Artificial Sequence
  Synthetic
cucacaugacacauggggauuac

SEQ ID NO: 262933 - RNA, 24 nt, Artificial Sequence
  Synthetic
ccucacaugacacauggggauuac

SEQ ID NO: 262934 - RNA, 18 nt, Artificial Sequence
  Synthetic
ccgaguagcugggauuac

SEQ ID NO: 262935 - RNA, 19 nt, Artificial Sequence
  Synthetic
cccgaguagcugggauuac

SEQ ID NO: 262936 - RNA, 20 nt, Artificial Sequence
  Synthetic
ucccgaguagcugggauuac

SEQ ID NO: 262937 - RNA, 21 nt, Artificial Sequence
  Synthetic
cucccgaguagcugggauuac

SEQ ID NO: 262938 - RNA, 22 nt, Artificial Sequence
  Synthetic
ccucccgaguagcugggauuac

SEQ ID NO: 262939 - RNA, 23 nt, Artificial Sequence
  Synthetic
gccucccgaguagcugggauuac

SEQ ID NO: 262940 - RNA, 24 nt, Artificial Sequence
  Synthetic
agccucccgaguagcugggauuac

SEQ ID NO: 262941 - RNA, 18 nt, Artificial Sequence
  Synthetic
cugaguagcugggauuac

SEQ ID NO: 262942 - RNA, 19 nt, Artificial Sequence
  Synthetic
ccugaguagcugggauuac

SEQ ID NO: 262943 - RNA, 20 nt, Artificial Sequence
  Synthetic
uccugaguagcugggauuac

SEQ ID NO: 262944 - RNA, 21 nt, Artificial Sequence
  Synthetic
cuccugaguagcugggauuac

SEQ ID NO: 262945 - RNA, 22 nt, Artificial Sequence
  Synthetic
ccuccugaguagcugggauuac

SEQ ID NO: 262946 - RNA, 23 nt, Artificial Sequence
  Synthetic
gccuccugaguagcugggauuac

SEQ ID NO: 262947 - RNA, 24 nt, Artificial Sequence
  Synthetic
agccuccugaguagcugggauuac

SEQ ID NO: 262948 - RNA, 18 nt, Artificial Sequence
  Synthetic
cugagguggguggauuac

SEQ ID NO: 262949 - RNA, 19 nt, Artificial Sequence
  Synthetic
ucugagguggguggauuac

SEQ ID NO: 262950 - RNA, 20 nt, Artificial Sequence
  Synthetic
gucugagguggguggauuac

SEQ ID NO: 262951 - RNA, 21 nt, Artificial Sequence
  Synthetic
agucugagguggguggauuac

SEQ ID NO: 262952 - RNA, 22 nt, Artificial Sequence
  Synthetic
gagucugagguggguggauuac

SEQ ID NO: 262953 - RNA, 23 nt, Artificial Sequence
  Synthetic
ggagucugagguggguggauuac

SEQ ID NO: 262954 - RNA, 24 nt, Artificial Sequence
  Synthetic
gggagucugagguggguggauuac

SEQ ID NO: 262955 - RNA, 18 nt, Artificial Sequence
  Synthetic
ucagaaggaaaugauuac

SEQ ID NO: 262956 - RNA, 19 nt, Artificial Sequence
  Synthetic
cucagaaggaaaugauuac

SEQ ID NO: 262957 - RNA, 20 nt, Artificial Sequence
  Synthetic
ucucagaaggaaaugauuac

SEQ ID NO: 262958 - RNA, 21 nt, Artificial Sequence
  Synthetic
aucucagaaggaaaugauuac

SEQ ID NO: 262959 - RNA, 22 nt, Artificial Sequence
  Synthetic
caucucagaaggaaaugauuac

SEQ ID NO: 262960 - RNA, 23 nt, Artificial Sequence
  Synthetic
ucaucucagaaggaaaugauuac

SEQ ID NO: 262961 - RNA, 24 nt, Artificial Sequence
  Synthetic
gucaucucagaaggaaaugauuac

SEQ ID NO: 262962 - RNA, 18 nt, Artificial Sequence
  Synthetic
gaguaaaaggaugauuac

SEQ ID NO: 262963 - RNA, 19 nt, Artificial Sequence
  Synthetic
agaguaaaaggaugauuac

SEQ ID NO: 262964 - RNA, 20 nt, Artificial Sequence
  Synthetic
gagaguaaaaggaugauuac

SEQ ID NO: 262965 - RNA, 21 nt, Artificial Sequence
  Synthetic
agagaguaaaaggaugauuac

SEQ ID NO: 262966 - RNA, 22 nt, Artificial Sequence
  Synthetic
cagagaguaaaaggaugauuac

SEQ ID NO: 262967 - RNA, 23 nt, Artificial Sequence
  Synthetic
acagagaguaaaaggaugauuac

SEQ ID NO: 262968 - RNA, 24 nt, Artificial Sequence
  Synthetic
uacagagaguaaaaggaugauuac

SEQ ID NO: 262969 - RNA, 18 nt, Artificial Sequence
  Synthetic
uugucaucauuauauuac

SEQ ID NO: 262970 - RNA, 19 nt, Artificial Sequence
  Synthetic
guugucaucauuauauuac

SEQ ID NO: 262971 - RNA, 20 nt, Artificial Sequence
  Synthetic
uguugucaucauuauauuac

SEQ ID NO: 262972 - RNA, 21 nt, Artificial Sequence
  Synthetic
uuguugucaucauuauauuac

SEQ ID NO: 262973 - RNA, 22 nt, Artificial Sequence
  Synthetic
guuguugucaucauuauauuac

SEQ ID NO: 262974 - RNA, 23 nt, Artificial Sequence
  Synthetic
uguuguugucaucauuauauuac

SEQ ID NO: 262975 - RNA, 24 nt, Artificial Sequence
  Synthetic
cuguuguugucaucauuauauuac

SEQ ID NO: 262976 - RNA, 18 nt, Artificial Sequence
  Synthetic
uccuauaaaugcuauuac

SEQ ID NO: 262977 - RNA, 19 nt, Artificial Sequence
  Synthetic
auccuauaaaugcuauuac

SEQ ID NO: 262978 - RNA, 20 nt, Artificial Sequence
  Synthetic
cauccuauaaaugcuauuac

SEQ ID NO: 262979 - RNA, 21 nt, Artificial Sequence
  Synthetic
ucauccuauaaaugcuauuac

SEQ ID NO: 262980 - RNA, 22 nt, Artificial Sequence
  Synthetic
cucauccuauaaaugcuauuac

SEQ ID NO: 262981 - RNA, 23 nt, Artificial Sequence
  Synthetic
ccucauccuauaaaugcuauuac

SEQ ID NO: 262982 - RNA, 24 nt, Artificial Sequence
  Synthetic
uccucauccuauaaaugcuauuac

SEQ ID NO: 262983 - RNA, 18 nt, Artificial Sequence
  Synthetic
uuguuuuaccucuauuac

SEQ ID NO: 262984 - RNA, 19 nt, Artificial Sequence
  Synthetic
auuguuuuaccucuauuac

SEQ ID NO: 262985 - RNA, 20 nt, Artificial Sequence
  Synthetic
aauuguuuuaccucuauuac

SEQ ID NO: 262986 - RNA, 21 nt, Artificial Sequence
  Synthetic
gaauuguuuuaccucuauuac

SEQ ID NO: 262987 - RNA, 22 nt, Artificial Sequence
  Synthetic
ggaauuguuuuaccucuauuac

SEQ ID NO: 262988 - RNA, 23 nt, Artificial Sequence
  Synthetic
aggaauuguuuuaccucuauuac

SEQ ID NO: 262989 - RNA, 24 nt, Artificial Sequence
  Synthetic
caggaauuguuuuaccucuauuac

SEQ ID NO: 262990 - RNA, 18 nt, Artificial Sequence
  Synthetic
acugcaauggaguauuac

SEQ ID NO: 262991 - RNA, 19 nt, Artificial Sequence
  Synthetic
cacugcaauggaguauuac

SEQ ID NO: 262992 - RNA, 20 nt, Artificial Sequence
  Synthetic
ccacugcaauggaguauuac

SEQ ID NO: 262993 - RNA, 21 nt, Artificial Sequence
  Synthetic
accacugcaauggaguauuac

SEQ ID NO: 262994 - RNA, 22 nt, Artificial Sequence
  Synthetic
gaccacugcaauggaguauuac

SEQ ID NO: 262995 - RNA, 23 nt, Artificial Sequence
  Synthetic
ggaccacugcaauggaguauuac

SEQ ID NO: 262996 - RNA, 24 nt, Artificial Sequence
  Synthetic
gggaccacugcaauggaguauuac

SEQ ID NO: 262997 - RNA, 18 nt, Artificial Sequence
  Synthetic
uagggaaagauguauuac

SEQ ID NO: 262998 - RNA, 19 nt, Artificial Sequence
  Synthetic
auagggaaagauguauuac

SEQ ID NO: 262999 - RNA, 20 nt, Artificial Sequence
  Synthetic
aauagggaaagauguauuac

SEQ ID NO: 263000 - RNA, 21 nt, Artificial Sequence
  Synthetic
gaauagggaaagauguauuac

SEQ ID NO: 263001 - RNA, 22 nt, Artificial Sequence
  Synthetic
agaauagggaaagauguauuac

SEQ ID NO: 263002 - RNA, 23 nt, Artificial Sequence
  Synthetic
aagaauagggaaagauguauuac

SEQ ID NO: 263003 - RNA, 24 nt, Artificial Sequence
  Synthetic
aaagaauagggaaagauguauuac

SEQ ID NO: 263004 - RNA, 18 nt, Artificial Sequence
  Synthetic
auacuuuuauuguauuac

SEQ ID NO: 263005 - RNA, 19 nt, Artificial Sequence
  Synthetic
gauacuuuuauuguauuac

SEQ ID NO: 263006 - RNA, 20 nt, Artificial Sequence
  Synthetic
ugauacuuuuauuguauuac

SEQ ID NO: 263007 - RNA, 21 nt, Artificial Sequence
  Synthetic
augauacuuuuauuguauuac

SEQ ID NO: 263008 - RNA, 22 nt, Artificial Sequence
  Synthetic
aaugauacuuuuauuguauuac

SEQ ID NO: 263009 - RNA, 23 nt, Artificial Sequence
  Synthetic
aaaugauacuuuuauuguauuac

SEQ ID NO: 263010 - RNA, 24 nt, Artificial Sequence
  Synthetic
aaaaugauacuuuuauuguauuac

SEQ ID NO: 263011 - RNA, 18 nt, Artificial Sequence
  Synthetic
acuaaauauuuguauuac

SEQ ID NO: 263012 - RNA, 19 nt, Artificial Sequence
  Synthetic
uacuaaauauuuguauuac

SEQ ID NO: 263013 - RNA, 20 nt, Artificial Sequence
  Synthetic
uuacuaaauauuuguauuac

SEQ ID NO: 263014 - RNA, 21 nt, Artificial Sequence
  Synthetic
uuuacuaaauauuuguauuac

SEQ ID NO: 263015 - RNA, 22 nt, Artificial Sequence
  Synthetic
uuuuacuaaauauuuguauuac

SEQ ID NO: 263016 - RNA, 23 nt, Artificial Sequence
  Synthetic
cuuuuacuaaauauuuguauuac

SEQ ID NO: 263017 - RNA, 24 nt, Artificial Sequence
  Synthetic
ucuuuuacuaaauauuuguauuac

SEQ ID NO: 263018 - RNA, 18 nt, Artificial Sequence
  Synthetic
caagcucuuacuuauuac

SEQ ID NO: 263019 - RNA, 19 nt, Artificial Sequence
  Synthetic
ucaagcucuuacuuauuac

SEQ ID NO: 263020 - RNA, 20 nt, Artificial Sequence
  Synthetic
cucaagcucuuacuuauuac

SEQ ID NO: 263021 - RNA, 21 nt, Artificial Sequence
  Synthetic
ucucaagcucuuacuuauuac

SEQ ID NO: 263022 - RNA, 22 nt, Artificial Sequence
  Synthetic
aucucaagcucuuacuuauuac

SEQ ID NO: 263023 - RNA, 23 nt, Artificial Sequence
  Synthetic
aaucucaagcucuuacuuauuac

SEQ ID NO: 263024 - RNA, 24 nt, Artificial Sequence
  Synthetic
aaaucucaagcucuuacuuauuac

SEQ ID NO: 263025 - RNA, 18 nt, Artificial Sequence
  Synthetic
augaaauaauguuauuac

SEQ ID NO: 263026 - RNA, 19 nt, Artificial Sequence
  Synthetic
uaugaaauaauguuauuac

SEQ ID NO: 263027 - RNA, 20 nt, Artificial Sequence
  Synthetic
cuaugaaauaauguuauuac

SEQ ID NO: 263028 - RNA, 21 nt, Artificial Sequence
  Synthetic
acuaugaaauaauguuauuac

SEQ ID NO: 263029 - RNA, 22 nt, Artificial Sequence
  Synthetic
uacuaugaaauaauguuauuac

SEQ ID NO: 263030 - RNA, 23 nt, Artificial Sequence
  Synthetic
cuacuaugaaauaauguuauuac

SEQ ID NO: 263031 - RNA, 24 nt, Artificial Sequence
  Synthetic
acuacuaugaaauaauguuauuac

SEQ ID NO: 263032 - RNA, 18 nt, Artificial Sequence
  Synthetic
acuaucauacuuuauuac

SEQ ID NO: 263033 - RNA, 19 nt, Artificial Sequence
  Synthetic
uacuaucauacuuuauuac

SEQ ID NO: 263034 - RNA, 20 nt, Artificial Sequence
  Synthetic
auacuaucauacuuuauuac

SEQ ID NO: 263035 - RNA, 21 nt, Artificial Sequence
  Synthetic
uauacuaucauacuuuauuac

SEQ ID NO: 263036 - RNA, 22 nt, Artificial Sequence
  Synthetic
auauacuaucauacuuuauuac

SEQ ID NO: 263037 - RNA, 23 nt, Artificial Sequence
  Synthetic
uauauacuaucauacuuuauuac

SEQ ID NO: 263038 - RNA, 24 nt, Artificial Sequence
  Synthetic
auauauacuaucauacuuuauuac

SEQ ID NO: 263039 - RNA, 18 nt, Artificial Sequence
  Synthetic
aaacacuguguuuauuac

SEQ ID NO: 263040 - RNA, 19 nt, Artificial Sequence
  Synthetic
gaaacacuguguuuauuac

SEQ ID NO: 263041 - RNA, 20 nt, Artificial Sequence
  Synthetic
agaaacacuguguuuauuac

SEQ ID NO: 263042 - RNA, 21 nt, Artificial Sequence
  Synthetic
aagaaacacuguguuuauuac

SEQ ID NO: 263043 - RNA, 22 nt, Artificial Sequence
  Synthetic
uaagaaacacuguguuuauuac

SEQ ID NO: 263044 - RNA, 23 nt, Artificial Sequence
  Synthetic
auaagaaacacuguguuuauuac

SEQ ID NO: 263045 - RNA, 24 nt, Artificial Sequence
  Synthetic
cauaagaaacacuguguuuauuac

SEQ ID NO: 263046 - RNA, 18 nt, Artificial Sequence
  Synthetic
uaagugcuauuuuauuac

SEQ ID NO: 263047 - RNA, 19 nt, Artificial Sequence
  Synthetic
uuaagugcuauuuuauuac

SEQ ID NO: 263048 - RNA, 20 nt, Artificial Sequence
  Synthetic
uuuaagugcuauuuuauuac

SEQ ID NO: 263049 - RNA, 21 nt, Artificial Sequence
  Synthetic
guuuaagugcuauuuuauuac

SEQ ID NO: 263050 - RNA, 22 nt, Artificial Sequence
  Synthetic
uguuuaagugcuauuuuauuac

SEQ ID NO: 263051 - RNA, 23 nt, Artificial Sequence
  Synthetic
auguuuaagugcuauuuuauuac

SEQ ID NO: 263052 - RNA, 24 nt, Artificial Sequence
  Synthetic
cauguuuaagugcuauuuuauuac

SEQ ID NO: 263053 - RNA, 18 nt, Artificial Sequence
  Synthetic
uacucuauuuuuuauuac

SEQ ID NO: 263054 - RNA, 19 nt, Artificial Sequence
  Synthetic
auacucuauuuuuuauuac

SEQ ID NO: 263055 - RNA, 20 nt, Artificial Sequence
  Synthetic
aauacucuauuuuuuauuac

SEQ ID NO: 263056 - RNA, 21 nt, Artificial Sequence
  Synthetic
uaauacucuauuuuuuauuac

SEQ ID NO: 263057 - RNA, 22 nt, Artificial Sequence
  Synthetic
uuaauacucuauuuuuuauuac

SEQ ID NO: 263058 - RNA, 23 nt, Artificial Sequence
  Synthetic
uuuaauacucuauuuuuuauuac

SEQ ID NO: 263059 - RNA, 24 nt, Artificial Sequence
  Synthetic
auuuaauacucuauuuuuuauuac

SEQ ID NO: 263060 - RNA, 18 nt, Artificial Sequence
  Synthetic
aagugaaaugaaacuuac

SEQ ID NO: 263061 - RNA, 19 nt, Artificial Sequence
  Synthetic
gaagugaaaugaaacuuac

SEQ ID NO: 263062 - RNA, 20 nt, Artificial Sequence
  Synthetic
ugaagugaaaugaaacuuac

SEQ ID NO: 263063 - RNA, 21 nt, Artificial Sequence
  Synthetic
cugaagugaaaugaaacuuac

SEQ ID NO: 263064 - RNA, 22 nt, Artificial Sequence
  Synthetic
acugaagugaaaugaaacuuac

SEQ ID NO: 263065 - RNA, 23 nt, Artificial Sequence
  Synthetic
aacugaagugaaaugaaacuuac

SEQ ID NO: 263066 - RNA, 24 nt, Artificial Sequence
  Synthetic
uaacugaagugaaaugaaacuuac

SEQ ID NO: 263067 - RNA, 19 nt, Artificial Sequence
  Synthetic
accuaggaauccaacuuac

SEQ ID NO: 263068 - RNA, 20 nt, Artificial Sequence
  Synthetic
uaccuaggaauccaacuuac

SEQ ID NO: 263069 - RNA, 18 nt, Artificial Sequence
  Synthetic
augcuaaaugcaacuuac

SEQ ID NO: 263070 - RNA, 19 nt, Artificial Sequence
  Synthetic
aaugcuaaaugcaacuuac

SEQ ID NO: 263071 - RNA, 20 nt, Artificial Sequence
  Synthetic
aaaugcuaaaugcaacuuac

SEQ ID NO: 263072 - RNA, 21 nt, Artificial Sequence
  Synthetic
aaaaugcuaaaugcaacuuac

SEQ ID NO: 263073 - RNA, 22 nt, Artificial Sequence
  Synthetic
uaaaaugcuaaaugcaacuuac

SEQ ID NO: 263074 - RNA, 23 nt, Artificial Sequence
  Synthetic
uuaaaaugcuaaaugcaacuuac

SEQ ID NO: 263075 - RNA, 24 nt, Artificial Sequence
  Synthetic
uuuaaaaugcuaaaugcaacuuac

SEQ ID NO: 263076 - RNA, 18 nt, Artificial Sequence
  Synthetic
ccuaggaaugcaacuuac

SEQ ID NO: 263077 - RNA, 19 nt, Artificial Sequence
  Synthetic
accuaggaaugcaacuuac

SEQ ID NO: 263078 - RNA, 20 nt, Artificial Sequence
  Synthetic
uaccuaggaaugcaacuuac

SEQ ID NO: 263079 - RNA, 21 nt, Artificial Sequence
  Synthetic
auaccuaggaaugcaacuuac

SEQ ID NO: 263080 - RNA, 22 nt, Artificial Sequence
  Synthetic
aauaccuaggaaugcaacuuac

SEQ ID NO: 263081 - RNA, 23 nt, Artificial Sequence
  Synthetic
aaauaccuaggaaugcaacuuac

SEQ ID NO: 263082 - RNA, 24 nt, Artificial Sequence
  Synthetic
aaaauaccuaggaaugcaacuuac

SEQ ID NO: 263083 - RNA, 18 nt, Artificial Sequence
  Synthetic
auuccagauugaacuuac

SEQ ID NO: 263084 - RNA, 19 nt, Artificial Sequence
  Synthetic
cauuccagauugaacuuac

SEQ ID NO: 263085 - RNA, 20 nt, Artificial Sequence
  Synthetic
acauuccagauugaacuuac

SEQ ID NO: 263086 - RNA, 21 nt, Artificial Sequence
  Synthetic
uacauuccagauugaacuuac

SEQ ID NO: 263087 - RNA, 22 nt, Artificial Sequence
  Synthetic
auacauuccagauugaacuuac

SEQ ID NO: 263088 - RNA, 23 nt, Artificial Sequence
  Synthetic
uauacauuccagauugaacuuac

SEQ ID NO: 263089 - RNA, 24 nt, Artificial Sequence
  Synthetic
auauacauuccagauugaacuuac

SEQ ID NO: 263090 - RNA, 18 nt, Artificial Sequence
  Synthetic
aaauacauauacacuuac

SEQ ID NO: 263091 - RNA, 19 nt, Artificial Sequence
  Synthetic
gaaauacauauacacuuac

SEQ ID NO: 263092 - RNA, 20 nt, Artificial Sequence
  Synthetic
ugaaauacauauacacuuac

SEQ ID NO: 263093 - RNA, 21 nt, Artificial Sequence
  Synthetic
uugaaauacauauacacuuac

SEQ ID NO: 263094 - RNA, 22 nt, Artificial Sequence
  Synthetic
uuugaaauacauauacacuuac

SEQ ID NO: 263095 - RNA, 23 nt, Artificial Sequence
  Synthetic
uuuugaaauacauauacacuuac

SEQ ID NO: 263096 - RNA, 24 nt, Artificial Sequence
  Synthetic
auuuugaaauacauauacacuuac

SEQ ID NO: 263097 - RNA, 18 nt, Artificial Sequence
  Synthetic
cuagcugaccugacuuac

SEQ ID NO: 263098 - RNA, 19 nt, Artificial Sequence
  Synthetic
gcuagcugaccugacuuac

SEQ ID NO: 263099 - RNA, 20 nt, Artificial Sequence
  Synthetic
ugcuagcugaccugacuuac

SEQ ID NO: 263100 - RNA, 21 nt, Artificial Sequence
  Synthetic
uugcuagcugaccugacuuac

SEQ ID NO: 263101 - RNA, 22 nt, Artificial Sequence
  Synthetic
cuugcuagcugaccugacuuac

SEQ ID NO: 263102 - RNA, 23 nt, Artificial Sequence
  Synthetic
ucuugcuagcugaccugacuuac

SEQ ID NO: 263103 - RNA, 24 nt, Artificial Sequence
  Synthetic
uucuugcuagcugaccugacuuac

SEQ ID NO: 263104 - RNA, 18 nt, Artificial Sequence
  Synthetic
gugauaacauauacuuac

SEQ ID NO: 263105 - RNA, 19 nt, Artificial Sequence
  Synthetic
agugauaacauauacuuac

SEQ ID NO: 263106 - RNA, 20 nt, Artificial Sequence
  Synthetic
aagugauaacauauacuuac

SEQ ID NO: 263107 - RNA, 21 nt, Artificial Sequence
  Synthetic
aaagugauaacauauacuuac

SEQ ID NO: 263108 - RNA, 22 nt, Artificial Sequence
  Synthetic
caaagugauaacauauacuuac

SEQ ID NO: 263109 - RNA, 23 nt, Artificial Sequence
  Synthetic
ucaaagugauaacauauacuuac

SEQ ID NO: 263110 - RNA, 24 nt, Artificial Sequence
  Synthetic
aucaaagugauaacauauacuuac

SEQ ID NO: 263111 - RNA, 18 nt, Artificial Sequence
  Synthetic
auaacccacaguacuuac

SEQ ID NO: 263112 - RNA, 19 nt, Artificial Sequence
  Synthetic
uauaacccacaguacuuac

SEQ ID NO: 263113 - RNA, 20 nt, Artificial Sequence
  Synthetic
cuauaacccacaguacuuac

SEQ ID NO: 263114 - RNA, 21 nt, Artificial Sequence
  Synthetic
ucuauaacccacaguacuuac

SEQ ID NO: 263115 - RNA, 22 nt, Artificial Sequence
  Synthetic
cucuauaacccacaguacuuac

SEQ ID NO: 263116 - RNA, 23 nt, Artificial Sequence
  Synthetic
ucucuauaacccacaguacuuac

SEQ ID NO: 263117 - RNA, 24 nt, Artificial Sequence
  Synthetic
aucucuauaacccacaguacuuac

SEQ ID NO: 263118 - RNA, 18 nt, Artificial Sequence
  Synthetic
caguacucagguacuuac

SEQ ID NO: 263119 - RNA, 19 nt, Artificial Sequence
  Synthetic
ucaguacucagguacuuac

SEQ ID NO: 263120 - RNA, 20 nt, Artificial Sequence
  Synthetic
uucaguacucagguacuuac

SEQ ID NO: 263121 - RNA, 21 nt, Artificial Sequence
  Synthetic
cuucaguacucagguacuuac

SEQ ID NO: 263122 - RNA, 22 nt, Artificial Sequence
  Synthetic
gcuucaguacucagguacuuac

SEQ ID NO: 263123 - RNA, 23 nt, Artificial Sequence
  Synthetic
ggcuucaguacucagguacuuac

SEQ ID NO: 263124 - RNA, 24 nt, Artificial Sequence
  Synthetic
uggcuucaguacucagguacuuac

SEQ ID NO: 263125 - RNA, 18 nt, Artificial Sequence
  Synthetic
gguucugauugaccuuac

SEQ ID NO: 263126 - RNA, 19 nt, Artificial Sequence
  Synthetic
ugguucugauugaccuuac

SEQ ID NO: 263127 - RNA, 20 nt, Artificial Sequence
  Synthetic
uugguucugauugaccuuac

SEQ ID NO: 263128 - RNA, 21 nt, Artificial Sequence
  Synthetic
auugguucugauugaccuuac

SEQ ID NO: 263129 - RNA, 22 nt, Artificial Sequence
  Synthetic
cauugguucugauugaccuuac

SEQ ID NO: 263130 - RNA, 23 nt, Artificial Sequence
  Synthetic
ucauugguucugauugaccuuac

SEQ ID NO: 263131 - RNA, 24 nt, Artificial Sequence
  Synthetic
uucauugguucugauugaccuuac

SEQ ID NO: 263132 - RNA, 18 nt, Artificial Sequence
  Synthetic
uauucgaaauccccuuac

SEQ ID NO: 263133 - RNA, 19 nt, Artificial Sequence
  Synthetic
uuauucgaaauccccuuac

SEQ ID NO: 263134 - RNA, 20 nt, Artificial Sequence
  Synthetic
cuuauucgaaauccccuuac

SEQ ID NO: 263135 - RNA, 21 nt, Artificial Sequence
  Synthetic
ccuuauucgaaauccccuuac

SEQ ID NO: 263136 - RNA, 22 nt, Artificial Sequence
  Synthetic
accuuauucgaaauccccuuac

SEQ ID NO: 263137 - RNA, 23 nt, Artificial Sequence
  Synthetic
gaccuuauucgaaauccccuuac

SEQ ID NO: 263138 - RNA, 24 nt, Artificial Sequence
  Synthetic
agaccuuauucgaaauccccuuac

SEQ ID NO: 263139 - RNA, 18 nt, Artificial Sequence
  Synthetic
uacaguuauaagccuuac

SEQ ID NO: 263140 - RNA, 19 nt, Artificial Sequence
  Synthetic
uuacaguuauaagccuuac

SEQ ID NO: 263141 - RNA, 20 nt, Artificial Sequence
  Synthetic
uuuacaguuauaagccuuac

SEQ ID NO: 263142 - RNA, 21 nt, Artificial Sequence
  Synthetic
uuuuacaguuauaagccuuac

SEQ ID NO: 263143 - RNA, 22 nt, Artificial Sequence
  Synthetic
auuuuacaguuauaagccuuac

SEQ ID NO: 263144 - RNA, 23 nt, Artificial Sequence
  Synthetic
gauuuuacaguuauaagccuuac

SEQ ID NO: 263145 - RNA, 24 nt, Artificial Sequence
  Synthetic
ugauuuuacaguuauaagccuuac

SEQ ID NO: 263146 - RNA, 18 nt, Artificial Sequence
  Synthetic
ccaccaggccugccuuac

SEQ ID NO: 263147 - RNA, 19 nt, Artificial Sequence
  Synthetic
accaccaggccugccuuac

SEQ ID NO: 263148 - RNA, 20 nt, Artificial Sequence
  Synthetic
caccaccaggccugccuuac

SEQ ID NO: 263149 - RNA, 21 nt, Artificial Sequence
  Synthetic
ucaccaccaggccugccuuac

SEQ ID NO: 263150 - RNA, 22 nt, Artificial Sequence
  Synthetic
gucaccaccaggccugccuuac

SEQ ID NO: 263151 - RNA, 23 nt, Artificial Sequence
  Synthetic
ugucaccaccaggccugccuuac

SEQ ID NO: 263152 - RNA, 24 nt, Artificial Sequence
  Synthetic
uugucaccaccaggccugccuuac

SEQ ID NO: 263153 - RNA, 18 nt, Artificial Sequence
  Synthetic
gcuuagaauuugccuuac

SEQ ID NO: 263154 - RNA, 19 nt, Artificial Sequence
  Synthetic
agcuuagaauuugccuuac

SEQ ID NO: 263155 - RNA, 20 nt, Artificial Sequence
  Synthetic
cagcuuagaauuugccuuac

SEQ ID NO: 263156 - RNA, 21 nt, Artificial Sequence
  Synthetic
acagcuuagaauuugccuuac

SEQ ID NO: 263157 - RNA, 22 nt, Artificial Sequence
  Synthetic
uacagcuuagaauuugccuuac

SEQ ID NO: 263158 - RNA, 23 nt, Artificial Sequence
  Synthetic
uuacagcuuagaauuugccuuac

SEQ ID NO: 263159 - RNA, 24 nt, Artificial Sequence
  Synthetic
guuacagcuuagaauuugccuuac

SEQ ID NO: 263160 - RNA, 18 nt, Artificial Sequence
  Synthetic
guuuuccuuacagcuuac

SEQ ID NO: 263161 - RNA, 19 nt, Artificial Sequence
  Synthetic
uguuuuccuuacagcuuac

SEQ ID NO: 263162 - RNA, 20 nt, Artificial Sequence
  Synthetic
uuguuuuccuuacagcuuac

SEQ ID NO: 263163 - RNA, 21 nt, Artificial Sequence
  Synthetic
uuuguuuuccuuacagcuuac

SEQ ID NO: 263164 - RNA, 22 nt, Artificial Sequence
  Synthetic
guuuguuuuccuuacagcuuac

SEQ ID NO: 263165 - RNA, 23 nt, Artificial Sequence
  Synthetic
uguuuguuuuccuuacagcuuac

SEQ ID NO: 263166 - RNA, 24 nt, Artificial Sequence
  Synthetic
uuguuuguuuuccuuacagcuuac

SEQ ID NO: 263167 - RNA, 18 nt, Artificial Sequence
  Synthetic
acacuuguuauggcuuac

SEQ ID NO: 263168 - RNA, 19 nt, Artificial Sequence
  Synthetic
aacacuuguuauggcuuac

SEQ ID NO: 263169 - RNA, 20 nt, Artificial Sequence
  Synthetic
aaacacuuguuauggcuuac

SEQ ID NO: 263170 - RNA, 21 nt, Artificial Sequence
  Synthetic
caaacacuuguuauggcuuac

SEQ ID NO: 263171 - RNA, 22 nt, Artificial Sequence
  Synthetic
gcaaacacuuguuauggcuuac

SEQ ID NO: 263172 - RNA, 23 nt, Artificial Sequence
  Synthetic
ggcaaacacuuguuauggcuuac

SEQ ID NO: 263173 - RNA, 24 nt, Artificial Sequence
  Synthetic
uggcaaacacuuguuauggcuuac

SEQ ID NO: 263174 - RNA, 18 nt, Artificial Sequence
  Synthetic
ccaccaggccuggcuuac

SEQ ID NO: 263175 - RNA, 19 nt, Artificial Sequence
  Synthetic
accaccaggccuggcuuac

SEQ ID NO: 263176 - RNA, 20 nt, Artificial Sequence
  Synthetic
caccaccaggccuggcuuac

SEQ ID NO: 263177 - RNA, 21 nt, Artificial Sequence
  Synthetic
ucaccaccaggccuggcuuac

SEQ ID NO: 263178 - RNA, 22 nt, Artificial Sequence
  Synthetic
gucaccaccaggccuggcuuac

SEQ ID NO: 263179 - RNA, 23 nt, Artificial Sequence
  Synthetic
ugucaccaccaggccuggcuuac

SEQ ID NO: 263180 - RNA, 24 nt, Artificial Sequence
  Synthetic
uugucaccaccaggccuggcuuac

SEQ ID NO: 263181 - RNA, 18 nt, Artificial Sequence
  Synthetic
cagugcuggccugcuuac

SEQ ID NO: 263182 - RNA, 19 nt, Artificial Sequence
  Synthetic
ucagugcuggccugcuuac

SEQ ID NO: 263183 - RNA, 20 nt, Artificial Sequence
  Synthetic
aucagugcuggccugcuuac

SEQ ID NO: 263184 - RNA, 21 nt, Artificial Sequence
  Synthetic
uaucagugcuggccugcuuac

SEQ ID NO: 263185 - RNA, 22 nt, Artificial Sequence
  Synthetic
uuaucagugcuggccugcuuac

SEQ ID NO: 263186 - RNA, 23 nt, Artificial Sequence
  Synthetic
guuaucagugcuggccugcuuac

SEQ ID NO: 263187 - RNA, 24 nt, Artificial Sequence
  Synthetic
uguuaucagugcuggccugcuuac

SEQ ID NO: 263188 - RNA, 18 nt, Artificial Sequence
  Synthetic
aacuaaagcagugcuuac

SEQ ID NO: 263189 - RNA, 19 nt, Artificial Sequence
  Synthetic
uaacuaaagcagugcuuac

SEQ ID NO: 263190 - RNA, 20 nt, Artificial Sequence
  Synthetic
guaacuaaagcagugcuuac

SEQ ID NO: 263191 - RNA, 21 nt, Artificial Sequence
  Synthetic
uguaacuaaagcagugcuuac

SEQ ID NO: 263192 - RNA, 22 nt, Artificial Sequence
  Synthetic
auguaacuaaagcagugcuuac

SEQ ID NO: 263193 - RNA, 23 nt, Artificial Sequence
  Synthetic
gauguaacuaaagcagugcuuac

SEQ ID NO: 263194 - RNA, 24 nt, Artificial Sequence
  Synthetic
ggauguaacuaaagcagugcuuac

SEQ ID NO: 263195 - RNA, 18 nt, Artificial Sequence
  Synthetic
caauuauggugugcuuac

SEQ ID NO: 263196 - RNA, 19 nt, Artificial Sequence
  Synthetic
ccaauuauggugugcuuac

SEQ ID NO: 263197 - RNA, 20 nt, Artificial Sequence
  Synthetic
cccaauuauggugugcuuac

SEQ ID NO: 263198 - RNA, 21 nt, Artificial Sequence
  Synthetic
ucccaauuauggugugcuuac

SEQ ID NO: 263199 - RNA, 22 nt, Artificial Sequence
  Synthetic
uucccaauuauggugugcuuac

SEQ ID NO: 263200 - RNA, 23 nt, Artificial Sequence
  Synthetic
cuucccaauuauggugugcuuac

SEQ ID NO: 263201 - RNA, 24 nt, Artificial Sequence
  Synthetic
ccuucccaauuauggugugcuuac

SEQ ID NO: 263202 - RNA, 18 nt, Artificial Sequence
  Synthetic
uucuccaauguugcuuac

SEQ ID NO: 263203 - RNA, 19 nt, Artificial Sequence
  Synthetic
auucuccaauguugcuuac

SEQ ID NO: 263204 - RNA, 20 nt, Artificial Sequence
  Synthetic
uauucuccaauguugcuuac

SEQ ID NO: 263205 - RNA, 21 nt, Artificial Sequence
  Synthetic
auauucuccaauguugcuuac

SEQ ID NO: 263206 - RNA, 22 nt, Artificial Sequence
  Synthetic
aauauucuccaauguugcuuac

SEQ ID NO: 263207 - RNA, 23 nt, Artificial Sequence
  Synthetic
aaauauucuccaauguugcuuac

SEQ ID NO: 263208 - RNA, 24 nt, Artificial Sequence
  Synthetic
aaaauauucuccaauguugcuuac

SEQ ID NO: 263209 - RNA, 18 nt, Artificial Sequence
  Synthetic
uaaacagucaaaucuuac

SEQ ID NO: 263210 - RNA, 19 nt, Artificial Sequence
  Synthetic
auaaacagucaaaucuuac

SEQ ID NO: 263211 - RNA, 20 nt, Artificial Sequence
  Synthetic
aauaaacagucaaaucuuac

SEQ ID NO: 263212 - RNA, 21 nt, Artificial Sequence
  Synthetic
gaauaaacagucaaaucuuac

SEQ ID NO: 263213 - RNA, 22 nt, Artificial Sequence
  Synthetic
ugaauaaacagucaaaucuuac

SEQ ID NO: 263214 - RNA, 23 nt, Artificial Sequence
  Synthetic
augaauaaacagucaaaucuuac

SEQ ID NO: 263215 - RNA, 24 nt, Artificial Sequence
  Synthetic
aaugaauaaacagucaaaucuuac

SEQ ID NO: 263216 - RNA, 18 nt, Artificial Sequence
  Synthetic
augaucaaaucaucuuac

SEQ ID NO: 263217 - RNA, 19 nt, Artificial Sequence
  Synthetic
aaugaucaaaucaucuuac

SEQ ID NO: 263218 - RNA, 20 nt, Artificial Sequence
  Synthetic
gaaugaucaaaucaucuuac

SEQ ID NO: 263219 - RNA, 21 nt, Artificial Sequence
  Synthetic
ugaaugaucaaaucaucuuac

SEQ ID NO: 263220 - RNA, 22 nt, Artificial Sequence
  Synthetic
augaaugaucaaaucaucuuac

SEQ ID NO: 263221 - RNA, 23 nt, Artificial Sequence
  Synthetic
caugaaugaucaaaucaucuuac

SEQ ID NO: 263222 - RNA, 24 nt, Artificial Sequence
  Synthetic
ccaugaaugaucaaaucaucuuac

SEQ ID NO: 263223 - RNA, 18 nt, Artificial Sequence
  Synthetic
gccuuuuugguaucuuac

SEQ ID NO: 263224 - RNA, 19 nt, Artificial Sequence
  Synthetic
ugccuuuuugguaucuuac

SEQ ID NO: 263225 - RNA, 20 nt, Artificial Sequence
  Synthetic
uugccuuuuugguaucuuac

SEQ ID NO: 263226 - RNA, 21 nt, Artificial Sequence
  Synthetic
uuugccuuuuugguaucuuac

SEQ ID NO: 263227 - RNA, 22 nt, Artificial Sequence
  Synthetic
uuuugccuuuuugguaucuuac

SEQ ID NO: 263228 - RNA, 23 nt, Artificial Sequence
  Synthetic
guuuugccuuuuugguaucuuac

SEQ ID NO: 263229 - RNA, 24 nt, Artificial Sequence
  Synthetic
uguuuugccuuuuugguaucuuac

SEQ ID NO: 263230 - RNA, 18 nt, Artificial Sequence
  Synthetic
aaucuacuugacucuuac

SEQ ID NO: 263231 - RNA, 19 nt, Artificial Sequence
  Synthetic
gaaucuacuugacucuuac

SEQ ID NO: 263232 - RNA, 20 nt, Artificial Sequence
  Synthetic
agaaucuacuugacucuuac

SEQ ID NO: 263233 - RNA, 21 nt, Artificial Sequence
  Synthetic
uagaaucuacuugacucuuac

SEQ ID NO: 263234 - RNA, 22 nt, Artificial Sequence
  Synthetic
uuagaaucuacuugacucuuac

SEQ ID NO: 263235 - RNA, 23 nt, Artificial Sequence
  Synthetic
uuuagaaucuacuugacucuuac

SEQ ID NO: 263236 - RNA, 24 nt, Artificial Sequence
  Synthetic
uuuuagaaucuacuugacucuuac

SEQ ID NO: 263237 - RNA, 18 nt, Artificial Sequence
  Synthetic
uuuuucuaggucucuuac

SEQ ID NO: 263238 - RNA, 19 nt, Artificial Sequence
  Synthetic
uuuuuucuaggucucuuac

SEQ ID NO: 263239 - RNA, 20 nt, Artificial Sequence
  Synthetic
uuuuuuucuaggucucuuac

SEQ ID NO: 263240 - RNA, 21 nt, Artificial Sequence
  Synthetic
guuuuuuucuaggucucuuac

SEQ ID NO: 263241 - RNA, 22 nt, Artificial Sequence
  Synthetic
aguuuuuuucuaggucucuuac

SEQ ID NO: 263242 - RNA, 23 nt, Artificial Sequence
  Synthetic
caguuuuuuucuaggucucuuac

SEQ ID NO: 263243 - RNA, 24 nt, Artificial Sequence
  Synthetic
gcaguuuuuuucuaggucucuuac

SEQ ID NO: 263244 - RNA, 18 nt, Artificial Sequence
  Synthetic
ggggauguagagucuuac

SEQ ID NO: 263245 - RNA, 19 nt, Artificial Sequence
  Synthetic
gggggauguagagucuuac

SEQ ID NO: 263246 - RNA, 20 nt, Artificial Sequence
  Synthetic
agggggauguagagucuuac

SEQ ID NO: 263247 - RNA, 21 nt, Artificial Sequence
  Synthetic
gagggggauguagagucuuac

SEQ ID NO: 263248 - RNA, 22 nt, Artificial Sequence
  Synthetic
ggagggggauguagagucuuac

SEQ ID NO: 263249 - RNA, 23 nt, Artificial Sequence
  Synthetic
gggagggggauguagagucuuac

SEQ ID NO: 263250 - RNA, 24 nt, Artificial Sequence
  Synthetic
ggggagggggauguagagucuuac

SEQ ID NO: 263251 - RNA, 18 nt, Artificial Sequence
  Synthetic
uugcucugguugucuuac

SEQ ID NO: 263252 - RNA, 19 nt, Artificial Sequence
  Synthetic
uuugcucugguugucuuac

SEQ ID NO: 263253 - RNA, 20 nt, Artificial Sequence
  Synthetic
uuuugcucugguugucuuac

SEQ ID NO: 263254 - RNA, 21 nt, Artificial Sequence
  Synthetic
uuuuugcucugguugucuuac

SEQ ID NO: 263255 - RNA, 22 nt, Artificial Sequence
  Synthetic
cuuuuugcucugguugucuuac

SEQ ID NO: 263256 - RNA, 23 nt, Artificial Sequence
  Synthetic
acuuuuugcucugguugucuuac

SEQ ID NO: 263257 - RNA, 24 nt, Artificial Sequence
  Synthetic
gacuuuuugcucugguugucuuac

SEQ ID NO: 263258 - RNA, 18 nt, Artificial Sequence
  Synthetic
uaauguuacaauucuuac

SEQ ID NO: 263259 - RNA, 19 nt, Artificial Sequence
  Synthetic
uuaauguuacaauucuuac

SEQ ID NO: 263260 - RNA, 20 nt, Artificial Sequence
  Synthetic
cuuaauguuacaauucuuac

SEQ ID NO: 263261 - RNA, 21 nt, Artificial Sequence
  Synthetic
ucuuaauguuacaauucuuac

SEQ ID NO: 263262 - RNA, 22 nt, Artificial Sequence
  Synthetic
cucuuaauguuacaauucuuac

SEQ ID NO: 263263 - RNA, 23 nt, Artificial Sequence
  Synthetic
ucucuuaauguuacaauucuuac

SEQ ID NO: 263264 - RNA, 24 nt, Artificial Sequence
  Synthetic
uucucuuaauguuacaauucuuac

SEQ ID NO: 263265 - RNA, 18 nt, Artificial Sequence
  Synthetic
cuucucuaacuuucuuac

SEQ ID NO: 263266 - RNA, 19 nt, Artificial Sequence
  Synthetic
ucuucucuaacuuucuuac

SEQ ID NO: 263267 - RNA, 20 nt, Artificial Sequence
  Synthetic
gucuucucuaacuuucuuac

SEQ ID NO: 263268 - RNA, 21 nt, Artificial Sequence
  Synthetic
ggucuucucuaacuuucuuac

SEQ ID NO: 263269 - RNA, 22 nt, Artificial Sequence
  Synthetic
gggucuucucuaacuuucuuac

SEQ ID NO: 263270 - RNA, 23 nt, Artificial Sequence
  Synthetic
ugggucuucucuaacuuucuuac

SEQ ID NO: 263271 - RNA, 24 nt, Artificial Sequence
  Synthetic
cugggucuucucuaacuuucuuac

SEQ ID NO: 263272 - RNA, 18 nt, Artificial Sequence
  Synthetic
caagaauucaaaaguuac

SEQ ID NO: 263273 - RNA, 19 nt, Artificial Sequence
  Synthetic
acaagaauucaaaaguuac

SEQ ID NO: 263274 - RNA, 20 nt, Artificial Sequence
  Synthetic
gacaagaauucaaaaguuac

SEQ ID NO: 263275 - RNA, 21 nt, Artificial Sequence
  Synthetic
ggacaagaauucaaaaguuac

SEQ ID NO: 263276 - RNA, 22 nt, Artificial Sequence
  Synthetic
uggacaagaauucaaaaguuac

SEQ ID NO: 263277 - RNA, 23 nt, Artificial Sequence
  Synthetic
uuggacaagaauucaaaaguuac

SEQ ID NO: 263278 - RNA, 24 nt, Artificial Sequence
  Synthetic
uuuggacaagaauucaaaaguuac

SEQ ID NO: 263279 - RNA, 18 nt, Artificial Sequence
  Synthetic
agaagucaucaaaguuac

SEQ ID NO: 263280 - RNA, 19 nt, Artificial Sequence
  Synthetic
uagaagucaucaaaguuac

SEQ ID NO: 263281 - RNA, 20 nt, Artificial Sequence
  Synthetic
guagaagucaucaaaguuac

SEQ ID NO: 263282 - RNA, 21 nt, Artificial Sequence
  Synthetic
aguagaagucaucaaaguuac

SEQ ID NO: 263283 - RNA, 22 nt, Artificial Sequence
  Synthetic
aaguagaagucaucaaaguuac

SEQ ID NO: 263284 - RNA, 23 nt, Artificial Sequence
  Synthetic
uaaguagaagucaucaaaguuac

SEQ ID NO: 263285 - RNA, 24 nt, Artificial Sequence
  Synthetic
uuaaguagaagucaucaaaguuac

SEQ ID NO: 263286 - RNA, 18 nt, Artificial Sequence
  Synthetic
uauaaauuuggaaguuac

SEQ ID NO: 263287 - RNA, 19 nt, Artificial Sequence
  Synthetic
cuauaaauuuggaaguuac

SEQ ID NO: 263288 - RNA, 20 nt, Artificial Sequence
  Synthetic
acuauaaauuuggaaguuac

SEQ ID NO: 263289 - RNA, 21 nt, Artificial Sequence
  Synthetic
aacuauaaauuuggaaguuac

SEQ ID NO: 263290 - RNA, 22 nt, Artificial Sequence
  Synthetic
aaacuauaaauuuggaaguuac

SEQ ID NO: 263291 - RNA, 23 nt, Artificial Sequence
  Synthetic
caaacuauaaauuuggaaguuac

SEQ ID NO: 263292 - RNA, 24 nt, Artificial Sequence
  Synthetic
ccaaacuauaaauuuggaaguuac

SEQ ID NO: 263293 - RNA, 18 nt, Artificial Sequence
  Synthetic
uuuaguggauauaguuac

SEQ ID NO: 263294 - RNA, 19 nt, Artificial Sequence
  Synthetic
cuuuaguggauauaguuac

SEQ ID NO: 263295 - RNA, 20 nt, Artificial Sequence
  Synthetic
acuuuaguggauauaguuac

SEQ ID NO: 263296 - RNA, 21 nt, Artificial Sequence
  Synthetic
gacuuuaguggauauaguuac

SEQ ID NO: 263297 - RNA, 22 nt, Artificial Sequence
  Synthetic
ggacuuuaguggauauaguuac

SEQ ID NO: 263298 - RNA, 23 nt, Artificial Sequence
  Synthetic
aggacuuuaguggauauaguuac

SEQ ID NO: 263299 - RNA, 24 nt, Artificial Sequence
  Synthetic
uaggacuuuaguggauauaguuac

SEQ ID NO: 263300 - RNA, 18 nt, Artificial Sequence
  Synthetic
gcaaagccaacuaguuac

SEQ ID NO: 263301 - RNA, 19 nt, Artificial Sequence
  Synthetic
agcaaagccaacuaguuac

SEQ ID NO: 263302 - RNA, 20 nt, Artificial Sequence
  Synthetic
gagcaaagccaacuaguuac

SEQ ID NO: 263303 - RNA, 21 nt, Artificial Sequence
  Synthetic
ggagcaaagccaacuaguuac

SEQ ID NO: 263304 - RNA, 22 nt, Artificial Sequence
  Synthetic
uggagcaaagccaacuaguuac

SEQ ID NO: 263305 - RNA, 23 nt, Artificial Sequence
  Synthetic
auggagcaaagccaacuaguuac

SEQ ID NO: 263306 - RNA, 24 nt, Artificial Sequence
  Synthetic
aauggagcaaagccaacuaguuac

SEQ ID NO: 263307 - RNA, 18 nt, Artificial Sequence
  Synthetic
caugggucuuuuaguuac

SEQ ID NO: 263308 - RNA, 19 nt, Artificial Sequence
  Synthetic
ucaugggucuuuuaguuac

SEQ ID NO: 263309 - RNA, 20 nt, Artificial Sequence
  Synthetic
cucaugggucuuuuaguuac

SEQ ID NO: 263310 - RNA, 21 nt, Artificial Sequence
  Synthetic
gcucaugggucuuuuaguuac

SEQ ID NO: 263311 - RNA, 22 nt, Artificial Sequence
  Synthetic
agcucaugggucuuuuaguuac

SEQ ID NO: 263312 - RNA, 23 nt, Artificial Sequence
  Synthetic
aagcucaugggucuuuuaguuac

SEQ ID NO: 263313 - RNA, 24 nt, Artificial Sequence
  Synthetic
caagcucaugggucuuuuaguuac

SEQ ID NO: 263314 - RNA, 18 nt, Artificial Sequence
  Synthetic
auggaaccaucacguuac

SEQ ID NO: 263315 - RNA, 19 nt, Artificial Sequence
  Synthetic
cauggaaccaucacguuac

SEQ ID NO: 263316 - RNA, 20 nt, Artificial Sequence
  Synthetic
ucauggaaccaucacguuac

SEQ ID NO: 263317 - RNA, 21 nt, Artificial Sequence
  Synthetic
gucauggaaccaucacguuac

SEQ ID NO: 263318 - RNA, 22 nt, Artificial Sequence
  Synthetic
ugucauggaaccaucacguuac

SEQ ID NO: 263319 - RNA, 23 nt, Artificial Sequence
  Synthetic
gugucauggaaccaucacguuac

SEQ ID NO: 263320 - RNA, 24 nt, Artificial Sequence
  Synthetic
agugucauggaaccaucacguuac

SEQ ID NO: 263321 - RNA, 18 nt, Artificial Sequence
  Synthetic
uaaugggggaaagguuac

SEQ ID NO: 263322 - RNA, 19 nt, Artificial Sequence
  Synthetic
guaaugggggaaagguuac

SEQ ID NO: 263323 - RNA, 20 nt, Artificial Sequence
  Synthetic
uguaaugggggaaagguuac

SEQ ID NO: 263324 - RNA, 21 nt, Artificial Sequence
  Synthetic
uuguaaugggggaaagguuac

SEQ ID NO: 263325 - RNA, 22 nt, Artificial Sequence
  Synthetic
uuuguaaugggggaaagguuac

SEQ ID NO: 263326 - RNA, 23 nt, Artificial Sequence
  Synthetic
auuuguaaugggggaaagguuac

SEQ ID NO: 263327 - RNA, 24 nt, Artificial Sequence
  Synthetic
uauuuguaaugggggaaagguuac

SEQ ID NO: 263328 - RNA, 18 nt, Artificial Sequence
  Synthetic
aauccgggcaaggguuac

SEQ ID NO: 263329 - RNA, 19 nt, Artificial Sequence
  Synthetic
gaauccgggcaaggguuac

SEQ ID NO: 263330 - RNA, 20 nt, Artificial Sequence
  Synthetic
ugaauccgggcaaggguuac

SEQ ID NO: 263331 - RNA, 21 nt, Artificial Sequence
  Synthetic
gugaauccgggcaaggguuac

SEQ ID NO: 263332 - RNA, 22 nt, Artificial Sequence
  Synthetic
ggugaauccgggcaaggguuac

SEQ ID NO: 263333 - RNA, 23 nt, Artificial Sequence
  Synthetic
uggugaauccgggcaaggguuac

SEQ ID NO: 263334 - RNA, 24 nt, Artificial Sequence
  Synthetic
auggugaauccgggcaaggguuac

SEQ ID NO: 263335 - RNA, 18 nt, Artificial Sequence
  Synthetic
cacuccagccuggguuac

SEQ ID NO: 263336 - RNA, 19 nt, Artificial Sequence
  Synthetic
gcacuccagccuggguuac

SEQ ID NO: 263337 - RNA, 20 nt, Artificial Sequence
  Synthetic
ugcacuccagccuggguuac

SEQ ID NO: 263338 - RNA, 21 nt, Artificial Sequence
  Synthetic
uugcacuccagccuggguuac

SEQ ID NO: 263339 - RNA, 22 nt, Artificial Sequence
  Synthetic
auugcacuccagccuggguuac

SEQ ID NO: 263340 - RNA, 23 nt, Artificial Sequence
  Synthetic
cauugcacuccagccuggguuac

SEQ ID NO: 263341 - RNA, 24 nt, Artificial Sequence
  Synthetic
ccauugcacuccagccuggguuac

SEQ ID NO: 263342 - RNA, 18 nt, Artificial Sequence
  Synthetic
aggaacuguuaugguuac

SEQ ID NO: 263343 - RNA, 19 nt, Artificial Sequence
  Synthetic
uaggaacuguuaugguuac

SEQ ID NO: 263344 - RNA, 20 nt, Artificial Sequence
  Synthetic
guaggaacuguuaugguuac

SEQ ID NO: 263345 - RNA, 21 nt, Artificial Sequence
  Synthetic
aguaggaacuguuaugguuac

SEQ ID NO: 263346 - RNA, 22 nt, Artificial Sequence
  Synthetic
uaguaggaacuguuaugguuac

SEQ ID NO: 263347 - RNA, 23 nt, Artificial Sequence
  Synthetic
cuaguaggaacuguuaugguuac

SEQ ID NO: 263348 - RNA, 24 nt, Artificial Sequence
  Synthetic
acuaguaggaacuguuaugguuac

SEQ ID NO: 263349 - RNA, 18 nt, Artificial Sequence
  Synthetic
gaguagaauggugguuac

SEQ ID NO: 263350 - RNA, 19 nt, Artificial Sequence
  Synthetic
agaguagaauggugguuac

SEQ ID NO: 263351 - RNA, 20 nt, Artificial Sequence
  Synthetic
gagaguagaauggugguuac

SEQ ID NO: 263352 - RNA, 21 nt, Artificial Sequence
  Synthetic
agagaguagaauggugguuac

SEQ ID NO: 263353 - RNA, 22 nt, Artificial Sequence
  Synthetic
uagagaguagaauggugguuac

SEQ ID NO: 263354 - RNA, 23 nt, Artificial Sequence
  Synthetic
guagagaguagaauggugguuac

SEQ ID NO: 263355 - RNA, 24 nt, Artificial Sequence
  Synthetic
aguagagaguagaauggugguuac

SEQ ID NO: 263356 - RNA, 18 nt, Artificial Sequence
  Synthetic
ugauacuaaaaauguuac

SEQ ID NO: 263357 - RNA, 19 nt, Artificial Sequence
  Synthetic
augauacuaaaaauguuac

SEQ ID NO: 263358 - RNA, 20 nt, Artificial Sequence
  Synthetic
caugauacuaaaaauguuac

SEQ ID NO: 263359 - RNA, 21 nt, Artificial Sequence
  Synthetic
ucaugauacuaaaaauguuac

SEQ ID NO: 263360 - RNA, 22 nt, Artificial Sequence
  Synthetic
uucaugauacuaaaaauguuac

SEQ ID NO: 263361 - RNA, 23 nt, Artificial Sequence
  Synthetic
cuucaugauacuaaaaauguuac

SEQ ID NO: 263362 - RNA, 24 nt, Artificial Sequence
  Synthetic
ccuucaugauacuaaaaauguuac

SEQ ID NO: 263363 - RNA, 18 nt, Artificial Sequence
  Synthetic
ggagcugaauaauguuac

SEQ ID NO: 263364 - RNA, 19 nt, Artificial Sequence
  Synthetic
aggagcugaauaauguuac

SEQ ID NO: 263365 - RNA, 20 nt, Artificial Sequence
  Synthetic
gaggagcugaauaauguuac

SEQ ID NO: 263366 - RNA, 21 nt, Artificial Sequence
  Synthetic
agaggagcugaauaauguuac

SEQ ID NO: 263367 - RNA, 22 nt, Artificial Sequence
  Synthetic
uagaggagcugaauaauguuac

SEQ ID NO: 263368 - RNA, 23 nt, Artificial Sequence
  Synthetic
uuagaggagcugaauaauguuac

SEQ ID NO: 263369 - RNA, 24 nt, Artificial Sequence
  Synthetic
auuagaggagcugaauaauguuac

SEQ ID NO: 263370 - RNA, 18 nt, Artificial Sequence
  Synthetic
aaaguugaaggauguuac

SEQ ID NO: 263371 - RNA, 19 nt, Artificial Sequence
  Synthetic
uaaaguugaaggauguuac

SEQ ID NO: 263372 - RNA, 20 nt, Artificial Sequence
  Synthetic
guaaaguugaaggauguuac

SEQ ID NO: 263373 - RNA, 21 nt, Artificial Sequence
  Synthetic
cguaaaguugaaggauguuac

SEQ ID NO: 263374 - RNA, 22 nt, Artificial Sequence
  Synthetic
acguaaaguugaaggauguuac

SEQ ID NO: 263375 - RNA, 23 nt, Artificial Sequence
  Synthetic
gacguaaaguugaaggauguuac

SEQ ID NO: 263376 - RNA, 24 nt, Artificial Sequence
  Synthetic
agacguaaaguugaaggauguuac

SEQ ID NO: 263377 - RNA, 18 nt, Artificial Sequence
  Synthetic
cacacauugcacuguuac

SEQ ID NO: 263378 - RNA, 19 nt, Artificial Sequence
  Synthetic
ccacacauugcacuguuac

SEQ ID NO: 263379 - RNA, 20 nt, Artificial Sequence
  Synthetic
accacacauugcacuguuac

SEQ ID NO: 263380 - RNA, 21 nt, Artificial Sequence
  Synthetic
aaccacacauugcacuguuac

SEQ ID NO: 263381 - RNA, 22 nt, Artificial Sequence
  Synthetic
uaaccacacauugcacuguuac

SEQ ID NO: 263382 - RNA, 23 nt, Artificial Sequence
  Synthetic
uuaaccacacauugcacuguuac

SEQ ID NO: 263383 - RNA, 24 nt, Artificial Sequence
  Synthetic
uuuaaccacacauugcacuguuac

SEQ ID NO: 263384 - RNA, 18 nt, Artificial Sequence
  Synthetic
ugucauuaucccuguuac

SEQ ID NO: 263385 - RNA, 19 nt, Artificial Sequence
  Synthetic
cugucauuaucccuguuac

SEQ ID NO: 263386 - RNA, 20 nt, Artificial Sequence
  Synthetic
acugucauuaucccuguuac

SEQ ID NO: 263387 - RNA, 21 nt, Artificial Sequence
  Synthetic
aacugucauuaucccuguuac

SEQ ID NO: 263388 - RNA, 22 nt, Artificial Sequence
  Synthetic
caacugucauuaucccuguuac

SEQ ID NO: 263389 - RNA, 23 nt, Artificial Sequence
  Synthetic
acaacugucauuaucccuguuac

SEQ ID NO: 263390 - RNA, 24 nt, Artificial Sequence
  Synthetic
gacaacugucauuaucccuguuac

SEQ ID NO: 263391 - RNA, 18 nt, Artificial Sequence
  Synthetic
cccacccaaaucuguuac

SEQ ID NO: 263392 - RNA, 19 nt, Artificial Sequence
  Synthetic
acccacccaaaucuguuac

SEQ ID NO: 263393 - RNA, 20 nt, Artificial Sequence
  Synthetic
aacccacccaaaucuguuac

SEQ ID NO: 263394 - RNA, 21 nt, Artificial Sequence
  Synthetic
aaacccacccaaaucuguuac

SEQ ID NO: 263395 - RNA, 22 nt, Artificial Sequence
  Synthetic
aaaacccacccaaaucuguuac

SEQ ID NO: 263396 - RNA, 23 nt, Artificial Sequence
  Synthetic
caaaacccacccaaaucuguuac

SEQ ID NO: 263397 - RNA, 24 nt, Artificial Sequence
  Synthetic
acaaaacccacccaaaucuguuac

SEQ ID NO: 263398 - RNA, 18 nt, Artificial Sequence
  Synthetic
uuaauuuuuauuuguuac

SEQ ID NO: 263399 - RNA, 19 nt, Artificial Sequence
  Synthetic
auuaauuuuuauuuguuac

SEQ ID NO: 263400 - RNA, 20 nt, Artificial Sequence
  Synthetic
uauuaauuuuuauuuguuac

SEQ ID NO: 263401 - RNA, 21 nt, Artificial Sequence
  Synthetic
auauuaauuuuuauuuguuac

SEQ ID NO: 263402 - RNA, 22 nt, Artificial Sequence
  Synthetic
uauauuaauuuuuauuuguuac

SEQ ID NO: 263403 - RNA, 23 nt, Artificial Sequence
  Synthetic
guauauuaauuuuuauuuguuac

SEQ ID NO: 263404 - RNA, 24 nt, Artificial Sequence
  Synthetic
uguauauuaauuuuuauuuguuac

SEQ ID NO: 263405 - RNA, 18 nt, Artificial Sequence
  Synthetic
ucacagaccuuuuguuac

SEQ ID NO: 263406 - RNA, 19 nt, Artificial Sequence
  Synthetic
gucacagaccuuuuguuac

SEQ ID NO: 263407 - RNA, 20 nt, Artificial Sequence
  Synthetic
ugucacagaccuuuuguuac

SEQ ID NO: 263408 - RNA, 21 nt, Artificial Sequence
  Synthetic
gugucacagaccuuuuguuac

SEQ ID NO: 263409 - RNA, 22 nt, Artificial Sequence
  Synthetic
cgugucacagaccuuuuguuac

SEQ ID NO: 263410 - RNA, 23 nt, Artificial Sequence
  Synthetic
ucgugucacagaccuuuuguuac

SEQ ID NO: 263411 - RNA, 24 nt, Artificial Sequence
  Synthetic
gucgugucacagaccuuuuguuac

SEQ ID NO: 263412 - RNA, 18 nt, Artificial Sequence
  Synthetic
gaacucaaacaaauuuac

SEQ ID NO: 263413 - RNA, 19 nt, Artificial Sequence
  Synthetic
ugaacucaaacaaauuuac

SEQ ID NO: 263414 - RNA, 20 nt, Artificial Sequence
  Synthetic
augaacucaaacaaauuuac

SEQ ID NO: 263415 - RNA, 21 nt, Artificial Sequence
  Synthetic
aaugaacucaaacaaauuuac

SEQ ID NO: 263416 - RNA, 22 nt, Artificial Sequence
  Synthetic
caaugaacucaaacaaauuuac

SEQ ID NO: 263417 - RNA, 23 nt, Artificial Sequence
  Synthetic
acaaugaacucaaacaaauuuac

SEQ ID NO: 263418 - RNA, 24 nt, Artificial Sequence
  Synthetic
uacaaugaacucaaacaaauuuac

SEQ ID NO: 263419 - RNA, 19 nt, Artificial Sequence
  Synthetic
ggaacuuaaacaaauuuac

SEQ ID NO: 263420 - RNA, 20 nt, Artificial Sequence
  Synthetic
aggaacuuaaacaaauuuac

SEQ ID NO: 263421 - RNA, 22 nt, Artificial Sequence
  Synthetic
caaggaacuuaaacaaauuuac

SEQ ID NO: 263422 - RNA, 23 nt, Artificial Sequence
  Synthetic
acaaggaacuuaaacaaauuuac

SEQ ID NO: 263423 - RNA, 24 nt, Artificial Sequence
  Synthetic
uacaaggaacuuaaacaaauuuac

SEQ ID NO: 263424 - RNA, 18 nt, Artificial Sequence
  Synthetic
gaacuccaacaaauuuac

SEQ ID NO: 263425 - RNA, 19 nt, Artificial Sequence
  Synthetic
ugaacuccaacaaauuuac

SEQ ID NO: 263426 - RNA, 20 nt, Artificial Sequence
  Synthetic
augaacuccaacaaauuuac

SEQ ID NO: 263427 - RNA, 21 nt, Artificial Sequence
  Synthetic
aaugaacuccaacaaauuuac

SEQ ID NO: 263428 - RNA, 22 nt, Artificial Sequence
  Synthetic
caaugaacuccaacaaauuuac

SEQ ID NO: 263429 - RNA, 23 nt, Artificial Sequence
  Synthetic
acaaugaacuccaacaaauuuac

SEQ ID NO: 263430 - RNA, 24 nt, Artificial Sequence
  Synthetic
uacaaugaacuccaacaaauuuac

SEQ ID NO: 263431 - RNA, 18 nt, Artificial Sequence
  Synthetic
ugguuuaaucaaauuuac

SEQ ID NO: 263432 - RNA, 19 nt, Artificial Sequence
  Synthetic
gugguuuaaucaaauuuac

SEQ ID NO: 263433 - RNA, 20 nt, Artificial Sequence
  Synthetic
ugugguuuaaucaaauuuac

SEQ ID NO: 263434 - RNA, 21 nt, Artificial Sequence
  Synthetic
augugguuuaaucaaauuuac

SEQ ID NO: 263435 - RNA, 22 nt, Artificial Sequence
  Synthetic
aaugugguuuaaucaaauuuac

SEQ ID NO: 263436 - RNA, 23 nt, Artificial Sequence
  Synthetic
aaaugugguuuaaucaaauuuac

SEQ ID NO: 263437 - RNA, 24 nt, Artificial Sequence
  Synthetic
aaaaugugguuuaaucaaauuuac

SEQ ID NO: 263438 - RNA, 18 nt, Artificial Sequence
  Synthetic
ugucccgugacaauuuac

SEQ ID NO: 263439 - RNA, 19 nt, Artificial Sequence
  Synthetic
gugucccgugacaauuuac

SEQ ID NO: 263440 - RNA, 20 nt, Artificial Sequence
  Synthetic
ugugucccgugacaauuuac

SEQ ID NO: 263441 - RNA, 21 nt, Artificial Sequence
  Synthetic
cugugucccgugacaauuuac

SEQ ID NO: 263442 - RNA, 22 nt, Artificial Sequence
  Synthetic
gcugugucccgugacaauuuac

SEQ ID NO: 263443 - RNA, 23 nt, Artificial Sequence
  Synthetic
ggcugugucccgugacaauuuac

SEQ ID NO: 263444 - RNA, 24 nt, Artificial Sequence
  Synthetic
uggcugugucccgugacaauuuac

SEQ ID NO: 263445 - RNA, 18 nt, Artificial Sequence
  Synthetic
aguaaauaaccaauuuac

SEQ ID NO: 263446 - RNA, 19 nt, Artificial Sequence
  Synthetic
uaguaaauaaccaauuuac

SEQ ID NO: 263447 - RNA, 20 nt, Artificial Sequence
  Synthetic
guaguaaauaaccaauuuac

SEQ ID NO: 263448 - RNA, 21 nt, Artificial Sequence
  Synthetic
aguaguaaauaaccaauuuac

SEQ ID NO: 263449 - RNA, 22 nt, Artificial Sequence
  Synthetic
aaguaguaaauaaccaauuuac

SEQ ID NO: 263450 - RNA, 23 nt, Artificial Sequence
  Synthetic
gaaguaguaaauaaccaauuuac

SEQ ID NO: 263451 - RNA, 24 nt, Artificial Sequence
  Synthetic
agaaguaguaaauaaccaauuuac

SEQ ID NO: 263452 - RNA, 18 nt, Artificial Sequence
  Synthetic
gcauaauuucuaauuuac

SEQ ID NO: 263453 - RNA, 19 nt, Artificial Sequence
  Synthetic
agcauaauuucuaauuuac

SEQ ID NO: 263454 - RNA, 20 nt, Artificial Sequence
  Synthetic
gagcauaauuucuaauuuac

SEQ ID NO: 263455 - RNA, 21 nt, Artificial Sequence
  Synthetic
ugagcauaauuucuaauuuac

SEQ ID NO: 263456 - RNA, 22 nt, Artificial Sequence
  Synthetic
uugagcauaauuucuaauuuac

SEQ ID NO: 263457 - RNA, 23 nt, Artificial Sequence
  Synthetic
auugagcauaauuucuaauuuac

SEQ ID NO: 263458 - RNA, 24 nt, Artificial Sequence
  Synthetic
gauugagcauaauuucuaauuuac

SEQ ID NO: 263459 - RNA, 18 nt, Artificial Sequence
  Synthetic
aguuacuuucuaauuuac

SEQ ID NO: 263460 - RNA, 19 nt, Artificial Sequence
  Synthetic
uaguuacuuucuaauuuac

SEQ ID NO: 263461 - RNA, 20 nt, Artificial Sequence
  Synthetic
cuaguuacuuucuaauuuac

SEQ ID NO: 263462 - RNA, 21 nt, Artificial Sequence
  Synthetic
gcuaguuacuuucuaauuuac

SEQ ID NO: 263463 - RNA, 22 nt, Artificial Sequence
  Synthetic
ugcuaguuacuuucuaauuuac

SEQ ID NO: 263464 - RNA, 23 nt, Artificial Sequence
  Synthetic
augcuaguuacuuucuaauuuac

SEQ ID NO: 263465 - RNA, 24 nt, Artificial Sequence
  Synthetic
uaugcuaguuacuuucuaauuuac

SEQ ID NO: 263466 - RNA, 18 nt, Artificial Sequence
  Synthetic
aguauguuucuaauuuac

SEQ ID NO: 263467 - RNA, 19 nt, Artificial Sequence
  Synthetic
uaguauguuucuaauuuac

SEQ ID NO: 263468 - RNA, 20 nt, Artificial Sequence
  Synthetic
guaguauguuucuaauuuac

SEQ ID NO: 263469 - RNA, 21 nt, Artificial Sequence
  Synthetic
uguaguauguuucuaauuuac

SEQ ID NO: 263470 - RNA, 22 nt, Artificial Sequence
  Synthetic
auguaguauguuucuaauuuac

SEQ ID NO: 263471 - RNA, 23 nt, Artificial Sequence
  Synthetic
aauguaguauguuucuaauuuac

SEQ ID NO: 263472 - RNA, 24 nt, Artificial Sequence
  Synthetic
gaauguaguauguuucuaauuuac

SEQ ID NO: 263473 - RNA, 18 nt, Artificial Sequence
  Synthetic
agaugaacacacauuuac

SEQ ID NO: 263474 - RNA, 19 nt, Artificial Sequence
  Synthetic
aagaugaacacacauuuac

SEQ ID NO: 263475 - RNA, 20 nt, Artificial Sequence
  Synthetic
caagaugaacacacauuuac

SEQ ID NO: 263476 - RNA, 21 nt, Artificial Sequence
  Synthetic
acaagaugaacacacauuuac

SEQ ID NO: 263477 - RNA, 22 nt, Artificial Sequence
  Synthetic
uacaagaugaacacacauuuac

SEQ ID NO: 263478 - RNA, 23 nt, Artificial Sequence
  Synthetic
auacaagaugaacacacauuuac

SEQ ID NO: 263479 - RNA, 24 nt, Artificial Sequence
  Synthetic
uauacaagaugaacacacauuuac

SEQ ID NO: 263480 - RNA, 18 nt, Artificial Sequence
  Synthetic
cuagaagaggacauuuac

SEQ ID NO: 263481 - RNA, 19 nt, Artificial Sequence
  Synthetic
acuagaagaggacauuuac

SEQ ID NO: 263482 - RNA, 20 nt, Artificial Sequence
  Synthetic
cacuagaagaggacauuuac

SEQ ID NO: 263483 - RNA, 21 nt, Artificial Sequence
  Synthetic
gcacuagaagaggacauuuac

SEQ ID NO: 263484 - RNA, 22 nt, Artificial Sequence
  Synthetic
ggcacuagaagaggacauuuac

SEQ ID NO: 263485 - RNA, 23 nt, Artificial Sequence
  Synthetic
aggcacuagaagaggacauuuac

SEQ ID NO: 263486 - RNA, 24 nt, Artificial Sequence
  Synthetic
uaggcacuagaagaggacauuuac

SEQ ID NO: 263487 - RNA, 18 nt, Artificial Sequence
  Synthetic
uuuuuccucagcauuuac

SEQ ID NO: 263488 - RNA, 19 nt, Artificial Sequence
  Synthetic
cuuuuuccucagcauuuac

SEQ ID NO: 263489 - RNA, 20 nt, Artificial Sequence
  Synthetic
gcuuuuuccucagcauuuac

SEQ ID NO: 263490 - RNA, 21 nt, Artificial Sequence
  Synthetic
ugcuuuuuccucagcauuuac

SEQ ID NO: 263491 - RNA, 22 nt, Artificial Sequence
  Synthetic
uugcuuuuuccucagcauuuac

SEQ ID NO: 263492 - RNA, 23 nt, Artificial Sequence
  Synthetic
guugcuuuuuccucagcauuuac

SEQ ID NO: 263493 - RNA, 24 nt, Artificial Sequence
  Synthetic
uguugcuuuuuccucagcauuuac

SEQ ID NO: 263494 - RNA, 18 nt, Artificial Sequence
  Synthetic
auucugaaggucauuuac

SEQ ID NO: 263495 - RNA, 19 nt, Artificial Sequence
  Synthetic
cauucugaaggucauuuac

SEQ ID NO: 263496 - RNA, 20 nt, Artificial Sequence
  Synthetic
ccauucugaaggucauuuac

SEQ ID NO: 263497 - RNA, 21 nt, Artificial Sequence
  Synthetic
gccauucugaaggucauuuac

SEQ ID NO: 263498 - RNA, 22 nt, Artificial Sequence
  Synthetic
ugccauucugaaggucauuuac

SEQ ID NO: 263499 - RNA, 23 nt, Artificial Sequence
  Synthetic
cugccauucugaaggucauuuac

SEQ ID NO: 263500 - RNA, 24 nt, Artificial Sequence
  Synthetic
acugccauucugaaggucauuuac

SEQ ID NO: 263501 - RNA, 18 nt, Artificial Sequence
  Synthetic
uuuuuagcugagauuuac

SEQ ID NO: 263502 - RNA, 19 nt, Artificial Sequence
  Synthetic
guuuuuagcugagauuuac

SEQ ID NO: 263503 - RNA, 20 nt, Artificial Sequence
  Synthetic
aguuuuuagcugagauuuac

SEQ ID NO: 263504 - RNA, 21 nt, Artificial Sequence
  Synthetic
caguuuuuagcugagauuuac

SEQ ID NO: 263505 - RNA, 22 nt, Artificial Sequence
  Synthetic
gcaguuuuuagcugagauuuac

SEQ ID NO: 263506 - RNA, 23 nt, Artificial Sequence
  Synthetic
agcaguuuuuagcugagauuuac

SEQ ID NO: 263507 - RNA, 24 nt, Artificial Sequence
  Synthetic
cagcaguuuuuagcugagauuuac

SEQ ID NO: 263508 - RNA, 18 nt, Artificial Sequence
  Synthetic
uuuuuuuguucuauuuac

SEQ ID NO: 263509 - RNA, 19 nt, Artificial Sequence
  Synthetic
cuuuuuuuguucuauuuac

SEQ ID NO: 263510 - RNA, 20 nt, Artificial Sequence
  Synthetic
acuuuuuuuguucuauuuac

SEQ ID NO: 263511 - RNA, 21 nt, Artificial Sequence
  Synthetic
gacuuuuuuuguucuauuuac

SEQ ID NO: 263512 - RNA, 22 nt, Artificial Sequence
  Synthetic
agacuuuuuuuguucuauuuac

SEQ ID NO: 263513 - RNA, 23 nt, Artificial Sequence
  Synthetic
aagacuuuuuuuguucuauuuac

SEQ ID NO: 263514 - RNA, 24 nt, Artificial Sequence
  Synthetic
gaagacuuuuuuuguucuauuuac

SEQ ID NO: 263515 - RNA, 18 nt, Artificial Sequence
  Synthetic
acaaauauggguauuuac

SEQ ID NO: 263516 - RNA, 19 nt, Artificial Sequence
  Synthetic
cacaaauauggguauuuac

SEQ ID NO: 263517 - RNA, 20 nt, Artificial Sequence
  Synthetic
acacaaauauggguauuuac

SEQ ID NO: 263518 - RNA, 21 nt, Artificial Sequence
  Synthetic
gacacaaauauggguauuuac

SEQ ID NO: 263519 - RNA, 22 nt, Artificial Sequence
  Synthetic
agacacaaauauggguauuuac

SEQ ID NO: 263520 - RNA, 23 nt, Artificial Sequence
  Synthetic
uagacacaaauauggguauuuac

SEQ ID NO: 263521 - RNA, 24 nt, Artificial Sequence
  Synthetic
auagacacaaauauggguauuuac

SEQ ID NO: 263522 - RNA, 18 nt, Artificial Sequence
  Synthetic
uuagauaaauuuauuuac

SEQ ID NO: 263523 - RNA, 19 nt, Artificial Sequence
  Synthetic
cuuagauaaauuuauuuac

SEQ ID NO: 263524 - RNA, 20 nt, Artificial Sequence
  Synthetic
acuuagauaaauuuauuuac

SEQ ID NO: 263525 - RNA, 21 nt, Artificial Sequence
  Synthetic
aacuuagauaaauuuauuuac

SEQ ID NO: 263526 - RNA, 22 nt, Artificial Sequence
  Synthetic
caacuuagauaaauuuauuuac

SEQ ID NO: 263527 - RNA, 23 nt, Artificial Sequence
  Synthetic
ccaacuuagauaaauuuauuuac

SEQ ID NO: 263528 - RNA, 24 nt, Artificial Sequence
  Synthetic
accaacuuagauaaauuuauuuac

SEQ ID NO: 263529 - RNA, 18 nt, Artificial Sequence
  Synthetic
aacuaucuagcacuuuac

SEQ ID NO: 263530 - RNA, 19 nt, Artificial Sequence
  Synthetic
aaacuaucuagcacuuuac

SEQ ID NO: 263531 - RNA, 20 nt, Artificial Sequence
  Synthetic
gaaacuaucuagcacuuuac

SEQ ID NO: 263532 - RNA, 21 nt, Artificial Sequence
  Synthetic
ugaaacuaucuagcacuuuac

SEQ ID NO: 263533 - RNA, 22 nt, Artificial Sequence
  Synthetic
gugaaacuaucuagcacuuuac

SEQ ID NO: 263534 - RNA, 23 nt, Artificial Sequence
  Synthetic
ugugaaacuaucuagcacuuuac

SEQ ID NO: 263535 - RNA, 24 nt, Artificial Sequence
  Synthetic
cugugaaacuaucuagcacuuuac

SEQ ID NO: 263536 - RNA, 18 nt, Artificial Sequence
  Synthetic
guuccugaguuacuuuac

SEQ ID NO: 263537 - RNA, 19 nt, Artificial Sequence
  Synthetic
cguuccugaguuacuuuac

SEQ ID NO: 263538 - RNA, 20 nt, Artificial Sequence
  Synthetic
ccguuccugaguuacuuuac

SEQ ID NO: 263539 - RNA, 21 nt, Artificial Sequence
  Synthetic
uccguuccugaguuacuuuac

SEQ ID NO: 263540 - RNA, 22 nt, Artificial Sequence
  Synthetic
uuccguuccugaguuacuuuac

SEQ ID NO: 263541 - RNA, 23 nt, Artificial Sequence
  Synthetic
uuuccguuccugaguuacuuuac

SEQ ID NO: 263542 - RNA, 24 nt, Artificial Sequence
  Synthetic
uuuuccguuccugaguuacuuuac

SEQ ID NO: 263543 - RNA, 18 nt, Artificial Sequence
  Synthetic
caguuaauguuacuuuac

SEQ ID NO: 263544 - RNA, 19 nt, Artificial Sequence
  Synthetic
acaguuaauguuacuuuac

SEQ ID NO: 263545 - RNA, 20 nt, Artificial Sequence
  Synthetic
aacaguuaauguuacuuuac

SEQ ID NO: 263546 - RNA, 21 nt, Artificial Sequence
  Synthetic
aaacaguuaauguuacuuuac

SEQ ID NO: 263547 - RNA, 22 nt, Artificial Sequence
  Synthetic
uaaacaguuaauguuacuuuac

SEQ ID NO: 263548 - RNA, 23 nt, Artificial Sequence
  Synthetic
cuaaacaguuaauguuacuuuac

SEQ ID NO: 263549 - RNA, 24 nt, Artificial Sequence
  Synthetic
acuaaacaguuaauguuacuuuac

SEQ ID NO: 263550 - RNA, 18 nt, Artificial Sequence
  Synthetic
agagucacugaccuuuac

SEQ ID NO: 263551 - RNA, 19 nt, Artificial Sequence
  Synthetic
gagagucacugaccuuuac

SEQ ID NO: 263552 - RNA, 20 nt, Artificial Sequence
  Synthetic
ggagagucacugaccuuuac

SEQ ID NO: 263553 - RNA, 21 nt, Artificial Sequence
  Synthetic
uggagagucacugaccuuuac

SEQ ID NO: 263554 - RNA, 22 nt, Artificial Sequence
  Synthetic
guggagagucacugaccuuuac

SEQ ID NO: 263555 - RNA, 23 nt, Artificial Sequence
  Synthetic
aguggagagucacugaccuuuac

SEQ ID NO: 263556 - RNA, 24 nt, Artificial Sequence
  Synthetic
caguggagagucacugaccuuuac

SEQ ID NO: 263557 - RNA, 18 nt, Artificial Sequence
  Synthetic
uguuacaauguccuuuac

SEQ ID NO: 263558 - RNA, 19 nt, Artificial Sequence
  Synthetic
uuguuacaauguccuuuac

SEQ ID NO: 263559 - RNA, 20 nt, Artificial Sequence
  Synthetic
uuuguuacaauguccuuuac

SEQ ID NO: 263560 - RNA, 21 nt, Artificial Sequence
  Synthetic
uuuuguuacaauguccuuuac

SEQ ID NO: 263561 - RNA, 22 nt, Artificial Sequence
  Synthetic
auuuuguuacaauguccuuuac

SEQ ID NO: 263562 - RNA, 23 nt, Artificial Sequence
  Synthetic
cauuuuguuacaauguccuuuac

SEQ ID NO: 263563 - RNA, 24 nt, Artificial Sequence
  Synthetic
ucauuuuguuacaauguccuuuac

SEQ ID NO: 263564 - RNA, 18 nt, Artificial Sequence
  Synthetic
guacauaucuuccuuuac

SEQ ID NO: 263565 - RNA, 19 nt, Artificial Sequence
  Synthetic
cguacauaucuuccuuuac

SEQ ID NO: 263566 - RNA, 20 nt, Artificial Sequence
  Synthetic
gcguacauaucuuccuuuac

SEQ ID NO: 263567 - RNA, 21 nt, Artificial Sequence
  Synthetic
agcguacauaucuuccuuuac

SEQ ID NO: 263568 - RNA, 22 nt, Artificial Sequence
  Synthetic
uagcguacauaucuuccuuuac

SEQ ID NO: 263569 - RNA, 23 nt, Artificial Sequence
  Synthetic
auagcguacauaucuuccuuuac

SEQ ID NO: 263570 - RNA, 24 nt, Artificial Sequence
  Synthetic
aauagcguacauaucuuccuuuac

SEQ ID NO: 263571 - RNA, 18 nt, Artificial Sequence
  Synthetic
agguuuccagagcuuuac

SEQ ID NO: 263572 - RNA, 19 nt, Artificial Sequence
  Synthetic
cagguuuccagagcuuuac

SEQ ID NO: 263573 - RNA, 20 nt, Artificial Sequence
  Synthetic
ucagguuuccagagcuuuac

SEQ ID NO: 263574 - RNA, 21 nt, Artificial Sequence
  Synthetic
uucagguuuccagagcuuuac

SEQ ID NO: 263575 - RNA, 22 nt, Artificial Sequence
  Synthetic
uuucagguuuccagagcuuuac

SEQ ID NO: 263576 - RNA, 23 nt, Artificial Sequence
  Synthetic
cuuucagguuuccagagcuuuac

SEQ ID NO: 263577 - RNA, 24 nt, Artificial Sequence
  Synthetic
ccuuucagguuuccagagcuuuac

SEQ ID NO: 263578 - RNA, 18 nt, Artificial Sequence
  Synthetic
cagaguccauugcuuuac

SEQ ID NO: 263579 - RNA, 19 nt, Artificial Sequence
  Synthetic
ccagaguccauugcuuuac

SEQ ID NO: 263580 - RNA, 20 nt, Artificial Sequence
  Synthetic
gccagaguccauugcuuuac

SEQ ID NO: 263581 - RNA, 21 nt, Artificial Sequence
  Synthetic
ugccagaguccauugcuuuac

SEQ ID NO: 263582 - RNA, 22 nt, Artificial Sequence
  Synthetic
augccagaguccauugcuuuac

SEQ ID NO: 263583 - RNA, 23 nt, Artificial Sequence
  Synthetic
caugccagaguccauugcuuuac

SEQ ID NO: 263584 - RNA, 24 nt, Artificial Sequence
  Synthetic
ucaugccagaguccauugcuuuac

SEQ ID NO: 263585 - RNA, 18 nt, Artificial Sequence
  Synthetic
cacggacaccaucuuuac

SEQ ID NO: 263586 - RNA, 19 nt, Artificial Sequence
  Synthetic
ccacggacaccaucuuuac

SEQ ID NO: 263587 - RNA, 20 nt, Artificial Sequence
  Synthetic
accacggacaccaucuuuac

SEQ ID NO: 263588 - RNA, 21 nt, Artificial Sequence
  Synthetic
uaccacggacaccaucuuuac

SEQ ID NO: 263589 - RNA, 22 nt, Artificial Sequence
  Synthetic
auaccacggacaccaucuuuac

SEQ ID NO: 263590 - RNA, 23 nt, Artificial Sequence
  Synthetic
cauaccacggacaccaucuuuac

SEQ ID NO: 263591 - RNA, 24 nt, Artificial Sequence
  Synthetic
acauaccacggacaccaucuuuac

SEQ ID NO: 263592 - RNA, 18 nt, Artificial Sequence
  Synthetic
ucccaagcuuuucuuuac

SEQ ID NO: 263593 - RNA, 19 nt, Artificial Sequence
  Synthetic
gucccaagcuuuucuuuac

SEQ ID NO: 263594 - RNA, 20 nt, Artificial Sequence
  Synthetic
ggucccaagcuuuucuuuac

SEQ ID NO: 263595 - RNA, 21 nt, Artificial Sequence
  Synthetic
gggucccaagcuuuucuuuac

SEQ ID NO: 263596 - RNA, 22 nt, Artificial Sequence
  Synthetic
cgggucccaagcuuuucuuuac

SEQ ID NO: 263597 - RNA, 23 nt, Artificial Sequence
  Synthetic
ucgggucccaagcuuuucuuuac

SEQ ID NO: 263598 - RNA, 24 nt, Artificial Sequence
  Synthetic
aucgggucccaagcuuuucuuuac

SEQ ID NO: 263599 - RNA, 18 nt, Artificial Sequence
  Synthetic
cacaauauaaacguuuac

SEQ ID NO: 263600 - RNA, 19 nt, Artificial Sequence
  Synthetic
ucacaauauaaacguuuac

SEQ ID NO: 263601 - RNA, 20 nt, Artificial Sequence
  Synthetic
aucacaauauaaacguuuac

SEQ ID NO: 263602 - RNA, 21 nt, Artificial Sequence
  Synthetic
uaucacaauauaaacguuuac

SEQ ID NO: 263603 - RNA, 22 nt, Artificial Sequence
  Synthetic
auaucacaauauaaacguuuac

SEQ ID NO: 263604 - RNA, 23 nt, Artificial Sequence
  Synthetic
uauaucacaauauaaacguuuac

SEQ ID NO: 263605 - RNA, 24 nt, Artificial Sequence
  Synthetic
auauaucacaauauaaacguuuac

SEQ ID NO: 263606 - RNA, 18 nt, Artificial Sequence
  Synthetic
acugccucucagguuuac

SEQ ID NO: 263607 - RNA, 19 nt, Artificial Sequence
  Synthetic
gacugccucucagguuuac

SEQ ID NO: 263608 - RNA, 20 nt, Artificial Sequence
  Synthetic
agacugccucucagguuuac

SEQ ID NO: 263609 - RNA, 21 nt, Artificial Sequence
  Synthetic
cagacugccucucagguuuac

SEQ ID NO: 263610 - RNA, 22 nt, Artificial Sequence
  Synthetic
ccagacugccucucagguuuac

SEQ ID NO: 263611 - RNA, 23 nt, Artificial Sequence
  Synthetic
cccagacugccucucagguuuac

SEQ ID NO: 263612 - RNA, 24 nt, Artificial Sequence
  Synthetic
ucccagacugccucucagguuuac

SEQ ID NO: 263613 - RNA, 18 nt, Artificial Sequence
  Synthetic
gaaauaucacauguuuac

SEQ ID NO: 263614 - RNA, 19 nt, Artificial Sequence
  Synthetic
ggaaauaucacauguuuac

SEQ ID NO: 263615 - RNA, 20 nt, Artificial Sequence
  Synthetic
aggaaauaucacauguuuac

SEQ ID NO: 263616 - RNA, 21 nt, Artificial Sequence
  Synthetic
aaggaaauaucacauguuuac

SEQ ID NO: 263617 - RNA, 22 nt, Artificial Sequence
  Synthetic
caaggaaauaucacauguuuac

SEQ ID NO: 263618 - RNA, 23 nt, Artificial Sequence
  Synthetic
acaaggaaauaucacauguuuac

SEQ ID NO: 263619 - RNA, 24 nt, Artificial Sequence
  Synthetic
uacaaggaaauaucacauguuuac

SEQ ID NO: 263620 - RNA, 18 nt, Artificial Sequence
  Synthetic
ccaccugcuucuguuuac

SEQ ID NO: 263621 - RNA, 19 nt, Artificial Sequence
  Synthetic
accaccugcuucuguuuac

SEQ ID NO: 263622 - RNA, 20 nt, Artificial Sequence
  Synthetic
aaccaccugcuucuguuuac

SEQ ID NO: 263623 - RNA, 21 nt, Artificial Sequence
  Synthetic
caaccaccugcuucuguuuac

SEQ ID NO: 263624 - RNA, 22 nt, Artificial Sequence
  Synthetic
ucaaccaccugcuucuguuuac

SEQ ID NO: 263625 - RNA, 23 nt, Artificial Sequence
  Synthetic
cucaaccaccugcuucuguuuac

SEQ ID NO: 263626 - RNA, 24 nt, Artificial Sequence
  Synthetic
ucucaaccaccugcuucuguuuac

SEQ ID NO: 263627 - RNA, 18 nt, Artificial Sequence
  Synthetic
uucuccuuuuaauuuuac

SEQ ID NO: 263628 - RNA, 19 nt, Artificial Sequence
  Synthetic
auucuccuuuuaauuuuac

SEQ ID NO: 263629 - RNA, 20 nt, Artificial Sequence
  Synthetic
uauucuccuuuuaauuuuac

SEQ ID NO: 263630 - RNA, 21 nt, Artificial Sequence
  Synthetic
cuauucuccuuuuaauuuuac

SEQ ID NO: 263631 - RNA, 22 nt, Artificial Sequence
  Synthetic
gcuauucuccuuuuaauuuuac

SEQ ID NO: 263632 - RNA, 23 nt, Artificial Sequence
  Synthetic
ugcuauucuccuuuuaauuuuac

SEQ ID NO: 263633 - RNA, 24 nt, Artificial Sequence
  Synthetic
uugcuauucuccuuuuaauuuuac

SEQ ID NO: 263634 - RNA, 18 nt, Artificial Sequence
  Synthetic
cuugacaucagauuuuac

SEQ ID NO: 263635 - RNA, 19 nt, Artificial Sequence
  Synthetic
acuugacaucagauuuuac

SEQ ID NO: 263636 - RNA, 20 nt, Artificial Sequence
  Synthetic
aacuugacaucagauuuuac

SEQ ID NO: 263637 - RNA, 21 nt, Artificial Sequence
  Synthetic
gaacuugacaucagauuuuac

SEQ ID NO: 263638 - RNA, 22 nt, Artificial Sequence
  Synthetic
agaacuugacaucagauuuuac

SEQ ID NO: 263639 - RNA, 23 nt, Artificial Sequence
  Synthetic
aagaacuugacaucagauuuuac

SEQ ID NO: 263640 - RNA, 24 nt, Artificial Sequence
  Synthetic
caagaacuugacaucagauuuuac

SEQ ID NO: 263641 - RNA, 18 nt, Artificial Sequence
  Synthetic
auuaauuuuagauuuuac

SEQ ID NO: 263642 - RNA, 19 nt, Artificial Sequence
  Synthetic
aauuaauuuuagauuuuac

SEQ ID NO: 263643 - RNA, 20 nt, Artificial Sequence
  Synthetic
aaauuaauuuuagauuuuac

SEQ ID NO: 263644 - RNA, 21 nt, Artificial Sequence
  Synthetic
gaaauuaauuuuagauuuuac

SEQ ID NO: 263645 - RNA, 22 nt, Artificial Sequence
  Synthetic
ugaaauuaauuuuagauuuuac

SEQ ID NO: 263646 - RNA, 23 nt, Artificial Sequence
  Synthetic
uugaaauuaauuuuagauuuuac

SEQ ID NO: 263647 - RNA, 24 nt, Artificial Sequence
  Synthetic
uuugaaauuaauuuuagauuuuac

SEQ ID NO: 263648 - RNA, 18 nt, Artificial Sequence
  Synthetic
gcugaaccuggauuuuac

SEQ ID NO: 263649 - RNA, 19 nt, Artificial Sequence
  Synthetic
ugcugaaccuggauuuuac

SEQ ID NO: 263650 - RNA, 20 nt, Artificial Sequence
  Synthetic
uugcugaaccuggauuuuac

SEQ ID NO: 263651 - RNA, 21 nt, Artificial Sequence
  Synthetic
uuugcugaaccuggauuuuac

SEQ ID NO: 263652 - RNA, 22 nt, Artificial Sequence
  Synthetic
cuuugcugaaccuggauuuuac

SEQ ID NO: 263653 - RNA, 23 nt, Artificial Sequence
  Synthetic
ucuuugcugaaccuggauuuuac

SEQ ID NO: 263654 - RNA, 24 nt, Artificial Sequence
  Synthetic
uucuuugcugaaccuggauuuuac

SEQ ID NO: 263655 - RNA, 18 nt, Artificial Sequence
  Synthetic
guuuauuuaauauuuuac

SEQ ID NO: 263656 - RNA, 19 nt, Artificial Sequence
  Synthetic
uguuuauuuaauauuuuac

SEQ ID NO: 263657 - RNA, 20 nt, Artificial Sequence
  Synthetic
guguuuauuuaauauuuuac

SEQ ID NO: 263658 - RNA, 21 nt, Artificial Sequence
  Synthetic
aguguuuauuuaauauuuuac

SEQ ID NO: 263659 - RNA, 22 nt, Artificial Sequence
  Synthetic
gaguguuuauuuaauauuuuac

SEQ ID NO: 263660 - RNA, 23 nt, Artificial Sequence
  Synthetic
ugaguguuuauuuaauauuuuac

SEQ ID NO: 263661 - RNA, 24 nt, Artificial Sequence
  Synthetic
uugaguguuuauuuaauauuuuac

SEQ ID NO: 263662 - RNA, 18 nt, Artificial Sequence
  Synthetic
acaaagauguuauuuuac

SEQ ID NO: 263663 - RNA, 19 nt, Artificial Sequence
  Synthetic
uacaaagauguuauuuuac

SEQ ID NO: 263664 - RNA, 20 nt, Artificial Sequence
  Synthetic
cuacaaagauguuauuuuac

SEQ ID NO: 263665 - RNA, 21 nt, Artificial Sequence
  Synthetic
ccuacaaagauguuauuuuac

SEQ ID NO: 263666 - RNA, 22 nt, Artificial Sequence
  Synthetic
gccuacaaagauguuauuuuac

SEQ ID NO: 263667 - RNA, 23 nt, Artificial Sequence
  Synthetic
ugccuacaaagauguuauuuuac

SEQ ID NO: 263668 - RNA, 24 nt, Artificial Sequence
  Synthetic
cugccuacaaagauguuauuuuac

SEQ ID NO: 263669 - RNA, 18 nt, Artificial Sequence
  Synthetic
uagugagaauacuuuuac

SEQ ID NO: 263670 - RNA, 19 nt, Artificial Sequence
  Synthetic
cuagugagaauacuuuuac

SEQ ID NO: 263671 - RNA, 20 nt, Artificial Sequence
  Synthetic
acuagugagaauacuuuuac

SEQ ID NO: 263672 - RNA, 21 nt, Artificial Sequence
  Synthetic
uacuagugagaauacuuuuac

SEQ ID NO: 263673 - RNA, 22 nt, Artificial Sequence
  Synthetic
cuacuagugagaauacuuuuac

SEQ ID NO: 263674 - RNA, 23 nt, Artificial Sequence
  Synthetic
gcuacuagugagaauacuuuuac

SEQ ID NO: 263675 - RNA, 24 nt, Artificial Sequence
  Synthetic
ugcuacuagugagaauacuuuuac

SEQ ID NO: 263676 - RNA, 18 nt, Artificial Sequence
  Synthetic
uguuguagcugcuuuuac

SEQ ID NO: 263677 - RNA, 19 nt, Artificial Sequence
  Synthetic
cuguuguagcugcuuuuac

SEQ ID NO: 263678 - RNA, 20 nt, Artificial Sequence
  Synthetic
ucuguuguagcugcuuuuac

SEQ ID NO: 263679 - RNA, 21 nt, Artificial Sequence
  Synthetic
uucuguuguagcugcuuuuac

SEQ ID NO: 263680 - RNA, 22 nt, Artificial Sequence
  Synthetic
uuucuguuguagcugcuuuuac

SEQ ID NO: 263681 - RNA, 23 nt, Artificial Sequence
  Synthetic
auuucuguuguagcugcuuuuac

SEQ ID NO: 263682 - RNA, 24 nt, Artificial Sequence
  Synthetic
uauuucuguuguagcugcuuuuac

SEQ ID NO: 263683 - RNA, 18 nt, Artificial Sequence
  Synthetic
auuucuguucucuuuuac

SEQ ID NO: 263684 - RNA, 19 nt, Artificial Sequence
  Synthetic
aauuucuguucucuuuuac

SEQ ID NO: 263685 - RNA, 20 nt, Artificial Sequence
  Synthetic
uaauuucuguucucuuuuac

SEQ ID NO: 263686 - RNA, 21 nt, Artificial Sequence
  Synthetic
uuaauuucuguucucuuuuac

SEQ ID NO: 263687 - RNA, 22 nt, Artificial Sequence
  Synthetic
uuuaauuucuguucucuuuuac

SEQ ID NO: 263688 - RNA, 23 nt, Artificial Sequence
  Synthetic
uuuuaauuucuguucucuuuuac

SEQ ID NO: 263689 - RNA, 24 nt, Artificial Sequence
  Synthetic
uuuuuaauuucuguucucuuuuac

SEQ ID NO: 263690 - RNA, 18 nt, Artificial Sequence
  Synthetic
uuccccucuuucuuuuac

SEQ ID NO: 263691 - RNA, 19 nt, Artificial Sequence
  Synthetic
uuuccccucuuucuuuuac

SEQ ID NO: 263692 - RNA, 20 nt, Artificial Sequence
  Synthetic
auuuccccucuuucuuuuac

SEQ ID NO: 263693 - RNA, 21 nt, Artificial Sequence
  Synthetic
uauuuccccucuuucuuuuac

SEQ ID NO: 263694 - RNA, 22 nt, Artificial Sequence
  Synthetic
auauuuccccucuuucuuuuac

SEQ ID NO: 263695 - RNA, 23 nt, Artificial Sequence
  Synthetic
cauauuuccccucuuucuuuuac

SEQ ID NO: 263696 - RNA, 24 nt, Artificial Sequence
  Synthetic
acauauuuccccucuuucuuuuac

SEQ ID NO: 263697 - RNA, 18 nt, Artificial Sequence
  Synthetic
ugacuuccuuuguuuuac

SEQ ID NO: 263698 - RNA, 19 nt, Artificial Sequence
  Synthetic
cugacuuccuuuguuuuac

SEQ ID NO: 263699 - RNA, 20 nt, Artificial Sequence
  Synthetic
acugacuuccuuuguuuuac

SEQ ID NO: 263700 - RNA, 21 nt, Artificial Sequence
  Synthetic
aacugacuuccuuuguuuuac

SEQ ID NO: 263701 - RNA, 22 nt, Artificial Sequence
  Synthetic
aaacugacuuccuuuguuuuac

SEQ ID NO: 263702 - RNA, 23 nt, Artificial Sequence
  Synthetic
aaaacugacuuccuuuguuuuac

SEQ ID NO: 263703 - RNA, 24 nt, Artificial Sequence
  Synthetic
aaaaacugacuuccuuuguuuuac

SEQ ID NO: 263704 - RNA, 18 nt, Artificial Sequence
  Synthetic
aaccucauauauuuuuac

SEQ ID NO: 263705 - RNA, 19 nt, Artificial Sequence
  Synthetic
caaccucauauauuuuuac

SEQ ID NO: 263706 - RNA, 20 nt, Artificial Sequence
  Synthetic
acaaccucauauauuuuuac

SEQ ID NO: 263707 - RNA, 21 nt, Artificial Sequence
  Synthetic
aacaaccucauauauuuuuac

SEQ ID NO: 263708 - RNA, 22 nt, Artificial Sequence
  Synthetic
aaacaaccucauauauuuuuac

SEQ ID NO: 263709 - RNA, 23 nt, Artificial Sequence
  Synthetic
aaaacaaccucauauauuuuuac

SEQ ID NO: 263710 - RNA, 24 nt, Artificial Sequence
  Synthetic
aaaaacaaccucauauauuuuuac

SEQ ID NO: 263711 - RNA, 18 nt, Artificial Sequence
  Synthetic
ccaugcuauucuuuuuac

SEQ ID NO: 263712 - RNA, 19 nt, Artificial Sequence
  Synthetic
cccaugcuauucuuuuuac

SEQ ID NO: 263713 - RNA, 20 nt, Artificial Sequence
  Synthetic
ucccaugcuauucuuuuuac

SEQ ID NO: 263714 - RNA, 21 nt, Artificial Sequence
  Synthetic
uucccaugcuauucuuuuuac

SEQ ID NO: 263715 - RNA, 22 nt, Artificial Sequence
  Synthetic
auucccaugcuauucuuuuuac

SEQ ID NO: 263716 - RNA, 23 nt, Artificial Sequence
  Synthetic
cauucccaugcuauucuuuuuac

SEQ ID NO: 263717 - RNA, 24 nt, Artificial Sequence
  Synthetic
ccauucccaugcuauucuuuuuac

SEQ ID NO: 263718 - RNA, 18 nt, Artificial Sequence
  Synthetic
uuugaaaauauuuuuuac

SEQ ID NO: 263719 - RNA, 19 nt, Artificial Sequence
  Synthetic
cuuugaaaauauuuuuuac

SEQ ID NO: 263720 - RNA, 20 nt, Artificial Sequence
  Synthetic
ucuuugaaaauauuuuuuac

SEQ ID NO: 263721 - RNA, 21 nt, Artificial Sequence
  Synthetic
aucuuugaaaauauuuuuuac

SEQ ID NO: 263722 - RNA, 22 nt, Artificial Sequence
  Synthetic
aaucuuugaaaauauuuuuuac

SEQ ID NO: 263723 - RNA, 23 nt, Artificial Sequence
  Synthetic
uaaucuuugaaaauauuuuuuac

SEQ ID NO: 263724 - RNA, 24 nt, Artificial Sequence
  Synthetic
uuaaucuuugaaaauauuuuuuac

SEQ ID NO: 263725 - RNA, 18 nt, Artificial Sequence
  Synthetic
uguguggauguuuuuuac

SEQ ID NO: 263726 - RNA, 19 nt, Artificial Sequence
  Synthetic
uuguguggauguuuuuuac

SEQ ID NO: 263727 - RNA, 20 nt, Artificial Sequence
  Synthetic
uuuguguggauguuuuuuac

SEQ ID NO: 263728 - RNA, 21 nt, Artificial Sequence
  Synthetic
uuuuguguggauguuuuuuac

SEQ ID NO: 263729 - RNA, 22 nt, Artificial Sequence
  Synthetic
guuuuguguggauguuuuuuac

SEQ ID NO: 263730 - RNA, 23 nt, Artificial Sequence
  Synthetic
uguuuuguguggauguuuuuuac

SEQ ID NO: 263731 - RNA, 24 nt, Artificial Sequence
  Synthetic
guguuuuguguggauguuuuuuac

SEQ ID NO: 263732 - RNA, 18 nt, Artificial Sequence
  Synthetic
aauaucccauuuuuuuac

SEQ ID NO: 263733 - RNA, 19 nt, Artificial Sequence
  Synthetic
aaauaucccauuuuuuuac

SEQ ID NO: 263734 - RNA, 20 nt, Artificial Sequence
  Synthetic
aaaauaucccauuuuuuuac

SEQ ID NO: 263735 - RNA, 21 nt, Artificial Sequence
  Synthetic
aaaaauaucccauuuuuuuac

SEQ ID NO: 263736 - RNA, 22 nt, Artificial Sequence
  Synthetic
uaaaaauaucccauuuuuuuac

SEQ ID NO: 263737 - RNA, 23 nt, Artificial Sequence
  Synthetic
cuaaaaauaucccauuuuuuuac

SEQ ID NO: 263738 - RNA, 24 nt, Artificial Sequence
  Synthetic
ucuaaaaauaucccauuuuuuuac

SEQ ID NO: 263739 - RNA, 18 nt, Artificial Sequence
  Synthetic
cuuucagcuuaaaaaacc

SEQ ID NO: 263740 - RNA, 19 nt, Artificial Sequence
  Synthetic
acuuucagcuuaaaaaacc

SEQ ID NO: 263741 - RNA, 20 nt, Artificial Sequence
  Synthetic
cacuuucagcuuaaaaaacc

SEQ ID NO: 263742 - RNA, 21 nt, Artificial Sequence
  Synthetic
acacuuucagcuuaaaaaacc

SEQ ID NO: 263743 - RNA, 22 nt, Artificial Sequence
  Synthetic
uacacuuucagcuuaaaaaacc

SEQ ID NO: 263744 - RNA, 23 nt, Artificial Sequence
  Synthetic
cuacacuuucagcuuaaaaaacc

SEQ ID NO: 263745 - RNA, 24 nt, Artificial Sequence
  Synthetic
ucuacacuuucagcuuaaaaaacc

SEQ ID NO: 263746 - RNA, 18 nt, Artificial Sequence
  Synthetic
ccacuccuaucaaaaacc

SEQ ID NO: 263747 - RNA, 19 nt, Artificial Sequence
  Synthetic
cccacuccuaucaaaaacc

SEQ ID NO: 263748 - RNA, 20 nt, Artificial Sequence
  Synthetic
ucccacuccuaucaaaaacc

SEQ ID NO: 263749 - RNA, 21 nt, Artificial Sequence
  Synthetic
aucccacuccuaucaaaaacc

SEQ ID NO: 263750 - RNA, 22 nt, Artificial Sequence
  Synthetic
aaucccacuccuaucaaaaacc

SEQ ID NO: 263751 - RNA, 23 nt, Artificial Sequence
  Synthetic
caaucccacuccuaucaaaaacc

SEQ ID NO: 263752 - RNA, 24 nt, Artificial Sequence
  Synthetic
gcaaucccacuccuaucaaaaacc

SEQ ID NO: 263753 - RNA, 18 nt, Artificial Sequence
  Synthetic
ucuuucuccugaaaaacc

SEQ ID NO: 263754 - RNA, 19 nt, Artificial Sequence
  Synthetic
uucuuucuccugaaaaacc

SEQ ID NO: 263755 - RNA, 20 nt, Artificial Sequence
  Synthetic
uuucuuucuccugaaaaacc

SEQ ID NO: 263756 - RNA, 21 nt, Artificial Sequence
  Synthetic
auuucuuucuccugaaaaacc

SEQ ID NO: 263757 - RNA, 22 nt, Artificial Sequence
  Synthetic
uauuucuuucuccugaaaaacc

SEQ ID NO: 263758 - RNA, 23 nt, Artificial Sequence
  Synthetic
cuauuucuuucuccugaaaaacc

SEQ ID NO: 263759 - RNA, 24 nt, Artificial Sequence
  Synthetic
ccuauuucuuucuccugaaaaacc

SEQ ID NO: 263760 - RNA, 18 nt, Artificial Sequence
  Synthetic
augcacaauauaaaaacc

SEQ ID NO: 263761 - RNA, 19 nt, Artificial Sequence
  Synthetic
uaugcacaauauaaaaacc

SEQ ID NO: 263762 - RNA, 20 nt, Artificial Sequence
  Synthetic
cuaugcacaauauaaaaacc

SEQ ID NO: 263763 - RNA, 21 nt, Artificial Sequence
  Synthetic
gcuaugcacaauauaaaaacc

SEQ ID NO: 263764 - RNA, 22 nt, Artificial Sequence
  Synthetic
agcuaugcacaauauaaaaacc

SEQ ID NO: 263765 - RNA, 23 nt, Artificial Sequence
  Synthetic
uagcuaugcacaauauaaaaacc

SEQ ID NO: 263766 - RNA, 24 nt, Artificial Sequence
  Synthetic
auagcuaugcacaauauaaaaacc

SEQ ID NO: 263767 - RNA, 18 nt, Artificial Sequence
  Synthetic
ucuccaauauuaaaaacc

SEQ ID NO: 263768 - RNA, 19 nt, Artificial Sequence
  Synthetic
uucuccaauauuaaaaacc

SEQ ID NO: 263769 - RNA, 20 nt, Artificial Sequence
  Synthetic
guucuccaauauuaaaaacc

SEQ ID NO: 263770 - RNA, 21 nt, Artificial Sequence
  Synthetic
uguucuccaauauuaaaaacc

SEQ ID NO: 263771 - RNA, 22 nt, Artificial Sequence
  Synthetic
uuguucuccaauauuaaaaacc

SEQ ID NO: 263772 - RNA, 23 nt, Artificial Sequence
  Synthetic
auuguucuccaauauuaaaaacc

SEQ ID NO: 263773 - RNA, 24 nt, Artificial Sequence
  Synthetic
aauuguucuccaauauuaaaaacc

SEQ ID NO: 263774 - RNA, 18 nt, Artificial Sequence
  Synthetic
ugaggacaauacaaaacc

SEQ ID NO: 263775 - RNA, 19 nt, Artificial Sequence
  Synthetic
cugaggacaauacaaaacc

SEQ ID NO: 263776 - RNA, 20 nt, Artificial Sequence
  Synthetic
acugaggacaauacaaaacc

SEQ ID NO: 263777 - RNA, 21 nt, Artificial Sequence
  Synthetic
cacugaggacaauacaaaacc

SEQ ID NO: 263778 - RNA, 22 nt, Artificial Sequence
  Synthetic
acacugaggacaauacaaaacc

SEQ ID NO: 263779 - RNA, 23 nt, Artificial Sequence
  Synthetic
uacacugaggacaauacaaaacc

SEQ ID NO: 263780 - RNA, 24 nt, Artificial Sequence
  Synthetic
cuacacugaggacaauacaaaacc

SEQ ID NO: 263781 - RNA, 18 nt, Artificial Sequence
  Synthetic
cauucgugaaagaaaacc

SEQ ID NO: 263782 - RNA, 19 nt, Artificial Sequence
  Synthetic
gcauucgugaaagaaaacc

SEQ ID NO: 263783 - RNA, 20 nt, Artificial Sequence
  Synthetic
ugcauucgugaaagaaaacc

SEQ ID NO: 263784 - RNA, 21 nt, Artificial Sequence
  Synthetic
uugcauucgugaaagaaaacc

SEQ ID NO: 263785 - RNA, 22 nt, Artificial Sequence
  Synthetic
cuugcauucgugaaagaaaacc

SEQ ID NO: 263786 - RNA, 23 nt, Artificial Sequence
  Synthetic
gcuugcauucgugaaagaaaacc

SEQ ID NO: 263787 - RNA, 24 nt, Artificial Sequence
  Synthetic
ugcuugcauucgugaaagaaaacc

SEQ ID NO: 263788 - RNA, 18 nt, Artificial Sequence
  Synthetic
gaaucgcagaagaaaacc

SEQ ID NO: 263789 - RNA, 19 nt, Artificial Sequence
  Synthetic
agaaucgcagaagaaaacc

SEQ ID NO: 263790 - RNA, 20 nt, Artificial Sequence
  Synthetic
aagaaucgcagaagaaaacc

SEQ ID NO: 263791 - RNA, 21 nt, Artificial Sequence
  Synthetic
gaagaaucgcagaagaaaacc

SEQ ID NO: 263792 - RNA, 22 nt, Artificial Sequence
  Synthetic
agaagaaucgcagaagaaaacc

SEQ ID NO: 263793 - RNA, 23 nt, Artificial Sequence
  Synthetic
uagaagaaucgcagaagaaaacc

SEQ ID NO: 263794 - RNA, 24 nt, Artificial Sequence
  Synthetic
cuagaagaaucgcagaagaaaacc

SEQ ID NO: 263795 - RNA, 18 nt, Artificial Sequence
  Synthetic
uauugugcagagaaaacc

SEQ ID NO: 263796 - RNA, 19 nt, Artificial Sequence
  Synthetic
uuauugugcagagaaaacc

SEQ ID NO: 263797 - RNA, 20 nt, Artificial Sequence
  Synthetic
auuauugugcagagaaaacc

SEQ ID NO: 263798 - RNA, 21 nt, Artificial Sequence
  Synthetic
gauuauugugcagagaaaacc

SEQ ID NO: 263799 - RNA, 22 nt, Artificial Sequence
  Synthetic
ggauuauugugcagagaaaacc

SEQ ID NO: 263800 - RNA, 23 nt, Artificial Sequence
  Synthetic
aggauuauugugcagagaaaacc

SEQ ID NO: 263801 - RNA, 24 nt, Artificial Sequence
  Synthetic
uaggauuauugugcagagaaaacc

SEQ ID NO: 263802 - RNA, 18 nt, Artificial Sequence
  Synthetic
gcucgucacgagaaaacc

SEQ ID NO: 263803 - RNA, 19 nt, Artificial Sequence
  Synthetic
ggcucgucacgagaaaacc

SEQ ID NO: 263804 - RNA, 20 nt, Artificial Sequence
  Synthetic
uggcucgucacgagaaaacc

SEQ ID NO: 263805 - RNA, 21 nt, Artificial Sequence
  Synthetic
uuggcucgucacgagaaaacc

SEQ ID NO: 263806 - RNA, 22 nt, Artificial Sequence
  Synthetic
cuuggcucgucacgagaaaacc

SEQ ID NO: 263807 - RNA, 23 nt, Artificial Sequence
  Synthetic
ccuuggcucgucacgagaaaacc

SEQ ID NO: 263808 - RNA, 24 nt, Artificial Sequence
  Synthetic
gccuuggcucgucacgagaaaacc

SEQ ID NO: 263809 - RNA, 18 nt, Artificial Sequence
  Synthetic
uaguuugcugagaaaacc

SEQ ID NO: 263810 - RNA, 19 nt, Artificial Sequence
  Synthetic
auaguuugcugagaaaacc

SEQ ID NO: 263811 - RNA, 20 nt, Artificial Sequence
  Synthetic
gauaguuugcugagaaaacc

SEQ ID NO: 263812 - RNA, 21 nt, Artificial Sequence
  Synthetic
cgauaguuugcugagaaaacc

SEQ ID NO: 263813 - RNA, 22 nt, Artificial Sequence
  Synthetic
gcgauaguuugcugagaaaacc

SEQ ID NO: 263814 - RNA, 23 nt, Artificial Sequence
  Synthetic
ugcgauaguuugcugagaaaacc

SEQ ID NO: 263815 - RNA, 24 nt, Artificial Sequence
  Synthetic
uugcgauaguuugcugagaaaacc

SEQ ID NO: 263816 - RNA, 18 nt, Artificial Sequence
  Synthetic
gcucuugugcggaaaacc

SEQ ID NO: 263817 - RNA, 19 nt, Artificial Sequence
  Synthetic
agcucuugugcggaaaacc

SEQ ID NO: 263818 - RNA, 20 nt, Artificial Sequence
  Synthetic
gagcucuugugcggaaaacc

SEQ ID NO: 263819 - RNA, 21 nt, Artificial Sequence
  Synthetic
ggagcucuugugcggaaaacc

SEQ ID NO: 263820 - RNA, 22 nt, Artificial Sequence
  Synthetic
uggagcucuugugcggaaaacc

SEQ ID NO: 263821 - RNA, 23 nt, Artificial Sequence
  Synthetic
uuggagcucuugugcggaaaacc

SEQ ID NO: 263822 - RNA, 24 nt, Artificial Sequence
  Synthetic
uuuggagcucuugugcggaaaacc

SEQ ID NO: 263823 - RNA, 18 nt, Artificial Sequence
  Synthetic
acagucugcuugaaaacc

SEQ ID NO: 263824 - RNA, 19 nt, Artificial Sequence
  Synthetic
aacagucugcuugaaaacc

SEQ ID NO: 263825 - RNA, 20 nt, Artificial Sequence
  Synthetic
gaacagucugcuugaaaacc

SEQ ID NO: 263826 - RNA, 21 nt, Artificial Sequence
  Synthetic
agaacagucugcuugaaaacc

SEQ ID NO: 263827 - RNA, 22 nt, Artificial Sequence
  Synthetic
cagaacagucugcuugaaaacc

SEQ ID NO: 263828 - RNA, 23 nt, Artificial Sequence
  Synthetic
ccagaacagucugcuugaaaacc

SEQ ID NO: 263829 - RNA, 24 nt, Artificial Sequence
  Synthetic
accagaacagucugcuugaaaacc

SEQ ID NO: 263830 - RNA, 18 nt, Artificial Sequence
  Synthetic
gcaaucacacuuaaaacc

SEQ ID NO: 263831 - RNA, 19 nt, Artificial Sequence
  Synthetic
agcaaucacacuuaaaacc

SEQ ID NO: 263832 - RNA, 20 nt, Artificial Sequence
  Synthetic
uagcaaucacacuuaaaacc

SEQ ID NO: 263833 - RNA, 21 nt, Artificial Sequence
  Synthetic
cuagcaaucacacuuaaaacc

SEQ ID NO: 263834 - RNA, 22 nt, Artificial Sequence
  Synthetic
ucuagcaaucacacuuaaaacc

SEQ ID NO: 263835 - RNA, 23 nt, Artificial Sequence
  Synthetic
uucuagcaaucacacuuaaaacc

SEQ ID NO: 263836 - RNA, 24 nt, Artificial Sequence
  Synthetic
uuucuagcaaucacacuuaaaacc

SEQ ID NO: 263837 - RNA, 18 nt, Artificial Sequence
  Synthetic
uaaugagaacuacaaacc

SEQ ID NO: 263838 - RNA, 19 nt, Artificial Sequence
  Synthetic
auaaugagaacuacaaacc

SEQ ID NO: 263839 - RNA, 20 nt, Artificial Sequence
  Synthetic
gauaaugagaacuacaaacc

SEQ ID NO: 263840 - RNA, 21 nt, Artificial Sequence
  Synthetic
ugauaaugagaacuacaaacc

SEQ ID NO: 263841 - RNA, 22 nt, Artificial Sequence
  Synthetic
cugauaaugagaacuacaaacc

SEQ ID NO: 263842 - RNA, 23 nt, Artificial Sequence
  Synthetic
gcugauaaugagaacuacaaacc

SEQ ID NO: 263843 - RNA, 24 nt, Artificial Sequence
  Synthetic
ugcugauaaugagaacuacaaacc

SEQ ID NO: 263844 - RNA, 18 nt, Artificial Sequence
  Synthetic
uggucuagagaccaaacc

SEQ ID NO: 263845 - RNA, 19 nt, Artificial Sequence
  Synthetic
uuggucuagagaccaaacc

SEQ ID NO: 263846 - RNA, 20 nt, Artificial Sequence
  Synthetic
auuggucuagagaccaaacc

SEQ ID NO: 263847 - RNA, 21 nt, Artificial Sequence
  Synthetic
cauuggucuagagaccaaacc

SEQ ID NO: 263848 - RNA, 22 nt, Artificial Sequence
  Synthetic
gcauuggucuagagaccaaacc

SEQ ID NO: 263849 - RNA, 23 nt, Artificial Sequence
  Synthetic
ggcauuggucuagagaccaaacc

SEQ ID NO: 263850 - RNA, 24 nt, Artificial Sequence
  Synthetic
uggcauuggucuagagaccaaacc

SEQ ID NO: 263851 - RNA, 18 nt, Artificial Sequence
  Synthetic
ugguccucagggcaaacc

SEQ ID NO: 263852 - RNA, 19 nt, Artificial Sequence
  Synthetic
gugguccucagggcaaacc

SEQ ID NO: 263853 - RNA, 20 nt, Artificial Sequence
  Synthetic
ugugguccucagggcaaacc

SEQ ID NO: 263854 - RNA, 21 nt, Artificial Sequence
  Synthetic
uugugguccucagggcaaacc

SEQ ID NO: 263855 - RNA, 22 nt, Artificial Sequence
  Synthetic
auugugguccucagggcaaacc

SEQ ID NO: 263856 - RNA, 23 nt, Artificial Sequence
  Synthetic
aauugugguccucagggcaaacc

SEQ ID NO: 263857 - RNA, 24 nt, Artificial Sequence
  Synthetic
aaauugugguccucagggcaaacc

SEQ ID NO: 263858 - RNA, 18 nt, Artificial Sequence
  Synthetic
caagcagcaguucaaacc

SEQ ID NO: 263859 - RNA, 19 nt, Artificial Sequence
  Synthetic
ccaagcagcaguucaaacc

SEQ ID NO: 263860 - RNA, 20 nt, Artificial Sequence
  Synthetic
cccaagcagcaguucaaacc

SEQ ID NO: 263861 - RNA, 21 nt, Artificial Sequence
  Synthetic
ccccaagcagcaguucaaacc

SEQ ID NO: 263862 - RNA, 22 nt, Artificial Sequence
  Synthetic
gccccaagcagcaguucaaacc

SEQ ID NO: 263863 - RNA, 23 nt, Artificial Sequence
  Synthetic
agccccaagcagcaguucaaacc

SEQ ID NO: 263864 - RNA, 24 nt, Artificial Sequence
  Synthetic
aagccccaagcagcaguucaaacc

SEQ ID NO: 263865 - RNA, 18 nt, Artificial Sequence
  Synthetic
caagugaagaaagaaacc

SEQ ID NO: 263866 - RNA, 19 nt, Artificial Sequence
  Synthetic
ccaagugaagaaagaaacc

SEQ ID NO: 263867 - RNA, 20 nt, Artificial Sequence
  Synthetic
accaagugaagaaagaaacc

SEQ ID NO: 263868 - RNA, 21 nt, Artificial Sequence
  Synthetic
uaccaagugaagaaagaaacc

SEQ ID NO: 263869 - RNA, 22 nt, Artificial Sequence
  Synthetic
cuaccaagugaagaaagaaacc

SEQ ID NO: 263870 - RNA, 23 nt, Artificial Sequence
  Synthetic
ucuaccaagugaagaaagaaacc

SEQ ID NO: 263871 - RNA, 24 nt, Artificial Sequence
  Synthetic
cucuaccaagugaagaaagaaacc

SEQ ID NO: 263872 - RNA, 18 nt, Artificial Sequence
  Synthetic
uuuaaaaaacaagaaacc

SEQ ID NO: 263873 - RNA, 19 nt, Artificial Sequence
  Synthetic
uuuuaaaaaacaagaaacc

SEQ ID NO: 263874 - RNA, 20 nt, Artificial Sequence
  Synthetic
auuuuaaaaaacaagaaacc

SEQ ID NO: 263875 - RNA, 21 nt, Artificial Sequence
  Synthetic
aauuuuaaaaaacaagaaacc

SEQ ID NO: 263876 - RNA, 22 nt, Artificial Sequence
  Synthetic
uaauuuuaaaaaacaagaaacc

SEQ ID NO: 263877 - RNA, 23 nt, Artificial Sequence
  Synthetic
uuaauuuuaaaaaacaagaaacc

SEQ ID NO: 263878 - RNA, 24 nt, Artificial Sequence
  Synthetic
uuuaauuuuaaaaaacaagaaacc

SEQ ID NO: 263879 - RNA, 18 nt, Artificial Sequence
  Synthetic
gacacagagagagaaacc

SEQ ID NO: 263880 - RNA, 19 nt, Artificial Sequence
  Synthetic
agacacagagagagaaacc

SEQ ID NO: 263881 - RNA, 20 nt, Artificial Sequence
  Synthetic
cagacacagagagagaaacc

SEQ ID NO: 263882 - RNA, 21 nt, Artificial Sequence
  Synthetic
ucagacacagagagagaaacc

SEQ ID NO: 263883 - RNA, 22 nt, Artificial Sequence
  Synthetic
gucagacacagagagagaaacc

SEQ ID NO: 263884 - RNA, 23 nt, Artificial Sequence
  Synthetic
ugucagacacagagagagaaacc

SEQ ID NO: 263885 - RNA, 24 nt, Artificial Sequence
  Synthetic
cugucagacacagagagagaaacc

SEQ ID NO: 263886 - RNA, 18 nt, Artificial Sequence
  Synthetic
uuauaaauuauagaaacc

SEQ ID NO: 263887 - RNA, 19 nt, Artificial Sequence
  Synthetic
guuauaaauuauagaaacc

SEQ ID NO: 263888 - RNA, 20 nt, Artificial Sequence
  Synthetic
uguuauaaauuauagaaacc

SEQ ID NO: 263889 - RNA, 21 nt, Artificial Sequence
  Synthetic
auguuauaaauuauagaaacc

SEQ ID NO: 263890 - RNA, 22 nt, Artificial Sequence
  Synthetic
gauguuauaaauuauagaaacc

SEQ ID NO: 263891 - RNA, 23 nt, Artificial Sequence
  Synthetic
ugauguuauaaauuauagaaacc

SEQ ID NO: 263892 - RNA, 24 nt, Artificial Sequence
  Synthetic
augauguuauaaauuauagaaacc

SEQ ID NO: 263893 - RNA, 18 nt, Artificial Sequence
  Synthetic
uaucaaagccaggaaacc

SEQ ID NO: 263894 - RNA, 19 nt, Artificial Sequence
  Synthetic
auaucaaagccaggaaacc

SEQ ID NO: 263895 - RNA, 20 nt, Artificial Sequence
  Synthetic
aauaucaaagccaggaaacc

SEQ ID NO: 263896 - RNA, 21 nt, Artificial Sequence
  Synthetic
uaauaucaaagccaggaaacc

SEQ ID NO: 263897 - RNA, 22 nt, Artificial Sequence
  Synthetic
guaauaucaaagccaggaaacc

SEQ ID NO: 263898 - RNA, 23 nt, Artificial Sequence
  Synthetic
uguaauaucaaagccaggaaacc

SEQ ID NO: 263899 - RNA, 24 nt, Artificial Sequence
  Synthetic
auguaauaucaaagccaggaaacc

SEQ ID NO: 263900 - RNA, 18 nt, Artificial Sequence
  Synthetic
uuuucaaacucggaaacc

SEQ ID NO: 263901 - RNA, 19 nt, Artificial Sequence
  Synthetic
cuuuucaaacucggaaacc

SEQ ID NO: 263902 - RNA, 20 nt, Artificial Sequence
  Synthetic
acuuuucaaacucggaaacc

SEQ ID NO: 263903 - RNA, 21 nt, Artificial Sequence
  Synthetic
gacuuuucaaacucggaaacc

SEQ ID NO: 263904 - RNA, 22 nt, Artificial Sequence
  Synthetic
agacuuuucaaacucggaaacc

SEQ ID NO: 263905 - RNA, 23 nt, Artificial Sequence
  Synthetic
uagacuuuucaaacucggaaacc

SEQ ID NO: 263906 - RNA, 24 nt, Artificial Sequence
  Synthetic
uuagacuuuucaaacucggaaacc

SEQ ID NO: 263907 - RNA, 18 nt, Artificial Sequence
  Synthetic
aagcccucaagggaaacc

SEQ ID NO: 263908 - RNA, 19 nt, Artificial Sequence
  Synthetic
aaagcccucaagggaaacc

SEQ ID NO: 263909 - RNA, 20 nt, Artificial Sequence
  Synthetic
caaagcccucaagggaaacc

SEQ ID NO: 263910 - RNA, 21 nt, Artificial Sequence
  Synthetic
ucaaagcccucaagggaaacc

SEQ ID NO: 263911 - RNA, 22 nt, Artificial Sequence
  Synthetic
uucaaagcccucaagggaaacc

SEQ ID NO: 263912 - RNA, 23 nt, Artificial Sequence
  Synthetic
uuucaaagcccucaagggaaacc

SEQ ID NO: 263913 - RNA, 24 nt, Artificial Sequence
  Synthetic
auuucaaagcccucaagggaaacc

SEQ ID NO: 263914 - RNA, 18 nt, Artificial Sequence
  Synthetic
cacuuuucauaugaaacc

SEQ ID NO: 263915 - RNA, 19 nt, Artificial Sequence
  Synthetic
ccacuuuucauaugaaacc

SEQ ID NO: 263916 - RNA, 20 nt, Artificial Sequence
  Synthetic
uccacuuuucauaugaaacc

SEQ ID NO: 263917 - RNA, 21 nt, Artificial Sequence
  Synthetic
auccacuuuucauaugaaacc

SEQ ID NO: 263918 - RNA, 22 nt, Artificial Sequence
  Synthetic
cauccacuuuucauaugaaacc

SEQ ID NO: 263919 - RNA, 23 nt, Artificial Sequence
  Synthetic
acauccacuuuucauaugaaacc

SEQ ID NO: 263920 - RNA, 24 nt, Artificial Sequence
  Synthetic
aacauccacuuuucauaugaaacc

SEQ ID NO: 263921 - RNA, 18 nt, Artificial Sequence
  Synthetic
agcauuuacagugaaacc

SEQ ID NO: 263922 - RNA, 19 nt, Artificial Sequence
  Synthetic
gagcauuuacagugaaacc

SEQ ID NO: 263923 - RNA, 20 nt, Artificial Sequence
  Synthetic
ugagcauuuacagugaaacc

SEQ ID NO: 263924 - RNA, 21 nt, Artificial Sequence
  Synthetic
cugagcauuuacagugaaacc

SEQ ID NO: 263925 - RNA, 22 nt, Artificial Sequence
  Synthetic
ccugagcauuuacagugaaacc

SEQ ID NO: 263926 - RNA, 23 nt, Artificial Sequence
  Synthetic
accugagcauuuacagugaaacc

SEQ ID NO: 263927 - RNA, 24 nt, Artificial Sequence
  Synthetic
uaccugagcauuuacagugaaacc

SEQ ID NO: 263928 - RNA, 18 nt, Artificial Sequence
  Synthetic
uauguuucaugugaaacc

SEQ ID NO: 263929 - RNA, 19 nt, Artificial Sequence
  Synthetic
auauguuucaugugaaacc

SEQ ID NO: 263930 - RNA, 20 nt, Artificial Sequence
  Synthetic
cauauguuucaugugaaacc

SEQ ID NO: 263931 - RNA, 21 nt, Artificial Sequence
  Synthetic
acauauguuucaugugaaacc

SEQ ID NO: 263932 - RNA, 22 nt, Artificial Sequence
  Synthetic
gacauauguuucaugugaaacc

SEQ ID NO: 263933 - RNA, 23 nt, Artificial Sequence
  Synthetic
agacauauguuucaugugaaacc

SEQ ID NO: 263934 - RNA, 24 nt, Artificial Sequence
  Synthetic
aagacauauguuucaugugaaacc

SEQ ID NO: 263935 - RNA, 18 nt, Artificial Sequence
  Synthetic
acauggggacaauaaacc

SEQ ID NO: 263936 - RNA, 19 nt, Artificial Sequence
  Synthetic
cacauggggacaauaaacc

SEQ ID NO: 263937 - RNA, 20 nt, Artificial Sequence
  Synthetic
ucacauggggacaauaaacc

SEQ ID NO: 263938 - RNA, 21 nt, Artificial Sequence
  Synthetic
cucacauggggacaauaaacc

SEQ ID NO: 263939 - RNA, 22 nt, Artificial Sequence
  Synthetic
ucucacauggggacaauaaacc

SEQ ID NO: 263940 - RNA, 23 nt, Artificial Sequence
  Synthetic
uucucacauggggacaauaaacc

SEQ ID NO: 263941 - RNA, 24 nt, Artificial Sequence
  Synthetic
uuucucacauggggacaauaaacc

SEQ ID NO: 263942 - RNA, 18 nt, Artificial Sequence
  Synthetic
ucagccuuccuauaaacc

SEQ ID NO: 263943 - RNA, 19 nt, Artificial Sequence
  Synthetic
cucagccuuccuauaaacc

SEQ ID NO: 263944 - RNA, 20 nt, Artificial Sequence
  Synthetic
acucagccuuccuauaaacc

SEQ ID NO: 263945 - RNA, 21 nt, Artificial Sequence
  Synthetic
cacucagccuuccuauaaacc

SEQ ID NO: 263946 - RNA, 22 nt, Artificial Sequence
  Synthetic
gcacucagccuuccuauaaacc

SEQ ID NO: 263947 - RNA, 23 nt, Artificial Sequence
  Synthetic
agcacucagccuuccuauaaacc

SEQ ID NO: 263948 - RNA, 24 nt, Artificial Sequence
  Synthetic
uagcacucagccuuccuauaaacc

SEQ ID NO: 263949 - RNA, 18 nt, Artificial Sequence
  Synthetic
cccucccaagacuaaacc

SEQ ID NO: 263950 - RNA, 19 nt, Artificial Sequence
  Synthetic
acccucccaagacuaaacc

SEQ ID NO: 263951 - RNA, 20 nt, Artificial Sequence
  Synthetic
cacccucccaagacuaaacc

SEQ ID NO: 263952 - RNA, 18 nt, Artificial Sequence
  Synthetic
cucucccaagacuaaacc

SEQ ID NO: 263953 - RNA, 19 nt, Artificial Sequence
  Synthetic
acucucccaagacuaaacc

SEQ ID NO: 263954 - RNA, 20 nt, Artificial Sequence
  Synthetic
cacucucccaagacuaaacc

SEQ ID NO: 263955 - RNA, 21 nt, Artificial Sequence
  Synthetic
acacucucccaagacuaaacc

SEQ ID NO: 263956 - RNA, 22 nt, Artificial Sequence
  Synthetic
uacacucucccaagacuaaacc

SEQ ID NO: 263957 - RNA, 23 nt, Artificial Sequence
  Synthetic
auacacucucccaagacuaaacc

SEQ ID NO: 263958 - RNA, 24 nt, Artificial Sequence
  Synthetic
cauacacucucccaagacuaaacc

SEQ ID NO: 263959 - RNA, 18 nt, Artificial Sequence
  Synthetic
aagcuaauauccuaaacc

SEQ ID NO: 263960 - RNA, 19 nt, Artificial Sequence
  Synthetic
caagcuaauauccuaaacc

SEQ ID NO: 263961 - RNA, 20 nt, Artificial Sequence
  Synthetic
ucaagcuaauauccuaaacc

SEQ ID NO: 263962 - RNA, 21 nt, Artificial Sequence
  Synthetic
cucaagcuaauauccuaaacc

SEQ ID NO: 263963 - RNA, 22 nt, Artificial Sequence
  Synthetic
acucaagcuaauauccuaaacc

SEQ ID NO: 263964 - RNA, 23 nt, Artificial Sequence
  Synthetic
uacucaagcuaauauccuaaacc

SEQ ID NO: 263965 - RNA, 24 nt, Artificial Sequence
  Synthetic
cuacucaagcuaauauccuaaacc

SEQ ID NO: 263966 - RNA, 18 nt, Artificial Sequence
  Synthetic
ccuuuuauuagcuaaacc

SEQ ID NO: 263967 - RNA, 19 nt, Artificial Sequence
  Synthetic
gccuuuuauuagcuaaacc

SEQ ID NO: 263968 - RNA, 20 nt, Artificial Sequence
  Synthetic
ggccuuuuauuagcuaaacc

SEQ ID NO: 263969 - RNA, 21 nt, Artificial Sequence
  Synthetic
uggccuuuuauuagcuaaacc

SEQ ID NO: 263970 - RNA, 22 nt, Artificial Sequence
  Synthetic
guggccuuuuauuagcuaaacc

SEQ ID NO: 263971 - RNA, 23 nt, Artificial Sequence
  Synthetic
uguggccuuuuauuagcuaaacc

SEQ ID NO: 263972 - RNA, 24 nt, Artificial Sequence
  Synthetic
auguggccuuuuauuagcuaaacc

SEQ ID NO: 263973 - RNA, 18 nt, Artificial Sequence
  Synthetic
cuaacacuuagcuaaacc

SEQ ID NO: 263974 - RNA, 19 nt, Artificial Sequence
  Synthetic
gcuaacacuuagcuaaacc

SEQ ID NO: 263975 - RNA, 20 nt, Artificial Sequence
  Synthetic
agcuaacacuuagcuaaacc

SEQ ID NO: 263976 - RNA, 21 nt, Artificial Sequence
  Synthetic
cagcuaacacuuagcuaaacc

SEQ ID NO: 263977 - RNA, 22 nt, Artificial Sequence
  Synthetic
acagcuaacacuuagcuaaacc

SEQ ID NO: 263978 - RNA, 23 nt, Artificial Sequence
  Synthetic
aacagcuaacacuuagcuaaacc

SEQ ID NO: 263979 - RNA, 24 nt, Artificial Sequence
  Synthetic
aaacagcuaacacuuagcuaaacc

SEQ ID NO: 263980 - RNA, 18 nt, Artificial Sequence
  Synthetic
aguuacaggcucuaaacc

SEQ ID NO: 263981 - RNA, 19 nt, Artificial Sequence
  Synthetic
uaguuacaggcucuaaacc

SEQ ID NO: 263982 - RNA, 20 nt, Artificial Sequence
  Synthetic
auaguuacaggcucuaaacc

SEQ ID NO: 263983 - RNA, 21 nt, Artificial Sequence
  Synthetic
uauaguuacaggcucuaaacc

SEQ ID NO: 263984 - RNA, 22 nt, Artificial Sequence
  Synthetic
uuauaguuacaggcucuaaacc

SEQ ID NO: 263985 - RNA, 23 nt, Artificial Sequence
  Synthetic
uuuauaguuacaggcucuaaacc

SEQ ID NO: 263986 - RNA, 24 nt, Artificial Sequence
  Synthetic
uuuuauaguuacaggcucuaaacc

SEQ ID NO: 263987 - RNA, 18 nt, Artificial Sequence
  Synthetic
uaauggugauucuaaacc

SEQ ID NO: 263988 - RNA, 19 nt, Artificial Sequence
  Synthetic
auaauggugauucuaaacc

SEQ ID NO: 263989 - RNA, 20 nt, Artificial Sequence
  Synthetic
aauaauggugauucuaaacc

SEQ ID NO: 263990 - RNA, 21 nt, Artificial Sequence
  Synthetic
aaauaauggugauucuaaacc

SEQ ID NO: 263991 - RNA, 22 nt, Artificial Sequence
  Synthetic
gaaauaauggugauucuaaacc

SEQ ID NO: 263992 - RNA, 23 nt, Artificial Sequence
  Synthetic
agaaauaauggugauucuaaacc

SEQ ID NO: 263993 - RNA, 24 nt, Artificial Sequence
  Synthetic
gagaaauaauggugauucuaaacc

SEQ ID NO: 263994 - RNA, 18 nt, Artificial Sequence
  Synthetic
guauuuacaaaguaaacc

SEQ ID NO: 263995 - RNA, 19 nt, Artificial Sequence
  Synthetic
aguauuuacaaaguaaacc

SEQ ID NO: 263996 - RNA, 20 nt, Artificial Sequence
  Synthetic
uaguauuuacaaaguaaacc

SEQ ID NO: 263997 - RNA, 21 nt, Artificial Sequence
  Synthetic
cuaguauuuacaaaguaaacc

SEQ ID NO: 263998 - RNA, 22 nt, Artificial Sequence
  Synthetic
gcuaguauuuacaaaguaaacc

SEQ ID NO: 263999 - RNA, 23 nt, Artificial Sequence
  Synthetic
agcuaguauuuacaaaguaaacc

SEQ ID NO: 264000 - RNA, 24 nt, Artificial Sequence
  Synthetic
gagcuaguauuuacaaaguaaacc

SEQ ID NO: 264001 - RNA, 18 nt, Artificial Sequence
  Synthetic
gaaugguguaaguaaacc

SEQ ID NO: 264002 - RNA, 19 nt, Artificial Sequence
  Synthetic
agaaugguguaaguaaacc

SEQ ID NO: 264003 - RNA, 20 nt, Artificial Sequence
  Synthetic
gagaaugguguaaguaaacc

SEQ ID NO: 264004 - RNA, 21 nt, Artificial Sequence
  Synthetic
agagaaugguguaaguaaacc

SEQ ID NO: 264005 - RNA, 22 nt, Artificial Sequence
  Synthetic
aagagaaugguguaaguaaacc

SEQ ID NO: 264006 - RNA, 23 nt, Artificial Sequence
  Synthetic
caagagaaugguguaaguaaacc

SEQ ID NO: 264007 - RNA, 24 nt, Artificial Sequence
  Synthetic
gcaagagaaugguguaaguaaacc

SEQ ID NO: 264008 - RNA, 18 nt, Artificial Sequence
  Synthetic
agaggaugguauuaaacc

SEQ ID NO: 264009 - RNA, 19 nt, Artificial Sequence
  Synthetic
aagaggaugguauuaaacc

SEQ ID NO: 264010 - RNA, 20 nt, Artificial Sequence
  Synthetic
caagaggaugguauuaaacc

SEQ ID NO: 264011 - RNA, 21 nt, Artificial Sequence
  Synthetic
ccaagaggaugguauuaaacc

SEQ ID NO: 264012 - RNA, 22 nt, Artificial Sequence
  Synthetic
accaagaggaugguauuaaacc

SEQ ID NO: 264013 - RNA, 23 nt, Artificial Sequence
  Synthetic
uaccaagaggaugguauuaaacc

SEQ ID NO: 264014 - RNA, 24 nt, Artificial Sequence
  Synthetic
guaccaagaggaugguauuaaacc

SEQ ID NO: 264015 - RNA, 18 nt, Artificial Sequence
  Synthetic
uuuaaaauguuuuaaacc

SEQ ID NO: 264016 - RNA, 19 nt, Artificial Sequence
  Synthetic
uuuuaaaauguuuuaaacc

SEQ ID NO: 264017 - RNA, 20 nt, Artificial Sequence
  Synthetic
auuuuaaaauguuuuaaacc

SEQ ID NO: 264018 - RNA, 21 nt, Artificial Sequence
  Synthetic
cauuuuaaaauguuuuaaacc

SEQ ID NO: 264019 - RNA, 22 nt, Artificial Sequence
  Synthetic
ccauuuuaaaauguuuuaaacc

SEQ ID NO: 264020 - RNA, 23 nt, Artificial Sequence
  Synthetic
accauuuuaaaauguuuuaaacc

SEQ ID NO: 264021 - RNA, 24 nt, Artificial Sequence
  Synthetic
gaccauuuuaaaauguuuuaaacc

SEQ ID NO: 264022 - RNA, 18 nt, Artificial Sequence
  Synthetic
gaaaagaucaaaacaacc

SEQ ID NO: 264023 - RNA, 19 nt, Artificial Sequence
  Synthetic
agaaaagaucaaaacaacc

SEQ ID NO: 264024 - RNA, 20 nt, Artificial Sequence
  Synthetic
gagaaaagaucaaaacaacc

SEQ ID NO: 264025 - RNA, 21 nt, Artificial Sequence
  Synthetic
cgagaaaagaucaaaacaacc

SEQ ID NO: 264026 - RNA, 22 nt, Artificial Sequence
  Synthetic
acgagaaaagaucaaaacaacc

SEQ ID NO: 264027 - RNA, 23 nt, Artificial Sequence
  Synthetic
aacgagaaaagaucaaaacaacc

SEQ ID NO: 264028 - RNA, 24 nt, Artificial Sequence
  Synthetic
aaacgagaaaagaucaaaacaacc

SEQ ID NO: 264029 - RNA, 18 nt, Artificial Sequence
  Synthetic
agaauagucaaaacaacc

SEQ ID NO: 264030 - RNA, 19 nt, Artificial Sequence
  Synthetic
uagaauagucaaaacaacc

SEQ ID NO: 264031 - RNA, 20 nt, Artificial Sequence
  Synthetic
guagaauagucaaaacaacc

SEQ ID NO: 264032 - RNA, 21 nt, Artificial Sequence
  Synthetic
uguagaauagucaaaacaacc

SEQ ID NO: 264033 - RNA, 22 nt, Artificial Sequence
  Synthetic
auguagaauagucaaaacaacc

SEQ ID NO: 264034 - RNA, 23 nt, Artificial Sequence
  Synthetic
gauguagaauagucaaaacaacc

SEQ ID NO: 264035 - RNA, 24 nt, Artificial Sequence
  Synthetic
ggauguagaauagucaaaacaacc

SEQ ID NO: 264036 - RNA, 18 nt, Artificial Sequence
  Synthetic
ucuuagaauaaaacaacc

SEQ ID NO: 264037 - RNA, 19 nt, Artificial Sequence
  Synthetic
uucuuagaauaaaacaacc

SEQ ID NO: 264038 - RNA, 20 nt, Artificial Sequence
  Synthetic
uuucuuagaauaaaacaacc

SEQ ID NO: 264039 - RNA, 21 nt, Artificial Sequence
  Synthetic
auuucuuagaauaaaacaacc

SEQ ID NO: 264040 - RNA, 22 nt, Artificial Sequence
  Synthetic
aauuucuuagaauaaaacaacc

SEQ ID NO: 264041 - RNA, 23 nt, Artificial Sequence
  Synthetic
caauuucuuagaauaaaacaacc

SEQ ID NO: 264042 - RNA, 24 nt, Artificial Sequence
  Synthetic
ccaauuucuuagaauaaaacaacc

SEQ ID NO: 264043 - RNA, 18 nt, Artificial Sequence
  Synthetic
uuaaaugaagaaacaacc

SEQ ID NO: 264044 - RNA, 19 nt, Artificial Sequence
  Synthetic
uuuaaaugaagaaacaacc

SEQ ID NO: 264045 - RNA, 20 nt, Artificial Sequence
  Synthetic
uuuuaaaugaagaaacaacc

SEQ ID NO: 264046 - RNA, 21 nt, Artificial Sequence
  Synthetic
guuuuaaaugaagaaacaacc

SEQ ID NO: 264047 - RNA, 22 nt, Artificial Sequence
  Synthetic
gguuuuaaaugaagaaacaacc

SEQ ID NO: 264048 - RNA, 23 nt, Artificial Sequence
  Synthetic
cgguuuuaaaugaagaaacaacc

SEQ ID NO: 264049 - RNA, 24 nt, Artificial Sequence
  Synthetic
acgguuuuaaaugaagaaacaacc

SEQ ID NO: 264050 - RNA, 18 nt, Artificial Sequence
  Synthetic
aaugaacaggaaacaacc

SEQ ID NO: 264051 - RNA, 19 nt, Artificial Sequence
  Synthetic
caaugaacaggaaacaacc

SEQ ID NO: 264052 - RNA, 20 nt, Artificial Sequence
  Synthetic
acaaugaacaggaaacaacc

SEQ ID NO: 264053 - RNA, 21 nt, Artificial Sequence
  Synthetic
uacaaugaacaggaaacaacc

SEQ ID NO: 264054 - RNA, 22 nt, Artificial Sequence
  Synthetic
uuacaaugaacaggaaacaacc

SEQ ID NO: 264055 - RNA, 23 nt, Artificial Sequence
  Synthetic
auuacaaugaacaggaaacaacc

SEQ ID NO: 264056 - RNA, 24 nt, Artificial Sequence
  Synthetic
uauuacaaugaacaggaaacaacc

SEQ ID NO: 264057 - RNA, 18 nt, Artificial Sequence
  Synthetic
cugguuucaugcacaacc

SEQ ID NO: 264058 - RNA, 19 nt, Artificial Sequence
  Synthetic
ucugguuucaugcacaacc

SEQ ID NO: 264059 - RNA, 20 nt, Artificial Sequence
  Synthetic
uucugguuucaugcacaacc

SEQ ID NO: 264060 - RNA, 21 nt, Artificial Sequence
  Synthetic
guucugguuucaugcacaacc

SEQ ID NO: 264061 - RNA, 22 nt, Artificial Sequence
  Synthetic
gguucugguuucaugcacaacc

SEQ ID NO: 264062 - RNA, 23 nt, Artificial Sequence
  Synthetic
ggguucugguuucaugcacaacc

SEQ ID NO: 264063 - RNA, 24 nt, Artificial Sequence
  Synthetic
aggguucugguuucaugcacaacc

SEQ ID NO: 264064 - RNA, 18 nt, Artificial Sequence
  Synthetic
agaacaaggcucacaacc

SEQ ID NO: 264065 - RNA, 19 nt, Artificial Sequence
  Synthetic
gagaacaaggcucacaacc

SEQ ID NO: 264066 - RNA, 20 nt, Artificial Sequence
  Synthetic
ugagaacaaggcucacaacc

SEQ ID NO: 264067 - RNA, 21 nt, Artificial Sequence
  Synthetic
cugagaacaaggcucacaacc

SEQ ID NO: 264068 - RNA, 22 nt, Artificial Sequence
  Synthetic
ccugagaacaaggcucacaacc

SEQ ID NO: 264069 - RNA, 23 nt, Artificial Sequence
  Synthetic
gccugagaacaaggcucacaacc

SEQ ID NO: 264070 - RNA, 24 nt, Artificial Sequence
  Synthetic
agccugagaacaaggcucacaacc

SEQ ID NO: 264071 - RNA, 18 nt, Artificial Sequence
  Synthetic
ggcagcuauaagacaacc

SEQ ID NO: 264072 - RNA, 19 nt, Artificial Sequence
  Synthetic
uggcagcuauaagacaacc

SEQ ID NO: 264073 - RNA, 20 nt, Artificial Sequence
  Synthetic
auggcagcuauaagacaacc

SEQ ID NO: 264074 - RNA, 21 nt, Artificial Sequence
  Synthetic
aauggcagcuauaagacaacc

SEQ ID NO: 264075 - RNA, 22 nt, Artificial Sequence
  Synthetic
aaauggcagcuauaagacaacc

SEQ ID NO: 264076 - RNA, 23 nt, Artificial Sequence
  Synthetic
gaaauggcagcuauaagacaacc

SEQ ID NO: 264077 - RNA, 24 nt, Artificial Sequence
  Synthetic
ggaaauggcagcuauaagacaacc

SEQ ID NO: 264078 - RNA, 18 nt, Artificial Sequence
  Synthetic
ucuccgucuuugacaacc

SEQ ID NO: 264079 - RNA, 19 nt, Artificial Sequence
  Synthetic
uucuccgucuuugacaacc

SEQ ID NO: 264080 - RNA, 20 nt, Artificial Sequence
  Synthetic
uuucuccgucuuugacaacc

SEQ ID NO: 264081 - RNA, 21 nt, Artificial Sequence
  Synthetic
uuuucuccgucuuugacaacc

SEQ ID NO: 264082 - RNA, 22 nt, Artificial Sequence
  Synthetic
guuuucuccgucuuugacaacc

SEQ ID NO: 264083 - RNA, 23 nt, Artificial Sequence
  Synthetic
uguuuucuccgucuuugacaacc

SEQ ID NO: 264084 - RNA, 24 nt, Artificial Sequence
  Synthetic
cuguuuucuccgucuuugacaacc

SEQ ID NO: 264085 - RNA, 18 nt, Artificial Sequence
  Synthetic
uuuuucuaauauacaacc

SEQ ID NO: 264086 - RNA, 19 nt, Artificial Sequence
  Synthetic
uuuuuucuaauauacaacc

SEQ ID NO: 264087 - RNA, 20 nt, Artificial Sequence
  Synthetic
cuuuuuucuaauauacaacc

SEQ ID NO: 264088 - RNA, 21 nt, Artificial Sequence
  Synthetic
gcuuuuuucuaauauacaacc

SEQ ID NO: 264089 - RNA, 22 nt, Artificial Sequence
  Synthetic
ugcuuuuuucuaauauacaacc

SEQ ID NO: 264090 - RNA, 23 nt, Artificial Sequence
  Synthetic
uugcuuuuuucuaauauacaacc

SEQ ID NO: 264091 - RNA, 24 nt, Artificial Sequence
  Synthetic
auugcuuuuuucuaauauacaacc

SEQ ID NO: 264092 - RNA, 18 nt, Artificial Sequence
  Synthetic
cuuaacuuguauacaacc

SEQ ID NO: 264093 - RNA, 19 nt, Artificial Sequence
  Synthetic
acuuaacuuguauacaacc

SEQ ID NO: 264094 - RNA, 20 nt, Artificial Sequence
  Synthetic
cacuuaacuuguauacaacc

SEQ ID NO: 264095 - RNA, 21 nt, Artificial Sequence
  Synthetic
ccacuuaacuuguauacaacc

SEQ ID NO: 264096 - RNA, 22 nt, Artificial Sequence
  Synthetic
gccacuuaacuuguauacaacc

SEQ ID NO: 264097 - RNA, 23 nt, Artificial Sequence
  Synthetic
ugccacuuaacuuguauacaacc

SEQ ID NO: 264098 - RNA, 24 nt, Artificial Sequence
  Synthetic
cugccacuuaacuuguauacaacc

SEQ ID NO: 264099 - RNA, 18 nt, Artificial Sequence
  Synthetic
uauuugaaugcuacaacc

SEQ ID NO: 264100 - RNA, 19 nt, Artificial Sequence
  Synthetic
uuauuugaaugcuacaacc

SEQ ID NO: 264101 - RNA, 20 nt, Artificial Sequence
  Synthetic
uuuauuugaaugcuacaacc

SEQ ID NO: 264102 - RNA, 21 nt, Artificial Sequence
  Synthetic
cuuuauuugaaugcuacaacc

SEQ ID NO: 264103 - RNA, 22 nt, Artificial Sequence
  Synthetic
ucuuuauuugaaugcuacaacc

SEQ ID NO: 264104 - RNA, 23 nt, Artificial Sequence
  Synthetic
aucuuuauuugaaugcuacaacc

SEQ ID NO: 264105 - RNA, 24 nt, Artificial Sequence
  Synthetic
uaucuuuauuugaaugcuacaacc

SEQ ID NO: 264106 - RNA, 18 nt, Artificial Sequence
  Synthetic
acugcagaaaaaccaacc

SEQ ID NO: 264107 - RNA, 19 nt, Artificial Sequence
  Synthetic
cacugcagaaaaaccaacc

SEQ ID NO: 264108 - RNA, 20 nt, Artificial Sequence
  Synthetic
acacugcagaaaaaccaacc

SEQ ID NO: 264109 - RNA, 21 nt, Artificial Sequence
  Synthetic
cacacugcagaaaaaccaacc

SEQ ID NO: 264110 - RNA, 22 nt, Artificial Sequence
  Synthetic
ccacacugcagaaaaaccaacc

SEQ ID NO: 264111 - RNA, 23 nt, Artificial Sequence
  Synthetic
uccacacugcagaaaaaccaacc

SEQ ID NO: 264112 - RNA, 24 nt, Artificial Sequence
  Synthetic
auccacacugcagaaaaaccaacc

SEQ ID NO: 264113 - RNA, 18 nt, Artificial Sequence
  Synthetic
acuuacauagcaccaacc

SEQ ID NO: 264114 - RNA, 19 nt, Artificial Sequence
  Synthetic
uacuuacauagcaccaacc

SEQ ID NO: 264115 - RNA, 20 nt, Artificial Sequence
  Synthetic
uuacuuacauagcaccaacc

SEQ ID NO: 264116 - RNA, 21 nt, Artificial Sequence
  Synthetic
uuuacuuacauagcaccaacc

SEQ ID NO: 264117 - RNA, 22 nt, Artificial Sequence
  Synthetic
uuuuacuuacauagcaccaacc

SEQ ID NO: 264118 - RNA, 23 nt, Artificial Sequence
  Synthetic
cuuuuacuuacauagcaccaacc

SEQ ID NO: 264119 - RNA, 24 nt, Artificial Sequence
  Synthetic
gcuuuuacuuacauagcaccaacc

SEQ ID NO: 264120 - RNA, 18 nt, Artificial Sequence
  Synthetic
gaaaaaggcacuccaacc

SEQ ID NO: 264121 - RNA, 19 nt, Artificial Sequence
  Synthetic
ugaaaaaggcacuccaacc

SEQ ID NO: 264122 - RNA, 20 nt, Artificial Sequence
  Synthetic
uugaaaaaggcacuccaacc

SEQ ID NO: 264123 - RNA, 21 nt, Artificial Sequence
  Synthetic
uuugaaaaaggcacuccaacc

SEQ ID NO: 264124 - RNA, 22 nt, Artificial Sequence
  Synthetic
auuugaaaaaggcacuccaacc

SEQ ID NO: 264125 - RNA, 23 nt, Artificial Sequence
  Synthetic
cauuugaaaaaggcacuccaacc

SEQ ID NO: 264126 - RNA, 24 nt, Artificial Sequence
  Synthetic
acauuugaaaaaggcacuccaacc

SEQ ID NO: 264127 - RNA, 18 nt, Artificial Sequence
  Synthetic
cucaucuuacuuccaacc

SEQ ID NO: 264128 - RNA, 19 nt, Artificial Sequence
  Synthetic
ucucaucuuacuuccaacc

SEQ ID NO: 264129 - RNA, 20 nt, Artificial Sequence
  Synthetic
cucucaucuuacuuccaacc

SEQ ID NO: 264130 - RNA, 21 nt, Artificial Sequence
  Synthetic
ccucucaucuuacuuccaacc

SEQ ID NO: 264131 - RNA, 22 nt, Artificial Sequence
  Synthetic
accucucaucuuacuuccaacc

SEQ ID NO: 264132 - RNA, 23 nt, Artificial Sequence
  Synthetic
uaccucucaucuuacuuccaacc

SEQ ID NO: 264133 - RNA, 24 nt, Artificial Sequence
  Synthetic
auaccucucaucuuacuuccaacc

SEQ ID NO: 264134 - RNA, 18 nt, Artificial Sequence
  Synthetic
cauuucauauuggcaacc

SEQ ID NO: 264135 - RNA, 19 nt, Artificial Sequence
  Synthetic
ucauuucauauuggcaacc

SEQ ID NO: 264136 - RNA, 20 nt, Artificial Sequence
  Synthetic
uucauuucauauuggcaacc

SEQ ID NO: 264137 - RNA, 21 nt, Artificial Sequence
  Synthetic
uuucauuucauauuggcaacc

SEQ ID NO: 264138 - RNA, 22 nt, Artificial Sequence
  Synthetic
uuuucauuucauauuggcaacc

SEQ ID NO: 264139 - RNA, 23 nt, Artificial Sequence
  Synthetic
uuuuucauuucauauuggcaacc

SEQ ID NO: 264140 - RNA, 24 nt, Artificial Sequence
  Synthetic
cuuuuucauuucauauuggcaacc

SEQ ID NO: 264141 - RNA, 18 nt, Artificial Sequence
  Synthetic
caaaacauggcugcaacc

SEQ ID NO: 264142 - RNA, 19 nt, Artificial Sequence
  Synthetic
ucaaaacauggcugcaacc

SEQ ID NO: 264143 - RNA, 20 nt, Artificial Sequence
  Synthetic
cucaaaacauggcugcaacc

SEQ ID NO: 264144 - RNA, 21 nt, Artificial Sequence
  Synthetic
ucucaaaacauggcugcaacc

SEQ ID NO: 264145 - RNA, 22 nt, Artificial Sequence
  Synthetic
gucucaaaacauggcugcaacc

SEQ ID NO: 264146 - RNA, 23 nt, Artificial Sequence
  Synthetic
ugucucaaaacauggcugcaacc

SEQ ID NO: 264147 - RNA, 24 nt, Artificial Sequence
  Synthetic
gugucucaaaacauggcugcaacc

SEQ ID NO: 264148 - RNA, 18 nt, Artificial Sequence
  Synthetic
ucccgcagcuccucaacc

SEQ ID NO: 264149 - RNA, 19 nt, Artificial Sequence
  Synthetic
cucccgcagcuccucaacc

SEQ ID NO: 264150 - RNA, 20 nt, Artificial Sequence
  Synthetic
ucucccgcagcuccucaacc

SEQ ID NO: 264151 - RNA, 21 nt, Artificial Sequence
  Synthetic
gucucccgcagcuccucaacc

SEQ ID NO: 264152 - RNA, 22 nt, Artificial Sequence
  Synthetic
ugucucccgcagcuccucaacc

SEQ ID NO: 264153 - RNA, 23 nt, Artificial Sequence
  Synthetic
cugucucccgcagcuccucaacc

SEQ ID NO: 264154 - RNA, 24 nt, Artificial Sequence
  Synthetic
acugucucccgcagcuccucaacc

SEQ ID NO: 264155 - RNA, 18 nt, Artificial Sequence
  Synthetic
uuaauaguacucucaacc

SEQ ID NO: 264156 - RNA, 19 nt, Artificial Sequence
  Synthetic
uuuaauaguacucucaacc

SEQ ID NO: 264157 - RNA, 20 nt, Artificial Sequence
  Synthetic
uuuuaauaguacucucaacc

SEQ ID NO: 264158 - RNA, 21 nt, Artificial Sequence
  Synthetic
guuuuaauaguacucucaacc

SEQ ID NO: 264159 - RNA, 22 nt, Artificial Sequence
  Synthetic
uguuuuaauaguacucucaacc

SEQ ID NO: 264160 - RNA, 23 nt, Artificial Sequence
  Synthetic
cuguuuuaauaguacucucaacc

SEQ ID NO: 264161 - RNA, 24 nt, Artificial Sequence
  Synthetic
ucuguuuuaauaguacucucaacc

SEQ ID NO: 264162 - RNA, 18 nt, Artificial Sequence
  Synthetic
uuuaguugguucucaacc

SEQ ID NO: 264163 - RNA, 19 nt, Artificial Sequence
  Synthetic
cuuuaguugguucucaacc

SEQ ID NO: 264164 - RNA, 20 nt, Artificial Sequence
  Synthetic
acuuuaguugguucucaacc

SEQ ID NO: 264165 - RNA, 21 nt, Artificial Sequence
  Synthetic
uacuuuaguugguucucaacc

SEQ ID NO: 264166 - RNA, 22 nt, Artificial Sequence
  Synthetic
uuacuuuaguugguucucaacc

SEQ ID NO: 264167 - RNA, 23 nt, Artificial Sequence
  Synthetic
cuuacuuuaguugguucucaacc

SEQ ID NO: 264168 - RNA, 24 nt, Artificial Sequence
  Synthetic
acuuacuuuaguugguucucaacc

SEQ ID NO: 264169 - RNA, 18 nt, Artificial Sequence
  Synthetic
agauuggaaaggucaacc

SEQ ID NO: 264170 - RNA, 19 nt, Artificial Sequence
  Synthetic
gagauuggaaaggucaacc

SEQ ID NO: 264171 - RNA, 20 nt, Artificial Sequence
  Synthetic
ugagauuggaaaggucaacc

SEQ ID NO: 264172 - RNA, 21 nt, Artificial Sequence
  Synthetic
cugagauuggaaaggucaacc

SEQ ID NO: 264173 - RNA, 22 nt, Artificial Sequence
  Synthetic
ccugagauuggaaaggucaacc

SEQ ID NO: 264174 - RNA, 23 nt, Artificial Sequence
  Synthetic
accugagauuggaaaggucaacc

SEQ ID NO: 264175 - RNA, 24 nt, Artificial Sequence
  Synthetic
aaccugagauuggaaaggucaacc

SEQ ID NO: 264176 - RNA, 18 nt, Artificial Sequence
  Synthetic
aaauaaaaagaaagaacc

SEQ ID NO: 264177 - RNA, 19 nt, Artificial Sequence
  Synthetic
gaaauaaaaagaaagaacc

SEQ ID NO: 264178 - RNA, 20 nt, Artificial Sequence
  Synthetic
ugaaauaaaaagaaagaacc

SEQ ID NO: 264179 - RNA, 21 nt, Artificial Sequence
  Synthetic
cugaaauaaaaagaaagaacc

SEQ ID NO: 264180 - RNA, 22 nt, Artificial Sequence
  Synthetic
ucugaaauaaaaagaaagaacc

SEQ ID NO: 264181 - RNA, 23 nt, Artificial Sequence
  Synthetic
uucugaaauaaaaagaaagaacc

SEQ ID NO: 264182 - RNA, 24 nt, Artificial Sequence
  Synthetic
uuucugaaauaaaaagaaagaacc

SEQ ID NO: 264183 - RNA, 18 nt, Artificial Sequence
  Synthetic
cacucaaguuaaagaacc

SEQ ID NO: 264184 - RNA, 19 nt, Artificial Sequence
  Synthetic
acacucaaguuaaagaacc

SEQ ID NO: 264185 - RNA, 20 nt, Artificial Sequence
  Synthetic
cacacucaaguuaaagaacc

SEQ ID NO: 264186 - RNA, 21 nt, Artificial Sequence
  Synthetic
gcacacucaaguuaaagaacc

SEQ ID NO: 264187 - RNA, 22 nt, Artificial Sequence
  Synthetic
cgcacacucaaguuaaagaacc

SEQ ID NO: 264188 - RNA, 23 nt, Artificial Sequence
  Synthetic
acgcacacucaaguuaaagaacc

SEQ ID NO: 264189 - RNA, 24 nt, Artificial Sequence
  Synthetic
aacgcacacucaaguuaaagaacc

SEQ ID NO: 264190 - RNA, 18 nt, Artificial Sequence
  Synthetic
aauuugaaugucagaacc

SEQ ID NO: 264191 - RNA, 19 nt, Artificial Sequence
  Synthetic
caauuugaaugucagaacc

SEQ ID NO: 264192 - RNA, 20 nt, Artificial Sequence
  Synthetic
acaauuugaaugucagaacc

SEQ ID NO: 264193 - RNA, 21 nt, Artificial Sequence
  Synthetic
uacaauuugaaugucagaacc

SEQ ID NO: 264194 - RNA, 22 nt, Artificial Sequence
  Synthetic
uuacaauuugaaugucagaacc

SEQ ID NO: 264195 - RNA, 23 nt, Artificial Sequence
  Synthetic
uuuacaauuugaaugucagaacc

SEQ ID NO: 264196 - RNA, 24 nt, Artificial Sequence
  Synthetic
uuuuacaauuugaaugucagaacc

SEQ ID NO: 264197 - RNA, 18 nt, Artificial Sequence
  Synthetic
caaauuuuauugagaacc

SEQ ID NO: 264198 - RNA, 19 nt, Artificial Sequence
  Synthetic
ucaaauuuuauugagaacc

SEQ ID NO: 264199 - RNA, 20 nt, Artificial Sequence
  Synthetic
cucaaauuuuauugagaacc

SEQ ID NO: 264200 - RNA, 21 nt, Artificial Sequence
  Synthetic
gcucaaauuuuauugagaacc

SEQ ID NO: 264201 - RNA, 22 nt, Artificial Sequence
  Synthetic
agcucaaauuuuauugagaacc

SEQ ID NO: 264202 - RNA, 23 nt, Artificial Sequence
  Synthetic
uagcucaaauuuuauugagaacc

SEQ ID NO: 264203 - RNA, 24 nt, Artificial Sequence
  Synthetic
cuagcucaaauuuuauugagaacc

SEQ ID NO: 264204 - RNA, 18 nt, Artificial Sequence
  Synthetic
ggagauggggcuagaacc

SEQ ID NO: 264205 - RNA, 19 nt, Artificial Sequence
  Synthetic
aggagauggggcuagaacc

SEQ ID NO: 264206 - RNA, 20 nt, Artificial Sequence
  Synthetic
gaggagauggggcuagaacc

SEQ ID NO: 264207 - RNA, 21 nt, Artificial Sequence
  Synthetic
agaggagauggggcuagaacc

SEQ ID NO: 264208 - RNA, 22 nt, Artificial Sequence
  Synthetic
aagaggagauggggcuagaacc

SEQ ID NO: 264209 - RNA, 23 nt, Artificial Sequence
  Synthetic
aaagaggagauggggcuagaacc

SEQ ID NO: 264210 - RNA, 24 nt, Artificial Sequence
  Synthetic
uaaagaggagauggggcuagaacc

SEQ ID NO: 264211 - RNA, 18 nt, Artificial Sequence
  Synthetic
aggagaauggcgcgaacc

SEQ ID NO: 264212 - RNA, 19 nt, Artificial Sequence
  Synthetic
caggagaauggcgcgaacc

SEQ ID NO: 264213 - RNA, 20 nt, Artificial Sequence
  Synthetic
gcaggagaauggcgcgaacc

SEQ ID NO: 264214 - RNA, 21 nt, Artificial Sequence
  Synthetic
ggcaggagaauggcgcgaacc

SEQ ID NO: 264215 - RNA, 22 nt, Artificial Sequence
  Synthetic
aggcaggagaauggcgcgaacc

SEQ ID NO: 264216 - RNA, 23 nt, Artificial Sequence
  Synthetic
gaggcaggagaauggcgcgaacc

SEQ ID NO: 264217 - RNA, 24 nt, Artificial Sequence
  Synthetic
ugaggcaggagaauggcgcgaacc

SEQ ID NO: 264218 - RNA, 18 nt, Artificial Sequence
  Synthetic
agaagaauugcucgaacc

SEQ ID NO: 264219 - RNA, 19 nt, Artificial Sequence
  Synthetic
cagaagaauugcucgaacc

SEQ ID NO: 264220 - RNA, 20 nt, Artificial Sequence
  Synthetic
gcagaagaauugcucgaacc

SEQ ID NO: 264221 - RNA, 21 nt, Artificial Sequence
  Synthetic
agcagaagaauugcucgaacc

SEQ ID NO: 264222 - RNA, 22 nt, Artificial Sequence
  Synthetic
aagcagaagaauugcucgaacc

SEQ ID NO: 264223 - RNA, 23 nt, Artificial Sequence
  Synthetic
gaagcagaagaauugcucgaacc

SEQ ID NO: 264224 - RNA, 24 nt, Artificial Sequence
  Synthetic
ugaagcagaagaauugcucgaacc

SEQ ID NO: 264225 - RNA, 18 nt, Artificial Sequence
  Synthetic
gggagaguugcucgaacc

SEQ ID NO: 264226 - RNA, 19 nt, Artificial Sequence
  Synthetic
ugggagaguugcucgaacc

SEQ ID NO: 264227 - RNA, 20 nt, Artificial Sequence
  Synthetic
gugggagaguugcucgaacc

SEQ ID NO: 264228 - RNA, 21 nt, Artificial Sequence
  Synthetic
ggugggagaguugcucgaacc

SEQ ID NO: 264229 - RNA, 22 nt, Artificial Sequence
  Synthetic
aggugggagaguugcucgaacc

SEQ ID NO: 264230 - RNA, 23 nt, Artificial Sequence
  Synthetic
gaggugggagaguugcucgaacc

SEQ ID NO: 264231 - RNA, 24 nt, Artificial Sequence
  Synthetic
ugaggugggagaguugcucgaacc

SEQ ID NO: 264232 - RNA, 18 nt, Artificial Sequence
  Synthetic
cucuuucauacaggaacc

SEQ ID NO: 264233 - RNA, 19 nt, Artificial Sequence
  Synthetic
ucucuuucauacaggaacc

SEQ ID NO: 264234 - RNA, 20 nt, Artificial Sequence
  Synthetic
uucucuuucauacaggaacc

SEQ ID NO: 264235 - RNA, 21 nt, Artificial Sequence
  Synthetic
uuucucuuucauacaggaacc

SEQ ID NO: 264236 - RNA, 22 nt, Artificial Sequence
  Synthetic
uuuucucuuucauacaggaacc

SEQ ID NO: 264237 - RNA, 23 nt, Artificial Sequence
  Synthetic
uuuuucucuuucauacaggaacc

SEQ ID NO: 264238 - RNA, 24 nt, Artificial Sequence
  Synthetic
auuuuucucuuucauacaggaacc

SEQ ID NO: 264239 - RNA, 18 nt, Artificial Sequence
  Synthetic
aaauaggaacuaggaacc

SEQ ID NO: 264240 - RNA, 19 nt, Artificial Sequence
  Synthetic
uaaauaggaacuaggaacc

SEQ ID NO: 264241 - RNA, 20 nt, Artificial Sequence
  Synthetic
guaaauaggaacuaggaacc

SEQ ID NO: 264242 - RNA, 21 nt, Artificial Sequence
  Synthetic
uguaaauaggaacuaggaacc

SEQ ID NO: 264243 - RNA, 22 nt, Artificial Sequence
  Synthetic
uuguaaauaggaacuaggaacc

SEQ ID NO: 264244 - RNA, 23 nt, Artificial Sequence
  Synthetic
uuuguaaauaggaacuaggaacc

SEQ ID NO: 264245 - RNA, 24 nt, Artificial Sequence
  Synthetic
cuuuguaaauaggaacuaggaacc

SEQ ID NO: 264246 - RNA, 18 nt, Artificial Sequence
  Synthetic
uuguuucgcuuaggaacc

SEQ ID NO: 264247 - RNA, 19 nt, Artificial Sequence
  Synthetic
auuguuucgcuuaggaacc

SEQ ID NO: 264248 - RNA, 20 nt, Artificial Sequence
  Synthetic
cauuguuucgcuuaggaacc

SEQ ID NO: 264249 - RNA, 21 nt, Artificial Sequence
  Synthetic
gcauuguuucgcuuaggaacc

SEQ ID NO: 264250 - RNA, 22 nt, Artificial Sequence
  Synthetic
agcauuguuucgcuuaggaacc

SEQ ID NO: 264251 - RNA, 23 nt, Artificial Sequence
  Synthetic
gagcauuguuucgcuuaggaacc

SEQ ID NO: 264252 - RNA, 24 nt, Artificial Sequence
  Synthetic
ggagcauuguuucgcuuaggaacc

SEQ ID NO: 264253 - RNA, 18 nt, Artificial Sequence
  Synthetic
acugguauuuauggaacc

SEQ ID NO: 264254 - RNA, 19 nt, Artificial Sequence
  Synthetic
gacugguauuuauggaacc

SEQ ID NO: 264255 - RNA, 20 nt, Artificial Sequence
  Synthetic
ugacugguauuuauggaacc

SEQ ID NO: 264256 - RNA, 21 nt, Artificial Sequence
  Synthetic
uugacugguauuuauggaacc

SEQ ID NO: 264257 - RNA, 22 nt, Artificial Sequence
  Synthetic
auugacugguauuuauggaacc

SEQ ID NO: 264258 - RNA, 23 nt, Artificial Sequence
  Synthetic
uauugacugguauuuauggaacc

SEQ ID NO: 264259 - RNA, 24 nt, Artificial Sequence
  Synthetic
auauugacugguauuuauggaacc

SEQ ID NO: 264260 - RNA, 18 nt, Artificial Sequence
  Synthetic
aggagaaucacuggaacc

SEQ ID NO: 264261 - RNA, 19 nt, Artificial Sequence
  Synthetic
caggagaaucacuggaacc

SEQ ID NO: 264262 - RNA, 20 nt, Artificial Sequence
  Synthetic
gcaggagaaucacuggaacc

SEQ ID NO: 264263 - RNA, 21 nt, Artificial Sequence
  Synthetic
ggcaggagaaucacuggaacc

SEQ ID NO: 264264 - RNA, 22 nt, Artificial Sequence
  Synthetic
aggcaggagaaucacuggaacc

SEQ ID NO: 264265 - RNA, 23 nt, Artificial Sequence
  Synthetic
gaggcaggagaaucacuggaacc

SEQ ID NO: 264266 - RNA, 24 nt, Artificial Sequence
  Synthetic
ugaggcaggagaaucacuggaacc

SEQ ID NO: 264267 - RNA, 18 nt, Artificial Sequence
  Synthetic
cuccaccauacuggaacc

SEQ ID NO: 264268 - RNA, 19 nt, Artificial Sequence
  Synthetic
ccuccaccauacuggaacc

SEQ ID NO: 264269 - RNA, 20 nt, Artificial Sequence
  Synthetic
uccuccaccauacuggaacc

SEQ ID NO: 264270 - RNA, 21 nt, Artificial Sequence
  Synthetic
uuccuccaccauacuggaacc

SEQ ID NO: 264271 - RNA, 22 nt, Artificial Sequence
  Synthetic
auuccuccaccauacuggaacc

SEQ ID NO: 264272 - RNA, 23 nt, Artificial Sequence
  Synthetic
cauuccuccaccauacuggaacc

SEQ ID NO: 264273 - RNA, 24 nt, Artificial Sequence
  Synthetic
gcauuccuccaccauacuggaacc

SEQ ID NO: 264274 - RNA, 18 nt, Artificial Sequence
  Synthetic
ugacagcguggaugaacc

SEQ ID NO: 264275 - RNA, 19 nt, Artificial Sequence
  Synthetic
augacagcguggaugaacc

SEQ ID NO: 264276 - RNA, 20 nt, Artificial Sequence
  Synthetic
uaugacagcguggaugaacc

SEQ ID NO: 264277 - RNA, 21 nt, Artificial Sequence
  Synthetic
uuaugacagcguggaugaacc

SEQ ID NO: 264278 - RNA, 22 nt, Artificial Sequence
  Synthetic
uuuaugacagcguggaugaacc

SEQ ID NO: 264279 - RNA, 23 nt, Artificial Sequence
  Synthetic
guuuaugacagcguggaugaacc

SEQ ID NO: 264280 - RNA, 24 nt, Artificial Sequence
  Synthetic
uguuuaugacagcguggaugaacc

SEQ ID NO: 264281 - RNA, 18 nt, Artificial Sequence
  Synthetic
ugacaauauguaugaacc

SEQ ID NO: 264282 - RNA, 19 nt, Artificial Sequence
  Synthetic
uugacaauauguaugaacc

SEQ ID NO: 264283 - RNA, 20 nt, Artificial Sequence
  Synthetic
uuugacaauauguaugaacc

SEQ ID NO: 264284 - RNA, 21 nt, Artificial Sequence
  Synthetic
auuugacaauauguaugaacc

SEQ ID NO: 264285 - RNA, 22 nt, Artificial Sequence
  Synthetic
uauuugacaauauguaugaacc

SEQ ID NO: 264286 - RNA, 23 nt, Artificial Sequence
  Synthetic
auauuugacaauauguaugaacc

SEQ ID NO: 264287 - RNA, 24 nt, Artificial Sequence
  Synthetic
cauauuugacaauauguaugaacc

SEQ ID NO: 264288 - RNA, 18 nt, Artificial Sequence
  Synthetic
aaucacacuuuaugaacc

SEQ ID NO: 264289 - RNA, 19 nt, Artificial Sequence
  Synthetic
caaucacacuuuaugaacc

SEQ ID NO: 264290 - RNA, 20 nt, Artificial Sequence
  Synthetic
gcaaucacacuuuaugaacc

SEQ ID NO: 264291 - RNA, 21 nt, Artificial Sequence
  Synthetic
ugcaaucacacuuuaugaacc

SEQ ID NO: 264292 - RNA, 22 nt, Artificial Sequence
  Synthetic
cugcaaucacacuuuaugaacc

SEQ ID NO: 264293 - RNA, 23 nt, Artificial Sequence
  Synthetic
ucugcaaucacacuuuaugaacc

SEQ ID NO: 264294 - RNA, 24 nt, Artificial Sequence
  Synthetic
uucugcaaucacacuuuaugaacc

SEQ ID NO: 264295 - RNA, 18 nt, Artificial Sequence
  Synthetic
ugagggcuucccugaacc

SEQ ID NO: 264296 - RNA, 19 nt, Artificial Sequence
  Synthetic
gugagggcuucccugaacc

SEQ ID NO: 264297 - RNA, 20 nt, Artificial Sequence
  Synthetic
ugugagggcuucccugaacc

SEQ ID NO: 264298 - RNA, 21 nt, Artificial Sequence
  Synthetic
cugugagggcuucccugaacc

SEQ ID NO: 264299 - RNA, 22 nt, Artificial Sequence
  Synthetic
ucugugagggcuucccugaacc

SEQ ID NO: 264300 - RNA, 23 nt, Artificial Sequence
  Synthetic
uucugugagggcuucccugaacc

SEQ ID NO: 264301 - RNA, 24 nt, Artificial Sequence
  Synthetic
auucugugagggcuucccugaacc

SEQ ID NO: 264302 - RNA, 18 nt, Artificial Sequence
  Synthetic
aacuuuucuuccugaacc

SEQ ID NO: 264303 - RNA, 19 nt, Artificial Sequence
  Synthetic
aaacuuuucuuccugaacc

SEQ ID NO: 264304 - RNA, 20 nt, Artificial Sequence
  Synthetic
uaaacuuuucuuccugaacc

SEQ ID NO: 264305 - RNA, 21 nt, Artificial Sequence
  Synthetic
uuaaacuuuucuuccugaacc

SEQ ID NO: 264306 - RNA, 22 nt, Artificial Sequence
  Synthetic
uuuaaacuuuucuuccugaacc

SEQ ID NO: 264307 - RNA, 23 nt, Artificial Sequence
  Synthetic
auuuaaacuuuucuuccugaacc

SEQ ID NO: 264308 - RNA, 24 nt, Artificial Sequence
  Synthetic
gauuuaaacuuuucuuccugaacc

SEQ ID NO: 264309 - RNA, 18 nt, Artificial Sequence
  Synthetic
caucgccuuuucugaacc

SEQ ID NO: 264310 - RNA, 19 nt, Artificial Sequence
  Synthetic
acaucgccuuuucugaacc

SEQ ID NO: 264311 - RNA, 20 nt, Artificial Sequence
  Synthetic
cacaucgccuuuucugaacc

SEQ ID NO: 264312 - RNA, 21 nt, Artificial Sequence
  Synthetic
ccacaucgccuuuucugaacc

SEQ ID NO: 264313 - RNA, 22 nt, Artificial Sequence
  Synthetic
cccacaucgccuuuucugaacc

SEQ ID NO: 264314 - RNA, 23 nt, Artificial Sequence
  Synthetic
ccccacaucgccuuuucugaacc

SEQ ID NO: 264315 - RNA, 24 nt, Artificial Sequence
  Synthetic
gccccacaucgccuuuucugaacc

SEQ ID NO: 264316 - RNA, 18 nt, Artificial Sequence
  Synthetic
ugcaaagaaaagugaacc

SEQ ID NO: 264317 - RNA, 19 nt, Artificial Sequence
  Synthetic
gugcaaagaaaagugaacc

SEQ ID NO: 264318 - RNA, 20 nt, Artificial Sequence
  Synthetic
ggugcaaagaaaagugaacc

SEQ ID NO: 264319 - RNA, 21 nt, Artificial Sequence
  Synthetic
uggugcaaagaaaagugaacc

SEQ ID NO: 264320 - RNA, 22 nt, Artificial Sequence
  Synthetic
cuggugcaaagaaaagugaacc

SEQ ID NO: 264321 - RNA, 23 nt, Artificial Sequence
  Synthetic
ccuggugcaaagaaaagugaacc

SEQ ID NO: 264322 - RNA, 24 nt, Artificial Sequence
  Synthetic
accuggugcaaagaaaagugaacc

SEQ ID NO: 264323 - RNA, 18 nt, Artificial Sequence
  Synthetic
gccuggggccagugaacc

SEQ ID NO: 264324 - RNA, 19 nt, Artificial Sequence
  Synthetic
ggccuggggccagugaacc

SEQ ID NO: 264325 - RNA, 20 nt, Artificial Sequence
  Synthetic
aggccuggggccagugaacc

SEQ ID NO: 264326 - RNA, 21 nt, Artificial Sequence
  Synthetic
uaggccuggggccagugaacc

SEQ ID NO: 264327 - RNA, 22 nt, Artificial Sequence
  Synthetic
uuaggccuggggccagugaacc

SEQ ID NO: 264328 - RNA, 23 nt, Artificial Sequence
  Synthetic
auuaggccuggggccagugaacc

SEQ ID NO: 264329 - RNA, 24 nt, Artificial Sequence
  Synthetic
gauuaggccuggggccagugaacc

SEQ ID NO: 264330 - RNA, 18 nt, Artificial Sequence
  Synthetic
agggccuaggagugaacc

SEQ ID NO: 264331 - RNA, 19 nt, Artificial Sequence
  Synthetic
gagggccuaggagugaacc

SEQ ID NO: 264332 - RNA, 20 nt, Artificial Sequence
  Synthetic
agagggccuaggagugaacc

SEQ ID NO: 264333 - RNA, 21 nt, Artificial Sequence
  Synthetic
aagagggccuaggagugaacc

SEQ ID NO: 264334 - RNA, 22 nt, Artificial Sequence
  Synthetic
gaagagggccuaggagugaacc

SEQ ID NO: 264335 - RNA, 23 nt, Artificial Sequence
  Synthetic
agaagagggccuaggagugaacc

SEQ ID NO: 264336 - RNA, 24 nt, Artificial Sequence
  Synthetic
gagaagagggccuaggagugaacc

SEQ ID NO: 264337 - RNA, 18 nt, Artificial Sequence
  Synthetic
agaaggaucacgugaacc

SEQ ID NO: 264338 - RNA, 19 nt, Artificial Sequence
  Synthetic
uagaaggaucacgugaacc

SEQ ID NO: 264339 - RNA, 20 nt, Artificial Sequence
  Synthetic
guagaaggaucacgugaacc

SEQ ID NO: 264340 - RNA, 21 nt, Artificial Sequence
  Synthetic
gguagaaggaucacgugaacc

SEQ ID NO: 264341 - RNA, 22 nt, Artificial Sequence
  Synthetic
agguagaaggaucacgugaacc

SEQ ID NO: 264342 - RNA, 23 nt, Artificial Sequence
  Synthetic
gagguagaaggaucacgugaacc

SEQ ID NO: 264343 - RNA, 24 nt, Artificial Sequence
  Synthetic
ugagguagaaggaucacgugaacc

SEQ ID NO: 264344 - RNA, 18 nt, Artificial Sequence
  Synthetic
gggagaaaggcgugaacc

SEQ ID NO: 264345 - RNA, 19 nt, Artificial Sequence
  Synthetic
cgggagaaaggcgugaacc

SEQ ID NO: 264346 - RNA, 20 nt, Artificial Sequence
  Synthetic
gcgggagaaaggcgugaacc

SEQ ID NO: 264347 - RNA, 21 nt, Artificial Sequence
  Synthetic
ggcgggagaaaggcgugaacc

SEQ ID NO: 264348 - RNA, 22 nt, Artificial Sequence
  Synthetic
aggcgggagaaaggcgugaacc

SEQ ID NO: 264349 - RNA, 23 nt, Artificial Sequence
  Synthetic
gaggcgggagaaaggcgugaacc

SEQ ID NO: 264350 - RNA, 24 nt, Artificial Sequence
  Synthetic
ugaggcgggagaaaggcgugaacc

SEQ ID NO: 264351 - RNA, 21 nt, Artificial Sequence
  Synthetic
ggcaggagaauggcgugaacc

SEQ ID NO: 264352 - RNA, 22 nt, Artificial Sequence
  Synthetic
aggcaggagaauggcgugaacc

SEQ ID NO: 264353 - RNA, 23 nt, Artificial Sequence
  Synthetic
aaggcaggagaauggcgugaacc

SEQ ID NO: 264354 - RNA, 24 nt, Artificial Sequence
  Synthetic
uaaggcaggagaauggcgugaacc

SEQ ID NO: 264355 - RNA, 18 nt, Artificial Sequence
  Synthetic
aggaaaauggugugaacc

SEQ ID NO: 264356 - RNA, 19 nt, Artificial Sequence
  Synthetic
caggaaaauggugugaacc

SEQ ID NO: 264357 - RNA, 20 nt, Artificial Sequence
  Synthetic
gcaggaaaauggugugaacc

SEQ ID NO: 264358 - RNA, 21 nt, Artificial Sequence
  Synthetic
ggcaggaaaauggugugaacc

SEQ ID NO: 264359 - RNA, 22 nt, Artificial Sequence
  Synthetic
aggcaggaaaauggugugaacc

SEQ ID NO: 264360 - RNA, 23 nt, Artificial Sequence
  Synthetic
gaggcaggaaaauggugugaacc

SEQ ID NO: 264361 - RNA, 24 nt, Artificial Sequence
  Synthetic
ugaggcaggaaaauggugugaacc

SEQ ID NO: 264362 - RNA, 18 nt, Artificial Sequence
  Synthetic
accacuggaaauugaacc

SEQ ID NO: 264363 - RNA, 19 nt, Artificial Sequence
  Synthetic
aaccacuggaaauugaacc

SEQ ID NO: 264364 - RNA, 20 nt, Artificial Sequence
  Synthetic
aaaccacuggaaauugaacc

SEQ ID NO: 264365 - RNA, 21 nt, Artificial Sequence
  Synthetic
uaaaccacuggaaauugaacc

SEQ ID NO: 264366 - RNA, 22 nt, Artificial Sequence
  Synthetic
uuaaaccacuggaaauugaacc

SEQ ID NO: 264367 - RNA, 23 nt, Artificial Sequence
  Synthetic
uuuaaaccacuggaaauugaacc

SEQ ID NO: 264368 - RNA, 24 nt, Artificial Sequence
  Synthetic
uuuuaaaccacuggaaauugaacc

SEQ ID NO: 264369 - RNA, 18 nt, Artificial Sequence
  Synthetic
uugcuuauaaauugaacc

SEQ ID NO: 264370 - RNA, 19 nt, Artificial Sequence
  Synthetic
guugcuuauaaauugaacc

SEQ ID NO: 264371 - RNA, 20 nt, Artificial Sequence
  Synthetic
aguugcuuauaaauugaacc

SEQ ID NO: 264372 - RNA, 21 nt, Artificial Sequence
  Synthetic
uaguugcuuauaaauugaacc

SEQ ID NO: 264373 - RNA, 22 nt, Artificial Sequence
  Synthetic
uuaguugcuuauaaauugaacc

SEQ ID NO: 264374 - RNA, 23 nt, Artificial Sequence
  Synthetic
auuaguugcuuauaaauugaacc

SEQ ID NO: 264375 - RNA, 24 nt, Artificial Sequence
  Synthetic
aauuaguugcuuauaaauugaacc

SEQ ID NO: 264376 - RNA, 18 nt, Artificial Sequence
  Synthetic
aggagaaucacuugaacc

SEQ ID NO: 264377 - RNA, 19 nt, Artificial Sequence
  Synthetic
uaggagaaucacuugaacc

SEQ ID NO: 264378 - RNA, 20 nt, Artificial Sequence
  Synthetic
guaggagaaucacuugaacc

SEQ ID NO: 264379 - RNA, 21 nt, Artificial Sequence
  Synthetic
gguaggagaaucacuugaacc

SEQ ID NO: 264380 - RNA, 22 nt, Artificial Sequence
  Synthetic
agguaggagaaucacuugaacc

SEQ ID NO: 264381 - RNA, 23 nt, Artificial Sequence
  Synthetic
gagguaggagaaucacuugaacc

SEQ ID NO: 264382 - RNA, 24 nt, Artificial Sequence
  Synthetic
ugagguaggagaaucacuugaacc

SEQ ID NO: 264383 - RNA, 18 nt, Artificial Sequence
  Synthetic
guguucgauccuugaacc

SEQ ID NO: 264384 - RNA, 19 nt, Artificial Sequence
  Synthetic
aguguucgauccuugaacc

SEQ ID NO: 264385 - RNA, 20 nt, Artificial Sequence
  Synthetic
gaguguucgauccuugaacc

SEQ ID NO: 264386 - RNA, 21 nt, Artificial Sequence
  Synthetic
ugaguguucgauccuugaacc

SEQ ID NO: 264387 - RNA, 22 nt, Artificial Sequence
  Synthetic
uugaguguucgauccuugaacc

SEQ ID NO: 264388 - RNA, 23 nt, Artificial Sequence
  Synthetic
cuugaguguucgauccuugaacc

SEQ ID NO: 264389 - RNA, 24 nt, Artificial Sequence
  Synthetic
ccuugaguguucgauccuugaacc

SEQ ID NO: 264390 - RNA, 18 nt, Artificial Sequence
  Synthetic
aggaggauuccuugaacc

SEQ ID NO: 264391 - RNA, 19 nt, Artificial Sequence
  Synthetic
caggaggauuccuugaacc

SEQ ID NO: 264392 - RNA, 20 nt, Artificial Sequence
  Synthetic
gcaggaggauuccuugaacc

SEQ ID NO: 264393 - RNA, 21 nt, Artificial Sequence
  Synthetic
ggcaggaggauuccuugaacc

SEQ ID NO: 264394 - RNA, 22 nt, Artificial Sequence
  Synthetic
aggcaggaggauuccuugaacc

SEQ ID NO: 264395 - RNA, 23 nt, Artificial Sequence
  Synthetic
gaggcaggaggauuccuugaacc

SEQ ID NO: 264396 - RNA, 24 nt, Artificial Sequence
  Synthetic
ugaggcaggaggauuccuugaacc

SEQ ID NO: 264397 - RNA, 18 nt, Artificial Sequence
  Synthetic
aggaggauagcuugaacc

SEQ ID NO: 264398 - RNA, 19 nt, Artificial Sequence
  Synthetic
caggaggauagcuugaacc

SEQ ID NO: 264399 - RNA, 20 nt, Artificial Sequence
  Synthetic
acaggaggauagcuugaacc

SEQ ID NO: 264400 - RNA, 21 nt, Artificial Sequence
  Synthetic
gacaggaggauagcuugaacc

SEQ ID NO: 264401 - RNA, 22 nt, Artificial Sequence
  Synthetic
agacaggaggauagcuugaacc

SEQ ID NO: 264402 - RNA, 23 nt, Artificial Sequence
  Synthetic
gagacaggaggauagcuugaacc

SEQ ID NO: 264403 - RNA, 24 nt, Artificial Sequence
  Synthetic
ugagacaggaggauagcuugaacc

SEQ ID NO: 264404 - RNA, 18 nt, Artificial Sequence
  Synthetic
gggagaaucgcuugaacc

SEQ ID NO: 264405 - RNA, 19 nt, Artificial Sequence
  Synthetic
ugggagaaucgcuugaacc

SEQ ID NO: 264406 - RNA, 20 nt, Artificial Sequence
  Synthetic
gugggagaaucgcuugaacc

SEQ ID NO: 264407 - RNA, 21 nt, Artificial Sequence
  Synthetic
ggugggagaaucgcuugaacc

SEQ ID NO: 264408 - RNA, 22 nt, Artificial Sequence
  Synthetic
aggugggagaaucgcuugaacc

SEQ ID NO: 264409 - RNA, 23 nt, Artificial Sequence
  Synthetic
gaggugggagaaucgcuugaacc

SEQ ID NO: 264410 - RNA, 24 nt, Artificial Sequence
  Synthetic
ugaggugggagaaucgcuugaacc

SEQ ID NO: 264411 - RNA, 18 nt, Artificial Sequence
  Synthetic
aggggaaucgcuugaacc

SEQ ID NO: 264412 - RNA, 19 nt, Artificial Sequence
  Synthetic
caggggaaucgcuugaacc

SEQ ID NO: 264413 - RNA, 20 nt, Artificial Sequence
  Synthetic
gcaggggaaucgcuugaacc

SEQ ID NO: 264414 - RNA, 21 nt, Artificial Sequence
  Synthetic
ggcaggggaaucgcuugaacc

SEQ ID NO: 264415 - RNA, 22 nt, Artificial Sequence
  Synthetic
aggcaggggaaucgcuugaacc

SEQ ID NO: 264416 - RNA, 23 nt, Artificial Sequence
  Synthetic
gaggcaggggaaucgcuugaacc

SEQ ID NO: 264417 - RNA, 24 nt, Artificial Sequence
  Synthetic
ugaggcaggggaaucgcuugaacc

SEQ ID NO: 264418 - RNA, 18 nt, Artificial Sequence
  Synthetic
agcagaauugcuugaacc

SEQ ID NO: 264419 - RNA, 19 nt, Artificial Sequence
  Synthetic
cagcagaauugcuugaacc

SEQ ID NO: 264420 - RNA, 20 nt, Artificial Sequence
  Synthetic
gcagcagaauugcuugaacc

SEQ ID NO: 264421 - RNA, 21 nt, Artificial Sequence
  Synthetic
ggcagcagaauugcuugaacc

SEQ ID NO: 264422 - RNA, 22 nt, Artificial Sequence
  Synthetic
aggcagcagaauugcuugaacc

SEQ ID NO: 264423 - RNA, 23 nt, Artificial Sequence
  Synthetic
gaggcagcagaauugcuugaacc

SEQ ID NO: 264424 - RNA, 24 nt, Artificial Sequence
  Synthetic
ugaggcagcagaauugcuugaacc

SEQ ID NO: 264425 - RNA, 21 nt, Artificial Sequence
  Synthetic
ugcaggagaauugcuugaacc

SEQ ID NO: 264426 - RNA, 22 nt, Artificial Sequence
  Synthetic
augcaggagaauugcuugaacc

SEQ ID NO: 264427 - RNA, 23 nt, Artificial Sequence
  Synthetic
gaugcaggagaauugcuugaacc

SEQ ID NO: 264428 - RNA, 24 nt, Artificial Sequence
  Synthetic
ugaugcaggagaauugcuugaacc

SEQ ID NO: 264429 - RNA, 18 nt, Artificial Sequence
  Synthetic
augagaauugcuugaacc

SEQ ID NO: 264430 - RNA, 19 nt, Artificial Sequence
  Synthetic
caugagaauugcuugaacc

SEQ ID NO: 264431 - RNA, 20 nt, Artificial Sequence
  Synthetic
gcaugagaauugcuugaacc

SEQ ID NO: 264432 - RNA, 21 nt, Artificial Sequence
  Synthetic
ggcaugagaauugcuugaacc

SEQ ID NO: 264433 - RNA, 22 nt, Artificial Sequence
  Synthetic
aggcaugagaauugcuugaacc

SEQ ID NO: 264434 - RNA, 23 nt, Artificial Sequence
  Synthetic
gaggcaugagaauugcuugaacc

SEQ ID NO: 264435 - RNA, 24 nt, Artificial Sequence
  Synthetic
ugaggcaugagaauugcuugaacc

SEQ ID NO: 264436 - RNA, 18 nt, Artificial Sequence
  Synthetic
gggaagauugcuugaacc

SEQ ID NO: 264437 - RNA, 19 nt, Artificial Sequence
  Synthetic
cgggaagauugcuugaacc

SEQ ID NO: 264438 - RNA, 20 nt, Artificial Sequence
  Synthetic
gcgggaagauugcuugaacc

SEQ ID NO: 264439 - RNA, 21 nt, Artificial Sequence
  Synthetic
ggcgggaagauugcuugaacc

SEQ ID NO: 264440 - RNA, 22 nt, Artificial Sequence
  Synthetic
aggcgggaagauugcuugaacc

SEQ ID NO: 264441 - RNA, 23 nt, Artificial Sequence
  Synthetic
gaggcgggaagauugcuugaacc

SEQ ID NO: 264442 - RNA, 24 nt, Artificial Sequence
  Synthetic
ugaggcgggaagauugcuugaacc

SEQ ID NO: 264443 - RNA, 18 nt, Artificial Sequence
  Synthetic
aagaggauuucuugaacc

SEQ ID NO: 264444 - RNA, 19 nt, Artificial Sequence
  Synthetic
caagaggauuucuugaacc

SEQ ID NO: 264445 - RNA, 20 nt, Artificial Sequence
  Synthetic
gcaagaggauuucuugaacc

SEQ ID NO: 264446 - RNA, 21 nt, Artificial Sequence
  Synthetic
ggcaagaggauuucuugaacc

SEQ ID NO: 264447 - RNA, 22 nt, Artificial Sequence
  Synthetic
aggcaagaggauuucuugaacc

SEQ ID NO: 264448 - RNA, 23 nt, Artificial Sequence
  Synthetic
gaggcaagaggauuucuugaacc

SEQ ID NO: 264449 - RNA, 24 nt, Artificial Sequence
  Synthetic
ugaggcaagaggauuucuugaacc

SEQ ID NO: 264450 - RNA, 18 nt, Artificial Sequence
  Synthetic
aggagaaucauuugaacc

SEQ ID NO: 264451 - RNA, 19 nt, Artificial Sequence
  Synthetic
caggagaaucauuugaacc

SEQ ID NO: 264452 - RNA, 20 nt, Artificial Sequence
  Synthetic
gcaggagaaucauuugaacc

SEQ ID NO: 264453 - RNA, 21 nt, Artificial Sequence
  Synthetic
ggcaggagaaucauuugaacc

SEQ ID NO: 264454 - RNA, 22 nt, Artificial Sequence
  Synthetic
aggcaggagaaucauuugaacc

SEQ ID NO: 264455 - RNA, 23 nt, Artificial Sequence
  Synthetic
gaggcaggagaaucauuugaacc

SEQ ID NO: 264456 - RNA, 24 nt, Artificial Sequence
  Synthetic
ugaggcaggagaaucauuugaacc

SEQ ID NO: 264457 - RNA, 18 nt, Artificial Sequence
  Synthetic
aggagaaucguuugaacc

SEQ ID NO: 264458 - RNA, 19 nt, Artificial Sequence
  Synthetic
caggagaaucguuugaacc

SEQ ID NO: 264459 - RNA, 20 nt, Artificial Sequence
  Synthetic
gcaggagaaucguuugaacc

SEQ ID NO: 264460 - RNA, 21 nt, Artificial Sequence
  Synthetic
ggcaggagaaucguuugaacc

SEQ ID NO: 264461 - RNA, 22 nt, Artificial Sequence
  Synthetic
aggcaggagaaucguuugaacc

SEQ ID NO: 264462 - RNA, 23 nt, Artificial Sequence
  Synthetic
gaggcaggagaaucguuugaacc

SEQ ID NO: 264463 - RNA, 24 nt, Artificial Sequence
  Synthetic
ugaggcaggagaaucguuugaacc

SEQ ID NO: 264464 - RNA, 18 nt, Artificial Sequence
  Synthetic
aggagaauuguuugaacc

SEQ ID NO: 264465 - RNA, 19 nt, Artificial Sequence
  Synthetic
caggagaauuguuugaacc

SEQ ID NO: 264466 - RNA, 20 nt, Artificial Sequence
  Synthetic
gcaggagaauuguuugaacc

SEQ ID NO: 264467 - RNA, 21 nt, Artificial Sequence
  Synthetic
ggcaggagaauuguuugaacc

SEQ ID NO: 264468 - RNA, 22 nt, Artificial Sequence
  Synthetic
aggcaggagaauuguuugaacc

SEQ ID NO: 264469 - RNA, 23 nt, Artificial Sequence
  Synthetic
gaggcaggagaauuguuugaacc

SEQ ID NO: 264470 - RNA, 24 nt, Artificial Sequence
  Synthetic
ugaggcaggagaauuguuugaacc

SEQ ID NO: 264471 - RNA, 18 nt, Artificial Sequence
  Synthetic
acuggguaaggaauaacc

SEQ ID NO: 264472 - RNA, 19 nt, Artificial Sequence
  Synthetic
gacuggguaaggaauaacc

SEQ ID NO: 264473 - RNA, 20 nt, Artificial Sequence
  Synthetic
ugacuggguaaggaauaacc

SEQ ID NO: 264474 - RNA, 21 nt, Artificial Sequence
  Synthetic
gugacuggguaaggaauaacc

SEQ ID NO: 264475 - RNA, 22 nt, Artificial Sequence
  Synthetic
agugacuggguaaggaauaacc

SEQ ID NO: 264476 - RNA, 23 nt, Artificial Sequence
  Synthetic
uagugacuggguaaggaauaacc

SEQ ID NO: 264477 - RNA, 24 nt, Artificial Sequence
  Synthetic
uuagugacuggguaaggaauaacc

SEQ ID NO: 264478 - RNA, 18 nt, Artificial Sequence
  Synthetic
acaacagcuugaauaacc

SEQ ID NO: 264479 - RNA, 19 nt, Artificial Sequence
  Synthetic
gacaacagcuugaauaacc

SEQ ID NO: 264480 - RNA, 20 nt, Artificial Sequence
  Synthetic
ggacaacagcuugaauaacc

SEQ ID NO: 264481 - RNA, 21 nt, Artificial Sequence
  Synthetic
uggacaacagcuugaauaacc

SEQ ID NO: 264482 - RNA, 22 nt, Artificial Sequence
  Synthetic
guggacaacagcuugaauaacc

SEQ ID NO: 264483 - RNA, 23 nt, Artificial Sequence
  Synthetic
uguggacaacagcuugaauaacc

SEQ ID NO: 264484 - RNA, 24 nt, Artificial Sequence
  Synthetic
guguggacaacagcuugaauaacc

SEQ ID NO: 264485 - RNA, 18 nt, Artificial Sequence
  Synthetic
aaaaguagugacauaacc

SEQ ID NO: 264486 - RNA, 19 nt, Artificial Sequence
  Synthetic
caaaaguagugacauaacc

SEQ ID NO: 264487 - RNA, 20 nt, Artificial Sequence
  Synthetic
acaaaaguagugacauaacc

SEQ ID NO: 264488 - RNA, 21 nt, Artificial Sequence
  Synthetic
cacaaaaguagugacauaacc

SEQ ID NO: 264489 - RNA, 22 nt, Artificial Sequence
  Synthetic
ucacaaaaguagugacauaacc

SEQ ID NO: 264490 - RNA, 23 nt, Artificial Sequence
  Synthetic
gucacaaaaguagugacauaacc

SEQ ID NO: 264491 - RNA, 24 nt, Artificial Sequence
  Synthetic
ugucacaaaaguagugacauaacc

SEQ ID NO: 264492 - RNA, 18 nt, Artificial Sequence
  Synthetic
uuaugggauuacauaacc

SEQ ID NO: 264493 - RNA, 19 nt, Artificial Sequence
  Synthetic
cuuaugggauuacauaacc

SEQ ID NO: 264494 - RNA, 20 nt, Artificial Sequence
  Synthetic
ucuuaugggauuacauaacc

SEQ ID NO: 264495 - RNA, 21 nt, Artificial Sequence
  Synthetic
aucuuaugggauuacauaacc

SEQ ID NO: 264496 - RNA, 22 nt, Artificial Sequence
  Synthetic
aaucuuaugggauuacauaacc

SEQ ID NO: 264497 - RNA, 23 nt, Artificial Sequence
  Synthetic
uaaucuuaugggauuacauaacc

SEQ ID NO: 264498 - RNA, 24 nt, Artificial Sequence
  Synthetic
uuaaucuuaugggauuacauaacc

SEQ ID NO: 264499 - RNA, 18 nt, Artificial Sequence
  Synthetic
uuuauaacaaauauaacc

SEQ ID NO: 264500 - RNA, 19 nt, Artificial Sequence
  Synthetic
cuuuauaacaaauauaacc

SEQ ID NO: 264501 - RNA, 20 nt, Artificial Sequence
  Synthetic
gcuuuauaacaaauauaacc

SEQ ID NO: 264502 - RNA, 21 nt, Artificial Sequence
  Synthetic
ugcuuuauaacaaauauaacc

SEQ ID NO: 264503 - RNA, 22 nt, Artificial Sequence
  Synthetic
augcuuuauaacaaauauaacc

SEQ ID NO: 264504 - RNA, 23 nt, Artificial Sequence
  Synthetic
caugcuuuauaacaaauauaacc

SEQ ID NO: 264505 - RNA, 24 nt, Artificial Sequence
  Synthetic
ccaugcuuuauaacaaauauaacc

SEQ ID NO: 264506 - RNA, 18 nt, Artificial Sequence
  Synthetic
gccacaaaaaaacuaacc

SEQ ID NO: 264507 - RNA, 19 nt, Artificial Sequence
  Synthetic
ugccacaaaaaaacuaacc

SEQ ID NO: 264508 - RNA, 20 nt, Artificial Sequence
  Synthetic
augccacaaaaaaacuaacc

SEQ ID NO: 264509 - RNA, 21 nt, Artificial Sequence
  Synthetic
gaugccacaaaaaaacuaacc

SEQ ID NO: 264510 - RNA, 22 nt, Artificial Sequence
  Synthetic
agaugccacaaaaaaacuaacc

SEQ ID NO: 264511 - RNA, 23 nt, Artificial Sequence
  Synthetic
uagaugccacaaaaaaacuaacc

SEQ ID NO: 264512 - RNA, 24 nt, Artificial Sequence
  Synthetic
uuagaugccacaaaaaaacuaacc

SEQ ID NO: 264513 - RNA, 18 nt, Artificial Sequence
  Synthetic
uauuuguuaacacuaacc

SEQ ID NO: 264514 - RNA, 19 nt, Artificial Sequence
  Synthetic
uuauuuguuaacacuaacc

SEQ ID NO: 264515 - RNA, 20 nt, Artificial Sequence
  Synthetic
auuauuuguuaacacuaacc

SEQ ID NO: 264516 - RNA, 21 nt, Artificial Sequence
  Synthetic
uauuauuuguuaacacuaacc

SEQ ID NO: 264517 - RNA, 22 nt, Artificial Sequence
  Synthetic
cuauuauuuguuaacacuaacc

SEQ ID NO: 264518 - RNA, 23 nt, Artificial Sequence
  Synthetic
acuauuauuuguuaacacuaacc

SEQ ID NO: 264519 - RNA, 24 nt, Artificial Sequence
  Synthetic
aacuauuauuuguuaacacuaacc

SEQ ID NO: 264520 - RNA, 18 nt, Artificial Sequence
  Synthetic
cacugauucuuccuaacc

SEQ ID NO: 264521 - RNA, 19 nt, Artificial Sequence
  Synthetic
ccacugauucuuccuaacc

SEQ ID NO: 264522 - RNA, 20 nt, Artificial Sequence
  Synthetic
uccacugauucuuccuaacc

SEQ ID NO: 264523 - RNA, 21 nt, Artificial Sequence
  Synthetic
cuccacugauucuuccuaacc

SEQ ID NO: 264524 - RNA, 22 nt, Artificial Sequence
  Synthetic
acuccacugauucuuccuaacc

SEQ ID NO: 264525 - RNA, 23 nt, Artificial Sequence
  Synthetic
cacuccacugauucuuccuaacc

SEQ ID NO: 264526 - RNA, 24 nt, Artificial Sequence
  Synthetic
ucacuccacugauucuuccuaacc

SEQ ID NO: 264527 - RNA, 18 nt, Artificial Sequence
  Synthetic
uaaaaacuggagcuaacc

SEQ ID NO: 264528 - RNA, 19 nt, Artificial Sequence
  Synthetic
auaaaaacuggagcuaacc

SEQ ID NO: 264529 - RNA, 20 nt, Artificial Sequence
  Synthetic
aauaaaaacuggagcuaacc

SEQ ID NO: 264530 - RNA, 21 nt, Artificial Sequence
  Synthetic
aaauaaaaacuggagcuaacc

SEQ ID NO: 264531 - RNA, 22 nt, Artificial Sequence
  Synthetic
aaaauaaaaacuggagcuaacc

SEQ ID NO: 264532 - RNA, 23 nt, Artificial Sequence
  Synthetic
aaaaauaaaaacuggagcuaacc

SEQ ID NO: 264533 - RNA, 24 nt, Artificial Sequence
  Synthetic
caaaaauaaaaacuggagcuaacc

SEQ ID NO: 264534 - RNA, 18 nt, Artificial Sequence
  Synthetic
gccuaaauugggcuaacc

SEQ ID NO: 264535 - RNA, 19 nt, Artificial Sequence
  Synthetic
ggccuaaauugggcuaacc

SEQ ID NO: 264536 - RNA, 20 nt, Artificial Sequence
  Synthetic
uggccuaaauugggcuaacc

SEQ ID NO: 264537 - RNA, 21 nt, Artificial Sequence
  Synthetic
auggccuaaauugggcuaacc

SEQ ID NO: 264538 - RNA, 22 nt, Artificial Sequence
  Synthetic
gauggccuaaauugggcuaacc

SEQ ID NO: 264539 - RNA, 23 nt, Artificial Sequence
  Synthetic
agauggccuaaauugggcuaacc

SEQ ID NO: 264540 - RNA, 24 nt, Artificial Sequence
  Synthetic
uagauggccuaaauugggcuaacc

SEQ ID NO: 264541 - RNA, 18 nt, Artificial Sequence
  Synthetic
acauuugccaugcuaacc

SEQ ID NO: 264542 - RNA, 19 nt, Artificial Sequence
  Synthetic
uacauuugccaugcuaacc

SEQ ID NO: 264543 - RNA, 20 nt, Artificial Sequence
  Synthetic
auacauuugccaugcuaacc

SEQ ID NO: 264544 - RNA, 21 nt, Artificial Sequence
  Synthetic
uauacauuugccaugcuaacc

SEQ ID NO: 264545 - RNA, 22 nt, Artificial Sequence
  Synthetic
cuauacauuugccaugcuaacc

SEQ ID NO: 264546 - RNA, 23 nt, Artificial Sequence
  Synthetic
ccuauacauuugccaugcuaacc

SEQ ID NO: 264547 - RNA, 24 nt, Artificial Sequence
  Synthetic
gccuauacauuugccaugcuaacc

SEQ ID NO: 264548 - RNA, 18 nt, Artificial Sequence
  Synthetic
cacucuucacugcuaacc

SEQ ID NO: 264549 - RNA, 19 nt, Artificial Sequence
  Synthetic
ucacucuucacugcuaacc

SEQ ID NO: 264550 - RNA, 20 nt, Artificial Sequence
  Synthetic
gucacucuucacugcuaacc

SEQ ID NO: 264551 - RNA, 21 nt, Artificial Sequence
  Synthetic
agucacucuucacugcuaacc

SEQ ID NO: 264552 - RNA, 22 nt, Artificial Sequence
  Synthetic
gagucacucuucacugcuaacc

SEQ ID NO: 264553 - RNA, 23 nt, Artificial Sequence
  Synthetic
ugagucacucuucacugcuaacc

SEQ ID NO: 264554 - RNA, 24 nt, Artificial Sequence
  Synthetic
augagucacucuucacugcuaacc

SEQ ID NO: 264555 - RNA, 18 nt, Artificial Sequence
  Synthetic
caaauaacagugcuaacc

SEQ ID NO: 264556 - RNA, 19 nt, Artificial Sequence
  Synthetic
ccaaauaacagugcuaacc

SEQ ID NO: 264557 - RNA, 20 nt, Artificial Sequence
  Synthetic
uccaaauaacagugcuaacc

SEQ ID NO: 264558 - RNA, 21 nt, Artificial Sequence
  Synthetic
cuccaaauaacagugcuaacc

SEQ ID NO: 264559 - RNA, 22 nt, Artificial Sequence
  Synthetic
ucuccaaauaacagugcuaacc

SEQ ID NO: 264560 - RNA, 23 nt, Artificial Sequence
  Synthetic
gucuccaaauaacagugcuaacc

SEQ ID NO: 264561 - RNA, 24 nt, Artificial Sequence
  Synthetic
ugucuccaaauaacagugcuaacc

SEQ ID NO: 264562 - RNA, 18 nt, Artificial Sequence
  Synthetic
guguuaaguccucuaacc

SEQ ID NO: 264563 - RNA, 19 nt, Artificial Sequence
  Synthetic
aguguuaaguccucuaacc

SEQ ID NO: 264564 - RNA, 20 nt, Artificial Sequence
  Synthetic
aaguguuaaguccucuaacc

SEQ ID NO: 264565 - RNA, 21 nt, Artificial Sequence
  Synthetic
aaaguguuaaguccucuaacc

SEQ ID NO: 264566 - RNA, 22 nt, Artificial Sequence
  Synthetic
uaaaguguuaaguccucuaacc

SEQ ID NO: 264567 - RNA, 23 nt, Artificial Sequence
  Synthetic
guaaaguguuaaguccucuaacc

SEQ ID NO: 264568 - RNA, 24 nt, Artificial Sequence
  Synthetic
gguaaaguguuaaguccucuaacc

SEQ ID NO: 264569 - RNA, 18 nt, Artificial Sequence
  Synthetic
auacaauugcaaguaacc

SEQ ID NO: 264570 - RNA, 19 nt, Artificial Sequence
  Synthetic
uauacaauugcaaguaacc

SEQ ID NO: 264571 - RNA, 20 nt, Artificial Sequence
  Synthetic
guauacaauugcaaguaacc

SEQ ID NO: 264572 - RNA, 21 nt, Artificial Sequence
  Synthetic
aguauacaauugcaaguaacc

SEQ ID NO: 264573 - RNA, 22 nt, Artificial Sequence
  Synthetic
caguauacaauugcaaguaacc

SEQ ID NO: 264574 - RNA, 23 nt, Artificial Sequence
  Synthetic
ucaguauacaauugcaaguaacc

SEQ ID NO: 264575 - RNA, 24 nt, Artificial Sequence
  Synthetic
cucaguauacaauugcaaguaacc

SEQ ID NO: 264576 - RNA, 18 nt, Artificial Sequence
  Synthetic
cuuagguaucaaguaacc

SEQ ID NO: 264577 - RNA, 19 nt, Artificial Sequence
  Synthetic
ccuuagguaucaaguaacc

SEQ ID NO: 264578 - RNA, 20 nt, Artificial Sequence
  Synthetic
cccuuagguaucaaguaacc

SEQ ID NO: 264579 - RNA, 21 nt, Artificial Sequence
  Synthetic
gcccuuagguaucaaguaacc

SEQ ID NO: 264580 - RNA, 22 nt, Artificial Sequence
  Synthetic
agcccuuagguaucaaguaacc

SEQ ID NO: 264581 - RNA, 23 nt, Artificial Sequence
  Synthetic
uagcccuuagguaucaaguaacc

SEQ ID NO: 264582 - RNA, 24 nt, Artificial Sequence
  Synthetic
uuagcccuuagguaucaaguaacc

SEQ ID NO: 264583 - RNA, 18 nt, Artificial Sequence
  Synthetic
aaaaaagcugaaguaacc

SEQ ID NO: 264584 - RNA, 19 nt, Artificial Sequence
  Synthetic
aaaaaaagcugaaguaacc

SEQ ID NO: 264585 - RNA, 20 nt, Artificial Sequence
  Synthetic
uaaaaaaagcugaaguaacc

SEQ ID NO: 264586 - RNA, 21 nt, Artificial Sequence
  Synthetic
uuaaaaaaagcugaaguaacc

SEQ ID NO: 264587 - RNA, 22 nt, Artificial Sequence
  Synthetic
uuuaaaaaaagcugaaguaacc

SEQ ID NO: 264588 - RNA, 23 nt, Artificial Sequence
  Synthetic
auuuaaaaaaagcugaaguaacc

SEQ ID NO: 264589 - RNA, 24 nt, Artificial Sequence
  Synthetic
cauuuaaaaaaagcugaaguaacc

SEQ ID NO: 264590 - RNA, 18 nt, Artificial Sequence
  Synthetic
ccucacaguggaguaacc

SEQ ID NO: 264591 - RNA, 19 nt, Artificial Sequence
  Synthetic
uccucacaguggaguaacc

SEQ ID NO: 264592 - RNA, 20 nt, Artificial Sequence
  Synthetic
guccucacaguggaguaacc

SEQ ID NO: 264593 - RNA, 21 nt, Artificial Sequence
  Synthetic
uguccucacaguggaguaacc

SEQ ID NO: 264594 - RNA, 22 nt, Artificial Sequence
  Synthetic
cuguccucacaguggaguaacc

SEQ ID NO: 264595 - RNA, 23 nt, Artificial Sequence
  Synthetic
gcuguccucacaguggaguaacc

SEQ ID NO: 264596 - RNA, 24 nt, Artificial Sequence
  Synthetic
agcuguccucacaguggaguaacc

SEQ ID NO: 264597 - RNA, 18 nt, Artificial Sequence
  Synthetic
aguagaaugauaguaacc

SEQ ID NO: 264598 - RNA, 19 nt, Artificial Sequence
  Synthetic
gaguagaaugauaguaacc

SEQ ID NO: 264599 - RNA, 20 nt, Artificial Sequence
  Synthetic
agaguagaaugauaguaacc

SEQ ID NO: 264600 - RNA, 21 nt, Artificial Sequence
  Synthetic
gagaguagaaugauaguaacc

SEQ ID NO: 264601 - RNA, 22 nt, Artificial Sequence
  Synthetic
agagaguagaaugauaguaacc

SEQ ID NO: 264602 - RNA, 23 nt, Artificial Sequence
  Synthetic
cagagaguagaaugauaguaacc

SEQ ID NO: 264603 - RNA, 24 nt, Artificial Sequence
  Synthetic
ccagagaguagaaugauaguaacc

SEQ ID NO: 264604 - RNA, 18 nt, Artificial Sequence
  Synthetic
auaggggucuuaguaacc

SEQ ID NO: 264605 - RNA, 19 nt, Artificial Sequence
  Synthetic
uauaggggucuuaguaacc

SEQ ID NO: 264606 - RNA, 20 nt, Artificial Sequence
  Synthetic
uuauaggggucuuaguaacc

SEQ ID NO: 264607 - RNA, 21 nt, Artificial Sequence
  Synthetic
uuuauaggggucuuaguaacc

SEQ ID NO: 264608 - RNA, 22 nt, Artificial Sequence
  Synthetic
uuuuauaggggucuuaguaacc

SEQ ID NO: 264609 - RNA, 23 nt, Artificial Sequence
  Synthetic
auuuuauaggggucuuaguaacc

SEQ ID NO: 264610 - RNA, 24 nt, Artificial Sequence
  Synthetic
cauuuuauaggggucuuaguaacc

SEQ ID NO: 264611 - RNA, 18 nt, Artificial Sequence
  Synthetic
gcuauacuuuggguaacc

SEQ ID NO: 264612 - RNA, 19 nt, Artificial Sequence
  Synthetic
ugcuauacuuuggguaacc

SEQ ID NO: 264613 - RNA, 20 nt, Artificial Sequence
  Synthetic
gugcuauacuuuggguaacc

SEQ ID NO: 264614 - RNA, 21 nt, Artificial Sequence
  Synthetic
ugugcuauacuuuggguaacc

SEQ ID NO: 264615 - RNA, 22 nt, Artificial Sequence
  Synthetic
augugcuauacuuuggguaacc

SEQ ID NO: 264616 - RNA, 23 nt, Artificial Sequence
  Synthetic
aaugugcuauacuuuggguaacc

SEQ ID NO: 264617 - RNA, 24 nt, Artificial Sequence
  Synthetic
aaaugugcuauacuuuggguaacc

SEQ ID NO: 264618 - RNA, 18 nt, Artificial Sequence
  Synthetic
ucaaagugugugguaacc

SEQ ID NO: 264619 - RNA, 19 nt, Artificial Sequence
  Synthetic
uucaaagugugugguaacc

SEQ ID NO: 264620 - RNA, 20 nt, Artificial Sequence
  Synthetic
uuucaaagugugugguaacc

SEQ ID NO: 264621 - RNA, 21 nt, Artificial Sequence
  Synthetic
uuuucaaagugugugguaacc

SEQ ID NO: 264622 - RNA, 22 nt, Artificial Sequence
  Synthetic
cuuuucaaagugugugguaacc

SEQ ID NO: 264623 - RNA, 23 nt, Artificial Sequence
  Synthetic
gcuuuucaaagugugugguaacc

SEQ ID NO: 264624 - RNA, 24 nt, Artificial Sequence
  Synthetic
agcuuuucaaagugugugguaacc

SEQ ID NO: 264625 - RNA, 18 nt, Artificial Sequence
  Synthetic
auacacaagcauguaacc

SEQ ID NO: 264626 - RNA, 19 nt, Artificial Sequence
  Synthetic
cauacacaagcauguaacc

SEQ ID NO: 264627 - RNA, 20 nt, Artificial Sequence
  Synthetic
acauacacaagcauguaacc

SEQ ID NO: 264628 - RNA, 21 nt, Artificial Sequence
  Synthetic
cacauacacaagcauguaacc

SEQ ID NO: 264629 - RNA, 22 nt, Artificial Sequence
  Synthetic
acacauacacaagcauguaacc

SEQ ID NO: 264630 - RNA, 23 nt, Artificial Sequence
  Synthetic
cacacauacacaagcauguaacc

SEQ ID NO: 264631 - RNA, 24 nt, Artificial Sequence
  Synthetic
gcacacauacacaagcauguaacc

SEQ ID NO: 264632 - RNA, 18 nt, Artificial Sequence
  Synthetic
auuggccugauuguaacc

SEQ ID NO: 264633 - RNA, 19 nt, Artificial Sequence
  Synthetic
uauuggccugauuguaacc

SEQ ID NO: 264634 - RNA, 20 nt, Artificial Sequence
  Synthetic
cuauuggccugauuguaacc

SEQ ID NO: 264635 - RNA, 21 nt, Artificial Sequence
  Synthetic
ucuauuggccugauuguaacc

SEQ ID NO: 264636 - RNA, 22 nt, Artificial Sequence
  Synthetic
aucuauuggccugauuguaacc

SEQ ID NO: 264637 - RNA, 23 nt, Artificial Sequence
  Synthetic
aaucuauuggccugauuguaacc

SEQ ID NO: 264638 - RNA, 24 nt, Artificial Sequence
  Synthetic
caaucuauuggccugauuguaacc

SEQ ID NO: 264639 - RNA, 18 nt, Artificial Sequence
  Synthetic
cugguuaaauuuguaacc

SEQ ID NO: 264640 - RNA, 19 nt, Artificial Sequence
  Synthetic
ccugguuaaauuuguaacc

SEQ ID NO: 264641 - RNA, 20 nt, Artificial Sequence
  Synthetic
uccugguuaaauuuguaacc

SEQ ID NO: 264642 - RNA, 21 nt, Artificial Sequence
  Synthetic
cuccugguuaaauuuguaacc

SEQ ID NO: 264643 - RNA, 22 nt, Artificial Sequence
  Synthetic
ucuccugguuaaauuuguaacc

SEQ ID NO: 264644 - RNA, 23 nt, Artificial Sequence
  Synthetic
uucuccugguuaaauuuguaacc

SEQ ID NO: 264645 - RNA, 24 nt, Artificial Sequence
  Synthetic
uuucuccugguuaaauuuguaacc

SEQ ID NO: 264646 - RNA, 18 nt, Artificial Sequence
  Synthetic
cucacucuagcauuaacc

SEQ ID NO: 264647 - RNA, 19 nt, Artificial Sequence
  Synthetic
acucacucuagcauuaacc

SEQ ID NO: 264648 - RNA, 20 nt, Artificial Sequence
  Synthetic
aacucacucuagcauuaacc

SEQ ID NO: 264649 - RNA, 21 nt, Artificial Sequence
  Synthetic
uaacucacucuagcauuaacc

SEQ ID NO: 264650 - RNA, 22 nt, Artificial Sequence
  Synthetic
uuaacucacucuagcauuaacc

SEQ ID NO: 264651 - RNA, 23 nt, Artificial Sequence
  Synthetic
cuuaacucacucuagcauuaacc

SEQ ID NO: 264652 - RNA, 24 nt, Artificial Sequence
  Synthetic
ucuuaacucacucuagcauuaacc

SEQ ID NO: 264653 - RNA, 18 nt, Artificial Sequence
  Synthetic
cuacuucugugauuaacc

SEQ ID NO: 264654 - RNA, 19 nt, Artificial Sequence
  Synthetic
ucuacuucugugauuaacc

SEQ ID NO: 264655 - RNA, 20 nt, Artificial Sequence
  Synthetic
gucuacuucugugauuaacc

SEQ ID NO: 264656 - RNA, 21 nt, Artificial Sequence
  Synthetic
ugucuacuucugugauuaacc

SEQ ID NO: 264657 - RNA, 22 nt, Artificial Sequence
  Synthetic
uugucuacuucugugauuaacc

SEQ ID NO: 264658 - RNA, 23 nt, Artificial Sequence
  Synthetic
cuugucuacuucugugauuaacc

SEQ ID NO: 264659 - RNA, 24 nt, Artificial Sequence
  Synthetic
acuugucuacuucugugauuaacc

SEQ ID NO: 264660 - RNA, 18 nt, Artificial Sequence
  Synthetic
aaaggcagguaguuaacc

SEQ ID NO: 264661 - RNA, 19 nt, Artificial Sequence
  Synthetic
caaaggcagguaguuaacc

SEQ ID NO: 264662 - RNA, 20 nt, Artificial Sequence
  Synthetic
ccaaaggcagguaguuaacc

SEQ ID NO: 264663 - RNA, 21 nt, Artificial Sequence
  Synthetic
accaaaggcagguaguuaacc

SEQ ID NO: 264664 - RNA, 22 nt, Artificial Sequence
  Synthetic
gaccaaaggcagguaguuaacc

SEQ ID NO: 264665 - RNA, 23 nt, Artificial Sequence
  Synthetic
ugaccaaaggcagguaguuaacc

SEQ ID NO: 264666 - RNA, 24 nt, Artificial Sequence
  Synthetic
gugaccaaaggcagguaguuaacc

SEQ ID NO: 264667 - RNA, 18 nt, Artificial Sequence
  Synthetic
uacuuucagauguuaacc

SEQ ID NO: 264668 - RNA, 19 nt, Artificial Sequence
  Synthetic
auacuuucagauguuaacc

SEQ ID NO: 264669 - RNA, 20 nt, Artificial Sequence
  Synthetic
aauacuuucagauguuaacc

SEQ ID NO: 264670 - RNA, 21 nt, Artificial Sequence
  Synthetic
gaauacuuucagauguuaacc

SEQ ID NO: 264671 - RNA, 22 nt, Artificial Sequence
  Synthetic
ugaauacuuucagauguuaacc

SEQ ID NO: 264672 - RNA, 23 nt, Artificial Sequence
  Synthetic
gugaauacuuucagauguuaacc

SEQ ID NO: 264673 - RNA, 24 nt, Artificial Sequence
  Synthetic
ggugaauacuuucagauguuaacc

SEQ ID NO: 264674 - RNA, 18 nt, Artificial Sequence
  Synthetic
agucagcaccauuuaacc

SEQ ID NO: 264675 - RNA, 19 nt, Artificial Sequence
  Synthetic
gagucagcaccauuuaacc

SEQ ID NO: 264676 - RNA, 20 nt, Artificial Sequence
  Synthetic
ugagucagcaccauuuaacc

SEQ ID NO: 264677 - RNA, 21 nt, Artificial Sequence
  Synthetic
augagucagcaccauuuaacc

SEQ ID NO: 264678 - RNA, 22 nt, Artificial Sequence
  Synthetic
aaugagucagcaccauuuaacc

SEQ ID NO: 264679 - RNA, 23 nt, Artificial Sequence
  Synthetic
uaaugagucagcaccauuuaacc

SEQ ID NO: 264680 - RNA, 24 nt, Artificial Sequence
  Synthetic
auaaugagucagcaccauuuaacc

SEQ ID NO: 264681 - RNA, 18 nt, Artificial Sequence
  Synthetic
gcgguagccugaaacacc

SEQ ID NO: 264682 - RNA, 19 nt, Artificial Sequence
  Synthetic
ugcgguagccugaaacacc

SEQ ID NO: 264683 - RNA, 20 nt, Artificial Sequence
  Synthetic
uugcgguagccugaaacacc

SEQ ID NO: 264684 - RNA, 21 nt, Artificial Sequence
  Synthetic
uuugcgguagccugaaacacc

SEQ ID NO: 264685 - RNA, 22 nt, Artificial Sequence
  Synthetic
guuugcgguagccugaaacacc

SEQ ID NO: 264686 - RNA, 23 nt, Artificial Sequence
  Synthetic
gguuugcgguagccugaaacacc

SEQ ID NO: 264687 - RNA, 24 nt, Artificial Sequence
  Synthetic
ggguuugcgguagccugaaacacc

SEQ ID NO: 264688 - RNA, 18 nt, Artificial Sequence
  Synthetic
aagguguuuuuaaacacc

SEQ ID NO: 264689 - RNA, 19 nt, Artificial Sequence
  Synthetic
caagguguuuuuaaacacc

SEQ ID NO: 264690 - RNA, 20 nt, Artificial Sequence
  Synthetic
acaagguguuuuuaaacacc

SEQ ID NO: 264691 - RNA, 21 nt, Artificial Sequence
  Synthetic
aacaagguguuuuuaaacacc

SEQ ID NO: 264692 - RNA, 22 nt, Artificial Sequence
  Synthetic
aaacaagguguuuuuaaacacc

SEQ ID NO: 264693 - RNA, 23 nt, Artificial Sequence
  Synthetic
aaaacaagguguuuuuaaacacc

SEQ ID NO: 264694 - RNA, 24 nt, Artificial Sequence
  Synthetic
aaaaacaagguguuuuuaaacacc

SEQ ID NO: 264695 - RNA, 18 nt, Artificial Sequence
  Synthetic
uagacauaugagaacacc

SEQ ID NO: 264696 - RNA, 19 nt, Artificial Sequence
  Synthetic
auagacauaugagaacacc

SEQ ID NO: 264697 - RNA, 20 nt, Artificial Sequence
  Synthetic
gauagacauaugagaacacc

SEQ ID NO: 264698 - RNA, 21 nt, Artificial Sequence
  Synthetic
agauagacauaugagaacacc

SEQ ID NO: 264699 - RNA, 22 nt, Artificial Sequence
  Synthetic
cagauagacauaugagaacacc

SEQ ID NO: 264700 - RNA, 23 nt, Artificial Sequence
  Synthetic
ucagauagacauaugagaacacc

SEQ ID NO: 264701 - RNA, 24 nt, Artificial Sequence
  Synthetic
cucagauagacauaugagaacacc

SEQ ID NO: 264702 - RNA, 18 nt, Artificial Sequence
  Synthetic
aaggaaaagcugaacacc

SEQ ID NO: 264703 - RNA, 19 nt, Artificial Sequence
  Synthetic
aaaggaaaagcugaacacc

SEQ ID NO: 264704 - RNA, 20 nt, Artificial Sequence
  Synthetic
caaaggaaaagcugaacacc

SEQ ID NO: 264705 - RNA, 21 nt, Artificial Sequence
  Synthetic
ucaaaggaaaagcugaacacc

SEQ ID NO: 264706 - RNA, 22 nt, Artificial Sequence
  Synthetic
uucaaaggaaaagcugaacacc

SEQ ID NO: 264707 - RNA, 23 nt, Artificial Sequence
  Synthetic
uuucaaaggaaaagcugaacacc

SEQ ID NO: 264708 - RNA, 24 nt, Artificial Sequence
  Synthetic
uuuucaaaggaaaagcugaacacc

SEQ ID NO: 264709 - RNA, 18 nt, Artificial Sequence
  Synthetic
cacaacuccuugaacacc

SEQ ID NO: 264710 - RNA, 19 nt, Artificial Sequence
  Synthetic
ccacaacuccuugaacacc

SEQ ID NO: 264711 - RNA, 20 nt, Artificial Sequence
  Synthetic
gccacaacuccuugaacacc

SEQ ID NO: 264712 - RNA, 21 nt, Artificial Sequence
  Synthetic
ggccacaacuccuugaacacc

SEQ ID NO: 264713 - RNA, 22 nt, Artificial Sequence
  Synthetic
gggccacaacuccuugaacacc

SEQ ID NO: 264714 - RNA, 23 nt, Artificial Sequence
  Synthetic
ugggccacaacuccuugaacacc

SEQ ID NO: 264715 - RNA, 24 nt, Artificial Sequence
  Synthetic
uugggccacaacuccuugaacacc

SEQ ID NO: 264716 - RNA, 18 nt, Artificial Sequence
  Synthetic
uucuggcuugauaacacc

SEQ ID NO: 264717 - RNA, 19 nt, Artificial Sequence
  Synthetic
auucuggcuugauaacacc

SEQ ID NO: 264718 - RNA, 20 nt, Artificial Sequence
  Synthetic
aauucuggcuugauaacacc

SEQ ID NO: 264719 - RNA, 21 nt, Artificial Sequence
  Synthetic
uaauucuggcuugauaacacc

SEQ ID NO: 264720 - RNA, 22 nt, Artificial Sequence
  Synthetic
auaauucuggcuugauaacacc

SEQ ID NO: 264721 - RNA, 23 nt, Artificial Sequence
  Synthetic
uauaauucuggcuugauaacacc

SEQ ID NO: 264722 - RNA, 24 nt, Artificial Sequence
  Synthetic
guauaauucuggcuugauaacacc

SEQ ID NO: 264723 - RNA, 18 nt, Artificial Sequence
  Synthetic
ggcaaaauuccuaacacc

SEQ ID NO: 264724 - RNA, 19 nt, Artificial Sequence
  Synthetic
uggcaaaauuccuaacacc

SEQ ID NO: 264725 - RNA, 20 nt, Artificial Sequence
  Synthetic
uuggcaaaauuccuaacacc

SEQ ID NO: 264726 - RNA, 21 nt, Artificial Sequence
  Synthetic
cuuggcaaaauuccuaacacc

SEQ ID NO: 264727 - RNA, 22 nt, Artificial Sequence
  Synthetic
ucuuggcaaaauuccuaacacc

SEQ ID NO: 264728 - RNA, 23 nt, Artificial Sequence
  Synthetic
cucuuggcaaaauuccuaacacc

SEQ ID NO: 264729 - RNA, 24 nt, Artificial Sequence
  Synthetic
acucuuggcaaaauuccuaacacc

SEQ ID NO: 264730 - RNA, 18 nt, Artificial Sequence
  Synthetic
agguggcacauacacacc

SEQ ID NO: 264731 - RNA, 19 nt, Artificial Sequence
  Synthetic
aagguggcacauacacacc

SEQ ID NO: 264732 - RNA, 20 nt, Artificial Sequence
  Synthetic
aaagguggcacauacacacc

SEQ ID NO: 264733 - RNA, 21 nt, Artificial Sequence
  Synthetic
aaaagguggcacauacacacc

SEQ ID NO: 264734 - RNA, 22 nt, Artificial Sequence
  Synthetic
gaaaagguggcacauacacacc

SEQ ID NO: 264735 - RNA, 23 nt, Artificial Sequence
  Synthetic
agaaaagguggcacauacacacc

SEQ ID NO: 264736 - RNA, 24 nt, Artificial Sequence
  Synthetic
aagaaaagguggcacauacacacc

SEQ ID NO: 264737 - RNA, 18 nt, Artificial Sequence
  Synthetic
uagaauaucgggcacacc

SEQ ID NO: 264738 - RNA, 19 nt, Artificial Sequence
  Synthetic
cuagaauaucgggcacacc

SEQ ID NO: 264739 - RNA, 20 nt, Artificial Sequence
  Synthetic
acuagaauaucgggcacacc

SEQ ID NO: 264740 - RNA, 21 nt, Artificial Sequence
  Synthetic
uacuagaauaucgggcacacc

SEQ ID NO: 264741 - RNA, 22 nt, Artificial Sequence
  Synthetic
uuacuagaauaucgggcacacc

SEQ ID NO: 264742 - RNA, 23 nt, Artificial Sequence
  Synthetic
auuacuagaauaucgggcacacc

SEQ ID NO: 264743 - RNA, 24 nt, Artificial Sequence
  Synthetic
aauuacuagaauaucgggcacacc

SEQ ID NO: 264744 - RNA, 18 nt, Artificial Sequence
  Synthetic
gcaggacagaaucacacc

SEQ ID NO: 264745 - RNA, 19 nt, Artificial Sequence
  Synthetic
ugcaggacagaaucacacc

SEQ ID NO: 264746 - RNA, 20 nt, Artificial Sequence
  Synthetic
gugcaggacagaaucacacc

SEQ ID NO: 264747 - RNA, 21 nt, Artificial Sequence
  Synthetic
ugugcaggacagaaucacacc

SEQ ID NO: 264748 - RNA, 22 nt, Artificial Sequence
  Synthetic
cugugcaggacagaaucacacc

SEQ ID NO: 264749 - RNA, 23 nt, Artificial Sequence
  Synthetic
gcugugcaggacagaaucacacc

SEQ ID NO: 264750 - RNA, 24 nt, Artificial Sequence
  Synthetic
agcugugcaggacagaaucacacc

SEQ ID NO: 264751 - RNA, 18 nt, Artificial Sequence
  Synthetic
aaacugaaauaucacacc

SEQ ID NO: 264752 - RNA, 19 nt, Artificial Sequence
  Synthetic
uaaacugaaauaucacacc

SEQ ID NO: 264753 - RNA, 20 nt, Artificial Sequence
  Synthetic
guaaacugaaauaucacacc

SEQ ID NO: 264754 - RNA, 21 nt, Artificial Sequence
  Synthetic
aguaaacugaaauaucacacc

SEQ ID NO: 264755 - RNA, 22 nt, Artificial Sequence
  Synthetic
gaguaaacugaaauaucacacc

SEQ ID NO: 264756 - RNA, 23 nt, Artificial Sequence
  Synthetic
ugaguaaacugaaauaucacacc

SEQ ID NO: 264757 - RNA, 24 nt, Artificial Sequence
  Synthetic
cugaguaaacugaaauaucacacc

SEQ ID NO: 264758 - RNA, 18 nt, Artificial Sequence
  Synthetic
acaaaugagggagacacc

SEQ ID NO: 264759 - RNA, 19 nt, Artificial Sequence
  Synthetic
aacaaaugagggagacacc

SEQ ID NO: 264760 - RNA, 20 nt, Artificial Sequence
  Synthetic
aaacaaaugagggagacacc

SEQ ID NO: 264761 - RNA, 21 nt, Artificial Sequence
  Synthetic
gaaacaaaugagggagacacc

SEQ ID NO: 264762 - RNA, 22 nt, Artificial Sequence
  Synthetic
agaaacaaaugagggagacacc

SEQ ID NO: 264763 - RNA, 23 nt, Artificial Sequence
  Synthetic
cagaaacaaaugagggagacacc

SEQ ID NO: 264764 - RNA, 24 nt, Artificial Sequence
  Synthetic
gcagaaacaaaugagggagacacc

SEQ ID NO: 264765 - RNA, 18 nt, Artificial Sequence
  Synthetic
ugagaacacauggacacc

SEQ ID NO: 264766 - RNA, 19 nt, Artificial Sequence
  Synthetic
augagaacacauggacacc

SEQ ID NO: 264767 - RNA, 20 nt, Artificial Sequence
  Synthetic
aaugagaacacauggacacc

SEQ ID NO: 264768 - RNA, 21 nt, Artificial Sequence
  Synthetic
caaugagaacacauggacacc

SEQ ID NO: 264769 - RNA, 22 nt, Artificial Sequence
  Synthetic
gcaaugagaacacauggacacc

SEQ ID NO: 264770 - RNA, 23 nt, Artificial Sequence
  Synthetic
agcaaugagaacacauggacacc

SEQ ID NO: 264771 - RNA, 24 nt, Artificial Sequence
  Synthetic
gagcaaugagaacacauggacacc

SEQ ID NO: 264772 - RNA, 18 nt, Artificial Sequence
  Synthetic
ggaugugucauggacacc

SEQ ID NO: 264773 - RNA, 19 nt, Artificial Sequence
  Synthetic
aggaugugucauggacacc

SEQ ID NO: 264774 - RNA, 20 nt, Artificial Sequence
  Synthetic
caggaugugucauggacacc

SEQ ID NO: 264775 - RNA, 21 nt, Artificial Sequence
  Synthetic
ccaggaugugucauggacacc

SEQ ID NO: 264776 - RNA, 22 nt, Artificial Sequence
  Synthetic
accaggaugugucauggacacc

SEQ ID NO: 264777 - RNA, 23 nt, Artificial Sequence
  Synthetic
caccaggaugugucauggacacc

SEQ ID NO: 264778 - RNA, 24 nt, Artificial Sequence
  Synthetic
gcaccaggaugugucauggacacc

SEQ ID NO: 264779 - RNA, 18 nt, Artificial Sequence
  Synthetic
ucaucuguugaugacacc

SEQ ID NO: 264780 - RNA, 19 nt, Artificial Sequence
  Synthetic
uucaucuguugaugacacc

SEQ ID NO: 264781 - RNA, 20 nt, Artificial Sequence
  Synthetic
auucaucuguugaugacacc

SEQ ID NO: 264782 - RNA, 21 nt, Artificial Sequence
  Synthetic
uauucaucuguugaugacacc

SEQ ID NO: 264783 - RNA, 22 nt, Artificial Sequence
  Synthetic
uuauucaucuguugaugacacc

SEQ ID NO: 264784 - RNA, 23 nt, Artificial Sequence
  Synthetic
auuauucaucuguugaugacacc

SEQ ID NO: 264785 - RNA, 24 nt, Artificial Sequence
  Synthetic
aauuauucaucuguugaugacacc

SEQ ID NO: 264786 - RNA, 18 nt, Artificial Sequence
  Synthetic
agccucuccuuugacacc

SEQ ID NO: 264787 - RNA, 19 nt, Artificial Sequence
  Synthetic
uagccucuccuuugacacc

SEQ ID NO: 264788 - RNA, 20 nt, Artificial Sequence
  Synthetic
auagccucuccuuugacacc

SEQ ID NO: 264789 - RNA, 21 nt, Artificial Sequence
  Synthetic
cauagccucuccuuugacacc

SEQ ID NO: 264790 - RNA, 22 nt, Artificial Sequence
  Synthetic
acauagccucuccuuugacacc

SEQ ID NO: 264791 - RNA, 23 nt, Artificial Sequence
  Synthetic
cacauagccucuccuuugacacc

SEQ ID NO: 264792 - RNA, 24 nt, Artificial Sequence
  Synthetic
ccacauagccucuccuuugacacc

SEQ ID NO: 264793 - RNA, 18 nt, Artificial Sequence
  Synthetic
uacucuauuuuugacacc

SEQ ID NO: 264794 - RNA, 19 nt, Artificial Sequence
  Synthetic
auacucuauuuuugacacc

SEQ ID NO: 264795 - RNA, 20 nt, Artificial Sequence
  Synthetic
aauacucuauuuuugacacc

SEQ ID NO: 264796 - RNA, 21 nt, Artificial Sequence
  Synthetic
aaauacucuauuuuugacacc

SEQ ID NO: 264797 - RNA, 22 nt, Artificial Sequence
  Synthetic
gaaauacucuauuuuugacacc

SEQ ID NO: 264798 - RNA, 23 nt, Artificial Sequence
  Synthetic
ugaaauacucuauuuuugacacc

SEQ ID NO: 264799 - RNA, 24 nt, Artificial Sequence
  Synthetic
uugaaauacucuauuuuugacacc

SEQ ID NO: 264800 - RNA, 18 nt, Artificial Sequence
  Synthetic
cuauuucuuuaauacacc

SEQ ID NO: 264801 - RNA, 19 nt, Artificial Sequence
  Synthetic
ucuauuucuuuaauacacc

SEQ ID NO: 264802 - RNA, 20 nt, Artificial Sequence
  Synthetic
gucuauuucuuuaauacacc

SEQ ID NO: 264803 - RNA, 21 nt, Artificial Sequence
  Synthetic
ugucuauuucuuuaauacacc

SEQ ID NO: 264804 - RNA, 22 nt, Artificial Sequence
  Synthetic
cugucuauuucuuuaauacacc

SEQ ID NO: 264805 - RNA, 23 nt, Artificial Sequence
  Synthetic
gcugucuauuucuuuaauacacc

SEQ ID NO: 264806 - RNA, 24 nt, Artificial Sequence
  Synthetic
ugcugucuauuucuuuaauacacc

SEQ ID NO: 264807 - RNA, 18 nt, Artificial Sequence
  Synthetic
acguggcacagauacacc

SEQ ID NO: 264808 - RNA, 19 nt, Artificial Sequence
  Synthetic
aacguggcacagauacacc

SEQ ID NO: 264809 - RNA, 20 nt, Artificial Sequence
  Synthetic
aaacguggcacagauacacc

SEQ ID NO: 264810 - RNA, 21 nt, Artificial Sequence
  Synthetic
aaaacguggcacagauacacc

SEQ ID NO: 264811 - RNA, 22 nt, Artificial Sequence
  Synthetic
gaaaacguggcacagauacacc

SEQ ID NO: 264812 - RNA, 23 nt, Artificial Sequence
  Synthetic
agaaaacguggcacagauacacc

SEQ ID NO: 264813 - RNA, 24 nt, Artificial Sequence
  Synthetic
aagaaaacguggcacagauacacc

SEQ ID NO: 264814 - RNA, 18 nt, Artificial Sequence
  Synthetic
caggccccaauauacacc

SEQ ID NO: 264815 - RNA, 19 nt, Artificial Sequence
  Synthetic
ccaggccccaauauacacc

SEQ ID NO: 264816 - RNA, 20 nt, Artificial Sequence
  Synthetic
cccaggccccaauauacacc

SEQ ID NO: 264817 - RNA, 21 nt, Artificial Sequence
  Synthetic
gcccaggccccaauauacacc

SEQ ID NO: 264818 - RNA, 22 nt, Artificial Sequence
  Synthetic
ugcccaggccccaauauacacc

SEQ ID NO: 264819 - RNA, 23 nt, Artificial Sequence
  Synthetic
cugcccaggccccaauauacacc

SEQ ID NO: 264820 - RNA, 24 nt, Artificial Sequence
  Synthetic
ucugcccaggccccaauauacacc

SEQ ID NO: 264821 - RNA, 18 nt, Artificial Sequence
  Synthetic
auguggcacauauacacc

SEQ ID NO: 264822 - RNA, 19 nt, Artificial Sequence
  Synthetic
aauguggcacauauacacc

SEQ ID NO: 264823 - RNA, 20 nt, Artificial Sequence
  Synthetic
aaauguggcacauauacacc

SEQ ID NO: 264824 - RNA, 21 nt, Artificial Sequence
  Synthetic
aaaauguggcacauauacacc

SEQ ID NO: 264825 - RNA, 22 nt, Artificial Sequence
  Synthetic
gaaaauguggcacauauacacc

SEQ ID NO: 264826 - RNA, 23 nt, Artificial Sequence
  Synthetic
agaaaauguggcacauauacacc

SEQ ID NO: 264827 - RNA, 24 nt, Artificial Sequence
  Synthetic
aagaaaauguggcacauauacacc

SEQ ID NO: 264828 - RNA, 24 nt, Artificial Sequence
  Synthetic
gagaaaauguggcacauauacacc

SEQ ID NO: 264829 - RNA, 18 nt, Artificial Sequence
  Synthetic
augugguacauauacacc

SEQ ID NO: 264830 - RNA, 19 nt, Artificial Sequence
  Synthetic
aaugugguacauauacacc

SEQ ID NO: 264831 - RNA, 20 nt, Artificial Sequence
  Synthetic
aaaugugguacauauacacc

SEQ ID NO: 264832 - RNA, 18 nt, Artificial Sequence
  Synthetic
uucuguuggauauacacc

SEQ ID NO: 264833 - RNA, 19 nt, Artificial Sequence
  Synthetic
uuucuguuggauauacacc

SEQ ID NO: 264834 - RNA, 20 nt, Artificial Sequence
  Synthetic
auuucuguuggauauacacc

SEQ ID NO: 264835 - RNA, 21 nt, Artificial Sequence
  Synthetic
cauuucuguuggauauacacc

SEQ ID NO: 264836 - RNA, 22 nt, Artificial Sequence
  Synthetic
gcauuucuguuggauauacacc

SEQ ID NO: 264837 - RNA, 23 nt, Artificial Sequence
  Synthetic
ugcauuucuguuggauauacacc

SEQ ID NO: 264838 - RNA, 24 nt, Artificial Sequence
  Synthetic
augcauuucuguuggauauacacc

SEQ ID NO: 264839 - RNA, 18 nt, Artificial Sequence
  Synthetic
aaaaauuuucuauacacc

SEQ ID NO: 264840 - RNA, 19 nt, Artificial Sequence
  Synthetic
uaaaaauuuucuauacacc

SEQ ID NO: 264841 - RNA, 20 nt, Artificial Sequence
  Synthetic
uuaaaaauuuucuauacacc

SEQ ID NO: 264842 - RNA, 21 nt, Artificial Sequence
  Synthetic
uuuaaaaauuuucuauacacc

SEQ ID NO: 264843 - RNA, 22 nt, Artificial Sequence
  Synthetic
uuuuaaaaauuuucuauacacc

SEQ ID NO: 264844 - RNA, 23 nt, Artificial Sequence
  Synthetic
uuuuuaaaaauuuucuauacacc

SEQ ID NO: 264845 - RNA, 24 nt, Artificial Sequence
  Synthetic
cuuuuuaaaaauuuucuauacacc

SEQ ID NO: 264846 - RNA, 18 nt, Artificial Sequence
  Synthetic
ucugaaaggcacuacacc

SEQ ID NO: 264847 - RNA, 19 nt, Artificial Sequence
  Synthetic
uucugaaaggcacuacacc

SEQ ID NO: 264848 - RNA, 20 nt, Artificial Sequence
  Synthetic
uuucugaaaggcacuacacc

SEQ ID NO: 264849 - RNA, 21 nt, Artificial Sequence
  Synthetic
uuuucugaaaggcacuacacc

SEQ ID NO: 264850 - RNA, 22 nt, Artificial Sequence
  Synthetic
auuuucugaaaggcacuacacc

SEQ ID NO: 264851 - RNA, 23 nt, Artificial Sequence
  Synthetic
gauuuucugaaaggcacuacacc

SEQ ID NO: 264852 - RNA, 24 nt, Artificial Sequence
  Synthetic
agauuuucugaaaggcacuacacc

SEQ ID NO: 264853 - RNA, 18 nt, Artificial Sequence
  Synthetic
ggggacuaaccguacacc

SEQ ID NO: 264854 - RNA, 19 nt, Artificial Sequence
  Synthetic
uggggacuaaccguacacc

SEQ ID NO: 264855 - RNA, 20 nt, Artificial Sequence
  Synthetic
uuggggacuaaccguacacc

SEQ ID NO: 264856 - RNA, 21 nt, Artificial Sequence
  Synthetic
guuggggacuaaccguacacc

SEQ ID NO: 264857 - RNA, 22 nt, Artificial Sequence
  Synthetic
aguuggggacuaaccguacacc

SEQ ID NO: 264858 - RNA, 23 nt, Artificial Sequence
  Synthetic
aaguuggggacuaaccguacacc

SEQ ID NO: 264859 - RNA, 24 nt, Artificial Sequence
  Synthetic
uaaguuggggacuaaccguacacc

SEQ ID NO: 264860 - RNA, 18 nt, Artificial Sequence
  Synthetic
uguggcaaaaauuacacc

SEQ ID NO: 264861 - RNA, 19 nt, Artificial Sequence
  Synthetic
uuguggcaaaaauuacacc

SEQ ID NO: 264862 - RNA, 20 nt, Artificial Sequence
  Synthetic
auuguggcaaaaauuacacc

SEQ ID NO: 264863 - RNA, 21 nt, Artificial Sequence
  Synthetic
uauuguggcaaaaauuacacc

SEQ ID NO: 264864 - RNA, 22 nt, Artificial Sequence
  Synthetic
auauuguggcaaaaauuacacc

SEQ ID NO: 264865 - RNA, 23 nt, Artificial Sequence
  Synthetic
aauauuguggcaaaaauuacacc

SEQ ID NO: 264866 - RNA, 24 nt, Artificial Sequence
  Synthetic
aaauauuguggcaaaaauuacacc

SEQ ID NO: 264867 - RNA, 18 nt, Artificial Sequence
  Synthetic
cacugagauacuuacacc

SEQ ID NO: 264868 - RNA, 19 nt, Artificial Sequence
  Synthetic
ucacugagauacuuacacc

SEQ ID NO: 264869 - RNA, 20 nt, Artificial Sequence
  Synthetic
aucacugagauacuuacacc

SEQ ID NO: 264870 - RNA, 21 nt, Artificial Sequence
  Synthetic
aaucacugagauacuuacacc

SEQ ID NO: 264871 - RNA, 22 nt, Artificial Sequence
  Synthetic
aaaucacugagauacuuacacc

SEQ ID NO: 264872 - RNA, 23 nt, Artificial Sequence
  Synthetic
caaaucacugagauacuuacacc

SEQ ID NO: 264873 - RNA, 24 nt, Artificial Sequence
  Synthetic
ucaaaucacugagauacuuacacc

SEQ ID NO: 264874 - RNA, 18 nt, Artificial Sequence
  Synthetic
aguggcucauuaaccacc

SEQ ID NO: 264875 - RNA, 19 nt, Artificial Sequence
  Synthetic
aaguggcucauuaaccacc

SEQ ID NO: 264876 - RNA, 20 nt, Artificial Sequence
  Synthetic
aaaguggcucauuaaccacc

SEQ ID NO: 264877 - RNA, 21 nt, Artificial Sequence
  Synthetic
caaaguggcucauuaaccacc

SEQ ID NO: 264878 - RNA, 22 nt, Artificial Sequence
  Synthetic
ccaaaguggcucauuaaccacc

SEQ ID NO: 264879 - RNA, 23 nt, Artificial Sequence
  Synthetic
uccaaaguggcucauuaaccacc

SEQ ID NO: 264880 - RNA, 24 nt, Artificial Sequence
  Synthetic
auccaaaguggcucauuaaccacc

SEQ ID NO: 264881 - RNA, 18 nt, Artificial Sequence
  Synthetic
aucagcaucaacaccacc

SEQ ID NO: 264882 - RNA, 19 nt, Artificial Sequence
  Synthetic
aaucagcaucaacaccacc

SEQ ID NO: 264883 - RNA, 20 nt, Artificial Sequence
  Synthetic
caaucagcaucaacaccacc

SEQ ID NO: 264884 - RNA, 21 nt, Artificial Sequence
  Synthetic
acaaucagcaucaacaccacc

SEQ ID NO: 264885 - RNA, 22 nt, Artificial Sequence
  Synthetic
aacaaucagcaucaacaccacc

SEQ ID NO: 264886 - RNA, 23 nt, Artificial Sequence
  Synthetic
gaacaaucagcaucaacaccacc

SEQ ID NO: 264887 - RNA, 24 nt, Artificial Sequence
  Synthetic
ugaacaaucagcaucaacaccacc

SEQ ID NO: 264888 - RNA, 18 nt, Artificial Sequence
  Synthetic
ccuguggcccucaccacc

SEQ ID NO: 264889 - RNA, 19 nt, Artificial Sequence
  Synthetic
cccuguggcccucaccacc

SEQ ID NO: 264890 - RNA, 20 nt, Artificial Sequence
  Synthetic
ucccuguggcccucaccacc

SEQ ID NO: 264891 - RNA, 21 nt, Artificial Sequence
  Synthetic
cucccuguggcccucaccacc

SEQ ID NO: 264892 - RNA, 22 nt, Artificial Sequence
  Synthetic
ucucccuguggcccucaccacc

SEQ ID NO: 264893 - RNA, 23 nt, Artificial Sequence
  Synthetic
cucucccuguggcccucaccacc

SEQ ID NO: 264894 - RNA, 24 nt, Artificial Sequence
  Synthetic
ccucucccuguggcccucaccacc

SEQ ID NO: 264895 - RNA, 18 nt, Artificial Sequence
  Synthetic
acuccccaucuccccacc

SEQ ID NO: 264896 - RNA, 19 nt, Artificial Sequence
  Synthetic
uacuccccaucuccccacc

SEQ ID NO: 264897 - RNA, 20 nt, Artificial Sequence
  Synthetic
cuacuccccaucuccccacc

SEQ ID NO: 264898 - RNA, 21 nt, Artificial Sequence
  Synthetic
ucuacuccccaucuccccacc

SEQ ID NO: 264899 - RNA, 22 nt, Artificial Sequence
  Synthetic
cucuacuccccaucuccccacc

SEQ ID NO: 264900 - RNA, 23 nt, Artificial Sequence
  Synthetic
ccucuacuccccaucuccccacc

SEQ ID NO: 264901 - RNA, 24 nt, Artificial Sequence
  Synthetic
accucuacuccccaucuccccacc

SEQ ID NO: 264902 - RNA, 18 nt, Artificial Sequence
  Synthetic
ucaggugauccgcccacc

SEQ ID NO: 264903 - RNA, 19 nt, Artificial Sequence
  Synthetic
cucaggugauccgcccacc

SEQ ID NO: 264904 - RNA, 20 nt, Artificial Sequence
  Synthetic
ccucaggugauccgcccacc

SEQ ID NO: 264905 - RNA, 21 nt, Artificial Sequence
  Synthetic
accucaggugauccgcccacc

SEQ ID NO: 264906 - RNA, 22 nt, Artificial Sequence
  Synthetic
gaccucaggugauccgcccacc

SEQ ID NO: 264907 - RNA, 23 nt, Artificial Sequence
  Synthetic
ugaccucaggugauccgcccacc

SEQ ID NO: 264908 - RNA, 24 nt, Artificial Sequence
  Synthetic
cugaccucaggugauccgcccacc

SEQ ID NO: 264909 - RNA, 18 nt, Artificial Sequence
  Synthetic
agugaugacagucccacc

SEQ ID NO: 264910 - RNA, 19 nt, Artificial Sequence
  Synthetic
uagugaugacagucccacc

SEQ ID NO: 264911 - RNA, 20 nt, Artificial Sequence
  Synthetic
auagugaugacagucccacc

SEQ ID NO: 264912 - RNA, 21 nt, Artificial Sequence
  Synthetic
gauagugaugacagucccacc

SEQ ID NO: 264913 - RNA, 22 nt, Artificial Sequence
  Synthetic
ugauagugaugacagucccacc

SEQ ID NO: 264914 - RNA, 23 nt, Artificial Sequence
  Synthetic
uugauagugaugacagucccacc

SEQ ID NO: 264915 - RNA, 24 nt, Artificial Sequence
  Synthetic
auugauagugaugacagucccacc

SEQ ID NO: 264916 - RNA, 18 nt, Artificial Sequence
  Synthetic
uuguaaacagaagccacc

SEQ ID NO: 264917 - RNA, 19 nt, Artificial Sequence
  Synthetic
guuguaaacagaagccacc

SEQ ID NO: 264918 - RNA, 20 nt, Artificial Sequence
  Synthetic
uguuguaaacagaagccacc

SEQ ID NO: 264919 - RNA, 21 nt, Artificial Sequence
  Synthetic
uuguuguaaacagaagccacc

SEQ ID NO: 264920 - RNA, 22 nt, Artificial Sequence
  Synthetic
auuguuguaaacagaagccacc

SEQ ID NO: 264921 - RNA, 23 nt, Artificial Sequence
  Synthetic
cauuguuguaaacagaagccacc

SEQ ID NO: 264922 - RNA, 24 nt, Artificial Sequence
  Synthetic
gcauuguuguaaacagaagccacc

SEQ ID NO: 264923 - RNA, 18 nt, Artificial Sequence
  Synthetic
uacauacacacagccacc

SEQ ID NO: 264924 - RNA, 19 nt, Artificial Sequence
  Synthetic
auacauacacacagccacc

SEQ ID NO: 264925 - RNA, 20 nt, Artificial Sequence
  Synthetic
gauacauacacacagccacc

SEQ ID NO: 264926 - RNA, 21 nt, Artificial Sequence
  Synthetic
ugauacauacacacagccacc

SEQ ID NO: 264927 - RNA, 22 nt, Artificial Sequence
  Synthetic
gugauacauacacacagccacc

SEQ ID NO: 264928 - RNA, 23 nt, Artificial Sequence
  Synthetic
ggugauacauacacacagccacc

SEQ ID NO: 264929 - RNA, 24 nt, Artificial Sequence
  Synthetic
aggugauacauacacacagccacc

SEQ ID NO: 264930 - RNA, 18 nt, Artificial Sequence
  Synthetic
aucuucagcacagccacc

SEQ ID NO: 264931 - RNA, 19 nt, Artificial Sequence
  Synthetic
aaucuucagcacagccacc

SEQ ID NO: 264932 - RNA, 20 nt, Artificial Sequence
  Synthetic
aaaucuucagcacagccacc

SEQ ID NO: 264933 - RNA, 21 nt, Artificial Sequence
  Synthetic
caaaucuucagcacagccacc

SEQ ID NO: 264934 - RNA, 22 nt, Artificial Sequence
  Synthetic
gcaaaucuucagcacagccacc

SEQ ID NO: 264935 - RNA, 23 nt, Artificial Sequence
  Synthetic
agcaaaucuucagcacagccacc

SEQ ID NO: 264936 - RNA, 24 nt, Artificial Sequence
  Synthetic
gagcaaaucuucagcacagccacc

SEQ ID NO: 264937 - RNA, 18 nt, Artificial Sequence
  Synthetic
cagggugugauggccacc

SEQ ID NO: 264938 - RNA, 19 nt, Artificial Sequence
  Synthetic
acagggugugauggccacc

SEQ ID NO: 264939 - RNA, 20 nt, Artificial Sequence
  Synthetic
cacagggugugauggccacc

SEQ ID NO: 264940 - RNA, 21 nt, Artificial Sequence
  Synthetic
ccacagggugugauggccacc

SEQ ID NO: 264941 - RNA, 22 nt, Artificial Sequence
  Synthetic
accacagggugugauggccacc

SEQ ID NO: 264942 - RNA, 23 nt, Artificial Sequence
  Synthetic
gaccacagggugugauggccacc

SEQ ID NO: 264943 - RNA, 24 nt, Artificial Sequence
  Synthetic
ugaccacagggugugauggccacc

SEQ ID NO: 264944 - RNA, 18 nt, Artificial Sequence
  Synthetic
caagugaguuuggccacc

SEQ ID NO: 264945 - RNA, 19 nt, Artificial Sequence
  Synthetic
acaagugaguuuggccacc

SEQ ID NO: 264946 - RNA, 20 nt, Artificial Sequence
  Synthetic
aacaagugaguuuggccacc

SEQ ID NO: 264947 - RNA, 21 nt, Artificial Sequence
  Synthetic
aaacaagugaguuuggccacc

SEQ ID NO: 264948 - RNA, 22 nt, Artificial Sequence
  Synthetic
aaaacaagugaguuuggccacc

SEQ ID NO: 264949 - RNA, 23 nt, Artificial Sequence
  Synthetic
gaaaacaagugaguuuggccacc

SEQ ID NO: 264950 - RNA, 24 nt, Artificial Sequence
  Synthetic
ugaaaacaagugaguuuggccacc

SEQ ID NO: 264951 - RNA, 18 nt, Artificial Sequence
  Synthetic
gugaauggcacugccacc

SEQ ID NO: 264952 - RNA, 19 nt, Artificial Sequence
  Synthetic
ugugaauggcacugccacc

SEQ ID NO: 264953 - RNA, 20 nt, Artificial Sequence
  Synthetic
gugugaauggcacugccacc

SEQ ID NO: 264954 - RNA, 21 nt, Artificial Sequence
  Synthetic
agugugaauggcacugccacc

SEQ ID NO: 264955 - RNA, 22 nt, Artificial Sequence
  Synthetic
aagugugaauggcacugccacc

SEQ ID NO: 264956 - RNA, 23 nt, Artificial Sequence
  Synthetic
gaagugugaauggcacugccacc

SEQ ID NO: 264957 - RNA, 24 nt, Artificial Sequence
  Synthetic
agaagugugaauggcacugccacc

SEQ ID NO: 264958 - RNA, 18 nt, Artificial Sequence
  Synthetic
aauuuggucagugccacc

SEQ ID NO: 264959 - RNA, 19 nt, Artificial Sequence
  Synthetic
aaauuuggucagugccacc

SEQ ID NO: 264960 - RNA, 20 nt, Artificial Sequence
  Synthetic
aaaauuuggucagugccacc

SEQ ID NO: 264961 - RNA, 21 nt, Artificial Sequence
  Synthetic
uaaaauuuggucagugccacc

SEQ ID NO: 264962 - RNA, 22 nt, Artificial Sequence
  Synthetic
cuaaaauuuggucagugccacc

SEQ ID NO: 264963 - RNA, 23 nt, Artificial Sequence
  Synthetic
ccuaaaauuuggucagugccacc

SEQ ID NO: 264964 - RNA, 24 nt, Artificial Sequence
  Synthetic
uccuaaaauuuggucagugccacc

SEQ ID NO: 264965 - RNA, 18 nt, Artificial Sequence
  Synthetic
ugaaguucaguugccacc

SEQ ID NO: 264966 - RNA, 19 nt, Artificial Sequence
  Synthetic
cugaaguucaguugccacc

SEQ ID NO: 264967 - RNA, 20 nt, Artificial Sequence
  Synthetic
ccugaaguucaguugccacc

SEQ ID NO: 264968 - RNA, 21 nt, Artificial Sequence
  Synthetic
uccugaaguucaguugccacc

SEQ ID NO: 264969 - RNA, 22 nt, Artificial Sequence
  Synthetic
uuccugaaguucaguugccacc

SEQ ID NO: 264970 - RNA, 23 nt, Artificial Sequence
  Synthetic
auuccugaaguucaguugccacc

SEQ ID NO: 264971 - RNA, 24 nt, Artificial Sequence
  Synthetic
aauuccugaaguucaguugccacc

SEQ ID NO: 264972 - RNA, 18 nt, Artificial Sequence
  Synthetic
agggagaauaaauccacc

SEQ ID NO: 264973 - RNA, 19 nt, Artificial Sequence
  Synthetic
aagggagaauaaauccacc

SEQ ID NO: 264974 - RNA, 20 nt, Artificial Sequence
  Synthetic
uaagggagaauaaauccacc

SEQ ID NO: 264975 - RNA, 21 nt, Artificial Sequence
  Synthetic
uuaagggagaauaaauccacc

SEQ ID NO: 264976 - RNA, 22 nt, Artificial Sequence
  Synthetic
cuuaagggagaauaaauccacc

SEQ ID NO: 264977 - RNA, 23 nt, Artificial Sequence
  Synthetic
gcuuaagggagaauaaauccacc

SEQ ID NO: 264978 - RNA, 24 nt, Artificial Sequence
  Synthetic
agcuuaagggagaauaaauccacc

SEQ ID NO: 264979 - RNA, 18 nt, Artificial Sequence
  Synthetic
auguuuuauucauccacc

SEQ ID NO: 264980 - RNA, 19 nt, Artificial Sequence
  Synthetic
aauguuuuauucauccacc

SEQ ID NO: 264981 - RNA, 20 nt, Artificial Sequence
  Synthetic
aaauguuuuauucauccacc

SEQ ID NO: 264982 - RNA, 21 nt, Artificial Sequence
  Synthetic
caaauguuuuauucauccacc

SEQ ID NO: 264983 - RNA, 22 nt, Artificial Sequence
  Synthetic
acaaauguuuuauucauccacc

SEQ ID NO: 264984 - RNA, 23 nt, Artificial Sequence
  Synthetic
aacaaauguuuuauucauccacc

SEQ ID NO: 264985 - RNA, 24 nt, Artificial Sequence
  Synthetic
uaacaaauguuuuauucauccacc

SEQ ID NO: 264986 - RNA, 18 nt, Artificial Sequence
  Synthetic
auguggcacauauccacc

SEQ ID NO: 264987 - RNA, 19 nt, Artificial Sequence
  Synthetic
aauguggcacauauccacc

SEQ ID NO: 264988 - RNA, 20 nt, Artificial Sequence
  Synthetic
aaauguggcacauauccacc

SEQ ID NO: 264989 - RNA, 21 nt, Artificial Sequence
  Synthetic
aaaauguggcacauauccacc

SEQ ID NO: 264990 - RNA, 22 nt, Artificial Sequence
  Synthetic
gaaaauguggcacauauccacc

SEQ ID NO: 264991 - RNA, 23 nt, Artificial Sequence
  Synthetic
agaaaauguggcacauauccacc

SEQ ID NO: 264992 - RNA, 24 nt, Artificial Sequence
  Synthetic
aagaaaauguggcacauauccacc

SEQ ID NO: 264993 - RNA, 18 nt, Artificial Sequence
  Synthetic
guccugacacuauccacc

SEQ ID NO: 264994 - RNA, 19 nt, Artificial Sequence
  Synthetic
aguccugacacuauccacc

SEQ ID NO: 264995 - RNA, 20 nt, Artificial Sequence
  Synthetic
caguccugacacuauccacc

SEQ ID NO: 264996 - RNA, 21 nt, Artificial Sequence
  Synthetic
ucaguccugacacuauccacc

SEQ ID NO: 264997 - RNA, 22 nt, Artificial Sequence
  Synthetic
uucaguccugacacuauccacc

SEQ ID NO: 264998 - RNA, 23 nt, Artificial Sequence
  Synthetic
auucaguccugacacuauccacc

SEQ ID NO: 264999 - RNA, 24 nt, Artificial Sequence
  Synthetic
aauucaguccugacacuauccacc

SEQ ID NO: 265000 - RNA, 18 nt, Artificial Sequence
  Synthetic
caagagugaaacuccacc

SEQ ID NO: 265001 - RNA, 19 nt, Artificial Sequence
  Synthetic
gcaagagugaaacuccacc

SEQ ID NO: 265002 - RNA, 20 nt, Artificial Sequence
  Synthetic
agcaagagugaaacuccacc

SEQ ID NO: 265003 - RNA, 21 nt, Artificial Sequence
  Synthetic
cagcaagagugaaacuccacc

SEQ ID NO: 265004 - RNA, 22 nt, Artificial Sequence
  Synthetic
gcagcaagagugaaacuccacc

SEQ ID NO: 265005 - RNA, 23 nt, Artificial Sequence
  Synthetic
ggcagcaagagugaaacuccacc

SEQ ID NO: 265006 - RNA, 24 nt, Artificial Sequence
  Synthetic
gggcagcaagagugaaacuccacc

SEQ ID NO: 265007 - RNA, 18 nt, Artificial Sequence
  Synthetic
aagagaaucucuuccacc

SEQ ID NO: 265008 - RNA, 19 nt, Artificial Sequence
  Synthetic
caagagaaucucuuccacc

SEQ ID NO: 265009 - RNA, 20 nt, Artificial Sequence
  Synthetic
gcaagagaaucucuuccacc

SEQ ID NO: 265010 - RNA, 21 nt, Artificial Sequence
  Synthetic
ggcaagagaaucucuuccacc

SEQ ID NO: 265011 - RNA, 22 nt, Artificial Sequence
  Synthetic
aggcaagagaaucucuuccacc

SEQ ID NO: 265012 - RNA, 23 nt, Artificial Sequence
  Synthetic
aaggcaagagaaucucuuccacc

SEQ ID NO: 265013 - RNA, 24 nt, Artificial Sequence
  Synthetic
uaaggcaagagaaucucuuccacc

SEQ ID NO: 265014 - RNA, 18 nt, Artificial Sequence
  Synthetic
uacuuuccagguuccacc

SEQ ID NO: 265015 - RNA, 19 nt, Artificial Sequence
  Synthetic
uuacuuuccagguuccacc

SEQ ID NO: 265016 - RNA, 20 nt, Artificial Sequence
  Synthetic
auuacuuuccagguuccacc

SEQ ID NO: 265017 - RNA, 21 nt, Artificial Sequence
  Synthetic
gauuacuuuccagguuccacc

SEQ ID NO: 265018 - RNA, 22 nt, Artificial Sequence
  Synthetic
agauuacuuuccagguuccacc

SEQ ID NO: 265019 - RNA, 23 nt, Artificial Sequence
  Synthetic
gagauuacuuuccagguuccacc

SEQ ID NO: 265020 - RNA, 24 nt, Artificial Sequence
  Synthetic
ugagauuacuuuccagguuccacc

SEQ ID NO: 265021 - RNA, 18 nt, Artificial Sequence
  Synthetic
auuauauuugguuccacc

SEQ ID NO: 265022 - RNA, 19 nt, Artificial Sequence
  Synthetic
aauuauauuugguuccacc

SEQ ID NO: 265023 - RNA, 20 nt, Artificial Sequence
  Synthetic
uaauuauauuugguuccacc

SEQ ID NO: 265024 - RNA, 21 nt, Artificial Sequence
  Synthetic
guaauuauauuugguuccacc

SEQ ID NO: 265025 - RNA, 22 nt, Artificial Sequence
  Synthetic
aguaauuauauuugguuccacc

SEQ ID NO: 265026 - RNA, 23 nt, Artificial Sequence
  Synthetic
uaguaauuauauuugguuccacc

SEQ ID NO: 265027 - RNA, 24 nt, Artificial Sequence
  Synthetic
uuaguaauuauauuugguuccacc

SEQ ID NO: 265028 - RNA, 18 nt, Artificial Sequence
  Synthetic
aguaaauccacaagcacc

SEQ ID NO: 265029 - RNA, 19 nt, Artificial Sequence
  Synthetic
caguaaauccacaagcacc

SEQ ID NO: 265030 - RNA, 20 nt, Artificial Sequence
  Synthetic
acaguaaauccacaagcacc

SEQ ID NO: 265031 - RNA, 21 nt, Artificial Sequence
  Synthetic
aacaguaaauccacaagcacc

SEQ ID NO: 265032 - RNA, 22 nt, Artificial Sequence
  Synthetic
caacaguaaauccacaagcacc

SEQ ID NO: 265033 - RNA, 23 nt, Artificial Sequence
  Synthetic
ucaacaguaaauccacaagcacc

SEQ ID NO: 265034 - RNA, 24 nt, Artificial Sequence
  Synthetic
gucaacaguaaauccacaagcacc

SEQ ID NO: 265035 - RNA, 18 nt, Artificial Sequence
  Synthetic
agcaaucucugaagcacc

SEQ ID NO: 265036 - RNA, 19 nt, Artificial Sequence
  Synthetic
uagcaaucucugaagcacc

SEQ ID NO: 265037 - RNA, 20 nt, Artificial Sequence
  Synthetic
guagcaaucucugaagcacc

SEQ ID NO: 265038 - RNA, 21 nt, Artificial Sequence
  Synthetic
cguagcaaucucugaagcacc

SEQ ID NO: 265039 - RNA, 22 nt, Artificial Sequence
  Synthetic
gcguagcaaucucugaagcacc

SEQ ID NO: 265040 - RNA, 23 nt, Artificial Sequence
  Synthetic
ugcguagcaaucucugaagcacc

SEQ ID NO: 265041 - RNA, 24 nt, Artificial Sequence
  Synthetic
augcguagcaaucucugaagcacc

SEQ ID NO: 265042 - RNA, 18 nt, Artificial Sequence
  Synthetic
aauuaugauguaagcacc

SEQ ID NO: 265043 - RNA, 19 nt, Artificial Sequence
  Synthetic
caauuaugauguaagcacc

SEQ ID NO: 265044 - RNA, 20 nt, Artificial Sequence
  Synthetic
gcaauuaugauguaagcacc

SEQ ID NO: 265045 - RNA, 21 nt, Artificial Sequence
  Synthetic
ugcaauuaugauguaagcacc

SEQ ID NO: 265046 - RNA, 22 nt, Artificial Sequence
  Synthetic
cugcaauuaugauguaagcacc

SEQ ID NO: 265047 - RNA, 23 nt, Artificial Sequence
  Synthetic
ucugcaauuaugauguaagcacc

SEQ ID NO: 265048 - RNA, 24 nt, Artificial Sequence
  Synthetic
gucugcaauuaugauguaagcacc

SEQ ID NO: 265049 - RNA, 18 nt, Artificial Sequence
  Synthetic
uaucacaagaacagcacc

SEQ ID NO: 265050 - RNA, 19 nt, Artificial Sequence
  Synthetic
cuaucacaagaacagcacc

SEQ ID NO: 265051 - RNA, 20 nt, Artificial Sequence
  Synthetic
acuaucacaagaacagcacc

SEQ ID NO: 265052 - RNA, 21 nt, Artificial Sequence
  Synthetic
cacuaucacaagaacagcacc

SEQ ID NO: 265053 - RNA, 22 nt, Artificial Sequence
  Synthetic
ucacuaucacaagaacagcacc

SEQ ID NO: 265054 - RNA, 23 nt, Artificial Sequence
  Synthetic
cucacuaucacaagaacagcacc

SEQ ID NO: 265055 - RNA, 24 nt, Artificial Sequence
  Synthetic
acucacuaucacaagaacagcacc

SEQ ID NO: 265056 - RNA, 18 nt, Artificial Sequence
  Synthetic
cuggucucaugcagcacc

SEQ ID NO: 265057 - RNA, 19 nt, Artificial Sequence
  Synthetic
ccuggucucaugcagcacc

SEQ ID NO: 265058 - RNA, 20 nt, Artificial Sequence
  Synthetic
gccuggucucaugcagcacc

SEQ ID NO: 265059 - RNA, 21 nt, Artificial Sequence
  Synthetic
ggccuggucucaugcagcacc

SEQ ID NO: 265060 - RNA, 22 nt, Artificial Sequence
  Synthetic
aggccuggucucaugcagcacc

SEQ ID NO: 265061 - RNA, 23 nt, Artificial Sequence
  Synthetic
aaggccuggucucaugcagcacc

SEQ ID NO: 265062 - RNA, 24 nt, Artificial Sequence
  Synthetic
gaaggccuggucucaugcagcacc

SEQ ID NO: 265063 - RNA, 18 nt, Artificial Sequence
  Synthetic
ucccugggacagagcacc

SEQ ID NO: 265064 - RNA, 19 nt, Artificial Sequence
  Synthetic
cucccugggacagagcacc

SEQ ID NO: 265065 - RNA, 20 nt, Artificial Sequence
  Synthetic
ucucccugggacagagcacc

SEQ ID NO: 265066 - RNA, 21 nt, Artificial Sequence
  Synthetic
aucucccugggacagagcacc

SEQ ID NO: 265067 - RNA, 22 nt, Artificial Sequence
  Synthetic
caucucccugggacagagcacc

SEQ ID NO: 265068 - RNA, 23 nt, Artificial Sequence
  Synthetic
ccaucucccugggacagagcacc

SEQ ID NO: 265069 - RNA, 24 nt, Artificial Sequence
  Synthetic
cccaucucccugggacagagcacc

SEQ ID NO: 265070 - RNA, 18 nt, Artificial Sequence
  Synthetic
auggacaccuagagcacc

SEQ ID NO: 265071 - RNA, 19 nt, Artificial Sequence
  Synthetic
cauggacaccuagagcacc

SEQ ID NO: 265072 - RNA, 20 nt, Artificial Sequence
  Synthetic
ucauggacaccuagagcacc

SEQ ID NO: 265073 - RNA, 21 nt, Artificial Sequence
  Synthetic
gucauggacaccuagagcacc

SEQ ID NO: 265074 - RNA, 22 nt, Artificial Sequence
  Synthetic
ugucauggacaccuagagcacc

SEQ ID NO: 265075 - RNA, 23 nt, Artificial Sequence
  Synthetic
gugucauggacaccuagagcacc

SEQ ID NO: 265076 - RNA, 24 nt, Artificial Sequence
  Synthetic
ugugucauggacaccuagagcacc

SEQ ID NO: 265077 - RNA, 18 nt, Artificial Sequence
  Synthetic
aaccauauuaggagcacc

SEQ ID NO: 265078 - RNA, 19 nt, Artificial Sequence
  Synthetic
caaccauauuaggagcacc

SEQ ID NO: 265079 - RNA, 20 nt, Artificial Sequence
  Synthetic
ccaaccauauuaggagcacc

SEQ ID NO: 265080 - RNA, 21 nt, Artificial Sequence
  Synthetic
cccaaccauauuaggagcacc

SEQ ID NO: 265081 - RNA, 22 nt, Artificial Sequence
  Synthetic
acccaaccauauuaggagcacc

SEQ ID NO: 265082 - RNA, 23 nt, Artificial Sequence
  Synthetic
aacccaaccauauuaggagcacc

SEQ ID NO: 265083 - RNA, 24 nt, Artificial Sequence
  Synthetic
caacccaaccauauuaggagcacc

SEQ ID NO: 265084 - RNA, 18 nt, Artificial Sequence
  Synthetic
gaaggaaaugugagcacc

SEQ ID NO: 265085 - RNA, 19 nt, Artificial Sequence
  Synthetic
ugaaggaaaugugagcacc

SEQ ID NO: 265086 - RNA, 20 nt, Artificial Sequence
  Synthetic
augaaggaaaugugagcacc

SEQ ID NO: 265087 - RNA, 21 nt, Artificial Sequence
  Synthetic
caugaaggaaaugugagcacc

SEQ ID NO: 265088 - RNA, 22 nt, Artificial Sequence
  Synthetic
acaugaaggaaaugugagcacc

SEQ ID NO: 265089 - RNA, 23 nt, Artificial Sequence
  Synthetic
uacaugaaggaaaugugagcacc

SEQ ID NO: 265090 - RNA, 24 nt, Artificial Sequence
  Synthetic
auacaugaaggaaaugugagcacc

SEQ ID NO: 265091 - RNA, 18 nt, Artificial Sequence
  Synthetic
cacauacugacaggcacc

SEQ ID NO: 265092 - RNA, 19 nt, Artificial Sequence
  Synthetic
acacauacugacaggcacc

SEQ ID NO: 265093 - RNA, 20 nt, Artificial Sequence
  Synthetic
cacacauacugacaggcacc

SEQ ID NO: 265094 - RNA, 21 nt, Artificial Sequence
  Synthetic
ccacacauacugacaggcacc

SEQ ID NO: 265095 - RNA, 22 nt, Artificial Sequence
  Synthetic
uccacacauacugacaggcacc

SEQ ID NO: 265096 - RNA, 23 nt, Artificial Sequence
  Synthetic
guccacacauacugacaggcacc

SEQ ID NO: 265097 - RNA, 24 nt, Artificial Sequence
  Synthetic
gguccacacauacugacaggcacc

SEQ ID NO: 265098 - RNA, 18 nt, Artificial Sequence
  Synthetic
uagccaagagcaggcacc

SEQ ID NO: 265099 - RNA, 19 nt, Artificial Sequence
  Synthetic
cuagccaagagcaggcacc

SEQ ID NO: 265100 - RNA, 20 nt, Artificial Sequence
  Synthetic
acuagccaagagcaggcacc

SEQ ID NO: 265101 - RNA, 21 nt, Artificial Sequence
  Synthetic
cacuagccaagagcaggcacc

SEQ ID NO: 265102 - RNA, 22 nt, Artificial Sequence
  Synthetic
gcacuagccaagagcaggcacc

SEQ ID NO: 265103 - RNA, 23 nt, Artificial Sequence
  Synthetic
ugcacuagccaagagcaggcacc

SEQ ID NO: 265104 - RNA, 24 nt, Artificial Sequence
  Synthetic
uugcacuagccaagagcaggcacc

SEQ ID NO: 265105 - RNA, 18 nt, Artificial Sequence
  Synthetic
aucauggcauuaggcacc

SEQ ID NO: 265106 - RNA, 19 nt, Artificial Sequence
  Synthetic
caucauggcauuaggcacc

SEQ ID NO: 265107 - RNA, 20 nt, Artificial Sequence
  Synthetic
ucaucauggcauuaggcacc

SEQ ID NO: 265108 - RNA, 21 nt, Artificial Sequence
  Synthetic
cucaucauggcauuaggcacc

SEQ ID NO: 265109 - RNA, 22 nt, Artificial Sequence
  Synthetic
gcucaucauggcauuaggcacc

SEQ ID NO: 265110 - RNA, 23 nt, Artificial Sequence
  Synthetic
agcucaucauggcauuaggcacc

SEQ ID NO: 265111 - RNA, 24 nt, Artificial Sequence
  Synthetic
gagcucaucauggcauuaggcacc

SEQ ID NO: 265112 - RNA, 18 nt, Artificial Sequence
  Synthetic
caucaugaggauggcacc

SEQ ID NO: 265113 - RNA, 19 nt, Artificial Sequence
  Synthetic
ucaucaugaggauggcacc

SEQ ID NO: 265114 - RNA, 20 nt, Artificial Sequence
  Synthetic
aucaucaugaggauggcacc

SEQ ID NO: 265115 - RNA, 21 nt, Artificial Sequence
  Synthetic
caucaucaugaggauggcacc

SEQ ID NO: 265116 - RNA, 22 nt, Artificial Sequence
  Synthetic
ucaucaucaugaggauggcacc

SEQ ID NO: 265117 - RNA, 23 nt, Artificial Sequence
  Synthetic
cucaucaucaugaggauggcacc

SEQ ID NO: 265118 - RNA, 24 nt, Artificial Sequence
  Synthetic
acucaucaucaugaggauggcacc

SEQ ID NO: 265119 - RNA, 18 nt, Artificial Sequence
  Synthetic
ggcacuguuuguggcacc

SEQ ID NO: 265120 - RNA, 19 nt, Artificial Sequence
  Synthetic
gggcacuguuuguggcacc

SEQ ID NO: 265121 - RNA, 20 nt, Artificial Sequence
  Synthetic
ugggcacuguuuguggcacc

SEQ ID NO: 265122 - RNA, 21 nt, Artificial Sequence
  Synthetic
augggcacuguuuguggcacc

SEQ ID NO: 265123 - RNA, 22 nt, Artificial Sequence
  Synthetic
uaugggcacuguuuguggcacc

SEQ ID NO: 265124 - RNA, 23 nt, Artificial Sequence
  Synthetic
auaugggcacuguuuguggcacc

SEQ ID NO: 265125 - RNA, 24 nt, Artificial Sequence
  Synthetic
uauaugggcacuguuuguggcacc

SEQ ID NO: 265126 - RNA, 18 nt, Artificial Sequence
  Synthetic
auucucugagaaugcacc

SEQ ID NO: 265127 - RNA, 19 nt, Artificial Sequence
  Synthetic
cauucucugagaaugcacc

SEQ ID NO: 265128 - RNA, 20 nt, Artificial Sequence
  Synthetic
gcauucucugagaaugcacc

SEQ ID NO: 265129 - RNA, 21 nt, Artificial Sequence
  Synthetic
agcauucucugagaaugcacc

SEQ ID NO: 265130 - RNA, 22 nt, Artificial Sequence
  Synthetic
cagcauucucugagaaugcacc

SEQ ID NO: 265131 - RNA, 23 nt, Artificial Sequence
  Synthetic
acagcauucucugagaaugcacc

SEQ ID NO: 265132 - RNA, 24 nt, Artificial Sequence
  Synthetic
gacagcauucucugagaaugcacc

SEQ ID NO: 265133 - RNA, 18 nt, Artificial Sequence
  Synthetic
acgugguauacaugcacc

SEQ ID NO: 265134 - RNA, 19 nt, Artificial Sequence
  Synthetic
aacgugguauacaugcacc

SEQ ID NO: 265135 - RNA, 20 nt, Artificial Sequence
  Synthetic
aaacgugguauacaugcacc

SEQ ID NO: 265136 - RNA, 21 nt, Artificial Sequence
  Synthetic
uaaacgugguauacaugcacc

SEQ ID NO: 265137 - RNA, 22 nt, Artificial Sequence
  Synthetic
auaaacgugguauacaugcacc

SEQ ID NO: 265138 - RNA, 23 nt, Artificial Sequence
  Synthetic
aauaaacgugguauacaugcacc

SEQ ID NO: 265139 - RNA, 24 nt, Artificial Sequence
  Synthetic
aaauaaacgugguauacaugcacc

SEQ ID NO: 265140 - RNA, 18 nt, Artificial Sequence
  Synthetic
cuuauuaaguuaugcacc

SEQ ID NO: 265141 - RNA, 19 nt, Artificial Sequence
  Synthetic
acuuauuaaguuaugcacc

SEQ ID NO: 265142 - RNA, 20 nt, Artificial Sequence
  Synthetic
gacuuauuaaguuaugcacc

SEQ ID NO: 265143 - RNA, 21 nt, Artificial Sequence
  Synthetic
ugacuuauuaaguuaugcacc

SEQ ID NO: 265144 - RNA, 22 nt, Artificial Sequence
  Synthetic
cugacuuauuaaguuaugcacc

SEQ ID NO: 265145 - RNA, 23 nt, Artificial Sequence
  Synthetic
gcugacuuauuaaguuaugcacc

SEQ ID NO: 265146 - RNA, 24 nt, Artificial Sequence
  Synthetic
ugcugacuuauuaaguuaugcacc

SEQ ID NO: 265147 - RNA, 18 nt, Artificial Sequence
  Synthetic
ucaaguuccugcugcacc

SEQ ID NO: 265148 - RNA, 19 nt, Artificial Sequence
  Synthetic
aucaaguuccugcugcacc

SEQ ID NO: 265149 - RNA, 20 nt, Artificial Sequence
  Synthetic
aaucaaguuccugcugcacc

SEQ ID NO: 265150 - RNA, 21 nt, Artificial Sequence
  Synthetic
caaucaaguuccugcugcacc

SEQ ID NO: 265151 - RNA, 22 nt, Artificial Sequence
  Synthetic
ccaaucaaguuccugcugcacc

SEQ ID NO: 265152 - RNA, 23 nt, Artificial Sequence
  Synthetic
cccaaucaaguuccugcugcacc

SEQ ID NO: 265153 - RNA, 24 nt, Artificial Sequence
  Synthetic
ccccaaucaaguuccugcugcacc

SEQ ID NO: 265154 - RNA, 18 nt, Artificial Sequence
  Synthetic
auugguaauuaaaucacc

SEQ ID NO: 265155 - RNA, 19 nt, Artificial Sequence
  Synthetic
uauugguaauuaaaucacc

SEQ ID NO: 265156 - RNA, 20 nt, Artificial Sequence
  Synthetic
uuauugguaauuaaaucacc

SEQ ID NO: 265157 - RNA, 21 nt, Artificial Sequence
  Synthetic
auuauugguaauuaaaucacc

SEQ ID NO: 265158 - RNA, 22 nt, Artificial Sequence
  Synthetic
gauuauugguaauuaaaucacc

SEQ ID NO: 265159 - RNA, 23 nt, Artificial Sequence
  Synthetic
agauuauugguaauuaaaucacc

SEQ ID NO: 265160 - RNA, 24 nt, Artificial Sequence
  Synthetic
aagauuauugguaauuaaaucacc

SEQ ID NO: 265161 - RNA, 18 nt, Artificial Sequence
  Synthetic
gcauacaucagaaucacc

SEQ ID NO: 265162 - RNA, 19 nt, Artificial Sequence
  Synthetic
agcauacaucagaaucacc

SEQ ID NO: 265163 - RNA, 20 nt, Artificial Sequence
  Synthetic
cagcauacaucagaaucacc

SEQ ID NO: 265164 - RNA, 21 nt, Artificial Sequence
  Synthetic
ucagcauacaucagaaucacc

SEQ ID NO: 265165 - RNA, 22 nt, Artificial Sequence
  Synthetic
cucagcauacaucagaaucacc

SEQ ID NO: 265166 - RNA, 23 nt, Artificial Sequence
  Synthetic
ccucagcauacaucagaaucacc

SEQ ID NO: 265167 - RNA, 24 nt, Artificial Sequence
  Synthetic
accucagcauacaucagaaucacc

SEQ ID NO: 265168 - RNA, 18 nt, Artificial Sequence
  Synthetic
augugcaucagaaucacc

SEQ ID NO: 265169 - RNA, 19 nt, Artificial Sequence
  Synthetic
gaugugcaucagaaucacc

SEQ ID NO: 265170 - RNA, 20 nt, Artificial Sequence
  Synthetic
ugaugugcaucagaaucacc

SEQ ID NO: 265171 - RNA, 21 nt, Artificial Sequence
  Synthetic
uugaugugcaucagaaucacc

SEQ ID NO: 265172 - RNA, 22 nt, Artificial Sequence
  Synthetic
uuugaugugcaucagaaucacc

SEQ ID NO: 265173 - RNA, 23 nt, Artificial Sequence
  Synthetic
cuuugaugugcaucagaaucacc

SEQ ID NO: 265174 - RNA, 24 nt, Artificial Sequence
  Synthetic
acuuugaugugcaucagaaucacc

SEQ ID NO: 265175 - RNA, 18 nt, Artificial Sequence
  Synthetic
acugaaacaggaaucacc

SEQ ID NO: 265176 - RNA, 19 nt, Artificial Sequence
  Synthetic
uacugaaacaggaaucacc

SEQ ID NO: 265177 - RNA, 20 nt, Artificial Sequence
  Synthetic
uuacugaaacaggaaucacc

SEQ ID NO: 265178 - RNA, 21 nt, Artificial Sequence
  Synthetic
cuuacugaaacaggaaucacc

SEQ ID NO: 265179 - RNA, 22 nt, Artificial Sequence
  Synthetic
acuuacugaaacaggaaucacc

SEQ ID NO: 265180 - RNA, 23 nt, Artificial Sequence
  Synthetic
gacuuacugaaacaggaaucacc

SEQ ID NO: 265181 - RNA, 24 nt, Artificial Sequence
  Synthetic
ugacuuacugaaacaggaaucacc

SEQ ID NO: 265182 - RNA, 18 nt, Artificial Sequence
  Synthetic
uugcguaucugaaucacc

SEQ ID NO: 265183 - RNA, 19 nt, Artificial Sequence
  Synthetic
auugcguaucugaaucacc

SEQ ID NO: 265184 - RNA, 20 nt, Artificial Sequence
  Synthetic
gauugcguaucugaaucacc

SEQ ID NO: 265185 - RNA, 21 nt, Artificial Sequence
  Synthetic
ugauugcguaucugaaucacc

SEQ ID NO: 265186 - RNA, 22 nt, Artificial Sequence
  Synthetic
uugauugcguaucugaaucacc

SEQ ID NO: 265187 - RNA, 23 nt, Artificial Sequence
  Synthetic
uuugauugcguaucugaaucacc

SEQ ID NO: 265188 - RNA, 24 nt, Artificial Sequence
  Synthetic
cuuugauugcguaucugaaucacc

SEQ ID NO: 265189 - RNA, 18 nt, Artificial Sequence
  Synthetic
ugggguuuuuuaaucacc

SEQ ID NO: 265190 - RNA, 19 nt, Artificial Sequence
  Synthetic
uugggguuuuuuaaucacc

SEQ ID NO: 265191 - RNA, 20 nt, Artificial Sequence
  Synthetic
uuugggguuuuuuaaucacc

SEQ ID NO: 265192 - RNA, 21 nt, Artificial Sequence
  Synthetic
guuugggguuuuuuaaucacc

SEQ ID NO: 265193 - RNA, 22 nt, Artificial Sequence
  Synthetic
uguuugggguuuuuuaaucacc

SEQ ID NO: 265194 - RNA, 23 nt, Artificial Sequence
  Synthetic
uuguuugggguuuuuuaaucacc

SEQ ID NO: 265195 - RNA, 24 nt, Artificial Sequence
  Synthetic
auuguuugggguuuuuuaaucacc

SEQ ID NO: 265196 - RNA, 18 nt, Artificial Sequence
  Synthetic
cagagcacagacaucacc

SEQ ID NO: 265197 - RNA, 19 nt, Artificial Sequence
  Synthetic
ccagagcacagacaucacc

SEQ ID NO: 265198 - RNA, 20 nt, Artificial Sequence
  Synthetic
uccagagcacagacaucacc

SEQ ID NO: 265199 - RNA, 21 nt, Artificial Sequence
  Synthetic
guccagagcacagacaucacc

SEQ ID NO: 265200 - RNA, 22 nt, Artificial Sequence
  Synthetic
gguccagagcacagacaucacc

SEQ ID NO: 265201 - RNA, 23 nt, Artificial Sequence
  Synthetic
ugguccagagcacagacaucacc

SEQ ID NO: 265202 - RNA, 24 nt, Artificial Sequence
  Synthetic
cugguccagagcacagacaucacc

SEQ ID NO: 265203 - RNA, 18 nt, Artificial Sequence
  Synthetic
cuuccuaaugucaucacc

SEQ ID NO: 265204 - RNA, 19 nt, Artificial Sequence
  Synthetic
acuuccuaaugucaucacc

SEQ ID NO: 265205 - RNA, 20 nt, Artificial Sequence
  Synthetic
cacuuccuaaugucaucacc

SEQ ID NO: 265206 - RNA, 21 nt, Artificial Sequence
  Synthetic
ccacuuccuaaugucaucacc

SEQ ID NO: 265207 - RNA, 22 nt, Artificial Sequence
  Synthetic
cccacuuccuaaugucaucacc

SEQ ID NO: 265208 - RNA, 23 nt, Artificial Sequence
  Synthetic
ccccacuuccuaaugucaucacc

SEQ ID NO: 265209 - RNA, 24 nt, Artificial Sequence
  Synthetic
gccccacuuccuaaugucaucacc

SEQ ID NO: 265210 - RNA, 18 nt, Artificial Sequence
  Synthetic
acucucuccaagaucacc

SEQ ID NO: 265211 - RNA, 19 nt, Artificial Sequence
  Synthetic
gacucucuccaagaucacc

SEQ ID NO: 265212 - RNA, 20 nt, Artificial Sequence
  Synthetic
ugacucucuccaagaucacc

SEQ ID NO: 265213 - RNA, 21 nt, Artificial Sequence
  Synthetic
uugacucucuccaagaucacc

SEQ ID NO: 265214 - RNA, 22 nt, Artificial Sequence
  Synthetic
auugacucucuccaagaucacc

SEQ ID NO: 265215 - RNA, 23 nt, Artificial Sequence
  Synthetic
cauugacucucuccaagaucacc

SEQ ID NO: 265216 - RNA, 24 nt, Artificial Sequence
  Synthetic
ucauugacucucuccaagaucacc

SEQ ID NO: 265217 - RNA, 18 nt, Artificial Sequence
  Synthetic
acacuuguggagaucacc

SEQ ID NO: 265218 - RNA, 19 nt, Artificial Sequence
  Synthetic
aacacuuguggagaucacc

SEQ ID NO: 265219 - RNA, 20 nt, Artificial Sequence
  Synthetic
caacacuuguggagaucacc

SEQ ID NO: 265220 - RNA, 21 nt, Artificial Sequence
  Synthetic
ccaacacuuguggagaucacc

SEQ ID NO: 265221 - RNA, 22 nt, Artificial Sequence
  Synthetic
uccaacacuuguggagaucacc

SEQ ID NO: 265222 - RNA, 23 nt, Artificial Sequence
  Synthetic
uuccaacacuuguggagaucacc

SEQ ID NO: 265223 - RNA, 24 nt, Artificial Sequence
  Synthetic
cuuccaacacuuguggagaucacc

SEQ ID NO: 265224 - RNA, 18 nt, Artificial Sequence
  Synthetic
uuuaauaauaugaucacc

SEQ ID NO: 265225 - RNA, 19 nt, Artificial Sequence
  Synthetic
cuuuaauaauaugaucacc

SEQ ID NO: 265226 - RNA, 20 nt, Artificial Sequence
  Synthetic
ccuuuaauaauaugaucacc

SEQ ID NO: 265227 - RNA, 21 nt, Artificial Sequence
  Synthetic
accuuuaauaauaugaucacc

SEQ ID NO: 265228 - RNA, 22 nt, Artificial Sequence
  Synthetic
uaccuuuaauaauaugaucacc

SEQ ID NO: 265229 - RNA, 23 nt, Artificial Sequence
  Synthetic
cuaccuuuaauaauaugaucacc

SEQ ID NO: 265230 - RNA, 24 nt, Artificial Sequence
  Synthetic
acuaccuuuaauaauaugaucacc

SEQ ID NO: 265231 - RNA, 18 nt, Artificial Sequence
  Synthetic
uucaguguuaauaucacc

SEQ ID NO: 265232 - RNA, 19 nt, Artificial Sequence
  Synthetic
cuucaguguuaauaucacc

SEQ ID NO: 265233 - RNA, 20 nt, Artificial Sequence
  Synthetic
ucuucaguguuaauaucacc

SEQ ID NO: 265234 - RNA, 21 nt, Artificial Sequence
  Synthetic
cucuucaguguuaauaucacc

SEQ ID NO: 265235 - RNA, 22 nt, Artificial Sequence
  Synthetic
ccucuucaguguuaauaucacc

SEQ ID NO: 265236 - RNA, 23 nt, Artificial Sequence
  Synthetic
cccucuucaguguuaauaucacc

SEQ ID NO: 265237 - RNA, 24 nt, Artificial Sequence
  Synthetic
gcccucuucaguguuaauaucacc

SEQ ID NO: 265238 - RNA, 18 nt, Artificial Sequence
  Synthetic
auguguggugauaucacc

SEQ ID NO: 265239 - RNA, 19 nt, Artificial Sequence
  Synthetic
aauguguggugauaucacc

SEQ ID NO: 265240 - RNA, 20 nt, Artificial Sequence
  Synthetic
gaauguguggugauaucacc

SEQ ID NO: 265241 - RNA, 21 nt, Artificial Sequence
  Synthetic
ggaauguguggugauaucacc

SEQ ID NO: 265242 - RNA, 22 nt, Artificial Sequence
  Synthetic
uggaauguguggugauaucacc

SEQ ID NO: 265243 - RNA, 23 nt, Artificial Sequence
  Synthetic
uuggaauguguggugauaucacc

SEQ ID NO: 265244 - RNA, 24 nt, Artificial Sequence
  Synthetic
auuggaauguguggugauaucacc

SEQ ID NO: 265245 - RNA, 18 nt, Artificial Sequence
  Synthetic
guuuauuucacuaucacc

SEQ ID NO: 265246 - RNA, 19 nt, Artificial Sequence
  Synthetic
uguuuauuucacuaucacc

SEQ ID NO: 265247 - RNA, 20 nt, Artificial Sequence
  Synthetic
uuguuuauuucacuaucacc

SEQ ID NO: 265248 - RNA, 21 nt, Artificial Sequence
  Synthetic
auuguuuauuucacuaucacc

SEQ ID NO: 265249 - RNA, 22 nt, Artificial Sequence
  Synthetic
uauuguuuauuucacuaucacc

SEQ ID NO: 265250 - RNA, 23 nt, Artificial Sequence
  Synthetic
guauuguuuauuucacuaucacc

SEQ ID NO: 265251 - RNA, 24 nt, Artificial Sequence
  Synthetic
gguauuguuuauuucacuaucacc

SEQ ID NO: 265252 - RNA, 18 nt, Artificial Sequence
  Synthetic
uuaggcacuuuuaucacc

SEQ ID NO: 265253 - RNA, 19 nt, Artificial Sequence
  Synthetic
auuaggcacuuuuaucacc

SEQ ID NO: 265254 - RNA, 20 nt, Artificial Sequence
  Synthetic
aauuaggcacuuuuaucacc

SEQ ID NO: 265255 - RNA, 21 nt, Artificial Sequence
  Synthetic
uaauuaggcacuuuuaucacc

SEQ ID NO: 265256 - RNA, 22 nt, Artificial Sequence
  Synthetic
auaauuaggcacuuuuaucacc

SEQ ID NO: 265257 - RNA, 23 nt, Artificial Sequence
  Synthetic
aauaauuaggcacuuuuaucacc

SEQ ID NO: 265258 - RNA, 24 nt, Artificial Sequence
  Synthetic
gaauaauuaggcacuuuuaucacc

SEQ ID NO: 265259 - RNA, 18 nt, Artificial Sequence
  Synthetic
gaggccaggaaacucacc

SEQ ID NO: 265260 - RNA, 19 nt, Artificial Sequence
  Synthetic
agaggccaggaaacucacc

SEQ ID NO: 265261 - RNA, 20 nt, Artificial Sequence
  Synthetic
aagaggccaggaaacucacc

SEQ ID NO: 265262 - RNA, 21 nt, Artificial Sequence
  Synthetic
aaagaggccaggaaacucacc

SEQ ID NO: 265263 - RNA, 22 nt, Artificial Sequence
  Synthetic
caaagaggccaggaaacucacc

SEQ ID NO: 265264 - RNA, 23 nt, Artificial Sequence
  Synthetic
ccaaagaggccaggaaacucacc

SEQ ID NO: 265265 - RNA, 24 nt, Artificial Sequence
  Synthetic
uccaaagaggccaggaaacucacc

SEQ ID NO: 265266 - RNA, 18 nt, Artificial Sequence
  Synthetic
gaauaaucaucccucacc

SEQ ID NO: 265267 - RNA, 19 nt, Artificial Sequence
  Synthetic
agaauaaucaucccucacc

SEQ ID NO: 265268 - RNA, 20 nt, Artificial Sequence
  Synthetic
gagaauaaucaucccucacc

SEQ ID NO: 265269 - RNA, 21 nt, Artificial Sequence
  Synthetic
cgagaauaaucaucccucacc

SEQ ID NO: 265270 - RNA, 22 nt, Artificial Sequence
  Synthetic
acgagaauaaucaucccucacc

SEQ ID NO: 265271 - RNA, 23 nt, Artificial Sequence
  Synthetic
uacgagaauaaucaucccucacc

SEQ ID NO: 265272 - RNA, 24 nt, Artificial Sequence
  Synthetic
auacgagaauaaucaucccucacc

SEQ ID NO: 265273 - RNA, 18 nt, Artificial Sequence
  Synthetic
gugggaugucgccucacc

SEQ ID NO: 265274 - RNA, 19 nt, Artificial Sequence
  Synthetic
ggugggaugucgccucacc

SEQ ID NO: 265275 - RNA, 20 nt, Artificial Sequence
  Synthetic
cggugggaugucgccucacc

SEQ ID NO: 265276 - RNA, 21 nt, Artificial Sequence
  Synthetic
acggugggaugucgccucacc

SEQ ID NO: 265277 - RNA, 22 nt, Artificial Sequence
  Synthetic
cacggugggaugucgccucacc

SEQ ID NO: 265278 - RNA, 23 nt, Artificial Sequence
  Synthetic
gcacggugggaugucgccucacc

SEQ ID NO: 265279 - RNA, 24 nt, Artificial Sequence
  Synthetic
agcacggugggaugucgccucacc

SEQ ID NO: 265280 - RNA, 18 nt, Artificial Sequence
  Synthetic
aauugucccaggcucacc

SEQ ID NO: 265281 - RNA, 19 nt, Artificial Sequence
  Synthetic
caauugucccaggcucacc

SEQ ID NO: 265282 - RNA, 20 nt, Artificial Sequence
  Synthetic
ucaauugucccaggcucacc

SEQ ID NO: 265283 - RNA, 21 nt, Artificial Sequence
  Synthetic
cucaauugucccaggcucacc

SEQ ID NO: 265284 - RNA, 22 nt, Artificial Sequence
  Synthetic
gcucaauugucccaggcucacc

SEQ ID NO: 265285 - RNA, 23 nt, Artificial Sequence
  Synthetic
ugcucaauugucccaggcucacc

SEQ ID NO: 265286 - RNA, 24 nt, Artificial Sequence
  Synthetic
cugcucaauugucccaggcucacc

SEQ ID NO: 265287 - RNA, 18 nt, Artificial Sequence
  Synthetic
ggucucaguuuucucacc

SEQ ID NO: 265288 - RNA, 19 nt, Artificial Sequence
  Synthetic
uggucucaguuuucucacc

SEQ ID NO: 265289 - RNA, 20 nt, Artificial Sequence
  Synthetic
guggucucaguuuucucacc

SEQ ID NO: 265290 - RNA, 21 nt, Artificial Sequence
  Synthetic
uguggucucaguuuucucacc

SEQ ID NO: 265291 - RNA, 22 nt, Artificial Sequence
  Synthetic
cuguggucucaguuuucucacc

SEQ ID NO: 265292 - RNA, 23 nt, Artificial Sequence
  Synthetic
ucuguggucucaguuuucucacc

SEQ ID NO: 265293 - RNA, 24 nt, Artificial Sequence
  Synthetic
cucuguggucucaguuuucucacc

SEQ ID NO: 265294 - RNA, 18 nt, Artificial Sequence
  Synthetic
ucauaucccagcgucacc

SEQ ID NO: 265295 - RNA, 19 nt, Artificial Sequence
  Synthetic
uucauaucccagcgucacc

SEQ ID NO: 265296 - RNA, 20 nt, Artificial Sequence
  Synthetic
uuucauaucccagcgucacc

SEQ ID NO: 265297 - RNA, 21 nt, Artificial Sequence
  Synthetic
uuuucauaucccagcgucacc

SEQ ID NO: 265298 - RNA, 22 nt, Artificial Sequence
  Synthetic
uuuuucauaucccagcgucacc

SEQ ID NO: 265299 - RNA, 23 nt, Artificial Sequence
  Synthetic
uuuuuucauaucccagcgucacc

SEQ ID NO: 265300 - RNA, 24 nt, Artificial Sequence
  Synthetic
uuuuuuucauaucccagcgucacc

SEQ ID NO: 265301 - RNA, 18 nt, Artificial Sequence
  Synthetic
uucucuguuugggucacc

SEQ ID NO: 265302 - RNA, 19 nt, Artificial Sequence
  Synthetic
auucucuguuugggucacc

SEQ ID NO: 265303 - RNA, 20 nt, Artificial Sequence
  Synthetic
aauucucuguuugggucacc

SEQ ID NO: 265304 - RNA, 21 nt, Artificial Sequence
  Synthetic
caauucucuguuugggucacc

SEQ ID NO: 265305 - RNA, 22 nt, Artificial Sequence
  Synthetic
acaauucucuguuugggucacc

SEQ ID NO: 265306 - RNA, 23 nt, Artificial Sequence
  Synthetic
aacaauucucuguuugggucacc

SEQ ID NO: 265307 - RNA, 24 nt, Artificial Sequence
  Synthetic
uaacaauucucuguuugggucacc

SEQ ID NO: 265308 - RNA, 18 nt, Artificial Sequence
  Synthetic
gaauuuaagcuggucacc

SEQ ID NO: 265309 - RNA, 19 nt, Artificial Sequence
  Synthetic
ugaauuuaagcuggucacc

SEQ ID NO: 265310 - RNA, 20 nt, Artificial Sequence
  Synthetic
cugaauuuaagcuggucacc

SEQ ID NO: 265311 - RNA, 21 nt, Artificial Sequence
  Synthetic
gcugaauuuaagcuggucacc

SEQ ID NO: 265312 - RNA, 22 nt, Artificial Sequence
  Synthetic
agcugaauuuaagcuggucacc

SEQ ID NO: 265313 - RNA, 23 nt, Artificial Sequence
  Synthetic
aagcugaauuuaagcuggucacc

SEQ ID NO: 265314 - RNA, 24 nt, Artificial Sequence
  Synthetic
gaagcugaauuuaagcuggucacc

SEQ ID NO: 265315 - RNA, 18 nt, Artificial Sequence
  Synthetic
cugacuagcuaugucacc

SEQ ID NO: 265316 - RNA, 19 nt, Artificial Sequence
  Synthetic
acugacuagcuaugucacc

SEQ ID NO: 265317 - RNA, 20 nt, Artificial Sequence
  Synthetic
cacugacuagcuaugucacc

SEQ ID NO: 265318 - RNA, 21 nt, Artificial Sequence
  Synthetic
ucacugacuagcuaugucacc

SEQ ID NO: 265319 - RNA, 22 nt, Artificial Sequence
  Synthetic
uucacugacuagcuaugucacc

SEQ ID NO: 265320 - RNA, 23 nt, Artificial Sequence
  Synthetic
uuucacugacuagcuaugucacc

SEQ ID NO: 265321 - RNA, 24 nt, Artificial Sequence
  Synthetic
cuuucacugacuagcuaugucacc

SEQ ID NO: 265322 - RNA, 18 nt, Artificial Sequence
  Synthetic
cugucuauuucauucacc

SEQ ID NO: 265323 - RNA, 19 nt, Artificial Sequence
  Synthetic
ucugucuauuucauucacc

SEQ ID NO: 265324 - RNA, 20 nt, Artificial Sequence
  Synthetic
cucugucuauuucauucacc

SEQ ID NO: 265325 - RNA, 21 nt, Artificial Sequence
  Synthetic
gcucugucuauuucauucacc

SEQ ID NO: 265326 - RNA, 22 nt, Artificial Sequence
  Synthetic
ggcucugucuauuucauucacc

SEQ ID NO: 265327 - RNA, 23 nt, Artificial Sequence
  Synthetic
aggcucugucuauuucauucacc

SEQ ID NO: 265328 - RNA, 24 nt, Artificial Sequence
  Synthetic
caggcucugucuauuucauucacc

SEQ ID NO: 265329 - RNA, 18 nt, Artificial Sequence
  Synthetic
ggauguuacugauucacc

SEQ ID NO: 265330 - RNA, 19 nt, Artificial Sequence
  Synthetic
gggauguuacugauucacc

SEQ ID NO: 265331 - RNA, 20 nt, Artificial Sequence
  Synthetic
agggauguuacugauucacc

SEQ ID NO: 265332 - RNA, 21 nt, Artificial Sequence
  Synthetic
gagggauguuacugauucacc

SEQ ID NO: 265333 - RNA, 22 nt, Artificial Sequence
  Synthetic
ugagggauguuacugauucacc

SEQ ID NO: 265334 - RNA, 23 nt, Artificial Sequence
  Synthetic
cugagggauguuacugauucacc

SEQ ID NO: 265335 - RNA, 24 nt, Artificial Sequence
  Synthetic
gcugagggauguuacugauucacc

SEQ ID NO: 265336 - RNA, 18 nt, Artificial Sequence
  Synthetic
guuuacucaauauucacc

SEQ ID NO: 265337 - RNA, 19 nt, Artificial Sequence
  Synthetic
gguuuacucaauauucacc

SEQ ID NO: 265338 - RNA, 20 nt, Artificial Sequence
  Synthetic
cgguuuacucaauauucacc

SEQ ID NO: 265339 - RNA, 21 nt, Artificial Sequence
  Synthetic
acgguuuacucaauauucacc

SEQ ID NO: 265340 - RNA, 22 nt, Artificial Sequence
  Synthetic
aacgguuuacucaauauucacc

SEQ ID NO: 265341 - RNA, 23 nt, Artificial Sequence
  Synthetic
uaacgguuuacucaauauucacc

SEQ ID NO: 265342 - RNA, 24 nt, Artificial Sequence
  Synthetic
uuaacgguuuacucaauauucacc

SEQ ID NO: 265343 - RNA, 18 nt, Artificial Sequence
  Synthetic
gggauacaagacuucacc

SEQ ID NO: 265344 - RNA, 19 nt, Artificial Sequence
  Synthetic
ggggauacaagacuucacc

SEQ ID NO: 265345 - RNA, 20 nt, Artificial Sequence
  Synthetic
aggggauacaagacuucacc

SEQ ID NO: 265346 - RNA, 21 nt, Artificial Sequence
  Synthetic
aaggggauacaagacuucacc

SEQ ID NO: 265347 - RNA, 22 nt, Artificial Sequence
  Synthetic
aaaggggauacaagacuucacc

SEQ ID NO: 265348 - RNA, 23 nt, Artificial Sequence
  Synthetic
caaaggggauacaagacuucacc

SEQ ID NO: 265349 - RNA, 24 nt, Artificial Sequence
  Synthetic
gcaaaggggauacaagacuucacc

SEQ ID NO: 265350 - RNA, 18 nt, Artificial Sequence
  Synthetic
uuacauauaugcuucacc

SEQ ID NO: 265351 - RNA, 19 nt, Artificial Sequence
  Synthetic
auuacauauaugcuucacc

SEQ ID NO: 265352 - RNA, 20 nt, Artificial Sequence
  Synthetic
gauuacauauaugcuucacc

SEQ ID NO: 265353 - RNA, 21 nt, Artificial Sequence
  Synthetic
ugauuacauauaugcuucacc

SEQ ID NO: 265354 - RNA, 22 nt, Artificial Sequence
  Synthetic
gugauuacauauaugcuucacc

SEQ ID NO: 265355 - RNA, 23 nt, Artificial Sequence
  Synthetic
ugugauuacauauaugcuucacc

SEQ ID NO: 265356 - RNA, 24 nt, Artificial Sequence
  Synthetic
uugugauuacauauaugcuucacc

SEQ ID NO: 265357 - RNA, 18 nt, Artificial Sequence
  Synthetic
uacuuuggcgaguucacc

SEQ ID NO: 265358 - RNA, 19 nt, Artificial Sequence
  Synthetic
uuacuuuggcgaguucacc

SEQ ID NO: 265359 - RNA, 20 nt, Artificial Sequence
  Synthetic
uuuacuuuggcgaguucacc

SEQ ID NO: 265360 - RNA, 21 nt, Artificial Sequence
  Synthetic
auuuacuuuggcgaguucacc

SEQ ID NO: 265361 - RNA, 22 nt, Artificial Sequence
  Synthetic
aauuuacuuuggcgaguucacc

SEQ ID NO: 265362 - RNA, 23 nt, Artificial Sequence
  Synthetic
aaauuuacuuuggcgaguucacc

SEQ ID NO: 265363 - RNA, 24 nt, Artificial Sequence
  Synthetic
aaaauuuacuuuggcgaguucacc

SEQ ID NO: 265364 - RNA, 18 nt, Artificial Sequence
  Synthetic
uuuaaguaauaguucacc

SEQ ID NO: 265365 - RNA, 19 nt, Artificial Sequence
  Synthetic
auuuaaguaauaguucacc

SEQ ID NO: 265366 - RNA, 20 nt, Artificial Sequence
  Synthetic
aauuuaaguaauaguucacc

SEQ ID NO: 265367 - RNA, 21 nt, Artificial Sequence
  Synthetic
aaauuuaaguaauaguucacc

SEQ ID NO: 265368 - RNA, 22 nt, Artificial Sequence
  Synthetic
aaaauuuaaguaauaguucacc

SEQ ID NO: 265369 - RNA, 23 nt, Artificial Sequence
  Synthetic
aaaaauuuaaguaauaguucacc

SEQ ID NO: 265370 - RNA, 24 nt, Artificial Sequence
  Synthetic
uaaaaauuuaaguaauaguucacc

SEQ ID NO: 265371 - RNA, 18 nt, Artificial Sequence
  Synthetic
uauuuuuggcauuucacc

SEQ ID NO: 265372 - RNA, 19 nt, Artificial Sequence
  Synthetic
cuauuuuuggcauuucacc

SEQ ID NO: 265373 - RNA, 20 nt, Artificial Sequence
  Synthetic
ucuauuuuuggcauuucacc

SEQ ID NO: 265374 - RNA, 21 nt, Artificial Sequence
  Synthetic
uucuauuuuuggcauuucacc

SEQ ID NO: 265375 - RNA, 22 nt, Artificial Sequence
  Synthetic
guucuauuuuuggcauuucacc

SEQ ID NO: 265376 - RNA, 23 nt, Artificial Sequence
  Synthetic
uguucuauuuuuggcauuucacc

SEQ ID NO: 265377 - RNA, 24 nt, Artificial Sequence
  Synthetic
uuguucuauuuuuggcauuucacc

SEQ ID NO: 265378 - RNA, 18 nt, Artificial Sequence
  Synthetic
uccuaagucacuuucacc

SEQ ID NO: 265379 - RNA, 19 nt, Artificial Sequence
  Synthetic
guccuaagucacuuucacc

SEQ ID NO: 265380 - RNA, 20 nt, Artificial Sequence
  Synthetic
cguccuaagucacuuucacc

SEQ ID NO: 265381 - RNA, 21 nt, Artificial Sequence
  Synthetic
ccguccuaagucacuuucacc

SEQ ID NO: 265382 - RNA, 22 nt, Artificial Sequence
  Synthetic
cccguccuaagucacuuucacc

SEQ ID NO: 265383 - RNA, 23 nt, Artificial Sequence
  Synthetic
ccccguccuaagucacuuucacc

SEQ ID NO: 265384 - RNA, 24 nt, Artificial Sequence
  Synthetic
gccccguccuaagucacuuucacc

SEQ ID NO: 265385 - RNA, 18 nt, Artificial Sequence
  Synthetic
uuauuauuauuuuucacc

SEQ ID NO: 265386 - RNA, 19 nt, Artificial Sequence
  Synthetic
auuauuauuauuuuucacc

SEQ ID NO: 265387 - RNA, 20 nt, Artificial Sequence
  Synthetic
cauuauuauuauuuuucacc

SEQ ID NO: 265388 - RNA, 21 nt, Artificial Sequence
  Synthetic
acauuauuauuauuuuucacc

SEQ ID NO: 265389 - RNA, 22 nt, Artificial Sequence
  Synthetic
uacauuauuauuauuuuucacc

SEQ ID NO: 265390 - RNA, 23 nt, Artificial Sequence
  Synthetic
cuacauuauuauuauuuuucacc

SEQ ID NO: 265391 - RNA, 24 nt, Artificial Sequence
  Synthetic
acuacauuauuauuauuuuucacc

SEQ ID NO: 265392 - RNA, 18 nt, Artificial Sequence
  Synthetic
guuauuuuauuuuucacc

SEQ ID NO: 265393 - RNA, 19 nt, Artificial Sequence
  Synthetic
uguuauuuuauuuuucacc

SEQ ID NO: 265394 - RNA, 20 nt, Artificial Sequence
  Synthetic
uuguuauuuuauuuuucacc

SEQ ID NO: 265395 - RNA, 21 nt, Artificial Sequence
  Synthetic
auuguuauuuuauuuuucacc

SEQ ID NO: 265396 - RNA, 22 nt, Artificial Sequence
  Synthetic
cauuguuauuuuauuuuucacc

SEQ ID NO: 265397 - RNA, 23 nt, Artificial Sequence
  Synthetic
gcauuguuauuuuauuuuucacc

SEQ ID NO: 265398 - RNA, 24 nt, Artificial Sequence
  Synthetic
ugcauuguuauuuuauuuuucacc

SEQ ID NO: 265399 - RNA, 18 nt, Artificial Sequence
  Synthetic
aggccuaacaaaaagacc

SEQ ID NO: 265400 - RNA, 19 nt, Artificial Sequence
  Synthetic
gaggccuaacaaaaagacc

SEQ ID NO: 265401 - RNA, 20 nt, Artificial Sequence
  Synthetic
ggaggccuaacaaaaagacc

SEQ ID NO: 265402 - RNA, 21 nt, Artificial Sequence
  Synthetic
uggaggccuaacaaaaagacc

SEQ ID NO: 265403 - RNA, 22 nt, Artificial Sequence
  Synthetic
uuggaggccuaacaaaaagacc

SEQ ID NO: 265404 - RNA, 23 nt, Artificial Sequence
  Synthetic
uuuggaggccuaacaaaaagacc

SEQ ID NO: 265405 - RNA, 24 nt, Artificial Sequence
  Synthetic
uuuuggaggccuaacaaaaagacc

SEQ ID NO: 265406 - RNA, 18 nt, Artificial Sequence
  Synthetic
gaggcuugagaaaagacc

SEQ ID NO: 265407 - RNA, 19 nt, Artificial Sequence
  Synthetic
agaggcuugagaaaagacc

SEQ ID NO: 265408 - RNA, 20 nt, Artificial Sequence
  Synthetic
cagaggcuugagaaaagacc

SEQ ID NO: 265409 - RNA, 21 nt, Artificial Sequence
  Synthetic
ucagaggcuugagaaaagacc

SEQ ID NO: 265410 - RNA, 22 nt, Artificial Sequence
  Synthetic
uucagaggcuugagaaaagacc

SEQ ID NO: 265411 - RNA, 23 nt, Artificial Sequence
  Synthetic
cuucagaggcuugagaaaagacc

SEQ ID NO: 265412 - RNA, 24 nt, Artificial Sequence
  Synthetic
acuucagaggcuugagaaaagacc

SEQ ID NO: 265413 - RNA, 18 nt, Artificial Sequence
  Synthetic
guauagauggaaaagacc

SEQ ID NO: 265414 - RNA, 19 nt, Artificial Sequence
  Synthetic
uguauagauggaaaagacc

SEQ ID NO: 265415 - RNA, 20 nt, Artificial Sequence
  Synthetic
guguauagauggaaaagacc

SEQ ID NO: 265416 - RNA, 21 nt, Artificial Sequence
  Synthetic
gguguauagauggaaaagacc

SEQ ID NO: 265417 - RNA, 22 nt, Artificial Sequence
  Synthetic
agguguauagauggaaaagacc

SEQ ID NO: 265418 - RNA, 23 nt, Artificial Sequence
  Synthetic
uagguguauagauggaaaagacc

SEQ ID NO: 265419 - RNA, 24 nt, Artificial Sequence
  Synthetic
guagguguauagauggaaaagacc

SEQ ID NO: 265420 - RNA, 18 nt, Artificial Sequence
  Synthetic
aaaagagucccaaagacc

SEQ ID NO: 265421 - RNA, 19 nt, Artificial Sequence
  Synthetic
gaaaagagucccaaagacc

SEQ ID NO: 265422 - RNA, 20 nt, Artificial Sequence
  Synthetic
ggaaaagagucccaaagacc

SEQ ID NO: 265423 - RNA, 21 nt, Artificial Sequence
  Synthetic
uggaaaagagucccaaagacc

SEQ ID NO: 265424 - RNA, 22 nt, Artificial Sequence
  Synthetic
auggaaaagagucccaaagacc

SEQ ID NO: 265425 - RNA, 23 nt, Artificial Sequence
  Synthetic
uauggaaaagagucccaaagacc

SEQ ID NO: 265426 - RNA, 24 nt, Artificial Sequence
  Synthetic
uuauggaaaagagucccaaagacc

SEQ ID NO: 265427 - RNA, 18 nt, Artificial Sequence
  Synthetic
ggcugcaguggaaagacc

SEQ ID NO: 265428 - RNA, 19 nt, Artificial Sequence
  Synthetic
gggcugcaguggaaagacc

SEQ ID NO: 265429 - RNA, 20 nt, Artificial Sequence
  Synthetic
ugggcugcaguggaaagacc

SEQ ID NO: 265430 - RNA, 21 nt, Artificial Sequence
  Synthetic
augggcugcaguggaaagacc

SEQ ID NO: 265431 - RNA, 22 nt, Artificial Sequence
  Synthetic
caugggcugcaguggaaagacc

SEQ ID NO: 265432 - RNA, 23 nt, Artificial Sequence
  Synthetic
gcaugggcugcaguggaaagacc

SEQ ID NO: 265433 - RNA, 24 nt, Artificial Sequence
  Synthetic
ggcaugggcugcaguggaaagacc

SEQ ID NO: 265434 - RNA, 18 nt, Artificial Sequence
  Synthetic
uaggaaggcagcaagacc

SEQ ID NO: 265435 - RNA, 19 nt, Artificial Sequence
  Synthetic
uuaggaaggcagcaagacc

SEQ ID NO: 265436 - RNA, 20 nt, Artificial Sequence
  Synthetic
cuuaggaaggcagcaagacc

SEQ ID NO: 265437 - RNA, 21 nt, Artificial Sequence
  Synthetic
acuuaggaaggcagcaagacc

SEQ ID NO: 265438 - RNA, 22 nt, Artificial Sequence
  Synthetic
gacuuaggaaggcagcaagacc

SEQ ID NO: 265439 - RNA, 23 nt, Artificial Sequence
  Synthetic
ggacuuaggaaggcagcaagacc

SEQ ID NO: 265440 - RNA, 24 nt, Artificial Sequence
  Synthetic
aggacuuaggaaggcagcaagacc

SEQ ID NO: 265441 - RNA, 18 nt, Artificial Sequence
  Synthetic
agaacaugaaagaagacc

SEQ ID NO: 265442 - RNA, 19 nt, Artificial Sequence
  Synthetic
gagaacaugaaagaagacc

SEQ ID NO: 265443 - RNA, 20 nt, Artificial Sequence
  Synthetic
agagaacaugaaagaagacc

SEQ ID NO: 265444 - RNA, 21 nt, Artificial Sequence
  Synthetic
aagagaacaugaaagaagacc

SEQ ID NO: 265445 - RNA, 22 nt, Artificial Sequence
  Synthetic
gaagagaacaugaaagaagacc

SEQ ID NO: 265446 - RNA, 23 nt, Artificial Sequence
  Synthetic
ggaagagaacaugaaagaagacc

SEQ ID NO: 265447 - RNA, 24 nt, Artificial Sequence
  Synthetic
gggaagagaacaugaaagaagacc

SEQ ID NO: 265448 - RNA, 18 nt, Artificial Sequence
  Synthetic
cuuuauauuaauaagacc

SEQ ID NO: 265449 - RNA, 19 nt, Artificial Sequence
  Synthetic
ucuuuauauuaauaagacc

SEQ ID NO: 265450 - RNA, 20 nt, Artificial Sequence
  Synthetic
gucuuuauauuaauaagacc

SEQ ID NO: 265451 - RNA, 21 nt, Artificial Sequence
  Synthetic
agucuuuauauuaauaagacc

SEQ ID NO: 265452 - RNA, 22 nt, Artificial Sequence
  Synthetic
uagucuuuauauuaauaagacc

SEQ ID NO: 265453 - RNA, 23 nt, Artificial Sequence
  Synthetic
auagucuuuauauuaauaagacc

SEQ ID NO: 265454 - RNA, 24 nt, Artificial Sequence
  Synthetic
aauagucuuuauauuaauaagacc

SEQ ID NO: 265455 - RNA, 18 nt, Artificial Sequence
  Synthetic
uauguacugccuaagacc

SEQ ID NO: 265456 - RNA, 19 nt, Artificial Sequence
  Synthetic
uuauguacugccuaagacc

SEQ ID NO: 265457 - RNA, 20 nt, Artificial Sequence
  Synthetic
auuauguacugccuaagacc

SEQ ID NO: 265458 - RNA, 21 nt, Artificial Sequence
  Synthetic
gauuauguacugccuaagacc

SEQ ID NO: 265459 - RNA, 22 nt, Artificial Sequence
  Synthetic
agauuauguacugccuaagacc

SEQ ID NO: 265460 - RNA, 23 nt, Artificial Sequence
  Synthetic
uagauuauguacugccuaagacc

SEQ ID NO: 265461 - RNA, 24 nt, Artificial Sequence
  Synthetic
cuagauuauguacugccuaagacc

SEQ ID NO: 265462 - RNA, 18 nt, Artificial Sequence
  Synthetic
guuaccaacucuaagacc

SEQ ID NO: 265463 - RNA, 19 nt, Artificial Sequence
  Synthetic
aguuaccaacucuaagacc

SEQ ID NO: 265464 - RNA, 20 nt, Artificial Sequence
  Synthetic
aaguuaccaacucuaagacc

SEQ ID NO: 265465 - RNA, 21 nt, Artificial Sequence
  Synthetic
caaguuaccaacucuaagacc

SEQ ID NO: 265466 - RNA, 22 nt, Artificial Sequence
  Synthetic
gcaaguuaccaacucuaagacc

SEQ ID NO: 265467 - RNA, 23 nt, Artificial Sequence
  Synthetic
ugcaaguuaccaacucuaagacc

SEQ ID NO: 265468 - RNA, 24 nt, Artificial Sequence
  Synthetic
uugcaaguuaccaacucuaagacc

SEQ ID NO: 265469 - RNA, 18 nt, Artificial Sequence
  Synthetic
ccucagauuucuaagacc

SEQ ID NO: 265470 - RNA, 19 nt, Artificial Sequence
  Synthetic
accucagauuucuaagacc

SEQ ID NO: 265471 - RNA, 20 nt, Artificial Sequence
  Synthetic
caccucagauuucuaagacc

SEQ ID NO: 265472 - RNA, 21 nt, Artificial Sequence
  Synthetic
acaccucagauuucuaagacc

SEQ ID NO: 265473 - RNA, 22 nt, Artificial Sequence
  Synthetic
gacaccucagauuucuaagacc

SEQ ID NO: 265474 - RNA, 23 nt, Artificial Sequence
  Synthetic
ugacaccucagauuucuaagacc

SEQ ID NO: 265475 - RNA, 24 nt, Artificial Sequence
  Synthetic
cugacaccucagauuucuaagacc

SEQ ID NO: 265476 - RNA, 18 nt, Artificial Sequence
  Synthetic
gugucccaaaaacagacc

SEQ ID NO: 265477 - RNA, 19 nt, Artificial Sequence
  Synthetic
agugucccaaaaacagacc

SEQ ID NO: 265478 - RNA, 20 nt, Artificial Sequence
  Synthetic
aagugucccaaaaacagacc

SEQ ID NO: 265479 - RNA, 21 nt, Artificial Sequence
  Synthetic
aaagugucccaaaaacagacc

SEQ ID NO: 265480 - RNA, 22 nt, Artificial Sequence
  Synthetic
caaagugucccaaaaacagacc

SEQ ID NO: 265481 - RNA, 23 nt, Artificial Sequence
  Synthetic
acaaagugucccaaaaacagacc

SEQ ID NO: 265482 - RNA, 24 nt, Artificial Sequence
  Synthetic
uacaaagugucccaaaaacagacc

SEQ ID NO: 265483 - RNA, 18 nt, Artificial Sequence
  Synthetic
uacauuauuccacagacc

SEQ ID NO: 265484 - RNA, 19 nt, Artificial Sequence
  Synthetic
auacauuauuccacagacc

SEQ ID NO: 265485 - RNA, 20 nt, Artificial Sequence
  Synthetic
uauacauuauuccacagacc

SEQ ID NO: 265486 - RNA, 21 nt, Artificial Sequence
  Synthetic
cuauacauuauuccacagacc

SEQ ID NO: 265487 - RNA, 22 nt, Artificial Sequence
  Synthetic
ccuauacauuauuccacagacc

SEQ ID NO: 265488 - RNA, 23 nt, Artificial Sequence
  Synthetic
gccuauacauuauuccacagacc

SEQ ID NO: 265489 - RNA, 24 nt, Artificial Sequence
  Synthetic
ugccuauacauuauuccacagacc

SEQ ID NO: 265490 - RNA, 18 nt, Artificial Sequence
  Synthetic
acacugaaaauacagacc

SEQ ID NO: 265491 - RNA, 19 nt, Artificial Sequence
  Synthetic
uacacugaaaauacagacc

SEQ ID NO: 265492 - RNA, 20 nt, Artificial Sequence
  Synthetic
guacacugaaaauacagacc

SEQ ID NO: 265493 - RNA, 21 nt, Artificial Sequence
  Synthetic
uguacacugaaaauacagacc

SEQ ID NO: 265494 - RNA, 22 nt, Artificial Sequence
  Synthetic
auguacacugaaaauacagacc

SEQ ID NO: 265495 - RNA, 23 nt, Artificial Sequence
  Synthetic
cauguacacugaaaauacagacc

SEQ ID NO: 265496 - RNA, 24 nt, Artificial Sequence
  Synthetic
ucauguacacugaaaauacagacc

SEQ ID NO: 265497 - RNA, 18 nt, Artificial Sequence
  Synthetic
gugagucuggaccagacc

SEQ ID NO: 265498 - RNA, 19 nt, Artificial Sequence
  Synthetic
cgugagucuggaccagacc

SEQ ID NO: 265499 - RNA, 20 nt, Artificial Sequence
  Synthetic
gcgugagucuggaccagacc

SEQ ID NO: 265500 - RNA, 21 nt, Artificial Sequence
  Synthetic
ugcgugagucuggaccagacc

SEQ ID NO: 265501 - RNA, 22 nt, Artificial Sequence
  Synthetic
augcgugagucuggaccagacc

SEQ ID NO: 265502 - RNA, 23 nt, Artificial Sequence
  Synthetic
aaugcgugagucuggaccagacc

SEQ ID NO: 265503 - RNA, 24 nt, Artificial Sequence
  Synthetic
caaugcgugagucuggaccagacc

SEQ ID NO: 265504 - RNA, 18 nt, Artificial Sequence
  Synthetic
aaugaaauaagccagacc

SEQ ID NO: 265505 - RNA, 19 nt, Artificial Sequence
  Synthetic
aaaugaaauaagccagacc

SEQ ID NO: 265506 - RNA, 20 nt, Artificial Sequence
  Synthetic
uaaaugaaauaagccagacc

SEQ ID NO: 265507 - RNA, 21 nt, Artificial Sequence
  Synthetic
cuaaaugaaauaagccagacc

SEQ ID NO: 265508 - RNA, 22 nt, Artificial Sequence
  Synthetic
gcuaaaugaaauaagccagacc

SEQ ID NO: 265509 - RNA, 23 nt, Artificial Sequence
  Synthetic
ugcuaaaugaaauaagccagacc

SEQ ID NO: 265510 - RNA, 24 nt, Artificial Sequence
  Synthetic
augcuaaaugaaauaagccagacc

SEQ ID NO: 265511 - RNA, 18 nt, Artificial Sequence
  Synthetic
guuccaugaacgcagacc

SEQ ID NO: 265512 - RNA, 19 nt, Artificial Sequence
  Synthetic
gguuccaugaacgcagacc

SEQ ID NO: 265513 - RNA, 20 nt, Artificial Sequence
  Synthetic
agguuccaugaacgcagacc

SEQ ID NO: 265514 - RNA, 21 nt, Artificial Sequence
  Synthetic
cagguuccaugaacgcagacc

SEQ ID NO: 265515 - RNA, 22 nt, Artificial Sequence
  Synthetic
ucagguuccaugaacgcagacc

SEQ ID NO: 265516 - RNA, 23 nt, Artificial Sequence
  Synthetic
gucagguuccaugaacgcagacc

SEQ ID NO: 265517 - RNA, 24 nt, Artificial Sequence
  Synthetic
agucagguuccaugaacgcagacc

SEQ ID NO: 265518 - RNA, 18 nt, Artificial Sequence
  Synthetic
cuccgcaacaugcagacc

SEQ ID NO: 265519 - RNA, 19 nt, Artificial Sequence
  Synthetic
ccuccgcaacaugcagacc

SEQ ID NO: 265520 - RNA, 20 nt, Artificial Sequence
  Synthetic
gccuccgcaacaugcagacc

SEQ ID NO: 265521 - RNA, 21 nt, Artificial Sequence
  Synthetic
agccuccgcaacaugcagacc

SEQ ID NO: 265522 - RNA, 22 nt, Artificial Sequence
  Synthetic
cagccuccgcaacaugcagacc

SEQ ID NO: 265523 - RNA, 23 nt, Artificial Sequence
  Synthetic
acagccuccgcaacaugcagacc

SEQ ID NO: 265524 - RNA, 24 nt, Artificial Sequence
  Synthetic
cacagccuccgcaacaugcagacc

SEQ ID NO: 265525 - RNA, 18 nt, Artificial Sequence
  Synthetic
acacauguggcucagacc

SEQ ID NO: 265526 - RNA, 19 nt, Artificial Sequence
  Synthetic
aacacauguggcucagacc

SEQ ID NO: 265527 - RNA, 20 nt, Artificial Sequence
  Synthetic
uaacacauguggcucagacc

SEQ ID NO: 265528 - RNA, 21 nt, Artificial Sequence
  Synthetic
uuaacacauguggcucagacc

SEQ ID NO: 265529 - RNA, 22 nt, Artificial Sequence
  Synthetic
guuaacacauguggcucagacc

SEQ ID NO: 265530 - RNA, 23 nt, Artificial Sequence
  Synthetic
gguuaacacauguggcucagacc

SEQ ID NO: 265531 - RNA, 24 nt, Artificial Sequence
  Synthetic
ugguuaacacauguggcucagacc

SEQ ID NO: 265532 - RNA, 18 nt, Artificial Sequence
  Synthetic
cugaaagagaaagagacc

SEQ ID NO: 265533 - RNA, 19 nt, Artificial Sequence
  Synthetic
acugaaagagaaagagacc

SEQ ID NO: 265534 - RNA, 20 nt, Artificial Sequence
  Synthetic
uacugaaagagaaagagacc

SEQ ID NO: 265535 - RNA, 21 nt, Artificial Sequence
  Synthetic
guacugaaagagaaagagacc

SEQ ID NO: 265536 - RNA, 22 nt, Artificial Sequence
  Synthetic
gguacugaaagagaaagagacc

SEQ ID NO: 265537 - RNA, 23 nt, Artificial Sequence
  Synthetic
cgguacugaaagagaaagagacc

SEQ ID NO: 265538 - RNA, 24 nt, Artificial Sequence
  Synthetic
gcgguacugaaagagaaagagacc

SEQ ID NO: 265539 - RNA, 18 nt, Artificial Sequence
  Synthetic
uggauuucagaagagacc

SEQ ID NO: 265540 - RNA, 19 nt, Artificial Sequence
  Synthetic
cuggauuucagaagagacc

SEQ ID NO: 265541 - RNA, 20 nt, Artificial Sequence
  Synthetic
gcuggauuucagaagagacc

SEQ ID NO: 265542 - RNA, 21 nt, Artificial Sequence
  Synthetic
ggcuggauuucagaagagacc

SEQ ID NO: 265543 - RNA, 22 nt, Artificial Sequence
  Synthetic
gggcuggauuucagaagagacc

SEQ ID NO: 265544 - RNA, 23 nt, Artificial Sequence
  Synthetic
agggcuggauuucagaagagacc

SEQ ID NO: 265545 - RNA, 24 nt, Artificial Sequence
  Synthetic
cagggcuggauuucagaagagacc

SEQ ID NO: 265546 - RNA, 18 nt, Artificial Sequence
  Synthetic
ccuggcaggauggagacc

SEQ ID NO: 265547 - RNA, 19 nt, Artificial Sequence
  Synthetic
gccuggcaggauggagacc

SEQ ID NO: 265548 - RNA, 20 nt, Artificial Sequence
  Synthetic
agccuggcaggauggagacc

SEQ ID NO: 265549 - RNA, 21 nt, Artificial Sequence
  Synthetic
aagccuggcaggauggagacc

SEQ ID NO: 265550 - RNA, 22 nt, Artificial Sequence
  Synthetic
aaagccuggcaggauggagacc

SEQ ID NO: 265551 - RNA, 23 nt, Artificial Sequence
  Synthetic
aaaagccuggcaggauggagacc

SEQ ID NO: 265552 - RNA, 24 nt, Artificial Sequence
  Synthetic
caaaagccuggcaggauggagacc

SEQ ID NO: 265553 - RNA, 18 nt, Artificial Sequence
  Synthetic
aagggguggcuggagacc

SEQ ID NO: 265554 - RNA, 19 nt, Artificial Sequence
  Synthetic
aaagggguggcuggagacc

SEQ ID NO: 265555 - RNA, 20 nt, Artificial Sequence
  Synthetic
uaaagggguggcuggagacc

SEQ ID NO: 265556 - RNA, 21 nt, Artificial Sequence
  Synthetic
uuaaagggguggcuggagacc

SEQ ID NO: 265557 - RNA, 22 nt, Artificial Sequence
  Synthetic
cuuaaagggguggcuggagacc

SEQ ID NO: 265558 - RNA, 23 nt, Artificial Sequence
  Synthetic
ccuuaaagggguggcuggagacc

SEQ ID NO: 265559 - RNA, 24 nt, Artificial Sequence
  Synthetic
accuuaaagggguggcuggagacc

SEQ ID NO: 265560 - RNA, 18 nt, Artificial Sequence
  Synthetic
auuacucaaguggagacc

SEQ ID NO: 265561 - RNA, 19 nt, Artificial Sequence
  Synthetic
cauuacucaaguggagacc

SEQ ID NO: 265562 - RNA, 20 nt, Artificial Sequence
  Synthetic
gcauuacucaaguggagacc

SEQ ID NO: 265563 - RNA, 21 nt, Artificial Sequence
  Synthetic
ugcauuacucaaguggagacc

SEQ ID NO: 265564 - RNA, 22 nt, Artificial Sequence
  Synthetic
uugcauuacucaaguggagacc

SEQ ID NO: 265565 - RNA, 23 nt, Artificial Sequence
  Synthetic
auugcauuacucaaguggagacc

SEQ ID NO: 265566 - RNA, 24 nt, Artificial Sequence
  Synthetic
gauugcauuacucaaguggagacc

SEQ ID NO: 265567 - RNA, 18 nt, Artificial Sequence
  Synthetic
cuuugcccuguggagacc

SEQ ID NO: 265568 - RNA, 19 nt, Artificial Sequence
  Synthetic
ccuuugcccuguggagacc

SEQ ID NO: 265569 - RNA, 20 nt, Artificial Sequence
  Synthetic
accuuugcccuguggagacc

SEQ ID NO: 265570 - RNA, 21 nt, Artificial Sequence
  Synthetic
caccuuugcccuguggagacc

SEQ ID NO: 265571 - RNA, 22 nt, Artificial Sequence
  Synthetic
ccaccuuugcccuguggagacc

SEQ ID NO: 265572 - RNA, 23 nt, Artificial Sequence
  Synthetic
gccaccuuugcccuguggagacc

SEQ ID NO: 265573 - RNA, 24 nt, Artificial Sequence
  Synthetic
ugccaccuuugcccuguggagacc

SEQ ID NO: 265574 - RNA, 18 nt, Artificial Sequence
  Synthetic
gcauccucaucugagacc

SEQ ID NO: 265575 - RNA, 19 nt, Artificial Sequence
  Synthetic
ggcauccucaucugagacc

SEQ ID NO: 265576 - RNA, 20 nt, Artificial Sequence
  Synthetic
aggcauccucaucugagacc

SEQ ID NO: 265577 - RNA, 21 nt, Artificial Sequence
  Synthetic
caggcauccucaucugagacc

SEQ ID NO: 265578 - RNA, 22 nt, Artificial Sequence
  Synthetic
ccaggcauccucaucugagacc

SEQ ID NO: 265579 - RNA, 23 nt, Artificial Sequence
  Synthetic
accaggcauccucaucugagacc

SEQ ID NO: 265580 - RNA, 24 nt, Artificial Sequence
  Synthetic
caccaggcauccucaucugagacc

SEQ ID NO: 265581 - RNA, 18 nt, Artificial Sequence
  Synthetic
aggaaggcuauugagacc

SEQ ID NO: 265582 - RNA, 19 nt, Artificial Sequence
  Synthetic
aaggaaggcuauugagacc

SEQ ID NO: 265583 - RNA, 20 nt, Artificial Sequence
  Synthetic
aaaggaaggcuauugagacc

SEQ ID NO: 265584 - RNA, 21 nt, Artificial Sequence
  Synthetic
uaaaggaaggcuauugagacc

SEQ ID NO: 265585 - RNA, 22 nt, Artificial Sequence
  Synthetic
auaaaggaaggcuauugagacc

SEQ ID NO: 265586 - RNA, 23 nt, Artificial Sequence
  Synthetic
gauaaaggaaggcuauugagacc

SEQ ID NO: 265587 - RNA, 24 nt, Artificial Sequence
  Synthetic
agauaaaggaaggcuauugagacc

SEQ ID NO: 265588 - RNA, 18 nt, Artificial Sequence
  Synthetic
acacuauaguuugagacc

SEQ ID NO: 265589 - RNA, 19 nt, Artificial Sequence
  Synthetic
cacacuauaguuugagacc

SEQ ID NO: 265590 - RNA, 20 nt, Artificial Sequence
  Synthetic
acacacuauaguuugagacc

SEQ ID NO: 265591 - RNA, 21 nt, Artificial Sequence
  Synthetic
uacacacuauaguuugagacc

SEQ ID NO: 265592 - RNA, 22 nt, Artificial Sequence
  Synthetic
auacacacuauaguuugagacc

SEQ ID NO: 265593 - RNA, 23 nt, Artificial Sequence
  Synthetic
uauacacacuauaguuugagacc

SEQ ID NO: 265594 - RNA, 24 nt, Artificial Sequence
  Synthetic
uuauacacacuauaguuugagacc

SEQ ID NO: 265595 - RNA, 18 nt, Artificial Sequence
  Synthetic
acaugugcuaaauagacc

SEQ ID NO: 265596 - RNA, 19 nt, Artificial Sequence
  Synthetic
gacaugugcuaaauagacc

SEQ ID NO: 265597 - RNA, 20 nt, Artificial Sequence
  Synthetic
cgacaugugcuaaauagacc

SEQ ID NO: 265598 - RNA, 21 nt, Artificial Sequence
  Synthetic
acgacaugugcuaaauagacc

SEQ ID NO: 265599 - RNA, 22 nt, Artificial Sequence
  Synthetic
uacgacaugugcuaaauagacc

SEQ ID NO: 265600 - RNA, 23 nt, Artificial Sequence
  Synthetic
cuacgacaugugcuaaauagacc

SEQ ID NO: 265601 - RNA, 24 nt, Artificial Sequence
  Synthetic
acuacgacaugugcuaaauagacc

SEQ ID NO: 265602 - RNA, 18 nt, Artificial Sequence
  Synthetic
uaaauacuaaacuagacc

SEQ ID NO: 265603 - RNA, 19 nt, Artificial Sequence
  Synthetic
auaaauacuaaacuagacc

SEQ ID NO: 265604 - RNA, 20 nt, Artificial Sequence
  Synthetic
uauaaauacuaaacuagacc

SEQ ID NO: 265605 - RNA, 21 nt, Artificial Sequence
  Synthetic
auauaaauacuaaacuagacc

SEQ ID NO: 265606 - RNA, 22 nt, Artificial Sequence
  Synthetic
aauauaaauacuaaacuagacc

SEQ ID NO: 265607 - RNA, 23 nt, Artificial Sequence
  Synthetic
aaauauaaauacuaaacuagacc

SEQ ID NO: 265608 - RNA, 24 nt, Artificial Sequence
  Synthetic
uaaauauaaauacuaaacuagacc

SEQ ID NO: 265609 - RNA, 18 nt, Artificial Sequence
  Synthetic
aaaaacgaccuguagacc

SEQ ID NO: 265610 - RNA, 19 nt, Artificial Sequence
  Synthetic
uaaaaacgaccuguagacc

SEQ ID NO: 265611 - RNA, 20 nt, Artificial Sequence
  Synthetic
uuaaaaacgaccuguagacc

SEQ ID NO: 265612 - RNA, 21 nt, Artificial Sequence
  Synthetic
auuaaaaacgaccuguagacc

SEQ ID NO: 265613 - RNA, 22 nt, Artificial Sequence
  Synthetic
gauuaaaaacgaccuguagacc

SEQ ID NO: 265614 - RNA, 23 nt, Artificial Sequence
  Synthetic
ggauuaaaaacgaccuguagacc

SEQ ID NO: 265615 - RNA, 24 nt, Artificial Sequence
  Synthetic
aggauuaaaaacgaccuguagacc

SEQ ID NO: 265616 - RNA, 18 nt, Artificial Sequence
  Synthetic
ggauuaaggugggcgacc

SEQ ID NO: 265617 - RNA, 19 nt, Artificial Sequence
  Synthetic
gggauuaaggugggcgacc

SEQ ID NO: 265618 - RNA, 20 nt, Artificial Sequence
  Synthetic
cgggauuaaggugggcgacc

SEQ ID NO: 265619 - RNA, 21 nt, Artificial Sequence
  Synthetic
ucgggauuaaggugggcgacc

SEQ ID NO: 265620 - RNA, 22 nt, Artificial Sequence
  Synthetic
cucgggauuaaggugggcgacc

SEQ ID NO: 265621 - RNA, 23 nt, Artificial Sequence
  Synthetic
gcucgggauuaaggugggcgacc

SEQ ID NO: 265622 - RNA, 24 nt, Artificial Sequence
  Synthetic
ggcucgggauuaaggugggcgacc

SEQ ID NO: 265623 - RNA, 18 nt, Artificial Sequence
  Synthetic
uggaucuguugggcgacc

SEQ ID NO: 265624 - RNA, 19 nt, Artificial Sequence
  Synthetic
guggaucuguugggcgacc

SEQ ID NO: 265625 - RNA, 20 nt, Artificial Sequence
  Synthetic
uguggaucuguugggcgacc

SEQ ID NO: 265626 - RNA, 21 nt, Artificial Sequence
  Synthetic
guguggaucuguugggcgacc

SEQ ID NO: 265627 - RNA, 22 nt, Artificial Sequence
  Synthetic
gguguggaucuguugggcgacc

SEQ ID NO: 265628 - RNA, 23 nt, Artificial Sequence
  Synthetic
agguguggaucuguugggcgacc

SEQ ID NO: 265629 - RNA, 24 nt, Artificial Sequence
  Synthetic
cagguguggaucuguugggcgacc

SEQ ID NO: 265630 - RNA, 18 nt, Artificial Sequence
  Synthetic
ccaaguccccacucgacc

SEQ ID NO: 265631 - RNA, 19 nt, Artificial Sequence
  Synthetic
cccaaguccccacucgacc

SEQ ID NO: 265632 - RNA, 20 nt, Artificial Sequence
  Synthetic
ccccaaguccccacucgacc

SEQ ID NO: 265633 - RNA, 21 nt, Artificial Sequence
  Synthetic
uccccaaguccccacucgacc

SEQ ID NO: 265634 - RNA, 22 nt, Artificial Sequence
  Synthetic
uuccccaaguccccacucgacc

SEQ ID NO: 265635 - RNA, 23 nt, Artificial Sequence
  Synthetic
guuccccaaguccccacucgacc

SEQ ID NO: 265636 - RNA, 24 nt, Artificial Sequence
  Synthetic
aguuccccaaguccccacucgacc

SEQ ID NO: 265637 - RNA, 18 nt, Artificial Sequence
  Synthetic
agaagaaagaauucgacc

SEQ ID NO: 265638 - RNA, 19 nt, Artificial Sequence
  Synthetic
cagaagaaagaauucgacc

SEQ ID NO: 265639 - RNA, 20 nt, Artificial Sequence
  Synthetic
ucagaagaaagaauucgacc

SEQ ID NO: 265640 - RNA, 21 nt, Artificial Sequence
  Synthetic
cucagaagaaagaauucgacc

SEQ ID NO: 265641 - RNA, 22 nt, Artificial Sequence
  Synthetic
ccucagaagaaagaauucgacc

SEQ ID NO: 265642 - RNA, 23 nt, Artificial Sequence
  Synthetic
uccucagaagaaagaauucgacc

SEQ ID NO: 265643 - RNA, 24 nt, Artificial Sequence
  Synthetic
cuccucagaagaaagaauucgacc

SEQ ID NO: 265644 - RNA, 18 nt, Artificial Sequence
  Synthetic
ggccagauaaugaggacc

SEQ ID NO: 265645 - RNA, 19 nt, Artificial Sequence
  Synthetic
aggccagauaaugaggacc

SEQ ID NO: 265646 - RNA, 20 nt, Artificial Sequence
  Synthetic
gaggccagauaaugaggacc

SEQ ID NO: 265647 - RNA, 21 nt, Artificial Sequence
  Synthetic
agaggccagauaaugaggacc

SEQ ID NO: 265648 - RNA, 22 nt, Artificial Sequence
  Synthetic
cagaggccagauaaugaggacc

SEQ ID NO: 265649 - RNA, 23 nt, Artificial Sequence
  Synthetic
gcagaggccagauaaugaggacc

SEQ ID NO: 265650 - RNA, 24 nt, Artificial Sequence
  Synthetic
agcagaggccagauaaugaggacc

SEQ ID NO: 265651 - RNA, 18 nt, Artificial Sequence
  Synthetic
gcaugguugccagggacc

SEQ ID NO: 265652 - RNA, 19 nt, Artificial Sequence
  Synthetic
ugcaugguugccagggacc

SEQ ID NO: 265653 - RNA, 20 nt, Artificial Sequence
  Synthetic
uugcaugguugccagggacc

SEQ ID NO: 265654 - RNA, 21 nt, Artificial Sequence
  Synthetic
guugcaugguugccagggacc

SEQ ID NO: 265655 - RNA, 22 nt, Artificial Sequence
  Synthetic
aguugcaugguugccagggacc

SEQ ID NO: 265656 - RNA, 23 nt, Artificial Sequence
  Synthetic
uaguugcaugguugccagggacc

SEQ ID NO: 265657 - RNA, 24 nt, Artificial Sequence
  Synthetic
auaguugcaugguugccagggacc

SEQ ID NO: 265658 - RNA, 18 nt, Artificial Sequence
  Synthetic
uguguugugggagggacc

SEQ ID NO: 265659 - RNA, 19 nt, Artificial Sequence
  Synthetic
auguguugugggagggacc

SEQ ID NO: 265660 - RNA, 20 nt, Artificial Sequence
  Synthetic
cauguguugugggagggacc

SEQ ID NO: 265661 - RNA, 21 nt, Artificial Sequence
  Synthetic
ccauguguugugggagggacc

SEQ ID NO: 265662 - RNA, 22 nt, Artificial Sequence
  Synthetic
cccauguguugugggagggacc

SEQ ID NO: 265663 - RNA, 23 nt, Artificial Sequence
  Synthetic
ucccauguguugugggagggacc

SEQ ID NO: 265664 - RNA, 24 nt, Artificial Sequence
  Synthetic
uucccauguguugugggagggacc

SEQ ID NO: 265665 - RNA, 18 nt, Artificial Sequence
  Synthetic
uaguaaauuugggggacc

SEQ ID NO: 265666 - RNA, 19 nt, Artificial Sequence
  Synthetic
guaguaaauuugggggacc

SEQ ID NO: 265667 - RNA, 20 nt, Artificial Sequence
  Synthetic
uguaguaaauuugggggacc

SEQ ID NO: 265668 - RNA, 21 nt, Artificial Sequence
  Synthetic
auguaguaaauuugggggacc

SEQ ID NO: 265669 - RNA, 22 nt, Artificial Sequence
  Synthetic
cauguaguaaauuugggggacc

SEQ ID NO: 265670 - RNA, 23 nt, Artificial Sequence
  Synthetic
acauguaguaaauuugggggacc

SEQ ID NO: 265671 - RNA, 24 nt, Artificial Sequence
  Synthetic
aacauguaguaaauuugggggacc

SEQ ID NO: 265672 - RNA, 18 nt, Artificial Sequence
  Synthetic
uaaugaaaaauugggacc

SEQ ID NO: 265673 - RNA, 19 nt, Artificial Sequence
  Synthetic
auaaugaaaaauugggacc

SEQ ID NO: 265674 - RNA, 20 nt, Artificial Sequence
  Synthetic
gauaaugaaaaauugggacc

SEQ ID NO: 265675 - RNA, 21 nt, Artificial Sequence
  Synthetic
agauaaugaaaaauugggacc

SEQ ID NO: 265676 - RNA, 22 nt, Artificial Sequence
  Synthetic
aagauaaugaaaaauugggacc

SEQ ID NO: 265677 - RNA, 23 nt, Artificial Sequence
  Synthetic
caagauaaugaaaaauugggacc

SEQ ID NO: 265678 - RNA, 24 nt, Artificial Sequence
  Synthetic
gcaagauaaugaaaaauugggacc

SEQ ID NO: 265679 - RNA, 18 nt, Artificial Sequence
  Synthetic
agugcuuucaaauggacc

SEQ ID NO: 265680 - RNA, 19 nt, Artificial Sequence
  Synthetic
uagugcuuucaaauggacc

SEQ ID NO: 265681 - RNA, 20 nt, Artificial Sequence
  Synthetic
uuagugcuuucaaauggacc

SEQ ID NO: 265682 - RNA, 21 nt, Artificial Sequence
  Synthetic
guuagugcuuucaaauggacc

SEQ ID NO: 265683 - RNA, 22 nt, Artificial Sequence
  Synthetic
aguuagugcuuucaaauggacc

SEQ ID NO: 265684 - RNA, 23 nt, Artificial Sequence
  Synthetic
aaguuagugcuuucaaauggacc

SEQ ID NO: 265685 - RNA, 24 nt, Artificial Sequence
  Synthetic
uaaguuagugcuuucaaauggacc

SEQ ID NO: 265686 - RNA, 18 nt, Artificial Sequence
  Synthetic
ucccaacauggauggacc

SEQ ID NO: 265687 - RNA, 19 nt, Artificial Sequence
  Synthetic
gucccaacauggauggacc

SEQ ID NO: 265688 - RNA, 20 nt, Artificial Sequence
  Synthetic
ugucccaacauggauggacc

SEQ ID NO: 265689 - RNA, 21 nt, Artificial Sequence
  Synthetic
uugucccaacauggauggacc

SEQ ID NO: 265690 - RNA, 22 nt, Artificial Sequence
  Synthetic
uuugucccaacauggauggacc

SEQ ID NO: 265691 - RNA, 23 nt, Artificial Sequence
  Synthetic
auuugucccaacauggauggacc

SEQ ID NO: 265692 - RNA, 24 nt, Artificial Sequence
  Synthetic
cauuugucccaacauggauggacc

SEQ ID NO: 265693 - RNA, 18 nt, Artificial Sequence
  Synthetic
ggugaaacuggauggacc

SEQ ID NO: 265694 - RNA, 19 nt, Artificial Sequence
  Synthetic
uggugaaacuggauggacc

SEQ ID NO: 265695 - RNA, 20 nt, Artificial Sequence
  Synthetic
guggugaaacuggauggacc

SEQ ID NO: 265696 - RNA, 21 nt, Artificial Sequence
  Synthetic
gguggugaaacuggauggacc

SEQ ID NO: 265697 - RNA, 22 nt, Artificial Sequence
  Synthetic
ggguggugaaacuggauggacc

SEQ ID NO: 265698 - RNA, 23 nt, Artificial Sequence
  Synthetic
gggguggugaaacuggauggacc

SEQ ID NO: 265699 - RNA, 24 nt, Artificial Sequence
  Synthetic
ugggguggugaaacuggauggacc

SEQ ID NO: 265700 - RNA, 18 nt, Artificial Sequence
  Synthetic
gcacauacaguuuggacc

SEQ ID NO: 265701 - RNA, 19 nt, Artificial Sequence
  Synthetic
cgcacauacaguuuggacc

SEQ ID NO: 265702 - RNA, 20 nt, Artificial Sequence
  Synthetic
ucgcacauacaguuuggacc

SEQ ID NO: 265703 - RNA, 21 nt, Artificial Sequence
  Synthetic
uucgcacauacaguuuggacc

SEQ ID NO: 265704 - RNA, 22 nt, Artificial Sequence
  Synthetic
auucgcacauacaguuuggacc

SEQ ID NO: 265705 - RNA, 23 nt, Artificial Sequence
  Synthetic
uauucgcacauacaguuuggacc

SEQ ID NO: 265706 - RNA, 24 nt, Artificial Sequence
  Synthetic
uuauucgcacauacaguuuggacc

SEQ ID NO: 265707 - RNA, 18 nt, Artificial Sequence
  Synthetic
gaccuugaacaaaugacc

SEQ ID NO: 265708 - RNA, 19 nt, Artificial Sequence
  Synthetic
ugaccuugaacaaaugacc

SEQ ID NO: 265709 - RNA, 20 nt, Artificial Sequence
  Synthetic
cugaccuugaacaaaugacc

SEQ ID NO: 265710 - RNA, 21 nt, Artificial Sequence
  Synthetic
ucugaccuugaacaaaugacc

SEQ ID NO: 265711 - RNA, 22 nt, Artificial Sequence
  Synthetic
gucugaccuugaacaaaugacc

SEQ ID NO: 265712 - RNA, 23 nt, Artificial Sequence
  Synthetic
ugucugaccuugaacaaaugacc

SEQ ID NO: 265713 - RNA, 24 nt, Artificial Sequence
  Synthetic
cugucugaccuugaacaaaugacc

SEQ ID NO: 265714 - RNA, 18 nt, Artificial Sequence
  Synthetic
uugcuguggaccaugacc

SEQ ID NO: 265715 - RNA, 19 nt, Artificial Sequence
  Synthetic
uuugcuguggaccaugacc

SEQ ID NO: 265716 - RNA, 20 nt, Artificial Sequence
  Synthetic
uuuugcuguggaccaugacc

SEQ ID NO: 265717 - RNA, 21 nt, Artificial Sequence
  Synthetic
cuuuugcuguggaccaugacc

SEQ ID NO: 265718 - RNA, 22 nt, Artificial Sequence
  Synthetic
acuuuugcuguggaccaugacc

SEQ ID NO: 265719 - RNA, 23 nt, Artificial Sequence
  Synthetic
aacuuuugcuguggaccaugacc

SEQ ID NO: 265720 - RNA, 24 nt, Artificial Sequence
  Synthetic
caacuuuugcuguggaccaugacc

SEQ ID NO: 265721 - RNA, 18 nt, Artificial Sequence
  Synthetic
ucaauaaagugcaugacc

SEQ ID NO: 265722 - RNA, 19 nt, Artificial Sequence
  Synthetic
cucaauaaagugcaugacc

SEQ ID NO: 265723 - RNA, 20 nt, Artificial Sequence
  Synthetic
ucucaauaaagugcaugacc

SEQ ID NO: 265724 - RNA, 21 nt, Artificial Sequence
  Synthetic
uucucaauaaagugcaugacc

SEQ ID NO: 265725 - RNA, 22 nt, Artificial Sequence
  Synthetic
uuucucaauaaagugcaugacc

SEQ ID NO: 265726 - RNA, 23 nt, Artificial Sequence
  Synthetic
uuuucucaauaaagugcaugacc

SEQ ID NO: 265727 - RNA, 24 nt, Artificial Sequence
  Synthetic
uuuuucucaauaaagugcaugacc

SEQ ID NO: 265728 - RNA, 18 nt, Artificial Sequence
  Synthetic
uguaucaccaucaugacc

SEQ ID NO: 265729 - RNA, 19 nt, Artificial Sequence
  Synthetic
cuguaucaccaucaugacc

SEQ ID NO: 265730 - RNA, 20 nt, Artificial Sequence
  Synthetic
ucuguaucaccaucaugacc

SEQ ID NO: 265731 - RNA, 21 nt, Artificial Sequence
  Synthetic
cucuguaucaccaucaugacc

SEQ ID NO: 265732 - RNA, 22 nt, Artificial Sequence
  Synthetic
gcucuguaucaccaucaugacc

SEQ ID NO: 265733 - RNA, 23 nt, Artificial Sequence
  Synthetic
agcucuguaucaccaucaugacc

SEQ ID NO: 265734 - RNA, 24 nt, Artificial Sequence
  Synthetic
cagcucuguaucaccaucaugacc

SEQ ID NO: 265735 - RNA, 18 nt, Artificial Sequence
  Synthetic
ccuagaaggaggaugacc

SEQ ID NO: 265736 - RNA, 19 nt, Artificial Sequence
  Synthetic
uccuagaaggaggaugacc

SEQ ID NO: 265737 - RNA, 20 nt, Artificial Sequence
  Synthetic
guccuagaaggaggaugacc

SEQ ID NO: 265738 - RNA, 21 nt, Artificial Sequence
  Synthetic
aguccuagaaggaggaugacc

SEQ ID NO: 265739 - RNA, 22 nt, Artificial Sequence
  Synthetic
caguccuagaaggaggaugacc

SEQ ID NO: 265740 - RNA, 23 nt, Artificial Sequence
  Synthetic
ucaguccuagaaggaggaugacc

SEQ ID NO: 265741 - RNA, 24 nt, Artificial Sequence
  Synthetic
cucaguccuagaaggaggaugacc

SEQ ID NO: 265742 - RNA, 18 nt, Artificial Sequence
  Synthetic
cacauaaaggcacugacc

SEQ ID NO: 265743 - RNA, 19 nt, Artificial Sequence
  Synthetic
ccacauaaaggcacugacc

SEQ ID NO: 265744 - RNA, 20 nt, Artificial Sequence
  Synthetic
gccacauaaaggcacugacc

SEQ ID NO: 265745 - RNA, 21 nt, Artificial Sequence
  Synthetic
ugccacauaaaggcacugacc

SEQ ID NO: 265746 - RNA, 22 nt, Artificial Sequence
  Synthetic
augccacauaaaggcacugacc

SEQ ID NO: 265747 - RNA, 23 nt, Artificial Sequence
  Synthetic
aaugccacauaaaggcacugacc

SEQ ID NO: 265748 - RNA, 24 nt, Artificial Sequence
  Synthetic
gaaugccacauaaaggcacugacc

SEQ ID NO: 265749 - RNA, 18 nt, Artificial Sequence
  Synthetic
auaacauguuuacugacc

SEQ ID NO: 265750 - RNA, 19 nt, Artificial Sequence
  Synthetic
cauaacauguuuacugacc

SEQ ID NO: 265751 - RNA, 20 nt, Artificial Sequence
  Synthetic
ucauaacauguuuacugacc

SEQ ID NO: 265752 - RNA, 21 nt, Artificial Sequence
  Synthetic
uucauaacauguuuacugacc

SEQ ID NO: 265753 - RNA, 22 nt, Artificial Sequence
  Synthetic
auucauaacauguuuacugacc

SEQ ID NO: 265754 - RNA, 23 nt, Artificial Sequence
  Synthetic
aauucauaacauguuuacugacc

SEQ ID NO: 265755 - RNA, 24 nt, Artificial Sequence
  Synthetic
caauucauaacauguuuacugacc

SEQ ID NO: 265756 - RNA, 18 nt, Artificial Sequence
  Synthetic
gaguuaacaaagcugacc

SEQ ID NO: 265757 - RNA, 19 nt, Artificial Sequence
  Synthetic
ggaguuaacaaagcugacc

SEQ ID NO: 265758 - RNA, 20 nt, Artificial Sequence
  Synthetic
aggaguuaacaaagcugacc

SEQ ID NO: 265759 - RNA, 21 nt, Artificial Sequence
  Synthetic
gaggaguuaacaaagcugacc

SEQ ID NO: 265760 - RNA, 22 nt, Artificial Sequence
  Synthetic
agaggaguuaacaaagcugacc

SEQ ID NO: 265761 - RNA, 23 nt, Artificial Sequence
  Synthetic
gagaggaguuaacaaagcugacc

SEQ ID NO: 265762 - RNA, 24 nt, Artificial Sequence
  Synthetic
ugagaggaguuaacaaagcugacc

SEQ ID NO: 265763 - RNA, 18 nt, Artificial Sequence
  Synthetic
gacugucauacucugacc

SEQ ID NO: 265764 - RNA, 19 nt, Artificial Sequence
  Synthetic
ugacugucauacucugacc

SEQ ID NO: 265765 - RNA, 20 nt, Artificial Sequence
  Synthetic
uugacugucauacucugacc

SEQ ID NO: 265766 - RNA, 21 nt, Artificial Sequence
  Synthetic
cuugacugucauacucugacc

SEQ ID NO: 265767 - RNA, 22 nt, Artificial Sequence
  Synthetic
ucuugacugucauacucugacc

SEQ ID NO: 265768 - RNA, 23 nt, Artificial Sequence
  Synthetic
aucuugacugucauacucugacc

SEQ ID NO: 265769 - RNA, 24 nt, Artificial Sequence
  Synthetic
aaucuugacugucauacucugacc

SEQ ID NO: 265770 - RNA, 18 nt, Artificial Sequence
  Synthetic
aaaguacaugcucugacc

SEQ ID NO: 265771 - RNA, 19 nt, Artificial Sequence
  Synthetic
aaaaguacaugcucugacc

SEQ ID NO: 265772 - RNA, 20 nt, Artificial Sequence
  Synthetic
aaaaaguacaugcucugacc

SEQ ID NO: 265773 - RNA, 21 nt, Artificial Sequence
  Synthetic
gaaaaaguacaugcucugacc

SEQ ID NO: 265774 - RNA, 22 nt, Artificial Sequence
  Synthetic
agaaaaaguacaugcucugacc

SEQ ID NO: 265775 - RNA, 23 nt, Artificial Sequence
  Synthetic
uagaaaaaguacaugcucugacc

SEQ ID NO: 265776 - RNA, 24 nt, Artificial Sequence
  Synthetic
uuagaaaaaguacaugcucugacc

SEQ ID NO: 265777 - RNA, 18 nt, Artificial Sequence
  Synthetic
cguggaaccugucugacc

SEQ ID NO: 265778 - RNA, 19 nt, Artificial Sequence
  Synthetic
ccguggaaccugucugacc

SEQ ID NO: 265779 - RNA, 20 nt, Artificial Sequence
  Synthetic
accguggaaccugucugacc

SEQ ID NO: 265780 - RNA, 21 nt, Artificial Sequence
  Synthetic
caccguggaaccugucugacc

SEQ ID NO: 265781 - RNA, 22 nt, Artificial Sequence
  Synthetic
ccaccguggaaccugucugacc

SEQ ID NO: 265782 - RNA, 23 nt, Artificial Sequence
  Synthetic
uccaccguggaaccugucugacc

SEQ ID NO: 265783 - RNA, 24 nt, Artificial Sequence
  Synthetic
uuccaccguggaaccugucugacc

SEQ ID NO: 265784 - RNA, 18 nt, Artificial Sequence
  Synthetic
caagcuggagcagugacc

SEQ ID NO: 265785 - RNA, 19 nt, Artificial Sequence
  Synthetic
ccaagcuggagcagugacc

SEQ ID NO: 265786 - RNA, 20 nt, Artificial Sequence
  Synthetic
cccaagcuggagcagugacc

SEQ ID NO: 265787 - RNA, 21 nt, Artificial Sequence
  Synthetic
gcccaagcuggagcagugacc

SEQ ID NO: 265788 - RNA, 22 nt, Artificial Sequence
  Synthetic
agcccaagcuggagcagugacc

SEQ ID NO: 265789 - RNA, 23 nt, Artificial Sequence
  Synthetic
gagcccaagcuggagcagugacc

SEQ ID NO: 265790 - RNA, 24 nt, Artificial Sequence
  Synthetic
agagcccaagcuggagcagugacc

SEQ ID NO: 265791 - RNA, 18 nt, Artificial Sequence
  Synthetic
agaugaguaagggugacc

SEQ ID NO: 265792 - RNA, 19 nt, Artificial Sequence
  Synthetic
uagaugaguaagggugacc

SEQ ID NO: 265793 - RNA, 20 nt, Artificial Sequence
  Synthetic
auagaugaguaagggugacc

SEQ ID NO: 265794 - RNA, 21 nt, Artificial Sequence
  Synthetic
gauagaugaguaagggugacc

SEQ ID NO: 265795 - RNA, 22 nt, Artificial Sequence
  Synthetic
ugauagaugaguaagggugacc

SEQ ID NO: 265796 - RNA, 23 nt, Artificial Sequence
  Synthetic
gugauagaugaguaagggugacc

SEQ ID NO: 265797 - RNA, 24 nt, Artificial Sequence
  Synthetic
ugugauagaugaguaagggugacc

SEQ ID NO: 265798 - RNA, 18 nt, Artificial Sequence
  Synthetic
ccuuuuagcuuggugacc

SEQ ID NO: 265799 - RNA, 19 nt, Artificial Sequence
  Synthetic
accuuuuagcuuggugacc

SEQ ID NO: 265800 - RNA, 20 nt, Artificial Sequence
  Synthetic
caccuuuuagcuuggugacc

SEQ ID NO: 265801 - RNA, 21 nt, Artificial Sequence
  Synthetic
ccaccuuuuagcuuggugacc

SEQ ID NO: 265802 - RNA, 22 nt, Artificial Sequence
  Synthetic
accaccuuuuagcuuggugacc

SEQ ID NO: 265803 - RNA, 23 nt, Artificial Sequence
  Synthetic
caccaccuuuuagcuuggugacc

SEQ ID NO: 265804 - RNA, 24 nt, Artificial Sequence
  Synthetic
ucaccaccuuuuagcuuggugacc

SEQ ID NO: 265805 - RNA, 18 nt, Artificial Sequence
  Synthetic
uuaaauuccaaauugacc

SEQ ID NO: 265806 - RNA, 19 nt, Artificial Sequence
  Synthetic
uuuaaauuccaaauugacc

SEQ ID NO: 265807 - RNA, 20 nt, Artificial Sequence
  Synthetic
cuuuaaauuccaaauugacc

SEQ ID NO: 265808 - RNA, 21 nt, Artificial Sequence
  Synthetic
ucuuuaaauuccaaauugacc

SEQ ID NO: 265809 - RNA, 22 nt, Artificial Sequence
  Synthetic
uucuuuaaauuccaaauugacc

SEQ ID NO: 265810 - RNA, 23 nt, Artificial Sequence
  Synthetic
auucuuuaaauuccaaauugacc

SEQ ID NO: 265811 - RNA, 24 nt, Artificial Sequence
  Synthetic
gauucuuuaaauuccaaauugacc

SEQ ID NO: 265812 - RNA, 18 nt, Artificial Sequence
  Synthetic
aagagauagaaauugacc

SEQ ID NO: 265813 - RNA, 19 nt, Artificial Sequence
  Synthetic
aaagagauagaaauugacc

SEQ ID NO: 265814 - RNA, 20 nt, Artificial Sequence
  Synthetic
aaaagagauagaaauugacc

SEQ ID NO: 265815 - RNA, 21 nt, Artificial Sequence
  Synthetic
uaaaagagauagaaauugacc

SEQ ID NO: 265816 - RNA, 22 nt, Artificial Sequence
  Synthetic
auaaaagagauagaaauugacc

SEQ ID NO: 265817 - RNA, 23 nt, Artificial Sequence
  Synthetic
aauaaaagagauagaaauugacc

SEQ ID NO: 265818 - RNA, 24 nt, Artificial Sequence
  Synthetic
aaauaaaagagauagaaauugacc

SEQ ID NO: 265819 - RNA, 18 nt, Artificial Sequence
  Synthetic
uuuauuuaagaauugacc

SEQ ID NO: 265820 - RNA, 19 nt, Artificial Sequence
  Synthetic
uuuuauuuaagaauugacc

SEQ ID NO: 265821 - RNA, 20 nt, Artificial Sequence
  Synthetic
auuuuauuuaagaauugacc

SEQ ID NO: 265822 - RNA, 21 nt, Artificial Sequence
  Synthetic
aauuuuauuuaagaauugacc

SEQ ID NO: 265823 - RNA, 22 nt, Artificial Sequence
  Synthetic
aaauuuuauuuaagaauugacc

SEQ ID NO: 265824 - RNA, 23 nt, Artificial Sequence
  Synthetic
aaaauuuuauuuaagaauugacc

SEQ ID NO: 265825 - RNA, 24 nt, Artificial Sequence
  Synthetic
aaaaauuuuauuuaagaauugacc

SEQ ID NO: 265826 - RNA, 18 nt, Artificial Sequence
  Synthetic
auuaaguauucuuugacc

SEQ ID NO: 265827 - RNA, 19 nt, Artificial Sequence
  Synthetic
uauuaaguauucuuugacc

SEQ ID NO: 265828 - RNA, 20 nt, Artificial Sequence
  Synthetic
uuauuaaguauucuuugacc

SEQ ID NO: 265829 - RNA, 21 nt, Artificial Sequence
  Synthetic
auuauuaaguauucuuugacc

SEQ ID NO: 265830 - RNA, 22 nt, Artificial Sequence
  Synthetic
uauuauuaaguauucuuugacc

SEQ ID NO: 265831 - RNA, 23 nt, Artificial Sequence
  Synthetic
auauuauuaaguauucuuugacc

SEQ ID NO: 265832 - RNA, 24 nt, Artificial Sequence
  Synthetic
uauauuauuaaguauucuuugacc

SEQ ID NO: 265833 - RNA, 18 nt, Artificial Sequence
  Synthetic
ccuucuaaaaguuugacc

SEQ ID NO: 265834 - RNA, 19 nt, Artificial Sequence
  Synthetic
cccuucuaaaaguuugacc

SEQ ID NO: 265835 - RNA, 20 nt, Artificial Sequence
  Synthetic
ucccuucuaaaaguuugacc

SEQ ID NO: 265836 - RNA, 21 nt, Artificial Sequence
  Synthetic
aucccuucuaaaaguuugacc

SEQ ID NO: 265837 - RNA, 22 nt, Artificial Sequence
  Synthetic
caucccuucuaaaaguuugacc

SEQ ID NO: 265838 - RNA, 23 nt, Artificial Sequence
  Synthetic
gcaucccuucuaaaaguuugacc

SEQ ID NO: 265839 - RNA, 24 nt, Artificial Sequence
  Synthetic
ugcaucccuucuaaaaguuugacc

SEQ ID NO: 265840 - RNA, 18 nt, Artificial Sequence
  Synthetic
aacagagcuuguuugacc

SEQ ID NO: 265841 - RNA, 19 nt, Artificial Sequence
  Synthetic
gaacagagcuuguuugacc

SEQ ID NO: 265842 - RNA, 20 nt, Artificial Sequence
  Synthetic
ggaacagagcuuguuugacc

SEQ ID NO: 265843 - RNA, 21 nt, Artificial Sequence
  Synthetic
aggaacagagcuuguuugacc

SEQ ID NO: 265844 - RNA, 22 nt, Artificial Sequence
  Synthetic
uaggaacagagcuuguuugacc

SEQ ID NO: 265845 - RNA, 23 nt, Artificial Sequence
  Synthetic
uuaggaacagagcuuguuugacc

SEQ ID NO: 265846 - RNA, 24 nt, Artificial Sequence
  Synthetic
uuuaggaacagagcuuguuugacc

SEQ ID NO: 265847 - RNA, 18 nt, Artificial Sequence
  Synthetic
aaggacacaaaaaauacc

SEQ ID NO: 265848 - RNA, 19 nt, Artificial Sequence
  Synthetic
caaggacacaaaaaauacc

SEQ ID NO: 265849 - RNA, 20 nt, Artificial Sequence
  Synthetic
acaaggacacaaaaaauacc

SEQ ID NO: 265850 - RNA, 21 nt, Artificial Sequence
  Synthetic
cacaaggacacaaaaaauacc

SEQ ID NO: 265851 - RNA, 22 nt, Artificial Sequence
  Synthetic
gcacaaggacacaaaaaauacc

SEQ ID NO: 265852 - RNA, 23 nt, Artificial Sequence
  Synthetic
ggcacaaggacacaaaaaauacc

SEQ ID NO: 265853 - RNA, 24 nt, Artificial Sequence
  Synthetic
uggcacaaggacacaaaaaauacc

SEQ ID NO: 265854 - RNA, 18 nt, Artificial Sequence
  Synthetic
caaagagaauaaaauacc

SEQ ID NO: 265855 - RNA, 19 nt, Artificial Sequence
  Synthetic
ucaaagagaauaaaauacc

SEQ ID NO: 265856 - RNA, 20 nt, Artificial Sequence
  Synthetic
uucaaagagaauaaaauacc

SEQ ID NO: 265857 - RNA, 21 nt, Artificial Sequence
  Synthetic
cuucaaagagaauaaaauacc

SEQ ID NO: 265858 - RNA, 22 nt, Artificial Sequence
  Synthetic
gcuucaaagagaauaaaauacc

SEQ ID NO: 265859 - RNA, 23 nt, Artificial Sequence
  Synthetic
ugcuucaaagagaauaaaauacc

SEQ ID NO: 265860 - RNA, 24 nt, Artificial Sequence
  Synthetic
uugcuucaaagagaauaaaauacc

SEQ ID NO: 265861 - RNA, 18 nt, Artificial Sequence
  Synthetic
uacaagggcuaaaauacc

SEQ ID NO: 265862 - RNA, 19 nt, Artificial Sequence
  Synthetic
cuacaagggcuaaaauacc

SEQ ID NO: 265863 - RNA, 20 nt, Artificial Sequence
  Synthetic
gcuacaagggcuaaaauacc

SEQ ID NO: 265864 - RNA, 21 nt, Artificial Sequence
  Synthetic
ugcuacaagggcuaaaauacc

SEQ ID NO: 265865 - RNA, 22 nt, Artificial Sequence
  Synthetic
uugcuacaagggcuaaaauacc

SEQ ID NO: 265866 - RNA, 23 nt, Artificial Sequence
  Synthetic
auugcuacaagggcuaaaauacc

SEQ ID NO: 265867 - RNA, 24 nt, Artificial Sequence
  Synthetic
cauugcuacaagggcuaaaauacc

SEQ ID NO: 265868 - RNA, 18 nt, Artificial Sequence
  Synthetic
uauggagacucaaauacc

SEQ ID NO: 265869 - RNA, 19 nt, Artificial Sequence
  Synthetic
guauggagacucaaauacc

SEQ ID NO: 265870 - RNA, 20 nt, Artificial Sequence
  Synthetic
uguauggagacucaaauacc

SEQ ID NO: 265871 - RNA, 21 nt, Artificial Sequence
  Synthetic
uuguauggagacucaaauacc

SEQ ID NO: 265872 - RNA, 22 nt, Artificial Sequence
  Synthetic
guuguauggagacucaaauacc

SEQ ID NO: 265873 - RNA, 23 nt, Artificial Sequence
  Synthetic
uguuguauggagacucaaauacc

SEQ ID NO: 265874 - RNA, 24 nt, Artificial Sequence
  Synthetic
guguuguauggagacucaaauacc

SEQ ID NO: 265875 - RNA, 18 nt, Artificial Sequence
  Synthetic
acauuuggaagaaauacc

SEQ ID NO: 265876 - RNA, 19 nt, Artificial Sequence
  Synthetic
uacauuuggaagaaauacc

SEQ ID NO: 265877 - RNA, 20 nt, Artificial Sequence
  Synthetic
cuacauuuggaagaaauacc

SEQ ID NO: 265878 - RNA, 21 nt, Artificial Sequence
  Synthetic
acuacauuuggaagaaauacc

SEQ ID NO: 265879 - RNA, 22 nt, Artificial Sequence
  Synthetic
cacuacauuuggaagaaauacc

SEQ ID NO: 265880 - RNA, 23 nt, Artificial Sequence
  Synthetic
acacuacauuuggaagaaauacc

SEQ ID NO: 265881 - RNA, 24 nt, Artificial Sequence
  Synthetic
aacacuacauuuggaagaaauacc

SEQ ID NO: 265882 - RNA, 18 nt, Artificial Sequence
  Synthetic
uuuugaaauguaaauacc

SEQ ID NO: 265883 - RNA, 19 nt, Artificial Sequence
  Synthetic
uuuuugaaauguaaauacc

SEQ ID NO: 265884 - RNA, 20 nt, Artificial Sequence
  Synthetic
uuuuuugaaauguaaauacc

SEQ ID NO: 265885 - RNA, 21 nt, Artificial Sequence
  Synthetic
auuuuuugaaauguaaauacc

SEQ ID NO: 265886 - RNA, 22 nt, Artificial Sequence
  Synthetic
uauuuuuugaaauguaaauacc

SEQ ID NO: 265887 - RNA, 23 nt, Artificial Sequence
  Synthetic
auauuuuuugaaauguaaauacc

SEQ ID NO: 265888 - RNA, 24 nt, Artificial Sequence
  Synthetic
cauauuuuuugaaauguaaauacc

SEQ ID NO: 265889 - RNA, 18 nt, Artificial Sequence
  Synthetic
aacagguuucacaauacc

SEQ ID NO: 265890 - RNA, 19 nt, Artificial Sequence
  Synthetic
gaacagguuucacaauacc

SEQ ID NO: 265891 - RNA, 20 nt, Artificial Sequence
  Synthetic
agaacagguuucacaauacc

SEQ ID NO: 265892 - RNA, 21 nt, Artificial Sequence
  Synthetic
gagaacagguuucacaauacc

SEQ ID NO: 265893 - RNA, 22 nt, Artificial Sequence
  Synthetic
agagaacagguuucacaauacc

SEQ ID NO: 265894 - RNA, 23 nt, Artificial Sequence
  Synthetic
uagagaacagguuucacaauacc

SEQ ID NO: 265895 - RNA, 24 nt, Artificial Sequence
  Synthetic
cuagagaacagguuucacaauacc

SEQ ID NO: 265896 - RNA, 18 nt, Artificial Sequence
  Synthetic
ucaaaacuuaugaauacc

SEQ ID NO: 265897 - RNA, 19 nt, Artificial Sequence
  Synthetic
uucaaaacuuaugaauacc

SEQ ID NO: 265898 - RNA, 20 nt, Artificial Sequence
  Synthetic
auucaaaacuuaugaauacc

SEQ ID NO: 265899 - RNA, 21 nt, Artificial Sequence
  Synthetic
cauucaaaacuuaugaauacc

SEQ ID NO: 265900 - RNA, 22 nt, Artificial Sequence
  Synthetic
acauucaaaacuuaugaauacc

SEQ ID NO: 265901 - RNA, 23 nt, Artificial Sequence
  Synthetic
aacauucaaaacuuaugaauacc

SEQ ID NO: 265902 - RNA, 24 nt, Artificial Sequence
  Synthetic
uaacauucaaaacuuaugaauacc

SEQ ID NO: 265903 - RNA, 18 nt, Artificial Sequence
  Synthetic
uugugccuuuugaauacc

SEQ ID NO: 265904 - RNA, 19 nt, Artificial Sequence
  Synthetic
uuugugccuuuugaauacc

SEQ ID NO: 265905 - RNA, 20 nt, Artificial Sequence
  Synthetic
auuugugccuuuugaauacc

SEQ ID NO: 265906 - RNA, 21 nt, Artificial Sequence
  Synthetic
uauuugugccuuuugaauacc

SEQ ID NO: 265907 - RNA, 22 nt, Artificial Sequence
  Synthetic
cuauuugugccuuuugaauacc

SEQ ID NO: 265908 - RNA, 23 nt, Artificial Sequence
  Synthetic
gcuauuugugccuuuugaauacc

SEQ ID NO: 265909 - RNA, 24 nt, Artificial Sequence
  Synthetic
agcuauuugugccuuuugaauacc

SEQ ID NO: 265910 - RNA, 18 nt, Artificial Sequence
  Synthetic
uguaauaauaauaauacc

SEQ ID NO: 265911 - RNA, 19 nt, Artificial Sequence
  Synthetic
auguaauaauaauaauacc

SEQ ID NO: 265912 - RNA, 20 nt, Artificial Sequence
  Synthetic
cauguaauaauaauaauacc

SEQ ID NO: 265913 - RNA, 21 nt, Artificial Sequence
  Synthetic
ccauguaauaauaauaauacc

SEQ ID NO: 265914 - RNA, 22 nt, Artificial Sequence
  Synthetic
cccauguaauaauaauaauacc

SEQ ID NO: 265915 - RNA, 23 nt, Artificial Sequence
  Synthetic
ucccauguaauaauaauaauacc

SEQ ID NO: 265916 - RNA, 24 nt, Artificial Sequence
  Synthetic
uucccauguaauaauaauaauacc

SEQ ID NO: 265917 - RNA, 18 nt, Artificial Sequence
  Synthetic
aauaaugauuauaauacc

SEQ ID NO: 265918 - RNA, 19 nt, Artificial Sequence
  Synthetic
uaauaaugauuauaauacc

SEQ ID NO: 265919 - RNA, 20 nt, Artificial Sequence
  Synthetic
uuaauaaugauuauaauacc

SEQ ID NO: 265920 - RNA, 21 nt, Artificial Sequence
  Synthetic
auuaauaaugauuauaauacc

SEQ ID NO: 265921 - RNA, 22 nt, Artificial Sequence
  Synthetic
aauuaauaaugauuauaauacc

SEQ ID NO: 265922 - RNA, 23 nt, Artificial Sequence
  Synthetic
caauuaauaaugauuauaauacc

SEQ ID NO: 265923 - RNA, 24 nt, Artificial Sequence
  Synthetic
gcaauuaauaaugauuauaauacc

SEQ ID NO: 265924 - RNA, 18 nt, Artificial Sequence
  Synthetic
cacugaauacguaauacc

SEQ ID NO: 265925 - RNA, 19 nt, Artificial Sequence
  Synthetic
ccacugaauacguaauacc

SEQ ID NO: 265926 - RNA, 20 nt, Artificial Sequence
  Synthetic
uccacugaauacguaauacc

SEQ ID NO: 265927 - RNA, 21 nt, Artificial Sequence
  Synthetic
uuccacugaauacguaauacc

SEQ ID NO: 265928 - RNA, 22 nt, Artificial Sequence
  Synthetic
uuuccacugaauacguaauacc

SEQ ID NO: 265929 - RNA, 23 nt, Artificial Sequence
  Synthetic
uuuuccacugaauacguaauacc

SEQ ID NO: 265930 - RNA, 24 nt, Artificial Sequence
  Synthetic
auuuuccacugaauacguaauacc

SEQ ID NO: 265931 - RNA, 18 nt, Artificial Sequence
  Synthetic
gguaacauuguacauacc

SEQ ID NO: 265932 - RNA, 19 nt, Artificial Sequence
  Synthetic
ugguaacauuguacauacc

SEQ ID NO: 265933 - RNA, 20 nt, Artificial Sequence
  Synthetic
gugguaacauuguacauacc

SEQ ID NO: 265934 - RNA, 21 nt, Artificial Sequence
  Synthetic
ugugguaacauuguacauacc

SEQ ID NO: 265935 - RNA, 22 nt, Artificial Sequence
  Synthetic
gugugguaacauuguacauacc

SEQ ID NO: 265936 - RNA, 23 nt, Artificial Sequence
  Synthetic
ugugugguaacauuguacauacc

SEQ ID NO: 265937 - RNA, 24 nt, Artificial Sequence
  Synthetic
gugugugguaacauuguacauacc

SEQ ID NO: 265938 - RNA, 18 nt, Artificial Sequence
  Synthetic
ucuccagguuuacauacc

SEQ ID NO: 265939 - RNA, 19 nt, Artificial Sequence
  Synthetic
uucuccagguuuacauacc

SEQ ID NO: 265940 - RNA, 20 nt, Artificial Sequence
  Synthetic
uuucuccagguuuacauacc

SEQ ID NO: 265941 - RNA, 21 nt, Artificial Sequence
  Synthetic
guuucuccagguuuacauacc

SEQ ID NO: 265942 - RNA, 22 nt, Artificial Sequence
  Synthetic
uguuucuccagguuuacauacc

SEQ ID NO: 265943 - RNA, 23 nt, Artificial Sequence
  Synthetic
auguuucuccagguuuacauacc

SEQ ID NO: 265944 - RNA, 24 nt, Artificial Sequence
  Synthetic
uauguuucuccagguuuacauacc

SEQ ID NO: 265945 - RNA, 18 nt, Artificial Sequence
  Synthetic
ucagcaauaagccauacc

SEQ ID NO: 265946 - RNA, 19 nt, Artificial Sequence
  Synthetic
gucagcaauaagccauacc

SEQ ID NO: 265947 - RNA, 20 nt, Artificial Sequence
  Synthetic
ggucagcaauaagccauacc

SEQ ID NO: 265948 - RNA, 21 nt, Artificial Sequence
  Synthetic
aggucagcaauaagccauacc

SEQ ID NO: 265949 - RNA, 22 nt, Artificial Sequence
  Synthetic
gaggucagcaauaagccauacc

SEQ ID NO: 265950 - RNA, 23 nt, Artificial Sequence
  Synthetic
ugaggucagcaauaagccauacc

SEQ ID NO: 265951 - RNA, 24 nt, Artificial Sequence
  Synthetic
augaggucagcaauaagccauacc

SEQ ID NO: 265952 - RNA, 18 nt, Artificial Sequence
  Synthetic
ggugugauguuccauacc

SEQ ID NO: 265953 - RNA, 19 nt, Artificial Sequence
  Synthetic
aggugugauguuccauacc

SEQ ID NO: 265954 - RNA, 20 nt, Artificial Sequence
  Synthetic
caggugugauguuccauacc

SEQ ID NO: 265955 - RNA, 21 nt, Artificial Sequence
  Synthetic
ccaggugugauguuccauacc

SEQ ID NO: 265956 - RNA, 22 nt, Artificial Sequence
  Synthetic
accaggugugauguuccauacc

SEQ ID NO: 265957 - RNA, 23 nt, Artificial Sequence
  Synthetic
caccaggugugauguuccauacc

SEQ ID NO: 265958 - RNA, 24 nt, Artificial Sequence
  Synthetic
acaccaggugugauguuccauacc

SEQ ID NO: 265959 - RNA, 18 nt, Artificial Sequence
  Synthetic
gugacugggaagcauacc

SEQ ID NO: 265960 - RNA, 19 nt, Artificial Sequence
  Synthetic
ggugacugggaagcauacc

SEQ ID NO: 265961 - RNA, 20 nt, Artificial Sequence
  Synthetic
gggugacugggaagcauacc

SEQ ID NO: 265962 - RNA, 21 nt, Artificial Sequence
  Synthetic
ugggugacugggaagcauacc

SEQ ID NO: 265963 - RNA, 22 nt, Artificial Sequence
  Synthetic
uugggugacugggaagcauacc

SEQ ID NO: 265964 - RNA, 23 nt, Artificial Sequence
  Synthetic
uuugggugacugggaagcauacc

SEQ ID NO: 265965 - RNA, 24 nt, Artificial Sequence
  Synthetic
guuugggugacugggaagcauacc

SEQ ID NO: 265966 - RNA, 18 nt, Artificial Sequence
  Synthetic
uuguuuuaaaugcauacc

SEQ ID NO: 265967 - RNA, 19 nt, Artificial Sequence
  Synthetic
guuguuuuaaaugcauacc

SEQ ID NO: 265968 - RNA, 20 nt, Artificial Sequence
  Synthetic
aguuguuuuaaaugcauacc

SEQ ID NO: 265969 - RNA, 21 nt, Artificial Sequence
  Synthetic
aaguuguuuuaaaugcauacc

SEQ ID NO: 265970 - RNA, 22 nt, Artificial Sequence
  Synthetic
aaaguuguuuuaaaugcauacc

SEQ ID NO: 265971 - RNA, 23 nt, Artificial Sequence
  Synthetic
uaaaguuguuuuaaaugcauacc

SEQ ID NO: 265972 - RNA, 24 nt, Artificial Sequence
  Synthetic
auaaaguuguuuuaaaugcauacc

SEQ ID NO: 265973 - RNA, 18 nt, Artificial Sequence
  Synthetic
aaauaggauaaagauacc

SEQ ID NO: 265974 - RNA, 19 nt, Artificial Sequence
  Synthetic
gaaauaggauaaagauacc

SEQ ID NO: 265975 - RNA, 20 nt, Artificial Sequence
  Synthetic
agaaauaggauaaagauacc

SEQ ID NO: 265976 - RNA, 21 nt, Artificial Sequence
  Synthetic
gagaaauaggauaaagauacc

SEQ ID NO: 265977 - RNA, 22 nt, Artificial Sequence
  Synthetic
ggagaaauaggauaaagauacc

SEQ ID NO: 265978 - RNA, 23 nt, Artificial Sequence
  Synthetic
gggagaaauaggauaaagauacc

SEQ ID NO: 265979 - RNA, 24 nt, Artificial Sequence
  Synthetic
ugggagaaauaggauaaagauacc

SEQ ID NO: 265980 - RNA, 18 nt, Artificial Sequence
  Synthetic
ucugugaaaauagauacc

SEQ ID NO: 265981 - RNA, 19 nt, Artificial Sequence
  Synthetic
uucugugaaaauagauacc

SEQ ID NO: 265982 - RNA, 20 nt, Artificial Sequence
  Synthetic
auucugugaaaauagauacc

SEQ ID NO: 265983 - RNA, 21 nt, Artificial Sequence
  Synthetic
uauucugugaaaauagauacc

SEQ ID NO: 265984 - RNA, 22 nt, Artificial Sequence
  Synthetic
cuauucugugaaaauagauacc

SEQ ID NO: 265985 - RNA, 23 nt, Artificial Sequence
  Synthetic
acuauucugugaaaauagauacc

SEQ ID NO: 265986 - RNA, 24 nt, Artificial Sequence
  Synthetic
aacuauucugugaaaauagauacc

SEQ ID NO: 265987 - RNA, 18 nt, Artificial Sequence
  Synthetic
uacagagcuacggauacc

SEQ ID NO: 265988 - RNA, 19 nt, Artificial Sequence
  Synthetic
uuacagagcuacggauacc

SEQ ID NO: 265989 - RNA, 20 nt, Artificial Sequence
  Synthetic
cuuacagagcuacggauacc

SEQ ID NO: 265990 - RNA, 21 nt, Artificial Sequence
  Synthetic
ucuuacagagcuacggauacc

SEQ ID NO: 265991 - RNA, 22 nt, Artificial Sequence
  Synthetic
gucuuacagagcuacggauacc

SEQ ID NO: 265992 - RNA, 23 nt, Artificial Sequence
  Synthetic
ugucuuacagagcuacggauacc

SEQ ID NO: 265993 - RNA, 24 nt, Artificial Sequence
  Synthetic
cugucuuacagagcuacggauacc

SEQ ID NO: 265994 - RNA, 18 nt, Artificial Sequence
  Synthetic
aaagaaaauucugauacc

SEQ ID NO: 265995 - RNA, 19 nt, Artificial Sequence
  Synthetic
aaaagaaaauucugauacc

SEQ ID NO: 265996 - RNA, 20 nt, Artificial Sequence
  Synthetic
aaaaagaaaauucugauacc

SEQ ID NO: 265997 - RNA, 21 nt, Artificial Sequence
  Synthetic
caaaaagaaaauucugauacc

SEQ ID NO: 265998 - RNA, 22 nt, Artificial Sequence
  Synthetic
ucaaaaagaaaauucugauacc

SEQ ID NO: 265999 - RNA, 23 nt, Artificial Sequence
  Synthetic
cucaaaaagaaaauucugauacc

SEQ ID NO: 266000 - RNA, 24 nt, Artificial Sequence
  Synthetic
ucucaaaaagaaaauucugauacc

SEQ ID NO: 266001 - RNA, 18 nt, Artificial Sequence
  Synthetic
cauuauugggcauauacc

SEQ ID NO: 266002 - RNA, 19 nt, Artificial Sequence
  Synthetic
ccauuauugggcauauacc

SEQ ID NO: 266003 - RNA, 20 nt, Artificial Sequence
  Synthetic
cccauuauugggcauauacc

SEQ ID NO: 266004 - RNA, 21 nt, Artificial Sequence
  Synthetic
ucccauuauugggcauauacc

SEQ ID NO: 266005 - RNA, 22 nt, Artificial Sequence
  Synthetic
aucccauuauugggcauauacc

SEQ ID NO: 266006 - RNA, 23 nt, Artificial Sequence
  Synthetic
aaucccauuauugggcauauacc

SEQ ID NO: 266007 - RNA, 24 nt, Artificial Sequence
  Synthetic
caaucccauuauugggcauauacc

SEQ ID NO: 266008 - RNA, 18 nt, Artificial Sequence
  Synthetic
cauauauuuucauauacc

SEQ ID NO: 266009 - RNA, 19 nt, Artificial Sequence
  Synthetic
gcauauauuuucauauacc

SEQ ID NO: 266010 - RNA, 20 nt, Artificial Sequence
  Synthetic
ggcauauauuuucauauacc

SEQ ID NO: 266011 - RNA, 21 nt, Artificial Sequence
  Synthetic
uggcauauauuuucauauacc

SEQ ID NO: 266012 - RNA, 22 nt, Artificial Sequence
  Synthetic
guggcauauauuuucauauacc

SEQ ID NO: 266013 - RNA, 23 nt, Artificial Sequence
  Synthetic
uguggcauauauuuucauauacc

SEQ ID NO: 266014 - RNA, 24 nt, Artificial Sequence
  Synthetic
auguggcauauauuuucauauacc

SEQ ID NO: 266015 - RNA, 18 nt, Artificial Sequence
  Synthetic
aguuuugcaauauauacc

SEQ ID NO: 266016 - RNA, 19 nt, Artificial Sequence
  Synthetic
gaguuuugcaauauauacc

SEQ ID NO: 266017 - RNA, 20 nt, Artificial Sequence
  Synthetic
agaguuuugcaauauauacc

SEQ ID NO: 266018 - RNA, 21 nt, Artificial Sequence
  Synthetic
uagaguuuugcaauauauacc

SEQ ID NO: 266019 - RNA, 22 nt, Artificial Sequence
  Synthetic
cuagaguuuugcaauauauacc

SEQ ID NO: 266020 - RNA, 23 nt, Artificial Sequence
  Synthetic
gcuagaguuuugcaauauauacc

SEQ ID NO: 266021 - RNA, 24 nt, Artificial Sequence
  Synthetic
ugcuagaguuuugcaauauauacc

SEQ ID NO: 266022 - RNA, 18 nt, Artificial Sequence
  Synthetic
augauugaaaccuauacc

SEQ ID NO: 266023 - RNA, 19 nt, Artificial Sequence
  Synthetic
uaugauugaaaccuauacc

SEQ ID NO: 266024 - RNA, 20 nt, Artificial Sequence
  Synthetic
auaugauugaaaccuauacc

SEQ ID NO: 266025 - RNA, 21 nt, Artificial Sequence
  Synthetic
gauaugauugaaaccuauacc

SEQ ID NO: 266026 - RNA, 22 nt, Artificial Sequence
  Synthetic
ugauaugauugaaaccuauacc

SEQ ID NO: 266027 - RNA, 23 nt, Artificial Sequence
  Synthetic
augauaugauugaaaccuauacc

SEQ ID NO: 266028 - RNA, 24 nt, Artificial Sequence
  Synthetic
caugauaugauugaaaccuauacc

SEQ ID NO: 266029 - RNA, 18 nt, Artificial Sequence
  Synthetic
ugcagcccucaguauacc

SEQ ID NO: 266030 - RNA, 19 nt, Artificial Sequence
  Synthetic
augcagcccucaguauacc

SEQ ID NO: 266031 - RNA, 20 nt, Artificial Sequence
  Synthetic
gaugcagcccucaguauacc

SEQ ID NO: 266032 - RNA, 21 nt, Artificial Sequence
  Synthetic
ugaugcagcccucaguauacc

SEQ ID NO: 266033 - RNA, 22 nt, Artificial Sequence
  Synthetic
cugaugcagcccucaguauacc

SEQ ID NO: 266034 - RNA, 23 nt, Artificial Sequence
  Synthetic
ucugaugcagcccucaguauacc

SEQ ID NO: 266035 - RNA, 24 nt, Artificial Sequence
  Synthetic
uucugaugcagcccucaguauacc

SEQ ID NO: 266036 - RNA, 18 nt, Artificial Sequence
  Synthetic
gaaauauuauaguauacc

SEQ ID NO: 266037 - RNA, 19 nt, Artificial Sequence
  Synthetic
ugaaauauuauaguauacc

SEQ ID NO: 266038 - RNA, 20 nt, Artificial Sequence
  Synthetic
augaaauauuauaguauacc

SEQ ID NO: 266039 - RNA, 21 nt, Artificial Sequence
  Synthetic
aaugaaauauuauaguauacc

SEQ ID NO: 266040 - RNA, 22 nt, Artificial Sequence
  Synthetic
aaaugaaauauuauaguauacc

SEQ ID NO: 266041 - RNA, 23 nt, Artificial Sequence
  Synthetic
aaaaugaaauauuauaguauacc

SEQ ID NO: 266042 - RNA, 24 nt, Artificial Sequence
  Synthetic
caaaaugaaauauuauaguauacc

SEQ ID NO: 266043 - RNA, 18 nt, Artificial Sequence
  Synthetic
uuguucacccuguauacc

SEQ ID NO: 266044 - RNA, 19 nt, Artificial Sequence
  Synthetic
cuuguucacccuguauacc

SEQ ID NO: 266045 - RNA, 20 nt, Artificial Sequence
  Synthetic
gcuuguucacccuguauacc

SEQ ID NO: 266046 - RNA, 21 nt, Artificial Sequence
  Synthetic
ugcuuguucacccuguauacc

SEQ ID NO: 266047 - RNA, 22 nt, Artificial Sequence
  Synthetic
uugcuuguucacccuguauacc

SEQ ID NO: 266048 - RNA, 23 nt, Artificial Sequence
  Synthetic
cuugcuuguucacccuguauacc

SEQ ID NO: 266049 - RNA, 24 nt, Artificial Sequence
  Synthetic
gcuugcuuguucacccuguauacc

SEQ ID NO: 266050 - RNA, 18 nt, Artificial Sequence
  Synthetic
uucacauggguguauacc

SEQ ID NO: 266051 - RNA, 19 nt, Artificial Sequence
  Synthetic
uuucacauggguguauacc

SEQ ID NO: 266052 - RNA, 20 nt, Artificial Sequence
  Synthetic
auuucacauggguguauacc

SEQ ID NO: 266053 - RNA, 21 nt, Artificial Sequence
  Synthetic
cauuucacauggguguauacc

SEQ ID NO: 266054 - RNA, 22 nt, Artificial Sequence
  Synthetic
acauuucacauggguguauacc

SEQ ID NO: 266055 - RNA, 23 nt, Artificial Sequence
  Synthetic
cacauuucacauggguguauacc

SEQ ID NO: 266056 - RNA, 24 nt, Artificial Sequence
  Synthetic
acacauuucacauggguguauacc

SEQ ID NO: 266057 - RNA, 18 nt, Artificial Sequence
  Synthetic
gauuagaauuuguauacc

SEQ ID NO: 266058 - RNA, 19 nt, Artificial Sequence
  Synthetic
ggauuagaauuuguauacc

SEQ ID NO: 266059 - RNA, 20 nt, Artificial Sequence
  Synthetic
uggauuagaauuuguauacc

SEQ ID NO: 266060 - RNA, 21 nt, Artificial Sequence
  Synthetic
guggauuagaauuuguauacc

SEQ ID NO: 266061 - RNA, 22 nt, Artificial Sequence
  Synthetic
gguggauuagaauuuguauacc

SEQ ID NO: 266062 - RNA, 23 nt, Artificial Sequence
  Synthetic
cgguggauuagaauuuguauacc

SEQ ID NO: 266063 - RNA, 24 nt, Artificial Sequence
  Synthetic
ucgguggauuagaauuuguauacc

SEQ ID NO: 266064 - RNA, 18 nt, Artificial Sequence
  Synthetic
cuuauaaugcuuuauacc

SEQ ID NO: 266065 - RNA, 19 nt, Artificial Sequence
  Synthetic
ucuuauaaugcuuuauacc

SEQ ID NO: 266066 - RNA, 20 nt, Artificial Sequence
  Synthetic
gucuuauaaugcuuuauacc

SEQ ID NO: 266067 - RNA, 21 nt, Artificial Sequence
  Synthetic
ggucuuauaaugcuuuauacc

SEQ ID NO: 266068 - RNA, 22 nt, Artificial Sequence
  Synthetic
uggucuuauaaugcuuuauacc

SEQ ID NO: 266069 - RNA, 23 nt, Artificial Sequence
  Synthetic
uuggucuuauaaugcuuuauacc

SEQ ID NO: 266070 - RNA, 24 nt, Artificial Sequence
  Synthetic
uuuggucuuauaaugcuuuauacc

SEQ ID NO: 266071 - RNA, 18 nt, Artificial Sequence
  Synthetic
uggccacacaaaacuacc

SEQ ID NO: 266072 - RNA, 19 nt, Artificial Sequence
  Synthetic
uuggccacacaaaacuacc

SEQ ID NO: 266073 - RNA, 20 nt, Artificial Sequence
  Synthetic
cuuggccacacaaaacuacc

SEQ ID NO: 266074 - RNA, 21 nt, Artificial Sequence
  Synthetic
acuuggccacacaaaacuacc

SEQ ID NO: 266075 - RNA, 22 nt, Artificial Sequence
  Synthetic
gacuuggccacacaaaacuacc

SEQ ID NO: 266076 - RNA, 23 nt, Artificial Sequence
  Synthetic
agacuuggccacacaaaacuacc

SEQ ID NO: 266077 - RNA, 24 nt, Artificial Sequence
  Synthetic
uagacuuggccacacaaaacuacc

SEQ ID NO: 266078 - RNA, 18 nt, Artificial Sequence
  Synthetic
acuuaugauacaacuacc

SEQ ID NO: 266079 - RNA, 19 nt, Artificial Sequence
  Synthetic
aacuuaugauacaacuacc

SEQ ID NO: 266080 - RNA, 20 nt, Artificial Sequence
  Synthetic
aaacuuaugauacaacuacc

SEQ ID NO: 266081 - RNA, 21 nt, Artificial Sequence
  Synthetic
aaaacuuaugauacaacuacc

SEQ ID NO: 266082 - RNA, 22 nt, Artificial Sequence
  Synthetic
aaaaacuuaugauacaacuacc

SEQ ID NO: 266083 - RNA, 23 nt, Artificial Sequence
  Synthetic
aaaaaacuuaugauacaacuacc

SEQ ID NO: 266084 - RNA, 24 nt, Artificial Sequence
  Synthetic
aaaaaaacuuaugauacaacuacc

SEQ ID NO: 266085 - RNA, 18 nt, Artificial Sequence
  Synthetic
guggaaagaauuacuacc

SEQ ID NO: 266086 - RNA, 19 nt, Artificial Sequence
  Synthetic
gguggaaagaauuacuacc

SEQ ID NO: 266087 - RNA, 20 nt, Artificial Sequence
  Synthetic
ggguggaaagaauuacuacc

SEQ ID NO: 266088 - RNA, 21 nt, Artificial Sequence
  Synthetic
gggguggaaagaauuacuacc

SEQ ID NO: 266089 - RNA, 22 nt, Artificial Sequence
  Synthetic
ggggguggaaagaauuacuacc

SEQ ID NO: 266090 - RNA, 23 nt, Artificial Sequence
  Synthetic
uggggguggaaagaauuacuacc

SEQ ID NO: 266091 - RNA, 24 nt, Artificial Sequence
  Synthetic
cuggggguggaaagaauuacuacc

SEQ ID NO: 266092 - RNA, 18 nt, Artificial Sequence
  Synthetic
ucagcuuaggaaccuacc

SEQ ID NO: 266093 - RNA, 19 nt, Artificial Sequence
  Synthetic
uucagcuuaggaaccuacc

SEQ ID NO: 266094 - RNA, 20 nt, Artificial Sequence
  Synthetic
guucagcuuaggaaccuacc

SEQ ID NO: 266095 - RNA, 21 nt, Artificial Sequence
  Synthetic
aguucagcuuaggaaccuacc

SEQ ID NO: 266096 - RNA, 22 nt, Artificial Sequence
  Synthetic
gaguucagcuuaggaaccuacc

SEQ ID NO: 266097 - RNA, 23 nt, Artificial Sequence
  Synthetic
agaguucagcuuaggaaccuacc

SEQ ID NO: 266098 - RNA, 24 nt, Artificial Sequence
  Synthetic
uagaguucagcuuaggaaccuacc

SEQ ID NO: 266099 - RNA, 18 nt, Artificial Sequence
  Synthetic
caauuccacucaccuacc

SEQ ID NO: 266100 - RNA, 19 nt, Artificial Sequence
  Synthetic
gcaauuccacucaccuacc

SEQ ID NO: 266101 - RNA, 20 nt, Artificial Sequence
  Synthetic
agcaauuccacucaccuacc

SEQ ID NO: 266102 - RNA, 21 nt, Artificial Sequence
  Synthetic
uagcaauuccacucaccuacc

SEQ ID NO: 266103 - RNA, 22 nt, Artificial Sequence
  Synthetic
auagcaauuccacucaccuacc

SEQ ID NO: 266104 - RNA, 23 nt, Artificial Sequence
  Synthetic
aauagcaauuccacucaccuacc

SEQ ID NO: 266105 - RNA, 24 nt, Artificial Sequence
  Synthetic
uaauagcaauuccacucaccuacc

SEQ ID NO: 266106 - RNA, 18 nt, Artificial Sequence
  Synthetic
cuguccugguuaccuacc

SEQ ID NO: 266107 - RNA, 19 nt, Artificial Sequence
  Synthetic
ucuguccugguuaccuacc

SEQ ID NO: 266108 - RNA, 20 nt, Artificial Sequence
  Synthetic
aucuguccugguuaccuacc

SEQ ID NO: 266109 - RNA, 21 nt, Artificial Sequence
  Synthetic
aaucuguccugguuaccuacc

SEQ ID NO: 266110 - RNA, 22 nt, Artificial Sequence
  Synthetic
uaaucuguccugguuaccuacc

SEQ ID NO: 266111 - RNA, 23 nt, Artificial Sequence
  Synthetic
uuaaucuguccugguuaccuacc

SEQ ID NO: 266112 - RNA, 24 nt, Artificial Sequence
  Synthetic
uuuaaucuguccugguuaccuacc

SEQ ID NO: 266113 - RNA, 18 nt, Artificial Sequence
  Synthetic
agcuagccagucccuacc

SEQ ID NO: 266114 - RNA, 19 nt, Artificial Sequence
  Synthetic
cagcuagccagucccuacc

SEQ ID NO: 266115 - RNA, 20 nt, Artificial Sequence
  Synthetic
gcagcuagccagucccuacc

SEQ ID NO: 266116 - RNA, 21 nt, Artificial Sequence
  Synthetic
agcagcuagccagucccuacc

SEQ ID NO: 266117 - RNA, 22 nt, Artificial Sequence
  Synthetic
gagcagcuagccagucccuacc

SEQ ID NO: 266118 - RNA, 23 nt, Artificial Sequence
  Synthetic
ugagcagcuagccagucccuacc

SEQ ID NO: 266119 - RNA, 24 nt, Artificial Sequence
  Synthetic
augagcagcuagccagucccuacc

SEQ ID NO: 266120 - RNA, 18 nt, Artificial Sequence
  Synthetic
aguauuuauuucccuacc

SEQ ID NO: 266121 - RNA, 19 nt, Artificial Sequence
  Synthetic
gaguauuuauuucccuacc

SEQ ID NO: 266122 - RNA, 20 nt, Artificial Sequence
  Synthetic
ugaguauuuauuucccuacc

SEQ ID NO: 266123 - RNA, 21 nt, Artificial Sequence
  Synthetic
uugaguauuuauuucccuacc

SEQ ID NO: 266124 - RNA, 22 nt, Artificial Sequence
  Synthetic
cuugaguauuuauuucccuacc

SEQ ID NO: 266125 - RNA, 23 nt, Artificial Sequence
  Synthetic
ucuugaguauuuauuucccuacc

SEQ ID NO: 266126 - RNA, 24 nt, Artificial Sequence
  Synthetic
uucuugaguauuuauuucccuacc

SEQ ID NO: 266127 - RNA, 18 nt, Artificial Sequence
  Synthetic
ccuguaaucccagcuacc

SEQ ID NO: 266128 - RNA, 19 nt, Artificial Sequence
  Synthetic
gccuguaaucccagcuacc

SEQ ID NO: 266129 - RNA, 20 nt, Artificial Sequence
  Synthetic
agccuguaaucccagcuacc

SEQ ID NO: 266130 - RNA, 21 nt, Artificial Sequence
  Synthetic
gagccuguaaucccagcuacc

SEQ ID NO: 266131 - RNA, 22 nt, Artificial Sequence
  Synthetic
cgagccuguaaucccagcuacc

SEQ ID NO: 266132 - RNA, 23 nt, Artificial Sequence
  Synthetic
gcgagccuguaaucccagcuacc

SEQ ID NO: 266133 - RNA, 24 nt, Artificial Sequence
  Synthetic
ugcgagccuguaaucccagcuacc

SEQ ID NO: 266134 - RNA, 18 nt, Artificial Sequence
  Synthetic
ccuguagucccagcuacc

SEQ ID NO: 266135 - RNA, 19 nt, Artificial Sequence
  Synthetic
accuguagucccagcuacc

SEQ ID NO: 266136 - RNA, 20 nt, Artificial Sequence
  Synthetic
caccuguagucccagcuacc

SEQ ID NO: 266137 - RNA, 21 nt, Artificial Sequence
  Synthetic
gcaccuguagucccagcuacc

SEQ ID NO: 266138 - RNA, 22 nt, Artificial Sequence
  Synthetic
cgcaccuguagucccagcuacc

SEQ ID NO: 266139 - RNA, 23 nt, Artificial Sequence
  Synthetic
acgcaccuguagucccagcuacc

SEQ ID NO: 266140 - RNA, 24 nt, Artificial Sequence
  Synthetic
cacgcaccuguagucccagcuacc

SEQ ID NO: 266141 - RNA, 19 nt, Artificial Sequence
  Synthetic
gccuguagucccagcuacc

SEQ ID NO: 266142 - RNA, 20 nt, Artificial Sequence
  Synthetic
ugccuguagucccagcuacc

SEQ ID NO: 266143 - RNA, 21 nt, Artificial Sequence
  Synthetic
gugccuguagucccagcuacc

SEQ ID NO: 266144 - RNA, 22 nt, Artificial Sequence
  Synthetic
cgugccuguagucccagcuacc

SEQ ID NO: 266145 - RNA, 23 nt, Artificial Sequence
  Synthetic
acgugccuguagucccagcuacc

SEQ ID NO: 266146 - RNA, 24 nt, Artificial Sequence
  Synthetic
cacgugccuguagucccagcuacc

SEQ ID NO: 266147 - RNA, 18 nt, Artificial Sequence
  Synthetic
cccaccuguucagcuacc

SEQ ID NO: 266148 - RNA, 19 nt, Artificial Sequence
  Synthetic
ccccaccuguucagcuacc

SEQ ID NO: 266149 - RNA, 20 nt, Artificial Sequence
  Synthetic
uccccaccuguucagcuacc

SEQ ID NO: 266150 - RNA, 21 nt, Artificial Sequence
  Synthetic
auccccaccuguucagcuacc

SEQ ID NO: 266151 - RNA, 22 nt, Artificial Sequence
  Synthetic
aauccccaccuguucagcuacc

SEQ ID NO: 266152 - RNA, 23 nt, Artificial Sequence
  Synthetic
gaauccccaccuguucagcuacc

SEQ ID NO: 266153 - RNA, 24 nt, Artificial Sequence
  Synthetic
ggaauccccaccuguucagcuacc

SEQ ID NO: 266154 - RNA, 18 nt, Artificial Sequence
  Synthetic
aucagaggaaucgcuacc

SEQ ID NO: 266155 - RNA, 19 nt, Artificial Sequence
  Synthetic
caucagaggaaucgcuacc

SEQ ID NO: 266156 - RNA, 20 nt, Artificial Sequence
  Synthetic
ccaucagaggaaucgcuacc

SEQ ID NO: 266157 - RNA, 21 nt, Artificial Sequence
  Synthetic
uccaucagaggaaucgcuacc

SEQ ID NO: 266158 - RNA, 22 nt, Artificial Sequence
  Synthetic
auccaucagaggaaucgcuacc

SEQ ID NO: 266159 - RNA, 23 nt, Artificial Sequence
  Synthetic
gauccaucagaggaaucgcuacc

SEQ ID NO: 266160 - RNA, 24 nt, Artificial Sequence
  Synthetic
agauccaucagaggaaucgcuacc

SEQ ID NO: 266161 - RNA, 18 nt, Artificial Sequence
  Synthetic
uugaacauauuugcuacc

SEQ ID NO: 266162 - RNA, 19 nt, Artificial Sequence
  Synthetic
auugaacauauuugcuacc

SEQ ID NO: 266163 - RNA, 20 nt, Artificial Sequence
  Synthetic
aauugaacauauuugcuacc

SEQ ID NO: 266164 - RNA, 21 nt, Artificial Sequence
  Synthetic
aaauugaacauauuugcuacc

SEQ ID NO: 266165 - RNA, 22 nt, Artificial Sequence
  Synthetic
aaaauugaacauauuugcuacc

SEQ ID NO: 266166 - RNA, 23 nt, Artificial Sequence
  Synthetic
uaaaauugaacauauuugcuacc

SEQ ID NO: 266167 - RNA, 24 nt, Artificial Sequence
  Synthetic
uuaaaauugaacauauuugcuacc

SEQ ID NO: 266168 - RNA, 18 nt, Artificial Sequence
  Synthetic
gggaugauaacaucuacc

SEQ ID NO: 266169 - RNA, 19 nt, Artificial Sequence
  Synthetic
ggggaugauaacaucuacc

SEQ ID NO: 266170 - RNA, 20 nt, Artificial Sequence
  Synthetic
gggggaugauaacaucuacc

SEQ ID NO: 266171 - RNA, 21 nt, Artificial Sequence
  Synthetic
agggggaugauaacaucuacc

SEQ ID NO: 266172 - RNA, 22 nt, Artificial Sequence
  Synthetic
aagggggaugauaacaucuacc

SEQ ID NO: 266173 - RNA, 23 nt, Artificial Sequence
  Synthetic
aaagggggaugauaacaucuacc

SEQ ID NO: 266174 - RNA, 24 nt, Artificial Sequence
  Synthetic
aaaagggggaugauaacaucuacc

SEQ ID NO: 266175 - RNA, 18 nt, Artificial Sequence
  Synthetic
acauacuccuuaucuacc

SEQ ID NO: 266176 - RNA, 19 nt, Artificial Sequence
  Synthetic
aacauacuccuuaucuacc

SEQ ID NO: 266177 - RNA, 20 nt, Artificial Sequence
  Synthetic
aaacauacuccuuaucuacc

SEQ ID NO: 266178 - RNA, 21 nt, Artificial Sequence
  Synthetic
aaaacauacuccuuaucuacc

SEQ ID NO: 266179 - RNA, 22 nt, Artificial Sequence
  Synthetic
gaaaacauacuccuuaucuacc

SEQ ID NO: 266180 - RNA, 23 nt, Artificial Sequence
  Synthetic
ugaaaacauacuccuuaucuacc

SEQ ID NO: 266181 - RNA, 24 nt, Artificial Sequence
  Synthetic
cugaaaacauacuccuuaucuacc

SEQ ID NO: 266182 - RNA, 18 nt, Artificial Sequence
  Synthetic
gacuagagaaacucuacc

SEQ ID NO: 266183 - RNA, 19 nt, Artificial Sequence
  Synthetic
ggacuagagaaacucuacc

SEQ ID NO: 266184 - RNA, 20 nt, Artificial Sequence
  Synthetic
aggacuagagaaacucuacc

SEQ ID NO: 266185 - RNA, 21 nt, Artificial Sequence
  Synthetic
aaggacuagagaaacucuacc

SEQ ID NO: 266186 - RNA, 22 nt, Artificial Sequence
  Synthetic
gaaggacuagagaaacucuacc

SEQ ID NO: 266187 - RNA, 23 nt, Artificial Sequence
  Synthetic
ggaaggacuagagaaacucuacc

SEQ ID NO: 266188 - RNA, 24 nt, Artificial Sequence
  Synthetic
uggaaggacuagagaaacucuacc

SEQ ID NO: 266189 - RNA, 18 nt, Artificial Sequence
  Synthetic
uugcaagaauacucuacc

SEQ ID NO: 266190 - RNA, 19 nt, Artificial Sequence
  Synthetic
uuugcaagaauacucuacc

SEQ ID NO: 266191 - RNA, 20 nt, Artificial Sequence
  Synthetic
auuugcaagaauacucuacc

SEQ ID NO: 266192 - RNA, 21 nt, Artificial Sequence
  Synthetic
cauuugcaagaauacucuacc

SEQ ID NO: 266193 - RNA, 22 nt, Artificial Sequence
  Synthetic
acauuugcaagaauacucuacc

SEQ ID NO: 266194 - RNA, 23 nt, Artificial Sequence
  Synthetic
uacauuugcaagaauacucuacc

SEQ ID NO: 266195 - RNA, 24 nt, Artificial Sequence
  Synthetic
auacauuugcaagaauacucuacc

SEQ ID NO: 266196 - RNA, 18 nt, Artificial Sequence
  Synthetic
gagacuggcaagucuacc

SEQ ID NO: 266197 - RNA, 19 nt, Artificial Sequence
  Synthetic
ggagacuggcaagucuacc

SEQ ID NO: 266198 - RNA, 20 nt, Artificial Sequence
  Synthetic
gggagacuggcaagucuacc

SEQ ID NO: 266199 - RNA, 21 nt, Artificial Sequence
  Synthetic
agggagacuggcaagucuacc

SEQ ID NO: 266200 - RNA, 22 nt, Artificial Sequence
  Synthetic
cagggagacuggcaagucuacc

SEQ ID NO: 266201 - RNA, 23 nt, Artificial Sequence
  Synthetic
acagggagacuggcaagucuacc

SEQ ID NO: 266202 - RNA, 24 nt, Artificial Sequence
  Synthetic
cacagggagacuggcaagucuacc

SEQ ID NO: 266203 - RNA, 18 nt, Artificial Sequence
  Synthetic
uuucucuccuugucuacc

SEQ ID NO: 266204 - RNA, 19 nt, Artificial Sequence
  Synthetic
cuuucucuccuugucuacc

SEQ ID NO: 266205 - RNA, 20 nt, Artificial Sequence
  Synthetic
ccuuucucuccuugucuacc

SEQ ID NO: 266206 - RNA, 21 nt, Artificial Sequence
  Synthetic
cccuuucucuccuugucuacc

SEQ ID NO: 266207 - RNA, 22 nt, Artificial Sequence
  Synthetic
acccuuucucuccuugucuacc

SEQ ID NO: 266208 - RNA, 23 nt, Artificial Sequence
  Synthetic
uacccuuucucuccuugucuacc

SEQ ID NO: 266209 - RNA, 24 nt, Artificial Sequence
  Synthetic
auacccuuucucuccuugucuacc

SEQ ID NO: 266210 - RNA, 18 nt, Artificial Sequence
  Synthetic
uugaggucuuugucuacc

SEQ ID NO: 266211 - RNA, 19 nt, Artificial Sequence
  Synthetic
guugaggucuuugucuacc

SEQ ID NO: 266212 - RNA, 20 nt, Artificial Sequence
  Synthetic
gguugaggucuuugucuacc

SEQ ID NO: 266213 - RNA, 21 nt, Artificial Sequence
  Synthetic
ugguugaggucuuugucuacc

SEQ ID NO: 266214 - RNA, 22 nt, Artificial Sequence
  Synthetic
cugguugaggucuuugucuacc

SEQ ID NO: 266215 - RNA, 23 nt, Artificial Sequence
  Synthetic
ccugguugaggucuuugucuacc

SEQ ID NO: 266216 - RNA, 24 nt, Artificial Sequence
  Synthetic
uccugguugaggucuuugucuacc

SEQ ID NO: 266217 - RNA, 18 nt, Artificial Sequence
  Synthetic
accuuggcauuuucuacc

SEQ ID NO: 266218 - RNA, 19 nt, Artificial Sequence
  Synthetic
caccuuggcauuuucuacc

SEQ ID NO: 266219 - RNA, 20 nt, Artificial Sequence
  Synthetic
ucaccuuggcauuuucuacc

SEQ ID NO: 266220 - RNA, 21 nt, Artificial Sequence
  Synthetic
uucaccuuggcauuuucuacc

SEQ ID NO: 266221 - RNA, 22 nt, Artificial Sequence
  Synthetic
uuucaccuuggcauuuucuacc

SEQ ID NO: 266222 - RNA, 23 nt, Artificial Sequence
  Synthetic
cuuucaccuuggcauuuucuacc

SEQ ID NO: 266223 - RNA, 24 nt, Artificial Sequence
  Synthetic
ccuuucaccuuggcauuuucuacc

SEQ ID NO: 266224 - RNA, 18 nt, Artificial Sequence
  Synthetic
acauauuuuuuuucuacc

SEQ ID NO: 266225 - RNA, 19 nt, Artificial Sequence
  Synthetic
uacauauuuuuuuucuacc

SEQ ID NO: 266226 - RNA, 20 nt, Artificial Sequence
  Synthetic
uuacauauuuuuuuucuacc

SEQ ID NO: 266227 - RNA, 21 nt, Artificial Sequence
  Synthetic
cuuacauauuuuuuuucuacc

SEQ ID NO: 266228 - RNA, 22 nt, Artificial Sequence
  Synthetic
acuuacauauuuuuuuucuacc

SEQ ID NO: 266229 - RNA, 23 nt, Artificial Sequence
  Synthetic
gacuuacauauuuuuuuucuacc

SEQ ID NO: 266230 - RNA, 24 nt, Artificial Sequence
  Synthetic
agacuuacauauuuuuuuucuacc

SEQ ID NO: 266231 - RNA, 18 nt, Artificial Sequence
  Synthetic
gagcugccacuaaguacc

SEQ ID NO: 266232 - RNA, 19 nt, Artificial Sequence
  Synthetic
ugagcugccacuaaguacc

SEQ ID NO: 266233 - RNA, 20 nt, Artificial Sequence
  Synthetic
uugagcugccacuaaguacc

SEQ ID NO: 266234 - RNA, 21 nt, Artificial Sequence
  Synthetic
auugagcugccacuaaguacc

SEQ ID NO: 266235 - RNA, 22 nt, Artificial Sequence
  Synthetic
uauugagcugccacuaaguacc

SEQ ID NO: 266236 - RNA, 23 nt, Artificial Sequence
  Synthetic
cuauugagcugccacuaaguacc

SEQ ID NO: 266237 - RNA, 24 nt, Artificial Sequence
  Synthetic
ucuauugagcugccacuaaguacc

SEQ ID NO: 266238 - RNA, 18 nt, Artificial Sequence
  Synthetic
uagauuaagaacaguacc

SEQ ID NO: 266239 - RNA, 19 nt, Artificial Sequence
  Synthetic
cuagauuaagaacaguacc

SEQ ID NO: 266240 - RNA, 20 nt, Artificial Sequence
  Synthetic
ccuagauuaagaacaguacc

SEQ ID NO: 266241 - RNA, 21 nt, Artificial Sequence
  Synthetic
accuagauuaagaacaguacc

SEQ ID NO: 266242 - RNA, 22 nt, Artificial Sequence
  Synthetic
uaccuagauuaagaacaguacc

SEQ ID NO: 266243 - RNA, 23 nt, Artificial Sequence
  Synthetic
auaccuagauuaagaacaguacc

SEQ ID NO: 266244 - RNA, 24 nt, Artificial Sequence
  Synthetic
cauaccuagauuaagaacaguacc

SEQ ID NO: 266245 - RNA, 18 nt, Artificial Sequence
  Synthetic
uuucaugaggacaguacc

SEQ ID NO: 266246 - RNA, 19 nt, Artificial Sequence
  Synthetic
uuuucaugaggacaguacc

SEQ ID NO: 266247 - RNA, 20 nt, Artificial Sequence
  Synthetic
auuuucaugaggacaguacc

SEQ ID NO: 266248 - RNA, 21 nt, Artificial Sequence
  Synthetic
cauuuucaugaggacaguacc

SEQ ID NO: 266249 - RNA, 22 nt, Artificial Sequence
  Synthetic
ucauuuucaugaggacaguacc

SEQ ID NO: 266250 - RNA, 23 nt, Artificial Sequence
  Synthetic
cucauuuucaugaggacaguacc

SEQ ID NO: 266251 - RNA, 24 nt, Artificial Sequence
  Synthetic
acucauuuucaugaggacaguacc

SEQ ID NO: 266252 - RNA, 18 nt, Artificial Sequence
  Synthetic
gacaucaaccagaguacc

SEQ ID NO: 266253 - RNA, 19 nt, Artificial Sequence
  Synthetic
ggacaucaaccagaguacc

SEQ ID NO: 266254 - RNA, 20 nt, Artificial Sequence
  Synthetic
aggacaucaaccagaguacc

SEQ ID NO: 266255 - RNA, 21 nt, Artificial Sequence
  Synthetic
uaggacaucaaccagaguacc

SEQ ID NO: 266256 - RNA, 22 nt, Artificial Sequence
  Synthetic
guaggacaucaaccagaguacc

SEQ ID NO: 266257 - RNA, 23 nt, Artificial Sequence
  Synthetic
uguaggacaucaaccagaguacc

SEQ ID NO: 266258 - RNA, 24 nt, Artificial Sequence
  Synthetic
cuguaggacaucaaccagaguacc

SEQ ID NO: 266259 - RNA, 18 nt, Artificial Sequence
  Synthetic
aaauucagugugaguacc

SEQ ID NO: 266260 - RNA, 19 nt, Artificial Sequence
  Synthetic
aaaauucagugugaguacc

SEQ ID NO: 266261 - RNA, 20 nt, Artificial Sequence
  Synthetic
uaaaauucagugugaguacc

SEQ ID NO: 266262 - RNA, 21 nt, Artificial Sequence
  Synthetic
uuaaaauucagugugaguacc

SEQ ID NO: 266263 - RNA, 22 nt, Artificial Sequence
  Synthetic
auuaaaauucagugugaguacc

SEQ ID NO: 266264 - RNA, 23 nt, Artificial Sequence
  Synthetic
cauuaaaauucagugugaguacc

SEQ ID NO: 266265 - RNA, 24 nt, Artificial Sequence
  Synthetic
ucauuaaaauucagugugaguacc

SEQ ID NO: 266266 - RNA, 18 nt, Artificial Sequence
  Synthetic
acuccuccaaauaguacc

SEQ ID NO: 266267 - RNA, 19 nt, Artificial Sequence
  Synthetic
aacuccuccaaauaguacc

SEQ ID NO: 266268 - RNA, 20 nt, Artificial Sequence
  Synthetic
gaacuccuccaaauaguacc

SEQ ID NO: 266269 - RNA, 21 nt, Artificial Sequence
  Synthetic
agaacuccuccaaauaguacc

SEQ ID NO: 266270 - RNA, 22 nt, Artificial Sequence
  Synthetic
gagaacuccuccaaauaguacc

SEQ ID NO: 266271 - RNA, 23 nt, Artificial Sequence
  Synthetic
agagaacuccuccaaauaguacc

SEQ ID NO: 266272 - RNA, 24 nt, Artificial Sequence
  Synthetic
aagagaacuccuccaaauaguacc

SEQ ID NO: 266273 - RNA, 18 nt, Artificial Sequence
  Synthetic
augaguguuauuaguacc

SEQ ID NO: 266274 - RNA, 19 nt, Artificial Sequence
  Synthetic
caugaguguuauuaguacc

SEQ ID NO: 266275 - RNA, 20 nt, Artificial Sequence
  Synthetic
acaugaguguuauuaguacc

SEQ ID NO: 266276 - RNA, 21 nt, Artificial Sequence
  Synthetic
aacaugaguguuauuaguacc

SEQ ID NO: 266277 - RNA, 22 nt, Artificial Sequence
  Synthetic
caacaugaguguuauuaguacc

SEQ ID NO: 266278 - RNA, 23 nt, Artificial Sequence
  Synthetic
ccaacaugaguguuauuaguacc

SEQ ID NO: 266279 - RNA, 24 nt, Artificial Sequence
  Synthetic
uccaacaugaguguuauuaguacc

SEQ ID NO: 266280 - RNA, 18 nt, Artificial Sequence
  Synthetic
ccuaguuaauaagguacc

SEQ ID NO: 266281 - RNA, 19 nt, Artificial Sequence
  Synthetic
accuaguuaauaagguacc

SEQ ID NO: 266282 - RNA, 20 nt, Artificial Sequence
  Synthetic
uaccuaguuaauaagguacc

SEQ ID NO: 266283 - RNA, 21 nt, Artificial Sequence
  Synthetic
guaccuaguuaauaagguacc

SEQ ID NO: 266284 - RNA, 22 nt, Artificial Sequence
  Synthetic
aguaccuaguuaauaagguacc

SEQ ID NO: 266285 - RNA, 23 nt, Artificial Sequence
  Synthetic
uaguaccuaguuaauaagguacc

SEQ ID NO: 266286 - RNA, 24 nt, Artificial Sequence
  Synthetic
guaguaccuaguuaauaagguacc

SEQ ID NO: 266287 - RNA, 18 nt, Artificial Sequence
  Synthetic
aagaguuuauuagguacc

SEQ ID NO: 266288 - RNA, 19 nt, Artificial Sequence
  Synthetic
uaagaguuuauuagguacc

SEQ ID NO: 266289 - RNA, 20 nt, Artificial Sequence
  Synthetic
uuaagaguuuauuagguacc

SEQ ID NO: 266290 - RNA, 21 nt, Artificial Sequence
  Synthetic
cuuaagaguuuauuagguacc

SEQ ID NO: 266291 - RNA, 22 nt, Artificial Sequence
  Synthetic
ucuuaagaguuuauuagguacc

SEQ ID NO: 266292 - RNA, 23 nt, Artificial Sequence
  Synthetic
gucuuaagaguuuauuagguacc

SEQ ID NO: 266293 - RNA, 24 nt, Artificial Sequence
  Synthetic
agucuuaagaguuuauuagguacc

SEQ ID NO: 266294 - RNA, 18 nt, Artificial Sequence
  Synthetic
auuuuugacaaggguacc

SEQ ID NO: 266295 - RNA, 19 nt, Artificial Sequence
  Synthetic
gauuuuugacaaggguacc

SEQ ID NO: 266296 - RNA, 20 nt, Artificial Sequence
  Synthetic
ugauuuuugacaaggguacc

SEQ ID NO: 266297 - RNA, 21 nt, Artificial Sequence
  Synthetic
cugauuuuugacaaggguacc

SEQ ID NO: 266298 - RNA, 22 nt, Artificial Sequence
  Synthetic
acugauuuuugacaaggguacc

SEQ ID NO: 266299 - RNA, 23 nt, Artificial Sequence
  Synthetic
aacugauuuuugacaaggguacc

SEQ ID NO: 266300 - RNA, 24 nt, Artificial Sequence
  Synthetic
caacugauuuuugacaaggguacc

SEQ ID NO: 266301 - RNA, 18 nt, Artificial Sequence
  Synthetic
acauccugcacauguacc

SEQ ID NO: 266302 - RNA, 19 nt, Artificial Sequence
  Synthetic
cacauccugcacauguacc

SEQ ID NO: 266303 - RNA, 20 nt, Artificial Sequence
  Synthetic
gcacauccugcacauguacc

SEQ ID NO: 266304 - RNA, 21 nt, Artificial Sequence
  Synthetic
ugcacauccugcacauguacc

SEQ ID NO: 266305 - RNA, 22 nt, Artificial Sequence
  Synthetic
cugcacauccugcacauguacc

SEQ ID NO: 266306 - RNA, 23 nt, Artificial Sequence
  Synthetic
ccugcacauccugcacauguacc

SEQ ID NO: 266307 - RNA, 24 nt, Artificial Sequence
  Synthetic
accugcacauccugcacauguacc

SEQ ID NO: 266308 - RNA, 18 nt, Artificial Sequence
  Synthetic
gagagagguccauguacc

SEQ ID NO: 266309 - RNA, 19 nt, Artificial Sequence
  Synthetic
ggagagagguccauguacc

SEQ ID NO: 266310 - RNA, 20 nt, Artificial Sequence
  Synthetic
gggagagagguccauguacc

SEQ ID NO: 266311 - RNA, 21 nt, Artificial Sequence
  Synthetic
ggggagagagguccauguacc

SEQ ID NO: 266312 - RNA, 22 nt, Artificial Sequence
  Synthetic
gggggagagagguccauguacc

SEQ ID NO: 266313 - RNA, 23 nt, Artificial Sequence
  Synthetic
ggggggagagagguccauguacc

SEQ ID NO: 266314 - RNA, 24 nt, Artificial Sequence
  Synthetic
cggggggagagagguccauguacc

SEQ ID NO: 266315 - RNA, 18 nt, Artificial Sequence
  Synthetic
caacauuuaucauguacc

SEQ ID NO: 266316 - RNA, 19 nt, Artificial Sequence
  Synthetic
ucaacauuuaucauguacc

SEQ ID NO: 266317 - RNA, 20 nt, Artificial Sequence
  Synthetic
uucaacauuuaucauguacc

SEQ ID NO: 266318 - RNA, 21 nt, Artificial Sequence
  Synthetic
auucaacauuuaucauguacc

SEQ ID NO: 266319 - RNA, 22 nt, Artificial Sequence
  Synthetic
uauucaacauuuaucauguacc

SEQ ID NO: 266320 - RNA, 23 nt, Artificial Sequence
  Synthetic
guauucaacauuuaucauguacc

SEQ ID NO: 266321 - RNA, 24 nt, Artificial Sequence
  Synthetic
uguauucaacauuuaucauguacc

SEQ ID NO: 266322 - RNA, 18 nt, Artificial Sequence
  Synthetic
uucuuuugaguauguacc

SEQ ID NO: 266323 - RNA, 19 nt, Artificial Sequence
  Synthetic
uuucuuuugaguauguacc

SEQ ID NO: 266324 - RNA, 20 nt, Artificial Sequence
  Synthetic
uuuucuuuugaguauguacc

SEQ ID NO: 266325 - RNA, 21 nt, Artificial Sequence
  Synthetic
cuuuucuuuugaguauguacc

SEQ ID NO: 266326 - RNA, 22 nt, Artificial Sequence
  Synthetic
ccuuuucuuuugaguauguacc

SEQ ID NO: 266327 - RNA, 23 nt, Artificial Sequence
  Synthetic
uccuuuucuuuugaguauguacc

SEQ ID NO: 266328 - RNA, 24 nt, Artificial Sequence
  Synthetic
cuccuuuucuuuugaguauguacc

SEQ ID NO: 266329 - RNA, 18 nt, Artificial Sequence
  Synthetic
cacuaccgauuauguacc

SEQ ID NO: 266330 - RNA, 19 nt, Artificial Sequence
  Synthetic
ucacuaccgauuauguacc

SEQ ID NO: 266331 - RNA, 20 nt, Artificial Sequence
  Synthetic
cucacuaccgauuauguacc

SEQ ID NO: 266332 - RNA, 21 nt, Artificial Sequence
  Synthetic
ucucacuaccgauuauguacc

SEQ ID NO: 266333 - RNA, 22 nt, Artificial Sequence
  Synthetic
aucucacuaccgauuauguacc

SEQ ID NO: 266334 - RNA, 23 nt, Artificial Sequence
  Synthetic
aaucucacuaccgauuauguacc

SEQ ID NO: 266335 - RNA, 24 nt, Artificial Sequence
  Synthetic
aaaucucacuaccgauuauguacc

SEQ ID NO: 266336 - RNA, 18 nt, Artificial Sequence
  Synthetic
gaggcagaacuguguacc

SEQ ID NO: 266337 - RNA, 19 nt, Artificial Sequence
  Synthetic
ggaggcagaacuguguacc

SEQ ID NO: 266338 - RNA, 20 nt, Artificial Sequence
  Synthetic
gggaggcagaacuguguacc

SEQ ID NO: 266339 - RNA, 21 nt, Artificial Sequence
  Synthetic
ggggaggcagaacuguguacc

SEQ ID NO: 266340 - RNA, 22 nt, Artificial Sequence
  Synthetic
uggggaggcagaacuguguacc

SEQ ID NO: 266341 - RNA, 23 nt, Artificial Sequence
  Synthetic
cuggggaggcagaacuguguacc

SEQ ID NO: 266342 - RNA, 24 nt, Artificial Sequence
  Synthetic
acuggggaggcagaacuguguacc

SEQ ID NO: 266343 - RNA, 18 nt, Artificial Sequence
  Synthetic
agaaaaagaaauuguacc

SEQ ID NO: 266344 - RNA, 19 nt, Artificial Sequence
  Synthetic
aagaaaaagaaauuguacc

SEQ ID NO: 266345 - RNA, 20 nt, Artificial Sequence
  Synthetic
aaagaaaaagaaauuguacc

SEQ ID NO: 266346 - RNA, 21 nt, Artificial Sequence
  Synthetic
aaaagaaaaagaaauuguacc

SEQ ID NO: 266347 - RNA, 22 nt, Artificial Sequence
  Synthetic
uaaaagaaaaagaaauuguacc

SEQ ID NO: 266348 - RNA, 23 nt, Artificial Sequence
  Synthetic
auaaaagaaaaagaaauuguacc

SEQ ID NO: 266349 - RNA, 24 nt, Artificial Sequence
  Synthetic
aauaaaagaaaaagaaauuguacc

SEQ ID NO: 266350 - RNA, 18 nt, Artificial Sequence
  Synthetic
cagaugggaaauuguacc

SEQ ID NO: 266351 - RNA, 19 nt, Artificial Sequence
  Synthetic
gcagaugggaaauuguacc

SEQ ID NO: 266352 - RNA, 20 nt, Artificial Sequence
  Synthetic
agcagaugggaaauuguacc

SEQ ID NO: 266353 - RNA, 21 nt, Artificial Sequence
  Synthetic
gagcagaugggaaauuguacc

SEQ ID NO: 266354 - RNA, 22 nt, Artificial Sequence
  Synthetic
ggagcagaugggaaauuguacc

SEQ ID NO: 266355 - RNA, 23 nt, Artificial Sequence
  Synthetic
aggagcagaugggaaauuguacc

SEQ ID NO: 266356 - RNA, 24 nt, Artificial Sequence
  Synthetic
caggagcagaugggaaauuguacc

SEQ ID NO: 266357 - RNA, 18 nt, Artificial Sequence
  Synthetic
agaagaauugcuuguacc

SEQ ID NO: 266358 - RNA, 19 nt, Artificial Sequence
  Synthetic
cagaagaauugcuuguacc

SEQ ID NO: 266359 - RNA, 20 nt, Artificial Sequence
  Synthetic
gcagaagaauugcuuguacc

SEQ ID NO: 266360 - RNA, 21 nt, Artificial Sequence
  Synthetic
ggcagaagaauugcuuguacc

SEQ ID NO: 266361 - RNA, 22 nt, Artificial Sequence
  Synthetic
aggcagaagaauugcuuguacc

SEQ ID NO: 266362 - RNA, 23 nt, Artificial Sequence
  Synthetic
gaggcagaagaauugcuuguacc

SEQ ID NO: 266363 - RNA, 24 nt, Artificial Sequence
  Synthetic
ugaggcagaagaauugcuuguacc

SEQ ID NO: 266364 - RNA, 18 nt, Artificial Sequence
  Synthetic
uugaaucuguaaauuacc

SEQ ID NO: 266365 - RNA, 19 nt, Artificial Sequence
  Synthetic
auugaaucuguaaauuacc

SEQ ID NO: 266366 - RNA, 20 nt, Artificial Sequence
  Synthetic
cauugaaucuguaaauuacc

SEQ ID NO: 266367 - RNA, 21 nt, Artificial Sequence
  Synthetic
gcauugaaucuguaaauuacc

SEQ ID NO: 266368 - RNA, 22 nt, Artificial Sequence
  Synthetic
ggcauugaaucuguaaauuacc

SEQ ID NO: 266369 - RNA, 23 nt, Artificial Sequence
  Synthetic
uggcauugaaucuguaaauuacc

SEQ ID NO: 266370 - RNA, 24 nt, Artificial Sequence
  Synthetic
auggcauugaaucuguaaauuacc

SEQ ID NO: 266371 - RNA, 18 nt, Artificial Sequence
  Synthetic
cauugaauccccauuacc

SEQ ID NO: 266372 - RNA, 19 nt, Artificial Sequence
  Synthetic
ucauugaauccccauuacc

SEQ ID NO: 266373 - RNA, 20 nt, Artificial Sequence
  Synthetic
uucauugaauccccauuacc

SEQ ID NO: 266374 - RNA, 21 nt, Artificial Sequence
  Synthetic
uuucauugaauccccauuacc

SEQ ID NO: 266375 - RNA, 22 nt, Artificial Sequence
  Synthetic
uuuucauugaauccccauuacc

SEQ ID NO: 266376 - RNA, 23 nt, Artificial Sequence
  Synthetic
auuuucauugaauccccauuacc

SEQ ID NO: 266377 - RNA, 24 nt, Artificial Sequence
  Synthetic
gauuuucauugaauccccauuacc

SEQ ID NO: 266378 - RNA, 18 nt, Artificial Sequence
  Synthetic
uaauauuuucagauuacc

SEQ ID NO: 266379 - RNA, 19 nt, Artificial Sequence
  Synthetic
auaauauuuucagauuacc

SEQ ID NO: 266380 - RNA, 20 nt, Artificial Sequence
  Synthetic
gauaauauuuucagauuacc

SEQ ID NO: 266381 - RNA, 21 nt, Artificial Sequence
  Synthetic
agauaauauuuucagauuacc

SEQ ID NO: 266382 - RNA, 22 nt, Artificial Sequence
  Synthetic
gagauaauauuuucagauuacc

SEQ ID NO: 266383 - RNA, 23 nt, Artificial Sequence
  Synthetic
ggagauaauauuuucagauuacc

SEQ ID NO: 266384 - RNA, 24 nt, Artificial Sequence
  Synthetic
aggagauaauauuuucagauuacc

SEQ ID NO: 266385 - RNA, 18 nt, Artificial Sequence
  Synthetic
auauucacuaugauuacc

SEQ ID NO: 266386 - RNA, 19 nt, Artificial Sequence
  Synthetic
cauauucacuaugauuacc

SEQ ID NO: 266387 - RNA, 20 nt, Artificial Sequence
  Synthetic
ucauauucacuaugauuacc

SEQ ID NO: 266388 - RNA, 21 nt, Artificial Sequence
  Synthetic
cucauauucacuaugauuacc

SEQ ID NO: 266389 - RNA, 22 nt, Artificial Sequence
  Synthetic
ccucauauucacuaugauuacc

SEQ ID NO: 266390 - RNA, 23 nt, Artificial Sequence
  Synthetic
uccucauauucacuaugauuacc

SEQ ID NO: 266391 - RNA, 24 nt, Artificial Sequence
  Synthetic
auccucauauucacuaugauuacc

SEQ ID NO: 266392 - RNA, 18 nt, Artificial Sequence
  Synthetic
accaugucucauauuacc

SEQ ID NO: 266393 - RNA, 19 nt, Artificial Sequence
  Synthetic
aaccaugucucauauuacc

SEQ ID NO: 266394 - RNA, 20 nt, Artificial Sequence
  Synthetic
aaaccaugucucauauuacc

SEQ ID NO: 266395 - RNA, 21 nt, Artificial Sequence
  Synthetic
gaaaccaugucucauauuacc

SEQ ID NO: 266396 - RNA, 22 nt, Artificial Sequence
  Synthetic
agaaaccaugucucauauuacc

SEQ ID NO: 266397 - RNA, 23 nt, Artificial Sequence
  Synthetic
uagaaaccaugucucauauuacc

SEQ ID NO: 266398 - RNA, 24 nt, Artificial Sequence
  Synthetic
uuagaaaccaugucucauauuacc

SEQ ID NO: 266399 - RNA, 18 nt, Artificial Sequence
  Synthetic
ccuauaaaugcuauuacc

SEQ ID NO: 266400 - RNA, 19 nt, Artificial Sequence
  Synthetic
uccuauaaaugcuauuacc

SEQ ID NO: 266401 - RNA, 20 nt, Artificial Sequence
  Synthetic
auccuauaaaugcuauuacc

SEQ ID NO: 266402 - RNA, 21 nt, Artificial Sequence
  Synthetic
cauccuauaaaugcuauuacc

SEQ ID NO: 266403 - RNA, 22 nt, Artificial Sequence
  Synthetic
ucauccuauaaaugcuauuacc

SEQ ID NO: 266404 - RNA, 23 nt, Artificial Sequence
  Synthetic
cucauccuauaaaugcuauuacc

SEQ ID NO: 266405 - RNA, 24 nt, Artificial Sequence
  Synthetic
ccucauccuauaaaugcuauuacc

SEQ ID NO: 266406 - RNA, 18 nt, Artificial Sequence
  Synthetic
auucgaaauccccuuacc

SEQ ID NO: 266407 - RNA, 19 nt, Artificial Sequence
  Synthetic
uauucgaaauccccuuacc

SEQ ID NO: 266408 - RNA, 20 nt, Artificial Sequence
  Synthetic
uuauucgaaauccccuuacc

SEQ ID NO: 266409 - RNA, 21 nt, Artificial Sequence
  Synthetic
cuuauucgaaauccccuuacc

SEQ ID NO: 266410 - RNA, 22 nt, Artificial Sequence
  Synthetic
ccuuauucgaaauccccuuacc

SEQ ID NO: 266411 - RNA, 23 nt, Artificial Sequence
  Synthetic
accuuauucgaaauccccuuacc

SEQ ID NO: 266412 - RNA, 24 nt, Artificial Sequence
  Synthetic
gaccuuauucgaaauccccuuacc

SEQ ID NO: 266413 - RNA, 18 nt, Artificial Sequence
  Synthetic
aagcucuuuaggcuuacc

SEQ ID NO: 266414 - RNA, 19 nt, Artificial Sequence
  Synthetic
uaagcucuuuaggcuuacc

SEQ ID NO: 266415 - RNA, 20 nt, Artificial Sequence
  Synthetic
uuaagcucuuuaggcuuacc

SEQ ID NO: 266416 - RNA, 21 nt, Artificial Sequence
  Synthetic
auuaagcucuuuaggcuuacc

SEQ ID NO: 266417 - RNA, 22 nt, Artificial Sequence
  Synthetic
aauuaagcucuuuaggcuuacc

SEQ ID NO: 266418 - RNA, 23 nt, Artificial Sequence
  Synthetic
uaauuaagcucuuuaggcuuacc

SEQ ID NO: 266419 - RNA, 24 nt, Artificial Sequence
  Synthetic
auaauuaagcucuuuaggcuuacc

SEQ ID NO: 266420 - RNA, 18 nt, Artificial Sequence
  Synthetic
auuaaaaaugaaguuacc

SEQ ID NO: 266421 - RNA, 19 nt, Artificial Sequence
  Synthetic
aauuaaaaaugaaguuacc

SEQ ID NO: 266422 - RNA, 20 nt, Artificial Sequence
  Synthetic
aaauuaaaaaugaaguuacc

SEQ ID NO: 266423 - RNA, 21 nt, Artificial Sequence
  Synthetic
gaaauuaaaaaugaaguuacc

SEQ ID NO: 266424 - RNA, 22 nt, Artificial Sequence
  Synthetic
ugaaauuaaaaaugaaguuacc

SEQ ID NO: 266425 - RNA, 23 nt, Artificial Sequence
  Synthetic
uugaaauuaaaaaugaaguuacc

SEQ ID NO: 266426 - RNA, 24 nt, Artificial Sequence
  Synthetic
auugaaauuaaaaaugaaguuacc

SEQ ID NO: 266427 - RNA, 18 nt, Artificial Sequence
  Synthetic
accuuuacuacaguuacc

SEQ ID NO: 266428 - RNA, 19 nt, Artificial Sequence
  Synthetic
gaccuuuacuacaguuacc

SEQ ID NO: 266429 - RNA, 20 nt, Artificial Sequence
  Synthetic
ugaccuuuacuacaguuacc

SEQ ID NO: 266430 - RNA, 21 nt, Artificial Sequence
  Synthetic
gugaccuuuacuacaguuacc

SEQ ID NO: 266431 - RNA, 22 nt, Artificial Sequence
  Synthetic
agugaccuuuacuacaguuacc

SEQ ID NO: 266432 - RNA, 23 nt, Artificial Sequence
  Synthetic
aagugaccuuuacuacaguuacc

SEQ ID NO: 266433 - RNA, 24 nt, Artificial Sequence
  Synthetic
aaagugaccuuuacuacaguuacc

SEQ ID NO: 266434 - RNA, 18 nt, Artificial Sequence
  Synthetic
guucuuguugcaguuacc

SEQ ID NO: 266435 - RNA, 19 nt, Artificial Sequence
  Synthetic
aguucuuguugcaguuacc

SEQ ID NO: 266436 - RNA, 20 nt, Artificial Sequence
  Synthetic
caguucuuguugcaguuacc

SEQ ID NO: 266437 - RNA, 21 nt, Artificial Sequence
  Synthetic
acaguucuuguugcaguuacc

SEQ ID NO: 266438 - RNA, 22 nt, Artificial Sequence
  Synthetic
gacaguucuuguugcaguuacc

SEQ ID NO: 266439 - RNA, 23 nt, Artificial Sequence
  Synthetic
agacaguucuuguugcaguuacc

SEQ ID NO: 266440 - RNA, 24 nt, Artificial Sequence
  Synthetic
uagacaguucuuguugcaguuacc

SEQ ID NO: 266441 - RNA, 18 nt, Artificial Sequence
  Synthetic
auccgggcaaggguuacc

SEQ ID NO: 266442 - RNA, 19 nt, Artificial Sequence
  Synthetic
aauccgggcaaggguuacc

SEQ ID NO: 266443 - RNA, 20 nt, Artificial Sequence
  Synthetic
gaauccgggcaaggguuacc

SEQ ID NO: 266444 - RNA, 21 nt, Artificial Sequence
  Synthetic
ugaauccgggcaaggguuacc

SEQ ID NO: 266445 - RNA, 22 nt, Artificial Sequence
  Synthetic
gugaauccgggcaaggguuacc

SEQ ID NO: 266446 - RNA, 23 nt, Artificial Sequence
  Synthetic
ggugaauccgggcaaggguuacc

SEQ ID NO: 266447 - RNA, 24 nt, Artificial Sequence
  Synthetic
uggugaauccgggcaaggguuacc

SEQ ID NO: 266448 - RNA, 18 nt, Artificial Sequence
  Synthetic
aaguugaaggauguuacc

SEQ ID NO: 266449 - RNA, 19 nt, Artificial Sequence
  Synthetic
aaaguugaaggauguuacc

SEQ ID NO: 266450 - RNA, 20 nt, Artificial Sequence
  Synthetic
uaaaguugaaggauguuacc

SEQ ID NO: 266451 - RNA, 21 nt, Artificial Sequence
  Synthetic
guaaaguugaaggauguuacc

SEQ ID NO: 266452 - RNA, 22 nt, Artificial Sequence
  Synthetic
cguaaaguugaaggauguuacc

SEQ ID NO: 266453 - RNA, 23 nt, Artificial Sequence
  Synthetic
acguaaaguugaaggauguuacc

SEQ ID NO: 266454 - RNA, 24 nt, Artificial Sequence
  Synthetic
gacguaaaguugaaggauguuacc

SEQ ID NO: 266455 - RNA, 18 nt, Artificial Sequence
  Synthetic
acacauugcacuguuacc

SEQ ID NO: 266456 - RNA, 19 nt, Artificial Sequence
  Synthetic
cacacauugcacuguuacc

SEQ ID NO: 266457 - RNA, 20 nt, Artificial Sequence
  Synthetic
ccacacauugcacuguuacc

SEQ ID NO: 266458 - RNA, 21 nt, Artificial Sequence
  Synthetic
accacacauugcacuguuacc

SEQ ID NO: 266459 - RNA, 22 nt, Artificial Sequence
  Synthetic
aaccacacauugcacuguuacc

SEQ ID NO: 266460 - RNA, 23 nt, Artificial Sequence
  Synthetic
uaaccacacauugcacuguuacc

SEQ ID NO: 266461 - RNA, 24 nt, Artificial Sequence
  Synthetic
uuaaccacacauugcacuguuacc

SEQ ID NO: 266462 - RNA, 18 nt, Artificial Sequence
  Synthetic
gucauuaucccuguuacc

SEQ ID NO: 266463 - RNA, 19 nt, Artificial Sequence
  Synthetic
ugucauuaucccuguuacc

SEQ ID NO: 266464 - RNA, 20 nt, Artificial Sequence
  Synthetic
cugucauuaucccuguuacc

SEQ ID NO: 266465 - RNA, 21 nt, Artificial Sequence
  Synthetic
acugucauuaucccuguuacc

SEQ ID NO: 266466 - RNA, 22 nt, Artificial Sequence
  Synthetic
aacugucauuaucccuguuacc

SEQ ID NO: 266467 - RNA, 23 nt, Artificial Sequence
  Synthetic
caacugucauuaucccuguuacc

SEQ ID NO: 266468 - RNA, 24 nt, Artificial Sequence
  Synthetic
acaacugucauuaucccuguuacc

SEQ ID NO: 266469 - RNA, 18 nt, Artificial Sequence
  Synthetic
uccaggaauuuuguuacc

SEQ ID NO: 266470 - RNA, 19 nt, Artificial Sequence
  Synthetic
cuccaggaauuuuguuacc

SEQ ID NO: 266471 - RNA, 20 nt, Artificial Sequence
  Synthetic
gcuccaggaauuuuguuacc

SEQ ID NO: 266472 - RNA, 21 nt, Artificial Sequence
  Synthetic
ugcuccaggaauuuuguuacc

SEQ ID NO: 266473 - RNA, 22 nt, Artificial Sequence
  Synthetic
gugcuccaggaauuuuguuacc

SEQ ID NO: 266474 - RNA, 23 nt, Artificial Sequence
  Synthetic
agugcuccaggaauuuuguuacc

SEQ ID NO: 266475 - RNA, 24 nt, Artificial Sequence
  Synthetic
uagugcuccaggaauuuuguuacc

SEQ ID NO: 266476 - RNA, 18 nt, Artificial Sequence
  Synthetic
guaaagacucaauuuacc

SEQ ID NO: 266477 - RNA, 19 nt, Artificial Sequence
  Synthetic
uguaaagacucaauuuacc

SEQ ID NO: 266478 - RNA, 20 nt, Artificial Sequence
  Synthetic
auguaaagacucaauuuacc

SEQ ID NO: 266479 - RNA, 21 nt, Artificial Sequence
  Synthetic
uauguaaagacucaauuuacc

SEQ ID NO: 266480 - RNA, 22 nt, Artificial Sequence
  Synthetic
uuauguaaagacucaauuuacc

SEQ ID NO: 266481 - RNA, 23 nt, Artificial Sequence
  Synthetic
guuauguaaagacucaauuuacc

SEQ ID NO: 266482 - RNA, 24 nt, Artificial Sequence
  Synthetic
uguuauguaaagacucaauuuacc

SEQ ID NO: 266483 - RNA, 18 nt, Artificial Sequence
  Synthetic
augucuggagaauuuacc

SEQ ID NO: 266484 - RNA, 19 nt, Artificial Sequence
  Synthetic
uaugucuggagaauuuacc

SEQ ID NO: 266485 - RNA, 20 nt, Artificial Sequence
  Synthetic
uuaugucuggagaauuuacc

SEQ ID NO: 266486 - RNA, 21 nt, Artificial Sequence
  Synthetic
auuaugucuggagaauuuacc

SEQ ID NO: 266487 - RNA, 22 nt, Artificial Sequence
  Synthetic
uauuaugucuggagaauuuacc

SEQ ID NO: 266488 - RNA, 23 nt, Artificial Sequence
  Synthetic
uuauuaugucuggagaauuuacc

SEQ ID NO: 266489 - RNA, 24 nt, Artificial Sequence
  Synthetic
cuuauuaugucuggagaauuuacc

SEQ ID NO: 266490 - RNA, 18 nt, Artificial Sequence
  Synthetic
accgucaauuaauuuacc

SEQ ID NO: 266491 - RNA, 19 nt, Artificial Sequence
  Synthetic
aaccgucaauuaauuuacc

SEQ ID NO: 266492 - RNA, 20 nt, Artificial Sequence
  Synthetic
aaaccgucaauuaauuuacc

SEQ ID NO: 266493 - RNA, 21 nt, Artificial Sequence
  Synthetic
gaaaccgucaauuaauuuacc

SEQ ID NO: 266494 - RNA, 22 nt, Artificial Sequence
  Synthetic
agaaaccgucaauuaauuuacc

SEQ ID NO: 266495 - RNA, 23 nt, Artificial Sequence
  Synthetic
gagaaaccgucaauuaauuuacc

SEQ ID NO: 266496 - RNA, 24 nt, Artificial Sequence
  Synthetic
ggagaaaccgucaauuaauuuacc

SEQ ID NO: 266497 - RNA, 18 nt, Artificial Sequence
  Synthetic
gacccugcuacauuuacc

SEQ ID NO: 266498 - RNA, 19 nt, Artificial Sequence
  Synthetic
ugacccugcuacauuuacc

SEQ ID NO: 266499 - RNA, 20 nt, Artificial Sequence
  Synthetic
cugacccugcuacauuuacc

SEQ ID NO: 266500 - RNA, 21 nt, Artificial Sequence
  Synthetic
ucugacccugcuacauuuacc

SEQ ID NO: 266501 - RNA, 22 nt, Artificial Sequence
  Synthetic
cucugacccugcuacauuuacc

SEQ ID NO: 266502 - RNA, 23 nt, Artificial Sequence
  Synthetic
acucugacccugcuacauuuacc

SEQ ID NO: 266503 - RNA, 24 nt, Artificial Sequence
  Synthetic
cacucugacccugcuacauuuacc

SEQ ID NO: 266504 - RNA, 18 nt, Artificial Sequence
  Synthetic
aaagauguaauauuuacc

SEQ ID NO: 266505 - RNA, 19 nt, Artificial Sequence
  Synthetic
uaaagauguaauauuuacc

SEQ ID NO: 266506 - RNA, 20 nt, Artificial Sequence
  Synthetic
guaaagauguaauauuuacc

SEQ ID NO: 266507 - RNA, 21 nt, Artificial Sequence
  Synthetic
gguaaagauguaauauuuacc

SEQ ID NO: 266508 - RNA, 22 nt, Artificial Sequence
  Synthetic
ggguaaagauguaauauuuacc

SEQ ID NO: 266509 - RNA, 23 nt, Artificial Sequence
  Synthetic
aggguaaagauguaauauuuacc

SEQ ID NO: 266510 - RNA, 24 nt, Artificial Sequence
  Synthetic
gaggguaaagauguaauauuuacc

SEQ ID NO: 266511 - RNA, 18 nt, Artificial Sequence
  Synthetic
uuuuuuguucuauuuacc

SEQ ID NO: 266512 - RNA, 19 nt, Artificial Sequence
  Synthetic
uuuuuuuguucuauuuacc

SEQ ID NO: 266513 - RNA, 20 nt, Artificial Sequence
  Synthetic
cuuuuuuuguucuauuuacc

SEQ ID NO: 266514 - RNA, 21 nt, Artificial Sequence
  Synthetic
acuuuuuuuguucuauuuacc

SEQ ID NO: 266515 - RNA, 22 nt, Artificial Sequence
  Synthetic
gacuuuuuuuguucuauuuacc

SEQ ID NO: 266516 - RNA, 23 nt, Artificial Sequence
  Synthetic
agacuuuuuuuguucuauuuacc

SEQ ID NO: 266517 - RNA, 24 nt, Artificial Sequence
  Synthetic
aagacuuuuuuuguucuauuuacc

SEQ ID NO: 266518 - RNA, 18 nt, Artificial Sequence
  Synthetic
uuuguaauuaacuuuacc

SEQ ID NO: 266519 - RNA, 19 nt, Artificial Sequence
  Synthetic
cuuuguaauuaacuuuacc

SEQ ID NO: 266520 - RNA, 20 nt, Artificial Sequence
  Synthetic
acuuuguaauuaacuuuacc

SEQ ID NO: 266521 - RNA, 21 nt, Artificial Sequence
  Synthetic
gacuuuguaauuaacuuuacc

SEQ ID NO: 266522 - RNA, 22 nt, Artificial Sequence
  Synthetic
ggacuuuguaauuaacuuuacc

SEQ ID NO: 266523 - RNA, 23 nt, Artificial Sequence
  Synthetic
uggacuuuguaauuaacuuuacc

SEQ ID NO: 266524 - RNA, 24 nt, Artificial Sequence
  Synthetic
cuggacuuuguaauuaacuuuacc

SEQ ID NO: 266525 - RNA, 18 nt, Artificial Sequence
  Synthetic
caucuuauucacuuuacc

SEQ ID NO: 266526 - RNA, 19 nt, Artificial Sequence
  Synthetic
gcaucuuauucacuuuacc

SEQ ID NO: 266527 - RNA, 20 nt, Artificial Sequence
  Synthetic
ugcaucuuauucacuuuacc

SEQ ID NO: 266528 - RNA, 21 nt, Artificial Sequence
  Synthetic
gugcaucuuauucacuuuacc

SEQ ID NO: 266529 - RNA, 22 nt, Artificial Sequence
  Synthetic
agugcaucuuauucacuuuacc

SEQ ID NO: 266530 - RNA, 23 nt, Artificial Sequence
  Synthetic
aagugcaucuuauucacuuuacc

SEQ ID NO: 266531 - RNA, 24 nt, Artificial Sequence
  Synthetic
uaagugcaucuuauucacuuuacc

SEQ ID NO: 266532 - RNA, 18 nt, Artificial Sequence
  Synthetic
agaguccauugcuuuacc

SEQ ID NO: 266533 - RNA, 19 nt, Artificial Sequence
  Synthetic
cagaguccauugcuuuacc

SEQ ID NO: 266534 - RNA, 20 nt, Artificial Sequence
  Synthetic
ccagaguccauugcuuuacc

SEQ ID NO: 266535 - RNA, 21 nt, Artificial Sequence
  Synthetic
gccagaguccauugcuuuacc

SEQ ID NO: 266536 - RNA, 22 nt, Artificial Sequence
  Synthetic
ugccagaguccauugcuuuacc

SEQ ID NO: 266537 - RNA, 23 nt, Artificial Sequence
  Synthetic
augccagaguccauugcuuuacc

SEQ ID NO: 266538 - RNA, 24 nt, Artificial Sequence
  Synthetic
caugccagaguccauugcuuuacc

SEQ ID NO: 266539 - RNA, 18 nt, Artificial Sequence
  Synthetic
aaauuuuaguaguuuacc

SEQ ID NO: 266540 - RNA, 19 nt, Artificial Sequence
  Synthetic
uaaauuuuaguaguuuacc

SEQ ID NO: 266541 - RNA, 20 nt, Artificial Sequence
  Synthetic
cuaaauuuuaguaguuuacc

SEQ ID NO: 266542 - RNA, 21 nt, Artificial Sequence
  Synthetic
acuaaauuuuaguaguuuacc

SEQ ID NO: 266543 - RNA, 22 nt, Artificial Sequence
  Synthetic
aacuaaauuuuaguaguuuacc

SEQ ID NO: 266544 - RNA, 23 nt, Artificial Sequence
  Synthetic
caacuaaauuuuaguaguuuacc

SEQ ID NO: 266545 - RNA, 24 nt, Artificial Sequence
  Synthetic
acaacuaaauuuuaguaguuuacc

SEQ ID NO: 266546 - RNA, 18 nt, Artificial Sequence
  Synthetic
cugccucucagguuuacc

SEQ ID NO: 266547 - RNA, 19 nt, Artificial Sequence
  Synthetic
acugccucucagguuuacc

SEQ ID NO: 266548 - RNA, 20 nt, Artificial Sequence
  Synthetic
gacugccucucagguuuacc

SEQ ID NO: 266549 - RNA, 21 nt, Artificial Sequence
  Synthetic
agacugccucucagguuuacc

SEQ ID NO: 266550 - RNA, 22 nt, Artificial Sequence
  Synthetic
cagacugccucucagguuuacc

SEQ ID NO: 266551 - RNA, 23 nt, Artificial Sequence
  Synthetic
ccagacugccucucagguuuacc

SEQ ID NO: 266552 - RNA, 24 nt, Artificial Sequence
  Synthetic
cccagacugccucucagguuuacc

SEQ ID NO: 266553 - RNA, 18 nt, Artificial Sequence
  Synthetic
agugagggauauuuuacc

SEQ ID NO: 266554 - RNA, 19 nt, Artificial Sequence
  Synthetic
uagugagggauauuuuacc

SEQ ID NO: 266555 - RNA, 20 nt, Artificial Sequence
  Synthetic
cuagugagggauauuuuacc

SEQ ID NO: 266556 - RNA, 21 nt, Artificial Sequence
  Synthetic
ccuagugagggauauuuuacc

SEQ ID NO: 266557 - RNA, 22 nt, Artificial Sequence
  Synthetic
uccuagugagggauauuuuacc

SEQ ID NO: 266558 - RNA, 23 nt, Artificial Sequence
  Synthetic
cuccuagugagggauauuuuacc

SEQ ID NO: 266559 - RNA, 24 nt, Artificial Sequence
  Synthetic
ccuccuagugagggauauuuuacc

SEQ ID NO: 266560 - RNA, 18 nt, Artificial Sequence
  Synthetic
ggguacuuuuauuuuacc

SEQ ID NO: 266561 - RNA, 19 nt, Artificial Sequence
  Synthetic
gggguacuuuuauuuuacc

SEQ ID NO: 266562 - RNA, 20 nt, Artificial Sequence
  Synthetic
ugggguacuuuuauuuuacc

SEQ ID NO: 266563 - RNA, 21 nt, Artificial Sequence
  Synthetic
uugggguacuuuuauuuuacc

SEQ ID NO: 266564 - RNA, 22 nt, Artificial Sequence
  Synthetic
guugggguacuuuuauuuuacc

SEQ ID NO: 266565 - RNA, 23 nt, Artificial Sequence
  Synthetic
uguugggguacuuuuauuuuacc

SEQ ID NO: 266566 - RNA, 24 nt, Artificial Sequence
  Synthetic
guguugggguacuuuuauuuuacc

SEQ ID NO: 266567 - RNA, 18 nt, Artificial Sequence
  Synthetic
uguaccauaacuuuuacc

SEQ ID NO: 266568 - RNA, 19 nt, Artificial Sequence
  Synthetic
guguaccauaacuuuuacc

SEQ ID NO: 266569 - RNA, 20 nt, Artificial Sequence
  Synthetic
uguguaccauaacuuuuacc

SEQ ID NO: 266570 - RNA, 21 nt, Artificial Sequence
  Synthetic
cuguguaccauaacuuuuacc

SEQ ID NO: 266571 - RNA, 22 nt, Artificial Sequence
  Synthetic
ucuguguaccauaacuuuuacc

SEQ ID NO: 266572 - RNA, 23 nt, Artificial Sequence
  Synthetic
uucuguguaccauaacuuuuacc

SEQ ID NO: 266573 - RNA, 24 nt, Artificial Sequence
  Synthetic
auucuguguaccauaacuuuuacc

SEQ ID NO: 266574 - RNA, 18 nt, Artificial Sequence
  Synthetic
cuauaauuuauuuuuacc

SEQ ID NO: 266575 - RNA, 19 nt, Artificial Sequence
  Synthetic
ucuauaauuuauuuuuacc

SEQ ID NO: 266576 - RNA, 20 nt, Artificial Sequence
  Synthetic
cucuauaauuuauuuuuacc

SEQ ID NO: 266577 - RNA, 21 nt, Artificial Sequence
  Synthetic
gcucuauaauuuauuuuuacc

SEQ ID NO: 266578 - RNA, 22 nt, Artificial Sequence
  Synthetic
ugcucuauaauuuauuuuuacc

SEQ ID NO: 266579 - RNA, 23 nt, Artificial Sequence
  Synthetic
uugcucuauaauuuauuuuuacc

SEQ ID NO: 266580 - RNA, 24 nt, Artificial Sequence
  Synthetic
auugcucuauaauuuauuuuuacc

SEQ ID NO: 266581 - RNA, 18 nt, Artificial Sequence
  Synthetic
cuuucuccugaaaaaccc

SEQ ID NO: 266582 - RNA, 19 nt, Artificial Sequence
  Synthetic
ucuuucuccugaaaaaccc

SEQ ID NO: 266583 - RNA, 20 nt, Artificial Sequence
  Synthetic
uucuuucuccugaaaaaccc

SEQ ID NO: 266584 - RNA, 21 nt, Artificial Sequence
  Synthetic
uuucuuucuccugaaaaaccc

SEQ ID NO: 266585 - RNA, 22 nt, Artificial Sequence
  Synthetic
auuucuuucuccugaaaaaccc

SEQ ID NO: 266586 - RNA, 23 nt, Artificial Sequence
  Synthetic
uauuucuuucuccugaaaaaccc

SEQ ID NO: 266587 - RNA, 24 nt, Artificial Sequence
  Synthetic
cuauuucuuucuccugaaaaaccc

SEQ ID NO: 266588 - RNA, 18 nt, Artificial Sequence
  Synthetic
cuaaaaccauaaaaaccc

SEQ ID NO: 266589 - RNA, 19 nt, Artificial Sequence
  Synthetic
ccuaaaaccauaaaaaccc

SEQ ID NO: 266590 - RNA, 20 nt, Artificial Sequence
  Synthetic
accuaaaaccauaaaaaccc

SEQ ID NO: 266591 - RNA, 21 nt, Artificial Sequence
  Synthetic
aaccuaaaaccauaaaaaccc

SEQ ID NO: 266592 - RNA, 22 nt, Artificial Sequence
  Synthetic
aaaccuaaaaccauaaaaaccc

SEQ ID NO: 266593 - RNA, 23 nt, Artificial Sequence
  Synthetic
aaaaccuaaaaccauaaaaaccc

SEQ ID NO: 266594 - RNA, 24 nt, Artificial Sequence
  Synthetic
uaaaaccuaaaaccauaaaaaccc

SEQ ID NO: 266595 - RNA, 21 nt, Artificial Sequence
  Synthetic
gaccuaaaaccauaaaaaccc

SEQ ID NO: 266596 - RNA, 22 nt, Artificial Sequence
  Synthetic
agaccuaaaaccauaaaaaccc

SEQ ID NO: 266597 - RNA, 23 nt, Artificial Sequence
  Synthetic
uagaccuaaaaccauaaaaaccc

SEQ ID NO: 266598 - RNA, 24 nt, Artificial Sequence
  Synthetic
uuagaccuaaaaccauaaaaaccc

SEQ ID NO: 266599 - RNA, 18 nt, Artificial Sequence
  Synthetic
agaaauuuuuacaaaccc

SEQ ID NO: 266600 - RNA, 19 nt, Artificial Sequence
  Synthetic
cagaaauuuuuacaaaccc

SEQ ID NO: 266601 - RNA, 20 nt, Artificial Sequence
  Synthetic
ccagaaauuuuuacaaaccc

SEQ ID NO: 266602 - RNA, 21 nt, Artificial Sequence
  Synthetic
cccagaaauuuuuacaaaccc

SEQ ID NO: 266603 - RNA, 22 nt, Artificial Sequence
  Synthetic
acccagaaauuuuuacaaaccc

SEQ ID NO: 266604 - RNA, 23 nt, Artificial Sequence
  Synthetic
cacccagaaauuuuuacaaaccc

SEQ ID NO: 266605 - RNA, 24 nt, Artificial Sequence
  Synthetic
ucacccagaaauuuuuacaaaccc

SEQ ID NO: 266606 - RNA, 18 nt, Artificial Sequence
  Synthetic
aaaaaucuaaugaaaccc

SEQ ID NO: 266607 - RNA, 19 nt, Artificial Sequence
  Synthetic
uaaaaaucuaaugaaaccc

SEQ ID NO: 266608 - RNA, 20 nt, Artificial Sequence
  Synthetic
cuaaaaaucuaaugaaaccc

SEQ ID NO: 266609 - RNA, 21 nt, Artificial Sequence
  Synthetic
ucuaaaaaucuaaugaaaccc

SEQ ID NO: 266610 - RNA, 22 nt, Artificial Sequence
  Synthetic
cucuaaaaaucuaaugaaaccc

SEQ ID NO: 266611 - RNA, 23 nt, Artificial Sequence
  Synthetic
ucucuaaaaaucuaaugaaaccc

SEQ ID NO: 266612 - RNA, 24 nt, Artificial Sequence
  Synthetic
cucucuaaaaaucuaaugaaaccc

SEQ ID NO: 266613 - RNA, 18 nt, Artificial Sequence
  Synthetic
uucagcuccgugaaaccc

SEQ ID NO: 266614 - RNA, 19 nt, Artificial Sequence
  Synthetic
uuucagcuccgugaaaccc

SEQ ID NO: 266615 - RNA, 20 nt, Artificial Sequence
  Synthetic
auuucagcuccgugaaaccc

SEQ ID NO: 266616 - RNA, 21 nt, Artificial Sequence
  Synthetic
cauuucagcuccgugaaaccc

SEQ ID NO: 266617 - RNA, 22 nt, Artificial Sequence
  Synthetic
acauuucagcuccgugaaaccc

SEQ ID NO: 266618 - RNA, 23 nt, Artificial Sequence
  Synthetic
uacauuucagcuccgugaaaccc

SEQ ID NO: 266619 - RNA, 24 nt, Artificial Sequence
  Synthetic
auacauuucagcuccgugaaaccc

SEQ ID NO: 266620 - RNA, 18 nt, Artificial Sequence
  Synthetic
aaugguguaaguaaaccc

SEQ ID NO: 266621 - RNA, 19 nt, Artificial Sequence
  Synthetic
gaaugguguaaguaaaccc

SEQ ID NO: 266622 - RNA, 20 nt, Artificial Sequence
  Synthetic
agaaugguguaaguaaaccc

SEQ ID NO: 266623 - RNA, 21 nt, Artificial Sequence
  Synthetic
gagaaugguguaaguaaaccc

SEQ ID NO: 266624 - RNA, 22 nt, Artificial Sequence
  Synthetic
agagaaugguguaaguaaaccc

SEQ ID NO: 266625 - RNA, 23 nt, Artificial Sequence
  Synthetic
aagagaaugguguaaguaaaccc

SEQ ID NO: 266626 - RNA, 24 nt, Artificial Sequence
  Synthetic
caagagaaugguguaaguaaaccc

SEQ ID NO: 266627 - RNA, 18 nt, Artificial Sequence
  Synthetic
uaaucauuaaaacaaccc

SEQ ID NO: 266628 - RNA, 19 nt, Artificial Sequence
  Synthetic
uuaaucauuaaaacaaccc

SEQ ID NO: 266629 - RNA, 20 nt, Artificial Sequence
  Synthetic
uuuaaucauuaaaacaaccc

SEQ ID NO: 266630 - RNA, 21 nt, Artificial Sequence
  Synthetic
guuuaaucauuaaaacaaccc

SEQ ID NO: 266631 - RNA, 22 nt, Artificial Sequence
  Synthetic
uguuuaaucauuaaaacaaccc

SEQ ID NO: 266632 - RNA, 23 nt, Artificial Sequence
  Synthetic
uuguuuaaucauuaaaacaaccc

SEQ ID NO: 266633 - RNA, 24 nt, Artificial Sequence
  Synthetic
uuuguuuaaucauuaaaacaaccc

SEQ ID NO: 266634 - RNA, 18 nt, Artificial Sequence
  Synthetic
uaucuuaucagacaaccc

SEQ ID NO: 266635 - RNA, 19 nt, Artificial Sequence
  Synthetic
uuaucuuaucagacaaccc

SEQ ID NO: 266636 - RNA, 20 nt, Artificial Sequence
  Synthetic
guuaucuuaucagacaaccc

SEQ ID NO: 266637 - RNA, 21 nt, Artificial Sequence
  Synthetic
gguuaucuuaucagacaaccc

SEQ ID NO: 266638 - RNA, 22 nt, Artificial Sequence
  Synthetic
ggguuaucuuaucagacaaccc

SEQ ID NO: 266639 - RNA, 23 nt, Artificial Sequence
  Synthetic
aggguuaucuuaucagacaaccc

SEQ ID NO: 266640 - RNA, 24 nt, Artificial Sequence
  Synthetic
caggguuaucuuaucagacaaccc

SEQ ID NO: 266641 - RNA, 18 nt, Artificial Sequence
  Synthetic
auuacuuagccccaaccc

SEQ ID NO: 266642 - RNA, 19 nt, Artificial Sequence
  Synthetic
gauuacuuagccccaaccc

SEQ ID NO: 266643 - RNA, 20 nt, Artificial Sequence
  Synthetic
agauuacuuagccccaaccc

SEQ ID NO: 266644 - RNA, 21 nt, Artificial Sequence
  Synthetic
uagauuacuuagccccaaccc

SEQ ID NO: 266645 - RNA, 22 nt, Artificial Sequence
  Synthetic
auagauuacuuagccccaaccc

SEQ ID NO: 266646 - RNA, 23 nt, Artificial Sequence
  Synthetic
cauagauuacuuagccccaaccc

SEQ ID NO: 266647 - RNA, 24 nt, Artificial Sequence
  Synthetic
acauagauuacuuagccccaaccc

SEQ ID NO: 266648 - RNA, 18 nt, Artificial Sequence
  Synthetic
uuacuaacuuugcaaccc

SEQ ID NO: 266649 - RNA, 19 nt, Artificial Sequence
  Synthetic
uuuacuaacuuugcaaccc

SEQ ID NO: 266650 - RNA, 20 nt, Artificial Sequence
  Synthetic
auuuacuaacuuugcaaccc

SEQ ID NO: 266651 - RNA, 21 nt, Artificial Sequence
  Synthetic
uauuuacuaacuuugcaaccc

SEQ ID NO: 266652 - RNA, 22 nt, Artificial Sequence
  Synthetic
auauuuacuaacuuugcaaccc

SEQ ID NO: 266653 - RNA, 23 nt, Artificial Sequence
  Synthetic
aauauuuacuaacuuugcaaccc

SEQ ID NO: 266654 - RNA, 24 nt, Artificial Sequence
  Synthetic
uaauauuuacuaacuuugcaaccc

SEQ ID NO: 266655 - RNA, 18 nt, Artificial Sequence
  Synthetic
ggcaggguaccucaaccc

SEQ ID NO: 266656 - RNA, 19 nt, Artificial Sequence
  Synthetic
uggcaggguaccucaaccc

SEQ ID NO: 266657 - RNA, 20 nt, Artificial Sequence
  Synthetic
auggcaggguaccucaaccc

SEQ ID NO: 266658 - RNA, 21 nt, Artificial Sequence
  Synthetic
uauggcaggguaccucaaccc

SEQ ID NO: 266659 - RNA, 22 nt, Artificial Sequence
  Synthetic
uuauggcaggguaccucaaccc

SEQ ID NO: 266660 - RNA, 23 nt, Artificial Sequence
  Synthetic
uuuauggcaggguaccucaaccc

SEQ ID NO: 266661 - RNA, 24 nt, Artificial Sequence
  Synthetic
uuuuauggcaggguaccucaaccc

SEQ ID NO: 266662 - RNA, 18 nt, Artificial Sequence
  Synthetic
ggagaauggcgcgaaccc

SEQ ID NO: 266663 - RNA, 19 nt, Artificial Sequence
  Synthetic
aggagaauggcgcgaaccc

SEQ ID NO: 266664 - RNA, 20 nt, Artificial Sequence
  Synthetic
caggagaauggcgcgaaccc

SEQ ID NO: 266665 - RNA, 21 nt, Artificial Sequence
  Synthetic
gcaggagaauggcgcgaaccc

SEQ ID NO: 266666 - RNA, 22 nt, Artificial Sequence
  Synthetic
ggcaggagaauggcgcgaaccc

SEQ ID NO: 266667 - RNA, 23 nt, Artificial Sequence
  Synthetic
aggcaggagaauggcgcgaaccc

SEQ ID NO: 266668 - RNA, 24 nt, Artificial Sequence
  Synthetic
gaggcaggagaauggcgcgaaccc

SEQ ID NO: 266669 - RNA, 18 nt, Artificial Sequence
  Synthetic
gaagaauugcucgaaccc

SEQ ID NO: 266670 - RNA, 19 nt, Artificial Sequence
  Synthetic
agaagaauugcucgaaccc

SEQ ID NO: 266671 - RNA, 20 nt, Artificial Sequence
  Synthetic
cagaagaauugcucgaaccc

SEQ ID NO: 266672 - RNA, 21 nt, Artificial Sequence
  Synthetic
gcagaagaauugcucgaaccc

SEQ ID NO: 266673 - RNA, 22 nt, Artificial Sequence
  Synthetic
agcagaagaauugcucgaaccc

SEQ ID NO: 266674 - RNA, 23 nt, Artificial Sequence
  Synthetic
aagcagaagaauugcucgaaccc

SEQ ID NO: 266675 - RNA, 24 nt, Artificial Sequence
  Synthetic
gaagcagaagaauugcucgaaccc

SEQ ID NO: 266676 - RNA, 18 nt, Artificial Sequence
  Synthetic
ggagaguugcucgaaccc

SEQ ID NO: 266677 - RNA, 19 nt, Artificial Sequence
  Synthetic
gggagaguugcucgaaccc

SEQ ID NO: 266678 - RNA, 20 nt, Artificial Sequence
  Synthetic
ugggagaguugcucgaaccc

SEQ ID NO: 266679 - RNA, 21 nt, Artificial Sequence
  Synthetic
gugggagaguugcucgaaccc

SEQ ID NO: 266680 - RNA, 22 nt, Artificial Sequence
  Synthetic
ggugggagaguugcucgaaccc

SEQ ID NO: 266681 - RNA, 23 nt, Artificial Sequence
  Synthetic
aggugggagaguugcucgaaccc

SEQ ID NO: 266682 - RNA, 24 nt, Artificial Sequence
  Synthetic
gaggugggagaguugcucgaaccc

SEQ ID NO: 266683 - RNA, 18 nt, Artificial Sequence
  Synthetic
aguacagagaaggaaccc

SEQ ID NO: 266684 - RNA, 19 nt, Artificial Sequence
  Synthetic
caguacagagaaggaaccc

SEQ ID NO: 266685 - RNA, 20 nt, Artificial Sequence
  Synthetic
ucaguacagagaaggaaccc

SEQ ID NO: 266686 - RNA, 21 nt, Artificial Sequence
  Synthetic
cucaguacagagaaggaaccc

SEQ ID NO: 266687 - RNA, 22 nt, Artificial Sequence
  Synthetic
acucaguacagagaaggaaccc

SEQ ID NO: 266688 - RNA, 23 nt, Artificial Sequence
  Synthetic
gacucaguacagagaaggaaccc

SEQ ID NO: 266689 - RNA, 24 nt, Artificial Sequence
  Synthetic
agacucaguacagagaaggaaccc

SEQ ID NO: 266690 - RNA, 18 nt, Artificial Sequence
  Synthetic
cugguauuuauggaaccc

SEQ ID NO: 266691 - RNA, 19 nt, Artificial Sequence
  Synthetic
acugguauuuauggaaccc

SEQ ID NO: 266692 - RNA, 20 nt, Artificial Sequence
  Synthetic
gacugguauuuauggaaccc

SEQ ID NO: 266693 - RNA, 21 nt, Artificial Sequence
  Synthetic
ugacugguauuuauggaaccc

SEQ ID NO: 266694 - RNA, 22 nt, Artificial Sequence
  Synthetic
uugacugguauuuauggaaccc

SEQ ID NO: 266695 - RNA, 23 nt, Artificial Sequence
  Synthetic
auugacugguauuuauggaaccc

SEQ ID NO: 266696 - RNA, 24 nt, Artificial Sequence
  Synthetic
uauugacugguauuuauggaaccc

SEQ ID NO: 266697 - RNA, 18 nt, Artificial Sequence
  Synthetic
ggagaaucacuggaaccc

SEQ ID NO: 266698 - RNA, 19 nt, Artificial Sequence
  Synthetic
aggagaaucacuggaaccc

SEQ ID NO: 266699 - RNA, 20 nt, Artificial Sequence
  Synthetic
caggagaaucacuggaaccc

SEQ ID NO: 266700 - RNA, 21 nt, Artificial Sequence
  Synthetic
gcaggagaaucacuggaaccc

SEQ ID NO: 266701 - RNA, 22 nt, Artificial Sequence
  Synthetic
ggcaggagaaucacuggaaccc

SEQ ID NO: 266702 - RNA, 23 nt, Artificial Sequence
  Synthetic
aggcaggagaaucacuggaaccc

SEQ ID NO: 266703 - RNA, 24 nt, Artificial Sequence
  Synthetic
gaggcaggagaaucacuggaaccc

SEQ ID NO: 266704 - RNA, 18 nt, Artificial Sequence
  Synthetic
ggagaauggcaugaaccc

SEQ ID NO: 266705 - RNA, 19 nt, Artificial Sequence
  Synthetic
aggagaauggcaugaaccc

SEQ ID NO: 266706 - RNA, 20 nt, Artificial Sequence
  Synthetic
caggagaauggcaugaaccc

SEQ ID NO: 266707 - RNA, 21 nt, Artificial Sequence
  Synthetic
gcaggagaauggcaugaaccc

SEQ ID NO: 266708 - RNA, 22 nt, Artificial Sequence
  Synthetic
ggcaggagaauggcaugaaccc

SEQ ID NO: 266709 - RNA, 23 nt, Artificial Sequence
  Synthetic
aggcaggagaauggcaugaaccc

SEQ ID NO: 266710 - RNA, 24 nt, Artificial Sequence
  Synthetic
gaggcaggagaauggcaugaaccc

SEQ ID NO: 266711 - RNA, 18 nt, Artificial Sequence
  Synthetic
aucgccuuuucugaaccc

SEQ ID NO: 266712 - RNA, 19 nt, Artificial Sequence
  Synthetic
caucgccuuuucugaaccc

SEQ ID NO: 266713 - RNA, 20 nt, Artificial Sequence
  Synthetic
acaucgccuuuucugaaccc

SEQ ID NO: 266714 - RNA, 21 nt, Artificial Sequence
  Synthetic
cacaucgccuuuucugaaccc

SEQ ID NO: 266715 - RNA, 22 nt, Artificial Sequence
  Synthetic
ccacaucgccuuuucugaaccc

SEQ ID NO: 266716 - RNA, 23 nt, Artificial Sequence
  Synthetic
cccacaucgccuuuucugaaccc

SEQ ID NO: 266717 - RNA, 24 nt, Artificial Sequence
  Synthetic
ccccacaucgccuuuucugaaccc

SEQ ID NO: 266718 - RNA, 18 nt, Artificial Sequence
  Synthetic
gggccuaggagugaaccc

SEQ ID NO: 266719 - RNA, 19 nt, Artificial Sequence
  Synthetic
agggccuaggagugaaccc

SEQ ID NO: 266720 - RNA, 20 nt, Artificial Sequence
  Synthetic
gagggccuaggagugaaccc

SEQ ID NO: 266721 - RNA, 21 nt, Artificial Sequence
  Synthetic
agagggccuaggagugaaccc

SEQ ID NO: 266722 - RNA, 22 nt, Artificial Sequence
  Synthetic
aagagggccuaggagugaaccc

SEQ ID NO: 266723 - RNA, 23 nt, Artificial Sequence
  Synthetic
gaagagggccuaggagugaaccc

SEQ ID NO: 266724 - RNA, 24 nt, Artificial Sequence
  Synthetic
agaagagggccuaggagugaaccc

SEQ ID NO: 266725 - RNA, 18 nt, Artificial Sequence
  Synthetic
gaaggaucacgugaaccc

SEQ ID NO: 266726 - RNA, 19 nt, Artificial Sequence
  Synthetic
agaaggaucacgugaaccc

SEQ ID NO: 266727 - RNA, 20 nt, Artificial Sequence
  Synthetic
uagaaggaucacgugaaccc

SEQ ID NO: 266728 - RNA, 21 nt, Artificial Sequence
  Synthetic
guagaaggaucacgugaaccc

SEQ ID NO: 266729 - RNA, 22 nt, Artificial Sequence
  Synthetic
gguagaaggaucacgugaaccc

SEQ ID NO: 266730 - RNA, 23 nt, Artificial Sequence
  Synthetic
agguagaaggaucacgugaaccc

SEQ ID NO: 266731 - RNA, 24 nt, Artificial Sequence
  Synthetic
gagguagaaggaucacgugaaccc

SEQ ID NO: 266732 - RNA, 20 nt, Artificial Sequence
  Synthetic
caggagaauggcgugaaccc

SEQ ID NO: 266733 - RNA, 21 nt, Artificial Sequence
  Synthetic
gcaggagaauggcgugaaccc

SEQ ID NO: 266734 - RNA, 22 nt, Artificial Sequence
  Synthetic
ggcaggagaauggcgugaaccc

SEQ ID NO: 266735 - RNA, 23 nt, Artificial Sequence
  Synthetic
aggcaggagaauggcgugaaccc

SEQ ID NO: 266736 - RNA, 24 nt, Artificial Sequence
  Synthetic
aaggcaggagaauggcgugaaccc

SEQ ID NO: 266737 - RNA, 18 nt, Artificial Sequence
  Synthetic
ggaaaauggugugaaccc

SEQ ID NO: 266738 - RNA, 19 nt, Artificial Sequence
  Synthetic
aggaaaauggugugaaccc

SEQ ID NO: 266739 - RNA, 20 nt, Artificial Sequence
  Synthetic
caggaaaauggugugaaccc

SEQ ID NO: 266740 - RNA, 21 nt, Artificial Sequence
  Synthetic
gcaggaaaauggugugaaccc

SEQ ID NO: 266741 - RNA, 22 nt, Artificial Sequence
  Synthetic
ggcaggaaaauggugugaaccc

SEQ ID NO: 266742 - RNA, 23 nt, Artificial Sequence
  Synthetic
aggcaggaaaauggugugaaccc

SEQ ID NO: 266743 - RNA, 24 nt, Artificial Sequence
  Synthetic
gaggcaggaaaauggugugaaccc

SEQ ID NO: 266744 - RNA, 18 nt, Artificial Sequence
  Synthetic
ggagaaucacuugaaccc

SEQ ID NO: 266745 - RNA, 19 nt, Artificial Sequence
  Synthetic
aggagaaucacuugaaccc

SEQ ID NO: 266746 - RNA, 20 nt, Artificial Sequence
  Synthetic
uaggagaaucacuugaaccc

SEQ ID NO: 266747 - RNA, 21 nt, Artificial Sequence
  Synthetic
guaggagaaucacuugaaccc

SEQ ID NO: 266748 - RNA, 22 nt, Artificial Sequence
  Synthetic
gguaggagaaucacuugaaccc

SEQ ID NO: 266749 - RNA, 23 nt, Artificial Sequence
  Synthetic
agguaggagaaucacuugaaccc

SEQ ID NO: 266750 - RNA, 24 nt, Artificial Sequence
  Synthetic
gagguaggagaaucacuugaaccc

SEQ ID NO: 266751 - RNA, 18 nt, Artificial Sequence
  Synthetic
ggagaaucccuugaaccc

SEQ ID NO: 266752 - RNA, 19 nt, Artificial Sequence
  Synthetic
aggagaaucccuugaaccc

SEQ ID NO: 266753 - RNA, 20 nt, Artificial Sequence
  Synthetic
caggagaaucccuugaaccc

SEQ ID NO: 266754 - RNA, 21 nt, Artificial Sequence
  Synthetic
gcaggagaaucccuugaaccc

SEQ ID NO: 266755 - RNA, 22 nt, Artificial Sequence
  Synthetic
ggcaggagaaucccuugaaccc

SEQ ID NO: 266756 - RNA, 23 nt, Artificial Sequence
  Synthetic
aggcaggagaaucccuugaaccc

SEQ ID NO: 266757 - RNA, 24 nt, Artificial Sequence
  Synthetic
gaggcaggagaaucccuugaaccc

SEQ ID NO: 266758 - RNA, 18 nt, Artificial Sequence
  Synthetic
ggaggauuccuugaaccc

SEQ ID NO: 266759 - RNA, 19 nt, Artificial Sequence
  Synthetic
aggaggauuccuugaaccc

SEQ ID NO: 266760 - RNA, 20 nt, Artificial Sequence
  Synthetic
caggaggauuccuugaaccc

SEQ ID NO: 266761 - RNA, 21 nt, Artificial Sequence
  Synthetic
gcaggaggauuccuugaaccc

SEQ ID NO: 266762 - RNA, 22 nt, Artificial Sequence
  Synthetic
ggcaggaggauuccuugaaccc

SEQ ID NO: 266763 - RNA, 23 nt, Artificial Sequence
  Synthetic
aggcaggaggauuccuugaaccc

SEQ ID NO: 266764 - RNA, 24 nt, Artificial Sequence
  Synthetic
gaggcaggaggauuccuugaaccc

SEQ ID NO: 266765 - RNA, 18 nt, Artificial Sequence
  Synthetic
ggagaauagcuugaaccc

SEQ ID NO: 266766 - RNA, 19 nt, Artificial Sequence
  Synthetic
aggagaauagcuugaaccc

SEQ ID NO: 266767 - RNA, 20 nt, Artificial Sequence
  Synthetic
caggagaauagcuugaaccc

SEQ ID NO: 266768 - RNA, 21 nt, Artificial Sequence
  Synthetic
gcaggagaauagcuugaaccc

SEQ ID NO: 266769 - RNA, 22 nt, Artificial Sequence
  Synthetic
ggcaggagaauagcuugaaccc

SEQ ID NO: 266770 - RNA, 23 nt, Artificial Sequence
  Synthetic
aggcaggagaauagcuugaaccc

SEQ ID NO: 266771 - RNA, 24 nt, Artificial Sequence
  Synthetic
gaggcaggagaauagcuugaaccc

SEQ ID NO: 266772 - RNA, 18 nt, Artificial Sequence
  Synthetic
ggaggauagcuugaaccc

SEQ ID NO: 266773 - RNA, 19 nt, Artificial Sequence
  Synthetic
aggaggauagcuugaaccc

SEQ ID NO: 266774 - RNA, 20 nt, Artificial Sequence
  Synthetic
caggaggauagcuugaaccc

SEQ ID NO: 266775 - RNA, 21 nt, Artificial Sequence
  Synthetic
acaggaggauagcuugaaccc

SEQ ID NO: 266776 - RNA, 22 nt, Artificial Sequence
  Synthetic
gacaggaggauagcuugaaccc

SEQ ID NO: 266777 - RNA, 23 nt, Artificial Sequence
  Synthetic
agacaggaggauagcuugaaccc

SEQ ID NO: 266778 - RNA, 24 nt, Artificial Sequence
  Synthetic
gagacaggaggauagcuugaaccc

SEQ ID NO: 266779 - RNA, 18 nt, Artificial Sequence
  Synthetic
ggagaaucgcuugaaccc

SEQ ID NO: 266780 - RNA, 21 nt, Artificial Sequence
  Synthetic
gcaggagaaucgcuugaaccc

SEQ ID NO: 266781 - RNA, 22 nt, Artificial Sequence
  Synthetic
agcaggagaaucgcuugaaccc

SEQ ID NO: 266782 - RNA, 23 nt, Artificial Sequence
  Synthetic
aagcaggagaaucgcuugaaccc

SEQ ID NO: 266783 - RNA, 24 nt, Artificial Sequence
  Synthetic
gaagcaggagaaucgcuugaaccc

SEQ ID NO: 266784 - RNA, 19 nt, Artificial Sequence
  Synthetic
gggagaaucgcuugaaccc

SEQ ID NO: 266785 - RNA, 20 nt, Artificial Sequence
  Synthetic
ugggagaaucgcuugaaccc

SEQ ID NO: 266786 - RNA, 21 nt, Artificial Sequence
  Synthetic
gugggagaaucgcuugaaccc

SEQ ID NO: 266787 - RNA, 22 nt, Artificial Sequence
  Synthetic
ggugggagaaucgcuugaaccc

SEQ ID NO: 266788 - RNA, 23 nt, Artificial Sequence
  Synthetic
aggugggagaaucgcuugaaccc

SEQ ID NO: 266789 - RNA, 24 nt, Artificial Sequence
  Synthetic
gaggugggagaaucgcuugaaccc

SEQ ID NO: 266790 - RNA, 18 nt, Artificial Sequence
  Synthetic
ggaguaucgcuugaaccc

SEQ ID NO: 266791 - RNA, 19 nt, Artificial Sequence
  Synthetic
aggaguaucgcuugaaccc

SEQ ID NO: 266792 - RNA, 20 nt, Artificial Sequence
  Synthetic
caggaguaucgcuugaaccc

SEQ ID NO: 266793 - RNA, 21 nt, Artificial Sequence
  Synthetic
gcaggaguaucgcuugaaccc

SEQ ID NO: 266794 - RNA, 22 nt, Artificial Sequence
  Synthetic
ggcaggaguaucgcuugaaccc

SEQ ID NO: 266795 - RNA, 23 nt, Artificial Sequence
  Synthetic
aggcaggaguaucgcuugaaccc

SEQ ID NO: 266796 - RNA, 24 nt, Artificial Sequence
  Synthetic
gaggcaggaguaucgcuugaaccc

SEQ ID NO: 266797 - RNA, 21 nt, Artificial Sequence
  Synthetic
gcaggagaauugcuugaaccc

SEQ ID NO: 266798 - RNA, 22 nt, Artificial Sequence
  Synthetic
ugcaggagaauugcuugaaccc

SEQ ID NO: 266799 - RNA, 23 nt, Artificial Sequence
  Synthetic
augcaggagaauugcuugaaccc

SEQ ID NO: 266800 - RNA, 24 nt, Artificial Sequence
  Synthetic
gaugcaggagaauugcuugaaccc

SEQ ID NO: 266801 - RNA, 18 nt, Artificial Sequence
  Synthetic
ugagaauugcuugaaccc

SEQ ID NO: 266802 - RNA, 19 nt, Artificial Sequence
  Synthetic
augagaauugcuugaaccc

SEQ ID NO: 266803 - RNA, 20 nt, Artificial Sequence
  Synthetic
caugagaauugcuugaaccc

SEQ ID NO: 266804 - RNA, 21 nt, Artificial Sequence
  Synthetic
gcaugagaauugcuugaaccc

SEQ ID NO: 266805 - RNA, 22 nt, Artificial Sequence
  Synthetic
ggcaugagaauugcuugaaccc

SEQ ID NO: 266806 - RNA, 23 nt, Artificial Sequence
  Synthetic
aggcaugagaauugcuugaaccc

SEQ ID NO: 266807 - RNA, 24 nt, Artificial Sequence
  Synthetic
gaggcaugagaauugcuugaaccc

SEQ ID NO: 266808 - RNA, 18 nt, Artificial Sequence
  Synthetic
ggagaaucauuugaaccc

SEQ ID NO: 266809 - RNA, 19 nt, Artificial Sequence
  Synthetic
aggagaaucauuugaaccc

SEQ ID NO: 266810 - RNA, 20 nt, Artificial Sequence
  Synthetic
caggagaaucauuugaaccc

SEQ ID NO: 266811 - RNA, 21 nt, Artificial Sequence
  Synthetic
gcaggagaaucauuugaaccc

SEQ ID NO: 266812 - RNA, 22 nt, Artificial Sequence
  Synthetic
ggcaggagaaucauuugaaccc

SEQ ID NO: 266813 - RNA, 23 nt, Artificial Sequence
  Synthetic
aggcaggagaaucauuugaaccc

SEQ ID NO: 266814 - RNA, 24 nt, Artificial Sequence
  Synthetic
gaggcaggagaaucauuugaaccc

SEQ ID NO: 266815 - RNA, 18 nt, Artificial Sequence
  Synthetic
ggagaaucguuugaaccc

SEQ ID NO: 266816 - RNA, 19 nt, Artificial Sequence
  Synthetic
aggagaaucguuugaaccc

SEQ ID NO: 266817 - RNA, 20 nt, Artificial Sequence
  Synthetic
caggagaaucguuugaaccc

SEQ ID NO: 266818 - RNA, 21 nt, Artificial Sequence
  Synthetic
gcaggagaaucguuugaaccc

SEQ ID NO: 266819 - RNA, 22 nt, Artificial Sequence
  Synthetic
ggcaggagaaucguuugaaccc

SEQ ID NO: 266820 - RNA, 23 nt, Artificial Sequence
  Synthetic
aggcaggagaaucguuugaaccc

SEQ ID NO: 266821 - RNA, 24 nt, Artificial Sequence
  Synthetic
gaggcaggagaaucguuugaaccc

SEQ ID NO: 266822 - RNA, 18 nt, Artificial Sequence
  Synthetic
uuuaagaucaaauaaccc

SEQ ID NO: 266823 - RNA, 19 nt, Artificial Sequence
  Synthetic
cuuuaagaucaaauaaccc

SEQ ID NO: 266824 - RNA, 20 nt, Artificial Sequence
  Synthetic
gcuuuaagaucaaauaaccc

SEQ ID NO: 266825 - RNA, 21 nt, Artificial Sequence
  Synthetic
ugcuuuaagaucaaauaaccc

SEQ ID NO: 266826 - RNA, 22 nt, Artificial Sequence
  Synthetic
augcuuuaagaucaaauaaccc

SEQ ID NO: 266827 - RNA, 23 nt, Artificial Sequence
  Synthetic
aaugcuuuaagaucaaauaaccc

SEQ ID NO: 266828 - RNA, 24 nt, Artificial Sequence
  Synthetic
aaaugcuuuaagaucaaauaaccc

SEQ ID NO: 266829 - RNA, 18 nt, Artificial Sequence
  Synthetic
uguaaagucugauaaccc

SEQ ID NO: 266830 - RNA, 19 nt, Artificial Sequence
  Synthetic
guguaaagucugauaaccc

SEQ ID NO: 266831 - RNA, 20 nt, Artificial Sequence
  Synthetic
uguguaaagucugauaaccc

SEQ ID NO: 266832 - RNA, 21 nt, Artificial Sequence
  Synthetic
guguguaaagucugauaaccc

SEQ ID NO: 266833 - RNA, 22 nt, Artificial Sequence
  Synthetic
aguguguaaagucugauaaccc

SEQ ID NO: 266834 - RNA, 23 nt, Artificial Sequence
  Synthetic
uaguguguaaagucugauaaccc

SEQ ID NO: 266835 - RNA, 24 nt, Artificial Sequence
  Synthetic
cuaguguguaaagucugauaaccc

SEQ ID NO: 266836 - RNA, 18 nt, Artificial Sequence
  Synthetic
uacaauugcaaguaaccc

SEQ ID NO: 266837 - RNA, 19 nt, Artificial Sequence
  Synthetic
auacaauugcaaguaaccc

SEQ ID NO: 266838 - RNA, 20 nt, Artificial Sequence
  Synthetic
uauacaauugcaaguaaccc

SEQ ID NO: 266839 - RNA, 21 nt, Artificial Sequence
  Synthetic
guauacaauugcaaguaaccc

SEQ ID NO: 266840 - RNA, 22 nt, Artificial Sequence
  Synthetic
aguauacaauugcaaguaaccc

SEQ ID NO: 266841 - RNA, 23 nt, Artificial Sequence
  Synthetic
caguauacaauugcaaguaaccc

SEQ ID NO: 266842 - RNA, 24 nt, Artificial Sequence
  Synthetic
ucaguauacaauugcaaguaaccc

SEQ ID NO: 266843 - RNA, 18 nt, Artificial Sequence
  Synthetic
agcucacgucuguaaccc

SEQ ID NO: 266844 - RNA, 19 nt, Artificial Sequence
  Synthetic
uagcucacgucuguaaccc

SEQ ID NO: 266845 - RNA, 20 nt, Artificial Sequence
  Synthetic
guagcucacgucuguaaccc

SEQ ID NO: 266846 - RNA, 21 nt, Artificial Sequence
  Synthetic
gguagcucacgucuguaaccc

SEQ ID NO: 266847 - RNA, 22 nt, Artificial Sequence
  Synthetic
ugguagcucacgucuguaaccc

SEQ ID NO: 266848 - RNA, 23 nt, Artificial Sequence
  Synthetic
augguagcucacgucuguaaccc

SEQ ID NO: 266849 - RNA, 24 nt, Artificial Sequence
  Synthetic
caugguagcucacgucuguaaccc

SEQ ID NO: 266850 - RNA, 18 nt, Artificial Sequence
  Synthetic
aaucaugcuaccacaccc

SEQ ID NO: 266851 - RNA, 19 nt, Artificial Sequence
  Synthetic
uaaucaugcuaccacaccc

SEQ ID NO: 266852 - RNA, 20 nt, Artificial Sequence
  Synthetic
auaaucaugcuaccacaccc

SEQ ID NO: 266853 - RNA, 21 nt, Artificial Sequence
  Synthetic
uauaaucaugcuaccacaccc

SEQ ID NO: 266854 - RNA, 22 nt, Artificial Sequence
  Synthetic
cuauaaucaugcuaccacaccc

SEQ ID NO: 266855 - RNA, 23 nt, Artificial Sequence
  Synthetic
gcuauaaucaugcuaccacaccc

SEQ ID NO: 266856 - RNA, 24 nt, Artificial Sequence
  Synthetic
agcuauaaucaugcuaccacaccc

SEQ ID NO: 266857 - RNA, 18 nt, Artificial Sequence
  Synthetic
aaagcaauuuucacaccc

SEQ ID NO: 266858 - RNA, 19 nt, Artificial Sequence
  Synthetic
caaagcaauuuucacaccc

SEQ ID NO: 266859 - RNA, 20 nt, Artificial Sequence
  Synthetic
ucaaagcaauuuucacaccc

SEQ ID NO: 266860 - RNA, 21 nt, Artificial Sequence
  Synthetic
cucaaagcaauuuucacaccc

SEQ ID NO: 266861 - RNA, 22 nt, Artificial Sequence
  Synthetic
ccucaaagcaauuuucacaccc

SEQ ID NO: 266862 - RNA, 23 nt, Artificial Sequence
  Synthetic
uccucaaagcaauuuucacaccc

SEQ ID NO: 266863 - RNA, 24 nt, Artificial Sequence
  Synthetic
cuccucaaagcaauuuucacaccc

SEQ ID NO: 266864 - RNA, 18 nt, Artificial Sequence
  Synthetic
caucuguugaugacaccc

SEQ ID NO: 266865 - RNA, 19 nt, Artificial Sequence
  Synthetic
ucaucuguugaugacaccc

SEQ ID NO: 266866 - RNA, 20 nt, Artificial Sequence
  Synthetic
uucaucuguugaugacaccc

SEQ ID NO: 266867 - RNA, 21 nt, Artificial Sequence
  Synthetic
auucaucuguugaugacaccc

SEQ ID NO: 266868 - RNA, 22 nt, Artificial Sequence
  Synthetic
uauucaucuguugaugacaccc

SEQ ID NO: 266869 - RNA, 23 nt, Artificial Sequence
  Synthetic
uuauucaucuguugaugacaccc

SEQ ID NO: 266870 - RNA, 24 nt, Artificial Sequence
  Synthetic
auuauucaucuguugaugacaccc

SEQ ID NO: 266871 - RNA, 18 nt, Artificial Sequence
  Synthetic
aaguaucagugaccaccc

SEQ ID NO: 266872 - RNA, 19 nt, Artificial Sequence
  Synthetic
aaaguaucagugaccaccc

SEQ ID NO: 266873 - RNA, 20 nt, Artificial Sequence
  Synthetic
uaaaguaucagugaccaccc

SEQ ID NO: 266874 - RNA, 21 nt, Artificial Sequence
  Synthetic
guaaaguaucagugaccaccc

SEQ ID NO: 266875 - RNA, 22 nt, Artificial Sequence
  Synthetic
gguaaaguaucagugaccaccc

SEQ ID NO: 266876 - RNA, 23 nt, Artificial Sequence
  Synthetic
ugguaaaguaucagugaccaccc

SEQ ID NO: 266877 - RNA, 24 nt, Artificial Sequence
  Synthetic
uugguaaaguaucagugaccaccc

SEQ ID NO: 266878 - RNA, 18 nt, Artificial Sequence
  Synthetic
ugcugguagaacccaccc

SEQ ID NO: 266879 - RNA, 19 nt, Artificial Sequence
  Synthetic
augcugguagaacccaccc

SEQ ID NO: 266880 - RNA, 20 nt, Artificial Sequence
  Synthetic
aaugcugguagaacccaccc

SEQ ID NO: 266881 - RNA, 21 nt, Artificial Sequence
  Synthetic
aaaugcugguagaacccaccc

SEQ ID NO: 266882 - RNA, 22 nt, Artificial Sequence
  Synthetic
caaaugcugguagaacccaccc

SEQ ID NO: 266883 - RNA, 23 nt, Artificial Sequence
  Synthetic
ucaaaugcugguagaacccaccc

SEQ ID NO: 266884 - RNA, 24 nt, Artificial Sequence
  Synthetic
uucaaaugcugguagaacccaccc

SEQ ID NO: 266885 - RNA, 18 nt, Artificial Sequence
  Synthetic
gaaguucaguugccaccc

SEQ ID NO: 266886 - RNA, 19 nt, Artificial Sequence
  Synthetic
ugaaguucaguugccaccc

SEQ ID NO: 266887 - RNA, 20 nt, Artificial Sequence
  Synthetic
cugaaguucaguugccaccc

SEQ ID NO: 266888 - RNA, 21 nt, Artificial Sequence
  Synthetic
ccugaaguucaguugccaccc

SEQ ID NO: 266889 - RNA, 22 nt, Artificial Sequence
  Synthetic
uccugaaguucaguugccaccc

SEQ ID NO: 266890 - RNA, 23 nt, Artificial Sequence
  Synthetic
uuccugaaguucaguugccaccc

SEQ ID NO: 266891 - RNA, 24 nt, Artificial Sequence
  Synthetic
auuccugaaguucaguugccaccc

SEQ ID NO: 266892 - RNA, 18 nt, Artificial Sequence
  Synthetic
agagaaucucuuccaccc

SEQ ID NO: 266893 - RNA, 19 nt, Artificial Sequence
  Synthetic
aagagaaucucuuccaccc

SEQ ID NO: 266894 - RNA, 20 nt, Artificial Sequence
  Synthetic
caagagaaucucuuccaccc

SEQ ID NO: 266895 - RNA, 21 nt, Artificial Sequence
  Synthetic
gcaagagaaucucuuccaccc

SEQ ID NO: 266896 - RNA, 22 nt, Artificial Sequence
  Synthetic
ggcaagagaaucucuuccaccc

SEQ ID NO: 266897 - RNA, 23 nt, Artificial Sequence
  Synthetic
aggcaagagaaucucuuccaccc

SEQ ID NO: 266898 - RNA, 24 nt, Artificial Sequence
  Synthetic
aaggcaagagaaucucuuccaccc

SEQ ID NO: 266899 - RNA, 18 nt, Artificial Sequence
  Synthetic
gcaaucucugaagcaccc

SEQ ID NO: 266900 - RNA, 19 nt, Artificial Sequence
  Synthetic
agcaaucucugaagcaccc

SEQ ID NO: 266901 - RNA, 20 nt, Artificial Sequence
  Synthetic
uagcaaucucugaagcaccc

SEQ ID NO: 266902 - RNA, 21 nt, Artificial Sequence
  Synthetic
guagcaaucucugaagcaccc

SEQ ID NO: 266903 - RNA, 22 nt, Artificial Sequence
  Synthetic
cguagcaaucucugaagcaccc

SEQ ID NO: 266904 - RNA, 23 nt, Artificial Sequence
  Synthetic
gcguagcaaucucugaagcaccc

SEQ ID NO: 266905 - RNA, 24 nt, Artificial Sequence
  Synthetic
ugcguagcaaucucugaagcaccc

SEQ ID NO: 266906 - RNA, 18 nt, Artificial Sequence
  Synthetic
cuuggacuugaggcaccc

SEQ ID NO: 266907 - RNA, 19 nt, Artificial Sequence
  Synthetic
acuuggacuugaggcaccc

SEQ ID NO: 266908 - RNA, 20 nt, Artificial Sequence
  Synthetic
aacuuggacuugaggcaccc

SEQ ID NO: 266909 - RNA, 21 nt, Artificial Sequence
  Synthetic
gaacuuggacuugaggcaccc

SEQ ID NO: 266910 - RNA, 22 nt, Artificial Sequence
  Synthetic
ggaacuuggacuugaggcaccc

SEQ ID NO: 266911 - RNA, 23 nt, Artificial Sequence
  Synthetic
gggaacuuggacuugaggcaccc

SEQ ID NO: 266912 - RNA, 24 nt, Artificial Sequence
  Synthetic
ugggaacuuggacuugaggcaccc

SEQ ID NO: 266913 - RNA, 18 nt, Artificial Sequence
  Synthetic
caguugguuuaggcaccc

SEQ ID NO: 266914 - RNA, 19 nt, Artificial Sequence
  Synthetic
ccaguugguuuaggcaccc

SEQ ID NO: 266915 - RNA, 20 nt, Artificial Sequence
  Synthetic
uccaguugguuuaggcaccc

SEQ ID NO: 266916 - RNA, 21 nt, Artificial Sequence
  Synthetic
uuccaguugguuuaggcaccc

SEQ ID NO: 266917 - RNA, 22 nt, Artificial Sequence
  Synthetic
cuuccaguugguuuaggcaccc

SEQ ID NO: 266918 - RNA, 23 nt, Artificial Sequence
  Synthetic
gcuuccaguugguuuaggcaccc

SEQ ID NO: 266919 - RNA, 24 nt, Artificial Sequence
  Synthetic
ggcuuccaguugguuuaggcaccc

SEQ ID NO: 266920 - RNA, 18 nt, Artificial Sequence
  Synthetic
uuuuuauuuggggcaccc

SEQ ID NO: 266921 - RNA, 19 nt, Artificial Sequence
  Synthetic
cuuuuuauuuggggcaccc

SEQ ID NO: 266922 - RNA, 20 nt, Artificial Sequence
  Synthetic
ccuuuuuauuuggggcaccc

SEQ ID NO: 266923 - RNA, 21 nt, Artificial Sequence
  Synthetic
cccuuuuuauuuggggcaccc

SEQ ID NO: 266924 - RNA, 22 nt, Artificial Sequence
  Synthetic
gcccuuuuuauuuggggcaccc

SEQ ID NO: 266925 - RNA, 23 nt, Artificial Sequence
  Synthetic
agcccuuuuuauuuggggcaccc

SEQ ID NO: 266926 - RNA, 24 nt, Artificial Sequence
  Synthetic
gagcccuuuuuauuuggggcaccc

SEQ ID NO: 266927 - RNA, 18 nt, Artificial Sequence
  Synthetic
aauuuccucauugcaccc

SEQ ID NO: 266928 - RNA, 19 nt, Artificial Sequence
  Synthetic
gaauuuccucauugcaccc

SEQ ID NO: 266929 - RNA, 20 nt, Artificial Sequence
  Synthetic
ugaauuuccucauugcaccc

SEQ ID NO: 266930 - RNA, 21 nt, Artificial Sequence
  Synthetic
augaauuuccucauugcaccc

SEQ ID NO: 266931 - RNA, 22 nt, Artificial Sequence
  Synthetic
aaugaauuuccucauugcaccc

SEQ ID NO: 266932 - RNA, 23 nt, Artificial Sequence
  Synthetic
aaaugaauuuccucauugcaccc

SEQ ID NO: 266933 - RNA, 24 nt, Artificial Sequence
  Synthetic
gaaaugaauuuccucauugcaccc

SEQ ID NO: 266934 - RNA, 18 nt, Artificial Sequence
  Synthetic
acccuagcuguugcaccc

SEQ ID NO: 266935 - RNA, 19 nt, Artificial Sequence
  Synthetic
uacccuagcuguugcaccc

SEQ ID NO: 266936 - RNA, 20 nt, Artificial Sequence
  Synthetic
cuacccuagcuguugcaccc

SEQ ID NO: 266937 - RNA, 21 nt, Artificial Sequence
  Synthetic
gcuacccuagcuguugcaccc

SEQ ID NO: 266938 - RNA, 22 nt, Artificial Sequence
  Synthetic
ggcuacccuagcuguugcaccc

SEQ ID NO: 266939 - RNA, 23 nt, Artificial Sequence
  Synthetic
aggcuacccuagcuguugcaccc

SEQ ID NO: 266940 - RNA, 24 nt, Artificial Sequence
  Synthetic
gaggcuacccuagcuguugcaccc

SEQ ID NO: 266941 - RNA, 18 nt, Artificial Sequence
  Synthetic
agaacucuguuugcaccc

SEQ ID NO: 266942 - RNA, 19 nt, Artificial Sequence
  Synthetic
uagaacucuguuugcaccc

SEQ ID NO: 266943 - RNA, 20 nt, Artificial Sequence
  Synthetic
uuagaacucuguuugcaccc

SEQ ID NO: 266944 - RNA, 21 nt, Artificial Sequence
  Synthetic
cuuagaacucuguuugcaccc

SEQ ID NO: 266945 - RNA, 22 nt, Artificial Sequence
  Synthetic
gcuuagaacucuguuugcaccc

SEQ ID NO: 266946 - RNA, 23 nt, Artificial Sequence
  Synthetic
ggcuuagaacucuguuugcaccc

SEQ ID NO: 266947 - RNA, 24 nt, Artificial Sequence
  Synthetic
aggcuuagaacucuguuugcaccc

SEQ ID NO: 266948 - RNA, 18 nt, Artificial Sequence
  Synthetic
cugugacacaaaucaccc

SEQ ID NO: 266949 - RNA, 19 nt, Artificial Sequence
  Synthetic
gcugugacacaaaucaccc

SEQ ID NO: 266950 - RNA, 20 nt, Artificial Sequence
  Synthetic
ugcugugacacaaaucaccc

SEQ ID NO: 266951 - RNA, 21 nt, Artificial Sequence
  Synthetic
augcugugacacaaaucaccc

SEQ ID NO: 266952 - RNA, 22 nt, Artificial Sequence
  Synthetic
aaugcugugacacaaaucaccc

SEQ ID NO: 266953 - RNA, 23 nt, Artificial Sequence
  Synthetic
uaaugcugugacacaaaucaccc

SEQ ID NO: 266954 - RNA, 24 nt, Artificial Sequence
  Synthetic
auaaugcugugacacaaaucaccc

SEQ ID NO: 266955 - RNA, 18 nt, Artificial Sequence
  Synthetic
uguguggugauaucaccc

SEQ ID NO: 266956 - RNA, 19 nt, Artificial Sequence
  Synthetic
auguguggugauaucaccc

SEQ ID NO: 266957 - RNA, 20 nt, Artificial Sequence
  Synthetic
aauguguggugauaucaccc

SEQ ID NO: 266958 - RNA, 21 nt, Artificial Sequence
  Synthetic
gaauguguggugauaucaccc

SEQ ID NO: 266959 - RNA, 22 nt, Artificial Sequence
  Synthetic
ggaauguguggugauaucaccc

SEQ ID NO: 266960 - RNA, 23 nt, Artificial Sequence
  Synthetic
uggaauguguggugauaucaccc

SEQ ID NO: 266961 - RNA, 24 nt, Artificial Sequence
  Synthetic
uuggaauguguggugauaucaccc

SEQ ID NO: 266962 - RNA, 18 nt, Artificial Sequence
  Synthetic
uguagucauuuaucaccc

SEQ ID NO: 266963 - RNA, 19 nt, Artificial Sequence
  Synthetic
cuguagucauuuaucaccc

SEQ ID NO: 266964 - RNA, 20 nt, Artificial Sequence
  Synthetic
acuguagucauuuaucaccc

SEQ ID NO: 266965 - RNA, 21 nt, Artificial Sequence
  Synthetic
aacuguagucauuuaucaccc

SEQ ID NO: 266966 - RNA, 22 nt, Artificial Sequence
  Synthetic
aaacuguagucauuuaucaccc

SEQ ID NO: 266967 - RNA, 23 nt, Artificial Sequence
  Synthetic
aaaacuguagucauuuaucaccc

SEQ ID NO: 266968 - RNA, 24 nt, Artificial Sequence
  Synthetic
aaaaacuguagucauuuaucaccc

SEQ ID NO: 266969 - RNA, 18 nt, Artificial Sequence
  Synthetic
ugggaugucgccucaccc

SEQ ID NO: 266970 - RNA, 19 nt, Artificial Sequence
  Synthetic
gugggaugucgccucaccc

SEQ ID NO: 266971 - RNA, 20 nt, Artificial Sequence
  Synthetic
ggugggaugucgccucaccc

SEQ ID NO: 266972 - RNA, 21 nt, Artificial Sequence
  Synthetic
cggugggaugucgccucaccc

SEQ ID NO: 266973 - RNA, 22 nt, Artificial Sequence
  Synthetic
acggugggaugucgccucaccc

SEQ ID NO: 266974 - RNA, 23 nt, Artificial Sequence
  Synthetic
cacggugggaugucgccucaccc

SEQ ID NO: 266975 - RNA, 24 nt, Artificial Sequence
  Synthetic
gcacggugggaugucgccucaccc

SEQ ID NO: 266976 - RNA, 18 nt, Artificial Sequence
  Synthetic
uugugagcuuucucaccc

SEQ ID NO: 266977 - RNA, 19 nt, Artificial Sequence
  Synthetic
uuugugagcuuucucaccc

SEQ ID NO: 266978 - RNA, 20 nt, Artificial Sequence
  Synthetic
uuuugugagcuuucucaccc

SEQ ID NO: 266979 - RNA, 21 nt, Artificial Sequence
  Synthetic
auuuugugagcuuucucaccc

SEQ ID NO: 266980 - RNA, 22 nt, Artificial Sequence
  Synthetic
gauuuugugagcuuucucaccc

SEQ ID NO: 266981 - RNA, 23 nt, Artificial Sequence
  Synthetic
agauuuugugagcuuucucaccc

SEQ ID NO: 266982 - RNA, 24 nt, Artificial Sequence
  Synthetic
cagauuuugugagcuuucucaccc

SEQ ID NO: 266983 - RNA, 18 nt, Artificial Sequence
  Synthetic
caaugucccuggucaccc

SEQ ID NO: 266984 - RNA, 19 nt, Artificial Sequence
  Synthetic
acaaugucccuggucaccc

SEQ ID NO: 266985 - RNA, 20 nt, Artificial Sequence
  Synthetic
gacaaugucccuggucaccc

SEQ ID NO: 266986 - RNA, 21 nt, Artificial Sequence
  Synthetic
ugacaaugucccuggucaccc

SEQ ID NO: 266987 - RNA, 22 nt, Artificial Sequence
  Synthetic
uugacaaugucccuggucaccc

SEQ ID NO: 266988 - RNA, 23 nt, Artificial Sequence
  Synthetic
uuugacaaugucccuggucaccc

SEQ ID NO: 266989 - RNA, 24 nt, Artificial Sequence
  Synthetic
cuuugacaaugucccuggucaccc

SEQ ID NO: 266990 - RNA, 18 nt, Artificial Sequence
  Synthetic
aauuuaagcuggucaccc

SEQ ID NO: 266991 - RNA, 19 nt, Artificial Sequence
  Synthetic
gaauuuaagcuggucaccc

SEQ ID NO: 266992 - RNA, 20 nt, Artificial Sequence
  Synthetic
ugaauuuaagcuggucaccc

SEQ ID NO: 266993 - RNA, 21 nt, Artificial Sequence
  Synthetic
cugaauuuaagcuggucaccc

SEQ ID NO: 266994 - RNA, 22 nt, Artificial Sequence
  Synthetic
gcugaauuuaagcuggucaccc

SEQ ID NO: 266995 - RNA, 23 nt, Artificial Sequence
  Synthetic
agcugaauuuaagcuggucaccc

SEQ ID NO: 266996 - RNA, 24 nt, Artificial Sequence
  Synthetic
aagcugaauuuaagcuggucaccc

SEQ ID NO: 266997 - RNA, 18 nt, Artificial Sequence
  Synthetic
uuacccauauuuucaccc

SEQ ID NO: 266998 - RNA, 19 nt, Artificial Sequence
  Synthetic
cuuacccauauuuucaccc

SEQ ID NO: 266999 - RNA, 20 nt, Artificial Sequence
  Synthetic
acuuacccauauuuucaccc

SEQ ID NO: 267000 - RNA, 21 nt, Artificial Sequence
  Synthetic
aacuuacccauauuuucaccc

SEQ ID NO: 267001 - RNA, 22 nt, Artificial Sequence
  Synthetic
aaacuuacccauauuuucaccc

SEQ ID NO: 267002 - RNA, 23 nt, Artificial Sequence
  Synthetic
gaaacuuacccauauuuucaccc

SEQ ID NO: 267003 - RNA, 24 nt, Artificial Sequence
  Synthetic
ugaaacuuacccauauuuucaccc

SEQ ID NO: 267004 - RNA, 18 nt, Artificial Sequence
  Synthetic
cuaauuucuuuuucaccc

SEQ ID NO: 267005 - RNA, 19 nt, Artificial Sequence
  Synthetic
ucuaauuucuuuuucaccc

SEQ ID NO: 267006 - RNA, 20 nt, Artificial Sequence
  Synthetic
cucuaauuucuuuuucaccc

SEQ ID NO: 267007 - RNA, 21 nt, Artificial Sequence
  Synthetic
gcucuaauuucuuuuucaccc

SEQ ID NO: 267008 - RNA, 22 nt, Artificial Sequence
  Synthetic
ggcucuaauuucuuuuucaccc

SEQ ID NO: 267009 - RNA, 23 nt, Artificial Sequence
  Synthetic
uggcucuaauuucuuuuucaccc

SEQ ID NO: 267010 - RNA, 24 nt, Artificial Sequence
  Synthetic
cuggcucuaauuucuuuuucaccc

SEQ ID NO: 267011 - RNA, 18 nt, Artificial Sequence
  Synthetic
aggagaccaaaaagaccc

SEQ ID NO: 267012 - RNA, 19 nt, Artificial Sequence
  Synthetic
gaggagaccaaaaagaccc

SEQ ID NO: 267013 - RNA, 20 nt, Artificial Sequence
  Synthetic
agaggagaccaaaaagaccc

SEQ ID NO: 267014 - RNA, 21 nt, Artificial Sequence
  Synthetic
uagaggagaccaaaaagaccc

SEQ ID NO: 267015 - RNA, 22 nt, Artificial Sequence
  Synthetic
cuagaggagaccaaaaagaccc

SEQ ID NO: 267016 - RNA, 23 nt, Artificial Sequence
  Synthetic
acuagaggagaccaaaaagaccc

SEQ ID NO: 267017 - RNA, 24 nt, Artificial Sequence
  Synthetic
gacuagaggagaccaaaaagaccc

SEQ ID NO: 267018 - RNA, 18 nt, Artificial Sequence
  Synthetic
gguucacucagaagaccc

SEQ ID NO: 267019 - RNA, 19 nt, Artificial Sequence
  Synthetic
ggguucacucagaagaccc

SEQ ID NO: 267020 - RNA, 20 nt, Artificial Sequence
  Synthetic
uggguucacucagaagaccc

SEQ ID NO: 267021 - RNA, 21 nt, Artificial Sequence
  Synthetic
uuggguucacucagaagaccc

SEQ ID NO: 267022 - RNA, 22 nt, Artificial Sequence
  Synthetic
cuuggguucacucagaagaccc

SEQ ID NO: 267023 - RNA, 23 nt, Artificial Sequence
  Synthetic
ccuuggguucacucagaagaccc

SEQ ID NO: 267024 - RNA, 24 nt, Artificial Sequence
  Synthetic
cccuuggguucacucagaagaccc

SEQ ID NO: 267025 - RNA, 18 nt, Artificial Sequence
  Synthetic
acgaagaucauaagaccc

SEQ ID NO: 267026 - RNA, 19 nt, Artificial Sequence
  Synthetic
gacgaagaucauaagaccc

SEQ ID NO: 267027 - RNA, 20 nt, Artificial Sequence
  Synthetic
agacgaagaucauaagaccc

SEQ ID NO: 267028 - RNA, 21 nt, Artificial Sequence
  Synthetic
uagacgaagaucauaagaccc

SEQ ID NO: 267029 - RNA, 22 nt, Artificial Sequence
  Synthetic
auagacgaagaucauaagaccc

SEQ ID NO: 267030 - RNA, 23 nt, Artificial Sequence
  Synthetic
uauagacgaagaucauaagaccc

SEQ ID NO: 267031 - RNA, 24 nt, Artificial Sequence
  Synthetic
uuauagacgaagaucauaagaccc

SEQ ID NO: 267032 - RNA, 18 nt, Artificial Sequence
  Synthetic
gaugcuuauuagagaccc

SEQ ID NO: 267033 - RNA, 19 nt, Artificial Sequence
  Synthetic
ggaugcuuauuagagaccc

SEQ ID NO: 267034 - RNA, 20 nt, Artificial Sequence
  Synthetic
gggaugcuuauuagagaccc

SEQ ID NO: 267035 - RNA, 21 nt, Artificial Sequence
  Synthetic
ggggaugcuuauuagagaccc

SEQ ID NO: 267036 - RNA, 22 nt, Artificial Sequence
  Synthetic
uggggaugcuuauuagagaccc

SEQ ID NO: 267037 - RNA, 23 nt, Artificial Sequence
  Synthetic
uuggggaugcuuauuagagaccc

SEQ ID NO: 267038 - RNA, 24 nt, Artificial Sequence
  Synthetic
uuuggggaugcuuauuagagaccc

SEQ ID NO: 267039 - RNA, 18 nt, Artificial Sequence
  Synthetic
cccucaaaaucuagaccc

SEQ ID NO: 267040 - RNA, 19 nt, Artificial Sequence
  Synthetic
acccucaaaaucuagaccc

SEQ ID NO: 267041 - RNA, 20 nt, Artificial Sequence
  Synthetic
gacccucaaaaucuagaccc

SEQ ID NO: 267042 - RNA, 21 nt, Artificial Sequence
  Synthetic
agacccucaaaaucuagaccc

SEQ ID NO: 267043 - RNA, 22 nt, Artificial Sequence
  Synthetic
uagacccucaaaaucuagaccc

SEQ ID NO: 267044 - RNA, 23 nt, Artificial Sequence
  Synthetic
auagacccucaaaaucuagaccc

SEQ ID NO: 267045 - RNA, 24 nt, Artificial Sequence
  Synthetic
gauagacccucaaaaucuagaccc

SEQ ID NO: 267046 - RNA, 18 nt, Artificial Sequence
  Synthetic
guguugugggagggaccc

SEQ ID NO: 267047 - RNA, 19 nt, Artificial Sequence
  Synthetic
uguguugugggagggaccc

SEQ ID NO: 267048 - RNA, 20 nt, Artificial Sequence
  Synthetic
auguguugugggagggaccc

SEQ ID NO: 267049 - RNA, 21 nt, Artificial Sequence
  Synthetic
cauguguugugggagggaccc

SEQ ID NO: 267050 - RNA, 22 nt, Artificial Sequence
  Synthetic
ccauguguugugggagggaccc

SEQ ID NO: 267051 - RNA, 23 nt, Artificial Sequence
  Synthetic
cccauguguugugggagggaccc

SEQ ID NO: 267052 - RNA, 24 nt, Artificial Sequence
  Synthetic
ucccauguguugugggagggaccc

SEQ ID NO: 267053 - RNA, 18 nt, Artificial Sequence
  Synthetic
gcauuucaccauggaccc

SEQ ID NO: 267054 - RNA, 19 nt, Artificial Sequence
  Synthetic
ggcauuucaccauggaccc

SEQ ID NO: 267055 - RNA, 20 nt, Artificial Sequence
  Synthetic
uggcauuucaccauggaccc

SEQ ID NO: 267056 - RNA, 21 nt, Artificial Sequence
  Synthetic
uuggcauuucaccauggaccc

SEQ ID NO: 267057 - RNA, 22 nt, Artificial Sequence
  Synthetic
uuuggcauuucaccauggaccc

SEQ ID NO: 267058 - RNA, 23 nt, Artificial Sequence
  Synthetic
uuuuggcauuucaccauggaccc

SEQ ID NO: 267059 - RNA, 24 nt, Artificial Sequence
  Synthetic
uuuuuggcauuucaccauggaccc

SEQ ID NO: 267060 - RNA, 18 nt, Artificial Sequence
  Synthetic
gaaugauggaaaugaccc

SEQ ID NO: 267061 - RNA, 19 nt, Artificial Sequence
  Synthetic
agaaugauggaaaugaccc

SEQ ID NO: 267062 - RNA, 20 nt, Artificial Sequence
  Synthetic
cagaaugauggaaaugaccc

SEQ ID NO: 267063 - RNA, 21 nt, Artificial Sequence
  Synthetic
acagaaugauggaaaugaccc

SEQ ID NO: 267064 - RNA, 22 nt, Artificial Sequence
  Synthetic
uacagaaugauggaaaugaccc

SEQ ID NO: 267065 - RNA, 23 nt, Artificial Sequence
  Synthetic
uuacagaaugauggaaaugaccc

SEQ ID NO: 267066 - RNA, 24 nt, Artificial Sequence
  Synthetic
auuacagaaugauggaaaugaccc

SEQ ID NO: 267067 - RNA, 18 nt, Artificial Sequence
  Synthetic
cucuggaacuucugaccc

SEQ ID NO: 267068 - RNA, 19 nt, Artificial Sequence
  Synthetic
ccucuggaacuucugaccc

SEQ ID NO: 267069 - RNA, 20 nt, Artificial Sequence
  Synthetic
gccucuggaacuucugaccc

SEQ ID NO: 267070 - RNA, 21 nt, Artificial Sequence
  Synthetic
ggccucuggaacuucugaccc

SEQ ID NO: 267071 - RNA, 22 nt, Artificial Sequence
  Synthetic
aggccucuggaacuucugaccc

SEQ ID NO: 267072 - RNA, 23 nt, Artificial Sequence
  Synthetic
caggccucuggaacuucugaccc

SEQ ID NO: 267073 - RNA, 24 nt, Artificial Sequence
  Synthetic
ccaggccucuggaacuucugaccc

SEQ ID NO: 267074 - RNA, 18 nt, Artificial Sequence
  Synthetic
aacagguguguuugaccc

SEQ ID NO: 267075 - RNA, 19 nt, Artificial Sequence
  Synthetic
aaacagguguguuugaccc

SEQ ID NO: 267076 - RNA, 20 nt, Artificial Sequence
  Synthetic
caaacagguguguuugaccc

SEQ ID NO: 267077 - RNA, 21 nt, Artificial Sequence
  Synthetic
acaaacagguguguuugaccc

SEQ ID NO: 267078 - RNA, 22 nt, Artificial Sequence
  Synthetic
cacaaacagguguguuugaccc

SEQ ID NO: 267079 - RNA, 23 nt, Artificial Sequence
  Synthetic
ccacaaacagguguguuugaccc

SEQ ID NO: 267080 - RNA, 24 nt, Artificial Sequence
  Synthetic
gccacaaacagguguguuugaccc

SEQ ID NO: 267081 - RNA, 18 nt, Artificial Sequence
  Synthetic
auaaugauuauaauaccc

SEQ ID NO: 267082 - RNA, 19 nt, Artificial Sequence
  Synthetic
aauaaugauuauaauaccc

SEQ ID NO: 267083 - RNA, 20 nt, Artificial Sequence
  Synthetic
uaauaaugauuauaauaccc

SEQ ID NO: 267084 - RNA, 21 nt, Artificial Sequence
  Synthetic
uuaauaaugauuauaauaccc

SEQ ID NO: 267085 - RNA, 22 nt, Artificial Sequence
  Synthetic
auuaauaaugauuauaauaccc

SEQ ID NO: 267086 - RNA, 23 nt, Artificial Sequence
  Synthetic
aauuaauaaugauuauaauaccc

SEQ ID NO: 267087 - RNA, 24 nt, Artificial Sequence
  Synthetic
caauuaauaaugauuauaauaccc

SEQ ID NO: 267088 - RNA, 18 nt, Artificial Sequence
  Synthetic
cugugaaaauagauaccc

SEQ ID NO: 267089 - RNA, 19 nt, Artificial Sequence
  Synthetic
ucugugaaaauagauaccc

SEQ ID NO: 267090 - RNA, 20 nt, Artificial Sequence
  Synthetic
uucugugaaaauagauaccc

SEQ ID NO: 267091 - RNA, 21 nt, Artificial Sequence
  Synthetic
auucugugaaaauagauaccc

SEQ ID NO: 267092 - RNA, 22 nt, Artificial Sequence
  Synthetic
uauucugugaaaauagauaccc

SEQ ID NO: 267093 - RNA, 23 nt, Artificial Sequence
  Synthetic
cuauucugugaaaauagauaccc

SEQ ID NO: 267094 - RNA, 24 nt, Artificial Sequence
  Synthetic
acuauucugugaaaauagauaccc

SEQ ID NO: 267095 - RNA, 18 nt, Artificial Sequence
  Synthetic
uaaaaaaaguagauaccc

SEQ ID NO: 267096 - RNA, 19 nt, Artificial Sequence
  Synthetic
auaaaaaaaguagauaccc

SEQ ID NO: 267097 - RNA, 20 nt, Artificial Sequence
  Synthetic
aauaaaaaaaguagauaccc

SEQ ID NO: 267098 - RNA, 21 nt, Artificial Sequence
  Synthetic
aaauaaaaaaaguagauaccc

SEQ ID NO: 267099 - RNA, 22 nt, Artificial Sequence
  Synthetic
caaauaaaaaaaguagauaccc

SEQ ID NO: 267100 - RNA, 23 nt, Artificial Sequence
  Synthetic
ucaaauaaaaaaaguagauaccc

SEQ ID NO: 267101 - RNA, 24 nt, Artificial Sequence
  Synthetic
uucaaauaaaaaaaguagauaccc

SEQ ID NO: 267102 - RNA, 18 nt, Artificial Sequence
  Synthetic
acagcucacaggauaccc

SEQ ID NO: 267103 - RNA, 19 nt, Artificial Sequence
  Synthetic
cacagcucacaggauaccc

SEQ ID NO: 267104 - RNA, 20 nt, Artificial Sequence
  Synthetic
ucacagcucacaggauaccc

SEQ ID NO: 267105 - RNA, 21 nt, Artificial Sequence
  Synthetic
aucacagcucacaggauaccc

SEQ ID NO: 267106 - RNA, 22 nt, Artificial Sequence
  Synthetic
uaucacagcucacaggauaccc

SEQ ID NO: 267107 - RNA, 23 nt, Artificial Sequence
  Synthetic
cuaucacagcucacaggauaccc

SEQ ID NO: 267108 - RNA, 24 nt, Artificial Sequence
  Synthetic
acuaucacagcucacaggauaccc

SEQ ID NO: 267109 - RNA, 18 nt, Artificial Sequence
  Synthetic
uggcaugcuaugauaccc

SEQ ID NO: 267110 - RNA, 19 nt, Artificial Sequence
  Synthetic
auggcaugcuaugauaccc

SEQ ID NO: 267111 - RNA, 20 nt, Artificial Sequence
  Synthetic
uauggcaugcuaugauaccc

SEQ ID NO: 267112 - RNA, 21 nt, Artificial Sequence
  Synthetic
cuauggcaugcuaugauaccc

SEQ ID NO: 267113 - RNA, 22 nt, Artificial Sequence
  Synthetic
gcuauggcaugcuaugauaccc

SEQ ID NO: 267114 - RNA, 23 nt, Artificial Sequence
  Synthetic
ugcuauggcaugcuaugauaccc

SEQ ID NO: 267115 - RNA, 24 nt, Artificial Sequence
  Synthetic
augcuauggcaugcuaugauaccc

SEQ ID NO: 267116 - RNA, 18 nt, Artificial Sequence
  Synthetic
auagacauuaugauaccc

SEQ ID NO: 267117 - RNA, 19 nt, Artificial Sequence
  Synthetic
aauagacauuaugauaccc

SEQ ID NO: 267118 - RNA, 20 nt, Artificial Sequence
  Synthetic
uaauagacauuaugauaccc

SEQ ID NO: 267119 - RNA, 21 nt, Artificial Sequence
  Synthetic
cuaauagacauuaugauaccc

SEQ ID NO: 267120 - RNA, 22 nt, Artificial Sequence
  Synthetic
gcuaauagacauuaugauaccc

SEQ ID NO: 267121 - RNA, 23 nt, Artificial Sequence
  Synthetic
ugcuaauagacauuaugauaccc

SEQ ID NO: 267122 - RNA, 24 nt, Artificial Sequence
  Synthetic
uugcuaauagacauuaugauaccc

SEQ ID NO: 267123 - RNA, 18 nt, Artificial Sequence
  Synthetic
ugaaacucaaauauaccc

SEQ ID NO: 267124 - RNA, 19 nt, Artificial Sequence
  Synthetic
uugaaacucaaauauaccc

SEQ ID NO: 267125 - RNA, 20 nt, Artificial Sequence
  Synthetic
auugaaacucaaauauaccc

SEQ ID NO: 267126 - RNA, 21 nt, Artificial Sequence
  Synthetic
cauugaaacucaaauauaccc

SEQ ID NO: 267127 - RNA, 22 nt, Artificial Sequence
  Synthetic
acauugaaacucaaauauaccc

SEQ ID NO: 267128 - RNA, 23 nt, Artificial Sequence
  Synthetic
uacauugaaacucaaauauaccc

SEQ ID NO: 267129 - RNA, 24 nt, Artificial Sequence
  Synthetic
auacauugaaacucaaauauaccc

SEQ ID NO: 267130 - RNA, 18 nt, Artificial Sequence
  Synthetic
gaacaugugcauauaccc

SEQ ID NO: 267131 - RNA, 19 nt, Artificial Sequence
  Synthetic
agaacaugugcauauaccc

SEQ ID NO: 267132 - RNA, 20 nt, Artificial Sequence
  Synthetic
uagaacaugugcauauaccc

SEQ ID NO: 267133 - RNA, 21 nt, Artificial Sequence
  Synthetic
cuagaacaugugcauauaccc

SEQ ID NO: 267134 - RNA, 22 nt, Artificial Sequence
  Synthetic
gcuagaacaugugcauauaccc

SEQ ID NO: 267135 - RNA, 23 nt, Artificial Sequence
  Synthetic
ggcuagaacaugugcauauaccc

SEQ ID NO: 267136 - RNA, 24 nt, Artificial Sequence
  Synthetic
gggcuagaacaugugcauauaccc

SEQ ID NO: 267137 - RNA, 18 nt, Artificial Sequence
  Synthetic
uugaagaugguuauaccc

SEQ ID NO: 267138 - RNA, 19 nt, Artificial Sequence
  Synthetic
uuugaagaugguuauaccc

SEQ ID NO: 267139 - RNA, 20 nt, Artificial Sequence
  Synthetic
auuugaagaugguuauaccc

SEQ ID NO: 267140 - RNA, 21 nt, Artificial Sequence
  Synthetic
cauuugaagaugguuauaccc

SEQ ID NO: 267141 - RNA, 22 nt, Artificial Sequence
  Synthetic
ucauuugaagaugguuauaccc

SEQ ID NO: 267142 - RNA, 23 nt, Artificial Sequence
  Synthetic
aucauuugaagaugguuauaccc

SEQ ID NO: 267143 - RNA, 24 nt, Artificial Sequence
  Synthetic
aaucauuugaagaugguuauaccc

SEQ ID NO: 267144 - RNA, 18 nt, Artificial Sequence
  Synthetic
cuuaugauacaacuaccc

SEQ ID NO: 267145 - RNA, 19 nt, Artificial Sequence
  Synthetic
acuuaugauacaacuaccc

SEQ ID NO: 267146 - RNA, 20 nt, Artificial Sequence
  Synthetic
aacuuaugauacaacuaccc

SEQ ID NO: 267147 - RNA, 21 nt, Artificial Sequence
  Synthetic
aaacuuaugauacaacuaccc

SEQ ID NO: 267148 - RNA, 22 nt, Artificial Sequence
  Synthetic
aaaacuuaugauacaacuaccc

SEQ ID NO: 267149 - RNA, 23 nt, Artificial Sequence
  Synthetic
aaaaacuuaugauacaacuaccc

SEQ ID NO: 267150 - RNA, 24 nt, Artificial Sequence
  Synthetic
aaaaaacuuaugauacaacuaccc

SEQ ID NO: 267151 - RNA, 18 nt, Artificial Sequence
  Synthetic
aacauguacugacuaccc

SEQ ID NO: 267152 - RNA, 19 nt, Artificial Sequence
  Synthetic
uaacauguacugacuaccc

SEQ ID NO: 267153 - RNA, 20 nt, Artificial Sequence
  Synthetic
uuaacauguacugacuaccc

SEQ ID NO: 267154 - RNA, 21 nt, Artificial Sequence
  Synthetic
auuaacauguacugacuaccc

SEQ ID NO: 267155 - RNA, 22 nt, Artificial Sequence
  Synthetic
aauuaacauguacugacuaccc

SEQ ID NO: 267156 - RNA, 23 nt, Artificial Sequence
  Synthetic
caauuaacauguacugacuaccc

SEQ ID NO: 267157 - RNA, 24 nt, Artificial Sequence
  Synthetic
ucaauuaacauguacugacuaccc

SEQ ID NO: 267158 - RNA, 18 nt, Artificial Sequence
  Synthetic
uaauaguagccccuaccc

SEQ ID NO: 267159 - RNA, 19 nt, Artificial Sequence
  Synthetic
auaauaguagccccuaccc

SEQ ID NO: 267160 - RNA, 20 nt, Artificial Sequence
  Synthetic
gauaauaguagccccuaccc

SEQ ID NO: 267161 - RNA, 21 nt, Artificial Sequence
  Synthetic
agauaauaguagccccuaccc

SEQ ID NO: 267162 - RNA, 22 nt, Artificial Sequence
  Synthetic
aagauaauaguagccccuaccc

SEQ ID NO: 267163 - RNA, 23 nt, Artificial Sequence
  Synthetic
gaagauaauaguagccccuaccc

SEQ ID NO: 267164 - RNA, 24 nt, Artificial Sequence
  Synthetic
ugaagauaauaguagccccuaccc

SEQ ID NO: 267165 - RNA, 20 nt, Artificial Sequence
  Synthetic
gauauugauucuuccuaccc

SEQ ID NO: 267166 - RNA, 21 nt, Artificial Sequence
  Synthetic
cgauauugauucuuccuaccc

SEQ ID NO: 267167 - RNA, 22 nt, Artificial Sequence
  Synthetic
acgauauugauucuuccuaccc

SEQ ID NO: 267168 - RNA, 23 nt, Artificial Sequence
  Synthetic
cacgauauugauucuuccuaccc

SEQ ID NO: 267169 - RNA, 24 nt, Artificial Sequence
  Synthetic
acacgauauugauucuuccuaccc

SEQ ID NO: 267170 - RNA, 24 nt, Artificial Sequence
  Synthetic
ucacgauauugauucuuccuaccc

SEQ ID NO: 267171 - RNA, 18 nt, Artificial Sequence
  Synthetic
cuguagucccagcuaccc

SEQ ID NO: 267172 - RNA, 19 nt, Artificial Sequence
  Synthetic
ccuguagucccagcuaccc

SEQ ID NO: 267173 - RNA, 20 nt, Artificial Sequence
  Synthetic
gccuguagucccagcuaccc

SEQ ID NO: 267174 - RNA, 21 nt, Artificial Sequence
  Synthetic
ugccuguagucccagcuaccc

SEQ ID NO: 267175 - RNA, 22 nt, Artificial Sequence
  Synthetic
gugccuguagucccagcuaccc

SEQ ID NO: 267176 - RNA, 23 nt, Artificial Sequence
  Synthetic
cgugccuguagucccagcuaccc

SEQ ID NO: 267177 - RNA, 24 nt, Artificial Sequence
  Synthetic
acgugccuguagucccagcuaccc

SEQ ID NO: 267178 - RNA, 18 nt, Artificial Sequence
  Synthetic
uaaccuguuguucuaccc

SEQ ID NO: 267179 - RNA, 19 nt, Artificial Sequence
  Synthetic
cuaaccuguuguucuaccc

SEQ ID NO: 267180 - RNA, 20 nt, Artificial Sequence
  Synthetic
ucuaaccuguuguucuaccc

SEQ ID NO: 267181 - RNA, 21 nt, Artificial Sequence
  Synthetic
cucuaaccuguuguucuaccc

SEQ ID NO: 267182 - RNA, 22 nt, Artificial Sequence
  Synthetic
ucucuaaccuguuguucuaccc

SEQ ID NO: 267183 - RNA, 23 nt, Artificial Sequence
  Synthetic
aucucuaaccuguuguucuaccc

SEQ ID NO: 267184 - RNA, 24 nt, Artificial Sequence
  Synthetic
aaucucuaaccuguuguucuaccc

SEQ ID NO: 267185 - RNA, 18 nt, Artificial Sequence
  Synthetic
gugguucucuaaguaccc

SEQ ID NO: 267186 - RNA, 19 nt, Artificial Sequence
  Synthetic
agugguucucuaaguaccc

SEQ ID NO: 267187 - RNA, 20 nt, Artificial Sequence
  Synthetic
aagugguucucuaaguaccc

SEQ ID NO: 267188 - RNA, 21 nt, Artificial Sequence
  Synthetic
uaagugguucucuaaguaccc

SEQ ID NO: 267189 - RNA, 22 nt, Artificial Sequence
  Synthetic
uuaagugguucucuaaguaccc

SEQ ID NO: 267190 - RNA, 23 nt, Artificial Sequence
  Synthetic
auuaagugguucucuaaguaccc

SEQ ID NO: 267191 - RNA, 24 nt, Artificial Sequence
  Synthetic
uauuaagugguucucuaaguaccc

SEQ ID NO: 267192 - RNA, 18 nt, Artificial Sequence
  Synthetic
uguugugcacauguaccc

SEQ ID NO: 267193 - RNA, 19 nt, Artificial Sequence
  Synthetic
auguugugcacauguaccc

SEQ ID NO: 267194 - RNA, 20 nt, Artificial Sequence
  Synthetic
cauguugugcacauguaccc

SEQ ID NO: 267195 - RNA, 21 nt, Artificial Sequence
  Synthetic
gcauguugugcacauguaccc

SEQ ID NO: 267196 - RNA, 22 nt, Artificial Sequence
  Synthetic
ugcauguugugcacauguaccc

SEQ ID NO: 267197 - RNA, 23 nt, Artificial Sequence
  Synthetic
cugcauguugugcacauguaccc

SEQ ID NO: 267198 - RNA, 24 nt, Artificial Sequence
  Synthetic
ccugcauguugugcacauguaccc

SEQ ID NO: 267199 - RNA, 18 nt, Artificial Sequence
  Synthetic
cugacuaaucauguaccc

SEQ ID NO: 267200 - RNA, 19 nt, Artificial Sequence
  Synthetic
ucugacuaaucauguaccc

SEQ ID NO: 267201 - RNA, 20 nt, Artificial Sequence
  Synthetic
gucugacuaaucauguaccc

SEQ ID NO: 267202 - RNA, 21 nt, Artificial Sequence
  Synthetic
agucugacuaaucauguaccc

SEQ ID NO: 267203 - RNA, 22 nt, Artificial Sequence
  Synthetic
uagucugacuaaucauguaccc

SEQ ID NO: 267204 - RNA, 23 nt, Artificial Sequence
  Synthetic
uuagucugacuaaucauguaccc

SEQ ID NO: 267205 - RNA, 24 nt, Artificial Sequence
  Synthetic
guuagucugacuaaucauguaccc

SEQ ID NO: 267206 - RNA, 18 nt, Artificial Sequence
  Synthetic
aaaccugcacguguaccc

SEQ ID NO: 267207 - RNA, 19 nt, Artificial Sequence
  Synthetic
caaaccugcacguguaccc

SEQ ID NO: 267208 - RNA, 20 nt, Artificial Sequence
  Synthetic
gcaaaccugcacguguaccc

SEQ ID NO: 267209 - RNA, 21 nt, Artificial Sequence
  Synthetic
agcaaaccugcacguguaccc

SEQ ID NO: 267210 - RNA, 22 nt, Artificial Sequence
  Synthetic
uagcaaaccugcacguguaccc

SEQ ID NO: 267211 - RNA, 23 nt, Artificial Sequence
  Synthetic
auagcaaaccugcacguguaccc

SEQ ID NO: 267212 - RNA, 24 nt, Artificial Sequence
  Synthetic
uauagcaaaccugcacguguaccc

SEQ ID NO: 267213 - RNA, 18 nt, Artificial Sequence
  Synthetic
uuguugauaguuguaccc

SEQ ID NO: 267214 - RNA, 19 nt, Artificial Sequence
  Synthetic
auuguugauaguuguaccc

SEQ ID NO: 267215 - RNA, 20 nt, Artificial Sequence
  Synthetic
gauuguugauaguuguaccc

SEQ ID NO: 267216 - RNA, 21 nt, Artificial Sequence
  Synthetic
ugauuguugauaguuguaccc

SEQ ID NO: 267217 - RNA, 22 nt, Artificial Sequence
  Synthetic
cugauuguugauaguuguaccc

SEQ ID NO: 267218 - RNA, 23 nt, Artificial Sequence
  Synthetic
ccugauuguugauaguuguaccc

SEQ ID NO: 267219 - RNA, 24 nt, Artificial Sequence
  Synthetic
accugauuguugauaguuguaccc

SEQ ID NO: 267220 - RNA, 18 nt, Artificial Sequence
  Synthetic
agcucuuuaggcuuaccc

SEQ ID NO: 267221 - RNA, 19 nt, Artificial Sequence
  Synthetic
aagcucuuuaggcuuaccc

SEQ ID NO: 267222 - RNA, 20 nt, Artificial Sequence
  Synthetic
uaagcucuuuaggcuuaccc

SEQ ID NO: 267223 - RNA, 21 nt, Artificial Sequence
  Synthetic
uuaagcucuuuaggcuuaccc

SEQ ID NO: 267224 - RNA, 22 nt, Artificial Sequence
  Synthetic
auuaagcucuuuaggcuuaccc

SEQ ID NO: 267225 - RNA, 23 nt, Artificial Sequence
  Synthetic
aauuaagcucuuuaggcuuaccc

SEQ ID NO: 267226 - RNA, 24 nt, Artificial Sequence
  Synthetic
uaauuaagcucuuuaggcuuaccc

SEQ ID NO: 267227 - RNA, 18 nt, Artificial Sequence
  Synthetic
gugguggcuggcuuaccc

SEQ ID NO: 267228 - RNA, 19 nt, Artificial Sequence
  Synthetic
ugugguggcuggcuuaccc

SEQ ID NO: 267229 - RNA, 20 nt, Artificial Sequence
  Synthetic
augugguggcuggcuuaccc

SEQ ID NO: 267230 - RNA, 21 nt, Artificial Sequence
  Synthetic
gaugugguggcuggcuuaccc

SEQ ID NO: 267231 - RNA, 22 nt, Artificial Sequence
  Synthetic
ugaugugguggcuggcuuaccc

SEQ ID NO: 267232 - RNA, 23 nt, Artificial Sequence
  Synthetic
augaugugguggcuggcuuaccc

SEQ ID NO: 267233 - RNA, 24 nt, Artificial Sequence
  Synthetic
uaugaugugguggcuggcuuaccc

SEQ ID NO: 267234 - RNA, 18 nt, Artificial Sequence
  Synthetic
cuaccaccagauuuaccc

SEQ ID NO: 267235 - RNA, 19 nt, Artificial Sequence
  Synthetic
ucuaccaccagauuuaccc

SEQ ID NO: 267236 - RNA, 20 nt, Artificial Sequence
  Synthetic
uucuaccaccagauuuaccc

SEQ ID NO: 267237 - RNA, 21 nt, Artificial Sequence
  Synthetic
uuucuaccaccagauuuaccc

SEQ ID NO: 267238 - RNA, 22 nt, Artificial Sequence
  Synthetic
cuuucuaccaccagauuuaccc

SEQ ID NO: 267239 - RNA, 23 nt, Artificial Sequence
  Synthetic
acuuucuaccaccagauuuaccc

SEQ ID NO: 267240 - RNA, 24 nt, Artificial Sequence
  Synthetic
aacuuucuaccaccagauuuaccc

SEQ ID NO: 267241 - RNA, 18 nt, Artificial Sequence
  Synthetic
aauuccucgucuuuaccc

SEQ ID NO: 267242 - RNA, 19 nt, Artificial Sequence
  Synthetic
caauuccucgucuuuaccc

SEQ ID NO: 267243 - RNA, 20 nt, Artificial Sequence
  Synthetic
ccaauuccucgucuuuaccc

SEQ ID NO: 267244 - RNA, 21 nt, Artificial Sequence
  Synthetic
cccaauuccucgucuuuaccc

SEQ ID NO: 267245 - RNA, 22 nt, Artificial Sequence
  Synthetic
ccccaauuccucgucuuuaccc

SEQ ID NO: 267246 - RNA, 23 nt, Artificial Sequence
  Synthetic
cccccaauuccucgucuuuaccc

SEQ ID NO: 267247 - RNA, 24 nt, Artificial Sequence
  Synthetic
acccccaauuccucgucuuuaccc

SEQ ID NO: 267248 - RNA, 18 nt, Artificial Sequence
  Synthetic
uuucugucucguuuaccc

SEQ ID NO: 267249 - RNA, 19 nt, Artificial Sequence
  Synthetic
guuucugucucguuuaccc

SEQ ID NO: 267250 - RNA, 20 nt, Artificial Sequence
  Synthetic
cguuucugucucguuuaccc

SEQ ID NO: 267251 - RNA, 21 nt, Artificial Sequence
  Synthetic
ccguuucugucucguuuaccc

SEQ ID NO: 267252 - RNA, 22 nt, Artificial Sequence
  Synthetic
uccguuucugucucguuuaccc

SEQ ID NO: 267253 - RNA, 23 nt, Artificial Sequence
  Synthetic
uuccguuucugucucguuuaccc

SEQ ID NO: 267254 - RNA, 24 nt, Artificial Sequence
  Synthetic
cuuccguuucugucucguuuaccc

SEQ ID NO: 267255 - RNA, 18 nt, Artificial Sequence
  Synthetic
guuccucaauuuuuaccc

SEQ ID NO: 267256 - RNA, 19 nt, Artificial Sequence
  Synthetic
gguuccucaauuuuuaccc

SEQ ID NO: 267257 - RNA, 20 nt, Artificial Sequence
  Synthetic
agguuccucaauuuuuaccc

SEQ ID NO: 267258 - RNA, 21 nt, Artificial Sequence
  Synthetic
cagguuccucaauuuuuaccc

SEQ ID NO: 267259 - RNA, 22 nt, Artificial Sequence
  Synthetic
ccagguuccucaauuuuuaccc

SEQ ID NO: 267260 - RNA, 23 nt, Artificial Sequence
  Synthetic
cccagguuccucaauuuuuaccc

SEQ ID NO: 267261 - RNA, 24 nt, Artificial Sequence
  Synthetic
ucccagguuccucaauuuuuaccc

SEQ ID NO: 267262 - RNA, 18 nt, Artificial Sequence
  Synthetic
gaaauuuuuacaaacccc

SEQ ID NO: 267263 - RNA, 19 nt, Artificial Sequence
  Synthetic
agaaauuuuuacaaacccc

SEQ ID NO: 267264 - RNA, 20 nt, Artificial Sequence
  Synthetic
cagaaauuuuuacaaacccc

SEQ ID NO: 267265 - RNA, 21 nt, Artificial Sequence
  Synthetic
ccagaaauuuuuacaaacccc

SEQ ID NO: 267266 - RNA, 22 nt, Artificial Sequence
  Synthetic
cccagaaauuuuuacaaacccc

SEQ ID NO: 267267 - RNA, 23 nt, Artificial Sequence
  Synthetic
acccagaaauuuuuacaaacccc

SEQ ID NO: 267268 - RNA, 24 nt, Artificial Sequence
  Synthetic
cacccagaaauuuuuacaaacccc

SEQ ID NO: 267269 - RNA, 18 nt, Artificial Sequence
  Synthetic
cacacacacacacacccc

SEQ ID NO: 267270 - RNA, 19 nt, Artificial Sequence
  Synthetic
acacacacacacacacccc

SEQ ID NO: 267271 - RNA, 20 nt, Artificial Sequence
  Synthetic
cacacacacacacacacccc

SEQ ID NO: 267272 - RNA, 21 nt, Artificial Sequence
  Synthetic
acacacacacacacacacccc

SEQ ID NO: 267273 - RNA, 22 nt, Artificial Sequence
  Synthetic
cacacacacacacacacacccc

SEQ ID NO: 267274 - RNA, 23 nt, Artificial Sequence
  Synthetic
acacacacacacacacacacccc

SEQ ID NO: 267275 - RNA, 24 nt, Artificial Sequence
  Synthetic
cacacacacacacacacacacccc

SEQ ID NO: 267276 - RNA, 18 nt, Artificial Sequence
  Synthetic
aucaugcuaccacacccc

SEQ ID NO: 267277 - RNA, 19 nt, Artificial Sequence
  Synthetic
aaucaugcuaccacacccc

SEQ ID NO: 267278 - RNA, 20 nt, Artificial Sequence
  Synthetic
uaaucaugcuaccacacccc

SEQ ID NO: 267279 - RNA, 21 nt, Artificial Sequence
  Synthetic
auaaucaugcuaccacacccc

SEQ ID NO: 267280 - RNA, 22 nt, Artificial Sequence
  Synthetic
uauaaucaugcuaccacacccc

SEQ ID NO: 267281 - RNA, 23 nt, Artificial Sequence
  Synthetic
cuauaaucaugcuaccacacccc

SEQ ID NO: 267282 - RNA, 24 nt, Artificial Sequence
  Synthetic
gcuauaaucaugcuaccacacccc

SEQ ID NO: 267283 - RNA, 18 nt, Artificial Sequence
  Synthetic
cagugggaugcacacccc

SEQ ID NO: 267284 - RNA, 19 nt, Artificial Sequence
  Synthetic
ucagugggaugcacacccc

SEQ ID NO: 267285 - RNA, 20 nt, Artificial Sequence
  Synthetic
cucagugggaugcacacccc

SEQ ID NO: 267286 - RNA, 21 nt, Artificial Sequence
  Synthetic
ccucagugggaugcacacccc

SEQ ID NO: 267287 - RNA, 22 nt, Artificial Sequence
  Synthetic
cccucagugggaugcacacccc

SEQ ID NO: 267288 - RNA, 23 nt, Artificial Sequence
  Synthetic
acccucagugggaugcacacccc

SEQ ID NO: 267289 - RNA, 24 nt, Artificial Sequence
  Synthetic
uacccucagugggaugcacacccc

SEQ ID NO: 267290 - RNA, 18 nt, Artificial Sequence
  Synthetic
gugaauuccagacacccc

SEQ ID NO: 267291 - RNA, 19 nt, Artificial Sequence
  Synthetic
ugugaauuccagacacccc

SEQ ID NO: 267292 - RNA, 20 nt, Artificial Sequence
  Synthetic
cugugaauuccagacacccc

SEQ ID NO: 267293 - RNA, 21 nt, Artificial Sequence
  Synthetic
gcugugaauuccagacacccc

SEQ ID NO: 267294 - RNA, 22 nt, Artificial Sequence
  Synthetic
agcugugaauuccagacacccc

SEQ ID NO: 267295 - RNA, 23 nt, Artificial Sequence
  Synthetic
aagcugugaauuccagacacccc

SEQ ID NO: 267296 - RNA, 24 nt, Artificial Sequence
  Synthetic
caagcugugaauuccagacacccc

SEQ ID NO: 267297 - RNA, 18 nt, Artificial Sequence
  Synthetic
gcugguagaacccacccc

SEQ ID NO: 267298 - RNA, 19 nt, Artificial Sequence
  Synthetic
ugcugguagaacccacccc

SEQ ID NO: 267299 - RNA, 20 nt, Artificial Sequence
  Synthetic
augcugguagaacccacccc

SEQ ID NO: 267300 - RNA, 21 nt, Artificial Sequence
  Synthetic
aaugcugguagaacccacccc

SEQ ID NO: 267301 - RNA, 22 nt, Artificial Sequence
  Synthetic
aaaugcugguagaacccacccc

SEQ ID NO: 267302 - RNA, 23 nt, Artificial Sequence
  Synthetic
caaaugcugguagaacccacccc

SEQ ID NO: 267303 - RNA, 24 nt, Artificial Sequence
  Synthetic
ucaaaugcugguagaacccacccc

SEQ ID NO: 267304 - RNA, 18 nt, Artificial Sequence
  Synthetic
acuuacuuuguccacccc

SEQ ID NO: 267305 - RNA, 19 nt, Artificial Sequence
  Synthetic
aacuuacuuuguccacccc

SEQ ID NO: 267306 - RNA, 20 nt, Artificial Sequence
  Synthetic
uaacuuacuuuguccacccc

SEQ ID NO: 267307 - RNA, 21 nt, Artificial Sequence
  Synthetic
auaacuuacuuuguccacccc

SEQ ID NO: 267308 - RNA, 22 nt, Artificial Sequence
  Synthetic
uauaacuuacuuuguccacccc

SEQ ID NO: 267309 - RNA, 23 nt, Artificial Sequence
  Synthetic
uuauaacuuacuuuguccacccc

SEQ ID NO: 267310 - RNA, 24 nt, Artificial Sequence
  Synthetic
uuuauaacuuacuuuguccacccc

SEQ ID NO: 267311 - RNA, 18 nt, Artificial Sequence
  Synthetic
augguccugggucacccc

SEQ ID NO: 267312 - RNA, 19 nt, Artificial Sequence
  Synthetic
aaugguccugggucacccc

SEQ ID NO: 267313 - RNA, 20 nt, Artificial Sequence
  Synthetic
uaaugguccugggucacccc

SEQ ID NO: 267314 - RNA, 21 nt, Artificial Sequence
  Synthetic
uuaaugguccugggucacccc

SEQ ID NO: 267315 - RNA, 22 nt, Artificial Sequence
  Synthetic
guuaaugguccugggucacccc

SEQ ID NO: 267316 - RNA, 23 nt, Artificial Sequence
  Synthetic
aguuaaugguccugggucacccc

SEQ ID NO: 267317 - RNA, 24 nt, Artificial Sequence
  Synthetic
gaguuaaugguccugggucacccc

SEQ ID NO: 267318 - RNA, 18 nt, Artificial Sequence
  Synthetic
auguuacugauucacccc

SEQ ID NO: 267319 - RNA, 19 nt, Artificial Sequence
  Synthetic
gauguuacugauucacccc

SEQ ID NO: 267320 - RNA, 20 nt, Artificial Sequence
  Synthetic
ggauguuacugauucacccc

SEQ ID NO: 267321 - RNA, 21 nt, Artificial Sequence
  Synthetic
gggauguuacugauucacccc

SEQ ID NO: 267322 - RNA, 22 nt, Artificial Sequence
  Synthetic
agggauguuacugauucacccc

SEQ ID NO: 267323 - RNA, 23 nt, Artificial Sequence
  Synthetic
gagggauguuacugauucacccc

SEQ ID NO: 267324 - RNA, 24 nt, Artificial Sequence
  Synthetic
ugagggauguuacugauucacccc

SEQ ID NO: 267325 - RNA, 18 nt, Artificial Sequence
  Synthetic
agaucaaagggagacccc

SEQ ID NO: 267326 - RNA, 19 nt, Artificial Sequence
  Synthetic
aagaucaaagggagacccc

SEQ ID NO: 267327 - RNA, 20 nt, Artificial Sequence
  Synthetic
aaagaucaaagggagacccc

SEQ ID NO: 267328 - RNA, 21 nt, Artificial Sequence
  Synthetic
aaaagaucaaagggagacccc

SEQ ID NO: 267329 - RNA, 22 nt, Artificial Sequence
  Synthetic
aaaaagaucaaagggagacccc

SEQ ID NO: 267330 - RNA, 23 nt, Artificial Sequence
  Synthetic
caaaaagaucaaagggagacccc

SEQ ID NO: 267331 - RNA, 24 nt, Artificial Sequence
  Synthetic
acaaaaagaucaaagggagacccc

SEQ ID NO: 267332 - RNA, 18 nt, Artificial Sequence
  Synthetic
aaugauggaaaugacccc

SEQ ID NO: 267333 - RNA, 19 nt, Artificial Sequence
  Synthetic
gaaugauggaaaugacccc

SEQ ID NO: 267334 - RNA, 20 nt, Artificial Sequence
  Synthetic
agaaugauggaaaugacccc

SEQ ID NO: 267335 - RNA, 21 nt, Artificial Sequence
  Synthetic
cagaaugauggaaaugacccc

SEQ ID NO: 267336 - RNA, 22 nt, Artificial Sequence
  Synthetic
acagaaugauggaaaugacccc

SEQ ID NO: 267337 - RNA, 23 nt, Artificial Sequence
  Synthetic
uacagaaugauggaaaugacccc

SEQ ID NO: 267338 - RNA, 24 nt, Artificial Sequence
  Synthetic
uuacagaaugauggaaaugacccc

SEQ ID NO: 267339 - RNA, 18 nt, Artificial Sequence
  Synthetic
uugcaugcuauugacccc

SEQ ID NO: 267340 - RNA, 19 nt, Artificial Sequence
  Synthetic
uuugcaugcuauugacccc

SEQ ID NO: 267341 - RNA, 20 nt, Artificial Sequence
  Synthetic
auuugcaugcuauugacccc

SEQ ID NO: 267342 - RNA, 21 nt, Artificial Sequence
  Synthetic
uauuugcaugcuauugacccc

SEQ ID NO: 267343 - RNA, 22 nt, Artificial Sequence
  Synthetic
auauuugcaugcuauugacccc

SEQ ID NO: 267344 - RNA, 23 nt, Artificial Sequence
  Synthetic
cauauuugcaugcuauugacccc

SEQ ID NO: 267345 - RNA, 24 nt, Artificial Sequence
  Synthetic
acauauuugcaugcuauugacccc

SEQ ID NO: 267346 - RNA, 18 nt, Artificial Sequence
  Synthetic
cacugcuuuugcuacccc

SEQ ID NO: 267347 - RNA, 19 nt, Artificial Sequence
  Synthetic
gcacugcuuuugcuacccc

SEQ ID NO: 267348 - RNA, 20 nt, Artificial Sequence
  Synthetic
agcacugcuuuugcuacccc

SEQ ID NO: 267349 - RNA, 21 nt, Artificial Sequence
  Synthetic
uagcacugcuuuugcuacccc

SEQ ID NO: 267350 - RNA, 22 nt, Artificial Sequence
  Synthetic
uuagcacugcuuuugcuacccc

SEQ ID NO: 267351 - RNA, 23 nt, Artificial Sequence
  Synthetic
cuuagcacugcuuuugcuacccc

SEQ ID NO: 267352 - RNA, 24 nt, Artificial Sequence
  Synthetic
ucuuagcacugcuuuugcuacccc

SEQ ID NO: 267353 - RNA, 18 nt, Artificial Sequence
  Synthetic
ugcccaaagacuuacccc

SEQ ID NO: 267354 - RNA, 19 nt, Artificial Sequence
  Synthetic
uugcccaaagacuuacccc

SEQ ID NO: 267355 - RNA, 20 nt, Artificial Sequence
  Synthetic
uuugcccaaagacuuacccc

SEQ ID NO: 267356 - RNA, 21 nt, Artificial Sequence
  Synthetic
cuuugcccaaagacuuacccc

SEQ ID NO: 267357 - RNA, 22 nt, Artificial Sequence
  Synthetic
ccuuugcccaaagacuuacccc

SEQ ID NO: 267358 - RNA, 23 nt, Artificial Sequence
  Synthetic
uccuuugcccaaagacuuacccc

SEQ ID NO: 267359 - RNA, 24 nt, Artificial Sequence
  Synthetic
uuccuuugcccaaagacuuacccc

SEQ ID NO: 267360 - RNA, 18 nt, Artificial Sequence
  Synthetic
cuugugccuuagcccccc

SEQ ID NO: 267361 - RNA, 19 nt, Artificial Sequence
  Synthetic
ucuugugccuuagcccccc

SEQ ID NO: 267362 - RNA, 20 nt, Artificial Sequence
  Synthetic
uucuugugccuuagcccccc

SEQ ID NO: 267363 - RNA, 21 nt, Artificial Sequence
  Synthetic
auucuugugccuuagcccccc

SEQ ID NO: 267364 - RNA, 22 nt, Artificial Sequence
  Synthetic
gauucuugugccuuagcccccc

SEQ ID NO: 267365 - RNA, 23 nt, Artificial Sequence
  Synthetic
agauucuugugccuuagcccccc

SEQ ID NO: 267366 - RNA, 24 nt, Artificial Sequence
  Synthetic
gagauucuugugccuuagcccccc

SEQ ID NO: 267367 - RNA, 18 nt, Artificial Sequence
  Synthetic
uucccuuucuuucccccc

SEQ ID NO: 267368 - RNA, 19 nt, Artificial Sequence
  Synthetic
uuucccuuucuuucccccc

SEQ ID NO: 267369 - RNA, 20 nt, Artificial Sequence
  Synthetic
uuuucccuuucuuucccccc

SEQ ID NO: 267370 - RNA, 21 nt, Artificial Sequence
  Synthetic
guuuucccuuucuuucccccc

SEQ ID NO: 267371 - RNA, 22 nt, Artificial Sequence
  Synthetic
aguuuucccuuucuuucccccc

SEQ ID NO: 267372 - RNA, 23 nt, Artificial Sequence
  Synthetic
uaguuuucccuuucuuucccccc

SEQ ID NO: 267373 - RNA, 24 nt, Artificial Sequence
  Synthetic
guaguuuucccuuucuuucccccc

SEQ ID NO: 267374 - RNA, 18 nt, Artificial Sequence
  Synthetic
uaauccaagucagccccc

SEQ ID NO: 267375 - RNA, 19 nt, Artificial Sequence
  Synthetic
guaauccaagucagccccc

SEQ ID NO: 267376 - RNA, 20 nt, Artificial Sequence
  Synthetic
uguaauccaagucagccccc

SEQ ID NO: 267377 - RNA, 21 nt, Artificial Sequence
  Synthetic
auguaauccaagucagccccc

SEQ ID NO: 267378 - RNA, 22 nt, Artificial Sequence
  Synthetic
gauguaauccaagucagccccc

SEQ ID NO: 267379 - RNA, 23 nt, Artificial Sequence
  Synthetic
ugauguaauccaagucagccccc

SEQ ID NO: 267380 - RNA, 24 nt, Artificial Sequence
  Synthetic
augauguaauccaagucagccccc

SEQ ID NO: 267381 - RNA, 18 nt, Artificial Sequence
  Synthetic
gucacucaaccugccccc

SEQ ID NO: 267382 - RNA, 19 nt, Artificial Sequence
  Synthetic
agucacucaaccugccccc

SEQ ID NO: 267383 - RNA, 20 nt, Artificial Sequence
  Synthetic
cagucacucaaccugccccc

SEQ ID NO: 267384 - RNA, 21 nt, Artificial Sequence
  Synthetic
gcagucacucaaccugccccc

SEQ ID NO: 267385 - RNA, 22 nt, Artificial Sequence
  Synthetic
agcagucacucaaccugccccc

SEQ ID NO: 267386 - RNA, 23 nt, Artificial Sequence
  Synthetic
gagcagucacucaaccugccccc

SEQ ID NO: 267387 - RNA, 24 nt, Artificial Sequence
  Synthetic
ugagcagucacucaaccugccccc

SEQ ID NO: 267388 - RNA, 18 nt, Artificial Sequence
  Synthetic
ucaagucccauugccccc

SEQ ID NO: 267389 - RNA, 19 nt, Artificial Sequence
  Synthetic
cucaagucccauugccccc

SEQ ID NO: 267390 - RNA, 20 nt, Artificial Sequence
  Synthetic
gcucaagucccauugccccc

SEQ ID NO: 267391 - RNA, 21 nt, Artificial Sequence
  Synthetic
ugcucaagucccauugccccc

SEQ ID NO: 267392 - RNA, 22 nt, Artificial Sequence
  Synthetic
uugcucaagucccauugccccc

SEQ ID NO: 267393 - RNA, 23 nt, Artificial Sequence
  Synthetic
cuugcucaagucccauugccccc

SEQ ID NO: 267394 - RNA, 24 nt, Artificial Sequence
  Synthetic
acuugcucaagucccauugccccc

SEQ ID NO: 267395 - RNA, 18 nt, Artificial Sequence
  Synthetic
caucccaccacauccccc

SEQ ID NO: 267396 - RNA, 19 nt, Artificial Sequence
  Synthetic
ucaucccaccacauccccc

SEQ ID NO: 267397 - RNA, 20 nt, Artificial Sequence
  Synthetic
uucaucccaccacauccccc

SEQ ID NO: 267398 - RNA, 21 nt, Artificial Sequence
  Synthetic
auucaucccaccacauccccc

SEQ ID NO: 267399 - RNA, 22 nt, Artificial Sequence
  Synthetic
uauucaucccaccacauccccc

SEQ ID NO: 267400 - RNA, 23 nt, Artificial Sequence
  Synthetic
cuauucaucccaccacauccccc

SEQ ID NO: 267401 - RNA, 24 nt, Artificial Sequence
  Synthetic
acuauucaucccaccacauccccc

SEQ ID NO: 267402 - RNA, 18 nt, Artificial Sequence
  Synthetic
uagugagugccuuccccc

SEQ ID NO: 267403 - RNA, 19 nt, Artificial Sequence
  Synthetic
guagugagugccuuccccc

SEQ ID NO: 267404 - RNA, 20 nt, Artificial Sequence
  Synthetic
aguagugagugccuuccccc

SEQ ID NO: 267405 - RNA, 21 nt, Artificial Sequence
  Synthetic
caguagugagugccuuccccc

SEQ ID NO: 267406 - RNA, 22 nt, Artificial Sequence
  Synthetic
ucaguagugagugccuuccccc

SEQ ID NO: 267407 - RNA, 23 nt, Artificial Sequence
  Synthetic
uucaguagugagugccuuccccc

SEQ ID NO: 267408 - RNA, 24 nt, Artificial Sequence
  Synthetic
uuucaguagugagugccuuccccc

SEQ ID NO: 267409 - RNA, 18 nt, Artificial Sequence
  Synthetic
aaucaccuuccuuccccc

SEQ ID NO: 267410 - RNA, 19 nt, Artificial Sequence
  Synthetic
uaaucaccuuccuuccccc

SEQ ID NO: 267411 - RNA, 20 nt, Artificial Sequence
  Synthetic
cuaaucaccuuccuuccccc

SEQ ID NO: 267412 - RNA, 21 nt, Artificial Sequence
  Synthetic
gcuaaucaccuuccuuccccc

SEQ ID NO: 267413 - RNA, 22 nt, Artificial Sequence
  Synthetic
ugcuaaucaccuuccuuccccc

SEQ ID NO: 267414 - RNA, 23 nt, Artificial Sequence
  Synthetic
uugcuaaucaccuuccuuccccc

SEQ ID NO: 267415 - RNA, 24 nt, Artificial Sequence
  Synthetic
cuugcuaaucaccuuccuuccccc

SEQ ID NO: 267416 - RNA, 18 nt, Artificial Sequence
  Synthetic
ccgagguguuuuuccccc

SEQ ID NO: 267417 - RNA, 19 nt, Artificial Sequence
  Synthetic
uccgagguguuuuuccccc

SEQ ID NO: 267418 - RNA, 20 nt, Artificial Sequence
  Synthetic
cuccgagguguuuuuccccc

SEQ ID NO: 267419 - RNA, 21 nt, Artificial Sequence
  Synthetic
acuccgagguguuuuuccccc

SEQ ID NO: 267420 - RNA, 22 nt, Artificial Sequence
  Synthetic
aacuccgagguguuuuuccccc

SEQ ID NO: 267421 - RNA, 23 nt, Artificial Sequence
  Synthetic
caacuccgagguguuuuuccccc

SEQ ID NO: 267422 - RNA, 24 nt, Artificial Sequence
  Synthetic
ucaacuccgagguguuuuuccccc

SEQ ID NO: 267423 - RNA, 18 nt, Artificial Sequence
  Synthetic
agacagcugagaagcccc

SEQ ID NO: 267424 - RNA, 19 nt, Artificial Sequence
  Synthetic
aagacagcugagaagcccc

SEQ ID NO: 267425 - RNA, 20 nt, Artificial Sequence
  Synthetic
aaagacagcugagaagcccc

SEQ ID NO: 267426 - RNA, 21 nt, Artificial Sequence
  Synthetic
caaagacagcugagaagcccc

SEQ ID NO: 267427 - RNA, 22 nt, Artificial Sequence
  Synthetic
ucaaagacagcugagaagcccc

SEQ ID NO: 267428 - RNA, 23 nt, Artificial Sequence
  Synthetic
uucaaagacagcugagaagcccc

SEQ ID NO: 267429 - RNA, 24 nt, Artificial Sequence
  Synthetic
cuucaaagacagcugagaagcccc

SEQ ID NO: 267430 - RNA, 18 nt, Artificial Sequence
  Synthetic
cugccccaccccagcccc

SEQ ID NO: 267431 - RNA, 19 nt, Artificial Sequence
  Synthetic
ccugccccaccccagcccc

SEQ ID NO: 267432 - RNA, 20 nt, Artificial Sequence
  Synthetic
uccugccccaccccagcccc

SEQ ID NO: 267433 - RNA, 21 nt, Artificial Sequence
  Synthetic
cuccugccccaccccagcccc

SEQ ID NO: 267434 - RNA, 22 nt, Artificial Sequence
  Synthetic
ucuccugccccaccccagcccc

SEQ ID NO: 267435 - RNA, 23 nt, Artificial Sequence
  Synthetic
gucuccugccccaccccagcccc

SEQ ID NO: 267436 - RNA, 24 nt, Artificial Sequence
  Synthetic
agucuccugccccaccccagcccc

SEQ ID NO: 267437 - RNA, 18 nt, Artificial Sequence
  Synthetic
cuuccugcccccagcccc

SEQ ID NO: 267438 - RNA, 19 nt, Artificial Sequence
  Synthetic
gcuuccugcccccagcccc

SEQ ID NO: 267439 - RNA, 20 nt, Artificial Sequence
  Synthetic
ugcuuccugcccccagcccc

SEQ ID NO: 267440 - RNA, 21 nt, Artificial Sequence
  Synthetic
uugcuuccugcccccagcccc

SEQ ID NO: 267441 - RNA, 22 nt, Artificial Sequence
  Synthetic
auugcuuccugcccccagcccc

SEQ ID NO: 267442 - RNA, 23 nt, Artificial Sequence
  Synthetic
cauugcuuccugcccccagcccc

SEQ ID NO: 267443 - RNA, 24 nt, Artificial Sequence
  Synthetic
ccauugcuuccugcccccagcccc

SEQ ID NO: 267444 - RNA, 18 nt, Artificial Sequence
  Synthetic
guaauccaagucagcccc

SEQ ID NO: 267445 - RNA, 19 nt, Artificial Sequence
  Synthetic
uguaauccaagucagcccc

SEQ ID NO: 267446 - RNA, 20 nt, Artificial Sequence
  Synthetic
auguaauccaagucagcccc

SEQ ID NO: 267447 - RNA, 21 nt, Artificial Sequence
  Synthetic
gauguaauccaagucagcccc

SEQ ID NO: 267448 - RNA, 22 nt, Artificial Sequence
  Synthetic
ugauguaauccaagucagcccc

SEQ ID NO: 267449 - RNA, 23 nt, Artificial Sequence
  Synthetic
augauguaauccaagucagcccc

SEQ ID NO: 267450 - RNA, 24 nt, Artificial Sequence
  Synthetic
aaugauguaauccaagucagcccc

SEQ ID NO: 267451 - RNA, 18 nt, Artificial Sequence
  Synthetic
gagaguccuuagagcccc

SEQ ID NO: 267452 - RNA, 19 nt, Artificial Sequence
  Synthetic
ggagaguccuuagagcccc

SEQ ID NO: 267453 - RNA, 20 nt, Artificial Sequence
  Synthetic
gggagaguccuuagagcccc

SEQ ID NO: 267454 - RNA, 21 nt, Artificial Sequence
  Synthetic
agggagaguccuuagagcccc

SEQ ID NO: 267455 - RNA, 22 nt, Artificial Sequence
  Synthetic
cagggagaguccuuagagcccc

SEQ ID NO: 267456 - RNA, 23 nt, Artificial Sequence
  Synthetic
acagggagaguccuuagagcccc

SEQ ID NO: 267457 - RNA, 24 nt, Artificial Sequence
  Synthetic
cacagggagaguccuuagagcccc

SEQ ID NO: 267458 - RNA, 18 nt, Artificial Sequence
  Synthetic
gcagcucagaugagcccc

SEQ ID NO: 267459 - RNA, 19 nt, Artificial Sequence
  Synthetic
ggcagcucagaugagcccc

SEQ ID NO: 267460 - RNA, 20 nt, Artificial Sequence
  Synthetic
uggcagcucagaugagcccc

SEQ ID NO: 267461 - RNA, 21 nt, Artificial Sequence
  Synthetic
uuggcagcucagaugagcccc

SEQ ID NO: 267462 - RNA, 22 nt, Artificial Sequence
  Synthetic
uuuggcagcucagaugagcccc

SEQ ID NO: 267463 - RNA, 23 nt, Artificial Sequence
  Synthetic
uuuuggcagcucagaugagcccc

SEQ ID NO: 267464 - RNA, 24 nt, Artificial Sequence
  Synthetic
auuuuggcagcucagaugagcccc

SEQ ID NO: 267465 - RNA, 18 nt, Artificial Sequence
  Synthetic
uuucaaacggguagcccc

SEQ ID NO: 267466 - RNA, 19 nt, Artificial Sequence
  Synthetic
auuucaaacggguagcccc

SEQ ID NO: 267467 - RNA, 20 nt, Artificial Sequence
  Synthetic
gauuucaaacggguagcccc

SEQ ID NO: 267468 - RNA, 21 nt, Artificial Sequence
  Synthetic
ugauuucaaacggguagcccc

SEQ ID NO: 267469 - RNA, 22 nt, Artificial Sequence
  Synthetic
uugauuucaaacggguagcccc

SEQ ID NO: 267470 - RNA, 23 nt, Artificial Sequence
  Synthetic
uuugauuucaaacggguagcccc

SEQ ID NO: 267471 - RNA, 24 nt, Artificial Sequence
  Synthetic
cuuugauuucaaacggguagcccc

SEQ ID NO: 267472 - RNA, 18 nt, Artificial Sequence
  Synthetic
gugaucauauuuagcccc

SEQ ID NO: 267473 - RNA, 19 nt, Artificial Sequence
  Synthetic
agugaucauauuuagcccc

SEQ ID NO: 267474 - RNA, 20 nt, Artificial Sequence
  Synthetic
aagugaucauauuuagcccc

SEQ ID NO: 267475 - RNA, 21 nt, Artificial Sequence
  Synthetic
gaagugaucauauuuagcccc

SEQ ID NO: 267476 - RNA, 22 nt, Artificial Sequence
  Synthetic
ugaagugaucauauuuagcccc

SEQ ID NO: 267477 - RNA, 23 nt, Artificial Sequence
  Synthetic
uugaagugaucauauuuagcccc

SEQ ID NO: 267478 - RNA, 24 nt, Artificial Sequence
  Synthetic
auugaagugaucauauuuagcccc

SEQ ID NO: 267479 - RNA, 18 nt, Artificial Sequence
  Synthetic
cuugcuugggcaggcccc

SEQ ID NO: 267480 - RNA, 19 nt, Artificial Sequence
  Synthetic
gcuugcuugggcaggcccc

SEQ ID NO: 267481 - RNA, 20 nt, Artificial Sequence
  Synthetic
ugcuugcuugggcaggcccc

SEQ ID NO: 267482 - RNA, 21 nt, Artificial Sequence
  Synthetic
augcuugcuugggcaggcccc

SEQ ID NO: 267483 - RNA, 22 nt, Artificial Sequence
  Synthetic
aaugcuugcuugggcaggcccc

SEQ ID NO: 267484 - RNA, 23 nt, Artificial Sequence
  Synthetic
aaaugcuugcuugggcaggcccc

SEQ ID NO: 267485 - RNA, 24 nt, Artificial Sequence
  Synthetic
caaaugcuugcuugggcaggcccc

SEQ ID NO: 267486 - RNA, 18 nt, Artificial Sequence
  Synthetic
uuccaucauaagggcccc

SEQ ID NO: 267487 - RNA, 19 nt, Artificial Sequence
  Synthetic
auuccaucauaagggcccc

SEQ ID NO: 267488 - RNA, 20 nt, Artificial Sequence
  Synthetic
aauuccaucauaagggcccc

SEQ ID NO: 267489 - RNA, 21 nt, Artificial Sequence
  Synthetic
uaauuccaucauaagggcccc

SEQ ID NO: 267490 - RNA, 22 nt, Artificial Sequence
  Synthetic
cuaauuccaucauaagggcccc

SEQ ID NO: 267491 - RNA, 23 nt, Artificial Sequence
  Synthetic
acuaauuccaucauaagggcccc

SEQ ID NO: 267492 - RNA, 24 nt, Artificial Sequence
  Synthetic
aacuaauuccaucauaagggcccc

SEQ ID NO: 267493 - RNA, 18 nt, Artificial Sequence
  Synthetic
ggcagaaucaugggcccc

SEQ ID NO: 267494 - RNA, 19 nt, Artificial Sequence
  Synthetic
aggcagaaucaugggcccc

SEQ ID NO: 267495 - RNA, 20 nt, Artificial Sequence
  Synthetic
uaggcagaaucaugggcccc

SEQ ID NO: 267496 - RNA, 21 nt, Artificial Sequence
  Synthetic
guaggcagaaucaugggcccc

SEQ ID NO: 267497 - RNA, 22 nt, Artificial Sequence
  Synthetic
gguaggcagaaucaugggcccc

SEQ ID NO: 267498 - RNA, 23 nt, Artificial Sequence
  Synthetic
ugguaggcagaaucaugggcccc

SEQ ID NO: 267499 - RNA, 24 nt, Artificial Sequence
  Synthetic
gugguaggcagaaucaugggcccc

SEQ ID NO: 267500 - RNA, 18 nt, Artificial Sequence
  Synthetic
cuugacucucuuggcccc

SEQ ID NO: 267501 - RNA, 19 nt, Artificial Sequence
  Synthetic
ccuugacucucuuggcccc

SEQ ID NO: 267502 - RNA, 20 nt, Artificial Sequence
  Synthetic
uccuugacucucuuggcccc

SEQ ID NO: 267503 - RNA, 21 nt, Artificial Sequence
  Synthetic
guccuugacucucuuggcccc

SEQ ID NO: 267504 - RNA, 22 nt, Artificial Sequence
  Synthetic
aguccuugacucucuuggcccc

SEQ ID NO: 267505 - RNA, 23 nt, Artificial Sequence
  Synthetic
caguccuugacucucuuggcccc

SEQ ID NO: 267506 - RNA, 24 nt, Artificial Sequence
  Synthetic
acaguccuugacucucuuggcccc

SEQ ID NO: 267507 - RNA, 18 nt, Artificial Sequence
  Synthetic
agucacucaaccugcccc

SEQ ID NO: 267508 - RNA, 19 nt, Artificial Sequence
  Synthetic
cagucacucaaccugcccc

SEQ ID NO: 267509 - RNA, 20 nt, Artificial Sequence
  Synthetic
gcagucacucaaccugcccc

SEQ ID NO: 267510 - RNA, 21 nt, Artificial Sequence
  Synthetic
agcagucacucaaccugcccc

SEQ ID NO: 267511 - RNA, 22 nt, Artificial Sequence
  Synthetic
gagcagucacucaaccugcccc

SEQ ID NO: 267512 - RNA, 23 nt, Artificial Sequence
  Synthetic
ugagcagucacucaaccugcccc

SEQ ID NO: 267513 - RNA, 24 nt, Artificial Sequence
  Synthetic
augagcagucacucaaccugcccc

SEQ ID NO: 267514 - RNA, 18 nt, Artificial Sequence
  Synthetic
ugucccagucugugcccc

SEQ ID NO: 267515 - RNA, 19 nt, Artificial Sequence
  Synthetic
uugucccagucugugcccc

SEQ ID NO: 267516 - RNA, 20 nt, Artificial Sequence
  Synthetic
uuugucccagucugugcccc

SEQ ID NO: 267517 - RNA, 21 nt, Artificial Sequence
  Synthetic
uuuugucccagucugugcccc

SEQ ID NO: 267518 - RNA, 22 nt, Artificial Sequence
  Synthetic
cuuuugucccagucugugcccc

SEQ ID NO: 267519 - RNA, 23 nt, Artificial Sequence
  Synthetic
acuuuugucccagucugugcccc

SEQ ID NO: 267520 - RNA, 24 nt, Artificial Sequence
  Synthetic
gacuuuugucccagucugugcccc

SEQ ID NO: 267521 - RNA, 18 nt, Artificial Sequence
  Synthetic
caauaaggcuauugcccc

SEQ ID NO: 267522 - RNA, 19 nt, Artificial Sequence
  Synthetic
ccaauaaggcuauugcccc

SEQ ID NO: 267523 - RNA, 20 nt, Artificial Sequence
  Synthetic
accaauaaggcuauugcccc

SEQ ID NO: 267524 - RNA, 21 nt, Artificial Sequence
  Synthetic
uaccaauaaggcuauugcccc

SEQ ID NO: 267525 - RNA, 22 nt, Artificial Sequence
  Synthetic
auaccaauaaggcuauugcccc

SEQ ID NO: 267526 - RNA, 23 nt, Artificial Sequence
  Synthetic
aauaccaauaaggcuauugcccc

SEQ ID NO: 267527 - RNA, 24 nt, Artificial Sequence
  Synthetic
aaauaccaauaaggcuauugcccc

SEQ ID NO: 267528 - RNA, 18 nt, Artificial Sequence
  Synthetic
caugauagagguugcccc

SEQ ID NO: 267529 - RNA, 19 nt, Artificial Sequence
  Synthetic
acaugauagagguugcccc

SEQ ID NO: 267530 - RNA, 20 nt, Artificial Sequence
  Synthetic
uacaugauagagguugcccc

SEQ ID NO: 267531 - RNA, 21 nt, Artificial Sequence
  Synthetic
cuacaugauagagguugcccc

SEQ ID NO: 267532 - RNA, 22 nt, Artificial Sequence
  Synthetic
gcuacaugauagagguugcccc

SEQ ID NO: 267533 - RNA, 23 nt, Artificial Sequence
  Synthetic
ggcuacaugauagagguugcccc

SEQ ID NO: 267534 - RNA, 24 nt, Artificial Sequence
  Synthetic
aggcuacaugauagagguugcccc

SEQ ID NO: 267535 - RNA, 18 nt, Artificial Sequence
  Synthetic
aguguagauaaaaucccc

SEQ ID NO: 267536 - RNA, 19 nt, Artificial Sequence
  Synthetic
uaguguagauaaaaucccc

SEQ ID NO: 267537 - RNA, 20 nt, Artificial Sequence
  Synthetic
auaguguagauaaaaucccc

SEQ ID NO: 267538 - RNA, 21 nt, Artificial Sequence
  Synthetic
gauaguguagauaaaaucccc

SEQ ID NO: 267539 - RNA, 22 nt, Artificial Sequence
  Synthetic
ggauaguguagauaaaaucccc

SEQ ID NO: 267540 - RNA, 23 nt, Artificial Sequence
  Synthetic
uggauaguguagauaaaaucccc

SEQ ID NO: 267541 - RNA, 24 nt, Artificial Sequence
  Synthetic
auggauaguguagauaaaaucccc

SEQ ID NO: 267542 - RNA, 18 nt, Artificial Sequence
  Synthetic
uuauuuucucaaaucccc

SEQ ID NO: 267543 - RNA, 19 nt, Artificial Sequence
  Synthetic
uuuauuuucucaaaucccc

SEQ ID NO: 267544 - RNA, 20 nt, Artificial Sequence
  Synthetic
uuuuauuuucucaaaucccc

SEQ ID NO: 267545 - RNA, 21 nt, Artificial Sequence
  Synthetic
auuuuauuuucucaaaucccc

SEQ ID NO: 267546 - RNA, 22 nt, Artificial Sequence
  Synthetic
aauuuuauuuucucaaaucccc

SEQ ID NO: 267547 - RNA, 23 nt, Artificial Sequence
  Synthetic
uaauuuuauuuucucaaaucccc

SEQ ID NO: 267548 - RNA, 24 nt, Artificial Sequence
  Synthetic
guaauuuuauuuucucaaaucccc

SEQ ID NO: 267549 - RNA, 18 nt, Artificial Sequence
  Synthetic
cauuguaagacaaucccc

SEQ ID NO: 267550 - RNA, 19 nt, Artificial Sequence
  Synthetic
ccauuguaagacaaucccc

SEQ ID NO: 267551 - RNA, 20 nt, Artificial Sequence
  Synthetic
gccauuguaagacaaucccc

SEQ ID NO: 267552 - RNA, 21 nt, Artificial Sequence
  Synthetic
cgccauuguaagacaaucccc

SEQ ID NO: 267553 - RNA, 22 nt, Artificial Sequence
  Synthetic
ccgccauuguaagacaaucccc

SEQ ID NO: 267554 - RNA, 23 nt, Artificial Sequence
  Synthetic
uccgccauuguaagacaaucccc

SEQ ID NO: 267555 - RNA, 24 nt, Artificial Sequence
  Synthetic
auccgccauuguaagacaaucccc

SEQ ID NO: 267556 - RNA, 18 nt, Artificial Sequence
  Synthetic
aguuuauucagcaucccc

SEQ ID NO: 267557 - RNA, 19 nt, Artificial Sequence
  Synthetic
gaguuuauucagcaucccc

SEQ ID NO: 267558 - RNA, 20 nt, Artificial Sequence
  Synthetic
agaguuuauucagcaucccc

SEQ ID NO: 267559 - RNA, 21 nt, Artificial Sequence
  Synthetic
uagaguuuauucagcaucccc

SEQ ID NO: 267560 - RNA, 22 nt, Artificial Sequence
  Synthetic
auagaguuuauucagcaucccc

SEQ ID NO: 267561 - RNA, 23 nt, Artificial Sequence
  Synthetic
cauagaguuuauucagcaucccc

SEQ ID NO: 267562 - RNA, 24 nt, Artificial Sequence
  Synthetic
acauagaguuuauucagcaucccc

SEQ ID NO: 267563 - RNA, 18 nt, Artificial Sequence
  Synthetic
uagaaccauucacucccc

SEQ ID NO: 267564 - RNA, 19 nt, Artificial Sequence
  Synthetic
auagaaccauucacucccc

SEQ ID NO: 267565 - RNA, 20 nt, Artificial Sequence
  Synthetic
gauagaaccauucacucccc

SEQ ID NO: 267566 - RNA, 21 nt, Artificial Sequence
  Synthetic
agauagaaccauucacucccc

SEQ ID NO: 267567 - RNA, 22 nt, Artificial Sequence
  Synthetic
gagauagaaccauucacucccc

SEQ ID NO: 267568 - RNA, 23 nt, Artificial Sequence
  Synthetic
cgagauagaaccauucacucccc

SEQ ID NO: 267569 - RNA, 24 nt, Artificial Sequence
  Synthetic
gcgagauagaaccauucacucccc

SEQ ID NO: 267570 - RNA, 18 nt, Artificial Sequence
  Synthetic
agcgccacugcccucccc

SEQ ID NO: 267571 - RNA, 19 nt, Artificial Sequence
  Synthetic
uagcgccacugcccucccc

SEQ ID NO: 267572 - RNA, 20 nt, Artificial Sequence
  Synthetic
uuagcgccacugcccucccc

SEQ ID NO: 267573 - RNA, 21 nt, Artificial Sequence
  Synthetic
auuagcgccacugcccucccc

SEQ ID NO: 267574 - RNA, 22 nt, Artificial Sequence
  Synthetic
aauuagcgccacugcccucccc

SEQ ID NO: 267575 - RNA, 23 nt, Artificial Sequence
  Synthetic
caauuagcgccacugcccucccc

SEQ ID NO: 267576 - RNA, 24 nt, Artificial Sequence
  Synthetic
acaauuagcgccacugcccucccc

SEQ ID NO: 267577 - RNA, 18 nt, Artificial Sequence
  Synthetic
uauuuugaaaagcucccc

SEQ ID NO: 267578 - RNA, 19 nt, Artificial Sequence
  Synthetic
auauuuugaaaagcucccc

SEQ ID NO: 267579 - RNA, 20 nt, Artificial Sequence
  Synthetic
uauauuuugaaaagcucccc

SEQ ID NO: 267580 - RNA, 21 nt, Artificial Sequence
  Synthetic
uuauauuuugaaaagcucccc

SEQ ID NO: 267581 - RNA, 22 nt, Artificial Sequence
  Synthetic
uuuauauuuugaaaagcucccc

SEQ ID NO: 267582 - RNA, 23 nt, Artificial Sequence
  Synthetic
uuuuauauuuugaaaagcucccc

SEQ ID NO: 267583 - RNA, 24 nt, Artificial Sequence
  Synthetic
cuuuuauauuuugaaaagcucccc

SEQ ID NO: 267584 - RNA, 18 nt, Artificial Sequence
  Synthetic
auucaaauucaagucccc

SEQ ID NO: 267585 - RNA, 19 nt, Artificial Sequence
  Synthetic
uauucaaauucaagucccc

SEQ ID NO: 267586 - RNA, 20 nt, Artificial Sequence
  Synthetic
uuauucaaauucaagucccc

SEQ ID NO: 267587 - RNA, 21 nt, Artificial Sequence
  Synthetic
auuauucaaauucaagucccc

SEQ ID NO: 267588 - RNA, 22 nt, Artificial Sequence
  Synthetic
uauuauucaaauucaagucccc

SEQ ID NO: 267589 - RNA, 23 nt, Artificial Sequence
  Synthetic
guauuauucaaauucaagucccc

SEQ ID NO: 267590 - RNA, 24 nt, Artificial Sequence
  Synthetic
gguauuauucaaauucaagucccc

SEQ ID NO: 267591 - RNA, 18 nt, Artificial Sequence
  Synthetic
aaagaagguugagucccc

SEQ ID NO: 267592 - RNA, 19 nt, Artificial Sequence
  Synthetic
uaaagaagguugagucccc

SEQ ID NO: 267593 - RNA, 20 nt, Artificial Sequence
  Synthetic
guaaagaagguugagucccc

SEQ ID NO: 267594 - RNA, 21 nt, Artificial Sequence
  Synthetic
uguaaagaagguugagucccc

SEQ ID NO: 267595 - RNA, 22 nt, Artificial Sequence
  Synthetic
uuguaaagaagguugagucccc

SEQ ID NO: 267596 - RNA, 23 nt, Artificial Sequence
  Synthetic
uuuguaaagaagguugagucccc

SEQ ID NO: 267597 - RNA, 24 nt, Artificial Sequence
  Synthetic
uuuuguaaagaagguugagucccc

SEQ ID NO: 267598 - RNA, 18 nt, Artificial Sequence
  Synthetic
ccuaaauccacugucccc

SEQ ID NO: 267599 - RNA, 19 nt, Artificial Sequence
  Synthetic
uccuaaauccacugucccc

SEQ ID NO: 267600 - RNA, 20 nt, Artificial Sequence
  Synthetic
auccuaaauccacugucccc

SEQ ID NO: 267601 - RNA, 21 nt, Artificial Sequence
  Synthetic
gauccuaaauccacugucccc

SEQ ID NO: 267602 - RNA, 22 nt, Artificial Sequence
  Synthetic
ugauccuaaauccacugucccc

SEQ ID NO: 267603 - RNA, 23 nt, Artificial Sequence
  Synthetic
augauccuaaauccacugucccc

SEQ ID NO: 267604 - RNA, 24 nt, Artificial Sequence
  Synthetic
uaugauccuaaauccacugucccc

SEQ ID NO: 267605 - RNA, 18 nt, Artificial Sequence
  Synthetic
aaaacgaauuuugucccc

SEQ ID NO: 267606 - RNA, 19 nt, Artificial Sequence
  Synthetic
uaaaacgaauuuugucccc

SEQ ID NO: 267607 - RNA, 20 nt, Artificial Sequence
  Synthetic
uuaaaacgaauuuugucccc

SEQ ID NO: 267608 - RNA, 21 nt, Artificial Sequence
  Synthetic
cuuaaaacgaauuuugucccc

SEQ ID NO: 267609 - RNA, 22 nt, Artificial Sequence
  Synthetic
ucuuaaaacgaauuuugucccc

SEQ ID NO: 267610 - RNA, 23 nt, Artificial Sequence
  Synthetic
uucuuaaaacgaauuuugucccc

SEQ ID NO: 267611 - RNA, 24 nt, Artificial Sequence
  Synthetic
guucuuaaaacgaauuuugucccc

SEQ ID NO: 267612 - RNA, 18 nt, Artificial Sequence
  Synthetic
uuaucucugauauucccc

SEQ ID NO: 267613 - RNA, 19 nt, Artificial Sequence
  Synthetic
uuuaucucugauauucccc

SEQ ID NO: 267614 - RNA, 20 nt, Artificial Sequence
  Synthetic
guuuaucucugauauucccc

SEQ ID NO: 267615 - RNA, 21 nt, Artificial Sequence
  Synthetic
uguuuaucucugauauucccc

SEQ ID NO: 267616 - RNA, 22 nt, Artificial Sequence
  Synthetic
guguuuaucucugauauucccc

SEQ ID NO: 267617 - RNA, 23 nt, Artificial Sequence
  Synthetic
uguguuuaucucugauauucccc

SEQ ID NO: 267618 - RNA, 24 nt, Artificial Sequence
  Synthetic
cuguguuuaucucugauauucccc

SEQ ID NO: 267619 - RNA, 18 nt, Artificial Sequence
  Synthetic
uccuuccuagccuucccc

SEQ ID NO: 267620 - RNA, 19 nt, Artificial Sequence
  Synthetic
cuccuuccuagccuucccc

SEQ ID NO: 267621 - RNA, 20 nt, Artificial Sequence
  Synthetic
ucuccuuccuagccuucccc

SEQ ID NO: 267622 - RNA, 21 nt, Artificial Sequence
  Synthetic
cucuccuuccuagccuucccc

SEQ ID NO: 267623 - RNA, 22 nt, Artificial Sequence
  Synthetic
ccucuccuuccuagccuucccc

SEQ ID NO: 267624 - RNA, 23 nt, Artificial Sequence
  Synthetic
gccucuccuuccuagccuucccc

SEQ ID NO: 267625 - RNA, 24 nt, Artificial Sequence
  Synthetic
cgccucuccuuccuagccuucccc

SEQ ID NO: 267626 - RNA, 18 nt, Artificial Sequence
  Synthetic
uugugaugaaauuucccc

SEQ ID NO: 267627 - RNA, 19 nt, Artificial Sequence
  Synthetic
auugugaugaaauuucccc

SEQ ID NO: 267628 - RNA, 20 nt, Artificial Sequence
  Synthetic
uauugugaugaaauuucccc

SEQ ID NO: 267629 - RNA, 21 nt, Artificial Sequence
  Synthetic
auauugugaugaaauuucccc

SEQ ID NO: 267630 - RNA, 22 nt, Artificial Sequence
  Synthetic
cauauugugaugaaauuucccc

SEQ ID NO: 267631 - RNA, 23 nt, Artificial Sequence
  Synthetic
gcauauugugaugaaauuucccc

SEQ ID NO: 267632 - RNA, 24 nt, Artificial Sequence
  Synthetic
agcauauugugaugaaauuucccc

SEQ ID NO: 267633 - RNA, 18 nt, Artificial Sequence
  Synthetic
acuucugugaguuucccc

SEQ ID NO: 267634 - RNA, 19 nt, Artificial Sequence
  Synthetic
aacuucugugaguuucccc

SEQ ID NO: 267635 - RNA, 20 nt, Artificial Sequence
  Synthetic
aaacuucugugaguuucccc

SEQ ID NO: 267636 - RNA, 21 nt, Artificial Sequence
  Synthetic
aaaacuucugugaguuucccc

SEQ ID NO: 267637 - RNA, 22 nt, Artificial Sequence
  Synthetic
caaaacuucugugaguuucccc

SEQ ID NO: 267638 - RNA, 23 nt, Artificial Sequence
  Synthetic
ccaaaacuucugugaguuucccc

SEQ ID NO: 267639 - RNA, 24 nt, Artificial Sequence
  Synthetic
cccaaaacuucugugaguuucccc

SEQ ID NO: 267640 - RNA, 18 nt, Artificial Sequence
  Synthetic
auauggguucuuuucccc

SEQ ID NO: 267641 - RNA, 19 nt, Artificial Sequence
  Synthetic
uauauggguucuuuucccc

SEQ ID NO: 267642 - RNA, 20 nt, Artificial Sequence
  Synthetic
cuauauggguucuuuucccc

SEQ ID NO: 267643 - RNA, 21 nt, Artificial Sequence
  Synthetic
acuauauggguucuuuucccc

SEQ ID NO: 267644 - RNA, 22 nt, Artificial Sequence
  Synthetic
cacuauauggguucuuuucccc

SEQ ID NO: 267645 - RNA, 23 nt, Artificial Sequence
  Synthetic
gcacuauauggguucuuuucccc

SEQ ID NO: 267646 - RNA, 24 nt, Artificial Sequence
  Synthetic
ugcacuauauggguucuuuucccc

SEQ ID NO: 267647 - RNA, 18 nt, Artificial Sequence
  Synthetic
accaaccaaaaaaagccc

SEQ ID NO: 267648 - RNA, 19 nt, Artificial Sequence
  Synthetic
uaccaaccaaaaaaagccc

SEQ ID NO: 267649 - RNA, 20 nt, Artificial Sequence
  Synthetic
cuaccaaccaaaaaaagccc

SEQ ID NO: 267650 - RNA, 21 nt, Artificial Sequence
  Synthetic
ccuaccaaccaaaaaaagccc

SEQ ID NO: 267651 - RNA, 22 nt, Artificial Sequence
  Synthetic
gccuaccaaccaaaaaaagccc

SEQ ID NO: 267652 - RNA, 23 nt, Artificial Sequence
  Synthetic
agccuaccaaccaaaaaaagccc

SEQ ID NO: 267653 - RNA, 24 nt, Artificial Sequence
  Synthetic
uagccuaccaaccaaaaaaagccc

SEQ ID NO: 267654 - RNA, 18 nt, Artificial Sequence
  Synthetic
gccccacucgcaaagccc

SEQ ID NO: 267655 - RNA, 19 nt, Artificial Sequence
  Synthetic
agccccacucgcaaagccc

SEQ ID NO: 267656 - RNA, 20 nt, Artificial Sequence
  Synthetic
gagccccacucgcaaagccc

SEQ ID NO: 267657 - RNA, 21 nt, Artificial Sequence
  Synthetic
ugagccccacucgcaaagccc

SEQ ID NO: 267658 - RNA, 22 nt, Artificial Sequence
  Synthetic
augagccccacucgcaaagccc

SEQ ID NO: 267659 - RNA, 23 nt, Artificial Sequence
  Synthetic
gaugagccccacucgcaaagccc

SEQ ID NO: 267660 - RNA, 24 nt, Artificial Sequence
  Synthetic
agaugagccccacucgcaaagccc

SEQ ID NO: 267661 - RNA, 18 nt, Artificial Sequence
  Synthetic
gguguucacuuaaagccc

SEQ ID NO: 267662 - RNA, 19 nt, Artificial Sequence
  Synthetic
ugguguucacuuaaagccc

SEQ ID NO: 267663 - RNA, 20 nt, Artificial Sequence
  Synthetic
cugguguucacuuaaagccc

SEQ ID NO: 267664 - RNA, 21 nt, Artificial Sequence
  Synthetic
acugguguucacuuaaagccc

SEQ ID NO: 267665 - RNA, 22 nt, Artificial Sequence
  Synthetic
cacugguguucacuuaaagccc

SEQ ID NO: 267666 - RNA, 23 nt, Artificial Sequence
  Synthetic
ccacugguguucacuuaaagccc

SEQ ID NO: 267667 - RNA, 24 nt, Artificial Sequence
  Synthetic
uccacugguguucacuuaaagccc

SEQ ID NO: 267668 - RNA, 18 nt, Artificial Sequence
  Synthetic
cagagagagagcaagccc

SEQ ID NO: 267669 - RNA, 19 nt, Artificial Sequence
  Synthetic
ccagagagagagcaagccc

SEQ ID NO: 267670 - RNA, 20 nt, Artificial Sequence
  Synthetic
uccagagagagagcaagccc

SEQ ID NO: 267671 - RNA, 21 nt, Artificial Sequence
  Synthetic
auccagagagagagcaagccc

SEQ ID NO: 267672 - RNA, 22 nt, Artificial Sequence
  Synthetic
gauccagagagagagcaagccc

SEQ ID NO: 267673 - RNA, 23 nt, Artificial Sequence
  Synthetic
ugauccagagagagagcaagccc

SEQ ID NO: 267674 - RNA, 24 nt, Artificial Sequence
  Synthetic
cugauccagagagagagcaagccc

SEQ ID NO: 267675 - RNA, 18 nt, Artificial Sequence
  Synthetic
ucaggauuuaagaagccc

SEQ ID NO: 267676 - RNA, 19 nt, Artificial Sequence
  Synthetic
cucaggauuuaagaagccc

SEQ ID NO: 267677 - RNA, 20 nt, Artificial Sequence
  Synthetic
acucaggauuuaagaagccc

SEQ ID NO: 267678 - RNA, 21 nt, Artificial Sequence
  Synthetic
gacucaggauuuaagaagccc

SEQ ID NO: 267679 - RNA, 22 nt, Artificial Sequence
  Synthetic
ugacucaggauuuaagaagccc

SEQ ID NO: 267680 - RNA, 23 nt, Artificial Sequence
  Synthetic
augacucaggauuuaagaagccc

SEQ ID NO: 267681 - RNA, 24 nt, Artificial Sequence
  Synthetic
uaugacucaggauuuaagaagccc

SEQ ID NO: 267682 - RNA, 18 nt, Artificial Sequence
  Synthetic
acuuaauuacagaagccc

SEQ ID NO: 267683 - RNA, 19 nt, Artificial Sequence
  Synthetic
cacuuaauuacagaagccc

SEQ ID NO: 267684 - RNA, 20 nt, Artificial Sequence
  Synthetic
acacuuaauuacagaagccc

SEQ ID NO: 267685 - RNA, 21 nt, Artificial Sequence
  Synthetic
gacacuuaauuacagaagccc

SEQ ID NO: 267686 - RNA, 22 nt, Artificial Sequence
  Synthetic
ugacacuuaauuacagaagccc

SEQ ID NO: 267687 - RNA, 23 nt, Artificial Sequence
  Synthetic
gugacacuuaauuacagaagccc

SEQ ID NO: 267688 - RNA, 24 nt, Artificial Sequence
  Synthetic
ugugacacuuaauuacagaagccc

SEQ ID NO: 267689 - RNA, 18 nt, Artificial Sequence
  Synthetic
uggcaguagcagaagccc

SEQ ID NO: 267690 - RNA, 19 nt, Artificial Sequence
  Synthetic
guggcaguagcagaagccc

SEQ ID NO: 267691 - RNA, 20 nt, Artificial Sequence
  Synthetic
gguggcaguagcagaagccc

SEQ ID NO: 267692 - RNA, 21 nt, Artificial Sequence
  Synthetic
agguggcaguagcagaagccc

SEQ ID NO: 267693 - RNA, 22 nt, Artificial Sequence
  Synthetic
gagguggcaguagcagaagccc

SEQ ID NO: 267694 - RNA, 23 nt, Artificial Sequence
  Synthetic
ggagguggcaguagcagaagccc

SEQ ID NO: 267695 - RNA, 24 nt, Artificial Sequence
  Synthetic
uggagguggcaguagcagaagccc

SEQ ID NO: 267696 - RNA, 18 nt, Artificial Sequence
  Synthetic
gaaaaaaaaaauaagccc

SEQ ID NO: 267697 - RNA, 19 nt, Artificial Sequence
  Synthetic
agaaaaaaaaaauaagccc

SEQ ID NO: 267698 - RNA, 20 nt, Artificial Sequence
  Synthetic
gagaaaaaaaaaauaagccc

SEQ ID NO: 267699 - RNA, 21 nt, Artificial Sequence
  Synthetic
ugagaaaaaaaaaauaagccc

SEQ ID NO: 267700 - RNA, 22 nt, Artificial Sequence
  Synthetic
augagaaaaaaaaaauaagccc

SEQ ID NO: 267701 - RNA, 23 nt, Artificial Sequence
  Synthetic
gaugagaaaaaaaaaauaagccc

SEQ ID NO: 267702 - RNA, 24 nt, Artificial Sequence
  Synthetic
agaugagaaaaaaaaaauaagccc

SEQ ID NO: 267703 - RNA, 18 nt, Artificial Sequence
  Synthetic
gacagagcagcacagccc

SEQ ID NO: 267704 - RNA, 19 nt, Artificial Sequence
  Synthetic
agacagagcagcacagccc

SEQ ID NO: 267705 - RNA, 20 nt, Artificial Sequence
  Synthetic
uagacagagcagcacagccc

SEQ ID NO: 267706 - RNA, 21 nt, Artificial Sequence
  Synthetic
uuagacagagcagcacagccc

SEQ ID NO: 267707 - RNA, 22 nt, Artificial Sequence
  Synthetic
guuagacagagcagcacagccc

SEQ ID NO: 267708 - RNA, 23 nt, Artificial Sequence
  Synthetic
uguuagacagagcagcacagccc

SEQ ID NO: 267709 - RNA, 24 nt, Artificial Sequence
  Synthetic
guguuagacagagcagcacagccc

SEQ ID NO: 267710 - RNA, 18 nt, Artificial Sequence
  Synthetic
ucaucccgaucacagccc

SEQ ID NO: 267711 - RNA, 19 nt, Artificial Sequence
  Synthetic
aucaucccgaucacagccc

SEQ ID NO: 267712 - RNA, 20 nt, Artificial Sequence
  Synthetic
aaucaucccgaucacagccc

SEQ ID NO: 267713 - RNA, 21 nt, Artificial Sequence
  Synthetic
caaucaucccgaucacagccc

SEQ ID NO: 267714 - RNA, 22 nt, Artificial Sequence
  Synthetic
ucaaucaucccgaucacagccc

SEQ ID NO: 267715 - RNA, 23 nt, Artificial Sequence
  Synthetic
cucaaucaucccgaucacagccc

SEQ ID NO: 267716 - RNA, 24 nt, Artificial Sequence
  Synthetic
ucucaaucaucccgaucacagccc

SEQ ID NO: 267717 - RNA, 18 nt, Artificial Sequence
  Synthetic
ccugccccaccccagccc

SEQ ID NO: 267718 - RNA, 19 nt, Artificial Sequence
  Synthetic
uccugccccaccccagccc

SEQ ID NO: 267719 - RNA, 20 nt, Artificial Sequence
  Synthetic
cuccugccccaccccagccc

SEQ ID NO: 267720 - RNA, 21 nt, Artificial Sequence
  Synthetic
ucuccugccccaccccagccc

SEQ ID NO: 267721 - RNA, 22 nt, Artificial Sequence
  Synthetic
gucuccugccccaccccagccc

SEQ ID NO: 267722 - RNA, 23 nt, Artificial Sequence
  Synthetic
agucuccugccccaccccagccc

SEQ ID NO: 267723 - RNA, 24 nt, Artificial Sequence
  Synthetic
cagucuccugccccaccccagccc

SEQ ID NO: 267724 - RNA, 18 nt, Artificial Sequence
  Synthetic
gcuuccugcccccagccc

SEQ ID NO: 267725 - RNA, 19 nt, Artificial Sequence
  Synthetic
ugcuuccugcccccagccc

SEQ ID NO: 267726 - RNA, 20 nt, Artificial Sequence
  Synthetic
uugcuuccugcccccagccc

SEQ ID NO: 267727 - RNA, 21 nt, Artificial Sequence
  Synthetic
auugcuuccugcccccagccc

SEQ ID NO: 267728 - RNA, 22 nt, Artificial Sequence
  Synthetic
cauugcuuccugcccccagccc

SEQ ID NO: 267729 - RNA, 23 nt, Artificial Sequence
  Synthetic
ccauugcuuccugcccccagccc

SEQ ID NO: 267730 - RNA, 24 nt, Artificial Sequence
  Synthetic
cccauugcuuccugcccccagccc

SEQ ID NO: 267731 - RNA, 18 nt, Artificial Sequence
  Synthetic
agcaaggguccccagccc

SEQ ID NO: 267732 - RNA, 19 nt, Artificial Sequence
  Synthetic
gagcaaggguccccagccc

SEQ ID NO: 267733 - RNA, 20 nt, Artificial Sequence
  Synthetic
agagcaaggguccccagccc

SEQ ID NO: 267734 - RNA, 21 nt, Artificial Sequence
  Synthetic
uagagcaaggguccccagccc

SEQ ID NO: 267735 - RNA, 22 nt, Artificial Sequence
  Synthetic
auagagcaaggguccccagccc

SEQ ID NO: 267736 - RNA, 23 nt, Artificial Sequence
  Synthetic
uauagagcaaggguccccagccc

SEQ ID NO: 267737 - RNA, 24 nt, Artificial Sequence
  Synthetic
cuauagagcaaggguccccagccc

SEQ ID NO: 267738 - RNA, 18 nt, Artificial Sequence
  Synthetic
aucuuaagaggccagccc

SEQ ID NO: 267739 - RNA, 19 nt, Artificial Sequence
  Synthetic
caucuuaagaggccagccc

SEQ ID NO: 267740 - RNA, 20 nt, Artificial Sequence
  Synthetic
gcaucuuaagaggccagccc

SEQ ID NO: 267741 - RNA, 21 nt, Artificial Sequence
  Synthetic
ugcaucuuaagaggccagccc

SEQ ID NO: 267742 - RNA, 22 nt, Artificial Sequence
  Synthetic
uugcaucuuaagaggccagccc

SEQ ID NO: 267743 - RNA, 23 nt, Artificial Sequence
  Synthetic
auugcaucuuaagaggccagccc

SEQ ID NO: 267744 - RNA, 24 nt, Artificial Sequence
  Synthetic
aauugcaucuuaagaggccagccc

SEQ ID NO: 267745 - RNA, 18 nt, Artificial Sequence
  Synthetic
ugcacaaauuugcagccc

SEQ ID NO: 267746 - RNA, 19 nt, Artificial Sequence
  Synthetic
cugcacaaauuugcagccc

SEQ ID NO: 267747 - RNA, 20 nt, Artificial Sequence
  Synthetic
gcugcacaaauuugcagccc

SEQ ID NO: 267748 - RNA, 21 nt, Artificial Sequence
  Synthetic
ugcugcacaaauuugcagccc

SEQ ID NO: 267749 - RNA, 22 nt, Artificial Sequence
  Synthetic
gugcugcacaaauuugcagccc

SEQ ID NO: 267750 - RNA, 23 nt, Artificial Sequence
  Synthetic
cgugcugcacaaauuugcagccc

SEQ ID NO: 267751 - RNA, 24 nt, Artificial Sequence
  Synthetic
acgugcugcacaaauuugcagccc

SEQ ID NO: 267752 - RNA, 18 nt, Artificial Sequence
  Synthetic
uuaggcacccaagagccc

SEQ ID NO: 267753 - RNA, 19 nt, Artificial Sequence
  Synthetic
uuuaggcacccaagagccc

SEQ ID NO: 267754 - RNA, 20 nt, Artificial Sequence
  Synthetic
guuuaggcacccaagagccc

SEQ ID NO: 267755 - RNA, 21 nt, Artificial Sequence
  Synthetic
gguuuaggcacccaagagccc

SEQ ID NO: 267756 - RNA, 22 nt, Artificial Sequence
  Synthetic
ugguuuaggcacccaagagccc

SEQ ID NO: 267757 - RNA, 23 nt, Artificial Sequence
  Synthetic
uugguuuaggcacccaagagccc

SEQ ID NO: 267758 - RNA, 24 nt, Artificial Sequence
  Synthetic
guugguuuaggcacccaagagccc

SEQ ID NO: 267759 - RNA, 18 nt, Artificial Sequence
  Synthetic
guugaacaacgagagccc

SEQ ID NO: 267760 - RNA, 19 nt, Artificial Sequence
  Synthetic
aguugaacaacgagagccc

SEQ ID NO: 267761 - RNA, 20 nt, Artificial Sequence
  Synthetic
gaguugaacaacgagagccc

SEQ ID NO: 267762 - RNA, 21 nt, Artificial Sequence
  Synthetic
ggaguugaacaacgagagccc

SEQ ID NO: 267763 - RNA, 22 nt, Artificial Sequence
  Synthetic
gggaguugaacaacgagagccc

SEQ ID NO: 267764 - RNA, 23 nt, Artificial Sequence
  Synthetic
ugggaguugaacaacgagagccc

SEQ ID NO: 267765 - RNA, 24 nt, Artificial Sequence
  Synthetic
gugggaguugaacaacgagagccc

SEQ ID NO: 267766 - RNA, 18 nt, Artificial Sequence
  Synthetic
ggagaguccuuagagccc

SEQ ID NO: 267767 - RNA, 19 nt, Artificial Sequence
  Synthetic
gggagaguccuuagagccc

SEQ ID NO: 267768 - RNA, 20 nt, Artificial Sequence
  Synthetic
agggagaguccuuagagccc

SEQ ID NO: 267769 - RNA, 21 nt, Artificial Sequence
  Synthetic
cagggagaguccuuagagccc

SEQ ID NO: 267770 - RNA, 22 nt, Artificial Sequence
  Synthetic
acagggagaguccuuagagccc

SEQ ID NO: 267771 - RNA, 23 nt, Artificial Sequence
  Synthetic
cacagggagaguccuuagagccc

SEQ ID NO: 267772 - RNA, 24 nt, Artificial Sequence
  Synthetic
acacagggagaguccuuagagccc

SEQ ID NO: 267773 - RNA, 18 nt, Artificial Sequence
  Synthetic
ggaggaucacuugagccc

SEQ ID NO: 267774 - RNA, 19 nt, Artificial Sequence
  Synthetic
aggaggaucacuugagccc

SEQ ID NO: 267775 - RNA, 20 nt, Artificial Sequence
  Synthetic
caggaggaucacuugagccc

SEQ ID NO: 267776 - RNA, 21 nt, Artificial Sequence
  Synthetic
acaggaggaucacuugagccc

SEQ ID NO: 267777 - RNA, 22 nt, Artificial Sequence
  Synthetic
cacaggaggaucacuugagccc

SEQ ID NO: 267778 - RNA, 23 nt, Artificial Sequence
  Synthetic
acacaggaggaucacuugagccc

SEQ ID NO: 267779 - RNA, 24 nt, Artificial Sequence
  Synthetic
gacacaggaggaucacuugagccc

SEQ ID NO: 267780 - RNA, 18 nt, Artificial Sequence
  Synthetic
ggaggaucucuugagccc

SEQ ID NO: 267781 - RNA, 19 nt, Artificial Sequence
  Synthetic
gggaggaucucuugagccc

SEQ ID NO: 267782 - RNA, 20 nt, Artificial Sequence
  Synthetic
cgggaggaucucuugagccc

SEQ ID NO: 267783 - RNA, 21 nt, Artificial Sequence
  Synthetic
gcgggaggaucucuugagccc

SEQ ID NO: 267784 - RNA, 22 nt, Artificial Sequence
  Synthetic
ggcgggaggaucucuugagccc

SEQ ID NO: 267785 - RNA, 23 nt, Artificial Sequence
  Synthetic
aggcgggaggaucucuugagccc

SEQ ID NO: 267786 - RNA, 24 nt, Artificial Sequence
  Synthetic
gaggcgggaggaucucuugagccc

SEQ ID NO: 267787 - RNA, 18 nt, Artificial Sequence
  Synthetic
ggagaaucguuugagccc

SEQ ID NO: 267788 - RNA, 19 nt, Artificial Sequence
  Synthetic
gggagaaucguuugagccc

SEQ ID NO: 267789 - RNA, 20 nt, Artificial Sequence
  Synthetic
ugggagaaucguuugagccc

SEQ ID NO: 267790 - RNA, 21 nt, Artificial Sequence
  Synthetic
augggagaaucguuugagccc

SEQ ID NO: 267791 - RNA, 22 nt, Artificial Sequence
  Synthetic
gaugggagaaucguuugagccc

SEQ ID NO: 267792 - RNA, 23 nt, Artificial Sequence
  Synthetic
agaugggagaaucguuugagccc

SEQ ID NO: 267793 - RNA, 24 nt, Artificial Sequence
  Synthetic
gagaugggagaaucguuugagccc

SEQ ID NO: 267794 - RNA, 18 nt, Artificial Sequence
  Synthetic
acuuguguaguauagccc

SEQ ID NO: 267795 - RNA, 19 nt, Artificial Sequence
  Synthetic
aacuuguguaguauagccc

SEQ ID NO: 267796 - RNA, 20 nt, Artificial Sequence
  Synthetic
caacuuguguaguauagccc

SEQ ID NO: 267797 - RNA, 21 nt, Artificial Sequence
  Synthetic
acaacuuguguaguauagccc

SEQ ID NO: 267798 - RNA, 22 nt, Artificial Sequence
  Synthetic
aacaacuuguguaguauagccc

SEQ ID NO: 267799 - RNA, 23 nt, Artificial Sequence
  Synthetic
aaacaacuuguguaguauagccc

SEQ ID NO: 267800 - RNA, 24 nt, Artificial Sequence
  Synthetic
uaaacaacuuguguaguauagccc

SEQ ID NO: 267801 - RNA, 18 nt, Artificial Sequence
  Synthetic
aucuugcccaacuagccc

SEQ ID NO: 267802 - RNA, 19 nt, Artificial Sequence
  Synthetic
caucuugcccaacuagccc

SEQ ID NO: 267803 - RNA, 20 nt, Artificial Sequence
  Synthetic
acaucuugcccaacuagccc

SEQ ID NO: 267804 - RNA, 21 nt, Artificial Sequence
  Synthetic
uacaucuugcccaacuagccc

SEQ ID NO: 267805 - RNA, 22 nt, Artificial Sequence
  Synthetic
guacaucuugcccaacuagccc

SEQ ID NO: 267806 - RNA, 23 nt, Artificial Sequence
  Synthetic
aguacaucuugcccaacuagccc

SEQ ID NO: 267807 - RNA, 24 nt, Artificial Sequence
  Synthetic
uaguacaucuugcccaacuagccc

SEQ ID NO: 267808 - RNA, 18 nt, Artificial Sequence
  Synthetic
cugcauauuuacuagccc

SEQ ID NO: 267809 - RNA, 19 nt, Artificial Sequence
  Synthetic
acugcauauuuacuagccc

SEQ ID NO: 267810 - RNA, 20 nt, Artificial Sequence
  Synthetic
uacugcauauuuacuagccc

SEQ ID NO: 267811 - RNA, 21 nt, Artificial Sequence
  Synthetic
auacugcauauuuacuagccc

SEQ ID NO: 267812 - RNA, 22 nt, Artificial Sequence
  Synthetic
cauacugcauauuuacuagccc

SEQ ID NO: 267813 - RNA, 23 nt, Artificial Sequence
  Synthetic
ucauacugcauauuuacuagccc

SEQ ID NO: 267814 - RNA, 24 nt, Artificial Sequence
  Synthetic
aucauacugcauauuuacuagccc

SEQ ID NO: 267815 - RNA, 18 nt, Artificial Sequence
  Synthetic
uuaggaauuagcuagccc

SEQ ID NO: 267816 - RNA, 19 nt, Artificial Sequence
  Synthetic
uuuaggaauuagcuagccc

SEQ ID NO: 267817 - RNA, 20 nt, Artificial Sequence
  Synthetic
cuuuaggaauuagcuagccc

SEQ ID NO: 267818 - RNA, 21 nt, Artificial Sequence
  Synthetic
ucuuuaggaauuagcuagccc

SEQ ID NO: 267819 - RNA, 22 nt, Artificial Sequence
  Synthetic
aucuuuaggaauuagcuagccc

SEQ ID NO: 267820 - RNA, 23 nt, Artificial Sequence
  Synthetic
uaucuuuaggaauuagcuagccc

SEQ ID NO: 267821 - RNA, 24 nt, Artificial Sequence
  Synthetic
cuaucuuuaggaauuagcuagccc

SEQ ID NO: 267822 - RNA, 18 nt, Artificial Sequence
  Synthetic
acagaguugcaguagccc

SEQ ID NO: 267823 - RNA, 19 nt, Artificial Sequence
  Synthetic
aacagaguugcaguagccc

SEQ ID NO: 267824 - RNA, 20 nt, Artificial Sequence
  Synthetic
uaacagaguugcaguagccc

SEQ ID NO: 267825 - RNA, 21 nt, Artificial Sequence
  Synthetic
uuaacagaguugcaguagccc

SEQ ID NO: 267826 - RNA, 22 nt, Artificial Sequence
  Synthetic
auuaacagaguugcaguagccc

SEQ ID NO: 267827 - RNA, 23 nt, Artificial Sequence
  Synthetic
aauuaacagaguugcaguagccc

SEQ ID NO: 267828 - RNA, 24 nt, Artificial Sequence
  Synthetic
aaauuaacagaguugcaguagccc

SEQ ID NO: 267829 - RNA, 18 nt, Artificial Sequence
  Synthetic
auuucaaacggguagccc

SEQ ID NO: 267830 - RNA, 19 nt, Artificial Sequence
  Synthetic
gauuucaaacggguagccc

SEQ ID NO: 267831 - RNA, 20 nt, Artificial Sequence
  Synthetic
ugauuucaaacggguagccc

SEQ ID NO: 267832 - RNA, 21 nt, Artificial Sequence
  Synthetic
uugauuucaaacggguagccc

SEQ ID NO: 267833 - RNA, 22 nt, Artificial Sequence
  Synthetic
uuugauuucaaacggguagccc

SEQ ID NO: 267834 - RNA, 23 nt, Artificial Sequence
  Synthetic
cuuugauuucaaacggguagccc

SEQ ID NO: 267835 - RNA, 24 nt, Artificial Sequence
  Synthetic
gcuuugauuucaaacggguagccc

SEQ ID NO: 267836 - RNA, 18 nt, Artificial Sequence
  Synthetic
ggcaguccacguuagccc

SEQ ID NO: 267837 - RNA, 19 nt, Artificial Sequence
  Synthetic
cggcaguccacguuagccc

SEQ ID NO: 267838 - RNA, 20 nt, Artificial Sequence
  Synthetic
ccggcaguccacguuagccc

SEQ ID NO: 267839 - RNA, 21 nt, Artificial Sequence
  Synthetic
gccggcaguccacguuagccc

SEQ ID NO: 267840 - RNA, 22 nt, Artificial Sequence
  Synthetic
agccggcaguccacguuagccc

SEQ ID NO: 267841 - RNA, 23 nt, Artificial Sequence
  Synthetic
gagccggcaguccacguuagccc

SEQ ID NO: 267842 - RNA, 24 nt, Artificial Sequence
  Synthetic
ggagccggcaguccacguuagccc

SEQ ID NO: 267843 - RNA, 18 nt, Artificial Sequence
  Synthetic
agugaucauauuuagccc

SEQ ID NO: 267844 - RNA, 19 nt, Artificial Sequence
  Synthetic
aagugaucauauuuagccc

SEQ ID NO: 267845 - RNA, 20 nt, Artificial Sequence
  Synthetic
gaagugaucauauuuagccc

SEQ ID NO: 267846 - RNA, 21 nt, Artificial Sequence
  Synthetic
ugaagugaucauauuuagccc

SEQ ID NO: 267847 - RNA, 22 nt, Artificial Sequence
  Synthetic
uugaagugaucauauuuagccc

SEQ ID NO: 267848 - RNA, 23 nt, Artificial Sequence
  Synthetic
auugaagugaucauauuuagccc

SEQ ID NO: 267849 - RNA, 24 nt, Artificial Sequence
  Synthetic
gauugaagugaucauauuuagccc

SEQ ID NO: 267850 - RNA, 18 nt, Artificial Sequence
  Synthetic
gagaaauucacagcgccc

SEQ ID NO: 267851 - RNA, 19 nt, Artificial Sequence
  Synthetic
ugagaaauucacagcgccc

SEQ ID NO: 267852 - RNA, 20 nt, Artificial Sequence
  Synthetic
gugagaaauucacagcgccc

SEQ ID NO: 267853 - RNA, 21 nt, Artificial Sequence
  Synthetic
agugagaaauucacagcgccc

SEQ ID NO: 267854 - RNA, 22 nt, Artificial Sequence
  Synthetic
gagugagaaauucacagcgccc

SEQ ID NO: 267855 - RNA, 23 nt, Artificial Sequence
  Synthetic
ggagugagaaauucacagcgccc

SEQ ID NO: 267856 - RNA, 24 nt, Artificial Sequence
  Synthetic
uggagugagaaauucacagcgccc

SEQ ID NO: 267857 - RNA, 18 nt, Artificial Sequence
  Synthetic
augccacagcaaaggccc

SEQ ID NO: 267858 - RNA, 19 nt, Artificial Sequence
  Synthetic
uaugccacagcaaaggccc

SEQ ID NO: 267859 - RNA, 20 nt, Artificial Sequence
  Synthetic
cuaugccacagcaaaggccc

SEQ ID NO: 267860 - RNA, 21 nt, Artificial Sequence
  Synthetic
acuaugccacagcaaaggccc

SEQ ID NO: 267861 - RNA, 22 nt, Artificial Sequence
  Synthetic
gacuaugccacagcaaaggccc

SEQ ID NO: 267862 - RNA, 23 nt, Artificial Sequence
  Synthetic
agacuaugccacagcaaaggccc

SEQ ID NO: 267863 - RNA, 24 nt, Artificial Sequence
  Synthetic
aagacuaugccacagcaaaggccc

SEQ ID NO: 267864 - RNA, 18 nt, Artificial Sequence
  Synthetic
gcuugcuugggcaggccc

SEQ ID NO: 267865 - RNA, 19 nt, Artificial Sequence
  Synthetic
ugcuugcuugggcaggccc

SEQ ID NO: 267866 - RNA, 20 nt, Artificial Sequence
  Synthetic
augcuugcuugggcaggccc

SEQ ID NO: 267867 - RNA, 21 nt, Artificial Sequence
  Synthetic
aaugcuugcuugggcaggccc

SEQ ID NO: 267868 - RNA, 22 nt, Artificial Sequence
  Synthetic
aaaugcuugcuugggcaggccc

SEQ ID NO: 267869 - RNA, 23 nt, Artificial Sequence
  Synthetic
caaaugcuugcuugggcaggccc

SEQ ID NO: 267870 - RNA, 24 nt, Artificial Sequence
  Synthetic
acaaaugcuugcuugggcaggccc

SEQ ID NO: 267871 - RNA, 18 nt, Artificial Sequence
  Synthetic
ccuuaagcuuucaggccc

SEQ ID NO: 267872 - RNA, 19 nt, Artificial Sequence
  Synthetic
uccuuaagcuuucaggccc

SEQ ID NO: 267873 - RNA, 20 nt, Artificial Sequence
  Synthetic
cuccuuaagcuuucaggccc

SEQ ID NO: 267874 - RNA, 21 nt, Artificial Sequence
  Synthetic
ucuccuuaagcuuucaggccc

SEQ ID NO: 267875 - RNA, 22 nt, Artificial Sequence
  Synthetic
aucuccuuaagcuuucaggccc

SEQ ID NO: 267876 - RNA, 23 nt, Artificial Sequence
  Synthetic
caucuccuuaagcuuucaggccc

SEQ ID NO: 267877 - RNA, 24 nt, Artificial Sequence
  Synthetic
ucaucuccuuaagcuuucaggccc

SEQ ID NO: 267878 - RNA, 18 nt, Artificial Sequence
  Synthetic
uugauuuggucgaggccc

SEQ ID NO: 267879 - RNA, 19 nt, Artificial Sequence
  Synthetic
cuugauuuggucgaggccc

SEQ ID NO: 267880 - RNA, 20 nt, Artificial Sequence
  Synthetic
acuugauuuggucgaggccc

SEQ ID NO: 267881 - RNA, 21 nt, Artificial Sequence
  Synthetic
uacuugauuuggucgaggccc

SEQ ID NO: 267882 - RNA, 22 nt, Artificial Sequence
  Synthetic
guacuugauuuggucgaggccc

SEQ ID NO: 267883 - RNA, 23 nt, Artificial Sequence
  Synthetic
cguacuugauuuggucgaggccc

SEQ ID NO: 267884 - RNA, 24 nt, Artificial Sequence
  Synthetic
acguacuugauuuggucgaggccc

SEQ ID NO: 267885 - RNA, 18 nt, Artificial Sequence
  Synthetic
cucagaauagggaggccc

SEQ ID NO: 267886 - RNA, 19 nt, Artificial Sequence
  Synthetic
ucucagaauagggaggccc

SEQ ID NO: 267887 - RNA, 20 nt, Artificial Sequence
  Synthetic
gucucagaauagggaggccc

SEQ ID NO: 267888 - RNA, 21 nt, Artificial Sequence
  Synthetic
ugucucagaauagggaggccc

SEQ ID NO: 267889 - RNA, 22 nt, Artificial Sequence
  Synthetic
gugucucagaauagggaggccc

SEQ ID NO: 267890 - RNA, 23 nt, Artificial Sequence
  Synthetic
ugugucucagaauagggaggccc

SEQ ID NO: 267891 - RNA, 24 nt, Artificial Sequence
  Synthetic
uugugucucagaauagggaggccc

SEQ ID NO: 267892 - RNA, 18 nt, Artificial Sequence
  Synthetic
auuucuaguucuaggccc

SEQ ID NO: 267893 - RNA, 19 nt, Artificial Sequence
  Synthetic
uauuucuaguucuaggccc

SEQ ID NO: 267894 - RNA, 20 nt, Artificial Sequence
  Synthetic
guauuucuaguucuaggccc

SEQ ID NO: 267895 - RNA, 21 nt, Artificial Sequence
  Synthetic
gguauuucuaguucuaggccc

SEQ ID NO: 267896 - RNA, 22 nt, Artificial Sequence
  Synthetic
ugguauuucuaguucuaggccc

SEQ ID NO: 267897 - RNA, 23 nt, Artificial Sequence
  Synthetic
augguauuucuaguucuaggccc

SEQ ID NO: 267898 - RNA, 24 nt, Artificial Sequence
  Synthetic
aaugguauuucuaguucuaggccc

SEQ ID NO: 267899 - RNA, 18 nt, Artificial Sequence
  Synthetic
gggcucugggcccggccc

SEQ ID NO: 267900 - RNA, 19 nt, Artificial Sequence
  Synthetic
ggggcucugggcccggccc

SEQ ID NO: 267901 - RNA, 20 nt, Artificial Sequence
  Synthetic
gggggcucugggcccggccc

SEQ ID NO: 267902 - RNA, 21 nt, Artificial Sequence
  Synthetic
ggggggcucugggcccggccc

SEQ ID NO: 267903 - RNA, 22 nt, Artificial Sequence
  Synthetic
aggggggcucugggcccggccc

SEQ ID NO: 267904 - RNA, 23 nt, Artificial Sequence
  Synthetic
caggggggcucugggcccggccc

SEQ ID NO: 267905 - RNA, 24 nt, Artificial Sequence
  Synthetic
gcaggggggcucugggcccggccc

SEQ ID NO: 267906 - RNA, 18 nt, Artificial Sequence
  Synthetic
uuugaaagcauggggccc

SEQ ID NO: 267907 - RNA, 19 nt, Artificial Sequence
  Synthetic
cuuugaaagcauggggccc

SEQ ID NO: 267908 - RNA, 20 nt, Artificial Sequence
  Synthetic
ccuuugaaagcauggggccc

SEQ ID NO: 267909 - RNA, 21 nt, Artificial Sequence
  Synthetic
gccuuugaaagcauggggccc

SEQ ID NO: 267910 - RNA, 22 nt, Artificial Sequence
  Synthetic
ugccuuugaaagcauggggccc

SEQ ID NO: 267911 - RNA, 23 nt, Artificial Sequence
  Synthetic
uugccuuugaaagcauggggccc

SEQ ID NO: 267912 - RNA, 24 nt, Artificial Sequence
  Synthetic
uuugccuuugaaagcauggggccc

SEQ ID NO: 267913 - RNA, 18 nt, Artificial Sequence
  Synthetic
cuucuuccaguguggccc

SEQ ID NO: 267914 - RNA, 19 nt, Artificial Sequence
  Synthetic
ucuucuuccaguguggccc

SEQ ID NO: 267915 - RNA, 20 nt, Artificial Sequence
  Synthetic
uucuucuuccaguguggccc

SEQ ID NO: 267916 - RNA, 21 nt, Artificial Sequence
  Synthetic
auucuucuuccaguguggccc

SEQ ID NO: 267917 - RNA, 22 nt, Artificial Sequence
  Synthetic
aauucuucuuccaguguggccc

SEQ ID NO: 267918 - RNA, 23 nt, Artificial Sequence
  Synthetic
caauucuucuuccaguguggccc

SEQ ID NO: 267919 - RNA, 24 nt, Artificial Sequence
  Synthetic
acaauucuucuuccaguguggccc

SEQ ID NO: 267920 - RNA, 18 nt, Artificial Sequence
  Synthetic
uuacuaacuauaaugccc

SEQ ID NO: 267921 - RNA, 19 nt, Artificial Sequence
  Synthetic
uuuacuaacuauaaugccc

SEQ ID NO: 267922 - RNA, 20 nt, Artificial Sequence
  Synthetic
guuuacuaacuauaaugccc

SEQ ID NO: 267923 - RNA, 21 nt, Artificial Sequence
  Synthetic
gguuuacuaacuauaaugccc

SEQ ID NO: 267924 - RNA, 22 nt, Artificial Sequence
  Synthetic
ugguuuacuaacuauaaugccc

SEQ ID NO: 267925 - RNA, 23 nt, Artificial Sequence
  Synthetic
cugguuuacuaacuauaaugccc

SEQ ID NO: 267926 - RNA, 24 nt, Artificial Sequence
  Synthetic
ccugguuuacuaacuauaaugccc

SEQ ID NO: 267927 - RNA, 18 nt, Artificial Sequence
  Synthetic
aauauauuauucaugccc

SEQ ID NO: 267928 - RNA, 19 nt, Artificial Sequence
  Synthetic
aaauauauuauucaugccc

SEQ ID NO: 267929 - RNA, 20 nt, Artificial Sequence
  Synthetic
caaauauauuauucaugccc

SEQ ID NO: 267930 - RNA, 21 nt, Artificial Sequence
  Synthetic
ucaaauauauuauucaugccc

SEQ ID NO: 267931 - RNA, 22 nt, Artificial Sequence
  Synthetic
aucaaauauauuauucaugccc

SEQ ID NO: 267932 - RNA, 23 nt, Artificial Sequence
  Synthetic
aaucaaauauauuauucaugccc

SEQ ID NO: 267933 - RNA, 24 nt, Artificial Sequence
  Synthetic
uaaucaaauauauuauucaugccc

SEQ ID NO: 267934 - RNA, 18 nt, Artificial Sequence
  Synthetic
acucauagacagaugccc

SEQ ID NO: 267935 - RNA, 19 nt, Artificial Sequence
  Synthetic
uacucauagacagaugccc

SEQ ID NO: 267936 - RNA, 20 nt, Artificial Sequence
  Synthetic
cuacucauagacagaugccc

SEQ ID NO: 267937 - RNA, 21 nt, Artificial Sequence
  Synthetic
ccuacucauagacagaugccc

SEQ ID NO: 267938 - RNA, 22 nt, Artificial Sequence
  Synthetic
uccuacucauagacagaugccc

SEQ ID NO: 267939 - RNA, 23 nt, Artificial Sequence
  Synthetic
auccuacucauagacagaugccc

SEQ ID NO: 267940 - RNA, 24 nt, Artificial Sequence
  Synthetic
uauccuacucauagacagaugccc

SEQ ID NO: 267941 - RNA, 18 nt, Artificial Sequence
  Synthetic
ggucucaaugauaugccc

SEQ ID NO: 267942 - RNA, 19 nt, Artificial Sequence
  Synthetic
gggucucaaugauaugccc

SEQ ID NO: 267943 - RNA, 20 nt, Artificial Sequence
  Synthetic
ugggucucaaugauaugccc

SEQ ID NO: 267944 - RNA, 21 nt, Artificial Sequence
  Synthetic
gugggucucaaugauaugccc

SEQ ID NO: 267945 - RNA, 22 nt, Artificial Sequence
  Synthetic
ugugggucucaaugauaugccc

SEQ ID NO: 267946 - RNA, 23 nt, Artificial Sequence
  Synthetic
gugugggucucaaugauaugccc

SEQ ID NO: 267947 - RNA, 24 nt, Artificial Sequence
  Synthetic
agugugggucucaaugauaugccc

SEQ ID NO: 267948 - RNA, 18 nt, Artificial Sequence
  Synthetic
guaugagaacaacugccc

SEQ ID NO: 267949 - RNA, 19 nt, Artificial Sequence
  Synthetic
aguaugagaacaacugccc

SEQ ID NO: 267950 - RNA, 20 nt, Artificial Sequence
  Synthetic
aaguaugagaacaacugccc

SEQ ID NO: 267951 - RNA, 21 nt, Artificial Sequence
  Synthetic
aaaguaugagaacaacugccc

SEQ ID NO: 267952 - RNA, 22 nt, Artificial Sequence
  Synthetic
uaaaguaugagaacaacugccc

SEQ ID NO: 267953 - RNA, 23 nt, Artificial Sequence
  Synthetic
cuaaaguaugagaacaacugccc

SEQ ID NO: 267954 - RNA, 24 nt, Artificial Sequence
  Synthetic
ccuaaaguaugagaacaacugccc

SEQ ID NO: 267955 - RNA, 18 nt, Artificial Sequence
  Synthetic
gucucccaagcacugccc

SEQ ID NO: 267956 - RNA, 19 nt, Artificial Sequence
  Synthetic
ugucucccaagcacugccc

SEQ ID NO: 267957 - RNA, 20 nt, Artificial Sequence
  Synthetic
augucucccaagcacugccc

SEQ ID NO: 267958 - RNA, 21 nt, Artificial Sequence
  Synthetic
gaugucucccaagcacugccc

SEQ ID NO: 267959 - RNA, 22 nt, Artificial Sequence
  Synthetic
ggaugucucccaagcacugccc

SEQ ID NO: 267960 - RNA, 23 nt, Artificial Sequence
  Synthetic
gggaugucucccaagcacugccc

SEQ ID NO: 267961 - RNA, 24 nt, Artificial Sequence
  Synthetic
ugggaugucucccaagcacugccc

SEQ ID NO: 267962 - RNA, 18 nt, Artificial Sequence
  Synthetic
aaggucagaggccugccc

SEQ ID NO: 267963 - RNA, 19 nt, Artificial Sequence
  Synthetic
gaaggucagaggccugccc

SEQ ID NO: 267964 - RNA, 20 nt, Artificial Sequence
  Synthetic
agaaggucagaggccugccc

SEQ ID NO: 267965 - RNA, 21 nt, Artificial Sequence
  Synthetic
gagaaggucagaggccugccc

SEQ ID NO: 267966 - RNA, 22 nt, Artificial Sequence
  Synthetic
ggagaaggucagaggccugccc

SEQ ID NO: 267967 - RNA, 23 nt, Artificial Sequence
  Synthetic
aggagaaggucagaggccugccc

SEQ ID NO: 267968 - RNA, 24 nt, Artificial Sequence
  Synthetic
caggagaaggucagaggccugccc

SEQ ID NO: 267969 - RNA, 18 nt, Artificial Sequence
  Synthetic
acacauacacuccugccc

SEQ ID NO: 267970 - RNA, 19 nt, Artificial Sequence
  Synthetic
uacacauacacuccugccc

SEQ ID NO: 267971 - RNA, 20 nt, Artificial Sequence
  Synthetic
auacacauacacuccugccc

SEQ ID NO: 267972 - RNA, 21 nt, Artificial Sequence
  Synthetic
cauacacauacacuccugccc

SEQ ID NO: 267973 - RNA, 22 nt, Artificial Sequence
  Synthetic
acauacacauacacuccugccc

SEQ ID NO: 267974 - RNA, 23 nt, Artificial Sequence
  Synthetic
aacauacacauacacuccugccc

SEQ ID NO: 267975 - RNA, 24 nt, Artificial Sequence
  Synthetic
gaacauacacauacacuccugccc

SEQ ID NO: 267976 - RNA, 18 nt, Artificial Sequence
  Synthetic
gucaauaaucuccugccc

SEQ ID NO: 267977 - RNA, 19 nt, Artificial Sequence
  Synthetic
agucaauaaucuccugccc

SEQ ID NO: 267978 - RNA, 20 nt, Artificial Sequence
  Synthetic
gagucaauaaucuccugccc

SEQ ID NO: 267979 - RNA, 21 nt, Artificial Sequence
  Synthetic
agagucaauaaucuccugccc

SEQ ID NO: 267980 - RNA, 22 nt, Artificial Sequence
  Synthetic
aagagucaauaaucuccugccc

SEQ ID NO: 267981 - RNA, 23 nt, Artificial Sequence
  Synthetic
uaagagucaauaaucuccugccc

SEQ ID NO: 267982 - RNA, 24 nt, Artificial Sequence
  Synthetic
uuaagagucaauaaucuccugccc

SEQ ID NO: 267983 - RNA, 18 nt, Artificial Sequence
  Synthetic
caaaugcuagaucugccc

SEQ ID NO: 267984 - RNA, 19 nt, Artificial Sequence
  Synthetic
ucaaaugcuagaucugccc

SEQ ID NO: 267985 - RNA, 20 nt, Artificial Sequence
  Synthetic
cucaaaugcuagaucugccc

SEQ ID NO: 267986 - RNA, 21 nt, Artificial Sequence
  Synthetic
ucucaaaugcuagaucugccc

SEQ ID NO: 267987 - RNA, 22 nt, Artificial Sequence
  Synthetic
aucucaaaugcuagaucugccc

SEQ ID NO: 267988 - RNA, 23 nt, Artificial Sequence
  Synthetic
aaucucaaaugcuagaucugccc

SEQ ID NO: 267989 - RNA, 24 nt, Artificial Sequence
  Synthetic
aaaucucaaaugcuagaucugccc

SEQ ID NO: 267990 - RNA, 18 nt, Artificial Sequence
  Synthetic
aaagaggacggucugccc

SEQ ID NO: 267991 - RNA, 19 nt, Artificial Sequence
  Synthetic
aaaagaggacggucugccc

SEQ ID NO: 267992 - RNA, 20 nt, Artificial Sequence
  Synthetic
caaaagaggacggucugccc

SEQ ID NO: 267993 - RNA, 21 nt, Artificial Sequence
  Synthetic
acaaaagaggacggucugccc

SEQ ID NO: 267994 - RNA, 22 nt, Artificial Sequence
  Synthetic
gacaaaagaggacggucugccc

SEQ ID NO: 267995 - RNA, 23 nt, Artificial Sequence
  Synthetic
ggacaaaagaggacggucugccc

SEQ ID NO: 267996 - RNA, 24 nt, Artificial Sequence
  Synthetic
aggacaaaagaggacggucugccc

SEQ ID NO: 267997 - RNA, 18 nt, Artificial Sequence
  Synthetic
gacaucuauuuucugccc

SEQ ID NO: 267998 - RNA, 19 nt, Artificial Sequence
  Synthetic
ugacaucuauuuucugccc

SEQ ID NO: 267999 - RNA, 20 nt, Artificial Sequence
  Synthetic
augacaucuauuuucugccc

SEQ ID NO: 268000 - RNA, 21 nt, Artificial Sequence
  Synthetic
gaugacaucuauuuucugccc

SEQ ID NO: 268001 - RNA, 22 nt, Artificial Sequence
  Synthetic
agaugacaucuauuuucugccc

SEQ ID NO: 268002 - RNA, 23 nt, Artificial Sequence
  Synthetic
aagaugacaucuauuuucugccc

SEQ ID NO: 268003 - RNA, 24 nt, Artificial Sequence
  Synthetic
aaagaugacaucuauuuucugccc

SEQ ID NO: 268004 - RNA, 18 nt, Artificial Sequence
  Synthetic
cguugugcacaugugccc

SEQ ID NO: 268005 - RNA, 19 nt, Artificial Sequence
  Synthetic
acguugugcacaugugccc

SEQ ID NO: 268006 - RNA, 20 nt, Artificial Sequence
  Synthetic
cacguugugcacaugugccc

SEQ ID NO: 268007 - RNA, 21 nt, Artificial Sequence
  Synthetic
gcacguugugcacaugugccc

SEQ ID NO: 268008 - RNA, 22 nt, Artificial Sequence
  Synthetic
cgcacguugugcacaugugccc

SEQ ID NO: 268009 - RNA, 23 nt, Artificial Sequence
  Synthetic
ccgcacguugugcacaugugccc

SEQ ID NO: 268010 - RNA, 24 nt, Artificial Sequence
  Synthetic
cccgcacguugugcacaugugccc

SEQ ID NO: 268011 - RNA, 18 nt, Artificial Sequence
  Synthetic
ucugcuaucuaugugccc

SEQ ID NO: 268012 - RNA, 19 nt, Artificial Sequence
  Synthetic
uucugcuaucuaugugccc

SEQ ID NO: 268013 - RNA, 20 nt, Artificial Sequence
  Synthetic
uuucugcuaucuaugugccc

SEQ ID NO: 268014 - RNA, 21 nt, Artificial Sequence
  Synthetic
cuuucugcuaucuaugugccc

SEQ ID NO: 268015 - RNA, 22 nt, Artificial Sequence
  Synthetic
ccuuucugcuaucuaugugccc

SEQ ID NO: 268016 - RNA, 23 nt, Artificial Sequence
  Synthetic
gccuuucugcuaucuaugugccc

SEQ ID NO: 268017 - RNA, 24 nt, Artificial Sequence
  Synthetic
ggccuuucugcuaucuaugugccc

SEQ ID NO: 268018 - RNA, 18 nt, Artificial Sequence
  Synthetic
aucaaguccucauugccc

SEQ ID NO: 268019 - RNA, 19 nt, Artificial Sequence
  Synthetic
uaucaaguccucauugccc

SEQ ID NO: 268020 - RNA, 20 nt, Artificial Sequence
  Synthetic
uuaucaaguccucauugccc

SEQ ID NO: 268021 - RNA, 21 nt, Artificial Sequence
  Synthetic
uuuaucaaguccucauugccc

SEQ ID NO: 268022 - RNA, 22 nt, Artificial Sequence
  Synthetic
uuuuaucaaguccucauugccc

SEQ ID NO: 268023 - RNA, 23 nt, Artificial Sequence
  Synthetic
uuuuuaucaaguccucauugccc

SEQ ID NO: 268024 - RNA, 24 nt, Artificial Sequence
  Synthetic
auuuuuaucaaguccucauugccc

SEQ ID NO: 268025 - RNA, 18 nt, Artificial Sequence
  Synthetic
aaggucucugacuugccc

SEQ ID NO: 268026 - RNA, 19 nt, Artificial Sequence
  Synthetic
gaaggucucugacuugccc

SEQ ID NO: 268027 - RNA, 20 nt, Artificial Sequence
  Synthetic
ugaaggucucugacuugccc

SEQ ID NO: 268028 - RNA, 21 nt, Artificial Sequence
  Synthetic
augaaggucucugacuugccc

SEQ ID NO: 268029 - RNA, 22 nt, Artificial Sequence
  Synthetic
aaugaaggucucugacuugccc

SEQ ID NO: 268030 - RNA, 23 nt, Artificial Sequence
  Synthetic
caaugaaggucucugacuugccc

SEQ ID NO: 268031 - RNA, 24 nt, Artificial Sequence
  Synthetic
gcaaugaaggucucugacuugccc

SEQ ID NO: 268032 - RNA, 18 nt, Artificial Sequence
  Synthetic
uaucaguuaaucuugccc

SEQ ID NO: 268033 - RNA, 19 nt, Artificial Sequence
  Synthetic
cuaucaguuaaucuugccc

SEQ ID NO: 268034 - RNA, 20 nt, Artificial Sequence
  Synthetic
ucuaucaguuaaucuugccc

SEQ ID NO: 268035 - RNA, 21 nt, Artificial Sequence
  Synthetic
gucuaucaguuaaucuugccc

SEQ ID NO: 268036 - RNA, 22 nt, Artificial Sequence
  Synthetic
ugucuaucaguuaaucuugccc

SEQ ID NO: 268037 - RNA, 23 nt, Artificial Sequence
  Synthetic
gugucuaucaguuaaucuugccc

SEQ ID NO: 268038 - RNA, 24 nt, Artificial Sequence
  Synthetic
ugugucuaucaguuaaucuugccc

SEQ ID NO: 268039 - RNA, 18 nt, Artificial Sequence
  Synthetic
guaguacaggaguugccc

SEQ ID NO: 268040 - RNA, 19 nt, Artificial Sequence
  Synthetic
gguaguacaggaguugccc

SEQ ID NO: 268041 - RNA, 20 nt, Artificial Sequence
  Synthetic
cgguaguacaggaguugccc

SEQ ID NO: 268042 - RNA, 21 nt, Artificial Sequence
  Synthetic
acgguaguacaggaguugccc

SEQ ID NO: 268043 - RNA, 22 nt, Artificial Sequence
  Synthetic
gacgguaguacaggaguugccc

SEQ ID NO: 268044 - RNA, 23 nt, Artificial Sequence
  Synthetic
ggacgguaguacaggaguugccc

SEQ ID NO: 268045 - RNA, 24 nt, Artificial Sequence
  Synthetic
aggacgguaguacaggaguugccc

SEQ ID NO: 268046 - RNA, 18 nt, Artificial Sequence
  Synthetic
acaugauagagguugccc

SEQ ID NO: 268047 - RNA, 19 nt, Artificial Sequence
  Synthetic
uacaugauagagguugccc

SEQ ID NO: 268048 - RNA, 20 nt, Artificial Sequence
  Synthetic
cuacaugauagagguugccc

SEQ ID NO: 268049 - RNA, 21 nt, Artificial Sequence
  Synthetic
gcuacaugauagagguugccc

SEQ ID NO: 268050 - RNA, 22 nt, Artificial Sequence
  Synthetic
ggcuacaugauagagguugccc

SEQ ID NO: 268051 - RNA, 23 nt, Artificial Sequence
  Synthetic
aggcuacaugauagagguugccc

SEQ ID NO: 268052 - RNA, 24 nt, Artificial Sequence
  Synthetic
aaggcuacaugauagagguugccc

SEQ ID NO: 268053 - RNA, 18 nt, Artificial Sequence
  Synthetic
cuguuuccaauguugccc

SEQ ID NO: 268054 - RNA, 19 nt, Artificial Sequence
  Synthetic
ucuguuuccaauguugccc

SEQ ID NO: 268055 - RNA, 20 nt, Artificial Sequence
  Synthetic
cucuguuuccaauguugccc

SEQ ID NO: 268056 - RNA, 21 nt, Artificial Sequence
  Synthetic
acucuguuuccaauguugccc

SEQ ID NO: 268057 - RNA, 22 nt, Artificial Sequence
  Synthetic
gacucuguuuccaauguugccc

SEQ ID NO: 268058 - RNA, 23 nt, Artificial Sequence
  Synthetic
ugacucuguuuccaauguugccc

SEQ ID NO: 268059 - RNA, 24 nt, Artificial Sequence
  Synthetic
augacucuguuuccaauguugccc

SEQ ID NO: 268060 - RNA, 18 nt, Artificial Sequence
  Synthetic
acuuugaaacauuugccc

SEQ ID NO: 268061 - RNA, 19 nt, Artificial Sequence
  Synthetic
gacuuugaaacauuugccc

SEQ ID NO: 268062 - RNA, 20 nt, Artificial Sequence
  Synthetic
ugacuuugaaacauuugccc

SEQ ID NO: 268063 - RNA, 21 nt, Artificial Sequence
  Synthetic
cugacuuugaaacauuugccc

SEQ ID NO: 268064 - RNA, 22 nt, Artificial Sequence
  Synthetic
acugacuuugaaacauuugccc

SEQ ID NO: 268065 - RNA, 23 nt, Artificial Sequence
  Synthetic
aacugacuuugaaacauuugccc

SEQ ID NO: 268066 - RNA, 24 nt, Artificial Sequence
  Synthetic
uaacugacuuugaaacauuugccc

SEQ ID NO: 268067 - RNA, 18 nt, Artificial Sequence
  Synthetic
uccucccuagauuugccc

SEQ ID NO: 268068 - RNA, 19 nt, Artificial Sequence
  Synthetic
uuccucccuagauuugccc

SEQ ID NO: 268069 - RNA, 20 nt, Artificial Sequence
  Synthetic
auuccucccuagauuugccc

SEQ ID NO: 268070 - RNA, 21 nt, Artificial Sequence
  Synthetic
aauuccucccuagauuugccc

SEQ ID NO: 268071 - RNA, 22 nt, Artificial Sequence
  Synthetic
gaauuccucccuagauuugccc

SEQ ID NO: 268072 - RNA, 23 nt, Artificial Sequence
  Synthetic
ugaauuccucccuagauuugccc

SEQ ID NO: 268073 - RNA, 24 nt, Artificial Sequence
  Synthetic
cugaauuccucccuagauuugccc

SEQ ID NO: 268074 - RNA, 18 nt, Artificial Sequence
  Synthetic
aucaguuuuucuuugccc

SEQ ID NO: 268075 - RNA, 19 nt, Artificial Sequence
  Synthetic
aaucaguuuuucuuugccc

SEQ ID NO: 268076 - RNA, 20 nt, Artificial Sequence
  Synthetic
gaaucaguuuuucuuugccc

SEQ ID NO: 268077 - RNA, 21 nt, Artificial Sequence
  Synthetic
ggaaucaguuuuucuuugccc

SEQ ID NO: 268078 - RNA, 22 nt, Artificial Sequence
  Synthetic
uggaaucaguuuuucuuugccc

SEQ ID NO: 268079 - RNA, 23 nt, Artificial Sequence
  Synthetic
auggaaucaguuuuucuuugccc

SEQ ID NO: 268080 - RNA, 24 nt, Artificial Sequence
  Synthetic
aauggaaucaguuuuucuuugccc

SEQ ID NO: 268081 - RNA, 18 nt, Artificial Sequence
  Synthetic
cagcuagcaagaaauccc

SEQ ID NO: 268082 - RNA, 19 nt, Artificial Sequence
  Synthetic
ccagcuagcaagaaauccc

SEQ ID NO: 268083 - RNA, 20 nt, Artificial Sequence
  Synthetic
gccagcuagcaagaaauccc

SEQ ID NO: 268084 - RNA, 21 nt, Artificial Sequence
  Synthetic
agccagcuagcaagaaauccc

SEQ ID NO: 268085 - RNA, 22 nt, Artificial Sequence
  Synthetic
aagccagcuagcaagaaauccc

SEQ ID NO: 268086 - RNA, 23 nt, Artificial Sequence
  Synthetic
gaagccagcuagcaagaaauccc

SEQ ID NO: 268087 - RNA, 24 nt, Artificial Sequence
  Synthetic
agaagccagcuagcaagaaauccc

SEQ ID NO: 268088 - RNA, 19 nt, Artificial Sequence
  Synthetic
gcugaggcaggagaauccc

SEQ ID NO: 268089 - RNA, 20 nt, Artificial Sequence
  Synthetic
ggcugaggcaggagaauccc

SEQ ID NO: 268090 - RNA, 21 nt, Artificial Sequence
  Synthetic
aggcugaggcaggagaauccc

SEQ ID NO: 268091 - RNA, 22 nt, Artificial Sequence
  Synthetic
gaggcugaggcaggagaauccc

SEQ ID NO: 268092 - RNA, 23 nt, Artificial Sequence
  Synthetic
ggaggcugaggcaggagaauccc

SEQ ID NO: 268093 - RNA, 24 nt, Artificial Sequence
  Synthetic
gggaggcugaggcaggagaauccc

SEQ ID NO: 268094 - RNA, 18 nt, Artificial Sequence
  Synthetic
uguccauauccuaauccc

SEQ ID NO: 268095 - RNA, 19 nt, Artificial Sequence
  Synthetic
auguccauauccuaauccc

SEQ ID NO: 268096 - RNA, 20 nt, Artificial Sequence
  Synthetic
gauguccauauccuaauccc

SEQ ID NO: 268097 - RNA, 21 nt, Artificial Sequence
  Synthetic
agauguccauauccuaauccc

SEQ ID NO: 268098 - RNA, 22 nt, Artificial Sequence
  Synthetic
aagauguccauauccuaauccc

SEQ ID NO: 268099 - RNA, 23 nt, Artificial Sequence
  Synthetic
aaagauguccauauccuaauccc

SEQ ID NO: 268100 - RNA, 24 nt, Artificial Sequence
  Synthetic
caaagauguccauauccuaauccc

SEQ ID NO: 268101 - RNA, 18 nt, Artificial Sequence
  Synthetic
cucgaagauguuaauccc

SEQ ID NO: 268102 - RNA, 19 nt, Artificial Sequence
  Synthetic
ccucgaagauguuaauccc

SEQ ID NO: 268103 - RNA, 20 nt, Artificial Sequence
  Synthetic
cccucgaagauguuaauccc

SEQ ID NO: 268104 - RNA, 21 nt, Artificial Sequence
  Synthetic
ccccucgaagauguuaauccc

SEQ ID NO: 268105 - RNA, 22 nt, Artificial Sequence
  Synthetic
gccccucgaagauguuaauccc

SEQ ID NO: 268106 - RNA, 23 nt, Artificial Sequence
  Synthetic
ggccccucgaagauguuaauccc

SEQ ID NO: 268107 - RNA, 24 nt, Artificial Sequence
  Synthetic
gggccccucgaagauguuaauccc

SEQ ID NO: 268108 - RNA, 18 nt, Artificial Sequence
  Synthetic
uuaacucucccacauccc

SEQ ID NO: 268109 - RNA, 19 nt, Artificial Sequence
  Synthetic
auuaacucucccacauccc

SEQ ID NO: 268110 - RNA, 20 nt, Artificial Sequence
  Synthetic
uauuaacucucccacauccc

SEQ ID NO: 268111 - RNA, 21 nt, Artificial Sequence
  Synthetic
auauuaacucucccacauccc

SEQ ID NO: 268112 - RNA, 22 nt, Artificial Sequence
  Synthetic
aauauuaacucucccacauccc

SEQ ID NO: 268113 - RNA, 23 nt, Artificial Sequence
  Synthetic
gaauauuaacucucccacauccc

SEQ ID NO: 268114 - RNA, 24 nt, Artificial Sequence
  Synthetic
ugaauauuaacucucccacauccc

SEQ ID NO: 268115 - RNA, 18 nt, Artificial Sequence
  Synthetic
ggacuucucugacauccc

SEQ ID NO: 268116 - RNA, 19 nt, Artificial Sequence
  Synthetic
gggacuucucugacauccc

SEQ ID NO: 268117 - RNA, 20 nt, Artificial Sequence
  Synthetic
agggacuucucugacauccc

SEQ ID NO: 268118 - RNA, 21 nt, Artificial Sequence
  Synthetic
aagggacuucucugacauccc

SEQ ID NO: 268119 - RNA, 22 nt, Artificial Sequence
  Synthetic
uaagggacuucucugacauccc

SEQ ID NO: 268120 - RNA, 23 nt, Artificial Sequence
  Synthetic
cuaagggacuucucugacauccc

SEQ ID NO: 268121 - RNA, 24 nt, Artificial Sequence
  Synthetic
ucuaagggacuucucugacauccc

SEQ ID NO: 268122 - RNA, 18 nt, Artificial Sequence
  Synthetic
ccccuaaccccccauccc

SEQ ID NO: 268123 - RNA, 19 nt, Artificial Sequence
  Synthetic
uccccuaaccccccauccc

SEQ ID NO: 268124 - RNA, 20 nt, Artificial Sequence
  Synthetic
cuccccuaaccccccauccc

SEQ ID NO: 268125 - RNA, 21 nt, Artificial Sequence
  Synthetic
ccuccccuaaccccccauccc

SEQ ID NO: 268126 - RNA, 22 nt, Artificial Sequence
  Synthetic
cccuccccuaaccccccauccc

SEQ ID NO: 268127 - RNA, 23 nt, Artificial Sequence
  Synthetic
ucccuccccuaaccccccauccc

SEQ ID NO: 268128 - RNA, 24 nt, Artificial Sequence
  Synthetic
aucccuccccuaaccccccauccc

SEQ ID NO: 268129 - RNA, 18 nt, Artificial Sequence
  Synthetic
uaauaacacauccauccc

SEQ ID NO: 268130 - RNA, 19 nt, Artificial Sequence
  Synthetic
cuaauaacacauccauccc

SEQ ID NO: 268131 - RNA, 20 nt, Artificial Sequence
  Synthetic
ccuaauaacacauccauccc

SEQ ID NO: 268132 - RNA, 21 nt, Artificial Sequence
  Synthetic
uccuaauaacacauccauccc

SEQ ID NO: 268133 - RNA, 22 nt, Artificial Sequence
  Synthetic
auccuaauaacacauccauccc

SEQ ID NO: 268134 - RNA, 23 nt, Artificial Sequence
  Synthetic
uauccuaauaacacauccauccc

SEQ ID NO: 268135 - RNA, 24 nt, Artificial Sequence
  Synthetic
uuauccuaauaacacauccauccc

SEQ ID NO: 268136 - RNA, 18 nt, Artificial Sequence
  Synthetic
uuucccuccccucauccc

SEQ ID NO: 268137 - RNA, 19 nt, Artificial Sequence
  Synthetic
uuuucccuccccucauccc

SEQ ID NO: 268138 - RNA, 20 nt, Artificial Sequence
  Synthetic
cuuuucccuccccucauccc

SEQ ID NO: 268139 - RNA, 21 nt, Artificial Sequence
  Synthetic
acuuuucccuccccucauccc

SEQ ID NO: 268140 - RNA, 22 nt, Artificial Sequence
  Synthetic
cacuuuucccuccccucauccc

SEQ ID NO: 268141 - RNA, 23 nt, Artificial Sequence
  Synthetic
ccacuuuucccuccccucauccc

SEQ ID NO: 268142 - RNA, 24 nt, Artificial Sequence
  Synthetic
gccacuuuucccuccccucauccc

SEQ ID NO: 268143 - RNA, 18 nt, Artificial Sequence
  Synthetic
cugauauaauuucauccc

SEQ ID NO: 268144 - RNA, 19 nt, Artificial Sequence
  Synthetic
ccugauauaauuucauccc

SEQ ID NO: 268145 - RNA, 20 nt, Artificial Sequence
  Synthetic
accugauauaauuucauccc

SEQ ID NO: 268146 - RNA, 21 nt, Artificial Sequence
  Synthetic
aaccugauauaauuucauccc

SEQ ID NO: 268147 - RNA, 22 nt, Artificial Sequence
  Synthetic
uaaccugauauaauuucauccc

SEQ ID NO: 268148 - RNA, 23 nt, Artificial Sequence
  Synthetic
uuaaccugauauaauuucauccc

SEQ ID NO: 268149 - RNA, 24 nt, Artificial Sequence
  Synthetic
cuuaaccugauauaauuucauccc

SEQ ID NO: 268150 - RNA, 18 nt, Artificial Sequence
  Synthetic
gggcaagaacaagauccc

SEQ ID NO: 268151 - RNA, 19 nt, Artificial Sequence
  Synthetic
agggcaagaacaagauccc

SEQ ID NO: 268152 - RNA, 20 nt, Artificial Sequence
  Synthetic
gagggcaagaacaagauccc

SEQ ID NO: 268153 - RNA, 21 nt, Artificial Sequence
  Synthetic
agagggcaagaacaagauccc

SEQ ID NO: 268154 - RNA, 22 nt, Artificial Sequence
  Synthetic
aagagggcaagaacaagauccc

SEQ ID NO: 268155 - RNA, 23 nt, Artificial Sequence
  Synthetic
caagagggcaagaacaagauccc

SEQ ID NO: 268156 - RNA, 24 nt, Artificial Sequence
  Synthetic
acaagagggcaagaacaagauccc

SEQ ID NO: 268157 - RNA, 18 nt, Artificial Sequence
  Synthetic
aaccuagcagaagauccc

SEQ ID NO: 268158 - RNA, 19 nt, Artificial Sequence
  Synthetic
aaaccuagcagaagauccc

SEQ ID NO: 268159 - RNA, 20 nt, Artificial Sequence
  Synthetic
aaaaccuagcagaagauccc

SEQ ID NO: 268160 - RNA, 21 nt, Artificial Sequence
  Synthetic
uaaaaccuagcagaagauccc

SEQ ID NO: 268161 - RNA, 22 nt, Artificial Sequence
  Synthetic
guaaaaccuagcagaagauccc

SEQ ID NO: 268162 - RNA, 23 nt, Artificial Sequence
  Synthetic
cguaaaaccuagcagaagauccc

SEQ ID NO: 268163 - RNA, 24 nt, Artificial Sequence
  Synthetic
ucguaaaaccuagcagaagauccc

SEQ ID NO: 268164 - RNA, 18 nt, Artificial Sequence
  Synthetic
aaugauugacuagauccc

SEQ ID NO: 268165 - RNA, 19 nt, Artificial Sequence
  Synthetic
caaugauugacuagauccc

SEQ ID NO: 268166 - RNA, 20 nt, Artificial Sequence
  Synthetic
ucaaugauugacuagauccc

SEQ ID NO: 268167 - RNA, 21 nt, Artificial Sequence
  Synthetic
cucaaugauugacuagauccc

SEQ ID NO: 268168 - RNA, 22 nt, Artificial Sequence
  Synthetic
acucaaugauugacuagauccc

SEQ ID NO: 268169 - RNA, 23 nt, Artificial Sequence
  Synthetic
uacucaaugauugacuagauccc

SEQ ID NO: 268170 - RNA, 24 nt, Artificial Sequence
  Synthetic
auacucaaugauugacuagauccc

SEQ ID NO: 268171 - RNA, 18 nt, Artificial Sequence
  Synthetic
gccaggauggaggauccc

SEQ ID NO: 268172 - RNA, 19 nt, Artificial Sequence
  Synthetic
ugccaggauggaggauccc

SEQ ID NO: 268173 - RNA, 20 nt, Artificial Sequence
  Synthetic
gugccaggauggaggauccc

SEQ ID NO: 268174 - RNA, 21 nt, Artificial Sequence
  Synthetic
agugccaggauggaggauccc

SEQ ID NO: 268175 - RNA, 22 nt, Artificial Sequence
  Synthetic
cagugccaggauggaggauccc

SEQ ID NO: 268176 - RNA, 23 nt, Artificial Sequence
  Synthetic
ucagugccaggauggaggauccc

SEQ ID NO: 268177 - RNA, 24 nt, Artificial Sequence
  Synthetic
aucagugccaggauggaggauccc

SEQ ID NO: 268178 - RNA, 18 nt, Artificial Sequence
  Synthetic
auuuuuuuaauggauccc

SEQ ID NO: 268179 - RNA, 19 nt, Artificial Sequence
  Synthetic
uauuuuuuuaauggauccc

SEQ ID NO: 268180 - RNA, 20 nt, Artificial Sequence
  Synthetic
guauuuuuuuaauggauccc

SEQ ID NO: 268181 - RNA, 21 nt, Artificial Sequence
  Synthetic
uguauuuuuuuaauggauccc

SEQ ID NO: 268182 - RNA, 22 nt, Artificial Sequence
  Synthetic
uuguauuuuuuuaauggauccc

SEQ ID NO: 268183 - RNA, 23 nt, Artificial Sequence
  Synthetic
uuuguauuuuuuuaauggauccc

SEQ ID NO: 268184 - RNA, 24 nt, Artificial Sequence
  Synthetic
uuuuguauuuuuuuaauggauccc

SEQ ID NO: 268185 - RNA, 18 nt, Artificial Sequence
  Synthetic
cuaacccauguggauccc

SEQ ID NO: 268186 - RNA, 19 nt, Artificial Sequence
  Synthetic
gcuaacccauguggauccc

SEQ ID NO: 268187 - RNA, 20 nt, Artificial Sequence
  Synthetic
ugcuaacccauguggauccc

SEQ ID NO: 268188 - RNA, 21 nt, Artificial Sequence
  Synthetic
gugcuaacccauguggauccc

SEQ ID NO: 268189 - RNA, 22 nt, Artificial Sequence
  Synthetic
cgugcuaacccauguggauccc

SEQ ID NO: 268190 - RNA, 23 nt, Artificial Sequence
  Synthetic
acgugcuaacccauguggauccc

SEQ ID NO: 268191 - RNA, 24 nt, Artificial Sequence
  Synthetic
cacgugcuaacccauguggauccc

SEQ ID NO: 268192 - RNA, 18 nt, Artificial Sequence
  Synthetic
uuuuagugcagugauccc

SEQ ID NO: 268193 - RNA, 19 nt, Artificial Sequence
  Synthetic
guuuuagugcagugauccc

SEQ ID NO: 268194 - RNA, 20 nt, Artificial Sequence
  Synthetic
gguuuuagugcagugauccc

SEQ ID NO: 268195 - RNA, 21 nt, Artificial Sequence
  Synthetic
ggguuuuagugcagugauccc

SEQ ID NO: 268196 - RNA, 22 nt, Artificial Sequence
  Synthetic
uggguuuuagugcagugauccc

SEQ ID NO: 268197 - RNA, 23 nt, Artificial Sequence
  Synthetic
guggguuuuagugcagugauccc

SEQ ID NO: 268198 - RNA, 24 nt, Artificial Sequence
  Synthetic
cguggguuuuagugcagugauccc

SEQ ID NO: 268199 - RNA, 18 nt, Artificial Sequence
  Synthetic
ugguuguaaugugauccc

SEQ ID NO: 268200 - RNA, 19 nt, Artificial Sequence
  Synthetic
uugguuguaaugugauccc

SEQ ID NO: 268201 - RNA, 20 nt, Artificial Sequence
  Synthetic
uuugguuguaaugugauccc

SEQ ID NO: 268202 - RNA, 21 nt, Artificial Sequence
  Synthetic
guuugguuguaaugugauccc

SEQ ID NO: 268203 - RNA, 22 nt, Artificial Sequence
  Synthetic
gguuugguuguaaugugauccc

SEQ ID NO: 268204 - RNA, 23 nt, Artificial Sequence
  Synthetic
ugguuugguuguaaugugauccc

SEQ ID NO: 268205 - RNA, 24 nt, Artificial Sequence
  Synthetic
gugguuugguuguaaugugauccc

SEQ ID NO: 268206 - RNA, 18 nt, Artificial Sequence
  Synthetic
caauucuugaaauauccc

SEQ ID NO: 268207 - RNA, 19 nt, Artificial Sequence
  Synthetic
acaauucuugaaauauccc

SEQ ID NO: 268208 - RNA, 20 nt, Artificial Sequence
  Synthetic
uacaauucuugaaauauccc

SEQ ID NO: 268209 - RNA, 21 nt, Artificial Sequence
  Synthetic
guacaauucuugaaauauccc

SEQ ID NO: 268210 - RNA, 22 nt, Artificial Sequence
  Synthetic
aguacaauucuugaaauauccc

SEQ ID NO: 268211 - RNA, 23 nt, Artificial Sequence
  Synthetic
aaguacaauucuugaaauauccc

SEQ ID NO: 268212 - RNA, 24 nt, Artificial Sequence
  Synthetic
aaaguacaauucuugaaauauccc

SEQ ID NO: 268213 - RNA, 18 nt, Artificial Sequence
  Synthetic
aucuaaauuucauauccc

SEQ ID NO: 268214 - RNA, 19 nt, Artificial Sequence
  Synthetic
aaucuaaauuucauauccc

SEQ ID NO: 268215 - RNA, 20 nt, Artificial Sequence
  Synthetic
gaaucuaaauuucauauccc

SEQ ID NO: 268216 - RNA, 21 nt, Artificial Sequence
  Synthetic
agaaucuaaauuucauauccc

SEQ ID NO: 268217 - RNA, 22 nt, Artificial Sequence
  Synthetic
aagaaucuaaauuucauauccc

SEQ ID NO: 268218 - RNA, 23 nt, Artificial Sequence
  Synthetic
caagaaucuaaauuucauauccc

SEQ ID NO: 268219 - RNA, 24 nt, Artificial Sequence
  Synthetic
ucaagaaucuaaauuucauauccc

SEQ ID NO: 268220 - RNA, 18 nt, Artificial Sequence
  Synthetic
caguuuagaauguauccc

SEQ ID NO: 268221 - RNA, 19 nt, Artificial Sequence
  Synthetic
acaguuuagaauguauccc

SEQ ID NO: 268222 - RNA, 20 nt, Artificial Sequence
  Synthetic
uacaguuuagaauguauccc

SEQ ID NO: 268223 - RNA, 21 nt, Artificial Sequence
  Synthetic
guacaguuuagaauguauccc

SEQ ID NO: 268224 - RNA, 22 nt, Artificial Sequence
  Synthetic
aguacaguuuagaauguauccc

SEQ ID NO: 268225 - RNA, 23 nt, Artificial Sequence
  Synthetic
uaguacaguuuagaauguauccc

SEQ ID NO: 268226 - RNA, 24 nt, Artificial Sequence
  Synthetic
auaguacaguuuagaauguauccc

SEQ ID NO: 268227 - RNA, 18 nt, Artificial Sequence
  Synthetic
ucacuggagcuuuauccc

SEQ ID NO: 268228 - RNA, 19 nt, Artificial Sequence
  Synthetic
gucacuggagcuuuauccc

SEQ ID NO: 268229 - RNA, 20 nt, Artificial Sequence
  Synthetic
ggucacuggagcuuuauccc

SEQ ID NO: 268230 - RNA, 21 nt, Artificial Sequence
  Synthetic
gggucacuggagcuuuauccc

SEQ ID NO: 268231 - RNA, 22 nt, Artificial Sequence
  Synthetic
ugggucacuggagcuuuauccc

SEQ ID NO: 268232 - RNA, 23 nt, Artificial Sequence
  Synthetic
gugggucacuggagcuuuauccc

SEQ ID NO: 268233 - RNA, 24 nt, Artificial Sequence
  Synthetic
ugugggucacuggagcuuuauccc

SEQ ID NO: 268234 - RNA, 18 nt, Artificial Sequence
  Synthetic
auagaaccauucacuccc

SEQ ID NO: 268235 - RNA, 19 nt, Artificial Sequence
  Synthetic
gauagaaccauucacuccc

SEQ ID NO: 268236 - RNA, 20 nt, Artificial Sequence
  Synthetic
agauagaaccauucacuccc

SEQ ID NO: 268237 - RNA, 21 nt, Artificial Sequence
  Synthetic
gagauagaaccauucacuccc

SEQ ID NO: 268238 - RNA, 22 nt, Artificial Sequence
  Synthetic
cgagauagaaccauucacuccc

SEQ ID NO: 268239 - RNA, 23 nt, Artificial Sequence
  Synthetic
gcgagauagaaccauucacuccc

SEQ ID NO: 268240 - RNA, 24 nt, Artificial Sequence
  Synthetic
agcgagauagaaccauucacuccc

SEQ ID NO: 268241 - RNA, 18 nt, Artificial Sequence
  Synthetic
gaacaaauuuucacuccc

SEQ ID NO: 268242 - RNA, 19 nt, Artificial Sequence
  Synthetic
agaacaaauuuucacuccc

SEQ ID NO: 268243 - RNA, 20 nt, Artificial Sequence
  Synthetic
aagaacaaauuuucacuccc

SEQ ID NO: 268244 - RNA, 21 nt, Artificial Sequence
  Synthetic
caagaacaaauuuucacuccc

SEQ ID NO: 268245 - RNA, 22 nt, Artificial Sequence
  Synthetic
ucaagaacaaauuuucacuccc

SEQ ID NO: 268246 - RNA, 23 nt, Artificial Sequence
  Synthetic
cucaagaacaaauuuucacuccc

SEQ ID NO: 268247 - RNA, 24 nt, Artificial Sequence
  Synthetic
ucucaagaacaaauuuucacuccc

SEQ ID NO: 268248 - RNA, 18 nt, Artificial Sequence
  Synthetic
aagggcaccacgacuccc

SEQ ID NO: 268249 - RNA, 19 nt, Artificial Sequence
  Synthetic
uaagggcaccacgacuccc

SEQ ID NO: 268250 - RNA, 20 nt, Artificial Sequence
  Synthetic
uuaagggcaccacgacuccc

SEQ ID NO: 268251 - RNA, 21 nt, Artificial Sequence
  Synthetic
cuuaagggcaccacgacuccc

SEQ ID NO: 268252 - RNA, 22 nt, Artificial Sequence
  Synthetic
ucuuaagggcaccacgacuccc

SEQ ID NO: 268253 - RNA, 23 nt, Artificial Sequence
  Synthetic
aucuuaagggcaccacgacuccc

SEQ ID NO: 268254 - RNA, 24 nt, Artificial Sequence
  Synthetic
aaucuuaagggcaccacgacuccc

SEQ ID NO: 268255 - RNA, 18 nt, Artificial Sequence
  Synthetic
uauaaaccuaaaccuccc

SEQ ID NO: 268256 - RNA, 19 nt, Artificial Sequence
  Synthetic
guauaaaccuaaaccuccc

SEQ ID NO: 268257 - RNA, 20 nt, Artificial Sequence
  Synthetic
aguauaaaccuaaaccuccc

SEQ ID NO: 268258 - RNA, 21 nt, Artificial Sequence
  Synthetic
aaguauaaaccuaaaccuccc

SEQ ID NO: 268259 - RNA, 22 nt, Artificial Sequence
  Synthetic
aaaguauaaaccuaaaccuccc

SEQ ID NO: 268260 - RNA, 23 nt, Artificial Sequence
  Synthetic
caaaguauaaaccuaaaccuccc

SEQ ID NO: 268261 - RNA, 24 nt, Artificial Sequence
  Synthetic
ccaaaguauaaaccuaaaccuccc

SEQ ID NO: 268262 - RNA, 18 nt, Artificial Sequence
  Synthetic
augauucaauuaccuccc

SEQ ID NO: 268263 - RNA, 19 nt, Artificial Sequence
  Synthetic
caugauucaauuaccuccc

SEQ ID NO: 268264 - RNA, 20 nt, Artificial Sequence
  Synthetic
ccaugauucaauuaccuccc

SEQ ID NO: 268265 - RNA, 21 nt, Artificial Sequence
  Synthetic
cccaugauucaauuaccuccc

SEQ ID NO: 268266 - RNA, 22 nt, Artificial Sequence
  Synthetic
ccccaugauucaauuaccuccc

SEQ ID NO: 268267 - RNA, 23 nt, Artificial Sequence
  Synthetic
cccccaugauucaauuaccuccc

SEQ ID NO: 268268 - RNA, 24 nt, Artificial Sequence
  Synthetic
gcccccaugauucaauuaccuccc

SEQ ID NO: 268269 - RNA, 18 nt, Artificial Sequence
  Synthetic
aaaaacacugacccuccc

SEQ ID NO: 268270 - RNA, 19 nt, Artificial Sequence
  Synthetic
gaaaaacacugacccuccc

SEQ ID NO: 268271 - RNA, 20 nt, Artificial Sequence
  Synthetic
agaaaaacacugacccuccc

SEQ ID NO: 268272 - RNA, 21 nt, Artificial Sequence
  Synthetic
aagaaaaacacugacccuccc

SEQ ID NO: 268273 - RNA, 22 nt, Artificial Sequence
  Synthetic
gaagaaaaacacugacccuccc

SEQ ID NO: 268274 - RNA, 23 nt, Artificial Sequence
  Synthetic
agaagaaaaacacugacccuccc

SEQ ID NO: 268275 - RNA, 24 nt, Artificial Sequence
  Synthetic
uagaagaaaaacacugacccuccc

SEQ ID NO: 268276 - RNA, 18 nt, Artificial Sequence
  Synthetic
agguugacagagccuccc

SEQ ID NO: 268277 - RNA, 19 nt, Artificial Sequence
  Synthetic
uagguugacagagccuccc

SEQ ID NO: 268278 - RNA, 20 nt, Artificial Sequence
  Synthetic
guagguugacagagccuccc

SEQ ID NO: 268279 - RNA, 21 nt, Artificial Sequence
  Synthetic
aguagguugacagagccuccc

SEQ ID NO: 268280 - RNA, 22 nt, Artificial Sequence
  Synthetic
uaguagguugacagagccuccc

SEQ ID NO: 268281 - RNA, 23 nt, Artificial Sequence
  Synthetic
uuaguagguugacagagccuccc

SEQ ID NO: 268282 - RNA, 24 nt, Artificial Sequence
  Synthetic
cuuaguagguugacagagccuccc

SEQ ID NO: 268283 - RNA, 18 nt, Artificial Sequence
  Synthetic
aaagaauugguagcuccc

SEQ ID NO: 268284 - RNA, 19 nt, Artificial Sequence
  Synthetic
caaagaauugguagcuccc

SEQ ID NO: 268285 - RNA, 20 nt, Artificial Sequence
  Synthetic
ccaaagaauugguagcuccc

SEQ ID NO: 268286 - RNA, 21 nt, Artificial Sequence
  Synthetic
uccaaagaauugguagcuccc

SEQ ID NO: 268287 - RNA, 22 nt, Artificial Sequence
  Synthetic
uuccaaagaauugguagcuccc

SEQ ID NO: 268288 - RNA, 23 nt, Artificial Sequence
  Synthetic
auuccaaagaauugguagcuccc

SEQ ID NO: 268289 - RNA, 24 nt, Artificial Sequence
  Synthetic
cauuccaaagaauugguagcuccc

SEQ ID NO: 268290 - RNA, 18 nt, Artificial Sequence
  Synthetic
aacuuagacugggcuccc

SEQ ID NO: 268291 - RNA, 19 nt, Artificial Sequence
  Synthetic
uaacuuagacugggcuccc

SEQ ID NO: 268292 - RNA, 20 nt, Artificial Sequence
  Synthetic
cuaacuuagacugggcuccc

SEQ ID NO: 268293 - RNA, 21 nt, Artificial Sequence
  Synthetic
ucuaacuuagacugggcuccc

SEQ ID NO: 268294 - RNA, 22 nt, Artificial Sequence
  Synthetic
aucuaacuuagacugggcuccc

SEQ ID NO: 268295 - RNA, 23 nt, Artificial Sequence
  Synthetic
caucuaacuuagacugggcuccc

SEQ ID NO: 268296 - RNA, 24 nt, Artificial Sequence
  Synthetic
ccaucuaacuuagacugggcuccc

SEQ ID NO: 268297 - RNA, 18 nt, Artificial Sequence
  Synthetic
ugcucugacugggcuccc

SEQ ID NO: 268298 - RNA, 19 nt, Artificial Sequence
  Synthetic
cugcucugacugggcuccc

SEQ ID NO: 268299 - RNA, 20 nt, Artificial Sequence
  Synthetic
ucugcucugacugggcuccc

SEQ ID NO: 268300 - RNA, 21 nt, Artificial Sequence
  Synthetic
aucugcucugacugggcuccc

SEQ ID NO: 268301 - RNA, 22 nt, Artificial Sequence
  Synthetic
uaucugcucugacugggcuccc

SEQ ID NO: 268302 - RNA, 23 nt, Artificial Sequence
  Synthetic
uuaucugcucugacugggcuccc

SEQ ID NO: 268303 - RNA, 24 nt, Artificial Sequence
  Synthetic
uuuaucugcucugacugggcuccc

SEQ ID NO: 268304 - RNA, 18 nt, Artificial Sequence
  Synthetic
uuaucaagguaugcuccc

SEQ ID NO: 268305 - RNA, 19 nt, Artificial Sequence
  Synthetic
auuaucaagguaugcuccc

SEQ ID NO: 268306 - RNA, 20 nt, Artificial Sequence
  Synthetic
uauuaucaagguaugcuccc

SEQ ID NO: 268307 - RNA, 21 nt, Artificial Sequence
  Synthetic
auauuaucaagguaugcuccc

SEQ ID NO: 268308 - RNA, 22 nt, Artificial Sequence
  Synthetic
aauauuaucaagguaugcuccc

SEQ ID NO: 268309 - RNA, 23 nt, Artificial Sequence
  Synthetic
caauauuaucaagguaugcuccc

SEQ ID NO: 268310 - RNA, 24 nt, Artificial Sequence
  Synthetic
ucaauauuaucaagguaugcuccc

SEQ ID NO: 268311 - RNA, 18 nt, Artificial Sequence
  Synthetic
aaugagagagaaucuccc

SEQ ID NO: 268312 - RNA, 19 nt, Artificial Sequence
  Synthetic
uaaugagagagaaucuccc

SEQ ID NO: 268313 - RNA, 20 nt, Artificial Sequence
  Synthetic
auaaugagagagaaucuccc

SEQ ID NO: 268314 - RNA, 21 nt, Artificial Sequence
  Synthetic
uauaaugagagagaaucuccc

SEQ ID NO: 268315 - RNA, 22 nt, Artificial Sequence
  Synthetic
auauaaugagagagaaucuccc

SEQ ID NO: 268316 - RNA, 23 nt, Artificial Sequence
  Synthetic
aauauaaugagagagaaucuccc

SEQ ID NO: 268317 - RNA, 24 nt, Artificial Sequence
  Synthetic
aaauauaaugagagagaaucuccc

SEQ ID NO: 268318 - RNA, 18 nt, Artificial Sequence
  Synthetic
accaaauaaacaucuccc

SEQ ID NO: 268319 - RNA, 19 nt, Artificial Sequence
  Synthetic
caccaaauaaacaucuccc

SEQ ID NO: 268320 - RNA, 20 nt, Artificial Sequence
  Synthetic
ucaccaaauaaacaucuccc

SEQ ID NO: 268321 - RNA, 21 nt, Artificial Sequence
  Synthetic
gucaccaaauaaacaucuccc

SEQ ID NO: 268322 - RNA, 22 nt, Artificial Sequence
  Synthetic
ugucaccaaauaaacaucuccc

SEQ ID NO: 268323 - RNA, 23 nt, Artificial Sequence
  Synthetic
uugucaccaaauaaacaucuccc

SEQ ID NO: 268324 - RNA, 24 nt, Artificial Sequence
  Synthetic
auugucaccaaauaaacaucuccc

SEQ ID NO: 268325 - RNA, 18 nt, Artificial Sequence
  Synthetic
auaaaacucccaucuccc

SEQ ID NO: 268326 - RNA, 19 nt, Artificial Sequence
  Synthetic
gauaaaacucccaucuccc

SEQ ID NO: 268327 - RNA, 20 nt, Artificial Sequence
  Synthetic
agauaaaacucccaucuccc

SEQ ID NO: 268328 - RNA, 21 nt, Artificial Sequence
  Synthetic
uagauaaaacucccaucuccc

SEQ ID NO: 268329 - RNA, 22 nt, Artificial Sequence
  Synthetic
auagauaaaacucccaucuccc

SEQ ID NO: 268330 - RNA, 23 nt, Artificial Sequence
  Synthetic
uauagauaaaacucccaucuccc

SEQ ID NO: 268331 - RNA, 24 nt, Artificial Sequence
  Synthetic
uuauagauaaaacucccaucuccc

SEQ ID NO: 268332 - RNA, 18 nt, Artificial Sequence
  Synthetic
aacuuucuacacucuccc

SEQ ID NO: 268333 - RNA, 19 nt, Artificial Sequence
  Synthetic
aaacuuucuacacucuccc

SEQ ID NO: 268334 - RNA, 20 nt, Artificial Sequence
  Synthetic
uaaacuuucuacacucuccc

SEQ ID NO: 268335 - RNA, 21 nt, Artificial Sequence
  Synthetic
cuaaacuuucuacacucuccc

SEQ ID NO: 268336 - RNA, 22 nt, Artificial Sequence
  Synthetic
ccuaaacuuucuacacucuccc

SEQ ID NO: 268337 - RNA, 23 nt, Artificial Sequence
  Synthetic
cccuaaacuuucuacacucuccc

SEQ ID NO: 268338 - RNA, 24 nt, Artificial Sequence
  Synthetic
ucccuaaacuuucuacacucuccc

SEQ ID NO: 268339 - RNA, 18 nt, Artificial Sequence
  Synthetic
gaaaugccauccucuccc

SEQ ID NO: 268340 - RNA, 19 nt, Artificial Sequence
  Synthetic
ggaaaugccauccucuccc

SEQ ID NO: 268341 - RNA, 20 nt, Artificial Sequence
  Synthetic
cggaaaugccauccucuccc

SEQ ID NO: 268342 - RNA, 21 nt, Artificial Sequence
  Synthetic
ucggaaaugccauccucuccc

SEQ ID NO: 268343 - RNA, 22 nt, Artificial Sequence
  Synthetic
uucggaaaugccauccucuccc

SEQ ID NO: 268344 - RNA, 23 nt, Artificial Sequence
  Synthetic
cuucggaaaugccauccucuccc

SEQ ID NO: 268345 - RNA, 24 nt, Artificial Sequence
  Synthetic
acuucggaaaugccauccucuccc

SEQ ID NO: 268346 - RNA, 18 nt, Artificial Sequence
  Synthetic
agaagucccaugucuccc

SEQ ID NO: 268347 - RNA, 19 nt, Artificial Sequence
  Synthetic
aagaagucccaugucuccc

SEQ ID NO: 268348 - RNA, 20 nt, Artificial Sequence
  Synthetic
aaagaagucccaugucuccc

SEQ ID NO: 268349 - RNA, 21 nt, Artificial Sequence
  Synthetic
caaagaagucccaugucuccc

SEQ ID NO: 268350 - RNA, 22 nt, Artificial Sequence
  Synthetic
gcaaagaagucccaugucuccc

SEQ ID NO: 268351 - RNA, 23 nt, Artificial Sequence
  Synthetic
ggcaaagaagucccaugucuccc

SEQ ID NO: 268352 - RNA, 24 nt, Artificial Sequence
  Synthetic
aggcaaagaagucccaugucuccc

SEQ ID NO: 268353 - RNA, 18 nt, Artificial Sequence
  Synthetic
guguguagguugucuccc

SEQ ID NO: 268354 - RNA, 19 nt, Artificial Sequence
  Synthetic
cguguguagguugucuccc

SEQ ID NO: 268355 - RNA, 20 nt, Artificial Sequence
  Synthetic
ucguguguagguugucuccc

SEQ ID NO: 268356 - RNA, 21 nt, Artificial Sequence
  Synthetic
uucguguguagguugucuccc

SEQ ID NO: 268357 - RNA, 22 nt, Artificial Sequence
  Synthetic
cuucguguguagguugucuccc

SEQ ID NO: 268358 - RNA, 23 nt, Artificial Sequence
  Synthetic
ccuucguguguagguugucuccc

SEQ ID NO: 268359 - RNA, 24 nt, Artificial Sequence
  Synthetic
accuucguguguagguugucuccc

SEQ ID NO: 268360 - RNA, 18 nt, Artificial Sequence
  Synthetic
uguuuguagaauucuccc

SEQ ID NO: 268361 - RNA, 19 nt, Artificial Sequence
  Synthetic
auguuuguagaauucuccc

SEQ ID NO: 268362 - RNA, 20 nt, Artificial Sequence
  Synthetic
aauguuuguagaauucuccc

SEQ ID NO: 268363 - RNA, 21 nt, Artificial Sequence
  Synthetic
aaauguuuguagaauucuccc

SEQ ID NO: 268364 - RNA, 22 nt, Artificial Sequence
  Synthetic
uaaauguuuguagaauucuccc

SEQ ID NO: 268365 - RNA, 23 nt, Artificial Sequence
  Synthetic
uuaaauguuuguagaauucuccc

SEQ ID NO: 268366 - RNA, 24 nt, Artificial Sequence
  Synthetic
uuuaaauguuuguagaauucuccc

SEQ ID NO: 268367 - RNA, 18 nt, Artificial Sequence
  Synthetic
ugcucaugauuuucuccc

SEQ ID NO: 268368 - RNA, 19 nt, Artificial Sequence
  Synthetic
gugcucaugauuuucuccc

SEQ ID NO: 268369 - RNA, 20 nt, Artificial Sequence
  Synthetic
ugugcucaugauuuucuccc

SEQ ID NO: 268370 - RNA, 21 nt, Artificial Sequence
  Synthetic
augugcucaugauuuucuccc

SEQ ID NO: 268371 - RNA, 22 nt, Artificial Sequence
  Synthetic
uaugugcucaugauuuucuccc

SEQ ID NO: 268372 - RNA, 23 nt, Artificial Sequence
  Synthetic
uuaugugcucaugauuuucuccc

SEQ ID NO: 268373 - RNA, 24 nt, Artificial Sequence
  Synthetic
uuuaugugcucaugauuuucuccc

SEQ ID NO: 268374 - RNA, 18 nt, Artificial Sequence
  Synthetic
auacaucacaaaaguccc

SEQ ID NO: 268375 - RNA, 19 nt, Artificial Sequence
  Synthetic
uauacaucacaaaaguccc

SEQ ID NO: 268376 - RNA, 20 nt, Artificial Sequence
  Synthetic
auauacaucacaaaaguccc

SEQ ID NO: 268377 - RNA, 21 nt, Artificial Sequence
  Synthetic
uauauacaucacaaaaguccc

SEQ ID NO: 268378 - RNA, 22 nt, Artificial Sequence
  Synthetic
auauauacaucacaaaaguccc

SEQ ID NO: 268379 - RNA, 23 nt, Artificial Sequence
  Synthetic
uauauauacaucacaaaaguccc

SEQ ID NO: 268380 - RNA, 24 nt, Artificial Sequence
  Synthetic
cuauauauacaucacaaaaguccc

SEQ ID NO: 268381 - RNA, 18 nt, Artificial Sequence
  Synthetic
cauugaucucucaguccc

SEQ ID NO: 268382 - RNA, 19 nt, Artificial Sequence
  Synthetic
ccauugaucucucaguccc

SEQ ID NO: 268383 - RNA, 20 nt, Artificial Sequence
  Synthetic
uccauugaucucucaguccc

SEQ ID NO: 268384 - RNA, 21 nt, Artificial Sequence
  Synthetic
cuccauugaucucucaguccc

SEQ ID NO: 268385 - RNA, 22 nt, Artificial Sequence
  Synthetic
ucuccauugaucucucaguccc

SEQ ID NO: 268386 - RNA, 23 nt, Artificial Sequence
  Synthetic
aucuccauugaucucucaguccc

SEQ ID NO: 268387 - RNA, 24 nt, Artificial Sequence
  Synthetic
caucuccauugaucucucaguccc

SEQ ID NO: 268388 - RNA, 18 nt, Artificial Sequence
  Synthetic
cacagucugugggguccc

SEQ ID NO: 268389 - RNA, 19 nt, Artificial Sequence
  Synthetic
acacagucugugggguccc

SEQ ID NO: 268390 - RNA, 20 nt, Artificial Sequence
  Synthetic
cacacagucugugggguccc

SEQ ID NO: 268391 - RNA, 21 nt, Artificial Sequence
  Synthetic
gcacacagucugugggguccc

SEQ ID NO: 268392 - RNA, 22 nt, Artificial Sequence
  Synthetic
ugcacacagucugugggguccc

SEQ ID NO: 268393 - RNA, 23 nt, Artificial Sequence
  Synthetic
uugcacacagucugugggguccc

SEQ ID NO: 268394 - RNA, 24 nt, Artificial Sequence
  Synthetic
auugcacacagucugugggguccc

SEQ ID NO: 268395 - RNA, 18 nt, Artificial Sequence
  Synthetic
guguaagaguuggguccc

SEQ ID NO: 268396 - RNA, 19 nt, Artificial Sequence
  Synthetic
aguguaagaguuggguccc

SEQ ID NO: 268397 - RNA, 20 nt, Artificial Sequence
  Synthetic
caguguaagaguuggguccc

SEQ ID NO: 268398 - RNA, 21 nt, Artificial Sequence
  Synthetic
acaguguaagaguuggguccc

SEQ ID NO: 268399 - RNA, 22 nt, Artificial Sequence
  Synthetic
cacaguguaagaguuggguccc

SEQ ID NO: 268400 - RNA, 23 nt, Artificial Sequence
  Synthetic
ucacaguguaagaguuggguccc

SEQ ID NO: 268401 - RNA, 24 nt, Artificial Sequence
  Synthetic
uucacaguguaagaguuggguccc

SEQ ID NO: 268402 - RNA, 18 nt, Artificial Sequence
  Synthetic
gacauuuccaaauguccc

SEQ ID NO: 268403 - RNA, 19 nt, Artificial Sequence
  Synthetic
agacauuuccaaauguccc

SEQ ID NO: 268404 - RNA, 20 nt, Artificial Sequence
  Synthetic
cagacauuuccaaauguccc

SEQ ID NO: 268405 - RNA, 21 nt, Artificial Sequence
  Synthetic
ccagacauuuccaaauguccc

SEQ ID NO: 268406 - RNA, 22 nt, Artificial Sequence
  Synthetic
cccagacauuuccaaauguccc

SEQ ID NO: 268407 - RNA, 23 nt, Artificial Sequence
  Synthetic
ucccagacauuuccaaauguccc

SEQ ID NO: 268408 - RNA, 24 nt, Artificial Sequence
  Synthetic
gucccagacauuuccaaauguccc

SEQ ID NO: 268409 - RNA, 18 nt, Artificial Sequence
  Synthetic
uccuaaauccacuguccc

SEQ ID NO: 268410 - RNA, 19 nt, Artificial Sequence
  Synthetic
auccuaaauccacuguccc

SEQ ID NO: 268411 - RNA, 20 nt, Artificial Sequence
  Synthetic
gauccuaaauccacuguccc

SEQ ID NO: 268412 - RNA, 21 nt, Artificial Sequence
  Synthetic
ugauccuaaauccacuguccc

SEQ ID NO: 268413 - RNA, 22 nt, Artificial Sequence
  Synthetic
augauccuaaauccacuguccc

SEQ ID NO: 268414 - RNA, 23 nt, Artificial Sequence
  Synthetic
uaugauccuaaauccacuguccc

SEQ ID NO: 268415 - RNA, 24 nt, Artificial Sequence
  Synthetic
auaugauccuaaauccacuguccc

SEQ ID NO: 268416 - RNA, 18 nt, Artificial Sequence
  Synthetic
augugucccacguguccc

SEQ ID NO: 268417 - RNA, 19 nt, Artificial Sequence
  Synthetic
uaugugucccacguguccc

SEQ ID NO: 268418 - RNA, 20 nt, Artificial Sequence
  Synthetic
uuaugugucccacguguccc

SEQ ID NO: 268419 - RNA, 21 nt, Artificial Sequence
  Synthetic
uuuaugugucccacguguccc

SEQ ID NO: 268420 - RNA, 22 nt, Artificial Sequence
  Synthetic
uuuuaugugucccacguguccc

SEQ ID NO: 268421 - RNA, 23 nt, Artificial Sequence
  Synthetic
auuuuaugugucccacguguccc

SEQ ID NO: 268422 - RNA, 24 nt, Artificial Sequence
  Synthetic
aauuuuaugugucccacguguccc

SEQ ID NO: 268423 - RNA, 18 nt, Artificial Sequence
  Synthetic
acagacaaaaauuguccc

SEQ ID NO: 268424 - RNA, 19 nt, Artificial Sequence
  Synthetic
aacagacaaaaauuguccc

SEQ ID NO: 268425 - RNA, 20 nt, Artificial Sequence
  Synthetic
uaacagacaaaaauuguccc

SEQ ID NO: 268426 - RNA, 21 nt, Artificial Sequence
  Synthetic
auaacagacaaaaauuguccc

SEQ ID NO: 268427 - RNA, 22 nt, Artificial Sequence
  Synthetic
gauaacagacaaaaauuguccc

SEQ ID NO: 268428 - RNA, 23 nt, Artificial Sequence
  Synthetic
agauaacagacaaaaauuguccc

SEQ ID NO: 268429 - RNA, 24 nt, Artificial Sequence
  Synthetic
gagauaacagacaaaaauuguccc

SEQ ID NO: 268430 - RNA, 18 nt, Artificial Sequence
  Synthetic
uaaacccacucuuguccc

SEQ ID NO: 268431 - RNA, 19 nt, Artificial Sequence
  Synthetic
cuaaacccacucuuguccc

SEQ ID NO: 268432 - RNA, 20 nt, Artificial Sequence
  Synthetic
ccuaaacccacucuuguccc

SEQ ID NO: 268433 - RNA, 21 nt, Artificial Sequence
  Synthetic
uccuaaacccacucuuguccc

SEQ ID NO: 268434 - RNA, 22 nt, Artificial Sequence
  Synthetic
cuccuaaacccacucuuguccc

SEQ ID NO: 268435 - RNA, 23 nt, Artificial Sequence
  Synthetic
ucuccuaaacccacucuuguccc

SEQ ID NO: 268436 - RNA, 24 nt, Artificial Sequence
  Synthetic
aucuccuaaacccacucuuguccc

SEQ ID NO: 268437 - RNA, 18 nt, Artificial Sequence
  Synthetic
uaaguaaccuguuguccc

SEQ ID NO: 268438 - RNA, 19 nt, Artificial Sequence
  Synthetic
cuaaguaaccuguuguccc

SEQ ID NO: 268439 - RNA, 20 nt, Artificial Sequence
  Synthetic
acuaaguaaccuguuguccc

SEQ ID NO: 268440 - RNA, 21 nt, Artificial Sequence
  Synthetic
gacuaaguaaccuguuguccc

SEQ ID NO: 268441 - RNA, 22 nt, Artificial Sequence
  Synthetic
ugacuaaguaaccuguuguccc

SEQ ID NO: 268442 - RNA, 23 nt, Artificial Sequence
  Synthetic
uugacuaaguaaccuguuguccc

SEQ ID NO: 268443 - RNA, 24 nt, Artificial Sequence
  Synthetic
uuugacuaaguaaccuguuguccc

SEQ ID NO: 268444 - RNA, 18 nt, Artificial Sequence
  Synthetic
uucauauaccuuuguccc

SEQ ID NO: 268445 - RNA, 19 nt, Artificial Sequence
  Synthetic
uuucauauaccuuuguccc

SEQ ID NO: 268446 - RNA, 20 nt, Artificial Sequence
  Synthetic
cuuucauauaccuuuguccc

SEQ ID NO: 268447 - RNA, 21 nt, Artificial Sequence
  Synthetic
ucuuucauauaccuuuguccc

SEQ ID NO: 268448 - RNA, 22 nt, Artificial Sequence
  Synthetic
cucuuucauauaccuuuguccc

SEQ ID NO: 268449 - RNA, 23 nt, Artificial Sequence
  Synthetic
ucucuuucauauaccuuuguccc

SEQ ID NO: 268450 - RNA, 24 nt, Artificial Sequence
  Synthetic
aucucuuucauauaccuuuguccc

SEQ ID NO: 268451 - RNA, 18 nt, Artificial Sequence
  Synthetic
cauuucuaucaaauuccc

SEQ ID NO: 268452 - RNA, 19 nt, Artificial Sequence
  Synthetic
gcauuucuaucaaauuccc

SEQ ID NO: 268453 - RNA, 20 nt, Artificial Sequence
  Synthetic
ugcauuucuaucaaauuccc

SEQ ID NO: 268454 - RNA, 21 nt, Artificial Sequence
  Synthetic
uugcauuucuaucaaauuccc

SEQ ID NO: 268455 - RNA, 22 nt, Artificial Sequence
  Synthetic
uuugcauuucuaucaaauuccc

SEQ ID NO: 268456 - RNA, 23 nt, Artificial Sequence
  Synthetic
auuugcauuucuaucaaauuccc

SEQ ID NO: 268457 - RNA, 24 nt, Artificial Sequence
  Synthetic
aauuugcauuucuaucaaauuccc

SEQ ID NO: 268458 - RNA, 18 nt, Artificial Sequence
  Synthetic
ugugaucugggaauuccc

SEQ ID NO: 268459 - RNA, 19 nt, Artificial Sequence
  Synthetic
uugugaucugggaauuccc

SEQ ID NO: 268460 - RNA, 20 nt, Artificial Sequence
  Synthetic
uuugugaucugggaauuccc

SEQ ID NO: 268461 - RNA, 21 nt, Artificial Sequence
  Synthetic
auuugugaucugggaauuccc

SEQ ID NO: 268462 - RNA, 22 nt, Artificial Sequence
  Synthetic
aauuugugaucugggaauuccc

SEQ ID NO: 268463 - RNA, 23 nt, Artificial Sequence
  Synthetic
caauuugugaucugggaauuccc

SEQ ID NO: 268464 - RNA, 24 nt, Artificial Sequence
  Synthetic
acaauuugugaucugggaauuccc

SEQ ID NO: 268465 - RNA, 18 nt, Artificial Sequence
  Synthetic
ugcuguuauugaauuccc

SEQ ID NO: 268466 - RNA, 19 nt, Artificial Sequence
  Synthetic
augcuguuauugaauuccc

SEQ ID NO: 268467 - RNA, 20 nt, Artificial Sequence
  Synthetic
gaugcuguuauugaauuccc

SEQ ID NO: 268468 - RNA, 21 nt, Artificial Sequence
  Synthetic
agaugcuguuauugaauuccc

SEQ ID NO: 268469 - RNA, 22 nt, Artificial Sequence
  Synthetic
cagaugcuguuauugaauuccc

SEQ ID NO: 268470 - RNA, 23 nt, Artificial Sequence
  Synthetic
acagaugcuguuauugaauuccc

SEQ ID NO: 268471 - RNA, 24 nt, Artificial Sequence
  Synthetic
gacagaugcuguuauugaauuccc

SEQ ID NO: 268472 - RNA, 18 nt, Artificial Sequence
  Synthetic
aacuagggcuuaauuccc

SEQ ID NO: 268473 - RNA, 19 nt, Artificial Sequence
  Synthetic
gaacuagggcuuaauuccc

SEQ ID NO: 268474 - RNA, 20 nt, Artificial Sequence
  Synthetic
agaacuagggcuuaauuccc

SEQ ID NO: 268475 - RNA, 21 nt, Artificial Sequence
  Synthetic
gagaacuagggcuuaauuccc

SEQ ID NO: 268476 - RNA, 22 nt, Artificial Sequence
  Synthetic
ugagaacuagggcuuaauuccc

SEQ ID NO: 268477 - RNA, 23 nt, Artificial Sequence
  Synthetic
gugagaacuagggcuuaauuccc

SEQ ID NO: 268478 - RNA, 24 nt, Artificial Sequence
  Synthetic
ugugagaacuagggcuuaauuccc

SEQ ID NO: 268479 - RNA, 18 nt, Artificial Sequence
  Synthetic
uacuauaaucucauuccc

SEQ ID NO: 268480 - RNA, 19 nt, Artificial Sequence
  Synthetic
guacuauaaucucauuccc

SEQ ID NO: 268481 - RNA, 20 nt, Artificial Sequence
  Synthetic
gguacuauaaucucauuccc

SEQ ID NO: 268482 - RNA, 21 nt, Artificial Sequence
  Synthetic
ugguacuauaaucucauuccc

SEQ ID NO: 268483 - RNA, 22 nt, Artificial Sequence
  Synthetic
uugguacuauaaucucauuccc

SEQ ID NO: 268484 - RNA, 23 nt, Artificial Sequence
  Synthetic
uuugguacuauaaucucauuccc

SEQ ID NO: 268485 - RNA, 24 nt, Artificial Sequence
  Synthetic
cuuugguacuauaaucucauuccc

SEQ ID NO: 268486 - RNA, 18 nt, Artificial Sequence
  Synthetic
agaaggccauauauuccc

SEQ ID NO: 268487 - RNA, 19 nt, Artificial Sequence
  Synthetic
uagaaggccauauauuccc

SEQ ID NO: 268488 - RNA, 20 nt, Artificial Sequence
  Synthetic
uuagaaggccauauauuccc

SEQ ID NO: 268489 - RNA, 21 nt, Artificial Sequence
  Synthetic
uuuagaaggccauauauuccc

SEQ ID NO: 268490 - RNA, 22 nt, Artificial Sequence
  Synthetic
uuuuagaaggccauauauuccc

SEQ ID NO: 268491 - RNA, 23 nt, Artificial Sequence
  Synthetic
guuuuagaaggccauauauuccc

SEQ ID NO: 268492 - RNA, 24 nt, Artificial Sequence
  Synthetic
uguuuuagaaggccauauauuccc

SEQ ID NO: 268493 - RNA, 18 nt, Artificial Sequence
  Synthetic
uaaaggcauuauauuccc

SEQ ID NO: 268494 - RNA, 19 nt, Artificial Sequence
  Synthetic
uuaaaggcauuauauuccc

SEQ ID NO: 268495 - RNA, 20 nt, Artificial Sequence
  Synthetic
cuuaaaggcauuauauuccc

SEQ ID NO: 268496 - RNA, 21 nt, Artificial Sequence
  Synthetic
acuuaaaggcauuauauuccc

SEQ ID NO: 268497 - RNA, 22 nt, Artificial Sequence
  Synthetic
uacuuaaaggcauuauauuccc

SEQ ID NO: 268498 - RNA, 23 nt, Artificial Sequence
  Synthetic
cuacuuaaaggcauuauauuccc

SEQ ID NO: 268499 - RNA, 24 nt, Artificial Sequence
  Synthetic
ucuacuuaaaggcauuauauuccc

SEQ ID NO: 268500 - RNA, 18 nt, Artificial Sequence
  Synthetic
aaauguaaacguauuccc

SEQ ID NO: 268501 - RNA, 19 nt, Artificial Sequence
  Synthetic
uaaauguaaacguauuccc

SEQ ID NO: 268502 - RNA, 20 nt, Artificial Sequence
  Synthetic
guaaauguaaacguauuccc

SEQ ID NO: 268503 - RNA, 21 nt, Artificial Sequence
  Synthetic
uguaaauguaaacguauuccc

SEQ ID NO: 268504 - RNA, 22 nt, Artificial Sequence
  Synthetic
uuguaaauguaaacguauuccc

SEQ ID NO: 268505 - RNA, 23 nt, Artificial Sequence
  Synthetic
auuguaaauguaaacguauuccc

SEQ ID NO: 268506 - RNA, 24 nt, Artificial Sequence
  Synthetic
aauuguaaauguaaacguauuccc

SEQ ID NO: 268507 - RNA, 18 nt, Artificial Sequence
  Synthetic
uuaucguuuguacuuccc

SEQ ID NO: 268508 - RNA, 19 nt, Artificial Sequence
  Synthetic
cuuaucguuuguacuuccc

SEQ ID NO: 268509 - RNA, 20 nt, Artificial Sequence
  Synthetic
gcuuaucguuuguacuuccc

SEQ ID NO: 268510 - RNA, 21 nt, Artificial Sequence
  Synthetic
ugcuuaucguuuguacuuccc

SEQ ID NO: 268511 - RNA, 22 nt, Artificial Sequence
  Synthetic
augcuuaucguuuguacuuccc

SEQ ID NO: 268512 - RNA, 23 nt, Artificial Sequence
  Synthetic
caugcuuaucguuuguacuuccc

SEQ ID NO: 268513 - RNA, 24 nt, Artificial Sequence
  Synthetic
gcaugcuuaucguuuguacuuccc

SEQ ID NO: 268514 - RNA, 18 nt, Artificial Sequence
  Synthetic
uaauguguugcccuuccc

SEQ ID NO: 268515 - RNA, 19 nt, Artificial Sequence
  Synthetic
uuaauguguugcccuuccc

SEQ ID NO: 268516 - RNA, 20 nt, Artificial Sequence
  Synthetic
guuaauguguugcccuuccc

SEQ ID NO: 268517 - RNA, 21 nt, Artificial Sequence
  Synthetic
uguuaauguguugcccuuccc

SEQ ID NO: 268518 - RNA, 22 nt, Artificial Sequence
  Synthetic
cuguuaauguguugcccuuccc

SEQ ID NO: 268519 - RNA, 23 nt, Artificial Sequence
  Synthetic
gcuguuaauguguugcccuuccc

SEQ ID NO: 268520 - RNA, 24 nt, Artificial Sequence
  Synthetic
ggcuguuaauguguugcccuuccc

SEQ ID NO: 268521 - RNA, 18 nt, Artificial Sequence
  Synthetic
ucucuauaaucccuuccc

SEQ ID NO: 268522 - RNA, 19 nt, Artificial Sequence
  Synthetic
aucucuauaaucccuuccc

SEQ ID NO: 268523 - RNA, 20 nt, Artificial Sequence
  Synthetic
aaucucuauaaucccuuccc

SEQ ID NO: 268524 - RNA, 21 nt, Artificial Sequence
  Synthetic
aaaucucuauaaucccuuccc

SEQ ID NO: 268525 - RNA, 22 nt, Artificial Sequence
  Synthetic
aaaaucucuauaaucccuuccc

SEQ ID NO: 268526 - RNA, 23 nt, Artificial Sequence
  Synthetic
aaaaaucucuauaaucccuuccc

SEQ ID NO: 268527 - RNA, 24 nt, Artificial Sequence
  Synthetic
aaaaaaucucuauaaucccuuccc

SEQ ID NO: 268528 - RNA, 18 nt, Artificial Sequence
  Synthetic
cuccuuccuagccuuccc

SEQ ID NO: 268529 - RNA, 19 nt, Artificial Sequence
  Synthetic
ucuccuuccuagccuuccc

SEQ ID NO: 268530 - RNA, 20 nt, Artificial Sequence
  Synthetic
cucuccuuccuagccuuccc

SEQ ID NO: 268531 - RNA, 21 nt, Artificial Sequence
  Synthetic
ccucuccuuccuagccuuccc

SEQ ID NO: 268532 - RNA, 22 nt, Artificial Sequence
  Synthetic
gccucuccuuccuagccuuccc

SEQ ID NO: 268533 - RNA, 23 nt, Artificial Sequence
  Synthetic
cgccucuccuuccuagccuuccc

SEQ ID NO: 268534 - RNA, 24 nt, Artificial Sequence
  Synthetic
ccgccucuccuuccuagccuuccc

SEQ ID NO: 268535 - RNA, 18 nt, Artificial Sequence
  Synthetic
aacacacagugccuuccc

SEQ ID NO: 268536 - RNA, 19 nt, Artificial Sequence
  Synthetic
gaacacacagugccuuccc

SEQ ID NO: 268537 - RNA, 20 nt, Artificial Sequence
  Synthetic
agaacacacagugccuuccc

SEQ ID NO: 268538 - RNA, 21 nt, Artificial Sequence
  Synthetic
gagaacacacagugccuuccc

SEQ ID NO: 268539 - RNA, 22 nt, Artificial Sequence
  Synthetic
agagaacacacagugccuuccc

SEQ ID NO: 268540 - RNA, 23 nt, Artificial Sequence
  Synthetic
aagagaacacacagugccuuccc

SEQ ID NO: 268541 - RNA, 24 nt, Artificial Sequence
  Synthetic
caagagaacacacagugccuuccc

SEQ ID NO: 268542 - RNA, 18 nt, Artificial Sequence
  Synthetic
aguuggaagcugcuuccc

SEQ ID NO: 268543 - RNA, 19 nt, Artificial Sequence
  Synthetic
caguuggaagcugcuuccc

SEQ ID NO: 268544 - RNA, 20 nt, Artificial Sequence
  Synthetic
acaguuggaagcugcuuccc

SEQ ID NO: 268545 - RNA, 21 nt, Artificial Sequence
  Synthetic
gacaguuggaagcugcuuccc

SEQ ID NO: 268546 - RNA, 22 nt, Artificial Sequence
  Synthetic
ggacaguuggaagcugcuuccc

SEQ ID NO: 268547 - RNA, 23 nt, Artificial Sequence
  Synthetic
gggacaguuggaagcugcuuccc

SEQ ID NO: 268548 - RNA, 24 nt, Artificial Sequence
  Synthetic
ugggacaguuggaagcugcuuccc

SEQ ID NO: 268549 - RNA, 18 nt, Artificial Sequence
  Synthetic
uucuccccaauucuuccc

SEQ ID NO: 268550 - RNA, 19 nt, Artificial Sequence
  Synthetic
cuucuccccaauucuuccc

SEQ ID NO: 268551 - RNA, 20 nt, Artificial Sequence
  Synthetic
ccuucuccccaauucuuccc

SEQ ID NO: 268552 - RNA, 21 nt, Artificial Sequence
  Synthetic
accuucuccccaauucuuccc

SEQ ID NO: 268553 - RNA, 22 nt, Artificial Sequence
  Synthetic
uaccuucuccccaauucuuccc

SEQ ID NO: 268554 - RNA, 23 nt, Artificial Sequence
  Synthetic
auaccuucuccccaauucuuccc

SEQ ID NO: 268555 - RNA, 24 nt, Artificial Sequence
  Synthetic
uauaccuucuccccaauucuuccc

SEQ ID NO: 268556 - RNA, 18 nt, Artificial Sequence
  Synthetic
ucaucuuucauucuuccc

SEQ ID NO: 268557 - RNA, 19 nt, Artificial Sequence
  Synthetic
gucaucuuucauucuuccc

SEQ ID NO: 268558 - RNA, 20 nt, Artificial Sequence
  Synthetic
ugucaucuuucauucuuccc

SEQ ID NO: 268559 - RNA, 21 nt, Artificial Sequence
  Synthetic
augucaucuuucauucuuccc

SEQ ID NO: 268560 - RNA, 22 nt, Artificial Sequence
  Synthetic
caugucaucuuucauucuuccc

SEQ ID NO: 268561 - RNA, 23 nt, Artificial Sequence
  Synthetic
ucaugucaucuuucauucuuccc

SEQ ID NO: 268562 - RNA, 24 nt, Artificial Sequence
  Synthetic
gucaugucaucuuucauucuuccc

SEQ ID NO: 268563 - RNA, 18 nt, Artificial Sequence
  Synthetic
ucuguauugauucuuccc

SEQ ID NO: 268564 - RNA, 19 nt, Artificial Sequence
  Synthetic
aucuguauugauucuuccc

SEQ ID NO: 268565 - RNA, 20 nt, Artificial Sequence
  Synthetic
uaucuguauugauucuuccc

SEQ ID NO: 268566 - RNA, 21 nt, Artificial Sequence
  Synthetic
cuaucuguauugauucuuccc

SEQ ID NO: 268567 - RNA, 22 nt, Artificial Sequence
  Synthetic
acuaucuguauugauucuuccc

SEQ ID NO: 268568 - RNA, 23 nt, Artificial Sequence
  Synthetic
gacuaucuguauugauucuuccc

SEQ ID NO: 268569 - RNA, 24 nt, Artificial Sequence
  Synthetic
ggacuaucuguauugauucuuccc

SEQ ID NO: 268570 - RNA, 18 nt, Artificial Sequence
  Synthetic
uuauaaaugugaguuccc

SEQ ID NO: 268571 - RNA, 19 nt, Artificial Sequence
  Synthetic
uuuauaaaugugaguuccc

SEQ ID NO: 268572 - RNA, 20 nt, Artificial Sequence
  Synthetic
uuuuauaaaugugaguuccc

SEQ ID NO: 268573 - RNA, 21 nt, Artificial Sequence
  Synthetic
guuuuauaaaugugaguuccc

SEQ ID NO: 268574 - RNA, 22 nt, Artificial Sequence
  Synthetic
aguuuuauaaaugugaguuccc

SEQ ID NO: 268575 - RNA, 23 nt, Artificial Sequence
  Synthetic
uaguuuuauaaaugugaguuccc

SEQ ID NO: 268576 - RNA, 24 nt, Artificial Sequence
  Synthetic
auaguuuuauaaaugugaguuccc

SEQ ID NO: 268577 - RNA, 18 nt, Artificial Sequence
  Synthetic
cugggaaauguaguuccc

SEQ ID NO: 268578 - RNA, 19 nt, Artificial Sequence
  Synthetic
ucugggaaauguaguuccc

SEQ ID NO: 268579 - RNA, 20 nt, Artificial Sequence
  Synthetic
gucugggaaauguaguuccc

SEQ ID NO: 268580 - RNA, 21 nt, Artificial Sequence
  Synthetic
agucugggaaauguaguuccc

SEQ ID NO: 268581 - RNA, 22 nt, Artificial Sequence
  Synthetic
gagucugggaaauguaguuccc

SEQ ID NO: 268582 - RNA, 23 nt, Artificial Sequence
  Synthetic
ugagucugggaaauguaguuccc

SEQ ID NO: 268583 - RNA, 24 nt, Artificial Sequence
  Synthetic
augagucugggaaauguaguuccc

SEQ ID NO: 268584 - RNA, 18 nt, Artificial Sequence
  Synthetic
uaacaacgucugguuccc

SEQ ID NO: 268585 - RNA, 19 nt, Artificial Sequence
  Synthetic
auaacaacgucugguuccc

SEQ ID NO: 268586 - RNA, 20 nt, Artificial Sequence
  Synthetic
aauaacaacgucugguuccc

SEQ ID NO: 268587 - RNA, 21 nt, Artificial Sequence
  Synthetic
caauaacaacgucugguuccc

SEQ ID NO: 268588 - RNA, 22 nt, Artificial Sequence
  Synthetic
gcaauaacaacgucugguuccc

SEQ ID NO: 268589 - RNA, 23 nt, Artificial Sequence
  Synthetic
ggcaauaacaacgucugguuccc

SEQ ID NO: 268590 - RNA, 24 nt, Artificial Sequence
  Synthetic
uggcaauaacaacgucugguuccc

SEQ ID NO: 268591 - RNA, 18 nt, Artificial Sequence
  Synthetic
cugaguuaagcuguuccc

SEQ ID NO: 268592 - RNA, 19 nt, Artificial Sequence
  Synthetic
gcugaguuaagcuguuccc

SEQ ID NO: 268593 - RNA, 20 nt, Artificial Sequence
  Synthetic
ggcugaguuaagcuguuccc

SEQ ID NO: 268594 - RNA, 21 nt, Artificial Sequence
  Synthetic
aggcugaguuaagcuguuccc

SEQ ID NO: 268595 - RNA, 22 nt, Artificial Sequence
  Synthetic
caggcugaguuaagcuguuccc

SEQ ID NO: 268596 - RNA, 23 nt, Artificial Sequence
  Synthetic
ccaggcugaguuaagcuguuccc

SEQ ID NO: 268597 - RNA, 24 nt, Artificial Sequence
  Synthetic
uccaggcugaguuaagcuguuccc

SEQ ID NO: 268598 - RNA, 18 nt, Artificial Sequence
  Synthetic
uuguugaggaguguuccc

SEQ ID NO: 268599 - RNA, 19 nt, Artificial Sequence
  Synthetic
uuuguugaggaguguuccc

SEQ ID NO: 268600 - RNA, 20 nt, Artificial Sequence
  Synthetic
guuuguugaggaguguuccc

SEQ ID NO: 268601 - RNA, 21 nt, Artificial Sequence
  Synthetic
gguuuguugaggaguguuccc

SEQ ID NO: 268602 - RNA, 22 nt, Artificial Sequence
  Synthetic
agguuuguugaggaguguuccc

SEQ ID NO: 268603 - RNA, 23 nt, Artificial Sequence
  Synthetic
aagguuuguugaggaguguuccc

SEQ ID NO: 268604 - RNA, 24 nt, Artificial Sequence
  Synthetic
uaagguuuguugaggaguguuccc

SEQ ID NO: 268605 - RNA, 18 nt, Artificial Sequence
  Synthetic
agucaggauaaauuuccc

SEQ ID NO: 268606 - RNA, 19 nt, Artificial Sequence
  Synthetic
cagucaggauaaauuuccc

SEQ ID NO: 268607 - RNA, 20 nt, Artificial Sequence
  Synthetic
ucagucaggauaaauuuccc

SEQ ID NO: 268608 - RNA, 21 nt, Artificial Sequence
  Synthetic
uucagucaggauaaauuuccc

SEQ ID NO: 268609 - RNA, 22 nt, Artificial Sequence
  Synthetic
uuucagucaggauaaauuuccc

SEQ ID NO: 268610 - RNA, 23 nt, Artificial Sequence
  Synthetic
auuucagucaggauaaauuuccc

SEQ ID NO: 268611 - RNA, 24 nt, Artificial Sequence
  Synthetic
aauuucagucaggauaaauuuccc

SEQ ID NO: 268612 - RNA, 18 nt, Artificial Sequence
  Synthetic
ucaucauuuaaauuuccc

SEQ ID NO: 268613 - RNA, 19 nt, Artificial Sequence
  Synthetic
aucaucauuuaaauuuccc

SEQ ID NO: 268614 - RNA, 20 nt, Artificial Sequence
  Synthetic
aaucaucauuuaaauuuccc

SEQ ID NO: 268615 - RNA, 21 nt, Artificial Sequence
  Synthetic
caaucaucauuuaaauuuccc

SEQ ID NO: 268616 - RNA, 22 nt, Artificial Sequence
  Synthetic
ucaaucaucauuuaaauuuccc

SEQ ID NO: 268617 - RNA, 23 nt, Artificial Sequence
  Synthetic
uucaaucaucauuuaaauuuccc

SEQ ID NO: 268618 - RNA, 24 nt, Artificial Sequence
  Synthetic
auucaaucaucauuuaaauuuccc

SEQ ID NO: 268619 - RNA, 18 nt, Artificial Sequence
  Synthetic
uggccauaacaauuuccc

SEQ ID NO: 268620 - RNA, 19 nt, Artificial Sequence
  Synthetic
auggccauaacaauuuccc

SEQ ID NO: 268621 - RNA, 20 nt, Artificial Sequence
  Synthetic
cauggccauaacaauuuccc

SEQ ID NO: 268622 - RNA, 21 nt, Artificial Sequence
  Synthetic
ucauggccauaacaauuuccc

SEQ ID NO: 268623 - RNA, 22 nt, Artificial Sequence
  Synthetic
uucauggccauaacaauuuccc

SEQ ID NO: 268624 - RNA, 23 nt, Artificial Sequence
  Synthetic
cuucauggccauaacaauuuccc

SEQ ID NO: 268625 - RNA, 24 nt, Artificial Sequence
  Synthetic
ucuucauggccauaacaauuuccc

SEQ ID NO: 268626 - RNA, 18 nt, Artificial Sequence
  Synthetic
aaauugagugaauuuccc

SEQ ID NO: 268627 - RNA, 19 nt, Artificial Sequence
  Synthetic
aaaauugagugaauuuccc

SEQ ID NO: 268628 - RNA, 20 nt, Artificial Sequence
  Synthetic
aaaaauugagugaauuuccc

SEQ ID NO: 268629 - RNA, 21 nt, Artificial Sequence
  Synthetic
gaaaaauugagugaauuuccc

SEQ ID NO: 268630 - RNA, 22 nt, Artificial Sequence
  Synthetic
ugaaaaauugagugaauuuccc

SEQ ID NO: 268631 - RNA, 23 nt, Artificial Sequence
  Synthetic
augaaaaauugagugaauuuccc

SEQ ID NO: 268632 - RNA, 24 nt, Artificial Sequence
  Synthetic
aaugaaaaauugagugaauuuccc

SEQ ID NO: 268633 - RNA, 18 nt, Artificial Sequence
  Synthetic
uacuugucagcauuuccc

SEQ ID NO: 268634 - RNA, 19 nt, Artificial Sequence
  Synthetic
guacuugucagcauuuccc

SEQ ID NO: 268635 - RNA, 20 nt, Artificial Sequence
  Synthetic
cguacuugucagcauuuccc

SEQ ID NO: 268636 - RNA, 21 nt, Artificial Sequence
  Synthetic
ccguacuugucagcauuuccc

SEQ ID NO: 268637 - RNA, 22 nt, Artificial Sequence
  Synthetic
uccguacuugucagcauuuccc

SEQ ID NO: 268638 - RNA, 23 nt, Artificial Sequence
  Synthetic
guccguacuugucagcauuuccc

SEQ ID NO: 268639 - RNA, 24 nt, Artificial Sequence
  Synthetic
aguccguacuugucagcauuuccc

SEQ ID NO: 268640 - RNA, 18 nt, Artificial Sequence
  Synthetic
uggaggcugugauuuccc

SEQ ID NO: 268641 - RNA, 19 nt, Artificial Sequence
  Synthetic
cuggaggcugugauuuccc

SEQ ID NO: 268642 - RNA, 20 nt, Artificial Sequence
  Synthetic
acuggaggcugugauuuccc

SEQ ID NO: 268643 - RNA, 21 nt, Artificial Sequence
  Synthetic
gacuggaggcugugauuuccc

SEQ ID NO: 268644 - RNA, 22 nt, Artificial Sequence
  Synthetic
ggacuggaggcugugauuuccc

SEQ ID NO: 268645 - RNA, 23 nt, Artificial Sequence
  Synthetic
uggacuggaggcugugauuuccc

SEQ ID NO: 268646 - RNA, 24 nt, Artificial Sequence
  Synthetic
guggacuggaggcugugauuuccc

SEQ ID NO: 268647 - RNA, 18 nt, Artificial Sequence
  Synthetic
gaugcagaaggcuuuccc

SEQ ID NO: 268648 - RNA, 19 nt, Artificial Sequence
  Synthetic
ggaugcagaaggcuuuccc

SEQ ID NO: 268649 - RNA, 20 nt, Artificial Sequence
  Synthetic
aggaugcagaaggcuuuccc

SEQ ID NO: 268650 - RNA, 21 nt, Artificial Sequence
  Synthetic
caggaugcagaaggcuuuccc

SEQ ID NO: 268651 - RNA, 22 nt, Artificial Sequence
  Synthetic
gcaggaugcagaaggcuuuccc

SEQ ID NO: 268652 - RNA, 23 nt, Artificial Sequence
  Synthetic
ggcaggaugcagaaggcuuuccc

SEQ ID NO: 268653 - RNA, 24 nt, Artificial Sequence
  Synthetic
uggcaggaugcagaaggcuuuccc

SEQ ID NO: 268654 - RNA, 18 nt, Artificial Sequence
  Synthetic
aacuucugugaguuuccc

SEQ ID NO: 268655 - RNA, 19 nt, Artificial Sequence
  Synthetic
aaacuucugugaguuuccc

SEQ ID NO: 268656 - RNA, 20 nt, Artificial Sequence
  Synthetic
aaaacuucugugaguuuccc

SEQ ID NO: 268657 - RNA, 21 nt, Artificial Sequence
  Synthetic
caaaacuucugugaguuuccc

SEQ ID NO: 268658 - RNA, 22 nt, Artificial Sequence
  Synthetic
ccaaaacuucugugaguuuccc

SEQ ID NO: 268659 - RNA, 23 nt, Artificial Sequence
  Synthetic
cccaaaacuucugugaguuuccc

SEQ ID NO: 268660 - RNA, 24 nt, Artificial Sequence
  Synthetic
ccccaaaacuucugugaguuuccc

SEQ ID NO: 268661 - RNA, 18 nt, Artificial Sequence
  Synthetic
uagggccaaauguuuccc

SEQ ID NO: 268662 - RNA, 19 nt, Artificial Sequence
  Synthetic
uuagggccaaauguuuccc

SEQ ID NO: 268663 - RNA, 20 nt, Artificial Sequence
  Synthetic
cuuagggccaaauguuuccc

SEQ ID NO: 268664 - RNA, 21 nt, Artificial Sequence
  Synthetic
ucuuagggccaaauguuuccc

SEQ ID NO: 268665 - RNA, 22 nt, Artificial Sequence
  Synthetic
gucuuagggccaaauguuuccc

SEQ ID NO: 268666 - RNA, 23 nt, Artificial Sequence
  Synthetic
ugucuuagggccaaauguuuccc

SEQ ID NO: 268667 - RNA, 24 nt, Artificial Sequence
  Synthetic
uugucuuagggccaaauguuuccc

SEQ ID NO: 268668 - RNA, 18 nt, Artificial Sequence
  Synthetic
uuauagaaacauuuuccc

SEQ ID NO: 268669 - RNA, 19 nt, Artificial Sequence
  Synthetic
auuauagaaacauuuuccc

SEQ ID NO: 268670 - RNA, 20 nt, Artificial Sequence
  Synthetic
gauuauagaaacauuuuccc

SEQ ID NO: 268671 - RNA, 21 nt, Artificial Sequence
  Synthetic
ggauuauagaaacauuuuccc

SEQ ID NO: 268672 - RNA, 22 nt, Artificial Sequence
  Synthetic
aggauuauagaaacauuuuccc

SEQ ID NO: 268673 - RNA, 23 nt, Artificial Sequence
  Synthetic
uaggauuauagaaacauuuuccc

SEQ ID NO: 268674 - RNA, 24 nt, Artificial Sequence
  Synthetic
uuaggauuauagaaacauuuuccc

SEQ ID NO: 268675 - RNA, 18 nt, Artificial Sequence
  Synthetic
uauauggguucuuuuccc

SEQ ID NO: 268676 - RNA, 19 nt, Artificial Sequence
  Synthetic
cuauauggguucuuuuccc

SEQ ID NO: 268677 - RNA, 20 nt, Artificial Sequence
  Synthetic
acuauauggguucuuuuccc

SEQ ID NO: 268678 - RNA, 21 nt, Artificial Sequence
  Synthetic
cacuauauggguucuuuuccc

SEQ ID NO: 268679 - RNA, 22 nt, Artificial Sequence
  Synthetic
gcacuauauggguucuuuuccc

SEQ ID NO: 268680 - RNA, 23 nt, Artificial Sequence
  Synthetic
ugcacuauauggguucuuuuccc

SEQ ID NO: 268681 - RNA, 24 nt, Artificial Sequence
  Synthetic
cugcacuauauggguucuuuuccc

SEQ ID NO: 268682 - RNA, 18 nt, Artificial Sequence
  Synthetic
cuauguaucaguuuuccc

SEQ ID NO: 268683 - RNA, 19 nt, Artificial Sequence
  Synthetic
ccuauguaucaguuuuccc

SEQ ID NO: 268684 - RNA, 20 nt, Artificial Sequence
  Synthetic
uccuauguaucaguuuuccc

SEQ ID NO: 268685 - RNA, 21 nt, Artificial Sequence
  Synthetic
cuccuauguaucaguuuuccc

SEQ ID NO: 268686 - RNA, 22 nt, Artificial Sequence
  Synthetic
gcuccuauguaucaguuuuccc

SEQ ID NO: 268687 - RNA, 23 nt, Artificial Sequence
  Synthetic
ugcuccuauguaucaguuuuccc

SEQ ID NO: 268688 - RNA, 24 nt, Artificial Sequence
  Synthetic
augcuccuauguaucaguuuuccc

SEQ ID NO: 268689 - RNA, 18 nt, Artificial Sequence
  Synthetic
uuuuguuuugguuuuccc

SEQ ID NO: 268690 - RNA, 19 nt, Artificial Sequence
  Synthetic
guuuuguuuugguuuuccc

SEQ ID NO: 268691 - RNA, 20 nt, Artificial Sequence
  Synthetic
uguuuuguuuugguuuuccc

SEQ ID NO: 268692 - RNA, 21 nt, Artificial Sequence
  Synthetic
auguuuuguuuugguuuuccc

SEQ ID NO: 268693 - RNA, 22 nt, Artificial Sequence
  Synthetic
aauguuuuguuuugguuuuccc

SEQ ID NO: 268694 - RNA, 23 nt, Artificial Sequence
  Synthetic
caauguuuuguuuugguuuuccc

SEQ ID NO: 268695 - RNA, 24 nt, Artificial Sequence
  Synthetic
ucaauguuuuguuuugguuuuccc

SEQ ID NO: 268696 - RNA, 18 nt, Artificial Sequence
  Synthetic
ugcaacucuuguuuuccc

SEQ ID NO: 268697 - RNA, 19 nt, Artificial Sequence
  Synthetic
augcaacucuuguuuuccc

SEQ ID NO: 268698 - RNA, 20 nt, Artificial Sequence
  Synthetic
caugcaacucuuguuuuccc

SEQ ID NO: 268699 - RNA, 21 nt, Artificial Sequence
  Synthetic
acaugcaacucuuguuuuccc

SEQ ID NO: 268700 - RNA, 22 nt, Artificial Sequence
  Synthetic
gacaugcaacucuuguuuuccc

SEQ ID NO: 268701 - RNA, 23 nt, Artificial Sequence
  Synthetic
agacaugcaacucuuguuuuccc

SEQ ID NO: 268702 - RNA, 24 nt, Artificial Sequence
  Synthetic
gagacaugcaacucuuguuuuccc

SEQ ID NO: 268703 - RNA, 18 nt, Artificial Sequence
  Synthetic
cccuaaaccuuuuuuccc

SEQ ID NO: 268704 - RNA, 19 nt, Artificial Sequence
  Synthetic
ccccuaaaccuuuuuuccc

SEQ ID NO: 268705 - RNA, 20 nt, Artificial Sequence
  Synthetic
uccccuaaaccuuuuuuccc

SEQ ID NO: 268706 - RNA, 21 nt, Artificial Sequence
  Synthetic
cuccccuaaaccuuuuuuccc

SEQ ID NO: 268707 - RNA, 22 nt, Artificial Sequence
  Synthetic
acuccccuaaaccuuuuuuccc

SEQ ID NO: 268708 - RNA, 23 nt, Artificial Sequence
  Synthetic
uacuccccuaaaccuuuuuuccc

SEQ ID NO: 268709 - RNA, 24 nt, Artificial Sequence
  Synthetic
guacuccccuaaaccuuuuuuccc

SEQ ID NO: 268710 - RNA, 18 nt, Artificial Sequence
  Synthetic
uaccaaccaaaaaaagcc

SEQ ID NO: 268711 - RNA, 19 nt, Artificial Sequence
  Synthetic
cuaccaaccaaaaaaagcc

SEQ ID NO: 268712 - RNA, 20 nt, Artificial Sequence
  Synthetic
ccuaccaaccaaaaaaagcc

SEQ ID NO: 268713 - RNA, 21 nt, Artificial Sequence
  Synthetic
gccuaccaaccaaaaaaagcc

SEQ ID NO: 268714 - RNA, 22 nt, Artificial Sequence
  Synthetic
agccuaccaaccaaaaaaagcc

SEQ ID NO: 268715 - RNA, 23 nt, Artificial Sequence
  Synthetic
uagccuaccaaccaaaaaaagcc

SEQ ID NO: 268716 - RNA, 24 nt, Artificial Sequence
  Synthetic
auagccuaccaaccaaaaaaagcc

SEQ ID NO: 268717 - RNA, 18 nt, Artificial Sequence
  Synthetic
uagaaaaagaaaaaagcc

SEQ ID NO: 268718 - RNA, 19 nt, Artificial Sequence
  Synthetic
guagaaaaagaaaaaagcc

SEQ ID NO: 268719 - RNA, 20 nt, Artificial Sequence
  Synthetic
uguagaaaaagaaaaaagcc

SEQ ID NO: 268720 - RNA, 21 nt, Artificial Sequence
  Synthetic
auguagaaaaagaaaaaagcc

SEQ ID NO: 268721 - RNA, 22 nt, Artificial Sequence
  Synthetic
aauguagaaaaagaaaaaagcc

SEQ ID NO: 268722 - RNA, 23 nt, Artificial Sequence
  Synthetic
gaauguagaaaaagaaaaaagcc

SEQ ID NO: 268723 - RNA, 24 nt, Artificial Sequence
  Synthetic
ugaauguagaaaaagaaaaaagcc

SEQ ID NO: 268724 - RNA, 18 nt, Artificial Sequence
  Synthetic
ugaaccuaggaaaaagcc

SEQ ID NO: 268725 - RNA, 19 nt, Artificial Sequence
  Synthetic
gugaaccuaggaaaaagcc

SEQ ID NO: 268726 - RNA, 20 nt, Artificial Sequence
  Synthetic
agugaaccuaggaaaaagcc

SEQ ID NO: 268727 - RNA, 21 nt, Artificial Sequence
  Synthetic
aagugaaccuaggaaaaagcc

SEQ ID NO: 268728 - RNA, 22 nt, Artificial Sequence
  Synthetic
aaagugaaccuaggaaaaagcc

SEQ ID NO: 268729 - RNA, 23 nt, Artificial Sequence
  Synthetic
aaaagugaaccuaggaaaaagcc

SEQ ID NO: 268730 - RNA, 24 nt, Artificial Sequence
  Synthetic
gaaaagugaaccuaggaaaaagcc

SEQ ID NO: 268731 - RNA, 18 nt, Artificial Sequence
  Synthetic
cuuauuauaagaaaagcc

SEQ ID NO: 268732 - RNA, 19 nt, Artificial Sequence
  Synthetic
acuuauuauaagaaaagcc

SEQ ID NO: 268733 - RNA, 20 nt, Artificial Sequence
  Synthetic
cacuuauuauaagaaaagcc

SEQ ID NO: 268734 - RNA, 21 nt, Artificial Sequence
  Synthetic
ccacuuauuauaagaaaagcc

SEQ ID NO: 268735 - RNA, 22 nt, Artificial Sequence
  Synthetic
cccacuuauuauaagaaaagcc

SEQ ID NO: 268736 - RNA, 23 nt, Artificial Sequence
  Synthetic
acccacuuauuauaagaaaagcc

SEQ ID NO: 268737 - RNA, 24 nt, Artificial Sequence
  Synthetic
cacccacuuauuauaagaaaagcc

SEQ ID NO: 268738 - RNA, 18 nt, Artificial Sequence
  Synthetic
auucacaauagaaaagcc

SEQ ID NO: 268739 - RNA, 19 nt, Artificial Sequence
  Synthetic
uauucacaauagaaaagcc

SEQ ID NO: 268740 - RNA, 20 nt, Artificial Sequence
  Synthetic
cuauucacaauagaaaagcc

SEQ ID NO: 268741 - RNA, 21 nt, Artificial Sequence
  Synthetic
acuauucacaauagaaaagcc

SEQ ID NO: 268742 - RNA, 22 nt, Artificial Sequence
  Synthetic
cacuauucacaauagaaaagcc

SEQ ID NO: 268743 - RNA, 23 nt, Artificial Sequence
  Synthetic
gcacuauucacaauagaaaagcc

SEQ ID NO: 268744 - RNA, 24 nt, Artificial Sequence
  Synthetic
agcacuauucacaauagaaaagcc

SEQ ID NO: 268745 - RNA, 18 nt, Artificial Sequence
  Synthetic
uuaacaagaggaaaagcc

SEQ ID NO: 268746 - RNA, 19 nt, Artificial Sequence
  Synthetic
auuaacaagaggaaaagcc

SEQ ID NO: 268747 - RNA, 20 nt, Artificial Sequence
  Synthetic
gauuaacaagaggaaaagcc

SEQ ID NO: 268748 - RNA, 21 nt, Artificial Sequence
  Synthetic
agauuaacaagaggaaaagcc

SEQ ID NO: 268749 - RNA, 22 nt, Artificial Sequence
  Synthetic
cagauuaacaagaggaaaagcc

SEQ ID NO: 268750 - RNA, 23 nt, Artificial Sequence
  Synthetic
acagauuaacaagaggaaaagcc

SEQ ID NO: 268751 - RNA, 24 nt, Artificial Sequence
  Synthetic
gacagauuaacaagaggaaaagcc

SEQ ID NO: 268752 - RNA, 18 nt, Artificial Sequence
  Synthetic
uuagccucaaacaaagcc

SEQ ID NO: 268753 - RNA, 19 nt, Artificial Sequence
  Synthetic
auuagccucaaacaaagcc

SEQ ID NO: 268754 - RNA, 20 nt, Artificial Sequence
  Synthetic
cauuagccucaaacaaagcc

SEQ ID NO: 268755 - RNA, 21 nt, Artificial Sequence
  Synthetic
ccauuagccucaaacaaagcc

SEQ ID NO: 268756 - RNA, 22 nt, Artificial Sequence
  Synthetic
gccauuagccucaaacaaagcc

SEQ ID NO: 268757 - RNA, 23 nt, Artificial Sequence
  Synthetic
agccauuagccucaaacaaagcc

SEQ ID NO: 268758 - RNA, 24 nt, Artificial Sequence
  Synthetic
aagccauuagccucaaacaaagcc

SEQ ID NO: 268759 - RNA, 18 nt, Artificial Sequence
  Synthetic
acaaguuuuaccaaagcc

SEQ ID NO: 268760 - RNA, 19 nt, Artificial Sequence
  Synthetic
gacaaguuuuaccaaagcc

SEQ ID NO: 268761 - RNA, 20 nt, Artificial Sequence
  Synthetic
cgacaaguuuuaccaaagcc

SEQ ID NO: 268762 - RNA, 21 nt, Artificial Sequence
  Synthetic
ccgacaaguuuuaccaaagcc

SEQ ID NO: 268763 - RNA, 22 nt, Artificial Sequence
  Synthetic
accgacaaguuuuaccaaagcc

SEQ ID NO: 268764 - RNA, 23 nt, Artificial Sequence
  Synthetic
aaccgacaaguuuuaccaaagcc

SEQ ID NO: 268765 - RNA, 24 nt, Artificial Sequence
  Synthetic
gaaccgacaaguuuuaccaaagcc

SEQ ID NO: 268766 - RNA, 18 nt, Artificial Sequence
  Synthetic
auauguaauaucaaagcc

SEQ ID NO: 268767 - RNA, 19 nt, Artificial Sequence
  Synthetic
uauauguaauaucaaagcc

SEQ ID NO: 268768 - RNA, 20 nt, Artificial Sequence
  Synthetic
uuauauguaauaucaaagcc

SEQ ID NO: 268769 - RNA, 21 nt, Artificial Sequence
  Synthetic
auuauauguaauaucaaagcc

SEQ ID NO: 268770 - RNA, 22 nt, Artificial Sequence
  Synthetic
aauuauauguaauaucaaagcc

SEQ ID NO: 268771 - RNA, 23 nt, Artificial Sequence
  Synthetic
uaauuauauguaauaucaaagcc

SEQ ID NO: 268772 - RNA, 24 nt, Artificial Sequence
  Synthetic
auaauuauauguaauaucaaagcc

SEQ ID NO: 268773 - RNA, 18 nt, Artificial Sequence
  Synthetic
auaaaugaacucaaagcc

SEQ ID NO: 268774 - RNA, 19 nt, Artificial Sequence
  Synthetic
aauaaaugaacucaaagcc

SEQ ID NO: 268775 - RNA, 20 nt, Artificial Sequence
  Synthetic
aaauaaaugaacucaaagcc

SEQ ID NO: 268776 - RNA, 21 nt, Artificial Sequence
  Synthetic
gaaauaaaugaacucaaagcc

SEQ ID NO: 268777 - RNA, 22 nt, Artificial Sequence
  Synthetic
ugaaauaaaugaacucaaagcc

SEQ ID NO: 268778 - RNA, 23 nt, Artificial Sequence
  Synthetic
cugaaauaaaugaacucaaagcc

SEQ ID NO: 268779 - RNA, 24 nt, Artificial Sequence
  Synthetic
gcugaaauaaaugaacucaaagcc

SEQ ID NO: 268780 - RNA, 18 nt, Artificial Sequence
  Synthetic
cgagguaugaagaaagcc

SEQ ID NO: 268781 - RNA, 19 nt, Artificial Sequence
  Synthetic
ucgagguaugaagaaagcc

SEQ ID NO: 268782 - RNA, 20 nt, Artificial Sequence
  Synthetic
aucgagguaugaagaaagcc

SEQ ID NO: 268783 - RNA, 21 nt, Artificial Sequence
  Synthetic
caucgagguaugaagaaagcc

SEQ ID NO: 268784 - RNA, 22 nt, Artificial Sequence
  Synthetic
ccaucgagguaugaagaaagcc

SEQ ID NO: 268785 - RNA, 23 nt, Artificial Sequence
  Synthetic
accaucgagguaugaagaaagcc

SEQ ID NO: 268786 - RNA, 24 nt, Artificial Sequence
  Synthetic
aaccaucgagguaugaagaaagcc

SEQ ID NO: 268787 - RNA, 18 nt, Artificial Sequence
  Synthetic
uuuaucaccuagaaagcc

SEQ ID NO: 268788 - RNA, 19 nt, Artificial Sequence
  Synthetic
uuuuaucaccuagaaagcc

SEQ ID NO: 268789 - RNA, 20 nt, Artificial Sequence
  Synthetic
cuuuuaucaccuagaaagcc

SEQ ID NO: 268790 - RNA, 21 nt, Artificial Sequence
  Synthetic
acuuuuaucaccuagaaagcc

SEQ ID NO: 268791 - RNA, 22 nt, Artificial Sequence
  Synthetic
cacuuuuaucaccuagaaagcc

SEQ ID NO: 268792 - RNA, 23 nt, Artificial Sequence
  Synthetic
gcacuuuuaucaccuagaaagcc

SEQ ID NO: 268793 - RNA, 24 nt, Artificial Sequence
  Synthetic
ggcacuuuuaucaccuagaaagcc

SEQ ID NO: 268794 - RNA, 18 nt, Artificial Sequence
  Synthetic
ugcugcaguuggaaagcc

SEQ ID NO: 268795 - RNA, 19 nt, Artificial Sequence
  Synthetic
cugcugcaguuggaaagcc

SEQ ID NO: 268796 - RNA, 20 nt, Artificial Sequence
  Synthetic
gcugcugcaguuggaaagcc

SEQ ID NO: 268797 - RNA, 21 nt, Artificial Sequence
  Synthetic
ugcugcugcaguuggaaagcc

SEQ ID NO: 268798 - RNA, 22 nt, Artificial Sequence
  Synthetic
gugcugcugcaguuggaaagcc

SEQ ID NO: 268799 - RNA, 23 nt, Artificial Sequence
  Synthetic
cgugcugcugcaguuggaaagcc

SEQ ID NO: 268800 - RNA, 24 nt, Artificial Sequence
  Synthetic
gcgugcugcugcaguuggaaagcc

SEQ ID NO: 268801 - RNA, 18 nt, Artificial Sequence
  Synthetic
ugagaggaaaugaaagcc

SEQ ID NO: 268802 - RNA, 19 nt, Artificial Sequence
  Synthetic
augagaggaaaugaaagcc

SEQ ID NO: 268803 - RNA, 20 nt, Artificial Sequence
  Synthetic
caugagaggaaaugaaagcc

SEQ ID NO: 268804 - RNA, 21 nt, Artificial Sequence
  Synthetic
ccaugagaggaaaugaaagcc

SEQ ID NO: 268805 - RNA, 22 nt, Artificial Sequence
  Synthetic
accaugagaggaaaugaaagcc

SEQ ID NO: 268806 - RNA, 23 nt, Artificial Sequence
  Synthetic
caccaugagaggaaaugaaagcc

SEQ ID NO: 268807 - RNA, 24 nt, Artificial Sequence
  Synthetic
ucaccaugagaggaaaugaaagcc

SEQ ID NO: 268808 - RNA, 18 nt, Artificial Sequence
  Synthetic
gggaucuccuugaaagcc

SEQ ID NO: 268809 - RNA, 19 nt, Artificial Sequence
  Synthetic
cgggaucuccuugaaagcc

SEQ ID NO: 268810 - RNA, 20 nt, Artificial Sequence
  Synthetic
acgggaucuccuugaaagcc

SEQ ID NO: 268811 - RNA, 21 nt, Artificial Sequence
  Synthetic
gacgggaucuccuugaaagcc

SEQ ID NO: 268812 - RNA, 22 nt, Artificial Sequence
  Synthetic
ggacgggaucuccuugaaagcc

SEQ ID NO: 268813 - RNA, 23 nt, Artificial Sequence
  Synthetic
gggacgggaucuccuugaaagcc

SEQ ID NO: 268814 - RNA, 24 nt, Artificial Sequence
  Synthetic
agggacgggaucuccuugaaagcc

SEQ ID NO: 268815 - RNA, 18 nt, Artificial Sequence
  Synthetic
aaaaaucaccauaaagcc

SEQ ID NO: 268816 - RNA, 19 nt, Artificial Sequence
  Synthetic
uaaaaaucaccauaaagcc

SEQ ID NO: 268817 - RNA, 20 nt, Artificial Sequence
  Synthetic
auaaaaaucaccauaaagcc

SEQ ID NO: 268818 - RNA, 21 nt, Artificial Sequence
  Synthetic
aauaaaaaucaccauaaagcc

SEQ ID NO: 268819 - RNA, 22 nt, Artificial Sequence
  Synthetic
uaauaaaaaucaccauaaagcc

SEQ ID NO: 268820 - RNA, 23 nt, Artificial Sequence
  Synthetic
guaauaaaaaucaccauaaagcc

SEQ ID NO: 268821 - RNA, 24 nt, Artificial Sequence
  Synthetic
aguaauaaaaaucaccauaaagcc

SEQ ID NO: 268822 - RNA, 18 nt, Artificial Sequence
  Synthetic
gaauuaaccacuaaagcc

SEQ ID NO: 268823 - RNA, 19 nt, Artificial Sequence
  Synthetic
ugaauuaaccacuaaagcc

SEQ ID NO: 268824 - RNA, 20 nt, Artificial Sequence
  Synthetic
uugaauuaaccacuaaagcc

SEQ ID NO: 268825 - RNA, 21 nt, Artificial Sequence
  Synthetic
uuugaauuaaccacuaaagcc

SEQ ID NO: 268826 - RNA, 22 nt, Artificial Sequence
  Synthetic
cuuugaauuaaccacuaaagcc

SEQ ID NO: 268827 - RNA, 23 nt, Artificial Sequence
  Synthetic
ucuuugaauuaaccacuaaagcc

SEQ ID NO: 268828 - RNA, 24 nt, Artificial Sequence
  Synthetic
aucuuugaauuaaccacuaaagcc

SEQ ID NO: 268829 - RNA, 18 nt, Artificial Sequence
  Synthetic
aucaagguagaacaagcc

SEQ ID NO: 268830 - RNA, 19 nt, Artificial Sequence
  Synthetic
uaucaagguagaacaagcc

SEQ ID NO: 268831 - RNA, 20 nt, Artificial Sequence
  Synthetic
cuaucaagguagaacaagcc

SEQ ID NO: 268832 - RNA, 21 nt, Artificial Sequence
  Synthetic
ucuaucaagguagaacaagcc

SEQ ID NO: 268833 - RNA, 22 nt, Artificial Sequence
  Synthetic
uucuaucaagguagaacaagcc

SEQ ID NO: 268834 - RNA, 23 nt, Artificial Sequence
  Synthetic
guucuaucaagguagaacaagcc

SEQ ID NO: 268835 - RNA, 24 nt, Artificial Sequence
  Synthetic
aguucuaucaagguagaacaagcc

SEQ ID NO: 268836 - RNA, 18 nt, Artificial Sequence
  Synthetic
gaucugcaugcacaagcc

SEQ ID NO: 268837 - RNA, 19 nt, Artificial Sequence
  Synthetic
agaucugcaugcacaagcc

SEQ ID NO: 268838 - RNA, 20 nt, Artificial Sequence
  Synthetic
aagaucugcaugcacaagcc

SEQ ID NO: 268839 - RNA, 21 nt, Artificial Sequence
  Synthetic
aaagaucugcaugcacaagcc

SEQ ID NO: 268840 - RNA, 22 nt, Artificial Sequence
  Synthetic
aaaagaucugcaugcacaagcc

SEQ ID NO: 268841 - RNA, 23 nt, Artificial Sequence
  Synthetic
caaaagaucugcaugcacaagcc

SEQ ID NO: 268842 - RNA, 24 nt, Artificial Sequence
  Synthetic
ccaaaagaucugcaugcacaagcc

SEQ ID NO: 268843 - RNA, 18 nt, Artificial Sequence
  Synthetic
ccccucccaucacaagcc

SEQ ID NO: 268844 - RNA, 19 nt, Artificial Sequence
  Synthetic
gccccucccaucacaagcc

SEQ ID NO: 268845 - RNA, 20 nt, Artificial Sequence
  Synthetic
agccccucccaucacaagcc

SEQ ID NO: 268846 - RNA, 21 nt, Artificial Sequence
  Synthetic
cagccccucccaucacaagcc

SEQ ID NO: 268847 - RNA, 22 nt, Artificial Sequence
  Synthetic
gcagccccucccaucacaagcc

SEQ ID NO: 268848 - RNA, 23 nt, Artificial Sequence
  Synthetic
ggcagccccucccaucacaagcc

SEQ ID NO: 268849 - RNA, 24 nt, Artificial Sequence
  Synthetic
uggcagccccucccaucacaagcc

SEQ ID NO: 268850 - RNA, 18 nt, Artificial Sequence
  Synthetic
ucugucaagagacaagcc

SEQ ID NO: 268851 - RNA, 19 nt, Artificial Sequence
  Synthetic
uucugucaagagacaagcc

SEQ ID NO: 268852 - RNA, 20 nt, Artificial Sequence
  Synthetic
guucugucaagagacaagcc

SEQ ID NO: 268853 - RNA, 21 nt, Artificial Sequence
  Synthetic
uguucugucaagagacaagcc

SEQ ID NO: 268854 - RNA, 22 nt, Artificial Sequence
  Synthetic
cuguucugucaagagacaagcc

SEQ ID NO: 268855 - RNA, 23 nt, Artificial Sequence
  Synthetic
acuguucugucaagagacaagcc

SEQ ID NO: 268856 - RNA, 24 nt, Artificial Sequence
  Synthetic
aacuguucugucaagagacaagcc

SEQ ID NO: 268857 - RNA, 18 nt, Artificial Sequence
  Synthetic
acuuguaacugacaagcc

SEQ ID NO: 268858 - RNA, 19 nt, Artificial Sequence
  Synthetic
uacuuguaacugacaagcc

SEQ ID NO: 268859 - RNA, 20 nt, Artificial Sequence
  Synthetic
guacuuguaacugacaagcc

SEQ ID NO: 268860 - RNA, 21 nt, Artificial Sequence
  Synthetic
uguacuuguaacugacaagcc

SEQ ID NO: 268861 - RNA, 22 nt, Artificial Sequence
  Synthetic
uuguacuuguaacugacaagcc

SEQ ID NO: 268862 - RNA, 23 nt, Artificial Sequence
  Synthetic
uuuguacuuguaacugacaagcc

SEQ ID NO: 268863 - RNA, 24 nt, Artificial Sequence
  Synthetic
auuuguacuuguaacugacaagcc

SEQ ID NO: 268864 - RNA, 18 nt, Artificial Sequence
  Synthetic
caaagcauagaccaagcc

SEQ ID NO: 268865 - RNA, 19 nt, Artificial Sequence
  Synthetic
ccaaagcauagaccaagcc

SEQ ID NO: 268866 - RNA, 20 nt, Artificial Sequence
  Synthetic
accaaagcauagaccaagcc

SEQ ID NO: 268867 - RNA, 21 nt, Artificial Sequence
  Synthetic
uaccaaagcauagaccaagcc

SEQ ID NO: 268868 - RNA, 22 nt, Artificial Sequence
  Synthetic
auaccaaagcauagaccaagcc

SEQ ID NO: 268869 - RNA, 23 nt, Artificial Sequence
  Synthetic
aauaccaaagcauagaccaagcc

SEQ ID NO: 268870 - RNA, 24 nt, Artificial Sequence
  Synthetic
gaauaccaaagcauagaccaagcc

SEQ ID NO: 268871 - RNA, 18 nt, Artificial Sequence
  Synthetic
cucccccacucccaagcc

SEQ ID NO: 268872 - RNA, 19 nt, Artificial Sequence
  Synthetic
acucccccacucccaagcc

SEQ ID NO: 268873 - RNA, 20 nt, Artificial Sequence
  Synthetic
cacucccccacucccaagcc

SEQ ID NO: 268874 - RNA, 21 nt, Artificial Sequence
  Synthetic
ccacucccccacucccaagcc

SEQ ID NO: 268875 - RNA, 22 nt, Artificial Sequence
  Synthetic
cccacucccccacucccaagcc

SEQ ID NO: 268876 - RNA, 23 nt, Artificial Sequence
  Synthetic
ucccacucccccacucccaagcc

SEQ ID NO: 268877 - RNA, 24 nt, Artificial Sequence
  Synthetic
aucccacucccccacucccaagcc

SEQ ID NO: 268878 - RNA, 18 nt, Artificial Sequence
  Synthetic
uuuccucuuugccaagcc

SEQ ID NO: 268879 - RNA, 19 nt, Artificial Sequence
  Synthetic
uuuuccucuuugccaagcc

SEQ ID NO: 268880 - RNA, 20 nt, Artificial Sequence
  Synthetic
cuuuuccucuuugccaagcc

SEQ ID NO: 268881 - RNA, 21 nt, Artificial Sequence
  Synthetic
gcuuuuccucuuugccaagcc

SEQ ID NO: 268882 - RNA, 22 nt, Artificial Sequence
  Synthetic
ugcuuuuccucuuugccaagcc

SEQ ID NO: 268883 - RNA, 23 nt, Artificial Sequence
  Synthetic
gugcuuuuccucuuugccaagcc

SEQ ID NO: 268884 - RNA, 24 nt, Artificial Sequence
  Synthetic
agugcuuuuccucuuugccaagcc

SEQ ID NO: 268885 - RNA, 18 nt, Artificial Sequence
  Synthetic
uguuucaaacuccaagcc

SEQ ID NO: 268886 - RNA, 19 nt, Artificial Sequence
  Synthetic
uuguuucaaacuccaagcc

SEQ ID NO: 268887 - RNA, 20 nt, Artificial Sequence
  Synthetic
cuuguuucaaacuccaagcc

SEQ ID NO: 268888 - RNA, 21 nt, Artificial Sequence
  Synthetic
acuuguuucaaacuccaagcc

SEQ ID NO: 268889 - RNA, 22 nt, Artificial Sequence
  Synthetic
cacuuguuucaaacuccaagcc

SEQ ID NO: 268890 - RNA, 23 nt, Artificial Sequence
  Synthetic
ccacuuguuucaaacuccaagcc

SEQ ID NO: 268891 - RNA, 24 nt, Artificial Sequence
  Synthetic
accacuuguuucaaacuccaagcc

SEQ ID NO: 268892 - RNA, 18 nt, Artificial Sequence
  Synthetic
uagucucaagaucaagcc

SEQ ID NO: 268893 - RNA, 19 nt, Artificial Sequence
  Synthetic
auagucucaagaucaagcc

SEQ ID NO: 268894 - RNA, 20 nt, Artificial Sequence
  Synthetic
aauagucucaagaucaagcc

SEQ ID NO: 268895 - RNA, 21 nt, Artificial Sequence
  Synthetic
aaauagucucaagaucaagcc

SEQ ID NO: 268896 - RNA, 22 nt, Artificial Sequence
  Synthetic
uaaauagucucaagaucaagcc

SEQ ID NO: 268897 - RNA, 23 nt, Artificial Sequence
  Synthetic
auaaauagucucaagaucaagcc

SEQ ID NO: 268898 - RNA, 24 nt, Artificial Sequence
  Synthetic
cauaaauagucucaagaucaagcc

SEQ ID NO: 268899 - RNA, 18 nt, Artificial Sequence
  Synthetic
uuuucaaacaaagaagcc

SEQ ID NO: 268900 - RNA, 19 nt, Artificial Sequence
  Synthetic
cuuuucaaacaaagaagcc

SEQ ID NO: 268901 - RNA, 20 nt, Artificial Sequence
  Synthetic
gcuuuucaaacaaagaagcc

SEQ ID NO: 268902 - RNA, 21 nt, Artificial Sequence
  Synthetic
ugcuuuucaaacaaagaagcc

SEQ ID NO: 268903 - RNA, 22 nt, Artificial Sequence
  Synthetic
augcuuuucaaacaaagaagcc

SEQ ID NO: 268904 - RNA, 23 nt, Artificial Sequence
  Synthetic
gaugcuuuucaaacaaagaagcc

SEQ ID NO: 268905 - RNA, 24 nt, Artificial Sequence
  Synthetic
ugaugcuuuucaaacaaagaagcc

SEQ ID NO: 268906 - RNA, 18 nt, Artificial Sequence
  Synthetic
cccuagccaacagaagcc

SEQ ID NO: 268907 - RNA, 19 nt, Artificial Sequence
  Synthetic
ccccuagccaacagaagcc

SEQ ID NO: 268908 - RNA, 20 nt, Artificial Sequence
  Synthetic
uccccuagccaacagaagcc

SEQ ID NO: 268909 - RNA, 21 nt, Artificial Sequence
  Synthetic
cuccccuagccaacagaagcc

SEQ ID NO: 268910 - RNA, 22 nt, Artificial Sequence
  Synthetic
ccuccccuagccaacagaagcc

SEQ ID NO: 268911 - RNA, 23 nt, Artificial Sequence
  Synthetic
cccuccccuagccaacagaagcc

SEQ ID NO: 268912 - RNA, 24 nt, Artificial Sequence
  Synthetic
ucccuccccuagccaacagaagcc

SEQ ID NO: 268913 - RNA, 18 nt, Artificial Sequence
  Synthetic
caacaggcagcagaagcc

SEQ ID NO: 268914 - RNA, 19 nt, Artificial Sequence
  Synthetic
acaacaggcagcagaagcc

SEQ ID NO: 268915 - RNA, 20 nt, Artificial Sequence
  Synthetic
cacaacaggcagcagaagcc

SEQ ID NO: 268916 - RNA, 21 nt, Artificial Sequence
  Synthetic
ucacaacaggcagcagaagcc

SEQ ID NO: 268917 - RNA, 22 nt, Artificial Sequence
  Synthetic
aucacaacaggcagcagaagcc

SEQ ID NO: 268918 - RNA, 23 nt, Artificial Sequence
  Synthetic
caucacaacaggcagcagaagcc

SEQ ID NO: 268919 - RNA, 24 nt, Artificial Sequence
  Synthetic
gcaucacaacaggcagcagaagcc

SEQ ID NO: 268920 - RNA, 18 nt, Artificial Sequence
  Synthetic
auggccagagcagaagcc

SEQ ID NO: 268921 - RNA, 19 nt, Artificial Sequence
  Synthetic
cauggccagagcagaagcc

SEQ ID NO: 268922 - RNA, 20 nt, Artificial Sequence
  Synthetic
acauggccagagcagaagcc

SEQ ID NO: 268923 - RNA, 21 nt, Artificial Sequence
  Synthetic
cacauggccagagcagaagcc

SEQ ID NO: 268924 - RNA, 22 nt, Artificial Sequence
  Synthetic
ucacauggccagagcagaagcc

SEQ ID NO: 268925 - RNA, 23 nt, Artificial Sequence
  Synthetic
gucacauggccagagcagaagcc

SEQ ID NO: 268926 - RNA, 24 nt, Artificial Sequence
  Synthetic
ugucacauggccagagcagaagcc

SEQ ID NO: 268927 - RNA, 18 nt, Artificial Sequence
  Synthetic
gccucgaaaucagaagcc

SEQ ID NO: 268928 - RNA, 19 nt, Artificial Sequence
  Synthetic
ggccucgaaaucagaagcc

SEQ ID NO: 268929 - RNA, 20 nt, Artificial Sequence
  Synthetic
uggccucgaaaucagaagcc

SEQ ID NO: 268930 - RNA, 21 nt, Artificial Sequence
  Synthetic
uuggccucgaaaucagaagcc

SEQ ID NO: 268931 - RNA, 22 nt, Artificial Sequence
  Synthetic
guuggccucgaaaucagaagcc

SEQ ID NO: 268932 - RNA, 23 nt, Artificial Sequence
  Synthetic
cguuggccucgaaaucagaagcc

SEQ ID NO: 268933 - RNA, 24 nt, Artificial Sequence
  Synthetic
ucguuggccucgaaaucagaagcc

SEQ ID NO: 268934 - RNA, 18 nt, Artificial Sequence
  Synthetic
uucucuuugggagaagcc

SEQ ID NO: 268935 - RNA, 19 nt, Artificial Sequence
  Synthetic
uuucucuuugggagaagcc

SEQ ID NO: 268936 - RNA, 20 nt, Artificial Sequence
  Synthetic
auuucucuuugggagaagcc

SEQ ID NO: 268937 - RNA, 21 nt, Artificial Sequence
  Synthetic
uauuucucuuugggagaagcc

SEQ ID NO: 268938 - RNA, 22 nt, Artificial Sequence
  Synthetic
cuauuucucuuugggagaagcc

SEQ ID NO: 268939 - RNA, 23 nt, Artificial Sequence
  Synthetic
ccuauuucucuuugggagaagcc

SEQ ID NO: 268940 - RNA, 24 nt, Artificial Sequence
  Synthetic
gccuauuucucuuugggagaagcc

SEQ ID NO: 268941 - RNA, 18 nt, Artificial Sequence
  Synthetic
gacuucaagaacgaagcc

SEQ ID NO: 268942 - RNA, 19 nt, Artificial Sequence
  Synthetic
ugacuucaagaacgaagcc

SEQ ID NO: 268943 - RNA, 20 nt, Artificial Sequence
  Synthetic
cugacuucaagaacgaagcc

SEQ ID NO: 268944 - RNA, 21 nt, Artificial Sequence
  Synthetic
gcugacuucaagaacgaagcc

SEQ ID NO: 268945 - RNA, 22 nt, Artificial Sequence
  Synthetic
cgcugacuucaagaacgaagcc

SEQ ID NO: 268946 - RNA, 23 nt, Artificial Sequence
  Synthetic
ucgcugacuucaagaacgaagcc

SEQ ID NO: 268947 - RNA, 24 nt, Artificial Sequence
  Synthetic
cucgcugacuucaagaacgaagcc

SEQ ID NO: 268948 - RNA, 18 nt, Artificial Sequence
  Synthetic
uugguaagucaggaagcc

SEQ ID NO: 268949 - RNA, 19 nt, Artificial Sequence
  Synthetic
uuugguaagucaggaagcc

SEQ ID NO: 268950 - RNA, 20 nt, Artificial Sequence
  Synthetic
uuuugguaagucaggaagcc

SEQ ID NO: 268951 - RNA, 21 nt, Artificial Sequence
  Synthetic
uuuuugguaagucaggaagcc

SEQ ID NO: 268952 - RNA, 22 nt, Artificial Sequence
  Synthetic
auuuuugguaagucaggaagcc

SEQ ID NO: 268953 - RNA, 23 nt, Artificial Sequence
  Synthetic
gauuuuugguaagucaggaagcc

SEQ ID NO: 268954 - RNA, 24 nt, Artificial Sequence
  Synthetic
agauuuuugguaagucaggaagcc

SEQ ID NO: 268955 - RNA, 18 nt, Artificial Sequence
  Synthetic
gaaaagaaggaggaagcc

SEQ ID NO: 268956 - RNA, 19 nt, Artificial Sequence
  Synthetic
agaaaagaaggaggaagcc

SEQ ID NO: 268957 - RNA, 20 nt, Artificial Sequence
  Synthetic
aagaaaagaaggaggaagcc

SEQ ID NO: 268958 - RNA, 21 nt, Artificial Sequence
  Synthetic
aaagaaaagaaggaggaagcc

SEQ ID NO: 268959 - RNA, 22 nt, Artificial Sequence
  Synthetic
gaaagaaaagaaggaggaagcc

SEQ ID NO: 268960 - RNA, 23 nt, Artificial Sequence
  Synthetic
ugaaagaaaagaaggaggaagcc

SEQ ID NO: 268961 - RNA, 24 nt, Artificial Sequence
  Synthetic
gugaaagaaaagaaggaggaagcc

SEQ ID NO: 268962 - RNA, 18 nt, Artificial Sequence
  Synthetic
ggaagugugauggaagcc

SEQ ID NO: 268963 - RNA, 19 nt, Artificial Sequence
  Synthetic
gggaagugugauggaagcc

SEQ ID NO: 268964 - RNA, 20 nt, Artificial Sequence
  Synthetic
ggggaagugugauggaagcc

SEQ ID NO: 268965 - RNA, 21 nt, Artificial Sequence
  Synthetic
aggggaagugugauggaagcc

SEQ ID NO: 268966 - RNA, 22 nt, Artificial Sequence
  Synthetic
caggggaagugugauggaagcc

SEQ ID NO: 268967 - RNA, 23 nt, Artificial Sequence
  Synthetic
ucaggggaagugugauggaagcc

SEQ ID NO: 268968 - RNA, 24 nt, Artificial Sequence
  Synthetic
gucaggggaagugugauggaagcc

SEQ ID NO: 268969 - RNA, 18 nt, Artificial Sequence
  Synthetic
accaaaagaguggaagcc

SEQ ID NO: 268970 - RNA, 19 nt, Artificial Sequence
  Synthetic
gaccaaaagaguggaagcc

SEQ ID NO: 268971 - RNA, 20 nt, Artificial Sequence
  Synthetic
cgaccaaaagaguggaagcc

SEQ ID NO: 268972 - RNA, 21 nt, Artificial Sequence
  Synthetic
gcgaccaaaagaguggaagcc

SEQ ID NO: 268973 - RNA, 22 nt, Artificial Sequence
  Synthetic
ggcgaccaaaagaguggaagcc

SEQ ID NO: 268974 - RNA, 23 nt, Artificial Sequence
  Synthetic
aggcgaccaaaagaguggaagcc

SEQ ID NO: 268975 - RNA, 24 nt, Artificial Sequence
  Synthetic
gaggcgaccaaaagaguggaagcc

SEQ ID NO: 268976 - RNA, 18 nt, Artificial Sequence
  Synthetic
caaaaaaucaaugaagcc

SEQ ID NO: 268977 - RNA, 19 nt, Artificial Sequence
  Synthetic
ucaaaaaaucaaugaagcc

SEQ ID NO: 268978 - RNA, 20 nt, Artificial Sequence
  Synthetic
uucaaaaaaucaaugaagcc

SEQ ID NO: 268979 - RNA, 21 nt, Artificial Sequence
  Synthetic
cuucaaaaaaucaaugaagcc

SEQ ID NO: 268980 - RNA, 22 nt, Artificial Sequence
  Synthetic
ccuucaaaaaaucaaugaagcc

SEQ ID NO: 268981 - RNA, 23 nt, Artificial Sequence
  Synthetic
uccuucaaaaaaucaaugaagcc

SEQ ID NO: 268982 - RNA, 24 nt, Artificial Sequence
  Synthetic
auccuucaaaaaaucaaugaagcc

SEQ ID NO: 268983 - RNA, 18 nt, Artificial Sequence
  Synthetic
ggagaaucacuugaagcc

SEQ ID NO: 268984 - RNA, 19 nt, Artificial Sequence
  Synthetic
aggagaaucacuugaagcc

SEQ ID NO: 268985 - RNA, 20 nt, Artificial Sequence
  Synthetic
caggagaaucacuugaagcc

SEQ ID NO: 268986 - RNA, 21 nt, Artificial Sequence
  Synthetic
gcaggagaaucacuugaagcc

SEQ ID NO: 268987 - RNA, 22 nt, Artificial Sequence
  Synthetic
agcaggagaaucacuugaagcc

SEQ ID NO: 268988 - RNA, 23 nt, Artificial Sequence
  Synthetic
aagcaggagaaucacuugaagcc

SEQ ID NO: 268989 - RNA, 24 nt, Artificial Sequence
  Synthetic
gaagcaggagaaucacuugaagcc

SEQ ID NO: 268990 - RNA, 18 nt, Artificial Sequence
  Synthetic
cucaugggcuaauaagcc

SEQ ID NO: 268991 - RNA, 19 nt, Artificial Sequence
  Synthetic
acucaugggcuaauaagcc

SEQ ID NO: 268992 - RNA, 20 nt, Artificial Sequence
  Synthetic
aacucaugggcuaauaagcc

SEQ ID NO: 268993 - RNA, 21 nt, Artificial Sequence
  Synthetic
caacucaugggcuaauaagcc

SEQ ID NO: 268994 - RNA, 22 nt, Artificial Sequence
  Synthetic
ccaacucaugggcuaauaagcc

SEQ ID NO: 268995 - RNA, 23 nt, Artificial Sequence
  Synthetic
cccaacucaugggcuaauaagcc

SEQ ID NO: 268996 - RNA, 24 nt, Artificial Sequence
  Synthetic
ccccaacucaugggcuaauaagcc

SEQ ID NO: 268997 - RNA, 18 nt, Artificial Sequence
  Synthetic
uucagggaaaacuaagcc

SEQ ID NO: 268998 - RNA, 19 nt, Artificial Sequence
  Synthetic
cuucagggaaaacuaagcc

SEQ ID NO: 268999 - RNA, 20 nt, Artificial Sequence
  Synthetic
ucuucagggaaaacuaagcc

SEQ ID NO: 269000 - RNA, 21 nt, Artificial Sequence
  Synthetic
uucuucagggaaaacuaagcc

SEQ ID NO: 269001 - RNA, 22 nt, Artificial Sequence
  Synthetic
uuucuucagggaaaacuaagcc

SEQ ID NO: 269002 - RNA, 23 nt, Artificial Sequence
  Synthetic
cuuucuucagggaaaacuaagcc

SEQ ID NO: 269003 - RNA, 24 nt, Artificial Sequence
  Synthetic
gcuuucuucagggaaaacuaagcc

SEQ ID NO: 269004 - RNA, 18 nt, Artificial Sequence
  Synthetic
acccauuuaguaacagcc

SEQ ID NO: 269005 - RNA, 19 nt, Artificial Sequence
  Synthetic
cacccauuuaguaacagcc

SEQ ID NO: 269006 - RNA, 20 nt, Artificial Sequence
  Synthetic
gcacccauuuaguaacagcc

SEQ ID NO: 269007 - RNA, 21 nt, Artificial Sequence
  Synthetic
agcacccauuuaguaacagcc

SEQ ID NO: 269008 - RNA, 22 nt, Artificial Sequence
  Synthetic
uagcacccauuuaguaacagcc

SEQ ID NO: 269009 - RNA, 23 nt, Artificial Sequence
  Synthetic
uuagcacccauuuaguaacagcc

SEQ ID NO: 269010 - RNA, 24 nt, Artificial Sequence
  Synthetic
uuuagcacccauuuaguaacagcc

SEQ ID NO: 269011 - RNA, 18 nt, Artificial Sequence
  Synthetic
gaaucuccucacacagcc

SEQ ID NO: 269012 - RNA, 19 nt, Artificial Sequence
  Synthetic
agaaucuccucacacagcc

SEQ ID NO: 269013 - RNA, 20 nt, Artificial Sequence
  Synthetic
aagaaucuccucacacagcc

SEQ ID NO: 269014 - RNA, 21 nt, Artificial Sequence
  Synthetic
gaagaaucuccucacacagcc

SEQ ID NO: 269015 - RNA, 22 nt, Artificial Sequence
  Synthetic
agaagaaucuccucacacagcc

SEQ ID NO: 269016 - RNA, 23 nt, Artificial Sequence
  Synthetic
cagaagaaucuccucacacagcc

SEQ ID NO: 269017 - RNA, 24 nt, Artificial Sequence
  Synthetic
ucagaagaaucuccucacacagcc

SEQ ID NO: 269018 - RNA, 18 nt, Artificial Sequence
  Synthetic
caggcagcuaauacagcc

SEQ ID NO: 269019 - RNA, 19 nt, Artificial Sequence
  Synthetic
acaggcagcuaauacagcc

SEQ ID NO: 269020 - RNA, 20 nt, Artificial Sequence
  Synthetic
cacaggcagcuaauacagcc

SEQ ID NO: 269021 - RNA, 21 nt, Artificial Sequence
  Synthetic
ccacaggcagcuaauacagcc

SEQ ID NO: 269022 - RNA, 22 nt, Artificial Sequence
  Synthetic
gccacaggcagcuaauacagcc

SEQ ID NO: 269023 - RNA, 23 nt, Artificial Sequence
  Synthetic
agccacaggcagcuaauacagcc

SEQ ID NO: 269024 - RNA, 24 nt, Artificial Sequence
  Synthetic
cagccacaggcagcuaauacagcc

SEQ ID NO: 269025 - RNA, 18 nt, Artificial Sequence
  Synthetic
auaaaauacuauacagcc

SEQ ID NO: 269026 - RNA, 19 nt, Artificial Sequence
  Synthetic
cauaaaauacuauacagcc

SEQ ID NO: 269027 - RNA, 20 nt, Artificial Sequence
  Synthetic
ccauaaaauacuauacagcc

SEQ ID NO: 269028 - RNA, 21 nt, Artificial Sequence
  Synthetic
accauaaaauacuauacagcc

SEQ ID NO: 269029 - RNA, 22 nt, Artificial Sequence
  Synthetic
caccauaaaauacuauacagcc

SEQ ID NO: 269030 - RNA, 23 nt, Artificial Sequence
  Synthetic
acaccauaaaauacuauacagcc

SEQ ID NO: 269031 - RNA, 24 nt, Artificial Sequence
  Synthetic
uacaccauaaaauacuauacagcc

SEQ ID NO: 269032 - RNA, 18 nt, Artificial Sequence
  Synthetic
aaagcuaugucuacagcc

SEQ ID NO: 269033 - RNA, 19 nt, Artificial Sequence
  Synthetic
caaagcuaugucuacagcc

SEQ ID NO: 269034 - RNA, 20 nt, Artificial Sequence
  Synthetic
acaaagcuaugucuacagcc

SEQ ID NO: 269035 - RNA, 21 nt, Artificial Sequence
  Synthetic
cacaaagcuaugucuacagcc

SEQ ID NO: 269036 - RNA, 22 nt, Artificial Sequence
  Synthetic
ucacaaagcuaugucuacagcc

SEQ ID NO: 269037 - RNA, 23 nt, Artificial Sequence
  Synthetic
aucacaaagcuaugucuacagcc

SEQ ID NO: 269038 - RNA, 24 nt, Artificial Sequence
  Synthetic
aaucacaaagcuaugucuacagcc

SEQ ID NO: 269039 - RNA, 18 nt, Artificial Sequence
  Synthetic
cuacaaaucuguacagcc

SEQ ID NO: 269040 - RNA, 19 nt, Artificial Sequence
  Synthetic
ccuacaaaucuguacagcc

SEQ ID NO: 269041 - RNA, 20 nt, Artificial Sequence
  Synthetic
uccuacaaaucuguacagcc

SEQ ID NO: 269042 - RNA, 21 nt, Artificial Sequence
  Synthetic
guccuacaaaucuguacagcc

SEQ ID NO: 269043 - RNA, 22 nt, Artificial Sequence
  Synthetic
aguccuacaaaucuguacagcc

SEQ ID NO: 269044 - RNA, 23 nt, Artificial Sequence
  Synthetic
aaguccuacaaaucuguacagcc

SEQ ID NO: 269045 - RNA, 24 nt, Artificial Sequence
  Synthetic
uaaguccuacaaaucuguacagcc

SEQ ID NO: 269046 - RNA, 18 nt, Artificial Sequence
  Synthetic
aggaguuugagaccagcc

SEQ ID NO: 269047 - RNA, 19 nt, Artificial Sequence
  Synthetic
caggaguuugagaccagcc

SEQ ID NO: 269048 - RNA, 20 nt, Artificial Sequence
  Synthetic
ccaggaguuugagaccagcc

SEQ ID NO: 269049 - RNA, 21 nt, Artificial Sequence
  Synthetic
cccaggaguuugagaccagcc

SEQ ID NO: 269050 - RNA, 22 nt, Artificial Sequence
  Synthetic
gcccaggaguuugagaccagcc

SEQ ID NO: 269051 - RNA, 23 nt, Artificial Sequence
  Synthetic
agcccaggaguuugagaccagcc

SEQ ID NO: 269052 - RNA, 24 nt, Artificial Sequence
  Synthetic
gagcccaggaguuugagaccagcc

SEQ ID NO: 269053 - RNA, 18 nt, Artificial Sequence
  Synthetic
acaacaggagacccagcc

SEQ ID NO: 269054 - RNA, 19 nt, Artificial Sequence
  Synthetic
gacaacaggagacccagcc

SEQ ID NO: 269055 - RNA, 20 nt, Artificial Sequence
  Synthetic
ugacaacaggagacccagcc

SEQ ID NO: 269056 - RNA, 21 nt, Artificial Sequence
  Synthetic
augacaacaggagacccagcc

SEQ ID NO: 269057 - RNA, 22 nt, Artificial Sequence
  Synthetic
gaugacaacaggagacccagcc

SEQ ID NO: 269058 - RNA, 23 nt, Artificial Sequence
  Synthetic
ggaugacaacaggagacccagcc

SEQ ID NO: 269059 - RNA, 24 nt, Artificial Sequence
  Synthetic
gggaugacaacaggagacccagcc

SEQ ID NO: 269060 - RNA, 18 nt, Artificial Sequence
  Synthetic
gagcaaggguccccagcc

SEQ ID NO: 269061 - RNA, 19 nt, Artificial Sequence
  Synthetic
agagcaaggguccccagcc

SEQ ID NO: 269062 - RNA, 20 nt, Artificial Sequence
  Synthetic
uagagcaaggguccccagcc

SEQ ID NO: 269063 - RNA, 21 nt, Artificial Sequence
  Synthetic
auagagcaaggguccccagcc

SEQ ID NO: 269064 - RNA, 22 nt, Artificial Sequence
  Synthetic
uauagagcaaggguccccagcc

SEQ ID NO: 269065 - RNA, 23 nt, Artificial Sequence
  Synthetic
cuauagagcaaggguccccagcc

SEQ ID NO: 269066 - RNA, 24 nt, Artificial Sequence
  Synthetic
acuauagagcaaggguccccagcc

SEQ ID NO: 269067 - RNA, 18 nt, Artificial Sequence
  Synthetic
gagccaccgugcccagcc

SEQ ID NO: 269068 - RNA, 19 nt, Artificial Sequence
  Synthetic
ugagccaccgugcccagcc

SEQ ID NO: 269069 - RNA, 20 nt, Artificial Sequence
  Synthetic
gugagccaccgugcccagcc

SEQ ID NO: 269070 - RNA, 21 nt, Artificial Sequence
  Synthetic
ugugagccaccgugcccagcc

SEQ ID NO: 269071 - RNA, 22 nt, Artificial Sequence
  Synthetic
gugugagccaccgugcccagcc

SEQ ID NO: 269072 - RNA, 23 nt, Artificial Sequence
  Synthetic
ggugugagccaccgugcccagcc

SEQ ID NO: 269073 - RNA, 24 nt, Artificial Sequence
  Synthetic
aggugugagccaccgugcccagcc

SEQ ID NO: 269074 - RNA, 18 nt, Artificial Sequence
  Synthetic
agcaacugcuugccagcc

SEQ ID NO: 269075 - RNA, 19 nt, Artificial Sequence
  Synthetic
uagcaacugcuugccagcc

SEQ ID NO: 269076 - RNA, 20 nt, Artificial Sequence
  Synthetic
auagcaacugcuugccagcc

SEQ ID NO: 269077 - RNA, 21 nt, Artificial Sequence
  Synthetic
uauagcaacugcuugccagcc

SEQ ID NO: 269078 - RNA, 22 nt, Artificial Sequence
  Synthetic
auauagcaacugcuugccagcc

SEQ ID NO: 269079 - RNA, 23 nt, Artificial Sequence
  Synthetic
aauauagcaacugcuugccagcc

SEQ ID NO: 269080 - RNA, 24 nt, Artificial Sequence
  Synthetic
caauauagcaacugcuugccagcc

SEQ ID NO: 269081 - RNA, 18 nt, Artificial Sequence
  Synthetic
caccacuucacuccagcc

SEQ ID NO: 269082 - RNA, 19 nt, Artificial Sequence
  Synthetic
gcaccacuucacuccagcc

SEQ ID NO: 269083 - RNA, 20 nt, Artificial Sequence
  Synthetic
cgcaccacuucacuccagcc

SEQ ID NO: 269084 - RNA, 21 nt, Artificial Sequence
  Synthetic
ucgcaccacuucacuccagcc

SEQ ID NO: 269085 - RNA, 22 nt, Artificial Sequence
  Synthetic
aucgcaccacuucacuccagcc

SEQ ID NO: 269086 - RNA, 23 nt, Artificial Sequence
  Synthetic
gaucgcaccacuucacuccagcc

SEQ ID NO: 269087 - RNA, 24 nt, Artificial Sequence
  Synthetic
agaucgcaccacuucacuccagcc

SEQ ID NO: 269088 - RNA, 18 nt, Artificial Sequence
  Synthetic
auauuuacaucuccagcc

SEQ ID NO: 269089 - RNA, 19 nt, Artificial Sequence
  Synthetic
aauauuuacaucuccagcc

SEQ ID NO: 269090 - RNA, 20 nt, Artificial Sequence
  Synthetic
uaauauuuacaucuccagcc

SEQ ID NO: 269091 - RNA, 21 nt, Artificial Sequence
  Synthetic
cuaauauuuacaucuccagcc

SEQ ID NO: 269092 - RNA, 22 nt, Artificial Sequence
  Synthetic
ucuaauauuuacaucuccagcc

SEQ ID NO: 269093 - RNA, 23 nt, Artificial Sequence
  Synthetic
uucuaauauuuacaucuccagcc

SEQ ID NO: 269094 - RNA, 24 nt, Artificial Sequence
  Synthetic
cuucuaauauuuacaucuccagcc

SEQ ID NO: 269095 - RNA, 18 nt, Artificial Sequence
  Synthetic
aacugcccuucuccagcc

SEQ ID NO: 269096 - RNA, 19 nt, Artificial Sequence
  Synthetic
caacugcccuucuccagcc

SEQ ID NO: 269097 - RNA, 20 nt, Artificial Sequence
  Synthetic
gcaacugcccuucuccagcc

SEQ ID NO: 269098 - RNA, 21 nt, Artificial Sequence
  Synthetic
agcaacugcccuucuccagcc

SEQ ID NO: 269099 - RNA, 22 nt, Artificial Sequence
  Synthetic
uagcaacugcccuucuccagcc

SEQ ID NO: 269100 - RNA, 23 nt, Artificial Sequence
  Synthetic
uuagcaacugcccuucuccagcc

SEQ ID NO: 269101 - RNA, 24 nt, Artificial Sequence
  Synthetic
guuagcaacugcccuucuccagcc

SEQ ID NO: 269102 - RNA, 18 nt, Artificial Sequence
  Synthetic
aaguuaacagaagcagcc

SEQ ID NO: 269103 - RNA, 19 nt, Artificial Sequence
  Synthetic
caaguuaacagaagcagcc

SEQ ID NO: 269104 - RNA, 20 nt, Artificial Sequence
  Synthetic
gcaaguuaacagaagcagcc

SEQ ID NO: 269105 - RNA, 21 nt, Artificial Sequence
  Synthetic
ggcaaguuaacagaagcagcc

SEQ ID NO: 269106 - RNA, 22 nt, Artificial Sequence
  Synthetic
aggcaaguuaacagaagcagcc

SEQ ID NO: 269107 - RNA, 23 nt, Artificial Sequence
  Synthetic
caggcaaguuaacagaagcagcc

SEQ ID NO: 269108 - RNA, 24 nt, Artificial Sequence
  Synthetic
ucaggcaaguuaacagaagcagcc

SEQ ID NO: 269109 - RNA, 18 nt, Artificial Sequence
  Synthetic
agguuggaaggagcagcc

SEQ ID NO: 269110 - RNA, 19 nt, Artificial Sequence
  Synthetic
gagguuggaaggagcagcc

SEQ ID NO: 269111 - RNA, 20 nt, Artificial Sequence
  Synthetic
ugagguuggaaggagcagcc

SEQ ID NO: 269112 - RNA, 21 nt, Artificial Sequence
  Synthetic
gugagguuggaaggagcagcc

SEQ ID NO: 269113 - RNA, 22 nt, Artificial Sequence
  Synthetic
agugagguuggaaggagcagcc

SEQ ID NO: 269114 - RNA, 23 nt, Artificial Sequence
  Synthetic
cagugagguuggaaggagcagcc

SEQ ID NO: 269115 - RNA, 24 nt, Artificial Sequence
  Synthetic
gcagugagguuggaaggagcagcc

SEQ ID NO: 269116 - RNA, 18 nt, Artificial Sequence
  Synthetic
gugguauauugagcagcc

SEQ ID NO: 269117 - RNA, 19 nt, Artificial Sequence
  Synthetic
ggugguauauugagcagcc

SEQ ID NO: 269118 - RNA, 20 nt, Artificial Sequence
  Synthetic
gggugguauauugagcagcc

SEQ ID NO: 269119 - RNA, 21 nt, Artificial Sequence
  Synthetic
cgggugguauauugagcagcc

SEQ ID NO: 269120 - RNA, 22 nt, Artificial Sequence
  Synthetic
acgggugguauauugagcagcc

SEQ ID NO: 269121 - RNA, 23 nt, Artificial Sequence
  Synthetic
cacgggugguauauugagcagcc

SEQ ID NO: 269122 - RNA, 24 nt, Artificial Sequence
  Synthetic
acacgggugguauauugagcagcc

SEQ ID NO: 269123 - RNA, 18 nt, Artificial Sequence
  Synthetic
cuuucagcacucgcagcc

SEQ ID NO: 269124 - RNA, 19 nt, Artificial Sequence
  Synthetic
gcuuucagcacucgcagcc

SEQ ID NO: 269125 - RNA, 20 nt, Artificial Sequence
  Synthetic
ugcuuucagcacucgcagcc

SEQ ID NO: 269126 - RNA, 21 nt, Artificial Sequence
  Synthetic
uugcuuucagcacucgcagcc

SEQ ID NO: 269127 - RNA, 22 nt, Artificial Sequence
  Synthetic
cuugcuuucagcacucgcagcc

SEQ ID NO: 269128 - RNA, 23 nt, Artificial Sequence
  Synthetic
ccuugcuuucagcacucgcagcc

SEQ ID NO: 269129 - RNA, 24 nt, Artificial Sequence
  Synthetic
gccuugcuuucagcacucgcagcc

SEQ ID NO: 269130 - RNA, 18 nt, Artificial Sequence
  Synthetic
ccaccgcgcccggcagcc

SEQ ID NO: 269131 - RNA, 19 nt, Artificial Sequence
  Synthetic
gccaccgcgcccggcagcc

SEQ ID NO: 269132 - RNA, 20 nt, Artificial Sequence
  Synthetic
agccaccgcgcccggcagcc

SEQ ID NO: 269133 - RNA, 21 nt, Artificial Sequence
  Synthetic
gagccaccgcgcccggcagcc

SEQ ID NO: 269134 - RNA, 22 nt, Artificial Sequence
  Synthetic
ugagccaccgcgcccggcagcc

SEQ ID NO: 269135 - RNA, 23 nt, Artificial Sequence
  Synthetic
gugagccaccgcgcccggcagcc

SEQ ID NO: 269136 - RNA, 24 nt, Artificial Sequence
  Synthetic
cgugagccaccgcgcccggcagcc

SEQ ID NO: 269137 - RNA, 18 nt, Artificial Sequence
  Synthetic
uggcuaggugaugcagcc

SEQ ID NO: 269138 - RNA, 19 nt, Artificial Sequence
  Synthetic
auggcuaggugaugcagcc

SEQ ID NO: 269139 - RNA, 20 nt, Artificial Sequence
  Synthetic
uauggcuaggugaugcagcc

SEQ ID NO: 269140 - RNA, 21 nt, Artificial Sequence
  Synthetic
uuauggcuaggugaugcagcc

SEQ ID NO: 269141 - RNA, 22 nt, Artificial Sequence
  Synthetic
cuuauggcuaggugaugcagcc

SEQ ID NO: 269142 - RNA, 23 nt, Artificial Sequence
  Synthetic
acuuauggcuaggugaugcagcc

SEQ ID NO: 269143 - RNA, 24 nt, Artificial Sequence
  Synthetic
uacuuauggcuaggugaugcagcc

SEQ ID NO: 269144 - RNA, 18 nt, Artificial Sequence
  Synthetic
guugcgugauaugcagcc

SEQ ID NO: 269145 - RNA, 19 nt, Artificial Sequence
  Synthetic
gguugcgugauaugcagcc

SEQ ID NO: 269146 - RNA, 20 nt, Artificial Sequence
  Synthetic
ggguugcgugauaugcagcc

SEQ ID NO: 269147 - RNA, 21 nt, Artificial Sequence
  Synthetic
aggguugcgugauaugcagcc

SEQ ID NO: 269148 - RNA, 22 nt, Artificial Sequence
  Synthetic
uaggguugcgugauaugcagcc

SEQ ID NO: 269149 - RNA, 23 nt, Artificial Sequence
  Synthetic
auaggguugcgugauaugcagcc

SEQ ID NO: 269150 - RNA, 24 nt, Artificial Sequence
  Synthetic
aauaggguugcgugauaugcagcc

SEQ ID NO: 269151 - RNA, 18 nt, Artificial Sequence
  Synthetic
ucacggcucacugcagcc

SEQ ID NO: 269152 - RNA, 19 nt, Artificial Sequence
  Synthetic
aucacggcucacugcagcc

SEQ ID NO: 269153 - RNA, 20 nt, Artificial Sequence
  Synthetic
gaucacggcucacugcagcc

SEQ ID NO: 269154 - RNA, 21 nt, Artificial Sequence
  Synthetic
ugaucacggcucacugcagcc

SEQ ID NO: 269155 - RNA, 22 nt, Artificial Sequence
  Synthetic
augaucacggcucacugcagcc

SEQ ID NO: 269156 - RNA, 23 nt, Artificial Sequence
  Synthetic
caugaucacggcucacugcagcc

SEQ ID NO: 269157 - RNA, 24 nt, Artificial Sequence
  Synthetic
acaugaucacggcucacugcagcc

SEQ ID NO: 269158 - RNA, 18 nt, Artificial Sequence
  Synthetic
cugcacaaauuugcagcc

SEQ ID NO: 269159 - RNA, 19 nt, Artificial Sequence
  Synthetic
gcugcacaaauuugcagcc

SEQ ID NO: 269160 - RNA, 20 nt, Artificial Sequence
  Synthetic
ugcugcacaaauuugcagcc

SEQ ID NO: 269161 - RNA, 21 nt, Artificial Sequence
  Synthetic
gugcugcacaaauuugcagcc

SEQ ID NO: 269162 - RNA, 22 nt, Artificial Sequence
  Synthetic
cgugcugcacaaauuugcagcc

SEQ ID NO: 269163 - RNA, 23 nt, Artificial Sequence
  Synthetic
acgugcugcacaaauuugcagcc

SEQ ID NO: 269164 - RNA, 24 nt, Artificial Sequence
  Synthetic
cacgugcugcacaaauuugcagcc

SEQ ID NO: 269165 - RNA, 18 nt, Artificial Sequence
  Synthetic
ucaccguagccaucagcc

SEQ ID NO: 269166 - RNA, 19 nt, Artificial Sequence
  Synthetic
gucaccguagccaucagcc

SEQ ID NO: 269167 - RNA, 20 nt, Artificial Sequence
  Synthetic
agucaccguagccaucagcc

SEQ ID NO: 269168 - RNA, 21 nt, Artificial Sequence
  Synthetic
aagucaccguagccaucagcc

SEQ ID NO: 269169 - RNA, 22 nt, Artificial Sequence
  Synthetic
aaagucaccguagccaucagcc

SEQ ID NO: 269170 - RNA, 23 nt, Artificial Sequence
  Synthetic
aaaagucaccguagccaucagcc

SEQ ID NO: 269171 - RNA, 24 nt, Artificial Sequence
  Synthetic
uaaaagucaccguagccaucagcc

SEQ ID NO: 269172 - RNA, 18 nt, Artificial Sequence
  Synthetic
ccauaaggaaacucagcc

SEQ ID NO: 269173 - RNA, 19 nt, Artificial Sequence
  Synthetic
accauaaggaaacucagcc

SEQ ID NO: 269174 - RNA, 20 nt, Artificial Sequence
  Synthetic
aaccauaaggaaacucagcc

SEQ ID NO: 269175 - RNA, 21 nt, Artificial Sequence
  Synthetic
aaaccauaaggaaacucagcc

SEQ ID NO: 269176 - RNA, 22 nt, Artificial Sequence
  Synthetic
gaaaccauaaggaaacucagcc

SEQ ID NO: 269177 - RNA, 23 nt, Artificial Sequence
  Synthetic
ggaaaccauaaggaaacucagcc

SEQ ID NO: 269178 - RNA, 24 nt, Artificial Sequence
  Synthetic
aggaaaccauaaggaaacucagcc

SEQ ID NO: 269179 - RNA, 18 nt, Artificial Sequence
  Synthetic
uccacagugugcucagcc

SEQ ID NO: 269180 - RNA, 19 nt, Artificial Sequence
  Synthetic
uuccacagugugcucagcc

SEQ ID NO: 269181 - RNA, 20 nt, Artificial Sequence
  Synthetic
uuuccacagugugcucagcc

SEQ ID NO: 269182 - RNA, 21 nt, Artificial Sequence
  Synthetic
guuuccacagugugcucagcc

SEQ ID NO: 269183 - RNA, 22 nt, Artificial Sequence
  Synthetic
aguuuccacagugugcucagcc

SEQ ID NO: 269184 - RNA, 23 nt, Artificial Sequence
  Synthetic
aaguuuccacagugugcucagcc

SEQ ID NO: 269185 - RNA, 24 nt, Artificial Sequence
  Synthetic
uaaguuuccacagugugcucagcc

SEQ ID NO: 269186 - RNA, 18 nt, Artificial Sequence
  Synthetic
aagguaagggagucagcc

SEQ ID NO: 269187 - RNA, 19 nt, Artificial Sequence
  Synthetic
gaagguaagggagucagcc

SEQ ID NO: 269188 - RNA, 20 nt, Artificial Sequence
  Synthetic
agaagguaagggagucagcc

SEQ ID NO: 269189 - RNA, 21 nt, Artificial Sequence
  Synthetic
aagaagguaagggagucagcc

SEQ ID NO: 269190 - RNA, 22 nt, Artificial Sequence
  Synthetic
gaagaagguaagggagucagcc

SEQ ID NO: 269191 - RNA, 23 nt, Artificial Sequence
  Synthetic
ggaagaagguaagggagucagcc

SEQ ID NO: 269192 - RNA, 24 nt, Artificial Sequence
  Synthetic
uggaagaagguaagggagucagcc

SEQ ID NO: 269193 - RNA, 18 nt, Artificial Sequence
  Synthetic
ugugaucacuagucagcc

SEQ ID NO: 269194 - RNA, 19 nt, Artificial Sequence
  Synthetic
cugugaucacuagucagcc

SEQ ID NO: 269195 - RNA, 20 nt, Artificial Sequence
  Synthetic
ccugugaucacuagucagcc

SEQ ID NO: 269196 - RNA, 21 nt, Artificial Sequence
  Synthetic
cccugugaucacuagucagcc

SEQ ID NO: 269197 - RNA, 22 nt, Artificial Sequence
  Synthetic
gcccugugaucacuagucagcc

SEQ ID NO: 269198 - RNA, 23 nt, Artificial Sequence
  Synthetic
ugcccugugaucacuagucagcc

SEQ ID NO: 269199 - RNA, 24 nt, Artificial Sequence
  Synthetic
uugcccugugaucacuagucagcc

SEQ ID NO: 269200 - RNA, 18 nt, Artificial Sequence
  Synthetic
aucuaaauugugucagcc

SEQ ID NO: 269201 - RNA, 19 nt, Artificial Sequence
  Synthetic
uaucuaaauugugucagcc

SEQ ID NO: 269202 - RNA, 20 nt, Artificial Sequence
  Synthetic
auaucuaaauugugucagcc

SEQ ID NO: 269203 - RNA, 21 nt, Artificial Sequence
  Synthetic
aauaucuaaauugugucagcc

SEQ ID NO: 269204 - RNA, 22 nt, Artificial Sequence
  Synthetic
aaauaucuaaauugugucagcc

SEQ ID NO: 269205 - RNA, 23 nt, Artificial Sequence
  Synthetic
uaaauaucuaaauugugucagcc

SEQ ID NO: 269206 - RNA, 24 nt, Artificial Sequence
  Synthetic
auaaauaucuaaauugugucagcc

SEQ ID NO: 269207 - RNA, 18 nt, Artificial Sequence
  Synthetic
ccuggucacccaagagcc

SEQ ID NO: 269208 - RNA, 19 nt, Artificial Sequence
  Synthetic
cccuggucacccaagagcc

SEQ ID NO: 269209 - RNA, 20 nt, Artificial Sequence
  Synthetic
ucccuggucacccaagagcc

SEQ ID NO: 269210 - RNA, 21 nt, Artificial Sequence
  Synthetic
gucccuggucacccaagagcc

SEQ ID NO: 269211 - RNA, 22 nt, Artificial Sequence
  Synthetic
ugucccuggucacccaagagcc

SEQ ID NO: 269212 - RNA, 23 nt, Artificial Sequence
  Synthetic
augucccuggucacccaagagcc

SEQ ID NO: 269213 - RNA, 24 nt, Artificial Sequence
  Synthetic
aaugucccuggucacccaagagcc

SEQ ID NO: 269214 - RNA, 18 nt, Artificial Sequence
  Synthetic
aggacagggccaagagcc

SEQ ID NO: 269215 - RNA, 19 nt, Artificial Sequence
  Synthetic
aaggacagggccaagagcc

SEQ ID NO: 269216 - RNA, 20 nt, Artificial Sequence
  Synthetic
gaaggacagggccaagagcc

SEQ ID NO: 269217 - RNA, 21 nt, Artificial Sequence
  Synthetic
ugaaggacagggccaagagcc

SEQ ID NO: 269218 - RNA, 22 nt, Artificial Sequence
  Synthetic
augaaggacagggccaagagcc

SEQ ID NO: 269219 - RNA, 23 nt, Artificial Sequence
  Synthetic
gaugaaggacagggccaagagcc

SEQ ID NO: 269220 - RNA, 24 nt, Artificial Sequence
  Synthetic
agaugaaggacagggccaagagcc

SEQ ID NO: 269221 - RNA, 18 nt, Artificial Sequence
  Synthetic
gaaccacgaggaagagcc

SEQ ID NO: 269222 - RNA, 19 nt, Artificial Sequence
  Synthetic
ugaaccacgaggaagagcc

SEQ ID NO: 269223 - RNA, 20 nt, Artificial Sequence
  Synthetic
cugaaccacgaggaagagcc

SEQ ID NO: 269224 - RNA, 21 nt, Artificial Sequence
  Synthetic
ccugaaccacgaggaagagcc

SEQ ID NO: 269225 - RNA, 22 nt, Artificial Sequence
  Synthetic
cccugaaccacgaggaagagcc

SEQ ID NO: 269226 - RNA, 23 nt, Artificial Sequence
  Synthetic
ucccugaaccacgaggaagagcc

SEQ ID NO: 269227 - RNA, 24 nt, Artificial Sequence
  Synthetic
uucccugaaccacgaggaagagcc

SEQ ID NO: 269228 - RNA, 18 nt, Artificial Sequence
  Synthetic
gauguacuucacagagcc

SEQ ID NO: 269229 - RNA, 19 nt, Artificial Sequence
  Synthetic
ugauguacuucacagagcc

SEQ ID NO: 269230 - RNA, 20 nt, Artificial Sequence
  Synthetic
gugauguacuucacagagcc

SEQ ID NO: 269231 - RNA, 21 nt, Artificial Sequence
  Synthetic
ugugauguacuucacagagcc

SEQ ID NO: 269232 - RNA, 22 nt, Artificial Sequence
  Synthetic
augugauguacuucacagagcc

SEQ ID NO: 269233 - RNA, 23 nt, Artificial Sequence
  Synthetic
aaugugauguacuucacagagcc

SEQ ID NO: 269234 - RNA, 24 nt, Artificial Sequence
  Synthetic
aaaugugauguacuucacagagcc

SEQ ID NO: 269235 - RNA, 18 nt, Artificial Sequence
  Synthetic
uacacuggaaccagagcc

SEQ ID NO: 269236 - RNA, 19 nt, Artificial Sequence
  Synthetic
uuacacuggaaccagagcc

SEQ ID NO: 269237 - RNA, 20 nt, Artificial Sequence
  Synthetic
uuuacacuggaaccagagcc

SEQ ID NO: 269238 - RNA, 21 nt, Artificial Sequence
  Synthetic
auuuacacuggaaccagagcc

SEQ ID NO: 269239 - RNA, 22 nt, Artificial Sequence
  Synthetic
aauuuacacuggaaccagagcc

SEQ ID NO: 269240 - RNA, 23 nt, Artificial Sequence
  Synthetic
gaauuuacacuggaaccagagcc

SEQ ID NO: 269241 - RNA, 24 nt, Artificial Sequence
  Synthetic
agaauuuacacuggaaccagagcc

SEQ ID NO: 269242 - RNA, 18 nt, Artificial Sequence
  Synthetic
uacaguggaaccagagcc

SEQ ID NO: 269243 - RNA, 19 nt, Artificial Sequence
  Synthetic
uuacaguggaaccagagcc

SEQ ID NO: 269244 - RNA, 20 nt, Artificial Sequence
  Synthetic
uuuacaguggaaccagagcc

SEQ ID NO: 269245 - RNA, 21 nt, Artificial Sequence
  Synthetic
auuuacaguggaaccagagcc

SEQ ID NO: 269246 - RNA, 22 nt, Artificial Sequence
  Synthetic
aauuuacaguggaaccagagcc

SEQ ID NO: 269247 - RNA, 23 nt, Artificial Sequence
  Synthetic
gaauuuacaguggaaccagagcc

SEQ ID NO: 269248 - RNA, 24 nt, Artificial Sequence
  Synthetic
agaauuuacaguggaaccagagcc

SEQ ID NO: 269249 - RNA, 18 nt, Artificial Sequence
  Synthetic
gcauacuuagccagagcc

SEQ ID NO: 269250 - RNA, 19 nt, Artificial Sequence
  Synthetic
ugcauacuuagccagagcc

SEQ ID NO: 269251 - RNA, 20 nt, Artificial Sequence
  Synthetic
cugcauacuuagccagagcc

SEQ ID NO: 269252 - RNA, 21 nt, Artificial Sequence
  Synthetic
gcugcauacuuagccagagcc

SEQ ID NO: 269253 - RNA, 22 nt, Artificial Sequence
  Synthetic
agcugcauacuuagccagagcc

SEQ ID NO: 269254 - RNA, 23 nt, Artificial Sequence
  Synthetic
uagcugcauacuuagccagagcc

SEQ ID NO: 269255 - RNA, 24 nt, Artificial Sequence
  Synthetic
guagcugcauacuuagccagagcc

SEQ ID NO: 269256 - RNA, 18 nt, Artificial Sequence
  Synthetic
uggggacacagcagagcc

SEQ ID NO: 269257 - RNA, 19 nt, Artificial Sequence
  Synthetic
auggggacacagcagagcc

SEQ ID NO: 269258 - RNA, 20 nt, Artificial Sequence
  Synthetic
cauggggacacagcagagcc

SEQ ID NO: 269259 - RNA, 21 nt, Artificial Sequence
  Synthetic
ucauggggacacagcagagcc

SEQ ID NO: 269260 - RNA, 22 nt, Artificial Sequence
  Synthetic
cucauggggacacagcagagcc

SEQ ID NO: 269261 - RNA, 23 nt, Artificial Sequence
  Synthetic
gcucauggggacacagcagagcc

SEQ ID NO: 269262 - RNA, 24 nt, Artificial Sequence
  Synthetic
ugcucauggggacacagcagagcc

SEQ ID NO: 269263 - RNA, 18 nt, Artificial Sequence
  Synthetic
gagagguuucucagagcc

SEQ ID NO: 269264 - RNA, 19 nt, Artificial Sequence
  Synthetic
agagagguuucucagagcc

SEQ ID NO: 269265 - RNA, 20 nt, Artificial Sequence
  Synthetic
gagagagguuucucagagcc

SEQ ID NO: 269266 - RNA, 21 nt, Artificial Sequence
  Synthetic
ggagagagguuucucagagcc

SEQ ID NO: 269267 - RNA, 22 nt, Artificial Sequence
  Synthetic
gggagagagguuucucagagcc

SEQ ID NO: 269268 - RNA, 23 nt, Artificial Sequence
  Synthetic
ggggagagagguuucucagagcc

SEQ ID NO: 269269 - RNA, 24 nt, Artificial Sequence
  Synthetic
uggggagagagguuucucagagcc

SEQ ID NO: 269270 - RNA, 18 nt, Artificial Sequence
  Synthetic
gcuaccagacagagagcc

SEQ ID NO: 269271 - RNA, 19 nt, Artificial Sequence
  Synthetic
ggcuaccagacagagagcc

SEQ ID NO: 269272 - RNA, 20 nt, Artificial Sequence
  Synthetic
gggcuaccagacagagagcc

SEQ ID NO: 269273 - RNA, 21 nt, Artificial Sequence
  Synthetic
ugggcuaccagacagagagcc

SEQ ID NO: 269274 - RNA, 22 nt, Artificial Sequence
  Synthetic
cugggcuaccagacagagagcc

SEQ ID NO: 269275 - RNA, 23 nt, Artificial Sequence
  Synthetic
ccugggcuaccagacagagagcc

SEQ ID NO: 269276 - RNA, 24 nt, Artificial Sequence
  Synthetic
cccugggcuaccagacagagagcc

SEQ ID NO: 269277 - RNA, 18 nt, Artificial Sequence
  Synthetic
uacugggcagauagagcc

SEQ ID NO: 269278 - RNA, 19 nt, Artificial Sequence
  Synthetic
uuacugggcagauagagcc

SEQ ID NO: 269279 - RNA, 20 nt, Artificial Sequence
  Synthetic
uuuacugggcagauagagcc

SEQ ID NO: 269280 - RNA, 21 nt, Artificial Sequence
  Synthetic
uuuuacugggcagauagagcc

SEQ ID NO: 269281 - RNA, 22 nt, Artificial Sequence
  Synthetic
cuuuuacugggcagauagagcc

SEQ ID NO: 269282 - RNA, 23 nt, Artificial Sequence
  Synthetic
ccuuuuacugggcagauagagcc

SEQ ID NO: 269283 - RNA, 24 nt, Artificial Sequence
  Synthetic
uccuuuuacugggcagauagagcc

SEQ ID NO: 269284 - RNA, 18 nt, Artificial Sequence
  Synthetic
ugugauugcauuagagcc

SEQ ID NO: 269285 - RNA, 19 nt, Artificial Sequence
  Synthetic
uugugauugcauuagagcc

SEQ ID NO: 269286 - RNA, 20 nt, Artificial Sequence
  Synthetic
uuugugauugcauuagagcc

SEQ ID NO: 269287 - RNA, 21 nt, Artificial Sequence
  Synthetic
uuuugugauugcauuagagcc

SEQ ID NO: 269288 - RNA, 22 nt, Artificial Sequence
  Synthetic
auuuugugauugcauuagagcc

SEQ ID NO: 269289 - RNA, 23 nt, Artificial Sequence
  Synthetic
uauuuugugauugcauuagagcc

SEQ ID NO: 269290 - RNA, 24 nt, Artificial Sequence
  Synthetic
auauuuugugauugcauuagagcc

SEQ ID NO: 269291 - RNA, 18 nt, Artificial Sequence
  Synthetic
agaaugucuaaaggagcc

SEQ ID NO: 269292 - RNA, 19 nt, Artificial Sequence
  Synthetic
uagaaugucuaaaggagcc

SEQ ID NO: 269293 - RNA, 20 nt, Artificial Sequence
  Synthetic
cuagaaugucuaaaggagcc

SEQ ID NO: 269294 - RNA, 21 nt, Artificial Sequence
  Synthetic
ucuagaaugucuaaaggagcc

SEQ ID NO: 269295 - RNA, 22 nt, Artificial Sequence
  Synthetic
uucuagaaugucuaaaggagcc

SEQ ID NO: 269296 - RNA, 23 nt, Artificial Sequence
  Synthetic
auucuagaaugucuaaaggagcc

SEQ ID NO: 269297 - RNA, 24 nt, Artificial Sequence
  Synthetic
cauucuagaaugucuaaaggagcc

SEQ ID NO: 269298 - RNA, 18 nt, Artificial Sequence
  Synthetic
gaaacucuaccaggagcc

SEQ ID NO: 269299 - RNA, 19 nt, Artificial Sequence
  Synthetic
agaaacucuaccaggagcc

SEQ ID NO: 269300 - RNA, 20 nt, Artificial Sequence
  Synthetic
gagaaacucuaccaggagcc

SEQ ID NO: 269301 - RNA, 21 nt, Artificial Sequence
  Synthetic
agagaaacucuaccaggagcc

SEQ ID NO: 269302 - RNA, 22 nt, Artificial Sequence
  Synthetic
uagagaaacucuaccaggagcc

SEQ ID NO: 269303 - RNA, 23 nt, Artificial Sequence
  Synthetic
cuagagaaacucuaccaggagcc

SEQ ID NO: 269304 - RNA, 24 nt, Artificial Sequence
  Synthetic
acuagagaaacucuaccaggagcc

SEQ ID NO: 269305 - RNA, 18 nt, Artificial Sequence
  Synthetic
cauggguguggaggagcc

SEQ ID NO: 269306 - RNA, 19 nt, Artificial Sequence
  Synthetic
acauggguguggaggagcc

SEQ ID NO: 269307 - RNA, 20 nt, Artificial Sequence
  Synthetic
gacauggguguggaggagcc

SEQ ID NO: 269308 - RNA, 21 nt, Artificial Sequence
  Synthetic
agacauggguguggaggagcc

SEQ ID NO: 269309 - RNA, 22 nt, Artificial Sequence
  Synthetic
uagacauggguguggaggagcc

SEQ ID NO: 269310 - RNA, 23 nt, Artificial Sequence
  Synthetic
auagacauggguguggaggagcc

SEQ ID NO: 269311 - RNA, 24 nt, Artificial Sequence
  Synthetic
aauagacauggguguggaggagcc

SEQ ID NO: 269312 - RNA, 18 nt, Artificial Sequence
  Synthetic
gcggcaggagacggagcc

SEQ ID NO: 269313 - RNA, 19 nt, Artificial Sequence
  Synthetic
agcggcaggagacggagcc

SEQ ID NO: 269314 - RNA, 20 nt, Artificial Sequence
  Synthetic
aagcggcaggagacggagcc

SEQ ID NO: 269315 - RNA, 21 nt, Artificial Sequence
  Synthetic
gaagcggcaggagacggagcc

SEQ ID NO: 269316 - RNA, 22 nt, Artificial Sequence
  Synthetic
agaagcggcaggagacggagcc

SEQ ID NO: 269317 - RNA, 23 nt, Artificial Sequence
  Synthetic
gagaagcggcaggagacggagcc

SEQ ID NO: 269318 - RNA, 24 nt, Artificial Sequence
  Synthetic
ggagaagcggcaggagacggagcc

SEQ ID NO: 269319 - RNA, 18 nt, Artificial Sequence
  Synthetic
cauucuagcuugggagcc

SEQ ID NO: 269320 - RNA, 19 nt, Artificial Sequence
  Synthetic
ucauucuagcuugggagcc

SEQ ID NO: 269321 - RNA, 20 nt, Artificial Sequence
  Synthetic
uucauucuagcuugggagcc

SEQ ID NO: 269322 - RNA, 21 nt, Artificial Sequence
  Synthetic
cuucauucuagcuugggagcc

SEQ ID NO: 269323 - RNA, 22 nt, Artificial Sequence
  Synthetic
ucuucauucuagcuugggagcc

SEQ ID NO: 269324 - RNA, 23 nt, Artificial Sequence
  Synthetic
aucuucauucuagcuugggagcc

SEQ ID NO: 269325 - RNA, 24 nt, Artificial Sequence
  Synthetic
uaucuucauucuagcuugggagcc

SEQ ID NO: 269326 - RNA, 18 nt, Artificial Sequence
  Synthetic
auaucugaaaauggagcc

SEQ ID NO: 269327 - RNA, 19 nt, Artificial Sequence
  Synthetic
aauaucugaaaauggagcc

SEQ ID NO: 269328 - RNA, 20 nt, Artificial Sequence
  Synthetic
aaauaucugaaaauggagcc

SEQ ID NO: 269329 - RNA, 21 nt, Artificial Sequence
  Synthetic
aaaauaucugaaaauggagcc

SEQ ID NO: 269330 - RNA, 22 nt, Artificial Sequence
  Synthetic
aaaaauaucugaaaauggagcc

SEQ ID NO: 269331 - RNA, 23 nt, Artificial Sequence
  Synthetic
caaaaauaucugaaaauggagcc

SEQ ID NO: 269332 - RNA, 24 nt, Artificial Sequence
  Synthetic
ucaaaaauaucugaaaauggagcc

SEQ ID NO: 269333 - RNA, 18 nt, Artificial Sequence
  Synthetic
uaugaaaugacuggagcc

SEQ ID NO: 269334 - RNA, 19 nt, Artificial Sequence
  Synthetic
uuaugaaaugacuggagcc

SEQ ID NO: 269335 - RNA, 20 nt, Artificial Sequence
  Synthetic
uuuaugaaaugacuggagcc

SEQ ID NO: 269336 - RNA, 21 nt, Artificial Sequence
  Synthetic
cuuuaugaaaugacuggagcc

SEQ ID NO: 269337 - RNA, 22 nt, Artificial Sequence
  Synthetic
ucuuuaugaaaugacuggagcc

SEQ ID NO: 269338 - RNA, 23 nt, Artificial Sequence
  Synthetic
aucuuuaugaaaugacuggagcc

SEQ ID NO: 269339 - RNA, 24 nt, Artificial Sequence
  Synthetic
caucuuuaugaaaugacuggagcc

SEQ ID NO: 269340 - RNA, 18 nt, Artificial Sequence
  Synthetic
aaaauaaauaaaugagcc

SEQ ID NO: 269341 - RNA, 19 nt, Artificial Sequence
  Synthetic
uaaaauaaauaaaugagcc

SEQ ID NO: 269342 - RNA, 20 nt, Artificial Sequence
  Synthetic
cuaaaauaaauaaaugagcc

SEQ ID NO: 269343 - RNA, 21 nt, Artificial Sequence
  Synthetic
ucuaaaauaaauaaaugagcc

SEQ ID NO: 269344 - RNA, 22 nt, Artificial Sequence
  Synthetic
gucuaaaauaaauaaaugagcc

SEQ ID NO: 269345 - RNA, 23 nt, Artificial Sequence
  Synthetic
ggucuaaaauaaauaaaugagcc

SEQ ID NO: 269346 - RNA, 24 nt, Artificial Sequence
  Synthetic
aggucuaaaauaaauaaaugagcc

SEQ ID NO: 269347 - RNA, 18 nt, Artificial Sequence
  Synthetic
uacaaacagagaugagcc

SEQ ID NO: 269348 - RNA, 19 nt, Artificial Sequence
  Synthetic
auacaaacagagaugagcc

SEQ ID NO: 269349 - RNA, 20 nt, Artificial Sequence
  Synthetic
aauacaaacagagaugagcc

SEQ ID NO: 269350 - RNA, 21 nt, Artificial Sequence
  Synthetic
aaauacaaacagagaugagcc

SEQ ID NO: 269351 - RNA, 22 nt, Artificial Sequence
  Synthetic
caaauacaaacagagaugagcc

SEQ ID NO: 269352 - RNA, 23 nt, Artificial Sequence
  Synthetic
acaaauacaaacagagaugagcc

SEQ ID NO: 269353 - RNA, 24 nt, Artificial Sequence
  Synthetic
gacaaauacaaacagagaugagcc

SEQ ID NO: 269354 - RNA, 18 nt, Artificial Sequence
  Synthetic
cuauggguguuaugagcc

SEQ ID NO: 269355 - RNA, 19 nt, Artificial Sequence
  Synthetic
gcuauggguguuaugagcc

SEQ ID NO: 269356 - RNA, 20 nt, Artificial Sequence
  Synthetic
ggcuauggguguuaugagcc

SEQ ID NO: 269357 - RNA, 21 nt, Artificial Sequence
  Synthetic
gggcuauggguguuaugagcc

SEQ ID NO: 269358 - RNA, 22 nt, Artificial Sequence
  Synthetic
agggcuauggguguuaugagcc

SEQ ID NO: 269359 - RNA, 23 nt, Artificial Sequence
  Synthetic
aagggcuauggguguuaugagcc

SEQ ID NO: 269360 - RNA, 24 nt, Artificial Sequence
  Synthetic
caagggcuauggguguuaugagcc

SEQ ID NO: 269361 - RNA, 18 nt, Artificial Sequence
  Synthetic
aucauagcucacugagcc

SEQ ID NO: 269362 - RNA, 19 nt, Artificial Sequence
  Synthetic
aaucauagcucacugagcc

SEQ ID NO: 269363 - RNA, 20 nt, Artificial Sequence
  Synthetic
caaucauagcucacugagcc

SEQ ID NO: 269364 - RNA, 21 nt, Artificial Sequence
  Synthetic
acaaucauagcucacugagcc

SEQ ID NO: 269365 - RNA, 22 nt, Artificial Sequence
  Synthetic
cacaaucauagcucacugagcc

SEQ ID NO: 269366 - RNA, 23 nt, Artificial Sequence
  Synthetic
gcacaaucauagcucacugagcc

SEQ ID NO: 269367 - RNA, 24 nt, Artificial Sequence
  Synthetic
ggcacaaucauagcucacugagcc

SEQ ID NO: 269368 - RNA, 18 nt, Artificial Sequence
  Synthetic
agccagccuaccugagcc

SEQ ID NO: 269369 - RNA, 19 nt, Artificial Sequence
  Synthetic
uagccagccuaccugagcc

SEQ ID NO: 269370 - RNA, 20 nt, Artificial Sequence
  Synthetic
uuagccagccuaccugagcc

SEQ ID NO: 269371 - RNA, 21 nt, Artificial Sequence
  Synthetic
auuagccagccuaccugagcc

SEQ ID NO: 269372 - RNA, 22 nt, Artificial Sequence
  Synthetic
aauuagccagccuaccugagcc

SEQ ID NO: 269373 - RNA, 23 nt, Artificial Sequence
  Synthetic
aaauuagccagccuaccugagcc

SEQ ID NO: 269374 - RNA, 24 nt, Artificial Sequence
  Synthetic
aaaauuagccagccuaccugagcc

SEQ ID NO: 269375 - RNA, 18 nt, Artificial Sequence
  Synthetic
uuguccaggagcugagcc

SEQ ID NO: 269376 - RNA, 19 nt, Artificial Sequence
  Synthetic
guuguccaggagcugagcc

SEQ ID NO: 269377 - RNA, 20 nt, Artificial Sequence
  Synthetic
uguuguccaggagcugagcc

SEQ ID NO: 269378 - RNA, 21 nt, Artificial Sequence
  Synthetic
guguuguccaggagcugagcc

SEQ ID NO: 269379 - RNA, 22 nt, Artificial Sequence
  Synthetic
aguguuguccaggagcugagcc

SEQ ID NO: 269380 - RNA, 23 nt, Artificial Sequence
  Synthetic
gaguguuguccaggagcugagcc

SEQ ID NO: 269381 - RNA, 24 nt, Artificial Sequence
  Synthetic
agaguguuguccaggagcugagcc

SEQ ID NO: 269382 - RNA, 18 nt, Artificial Sequence
  Synthetic
acauagauucucugagcc

SEQ ID NO: 269383 - RNA, 19 nt, Artificial Sequence
  Synthetic
aacauagauucucugagcc

SEQ ID NO: 269384 - RNA, 20 nt, Artificial Sequence
  Synthetic
caacauagauucucugagcc

SEQ ID NO: 269385 - RNA, 21 nt, Artificial Sequence
  Synthetic
ccaacauagauucucugagcc

SEQ ID NO: 269386 - RNA, 22 nt, Artificial Sequence
  Synthetic
cccaacauagauucucugagcc

SEQ ID NO: 269387 - RNA, 23 nt, Artificial Sequence
  Synthetic
ccccaacauagauucucugagcc

SEQ ID NO: 269388 - RNA, 24 nt, Artificial Sequence
  Synthetic
uccccaacauagauucucugagcc

SEQ ID NO: 269389 - RNA, 18 nt, Artificial Sequence
  Synthetic
ggaggagaggagugagcc

SEQ ID NO: 269390 - RNA, 19 nt, Artificial Sequence
  Synthetic
aggaggagaggagugagcc

SEQ ID NO: 269391 - RNA, 20 nt, Artificial Sequence
  Synthetic
gaggaggagaggagugagcc

SEQ ID NO: 269392 - RNA, 21 nt, Artificial Sequence
  Synthetic
ggaggaggagaggagugagcc

SEQ ID NO: 269393 - RNA, 22 nt, Artificial Sequence
  Synthetic
uggaggaggagaggagugagcc

SEQ ID NO: 269394 - RNA, 23 nt, Artificial Sequence
  Synthetic
guggaggaggagaggagugagcc

SEQ ID NO: 269395 - RNA, 24 nt, Artificial Sequence
  Synthetic
gguggaggaggagaggagugagcc

SEQ ID NO: 269396 - RNA, 18 nt, Artificial Sequence
  Synthetic
gggauuaucgauugagcc

SEQ ID NO: 269397 - RNA, 19 nt, Artificial Sequence
  Synthetic
ugggauuaucgauugagcc

SEQ ID NO: 269398 - RNA, 20 nt, Artificial Sequence
  Synthetic
gugggauuaucgauugagcc

SEQ ID NO: 269399 - RNA, 21 nt, Artificial Sequence
  Synthetic
ggugggauuaucgauugagcc

SEQ ID NO: 269400 - RNA, 22 nt, Artificial Sequence
  Synthetic
aggugggauuaucgauugagcc

SEQ ID NO: 269401 - RNA, 23 nt, Artificial Sequence
  Synthetic
aaggugggauuaucgauugagcc

SEQ ID NO: 269402 - RNA, 24 nt, Artificial Sequence
  Synthetic
caaggugggauuaucgauugagcc

SEQ ID NO: 269403 - RNA, 18 nt, Artificial Sequence
  Synthetic
ugaaggaucacuugagcc

SEQ ID NO: 269404 - RNA, 19 nt, Artificial Sequence
  Synthetic
cugaaggaucacuugagcc

SEQ ID NO: 269405 - RNA, 20 nt, Artificial Sequence
  Synthetic
gcugaaggaucacuugagcc

SEQ ID NO: 269406 - RNA, 21 nt, Artificial Sequence
  Synthetic
ggcugaaggaucacuugagcc

SEQ ID NO: 269407 - RNA, 22 nt, Artificial Sequence
  Synthetic
aggcugaaggaucacuugagcc

SEQ ID NO: 269408 - RNA, 23 nt, Artificial Sequence
  Synthetic
gaggcugaaggaucacuugagcc

SEQ ID NO: 269409 - RNA, 24 nt, Artificial Sequence
  Synthetic
cgaggcugaaggaucacuugagcc

SEQ ID NO: 269410 - RNA, 18 nt, Artificial Sequence
  Synthetic
aggaggaucacuugagcc

SEQ ID NO: 269411 - RNA, 19 nt, Artificial Sequence
  Synthetic
caggaggaucacuugagcc

SEQ ID NO: 269412 - RNA, 20 nt, Artificial Sequence
  Synthetic
acaggaggaucacuugagcc

SEQ ID NO: 269413 - RNA, 21 nt, Artificial Sequence
  Synthetic
cacaggaggaucacuugagcc

SEQ ID NO: 269414 - RNA, 22 nt, Artificial Sequence
  Synthetic
acacaggaggaucacuugagcc

SEQ ID NO: 269415 - RNA, 23 nt, Artificial Sequence
  Synthetic
gacacaggaggaucacuugagcc

SEQ ID NO: 269416 - RNA, 24 nt, Artificial Sequence
  Synthetic
ugacacaggaggaucacuugagcc

SEQ ID NO: 269417 - RNA, 18 nt, Artificial Sequence
  Synthetic
gggaggaucacuugagcc

SEQ ID NO: 269418 - RNA, 19 nt, Artificial Sequence
  Synthetic
ugggaggaucacuugagcc

SEQ ID NO: 269419 - RNA, 20 nt, Artificial Sequence
  Synthetic
gugggaggaucacuugagcc

SEQ ID NO: 269420 - RNA, 21 nt, Artificial Sequence
  Synthetic
agugggaggaucacuugagcc

SEQ ID NO: 269421 - RNA, 22 nt, Artificial Sequence
  Synthetic
aagugggaggaucacuugagcc

SEQ ID NO: 269422 - RNA, 23 nt, Artificial Sequence
  Synthetic
gaagugggaggaucacuugagcc

SEQ ID NO: 269423 - RNA, 24 nt, Artificial Sequence
  Synthetic
cgaagugggaggaucacuugagcc

SEQ ID NO: 269424 - RNA, 18 nt, Artificial Sequence
  Synthetic
aggagggucacuugagcc

SEQ ID NO: 269425 - RNA, 19 nt, Artificial Sequence
  Synthetic
caggagggucacuugagcc

SEQ ID NO: 269426 - RNA, 20 nt, Artificial Sequence
  Synthetic
gcaggagggucacuugagcc

SEQ ID NO: 269427 - RNA, 21 nt, Artificial Sequence
  Synthetic
ggcaggagggucacuugagcc

SEQ ID NO: 269428 - RNA, 22 nt, Artificial Sequence
  Synthetic
aggcaggagggucacuugagcc

SEQ ID NO: 269429 - RNA, 23 nt, Artificial Sequence
  Synthetic
gaggcaggagggucacuugagcc

SEQ ID NO: 269430 - RNA, 24 nt, Artificial Sequence
  Synthetic
ugaggcaggagggucacuugagcc

SEQ ID NO: 269431 - RNA, 18 nt, Artificial Sequence
  Synthetic
aggagaauuacuugagcc

SEQ ID NO: 269432 - RNA, 19 nt, Artificial Sequence
  Synthetic
uaggagaauuacuugagcc

SEQ ID NO: 269433 - RNA, 20 nt, Artificial Sequence
  Synthetic
auaggagaauuacuugagcc

SEQ ID NO: 269434 - RNA, 21 nt, Artificial Sequence
  Synthetic
gauaggagaauuacuugagcc

SEQ ID NO: 269435 - RNA, 22 nt, Artificial Sequence
  Synthetic
ggauaggagaauuacuugagcc

SEQ ID NO: 269436 - RNA, 23 nt, Artificial Sequence
  Synthetic
aggauaggagaauuacuugagcc

SEQ ID NO: 269437 - RNA, 24 nt, Artificial Sequence
  Synthetic
caggauaggagaauuacuugagcc

SEQ ID NO: 269438 - RNA, 18 nt, Artificial Sequence
  Synthetic
aggagaaccgcuugagcc

SEQ ID NO: 269439 - RNA, 19 nt, Artificial Sequence
  Synthetic
caggagaaccgcuugagcc

SEQ ID NO: 269440 - RNA, 20 nt, Artificial Sequence
  Synthetic
gcaggagaaccgcuugagcc

SEQ ID NO: 269441 - RNA, 21 nt, Artificial Sequence
  Synthetic
ggcaggagaaccgcuugagcc

SEQ ID NO: 269442 - RNA, 22 nt, Artificial Sequence
  Synthetic
aggcaggagaaccgcuugagcc

SEQ ID NO: 269443 - RNA, 23 nt, Artificial Sequence
  Synthetic
gaggcaggagaaccgcuugagcc

SEQ ID NO: 269444 - RNA, 24 nt, Artificial Sequence
  Synthetic
ugaggcaggagaaccgcuugagcc

SEQ ID NO: 269445 - RNA, 18 nt, Artificial Sequence
  Synthetic
aggagaaucgcuugagcc

SEQ ID NO: 269446 - RNA, 19 nt, Artificial Sequence
  Synthetic
caggagaaucgcuugagcc

SEQ ID NO: 269447 - RNA, 20 nt, Artificial Sequence
  Synthetic
gcaggagaaucgcuugagcc

SEQ ID NO: 269448 - RNA, 21 nt, Artificial Sequence
  Synthetic
ggcaggagaaucgcuugagcc

SEQ ID NO: 269449 - RNA, 22 nt, Artificial Sequence
  Synthetic
aggcaggagaaucgcuugagcc

SEQ ID NO: 269450 - RNA, 23 nt, Artificial Sequence
  Synthetic
aaggcaggagaaucgcuugagcc

SEQ ID NO: 269451 - RNA, 24 nt, Artificial Sequence
  Synthetic
uaaggcaggagaaucgcuugagcc

SEQ ID NO: 269452 - RNA, 18 nt, Artificial Sequence
  Synthetic
aggaggaucgcuugagcc

SEQ ID NO: 269453 - RNA, 19 nt, Artificial Sequence
  Synthetic
caggaggaucgcuugagcc

SEQ ID NO: 269454 - RNA, 20 nt, Artificial Sequence
  Synthetic
gcaggaggaucgcuugagcc

SEQ ID NO: 269455 - RNA, 21 nt, Artificial Sequence
  Synthetic
agcaggaggaucgcuugagcc

SEQ ID NO: 269456 - RNA, 22 nt, Artificial Sequence
  Synthetic
aagcaggaggaucgcuugagcc

SEQ ID NO: 269457 - RNA, 23 nt, Artificial Sequence
  Synthetic
gaagcaggaggaucgcuugagcc

SEQ ID NO: 269458 - RNA, 24 nt, Artificial Sequence
  Synthetic
ugaagcaggaggaucgcuugagcc

SEQ ID NO: 269459 - RNA, 18 nt, Artificial Sequence
  Synthetic
aggaggauugcuugagcc

SEQ ID NO: 269460 - RNA, 19 nt, Artificial Sequence
  Synthetic
caggaggauugcuugagcc

SEQ ID NO: 269461 - RNA, 20 nt, Artificial Sequence
  Synthetic
gcaggaggauugcuugagcc

SEQ ID NO: 269462 - RNA, 21 nt, Artificial Sequence
  Synthetic
ggcaggaggauugcuugagcc

SEQ ID NO: 269463 - RNA, 22 nt, Artificial Sequence
  Synthetic
aggcaggaggauugcuugagcc

SEQ ID NO: 269464 - RNA, 23 nt, Artificial Sequence
  Synthetic
gaggcaggaggauugcuugagcc

SEQ ID NO: 269465 - RNA, 24 nt, Artificial Sequence
  Synthetic
ugaggcaggaggauugcuugagcc

SEQ ID NO: 269466 - RNA, 18 nt, Artificial Sequence
  Synthetic
gagaguauugcuugagcc

SEQ ID NO: 269467 - RNA, 19 nt, Artificial Sequence
  Synthetic
cgagaguauugcuugagcc

SEQ ID NO: 269468 - RNA, 20 nt, Artificial Sequence
  Synthetic
gcgagaguauugcuugagcc

SEQ ID NO: 269469 - RNA, 21 nt, Artificial Sequence
  Synthetic
ggcgagaguauugcuugagcc

SEQ ID NO: 269470 - RNA, 22 nt, Artificial Sequence
  Synthetic
gggcgagaguauugcuugagcc

SEQ ID NO: 269471 - RNA, 23 nt, Artificial Sequence
  Synthetic
ggggcgagaguauugcuugagcc

SEQ ID NO: 269472 - RNA, 24 nt, Artificial Sequence
  Synthetic
uggggcgagaguauugcuugagcc

SEQ ID NO: 269473 - RNA, 18 nt, Artificial Sequence
  Synthetic
gggaggaucucuugagcc

SEQ ID NO: 269474 - RNA, 19 nt, Artificial Sequence
  Synthetic
cgggaggaucucuugagcc

SEQ ID NO: 269475 - RNA, 20 nt, Artificial Sequence
  Synthetic
gcgggaggaucucuugagcc

SEQ ID NO: 269476 - RNA, 21 nt, Artificial Sequence
  Synthetic
ggcgggaggaucucuugagcc

SEQ ID NO: 269477 - RNA, 22 nt, Artificial Sequence
  Synthetic
aggcgggaggaucucuugagcc

SEQ ID NO: 269478 - RNA, 23 nt, Artificial Sequence
  Synthetic
gaggcgggaggaucucuugagcc

SEQ ID NO: 269479 - RNA, 24 nt, Artificial Sequence
  Synthetic
ugaggcgggaggaucucuugagcc

SEQ ID NO: 269480 - RNA, 18 nt, Artificial Sequence
  Synthetic
gggagaauuucuugagcc

SEQ ID NO: 269481 - RNA, 19 nt, Artificial Sequence
  Synthetic
ugggagaauuucuugagcc

SEQ ID NO: 269482 - RNA, 20 nt, Artificial Sequence
  Synthetic
uugggagaauuucuugagcc

SEQ ID NO: 269483 - RNA, 21 nt, Artificial Sequence
  Synthetic
guugggagaauuucuugagcc

SEQ ID NO: 269484 - RNA, 22 nt, Artificial Sequence
  Synthetic
aguugggagaauuucuugagcc

SEQ ID NO: 269485 - RNA, 23 nt, Artificial Sequence
  Synthetic
gaguugggagaauuucuugagcc

SEQ ID NO: 269486 - RNA, 24 nt, Artificial Sequence
  Synthetic
ugaguugggagaauuucuugagcc

SEQ ID NO: 269487 - RNA, 18 nt, Artificial Sequence
  Synthetic
cuuacagguaguugagcc

SEQ ID NO: 269488 - RNA, 19 nt, Artificial Sequence
  Synthetic
gcuuacagguaguugagcc

SEQ ID NO: 269489 - RNA, 20 nt, Artificial Sequence
  Synthetic
agcuuacagguaguugagcc

SEQ ID NO: 269490 - RNA, 21 nt, Artificial Sequence
  Synthetic
cagcuuacagguaguugagcc

SEQ ID NO: 269491 - RNA, 22 nt, Artificial Sequence
  Synthetic
acagcuuacagguaguugagcc

SEQ ID NO: 269492 - RNA, 23 nt, Artificial Sequence
  Synthetic
aacagcuuacagguaguugagcc

SEQ ID NO: 269493 - RNA, 24 nt, Artificial Sequence
  Synthetic
aaacagcuuacagguaguugagcc

SEQ ID NO: 269494 - RNA, 18 nt, Artificial Sequence
  Synthetic
aguguacacuguugagcc

SEQ ID NO: 269495 - RNA, 19 nt, Artificial Sequence
  Synthetic
uaguguacacuguugagcc

SEQ ID NO: 269496 - RNA, 20 nt, Artificial Sequence
  Synthetic
auaguguacacuguugagcc

SEQ ID NO: 269497 - RNA, 21 nt, Artificial Sequence
  Synthetic
aauaguguacacuguugagcc

SEQ ID NO: 269498 - RNA, 22 nt, Artificial Sequence
  Synthetic
aaauaguguacacuguugagcc

SEQ ID NO: 269499 - RNA, 23 nt, Artificial Sequence
  Synthetic
gaaauaguguacacuguugagcc

SEQ ID NO: 269500 - RNA, 24 nt, Artificial Sequence
  Synthetic
ggaaauaguguacacuguugagcc

SEQ ID NO: 269501 - RNA, 18 nt, Artificial Sequence
  Synthetic
gacuuuucagcaauagcc

SEQ ID NO: 269502 - RNA, 19 nt, Artificial Sequence
  Synthetic
ggacuuuucagcaauagcc

SEQ ID NO: 269503 - RNA, 20 nt, Artificial Sequence
  Synthetic
uggacuuuucagcaauagcc

SEQ ID NO: 269504 - RNA, 21 nt, Artificial Sequence
  Synthetic
uuggacuuuucagcaauagcc

SEQ ID NO: 269505 - RNA, 22 nt, Artificial Sequence
  Synthetic
uuuggacuuuucagcaauagcc

SEQ ID NO: 269506 - RNA, 23 nt, Artificial Sequence
  Synthetic
cuuuggacuuuucagcaauagcc

SEQ ID NO: 269507 - RNA, 24 nt, Artificial Sequence
  Synthetic
gcuuuggacuuuucagcaauagcc

SEQ ID NO: 269508 - RNA, 18 nt, Artificial Sequence
  Synthetic
caagguuaaaucauagcc

SEQ ID NO: 269509 - RNA, 19 nt, Artificial Sequence
  Synthetic
acaagguuaaaucauagcc

SEQ ID NO: 269510 - RNA, 20 nt, Artificial Sequence
  Synthetic
gacaagguuaaaucauagcc

SEQ ID NO: 269511 - RNA, 21 nt, Artificial Sequence
  Synthetic
cgacaagguuaaaucauagcc

SEQ ID NO: 269512 - RNA, 22 nt, Artificial Sequence
  Synthetic
gcgacaagguuaaaucauagcc

SEQ ID NO: 269513 - RNA, 23 nt, Artificial Sequence
  Synthetic
ugcgacaagguuaaaucauagcc

SEQ ID NO: 269514 - RNA, 24 nt, Artificial Sequence
  Synthetic
uugcgacaagguuaaaucauagcc

SEQ ID NO: 269515 - RNA, 18 nt, Artificial Sequence
  Synthetic
aacuuguguaguauagcc

SEQ ID NO: 269516 - RNA, 19 nt, Artificial Sequence
  Synthetic
caacuuguguaguauagcc

SEQ ID NO: 269517 - RNA, 20 nt, Artificial Sequence
  Synthetic
acaacuuguguaguauagcc

SEQ ID NO: 269518 - RNA, 21 nt, Artificial Sequence
  Synthetic
aacaacuuguguaguauagcc

SEQ ID NO: 269519 - RNA, 22 nt, Artificial Sequence
  Synthetic
aaacaacuuguguaguauagcc

SEQ ID NO: 269520 - RNA, 23 nt, Artificial Sequence
  Synthetic
uaaacaacuuguguaguauagcc

SEQ ID NO: 269521 - RNA, 24 nt, Artificial Sequence
  Synthetic
cuaaacaacuuguguaguauagcc

SEQ ID NO: 269522 - RNA, 18 nt, Artificial Sequence
  Synthetic
uuaugaccucuuauagcc

SEQ ID NO: 269523 - RNA, 19 nt, Artificial Sequence
  Synthetic
cuuaugaccucuuauagcc

SEQ ID NO: 269524 - RNA, 20 nt, Artificial Sequence
  Synthetic
acuuaugaccucuuauagcc

SEQ ID NO: 269525 - RNA, 21 nt, Artificial Sequence
  Synthetic
uacuuaugaccucuuauagcc

SEQ ID NO: 269526 - RNA, 22 nt, Artificial Sequence
  Synthetic
cuacuuaugaccucuuauagcc

SEQ ID NO: 269527 - RNA, 23 nt, Artificial Sequence
  Synthetic
acuacuuaugaccucuuauagcc

SEQ ID NO: 269528 - RNA, 24 nt, Artificial Sequence
  Synthetic
uacuacuuaugaccucuuauagcc

SEQ ID NO: 269529 - RNA, 18 nt, Artificial Sequence
  Synthetic
aaguaggaauuuauagcc

SEQ ID NO: 269530 - RNA, 19 nt, Artificial Sequence
  Synthetic
gaaguaggaauuuauagcc

SEQ ID NO: 269531 - RNA, 20 nt, Artificial Sequence
  Synthetic
ggaaguaggaauuuauagcc

SEQ ID NO: 269532 - RNA, 21 nt, Artificial Sequence
  Synthetic
uggaaguaggaauuuauagcc

SEQ ID NO: 269533 - RNA, 22 nt, Artificial Sequence
  Synthetic
guggaaguaggaauuuauagcc

SEQ ID NO: 269534 - RNA, 23 nt, Artificial Sequence
  Synthetic
aguggaaguaggaauuuauagcc

SEQ ID NO: 269535 - RNA, 24 nt, Artificial Sequence
  Synthetic
caguggaaguaggaauuuauagcc

SEQ ID NO: 269536 - RNA, 18 nt, Artificial Sequence
  Synthetic
gaaauguaauuuauagcc

SEQ ID NO: 269537 - RNA, 19 nt, Artificial Sequence
  Synthetic
ugaaauguaauuuauagcc

SEQ ID NO: 269538 - RNA, 20 nt, Artificial Sequence
  Synthetic
cugaaauguaauuuauagcc

SEQ ID NO: 269539 - RNA, 21 nt, Artificial Sequence
  Synthetic
ucugaaauguaauuuauagcc

SEQ ID NO: 269540 - RNA, 22 nt, Artificial Sequence
  Synthetic
uucugaaauguaauuuauagcc

SEQ ID NO: 269541 - RNA, 23 nt, Artificial Sequence
  Synthetic
guucugaaauguaauuuauagcc

SEQ ID NO: 269542 - RNA, 24 nt, Artificial Sequence
  Synthetic
aguucugaaauguaauuuauagcc

SEQ ID NO: 269543 - RNA, 18 nt, Artificial Sequence
  Synthetic
uguaucuuugcacuagcc

SEQ ID NO: 269544 - RNA, 19 nt, Artificial Sequence
  Synthetic
uuguaucuuugcacuagcc

SEQ ID NO: 269545 - RNA, 20 nt, Artificial Sequence
  Synthetic
uuuguaucuuugcacuagcc

SEQ ID NO: 269546 - RNA, 21 nt, Artificial Sequence
  Synthetic
uuuuguaucuuugcacuagcc

SEQ ID NO: 269547 - RNA, 22 nt, Artificial Sequence
  Synthetic
cuuuuguaucuuugcacuagcc

SEQ ID NO: 269548 - RNA, 23 nt, Artificial Sequence
  Synthetic
acuuuuguaucuuugcacuagcc

SEQ ID NO: 269549 - RNA, 24 nt, Artificial Sequence
  Synthetic
gacuuuuguaucuuugcacuagcc

SEQ ID NO: 269550 - RNA, 18 nt, Artificial Sequence
  Synthetic
ggacagagagaccuagcc

SEQ ID NO: 269551 - RNA, 19 nt, Artificial Sequence
  Synthetic
aggacagagagaccuagcc

SEQ ID NO: 269552 - RNA, 20 nt, Artificial Sequence
  Synthetic
gaggacagagagaccuagcc

SEQ ID NO: 269553 - RNA, 21 nt, Artificial Sequence
  Synthetic
ggaggacagagagaccuagcc

SEQ ID NO: 269554 - RNA, 22 nt, Artificial Sequence
  Synthetic
aggaggacagagagaccuagcc

SEQ ID NO: 269555 - RNA, 23 nt, Artificial Sequence
  Synthetic
caggaggacagagagaccuagcc

SEQ ID NO: 269556 - RNA, 24 nt, Artificial Sequence
  Synthetic
gcaggaggacagagagaccuagcc

SEQ ID NO: 269557 - RNA, 18 nt, Artificial Sequence
  Synthetic
cccaagucuauccuagcc

SEQ ID NO: 269558 - RNA, 19 nt, Artificial Sequence
  Synthetic
ucccaagucuauccuagcc

SEQ ID NO: 269559 - RNA, 20 nt, Artificial Sequence
  Synthetic
uucccaagucuauccuagcc

SEQ ID NO: 269560 - RNA, 21 nt, Artificial Sequence
  Synthetic
uuucccaagucuauccuagcc

SEQ ID NO: 269561 - RNA, 22 nt, Artificial Sequence
  Synthetic
auuucccaagucuauccuagcc

SEQ ID NO: 269562 - RNA, 23 nt, Artificial Sequence
  Synthetic
uauuucccaagucuauccuagcc

SEQ ID NO: 269563 - RNA, 24 nt, Artificial Sequence
  Synthetic
guauuucccaagucuauccuagcc

SEQ ID NO: 269564 - RNA, 18 nt, Artificial Sequence
  Synthetic
uuuaggaauuagcuagcc

SEQ ID NO: 269565 - RNA, 19 nt, Artificial Sequence
  Synthetic
cuuuaggaauuagcuagcc

SEQ ID NO: 269566 - RNA, 20 nt, Artificial Sequence
  Synthetic
ucuuuaggaauuagcuagcc

SEQ ID NO: 269567 - RNA, 21 nt, Artificial Sequence
  Synthetic
aucuuuaggaauuagcuagcc

SEQ ID NO: 269568 - RNA, 22 nt, Artificial Sequence
  Synthetic
uaucuuuaggaauuagcuagcc

SEQ ID NO: 269569 - RNA, 23 nt, Artificial Sequence
  Synthetic
cuaucuuuaggaauuagcuagcc

SEQ ID NO: 269570 - RNA, 24 nt, Artificial Sequence
  Synthetic
gcuaucuuuaggaauuagcuagcc

SEQ ID NO: 269571 - RNA, 18 nt, Artificial Sequence
  Synthetic
aucuuugggcugcuagcc

SEQ ID NO: 269572 - RNA, 19 nt, Artificial Sequence
  Synthetic
caucuuugggcugcuagcc

SEQ ID NO: 269573 - RNA, 20 nt, Artificial Sequence
  Synthetic
acaucuuugggcugcuagcc

SEQ ID NO: 269574 - RNA, 21 nt, Artificial Sequence
  Synthetic
uacaucuuugggcugcuagcc

SEQ ID NO: 269575 - RNA, 22 nt, Artificial Sequence
  Synthetic
guacaucuuugggcugcuagcc

SEQ ID NO: 269576 - RNA, 23 nt, Artificial Sequence
  Synthetic
uguacaucuuugggcugcuagcc

SEQ ID NO: 269577 - RNA, 24 nt, Artificial Sequence
  Synthetic
cuguacaucuuugggcugcuagcc

SEQ ID NO: 269578 - RNA, 18 nt, Artificial Sequence
  Synthetic
agaugaauuguucuagcc

SEQ ID NO: 269579 - RNA, 19 nt, Artificial Sequence
  Synthetic
gagaugaauuguucuagcc

SEQ ID NO: 269580 - RNA, 20 nt, Artificial Sequence
  Synthetic
ggagaugaauuguucuagcc

SEQ ID NO: 269581 - RNA, 21 nt, Artificial Sequence
  Synthetic
aggagaugaauuguucuagcc

SEQ ID NO: 269582 - RNA, 22 nt, Artificial Sequence
  Synthetic
aaggagaugaauuguucuagcc

SEQ ID NO: 269583 - RNA, 23 nt, Artificial Sequence
  Synthetic
aaaggagaugaauuguucuagcc

SEQ ID NO: 269584 - RNA, 24 nt, Artificial Sequence
  Synthetic
gaaaggagaugaauuguucuagcc

SEQ ID NO: 269585 - RNA, 18 nt, Artificial Sequence
  Synthetic
cagugaagauuucuagcc

SEQ ID NO: 269586 - RNA, 19 nt, Artificial Sequence
  Synthetic
acagugaagauuucuagcc

SEQ ID NO: 269587 - RNA, 20 nt, Artificial Sequence
  Synthetic
cacagugaagauuucuagcc

SEQ ID NO: 269588 - RNA, 21 nt, Artificial Sequence
  Synthetic
gcacagugaagauuucuagcc

SEQ ID NO: 269589 - RNA, 22 nt, Artificial Sequence
  Synthetic
agcacagugaagauuucuagcc

SEQ ID NO: 269590 - RNA, 23 nt, Artificial Sequence
  Synthetic
cagcacagugaagauuucuagcc

SEQ ID NO: 269591 - RNA, 24 nt, Artificial Sequence
  Synthetic
acagcacagugaagauuucuagcc

SEQ ID NO: 269592 - RNA, 18 nt, Artificial Sequence
  Synthetic
cccagcuccacaguagcc

SEQ ID NO: 269593 - RNA, 19 nt, Artificial Sequence
  Synthetic
ucccagcuccacaguagcc

SEQ ID NO: 269594 - RNA, 20 nt, Artificial Sequence
  Synthetic
cucccagcuccacaguagcc

SEQ ID NO: 269595 - RNA, 21 nt, Artificial Sequence
  Synthetic
ucucccagcuccacaguagcc

SEQ ID NO: 269596 - RNA, 22 nt, Artificial Sequence
  Synthetic
uucucccagcuccacaguagcc

SEQ ID NO: 269597 - RNA, 23 nt, Artificial Sequence
  Synthetic
uuucucccagcuccacaguagcc

SEQ ID NO: 269598 - RNA, 24 nt, Artificial Sequence
  Synthetic
cuuucucccagcuccacaguagcc

SEQ ID NO: 269599 - RNA, 18 nt, Artificial Sequence
  Synthetic
uuucucuaaucaguagcc

SEQ ID NO: 269600 - RNA, 19 nt, Artificial Sequence
  Synthetic
uuuucucuaaucaguagcc

SEQ ID NO: 269601 - RNA, 20 nt, Artificial Sequence
  Synthetic
uuuuucucuaaucaguagcc

SEQ ID NO: 269602 - RNA, 21 nt, Artificial Sequence
  Synthetic
auuuuucucuaaucaguagcc

SEQ ID NO: 269603 - RNA, 22 nt, Artificial Sequence
  Synthetic
cauuuuucucuaaucaguagcc

SEQ ID NO: 269604 - RNA, 23 nt, Artificial Sequence
  Synthetic
gcauuuuucucuaaucaguagcc

SEQ ID NO: 269605 - RNA, 24 nt, Artificial Sequence
  Synthetic
ugcauuuuucucuaaucaguagcc

SEQ ID NO: 269606 - RNA, 18 nt, Artificial Sequence
  Synthetic
cuugcacccucuguagcc

SEQ ID NO: 269607 - RNA, 19 nt, Artificial Sequence
  Synthetic
gcuugcacccucuguagcc

SEQ ID NO: 269608 - RNA, 20 nt, Artificial Sequence
  Synthetic
ggcuugcacccucuguagcc

SEQ ID NO: 269609 - RNA, 21 nt, Artificial Sequence
  Synthetic
gggcuugcacccucuguagcc

SEQ ID NO: 269610 - RNA, 22 nt, Artificial Sequence
  Synthetic
ggggcuugcacccucuguagcc

SEQ ID NO: 269611 - RNA, 23 nt, Artificial Sequence
  Synthetic
uggggcuugcacccucuguagcc

SEQ ID NO: 269612 - RNA, 24 nt, Artificial Sequence
  Synthetic
uuggggcuugcacccucuguagcc

SEQ ID NO: 269613 - RNA, 18 nt, Artificial Sequence
  Synthetic
cacauuaaaguuguagcc

SEQ ID NO: 269614 - RNA, 19 nt, Artificial Sequence
  Synthetic
ccacauuaaaguuguagcc

SEQ ID NO: 269615 - RNA, 20 nt, Artificial Sequence
  Synthetic
gccacauuaaaguuguagcc

SEQ ID NO: 269616 - RNA, 21 nt, Artificial Sequence
  Synthetic
ugccacauuaaaguuguagcc

SEQ ID NO: 269617 - RNA, 22 nt, Artificial Sequence
  Synthetic
uugccacauuaaaguuguagcc

SEQ ID NO: 269618 - RNA, 23 nt, Artificial Sequence
  Synthetic
uuugccacauuaaaguuguagcc

SEQ ID NO: 269619 - RNA, 24 nt, Artificial Sequence
  Synthetic
guuugccacauuaaaguuguagcc

SEQ ID NO: 269620 - RNA, 18 nt, Artificial Sequence
  Synthetic
caugacagaguuguagcc

SEQ ID NO: 269621 - RNA, 19 nt, Artificial Sequence
  Synthetic
acaugacagaguuguagcc

SEQ ID NO: 269622 - RNA, 20 nt, Artificial Sequence
  Synthetic
aacaugacagaguuguagcc

SEQ ID NO: 269623 - RNA, 21 nt, Artificial Sequence
  Synthetic
uaacaugacagaguuguagcc

SEQ ID NO: 269624 - RNA, 22 nt, Artificial Sequence
  Synthetic
auaacaugacagaguuguagcc

SEQ ID NO: 269625 - RNA, 23 nt, Artificial Sequence
  Synthetic
aauaacaugacagaguuguagcc

SEQ ID NO: 269626 - RNA, 24 nt, Artificial Sequence
  Synthetic
uaauaacaugacagaguuguagcc

SEQ ID NO: 269627 - RNA, 18 nt, Artificial Sequence
  Synthetic
auuaagcaggaauuagcc

SEQ ID NO: 269628 - RNA, 19 nt, Artificial Sequence
  Synthetic
aauuaagcaggaauuagcc

SEQ ID NO: 269629 - RNA, 20 nt, Artificial Sequence
  Synthetic
gaauuaagcaggaauuagcc

SEQ ID NO: 269630 - RNA, 21 nt, Artificial Sequence
  Synthetic
ugaauuaagcaggaauuagcc

SEQ ID NO: 269631 - RNA, 22 nt, Artificial Sequence
  Synthetic
gugaauuaagcaggaauuagcc

SEQ ID NO: 269632 - RNA, 23 nt, Artificial Sequence
  Synthetic
agugaauuaagcaggaauuagcc

SEQ ID NO: 269633 - RNA, 24 nt, Artificial Sequence
  Synthetic
aagugaauuaagcaggaauuagcc

SEQ ID NO: 269634 - RNA, 18 nt, Artificial Sequence
  Synthetic
aggaggaucguguuagcc

SEQ ID NO: 269635 - RNA, 19 nt, Artificial Sequence
  Synthetic
caggaggaucguguuagcc

SEQ ID NO: 269636 - RNA, 20 nt, Artificial Sequence
  Synthetic
gcaggaggaucguguuagcc

SEQ ID NO: 269637 - RNA, 21 nt, Artificial Sequence
  Synthetic
ggcaggaggaucguguuagcc

SEQ ID NO: 269638 - RNA, 22 nt, Artificial Sequence
  Synthetic
aggcaggaggaucguguuagcc

SEQ ID NO: 269639 - RNA, 23 nt, Artificial Sequence
  Synthetic
aaggcaggaggaucguguuagcc

SEQ ID NO: 269640 - RNA, 24 nt, Artificial Sequence
  Synthetic
caaggcaggaggaucguguuagcc

SEQ ID NO: 269641 - RNA, 18 nt, Artificial Sequence
  Synthetic
aagugaucauauuuagcc

SEQ ID NO: 269642 - RNA, 19 nt, Artificial Sequence
  Synthetic
gaagugaucauauuuagcc

SEQ ID NO: 269643 - RNA, 20 nt, Artificial Sequence
  Synthetic
ugaagugaucauauuuagcc

SEQ ID NO: 269644 - RNA, 21 nt, Artificial Sequence
  Synthetic
uugaagugaucauauuuagcc

SEQ ID NO: 269645 - RNA, 22 nt, Artificial Sequence
  Synthetic
auugaagugaucauauuuagcc

SEQ ID NO: 269646 - RNA, 23 nt, Artificial Sequence
  Synthetic
gauugaagugaucauauuuagcc

SEQ ID NO: 269647 - RNA, 24 nt, Artificial Sequence
  Synthetic
ugauugaagugaucauauuuagcc

SEQ ID NO: 269648 - RNA, 18 nt, Artificial Sequence
  Synthetic
agaugauucucuuuagcc

SEQ ID NO: 269649 - RNA, 19 nt, Artificial Sequence
  Synthetic
aagaugauucucuuuagcc

SEQ ID NO: 269650 - RNA, 20 nt, Artificial Sequence
  Synthetic
caagaugauucucuuuagcc

SEQ ID NO: 269651 - RNA, 21 nt, Artificial Sequence
  Synthetic
gcaagaugauucucuuuagcc

SEQ ID NO: 269652 - RNA, 22 nt, Artificial Sequence
  Synthetic
agcaagaugauucucuuuagcc

SEQ ID NO: 269653 - RNA, 23 nt, Artificial Sequence
  Synthetic
uagcaagaugauucucuuuagcc

SEQ ID NO: 269654 - RNA, 24 nt, Artificial Sequence
  Synthetic
uuagcaagaugauucucuuuagcc

SEQ ID NO: 269655 - RNA, 18 nt, Artificial Sequence
  Synthetic
uuuuugaugguuuuagcc

SEQ ID NO: 269656 - RNA, 19 nt, Artificial Sequence
  Synthetic
uuuuuugaugguuuuagcc

SEQ ID NO: 269657 - RNA, 20 nt, Artificial Sequence
  Synthetic
auuuuuugaugguuuuagcc

SEQ ID NO: 269658 - RNA, 21 nt, Artificial Sequence
  Synthetic
cauuuuuugaugguuuuagcc

SEQ ID NO: 269659 - RNA, 22 nt, Artificial Sequence
  Synthetic
acauuuuuugaugguuuuagcc

SEQ ID NO: 269660 - RNA, 23 nt, Artificial Sequence
  Synthetic
aacauuuuuugaugguuuuagcc

SEQ ID NO: 269661 - RNA, 24 nt, Artificial Sequence
  Synthetic
uaacauuuuuugaugguuuuagcc

SEQ ID NO: 269662 - RNA, 18 nt, Artificial Sequence
  Synthetic
uuugucaugagccacgcc

SEQ ID NO: 269663 - RNA, 19 nt, Artificial Sequence
  Synthetic
auuugucaugagccacgcc

SEQ ID NO: 269664 - RNA, 20 nt, Artificial Sequence
  Synthetic
aauuugucaugagccacgcc

SEQ ID NO: 269665 - RNA, 21 nt, Artificial Sequence
  Synthetic
aaauuugucaugagccacgcc

SEQ ID NO: 269666 - RNA, 22 nt, Artificial Sequence
  Synthetic
aaaauuugucaugagccacgcc

SEQ ID NO: 269667 - RNA, 23 nt, Artificial Sequence
  Synthetic
gaaaauuugucaugagccacgcc

SEQ ID NO: 269668 - RNA, 24 nt, Artificial Sequence
  Synthetic
ugaaaauuugucaugagccacgcc

SEQ ID NO: 269669 - RNA, 18 nt, Artificial Sequence
  Synthetic
auaaaaugauugcacgcc

SEQ ID NO: 269670 - RNA, 19 nt, Artificial Sequence
  Synthetic
aauaaaaugauugcacgcc

SEQ ID NO: 269671 - RNA, 20 nt, Artificial Sequence
  Synthetic
uaauaaaaugauugcacgcc

SEQ ID NO: 269672 - RNA, 21 nt, Artificial Sequence
  Synthetic
cuaauaaaaugauugcacgcc

SEQ ID NO: 269673 - RNA, 22 nt, Artificial Sequence
  Synthetic
ccuaauaaaaugauugcacgcc

SEQ ID NO: 269674 - RNA, 23 nt, Artificial Sequence
  Synthetic
gccuaauaaaaugauugcacgcc

SEQ ID NO: 269675 - RNA, 24 nt, Artificial Sequence
  Synthetic
agccuaauaaaaugauugcacgcc

SEQ ID NO: 269676 - RNA, 18 nt, Artificial Sequence
  Synthetic
agauugugcagugacgcc

SEQ ID NO: 269677 - RNA, 19 nt, Artificial Sequence
  Synthetic
gagauugugcagugacgcc

SEQ ID NO: 269678 - RNA, 20 nt, Artificial Sequence
  Synthetic
ggagauugugcagugacgcc

SEQ ID NO: 269679 - RNA, 21 nt, Artificial Sequence
  Synthetic
uggagauugugcagugacgcc

SEQ ID NO: 269680 - RNA, 22 nt, Artificial Sequence
  Synthetic
guggagauugugcagugacgcc

SEQ ID NO: 269681 - RNA, 23 nt, Artificial Sequence
  Synthetic
gguggagauugugcagugacgcc

SEQ ID NO: 269682 - RNA, 24 nt, Artificial Sequence
  Synthetic
agguggagauugugcagugacgcc

SEQ ID NO: 269683 - RNA, 18 nt, Artificial Sequence
  Synthetic
aggagaaggcaauacgcc

SEQ ID NO: 269684 - RNA, 19 nt, Artificial Sequence
  Synthetic
caggagaaggcaauacgcc

SEQ ID NO: 269685 - RNA, 20 nt, Artificial Sequence
  Synthetic
acaggagaaggcaauacgcc

SEQ ID NO: 269686 - RNA, 21 nt, Artificial Sequence
  Synthetic
aacaggagaaggcaauacgcc

SEQ ID NO: 269687 - RNA, 22 nt, Artificial Sequence
  Synthetic
uaacaggagaaggcaauacgcc

SEQ ID NO: 269688 - RNA, 23 nt, Artificial Sequence
  Synthetic
auaacaggagaaggcaauacgcc

SEQ ID NO: 269689 - RNA, 24 nt, Artificial Sequence
  Synthetic
aauaacaggagaaggcaauacgcc

SEQ ID NO: 269690 - RNA, 18 nt, Artificial Sequence
  Synthetic
aagaguugccccugcgcc

SEQ ID NO: 269691 - RNA, 19 nt, Artificial Sequence
  Synthetic
gaagaguugccccugcgcc

SEQ ID NO: 269692 - RNA, 20 nt, Artificial Sequence
  Synthetic
ggaagaguugccccugcgcc

SEQ ID NO: 269693 - RNA, 21 nt, Artificial Sequence
  Synthetic
uggaagaguugccccugcgcc

SEQ ID NO: 269694 - RNA, 22 nt, Artificial Sequence
  Synthetic
guggaagaguugccccugcgcc

SEQ ID NO: 269695 - RNA, 23 nt, Artificial Sequence
  Synthetic
gguggaagaguugccccugcgcc

SEQ ID NO: 269696 - RNA, 24 nt, Artificial Sequence
  Synthetic
ugguggaagaguugccccugcgcc

SEQ ID NO: 269697 - RNA, 18 nt, Artificial Sequence
  Synthetic
gucccugaugaccucgcc

SEQ ID NO: 269698 - RNA, 19 nt, Artificial Sequence
  Synthetic
ugucccugaugaccucgcc

SEQ ID NO: 269699 - RNA, 20 nt, Artificial Sequence
  Synthetic
uugucccugaugaccucgcc

SEQ ID NO: 269700 - RNA, 21 nt, Artificial Sequence
  Synthetic
uuugucccugaugaccucgcc

SEQ ID NO: 269701 - RNA, 22 nt, Artificial Sequence
  Synthetic
cuuugucccugaugaccucgcc

SEQ ID NO: 269702 - RNA, 23 nt, Artificial Sequence
  Synthetic
acuuugucccugaugaccucgcc

SEQ ID NO: 269703 - RNA, 24 nt, Artificial Sequence
  Synthetic
gacuuugucccugaugaccucgcc

SEQ ID NO: 269704 - RNA, 18 nt, Artificial Sequence
  Synthetic
aagggugcuucaaaggcc

SEQ ID NO: 269705 - RNA, 19 nt, Artificial Sequence
  Synthetic
gaagggugcuucaaaggcc

SEQ ID NO: 269706 - RNA, 20 nt, Artificial Sequence
  Synthetic
ugaagggugcuucaaaggcc

SEQ ID NO: 269707 - RNA, 21 nt, Artificial Sequence
  Synthetic
augaagggugcuucaaaggcc

SEQ ID NO: 269708 - RNA, 22 nt, Artificial Sequence
  Synthetic
aaugaagggugcuucaaaggcc

SEQ ID NO: 269709 - RNA, 23 nt, Artificial Sequence
  Synthetic
uaaugaagggugcuucaaaggcc

SEQ ID NO: 269710 - RNA, 24 nt, Artificial Sequence
  Synthetic
guaaugaagggugcuucaaaggcc

SEQ ID NO: 269711 - RNA, 18 nt, Artificial Sequence
  Synthetic
auacuaugcauaaaggcc

SEQ ID NO: 269712 - RNA, 19 nt, Artificial Sequence
  Synthetic
aauacuaugcauaaaggcc

SEQ ID NO: 269713 - RNA, 20 nt, Artificial Sequence
  Synthetic
gaauacuaugcauaaaggcc

SEQ ID NO: 269714 - RNA, 21 nt, Artificial Sequence
  Synthetic
ggaauacuaugcauaaaggcc

SEQ ID NO: 269715 - RNA, 22 nt, Artificial Sequence
  Synthetic
uggaauacuaugcauaaaggcc

SEQ ID NO: 269716 - RNA, 23 nt, Artificial Sequence
  Synthetic
auggaauacuaugcauaaaggcc

SEQ ID NO: 269717 - RNA, 24 nt, Artificial Sequence
  Synthetic
gauggaauacuaugcauaaaggcc

SEQ ID NO: 269718 - RNA, 18 nt, Artificial Sequence
  Synthetic
aaccugcauuuaaaggcc

SEQ ID NO: 269719 - RNA, 19 nt, Artificial Sequence
  Synthetic
caaccugcauuuaaaggcc

SEQ ID NO: 269720 - RNA, 20 nt, Artificial Sequence
  Synthetic
acaaccugcauuuaaaggcc

SEQ ID NO: 269721 - RNA, 21 nt, Artificial Sequence
  Synthetic
aacaaccugcauuuaaaggcc

SEQ ID NO: 269722 - RNA, 22 nt, Artificial Sequence
  Synthetic
aaacaaccugcauuuaaaggcc

SEQ ID NO: 269723 - RNA, 23 nt, Artificial Sequence
  Synthetic
uaaacaaccugcauuuaaaggcc

SEQ ID NO: 269724 - RNA, 24 nt, Artificial Sequence
  Synthetic
guaaacaaccugcauuuaaaggcc

SEQ ID NO: 269725 - RNA, 18 nt, Artificial Sequence
  Synthetic
gcagagcugcccaaggcc

SEQ ID NO: 269726 - RNA, 19 nt, Artificial Sequence
  Synthetic
ggcagagcugcccaaggcc

SEQ ID NO: 269727 - RNA, 20 nt, Artificial Sequence
  Synthetic
gggcagagcugcccaaggcc

SEQ ID NO: 269728 - RNA, 21 nt, Artificial Sequence
  Synthetic
agggcagagcugcccaaggcc

SEQ ID NO: 269729 - RNA, 22 nt, Artificial Sequence
  Synthetic
aagggcagagcugcccaaggcc

SEQ ID NO: 269730 - RNA, 23 nt, Artificial Sequence
  Synthetic
caagggcagagcugcccaaggcc

SEQ ID NO: 269731 - RNA, 24 nt, Artificial Sequence
  Synthetic
acaagggcagagcugcccaaggcc

SEQ ID NO: 269732 - RNA, 18 nt, Artificial Sequence
  Synthetic
uucagcucaggcaaggcc

SEQ ID NO: 269733 - RNA, 19 nt, Artificial Sequence
  Synthetic
cuucagcucaggcaaggcc

SEQ ID NO: 269734 - RNA, 20 nt, Artificial Sequence
  Synthetic
gcuucagcucaggcaaggcc

SEQ ID NO: 269735 - RNA, 21 nt, Artificial Sequence
  Synthetic
agcuucagcucaggcaaggcc

SEQ ID NO: 269736 - RNA, 22 nt, Artificial Sequence
  Synthetic
uagcuucagcucaggcaaggcc

SEQ ID NO: 269737 - RNA, 23 nt, Artificial Sequence
  Synthetic
cuagcuucagcucaggcaaggcc

SEQ ID NO: 269738 - RNA, 24 nt, Artificial Sequence
  Synthetic
ucuagcuucagcucaggcaaggcc

SEQ ID NO: 269739 - RNA, 18 nt, Artificial Sequence
  Synthetic
ccaagauacugcaaggcc

SEQ ID NO: 269740 - RNA, 19 nt, Artificial Sequence
  Synthetic
cccaagauacugcaaggcc

SEQ ID NO: 269741 - RNA, 20 nt, Artificial Sequence
  Synthetic
ucccaagauacugcaaggcc

SEQ ID NO: 269742 - RNA, 21 nt, Artificial Sequence
  Synthetic
aucccaagauacugcaaggcc

SEQ ID NO: 269743 - RNA, 22 nt, Artificial Sequence
  Synthetic
uaucccaagauacugcaaggcc

SEQ ID NO: 269744 - RNA, 23 nt, Artificial Sequence
  Synthetic
cuaucccaagauacugcaaggcc

SEQ ID NO: 269745 - RNA, 24 nt, Artificial Sequence
  Synthetic
ccuaucccaagauacugcaaggcc

SEQ ID NO: 269746 - RNA, 18 nt, Artificial Sequence
  Synthetic
uuagagaucuucaaggcc

SEQ ID NO: 269747 - RNA, 19 nt, Artificial Sequence
  Synthetic
cuuagagaucuucaaggcc

SEQ ID NO: 269748 - RNA, 20 nt, Artificial Sequence
  Synthetic
ccuuagagaucuucaaggcc

SEQ ID NO: 269749 - RNA, 21 nt, Artificial Sequence
  Synthetic
gccuuagagaucuucaaggcc

SEQ ID NO: 269750 - RNA, 22 nt, Artificial Sequence
  Synthetic
ugccuuagagaucuucaaggcc

SEQ ID NO: 269751 - RNA, 23 nt, Artificial Sequence
  Synthetic
cugccuuagagaucuucaaggcc

SEQ ID NO: 269752 - RNA, 24 nt, Artificial Sequence
  Synthetic
acugccuuagagaucuucaaggcc

SEQ ID NO: 269753 - RNA, 18 nt, Artificial Sequence
  Synthetic
uagggauauaagaaggcc

SEQ ID NO: 269754 - RNA, 19 nt, Artificial Sequence
  Synthetic
auagggauauaagaaggcc

SEQ ID NO: 269755 - RNA, 20 nt, Artificial Sequence
  Synthetic
aauagggauauaagaaggcc

SEQ ID NO: 269756 - RNA, 21 nt, Artificial Sequence
  Synthetic
uaauagggauauaagaaggcc

SEQ ID NO: 269757 - RNA, 22 nt, Artificial Sequence
  Synthetic
auaauagggauauaagaaggcc

SEQ ID NO: 269758 - RNA, 23 nt, Artificial Sequence
  Synthetic
cauaauagggauauaagaaggcc

SEQ ID NO: 269759 - RNA, 24 nt, Artificial Sequence
  Synthetic
acauaauagggauauaagaaggcc

SEQ ID NO: 269760 - RNA, 18 nt, Artificial Sequence
  Synthetic
guguuuuauggccaggcc

SEQ ID NO: 269761 - RNA, 19 nt, Artificial Sequence
  Synthetic
gguguuuuauggccaggcc

SEQ ID NO: 269762 - RNA, 20 nt, Artificial Sequence
  Synthetic
ugguguuuuauggccaggcc

SEQ ID NO: 269763 - RNA, 21 nt, Artificial Sequence
  Synthetic
augguguuuuauggccaggcc

SEQ ID NO: 269764 - RNA, 22 nt, Artificial Sequence
  Synthetic
caugguguuuuauggccaggcc

SEQ ID NO: 269765 - RNA, 23 nt, Artificial Sequence
  Synthetic
ccaugguguuuuauggccaggcc

SEQ ID NO: 269766 - RNA, 24 nt, Artificial Sequence
  Synthetic
uccaugguguuuuauggccaggcc

SEQ ID NO: 269767 - RNA, 18 nt, Artificial Sequence
  Synthetic
caaugaaaggcucaggcc

SEQ ID NO: 269768 - RNA, 19 nt, Artificial Sequence
  Synthetic
ccaaugaaaggcucaggcc

SEQ ID NO: 269769 - RNA, 20 nt, Artificial Sequence
  Synthetic
cccaaugaaaggcucaggcc

SEQ ID NO: 269770 - RNA, 21 nt, Artificial Sequence
  Synthetic
ucccaaugaaaggcucaggcc

SEQ ID NO: 269771 - RNA, 22 nt, Artificial Sequence
  Synthetic
cucccaaugaaaggcucaggcc

SEQ ID NO: 269772 - RNA, 23 nt, Artificial Sequence
  Synthetic
ucucccaaugaaaggcucaggcc

SEQ ID NO: 269773 - RNA, 24 nt, Artificial Sequence
  Synthetic
uucucccaaugaaaggcucaggcc

SEQ ID NO: 269774 - RNA, 18 nt, Artificial Sequence
  Synthetic
guacuggaaguucaggcc

SEQ ID NO: 269775 - RNA, 19 nt, Artificial Sequence
  Synthetic
uguacuggaaguucaggcc

SEQ ID NO: 269776 - RNA, 20 nt, Artificial Sequence
  Synthetic
uuguacuggaaguucaggcc

SEQ ID NO: 269777 - RNA, 21 nt, Artificial Sequence
  Synthetic
auuguacuggaaguucaggcc

SEQ ID NO: 269778 - RNA, 22 nt, Artificial Sequence
  Synthetic
uauuguacuggaaguucaggcc

SEQ ID NO: 269779 - RNA, 23 nt, Artificial Sequence
  Synthetic
guauuguacuggaaguucaggcc

SEQ ID NO: 269780 - RNA, 24 nt, Artificial Sequence
  Synthetic
aguauuguacuggaaguucaggcc

SEQ ID NO: 269781 - RNA, 18 nt, Artificial Sequence
  Synthetic
cccuuagccuuucaggcc

SEQ ID NO: 269782 - RNA, 19 nt, Artificial Sequence
  Synthetic
ccccuuagccuuucaggcc

SEQ ID NO: 269783 - RNA, 20 nt, Artificial Sequence
  Synthetic
uccccuuagccuuucaggcc

SEQ ID NO: 269784 - RNA, 21 nt, Artificial Sequence
  Synthetic
cuccccuuagccuuucaggcc

SEQ ID NO: 269785 - RNA, 22 nt, Artificial Sequence
  Synthetic
ccuccccuuagccuuucaggcc

SEQ ID NO: 269786 - RNA, 23 nt, Artificial Sequence
  Synthetic
cccuccccuuagccuuucaggcc

SEQ ID NO: 269787 - RNA, 24 nt, Artificial Sequence
  Synthetic
acccuccccuuagccuuucaggcc

SEQ ID NO: 269788 - RNA, 18 nt, Artificial Sequence
  Synthetic
uccuuaagcuuucaggcc

SEQ ID NO: 269789 - RNA, 19 nt, Artificial Sequence
  Synthetic
cuccuuaagcuuucaggcc

SEQ ID NO: 269790 - RNA, 20 nt, Artificial Sequence
  Synthetic
ucuccuuaagcuuucaggcc

SEQ ID NO: 269791 - RNA, 21 nt, Artificial Sequence
  Synthetic
aucuccuuaagcuuucaggcc

SEQ ID NO: 269792 - RNA, 22 nt, Artificial Sequence
  Synthetic
caucuccuuaagcuuucaggcc

SEQ ID NO: 269793 - RNA, 23 nt, Artificial Sequence
  Synthetic
ucaucuccuuaagcuuucaggcc

SEQ ID NO: 269794 - RNA, 24 nt, Artificial Sequence
  Synthetic
cucaucuccuuaagcuuucaggcc

SEQ ID NO: 269795 - RNA, 18 nt, Artificial Sequence
  Synthetic
aaaccuuccaaagaggcc

SEQ ID NO: 269796 - RNA, 19 nt, Artificial Sequence
  Synthetic
uaaaccuuccaaagaggcc

SEQ ID NO: 269797 - RNA, 20 nt, Artificial Sequence
  Synthetic
cuaaaccuuccaaagaggcc

SEQ ID NO: 269798 - RNA, 21 nt, Artificial Sequence
  Synthetic
gcuaaaccuuccaaagaggcc

SEQ ID NO: 269799 - RNA, 22 nt, Artificial Sequence
  Synthetic
ggcuaaaccuuccaaagaggcc

SEQ ID NO: 269800 - RNA, 23 nt, Artificial Sequence
  Synthetic
aggcuaaaccuuccaaagaggcc

SEQ ID NO: 269801 - RNA, 24 nt, Artificial Sequence
  Synthetic
uaggcuaaaccuuccaaagaggcc

SEQ ID NO: 269802 - RNA, 18 nt, Artificial Sequence
  Synthetic
uguuucuauccagaggcc

SEQ ID NO: 269803 - RNA, 19 nt, Artificial Sequence
  Synthetic
cuguuucuauccagaggcc

SEQ ID NO: 269804 - RNA, 20 nt, Artificial Sequence
  Synthetic
ucuguuucuauccagaggcc

SEQ ID NO: 269805 - RNA, 21 nt, Artificial Sequence
  Synthetic
uucuguuucuauccagaggcc

SEQ ID NO: 269806 - RNA, 22 nt, Artificial Sequence
  Synthetic
cuucuguuucuauccagaggcc

SEQ ID NO: 269807 - RNA, 23 nt, Artificial Sequence
  Synthetic
ucuucuguuucuauccagaggcc

SEQ ID NO: 269808 - RNA, 24 nt, Artificial Sequence
  Synthetic
cucuucuguuucuauccagaggcc

SEQ ID NO: 269809 - RNA, 18 nt, Artificial Sequence
  Synthetic
cuaguaagagccgaggcc

SEQ ID NO: 269810 - RNA, 19 nt, Artificial Sequence
  Synthetic
acuaguaagagccgaggcc

SEQ ID NO: 269811 - RNA, 20 nt, Artificial Sequence
  Synthetic
aacuaguaagagccgaggcc

SEQ ID NO: 269812 - RNA, 21 nt, Artificial Sequence
  Synthetic
gaacuaguaagagccgaggcc

SEQ ID NO: 269813 - RNA, 22 nt, Artificial Sequence
  Synthetic
ggaacuaguaagagccgaggcc

SEQ ID NO: 269814 - RNA, 23 nt, Artificial Sequence
  Synthetic
aggaacuaguaagagccgaggcc

SEQ ID NO: 269815 - RNA, 24 nt, Artificial Sequence
  Synthetic
aaggaacuaguaagagccgaggcc

SEQ ID NO: 269816 - RNA, 18 nt, Artificial Sequence
  Synthetic
augaacgaaaucgaggcc

SEQ ID NO: 269817 - RNA, 19 nt, Artificial Sequence
  Synthetic
caugaacgaaaucgaggcc

SEQ ID NO: 269818 - RNA, 20 nt, Artificial Sequence
  Synthetic
ccaugaacgaaaucgaggcc

SEQ ID NO: 269819 - RNA, 21 nt, Artificial Sequence
  Synthetic
cccaugaacgaaaucgaggcc

SEQ ID NO: 269820 - RNA, 22 nt, Artificial Sequence
  Synthetic
ucccaugaacgaaaucgaggcc

SEQ ID NO: 269821 - RNA, 23 nt, Artificial Sequence
  Synthetic
uucccaugaacgaaaucgaggcc

SEQ ID NO: 269822 - RNA, 24 nt, Artificial Sequence
  Synthetic
cuucccaugaacgaaaucgaggcc

SEQ ID NO: 269823 - RNA, 18 nt, Artificial Sequence
  Synthetic
uaagggccuuaggaggcc

SEQ ID NO: 269824 - RNA, 19 nt, Artificial Sequence
  Synthetic
auaagggccuuaggaggcc

SEQ ID NO: 269825 - RNA, 20 nt, Artificial Sequence
  Synthetic
cauaagggccuuaggaggcc

SEQ ID NO: 269826 - RNA, 21 nt, Artificial Sequence
  Synthetic
ucauaagggccuuaggaggcc

SEQ ID NO: 269827 - RNA, 22 nt, Artificial Sequence
  Synthetic
gucauaagggccuuaggaggcc

SEQ ID NO: 269828 - RNA, 23 nt, Artificial Sequence
  Synthetic
agucauaagggccuuaggaggcc

SEQ ID NO: 269829 - RNA, 24 nt, Artificial Sequence
  Synthetic
aagucauaagggccuuaggaggcc

SEQ ID NO: 269830 - RNA, 18 nt, Artificial Sequence
  Synthetic
ccagcacuuugggaggcc

SEQ ID NO: 269831 - RNA, 19 nt, Artificial Sequence
  Synthetic
cccagcacuuugggaggcc

SEQ ID NO: 269832 - RNA, 20 nt, Artificial Sequence
  Synthetic
ucccagcacuuugggaggcc

SEQ ID NO: 269833 - RNA, 18 nt, Artificial Sequence
  Synthetic
uagagcuaggcugaggcc

SEQ ID NO: 269834 - RNA, 19 nt, Artificial Sequence
  Synthetic
guagagcuaggcugaggcc

SEQ ID NO: 269835 - RNA, 20 nt, Artificial Sequence
  Synthetic
aguagagcuaggcugaggcc

SEQ ID NO: 269836 - RNA, 21 nt, Artificial Sequence
  Synthetic
caguagagcuaggcugaggcc

SEQ ID NO: 269837 - RNA, 22 nt, Artificial Sequence
  Synthetic
ucaguagagcuaggcugaggcc

SEQ ID NO: 269838 - RNA, 23 nt, Artificial Sequence
  Synthetic
uucaguagagcuaggcugaggcc

SEQ ID NO: 269839 - RNA, 24 nt, Artificial Sequence
  Synthetic
auucaguagagcuaggcugaggcc

SEQ ID NO: 269840 - RNA, 18 nt, Artificial Sequence
  Synthetic
aaauagauauuauaggcc

SEQ ID NO: 269841 - RNA, 19 nt, Artificial Sequence
  Synthetic
caaauagauauuauaggcc

SEQ ID NO: 269842 - RNA, 20 nt, Artificial Sequence
  Synthetic
ccaaauagauauuauaggcc

SEQ ID NO: 269843 - RNA, 21 nt, Artificial Sequence
  Synthetic
uccaaauagauauuauaggcc

SEQ ID NO: 269844 - RNA, 22 nt, Artificial Sequence
  Synthetic
guccaaauagauauuauaggcc

SEQ ID NO: 269845 - RNA, 23 nt, Artificial Sequence
  Synthetic
aguccaaauagauauuauaggcc

SEQ ID NO: 269846 - RNA, 24 nt, Artificial Sequence
  Synthetic
uaguccaaauagauauuauaggcc

SEQ ID NO: 269847 - RNA, 18 nt, Artificial Sequence
  Synthetic
ggauuguuggauuaggcc

SEQ ID NO: 269848 - RNA, 19 nt, Artificial Sequence
  Synthetic
uggauuguuggauuaggcc

SEQ ID NO: 269849 - RNA, 20 nt, Artificial Sequence
  Synthetic
auggauuguuggauuaggcc

SEQ ID NO: 269850 - RNA, 21 nt, Artificial Sequence
  Synthetic
aauggauuguuggauuaggcc

SEQ ID NO: 269851 - RNA, 22 nt, Artificial Sequence
  Synthetic
aaauggauuguuggauuaggcc

SEQ ID NO: 269852 - RNA, 23 nt, Artificial Sequence
  Synthetic
aaaauggauuguuggauuaggcc

SEQ ID NO: 269853 - RNA, 24 nt, Artificial Sequence
  Synthetic
gaaaauggauuguuggauuaggcc

SEQ ID NO: 269854 - RNA, 18 nt, Artificial Sequence
  Synthetic
uuaaguggugauuaggcc

SEQ ID NO: 269855 - RNA, 19 nt, Artificial Sequence
  Synthetic
uuuaaguggugauuaggcc

SEQ ID NO: 269856 - RNA, 20 nt, Artificial Sequence
  Synthetic
guuuaaguggugauuaggcc

SEQ ID NO: 269857 - RNA, 21 nt, Artificial Sequence
  Synthetic
uguuuaaguggugauuaggcc

SEQ ID NO: 269858 - RNA, 22 nt, Artificial Sequence
  Synthetic
guguuuaaguggugauuaggcc

SEQ ID NO: 269859 - RNA, 23 nt, Artificial Sequence
  Synthetic
gguguuuaaguggugauuaggcc

SEQ ID NO: 269860 - RNA, 24 nt, Artificial Sequence
  Synthetic
ggguguuuaaguggugauuaggcc

SEQ ID NO: 269861 - RNA, 18 nt, Artificial Sequence
  Synthetic
cgguggaaaucuuaggcc

SEQ ID NO: 269862 - RNA, 19 nt, Artificial Sequence
  Synthetic
ucgguggaaaucuuaggcc

SEQ ID NO: 269863 - RNA, 20 nt, Artificial Sequence
  Synthetic
uucgguggaaaucuuaggcc

SEQ ID NO: 269864 - RNA, 21 nt, Artificial Sequence
  Synthetic
uuucgguggaaaucuuaggcc

SEQ ID NO: 269865 - RNA, 22 nt, Artificial Sequence
  Synthetic
uuuucgguggaaaucuuaggcc

SEQ ID NO: 269866 - RNA, 23 nt, Artificial Sequence
  Synthetic
uuuuucgguggaaaucuuaggcc

SEQ ID NO: 269867 - RNA, 24 nt, Artificial Sequence
  Synthetic
auuuuucgguggaaaucuuaggcc

SEQ ID NO: 269868 - RNA, 18 nt, Artificial Sequence
  Synthetic
cuuguuucaaacacggcc

SEQ ID NO: 269869 - RNA, 19 nt, Artificial Sequence
  Synthetic
ucuuguuucaaacacggcc

SEQ ID NO: 269870 - RNA, 20 nt, Artificial Sequence
  Synthetic
gucuuguuucaaacacggcc

SEQ ID NO: 269871 - RNA, 21 nt, Artificial Sequence
  Synthetic
ugucuuguuucaaacacggcc

SEQ ID NO: 269872 - RNA, 22 nt, Artificial Sequence
  Synthetic
cugucuuguuucaaacacggcc

SEQ ID NO: 269873 - RNA, 23 nt, Artificial Sequence
  Synthetic
ucugucuuguuucaaacacggcc

SEQ ID NO: 269874 - RNA, 24 nt, Artificial Sequence
  Synthetic
cucugucuuguuucaaacacggcc

SEQ ID NO: 269875 - RNA, 18 nt, Artificial Sequence
  Synthetic
auaagaauuaguacggcc

SEQ ID NO: 269876 - RNA, 19 nt, Artificial Sequence
  Synthetic
gauaagaauuaguacggcc

SEQ ID NO: 269877 - RNA, 20 nt, Artificial Sequence
  Synthetic
ugauaagaauuaguacggcc

SEQ ID NO: 269878 - RNA, 21 nt, Artificial Sequence
  Synthetic
augauaagaauuaguacggcc

SEQ ID NO: 269879 - RNA, 22 nt, Artificial Sequence
  Synthetic
uaugauaagaauuaguacggcc

SEQ ID NO: 269880 - RNA, 23 nt, Artificial Sequence
  Synthetic
auaugauaagaauuaguacggcc

SEQ ID NO: 269881 - RNA, 24 nt, Artificial Sequence
  Synthetic
uauaugauaagaauuaguacggcc

SEQ ID NO: 269882 - RNA, 18 nt, Artificial Sequence
  Synthetic
ggggcucugggcccggcc

SEQ ID NO: 269883 - RNA, 19 nt, Artificial Sequence
  Synthetic
gggggcucugggcccggcc

SEQ ID NO: 269884 - RNA, 20 nt, Artificial Sequence
  Synthetic
ggggggcucugggcccggcc

SEQ ID NO: 269885 - RNA, 21 nt, Artificial Sequence
  Synthetic
aggggggcucugggcccggcc

SEQ ID NO: 269886 - RNA, 22 nt, Artificial Sequence
  Synthetic
caggggggcucugggcccggcc

SEQ ID NO: 269887 - RNA, 23 nt, Artificial Sequence
  Synthetic
gcaggggggcucugggcccggcc

SEQ ID NO: 269888 - RNA, 24 nt, Artificial Sequence
  Synthetic
agcaggggggcucugggcccggcc

SEQ ID NO: 269889 - RNA, 18 nt, Artificial Sequence
  Synthetic
uauccauaacuuccggcc

SEQ ID NO: 269890 - RNA, 19 nt, Artificial Sequence
  Synthetic
guauccauaacuuccggcc

SEQ ID NO: 269891 - RNA, 20 nt, Artificial Sequence
  Synthetic
uguauccauaacuuccggcc

SEQ ID NO: 269892 - RNA, 21 nt, Artificial Sequence
  Synthetic
uuguauccauaacuuccggcc

SEQ ID NO: 269893 - RNA, 22 nt, Artificial Sequence
  Synthetic
uuuguauccauaacuuccggcc

SEQ ID NO: 269894 - RNA, 23 nt, Artificial Sequence
  Synthetic
cuuuguauccauaacuuccggcc

SEQ ID NO: 269895 - RNA, 24 nt, Artificial Sequence
  Synthetic
ucuuuguauccauaacuuccggcc

SEQ ID NO: 269896 - RNA, 18 nt, Artificial Sequence
  Synthetic
aagaugaaggacagggcc

SEQ ID NO: 269897 - RNA, 19 nt, Artificial Sequence
  Synthetic
gaagaugaaggacagggcc

SEQ ID NO: 269898 - RNA, 20 nt, Artificial Sequence
  Synthetic
ugaagaugaaggacagggcc

SEQ ID NO: 269899 - RNA, 21 nt, Artificial Sequence
  Synthetic
uugaagaugaaggacagggcc

SEQ ID NO: 269900 - RNA, 22 nt, Artificial Sequence
  Synthetic
auugaagaugaaggacagggcc

SEQ ID NO: 269901 - RNA, 23 nt, Artificial Sequence
  Synthetic
cauugaagaugaaggacagggcc

SEQ ID NO: 269902 - RNA, 24 nt, Artificial Sequence
  Synthetic
gcauugaagaugaaggacagggcc

SEQ ID NO: 269903 - RNA, 18 nt, Artificial Sequence
  Synthetic
ggguuguaagucagggcc

SEQ ID NO: 269904 - RNA, 19 nt, Artificial Sequence
  Synthetic
aggguuguaagucagggcc

SEQ ID NO: 269905 - RNA, 20 nt, Artificial Sequence
  Synthetic
caggguuguaagucagggcc

SEQ ID NO: 269906 - RNA, 21 nt, Artificial Sequence
  Synthetic
acaggguuguaagucagggcc

SEQ ID NO: 269907 - RNA, 22 nt, Artificial Sequence
  Synthetic
aacaggguuguaagucagggcc

SEQ ID NO: 269908 - RNA, 23 nt, Artificial Sequence
  Synthetic
aaacaggguuguaagucagggcc

SEQ ID NO: 269909 - RNA, 24 nt, Artificial Sequence
  Synthetic
caaacaggguuguaagucagggcc

SEQ ID NO: 269910 - RNA, 18 nt, Artificial Sequence
  Synthetic
guagaugagaagagggcc

SEQ ID NO: 269911 - RNA, 19 nt, Artificial Sequence
  Synthetic
cguagaugagaagagggcc

SEQ ID NO: 269912 - RNA, 20 nt, Artificial Sequence
  Synthetic
ucguagaugagaagagggcc

SEQ ID NO: 269913 - RNA, 21 nt, Artificial Sequence
  Synthetic
uucguagaugagaagagggcc

SEQ ID NO: 269914 - RNA, 22 nt, Artificial Sequence
  Synthetic
guucguagaugagaagagggcc

SEQ ID NO: 269915 - RNA, 23 nt, Artificial Sequence
  Synthetic
aguucguagaugagaagagggcc

SEQ ID NO: 269916 - RNA, 24 nt, Artificial Sequence
  Synthetic
aaguucguagaugagaagagggcc

SEQ ID NO: 269917 - RNA, 18 nt, Artificial Sequence
  Synthetic
aaauuccagucgagggcc

SEQ ID NO: 269918 - RNA, 19 nt, Artificial Sequence
  Synthetic
uaaauuccagucgagggcc

SEQ ID NO: 269919 - RNA, 20 nt, Artificial Sequence
  Synthetic
uuaaauuccagucgagggcc

SEQ ID NO: 269920 - RNA, 21 nt, Artificial Sequence
  Synthetic
cuuaaauuccagucgagggcc

SEQ ID NO: 269921 - RNA, 22 nt, Artificial Sequence
  Synthetic
ucuuaaauuccagucgagggcc

SEQ ID NO: 269922 - RNA, 23 nt, Artificial Sequence
  Synthetic
cucuuaaauuccagucgagggcc

SEQ ID NO: 269923 - RNA, 24 nt, Artificial Sequence
  Synthetic
ucucuuaaauuccagucgagggcc

SEQ ID NO: 269924 - RNA, 18 nt, Artificial Sequence
  Synthetic
guuuuugggaguagggcc

SEQ ID NO: 269925 - RNA, 19 nt, Artificial Sequence
  Synthetic
aguuuuugggaguagggcc

SEQ ID NO: 269926 - RNA, 20 nt, Artificial Sequence
  Synthetic
gaguuuuugggaguagggcc

SEQ ID NO: 269927 - RNA, 21 nt, Artificial Sequence
  Synthetic
agaguuuuugggaguagggcc

SEQ ID NO: 269928 - RNA, 22 nt, Artificial Sequence
  Synthetic
cagaguuuuugggaguagggcc

SEQ ID NO: 269929 - RNA, 23 nt, Artificial Sequence
  Synthetic
ucagaguuuuugggaguagggcc

SEQ ID NO: 269930 - RNA, 24 nt, Artificial Sequence
  Synthetic
aucagaguuuuugggaguagggcc

SEQ ID NO: 269931 - RNA, 18 nt, Artificial Sequence
  Synthetic
gacccauauuuuagggcc

SEQ ID NO: 269932 - RNA, 19 nt, Artificial Sequence
  Synthetic
ggacccauauuuuagggcc

SEQ ID NO: 269933 - RNA, 20 nt, Artificial Sequence
  Synthetic
gggacccauauuuuagggcc

SEQ ID NO: 269934 - RNA, 21 nt, Artificial Sequence
  Synthetic
ugggacccauauuuuagggcc

SEQ ID NO: 269935 - RNA, 22 nt, Artificial Sequence
  Synthetic
cugggacccauauuuuagggcc

SEQ ID NO: 269936 - RNA, 23 nt, Artificial Sequence
  Synthetic
acugggacccauauuuuagggcc

SEQ ID NO: 269937 - RNA, 24 nt, Artificial Sequence
  Synthetic
aacugggacccauauuuuagggcc

SEQ ID NO: 269938 - RNA, 18 nt, Artificial Sequence
  Synthetic
aauauaaacuaaggggcc

SEQ ID NO: 269939 - RNA, 19 nt, Artificial Sequence
  Synthetic
uaauauaaacuaaggggcc

SEQ ID NO: 269940 - RNA, 20 nt, Artificial Sequence
  Synthetic
guaauauaaacuaaggggcc

SEQ ID NO: 269941 - RNA, 21 nt, Artificial Sequence
  Synthetic
gguaauauaaacuaaggggcc

SEQ ID NO: 269942 - RNA, 22 nt, Artificial Sequence
  Synthetic
agguaauauaaacuaaggggcc

SEQ ID NO: 269943 - RNA, 23 nt, Artificial Sequence
  Synthetic
uagguaauauaaacuaaggggcc

SEQ ID NO: 269944 - RNA, 24 nt, Artificial Sequence
  Synthetic
uuagguaauauaaacuaaggggcc

SEQ ID NO: 269945 - RNA, 18 nt, Artificial Sequence
  Synthetic
ugagauuugggaggggcc

SEQ ID NO: 269946 - RNA, 19 nt, Artificial Sequence
  Synthetic
augagauuugggaggggcc

SEQ ID NO: 269947 - RNA, 20 nt, Artificial Sequence
  Synthetic
caugagauuugggaggggcc

SEQ ID NO: 269948 - RNA, 21 nt, Artificial Sequence
  Synthetic
acaugagauuugggaggggcc

SEQ ID NO: 269949 - RNA, 22 nt, Artificial Sequence
  Synthetic
gacaugagauuugggaggggcc

SEQ ID NO: 269950 - RNA, 23 nt, Artificial Sequence
  Synthetic
ugacaugagauuugggaggggcc

SEQ ID NO: 269951 - RNA, 24 nt, Artificial Sequence
  Synthetic
augacaugagauuugggaggggcc

SEQ ID NO: 269952 - RNA, 18 nt, Artificial Sequence
  Synthetic
uaucagcguuuaggggcc

SEQ ID NO: 269953 - RNA, 19 nt, Artificial Sequence
  Synthetic
auaucagcguuuaggggcc

SEQ ID NO: 269954 - RNA, 20 nt, Artificial Sequence
  Synthetic
gauaucagcguuuaggggcc

SEQ ID NO: 269955 - RNA, 21 nt, Artificial Sequence
  Synthetic
agauaucagcguuuaggggcc

SEQ ID NO: 269956 - RNA, 22 nt, Artificial Sequence
  Synthetic
cagauaucagcguuuaggggcc

SEQ ID NO: 269957 - RNA, 23 nt, Artificial Sequence
  Synthetic
gcagauaucagcguuuaggggcc

SEQ ID NO: 269958 - RNA, 24 nt, Artificial Sequence
  Synthetic
agcagauaucagcguuuaggggcc

SEQ ID NO: 269959 - RNA, 18 nt, Artificial Sequence
  Synthetic
ugguggaucaggggggcc

SEQ ID NO: 269960 - RNA, 19 nt, Artificial Sequence
  Synthetic
augguggaucaggggggcc

SEQ ID NO: 269961 - RNA, 20 nt, Artificial Sequence
  Synthetic
aaugguggaucaggggggcc

SEQ ID NO: 269962 - RNA, 21 nt, Artificial Sequence
  Synthetic
aaaugguggaucaggggggcc

SEQ ID NO: 269963 - RNA, 22 nt, Artificial Sequence
  Synthetic
caaaugguggaucaggggggcc

SEQ ID NO: 269964 - RNA, 23 nt, Artificial Sequence
  Synthetic
ccaaaugguggaucaggggggcc

SEQ ID NO: 269965 - RNA, 24 nt, Artificial Sequence
  Synthetic
uccaaaugguggaucaggggggcc

SEQ ID NO: 269966 - RNA, 18 nt, Artificial Sequence
  Synthetic
gccucccucuugugggcc

SEQ ID NO: 269967 - RNA, 19 nt, Artificial Sequence
  Synthetic
ugccucccucuugugggcc

SEQ ID NO: 269968 - RNA, 20 nt, Artificial Sequence
  Synthetic
cugccucccucuugugggcc

SEQ ID NO: 269969 - RNA, 21 nt, Artificial Sequence
  Synthetic
ccugccucccucuugugggcc

SEQ ID NO: 269970 - RNA, 22 nt, Artificial Sequence
  Synthetic
uccugccucccucuugugggcc

SEQ ID NO: 269971 - RNA, 23 nt, Artificial Sequence
  Synthetic
auccugccucccucuugugggcc

SEQ ID NO: 269972 - RNA, 24 nt, Artificial Sequence
  Synthetic
cauccugccucccucuugugggcc

SEQ ID NO: 269973 - RNA, 18 nt, Artificial Sequence
  Synthetic
gacaugaucucuugggcc

SEQ ID NO: 269974 - RNA, 19 nt, Artificial Sequence
  Synthetic
ugacaugaucucuugggcc

SEQ ID NO: 269975 - RNA, 20 nt, Artificial Sequence
  Synthetic
gugacaugaucucuugggcc

SEQ ID NO: 269976 - RNA, 21 nt, Artificial Sequence
  Synthetic
ggugacaugaucucuugggcc

SEQ ID NO: 269977 - RNA, 22 nt, Artificial Sequence
  Synthetic
aggugacaugaucucuugggcc

SEQ ID NO: 269978 - RNA, 23 nt, Artificial Sequence
  Synthetic
gaggugacaugaucucuugggcc

SEQ ID NO: 269979 - RNA, 24 nt, Artificial Sequence
  Synthetic
ugaggugacaugaucucuugggcc

SEQ ID NO: 269980 - RNA, 18 nt, Artificial Sequence
  Synthetic
agcagaagcaaaauggcc

SEQ ID NO: 269981 - RNA, 19 nt, Artificial Sequence
  Synthetic
uagcagaagcaaaauggcc

SEQ ID NO: 269982 - RNA, 20 nt, Artificial Sequence
  Synthetic
auagcagaagcaaaauggcc

SEQ ID NO: 269983 - RNA, 21 nt, Artificial Sequence
  Synthetic
uauagcagaagcaaaauggcc

SEQ ID NO: 269984 - RNA, 22 nt, Artificial Sequence
  Synthetic
cuauagcagaagcaaaauggcc

SEQ ID NO: 269985 - RNA, 23 nt, Artificial Sequence
  Synthetic
acuauagcagaagcaaaauggcc

SEQ ID NO: 269986 - RNA, 24 nt, Artificial Sequence
  Synthetic
aacuauagcagaagcaaaauggcc

SEQ ID NO: 269987 - RNA, 18 nt, Artificial Sequence
  Synthetic
cuaauucccuaaauggcc

SEQ ID NO: 269988 - RNA, 19 nt, Artificial Sequence
  Synthetic
ccuaauucccuaaauggcc

SEQ ID NO: 269989 - RNA, 20 nt, Artificial Sequence
  Synthetic
accuaauucccuaaauggcc

SEQ ID NO: 269990 - RNA, 21 nt, Artificial Sequence
  Synthetic
gaccuaauucccuaaauggcc

SEQ ID NO: 269991 - RNA, 22 nt, Artificial Sequence
  Synthetic
agaccuaauucccuaaauggcc

SEQ ID NO: 269992 - RNA, 23 nt, Artificial Sequence
  Synthetic
aagaccuaauucccuaaauggcc

SEQ ID NO: 269993 - RNA, 24 nt, Artificial Sequence
  Synthetic
uaagaccuaauucccuaaauggcc

SEQ ID NO: 269994 - RNA, 18 nt, Artificial Sequence
  Synthetic
agugggcacagcauggcc

SEQ ID NO: 269995 - RNA, 19 nt, Artificial Sequence
  Synthetic
aagugggcacagcauggcc

SEQ ID NO: 269996 - RNA, 20 nt, Artificial Sequence
  Synthetic
uaagugggcacagcauggcc

SEQ ID NO: 269997 - RNA, 21 nt, Artificial Sequence
  Synthetic
cuaagugggcacagcauggcc

SEQ ID NO: 269998 - RNA, 22 nt, Artificial Sequence
  Synthetic
acuaagugggcacagcauggcc

SEQ ID NO: 269999 - RNA, 23 nt, Artificial Sequence
  Synthetic
uacuaagugggcacagcauggcc

SEQ ID NO: 270000 - RNA, 24 nt, Artificial Sequence
  Synthetic
cuacuaagugggcacagcauggcc

SEQ ID NO: 270001 - RNA, 18 nt, Artificial Sequence
  Synthetic
agcaaugguaauauggcc

SEQ ID NO: 270002 - RNA, 19 nt, Artificial Sequence
  Synthetic
gagcaaugguaauauggcc

SEQ ID NO: 270003 - RNA, 20 nt, Artificial Sequence
  Synthetic
ugagcaaugguaauauggcc

SEQ ID NO: 270004 - RNA, 21 nt, Artificial Sequence
  Synthetic
cugagcaaugguaauauggcc

SEQ ID NO: 270005 - RNA, 22 nt, Artificial Sequence
  Synthetic
acugagcaaugguaauauggcc

SEQ ID NO: 270006 - RNA, 23 nt, Artificial Sequence
  Synthetic
uacugagcaaugguaauauggcc

SEQ ID NO: 270007 - RNA, 24 nt, Artificial Sequence
  Synthetic
cuacugagcaaugguaauauggcc

SEQ ID NO: 270008 - RNA, 18 nt, Artificial Sequence
  Synthetic
cacucacaugcacuggcc

SEQ ID NO: 270009 - RNA, 19 nt, Artificial Sequence
  Synthetic
ccacucacaugcacuggcc

SEQ ID NO: 270010 - RNA, 20 nt, Artificial Sequence
  Synthetic
uccacucacaugcacuggcc

SEQ ID NO: 270011 - RNA, 21 nt, Artificial Sequence
  Synthetic
guccacucacaugcacuggcc

SEQ ID NO: 270012 - RNA, 22 nt, Artificial Sequence
  Synthetic
uguccacucacaugcacuggcc

SEQ ID NO: 270013 - RNA, 23 nt, Artificial Sequence
  Synthetic
cuguccacucacaugcacuggcc

SEQ ID NO: 270014 - RNA, 24 nt, Artificial Sequence
  Synthetic
gcuguccacucacaugcacuggcc

SEQ ID NO: 270015 - RNA, 18 nt, Artificial Sequence
  Synthetic
cccacucuuucacuggcc

SEQ ID NO: 270016 - RNA, 19 nt, Artificial Sequence
  Synthetic
gcccacucuuucacuggcc

SEQ ID NO: 270017 - RNA, 20 nt, Artificial Sequence
  Synthetic
ugcccacucuuucacuggcc

SEQ ID NO: 270018 - RNA, 21 nt, Artificial Sequence
  Synthetic
augcccacucuuucacuggcc

SEQ ID NO: 270019 - RNA, 22 nt, Artificial Sequence
  Synthetic
uaugcccacucuuucacuggcc

SEQ ID NO: 270020 - RNA, 23 nt, Artificial Sequence
  Synthetic
cuaugcccacucuuucacuggcc

SEQ ID NO: 270021 - RNA, 24 nt, Artificial Sequence
  Synthetic
ccuaugcccacucuuucacuggcc

SEQ ID NO: 270022 - RNA, 18 nt, Artificial Sequence
  Synthetic
gcugggucaacccuggcc

SEQ ID NO: 270023 - RNA, 19 nt, Artificial Sequence
  Synthetic
ugcugggucaacccuggcc

SEQ ID NO: 270024 - RNA, 20 nt, Artificial Sequence
  Synthetic
augcugggucaacccuggcc

SEQ ID NO: 270025 - RNA, 21 nt, Artificial Sequence
  Synthetic
gaugcugggucaacccuggcc

SEQ ID NO: 270026 - RNA, 22 nt, Artificial Sequence
  Synthetic
agaugcugggucaacccuggcc

SEQ ID NO: 270027 - RNA, 23 nt, Artificial Sequence
  Synthetic
gagaugcugggucaacccuggcc

SEQ ID NO: 270028 - RNA, 24 nt, Artificial Sequence
  Synthetic
cgagaugcugggucaacccuggcc

SEQ ID NO: 270029 - RNA, 18 nt, Artificial Sequence
  Synthetic
cagcauuuuccccuggcc

SEQ ID NO: 270030 - RNA, 19 nt, Artificial Sequence
  Synthetic
gcagcauuuuccccuggcc

SEQ ID NO: 270031 - RNA, 20 nt, Artificial Sequence
  Synthetic
ggcagcauuuuccccuggcc

SEQ ID NO: 270032 - RNA, 21 nt, Artificial Sequence
  Synthetic
uggcagcauuuuccccuggcc

SEQ ID NO: 270033 - RNA, 22 nt, Artificial Sequence
  Synthetic
cuggcagcauuuuccccuggcc

SEQ ID NO: 270034 - RNA, 23 nt, Artificial Sequence
  Synthetic
acuggcagcauuuuccccuggcc

SEQ ID NO: 270035 - RNA, 24 nt, Artificial Sequence
  Synthetic
gacuggcagcauuuuccccuggcc

SEQ ID NO: 270036 - RNA, 18 nt, Artificial Sequence
  Synthetic
auguuguccaggcuggcc

SEQ ID NO: 270037 - RNA, 19 nt, Artificial Sequence
  Synthetic
uauguuguccaggcuggcc

SEQ ID NO: 270038 - RNA, 20 nt, Artificial Sequence
  Synthetic
cuauguuguccaggcuggcc

SEQ ID NO: 270039 - RNA, 21 nt, Artificial Sequence
  Synthetic
gcuauguuguccaggcuggcc

SEQ ID NO: 270040 - RNA, 22 nt, Artificial Sequence
  Synthetic
ugcuauguuguccaggcuggcc

SEQ ID NO: 270041 - RNA, 23 nt, Artificial Sequence
  Synthetic
uugcuauguuguccaggcuggcc

SEQ ID NO: 270042 - RNA, 24 nt, Artificial Sequence
  Synthetic
guugcuauguuguccaggcuggcc

SEQ ID NO: 270043 - RNA, 18 nt, Artificial Sequence
  Synthetic
auaaugaucaggcuggcc

SEQ ID NO: 270044 - RNA, 19 nt, Artificial Sequence
  Synthetic
cauaaugaucaggcuggcc

SEQ ID NO: 270045 - RNA, 20 nt, Artificial Sequence
  Synthetic
ccauaaugaucaggcuggcc

SEQ ID NO: 270046 - RNA, 21 nt, Artificial Sequence
  Synthetic
accauaaugaucaggcuggcc

SEQ ID NO: 270047 - RNA, 22 nt, Artificial Sequence
  Synthetic
caccauaaugaucaggcuggcc

SEQ ID NO: 270048 - RNA, 23 nt, Artificial Sequence
  Synthetic
ucaccauaaugaucaggcuggcc

SEQ ID NO: 270049 - RNA, 24 nt, Artificial Sequence
  Synthetic
uucaccauaaugaucaggcuggcc

SEQ ID NO: 270050 - RNA, 18 nt, Artificial Sequence
  Synthetic
aaaguacuggaucuggcc

SEQ ID NO: 270051 - RNA, 19 nt, Artificial Sequence
  Synthetic
gaaaguacuggaucuggcc

SEQ ID NO: 270052 - RNA, 20 nt, Artificial Sequence
  Synthetic
agaaaguacuggaucuggcc

SEQ ID NO: 270053 - RNA, 21 nt, Artificial Sequence
  Synthetic
cagaaaguacuggaucuggcc

SEQ ID NO: 270054 - RNA, 22 nt, Artificial Sequence
  Synthetic
ccagaaaguacuggaucuggcc

SEQ ID NO: 270055 - RNA, 23 nt, Artificial Sequence
  Synthetic
uccagaaaguacuggaucuggcc

SEQ ID NO: 270056 - RNA, 24 nt, Artificial Sequence
  Synthetic
cuccagaaaguacuggaucuggcc

SEQ ID NO: 270057 - RNA, 18 nt, Artificial Sequence
  Synthetic
caaauagaggagguggcc

SEQ ID NO: 270058 - RNA, 19 nt, Artificial Sequence
  Synthetic
acaaauagaggagguggcc

SEQ ID NO: 270059 - RNA, 20 nt, Artificial Sequence
  Synthetic
aacaaauagaggagguggcc

SEQ ID NO: 270060 - RNA, 21 nt, Artificial Sequence
  Synthetic
aaacaaauagaggagguggcc

SEQ ID NO: 270061 - RNA, 22 nt, Artificial Sequence
  Synthetic
gaaacaaauagaggagguggcc

SEQ ID NO: 270062 - RNA, 23 nt, Artificial Sequence
  Synthetic
agaaacaaauagaggagguggcc

SEQ ID NO: 270063 - RNA, 24 nt, Artificial Sequence
  Synthetic
uagaaacaaauagaggagguggcc

SEQ ID NO: 270064 - RNA, 18 nt, Artificial Sequence
  Synthetic
cucuguuggaggguggcc

SEQ ID NO: 270065 - RNA, 19 nt, Artificial Sequence
  Synthetic
gcucuguuggaggguggcc

SEQ ID NO: 270066 - RNA, 20 nt, Artificial Sequence
  Synthetic
cgcucuguuggaggguggcc

SEQ ID NO: 270067 - RNA, 21 nt, Artificial Sequence
  Synthetic
ucgcucuguuggaggguggcc

SEQ ID NO: 270068 - RNA, 22 nt, Artificial Sequence
  Synthetic
aucgcucuguuggaggguggcc

SEQ ID NO: 270069 - RNA, 23 nt, Artificial Sequence
  Synthetic
aaucgcucuguuggaggguggcc

SEQ ID NO: 270070 - RNA, 24 nt, Artificial Sequence
  Synthetic
uaaucgcucuguuggaggguggcc

SEQ ID NO: 270071 - RNA, 18 nt, Artificial Sequence
  Synthetic
auggaauacuauguggcc

SEQ ID NO: 270072 - RNA, 19 nt, Artificial Sequence
  Synthetic
cauggaauacuauguggcc

SEQ ID NO: 270073 - RNA, 20 nt, Artificial Sequence
  Synthetic
ccauggaauacuauguggcc

SEQ ID NO: 270074 - RNA, 21 nt, Artificial Sequence
  Synthetic
accauggaauacuauguggcc

SEQ ID NO: 270075 - RNA, 22 nt, Artificial Sequence
  Synthetic
caccauggaauacuauguggcc

SEQ ID NO: 270076 - RNA, 23 nt, Artificial Sequence
  Synthetic
acaccauggaauacuauguggcc

SEQ ID NO: 270077 - RNA, 24 nt, Artificial Sequence
  Synthetic
uacaccauggaauacuauguggcc

SEQ ID NO: 270078 - RNA, 18 nt, Artificial Sequence
  Synthetic
ucuucuuccaguguggcc

SEQ ID NO: 270079 - RNA, 19 nt, Artificial Sequence
  Synthetic
uucuucuuccaguguggcc

SEQ ID NO: 270080 - RNA, 20 nt, Artificial Sequence
  Synthetic
auucuucuuccaguguggcc

SEQ ID NO: 270081 - RNA, 21 nt, Artificial Sequence
  Synthetic
aauucuucuuccaguguggcc

SEQ ID NO: 270082 - RNA, 22 nt, Artificial Sequence
  Synthetic
caauucuucuuccaguguggcc

SEQ ID NO: 270083 - RNA, 23 nt, Artificial Sequence
  Synthetic
acaauucuucuuccaguguggcc

SEQ ID NO: 270084 - RNA, 24 nt, Artificial Sequence
  Synthetic
gacaauucuucuuccaguguggcc

SEQ ID NO: 270085 - RNA, 18 nt, Artificial Sequence
  Synthetic
aggucuucugguguggcc

SEQ ID NO: 270086 - RNA, 19 nt, Artificial Sequence
  Synthetic
uaggucuucugguguggcc

SEQ ID NO: 270087 - RNA, 20 nt, Artificial Sequence
  Synthetic
auaggucuucugguguggcc

SEQ ID NO: 270088 - RNA, 21 nt, Artificial Sequence
  Synthetic
aauaggucuucugguguggcc

SEQ ID NO: 270089 - RNA, 22 nt, Artificial Sequence
  Synthetic
caauaggucuucugguguggcc

SEQ ID NO: 270090 - RNA, 23 nt, Artificial Sequence
  Synthetic
ucaauaggucuucugguguggcc

SEQ ID NO: 270091 - RNA, 24 nt, Artificial Sequence
  Synthetic
uucaauaggucuucugguguggcc

SEQ ID NO: 270092 - RNA, 18 nt, Artificial Sequence
  Synthetic
uguauuuuauguguggcc

SEQ ID NO: 270093 - RNA, 19 nt, Artificial Sequence
  Synthetic
guguauuuuauguguggcc

SEQ ID NO: 270094 - RNA, 20 nt, Artificial Sequence
  Synthetic
aguguauuuuauguguggcc

SEQ ID NO: 270095 - RNA, 21 nt, Artificial Sequence
  Synthetic
uaguguauuuuauguguggcc

SEQ ID NO: 270096 - RNA, 22 nt, Artificial Sequence
  Synthetic
uuaguguauuuuauguguggcc

SEQ ID NO: 270097 - RNA, 23 nt, Artificial Sequence
  Synthetic
guuaguguauuuuauguguggcc

SEQ ID NO: 270098 - RNA, 24 nt, Artificial Sequence
  Synthetic
uguuaguguauuuuauguguggcc

SEQ ID NO: 270099 - RNA, 18 nt, Artificial Sequence
  Synthetic
cuuguuagcuuuguggcc

SEQ ID NO: 270100 - RNA, 19 nt, Artificial Sequence
  Synthetic
acuuguuagcuuuguggcc

SEQ ID NO: 270101 - RNA, 20 nt, Artificial Sequence
  Synthetic
cacuuguuagcuuuguggcc

SEQ ID NO: 270102 - RNA, 21 nt, Artificial Sequence
  Synthetic
ccacuuguuagcuuuguggcc

SEQ ID NO: 270103 - RNA, 22 nt, Artificial Sequence
  Synthetic
gccacuuguuagcuuuguggcc

SEQ ID NO: 270104 - RNA, 23 nt, Artificial Sequence
  Synthetic
ggccacuuguuagcuuuguggcc

SEQ ID NO: 270105 - RNA, 24 nt, Artificial Sequence
  Synthetic
uggccacuuguuagcuuuguggcc

SEQ ID NO: 270106 - RNA, 18 nt, Artificial Sequence
  Synthetic
uccagccagccauuggcc

SEQ ID NO: 270107 - RNA, 19 nt, Artificial Sequence
  Synthetic
auccagccagccauuggcc

SEQ ID NO: 270108 - RNA, 20 nt, Artificial Sequence
  Synthetic
gauccagccagccauuggcc

SEQ ID NO: 270109 - RNA, 21 nt, Artificial Sequence
  Synthetic
ugauccagccagccauuggcc

SEQ ID NO: 270110 - RNA, 22 nt, Artificial Sequence
  Synthetic
cugauccagccagccauuggcc

SEQ ID NO: 270111 - RNA, 23 nt, Artificial Sequence
  Synthetic
ccugauccagccagccauuggcc

SEQ ID NO: 270112 - RNA, 24 nt, Artificial Sequence
  Synthetic
uccugauccagccagccauuggcc

SEQ ID NO: 270113 - RNA, 18 nt, Artificial Sequence
  Synthetic
cagcuaaagcuauuggcc

SEQ ID NO: 270114 - RNA, 19 nt, Artificial Sequence
  Synthetic
ucagcuaaagcuauuggcc

SEQ ID NO: 270115 - RNA, 20 nt, Artificial Sequence
  Synthetic
cucagcuaaagcuauuggcc

SEQ ID NO: 270116 - RNA, 21 nt, Artificial Sequence
  Synthetic
acucagcuaaagcuauuggcc

SEQ ID NO: 270117 - RNA, 22 nt, Artificial Sequence
  Synthetic
aacucagcuaaagcuauuggcc

SEQ ID NO: 270118 - RNA, 23 nt, Artificial Sequence
  Synthetic
gaacucagcuaaagcuauuggcc

SEQ ID NO: 270119 - RNA, 24 nt, Artificial Sequence
  Synthetic
agaacucagcuaaagcuauuggcc

SEQ ID NO: 270120 - RNA, 18 nt, Artificial Sequence
  Synthetic
auaugauguguauuggcc

SEQ ID NO: 270121 - RNA, 19 nt, Artificial Sequence
  Synthetic
aauaugauguguauuggcc

SEQ ID NO: 270122 - RNA, 20 nt, Artificial Sequence
  Synthetic
uaauaugauguguauuggcc

SEQ ID NO: 270123 - RNA, 21 nt, Artificial Sequence
  Synthetic
guaauaugauguguauuggcc

SEQ ID NO: 270124 - RNA, 22 nt, Artificial Sequence
  Synthetic
aguaauaugauguguauuggcc

SEQ ID NO: 270125 - RNA, 23 nt, Artificial Sequence
  Synthetic
gaguaauaugauguguauuggcc

SEQ ID NO: 270126 - RNA, 24 nt, Artificial Sequence
  Synthetic
agaguaauaugauguguauuggcc

SEQ ID NO: 270127 - RNA, 18 nt, Artificial Sequence
  Synthetic
uaguaauugagcuuggcc

SEQ ID NO: 270128 - RNA, 19 nt, Artificial Sequence
  Synthetic
auaguaauugagcuuggcc

SEQ ID NO: 270129 - RNA, 20 nt, Artificial Sequence
  Synthetic
gauaguaauugagcuuggcc

SEQ ID NO: 270130 - RNA, 21 nt, Artificial Sequence
  Synthetic
ugauaguaauugagcuuggcc

SEQ ID NO: 270131 - RNA, 22 nt, Artificial Sequence
  Synthetic
uugauaguaauugagcuuggcc

SEQ ID NO: 270132 - RNA, 23 nt, Artificial Sequence
  Synthetic
uuugauaguaauugagcuuggcc

SEQ ID NO: 270133 - RNA, 24 nt, Artificial Sequence
  Synthetic
auuugauaguaauugagcuuggcc

SEQ ID NO: 270134 - RNA, 18 nt, Artificial Sequence
  Synthetic
acucagcugggcuuggcc

SEQ ID NO: 270135 - RNA, 19 nt, Artificial Sequence
  Synthetic
gacucagcugggcuuggcc

SEQ ID NO: 270136 - RNA, 20 nt, Artificial Sequence
  Synthetic
ugacucagcugggcuuggcc

SEQ ID NO: 270137 - RNA, 21 nt, Artificial Sequence
  Synthetic
cugacucagcugggcuuggcc

SEQ ID NO: 270138 - RNA, 22 nt, Artificial Sequence
  Synthetic
acugacucagcugggcuuggcc

SEQ ID NO: 270139 - RNA, 23 nt, Artificial Sequence
  Synthetic
gacugacucagcugggcuuggcc

SEQ ID NO: 270140 - RNA, 24 nt, Artificial Sequence
  Synthetic
ugacugacucagcugggcuuggcc

SEQ ID NO: 270141 - RNA, 18 nt, Artificial Sequence
  Synthetic
auaguagguaucuuggcc

SEQ ID NO: 270142 - RNA, 19 nt, Artificial Sequence
  Synthetic
uauaguagguaucuuggcc

SEQ ID NO: 270143 - RNA, 20 nt, Artificial Sequence
  Synthetic
uuauaguagguaucuuggcc

SEQ ID NO: 270144 - RNA, 21 nt, Artificial Sequence
  Synthetic
auuauaguagguaucuuggcc

SEQ ID NO: 270145 - RNA, 22 nt, Artificial Sequence
  Synthetic
aauuauaguagguaucuuggcc

SEQ ID NO: 270146 - RNA, 23 nt, Artificial Sequence
  Synthetic
aaauuauaguagguaucuuggcc

SEQ ID NO: 270147 - RNA, 24 nt, Artificial Sequence
  Synthetic
caaauuauaguagguaucuuggcc

SEQ ID NO: 270148 - RNA, 18 nt, Artificial Sequence
  Synthetic
gacccaaacucguuggcc

SEQ ID NO: 270149 - RNA, 19 nt, Artificial Sequence
  Synthetic
ugacccaaacucguuggcc

SEQ ID NO: 270150 - RNA, 20 nt, Artificial Sequence
  Synthetic
augacccaaacucguuggcc

SEQ ID NO: 270151 - RNA, 21 nt, Artificial Sequence
  Synthetic
aaugacccaaacucguuggcc

SEQ ID NO: 270152 - RNA, 22 nt, Artificial Sequence
  Synthetic
aaaugacccaaacucguuggcc

SEQ ID NO: 270153 - RNA, 23 nt, Artificial Sequence
  Synthetic
aaaaugacccaaacucguuggcc

SEQ ID NO: 270154 - RNA, 24 nt, Artificial Sequence
  Synthetic
uaaaaugacccaaacucguuggcc

SEQ ID NO: 270155 - RNA, 18 nt, Artificial Sequence
  Synthetic
uuacaucacauguuggcc

SEQ ID NO: 270156 - RNA, 19 nt, Artificial Sequence
  Synthetic
auuacaucacauguuggcc

SEQ ID NO: 270157 - RNA, 20 nt, Artificial Sequence
  Synthetic
uauuacaucacauguuggcc

SEQ ID NO: 270158 - RNA, 21 nt, Artificial Sequence
  Synthetic
uuauuacaucacauguuggcc

SEQ ID NO: 270159 - RNA, 22 nt, Artificial Sequence
  Synthetic
auuauuacaucacauguuggcc

SEQ ID NO: 270160 - RNA, 23 nt, Artificial Sequence
  Synthetic
cauuauuacaucacauguuggcc

SEQ ID NO: 270161 - RNA, 24 nt, Artificial Sequence
  Synthetic
gcauuauuacaucacauguuggcc

SEQ ID NO: 270162 - RNA, 18 nt, Artificial Sequence
  Synthetic
gauuuuuucuuuuuggcc

SEQ ID NO: 270163 - RNA, 19 nt, Artificial Sequence
  Synthetic
ugauuuuuucuuuuuggcc

SEQ ID NO: 270164 - RNA, 20 nt, Artificial Sequence
  Synthetic
gugauuuuuucuuuuuggcc

SEQ ID NO: 270165 - RNA, 21 nt, Artificial Sequence
  Synthetic
cgugauuuuuucuuuuuggcc

SEQ ID NO: 270166 - RNA, 22 nt, Artificial Sequence
  Synthetic
acgugauuuuuucuuuuuggcc

SEQ ID NO: 270167 - RNA, 23 nt, Artificial Sequence
  Synthetic
cacgugauuuuuucuuuuuggcc

SEQ ID NO: 270168 - RNA, 24 nt, Artificial Sequence
  Synthetic
gcacgugauuuuuucuuuuuggcc

SEQ ID NO: 270169 - RNA, 18 nt, Artificial Sequence
  Synthetic
aaaaaaaaaaaaaaugcc

SEQ ID NO: 270170 - RNA, 19 nt, Artificial Sequence
  Synthetic
aaaaaaaaaaaaaaaugcc

SEQ ID NO: 270171 - RNA, 20 nt, Artificial Sequence
  Synthetic
caaaaaaaaaaaaaaaugcc

SEQ ID NO: 270172 - RNA, 21 nt, Artificial Sequence
  Synthetic
gcaaaaaaaaaaaaaaaugcc

SEQ ID NO: 270173 - RNA, 22 nt, Artificial Sequence
  Synthetic
ugcaaaaaaaaaaaaaaaugcc

SEQ ID NO: 270174 - RNA, 23 nt, Artificial Sequence
  Synthetic
uugcaaaaaaaaaaaaaaaugcc

SEQ ID NO: 270175 - RNA, 24 nt, Artificial Sequence
  Synthetic
uuugcaaaaaaaaaaaaaaaugcc

SEQ ID NO: 270176 - RNA, 18 nt, Artificial Sequence
  Synthetic
gcuuuuaagaaaaaugcc

SEQ ID NO: 270177 - RNA, 19 nt, Artificial Sequence
  Synthetic
ugcuuuuaagaaaaaugcc

SEQ ID NO: 270178 - RNA, 20 nt, Artificial Sequence
  Synthetic
gugcuuuuaagaaaaaugcc

SEQ ID NO: 270179 - RNA, 21 nt, Artificial Sequence
  Synthetic
agugcuuuuaagaaaaaugcc

SEQ ID NO: 270180 - RNA, 22 nt, Artificial Sequence
  Synthetic
gagugcuuuuaagaaaaaugcc

SEQ ID NO: 270181 - RNA, 23 nt, Artificial Sequence
  Synthetic
ugagugcuuuuaagaaaaaugcc

SEQ ID NO: 270182 - RNA, 24 nt, Artificial Sequence
  Synthetic
gugagugcuuuuaagaaaaaugcc

SEQ ID NO: 270183 - RNA, 18 nt, Artificial Sequence
  Synthetic
uuuucaggggaaaaugcc

SEQ ID NO: 270184 - RNA, 19 nt, Artificial Sequence
  Synthetic
auuuucaggggaaaaugcc

SEQ ID NO: 270185 - RNA, 20 nt, Artificial Sequence
  Synthetic
cauuuucaggggaaaaugcc

SEQ ID NO: 270186 - RNA, 21 nt, Artificial Sequence
  Synthetic
ucauuuucaggggaaaaugcc

SEQ ID NO: 270187 - RNA, 22 nt, Artificial Sequence
  Synthetic
gucauuuucaggggaaaaugcc

SEQ ID NO: 270188 - RNA, 23 nt, Artificial Sequence
  Synthetic
agucauuuucaggggaaaaugcc

SEQ ID NO: 270189 - RNA, 24 nt, Artificial Sequence
  Synthetic
aagucauuuucaggggaaaaugcc

SEQ ID NO: 270190 - RNA, 18 nt, Artificial Sequence
  Synthetic
uaaauuaaucuaaaugcc

SEQ ID NO: 270191 - RNA, 19 nt, Artificial Sequence
  Synthetic
uuaaauuaaucuaaaugcc

SEQ ID NO: 270192 - RNA, 20 nt, Artificial Sequence
  Synthetic
uuuaaauuaaucuaaaugcc

SEQ ID NO: 270193 - RNA, 21 nt, Artificial Sequence
  Synthetic
cuuuaaauuaaucuaaaugcc

SEQ ID NO: 270194 - RNA, 22 nt, Artificial Sequence
  Synthetic
ccuuuaaauuaaucuaaaugcc

SEQ ID NO: 270195 - RNA, 23 nt, Artificial Sequence
  Synthetic
uccuuuaaauuaaucuaaaugcc

SEQ ID NO: 270196 - RNA, 24 nt, Artificial Sequence
  Synthetic
guccuuuaaauuaaucuaaaugcc

SEQ ID NO: 270197 - RNA, 18 nt, Artificial Sequence
  Synthetic
uucaguucuuuaaaugcc

SEQ ID NO: 270198 - RNA, 19 nt, Artificial Sequence
  Synthetic
guucaguucuuuaaaugcc

SEQ ID NO: 270199 - RNA, 20 nt, Artificial Sequence
  Synthetic
uguucaguucuuuaaaugcc

SEQ ID NO: 270200 - RNA, 21 nt, Artificial Sequence
  Synthetic
uuguucaguucuuuaaaugcc

SEQ ID NO: 270201 - RNA, 22 nt, Artificial Sequence
  Synthetic
uuuguucaguucuuuaaaugcc

SEQ ID NO: 270202 - RNA, 23 nt, Artificial Sequence
  Synthetic
guuuguucaguucuuuaaaugcc

SEQ ID NO: 270203 - RNA, 24 nt, Artificial Sequence
  Synthetic
uguuuguucaguucuuuaaaugcc

SEQ ID NO: 270204 - RNA, 18 nt, Artificial Sequence
  Synthetic
ggugcugugaagaaugcc

SEQ ID NO: 270205 - RNA, 19 nt, Artificial Sequence
  Synthetic
aggugcugugaagaaugcc

SEQ ID NO: 270206 - RNA, 20 nt, Artificial Sequence
  Synthetic
caggugcugugaagaaugcc

SEQ ID NO: 270207 - RNA, 21 nt, Artificial Sequence
  Synthetic
ccaggugcugugaagaaugcc

SEQ ID NO: 270208 - RNA, 22 nt, Artificial Sequence
  Synthetic
gccaggugcugugaagaaugcc

SEQ ID NO: 270209 - RNA, 23 nt, Artificial Sequence
  Synthetic
ugccaggugcugugaagaaugcc

SEQ ID NO: 270210 - RNA, 24 nt, Artificial Sequence
  Synthetic
gugccaggugcugugaagaaugcc

SEQ ID NO: 270211 - RNA, 18 nt, Artificial Sequence
  Synthetic
ugacuguauaagaaugcc

SEQ ID NO: 270212 - RNA, 19 nt, Artificial Sequence
  Synthetic
cugacuguauaagaaugcc

SEQ ID NO: 270213 - RNA, 20 nt, Artificial Sequence
  Synthetic
ucugacuguauaagaaugcc

SEQ ID NO: 270214 - RNA, 21 nt, Artificial Sequence
  Synthetic
gucugacuguauaagaaugcc

SEQ ID NO: 270215 - RNA, 22 nt, Artificial Sequence
  Synthetic
ggucugacuguauaagaaugcc

SEQ ID NO: 270216 - RNA, 23 nt, Artificial Sequence
  Synthetic
uggucugacuguauaagaaugcc

SEQ ID NO: 270217 - RNA, 24 nt, Artificial Sequence
  Synthetic
auggucugacuguauaagaaugcc

SEQ ID NO: 270218 - RNA, 18 nt, Artificial Sequence
  Synthetic
agacuggaagagaaugcc

SEQ ID NO: 270219 - RNA, 19 nt, Artificial Sequence
  Synthetic
uagacuggaagagaaugcc

SEQ ID NO: 270220 - RNA, 20 nt, Artificial Sequence
  Synthetic
auagacuggaagagaaugcc

SEQ ID NO: 270221 - RNA, 21 nt, Artificial Sequence
  Synthetic
cauagacuggaagagaaugcc

SEQ ID NO: 270222 - RNA, 22 nt, Artificial Sequence
  Synthetic
acauagacuggaagagaaugcc

SEQ ID NO: 270223 - RNA, 23 nt, Artificial Sequence
  Synthetic
uacauagacuggaagagaaugcc

SEQ ID NO: 270224 - RNA, 24 nt, Artificial Sequence
  Synthetic
guacauagacuggaagagaaugcc

SEQ ID NO: 270225 - RNA, 18 nt, Artificial Sequence
  Synthetic
ugcaauucugugaaugcc

SEQ ID NO: 270226 - RNA, 19 nt, Artificial Sequence
  Synthetic
cugcaauucugugaaugcc

SEQ ID NO: 270227 - RNA, 20 nt, Artificial Sequence
  Synthetic
ucugcaauucugugaaugcc

SEQ ID NO: 270228 - RNA, 21 nt, Artificial Sequence
  Synthetic
cucugcaauucugugaaugcc

SEQ ID NO: 270229 - RNA, 22 nt, Artificial Sequence
  Synthetic
ucucugcaauucugugaaugcc

SEQ ID NO: 270230 - RNA, 23 nt, Artificial Sequence
  Synthetic
uucucugcaauucugugaaugcc

SEQ ID NO: 270231 - RNA, 24 nt, Artificial Sequence
  Synthetic
auucucugcaauucugugaaugcc

SEQ ID NO: 270232 - RNA, 18 nt, Artificial Sequence
  Synthetic
uuuacuaacuauaaugcc

SEQ ID NO: 270233 - RNA, 19 nt, Artificial Sequence
  Synthetic
guuuacuaacuauaaugcc

SEQ ID NO: 270234 - RNA, 20 nt, Artificial Sequence
  Synthetic
gguuuacuaacuauaaugcc

SEQ ID NO: 270235 - RNA, 21 nt, Artificial Sequence
  Synthetic
ugguuuacuaacuauaaugcc

SEQ ID NO: 270236 - RNA, 22 nt, Artificial Sequence
  Synthetic
cugguuuacuaacuauaaugcc

SEQ ID NO: 270237 - RNA, 23 nt, Artificial Sequence
  Synthetic
ccugguuuacuaacuauaaugcc

SEQ ID NO: 270238 - RNA, 24 nt, Artificial Sequence
  Synthetic
accugguuuacuaacuauaaugcc

SEQ ID NO: 270239 - RNA, 18 nt, Artificial Sequence
  Synthetic
aaugcguaucguaaugcc

SEQ ID NO: 270240 - RNA, 19 nt, Artificial Sequence
  Synthetic
uaaugcguaucguaaugcc

SEQ ID NO: 270241 - RNA, 20 nt, Artificial Sequence
  Synthetic
uuaaugcguaucguaaugcc

SEQ ID NO: 270242 - RNA, 21 nt, Artificial Sequence
  Synthetic
guuaaugcguaucguaaugcc

SEQ ID NO: 270243 - RNA, 22 nt, Artificial Sequence
  Synthetic
uguuaaugcguaucguaaugcc

SEQ ID NO: 270244 - RNA, 23 nt, Artificial Sequence
  Synthetic
auguuaaugcguaucguaaugcc

SEQ ID NO: 270245 - RNA, 24 nt, Artificial Sequence
  Synthetic
aauguuaaugcguaucguaaugcc

SEQ ID NO: 270246 - RNA, 18 nt, Artificial Sequence
  Synthetic
gaaucaaauuuuaaugcc

SEQ ID NO: 270247 - RNA, 19 nt, Artificial Sequence
  Synthetic
agaaucaaauuuuaaugcc

SEQ ID NO: 270248 - RNA, 20 nt, Artificial Sequence
  Synthetic
cagaaucaaauuuuaaugcc

SEQ ID NO: 270249 - RNA, 21 nt, Artificial Sequence
  Synthetic
gcagaaucaaauuuuaaugcc

SEQ ID NO: 270250 - RNA, 22 nt, Artificial Sequence
  Synthetic
ugcagaaucaaauuuuaaugcc

SEQ ID NO: 270251 - RNA, 23 nt, Artificial Sequence
  Synthetic
augcagaaucaaauuuuaaugcc

SEQ ID NO: 270252 - RNA, 24 nt, Artificial Sequence
  Synthetic
caugcagaaucaaauuuuaaugcc

SEQ ID NO: 270253 - RNA, 18 nt, Artificial Sequence
  Synthetic
caugcagauuuuaaugcc

SEQ ID NO: 270254 - RNA, 19 nt, Artificial Sequence
  Synthetic
ucaugcagauuuuaaugcc

SEQ ID NO: 270255 - RNA, 20 nt, Artificial Sequence
  Synthetic
aucaugcagauuuuaaugcc

SEQ ID NO: 270256 - RNA, 21 nt, Artificial Sequence
  Synthetic
caucaugcagauuuuaaugcc

SEQ ID NO: 270257 - RNA, 22 nt, Artificial Sequence
  Synthetic
acaucaugcagauuuuaaugcc

SEQ ID NO: 270258 - RNA, 23 nt, Artificial Sequence
  Synthetic
aacaucaugcagauuuuaaugcc

SEQ ID NO: 270259 - RNA, 24 nt, Artificial Sequence
  Synthetic
aaacaucaugcagauuuuaaugcc

SEQ ID NO: 270260 - RNA, 18 nt, Artificial Sequence
  Synthetic
cagaggguuaaacaugcc

SEQ ID NO: 270261 - RNA, 19 nt, Artificial Sequence
  Synthetic
ucagaggguuaaacaugcc

SEQ ID NO: 270262 - RNA, 20 nt, Artificial Sequence
  Synthetic
aucagaggguuaaacaugcc

SEQ ID NO: 270263 - RNA, 21 nt, Artificial Sequence
  Synthetic
caucagaggguuaaacaugcc

SEQ ID NO: 270264 - RNA, 22 nt, Artificial Sequence
  Synthetic
gcaucagaggguuaaacaugcc

SEQ ID NO: 270265 - RNA, 23 nt, Artificial Sequence
  Synthetic
ugcaucagaggguuaaacaugcc

SEQ ID NO: 270266 - RNA, 24 nt, Artificial Sequence
  Synthetic
uugcaucagaggguuaaacaugcc

SEQ ID NO: 270267 - RNA, 18 nt, Artificial Sequence
  Synthetic
agggcucacucacaugcc

SEQ ID NO: 270268 - RNA, 19 nt, Artificial Sequence
  Synthetic
gagggcucacucacaugcc

SEQ ID NO: 270269 - RNA, 20 nt, Artificial Sequence
  Synthetic
agagggcucacucacaugcc

SEQ ID NO: 270270 - RNA, 21 nt, Artificial Sequence
  Synthetic
aagagggcucacucacaugcc

SEQ ID NO: 270271 - RNA, 22 nt, Artificial Sequence
  Synthetic
caagagggcucacucacaugcc

SEQ ID NO: 270272 - RNA, 23 nt, Artificial Sequence
  Synthetic
ccaagagggcucacucacaugcc

SEQ ID NO: 270273 - RNA, 24 nt, Artificial Sequence
  Synthetic
uccaagagggcucacucacaugcc

SEQ ID NO: 270274 - RNA, 18 nt, Artificial Sequence
  Synthetic
uacucauagacagaugcc

SEQ ID NO: 270275 - RNA, 19 nt, Artificial Sequence
  Synthetic
cuacucauagacagaugcc

SEQ ID NO: 270276 - RNA, 20 nt, Artificial Sequence
  Synthetic
ccuacucauagacagaugcc

SEQ ID NO: 270277 - RNA, 21 nt, Artificial Sequence
  Synthetic
uccuacucauagacagaugcc

SEQ ID NO: 270278 - RNA, 22 nt, Artificial Sequence
  Synthetic
auccuacucauagacagaugcc

SEQ ID NO: 270279 - RNA, 23 nt, Artificial Sequence
  Synthetic
uauccuacucauagacagaugcc

SEQ ID NO: 270280 - RNA, 24 nt, Artificial Sequence
  Synthetic
auauccuacucauagacagaugcc

SEQ ID NO: 270281 - RNA, 18 nt, Artificial Sequence
  Synthetic
gggcacaggacagaugcc

SEQ ID NO: 270282 - RNA, 19 nt, Artificial Sequence
  Synthetic
ggggcacaggacagaugcc

SEQ ID NO: 270283 - RNA, 20 nt, Artificial Sequence
  Synthetic
aggggcacaggacagaugcc

SEQ ID NO: 270284 - RNA, 21 nt, Artificial Sequence
  Synthetic
aaggggcacaggacagaugcc

SEQ ID NO: 270285 - RNA, 22 nt, Artificial Sequence
  Synthetic
aaaggggcacaggacagaugcc

SEQ ID NO: 270286 - RNA, 23 nt, Artificial Sequence
  Synthetic
gaaaggggcacaggacagaugcc

SEQ ID NO: 270287 - RNA, 24 nt, Artificial Sequence
  Synthetic
agaaaggggcacaggacagaugcc

SEQ ID NO: 270288 - RNA, 18 nt, Artificial Sequence
  Synthetic
cucaccauuccagaugcc

SEQ ID NO: 270289 - RNA, 19 nt, Artificial Sequence
  Synthetic
ccucaccauuccagaugcc

SEQ ID NO: 270290 - RNA, 20 nt, Artificial Sequence
  Synthetic
uccucaccauuccagaugcc

SEQ ID NO: 270291 - RNA, 21 nt, Artificial Sequence
  Synthetic
guccucaccauuccagaugcc

SEQ ID NO: 270292 - RNA, 22 nt, Artificial Sequence
  Synthetic
aguccucaccauuccagaugcc

SEQ ID NO: 270293 - RNA, 23 nt, Artificial Sequence
  Synthetic
aaguccucaccauuccagaugcc

SEQ ID NO: 270294 - RNA, 24 nt, Artificial Sequence
  Synthetic
aaaguccucaccauuccagaugcc

SEQ ID NO: 270295 - RNA, 18 nt, Artificial Sequence
  Synthetic
augaacgauagugaugcc

SEQ ID NO: 270296 - RNA, 19 nt, Artificial Sequence
  Synthetic
gaugaacgauagugaugcc

SEQ ID NO: 270297 - RNA, 20 nt, Artificial Sequence
  Synthetic
ggaugaacgauagugaugcc

SEQ ID NO: 270298 - RNA, 21 nt, Artificial Sequence
  Synthetic
aggaugaacgauagugaugcc

SEQ ID NO: 270299 - RNA, 22 nt, Artificial Sequence
  Synthetic
gaggaugaacgauagugaugcc

SEQ ID NO: 270300 - RNA, 23 nt, Artificial Sequence
  Synthetic
ugaggaugaacgauagugaugcc

SEQ ID NO: 270301 - RNA, 24 nt, Artificial Sequence
  Synthetic
augaggaugaacgauagugaugcc

SEQ ID NO: 270302 - RNA, 18 nt, Artificial Sequence
  Synthetic
cuuaguuccaaauaugcc

SEQ ID NO: 270303 - RNA, 19 nt, Artificial Sequence
  Synthetic
ucuuaguuccaaauaugcc

SEQ ID NO: 270304 - RNA, 20 nt, Artificial Sequence
  Synthetic
aucuuaguuccaaauaugcc

SEQ ID NO: 270305 - RNA, 21 nt, Artificial Sequence
  Synthetic
aaucuuaguuccaaauaugcc

SEQ ID NO: 270306 - RNA, 22 nt, Artificial Sequence
  Synthetic
gaaucuuaguuccaaauaugcc

SEQ ID NO: 270307 - RNA, 23 nt, Artificial Sequence
  Synthetic
ggaaucuuaguuccaaauaugcc

SEQ ID NO: 270308 - RNA, 24 nt, Artificial Sequence
  Synthetic
uggaaucuuaguuccaaauaugcc

SEQ ID NO: 270309 - RNA, 18 nt, Artificial Sequence
  Synthetic
uauuuauuugaauaugcc

SEQ ID NO: 270310 - RNA, 19 nt, Artificial Sequence
  Synthetic
cuauuuauuugaauaugcc

SEQ ID NO: 270311 - RNA, 20 nt, Artificial Sequence
  Synthetic
gcuauuuauuugaauaugcc

SEQ ID NO: 270312 - RNA, 21 nt, Artificial Sequence
  Synthetic
agcuauuuauuugaauaugcc

SEQ ID NO: 270313 - RNA, 22 nt, Artificial Sequence
  Synthetic
cagcuauuuauuugaauaugcc

SEQ ID NO: 270314 - RNA, 23 nt, Artificial Sequence
  Synthetic
acagcuauuuauuugaauaugcc

SEQ ID NO: 270315 - RNA, 24 nt, Artificial Sequence
  Synthetic
aacagcuauuuauuugaauaugcc

SEQ ID NO: 270316 - RNA, 18 nt, Artificial Sequence
  Synthetic
gggucucaaugauaugcc

SEQ ID NO: 270317 - RNA, 19 nt, Artificial Sequence
  Synthetic
ugggucucaaugauaugcc

SEQ ID NO: 270318 - RNA, 20 nt, Artificial Sequence
  Synthetic
gugggucucaaugauaugcc

SEQ ID NO: 270319 - RNA, 21 nt, Artificial Sequence
  Synthetic
ugugggucucaaugauaugcc

SEQ ID NO: 270320 - RNA, 22 nt, Artificial Sequence
  Synthetic
gugugggucucaaugauaugcc

SEQ ID NO: 270321 - RNA, 23 nt, Artificial Sequence
  Synthetic
agugugggucucaaugauaugcc

SEQ ID NO: 270322 - RNA, 24 nt, Artificial Sequence
  Synthetic
gagugugggucucaaugauaugcc

SEQ ID NO: 270323 - RNA, 18 nt, Artificial Sequence
  Synthetic
uucuuuuggauauaugcc

SEQ ID NO: 270324 - RNA, 19 nt, Artificial Sequence
  Synthetic
guucuuuuggauauaugcc

SEQ ID NO: 270325 - RNA, 20 nt, Artificial Sequence
  Synthetic
aguucuuuuggauauaugcc

SEQ ID NO: 270326 - RNA, 21 nt, Artificial Sequence
  Synthetic
caguucuuuuggauauaugcc

SEQ ID NO: 270327 - RNA, 22 nt, Artificial Sequence
  Synthetic
ucaguucuuuuggauauaugcc

SEQ ID NO: 270328 - RNA, 23 nt, Artificial Sequence
  Synthetic
uucaguucuuuuggauauaugcc

SEQ ID NO: 270329 - RNA, 24 nt, Artificial Sequence
  Synthetic
uuucaguucuuuuggauauaugcc

SEQ ID NO: 270330 - RNA, 18 nt, Artificial Sequence
  Synthetic
aagaaaauagucuaugcc

SEQ ID NO: 270331 - RNA, 19 nt, Artificial Sequence
  Synthetic
aaagaaaauagucuaugcc

SEQ ID NO: 270332 - RNA, 20 nt, Artificial Sequence
  Synthetic
gaaagaaaauagucuaugcc

SEQ ID NO: 270333 - RNA, 21 nt, Artificial Sequence
  Synthetic
agaaagaaaauagucuaugcc

SEQ ID NO: 270334 - RNA, 22 nt, Artificial Sequence
  Synthetic
uagaaagaaaauagucuaugcc

SEQ ID NO: 270335 - RNA, 23 nt, Artificial Sequence
  Synthetic
uuagaaagaaaauagucuaugcc

SEQ ID NO: 270336 - RNA, 24 nt, Artificial Sequence
  Synthetic
uuuagaaagaaaauagucuaugcc

SEQ ID NO: 270337 - RNA, 18 nt, Artificial Sequence
  Synthetic
acauuagaaauguaugcc

SEQ ID NO: 270338 - RNA, 19 nt, Artificial Sequence
  Synthetic
cacauuagaaauguaugcc

SEQ ID NO: 270339 - RNA, 20 nt, Artificial Sequence
  Synthetic
acacauuagaaauguaugcc

SEQ ID NO: 270340 - RNA, 21 nt, Artificial Sequence
  Synthetic
cacacauuagaaauguaugcc

SEQ ID NO: 270341 - RNA, 22 nt, Artificial Sequence
  Synthetic
ucacacauuagaaauguaugcc

SEQ ID NO: 270342 - RNA, 23 nt, Artificial Sequence
  Synthetic
uucacacauuagaaauguaugcc

SEQ ID NO: 270343 - RNA, 24 nt, Artificial Sequence
  Synthetic
auucacacauuagaaauguaugcc

SEQ ID NO: 270344 - RNA, 18 nt, Artificial Sequence
  Synthetic
ugaaggcaaaauuaugcc

SEQ ID NO: 270345 - RNA, 19 nt, Artificial Sequence
  Synthetic
augaaggcaaaauuaugcc

SEQ ID NO: 270346 - RNA, 20 nt, Artificial Sequence
  Synthetic
aaugaaggcaaaauuaugcc

SEQ ID NO: 270347 - RNA, 21 nt, Artificial Sequence
  Synthetic
aaaugaaggcaaaauuaugcc

SEQ ID NO: 270348 - RNA, 22 nt, Artificial Sequence
  Synthetic
uaaaugaaggcaaaauuaugcc

SEQ ID NO: 270349 - RNA, 23 nt, Artificial Sequence
  Synthetic
uuaaaugaaggcaaaauuaugcc

SEQ ID NO: 270350 - RNA, 24 nt, Artificial Sequence
  Synthetic
guuaaaugaaggcaaaauuaugcc

SEQ ID NO: 270351 - RNA, 18 nt, Artificial Sequence
  Synthetic
uuuaaauaaaauuaugcc

SEQ ID NO: 270352 - RNA, 19 nt, Artificial Sequence
  Synthetic
cuuuaaauaaaauuaugcc

SEQ ID NO: 270353 - RNA, 20 nt, Artificial Sequence
  Synthetic
ccuuuaaauaaaauuaugcc

SEQ ID NO: 270354 - RNA, 21 nt, Artificial Sequence
  Synthetic
uccuuuaaauaaaauuaugcc

SEQ ID NO: 270355 - RNA, 22 nt, Artificial Sequence
  Synthetic
uuccuuuaaauaaaauuaugcc

SEQ ID NO: 270356 - RNA, 23 nt, Artificial Sequence
  Synthetic
cuuccuuuaaauaaaauuaugcc

SEQ ID NO: 270357 - RNA, 24 nt, Artificial Sequence
  Synthetic
acuuccuuuaaauaaaauuaugcc

SEQ ID NO: 270358 - RNA, 18 nt, Artificial Sequence
  Synthetic
acaggcuugccuuaugcc

SEQ ID NO: 270359 - RNA, 19 nt, Artificial Sequence
  Synthetic
uacaggcuugccuuaugcc

SEQ ID NO: 270360 - RNA, 20 nt, Artificial Sequence
  Synthetic
auacaggcuugccuuaugcc

SEQ ID NO: 270361 - RNA, 21 nt, Artificial Sequence
  Synthetic
uauacaggcuugccuuaugcc

SEQ ID NO: 270362 - RNA, 22 nt, Artificial Sequence
  Synthetic
auauacaggcuugccuuaugcc

SEQ ID NO: 270363 - RNA, 23 nt, Artificial Sequence
  Synthetic
cauauacaggcuugccuuaugcc

SEQ ID NO: 270364 - RNA, 24 nt, Artificial Sequence
  Synthetic
ccauauacaggcuugccuuaugcc

SEQ ID NO: 270365 - RNA, 18 nt, Artificial Sequence
  Synthetic
aacauuuuggcuuaugcc

SEQ ID NO: 270366 - RNA, 19 nt, Artificial Sequence
  Synthetic
aaacauuuuggcuuaugcc

SEQ ID NO: 270367 - RNA, 20 nt, Artificial Sequence
  Synthetic
uaaacauuuuggcuuaugcc

SEQ ID NO: 270368 - RNA, 21 nt, Artificial Sequence
  Synthetic
uuaaacauuuuggcuuaugcc

SEQ ID NO: 270369 - RNA, 22 nt, Artificial Sequence
  Synthetic
uuuaaacauuuuggcuuaugcc

SEQ ID NO: 270370 - RNA, 23 nt, Artificial Sequence
  Synthetic
uuuuaaacauuuuggcuuaugcc

SEQ ID NO: 270371 - RNA, 24 nt, Artificial Sequence
  Synthetic
uuuuuaaacauuuuggcuuaugcc

SEQ ID NO: 270372 - RNA, 18 nt, Artificial Sequence
  Synthetic
auguaguaguuuuaugcc

SEQ ID NO: 270373 - RNA, 19 nt, Artificial Sequence
  Synthetic
aauguaguaguuuuaugcc

SEQ ID NO: 270374 - RNA, 20 nt, Artificial Sequence
  Synthetic
gaauguaguaguuuuaugcc

SEQ ID NO: 270375 - RNA, 21 nt, Artificial Sequence
  Synthetic
ugaauguaguaguuuuaugcc

SEQ ID NO: 270376 - RNA, 22 nt, Artificial Sequence
  Synthetic
augaauguaguaguuuuaugcc

SEQ ID NO: 270377 - RNA, 23 nt, Artificial Sequence
  Synthetic
aaugaauguaguaguuuuaugcc

SEQ ID NO: 270378 - RNA, 24 nt, Artificial Sequence
  Synthetic
uaaugaauguaguaguuuuaugcc

SEQ ID NO: 270379 - RNA, 18 nt, Artificial Sequence
  Synthetic
aaauauacagcaacugcc

SEQ ID NO: 270380 - RNA, 19 nt, Artificial Sequence
  Synthetic
uaaauauacagcaacugcc

SEQ ID NO: 270381 - RNA, 20 nt, Artificial Sequence
  Synthetic
uuaaauauacagcaacugcc

SEQ ID NO: 270382 - RNA, 21 nt, Artificial Sequence
  Synthetic
auuaaauauacagcaacugcc

SEQ ID NO: 270383 - RNA, 22 nt, Artificial Sequence
  Synthetic
aauuaaauauacagcaacugcc

SEQ ID NO: 270384 - RNA, 23 nt, Artificial Sequence
  Synthetic
caauuaaauauacagcaacugcc

SEQ ID NO: 270385 - RNA, 24 nt, Artificial Sequence
  Synthetic
acaauuaaauauacagcaacugcc

SEQ ID NO: 270386 - RNA, 18 nt, Artificial Sequence
  Synthetic
ugugguuagcuaacugcc

SEQ ID NO: 270387 - RNA, 19 nt, Artificial Sequence
  Synthetic
augugguuagcuaacugcc

SEQ ID NO: 270388 - RNA, 20 nt, Artificial Sequence
  Synthetic
gaugugguuagcuaacugcc

SEQ ID NO: 270389 - RNA, 21 nt, Artificial Sequence
  Synthetic
ugaugugguuagcuaacugcc

SEQ ID NO: 270390 - RNA, 22 nt, Artificial Sequence
  Synthetic
uugaugugguuagcuaacugcc

SEQ ID NO: 270391 - RNA, 23 nt, Artificial Sequence
  Synthetic
guugaugugguuagcuaacugcc

SEQ ID NO: 270392 - RNA, 24 nt, Artificial Sequence
  Synthetic
gguugaugugguuagcuaacugcc

SEQ ID NO: 270393 - RNA, 18 nt, Artificial Sequence
  Synthetic
cuacaauucaggacugcc

SEQ ID NO: 270394 - RNA, 19 nt, Artificial Sequence
  Synthetic
acuacaauucaggacugcc

SEQ ID NO: 270395 - RNA, 20 nt, Artificial Sequence
  Synthetic
uacuacaauucaggacugcc

SEQ ID NO: 270396 - RNA, 21 nt, Artificial Sequence
  Synthetic
uuacuacaauucaggacugcc

SEQ ID NO: 270397 - RNA, 22 nt, Artificial Sequence
  Synthetic
uuuacuacaauucaggacugcc

SEQ ID NO: 270398 - RNA, 23 nt, Artificial Sequence
  Synthetic
uuuuacuacaauucaggacugcc

SEQ ID NO: 270399 - RNA, 24 nt, Artificial Sequence
  Synthetic
cuuuuacuacaauucaggacugcc

SEQ ID NO: 270400 - RNA, 18 nt, Artificial Sequence
  Synthetic
acaaaucugaugacugcc

SEQ ID NO: 270401 - RNA, 19 nt, Artificial Sequence
  Synthetic
cacaaaucugaugacugcc

SEQ ID NO: 270402 - RNA, 20 nt, Artificial Sequence
  Synthetic
acacaaaucugaugacugcc

SEQ ID NO: 270403 - RNA, 21 nt, Artificial Sequence
  Synthetic
cacacaaaucugaugacugcc

SEQ ID NO: 270404 - RNA, 22 nt, Artificial Sequence
  Synthetic
ucacacaaaucugaugacugcc

SEQ ID NO: 270405 - RNA, 23 nt, Artificial Sequence
  Synthetic
aucacacaaaucugaugacugcc

SEQ ID NO: 270406 - RNA, 24 nt, Artificial Sequence
  Synthetic
uaucacacaaaucugaugacugcc

SEQ ID NO: 270407 - RNA, 18 nt, Artificial Sequence
  Synthetic
guuuuuuuaaguacugcc

SEQ ID NO: 270408 - RNA, 19 nt, Artificial Sequence
  Synthetic
aguuuuuuuaaguacugcc

SEQ ID NO: 270409 - RNA, 20 nt, Artificial Sequence
  Synthetic
caguuuuuuuaaguacugcc

SEQ ID NO: 270410 - RNA, 21 nt, Artificial Sequence
  Synthetic
ccaguuuuuuuaaguacugcc

SEQ ID NO: 270411 - RNA, 22 nt, Artificial Sequence
  Synthetic
cccaguuuuuuuaaguacugcc

SEQ ID NO: 270412 - RNA, 23 nt, Artificial Sequence
  Synthetic
ucccaguuuuuuuaaguacugcc

SEQ ID NO: 270413 - RNA, 24 nt, Artificial Sequence
  Synthetic
uucccaguuuuuuuaaguacugcc

SEQ ID NO: 270414 - RNA, 18 nt, Artificial Sequence
  Synthetic
auauuucuucuuacugcc

SEQ ID NO: 270415 - RNA, 19 nt, Artificial Sequence
  Synthetic
cauauuucuucuuacugcc

SEQ ID NO: 270416 - RNA, 20 nt, Artificial Sequence
  Synthetic
ccauauuucuucuuacugcc

SEQ ID NO: 270417 - RNA, 21 nt, Artificial Sequence
  Synthetic
uccauauuucuucuuacugcc

SEQ ID NO: 270418 - RNA, 22 nt, Artificial Sequence
  Synthetic
auccauauuucuucuuacugcc

SEQ ID NO: 270419 - RNA, 23 nt, Artificial Sequence
  Synthetic
cauccauauuucuucuuacugcc

SEQ ID NO: 270420 - RNA, 24 nt, Artificial Sequence
  Synthetic
ccauccauauuucuucuuacugcc

SEQ ID NO: 270421 - RNA, 18 nt, Artificial Sequence
  Synthetic
acuguacugaauccugcc

SEQ ID NO: 270422 - RNA, 19 nt, Artificial Sequence
  Synthetic
aacuguacugaauccugcc

SEQ ID NO: 270423 - RNA, 20 nt, Artificial Sequence
  Synthetic
uaacuguacugaauccugcc

SEQ ID NO: 270424 - RNA, 21 nt, Artificial Sequence
  Synthetic
cuaacuguacugaauccugcc

SEQ ID NO: 270425 - RNA, 22 nt, Artificial Sequence
  Synthetic
ccuaacuguacugaauccugcc

SEQ ID NO: 270426 - RNA, 23 nt, Artificial Sequence
  Synthetic
gccuaacuguacugaauccugcc

SEQ ID NO: 270427 - RNA, 24 nt, Artificial Sequence
  Synthetic
ugccuaacuguacugaauccugcc

SEQ ID NO: 270428 - RNA, 18 nt, Artificial Sequence
  Synthetic
augguggccauagcugcc

SEQ ID NO: 270429 - RNA, 19 nt, Artificial Sequence
  Synthetic
caugguggccauagcugcc

SEQ ID NO: 270430 - RNA, 20 nt, Artificial Sequence
  Synthetic
ccaugguggccauagcugcc

SEQ ID NO: 270431 - RNA, 21 nt, Artificial Sequence
  Synthetic
gccaugguggccauagcugcc

SEQ ID NO: 270432 - RNA, 22 nt, Artificial Sequence
  Synthetic
ggccaugguggccauagcugcc

SEQ ID NO: 270433 - RNA, 23 nt, Artificial Sequence
  Synthetic
uggccaugguggccauagcugcc

SEQ ID NO: 270434 - RNA, 24 nt, Artificial Sequence
  Synthetic
cuggccaugguggccauagcugcc

SEQ ID NO: 270435 - RNA, 18 nt, Artificial Sequence
  Synthetic
caggaauucaaggcugcc

SEQ ID NO: 270436 - RNA, 19 nt, Artificial Sequence
  Synthetic
ccaggaauucaaggcugcc

SEQ ID NO: 270437 - RNA, 20 nt, Artificial Sequence
  Synthetic
cccaggaauucaaggcugcc

SEQ ID NO: 270438 - RNA, 21 nt, Artificial Sequence
  Synthetic
gcccaggaauucaaggcugcc

SEQ ID NO: 270439 - RNA, 22 nt, Artificial Sequence
  Synthetic
agcccaggaauucaaggcugcc

SEQ ID NO: 270440 - RNA, 23 nt, Artificial Sequence
  Synthetic
gagcccaggaauucaaggcugcc

SEQ ID NO: 270441 - RNA, 24 nt, Artificial Sequence
  Synthetic
ugagcccaggaauucaaggcugcc

SEQ ID NO: 270442 - RNA, 18 nt, Artificial Sequence
  Synthetic
cacugaaugagggcugcc

SEQ ID NO: 270443 - RNA, 19 nt, Artificial Sequence
  Synthetic
ucacugaaugagggcugcc

SEQ ID NO: 270444 - RNA, 20 nt, Artificial Sequence
  Synthetic
gucacugaaugagggcugcc

SEQ ID NO: 270445 - RNA, 21 nt, Artificial Sequence
  Synthetic
agucacugaaugagggcugcc

SEQ ID NO: 270446 - RNA, 22 nt, Artificial Sequence
  Synthetic
cagucacugaaugagggcugcc

SEQ ID NO: 270447 - RNA, 23 nt, Artificial Sequence
  Synthetic
ucagucacugaaugagggcugcc

SEQ ID NO: 270448 - RNA, 24 nt, Artificial Sequence
  Synthetic
aucagucacugaaugagggcugcc

SEQ ID NO: 270449 - RNA, 18 nt, Artificial Sequence
  Synthetic
augaugggaggggcugcc

SEQ ID NO: 270450 - RNA, 19 nt, Artificial Sequence
  Synthetic
uaugaugggaggggcugcc

SEQ ID NO: 270451 - RNA, 20 nt, Artificial Sequence
  Synthetic
cuaugaugggaggggcugcc

SEQ ID NO: 270452 - RNA, 21 nt, Artificial Sequence
  Synthetic
ccuaugaugggaggggcugcc

SEQ ID NO: 270453 - RNA, 22 nt, Artificial Sequence
  Synthetic
uccuaugaugggaggggcugcc

SEQ ID NO: 270454 - RNA, 23 nt, Artificial Sequence
  Synthetic
guccuaugaugggaggggcugcc

SEQ ID NO: 270455 - RNA, 24 nt, Artificial Sequence
  Synthetic
gguccuaugaugggaggggcugcc

SEQ ID NO: 270456 - RNA, 18 nt, Artificial Sequence
  Synthetic
uggaagaggagugcugcc

SEQ ID NO: 270457 - RNA, 19 nt, Artificial Sequence
  Synthetic
guggaagaggagugcugcc

SEQ ID NO: 270458 - RNA, 20 nt, Artificial Sequence
  Synthetic
gguggaagaggagugcugcc

SEQ ID NO: 270459 - RNA, 21 nt, Artificial Sequence
  Synthetic
agguggaagaggagugcugcc

SEQ ID NO: 270460 - RNA, 22 nt, Artificial Sequence
  Synthetic
gagguggaagaggagugcugcc

SEQ ID NO: 270461 - RNA, 23 nt, Artificial Sequence
  Synthetic
ggagguggaagaggagugcugcc

SEQ ID NO: 270462 - RNA, 24 nt, Artificial Sequence
  Synthetic
gggagguggaagaggagugcugcc

SEQ ID NO: 270463 - RNA, 18 nt, Artificial Sequence
  Synthetic
uaucuucccuuugcugcc

SEQ ID NO: 270464 - RNA, 19 nt, Artificial Sequence
  Synthetic
uuaucuucccuuugcugcc

SEQ ID NO: 270465 - RNA, 20 nt, Artificial Sequence
  Synthetic
uuuaucuucccuuugcugcc

SEQ ID NO: 270466 - RNA, 21 nt, Artificial Sequence
  Synthetic
auuuaucuucccuuugcugcc

SEQ ID NO: 270467 - RNA, 22 nt, Artificial Sequence
  Synthetic
uauuuaucuucccuuugcugcc

SEQ ID NO: 270468 - RNA, 23 nt, Artificial Sequence
  Synthetic
uuauuuaucuucccuuugcugcc

SEQ ID NO: 270469 - RNA, 24 nt, Artificial Sequence
  Synthetic
uuuauuuaucuucccuuugcugcc

SEQ ID NO: 270470 - RNA, 18 nt, Artificial Sequence
  Synthetic
gauaaacugaaaucugcc

SEQ ID NO: 270471 - RNA, 19 nt, Artificial Sequence
  Synthetic
agauaaacugaaaucugcc

SEQ ID NO: 270472 - RNA, 20 nt, Artificial Sequence
  Synthetic
uagauaaacugaaaucugcc

SEQ ID NO: 270473 - RNA, 21 nt, Artificial Sequence
  Synthetic
auagauaaacugaaaucugcc

SEQ ID NO: 270474 - RNA, 22 nt, Artificial Sequence
  Synthetic
aauagauaaacugaaaucugcc

SEQ ID NO: 270475 - RNA, 23 nt, Artificial Sequence
  Synthetic
aaauagauaaacugaaaucugcc

SEQ ID NO: 270476 - RNA, 24 nt, Artificial Sequence
  Synthetic
aaaauagauaaacugaaaucugcc

SEQ ID NO: 270477 - RNA, 18 nt, Artificial Sequence
  Synthetic
ucaaaugcuagaucugcc

SEQ ID NO: 270478 - RNA, 19 nt, Artificial Sequence
  Synthetic
cucaaaugcuagaucugcc

SEQ ID NO: 270479 - RNA, 20 nt, Artificial Sequence
  Synthetic
ucucaaaugcuagaucugcc

SEQ ID NO: 270480 - RNA, 21 nt, Artificial Sequence
  Synthetic
aucucaaaugcuagaucugcc

SEQ ID NO: 270481 - RNA, 22 nt, Artificial Sequence
  Synthetic
aaucucaaaugcuagaucugcc

SEQ ID NO: 270482 - RNA, 23 nt, Artificial Sequence
  Synthetic
aaaucucaaaugcuagaucugcc

SEQ ID NO: 270483 - RNA, 24 nt, Artificial Sequence
  Synthetic
aaaaucucaaaugcuagaucugcc

SEQ ID NO: 270484 - RNA, 18 nt, Artificial Sequence
  Synthetic
ucuaaguuucacucugcc

SEQ ID NO: 270485 - RNA, 19 nt, Artificial Sequence
  Synthetic
cucuaaguuucacucugcc

SEQ ID NO: 270486 - RNA, 20 nt, Artificial Sequence
  Synthetic
ucucuaaguuucacucugcc

SEQ ID NO: 270487 - RNA, 21 nt, Artificial Sequence
  Synthetic
uucucuaaguuucacucugcc

SEQ ID NO: 270488 - RNA, 22 nt, Artificial Sequence
  Synthetic
auucucuaaguuucacucugcc

SEQ ID NO: 270489 - RNA, 23 nt, Artificial Sequence
  Synthetic
cauucucuaaguuucacucugcc

SEQ ID NO: 270490 - RNA, 24 nt, Artificial Sequence
  Synthetic
acauucucuaaguuucacucugcc

SEQ ID NO: 270491 - RNA, 18 nt, Artificial Sequence
  Synthetic
uuaauuccuuucucugcc

SEQ ID NO: 270492 - RNA, 19 nt, Artificial Sequence
  Synthetic
guuaauuccuuucucugcc

SEQ ID NO: 270493 - RNA, 20 nt, Artificial Sequence
  Synthetic
uguuaauuccuuucucugcc

SEQ ID NO: 270494 - RNA, 21 nt, Artificial Sequence
  Synthetic
auguuaauuccuuucucugcc

SEQ ID NO: 270495 - RNA, 22 nt, Artificial Sequence
  Synthetic
aauguuaauuccuuucucugcc

SEQ ID NO: 270496 - RNA, 23 nt, Artificial Sequence
  Synthetic
aaauguuaauuccuuucucugcc

SEQ ID NO: 270497 - RNA, 24 nt, Artificial Sequence
  Synthetic
uaaauguuaauuccuuucucugcc

SEQ ID NO: 270498 - RNA, 18 nt, Artificial Sequence
  Synthetic
gggaguuuuuucucugcc

SEQ ID NO: 270499 - RNA, 19 nt, Artificial Sequence
  Synthetic
ugggaguuuuuucucugcc

SEQ ID NO: 270500 - RNA, 20 nt, Artificial Sequence
  Synthetic
uugggaguuuuuucucugcc

SEQ ID NO: 270501 - RNA, 21 nt, Artificial Sequence
  Synthetic
guugggaguuuuuucucugcc

SEQ ID NO: 270502 - RNA, 22 nt, Artificial Sequence
  Synthetic
uguugggaguuuuuucucugcc

SEQ ID NO: 270503 - RNA, 23 nt, Artificial Sequence
  Synthetic
cuguugggaguuuuuucucugcc

SEQ ID NO: 270504 - RNA, 24 nt, Artificial Sequence
  Synthetic
ccuguugggaguuuuuucucugcc

SEQ ID NO: 270505 - RNA, 18 nt, Artificial Sequence
  Synthetic
aaaagaggacggucugcc

SEQ ID NO: 270506 - RNA, 19 nt, Artificial Sequence
  Synthetic
caaaagaggacggucugcc

SEQ ID NO: 270507 - RNA, 20 nt, Artificial Sequence
  Synthetic
acaaaagaggacggucugcc

SEQ ID NO: 270508 - RNA, 21 nt, Artificial Sequence
  Synthetic
gacaaaagaggacggucugcc

SEQ ID NO: 270509 - RNA, 22 nt, Artificial Sequence
  Synthetic
ggacaaaagaggacggucugcc

SEQ ID NO: 270510 - RNA, 23 nt, Artificial Sequence
  Synthetic
aggacaaaagaggacggucugcc

SEQ ID NO: 270511 - RNA, 24 nt, Artificial Sequence
  Synthetic
aaggacaaaagaggacggucugcc

SEQ ID NO: 270512 - RNA, 18 nt, Artificial Sequence
  Synthetic
ccucaguucaugucugcc

SEQ ID NO: 270513 - RNA, 19 nt, Artificial Sequence
  Synthetic
uccucaguucaugucugcc

SEQ ID NO: 270514 - RNA, 20 nt, Artificial Sequence
  Synthetic
guccucaguucaugucugcc

SEQ ID NO: 270515 - RNA, 21 nt, Artificial Sequence
  Synthetic
aguccucaguucaugucugcc

SEQ ID NO: 270516 - RNA, 22 nt, Artificial Sequence
  Synthetic
gaguccucaguucaugucugcc

SEQ ID NO: 270517 - RNA, 23 nt, Artificial Sequence
  Synthetic
cgaguccucaguucaugucugcc

SEQ ID NO: 270518 - RNA, 24 nt, Artificial Sequence
  Synthetic
acgaguccucaguucaugucugcc

SEQ ID NO: 270519 - RNA, 18 nt, Artificial Sequence
  Synthetic
gauauaaaccauucugcc

SEQ ID NO: 270520 - RNA, 19 nt, Artificial Sequence
  Synthetic
ugauauaaaccauucugcc

SEQ ID NO: 270521 - RNA, 20 nt, Artificial Sequence
  Synthetic
augauauaaaccauucugcc

SEQ ID NO: 270522 - RNA, 21 nt, Artificial Sequence
  Synthetic
uaugauauaaaccauucugcc

SEQ ID NO: 270523 - RNA, 22 nt, Artificial Sequence
  Synthetic
uuaugauauaaaccauucugcc

SEQ ID NO: 270524 - RNA, 23 nt, Artificial Sequence
  Synthetic
cuuaugauauaaaccauucugcc

SEQ ID NO: 270525 - RNA, 24 nt, Artificial Sequence
  Synthetic
ucuuaugauauaaaccauucugcc

SEQ ID NO: 270526 - RNA, 18 nt, Artificial Sequence
  Synthetic
uuugauuugcauucugcc

SEQ ID NO: 270527 - RNA, 19 nt, Artificial Sequence
  Synthetic
guuugauuugcauucugcc

SEQ ID NO: 270528 - RNA, 20 nt, Artificial Sequence
  Synthetic
uguuugauuugcauucugcc

SEQ ID NO: 270529 - RNA, 21 nt, Artificial Sequence
  Synthetic
auguuugauuugcauucugcc

SEQ ID NO: 270530 - RNA, 22 nt, Artificial Sequence
  Synthetic
gauguuugauuugcauucugcc

SEQ ID NO: 270531 - RNA, 23 nt, Artificial Sequence
  Synthetic
agauguuugauuugcauucugcc

SEQ ID NO: 270532 - RNA, 24 nt, Artificial Sequence
  Synthetic
aagauguuugauuugcauucugcc

SEQ ID NO: 270533 - RNA, 18 nt, Artificial Sequence
  Synthetic
aggcaagucacuucugcc

SEQ ID NO: 270534 - RNA, 19 nt, Artificial Sequence
  Synthetic
aaggcaagucacuucugcc

SEQ ID NO: 270535 - RNA, 20 nt, Artificial Sequence
  Synthetic
caaggcaagucacuucugcc

SEQ ID NO: 270536 - RNA, 21 nt, Artificial Sequence
  Synthetic
acaaggcaagucacuucugcc

SEQ ID NO: 270537 - RNA, 22 nt, Artificial Sequence
  Synthetic
gacaaggcaagucacuucugcc

SEQ ID NO: 270538 - RNA, 23 nt, Artificial Sequence
  Synthetic
agacaaggcaagucacuucugcc

SEQ ID NO: 270539 - RNA, 24 nt, Artificial Sequence
  Synthetic
gagacaaggcaagucacuucugcc

SEQ ID NO: 270540 - RNA, 18 nt, Artificial Sequence
  Synthetic
guucuugagccuucugcc

SEQ ID NO: 270541 - RNA, 19 nt, Artificial Sequence
  Synthetic
gguucuugagccuucugcc

SEQ ID NO: 270542 - RNA, 20 nt, Artificial Sequence
  Synthetic
ugguucuugagccuucugcc

SEQ ID NO: 270543 - RNA, 21 nt, Artificial Sequence
  Synthetic
augguucuugagccuucugcc

SEQ ID NO: 270544 - RNA, 22 nt, Artificial Sequence
  Synthetic
caugguucuugagccuucugcc

SEQ ID NO: 270545 - RNA, 23 nt, Artificial Sequence
  Synthetic
acaugguucuugagccuucugcc

SEQ ID NO: 270546 - RNA, 24 nt, Artificial Sequence
  Synthetic
aacaugguucuugagccuucugcc

SEQ ID NO: 270547 - RNA, 18 nt, Artificial Sequence
  Synthetic
aucuccagagcuucugcc

SEQ ID NO: 270548 - RNA, 19 nt, Artificial Sequence
  Synthetic
uaucuccagagcuucugcc

SEQ ID NO: 270549 - RNA, 20 nt, Artificial Sequence
  Synthetic
uuaucuccagagcuucugcc

SEQ ID NO: 270550 - RNA, 21 nt, Artificial Sequence
  Synthetic
uuuaucuccagagcuucugcc

SEQ ID NO: 270551 - RNA, 22 nt, Artificial Sequence
  Synthetic
cuuuaucuccagagcuucugcc

SEQ ID NO: 270552 - RNA, 23 nt, Artificial Sequence
  Synthetic
gcuuuaucuccagagcuucugcc

SEQ ID NO: 270553 - RNA, 24 nt, Artificial Sequence
  Synthetic
ugcuuuaucuccagagcuucugcc

SEQ ID NO: 270554 - RNA, 18 nt, Artificial Sequence
  Synthetic
uucauuauaguuucugcc

SEQ ID NO: 270555 - RNA, 19 nt, Artificial Sequence
  Synthetic
uuucauuauaguuucugcc

SEQ ID NO: 270556 - RNA, 20 nt, Artificial Sequence
  Synthetic
uuuucauuauaguuucugcc

SEQ ID NO: 270557 - RNA, 21 nt, Artificial Sequence
  Synthetic
auuuucauuauaguuucugcc

SEQ ID NO: 270558 - RNA, 22 nt, Artificial Sequence
  Synthetic
cauuuucauuauaguuucugcc

SEQ ID NO: 270559 - RNA, 23 nt, Artificial Sequence
  Synthetic
gcauuuucauuauaguuucugcc

SEQ ID NO: 270560 - RNA, 24 nt, Artificial Sequence
  Synthetic
ugcauuuucauuauaguuucugcc

SEQ ID NO: 270561 - RNA, 18 nt, Artificial Sequence
  Synthetic
gcuuguaggguuucugcc

SEQ ID NO: 270562 - RNA, 19 nt, Artificial Sequence
  Synthetic
ggcuuguaggguuucugcc

SEQ ID NO: 270563 - RNA, 20 nt, Artificial Sequence
  Synthetic
uggcuuguaggguuucugcc

SEQ ID NO: 270564 - RNA, 21 nt, Artificial Sequence
  Synthetic
cuggcuuguaggguuucugcc

SEQ ID NO: 270565 - RNA, 22 nt, Artificial Sequence
  Synthetic
ucuggcuuguaggguuucugcc

SEQ ID NO: 270566 - RNA, 23 nt, Artificial Sequence
  Synthetic
uucuggcuuguaggguuucugcc

SEQ ID NO: 270567 - RNA, 24 nt, Artificial Sequence
  Synthetic
cuucuggcuuguaggguuucugcc

SEQ ID NO: 270568 - RNA, 18 nt, Artificial Sequence
  Synthetic
cuguaaauuucaagugcc

SEQ ID NO: 270569 - RNA, 19 nt, Artificial Sequence
  Synthetic
ccuguaaauuucaagugcc

SEQ ID NO: 270570 - RNA, 20 nt, Artificial Sequence
  Synthetic
cccuguaaauuucaagugcc

SEQ ID NO: 270571 - RNA, 21 nt, Artificial Sequence
  Synthetic
ucccuguaaauuucaagugcc

SEQ ID NO: 270572 - RNA, 22 nt, Artificial Sequence
  Synthetic
uucccuguaaauuucaagugcc

SEQ ID NO: 270573 - RNA, 23 nt, Artificial Sequence
  Synthetic
auucccuguaaauuucaagugcc

SEQ ID NO: 270574 - RNA, 24 nt, Artificial Sequence
  Synthetic
aauucccuguaaauuucaagugcc

SEQ ID NO: 270575 - RNA, 18 nt, Artificial Sequence
  Synthetic
ucauccaggugaagugcc

SEQ ID NO: 270576 - RNA, 19 nt, Artificial Sequence
  Synthetic
gucauccaggugaagugcc

SEQ ID NO: 270577 - RNA, 20 nt, Artificial Sequence
  Synthetic
ugucauccaggugaagugcc

SEQ ID NO: 270578 - RNA, 21 nt, Artificial Sequence
  Synthetic
cugucauccaggugaagugcc

SEQ ID NO: 270579 - RNA, 22 nt, Artificial Sequence
  Synthetic
ucugucauccaggugaagugcc

SEQ ID NO: 270580 - RNA, 23 nt, Artificial Sequence
  Synthetic
cucugucauccaggugaagugcc

SEQ ID NO: 270581 - RNA, 24 nt, Artificial Sequence
  Synthetic
acucugucauccaggugaagugcc

SEQ ID NO: 270582 - RNA, 18 nt, Artificial Sequence
  Synthetic
gauggagagguaagugcc

SEQ ID NO: 270583 - RNA, 19 nt, Artificial Sequence
  Synthetic
ugauggagagguaagugcc

SEQ ID NO: 270584 - RNA, 20 nt, Artificial Sequence
  Synthetic
gugauggagagguaagugcc

SEQ ID NO: 270585 - RNA, 21 nt, Artificial Sequence
  Synthetic
ggugauggagagguaagugcc

SEQ ID NO: 270586 - RNA, 22 nt, Artificial Sequence
  Synthetic
uggugauggagagguaagugcc

SEQ ID NO: 270587 - RNA, 23 nt, Artificial Sequence
  Synthetic
uuggugauggagagguaagugcc

SEQ ID NO: 270588 - RNA, 24 nt, Artificial Sequence
  Synthetic
uuuggugauggagagguaagugcc

SEQ ID NO: 270589 - RNA, 18 nt, Artificial Sequence
  Synthetic
cgcuguauuuccagugcc

SEQ ID NO: 270590 - RNA, 19 nt, Artificial Sequence
  Synthetic
acgcuguauuuccagugcc

SEQ ID NO: 270591 - RNA, 20 nt, Artificial Sequence
  Synthetic
uacgcuguauuuccagugcc

SEQ ID NO: 270592 - RNA, 21 nt, Artificial Sequence
  Synthetic
uuacgcuguauuuccagugcc

SEQ ID NO: 270593 - RNA, 22 nt, Artificial Sequence
  Synthetic
cuuacgcuguauuuccagugcc

SEQ ID NO: 270594 - RNA, 23 nt, Artificial Sequence
  Synthetic
ucuuacgcuguauuuccagugcc

SEQ ID NO: 270595 - RNA, 24 nt, Artificial Sequence
  Synthetic
aucuuacgcuguauuuccagugcc

SEQ ID NO: 270596 - RNA, 18 nt, Artificial Sequence
  Synthetic
agcauauuuggcagugcc

SEQ ID NO: 270597 - RNA, 19 nt, Artificial Sequence
  Synthetic
cagcauauuuggcagugcc

SEQ ID NO: 270598 - RNA, 20 nt, Artificial Sequence
  Synthetic
ccagcauauuuggcagugcc

SEQ ID NO: 270599 - RNA, 21 nt, Artificial Sequence
  Synthetic
cccagcauauuuggcagugcc

SEQ ID NO: 270600 - RNA, 22 nt, Artificial Sequence
  Synthetic
ccccagcauauuuggcagugcc

SEQ ID NO: 270601 - RNA, 23 nt, Artificial Sequence
  Synthetic
cccccagcauauuuggcagugcc

SEQ ID NO: 270602 - RNA, 24 nt, Artificial Sequence
  Synthetic
ccccccagcauauuuggcagugcc

SEQ ID NO: 270603 - RNA, 18 nt, Artificial Sequence
  Synthetic
uuuucugugugcagugcc

SEQ ID NO: 270604 - RNA, 19 nt, Artificial Sequence
  Synthetic
uuuuucugugugcagugcc

SEQ ID NO: 270605 - RNA, 20 nt, Artificial Sequence
  Synthetic
auuuuucugugugcagugcc

SEQ ID NO: 270606 - RNA, 21 nt, Artificial Sequence
  Synthetic
cauuuuucugugugcagugcc

SEQ ID NO: 270607 - RNA, 22 nt, Artificial Sequence
  Synthetic
ccauuuuucugugugcagugcc

SEQ ID NO: 270608 - RNA, 23 nt, Artificial Sequence
  Synthetic
accauuuuucugugugcagugcc

SEQ ID NO: 270609 - RNA, 24 nt, Artificial Sequence
  Synthetic
uaccauuuuucugugugcagugcc

SEQ ID NO: 270610 - RNA, 18 nt, Artificial Sequence
  Synthetic
auaucaucaaauagugcc

SEQ ID NO: 270611 - RNA, 19 nt, Artificial Sequence
  Synthetic
uauaucaucaaauagugcc

SEQ ID NO: 270612 - RNA, 20 nt, Artificial Sequence
  Synthetic
uuauaucaucaaauagugcc

SEQ ID NO: 270613 - RNA, 21 nt, Artificial Sequence
  Synthetic
auuauaucaucaaauagugcc

SEQ ID NO: 270614 - RNA, 22 nt, Artificial Sequence
  Synthetic
aauuauaucaucaaauagugcc

SEQ ID NO: 270615 - RNA, 23 nt, Artificial Sequence
  Synthetic
gaauuauaucaucaaauagugcc

SEQ ID NO: 270616 - RNA, 24 nt, Artificial Sequence
  Synthetic
ggaauuauaucaucaaauagugcc

SEQ ID NO: 270617 - RNA, 18 nt, Artificial Sequence
  Synthetic
aaggguuaaacacgugcc

SEQ ID NO: 270618 - RNA, 19 nt, Artificial Sequence
  Synthetic
caaggguuaaacacgugcc

SEQ ID NO: 270619 - RNA, 20 nt, Artificial Sequence
  Synthetic
ccaaggguuaaacacgugcc

SEQ ID NO: 270620 - RNA, 21 nt, Artificial Sequence
  Synthetic
gccaaggguuaaacacgugcc

SEQ ID NO: 270621 - RNA, 22 nt, Artificial Sequence
  Synthetic
agccaaggguuaaacacgugcc

SEQ ID NO: 270622 - RNA, 23 nt, Artificial Sequence
  Synthetic
aagccaaggguuaaacacgugcc

SEQ ID NO: 270623 - RNA, 24 nt, Artificial Sequence
  Synthetic
uaagccaaggguuaaacacgugcc

SEQ ID NO: 270624 - RNA, 18 nt, Artificial Sequence
  Synthetic
aauguccuguauggugcc

SEQ ID NO: 270625 - RNA, 19 nt, Artificial Sequence
  Synthetic
caauguccuguauggugcc

SEQ ID NO: 270626 - RNA, 20 nt, Artificial Sequence
  Synthetic
gcaauguccuguauggugcc

SEQ ID NO: 270627 - RNA, 21 nt, Artificial Sequence
  Synthetic
agcaauguccuguauggugcc

SEQ ID NO: 270628 - RNA, 22 nt, Artificial Sequence
  Synthetic
cagcaauguccuguauggugcc

SEQ ID NO: 270629 - RNA, 23 nt, Artificial Sequence
  Synthetic
ucagcaauguccuguauggugcc

SEQ ID NO: 270630 - RNA, 24 nt, Artificial Sequence
  Synthetic
aucagcaauguccuguauggugcc

SEQ ID NO: 270631 - RNA, 18 nt, Artificial Sequence
  Synthetic
guucuccaaaaaugugcc

SEQ ID NO: 270632 - RNA, 19 nt, Artificial Sequence
  Synthetic
aguucuccaaaaaugugcc

SEQ ID NO: 270633 - RNA, 20 nt, Artificial Sequence
  Synthetic
caguucuccaaaaaugugcc

SEQ ID NO: 270634 - RNA, 21 nt, Artificial Sequence
  Synthetic
ccaguucuccaaaaaugugcc

SEQ ID NO: 270635 - RNA, 22 nt, Artificial Sequence
  Synthetic
uccaguucuccaaaaaugugcc

SEQ ID NO: 270636 - RNA, 23 nt, Artificial Sequence
  Synthetic
guccaguucuccaaaaaugugcc

SEQ ID NO: 270637 - RNA, 24 nt, Artificial Sequence
  Synthetic
gguccaguucuccaaaaaugugcc

SEQ ID NO: 270638 - RNA, 18 nt, Artificial Sequence
  Synthetic
ccaugaacuuuaugugcc

SEQ ID NO: 270639 - RNA, 19 nt, Artificial Sequence
  Synthetic
uccaugaacuuuaugugcc

SEQ ID NO: 270640 - RNA, 20 nt, Artificial Sequence
  Synthetic
uuccaugaacuuuaugugcc

SEQ ID NO: 270641 - RNA, 21 nt, Artificial Sequence
  Synthetic
cuuccaugaacuuuaugugcc

SEQ ID NO: 270642 - RNA, 22 nt, Artificial Sequence
  Synthetic
ccuuccaugaacuuuaugugcc

SEQ ID NO: 270643 - RNA, 23 nt, Artificial Sequence
  Synthetic
gccuuccaugaacuuuaugugcc

SEQ ID NO: 270644 - RNA, 24 nt, Artificial Sequence
  Synthetic
ggccuuccaugaacuuuaugugcc

SEQ ID NO: 270645 - RNA, 18 nt, Artificial Sequence
  Synthetic
gccgugagggacugugcc

SEQ ID NO: 270646 - RNA, 19 nt, Artificial Sequence
  Synthetic
agccgugagggacugugcc

SEQ ID NO: 270647 - RNA, 20 nt, Artificial Sequence
  Synthetic
aagccgugagggacugugcc

SEQ ID NO: 270648 - RNA, 21 nt, Artificial Sequence
  Synthetic
gaagccgugagggacugugcc

SEQ ID NO: 270649 - RNA, 22 nt, Artificial Sequence
  Synthetic
agaagccgugagggacugugcc

SEQ ID NO: 270650 - RNA, 23 nt, Artificial Sequence
  Synthetic
cagaagccgugagggacugugcc

SEQ ID NO: 270651 - RNA, 24 nt, Artificial Sequence
  Synthetic
acagaagccgugagggacugugcc

SEQ ID NO: 270652 - RNA, 18 nt, Artificial Sequence
  Synthetic
uaaacagaaaagugugcc

SEQ ID NO: 270653 - RNA, 19 nt, Artificial Sequence
  Synthetic
uuaaacagaaaagugugcc

SEQ ID NO: 270654 - RNA, 20 nt, Artificial Sequence
  Synthetic
auuaaacagaaaagugugcc

SEQ ID NO: 270655 - RNA, 21 nt, Artificial Sequence
  Synthetic
aauuaaacagaaaagugugcc

SEQ ID NO: 270656 - RNA, 22 nt, Artificial Sequence
  Synthetic
uaauuaaacagaaaagugugcc

SEQ ID NO: 270657 - RNA, 23 nt, Artificial Sequence
  Synthetic
guaauuaaacagaaaagugugcc

SEQ ID NO: 270658 - RNA, 24 nt, Artificial Sequence
  Synthetic
uguaauuaaacagaaaagugugcc

SEQ ID NO: 270659 - RNA, 18 nt, Artificial Sequence
  Synthetic
cugaaccuuuguugugcc

SEQ ID NO: 270660 - RNA, 19 nt, Artificial Sequence
  Synthetic
gcugaaccuuuguugugcc

SEQ ID NO: 270661 - RNA, 20 nt, Artificial Sequence
  Synthetic
ugcugaaccuuuguugugcc

SEQ ID NO: 270662 - RNA, 21 nt, Artificial Sequence
  Synthetic
uugcugaaccuuuguugugcc

SEQ ID NO: 270663 - RNA, 22 nt, Artificial Sequence
  Synthetic
cuugcugaaccuuuguugugcc

SEQ ID NO: 270664 - RNA, 23 nt, Artificial Sequence
  Synthetic
ucuugcugaaccuuuguugugcc

SEQ ID NO: 270665 - RNA, 24 nt, Artificial Sequence
  Synthetic
uucuugcugaaccuuuguugugcc

SEQ ID NO: 270666 - RNA, 18 nt, Artificial Sequence
  Synthetic
auaaucgaguuuugugcc

SEQ ID NO: 270667 - RNA, 19 nt, Artificial Sequence
  Synthetic
aauaaucgaguuuugugcc

SEQ ID NO: 270668 - RNA, 20 nt, Artificial Sequence
  Synthetic
aaauaaucgaguuuugugcc

SEQ ID NO: 270669 - RNA, 21 nt, Artificial Sequence
  Synthetic
aaaauaaucgaguuuugugcc

SEQ ID NO: 270670 - RNA, 22 nt, Artificial Sequence
  Synthetic
aaaaauaaucgaguuuugugcc

SEQ ID NO: 270671 - RNA, 23 nt, Artificial Sequence
  Synthetic
uaaaaauaaucgaguuuugugcc

SEQ ID NO: 270672 - RNA, 24 nt, Artificial Sequence
  Synthetic
guaaaaauaaucgaguuuugugcc

SEQ ID NO: 270673 - RNA, 18 nt, Artificial Sequence
  Synthetic
guauucuugaaaauugcc

SEQ ID NO: 270674 - RNA, 19 nt, Artificial Sequence
  Synthetic
uguauucuugaaaauugcc

SEQ ID NO: 270675 - RNA, 20 nt, Artificial Sequence
  Synthetic
uuguauucuugaaaauugcc

SEQ ID NO: 270676 - RNA, 21 nt, Artificial Sequence
  Synthetic
auuguauucuugaaaauugcc

SEQ ID NO: 270677 - RNA, 22 nt, Artificial Sequence
  Synthetic
cauuguauucuugaaaauugcc

SEQ ID NO: 270678 - RNA, 23 nt, Artificial Sequence
  Synthetic
gcauuguauucuugaaaauugcc

SEQ ID NO: 270679 - RNA, 24 nt, Artificial Sequence
  Synthetic
ugcauuguauucuugaaaauugcc

SEQ ID NO: 270680 - RNA, 18 nt, Artificial Sequence
  Synthetic
aguaucuauuaaauugcc

SEQ ID NO: 270681 - RNA, 19 nt, Artificial Sequence
  Synthetic
gaguaucuauuaaauugcc

SEQ ID NO: 270682 - RNA, 20 nt, Artificial Sequence
  Synthetic
ugaguaucuauuaaauugcc

SEQ ID NO: 270683 - RNA, 21 nt, Artificial Sequence
  Synthetic
uugaguaucuauuaaauugcc

SEQ ID NO: 270684 - RNA, 22 nt, Artificial Sequence
  Synthetic
auugaguaucuauuaaauugcc

SEQ ID NO: 270685 - RNA, 23 nt, Artificial Sequence
  Synthetic
uauugaguaucuauuaaauugcc

SEQ ID NO: 270686 - RNA, 24 nt, Artificial Sequence
  Synthetic
uuauugaguaucuauuaaauugcc

SEQ ID NO: 270687 - RNA, 18 nt, Artificial Sequence
  Synthetic
auaugcauagcaauugcc

SEQ ID NO: 270688 - RNA, 19 nt, Artificial Sequence
  Synthetic
aauaugcauagcaauugcc

SEQ ID NO: 270689 - RNA, 20 nt, Artificial Sequence
  Synthetic
uaauaugcauagcaauugcc

SEQ ID NO: 270690 - RNA, 21 nt, Artificial Sequence
  Synthetic
uuaauaugcauagcaauugcc

SEQ ID NO: 270691 - RNA, 22 nt, Artificial Sequence
  Synthetic
cuuaauaugcauagcaauugcc

SEQ ID NO: 270692 - RNA, 23 nt, Artificial Sequence
  Synthetic
ucuuaauaugcauagcaauugcc

SEQ ID NO: 270693 - RNA, 24 nt, Artificial Sequence
  Synthetic
cucuuaauaugcauagcaauugcc

SEQ ID NO: 270694 - RNA, 18 nt, Artificial Sequence
  Synthetic
aaguuuacaagaauugcc

SEQ ID NO: 270695 - RNA, 19 nt, Artificial Sequence
  Synthetic
aaaguuuacaagaauugcc

SEQ ID NO: 270696 - RNA, 20 nt, Artificial Sequence
  Synthetic
gaaaguuuacaagaauugcc

SEQ ID NO: 270697 - RNA, 21 nt, Artificial Sequence
  Synthetic
ugaaaguuuacaagaauugcc

SEQ ID NO: 270698 - RNA, 22 nt, Artificial Sequence
  Synthetic
augaaaguuuacaagaauugcc

SEQ ID NO: 270699 - RNA, 23 nt, Artificial Sequence
  Synthetic
uaugaaaguuuacaagaauugcc

SEQ ID NO: 270700 - RNA, 24 nt, Artificial Sequence
  Synthetic
auaugaaaguuuacaagaauugcc

SEQ ID NO: 270701 - RNA, 18 nt, Artificial Sequence
  Synthetic
ccacagauguucauugcc

SEQ ID NO: 270702 - RNA, 19 nt, Artificial Sequence
  Synthetic
accacagauguucauugcc

SEQ ID NO: 270703 - RNA, 20 nt, Artificial Sequence
  Synthetic
gaccacagauguucauugcc

SEQ ID NO: 270704 - RNA, 21 nt, Artificial Sequence
  Synthetic
agaccacagauguucauugcc

SEQ ID NO: 270705 - RNA, 22 nt, Artificial Sequence
  Synthetic
aagaccacagauguucauugcc

SEQ ID NO: 270706 - RNA, 23 nt, Artificial Sequence
  Synthetic
aaagaccacagauguucauugcc

SEQ ID NO: 270707 - RNA, 24 nt, Artificial Sequence
  Synthetic
caaagaccacagauguucauugcc

SEQ ID NO: 270708 - RNA, 18 nt, Artificial Sequence
  Synthetic
ugaggugggaggauugcc

SEQ ID NO: 270709 - RNA, 19 nt, Artificial Sequence
  Synthetic
cugaggugggaggauugcc

SEQ ID NO: 270710 - RNA, 20 nt, Artificial Sequence
  Synthetic
gcugaggugggaggauugcc

SEQ ID NO: 270711 - RNA, 21 nt, Artificial Sequence
  Synthetic
ggcugaggugggaggauugcc

SEQ ID NO: 270712 - RNA, 22 nt, Artificial Sequence
  Synthetic
aggcugaggugggaggauugcc

SEQ ID NO: 270713 - RNA, 23 nt, Artificial Sequence
  Synthetic
gaggcugaggugggaggauugcc

SEQ ID NO: 270714 - RNA, 24 nt, Artificial Sequence
  Synthetic
ggaggcugaggugggaggauugcc

SEQ ID NO: 270715 - RNA, 18 nt, Artificial Sequence
  Synthetic
gcaaauaauuauauugcc

SEQ ID NO: 270716 - RNA, 19 nt, Artificial Sequence
  Synthetic
ugcaaauaauuauauugcc

SEQ ID NO: 270717 - RNA, 20 nt, Artificial Sequence
  Synthetic
augcaaauaauuauauugcc

SEQ ID NO: 270718 - RNA, 21 nt, Artificial Sequence
  Synthetic
uaugcaaauaauuauauugcc

SEQ ID NO: 270719 - RNA, 22 nt, Artificial Sequence
  Synthetic
cuaugcaaauaauuauauugcc

SEQ ID NO: 270720 - RNA, 23 nt, Artificial Sequence
  Synthetic
ccuaugcaaauaauuauauugcc

SEQ ID NO: 270721 - RNA, 24 nt, Artificial Sequence
  Synthetic
gccuaugcaaauaauuauauugcc

SEQ ID NO: 270722 - RNA, 18 nt, Artificial Sequence
  Synthetic
guauuaaaugcuauugcc

SEQ ID NO: 270723 - RNA, 19 nt, Artificial Sequence
  Synthetic
aguauuaaaugcuauugcc

SEQ ID NO: 270724 - RNA, 20 nt, Artificial Sequence
  Synthetic
gaguauuaaaugcuauugcc

SEQ ID NO: 270725 - RNA, 21 nt, Artificial Sequence
  Synthetic
ugaguauuaaaugcuauugcc

SEQ ID NO: 270726 - RNA, 22 nt, Artificial Sequence
  Synthetic
augaguauuaaaugcuauugcc

SEQ ID NO: 270727 - RNA, 23 nt, Artificial Sequence
  Synthetic
caugaguauuaaaugcuauugcc

SEQ ID NO: 270728 - RNA, 24 nt, Artificial Sequence
  Synthetic
gcaugaguauuaaaugcuauugcc

SEQ ID NO: 270729 - RNA, 18 nt, Artificial Sequence
  Synthetic
gucuuccuuuuuauugcc

SEQ ID NO: 270730 - RNA, 19 nt, Artificial Sequence
  Synthetic
ggucuuccuuuuuauugcc

SEQ ID NO: 270731 - RNA, 20 nt, Artificial Sequence
  Synthetic
uggucuuccuuuuuauugcc

SEQ ID NO: 270732 - RNA, 21 nt, Artificial Sequence
  Synthetic
uuggucuuccuuuuuauugcc

SEQ ID NO: 270733 - RNA, 22 nt, Artificial Sequence
  Synthetic
uuuggucuuccuuuuuauugcc

SEQ ID NO: 270734 - RNA, 23 nt, Artificial Sequence
  Synthetic
uuuuggucuuccuuuuuauugcc

SEQ ID NO: 270735 - RNA, 24 nt, Artificial Sequence
  Synthetic
auuuuggucuuccuuuuuauugcc

SEQ ID NO: 270736 - RNA, 18 nt, Artificial Sequence
  Synthetic
auuugaaacaaacuugcc

SEQ ID NO: 270737 - RNA, 19 nt, Artificial Sequence
  Synthetic
cauuugaaacaaacuugcc

SEQ ID NO: 270738 - RNA, 20 nt, Artificial Sequence
  Synthetic
gcauuugaaacaaacuugcc

SEQ ID NO: 270739 - RNA, 21 nt, Artificial Sequence
  Synthetic
ugcauuugaaacaaacuugcc

SEQ ID NO: 270740 - RNA, 22 nt, Artificial Sequence
  Synthetic
uugcauuugaaacaaacuugcc

SEQ ID NO: 270741 - RNA, 23 nt, Artificial Sequence
  Synthetic
cuugcauuugaaacaaacuugcc

SEQ ID NO: 270742 - RNA, 24 nt, Artificial Sequence
  Synthetic
ucuugcauuugaaacaaacuugcc

SEQ ID NO: 270743 - RNA, 18 nt, Artificial Sequence
  Synthetic
aaaucauccugacuugcc

SEQ ID NO: 270744 - RNA, 19 nt, Artificial Sequence
  Synthetic
aaaaucauccugacuugcc

SEQ ID NO: 270745 - RNA, 20 nt, Artificial Sequence
  Synthetic
aaaaaucauccugacuugcc

SEQ ID NO: 270746 - RNA, 21 nt, Artificial Sequence
  Synthetic
uaaaaaucauccugacuugcc

SEQ ID NO: 270747 - RNA, 22 nt, Artificial Sequence
  Synthetic
uuaaaaaucauccugacuugcc

SEQ ID NO: 270748 - RNA, 23 nt, Artificial Sequence
  Synthetic
guuaaaaaucauccugacuugcc

SEQ ID NO: 270749 - RNA, 24 nt, Artificial Sequence
  Synthetic
aguuaaaaaucauccugacuugcc

SEQ ID NO: 270750 - RNA, 18 nt, Artificial Sequence
  Synthetic
gaaggucucugacuugcc

SEQ ID NO: 270751 - RNA, 19 nt, Artificial Sequence
  Synthetic
ugaaggucucugacuugcc

SEQ ID NO: 270752 - RNA, 20 nt, Artificial Sequence
  Synthetic
augaaggucucugacuugcc

SEQ ID NO: 270753 - RNA, 21 nt, Artificial Sequence
  Synthetic
aaugaaggucucugacuugcc

SEQ ID NO: 270754 - RNA, 22 nt, Artificial Sequence
  Synthetic
caaugaaggucucugacuugcc

SEQ ID NO: 270755 - RNA, 23 nt, Artificial Sequence
  Synthetic
gcaaugaaggucucugacuugcc

SEQ ID NO: 270756 - RNA, 24 nt, Artificial Sequence
  Synthetic
cgcaaugaaggucucugacuugcc

SEQ ID NO: 270757 - RNA, 18 nt, Artificial Sequence
  Synthetic
ugcgggagaauacuugcc

SEQ ID NO: 270758 - RNA, 19 nt, Artificial Sequence
  Synthetic
uugcgggagaauacuugcc

SEQ ID NO: 270759 - RNA, 20 nt, Artificial Sequence
  Synthetic
cuugcgggagaauacuugcc

SEQ ID NO: 270760 - RNA, 21 nt, Artificial Sequence
  Synthetic
ccuugcgggagaauacuugcc

SEQ ID NO: 270761 - RNA, 22 nt, Artificial Sequence
  Synthetic
uccuugcgggagaauacuugcc

SEQ ID NO: 270762 - RNA, 23 nt, Artificial Sequence
  Synthetic
cuccuugcgggagaauacuugcc

SEQ ID NO: 270763 - RNA, 24 nt, Artificial Sequence
  Synthetic
acuccuugcgggagaauacuugcc

SEQ ID NO: 270764 - RNA, 18 nt, Artificial Sequence
  Synthetic
gaaauugccuuacuugcc

SEQ ID NO: 270765 - RNA, 19 nt, Artificial Sequence
  Synthetic
cgaaauugccuuacuugcc

SEQ ID NO: 270766 - RNA, 20 nt, Artificial Sequence
  Synthetic
acgaaauugccuuacuugcc

SEQ ID NO: 270767 - RNA, 21 nt, Artificial Sequence
  Synthetic
cacgaaauugccuuacuugcc

SEQ ID NO: 270768 - RNA, 22 nt, Artificial Sequence
  Synthetic
acacgaaauugccuuacuugcc

SEQ ID NO: 270769 - RNA, 23 nt, Artificial Sequence
  Synthetic
aacacgaaauugccuuacuugcc

SEQ ID NO: 270770 - RNA, 24 nt, Artificial Sequence
  Synthetic
uaacacgaaauugccuuacuugcc

SEQ ID NO: 270771 - RNA, 18 nt, Artificial Sequence
  Synthetic
cucauuugaaagcuugcc

SEQ ID NO: 270772 - RNA, 19 nt, Artificial Sequence
  Synthetic
ucucauuugaaagcuugcc

SEQ ID NO: 270773 - RNA, 20 nt, Artificial Sequence
  Synthetic
gucucauuugaaagcuugcc

SEQ ID NO: 270774 - RNA, 21 nt, Artificial Sequence
  Synthetic
ggucucauuugaaagcuugcc

SEQ ID NO: 270775 - RNA, 22 nt, Artificial Sequence
  Synthetic
gggucucauuugaaagcuugcc

SEQ ID NO: 270776 - RNA, 23 nt, Artificial Sequence
  Synthetic
agggucucauuugaaagcuugcc

SEQ ID NO: 270777 - RNA, 24 nt, Artificial Sequence
  Synthetic
uagggucucauuugaaagcuugcc

SEQ ID NO: 270778 - RNA, 18 nt, Artificial Sequence
  Synthetic
acaauggugaggcuugcc

SEQ ID NO: 270779 - RNA, 19 nt, Artificial Sequence
  Synthetic
cacaauggugaggcuugcc

SEQ ID NO: 270780 - RNA, 20 nt, Artificial Sequence
  Synthetic
ccacaauggugaggcuugcc

SEQ ID NO: 270781 - RNA, 21 nt, Artificial Sequence
  Synthetic
cccacaauggugaggcuugcc

SEQ ID NO: 270782 - RNA, 22 nt, Artificial Sequence
  Synthetic
gcccacaauggugaggcuugcc

SEQ ID NO: 270783 - RNA, 23 nt, Artificial Sequence
  Synthetic
ggcccacaauggugaggcuugcc

SEQ ID NO: 270784 - RNA, 24 nt, Artificial Sequence
  Synthetic
uggcccacaauggugaggcuugcc

SEQ ID NO: 270785 - RNA, 18 nt, Artificial Sequence
  Synthetic
auacuucaggugcuugcc

SEQ ID NO: 270786 - RNA, 19 nt, Artificial Sequence
  Synthetic
uauacuucaggugcuugcc

SEQ ID NO: 270787 - RNA, 20 nt, Artificial Sequence
  Synthetic
cuauacuucaggugcuugcc

SEQ ID NO: 270788 - RNA, 21 nt, Artificial Sequence
  Synthetic
ucuauacuucaggugcuugcc

SEQ ID NO: 270789 - RNA, 22 nt, Artificial Sequence
  Synthetic
cucuauacuucaggugcuugcc

SEQ ID NO: 270790 - RNA, 23 nt, Artificial Sequence
  Synthetic
acucuauacuucaggugcuugcc

SEQ ID NO: 270791 - RNA, 24 nt, Artificial Sequence
  Synthetic
aacucuauacuucaggugcuugcc

SEQ ID NO: 270792 - RNA, 18 nt, Artificial Sequence
  Synthetic
cgauucuucagucuugcc

SEQ ID NO: 270793 - RNA, 19 nt, Artificial Sequence
  Synthetic
ucgauucuucagucuugcc

SEQ ID NO: 270794 - RNA, 20 nt, Artificial Sequence
  Synthetic
uucgauucuucagucuugcc

SEQ ID NO: 270795 - RNA, 21 nt, Artificial Sequence
  Synthetic
cuucgauucuucagucuugcc

SEQ ID NO: 270796 - RNA, 22 nt, Artificial Sequence
  Synthetic
ucuucgauucuucagucuugcc

SEQ ID NO: 270797 - RNA, 23 nt, Artificial Sequence
  Synthetic
gucuucgauucuucagucuugcc

SEQ ID NO: 270798 - RNA, 24 nt, Artificial Sequence
  Synthetic
agucuucgauucuucagucuugcc

SEQ ID NO: 270799 - RNA, 18 nt, Artificial Sequence
  Synthetic
acaguuauuauucuugcc

SEQ ID NO: 270800 - RNA, 19 nt, Artificial Sequence
  Synthetic
uacaguuauuauucuugcc

SEQ ID NO: 270801 - RNA, 20 nt, Artificial Sequence
  Synthetic
uuacaguuauuauucuugcc

SEQ ID NO: 270802 - RNA, 21 nt, Artificial Sequence
  Synthetic
auuacaguuauuauucuugcc

SEQ ID NO: 270803 - RNA, 22 nt, Artificial Sequence
  Synthetic
aauuacaguuauuauucuugcc

SEQ ID NO: 270804 - RNA, 23 nt, Artificial Sequence
  Synthetic
gaauuacaguuauuauucuugcc

SEQ ID NO: 270805 - RNA, 24 nt, Artificial Sequence
  Synthetic
ugaauuacaguuauuauucuugcc

SEQ ID NO: 270806 - RNA, 18 nt, Artificial Sequence
  Synthetic
ccuccuuggccaguugcc

SEQ ID NO: 270807 - RNA, 19 nt, Artificial Sequence
  Synthetic
gccuccuuggccaguugcc

SEQ ID NO: 270808 - RNA, 20 nt, Artificial Sequence
  Synthetic
ugccuccuuggccaguugcc

SEQ ID NO: 270809 - RNA, 21 nt, Artificial Sequence
  Synthetic
gugccuccuuggccaguugcc

SEQ ID NO: 270810 - RNA, 22 nt, Artificial Sequence
  Synthetic
ggugccuccuuggccaguugcc

SEQ ID NO: 270811 - RNA, 23 nt, Artificial Sequence
  Synthetic
gggugccuccuuggccaguugcc

SEQ ID NO: 270812 - RNA, 24 nt, Artificial Sequence
  Synthetic
ggggugccuccuuggccaguugcc

SEQ ID NO: 270813 - RNA, 18 nt, Artificial Sequence
  Synthetic
uuaaaucuaagaguugcc

SEQ ID NO: 270814 - RNA, 19 nt, Artificial Sequence
  Synthetic
auuaaaucuaagaguugcc

SEQ ID NO: 270815 - RNA, 20 nt, Artificial Sequence
  Synthetic
aauuaaaucuaagaguugcc

SEQ ID NO: 270816 - RNA, 21 nt, Artificial Sequence
  Synthetic
uaauuaaaucuaagaguugcc

SEQ ID NO: 270817 - RNA, 22 nt, Artificial Sequence
  Synthetic
guaauuaaaucuaagaguugcc

SEQ ID NO: 270818 - RNA, 23 nt, Artificial Sequence
  Synthetic
aguaauuaaaucuaagaguugcc

SEQ ID NO: 270819 - RNA, 24 nt, Artificial Sequence
  Synthetic
uaguaauuaaaucuaagaguugcc

SEQ ID NO: 270820 - RNA, 18 nt, Artificial Sequence
  Synthetic
aauaguugcaugguugcc

SEQ ID NO: 270821 - RNA, 19 nt, Artificial Sequence
  Synthetic
aaauaguugcaugguugcc

SEQ ID NO: 270822 - RNA, 20 nt, Artificial Sequence
  Synthetic
caaauaguugcaugguugcc

SEQ ID NO: 270823 - RNA, 21 nt, Artificial Sequence
  Synthetic
acaaauaguugcaugguugcc

SEQ ID NO: 270824 - RNA, 22 nt, Artificial Sequence
  Synthetic
gacaaauaguugcaugguugcc

SEQ ID NO: 270825 - RNA, 23 nt, Artificial Sequence
  Synthetic
agacaaauaguugcaugguugcc

SEQ ID NO: 270826 - RNA, 24 nt, Artificial Sequence
  Synthetic
uagacaaauaguugcaugguugcc

SEQ ID NO: 270827 - RNA, 18 nt, Artificial Sequence
  Synthetic
ucuguuuccaauguugcc

SEQ ID NO: 270828 - RNA, 19 nt, Artificial Sequence
  Synthetic
cucuguuuccaauguugcc

SEQ ID NO: 270829 - RNA, 20 nt, Artificial Sequence
  Synthetic
acucuguuuccaauguugcc

SEQ ID NO: 270830 - RNA, 21 nt, Artificial Sequence
  Synthetic
gacucuguuuccaauguugcc

SEQ ID NO: 270831 - RNA, 22 nt, Artificial Sequence
  Synthetic
ugacucuguuuccaauguugcc

SEQ ID NO: 270832 - RNA, 23 nt, Artificial Sequence
  Synthetic
augacucuguuuccaauguugcc

SEQ ID NO: 270833 - RNA, 24 nt, Artificial Sequence
  Synthetic
gaugacucuguuuccaauguugcc

SEQ ID NO: 270834 - RNA, 18 nt, Artificial Sequence
  Synthetic
aaccauggaacuguugcc

SEQ ID NO: 270835 - RNA, 19 nt, Artificial Sequence
  Synthetic
gaaccauggaacuguugcc

SEQ ID NO: 270836 - RNA, 20 nt, Artificial Sequence
  Synthetic
ggaaccauggaacuguugcc

SEQ ID NO: 270837 - RNA, 21 nt, Artificial Sequence
  Synthetic
aggaaccauggaacuguugcc

SEQ ID NO: 270838 - RNA, 22 nt, Artificial Sequence
  Synthetic
caggaaccauggaacuguugcc

SEQ ID NO: 270839 - RNA, 23 nt, Artificial Sequence
  Synthetic
acaggaaccauggaacuguugcc

SEQ ID NO: 270840 - RNA, 24 nt, Artificial Sequence
  Synthetic
uacaggaaccauggaacuguugcc

SEQ ID NO: 270841 - RNA, 18 nt, Artificial Sequence
  Synthetic
gaaggacacucuguugcc

SEQ ID NO: 270842 - RNA, 19 nt, Artificial Sequence
  Synthetic
agaaggacacucuguugcc

SEQ ID NO: 270843 - RNA, 20 nt, Artificial Sequence
  Synthetic
uagaaggacacucuguugcc

SEQ ID NO: 270844 - RNA, 21 nt, Artificial Sequence
  Synthetic
uuagaaggacacucuguugcc

SEQ ID NO: 270845 - RNA, 22 nt, Artificial Sequence
  Synthetic
uuuagaaggacacucuguugcc

SEQ ID NO: 270846 - RNA, 23 nt, Artificial Sequence
  Synthetic
guuuagaaggacacucuguugcc

SEQ ID NO: 270847 - RNA, 24 nt, Artificial Sequence
  Synthetic
gguuuagaaggacacucuguugcc

SEQ ID NO: 270848 - RNA, 18 nt, Artificial Sequence
  Synthetic
uuguaaguuaguguugcc

SEQ ID NO: 270849 - RNA, 19 nt, Artificial Sequence
  Synthetic
auuguaaguuaguguugcc

SEQ ID NO: 270850 - RNA, 20 nt, Artificial Sequence
  Synthetic
aauuguaaguuaguguugcc

SEQ ID NO: 270851 - RNA, 21 nt, Artificial Sequence
  Synthetic
uaauuguaaguuaguguugcc

SEQ ID NO: 270852 - RNA, 22 nt, Artificial Sequence
  Synthetic
uuaauuguaaguuaguguugcc

SEQ ID NO: 270853 - RNA, 23 nt, Artificial Sequence
  Synthetic
auuaauuguaaguuaguguugcc

SEQ ID NO: 270854 - RNA, 24 nt, Artificial Sequence
  Synthetic
aauuaauuguaaguuaguguugcc

SEQ ID NO: 270855 - RNA, 18 nt, Artificial Sequence
  Synthetic
cuaacauugcguguugcc

SEQ ID NO: 270856 - RNA, 19 nt, Artificial Sequence
  Synthetic
ucuaacauugcguguugcc

SEQ ID NO: 270857 - RNA, 20 nt, Artificial Sequence
  Synthetic
uucuaacauugcguguugcc

SEQ ID NO: 270858 - RNA, 21 nt, Artificial Sequence
  Synthetic
uuucuaacauugcguguugcc

SEQ ID NO: 270859 - RNA, 22 nt, Artificial Sequence
  Synthetic
guuucuaacauugcguguugcc

SEQ ID NO: 270860 - RNA, 23 nt, Artificial Sequence
  Synthetic
gguuucuaacauugcguguugcc

SEQ ID NO: 270861 - RNA, 24 nt, Artificial Sequence
  Synthetic
agguuucuaacauugcguguugcc

SEQ ID NO: 270862 - RNA, 18 nt, Artificial Sequence
  Synthetic
acaucuuauauuguugcc

SEQ ID NO: 270863 - RNA, 19 nt, Artificial Sequence
  Synthetic
uacaucuuauauuguugcc

SEQ ID NO: 270864 - RNA, 20 nt, Artificial Sequence
  Synthetic
cuacaucuuauauuguugcc

SEQ ID NO: 270865 - RNA, 21 nt, Artificial Sequence
  Synthetic
gcuacaucuuauauuguugcc

SEQ ID NO: 270866 - RNA, 22 nt, Artificial Sequence
  Synthetic
ugcuacaucuuauauuguugcc

SEQ ID NO: 270867 - RNA, 23 nt, Artificial Sequence
  Synthetic
augcuacaucuuauauuguugcc

SEQ ID NO: 270868 - RNA, 24 nt, Artificial Sequence
  Synthetic
uaugcuacaucuuauauuguugcc

SEQ ID NO: 270869 - RNA, 18 nt, Artificial Sequence
  Synthetic
uuaaggacagaauuugcc

SEQ ID NO: 270870 - RNA, 19 nt, Artificial Sequence
  Synthetic
cuuaaggacagaauuugcc

SEQ ID NO: 270871 - RNA, 20 nt, Artificial Sequence
  Synthetic
ucuuaaggacagaauuugcc

SEQ ID NO: 270872 - RNA, 21 nt, Artificial Sequence
  Synthetic
cucuuaaggacagaauuugcc

SEQ ID NO: 270873 - RNA, 22 nt, Artificial Sequence
  Synthetic
ucucuuaaggacagaauuugcc

SEQ ID NO: 270874 - RNA, 23 nt, Artificial Sequence
  Synthetic
uucucuuaaggacagaauuugcc

SEQ ID NO: 270875 - RNA, 24 nt, Artificial Sequence
  Synthetic
uuucucuuaaggacagaauuugcc

SEQ ID NO: 270876 - RNA, 18 nt, Artificial Sequence
  Synthetic
gacuuugaaacauuugcc

SEQ ID NO: 270877 - RNA, 19 nt, Artificial Sequence
  Synthetic
ugacuuugaaacauuugcc

SEQ ID NO: 270878 - RNA, 20 nt, Artificial Sequence
  Synthetic
cugacuuugaaacauuugcc

SEQ ID NO: 270879 - RNA, 21 nt, Artificial Sequence
  Synthetic
acugacuuugaaacauuugcc

SEQ ID NO: 270880 - RNA, 22 nt, Artificial Sequence
  Synthetic
aacugacuuugaaacauuugcc

SEQ ID NO: 270881 - RNA, 23 nt, Artificial Sequence
  Synthetic
uaacugacuuugaaacauuugcc

SEQ ID NO: 270882 - RNA, 24 nt, Artificial Sequence
  Synthetic
guaacugacuuugaaacauuugcc

SEQ ID NO: 270883 - RNA, 18 nt, Artificial Sequence
  Synthetic
ucauagucuugauuugcc

SEQ ID NO: 270884 - RNA, 19 nt, Artificial Sequence
  Synthetic
aucauagucuugauuugcc

SEQ ID NO: 270885 - RNA, 20 nt, Artificial Sequence
  Synthetic
gaucauagucuugauuugcc

SEQ ID NO: 270886 - RNA, 21 nt, Artificial Sequence
  Synthetic
ugaucauagucuugauuugcc

SEQ ID NO: 270887 - RNA, 22 nt, Artificial Sequence
  Synthetic
augaucauagucuugauuugcc

SEQ ID NO: 270888 - RNA, 23 nt, Artificial Sequence
  Synthetic
gaugaucauagucuugauuugcc

SEQ ID NO: 270889 - RNA, 24 nt, Artificial Sequence
  Synthetic
ggaugaucauagucuugauuugcc

SEQ ID NO: 270890 - RNA, 18 nt, Artificial Sequence
  Synthetic
uaacacuaaauauuugcc

SEQ ID NO: 270891 - RNA, 19 nt, Artificial Sequence
  Synthetic
guaacacuaaauauuugcc

SEQ ID NO: 270892 - RNA, 20 nt, Artificial Sequence
  Synthetic
uguaacacuaaauauuugcc

SEQ ID NO: 270893 - RNA, 21 nt, Artificial Sequence
  Synthetic
cuguaacacuaaauauuugcc

SEQ ID NO: 270894 - RNA, 22 nt, Artificial Sequence
  Synthetic
ucuguaacacuaaauauuugcc

SEQ ID NO: 270895 - RNA, 23 nt, Artificial Sequence
  Synthetic
aucuguaacacuaaauauuugcc

SEQ ID NO: 270896 - RNA, 24 nt, Artificial Sequence
  Synthetic
gaucuguaacacuaaauauuugcc

SEQ ID NO: 270897 - RNA, 18 nt, Artificial Sequence
  Synthetic
gugugucuacuauuugcc

SEQ ID NO: 270898 - RNA, 19 nt, Artificial Sequence
  Synthetic
agugugucuacuauuugcc

SEQ ID NO: 270899 - RNA, 20 nt, Artificial Sequence
  Synthetic
uagugugucuacuauuugcc

SEQ ID NO: 270900 - RNA, 21 nt, Artificial Sequence
  Synthetic
cuagugugucuacuauuugcc

SEQ ID NO: 270901 - RNA, 22 nt, Artificial Sequence
  Synthetic
ucuagugugucuacuauuugcc

SEQ ID NO: 270902 - RNA, 23 nt, Artificial Sequence
  Synthetic
aucuagugugucuacuauuugcc

SEQ ID NO: 270903 - RNA, 24 nt, Artificial Sequence
  Synthetic
uaucuagugugucuacuauuugcc

SEQ ID NO: 270904 - RNA, 18 nt, Artificial Sequence
  Synthetic
uagauuuucuucuuugcc

SEQ ID NO: 270905 - RNA, 19 nt, Artificial Sequence
  Synthetic
auagauuuucuucuuugcc

SEQ ID NO: 270906 - RNA, 20 nt, Artificial Sequence
  Synthetic
cauagauuuucuucuuugcc

SEQ ID NO: 270907 - RNA, 21 nt, Artificial Sequence
  Synthetic
acauagauuuucuucuuugcc

SEQ ID NO: 270908 - RNA, 22 nt, Artificial Sequence
  Synthetic
cacauagauuuucuucuuugcc

SEQ ID NO: 270909 - RNA, 23 nt, Artificial Sequence
  Synthetic
ccacauagauuuucuucuuugcc

SEQ ID NO: 270910 - RNA, 24 nt, Artificial Sequence
  Synthetic
gccacauagauuuucuucuuugcc

SEQ ID NO: 270911 - RNA, 18 nt, Artificial Sequence
  Synthetic
aaucaguuuuucuuugcc

SEQ ID NO: 270912 - RNA, 19 nt, Artificial Sequence
  Synthetic
gaaucaguuuuucuuugcc

SEQ ID NO: 270913 - RNA, 20 nt, Artificial Sequence
  Synthetic
ggaaucaguuuuucuuugcc

SEQ ID NO: 270914 - RNA, 21 nt, Artificial Sequence
  Synthetic
uggaaucaguuuuucuuugcc

SEQ ID NO: 270915 - RNA, 22 nt, Artificial Sequence
  Synthetic
auggaaucaguuuuucuuugcc

SEQ ID NO: 270916 - RNA, 23 nt, Artificial Sequence
  Synthetic
aauggaaucaguuuuucuuugcc

SEQ ID NO: 270917 - RNA, 24 nt, Artificial Sequence
  Synthetic
aaauggaaucaguuuuucuuugcc

SEQ ID NO: 270918 - RNA, 18 nt, Artificial Sequence
  Synthetic
agucaacacauuuuugcc

SEQ ID NO: 270919 - RNA, 19 nt, Artificial Sequence
  Synthetic
cagucaacacauuuuugcc

SEQ ID NO: 270920 - RNA, 20 nt, Artificial Sequence
  Synthetic
acagucaacacauuuuugcc

SEQ ID NO: 270921 - RNA, 21 nt, Artificial Sequence
  Synthetic
uacagucaacacauuuuugcc

SEQ ID NO: 270922 - RNA, 22 nt, Artificial Sequence
  Synthetic
uuacagucaacacauuuuugcc

SEQ ID NO: 270923 - RNA, 23 nt, Artificial Sequence
  Synthetic
guuacagucaacacauuuuugcc

SEQ ID NO: 270924 - RNA, 24 nt, Artificial Sequence
  Synthetic
cguuacagucaacacauuuuugcc

SEQ ID NO: 270925 - RNA, 18 nt, Artificial Sequence
  Synthetic
cccacauuuuuuuuugcc

SEQ ID NO: 270926 - RNA, 19 nt, Artificial Sequence
  Synthetic
ccccacauuuuuuuuugcc

SEQ ID NO: 270927 - RNA, 20 nt, Artificial Sequence
  Synthetic
cccccacauuuuuuuuugcc

SEQ ID NO: 270928 - RNA, 21 nt, Artificial Sequence
  Synthetic
ucccccacauuuuuuuuugcc

SEQ ID NO: 270929 - RNA, 22 nt, Artificial Sequence
  Synthetic
cucccccacauuuuuuuuugcc

SEQ ID NO: 270930 - RNA, 23 nt, Artificial Sequence
  Synthetic
ccucccccacauuuuuuuuugcc

SEQ ID NO: 270931 - RNA, 24 nt, Artificial Sequence
  Synthetic
cccucccccacauuuuuuuuugcc

SEQ ID NO: 270932 - RNA, 18 nt, Artificial Sequence
  Synthetic
ggaaaaaaaaaaaaaucc

SEQ ID NO: 270933 - RNA, 19 nt, Artificial Sequence
  Synthetic
aggaaaaaaaaaaaaaucc

SEQ ID NO: 270934 - RNA, 20 nt, Artificial Sequence
  Synthetic
uaggaaaaaaaaaaaaaucc

SEQ ID NO: 270935 - RNA, 21 nt, Artificial Sequence
  Synthetic
auaggaaaaaaaaaaaaaucc

SEQ ID NO: 270936 - RNA, 22 nt, Artificial Sequence
  Synthetic
uauaggaaaaaaaaaaaaaucc

SEQ ID NO: 270937 - RNA, 23 nt, Artificial Sequence
  Synthetic
auauaggaaaaaaaaaaaaaucc

SEQ ID NO: 270938 - RNA, 24 nt, Artificial Sequence
  Synthetic
uauauaggaaaaaaaaaaaaaucc

SEQ ID NO: 270939 - RNA, 18 nt, Artificial Sequence
  Synthetic
uuaccauuccaaaaaucc

SEQ ID NO: 270940 - RNA, 19 nt, Artificial Sequence
  Synthetic
uuuaccauuccaaaaaucc

SEQ ID NO: 270941 - RNA, 20 nt, Artificial Sequence
  Synthetic
guuuaccauuccaaaaaucc

SEQ ID NO: 270942 - RNA, 21 nt, Artificial Sequence
  Synthetic
cguuuaccauuccaaaaaucc

SEQ ID NO: 270943 - RNA, 22 nt, Artificial Sequence
  Synthetic
ucguuuaccauuccaaaaaucc

SEQ ID NO: 270944 - RNA, 23 nt, Artificial Sequence
  Synthetic
cucguuuaccauuccaaaaaucc

SEQ ID NO: 270945 - RNA, 24 nt, Artificial Sequence
  Synthetic
gcucguuuaccauuccaaaaaucc

SEQ ID NO: 270946 - RNA, 18 nt, Artificial Sequence
  Synthetic
gugauuuugcaaaaaucc

SEQ ID NO: 270947 - RNA, 19 nt, Artificial Sequence
  Synthetic
ugugauuuugcaaaaaucc

SEQ ID NO: 270948 - RNA, 20 nt, Artificial Sequence
  Synthetic
gugugauuuugcaaaaaucc

SEQ ID NO: 270949 - RNA, 21 nt, Artificial Sequence
  Synthetic
ggugugauuuugcaaaaaucc

SEQ ID NO: 270950 - RNA, 22 nt, Artificial Sequence
  Synthetic
cggugugauuuugcaaaaaucc

SEQ ID NO: 270951 - RNA, 23 nt, Artificial Sequence
  Synthetic
ucggugugauuuugcaaaaaucc

SEQ ID NO: 270952 - RNA, 24 nt, Artificial Sequence
  Synthetic
gucggugugauuuugcaaaaaucc

SEQ ID NO: 270953 - RNA, 18 nt, Artificial Sequence
  Synthetic
auacuuuaugcaaaaucc

SEQ ID NO: 270954 - RNA, 19 nt, Artificial Sequence
  Synthetic
gauacuuuaugcaaaaucc

SEQ ID NO: 270955 - RNA, 20 nt, Artificial Sequence
  Synthetic
agauacuuuaugcaaaaucc

SEQ ID NO: 270956 - RNA, 21 nt, Artificial Sequence
  Synthetic
aagauacuuuaugcaaaaucc

SEQ ID NO: 270957 - RNA, 22 nt, Artificial Sequence
  Synthetic
aaagauacuuuaugcaaaaucc

SEQ ID NO: 270958 - RNA, 23 nt, Artificial Sequence
  Synthetic
caaagauacuuuaugcaaaaucc

SEQ ID NO: 270959 - RNA, 24 nt, Artificial Sequence
  Synthetic
ucaaagauacuuuaugcaaaaucc

SEQ ID NO: 270960 - RNA, 18 nt, Artificial Sequence
  Synthetic
aagaacaauggaaaaucc

SEQ ID NO: 270961 - RNA, 19 nt, Artificial Sequence
  Synthetic
aaagaacaauggaaaaucc

SEQ ID NO: 270962 - RNA, 20 nt, Artificial Sequence
  Synthetic
aaaagaacaauggaaaaucc

SEQ ID NO: 270963 - RNA, 21 nt, Artificial Sequence
  Synthetic
caaaagaacaauggaaaaucc

SEQ ID NO: 270964 - RNA, 22 nt, Artificial Sequence
  Synthetic
gcaaaagaacaauggaaaaucc

SEQ ID NO: 270965 - RNA, 23 nt, Artificial Sequence
  Synthetic
ggcaaaagaacaauggaaaaucc

SEQ ID NO: 270966 - RNA, 24 nt, Artificial Sequence
  Synthetic
gggcaaaagaacaauggaaaaucc

SEQ ID NO: 270967 - RNA, 18 nt, Artificial Sequence
  Synthetic
auaggcagaauaaaaucc

SEQ ID NO: 270968 - RNA, 19 nt, Artificial Sequence
  Synthetic
aauaggcagaauaaaaucc

SEQ ID NO: 270969 - RNA, 20 nt, Artificial Sequence
  Synthetic
aaauaggcagaauaaaaucc

SEQ ID NO: 270970 - RNA, 21 nt, Artificial Sequence
  Synthetic
caaauaggcagaauaaaaucc

SEQ ID NO: 270971 - RNA, 22 nt, Artificial Sequence
  Synthetic
ccaaauaggcagaauaaaaucc

SEQ ID NO: 270972 - RNA, 23 nt, Artificial Sequence
  Synthetic
gccaaauaggcagaauaaaaucc

SEQ ID NO: 270973 - RNA, 24 nt, Artificial Sequence
  Synthetic
ggccaaauaggcagaauaaaaucc

SEQ ID NO: 270974 - RNA, 18 nt, Artificial Sequence
  Synthetic
uguuuaaaaaagaaaucc

SEQ ID NO: 270975 - RNA, 19 nt, Artificial Sequence
  Synthetic
cuguuuaaaaaagaaaucc

SEQ ID NO: 270976 - RNA, 20 nt, Artificial Sequence
  Synthetic
ucuguuuaaaaaagaaaucc

SEQ ID NO: 270977 - RNA, 21 nt, Artificial Sequence
  Synthetic
gucuguuuaaaaaagaaaucc

SEQ ID NO: 270978 - RNA, 22 nt, Artificial Sequence
  Synthetic
ggucuguuuaaaaaagaaaucc

SEQ ID NO: 270979 - RNA, 23 nt, Artificial Sequence
  Synthetic
aggucuguuuaaaaaagaaaucc

SEQ ID NO: 270980 - RNA, 24 nt, Artificial Sequence
  Synthetic
uaggucuguuuaaaaaagaaaucc

SEQ ID NO: 270981 - RNA, 18 nt, Artificial Sequence
  Synthetic
ccagcuagcaagaaaucc

SEQ ID NO: 270982 - RNA, 19 nt, Artificial Sequence
  Synthetic
gccagcuagcaagaaaucc

SEQ ID NO: 270983 - RNA, 20 nt, Artificial Sequence
  Synthetic
agccagcuagcaagaaaucc

SEQ ID NO: 270984 - RNA, 21 nt, Artificial Sequence
  Synthetic
aagccagcuagcaagaaaucc

SEQ ID NO: 270985 - RNA, 22 nt, Artificial Sequence
  Synthetic
gaagccagcuagcaagaaaucc

SEQ ID NO: 270986 - RNA, 23 nt, Artificial Sequence
  Synthetic
agaagccagcuagcaagaaaucc

SEQ ID NO: 270987 - RNA, 24 nt, Artificial Sequence
  Synthetic
uagaagccagcuagcaagaaaucc

SEQ ID NO: 270988 - RNA, 18 nt, Artificial Sequence
  Synthetic
gccaggacucagaaaucc

SEQ ID NO: 270989 - RNA, 19 nt, Artificial Sequence
  Synthetic
ggccaggacucagaaaucc

SEQ ID NO: 270990 - RNA, 20 nt, Artificial Sequence
  Synthetic
aggccaggacucagaaaucc

SEQ ID NO: 270991 - RNA, 21 nt, Artificial Sequence
  Synthetic
uaggccaggacucagaaaucc

SEQ ID NO: 270992 - RNA, 22 nt, Artificial Sequence
  Synthetic
cuaggccaggacucagaaaucc

SEQ ID NO: 270993 - RNA, 23 nt, Artificial Sequence
  Synthetic
ccuaggccaggacucagaaaucc

SEQ ID NO: 270994 - RNA, 24 nt, Artificial Sequence
  Synthetic
accuaggccaggacucagaaaucc

SEQ ID NO: 270995 - RNA, 18 nt, Artificial Sequence
  Synthetic
acaggaaaggggaaaucc

SEQ ID NO: 270996 - RNA, 19 nt, Artificial Sequence
  Synthetic
aacaggaaaggggaaaucc

SEQ ID NO: 270997 - RNA, 20 nt, Artificial Sequence
  Synthetic
aaacaggaaaggggaaaucc

SEQ ID NO: 270998 - RNA, 21 nt, Artificial Sequence
  Synthetic
gaaacaggaaaggggaaaucc

SEQ ID NO: 270999 - RNA, 22 nt, Artificial Sequence
  Synthetic
ugaaacaggaaaggggaaaucc

SEQ ID NO: 271000 - RNA, 23 nt, Artificial Sequence
  Synthetic
augaaacaggaaaggggaaaucc

SEQ ID NO: 271001 - RNA, 24 nt, Artificial Sequence
  Synthetic
aaugaaacaggaaaggggaaaucc

SEQ ID NO: 271002 - RNA, 18 nt, Artificial Sequence
  Synthetic
gaaggauuaaauaaaucc

SEQ ID NO: 271003 - RNA, 19 nt, Artificial Sequence
  Synthetic
agaaggauuaaauaaaucc

SEQ ID NO: 271004 - RNA, 20 nt, Artificial Sequence
  Synthetic
gagaaggauuaaauaaaucc

SEQ ID NO: 271005 - RNA, 21 nt, Artificial Sequence
  Synthetic
cgagaaggauuaaauaaaucc

SEQ ID NO: 271006 - RNA, 22 nt, Artificial Sequence
  Synthetic
gcgagaaggauuaaauaaaucc

SEQ ID NO: 271007 - RNA, 23 nt, Artificial Sequence
  Synthetic
ggcgagaaggauuaaauaaaucc

SEQ ID NO: 271008 - RNA, 24 nt, Artificial Sequence
  Synthetic
aggcgagaaggauuaaauaaaucc

SEQ ID NO: 271009 - RNA, 18 nt, Artificial Sequence
  Synthetic
ccaaagguagauaaaucc

SEQ ID NO: 271010 - RNA, 19 nt, Artificial Sequence
  Synthetic
accaaagguagauaaaucc

SEQ ID NO: 271011 - RNA, 20 nt, Artificial Sequence
  Synthetic
gaccaaagguagauaaaucc

SEQ ID NO: 271012 - RNA, 21 nt, Artificial Sequence
  Synthetic
agaccaaagguagauaaaucc

SEQ ID NO: 271013 - RNA, 22 nt, Artificial Sequence
  Synthetic
aagaccaaagguagauaaaucc

SEQ ID NO: 271014 - RNA, 23 nt, Artificial Sequence
  Synthetic
aaagaccaaagguagauaaaucc

SEQ ID NO: 271015 - RNA, 24 nt, Artificial Sequence
  Synthetic
caaagaccaaagguagauaaaucc

SEQ ID NO: 271016 - RNA, 18 nt, Artificial Sequence
  Synthetic
ggagagaauuguaaaucc

SEQ ID NO: 271017 - RNA, 19 nt, Artificial Sequence
  Synthetic
gggagagaauuguaaaucc

SEQ ID NO: 271018 - RNA, 20 nt, Artificial Sequence
  Synthetic
agggagagaauuguaaaucc

SEQ ID NO: 271019 - RNA, 21 nt, Artificial Sequence
  Synthetic
aagggagagaauuguaaaucc

SEQ ID NO: 271020 - RNA, 22 nt, Artificial Sequence
  Synthetic
uaagggagagaauuguaaaucc

SEQ ID NO: 271021 - RNA, 23 nt, Artificial Sequence
  Synthetic
auaagggagagaauuguaaaucc

SEQ ID NO: 271022 - RNA, 24 nt, Artificial Sequence
  Synthetic
aauaagggagagaauuguaaaucc

SEQ ID NO: 271023 - RNA, 18 nt, Artificial Sequence
  Synthetic
uuaaaaaaaauuaaaucc

SEQ ID NO: 271024 - RNA, 19 nt, Artificial Sequence
  Synthetic
auuaaaaaaaauuaaaucc

SEQ ID NO: 271025 - RNA, 20 nt, Artificial Sequence
  Synthetic
aauuaaaaaaaauuaaaucc

SEQ ID NO: 271026 - RNA, 21 nt, Artificial Sequence
  Synthetic
aaauuaaaaaaaauuaaaucc

SEQ ID NO: 271027 - RNA, 22 nt, Artificial Sequence
  Synthetic
gaaauuaaaaaaaauuaaaucc

SEQ ID NO: 271028 - RNA, 23 nt, Artificial Sequence
  Synthetic
agaaauuaaaaaaaauuaaaucc

SEQ ID NO: 271029 - RNA, 24 nt, Artificial Sequence
  Synthetic
uagaaauuaaaaaaaauuaaaucc

SEQ ID NO: 271030 - RNA, 18 nt, Artificial Sequence
  Synthetic
cucucagauuuuaaaucc

SEQ ID NO: 271031 - RNA, 19 nt, Artificial Sequence
  Synthetic
gcucucagauuuuaaaucc

SEQ ID NO: 271032 - RNA, 20 nt, Artificial Sequence
  Synthetic
agcucucagauuuuaaaucc

SEQ ID NO: 271033 - RNA, 21 nt, Artificial Sequence
  Synthetic
cagcucucagauuuuaaaucc

SEQ ID NO: 271034 - RNA, 22 nt, Artificial Sequence
  Synthetic
ucagcucucagauuuuaaaucc

SEQ ID NO: 271035 - RNA, 23 nt, Artificial Sequence
  Synthetic
aucagcucucagauuuuaaaucc

SEQ ID NO: 271036 - RNA, 24 nt, Artificial Sequence
  Synthetic
aaucagcucucagauuuuaaaucc

SEQ ID NO: 271037 - RNA, 18 nt, Artificial Sequence
  Synthetic
uuacagucagaacaaucc

SEQ ID NO: 271038 - RNA, 19 nt, Artificial Sequence
  Synthetic
cuuacagucagaacaaucc

SEQ ID NO: 271039 - RNA, 20 nt, Artificial Sequence
  Synthetic
acuuacagucagaacaaucc

SEQ ID NO: 271040 - RNA, 21 nt, Artificial Sequence
  Synthetic
uacuuacagucagaacaaucc

SEQ ID NO: 271041 - RNA, 22 nt, Artificial Sequence
  Synthetic
guacuuacagucagaacaaucc

SEQ ID NO: 271042 - RNA, 23 nt, Artificial Sequence
  Synthetic
uguacuuacagucagaacaaucc

SEQ ID NO: 271043 - RNA, 24 nt, Artificial Sequence
  Synthetic
guguacuuacagucagaacaaucc

SEQ ID NO: 271044 - RNA, 18 nt, Artificial Sequence
  Synthetic
uggcuaagagcacaaucc

SEQ ID NO: 271045 - RNA, 19 nt, Artificial Sequence
  Synthetic
guggcuaagagcacaaucc

SEQ ID NO: 271046 - RNA, 20 nt, Artificial Sequence
  Synthetic
aguggcuaagagcacaaucc

SEQ ID NO: 271047 - RNA, 21 nt, Artificial Sequence
  Synthetic
uaguggcuaagagcacaaucc

SEQ ID NO: 271048 - RNA, 22 nt, Artificial Sequence
  Synthetic
cuaguggcuaagagcacaaucc

SEQ ID NO: 271049 - RNA, 23 nt, Artificial Sequence
  Synthetic
ccuaguggcuaagagcacaaucc

SEQ ID NO: 271050 - RNA, 24 nt, Artificial Sequence
  Synthetic
gccuaguggcuaagagcacaaucc

SEQ ID NO: 271051 - RNA, 18 nt, Artificial Sequence
  Synthetic
agaaugaacguccaaucc

SEQ ID NO: 271052 - RNA, 19 nt, Artificial Sequence
  Synthetic
uagaaugaacguccaaucc

SEQ ID NO: 271053 - RNA, 20 nt, Artificial Sequence
  Synthetic
uuagaaugaacguccaaucc

SEQ ID NO: 271054 - RNA, 21 nt, Artificial Sequence
  Synthetic
guuagaaugaacguccaaucc

SEQ ID NO: 271055 - RNA, 22 nt, Artificial Sequence
  Synthetic
uguuagaaugaacguccaaucc

SEQ ID NO: 271056 - RNA, 23 nt, Artificial Sequence
  Synthetic
auguuagaaugaacguccaaucc

SEQ ID NO: 271057 - RNA, 24 nt, Artificial Sequence
  Synthetic
uauguuagaaugaacguccaaucc

SEQ ID NO: 271058 - RNA, 18 nt, Artificial Sequence
  Synthetic
ccaaaggcacagcaaucc

SEQ ID NO: 271059 - RNA, 19 nt, Artificial Sequence
  Synthetic
uccaaaggcacagcaaucc

SEQ ID NO: 271060 - RNA, 20 nt, Artificial Sequence
  Synthetic
auccaaaggcacagcaaucc

SEQ ID NO: 271061 - RNA, 21 nt, Artificial Sequence
  Synthetic
aauccaaaggcacagcaaucc

SEQ ID NO: 271062 - RNA, 22 nt, Artificial Sequence
  Synthetic
uaauccaaaggcacagcaaucc

SEQ ID NO: 271063 - RNA, 23 nt, Artificial Sequence
  Synthetic
cuaauccaaaggcacagcaaucc

SEQ ID NO: 271064 - RNA, 24 nt, Artificial Sequence
  Synthetic
ucuaauccaaaggcacagcaaucc

SEQ ID NO: 271065 - RNA, 18 nt, Artificial Sequence
  Synthetic
uguaagcuaccucaaucc

SEQ ID NO: 271066 - RNA, 19 nt, Artificial Sequence
  Synthetic
uuguaagcuaccucaaucc

SEQ ID NO: 271067 - RNA, 20 nt, Artificial Sequence
  Synthetic
uuuguaagcuaccucaaucc

SEQ ID NO: 271068 - RNA, 21 nt, Artificial Sequence
  Synthetic
cuuuguaagcuaccucaaucc

SEQ ID NO: 271069 - RNA, 22 nt, Artificial Sequence
  Synthetic
gcuuuguaagcuaccucaaucc

SEQ ID NO: 271070 - RNA, 23 nt, Artificial Sequence
  Synthetic
ugcuuuguaagcuaccucaaucc

SEQ ID NO: 271071 - RNA, 24 nt, Artificial Sequence
  Synthetic
uugcuuuguaagcuaccucaaucc

SEQ ID NO: 271072 - RNA, 18 nt, Artificial Sequence
  Synthetic
ugugaugucacagaaucc

SEQ ID NO: 271073 - RNA, 19 nt, Artificial Sequence
  Synthetic
gugugaugucacagaaucc

SEQ ID NO: 271074 - RNA, 20 nt, Artificial Sequence
  Synthetic
cgugugaugucacagaaucc

SEQ ID NO: 271075 - RNA, 21 nt, Artificial Sequence
  Synthetic
ucgugugaugucacagaaucc

SEQ ID NO: 271076 - RNA, 22 nt, Artificial Sequence
  Synthetic
uucgugugaugucacagaaucc

SEQ ID NO: 271077 - RNA, 23 nt, Artificial Sequence
  Synthetic
guucgugugaugucacagaaucc

SEQ ID NO: 271078 - RNA, 24 nt, Artificial Sequence
  Synthetic
gguucgugugaugucacagaaucc

SEQ ID NO: 271079 - RNA, 18 nt, Artificial Sequence
  Synthetic
gagacaaauauagaaucc

SEQ ID NO: 271080 - RNA, 19 nt, Artificial Sequence
  Synthetic
agagacaaauauagaaucc

SEQ ID NO: 271081 - RNA, 20 nt, Artificial Sequence
  Synthetic
aagagacaaauauagaaucc

SEQ ID NO: 271082 - RNA, 21 nt, Artificial Sequence
  Synthetic
gaagagacaaauauagaaucc

SEQ ID NO: 271083 - RNA, 22 nt, Artificial Sequence
  Synthetic
ugaagagacaaauauagaaucc

SEQ ID NO: 271084 - RNA, 23 nt, Artificial Sequence
  Synthetic
gugaagagacaaauauagaaucc

SEQ ID NO: 271085 - RNA, 24 nt, Artificial Sequence
  Synthetic
agugaagagacaaauauagaaucc

SEQ ID NO: 271086 - RNA, 18 nt, Artificial Sequence
  Synthetic
gauauuuccuacgaaucc

SEQ ID NO: 271087 - RNA, 19 nt, Artificial Sequence
  Synthetic
ugauauuuccuacgaaucc

SEQ ID NO: 271088 - RNA, 20 nt, Artificial Sequence
  Synthetic
augauauuuccuacgaaucc

SEQ ID NO: 271089 - RNA, 21 nt, Artificial Sequence
  Synthetic
aaugauauuuccuacgaaucc

SEQ ID NO: 271090 - RNA, 22 nt, Artificial Sequence
  Synthetic
aaaugauauuuccuacgaaucc

SEQ ID NO: 271091 - RNA, 23 nt, Artificial Sequence
  Synthetic
aaaaugauauuuccuacgaaucc

SEQ ID NO: 271092 - RNA, 24 nt, Artificial Sequence
  Synthetic
aaaaaugauauuuccuacgaaucc

SEQ ID NO: 271093 - RNA, 18 nt, Artificial Sequence
  Synthetic
aagugucagaaggaaucc

SEQ ID NO: 271094 - RNA, 19 nt, Artificial Sequence
  Synthetic
caagugucagaaggaaucc

SEQ ID NO: 271095 - RNA, 20 nt, Artificial Sequence
  Synthetic
acaagugucagaaggaaucc

SEQ ID NO: 271096 - RNA, 21 nt, Artificial Sequence
  Synthetic
aacaagugucagaaggaaucc

SEQ ID NO: 271097 - RNA, 22 nt, Artificial Sequence
  Synthetic
aaacaagugucagaaggaaucc

SEQ ID NO: 271098 - RNA, 23 nt, Artificial Sequence
  Synthetic
gaaacaagugucagaaggaaucc

SEQ ID NO: 271099 - RNA, 24 nt, Artificial Sequence
  Synthetic
ugaaacaagugucagaaggaaucc

SEQ ID NO: 271100 - RNA, 18 nt, Artificial Sequence
  Synthetic
acacaaaggcaugaaucc

SEQ ID NO: 271101 - RNA, 19 nt, Artificial Sequence
  Synthetic
uacacaaaggcaugaaucc

SEQ ID NO: 271102 - RNA, 20 nt, Artificial Sequence
  Synthetic
cuacacaaaggcaugaaucc

SEQ ID NO: 271103 - RNA, 21 nt, Artificial Sequence
  Synthetic
acuacacaaaggcaugaaucc

SEQ ID NO: 271104 - RNA, 22 nt, Artificial Sequence
  Synthetic
gacuacacaaaggcaugaaucc

SEQ ID NO: 271105 - RNA, 23 nt, Artificial Sequence
  Synthetic
ggacuacacaaaggcaugaaucc

SEQ ID NO: 271106 - RNA, 24 nt, Artificial Sequence
  Synthetic
gggacuacacaaaggcaugaaucc

SEQ ID NO: 271107 - RNA, 18 nt, Artificial Sequence
  Synthetic
ggaggauggcaugaaucc

SEQ ID NO: 271108 - RNA, 19 nt, Artificial Sequence
  Synthetic
aggaggauggcaugaaucc

SEQ ID NO: 271109 - RNA, 20 nt, Artificial Sequence
  Synthetic
caggaggauggcaugaaucc

SEQ ID NO: 271110 - RNA, 21 nt, Artificial Sequence
  Synthetic
gcaggaggauggcaugaaucc

SEQ ID NO: 271111 - RNA, 22 nt, Artificial Sequence
  Synthetic
ggcaggaggauggcaugaaucc

SEQ ID NO: 271112 - RNA, 23 nt, Artificial Sequence
  Synthetic
aggcaggaggauggcaugaaucc

SEQ ID NO: 271113 - RNA, 24 nt, Artificial Sequence
  Synthetic
gaggcaggaggauggcaugaaucc

SEQ ID NO: 271114 - RNA, 18 nt, Artificial Sequence
  Synthetic
ugguagauucuugaaucc

SEQ ID NO: 271115 - RNA, 19 nt, Artificial Sequence
  Synthetic
augguagauucuugaaucc

SEQ ID NO: 271116 - RNA, 20 nt, Artificial Sequence
  Synthetic
aaugguagauucuugaaucc

SEQ ID NO: 271117 - RNA, 21 nt, Artificial Sequence
  Synthetic
caaugguagauucuugaaucc

SEQ ID NO: 271118 - RNA, 22 nt, Artificial Sequence
  Synthetic
acaaugguagauucuugaaucc

SEQ ID NO: 271119 - RNA, 23 nt, Artificial Sequence
  Synthetic
uacaaugguagauucuugaaucc

SEQ ID NO: 271120 - RNA, 24 nt, Artificial Sequence
  Synthetic
auacaaugguagauucuugaaucc

SEQ ID NO: 271121 - RNA, 18 nt, Artificial Sequence
  Synthetic
aaggcaagagaauaaucc

SEQ ID NO: 271122 - RNA, 19 nt, Artificial Sequence
  Synthetic
gaaggcaagagaauaaucc

SEQ ID NO: 271123 - RNA, 20 nt, Artificial Sequence
  Synthetic
agaaggcaagagaauaaucc

SEQ ID NO: 271124 - RNA, 21 nt, Artificial Sequence
  Synthetic
cagaaggcaagagaauaaucc

SEQ ID NO: 271125 - RNA, 22 nt, Artificial Sequence
  Synthetic
ccagaaggcaagagaauaaucc

SEQ ID NO: 271126 - RNA, 23 nt, Artificial Sequence
  Synthetic
accagaaggcaagagaauaaucc

SEQ ID NO: 271127 - RNA, 24 nt, Artificial Sequence
  Synthetic
uaccagaaggcaagagaauaaucc

SEQ ID NO: 271128 - RNA, 18 nt, Artificial Sequence
  Synthetic
uaucacugauaauaaucc

SEQ ID NO: 271129 - RNA, 19 nt, Artificial Sequence
  Synthetic
uuaucacugauaauaaucc

SEQ ID NO: 271130 - RNA, 20 nt, Artificial Sequence
  Synthetic
cuuaucacugauaauaaucc

SEQ ID NO: 271131 - RNA, 21 nt, Artificial Sequence
  Synthetic
ucuuaucacugauaauaaucc

SEQ ID NO: 271132 - RNA, 22 nt, Artificial Sequence
  Synthetic
uucuuaucacugauaauaaucc

SEQ ID NO: 271133 - RNA, 23 nt, Artificial Sequence
  Synthetic
cuucuuaucacugauaauaaucc

SEQ ID NO: 271134 - RNA, 24 nt, Artificial Sequence
  Synthetic
acuucuuaucacugauaauaaucc

SEQ ID NO: 271135 - RNA, 18 nt, Artificial Sequence
  Synthetic
aauaaaauauacuaaucc

SEQ ID NO: 271136 - RNA, 19 nt, Artificial Sequence
  Synthetic
gaauaaaauauacuaaucc

SEQ ID NO: 271137 - RNA, 20 nt, Artificial Sequence
  Synthetic
ggaauaaaauauacuaaucc

SEQ ID NO: 271138 - RNA, 21 nt, Artificial Sequence
  Synthetic
uggaauaaaauauacuaaucc

SEQ ID NO: 271139 - RNA, 22 nt, Artificial Sequence
  Synthetic
auggaauaaaauauacuaaucc

SEQ ID NO: 271140 - RNA, 23 nt, Artificial Sequence
  Synthetic
aauggaauaaaauauacuaaucc

SEQ ID NO: 271141 - RNA, 24 nt, Artificial Sequence
  Synthetic
caauggaauaaaauauacuaaucc

SEQ ID NO: 271142 - RNA, 18 nt, Artificial Sequence
  Synthetic
auguccauauccuaaucc

SEQ ID NO: 271143 - RNA, 19 nt, Artificial Sequence
  Synthetic
gauguccauauccuaaucc

SEQ ID NO: 271144 - RNA, 20 nt, Artificial Sequence
  Synthetic
agauguccauauccuaaucc

SEQ ID NO: 271145 - RNA, 21 nt, Artificial Sequence
  Synthetic
aagauguccauauccuaaucc

SEQ ID NO: 271146 - RNA, 22 nt, Artificial Sequence
  Synthetic
aaagauguccauauccuaaucc

SEQ ID NO: 271147 - RNA, 23 nt, Artificial Sequence
  Synthetic
caaagauguccauauccuaaucc

SEQ ID NO: 271148 - RNA, 24 nt, Artificial Sequence
  Synthetic
ccaaagauguccauauccuaaucc

SEQ ID NO: 271149 - RNA, 18 nt, Artificial Sequence
  Synthetic
uaaugguuauccuaaucc

SEQ ID NO: 271150 - RNA, 19 nt, Artificial Sequence
  Synthetic
auaaugguuauccuaaucc

SEQ ID NO: 271151 - RNA, 20 nt, Artificial Sequence
  Synthetic
aauaaugguuauccuaaucc

SEQ ID NO: 271152 - RNA, 21 nt, Artificial Sequence
  Synthetic
uaauaaugguuauccuaaucc

SEQ ID NO: 271153 - RNA, 22 nt, Artificial Sequence
  Synthetic
uuaauaaugguuauccuaaucc

SEQ ID NO: 271154 - RNA, 23 nt, Artificial Sequence
  Synthetic
uuuaauaaugguuauccuaaucc

SEQ ID NO: 271155 - RNA, 24 nt, Artificial Sequence
  Synthetic
uuuuaauaaugguuauccuaaucc

SEQ ID NO: 271156 - RNA, 18 nt, Artificial Sequence
  Synthetic
cacuagccucuguaaucc

SEQ ID NO: 271157 - RNA, 19 nt, Artificial Sequence
  Synthetic
acacuagccucuguaaucc

SEQ ID NO: 271158 - RNA, 20 nt, Artificial Sequence
  Synthetic
aacacuagccucuguaaucc

SEQ ID NO: 271159 - RNA, 21 nt, Artificial Sequence
  Synthetic
aaacacuagccucuguaaucc

SEQ ID NO: 271160 - RNA, 22 nt, Artificial Sequence
  Synthetic
uaaacacuagccucuguaaucc

SEQ ID NO: 271161 - RNA, 23 nt, Artificial Sequence
  Synthetic
cuaaacacuagccucuguaaucc

SEQ ID NO: 271162 - RNA, 24 nt, Artificial Sequence
  Synthetic
ccuaaacacuagccucuguaaucc

SEQ ID NO: 271163 - RNA, 18 nt, Artificial Sequence
  Synthetic
gggucacuucuguaaucc

SEQ ID NO: 271164 - RNA, 19 nt, Artificial Sequence
  Synthetic
ugggucacuucuguaaucc

SEQ ID NO: 271165 - RNA, 20 nt, Artificial Sequence
  Synthetic
gugggucacuucuguaaucc

SEQ ID NO: 271166 - RNA, 21 nt, Artificial Sequence
  Synthetic
ugugggucacuucuguaaucc

SEQ ID NO: 271167 - RNA, 22 nt, Artificial Sequence
  Synthetic
uugugggucacuucuguaaucc

SEQ ID NO: 271168 - RNA, 23 nt, Artificial Sequence
  Synthetic
auugugggucacuucuguaaucc

SEQ ID NO: 271169 - RNA, 24 nt, Artificial Sequence
  Synthetic
cauugugggucacuucuguaaucc

SEQ ID NO: 271170 - RNA, 18 nt, Artificial Sequence
  Synthetic
uuagcuuauguuuaaucc

SEQ ID NO: 271171 - RNA, 19 nt, Artificial Sequence
  Synthetic
uuuagcuuauguuuaaucc

SEQ ID NO: 271172 - RNA, 20 nt, Artificial Sequence
  Synthetic
uuuuagcuuauguuuaaucc

SEQ ID NO: 271173 - RNA, 21 nt, Artificial Sequence
  Synthetic
uuuuuagcuuauguuuaaucc

SEQ ID NO: 271174 - RNA, 22 nt, Artificial Sequence
  Synthetic
auuuuuagcuuauguuuaaucc

SEQ ID NO: 271175 - RNA, 23 nt, Artificial Sequence
  Synthetic
cauuuuuagcuuauguuuaaucc

SEQ ID NO: 271176 - RNA, 24 nt, Artificial Sequence
  Synthetic
ccauuuuuagcuuauguuuaaucc

SEQ ID NO: 271177 - RNA, 18 nt, Artificial Sequence
  Synthetic
acacuuucauuuuaaucc

SEQ ID NO: 271178 - RNA, 19 nt, Artificial Sequence
  Synthetic
aacacuuucauuuuaaucc

SEQ ID NO: 271179 - RNA, 20 nt, Artificial Sequence
  Synthetic
caacacuuucauuuuaaucc

SEQ ID NO: 271180 - RNA, 21 nt, Artificial Sequence
  Synthetic
ccaacacuuucauuuuaaucc

SEQ ID NO: 271181 - RNA, 22 nt, Artificial Sequence
  Synthetic
gccaacacuuucauuuuaaucc

SEQ ID NO: 271182 - RNA, 23 nt, Artificial Sequence
  Synthetic
ugccaacacuuucauuuuaaucc

SEQ ID NO: 271183 - RNA, 24 nt, Artificial Sequence
  Synthetic
cugccaacacuuucauuuuaaucc

SEQ ID NO: 271184 - RNA, 18 nt, Artificial Sequence
  Synthetic
gcugccagugcaacaucc

SEQ ID NO: 271185 - RNA, 19 nt, Artificial Sequence
  Synthetic
agcugccagugcaacaucc

SEQ ID NO: 271186 - RNA, 20 nt, Artificial Sequence
  Synthetic
cagcugccagugcaacaucc

SEQ ID NO: 271187 - RNA, 21 nt, Artificial Sequence
  Synthetic
ucagcugccagugcaacaucc

SEQ ID NO: 271188 - RNA, 22 nt, Artificial Sequence
  Synthetic
gucagcugccagugcaacaucc

SEQ ID NO: 271189 - RNA, 23 nt, Artificial Sequence
  Synthetic
ugucagcugccagugcaacaucc

SEQ ID NO: 271190 - RNA, 24 nt, Artificial Sequence
  Synthetic
uugucagcugccagugcaacaucc

SEQ ID NO: 271191 - RNA, 18 nt, Artificial Sequence
  Synthetic
gcuaauaggaacacaucc

SEQ ID NO: 271192 - RNA, 19 nt, Artificial Sequence
  Synthetic
agcuaauaggaacacaucc

SEQ ID NO: 271193 - RNA, 20 nt, Artificial Sequence
  Synthetic
cagcuaauaggaacacaucc

SEQ ID NO: 271194 - RNA, 21 nt, Artificial Sequence
  Synthetic
gcagcuaauaggaacacaucc

SEQ ID NO: 271195 - RNA, 22 nt, Artificial Sequence
  Synthetic
ugcagcuaauaggaacacaucc

SEQ ID NO: 271196 - RNA, 23 nt, Artificial Sequence
  Synthetic
uugcagcuaauaggaacacaucc

SEQ ID NO: 271197 - RNA, 24 nt, Artificial Sequence
  Synthetic
uuugcagcuaauaggaacacaucc

SEQ ID NO: 271198 - RNA, 18 nt, Artificial Sequence
  Synthetic
auguacuaugacacaucc

SEQ ID NO: 271199 - RNA, 19 nt, Artificial Sequence
  Synthetic
aauguacuaugacacaucc

SEQ ID NO: 271200 - RNA, 20 nt, Artificial Sequence
  Synthetic
gaauguacuaugacacaucc

SEQ ID NO: 271201 - RNA, 21 nt, Artificial Sequence
  Synthetic
agaauguacuaugacacaucc

SEQ ID NO: 271202 - RNA, 22 nt, Artificial Sequence
  Synthetic
uagaauguacuaugacacaucc

SEQ ID NO: 271203 - RNA, 23 nt, Artificial Sequence
  Synthetic
cuagaauguacuaugacacaucc

SEQ ID NO: 271204 - RNA, 24 nt, Artificial Sequence
  Synthetic
ucuagaauguacuaugacacaucc

SEQ ID NO: 271205 - RNA, 18 nt, Artificial Sequence
  Synthetic
cacuagccauucacaucc

SEQ ID NO: 271206 - RNA, 19 nt, Artificial Sequence
  Synthetic
gcacuagccauucacaucc

SEQ ID NO: 271207 - RNA, 20 nt, Artificial Sequence
  Synthetic
ugcacuagccauucacaucc

SEQ ID NO: 271208 - RNA, 21 nt, Artificial Sequence
  Synthetic
cugcacuagccauucacaucc

SEQ ID NO: 271209 - RNA, 22 nt, Artificial Sequence
  Synthetic
gcugcacuagccauucacaucc

SEQ ID NO: 271210 - RNA, 23 nt, Artificial Sequence
  Synthetic
ggcugcacuagccauucacaucc

SEQ ID NO: 271211 - RNA, 24 nt, Artificial Sequence
  Synthetic
gggcugcacuagccauucacaucc

SEQ ID NO: 271212 - RNA, 18 nt, Artificial Sequence
  Synthetic
acugauucauucacaucc

SEQ ID NO: 271213 - RNA, 19 nt, Artificial Sequence
  Synthetic
uacugauucauucacaucc

SEQ ID NO: 271214 - RNA, 20 nt, Artificial Sequence
  Synthetic
cuacugauucauucacaucc

SEQ ID NO: 271215 - RNA, 21 nt, Artificial Sequence
  Synthetic
ccuacugauucauucacaucc

SEQ ID NO: 271216 - RNA, 22 nt, Artificial Sequence
  Synthetic
gccuacugauucauucacaucc

SEQ ID NO: 271217 - RNA, 23 nt, Artificial Sequence
  Synthetic
agccuacugauucauucacaucc

SEQ ID NO: 271218 - RNA, 24 nt, Artificial Sequence
  Synthetic
aagccuacugauucauucacaucc

SEQ ID NO: 271219 - RNA, 18 nt, Artificial Sequence
  Synthetic
aggugaacugagacaucc

SEQ ID NO: 271220 - RNA, 19 nt, Artificial Sequence
  Synthetic
uaggugaacugagacaucc

SEQ ID NO: 271221 - RNA, 20 nt, Artificial Sequence
  Synthetic
guaggugaacugagacaucc

SEQ ID NO: 271222 - RNA, 21 nt, Artificial Sequence
  Synthetic
uguaggugaacugagacaucc

SEQ ID NO: 271223 - RNA, 22 nt, Artificial Sequence
  Synthetic
cuguaggugaacugagacaucc

SEQ ID NO: 271224 - RNA, 23 nt, Artificial Sequence
  Synthetic
ucuguaggugaacugagacaucc

SEQ ID NO: 271225 - RNA, 24 nt, Artificial Sequence
  Synthetic
uucuguaggugaacugagacaucc

SEQ ID NO: 271226 - RNA, 18 nt, Artificial Sequence
  Synthetic
acugcaacuucgacaucc

SEQ ID NO: 271227 - RNA, 19 nt, Artificial Sequence
  Synthetic
cacugcaacuucgacaucc

SEQ ID NO: 271228 - RNA, 20 nt, Artificial Sequence
  Synthetic
ucacugcaacuucgacaucc

SEQ ID NO: 271229 - RNA, 21 nt, Artificial Sequence
  Synthetic
cucacugcaacuucgacaucc

SEQ ID NO: 271230 - RNA, 22 nt, Artificial Sequence
  Synthetic
gcucacugcaacuucgacaucc

SEQ ID NO: 271231 - RNA, 23 nt, Artificial Sequence
  Synthetic
ggcucacugcaacuucgacaucc

SEQ ID NO: 271232 - RNA, 24 nt, Artificial Sequence
  Synthetic
uggcucacugcaacuucgacaucc

SEQ ID NO: 271233 - RNA, 18 nt, Artificial Sequence
  Synthetic
aaauaauaguggacaucc

SEQ ID NO: 271234 - RNA, 19 nt, Artificial Sequence
  Synthetic
caaauaauaguggacaucc

SEQ ID NO: 271235 - RNA, 20 nt, Artificial Sequence
  Synthetic
ucaaauaauaguggacaucc

SEQ ID NO: 271236 - RNA, 21 nt, Artificial Sequence
  Synthetic
uucaaauaauaguggacaucc

SEQ ID NO: 271237 - RNA, 22 nt, Artificial Sequence
  Synthetic
guucaaauaauaguggacaucc

SEQ ID NO: 271238 - RNA, 23 nt, Artificial Sequence
  Synthetic
aguucaaauaauaguggacaucc

SEQ ID NO: 271239 - RNA, 24 nt, Artificial Sequence
  Synthetic
aaguucaaauaauaguggacaucc

SEQ ID NO: 271240 - RNA, 18 nt, Artificial Sequence
  Synthetic
uaaaugcaacugacaucc

SEQ ID NO: 271241 - RNA, 19 nt, Artificial Sequence
  Synthetic
uuaaaugcaacugacaucc

SEQ ID NO: 271242 - RNA, 20 nt, Artificial Sequence
  Synthetic
uuuaaaugcaacugacaucc

SEQ ID NO: 271243 - RNA, 21 nt, Artificial Sequence
  Synthetic
auuuaaaugcaacugacaucc

SEQ ID NO: 271244 - RNA, 22 nt, Artificial Sequence
  Synthetic
uauuuaaaugcaacugacaucc

SEQ ID NO: 271245 - RNA, 23 nt, Artificial Sequence
  Synthetic
auauuuaaaugcaacugacaucc

SEQ ID NO: 271246 - RNA, 24 nt, Artificial Sequence
  Synthetic
uauauuuaaaugcaacugacaucc

SEQ ID NO: 271247 - RNA, 18 nt, Artificial Sequence
  Synthetic
gggacuucucugacaucc

SEQ ID NO: 271248 - RNA, 19 nt, Artificial Sequence
  Synthetic
agggacuucucugacaucc

SEQ ID NO: 271249 - RNA, 20 nt, Artificial Sequence
  Synthetic
aagggacuucucugacaucc

SEQ ID NO: 271250 - RNA, 21 nt, Artificial Sequence
  Synthetic
uaagggacuucucugacaucc

SEQ ID NO: 271251 - RNA, 22 nt, Artificial Sequence
  Synthetic
cuaagggacuucucugacaucc

SEQ ID NO: 271252 - RNA, 23 nt, Artificial Sequence
  Synthetic
ucuaagggacuucucugacaucc

SEQ ID NO: 271253 - RNA, 24 nt, Artificial Sequence
  Synthetic
aucuaagggacuucucugacaucc

SEQ ID NO: 271254 - RNA, 18 nt, Artificial Sequence
  Synthetic
uaagcugccuaaccaucc

SEQ ID NO: 271255 - RNA, 19 nt, Artificial Sequence
  Synthetic
cuaagcugccuaaccaucc

SEQ ID NO: 271256 - RNA, 20 nt, Artificial Sequence
  Synthetic
ucuaagcugccuaaccaucc

SEQ ID NO: 271257 - RNA, 21 nt, Artificial Sequence
  Synthetic
cucuaagcugccuaaccaucc

SEQ ID NO: 271258 - RNA, 22 nt, Artificial Sequence
  Synthetic
acucuaagcugccuaaccaucc

SEQ ID NO: 271259 - RNA, 23 nt, Artificial Sequence
  Synthetic
gacucuaagcugccuaaccaucc

SEQ ID NO: 271260 - RNA, 24 nt, Artificial Sequence
  Synthetic
agacucuaagcugccuaaccaucc

SEQ ID NO: 271261 - RNA, 18 nt, Artificial Sequence
  Synthetic
gcacccagggagccaucc

SEQ ID NO: 271262 - RNA, 19 nt, Artificial Sequence
  Synthetic
agcacccagggagccaucc

SEQ ID NO: 271263 - RNA, 20 nt, Artificial Sequence
  Synthetic
aagcacccagggagccaucc

SEQ ID NO: 271264 - RNA, 21 nt, Artificial Sequence
  Synthetic
gaagcacccagggagccaucc

SEQ ID NO: 271265 - RNA, 22 nt, Artificial Sequence
  Synthetic
ugaagcacccagggagccaucc

SEQ ID NO: 271266 - RNA, 23 nt, Artificial Sequence
  Synthetic
cugaagcacccagggagccaucc

SEQ ID NO: 271267 - RNA, 24 nt, Artificial Sequence
  Synthetic
ucugaagcacccagggagccaucc

SEQ ID NO: 271268 - RNA, 18 nt, Artificial Sequence
  Synthetic
uuuaccaaagguccaucc

SEQ ID NO: 271269 - RNA, 19 nt, Artificial Sequence
  Synthetic
auuuaccaaagguccaucc

SEQ ID NO: 271270 - RNA, 20 nt, Artificial Sequence
  Synthetic
aauuuaccaaagguccaucc

SEQ ID NO: 271271 - RNA, 21 nt, Artificial Sequence
  Synthetic
aaauuuaccaaagguccaucc

SEQ ID NO: 271272 - RNA, 22 nt, Artificial Sequence
  Synthetic
gaaauuuaccaaagguccaucc

SEQ ID NO: 271273 - RNA, 23 nt, Artificial Sequence
  Synthetic
ugaaauuuaccaaagguccaucc

SEQ ID NO: 271274 - RNA, 24 nt, Artificial Sequence
  Synthetic
uugaaauuuaccaaagguccaucc

SEQ ID NO: 271275 - RNA, 18 nt, Artificial Sequence
  Synthetic
ucugaacuaaaagcaucc

SEQ ID NO: 271276 - RNA, 19 nt, Artificial Sequence
  Synthetic
cucugaacuaaaagcaucc

SEQ ID NO: 271277 - RNA, 20 nt, Artificial Sequence
  Synthetic
gcucugaacuaaaagcaucc

SEQ ID NO: 271278 - RNA, 21 nt, Artificial Sequence
  Synthetic
ugcucugaacuaaaagcaucc

SEQ ID NO: 271279 - RNA, 22 nt, Artificial Sequence
  Synthetic
cugcucugaacuaaaagcaucc

SEQ ID NO: 271280 - RNA, 23 nt, Artificial Sequence
  Synthetic
gcugcucugaacuaaaagcaucc

SEQ ID NO: 271281 - RNA, 24 nt, Artificial Sequence
  Synthetic
ggcugcucugaacuaaaagcaucc

SEQ ID NO: 271282 - RNA, 18 nt, Artificial Sequence
  Synthetic
uucuuucccaaagcaucc

SEQ ID NO: 271283 - RNA, 19 nt, Artificial Sequence
  Synthetic
cuucuuucccaaagcaucc

SEQ ID NO: 271284 - RNA, 20 nt, Artificial Sequence
  Synthetic
ccuucuuucccaaagcaucc

SEQ ID NO: 271285 - RNA, 21 nt, Artificial Sequence
  Synthetic
accuucuuucccaaagcaucc

SEQ ID NO: 271286 - RNA, 22 nt, Artificial Sequence
  Synthetic
gaccuucuuucccaaagcaucc

SEQ ID NO: 271287 - RNA, 23 nt, Artificial Sequence
  Synthetic
ggaccuucuuucccaaagcaucc

SEQ ID NO: 271288 - RNA, 24 nt, Artificial Sequence
  Synthetic
gggaccuucuuucccaaagcaucc

SEQ ID NO: 271289 - RNA, 18 nt, Artificial Sequence
  Synthetic
ucaucugggcuggcaucc

SEQ ID NO: 271290 - RNA, 19 nt, Artificial Sequence
  Synthetic
gucaucugggcuggcaucc

SEQ ID NO: 271291 - RNA, 20 nt, Artificial Sequence
  Synthetic
ugucaucugggcuggcaucc

SEQ ID NO: 271292 - RNA, 21 nt, Artificial Sequence
  Synthetic
uugucaucugggcuggcaucc

SEQ ID NO: 271293 - RNA, 22 nt, Artificial Sequence
  Synthetic
guugucaucugggcuggcaucc

SEQ ID NO: 271294 - RNA, 23 nt, Artificial Sequence
  Synthetic
aguugucaucugggcuggcaucc

SEQ ID NO: 271295 - RNA, 24 nt, Artificial Sequence
  Synthetic
uaguugucaucugggcuggcaucc

SEQ ID NO: 271296 - RNA, 18 nt, Artificial Sequence
  Synthetic
cuuggggaaaaugcaucc

SEQ ID NO: 271297 - RNA, 19 nt, Artificial Sequence
  Synthetic
acuuggggaaaaugcaucc

SEQ ID NO: 271298 - RNA, 20 nt, Artificial Sequence
  Synthetic
aacuuggggaaaaugcaucc

SEQ ID NO: 271299 - RNA, 21 nt, Artificial Sequence
  Synthetic
caacuuggggaaaaugcaucc

SEQ ID NO: 271300 - RNA, 22 nt, Artificial Sequence
  Synthetic
ccaacuuggggaaaaugcaucc

SEQ ID NO: 271301 - RNA, 23 nt, Artificial Sequence
  Synthetic
uccaacuuggggaaaaugcaucc

SEQ ID NO: 271302 - RNA, 24 nt, Artificial Sequence
  Synthetic
cuccaacuuggggaaaaugcaucc

SEQ ID NO: 271303 - RNA, 18 nt, Artificial Sequence
  Synthetic
uagaagccuuaugcaucc

SEQ ID NO: 271304 - RNA, 19 nt, Artificial Sequence
  Synthetic
cuagaagccuuaugcaucc

SEQ ID NO: 271305 - RNA, 20 nt, Artificial Sequence
  Synthetic
ccuagaagccuuaugcaucc

SEQ ID NO: 271306 - RNA, 21 nt, Artificial Sequence
  Synthetic
gccuagaagccuuaugcaucc

SEQ ID NO: 271307 - RNA, 22 nt, Artificial Sequence
  Synthetic
ggccuagaagccuuaugcaucc

SEQ ID NO: 271308 - RNA, 23 nt, Artificial Sequence
  Synthetic
uggccuagaagccuuaugcaucc

SEQ ID NO: 271309 - RNA, 24 nt, Artificial Sequence
  Synthetic
cuggccuagaagccuuaugcaucc

SEQ ID NO: 271310 - RNA, 18 nt, Artificial Sequence
  Synthetic
gaugguuuuucugcaucc

SEQ ID NO: 271311 - RNA, 19 nt, Artificial Sequence
  Synthetic
agaugguuuuucugcaucc

SEQ ID NO: 271312 - RNA, 20 nt, Artificial Sequence
  Synthetic
aagaugguuuuucugcaucc

SEQ ID NO: 271313 - RNA, 21 nt, Artificial Sequence
  Synthetic
gaagaugguuuuucugcaucc

SEQ ID NO: 271314 - RNA, 22 nt, Artificial Sequence
  Synthetic
ggaagaugguuuuucugcaucc

SEQ ID NO: 271315 - RNA, 23 nt, Artificial Sequence
  Synthetic
gggaagaugguuuuucugcaucc

SEQ ID NO: 271316 - RNA, 24 nt, Artificial Sequence
  Synthetic
ggggaagaugguuuuucugcaucc

SEQ ID NO: 271317 - RNA, 18 nt, Artificial Sequence
  Synthetic
gcaacaacaagugcaucc

SEQ ID NO: 271318 - RNA, 19 nt, Artificial Sequence
  Synthetic
ggcaacaacaagugcaucc

SEQ ID NO: 271319 - RNA, 20 nt, Artificial Sequence
  Synthetic
aggcaacaacaagugcaucc

SEQ ID NO: 271320 - RNA, 21 nt, Artificial Sequence
  Synthetic
uaggcaacaacaagugcaucc

SEQ ID NO: 271321 - RNA, 22 nt, Artificial Sequence
  Synthetic
uuaggcaacaacaagugcaucc

SEQ ID NO: 271322 - RNA, 23 nt, Artificial Sequence
  Synthetic
guuaggcaacaacaagugcaucc

SEQ ID NO: 271323 - RNA, 24 nt, Artificial Sequence
  Synthetic
aguuaggcaacaacaagugcaucc

SEQ ID NO: 271324 - RNA, 18 nt, Artificial Sequence
  Synthetic
ugaaccagccuugcaucc

SEQ ID NO: 271325 - RNA, 19 nt, Artificial Sequence
  Synthetic
uugaaccagccuugcaucc

SEQ ID NO: 271326 - RNA, 20 nt, Artificial Sequence
  Synthetic
auugaaccagccuugcaucc

SEQ ID NO: 271327 - RNA, 21 nt, Artificial Sequence
  Synthetic
uauugaaccagccuugcaucc

SEQ ID NO: 271328 - RNA, 22 nt, Artificial Sequence
  Synthetic
auauugaaccagccuugcaucc

SEQ ID NO: 271329 - RNA, 23 nt, Artificial Sequence
  Synthetic
uauauugaaccagccuugcaucc

SEQ ID NO: 271330 - RNA, 24 nt, Artificial Sequence
  Synthetic
guauauugaaccagccuugcaucc

SEQ ID NO: 271331 - RNA, 20 nt, Artificial Sequence
  Synthetic
guugaaccagccuugcaucc

SEQ ID NO: 271332 - RNA, 21 nt, Artificial Sequence
  Synthetic
uguugaaccagccuugcaucc

SEQ ID NO: 271333 - RNA, 22 nt, Artificial Sequence
  Synthetic
auguugaaccagccuugcaucc

SEQ ID NO: 271334 - RNA, 23 nt, Artificial Sequence
  Synthetic
uauguugaaccagccuugcaucc

SEQ ID NO: 271335 - RNA, 24 nt, Artificial Sequence
  Synthetic
guauguugaaccagccuugcaucc

SEQ ID NO: 271336 - RNA, 18 nt, Artificial Sequence
  Synthetic
ugaaccagcuuugcaucc

SEQ ID NO: 271337 - RNA, 19 nt, Artificial Sequence
  Synthetic
uugaaccagcuuugcaucc

SEQ ID NO: 271338 - RNA, 20 nt, Artificial Sequence
  Synthetic
guugaaccagcuuugcaucc

SEQ ID NO: 271339 - RNA, 21 nt, Artificial Sequence
  Synthetic
uguugaaccagcuuugcaucc

SEQ ID NO: 271340 - RNA, 22 nt, Artificial Sequence
  Synthetic
auguugaaccagcuuugcaucc

SEQ ID NO: 271341 - RNA, 23 nt, Artificial Sequence
  Synthetic
uauguugaaccagcuuugcaucc

SEQ ID NO: 271342 - RNA, 24 nt, Artificial Sequence
  Synthetic
guauguugaaccagcuuugcaucc

SEQ ID NO: 271343 - RNA, 18 nt, Artificial Sequence
  Synthetic
cuaggccucaucucaucc

SEQ ID NO: 271344 - RNA, 19 nt, Artificial Sequence
  Synthetic
ccuaggccucaucucaucc

SEQ ID NO: 271345 - RNA, 20 nt, Artificial Sequence
  Synthetic
gccuaggccucaucucaucc

SEQ ID NO: 271346 - RNA, 21 nt, Artificial Sequence
  Synthetic
agccuaggccucaucucaucc

SEQ ID NO: 271347 - RNA, 22 nt, Artificial Sequence
  Synthetic
cagccuaggccucaucucaucc

SEQ ID NO: 271348 - RNA, 23 nt, Artificial Sequence
  Synthetic
ucagccuaggccucaucucaucc

SEQ ID NO: 271349 - RNA, 24 nt, Artificial Sequence
  Synthetic
uucagccuaggccucaucucaucc

SEQ ID NO: 271350 - RNA, 18 nt, Artificial Sequence
  Synthetic
cuaaaugucuucucaucc

SEQ ID NO: 271351 - RNA, 19 nt, Artificial Sequence
  Synthetic
ucuaaaugucuucucaucc

SEQ ID NO: 271352 - RNA, 20 nt, Artificial Sequence
  Synthetic
cucuaaaugucuucucaucc

SEQ ID NO: 271353 - RNA, 21 nt, Artificial Sequence
  Synthetic
gcucuaaaugucuucucaucc

SEQ ID NO: 271354 - RNA, 22 nt, Artificial Sequence
  Synthetic
ugcucuaaaugucuucucaucc

SEQ ID NO: 271355 - RNA, 23 nt, Artificial Sequence
  Synthetic
cugcucuaaaugucuucucaucc

SEQ ID NO: 271356 - RNA, 24 nt, Artificial Sequence
  Synthetic
ucugcucuaaaugucuucucaucc

SEQ ID NO: 271357 - RNA, 18 nt, Artificial Sequence
  Synthetic
ucccucuguaagucaucc

SEQ ID NO: 271358 - RNA, 19 nt, Artificial Sequence
  Synthetic
gucccucuguaagucaucc

SEQ ID NO: 271359 - RNA, 20 nt, Artificial Sequence
  Synthetic
agucccucuguaagucaucc

SEQ ID NO: 271360 - RNA, 21 nt, Artificial Sequence
  Synthetic
aagucccucuguaagucaucc

SEQ ID NO: 271361 - RNA, 22 nt, Artificial Sequence
  Synthetic
uaagucccucuguaagucaucc

SEQ ID NO: 271362 - RNA, 23 nt, Artificial Sequence
  Synthetic
uuaagucccucuguaagucaucc

SEQ ID NO: 271363 - RNA, 24 nt, Artificial Sequence
  Synthetic
auuaagucccucuguaagucaucc

SEQ ID NO: 271364 - RNA, 18 nt, Artificial Sequence
  Synthetic
aaaguccuuuagucaucc

SEQ ID NO: 271365 - RNA, 19 nt, Artificial Sequence
  Synthetic
caaaguccuuuagucaucc

SEQ ID NO: 271366 - RNA, 20 nt, Artificial Sequence
  Synthetic
acaaaguccuuuagucaucc

SEQ ID NO: 271367 - RNA, 21 nt, Artificial Sequence
  Synthetic
uacaaaguccuuuagucaucc

SEQ ID NO: 271368 - RNA, 22 nt, Artificial Sequence
  Synthetic
guacaaaguccuuuagucaucc

SEQ ID NO: 271369 - RNA, 23 nt, Artificial Sequence
  Synthetic
aguacaaaguccuuuagucaucc

SEQ ID NO: 271370 - RNA, 24 nt, Artificial Sequence
  Synthetic
gaguacaaaguccuuuagucaucc

SEQ ID NO: 271371 - RNA, 18 nt, Artificial Sequence
  Synthetic
ggaaggcuagggucaucc

SEQ ID NO: 271372 - RNA, 19 nt, Artificial Sequence
  Synthetic
gggaaggcuagggucaucc

SEQ ID NO: 271373 - RNA, 20 nt, Artificial Sequence
  Synthetic
agggaaggcuagggucaucc

SEQ ID NO: 271374 - RNA, 21 nt, Artificial Sequence
  Synthetic
aagggaaggcuagggucaucc

SEQ ID NO: 271375 - RNA, 22 nt, Artificial Sequence
  Synthetic
uaagggaaggcuagggucaucc

SEQ ID NO: 271376 - RNA, 23 nt, Artificial Sequence
  Synthetic
uuaagggaaggcuagggucaucc

SEQ ID NO: 271377 - RNA, 24 nt, Artificial Sequence
  Synthetic
cuuaagggaaggcuagggucaucc

SEQ ID NO: 271378 - RNA, 18 nt, Artificial Sequence
  Synthetic
gucucuuucaugucaucc

SEQ ID NO: 271379 - RNA, 19 nt, Artificial Sequence
  Synthetic
agucucuuucaugucaucc

SEQ ID NO: 271380 - RNA, 20 nt, Artificial Sequence
  Synthetic
gagucucuuucaugucaucc

SEQ ID NO: 271381 - RNA, 21 nt, Artificial Sequence
  Synthetic
agagucucuuucaugucaucc

SEQ ID NO: 271382 - RNA, 22 nt, Artificial Sequence
  Synthetic
gagagucucuuucaugucaucc

SEQ ID NO: 271383 - RNA, 23 nt, Artificial Sequence
  Synthetic
agagagucucuuucaugucaucc

SEQ ID NO: 271384 - RNA, 24 nt, Artificial Sequence
  Synthetic
uagagagucucuuucaugucaucc

SEQ ID NO: 271385 - RNA, 18 nt, Artificial Sequence
  Synthetic
ucuaacauggugucaucc

SEQ ID NO: 271386 - RNA, 19 nt, Artificial Sequence
  Synthetic
uucuaacauggugucaucc

SEQ ID NO: 271387 - RNA, 20 nt, Artificial Sequence
  Synthetic
uuucuaacauggugucaucc

SEQ ID NO: 271388 - RNA, 21 nt, Artificial Sequence
  Synthetic
cuuucuaacauggugucaucc

SEQ ID NO: 271389 - RNA, 22 nt, Artificial Sequence
  Synthetic
ucuuucuaacauggugucaucc

SEQ ID NO: 271390 - RNA, 23 nt, Artificial Sequence
  Synthetic
gucuuucuaacauggugucaucc

SEQ ID NO: 271391 - RNA, 24 nt, Artificial Sequence
  Synthetic
ugucuuucuaacauggugucaucc

SEQ ID NO: 271392 - RNA, 18 nt, Artificial Sequence
  Synthetic
aucaagugggcuucaucc

SEQ ID NO: 271393 - RNA, 19 nt, Artificial Sequence
  Synthetic
gaucaagugggcuucaucc

SEQ ID NO: 271394 - RNA, 20 nt, Artificial Sequence
  Synthetic
ugaucaagugggcuucaucc

SEQ ID NO: 271395 - RNA, 24 nt, Artificial Sequence
  Synthetic
accaugaucaagugggcuucaucc

SEQ ID NO: 271396 - RNA, 18 nt, Artificial Sequence
  Synthetic
aucaaguuggcuucaucc

SEQ ID NO: 271397 - RNA, 19 nt, Artificial Sequence
  Synthetic
gaucaaguuggcuucaucc

SEQ ID NO: 271398 - RNA, 20 nt, Artificial Sequence
  Synthetic
ugaucaaguuggcuucaucc

SEQ ID NO: 271399 - RNA, 21 nt, Artificial Sequence
  Synthetic
augaucaaguuggcuucaucc

SEQ ID NO: 271400 - RNA, 22 nt, Artificial Sequence
  Synthetic
caugaucaaguuggcuucaucc

SEQ ID NO: 271401 - RNA, 23 nt, Artificial Sequence
  Synthetic
gcaugaucaaguuggcuucaucc

SEQ ID NO: 271402 - RNA, 24 nt, Artificial Sequence
  Synthetic
agcaugaucaaguuggcuucaucc

SEQ ID NO: 271403 - RNA, 18 nt, Artificial Sequence
  Synthetic
ggaagaguaauuucaucc

SEQ ID NO: 271404 - RNA, 19 nt, Artificial Sequence
  Synthetic
gggaagaguaauuucaucc

SEQ ID NO: 271405 - RNA, 20 nt, Artificial Sequence
  Synthetic
agggaagaguaauuucaucc

SEQ ID NO: 271406 - RNA, 21 nt, Artificial Sequence
  Synthetic
gagggaagaguaauuucaucc

SEQ ID NO: 271407 - RNA, 22 nt, Artificial Sequence
  Synthetic
ugagggaagaguaauuucaucc

SEQ ID NO: 271408 - RNA, 23 nt, Artificial Sequence
  Synthetic
augagggaagaguaauuucaucc

SEQ ID NO: 271409 - RNA, 24 nt, Artificial Sequence
  Synthetic
aaugagggaagaguaauuucaucc

SEQ ID NO: 271410 - RNA, 18 nt, Artificial Sequence
  Synthetic
agggcaagaacaagaucc

SEQ ID NO: 271411 - RNA, 19 nt, Artificial Sequence
  Synthetic
gagggcaagaacaagaucc

SEQ ID NO: 271412 - RNA, 20 nt, Artificial Sequence
  Synthetic
agagggcaagaacaagaucc

SEQ ID NO: 271413 - RNA, 21 nt, Artificial Sequence
  Synthetic
aagagggcaagaacaagaucc

SEQ ID NO: 271414 - RNA, 22 nt, Artificial Sequence
  Synthetic
caagagggcaagaacaagaucc

SEQ ID NO: 271415 - RNA, 23 nt, Artificial Sequence
  Synthetic
acaagagggcaagaacaagaucc

SEQ ID NO: 271416 - RNA, 24 nt, Artificial Sequence
  Synthetic
uacaagagggcaagaacaagaucc

SEQ ID NO: 271417 - RNA, 18 nt, Artificial Sequence
  Synthetic
aauugaaugcuaagaucc

SEQ ID NO: 271418 - RNA, 19 nt, Artificial Sequence
  Synthetic
uaauugaaugcuaagaucc

SEQ ID NO: 271419 - RNA, 20 nt, Artificial Sequence
  Synthetic
auaauugaaugcuaagaucc

SEQ ID NO: 271420 - RNA, 21 nt, Artificial Sequence
  Synthetic
gauaauugaaugcuaagaucc

SEQ ID NO: 271421 - RNA, 22 nt, Artificial Sequence
  Synthetic
ugauaauugaaugcuaagaucc

SEQ ID NO: 271422 - RNA, 23 nt, Artificial Sequence
  Synthetic
augauaauugaaugcuaagaucc

SEQ ID NO: 271423 - RNA, 24 nt, Artificial Sequence
  Synthetic
aaugauaauugaaugcuaagaucc

SEQ ID NO: 271424 - RNA, 18 nt, Artificial Sequence
  Synthetic
aauaguauucccagaucc

SEQ ID NO: 271425 - RNA, 19 nt, Artificial Sequence
  Synthetic
uaauaguauucccagaucc

SEQ ID NO: 271426 - RNA, 20 nt, Artificial Sequence
  Synthetic
auaauaguauucccagaucc

SEQ ID NO: 271427 - RNA, 21 nt, Artificial Sequence
  Synthetic
uauaauaguauucccagaucc

SEQ ID NO: 271428 - RNA, 22 nt, Artificial Sequence
  Synthetic
guauaauaguauucccagaucc

SEQ ID NO: 271429 - RNA, 23 nt, Artificial Sequence
  Synthetic
aguauaauaguauucccagaucc

SEQ ID NO: 271430 - RNA, 24 nt, Artificial Sequence
  Synthetic
gaguauaauaguauucccagaucc

SEQ ID NO: 271431 - RNA, 18 nt, Artificial Sequence
  Synthetic
gcugaaacaggcagaucc

SEQ ID NO: 271432 - RNA, 19 nt, Artificial Sequence
  Synthetic
ggcugaaacaggcagaucc

SEQ ID NO: 271433 - RNA, 20 nt, Artificial Sequence
  Synthetic
uggcugaaacaggcagaucc

SEQ ID NO: 271434 - RNA, 21 nt, Artificial Sequence
  Synthetic
guggcugaaacaggcagaucc

SEQ ID NO: 271435 - RNA, 22 nt, Artificial Sequence
  Synthetic
gguggcugaaacaggcagaucc

SEQ ID NO: 271436 - RNA, 23 nt, Artificial Sequence
  Synthetic
ggguggcugaaacaggcagaucc

SEQ ID NO: 271437 - RNA, 24 nt, Artificial Sequence
  Synthetic
uggguggcugaaacaggcagaucc

SEQ ID NO: 271438 - RNA, 18 nt, Artificial Sequence
  Synthetic
auuucugguucuagaucc

SEQ ID NO: 271439 - RNA, 19 nt, Artificial Sequence
  Synthetic
uauuucugguucuagaucc

SEQ ID NO: 271440 - RNA, 20 nt, Artificial Sequence
  Synthetic
guauuucugguucuagaucc

SEQ ID NO: 271441 - RNA, 21 nt, Artificial Sequence
  Synthetic
gguauuucugguucuagaucc

SEQ ID NO: 271442 - RNA, 22 nt, Artificial Sequence
  Synthetic
ugguauuucugguucuagaucc

SEQ ID NO: 271443 - RNA, 23 nt, Artificial Sequence
  Synthetic
augguauuucugguucuagaucc

SEQ ID NO: 271444 - RNA, 24 nt, Artificial Sequence
  Synthetic
aaugguauuucugguucuagaucc

SEQ ID NO: 271445 - RNA, 18 nt, Artificial Sequence
  Synthetic
auauaauuccugcgaucc

SEQ ID NO: 271446 - RNA, 19 nt, Artificial Sequence
  Synthetic
aauauaauuccugcgaucc

SEQ ID NO: 271447 - RNA, 20 nt, Artificial Sequence
  Synthetic
uaauauaauuccugcgaucc

SEQ ID NO: 271448 - RNA, 21 nt, Artificial Sequence
  Synthetic
guaauauaauuccugcgaucc

SEQ ID NO: 271449 - RNA, 22 nt, Artificial Sequence
  Synthetic
uguaauauaauuccugcgaucc

SEQ ID NO: 271450 - RNA, 23 nt, Artificial Sequence
  Synthetic
auguaauauaauuccugcgaucc

SEQ ID NO: 271451 - RNA, 24 nt, Artificial Sequence
  Synthetic
uauguaauauaauuccugcgaucc

SEQ ID NO: 271452 - RNA, 18 nt, Artificial Sequence
  Synthetic
uccuugaguguucgaucc

SEQ ID NO: 271453 - RNA, 19 nt, Artificial Sequence
  Synthetic
cuccuugaguguucgaucc

SEQ ID NO: 271454 - RNA, 20 nt, Artificial Sequence
  Synthetic
ucuccuugaguguucgaucc

SEQ ID NO: 271455 - RNA, 21 nt, Artificial Sequence
  Synthetic
gucuccuugaguguucgaucc

SEQ ID NO: 271456 - RNA, 22 nt, Artificial Sequence
  Synthetic
ggucuccuugaguguucgaucc

SEQ ID NO: 271457 - RNA, 23 nt, Artificial Sequence
  Synthetic
aggucuccuugaguguucgaucc

SEQ ID NO: 271458 - RNA, 24 nt, Artificial Sequence
  Synthetic
uaggucuccuugaguguucgaucc

SEQ ID NO: 271459 - RNA, 18 nt, Artificial Sequence
  Synthetic
aauguaaauacaggaucc

SEQ ID NO: 271460 - RNA, 19 nt, Artificial Sequence
  Synthetic
gaauguaaauacaggaucc

SEQ ID NO: 271461 - RNA, 20 nt, Artificial Sequence
  Synthetic
ugaauguaaauacaggaucc

SEQ ID NO: 271462 - RNA, 21 nt, Artificial Sequence
  Synthetic
augaauguaaauacaggaucc

SEQ ID NO: 271463 - RNA, 22 nt, Artificial Sequence
  Synthetic
caugaauguaaauacaggaucc

SEQ ID NO: 271464 - RNA, 23 nt, Artificial Sequence
  Synthetic
ucaugaauguaaauacaggaucc

SEQ ID NO: 271465 - RNA, 24 nt, Artificial Sequence
  Synthetic
uucaugaauguaaauacaggaucc

SEQ ID NO: 271466 - RNA, 18 nt, Artificial Sequence
  Synthetic
auuuguuuuucaggaucc

SEQ ID NO: 271467 - RNA, 19 nt, Artificial Sequence
  Synthetic
aauuuguuuuucaggaucc

SEQ ID NO: 271468 - RNA, 20 nt, Artificial Sequence
  Synthetic
caauuuguuuuucaggaucc

SEQ ID NO: 271469 - RNA, 21 nt, Artificial Sequence
  Synthetic
ccaauuuguuuuucaggaucc

SEQ ID NO: 271470 - RNA, 22 nt, Artificial Sequence
  Synthetic
gccaauuuguuuuucaggaucc

SEQ ID NO: 271471 - RNA, 23 nt, Artificial Sequence
  Synthetic
agccaauuuguuuuucaggaucc

SEQ ID NO: 271472 - RNA, 24 nt, Artificial Sequence
  Synthetic
aagccaauuuguuuuucaggaucc

SEQ ID NO: 271473 - RNA, 18 nt, Artificial Sequence
  Synthetic
aggaaauaucuaggaucc

SEQ ID NO: 271474 - RNA, 19 nt, Artificial Sequence
  Synthetic
uaggaaauaucuaggaucc

SEQ ID NO: 271475 - RNA, 20 nt, Artificial Sequence
  Synthetic
cuaggaaauaucuaggaucc

SEQ ID NO: 271476 - RNA, 21 nt, Artificial Sequence
  Synthetic
gcuaggaaauaucuaggaucc

SEQ ID NO: 271477 - RNA, 22 nt, Artificial Sequence
  Synthetic
ggcuaggaaauaucuaggaucc

SEQ ID NO: 271478 - RNA, 23 nt, Artificial Sequence
  Synthetic
aggcuaggaaauaucuaggaucc

SEQ ID NO: 271479 - RNA, 24 nt, Artificial Sequence
  Synthetic
aaggcuaggaaauaucuaggaucc

SEQ ID NO: 271480 - RNA, 18 nt, Artificial Sequence
  Synthetic
ugcuauccguggggaucc

SEQ ID NO: 271481 - RNA, 19 nt, Artificial Sequence
  Synthetic
uugcuauccguggggaucc

SEQ ID NO: 271482 - RNA, 20 nt, Artificial Sequence
  Synthetic
uuugcuauccguggggaucc

SEQ ID NO: 271483 - RNA, 21 nt, Artificial Sequence
  Synthetic
auuugcuauccguggggaucc

SEQ ID NO: 271484 - RNA, 22 nt, Artificial Sequence
  Synthetic
gauuugcuauccguggggaucc

SEQ ID NO: 271485 - RNA, 23 nt, Artificial Sequence
  Synthetic
ggauuugcuauccguggggaucc

SEQ ID NO: 271486 - RNA, 24 nt, Artificial Sequence
  Synthetic
uggauuugcuauccguggggaucc

SEQ ID NO: 271487 - RNA, 18 nt, Artificial Sequence
  Synthetic
uuguagucacguggaucc

SEQ ID NO: 271488 - RNA, 19 nt, Artificial Sequence
  Synthetic
auuguagucacguggaucc

SEQ ID NO: 271489 - RNA, 20 nt, Artificial Sequence
  Synthetic
cauuguagucacguggaucc

SEQ ID NO: 271490 - RNA, 21 nt, Artificial Sequence
  Synthetic
ccauuguagucacguggaucc

SEQ ID NO: 271491 - RNA, 22 nt, Artificial Sequence
  Synthetic
accauuguagucacguggaucc

SEQ ID NO: 271492 - RNA, 23 nt, Artificial Sequence
  Synthetic
caccauuguagucacguggaucc

SEQ ID NO: 271493 - RNA, 24 nt, Artificial Sequence
  Synthetic
acaccauuguagucacguggaucc

SEQ ID NO: 271494 - RNA, 18 nt, Artificial Sequence
  Synthetic
gguugugguuaaugaucc

SEQ ID NO: 271495 - RNA, 19 nt, Artificial Sequence
  Synthetic
ugguugugguuaaugaucc

SEQ ID NO: 271496 - RNA, 20 nt, Artificial Sequence
  Synthetic
gugguugugguuaaugaucc

SEQ ID NO: 271497 - RNA, 21 nt, Artificial Sequence
  Synthetic
ggugguugugguuaaugaucc

SEQ ID NO: 271498 - RNA, 22 nt, Artificial Sequence
  Synthetic
cggugguugugguuaaugaucc

SEQ ID NO: 271499 - RNA, 23 nt, Artificial Sequence
  Synthetic
gcggugguugugguuaaugaucc

SEQ ID NO: 271500 - RNA, 24 nt, Artificial Sequence
  Synthetic
ggcggugguugugguuaaugaucc

SEQ ID NO: 271501 - RNA, 18 nt, Artificial Sequence
  Synthetic
aagugucagggaugaucc

SEQ ID NO: 271502 - RNA, 19 nt, Artificial Sequence
  Synthetic
gaagugucagggaugaucc

SEQ ID NO: 271503 - RNA, 20 nt, Artificial Sequence
  Synthetic
ugaagugucagggaugaucc

SEQ ID NO: 271504 - RNA, 21 nt, Artificial Sequence
  Synthetic
gugaagugucagggaugaucc

SEQ ID NO: 271505 - RNA, 22 nt, Artificial Sequence
  Synthetic
agugaagugucagggaugaucc

SEQ ID NO: 271506 - RNA, 23 nt, Artificial Sequence
  Synthetic
cagugaagugucagggaugaucc

SEQ ID NO: 271507 - RNA, 24 nt, Artificial Sequence
  Synthetic
acagugaagugucagggaugaucc

SEQ ID NO: 271508 - RNA, 18 nt, Artificial Sequence
  Synthetic
cccacccgccccugaucc

SEQ ID NO: 271509 - RNA, 19 nt, Artificial Sequence
  Synthetic
ccccacccgccccugaucc

SEQ ID NO: 271510 - RNA, 20 nt, Artificial Sequence
  Synthetic
accccacccgccccugaucc

SEQ ID NO: 271511 - RNA, 21 nt, Artificial Sequence
  Synthetic
aaccccacccgccccugaucc

SEQ ID NO: 271512 - RNA, 22 nt, Artificial Sequence
  Synthetic
caaccccacccgccccugaucc

SEQ ID NO: 271513 - RNA, 23 nt, Artificial Sequence
  Synthetic
acaaccccacccgccccugaucc

SEQ ID NO: 271514 - RNA, 24 nt, Artificial Sequence
  Synthetic
cacaaccccacccgccccugaucc

SEQ ID NO: 271515 - RNA, 18 nt, Artificial Sequence
  Synthetic
uugguuguaaugugaucc

SEQ ID NO: 271516 - RNA, 19 nt, Artificial Sequence
  Synthetic
uuugguuguaaugugaucc

SEQ ID NO: 271517 - RNA, 20 nt, Artificial Sequence
  Synthetic
guuugguuguaaugugaucc

SEQ ID NO: 271518 - RNA, 21 nt, Artificial Sequence
  Synthetic
gguuugguuguaaugugaucc

SEQ ID NO: 271519 - RNA, 22 nt, Artificial Sequence
  Synthetic
ugguuugguuguaaugugaucc

SEQ ID NO: 271520 - RNA, 23 nt, Artificial Sequence
  Synthetic
gugguuugguuguaaugugaucc

SEQ ID NO: 271521 - RNA, 24 nt, Artificial Sequence
  Synthetic
agugguuugguuguaaugugaucc

SEQ ID NO: 271522 - RNA, 18 nt, Artificial Sequence
  Synthetic
ccaccacaaucuugaucc

SEQ ID NO: 271523 - RNA, 19 nt, Artificial Sequence
  Synthetic
cccaccacaaucuugaucc

SEQ ID NO: 271524 - RNA, 20 nt, Artificial Sequence
  Synthetic
acccaccacaaucuugaucc

SEQ ID NO: 271525 - RNA, 21 nt, Artificial Sequence
  Synthetic
gacccaccacaaucuugaucc

SEQ ID NO: 271526 - RNA, 22 nt, Artificial Sequence
  Synthetic
agacccaccacaaucuugaucc

SEQ ID NO: 271527 - RNA, 23 nt, Artificial Sequence
  Synthetic
aagacccaccacaaucuugaucc

SEQ ID NO: 271528 - RNA, 24 nt, Artificial Sequence
  Synthetic
caagacccaccacaaucuugaucc

SEQ ID NO: 271529 - RNA, 18 nt, Artificial Sequence
  Synthetic
uauccaaucagaauaucc

SEQ ID NO: 271530 - RNA, 19 nt, Artificial Sequence
  Synthetic
auauccaaucagaauaucc

SEQ ID NO: 271531 - RNA, 20 nt, Artificial Sequence
  Synthetic
uauauccaaucagaauaucc

SEQ ID NO: 271532 - RNA, 21 nt, Artificial Sequence
  Synthetic
auauauccaaucagaauaucc

SEQ ID NO: 271533 - RNA, 22 nt, Artificial Sequence
  Synthetic
gauauauccaaucagaauaucc

SEQ ID NO: 271534 - RNA, 23 nt, Artificial Sequence
  Synthetic
ugauauauccaaucagaauaucc

SEQ ID NO: 271535 - RNA, 24 nt, Artificial Sequence
  Synthetic
augauauauccaaucagaauaucc

SEQ ID NO: 271536 - RNA, 18 nt, Artificial Sequence
  Synthetic
cuguauauacacauaucc

SEQ ID NO: 271537 - RNA, 19 nt, Artificial Sequence
  Synthetic
ucuguauauacacauaucc

SEQ ID NO: 271538 - RNA, 20 nt, Artificial Sequence
  Synthetic
cucuguauauacacauaucc

SEQ ID NO: 271539 - RNA, 21 nt, Artificial Sequence
  Synthetic
ccucuguauauacacauaucc

SEQ ID NO: 271540 - RNA, 22 nt, Artificial Sequence
  Synthetic
cccucuguauauacacauaucc

SEQ ID NO: 271541 - RNA, 23 nt, Artificial Sequence
  Synthetic
ucccucuguauauacacauaucc

SEQ ID NO: 271542 - RNA, 24 nt, Artificial Sequence
  Synthetic
aucccucuguauauacacauaucc

SEQ ID NO: 271543 - RNA, 18 nt, Artificial Sequence
  Synthetic
aaucuaaauuucauaucc

SEQ ID NO: 271544 - RNA, 19 nt, Artificial Sequence
  Synthetic
gaaucuaaauuucauaucc

SEQ ID NO: 271545 - RNA, 20 nt, Artificial Sequence
  Synthetic
agaaucuaaauuucauaucc

SEQ ID NO: 271546 - RNA, 21 nt, Artificial Sequence
  Synthetic
aagaaucuaaauuucauaucc

SEQ ID NO: 271547 - RNA, 22 nt, Artificial Sequence
  Synthetic
caagaaucuaaauuucauaucc

SEQ ID NO: 271548 - RNA, 23 nt, Artificial Sequence
  Synthetic
ucaagaaucuaaauuucauaucc

SEQ ID NO: 271549 - RNA, 24 nt, Artificial Sequence
  Synthetic
gucaagaaucuaaauuucauaucc

SEQ ID NO: 271550 - RNA, 18 nt, Artificial Sequence
  Synthetic
uuacccagacagauaucc

SEQ ID NO: 271551 - RNA, 19 nt, Artificial Sequence
  Synthetic
uuuacccagacagauaucc

SEQ ID NO: 271552 - RNA, 20 nt, Artificial Sequence
  Synthetic
uuuuacccagacagauaucc

SEQ ID NO: 271553 - RNA, 21 nt, Artificial Sequence
  Synthetic
guuuuacccagacagauaucc

SEQ ID NO: 271554 - RNA, 22 nt, Artificial Sequence
  Synthetic
uguuuuacccagacagauaucc

SEQ ID NO: 271555 - RNA, 23 nt, Artificial Sequence
  Synthetic
uuguuuuacccagacagauaucc

SEQ ID NO: 271556 - RNA, 24 nt, Artificial Sequence
  Synthetic
uuuguuuuacccagacagauaucc

SEQ ID NO: 271557 - RNA, 18 nt, Artificial Sequence
  Synthetic
gcuauuaucuagauaucc

SEQ ID NO: 271558 - RNA, 19 nt, Artificial Sequence
  Synthetic
agcuauuaucuagauaucc

SEQ ID NO: 271559 - RNA, 20 nt, Artificial Sequence
  Synthetic
gagcuauuaucuagauaucc

SEQ ID NO: 271560 - RNA, 21 nt, Artificial Sequence
  Synthetic
ggagcuauuaucuagauaucc

SEQ ID NO: 271561 - RNA, 22 nt, Artificial Sequence
  Synthetic
aggagcuauuaucuagauaucc

SEQ ID NO: 271562 - RNA, 23 nt, Artificial Sequence
  Synthetic
aaggagcuauuaucuagauaucc

SEQ ID NO: 271563 - RNA, 24 nt, Artificial Sequence
  Synthetic
caaggagcuauuaucuagauaucc

SEQ ID NO: 271564 - RNA, 18 nt, Artificial Sequence
  Synthetic
uucucaaguuugauaucc

SEQ ID NO: 271565 - RNA, 19 nt, Artificial Sequence
  Synthetic
cuucucaaguuugauaucc

SEQ ID NO: 271566 - RNA, 20 nt, Artificial Sequence
  Synthetic
acuucucaaguuugauaucc

SEQ ID NO: 271567 - RNA, 21 nt, Artificial Sequence
  Synthetic
aacuucucaaguuugauaucc

SEQ ID NO: 271568 - RNA, 22 nt, Artificial Sequence
  Synthetic
caacuucucaaguuugauaucc

SEQ ID NO: 271569 - RNA, 23 nt, Artificial Sequence
  Synthetic
ucaacuucucaaguuugauaucc

SEQ ID NO: 271570 - RNA, 24 nt, Artificial Sequence
  Synthetic
cucaacuucucaaguuugauaucc

SEQ ID NO: 271571 - RNA, 18 nt, Artificial Sequence
  Synthetic
auaauuugaacacuaucc

SEQ ID NO: 271572 - RNA, 19 nt, Artificial Sequence
  Synthetic
aauaauuugaacacuaucc

SEQ ID NO: 271573 - RNA, 20 nt, Artificial Sequence
  Synthetic
uaauaauuugaacacuaucc

SEQ ID NO: 271574 - RNA, 21 nt, Artificial Sequence
  Synthetic
uuaauaauuugaacacuaucc

SEQ ID NO: 271575 - RNA, 22 nt, Artificial Sequence
  Synthetic
auuaauaauuugaacacuaucc

SEQ ID NO: 271576 - RNA, 23 nt, Artificial Sequence
  Synthetic
uauuaauaauuugaacacuaucc

SEQ ID NO: 271577 - RNA, 24 nt, Artificial Sequence
  Synthetic
cuauuaauaauuugaacacuaucc

SEQ ID NO: 271578 - RNA, 18 nt, Artificial Sequence
  Synthetic
gcauauaauuuacuaucc

SEQ ID NO: 271579 - RNA, 19 nt, Artificial Sequence
  Synthetic
ggcauauaauuuacuaucc

SEQ ID NO: 271580 - RNA, 20 nt, Artificial Sequence
  Synthetic
uggcauauaauuuacuaucc

SEQ ID NO: 271581 - RNA, 21 nt, Artificial Sequence
  Synthetic
cuggcauauaauuuacuaucc

SEQ ID NO: 271582 - RNA, 22 nt, Artificial Sequence
  Synthetic
ucuggcauauaauuuacuaucc

SEQ ID NO: 271583 - RNA, 23 nt, Artificial Sequence
  Synthetic
cucuggcauauaauuuacuaucc

SEQ ID NO: 271584 - RNA, 24 nt, Artificial Sequence
  Synthetic
ucucuggcauauaauuuacuaucc

SEQ ID NO: 271585 - RNA, 18 nt, Artificial Sequence
  Synthetic
gagaauuucggccuaucc

SEQ ID NO: 271586 - RNA, 19 nt, Artificial Sequence
  Synthetic
ugagaauuucggccuaucc

SEQ ID NO: 271587 - RNA, 20 nt, Artificial Sequence
  Synthetic
cugagaauuucggccuaucc

SEQ ID NO: 271588 - RNA, 21 nt, Artificial Sequence
  Synthetic
gcugagaauuucggccuaucc

SEQ ID NO: 271589 - RNA, 22 nt, Artificial Sequence
  Synthetic
agcugagaauuucggccuaucc

SEQ ID NO: 271590 - RNA, 23 nt, Artificial Sequence
  Synthetic
cagcugagaauuucggccuaucc

SEQ ID NO: 271591 - RNA, 24 nt, Artificial Sequence
  Synthetic
ucagcugagaauuucggccuaucc

SEQ ID NO: 271592 - RNA, 18 nt, Artificial Sequence
  Synthetic
auguuaugcugccuaucc

SEQ ID NO: 271593 - RNA, 19 nt, Artificial Sequence
  Synthetic
uauguuaugcugccuaucc

SEQ ID NO: 271594 - RNA, 20 nt, Artificial Sequence
  Synthetic
auauguuaugcugccuaucc

SEQ ID NO: 271595 - RNA, 21 nt, Artificial Sequence
  Synthetic
cauauguuaugcugccuaucc

SEQ ID NO: 271596 - RNA, 22 nt, Artificial Sequence
  Synthetic
ccauauguuaugcugccuaucc

SEQ ID NO: 271597 - RNA, 23 nt, Artificial Sequence
  Synthetic
accauauguuaugcugccuaucc

SEQ ID NO: 271598 - RNA, 24 nt, Artificial Sequence
  Synthetic
gaccauauguuaugcugccuaucc

SEQ ID NO: 271599 - RNA, 18 nt, Artificial Sequence
  Synthetic
uauugauucuuccuaucc

SEQ ID NO: 271600 - RNA, 19 nt, Artificial Sequence
  Synthetic
auauugauucuuccuaucc

SEQ ID NO: 271601 - RNA, 20 nt, Artificial Sequence
  Synthetic
gauauugauucuuccuaucc

SEQ ID NO: 271602 - RNA, 18 nt, Artificial Sequence
  Synthetic
ugucuagaaaugcuaucc

SEQ ID NO: 271603 - RNA, 19 nt, Artificial Sequence
  Synthetic
gugucuagaaaugcuaucc

SEQ ID NO: 271604 - RNA, 20 nt, Artificial Sequence
  Synthetic
ugugucuagaaaugcuaucc

SEQ ID NO: 271605 - RNA, 21 nt, Artificial Sequence
  Synthetic
gugugucuagaaaugcuaucc

SEQ ID NO: 271606 - RNA, 22 nt, Artificial Sequence
  Synthetic
ggugugucuagaaaugcuaucc

SEQ ID NO: 271607 - RNA, 23 nt, Artificial Sequence
  Synthetic
gggugugucuagaaaugcuaucc

SEQ ID NO: 271608 - RNA, 24 nt, Artificial Sequence
  Synthetic
agggugugucuagaaaugcuaucc

SEQ ID NO: 271609 - RNA, 18 nt, Artificial Sequence
  Synthetic
uuuguggauuugcuaucc

SEQ ID NO: 271610 - RNA, 19 nt, Artificial Sequence
  Synthetic
auuuguggauuugcuaucc

SEQ ID NO: 271611 - RNA, 20 nt, Artificial Sequence
  Synthetic
cauuuguggauuugcuaucc

SEQ ID NO: 271612 - RNA, 21 nt, Artificial Sequence
  Synthetic
acauuuguggauuugcuaucc

SEQ ID NO: 271613 - RNA, 22 nt, Artificial Sequence
  Synthetic
aacauuuguggauuugcuaucc

SEQ ID NO: 271614 - RNA, 23 nt, Artificial Sequence
  Synthetic
gaacauuuguggauuugcuaucc

SEQ ID NO: 271615 - RNA, 24 nt, Artificial Sequence
  Synthetic
ugaacauuuguggauuugcuaucc

SEQ ID NO: 271616 - RNA, 18 nt, Artificial Sequence
  Synthetic
cuaacauaugaucuaucc

SEQ ID NO: 271617 - RNA, 19 nt, Artificial Sequence
  Synthetic
ccuaacauaugaucuaucc

SEQ ID NO: 271618 - RNA, 20 nt, Artificial Sequence
  Synthetic
gccuaacauaugaucuaucc

SEQ ID NO: 271619 - RNA, 21 nt, Artificial Sequence
  Synthetic
ggccuaacauaugaucuaucc

SEQ ID NO: 271620 - RNA, 22 nt, Artificial Sequence
  Synthetic
uggccuaacauaugaucuaucc

SEQ ID NO: 271621 - RNA, 23 nt, Artificial Sequence
  Synthetic
guggccuaacauaugaucuaucc

SEQ ID NO: 271622 - RNA, 24 nt, Artificial Sequence
  Synthetic
uguggccuaacauaugaucuaucc

SEQ ID NO: 271623 - RNA, 18 nt, Artificial Sequence
  Synthetic
aucuauugcauucuaucc

SEQ ID NO: 271624 - RNA, 19 nt, Artificial Sequence
  Synthetic
aaucuauugcauucuaucc

SEQ ID NO: 271625 - RNA, 20 nt, Artificial Sequence
  Synthetic
uaaucuauugcauucuaucc

SEQ ID NO: 271626 - RNA, 21 nt, Artificial Sequence
  Synthetic
uuaaucuauugcauucuaucc

SEQ ID NO: 271627 - RNA, 22 nt, Artificial Sequence
  Synthetic
auuaaucuauugcauucuaucc

SEQ ID NO: 271628 - RNA, 23 nt, Artificial Sequence
  Synthetic
aauuaaucuauugcauucuaucc

SEQ ID NO: 271629 - RNA, 24 nt, Artificial Sequence
  Synthetic
uaauuaaucuauugcauucuaucc

SEQ ID NO: 271630 - RNA, 18 nt, Artificial Sequence
  Synthetic
ugaaacaaccuucuaucc

SEQ ID NO: 271631 - RNA, 19 nt, Artificial Sequence
  Synthetic
uugaaacaaccuucuaucc

SEQ ID NO: 271632 - RNA, 20 nt, Artificial Sequence
  Synthetic
auugaaacaaccuucuaucc

SEQ ID NO: 271633 - RNA, 21 nt, Artificial Sequence
  Synthetic
uauugaaacaaccuucuaucc

SEQ ID NO: 271634 - RNA, 22 nt, Artificial Sequence
  Synthetic
auauugaaacaaccuucuaucc

SEQ ID NO: 271635 - RNA, 23 nt, Artificial Sequence
  Synthetic
uauauugaaacaaccuucuaucc

SEQ ID NO: 271636 - RNA, 24 nt, Artificial Sequence
  Synthetic
auauauugaaacaaccuucuaucc

SEQ ID NO: 271637 - RNA, 18 nt, Artificial Sequence
  Synthetic
cuauuacuauucguaucc

SEQ ID NO: 271638 - RNA, 19 nt, Artificial Sequence
  Synthetic
gcuauuacuauucguaucc

SEQ ID NO: 271639 - RNA, 20 nt, Artificial Sequence
  Synthetic
ugcuauuacuauucguaucc

SEQ ID NO: 271640 - RNA, 21 nt, Artificial Sequence
  Synthetic
augcuauuacuauucguaucc

SEQ ID NO: 271641 - RNA, 22 nt, Artificial Sequence
  Synthetic
gaugcuauuacuauucguaucc

SEQ ID NO: 271642 - RNA, 23 nt, Artificial Sequence
  Synthetic
ugaugcuauuacuauucguaucc

SEQ ID NO: 271643 - RNA, 24 nt, Artificial Sequence
  Synthetic
augaugcuauuacuauucguaucc

SEQ ID NO: 271644 - RNA, 18 nt, Artificial Sequence
  Synthetic
aaaucaggguugguaucc

SEQ ID NO: 271645 - RNA, 19 nt, Artificial Sequence
  Synthetic
caaaucaggguugguaucc

SEQ ID NO: 271646 - RNA, 20 nt, Artificial Sequence
  Synthetic
ucaaaucaggguugguaucc

SEQ ID NO: 271647 - RNA, 21 nt, Artificial Sequence
  Synthetic
gucaaaucaggguugguaucc

SEQ ID NO: 271648 - RNA, 22 nt, Artificial Sequence
  Synthetic
agucaaaucaggguugguaucc

SEQ ID NO: 271649 - RNA, 23 nt, Artificial Sequence
  Synthetic
gagucaaaucaggguugguaucc

SEQ ID NO: 271650 - RNA, 24 nt, Artificial Sequence
  Synthetic
agagucaaaucaggguugguaucc

SEQ ID NO: 271651 - RNA, 18 nt, Artificial Sequence
  Synthetic
cuacuccccaauguaucc

SEQ ID NO: 271652 - RNA, 19 nt, Artificial Sequence
  Synthetic
ccuacuccccaauguaucc

SEQ ID NO: 271653 - RNA, 20 nt, Artificial Sequence
  Synthetic
cccuacuccccaauguaucc

SEQ ID NO: 271654 - RNA, 21 nt, Artificial Sequence
  Synthetic
ucccuacuccccaauguaucc

SEQ ID NO: 271655 - RNA, 22 nt, Artificial Sequence
  Synthetic
cucccuacuccccaauguaucc

SEQ ID NO: 271656 - RNA, 23 nt, Artificial Sequence
  Synthetic
ucucccuacuccccaauguaucc

SEQ ID NO: 271657 - RNA, 24 nt, Artificial Sequence
  Synthetic
cucucccuacuccccaauguaucc

SEQ ID NO: 271658 - RNA, 18 nt, Artificial Sequence
  Synthetic
cauucugcacauguaucc

SEQ ID NO: 271659 - RNA, 19 nt, Artificial Sequence
  Synthetic
acauucugcacauguaucc

SEQ ID NO: 271660 - RNA, 20 nt, Artificial Sequence
  Synthetic
uacauucugcacauguaucc

SEQ ID NO: 271661 - RNA, 21 nt, Artificial Sequence
  Synthetic
guacauucugcacauguaucc

SEQ ID NO: 271662 - RNA, 22 nt, Artificial Sequence
  Synthetic
uguacauucugcacauguaucc

SEQ ID NO: 271663 - RNA, 23 nt, Artificial Sequence
  Synthetic
cuguacauucugcacauguaucc

SEQ ID NO: 271664 - RNA, 24 nt, Artificial Sequence
  Synthetic
ccuguacauucugcacauguaucc

SEQ ID NO: 271665 - RNA, 18 nt, Artificial Sequence
  Synthetic
cguucugcacauguaucc

SEQ ID NO: 271666 - RNA, 19 nt, Artificial Sequence
  Synthetic
acguucugcacauguaucc

SEQ ID NO: 271667 - RNA, 20 nt, Artificial Sequence
  Synthetic
cacguucugcacauguaucc

SEQ ID NO: 271668 - RNA, 21 nt, Artificial Sequence
  Synthetic
gcacguucugcacauguaucc

SEQ ID NO: 271669 - RNA, 22 nt, Artificial Sequence
  Synthetic
ugcacguucugcacauguaucc

SEQ ID NO: 271670 - RNA, 23 nt, Artificial Sequence
  Synthetic
cugcacguucugcacauguaucc

SEQ ID NO: 271671 - RNA, 24 nt, Artificial Sequence
  Synthetic
ccugcacguucugcacauguaucc

SEQ ID NO: 271672 - RNA, 18 nt, Artificial Sequence
  Synthetic
cuugcuuuugcuguaucc

SEQ ID NO: 271673 - RNA, 19 nt, Artificial Sequence
  Synthetic
ccuugcuuuugcuguaucc

SEQ ID NO: 271674 - RNA, 20 nt, Artificial Sequence
  Synthetic
gccuugcuuuugcuguaucc

SEQ ID NO: 271675 - RNA, 21 nt, Artificial Sequence
  Synthetic
agccuugcuuuugcuguaucc

SEQ ID NO: 271676 - RNA, 22 nt, Artificial Sequence
  Synthetic
uagccuugcuuuugcuguaucc

SEQ ID NO: 271677 - RNA, 23 nt, Artificial Sequence
  Synthetic
uuagccuugcuuuugcuguaucc

SEQ ID NO: 271678 - RNA, 24 nt, Artificial Sequence
  Synthetic
cuuagccuugcuuuugcuguaucc

SEQ ID NO: 271679 - RNA, 18 nt, Artificial Sequence
  Synthetic
auuucugguucuguaucc

SEQ ID NO: 271680 - RNA, 19 nt, Artificial Sequence
  Synthetic
uauuucugguucuguaucc

SEQ ID NO: 271681 - RNA, 20 nt, Artificial Sequence
  Synthetic
guauuucugguucuguaucc

SEQ ID NO: 271682 - RNA, 21 nt, Artificial Sequence
  Synthetic
gguauuucugguucuguaucc

SEQ ID NO: 271683 - RNA, 22 nt, Artificial Sequence
  Synthetic
ugguauuucugguucuguaucc

SEQ ID NO: 271684 - RNA, 23 nt, Artificial Sequence
  Synthetic
augguauuucugguucuguaucc

SEQ ID NO: 271685 - RNA, 24 nt, Artificial Sequence
  Synthetic
aaugguauuucugguucuguaucc

SEQ ID NO: 271686 - RNA, 18 nt, Artificial Sequence
  Synthetic
guaccccccauuguaucc

SEQ ID NO: 271687 - RNA, 19 nt, Artificial Sequence
  Synthetic
uguaccccccauuguaucc

SEQ ID NO: 271688 - RNA, 20 nt, Artificial Sequence
  Synthetic
cuguaccccccauuguaucc

SEQ ID NO: 271689 - RNA, 21 nt, Artificial Sequence
  Synthetic
ccuguaccccccauuguaucc

SEQ ID NO: 271690 - RNA, 22 nt, Artificial Sequence
  Synthetic
gccuguaccccccauuguaucc

SEQ ID NO: 271691 - RNA, 23 nt, Artificial Sequence
  Synthetic
ugccuguaccccccauuguaucc

SEQ ID NO: 271692 - RNA, 24 nt, Artificial Sequence
  Synthetic
augccuguaccccccauuguaucc

SEQ ID NO: 271693 - RNA, 18 nt, Artificial Sequence
  Synthetic
cucuucagguuauuaucc

SEQ ID NO: 271694 - RNA, 19 nt, Artificial Sequence
  Synthetic
acucuucagguuauuaucc

SEQ ID NO: 271695 - RNA, 20 nt, Artificial Sequence
  Synthetic
cacucuucagguuauuaucc

SEQ ID NO: 271696 - RNA, 21 nt, Artificial Sequence
  Synthetic
acacucuucagguuauuaucc

SEQ ID NO: 271697 - RNA, 22 nt, Artificial Sequence
  Synthetic
aacacucuucagguuauuaucc

SEQ ID NO: 271698 - RNA, 23 nt, Artificial Sequence
  Synthetic
aaacacucuucagguuauuaucc

SEQ ID NO: 271699 - RNA, 24 nt, Artificial Sequence
  Synthetic
aaaacacucuucagguuauuaucc

SEQ ID NO: 271700 - RNA, 18 nt, Artificial Sequence
  Synthetic
cugcuacccaaguuaucc

SEQ ID NO: 271701 - RNA, 19 nt, Artificial Sequence
  Synthetic
gcugcuacccaaguuaucc

SEQ ID NO: 271702 - RNA, 20 nt, Artificial Sequence
  Synthetic
agcugcuacccaaguuaucc

SEQ ID NO: 271703 - RNA, 21 nt, Artificial Sequence
  Synthetic
uagcugcuacccaaguuaucc

SEQ ID NO: 271704 - RNA, 22 nt, Artificial Sequence
  Synthetic
guagcugcuacccaaguuaucc

SEQ ID NO: 271705 - RNA, 23 nt, Artificial Sequence
  Synthetic
gguagcugcuacccaaguuaucc

SEQ ID NO: 271706 - RNA, 24 nt, Artificial Sequence
  Synthetic
agguagcugcuacccaaguuaucc

SEQ ID NO: 271707 - RNA, 18 nt, Artificial Sequence
  Synthetic
cagguucuaccuuuaucc

SEQ ID NO: 271708 - RNA, 19 nt, Artificial Sequence
  Synthetic
acagguucuaccuuuaucc

SEQ ID NO: 271709 - RNA, 20 nt, Artificial Sequence
  Synthetic
gacagguucuaccuuuaucc

SEQ ID NO: 271710 - RNA, 21 nt, Artificial Sequence
  Synthetic
ugacagguucuaccuuuaucc

SEQ ID NO: 271711 - RNA, 22 nt, Artificial Sequence
  Synthetic
uugacagguucuaccuuuaucc

SEQ ID NO: 271712 - RNA, 23 nt, Artificial Sequence
  Synthetic
uuugacagguucuaccuuuaucc

SEQ ID NO: 271713 - RNA, 24 nt, Artificial Sequence
  Synthetic
guuugacagguucuaccuuuaucc

SEQ ID NO: 271714 - RNA, 18 nt, Artificial Sequence
  Synthetic
ccuucccuuucaaacucc

SEQ ID NO: 271715 - RNA, 19 nt, Artificial Sequence
  Synthetic
accuucccuuucaaacucc

SEQ ID NO: 271716 - RNA, 20 nt, Artificial Sequence
  Synthetic
caccuucccuuucaaacucc

SEQ ID NO: 271717 - RNA, 21 nt, Artificial Sequence
  Synthetic
acaccuucccuuucaaacucc

SEQ ID NO: 271718 - RNA, 22 nt, Artificial Sequence
  Synthetic
aacaccuucccuuucaaacucc

SEQ ID NO: 271719 - RNA, 23 nt, Artificial Sequence
  Synthetic
aaacaccuucccuuucaaacucc

SEQ ID NO: 271720 - RNA, 24 nt, Artificial Sequence
  Synthetic
aaaacaccuucccuuucaaacucc

SEQ ID NO: 271721 - RNA, 18 nt, Artificial Sequence
  Synthetic
guagaguuguuaaacucc

SEQ ID NO: 271722 - RNA, 19 nt, Artificial Sequence
  Synthetic
aguagaguuguuaaacucc

SEQ ID NO: 271723 - RNA, 20 nt, Artificial Sequence
  Synthetic
aaguagaguuguuaaacucc

SEQ ID NO: 271724 - RNA, 21 nt, Artificial Sequence
  Synthetic
aaaguagaguuguuaaacucc

SEQ ID NO: 271725 - RNA, 22 nt, Artificial Sequence
  Synthetic
aaaaguagaguuguuaaacucc

SEQ ID NO: 271726 - RNA, 23 nt, Artificial Sequence
  Synthetic
aaaaaguagaguuguuaaacucc

SEQ ID NO: 271727 - RNA, 24 nt, Artificial Sequence
  Synthetic
aaaaaaguagaguuguuaaacucc

SEQ ID NO: 271728 - RNA, 18 nt, Artificial Sequence
  Synthetic
agguugggccacaacucc

SEQ ID NO: 271729 - RNA, 19 nt, Artificial Sequence
  Synthetic
gagguugggccacaacucc

SEQ ID NO: 271730 - RNA, 20 nt, Artificial Sequence
  Synthetic
ggagguugggccacaacucc

SEQ ID NO: 271731 - RNA, 21 nt, Artificial Sequence
  Synthetic
uggagguugggccacaacucc

SEQ ID NO: 271732 - RNA, 22 nt, Artificial Sequence
  Synthetic
cuggagguugggccacaacucc

SEQ ID NO: 271733 - RNA, 23 nt, Artificial Sequence
  Synthetic
acuggagguugggccacaacucc

SEQ ID NO: 271734 - RNA, 24 nt, Artificial Sequence
  Synthetic
gacuggagguugggccacaacucc

SEQ ID NO: 271735 - RNA, 18 nt, Artificial Sequence
  Synthetic
uucccaccuuccaacucc

SEQ ID NO: 271736 - RNA, 19 nt, Artificial Sequence
  Synthetic
cuucccaccuuccaacucc

SEQ ID NO: 271737 - RNA, 20 nt, Artificial Sequence
  Synthetic
ccuucccaccuuccaacucc

SEQ ID NO: 271738 - RNA, 21 nt, Artificial Sequence
  Synthetic
gccuucccaccuuccaacucc

SEQ ID NO: 271739 - RNA, 22 nt, Artificial Sequence
  Synthetic
ggccuucccaccuuccaacucc

SEQ ID NO: 271740 - RNA, 23 nt, Artificial Sequence
  Synthetic
aggccuucccaccuuccaacucc

SEQ ID NO: 271741 - RNA, 24 nt, Artificial Sequence
  Synthetic
caggccuucccaccuuccaacucc

SEQ ID NO: 271742 - RNA, 18 nt, Artificial Sequence
  Synthetic
ccucuuuugaagaacucc

SEQ ID NO: 271743 - RNA, 19 nt, Artificial Sequence
  Synthetic
accucuuuugaagaacucc

SEQ ID NO: 271744 - RNA, 20 nt, Artificial Sequence
  Synthetic
aaccucuuuugaagaacucc

SEQ ID NO: 271745 - RNA, 21 nt, Artificial Sequence
  Synthetic
caaccucuuuugaagaacucc

SEQ ID NO: 271746 - RNA, 22 nt, Artificial Sequence
  Synthetic
gcaaccucuuuugaagaacucc

SEQ ID NO: 271747 - RNA, 23 nt, Artificial Sequence
  Synthetic
agcaaccucuuuugaagaacucc

SEQ ID NO: 271748 - RNA, 24 nt, Artificial Sequence
  Synthetic
uagcaaccucuuuugaagaacucc

SEQ ID NO: 271749 - RNA, 18 nt, Artificial Sequence
  Synthetic
cacuguaucuagaacucc

SEQ ID NO: 271750 - RNA, 19 nt, Artificial Sequence
  Synthetic
ccacuguaucuagaacucc

SEQ ID NO: 271751 - RNA, 20 nt, Artificial Sequence
  Synthetic
accacuguaucuagaacucc

SEQ ID NO: 271752 - RNA, 21 nt, Artificial Sequence
  Synthetic
caccacuguaucuagaacucc

SEQ ID NO: 271753 - RNA, 22 nt, Artificial Sequence
  Synthetic
ccaccacuguaucuagaacucc

SEQ ID NO: 271754 - RNA, 23 nt, Artificial Sequence
  Synthetic
uccaccacuguaucuagaacucc

SEQ ID NO: 271755 - RNA, 24 nt, Artificial Sequence
  Synthetic
cuccaccacuguaucuagaacucc

SEQ ID NO: 271756 - RNA, 18 nt, Artificial Sequence
  Synthetic
cugagagucaggaacucc

SEQ ID NO: 271757 - RNA, 19 nt, Artificial Sequence
  Synthetic
acugagagucaggaacucc

SEQ ID NO: 271758 - RNA, 20 nt, Artificial Sequence
  Synthetic
cacugagagucaggaacucc

SEQ ID NO: 271759 - RNA, 21 nt, Artificial Sequence
  Synthetic
gcacugagagucaggaacucc

SEQ ID NO: 271760 - RNA, 22 nt, Artificial Sequence
  Synthetic
agcacugagagucaggaacucc

SEQ ID NO: 271761 - RNA, 23 nt, Artificial Sequence
  Synthetic
cagcacugagagucaggaacucc

SEQ ID NO: 271762 - RNA, 24 nt, Artificial Sequence
  Synthetic
gcagcacugagagucaggaacucc

SEQ ID NO: 271763 - RNA, 18 nt, Artificial Sequence
  Synthetic
acugcagccuugaacucc

SEQ ID NO: 271764 - RNA, 19 nt, Artificial Sequence
  Synthetic
cacugcagccuugaacucc

SEQ ID NO: 271765 - RNA, 20 nt, Artificial Sequence
  Synthetic
ucacugcagccuugaacucc

SEQ ID NO: 271766 - RNA, 21 nt, Artificial Sequence
  Synthetic
cucacugcagccuugaacucc

SEQ ID NO: 271767 - RNA, 22 nt, Artificial Sequence
  Synthetic
gcucacugcagccuugaacucc

SEQ ID NO: 271768 - RNA, 23 nt, Artificial Sequence
  Synthetic
ggcucacugcagccuugaacucc

SEQ ID NO: 271769 - RNA, 24 nt, Artificial Sequence
  Synthetic
cggcucacugcagccuugaacucc

SEQ ID NO: 271770 - RNA, 18 nt, Artificial Sequence
  Synthetic
caugcacaaccuaacucc

SEQ ID NO: 271771 - RNA, 19 nt, Artificial Sequence
  Synthetic
ucaugcacaaccuaacucc

SEQ ID NO: 271772 - RNA, 20 nt, Artificial Sequence
  Synthetic
aucaugcacaaccuaacucc

SEQ ID NO: 271773 - RNA, 21 nt, Artificial Sequence
  Synthetic
uaucaugcacaaccuaacucc

SEQ ID NO: 271774 - RNA, 22 nt, Artificial Sequence
  Synthetic
uuaucaugcacaaccuaacucc

SEQ ID NO: 271775 - RNA, 23 nt, Artificial Sequence
  Synthetic
auuaucaugcacaaccuaacucc

SEQ ID NO: 271776 - RNA, 24 nt, Artificial Sequence
  Synthetic
cauuaucaugcacaaccuaacucc

SEQ ID NO: 271777 - RNA, 18 nt, Artificial Sequence
  Synthetic
cucagacucuguaacucc

SEQ ID NO: 271778 - RNA, 19 nt, Artificial Sequence
  Synthetic
ccucagacucuguaacucc

SEQ ID NO: 271779 - RNA, 20 nt, Artificial Sequence
  Synthetic
gccucagacucuguaacucc

SEQ ID NO: 271780 - RNA, 21 nt, Artificial Sequence
  Synthetic
agccucagacucuguaacucc

SEQ ID NO: 271781 - RNA, 22 nt, Artificial Sequence
  Synthetic
cagccucagacucuguaacucc

SEQ ID NO: 271782 - RNA, 23 nt, Artificial Sequence
  Synthetic
ucagccucagacucuguaacucc

SEQ ID NO: 271783 - RNA, 24 nt, Artificial Sequence
  Synthetic
uucagccucagacucuguaacucc

SEQ ID NO: 271784 - RNA, 18 nt, Artificial Sequence
  Synthetic
cuauuuauuacccacucc

SEQ ID NO: 271785 - RNA, 19 nt, Artificial Sequence
  Synthetic
ucuauuuauuacccacucc

SEQ ID NO: 271786 - RNA, 20 nt, Artificial Sequence
  Synthetic
cucuauuuauuacccacucc

SEQ ID NO: 271787 - RNA, 21 nt, Artificial Sequence
  Synthetic
gcucuauuuauuacccacucc

SEQ ID NO: 271788 - RNA, 22 nt, Artificial Sequence
  Synthetic
ugcucuauuuauuacccacucc

SEQ ID NO: 271789 - RNA, 23 nt, Artificial Sequence
  Synthetic
cugcucuauuuauuacccacucc

SEQ ID NO: 271790 - RNA, 24 nt, Artificial Sequence
  Synthetic
ucugcucuauuuauuacccacucc

SEQ ID NO: 271791 - RNA, 18 nt, Artificial Sequence
  Synthetic
gacacccaaccccacucc

SEQ ID NO: 271792 - RNA, 19 nt, Artificial Sequence
  Synthetic
cgacacccaaccccacucc

SEQ ID NO: 271793 - RNA, 20 nt, Artificial Sequence
  Synthetic
ucgacacccaaccccacucc

SEQ ID NO: 271794 - RNA, 21 nt, Artificial Sequence
  Synthetic
aucgacacccaaccccacucc

SEQ ID NO: 271795 - RNA, 22 nt, Artificial Sequence
  Synthetic
caucgacacccaaccccacucc

SEQ ID NO: 271796 - RNA, 23 nt, Artificial Sequence
  Synthetic
ucaucgacacccaaccccacucc

SEQ ID NO: 271797 - RNA, 24 nt, Artificial Sequence
  Synthetic
cucaucgacacccaaccccacucc

SEQ ID NO: 271798 - RNA, 18 nt, Artificial Sequence
  Synthetic
ugaaguccuccccacucc

SEQ ID NO: 271799 - RNA, 19 nt, Artificial Sequence
  Synthetic
uugaaguccuccccacucc

SEQ ID NO: 271800 - RNA, 20 nt, Artificial Sequence
  Synthetic
uuugaaguccuccccacucc

SEQ ID NO: 271801 - RNA, 21 nt, Artificial Sequence
  Synthetic
uuuugaaguccuccccacucc

SEQ ID NO: 271802 - RNA, 22 nt, Artificial Sequence
  Synthetic
guuuugaaguccuccccacucc

SEQ ID NO: 271803 - RNA, 23 nt, Artificial Sequence
  Synthetic
uguuuugaaguccuccccacucc

SEQ ID NO: 271804 - RNA, 24 nt, Artificial Sequence
  Synthetic
cuguuuugaaguccuccccacucc

SEQ ID NO: 271805 - RNA, 18 nt, Artificial Sequence
  Synthetic
augacggaaaugcacucc

SEQ ID NO: 271806 - RNA, 19 nt, Artificial Sequence
  Synthetic
caugacggaaaugcacucc

SEQ ID NO: 271807 - RNA, 20 nt, Artificial Sequence
  Synthetic
ccaugacggaaaugcacucc

SEQ ID NO: 271808 - RNA, 21 nt, Artificial Sequence
  Synthetic
accaugacggaaaugcacucc

SEQ ID NO: 271809 - RNA, 22 nt, Artificial Sequence
  Synthetic
uaccaugacggaaaugcacucc

SEQ ID NO: 271810 - RNA, 23 nt, Artificial Sequence
  Synthetic
guaccaugacggaaaugcacucc

SEQ ID NO: 271811 - RNA, 24 nt, Artificial Sequence
  Synthetic
aguaccaugacggaaaugcacucc

SEQ ID NO: 271812 - RNA, 18 nt, Artificial Sequence
  Synthetic
ucucccaugacagacucc

SEQ ID NO: 271813 - RNA, 19 nt, Artificial Sequence
  Synthetic
cucucccaugacagacucc

SEQ ID NO: 271814 - RNA, 20 nt, Artificial Sequence
  Synthetic
ucucucccaugacagacucc

SEQ ID NO: 271815 - RNA, 21 nt, Artificial Sequence
  Synthetic
uucucucccaugacagacucc

SEQ ID NO: 271816 - RNA, 22 nt, Artificial Sequence
  Synthetic
uuucucucccaugacagacucc

SEQ ID NO: 271817 - RNA, 23 nt, Artificial Sequence
  Synthetic
uuuucucucccaugacagacucc

SEQ ID NO: 271818 - RNA, 24 nt, Artificial Sequence
  Synthetic
auuuucucucccaugacagacucc

SEQ ID NO: 271819 - RNA, 18 nt, Artificial Sequence
  Synthetic
gcgugauuccuagacucc

SEQ ID NO: 271820 - RNA, 19 nt, Artificial Sequence
  Synthetic
agcgugauuccuagacucc

SEQ ID NO: 271821 - RNA, 20 nt, Artificial Sequence
  Synthetic
aagcgugauuccuagacucc

SEQ ID NO: 271822 - RNA, 21 nt, Artificial Sequence
  Synthetic
uaagcgugauuccuagacucc

SEQ ID NO: 271823 - RNA, 22 nt, Artificial Sequence
  Synthetic
auaagcgugauuccuagacucc

SEQ ID NO: 271824 - RNA, 23 nt, Artificial Sequence
  Synthetic
gauaagcgugauuccuagacucc

SEQ ID NO: 271825 - RNA, 24 nt, Artificial Sequence
  Synthetic
agauaagcgugauuccuagacucc

SEQ ID NO: 271826 - RNA, 18 nt, Artificial Sequence
  Synthetic
aguaaguauguagacucc

SEQ ID NO: 271827 - RNA, 19 nt, Artificial Sequence
  Synthetic
gaguaaguauguagacucc

SEQ ID NO: 271828 - RNA, 20 nt, Artificial Sequence
  Synthetic
agaguaaguauguagacucc

SEQ ID NO: 271829 - RNA, 21 nt, Artificial Sequence
  Synthetic
gagaguaaguauguagacucc

SEQ ID NO: 271830 - RNA, 22 nt, Artificial Sequence
  Synthetic
ugagaguaaguauguagacucc

SEQ ID NO: 271831 - RNA, 23 nt, Artificial Sequence
  Synthetic
cugagaguaaguauguagacucc

SEQ ID NO: 271832 - RNA, 24 nt, Artificial Sequence
  Synthetic
acugagaguaaguauguagacucc

SEQ ID NO: 271833 - RNA, 18 nt, Artificial Sequence
  Synthetic
augggucucagggacucc

SEQ ID NO: 271834 - RNA, 19 nt, Artificial Sequence
  Synthetic
caugggucucagggacucc

SEQ ID NO: 271835 - RNA, 20 nt, Artificial Sequence
  Synthetic
gcaugggucucagggacucc

SEQ ID NO: 271836 - RNA, 21 nt, Artificial Sequence
  Synthetic
ugcaugggucucagggacucc

SEQ ID NO: 271837 - RNA, 22 nt, Artificial Sequence
  Synthetic
cugcaugggucucagggacucc

SEQ ID NO: 271838 - RNA, 23 nt, Artificial Sequence
  Synthetic
acugcaugggucucagggacucc

SEQ ID NO: 271839 - RNA, 24 nt, Artificial Sequence
  Synthetic
cacugcaugggucucagggacucc

SEQ ID NO: 271840 - RNA, 18 nt, Artificial Sequence
  Synthetic
aucuugaucucugacucc

SEQ ID NO: 271841 - RNA, 19 nt, Artificial Sequence
  Synthetic
caucuugaucucugacucc

SEQ ID NO: 271842 - RNA, 20 nt, Artificial Sequence
  Synthetic
ccaucuugaucucugacucc

SEQ ID NO: 271843 - RNA, 21 nt, Artificial Sequence
  Synthetic
uccaucuugaucucugacucc

SEQ ID NO: 271844 - RNA, 22 nt, Artificial Sequence
  Synthetic
uuccaucuugaucucugacucc

SEQ ID NO: 271845 - RNA, 23 nt, Artificial Sequence
  Synthetic
uuuccaucuugaucucugacucc

SEQ ID NO: 271846 - RNA, 24 nt, Artificial Sequence
  Synthetic
auuuccaucuugaucucugacucc

SEQ ID NO: 271847 - RNA, 18 nt, Artificial Sequence
  Synthetic
ugaguuauauaauacucc

SEQ ID NO: 271848 - RNA, 19 nt, Artificial Sequence
  Synthetic
uugaguuauauaauacucc

SEQ ID NO: 271849 - RNA, 20 nt, Artificial Sequence
  Synthetic
auugaguuauauaauacucc

SEQ ID NO: 271850 - RNA, 21 nt, Artificial Sequence
  Synthetic
uauugaguuauauaauacucc

SEQ ID NO: 271851 - RNA, 22 nt, Artificial Sequence
  Synthetic
auauugaguuauauaauacucc

SEQ ID NO: 271852 - RNA, 23 nt, Artificial Sequence
  Synthetic
cauauugaguuauauaauacucc

SEQ ID NO: 271853 - RNA, 24 nt, Artificial Sequence
  Synthetic
ccauauugaguuauauaauacucc

SEQ ID NO: 271854 - RNA, 18 nt, Artificial Sequence
  Synthetic
acaccacaaagauacucc

SEQ ID NO: 271855 - RNA, 19 nt, Artificial Sequence
  Synthetic
aacaccacaaagauacucc

SEQ ID NO: 271856 - RNA, 20 nt, Artificial Sequence
  Synthetic
gaacaccacaaagauacucc

SEQ ID NO: 271857 - RNA, 21 nt, Artificial Sequence
  Synthetic
agaacaccacaaagauacucc

SEQ ID NO: 271858 - RNA, 22 nt, Artificial Sequence
  Synthetic
gagaacaccacaaagauacucc

SEQ ID NO: 271859 - RNA, 23 nt, Artificial Sequence
  Synthetic
ggagaacaccacaaagauacucc

SEQ ID NO: 271860 - RNA, 24 nt, Artificial Sequence
  Synthetic
uggagaacaccacaaagauacucc

SEQ ID NO: 271861 - RNA, 18 nt, Artificial Sequence
  Synthetic
cuggaugugggcuacucc

SEQ ID NO: 271862 - RNA, 19 nt, Artificial Sequence
  Synthetic
acuggaugugggcuacucc

SEQ ID NO: 271863 - RNA, 20 nt, Artificial Sequence
  Synthetic
cacuggaugugggcuacucc

SEQ ID NO: 271864 - RNA, 21 nt, Artificial Sequence
  Synthetic
gcacuggaugugggcuacucc

SEQ ID NO: 271865 - RNA, 22 nt, Artificial Sequence
  Synthetic
ugcacuggaugugggcuacucc

SEQ ID NO: 271866 - RNA, 23 nt, Artificial Sequence
  Synthetic
augcacuggaugugggcuacucc

SEQ ID NO: 271867 - RNA, 24 nt, Artificial Sequence
  Synthetic
caugcacuggaugugggcuacucc

SEQ ID NO: 271868 - RNA, 18 nt, Artificial Sequence
  Synthetic
guauuuuuuucuuacucc

SEQ ID NO: 271869 - RNA, 19 nt, Artificial Sequence
  Synthetic
uguauuuuuuucuuacucc

SEQ ID NO: 271870 - RNA, 20 nt, Artificial Sequence
  Synthetic
auguauuuuuuucuuacucc

SEQ ID NO: 271871 - RNA, 21 nt, Artificial Sequence
  Synthetic
uauguauuuuuuucuuacucc

SEQ ID NO: 271872 - RNA, 22 nt, Artificial Sequence
  Synthetic
auauguauuuuuuucuuacucc

SEQ ID NO: 271873 - RNA, 23 nt, Artificial Sequence
  Synthetic
cauauguauuuuuuucuuacucc

SEQ ID NO: 271874 - RNA, 24 nt, Artificial Sequence
  Synthetic
gcauauguauuuuuuucuuacucc

SEQ ID NO: 271875 - RNA, 18 nt, Artificial Sequence
  Synthetic
ugccuuaaagguuacucc

SEQ ID NO: 271876 - RNA, 19 nt, Artificial Sequence
  Synthetic
augccuuaaagguuacucc

SEQ ID NO: 271877 - RNA, 20 nt, Artificial Sequence
  Synthetic
aaugccuuaaagguuacucc

SEQ ID NO: 271878 - RNA, 21 nt, Artificial Sequence
  Synthetic
uaaugccuuaaagguuacucc

SEQ ID NO: 271879 - RNA, 22 nt, Artificial Sequence
  Synthetic
auaaugccuuaaagguuacucc

SEQ ID NO: 271880 - RNA, 23 nt, Artificial Sequence
  Synthetic
aauaaugccuuaaagguuacucc

SEQ ID NO: 271881 - RNA, 24 nt, Artificial Sequence
  Synthetic
aaauaaugccuuaaagguuacucc

SEQ ID NO: 271882 - RNA, 18 nt, Artificial Sequence
  Synthetic
ccugugggcuuuuacucc

SEQ ID NO: 271883 - RNA, 19 nt, Artificial Sequence
  Synthetic
accugugggcuuuuacucc

SEQ ID NO: 271884 - RNA, 20 nt, Artificial Sequence
  Synthetic
aaccugugggcuuuuacucc

SEQ ID NO: 271885 - RNA, 21 nt, Artificial Sequence
  Synthetic
caaccugugggcuuuuacucc

SEQ ID NO: 271886 - RNA, 22 nt, Artificial Sequence
  Synthetic
ucaaccugugggcuuuuacucc

SEQ ID NO: 271887 - RNA, 23 nt, Artificial Sequence
  Synthetic
uucaaccugugggcuuuuacucc

SEQ ID NO: 271888 - RNA, 24 nt, Artificial Sequence
  Synthetic
cuucaaccugugggcuuuuacucc

SEQ ID NO: 271889 - RNA, 18 nt, Artificial Sequence
  Synthetic
uaagaaugcccaaccucc

SEQ ID NO: 271890 - RNA, 19 nt, Artificial Sequence
  Synthetic
cuaagaaugcccaaccucc

SEQ ID NO: 271891 - RNA, 20 nt, Artificial Sequence
  Synthetic
acuaagaaugcccaaccucc

SEQ ID NO: 271892 - RNA, 21 nt, Artificial Sequence
  Synthetic
gacuaagaaugcccaaccucc

SEQ ID NO: 271893 - RNA, 22 nt, Artificial Sequence
  Synthetic
ugacuaagaaugcccaaccucc

SEQ ID NO: 271894 - RNA, 23 nt, Artificial Sequence
  Synthetic
gugacuaagaaugcccaaccucc

SEQ ID NO: 271895 - RNA, 24 nt, Artificial Sequence
  Synthetic
ugugacuaagaaugcccaaccucc

SEQ ID NO: 271896 - RNA, 18 nt, Artificial Sequence
  Synthetic
guacuuuagggaaccucc

SEQ ID NO: 271897 - RNA, 19 nt, Artificial Sequence
  Synthetic
uguacuuuagggaaccucc

SEQ ID NO: 271898 - RNA, 20 nt, Artificial Sequence
  Synthetic
auguacuuuagggaaccucc

SEQ ID NO: 271899 - RNA, 21 nt, Artificial Sequence
  Synthetic
aauguacuuuagggaaccucc

SEQ ID NO: 271900 - RNA, 22 nt, Artificial Sequence
  Synthetic
caauguacuuuagggaaccucc

SEQ ID NO: 271901 - RNA, 23 nt, Artificial Sequence
  Synthetic
acaauguacuuuagggaaccucc

SEQ ID NO: 271902 - RNA, 24 nt, Artificial Sequence
  Synthetic
aacaauguacuuuagggaaccucc

SEQ ID NO: 271903 - RNA, 18 nt, Artificial Sequence
  Synthetic
aaccuugcuaccaccucc

SEQ ID NO: 271904 - RNA, 19 nt, Artificial Sequence
  Synthetic
gaaccuugcuaccaccucc

SEQ ID NO: 271905 - RNA, 20 nt, Artificial Sequence
  Synthetic
ggaaccuugcuaccaccucc

SEQ ID NO: 271906 - RNA, 21 nt, Artificial Sequence
  Synthetic
uggaaccuugcuaccaccucc

SEQ ID NO: 271907 - RNA, 22 nt, Artificial Sequence
  Synthetic
guggaaccuugcuaccaccucc

SEQ ID NO: 271908 - RNA, 23 nt, Artificial Sequence
  Synthetic
uguggaaccuugcuaccaccucc

SEQ ID NO: 271909 - RNA, 24 nt, Artificial Sequence
  Synthetic
cuguggaaccuugcuaccaccucc

SEQ ID NO: 271910 - RNA, 18 nt, Artificial Sequence
  Synthetic
auggcgcuagagaccucc

SEQ ID NO: 271911 - RNA, 19 nt, Artificial Sequence
  Synthetic
cauggcgcuagagaccucc

SEQ ID NO: 271912 - RNA, 20 nt, Artificial Sequence
  Synthetic
ccauggcgcuagagaccucc

SEQ ID NO: 271913 - RNA, 21 nt, Artificial Sequence
  Synthetic
gccauggcgcuagagaccucc

SEQ ID NO: 271914 - RNA, 22 nt, Artificial Sequence
  Synthetic
agccauggcgcuagagaccucc

SEQ ID NO: 271915 - RNA, 23 nt, Artificial Sequence
  Synthetic
gagccauggcgcuagagaccucc

SEQ ID NO: 271916 - RNA, 24 nt, Artificial Sequence
  Synthetic
agagccauggcgcuagagaccucc

SEQ ID NO: 271917 - RNA, 18 nt, Artificial Sequence
  Synthetic
cuuuaaccucugaccucc

SEQ ID NO: 271918 - RNA, 19 nt, Artificial Sequence
  Synthetic
ucuuuaaccucugaccucc

SEQ ID NO: 271919 - RNA, 20 nt, Artificial Sequence
  Synthetic
uucuuuaaccucugaccucc

SEQ ID NO: 271920 - RNA, 21 nt, Artificial Sequence
  Synthetic
uuucuuuaaccucugaccucc

SEQ ID NO: 271921 - RNA, 22 nt, Artificial Sequence
  Synthetic
uuuucuuuaaccucugaccucc

SEQ ID NO: 271922 - RNA, 23 nt, Artificial Sequence
  Synthetic
auuuucuuuaaccucugaccucc

SEQ ID NO: 271923 - RNA, 24 nt, Artificial Sequence
  Synthetic
cauuuucuuuaaccucugaccucc

SEQ ID NO: 271924 - RNA, 18 nt, Artificial Sequence
  Synthetic
acugcagccuugaccucc

SEQ ID NO: 271925 - RNA, 19 nt, Artificial Sequence
  Synthetic
cacugcagccuugaccucc

SEQ ID NO: 271926 - RNA, 20 nt, Artificial Sequence
  Synthetic
ucacugcagccuugaccucc

SEQ ID NO: 271927 - RNA, 21 nt, Artificial Sequence
  Synthetic
cucacugcagccuugaccucc

SEQ ID NO: 271928 - RNA, 22 nt, Artificial Sequence
  Synthetic
gcucacugcagccuugaccucc

SEQ ID NO: 271929 - RNA, 23 nt, Artificial Sequence
  Synthetic
ggcucacugcagccuugaccucc

SEQ ID NO: 271930 - RNA, 24 nt, Artificial Sequence
  Synthetic
uggcucacugcagccuugaccucc

SEQ ID NO: 271931 - RNA, 18 nt, Artificial Sequence
  Synthetic
uaaacgaaaaaacccucc

SEQ ID NO: 271932 - RNA, 19 nt, Artificial Sequence
  Synthetic
guaaacgaaaaaacccucc

SEQ ID NO: 271933 - RNA, 20 nt, Artificial Sequence
  Synthetic
uguaaacgaaaaaacccucc

SEQ ID NO: 271934 - RNA, 21 nt, Artificial Sequence
  Synthetic
guguaaacgaaaaaacccucc

SEQ ID NO: 271935 - RNA, 22 nt, Artificial Sequence
  Synthetic
uguguaaacgaaaaaacccucc

SEQ ID NO: 271936 - RNA, 23 nt, Artificial Sequence
  Synthetic
auguguaaacgaaaaaacccucc

SEQ ID NO: 271937 - RNA, 24 nt, Artificial Sequence
  Synthetic
aauguguaaacgaaaaaacccucc

SEQ ID NO: 271938 - RNA, 18 nt, Artificial Sequence
  Synthetic
uuuauuucaguacccucc

SEQ ID NO: 271939 - RNA, 19 nt, Artificial Sequence
  Synthetic
auuuauuucaguacccucc

SEQ ID NO: 271940 - RNA, 20 nt, Artificial Sequence
  Synthetic
aauuuauuucaguacccucc

SEQ ID NO: 271941 - RNA, 21 nt, Artificial Sequence
  Synthetic
gaauuuauuucaguacccucc

SEQ ID NO: 271942 - RNA, 22 nt, Artificial Sequence
  Synthetic
agaauuuauuucaguacccucc

SEQ ID NO: 271943 - RNA, 23 nt, Artificial Sequence
  Synthetic
uagaauuuauuucaguacccucc

SEQ ID NO: 271944 - RNA, 24 nt, Artificial Sequence
  Synthetic
guagaauuuauuucaguacccucc

SEQ ID NO: 271945 - RNA, 18 nt, Artificial Sequence
  Synthetic
uauauauucucccccucc

SEQ ID NO: 271946 - RNA, 19 nt, Artificial Sequence
  Synthetic
cuauauauucucccccucc

SEQ ID NO: 271947 - RNA, 20 nt, Artificial Sequence
  Synthetic
ucuauauauucucccccucc

SEQ ID NO: 271948 - RNA, 21 nt, Artificial Sequence
  Synthetic
cucuauauauucucccccucc

SEQ ID NO: 271949 - RNA, 22 nt, Artificial Sequence
  Synthetic
gcucuauauauucucccccucc

SEQ ID NO: 271950 - RNA, 23 nt, Artificial Sequence
  Synthetic
ugcucuauauauucucccccucc

SEQ ID NO: 271951 - RNA, 24 nt, Artificial Sequence
  Synthetic
augcucuauauauucucccccucc

SEQ ID NO: 271952 - RNA, 18 nt, Artificial Sequence
  Synthetic
ccuccccuaagccccucc

SEQ ID NO: 271953 - RNA, 19 nt, Artificial Sequence
  Synthetic
uccuccccuaagccccucc

SEQ ID NO: 271954 - RNA, 20 nt, Artificial Sequence
  Synthetic
auccuccccuaagccccucc

SEQ ID NO: 271955 - RNA, 21 nt, Artificial Sequence
  Synthetic
aauccuccccuaagccccucc

SEQ ID NO: 271956 - RNA, 22 nt, Artificial Sequence
  Synthetic
uaauccuccccuaagccccucc

SEQ ID NO: 271957 - RNA, 23 nt, Artificial Sequence
  Synthetic
uuaauccuccccuaagccccucc

SEQ ID NO: 271958 - RNA, 24 nt, Artificial Sequence
  Synthetic
uuuaauccuccccuaagccccucc

SEQ ID NO: 271959 - RNA, 18 nt, Artificial Sequence
  Synthetic
ucuuucauaaugcccucc

SEQ ID NO: 271960 - RNA, 19 nt, Artificial Sequence
  Synthetic
aucuuucauaaugcccucc

SEQ ID NO: 271961 - RNA, 20 nt, Artificial Sequence
  Synthetic
uaucuuucauaaugcccucc

SEQ ID NO: 271962 - RNA, 21 nt, Artificial Sequence
  Synthetic
uuaucuuucauaaugcccucc

SEQ ID NO: 271963 - RNA, 22 nt, Artificial Sequence
  Synthetic
uuuaucuuucauaaugcccucc

SEQ ID NO: 271964 - RNA, 23 nt, Artificial Sequence
  Synthetic
uuuuaucuuucauaaugcccucc

SEQ ID NO: 271965 - RNA, 24 nt, Artificial Sequence
  Synthetic
auuuuaucuuucauaaugcccucc

SEQ ID NO: 271966 - RNA, 18 nt, Artificial Sequence
  Synthetic
ucuccaccugaucccucc

SEQ ID NO: 271967 - RNA, 19 nt, Artificial Sequence
  Synthetic
aucuccaccugaucccucc

SEQ ID NO: 271968 - RNA, 20 nt, Artificial Sequence
  Synthetic
uaucuccaccugaucccucc

SEQ ID NO: 271969 - RNA, 21 nt, Artificial Sequence
  Synthetic
uuaucuccaccugaucccucc

SEQ ID NO: 271970 - RNA, 22 nt, Artificial Sequence
  Synthetic
auuaucuccaccugaucccucc

SEQ ID NO: 271971 - RNA, 23 nt, Artificial Sequence
  Synthetic
aauuaucuccaccugaucccucc

SEQ ID NO: 271972 - RNA, 24 nt, Artificial Sequence
  Synthetic
caauuaucuccaccugaucccucc

SEQ ID NO: 271973 - RNA, 18 nt, Artificial Sequence
  Synthetic
ucuaccuuccuucccucc

SEQ ID NO: 271974 - RNA, 19 nt, Artificial Sequence
  Synthetic
cucuaccuuccuucccucc

SEQ ID NO: 271975 - RNA, 20 nt, Artificial Sequence
  Synthetic
ucucuaccuuccuucccucc

SEQ ID NO: 271976 - RNA, 21 nt, Artificial Sequence
  Synthetic
cucucuaccuuccuucccucc

SEQ ID NO: 271977 - RNA, 22 nt, Artificial Sequence
  Synthetic
ucucucuaccuuccuucccucc

SEQ ID NO: 271978 - RNA, 23 nt, Artificial Sequence
  Synthetic
uucucucuaccuuccuucccucc

SEQ ID NO: 271979 - RNA, 24 nt, Artificial Sequence
  Synthetic
cuucucucuaccuuccuucccucc

SEQ ID NO: 271980 - RNA, 18 nt, Artificial Sequence
  Synthetic
uaaaacuuaaaagccucc

SEQ ID NO: 271981 - RNA, 19 nt, Artificial Sequence
  Synthetic
uuaaaacuuaaaagccucc

SEQ ID NO: 271982 - RNA, 20 nt, Artificial Sequence
  Synthetic
guuaaaacuuaaaagccucc

SEQ ID NO: 271983 - RNA, 21 nt, Artificial Sequence
  Synthetic
uguuaaaacuuaaaagccucc

SEQ ID NO: 271984 - RNA, 22 nt, Artificial Sequence
  Synthetic
uuguuaaaacuuaaaagccucc

SEQ ID NO: 271985 - RNA, 23 nt, Artificial Sequence
  Synthetic
uuuguuaaaacuuaaaagccucc

SEQ ID NO: 271986 - RNA, 24 nt, Artificial Sequence
  Synthetic
uuuuguuaaaacuuaaaagccucc

SEQ ID NO: 271987 - RNA, 18 nt, Artificial Sequence
  Synthetic
ugcuaguuggaagccucc

SEQ ID NO: 271988 - RNA, 19 nt, Artificial Sequence
  Synthetic
uugcuaguuggaagccucc

SEQ ID NO: 271989 - RNA, 20 nt, Artificial Sequence
  Synthetic
guugcuaguuggaagccucc

SEQ ID NO: 271990 - RNA, 21 nt, Artificial Sequence
  Synthetic
gguugcuaguuggaagccucc

SEQ ID NO: 271991 - RNA, 22 nt, Artificial Sequence
  Synthetic
ggguugcuaguuggaagccucc

SEQ ID NO: 271992 - RNA, 23 nt, Artificial Sequence
  Synthetic
cggguugcuaguuggaagccucc

SEQ ID NO: 271993 - RNA, 24 nt, Artificial Sequence
  Synthetic
acggguugcuaguuggaagccucc

SEQ ID NO: 271994 - RNA, 18 nt, Artificial Sequence
  Synthetic
gcuucuggggaggccucc

SEQ ID NO: 271995 - RNA, 19 nt, Artificial Sequence
  Synthetic
agcuucuggggaggccucc

SEQ ID NO: 271996 - RNA, 20 nt, Artificial Sequence
  Synthetic
cagcuucuggggaggccucc

SEQ ID NO: 271997 - RNA, 21 nt, Artificial Sequence
  Synthetic
ucagcuucuggggaggccucc

SEQ ID NO: 271998 - RNA, 22 nt, Artificial Sequence
  Synthetic
cucagcuucuggggaggccucc

SEQ ID NO: 271999 - RNA, 23 nt, Artificial Sequence
  Synthetic
acucagcuucuggggaggccucc

SEQ ID NO: 272000 - RNA, 24 nt, Artificial Sequence
  Synthetic
uacucagcuucuggggaggccucc

SEQ ID NO: 272001 - RNA, 18 nt, Artificial Sequence
  Synthetic
ccacccgcuuuggccucc

SEQ ID NO: 272002 - RNA, 19 nt, Artificial Sequence
  Synthetic
uccacccgcuuuggccucc

SEQ ID NO: 272003 - RNA, 20 nt, Artificial Sequence
  Synthetic
auccacccgcuuuggccucc

SEQ ID NO: 272004 - RNA, 21 nt, Artificial Sequence
  Synthetic
gauccacccgcuuuggccucc

SEQ ID NO: 272005 - RNA, 22 nt, Artificial Sequence
  Synthetic
ugauccacccgcuuuggccucc

SEQ ID NO: 272006 - RNA, 23 nt, Artificial Sequence
  Synthetic
augauccacccgcuuuggccucc

SEQ ID NO: 272007 - RNA, 24 nt, Artificial Sequence
  Synthetic
caugauccacccgcuuuggccucc

SEQ ID NO: 272008 - RNA, 18 nt, Artificial Sequence
  Synthetic
cauuugucuaaugccucc

SEQ ID NO: 272009 - RNA, 19 nt, Artificial Sequence
  Synthetic
ucauuugucuaaugccucc

SEQ ID NO: 272010 - RNA, 20 nt, Artificial Sequence
  Synthetic
uucauuugucuaaugccucc

SEQ ID NO: 272011 - RNA, 21 nt, Artificial Sequence
  Synthetic
cuucauuugucuaaugccucc

SEQ ID NO: 272012 - RNA, 22 nt, Artificial Sequence
  Synthetic
acuucauuugucuaaugccucc

SEQ ID NO: 272013 - RNA, 23 nt, Artificial Sequence
  Synthetic
cacuucauuugucuaaugccucc

SEQ ID NO: 272014 - RNA, 24 nt, Artificial Sequence
  Synthetic
ucacuucauuugucuaaugccucc

SEQ ID NO: 272015 - RNA, 18 nt, Artificial Sequence
  Synthetic
cagaauuuuggugccucc

SEQ ID NO: 272016 - RNA, 19 nt, Artificial Sequence
  Synthetic
gcagaauuuuggugccucc

SEQ ID NO: 272017 - RNA, 20 nt, Artificial Sequence
  Synthetic
ugcagaauuuuggugccucc

SEQ ID NO: 272018 - RNA, 21 nt, Artificial Sequence
  Synthetic
augcagaauuuuggugccucc

SEQ ID NO: 272019 - RNA, 22 nt, Artificial Sequence
  Synthetic
aaugcagaauuuuggugccucc

SEQ ID NO: 272020 - RNA, 23 nt, Artificial Sequence
  Synthetic
aaaugcagaauuuuggugccucc

SEQ ID NO: 272021 - RNA, 24 nt, Artificial Sequence
  Synthetic
gaaaugcagaauuuuggugccucc

SEQ ID NO: 272022 - RNA, 18 nt, Artificial Sequence
  Synthetic
uuuccuacuuaguccucc

SEQ ID NO: 272023 - RNA, 19 nt, Artificial Sequence
  Synthetic
uuuuccuacuuaguccucc

SEQ ID NO: 272024 - RNA, 20 nt, Artificial Sequence
  Synthetic
uuuuuccuacuuaguccucc

SEQ ID NO: 272025 - RNA, 21 nt, Artificial Sequence
  Synthetic
uuuuuuccuacuuaguccucc

SEQ ID NO: 272026 - RNA, 22 nt, Artificial Sequence
  Synthetic
cuuuuuuccuacuuaguccucc

SEQ ID NO: 272027 - RNA, 23 nt, Artificial Sequence
  Synthetic
ccuuuuuuccuacuuaguccucc

SEQ ID NO: 272028 - RNA, 24 nt, Artificial Sequence
  Synthetic
accuuuuuuccuacuuaguccucc

SEQ ID NO: 272029 - RNA, 18 nt, Artificial Sequence
  Synthetic
cuucuuaaggcuuccucc

SEQ ID NO: 272030 - RNA, 19 nt, Artificial Sequence
  Synthetic
ucuucuuaaggcuuccucc

SEQ ID NO: 272031 - RNA, 20 nt, Artificial Sequence
  Synthetic
aucuucuuaaggcuuccucc

SEQ ID NO: 272032 - RNA, 21 nt, Artificial Sequence
  Synthetic
aaucuucuuaaggcuuccucc

SEQ ID NO: 272033 - RNA, 22 nt, Artificial Sequence
  Synthetic
uaaucuucuuaaggcuuccucc

SEQ ID NO: 272034 - RNA, 23 nt, Artificial Sequence
  Synthetic
cuaaucuucuuaaggcuuccucc

SEQ ID NO: 272035 - RNA, 24 nt, Artificial Sequence
  Synthetic
ccuaaucuucuuaaggcuuccucc

SEQ ID NO: 272036 - RNA, 18 nt, Artificial Sequence
  Synthetic
cucuaaacgaguuccucc

SEQ ID NO: 272037 - RNA, 19 nt, Artificial Sequence
  Synthetic
ccucuaaacgaguuccucc

SEQ ID NO: 272038 - RNA, 20 nt, Artificial Sequence
  Synthetic
cccucuaaacgaguuccucc

SEQ ID NO: 272039 - RNA, 21 nt, Artificial Sequence
  Synthetic
ucccucuaaacgaguuccucc

SEQ ID NO: 272040 - RNA, 22 nt, Artificial Sequence
  Synthetic
uucccucuaaacgaguuccucc

SEQ ID NO: 272041 - RNA, 23 nt, Artificial Sequence
  Synthetic
uuucccucuaaacgaguuccucc

SEQ ID NO: 272042 - RNA, 24 nt, Artificial Sequence
  Synthetic
guuucccucuaaacgaguuccucc

SEQ ID NO: 272043 - RNA, 18 nt, Artificial Sequence
  Synthetic
ugauaugcauaaagcucc

SEQ ID NO: 272044 - RNA, 19 nt, Artificial Sequence
  Synthetic
cugauaugcauaaagcucc

SEQ ID NO: 272045 - RNA, 20 nt, Artificial Sequence
  Synthetic
ccugauaugcauaaagcucc

SEQ ID NO: 272046 - RNA, 21 nt, Artificial Sequence
  Synthetic
gccugauaugcauaaagcucc

SEQ ID NO: 272047 - RNA, 22 nt, Artificial Sequence
  Synthetic
ugccugauaugcauaaagcucc

SEQ ID NO: 272048 - RNA, 23 nt, Artificial Sequence
  Synthetic
gugccugauaugcauaaagcucc

SEQ ID NO: 272049 - RNA, 24 nt, Artificial Sequence
  Synthetic
agugccugauaugcauaaagcucc

SEQ ID NO: 272050 - RNA, 18 nt, Artificial Sequence
  Synthetic
gaccuaucuugcagcucc

SEQ ID NO: 272051 - RNA, 19 nt, Artificial Sequence
  Synthetic
ugaccuaucuugcagcucc

SEQ ID NO: 272052 - RNA, 20 nt, Artificial Sequence
  Synthetic
uugaccuaucuugcagcucc

SEQ ID NO: 272053 - RNA, 21 nt, Artificial Sequence
  Synthetic
uuugaccuaucuugcagcucc

SEQ ID NO: 272054 - RNA, 22 nt, Artificial Sequence
  Synthetic
guuugaccuaucuugcagcucc

SEQ ID NO: 272055 - RNA, 23 nt, Artificial Sequence
  Synthetic
uguuugaccuaucuugcagcucc

SEQ ID NO: 272056 - RNA, 24 nt, Artificial Sequence
  Synthetic
cuguuugaccuaucuugcagcucc

SEQ ID NO: 272057 - RNA, 18 nt, Artificial Sequence
  Synthetic
aaaaagaggcucagcucc

SEQ ID NO: 272058 - RNA, 19 nt, Artificial Sequence
  Synthetic
aaaaaagaggcucagcucc

SEQ ID NO: 272059 - RNA, 20 nt, Artificial Sequence
  Synthetic
caaaaaagaggcucagcucc

SEQ ID NO: 272060 - RNA, 21 nt, Artificial Sequence
  Synthetic
ucaaaaaagaggcucagcucc

SEQ ID NO: 272061 - RNA, 22 nt, Artificial Sequence
  Synthetic
cucaaaaaagaggcucagcucc

SEQ ID NO: 272062 - RNA, 23 nt, Artificial Sequence
  Synthetic
acucaaaaaagaggcucagcucc

SEQ ID NO: 272063 - RNA, 24 nt, Artificial Sequence
  Synthetic
aacucaaaaaagaggcucagcucc

SEQ ID NO: 272064 - RNA, 18 nt, Artificial Sequence
  Synthetic
gaaauacauuucagcucc

SEQ ID NO: 272065 - RNA, 19 nt, Artificial Sequence
  Synthetic
agaaauacauuucagcucc

SEQ ID NO: 272066 - RNA, 20 nt, Artificial Sequence
  Synthetic
gagaaauacauuucagcucc

SEQ ID NO: 272067 - RNA, 21 nt, Artificial Sequence
  Synthetic
ggagaaauacauuucagcucc

SEQ ID NO: 272068 - RNA, 22 nt, Artificial Sequence
  Synthetic
gggagaaauacauuucagcucc

SEQ ID NO: 272069 - RNA, 23 nt, Artificial Sequence
  Synthetic
ugggagaaauacauuucagcucc

SEQ ID NO: 272070 - RNA, 24 nt, Artificial Sequence
  Synthetic
cugggagaaauacauuucagcucc

SEQ ID NO: 272071 - RNA, 18 nt, Artificial Sequence
  Synthetic
aguuaaauucugcgcucc

SEQ ID NO: 272072 - RNA, 19 nt, Artificial Sequence
  Synthetic
caguuaaauucugcgcucc

SEQ ID NO: 272073 - RNA, 20 nt, Artificial Sequence
  Synthetic
ccaguuaaauucugcgcucc

SEQ ID NO: 272074 - RNA, 21 nt, Artificial Sequence
  Synthetic
uccaguuaaauucugcgcucc

SEQ ID NO: 272075 - RNA, 22 nt, Artificial Sequence
  Synthetic
cuccaguuaaauucugcgcucc

SEQ ID NO: 272076 - RNA, 23 nt, Artificial Sequence
  Synthetic
ccuccaguuaaauucugcgcucc

SEQ ID NO: 272077 - RNA, 24 nt, Artificial Sequence
  Synthetic
uccuccaguuaaauucugcgcucc

SEQ ID NO: 272078 - RNA, 18 nt, Artificial Sequence
  Synthetic
acuguauaauagggcucc

SEQ ID NO: 272079 - RNA, 19 nt, Artificial Sequence
  Synthetic
gacuguauaauagggcucc

SEQ ID NO: 272080 - RNA, 20 nt, Artificial Sequence
  Synthetic
ugacuguauaauagggcucc

SEQ ID NO: 272081 - RNA, 21 nt, Artificial Sequence
  Synthetic
augacuguauaauagggcucc

SEQ ID NO: 272082 - RNA, 22 nt, Artificial Sequence
  Synthetic
aaugacuguauaauagggcucc

SEQ ID NO: 272083 - RNA, 23 nt, Artificial Sequence
  Synthetic
gaaugacuguauaauagggcucc

SEQ ID NO: 272084 - RNA, 24 nt, Artificial Sequence
  Synthetic
ugaaugacuguauaauagggcucc

SEQ ID NO: 272085 - RNA, 18 nt, Artificial Sequence
  Synthetic
uaacuuagacugggcucc

SEQ ID NO: 272086 - RNA, 19 nt, Artificial Sequence
  Synthetic
cuaacuuagacugggcucc

SEQ ID NO: 272087 - RNA, 20 nt, Artificial Sequence
  Synthetic
ucuaacuuagacugggcucc

SEQ ID NO: 272088 - RNA, 21 nt, Artificial Sequence
  Synthetic
aucuaacuuagacugggcucc

SEQ ID NO: 272089 - RNA, 22 nt, Artificial Sequence
  Synthetic
caucuaacuuagacugggcucc

SEQ ID NO: 272090 - RNA, 23 nt, Artificial Sequence
  Synthetic
ccaucuaacuuagacugggcucc

SEQ ID NO: 272091 - RNA, 24 nt, Artificial Sequence
  Synthetic
cccaucuaacuuagacugggcucc

SEQ ID NO: 272092 - RNA, 18 nt, Artificial Sequence
  Synthetic
aggcauuugcuuggcucc

SEQ ID NO: 272093 - RNA, 19 nt, Artificial Sequence
  Synthetic
caggcauuugcuuggcucc

SEQ ID NO: 272094 - RNA, 20 nt, Artificial Sequence
  Synthetic
acaggcauuugcuuggcucc

SEQ ID NO: 272095 - RNA, 21 nt, Artificial Sequence
  Synthetic
cacaggcauuugcuuggcucc

SEQ ID NO: 272096 - RNA, 22 nt, Artificial Sequence
  Synthetic
gcacaggcauuugcuuggcucc

SEQ ID NO: 272097 - RNA, 23 nt, Artificial Sequence
  Synthetic
ggcacaggcauuugcuuggcucc

SEQ ID NO: 272098 - RNA, 24 nt, Artificial Sequence
  Synthetic
uggcacaggcauuugcuuggcucc

SEQ ID NO: 272099 - RNA, 18 nt, Artificial Sequence
  Synthetic
cccuacauuuaaugcucc

SEQ ID NO: 272100 - RNA, 19 nt, Artificial Sequence
  Synthetic
acccuacauuuaaugcucc

SEQ ID NO: 272101 - RNA, 20 nt, Artificial Sequence
  Synthetic
cacccuacauuuaaugcucc

SEQ ID NO: 272102 - RNA, 21 nt, Artificial Sequence
  Synthetic
gcacccuacauuuaaugcucc

SEQ ID NO: 272103 - RNA, 22 nt, Artificial Sequence
  Synthetic
ggcacccuacauuuaaugcucc

SEQ ID NO: 272104 - RNA, 23 nt, Artificial Sequence
  Synthetic
aggcacccuacauuuaaugcucc

SEQ ID NO: 272105 - RNA, 24 nt, Artificial Sequence
  Synthetic
caggcacccuacauuuaaugcucc

SEQ ID NO: 272106 - RNA, 18 nt, Artificial Sequence
  Synthetic
ugcgcuggguucugcucc

SEQ ID NO: 272107 - RNA, 19 nt, Artificial Sequence
  Synthetic
uugcgcuggguucugcucc

SEQ ID NO: 272108 - RNA, 20 nt, Artificial Sequence
  Synthetic
cuugcgcuggguucugcucc

SEQ ID NO: 272109 - RNA, 21 nt, Artificial Sequence
  Synthetic
gcuugcgcuggguucugcucc

SEQ ID NO: 272110 - RNA, 22 nt, Artificial Sequence
  Synthetic
ugcuugcgcuggguucugcucc

SEQ ID NO: 272111 - RNA, 23 nt, Artificial Sequence
  Synthetic
uugcuugcgcuggguucugcucc

SEQ ID NO: 272112 - RNA, 24 nt, Artificial Sequence
  Synthetic
cuugcuugcgcuggguucugcucc

SEQ ID NO: 272113 - RNA, 18 nt, Artificial Sequence
  Synthetic
cgaugggcuaaaaucucc

SEQ ID NO: 272114 - RNA, 19 nt, Artificial Sequence
  Synthetic
ccgaugggcuaaaaucucc

SEQ ID NO: 272115 - RNA, 20 nt, Artificial Sequence
  Synthetic
gccgaugggcuaaaaucucc

SEQ ID NO: 272116 - RNA, 21 nt, Artificial Sequence
  Synthetic
ggccgaugggcuaaaaucucc

SEQ ID NO: 272117 - RNA, 22 nt, Artificial Sequence
  Synthetic
gggccgaugggcuaaaaucucc

SEQ ID NO: 272118 - RNA, 23 nt, Artificial Sequence
  Synthetic
ugggccgaugggcuaaaaucucc

SEQ ID NO: 272119 - RNA, 24 nt, Artificial Sequence
  Synthetic
augggccgaugggcuaaaaucucc

SEQ ID NO: 272120 - RNA, 18 nt, Artificial Sequence
  Synthetic
cccuccaucagaaucucc

SEQ ID NO: 272121 - RNA, 19 nt, Artificial Sequence
  Synthetic
ccccuccaucagaaucucc

SEQ ID NO: 272122 - RNA, 20 nt, Artificial Sequence
  Synthetic
accccuccaucagaaucucc

SEQ ID NO: 272123 - RNA, 21 nt, Artificial Sequence
  Synthetic
aaccccuccaucagaaucucc

SEQ ID NO: 272124 - RNA, 22 nt, Artificial Sequence
  Synthetic
gaaccccuccaucagaaucucc

SEQ ID NO: 272125 - RNA, 23 nt, Artificial Sequence
  Synthetic
agaaccccuccaucagaaucucc

SEQ ID NO: 272126 - RNA, 24 nt, Artificial Sequence
  Synthetic
cagaaccccuccaucagaaucucc

SEQ ID NO: 272127 - RNA, 18 nt, Artificial Sequence
  Synthetic
agcuccacuggaaucucc

SEQ ID NO: 272128 - RNA, 19 nt, Artificial Sequence
  Synthetic
uagcuccacuggaaucucc

SEQ ID NO: 272129 - RNA, 20 nt, Artificial Sequence
  Synthetic
uuagcuccacuggaaucucc

SEQ ID NO: 272130 - RNA, 21 nt, Artificial Sequence
  Synthetic
uuuagcuccacuggaaucucc

SEQ ID NO: 272131 - RNA, 22 nt, Artificial Sequence
  Synthetic
cuuuagcuccacuggaaucucc

SEQ ID NO: 272132 - RNA, 23 nt, Artificial Sequence
  Synthetic
acuuuagcuccacuggaaucucc

SEQ ID NO: 272133 - RNA, 24 nt, Artificial Sequence
  Synthetic
aacuuuagcuccacuggaaucucc

SEQ ID NO: 272134 - RNA, 18 nt, Artificial Sequence
  Synthetic
uaaacugcucacaucucc

SEQ ID NO: 272135 - RNA, 19 nt, Artificial Sequence
  Synthetic
uuaaacugcucacaucucc

SEQ ID NO: 272136 - RNA, 20 nt, Artificial Sequence
  Synthetic
guuaaacugcucacaucucc

SEQ ID NO: 272137 - RNA, 21 nt, Artificial Sequence
  Synthetic
uguuaaacugcucacaucucc

SEQ ID NO: 272138 - RNA, 22 nt, Artificial Sequence
  Synthetic
auguuaaacugcucacaucucc

SEQ ID NO: 272139 - RNA, 23 nt, Artificial Sequence
  Synthetic
uauguuaaacugcucacaucucc

SEQ ID NO: 272140 - RNA, 24 nt, Artificial Sequence
  Synthetic
cuauguuaaacugcucacaucucc

SEQ ID NO: 272141 - RNA, 18 nt, Artificial Sequence
  Synthetic
gauaaaacucccaucucc

SEQ ID NO: 272142 - RNA, 19 nt, Artificial Sequence
  Synthetic
agauaaaacucccaucucc

SEQ ID NO: 272143 - RNA, 20 nt, Artificial Sequence
  Synthetic
uagauaaaacucccaucucc

SEQ ID NO: 272144 - RNA, 21 nt, Artificial Sequence
  Synthetic
auagauaaaacucccaucucc

SEQ ID NO: 272145 - RNA, 22 nt, Artificial Sequence
  Synthetic
uauagauaaaacucccaucucc

SEQ ID NO: 272146 - RNA, 23 nt, Artificial Sequence
  Synthetic
uuauagauaaaacucccaucucc

SEQ ID NO: 272147 - RNA, 24 nt, Artificial Sequence
  Synthetic
cuuauagauaaaacucccaucucc

SEQ ID NO: 272148 - RNA, 18 nt, Artificial Sequence
  Synthetic
ugaugaauucucaucucc

SEQ ID NO: 272149 - RNA, 19 nt, Artificial Sequence
  Synthetic
augaugaauucucaucucc

SEQ ID NO: 272150 - RNA, 20 nt, Artificial Sequence
  Synthetic
caugaugaauucucaucucc

SEQ ID NO: 272151 - RNA, 21 nt, Artificial Sequence
  Synthetic
ccaugaugaauucucaucucc

SEQ ID NO: 272152 - RNA, 22 nt, Artificial Sequence
  Synthetic
uccaugaugaauucucaucucc

SEQ ID NO: 272153 - RNA, 23 nt, Artificial Sequence
  Synthetic
auccaugaugaauucucaucucc

SEQ ID NO: 272154 - RNA, 24 nt, Artificial Sequence
  Synthetic
aauccaugaugaauucucaucucc

SEQ ID NO: 272155 - RNA, 18 nt, Artificial Sequence
  Synthetic
caguuuaguaagaucucc

SEQ ID NO: 272156 - RNA, 19 nt, Artificial Sequence
  Synthetic
gcaguuuaguaagaucucc

SEQ ID NO: 272157 - RNA, 20 nt, Artificial Sequence
  Synthetic
ugcaguuuaguaagaucucc

SEQ ID NO: 272158 - RNA, 21 nt, Artificial Sequence
  Synthetic
uugcaguuuaguaagaucucc

SEQ ID NO: 272159 - RNA, 22 nt, Artificial Sequence
  Synthetic
cuugcaguuuaguaagaucucc

SEQ ID NO: 272160 - RNA, 23 nt, Artificial Sequence
  Synthetic
acuugcaguuuaguaagaucucc

SEQ ID NO: 272161 - RNA, 24 nt, Artificial Sequence
  Synthetic
aacuugcaguuuaguaagaucucc

SEQ ID NO: 272162 - RNA, 18 nt, Artificial Sequence
  Synthetic
uucauuuuuaagaucucc

SEQ ID NO: 272163 - RNA, 19 nt, Artificial Sequence
  Synthetic
auucauuuuuaagaucucc

SEQ ID NO: 272164 - RNA, 20 nt, Artificial Sequence
  Synthetic
cauucauuuuuaagaucucc

SEQ ID NO: 272165 - RNA, 21 nt, Artificial Sequence
  Synthetic
ucauucauuuuuaagaucucc

SEQ ID NO: 272166 - RNA, 22 nt, Artificial Sequence
  Synthetic
aucauucauuuuuaagaucucc

SEQ ID NO: 272167 - RNA, 23 nt, Artificial Sequence
  Synthetic
uaucauucauuuuuaagaucucc

SEQ ID NO: 272168 - RNA, 24 nt, Artificial Sequence
  Synthetic
uuaucauucauuuuuaagaucucc

SEQ ID NO: 272169 - RNA, 18 nt, Artificial Sequence
  Synthetic
ucgagggacgggaucucc

SEQ ID NO: 272170 - RNA, 19 nt, Artificial Sequence
  Synthetic
uucgagggacgggaucucc

SEQ ID NO: 272171 - RNA, 20 nt, Artificial Sequence
  Synthetic
auucgagggacgggaucucc

SEQ ID NO: 272172 - RNA, 21 nt, Artificial Sequence
  Synthetic
aauucgagggacgggaucucc

SEQ ID NO: 272173 - RNA, 22 nt, Artificial Sequence
  Synthetic
gaauucgagggacgggaucucc

SEQ ID NO: 272174 - RNA, 23 nt, Artificial Sequence
  Synthetic
ugaauucgagggacgggaucucc

SEQ ID NO: 272175 - RNA, 24 nt, Artificial Sequence
  Synthetic
augaauucgagggacgggaucucc

SEQ ID NO: 272176 - RNA, 18 nt, Artificial Sequence
  Synthetic
uauauaagaaauaucucc

SEQ ID NO: 272177 - RNA, 19 nt, Artificial Sequence
  Synthetic
auauauaagaaauaucucc

SEQ ID NO: 272178 - RNA, 20 nt, Artificial Sequence
  Synthetic
gauauauaagaaauaucucc

SEQ ID NO: 272179 - RNA, 21 nt, Artificial Sequence
  Synthetic
cgauauauaagaaauaucucc

SEQ ID NO: 272180 - RNA, 22 nt, Artificial Sequence
  Synthetic
acgauauauaagaaauaucucc

SEQ ID NO: 272181 - RNA, 23 nt, Artificial Sequence
  Synthetic
uacgauauauaagaaauaucucc

SEQ ID NO: 272182 - RNA, 24 nt, Artificial Sequence
  Synthetic
uuacgauauauaagaaauaucucc

SEQ ID NO: 272183 - RNA, 18 nt, Artificial Sequence
  Synthetic
ucaauuggcuguaucucc

SEQ ID NO: 272184 - RNA, 19 nt, Artificial Sequence
  Synthetic
aucaauuggcuguaucucc

SEQ ID NO: 272185 - RNA, 20 nt, Artificial Sequence
  Synthetic
caucaauuggcuguaucucc

SEQ ID NO: 272186 - RNA, 21 nt, Artificial Sequence
  Synthetic
gcaucaauuggcuguaucucc

SEQ ID NO: 272187 - RNA, 22 nt, Artificial Sequence
  Synthetic
agcaucaauuggcuguaucucc

SEQ ID NO: 272188 - RNA, 23 nt, Artificial Sequence
  Synthetic
aagcaucaauuggcuguaucucc

SEQ ID NO: 272189 - RNA, 24 nt, Artificial Sequence
  Synthetic
gaagcaucaauuggcuguaucucc

SEQ ID NO: 272190 - RNA, 18 nt, Artificial Sequence
  Synthetic
accauugcaguuaucucc

SEQ ID NO: 272191 - RNA, 19 nt, Artificial Sequence
  Synthetic
gaccauugcaguuaucucc

SEQ ID NO: 272192 - RNA, 20 nt, Artificial Sequence
  Synthetic
agaccauugcaguuaucucc

SEQ ID NO: 272193 - RNA, 21 nt, Artificial Sequence
  Synthetic
uagaccauugcaguuaucucc

SEQ ID NO: 272194 - RNA, 22 nt, Artificial Sequence
  Synthetic
uuagaccauugcaguuaucucc

SEQ ID NO: 272195 - RNA, 23 nt, Artificial Sequence
  Synthetic
uuuagaccauugcaguuaucucc

SEQ ID NO: 272196 - RNA, 24 nt, Artificial Sequence
  Synthetic
uuuuagaccauugcaguuaucucc

SEQ ID NO: 272197 - RNA, 18 nt, Artificial Sequence
  Synthetic
uaucacugaaaacucucc

SEQ ID NO: 272198 - RNA, 19 nt, Artificial Sequence
  Synthetic
uuaucacugaaaacucucc

SEQ ID NO: 272199 - RNA, 20 nt, Artificial Sequence
  Synthetic
uuuaucacugaaaacucucc

SEQ ID NO: 272200 - RNA, 21 nt, Artificial Sequence
  Synthetic
cuuuaucacugaaaacucucc

SEQ ID NO: 272201 - RNA, 22 nt, Artificial Sequence
  Synthetic
gcuuuaucacugaaaacucucc

SEQ ID NO: 272202 - RNA, 23 nt, Artificial Sequence
  Synthetic
ugcuuuaucacugaaaacucucc

SEQ ID NO: 272203 - RNA, 24 nt, Artificial Sequence
  Synthetic
augcuuuaucacugaaaacucucc

SEQ ID NO: 272204 - RNA, 18 nt, Artificial Sequence
  Synthetic
aacaaaauagaacucucc

SEQ ID NO: 272205 - RNA, 19 nt, Artificial Sequence
  Synthetic
aaacaaaauagaacucucc

SEQ ID NO: 272206 - RNA, 20 nt, Artificial Sequence
  Synthetic
aaaacaaaauagaacucucc

SEQ ID NO: 272207 - RNA, 21 nt, Artificial Sequence
  Synthetic
caaaacaaaauagaacucucc

SEQ ID NO: 272208 - RNA, 22 nt, Artificial Sequence
  Synthetic
acaaaacaaaauagaacucucc

SEQ ID NO: 272209 - RNA, 23 nt, Artificial Sequence
  Synthetic
aacaaaacaaaauagaacucucc

SEQ ID NO: 272210 - RNA, 24 nt, Artificial Sequence
  Synthetic
gaacaaaacaaaauagaacucucc

SEQ ID NO: 272211 - RNA, 18 nt, Artificial Sequence
  Synthetic
cuucauguuuaacucucc

SEQ ID NO: 272212 - RNA, 19 nt, Artificial Sequence
  Synthetic
acuucauguuuaacucucc

SEQ ID NO: 272213 - RNA, 20 nt, Artificial Sequence
  Synthetic
cacuucauguuuaacucucc

SEQ ID NO: 272214 - RNA, 21 nt, Artificial Sequence
  Synthetic
ucacuucauguuuaacucucc

SEQ ID NO: 272215 - RNA, 22 nt, Artificial Sequence
  Synthetic
gucacuucauguuuaacucucc

SEQ ID NO: 272216 - RNA, 23 nt, Artificial Sequence
  Synthetic
ugucacuucauguuuaacucucc

SEQ ID NO: 272217 - RNA, 24 nt, Artificial Sequence
  Synthetic
uugucacuucauguuuaacucucc

SEQ ID NO: 272218 - RNA, 18 nt, Artificial Sequence
  Synthetic
cuucauguggaccucucc

SEQ ID NO: 272219 - RNA, 19 nt, Artificial Sequence
  Synthetic
ucuucauguggaccucucc

SEQ ID NO: 272220 - RNA, 20 nt, Artificial Sequence
  Synthetic
uucuucauguggaccucucc

SEQ ID NO: 272221 - RNA, 21 nt, Artificial Sequence
  Synthetic
uuucuucauguggaccucucc

SEQ ID NO: 272222 - RNA, 22 nt, Artificial Sequence
  Synthetic
uuuucuucauguggaccucucc

SEQ ID NO: 272223 - RNA, 23 nt, Artificial Sequence
  Synthetic
uuuuucuucauguggaccucucc

SEQ ID NO: 272224 - RNA, 24 nt, Artificial Sequence
  Synthetic
guuuuucuucauguggaccucucc

SEQ ID NO: 272225 - RNA, 18 nt, Artificial Sequence
  Synthetic
ucaaauggcucccucucc

SEQ ID NO: 272226 - RNA, 19 nt, Artificial Sequence
  Synthetic
aucaaauggcucccucucc

SEQ ID NO: 272227 - RNA, 20 nt, Artificial Sequence
  Synthetic
caucaaauggcucccucucc

SEQ ID NO: 272228 - RNA, 21 nt, Artificial Sequence
  Synthetic
ccaucaaauggcucccucucc

SEQ ID NO: 272229 - RNA, 22 nt, Artificial Sequence
  Synthetic
uccaucaaauggcucccucucc

SEQ ID NO: 272230 - RNA, 23 nt, Artificial Sequence
  Synthetic
cuccaucaaauggcucccucucc

SEQ ID NO: 272231 - RNA, 24 nt, Artificial Sequence
  Synthetic
ccuccaucaaauggcucccucucc

SEQ ID NO: 272232 - RNA, 18 nt, Artificial Sequence
  Synthetic
auauccacuucccucucc

SEQ ID NO: 272233 - RNA, 19 nt, Artificial Sequence
  Synthetic
cauauccacuucccucucc

SEQ ID NO: 272234 - RNA, 20 nt, Artificial Sequence
  Synthetic
ucauauccacuucccucucc

SEQ ID NO: 272235 - RNA, 21 nt, Artificial Sequence
  Synthetic
uucauauccacuucccucucc

SEQ ID NO: 272236 - RNA, 22 nt, Artificial Sequence
  Synthetic
auucauauccacuucccucucc

SEQ ID NO: 272237 - RNA, 23 nt, Artificial Sequence
  Synthetic
aauucauauccacuucccucucc

SEQ ID NO: 272238 - RNA, 24 nt, Artificial Sequence
  Synthetic
caauucauauccacuucccucucc

SEQ ID NO: 272239 - RNA, 18 nt, Artificial Sequence
  Synthetic
ggguagguaauccucucc

SEQ ID NO: 272240 - RNA, 19 nt, Artificial Sequence
  Synthetic
uggguagguaauccucucc

SEQ ID NO: 272241 - RNA, 20 nt, Artificial Sequence
  Synthetic
uuggguagguaauccucucc

SEQ ID NO: 272242 - RNA, 21 nt, Artificial Sequence
  Synthetic
uuuggguagguaauccucucc

SEQ ID NO: 272243 - RNA, 22 nt, Artificial Sequence
  Synthetic
cuuuggguagguaauccucucc

SEQ ID NO: 272244 - RNA, 23 nt, Artificial Sequence
  Synthetic
gcuuuggguagguaauccucucc

SEQ ID NO: 272245 - RNA, 24 nt, Artificial Sequence
  Synthetic
ggcuuuggguagguaauccucucc

SEQ ID NO: 272246 - RNA, 18 nt, Artificial Sequence
  Synthetic
ucaucucucuuccucucc

SEQ ID NO: 272247 - RNA, 19 nt, Artificial Sequence
  Synthetic
cucaucucucuuccucucc

SEQ ID NO: 272248 - RNA, 20 nt, Artificial Sequence
  Synthetic
ccucaucucucuuccucucc

SEQ ID NO: 272249 - RNA, 21 nt, Artificial Sequence
  Synthetic
cccucaucucucuuccucucc

SEQ ID NO: 272250 - RNA, 22 nt, Artificial Sequence
  Synthetic
ucccucaucucucuuccucucc

SEQ ID NO: 272251 - RNA, 23 nt, Artificial Sequence
  Synthetic
uucccucaucucucuuccucucc

SEQ ID NO: 272252 - RNA, 24 nt, Artificial Sequence
  Synthetic
auucccucaucucucuuccucucc

SEQ ID NO: 272253 - RNA, 18 nt, Artificial Sequence
  Synthetic
uguugugaccagcucucc

SEQ ID NO: 272254 - RNA, 19 nt, Artificial Sequence
  Synthetic
uuguugugaccagcucucc

SEQ ID NO: 272255 - RNA, 20 nt, Artificial Sequence
  Synthetic
uuuguugugaccagcucucc

SEQ ID NO: 272256 - RNA, 21 nt, Artificial Sequence
  Synthetic
cuuuguugugaccagcucucc

SEQ ID NO: 272257 - RNA, 22 nt, Artificial Sequence
  Synthetic
ucuuuguugugaccagcucucc

SEQ ID NO: 272258 - RNA, 23 nt, Artificial Sequence
  Synthetic
gucuuuguugugaccagcucucc

SEQ ID NO: 272259 - RNA, 24 nt, Artificial Sequence
  Synthetic
agucuuuguugugaccagcucucc

SEQ ID NO: 272260 - RNA, 18 nt, Artificial Sequence
  Synthetic
aaaauucucacucucucc

SEQ ID NO: 272261 - RNA, 19 nt, Artificial Sequence
  Synthetic
caaaauucucacucucucc

SEQ ID NO: 272262 - RNA, 20 nt, Artificial Sequence
  Synthetic
ucaaaauucucacucucucc

SEQ ID NO: 272263 - RNA, 21 nt, Artificial Sequence
  Synthetic
cucaaaauucucacucucucc

SEQ ID NO: 272264 - RNA, 22 nt, Artificial Sequence
  Synthetic
ucucaaaauucucacucucucc

SEQ ID NO: 272265 - RNA, 23 nt, Artificial Sequence
  Synthetic
cucucaaaauucucacucucucc

SEQ ID NO: 272266 - RNA, 24 nt, Artificial Sequence
  Synthetic
ccucucaaaauucucacucucucc

SEQ ID NO: 272267 - RNA, 18 nt, Artificial Sequence
  Synthetic
uccagcuuuccucucucc

SEQ ID NO: 272268 - RNA, 19 nt, Artificial Sequence
  Synthetic
uuccagcuuuccucucucc

SEQ ID NO: 272269 - RNA, 20 nt, Artificial Sequence
  Synthetic
uuuccagcuuuccucucucc

SEQ ID NO: 272270 - RNA, 21 nt, Artificial Sequence
  Synthetic
auuuccagcuuuccucucucc

SEQ ID NO: 272271 - RNA, 22 nt, Artificial Sequence
  Synthetic
uauuuccagcuuuccucucucc

SEQ ID NO: 272272 - RNA, 23 nt, Artificial Sequence
  Synthetic
uuauuuccagcuuuccucucucc

SEQ ID NO: 272273 - RNA, 24 nt, Artificial Sequence
  Synthetic
cuuauuuccagcuuuccucucucc

SEQ ID NO: 272274 - RNA, 18 nt, Artificial Sequence
  Synthetic
ugugucucagcucucucc

SEQ ID NO: 272275 - RNA, 19 nt, Artificial Sequence
  Synthetic
cugugucucagcucucucc

SEQ ID NO: 272276 - RNA, 20 nt, Artificial Sequence
  Synthetic
gcugugucucagcucucucc

SEQ ID NO: 272277 - RNA, 21 nt, Artificial Sequence
  Synthetic
agcugugucucagcucucucc

SEQ ID NO: 272278 - RNA, 22 nt, Artificial Sequence
  Synthetic
uagcugugucucagcucucucc

SEQ ID NO: 272279 - RNA, 23 nt, Artificial Sequence
  Synthetic
auagcugugucucagcucucucc

SEQ ID NO: 272280 - RNA, 24 nt, Artificial Sequence
  Synthetic
aauagcugugucucagcucucucc

SEQ ID NO: 272281 - RNA, 18 nt, Artificial Sequence
  Synthetic
agauuuuuucaagucucc

SEQ ID NO: 272282 - RNA, 19 nt, Artificial Sequence
  Synthetic
aagauuuuuucaagucucc

SEQ ID NO: 272283 - RNA, 20 nt, Artificial Sequence
  Synthetic
gaagauuuuuucaagucucc

SEQ ID NO: 272284 - RNA, 21 nt, Artificial Sequence
  Synthetic
ugaagauuuuuucaagucucc

SEQ ID NO: 272285 - RNA, 22 nt, Artificial Sequence
  Synthetic
gugaagauuuuuucaagucucc

SEQ ID NO: 272286 - RNA, 23 nt, Artificial Sequence
  Synthetic
ugugaagauuuuuucaagucucc

SEQ ID NO: 272287 - RNA, 24 nt, Artificial Sequence
  Synthetic
gugugaagauuuuuucaagucucc

SEQ ID NO: 272288 - RNA, 18 nt, Artificial Sequence
  Synthetic
cuacccuucccagucucc

SEQ ID NO: 272289 - RNA, 19 nt, Artificial Sequence
  Synthetic
acuacccuucccagucucc

SEQ ID NO: 272290 - RNA, 20 nt, Artificial Sequence
  Synthetic
cacuacccuucccagucucc

SEQ ID NO: 272291 - RNA, 21 nt, Artificial Sequence
  Synthetic
ccacuacccuucccagucucc

SEQ ID NO: 272292 - RNA, 22 nt, Artificial Sequence
  Synthetic
accacuacccuucccagucucc

SEQ ID NO: 272293 - RNA, 23 nt, Artificial Sequence
  Synthetic
uaccacuacccuucccagucucc

SEQ ID NO: 272294 - RNA, 24 nt, Artificial Sequence
  Synthetic
cuaccacuacccuucccagucucc

SEQ ID NO: 272295 - RNA, 18 nt, Artificial Sequence
  Synthetic
cugcuuugcagagucucc

SEQ ID NO: 272296 - RNA, 19 nt, Artificial Sequence
  Synthetic
acugcuuugcagagucucc

SEQ ID NO: 272297 - RNA, 20 nt, Artificial Sequence
  Synthetic
uacugcuuugcagagucucc

SEQ ID NO: 272298 - RNA, 21 nt, Artificial Sequence
  Synthetic
cuacugcuuugcagagucucc

SEQ ID NO: 272299 - RNA, 22 nt, Artificial Sequence
  Synthetic
ccuacugcuuugcagagucucc

SEQ ID NO: 272300 - RNA, 23 nt, Artificial Sequence
  Synthetic
accuacugcuuugcagagucucc

SEQ ID NO: 272301 - RNA, 24 nt, Artificial Sequence
  Synthetic
uaccuacugcuuugcagagucucc

SEQ ID NO: 272302 - RNA, 18 nt, Artificial Sequence
  Synthetic
aaauauuuucuagucucc

SEQ ID NO: 272303 - RNA, 19 nt, Artificial Sequence
  Synthetic
gaaauauuuucuagucucc

SEQ ID NO: 272304 - RNA, 20 nt, Artificial Sequence
  Synthetic
ugaaauauuuucuagucucc

SEQ ID NO: 272305 - RNA, 21 nt, Artificial Sequence
  Synthetic
uugaaauauuuucuagucucc

SEQ ID NO: 272306 - RNA, 22 nt, Artificial Sequence
  Synthetic
guugaaauauuuucuagucucc

SEQ ID NO: 272307 - RNA, 23 nt, Artificial Sequence
  Synthetic
uguugaaauauuuucuagucucc

SEQ ID NO: 272308 - RNA, 24 nt, Artificial Sequence
  Synthetic
cuguugaaauauuuucuagucucc

SEQ ID NO: 272309 - RNA, 18 nt, Artificial Sequence
  Synthetic
aauagugagaaugucucc

SEQ ID NO: 272310 - RNA, 19 nt, Artificial Sequence
  Synthetic
gaauagugagaaugucucc

SEQ ID NO: 272311 - RNA, 20 nt, Artificial Sequence
  Synthetic
agaauagugagaaugucucc

SEQ ID NO: 272312 - RNA, 21 nt, Artificial Sequence
  Synthetic
cagaauagugagaaugucucc

SEQ ID NO: 272313 - RNA, 22 nt, Artificial Sequence
  Synthetic
acagaauagugagaaugucucc

SEQ ID NO: 272314 - RNA, 23 nt, Artificial Sequence
  Synthetic
aacagaauagugagaaugucucc

SEQ ID NO: 272315 - RNA, 24 nt, Artificial Sequence
  Synthetic
aaacagaauagugagaaugucucc

SEQ ID NO: 272316 - RNA, 18 nt, Artificial Sequence
  Synthetic
agacaauuggaauucucc

SEQ ID NO: 272317 - RNA, 19 nt, Artificial Sequence
  Synthetic
aagacaauuggaauucucc

SEQ ID NO: 272318 - RNA, 20 nt, Artificial Sequence
  Synthetic
gaagacaauuggaauucucc

SEQ ID NO: 272319 - RNA, 21 nt, Artificial Sequence
  Synthetic
ugaagacaauuggaauucucc

SEQ ID NO: 272320 - RNA, 22 nt, Artificial Sequence
  Synthetic
uugaagacaauuggaauucucc

SEQ ID NO: 272321 - RNA, 23 nt, Artificial Sequence
  Synthetic
cuugaagacaauuggaauucucc

SEQ ID NO: 272322 - RNA, 24 nt, Artificial Sequence
  Synthetic
acuugaagacaauuggaauucucc

SEQ ID NO: 272323 - RNA, 18 nt, Artificial Sequence
  Synthetic
ucaaaugucuccuucucc

SEQ ID NO: 272324 - RNA, 19 nt, Artificial Sequence
  Synthetic
cucaaaugucuccuucucc

SEQ ID NO: 272325 - RNA, 20 nt, Artificial Sequence
  Synthetic
gcucaaaugucuccuucucc

SEQ ID NO: 272326 - RNA, 21 nt, Artificial Sequence
  Synthetic
ugcucaaaugucuccuucucc

SEQ ID NO: 272327 - RNA, 22 nt, Artificial Sequence
  Synthetic
uugcucaaaugucuccuucucc

SEQ ID NO: 272328 - RNA, 23 nt, Artificial Sequence
  Synthetic
uuugcucaaaugucuccuucucc

SEQ ID NO: 272329 - RNA, 24 nt, Artificial Sequence
  Synthetic
cuuugcucaaaugucuccuucucc

SEQ ID NO: 272330 - RNA, 18 nt, Artificial Sequence
  Synthetic
gugauuacuagcuucucc

SEQ ID NO: 272331 - RNA, 19 nt, Artificial Sequence
  Synthetic
ugugauuacuagcuucucc

SEQ ID NO: 272332 - RNA, 20 nt, Artificial Sequence
  Synthetic
augugauuacuagcuucucc

SEQ ID NO: 272333 - RNA, 21 nt, Artificial Sequence
  Synthetic
uaugugauuacuagcuucucc

SEQ ID NO: 272334 - RNA, 22 nt, Artificial Sequence
  Synthetic
cuaugugauuacuagcuucucc

SEQ ID NO: 272335 - RNA, 23 nt, Artificial Sequence
  Synthetic
ucuaugugauuacuagcuucucc

SEQ ID NO: 272336 - RNA, 24 nt, Artificial Sequence
  Synthetic
uucuaugugauuacuagcuucucc

SEQ ID NO: 272337 - RNA, 18 nt, Artificial Sequence
  Synthetic
caggaggucaaguucucc

SEQ ID NO: 272338 - RNA, 19 nt, Artificial Sequence
  Synthetic
ucaggaggucaaguucucc

SEQ ID NO: 272339 - RNA, 20 nt, Artificial Sequence
  Synthetic
uucaggaggucaaguucucc

SEQ ID NO: 272340 - RNA, 21 nt, Artificial Sequence
  Synthetic
auucaggaggucaaguucucc

SEQ ID NO: 272341 - RNA, 22 nt, Artificial Sequence
  Synthetic
aauucaggaggucaaguucucc

SEQ ID NO: 272342 - RNA, 23 nt, Artificial Sequence
  Synthetic
caauucaggaggucaaguucucc

SEQ ID NO: 272343 - RNA, 24 nt, Artificial Sequence
  Synthetic
acaauucaggaggucaaguucucc

SEQ ID NO: 272344 - RNA, 18 nt, Artificial Sequence
  Synthetic
auaagggcagaguucucc

SEQ ID NO: 272345 - RNA, 19 nt, Artificial Sequence
  Synthetic
aauaagggcagaguucucc

SEQ ID NO: 272346 - RNA, 20 nt, Artificial Sequence
  Synthetic
uaauaagggcagaguucucc

SEQ ID NO: 272347 - RNA, 21 nt, Artificial Sequence
  Synthetic
guaauaagggcagaguucucc

SEQ ID NO: 272348 - RNA, 22 nt, Artificial Sequence
  Synthetic
gguaauaagggcagaguucucc

SEQ ID NO: 272349 - RNA, 23 nt, Artificial Sequence
  Synthetic
ugguaauaagggcagaguucucc

SEQ ID NO: 272350 - RNA, 24 nt, Artificial Sequence
  Synthetic
gugguaauaagggcagaguucucc

SEQ ID NO: 272351 - RNA, 18 nt, Artificial Sequence
  Synthetic
agugguuuguaguucucc

SEQ ID NO: 272352 - RNA, 19 nt, Artificial Sequence
  Synthetic
cagugguuuguaguucucc

SEQ ID NO: 272353 - RNA, 20 nt, Artificial Sequence
  Synthetic
acagugguuuguaguucucc

SEQ ID NO: 272354 - RNA, 21 nt, Artificial Sequence
  Synthetic
aacagugguuuguaguucucc

SEQ ID NO: 272355 - RNA, 22 nt, Artificial Sequence
  Synthetic
gaacagugguuuguaguucucc

SEQ ID NO: 272356 - RNA, 23 nt, Artificial Sequence
  Synthetic
ugaacagugguuuguaguucucc

SEQ ID NO: 272357 - RNA, 24 nt, Artificial Sequence
  Synthetic
uugaacagugguuuguaguucucc

SEQ ID NO: 272358 - RNA, 20 nt, Artificial Sequence
  Synthetic
gcagugguuuguaguucucc

SEQ ID NO: 272359 - RNA, 18 nt, Artificial Sequence
  Synthetic
uccuagccgagguucucc

SEQ ID NO: 272360 - RNA, 19 nt, Artificial Sequence
  Synthetic
guccuagccgagguucucc

SEQ ID NO: 272361 - RNA, 20 nt, Artificial Sequence
  Synthetic
uguccuagccgagguucucc

SEQ ID NO: 272362 - RNA, 21 nt, Artificial Sequence
  Synthetic
cuguccuagccgagguucucc

SEQ ID NO: 272363 - RNA, 22 nt, Artificial Sequence
  Synthetic
acuguccuagccgagguucucc

SEQ ID NO: 272364 - RNA, 23 nt, Artificial Sequence
  Synthetic
cacuguccuagccgagguucucc

SEQ ID NO: 272365 - RNA, 24 nt, Artificial Sequence
  Synthetic
acacuguccuagccgagguucucc

SEQ ID NO: 272366 - RNA, 18 nt, Artificial Sequence
  Synthetic
uuugagaguauguucucc

SEQ ID NO: 272367 - RNA, 19 nt, Artificial Sequence
  Synthetic
auuugagaguauguucucc

SEQ ID NO: 272368 - RNA, 20 nt, Artificial Sequence
  Synthetic
cauuugagaguauguucucc

SEQ ID NO: 272369 - RNA, 21 nt, Artificial Sequence
  Synthetic
ccauuugagaguauguucucc

SEQ ID NO: 272370 - RNA, 22 nt, Artificial Sequence
  Synthetic
accauuugagaguauguucucc

SEQ ID NO: 272371 - RNA, 23 nt, Artificial Sequence
  Synthetic
caccauuugagaguauguucucc

SEQ ID NO: 272372 - RNA, 24 nt, Artificial Sequence
  Synthetic
ccaccauuugagaguauguucucc

SEQ ID NO: 272373 - RNA, 18 nt, Artificial Sequence
  Synthetic
uuucucagugauuucucc

SEQ ID NO: 272374 - RNA, 19 nt, Artificial Sequence
  Synthetic
auuucucagugauuucucc

SEQ ID NO: 272375 - RNA, 20 nt, Artificial Sequence
  Synthetic
uauuucucagugauuucucc

SEQ ID NO: 272376 - RNA, 21 nt, Artificial Sequence
  Synthetic
guauuucucagugauuucucc

SEQ ID NO: 272377 - RNA, 22 nt, Artificial Sequence
  Synthetic
aguauuucucagugauuucucc

SEQ ID NO: 272378 - RNA, 23 nt, Artificial Sequence
  Synthetic
caguauuucucagugauuucucc

SEQ ID NO: 272379 - RNA, 24 nt, Artificial Sequence
  Synthetic
ucaguauuucucagugauuucucc

SEQ ID NO: 272380 - RNA, 18 nt, Artificial Sequence
  Synthetic
aauugagacuauuucucc

SEQ ID NO: 272381 - RNA, 19 nt, Artificial Sequence
  Synthetic
uaauugagacuauuucucc

SEQ ID NO: 272382 - RNA, 20 nt, Artificial Sequence
  Synthetic
guaauugagacuauuucucc

SEQ ID NO: 272383 - RNA, 21 nt, Artificial Sequence
  Synthetic
uguaauugagacuauuucucc

SEQ ID NO: 272384 - RNA, 22 nt, Artificial Sequence
  Synthetic
uuguaauugagacuauuucucc

SEQ ID NO: 272385 - RNA, 23 nt, Artificial Sequence
  Synthetic
guuguaauugagacuauuucucc

SEQ ID NO: 272386 - RNA, 24 nt, Artificial Sequence
  Synthetic
aguuguaauugagacuauuucucc

SEQ ID NO: 272387 - RNA, 18 nt, Artificial Sequence
  Synthetic
uuuaaaccaccuuucucc

SEQ ID NO: 272388 - RNA, 19 nt, Artificial Sequence
  Synthetic
auuuaaaccaccuuucucc

SEQ ID NO: 272389 - RNA, 20 nt, Artificial Sequence
  Synthetic
gauuuaaaccaccuuucucc

SEQ ID NO: 272390 - RNA, 21 nt, Artificial Sequence
  Synthetic
ggauuuaaaccaccuuucucc

SEQ ID NO: 272391 - RNA, 22 nt, Artificial Sequence
  Synthetic
uggauuuaaaccaccuuucucc

SEQ ID NO: 272392 - RNA, 23 nt, Artificial Sequence
  Synthetic
auggauuuaaaccaccuuucucc

SEQ ID NO: 272393 - RNA, 24 nt, Artificial Sequence
  Synthetic
uauggauuuaaaccaccuuucucc

SEQ ID NO: 272394 - RNA, 18 nt, Artificial Sequence
  Synthetic
ucucuccauucuuucucc

SEQ ID NO: 272395 - RNA, 19 nt, Artificial Sequence
  Synthetic
gucucuccauucuuucucc

SEQ ID NO: 272396 - RNA, 20 nt, Artificial Sequence
  Synthetic
ugucucuccauucuuucucc

SEQ ID NO: 272397 - RNA, 21 nt, Artificial Sequence
  Synthetic
cugucucuccauucuuucucc

SEQ ID NO: 272398 - RNA, 22 nt, Artificial Sequence
  Synthetic
ccugucucuccauucuuucucc

SEQ ID NO: 272399 - RNA, 23 nt, Artificial Sequence
  Synthetic
uccugucucuccauucuuucucc

SEQ ID NO: 272400 - RNA, 24 nt, Artificial Sequence
  Synthetic
cuccugucucuccauucuuucucc

SEQ ID NO: 272401 - RNA, 18 nt, Artificial Sequence
  Synthetic
ucacaugguauuuucucc

SEQ ID NO: 272402 - RNA, 19 nt, Artificial Sequence
  Synthetic
uucacaugguauuuucucc

SEQ ID NO: 272403 - RNA, 20 nt, Artificial Sequence
  Synthetic
auucacaugguauuuucucc

SEQ ID NO: 272404 - RNA, 21 nt, Artificial Sequence
  Synthetic
cauucacaugguauuuucucc

SEQ ID NO: 272405 - RNA, 22 nt, Artificial Sequence
  Synthetic
ucauucacaugguauuuucucc

SEQ ID NO: 272406 - RNA, 23 nt, Artificial Sequence
  Synthetic
uucauucacaugguauuuucucc

SEQ ID NO: 272407 - RNA, 24 nt, Artificial Sequence
  Synthetic
cuucauucacaugguauuuucucc

SEQ ID NO: 272408 - RNA, 18 nt, Artificial Sequence
  Synthetic
augcauuuuuuuuucucc

SEQ ID NO: 272409 - RNA, 19 nt, Artificial Sequence
  Synthetic
uaugcauuuuuuuuucucc

SEQ ID NO: 272410 - RNA, 20 nt, Artificial Sequence
  Synthetic
uuaugcauuuuuuuuucucc

SEQ ID NO: 272411 - RNA, 21 nt, Artificial Sequence
  Synthetic
cuuaugcauuuuuuuuucucc

SEQ ID NO: 272412 - RNA, 22 nt, Artificial Sequence
  Synthetic
gcuuaugcauuuuuuuuucucc

SEQ ID NO: 272413 - RNA, 23 nt, Artificial Sequence
  Synthetic
ugcuuaugcauuuuuuuuucucc

SEQ ID NO: 272414 - RNA, 24 nt, Artificial Sequence
  Synthetic
uugcuuaugcauuuuuuuuucucc

SEQ ID NO: 272415 - RNA, 18 nt, Artificial Sequence
  Synthetic
cuggaauugaaaaagucc

SEQ ID NO: 272416 - RNA, 19 nt, Artificial Sequence
  Synthetic
ucuggaauugaaaaagucc

SEQ ID NO: 272417 - RNA, 20 nt, Artificial Sequence
  Synthetic
uucuggaauugaaaaagucc

SEQ ID NO: 272418 - RNA, 21 nt, Artificial Sequence
  Synthetic
uuucuggaauugaaaaagucc

SEQ ID NO: 272419 - RNA, 22 nt, Artificial Sequence
  Synthetic
guuucuggaauugaaaaagucc

SEQ ID NO: 272420 - RNA, 23 nt, Artificial Sequence
  Synthetic
uguuucuggaauugaaaaagucc

SEQ ID NO: 272421 - RNA, 24 nt, Artificial Sequence
  Synthetic
auguuucuggaauugaaaaagucc

SEQ ID NO: 272422 - RNA, 18 nt, Artificial Sequence
  Synthetic
cucuggccucccaagucc

SEQ ID NO: 272423 - RNA, 19 nt, Artificial Sequence
  Synthetic
gcucuggccucccaagucc

SEQ ID NO: 272424 - RNA, 20 nt, Artificial Sequence
  Synthetic
ggcucuggccucccaagucc

SEQ ID NO: 272425 - RNA, 21 nt, Artificial Sequence
  Synthetic
gggcucuggccucccaagucc

SEQ ID NO: 272426 - RNA, 22 nt, Artificial Sequence
  Synthetic
ugggcucuggccucccaagucc

SEQ ID NO: 272427 - RNA, 23 nt, Artificial Sequence
  Synthetic
augggcucuggccucccaagucc

SEQ ID NO: 272428 - RNA, 24 nt, Artificial Sequence
  Synthetic
gaugggcucuggccucccaagucc

SEQ ID NO: 272429 - RNA, 18 nt, Artificial Sequence
  Synthetic
gugcuagcucccaagucc

SEQ ID NO: 272430 - RNA, 19 nt, Artificial Sequence
  Synthetic
agugcuagcucccaagucc

SEQ ID NO: 272431 - RNA, 20 nt, Artificial Sequence
  Synthetic
aagugcuagcucccaagucc

SEQ ID NO: 272432 - RNA, 21 nt, Artificial Sequence
  Synthetic
aaagugcuagcucccaagucc

SEQ ID NO: 272433 - RNA, 22 nt, Artificial Sequence
  Synthetic
caaagugcuagcucccaagucc

SEQ ID NO: 272434 - RNA, 23 nt, Artificial Sequence
  Synthetic
ucaaagugcuagcucccaagucc

SEQ ID NO: 272435 - RNA, 24 nt, Artificial Sequence
  Synthetic
aucaaagugcuagcucccaagucc

SEQ ID NO: 272436 - RNA, 18 nt, Artificial Sequence
  Synthetic
aaaucuggggggaagucc

SEQ ID NO: 272437 - RNA, 19 nt, Artificial Sequence
  Synthetic
aaaaucuggggggaagucc

SEQ ID NO: 272438 - RNA, 20 nt, Artificial Sequence
  Synthetic
aaaaaucuggggggaagucc

SEQ ID NO: 272439 - RNA, 21 nt, Artificial Sequence
  Synthetic
caaaaaucuggggggaagucc

SEQ ID NO: 272440 - RNA, 22 nt, Artificial Sequence
  Synthetic
acaaaaaucuggggggaagucc

SEQ ID NO: 272441 - RNA, 23 nt, Artificial Sequence
  Synthetic
cacaaaaaucuggggggaagucc

SEQ ID NO: 272442 - RNA, 24 nt, Artificial Sequence
  Synthetic
acacaaaaaucuggggggaagucc

SEQ ID NO: 272443 - RNA, 18 nt, Artificial Sequence
  Synthetic
uuagaacuugggaagucc

SEQ ID NO: 272444 - RNA, 19 nt, Artificial Sequence
  Synthetic
cuuagaacuugggaagucc

SEQ ID NO: 272445 - RNA, 20 nt, Artificial Sequence
  Synthetic
acuuagaacuugggaagucc

SEQ ID NO: 272446 - RNA, 21 nt, Artificial Sequence
  Synthetic
uacuuagaacuugggaagucc

SEQ ID NO: 272447 - RNA, 22 nt, Artificial Sequence
  Synthetic
guacuuagaacuugggaagucc

SEQ ID NO: 272448 - RNA, 23 nt, Artificial Sequence
  Synthetic
aguacuuagaacuugggaagucc

SEQ ID NO: 272449 - RNA, 24 nt, Artificial Sequence
  Synthetic
aaguacuuagaacuugggaagucc

SEQ ID NO: 272450 - RNA, 18 nt, Artificial Sequence
  Synthetic
uuuauuuuaugccagucc

SEQ ID NO: 272451 - RNA, 19 nt, Artificial Sequence
  Synthetic
guuuauuuuaugccagucc

SEQ ID NO: 272452 - RNA, 20 nt, Artificial Sequence
  Synthetic
aguuuauuuuaugccagucc

SEQ ID NO: 272453 - RNA, 21 nt, Artificial Sequence
  Synthetic
uaguuuauuuuaugccagucc

SEQ ID NO: 272454 - RNA, 22 nt, Artificial Sequence
  Synthetic
uuaguuuauuuuaugccagucc

SEQ ID NO: 272455 - RNA, 23 nt, Artificial Sequence
  Synthetic
auuaguuuauuuuaugccagucc

SEQ ID NO: 272456 - RNA, 24 nt, Artificial Sequence
  Synthetic
gauuaguuuauuuuaugccagucc

SEQ ID NO: 272457 - RNA, 18 nt, Artificial Sequence
  Synthetic
cugcagcucaggcagucc

SEQ ID NO: 272458 - RNA, 19 nt, Artificial Sequence
  Synthetic
ucugcagcucaggcagucc

SEQ ID NO: 272459 - RNA, 20 nt, Artificial Sequence
  Synthetic
cucugcagcucaggcagucc

SEQ ID NO: 272460 - RNA, 21 nt, Artificial Sequence
  Synthetic
ucucugcagcucaggcagucc

SEQ ID NO: 272461 - RNA, 22 nt, Artificial Sequence
  Synthetic
cucucugcagcucaggcagucc

SEQ ID NO: 272462 - RNA, 23 nt, Artificial Sequence
  Synthetic
gcucucugcagcucaggcagucc

SEQ ID NO: 272463 - RNA, 24 nt, Artificial Sequence
  Synthetic
agcucucugcagcucaggcagucc

SEQ ID NO: 272464 - RNA, 18 nt, Artificial Sequence
  Synthetic
uugugcauuaaucagucc

SEQ ID NO: 272465 - RNA, 19 nt, Artificial Sequence
  Synthetic
auugugcauuaaucagucc

SEQ ID NO: 272466 - RNA, 20 nt, Artificial Sequence
  Synthetic
uauugugcauuaaucagucc

SEQ ID NO: 272467 - RNA, 21 nt, Artificial Sequence
  Synthetic
auauugugcauuaaucagucc

SEQ ID NO: 272468 - RNA, 22 nt, Artificial Sequence
  Synthetic
uauauugugcauuaaucagucc

SEQ ID NO: 272469 - RNA, 23 nt, Artificial Sequence
  Synthetic
auauauugugcauuaaucagucc

SEQ ID NO: 272470 - RNA, 24 nt, Artificial Sequence
  Synthetic
aauauauugugcauuaaucagucc

SEQ ID NO: 272471 - RNA, 18 nt, Artificial Sequence
  Synthetic
cugacuccccaucagucc

SEQ ID NO: 272472 - RNA, 19 nt, Artificial Sequence
  Synthetic
acugacuccccaucagucc

SEQ ID NO: 272473 - RNA, 20 nt, Artificial Sequence
  Synthetic
gacugacuccccaucagucc

SEQ ID NO: 272474 - RNA, 21 nt, Artificial Sequence
  Synthetic
ugacugacuccccaucagucc

SEQ ID NO: 272475 - RNA, 22 nt, Artificial Sequence
  Synthetic
augacugacuccccaucagucc

SEQ ID NO: 272476 - RNA, 23 nt, Artificial Sequence
  Synthetic
gaugacugacuccccaucagucc

SEQ ID NO: 272477 - RNA, 24 nt, Artificial Sequence
  Synthetic
ugaugacugacuccccaucagucc

SEQ ID NO: 272478 - RNA, 18 nt, Artificial Sequence
  Synthetic
ugccucagugcucagucc

SEQ ID NO: 272479 - RNA, 19 nt, Artificial Sequence
  Synthetic
augccucagugcucagucc

SEQ ID NO: 272480 - RNA, 20 nt, Artificial Sequence
  Synthetic
aaugccucagugcucagucc

SEQ ID NO: 272481 - RNA, 21 nt, Artificial Sequence
  Synthetic
aaaugccucagugcucagucc

SEQ ID NO: 272482 - RNA, 22 nt, Artificial Sequence
  Synthetic
gaaaugccucagugcucagucc

SEQ ID NO: 272483 - RNA, 23 nt, Artificial Sequence
  Synthetic
ugaaaugccucagugcucagucc

SEQ ID NO: 272484 - RNA, 24 nt, Artificial Sequence
  Synthetic
cugaaaugccucagugcucagucc

SEQ ID NO: 272485 - RNA, 18 nt, Artificial Sequence
  Synthetic
caugccucaucucagucc

SEQ ID NO: 272486 - RNA, 19 nt, Artificial Sequence
  Synthetic
ccaugccucaucucagucc

SEQ ID NO: 272487 - RNA, 20 nt, Artificial Sequence
  Synthetic
uccaugccucaucucagucc

SEQ ID NO: 272488 - RNA, 21 nt, Artificial Sequence
  Synthetic
cuccaugccucaucucagucc

SEQ ID NO: 272489 - RNA, 22 nt, Artificial Sequence
  Synthetic
ucuccaugccucaucucagucc

SEQ ID NO: 272490 - RNA, 23 nt, Artificial Sequence
  Synthetic
uucuccaugccucaucucagucc

SEQ ID NO: 272491 - RNA, 24 nt, Artificial Sequence
  Synthetic
auucuccaugccucaucucagucc

SEQ ID NO: 272492 - RNA, 18 nt, Artificial Sequence
  Synthetic
uagcauuucucucagucc

SEQ ID NO: 272493 - RNA, 19 nt, Artificial Sequence
  Synthetic
uuagcauuucucucagucc

SEQ ID NO: 272494 - RNA, 20 nt, Artificial Sequence
  Synthetic
auuagcauuucucucagucc

SEQ ID NO: 272495 - RNA, 21 nt, Artificial Sequence
  Synthetic
aauuagcauuucucucagucc

SEQ ID NO: 272496 - RNA, 22 nt, Artificial Sequence
  Synthetic
aaauuagcauuucucucagucc

SEQ ID NO: 272497 - RNA, 23 nt, Artificial Sequence
  Synthetic
gaaauuagcauuucucucagucc

SEQ ID NO: 272498 - RNA, 24 nt, Artificial Sequence
  Synthetic
agaaauuagcauuucucucagucc

SEQ ID NO: 272499 - RNA, 18 nt, Artificial Sequence
  Synthetic
uugagcuuuuuucagucc

SEQ ID NO: 272500 - RNA, 19 nt, Artificial Sequence
  Synthetic
uuugagcuuuuuucagucc

SEQ ID NO: 272501 - RNA, 20 nt, Artificial Sequence
  Synthetic
auuugagcuuuuuucagucc

SEQ ID NO: 272502 - RNA, 21 nt, Artificial Sequence
  Synthetic
gauuugagcuuuuuucagucc

SEQ ID NO: 272503 - RNA, 22 nt, Artificial Sequence
  Synthetic
ugauuugagcuuuuuucagucc

SEQ ID NO: 272504 - RNA, 23 nt, Artificial Sequence
  Synthetic
gugauuugagcuuuuuucagucc

SEQ ID NO: 272505 - RNA, 24 nt, Artificial Sequence
  Synthetic
ugugauuugagcuuuuuucagucc

SEQ ID NO: 272506 - RNA, 18 nt, Artificial Sequence
  Synthetic
ccucuccaaggagagucc

SEQ ID NO: 272507 - RNA, 19 nt, Artificial Sequence
  Synthetic
uccucuccaaggagagucc

SEQ ID NO: 272508 - RNA, 20 nt, Artificial Sequence
  Synthetic
auccucuccaaggagagucc

SEQ ID NO: 272509 - RNA, 21 nt, Artificial Sequence
  Synthetic
aauccucuccaaggagagucc

SEQ ID NO: 272510 - RNA, 22 nt, Artificial Sequence
  Synthetic
uaauccucuccaaggagagucc

SEQ ID NO: 272511 - RNA, 23 nt, Artificial Sequence
  Synthetic
guaauccucuccaaggagagucc

SEQ ID NO: 272512 - RNA, 24 nt, Artificial Sequence
  Synthetic
gguaauccucuccaaggagagucc

SEQ ID NO: 272513 - RNA, 18 nt, Artificial Sequence
  Synthetic
guuuacaagugagagucc

SEQ ID NO: 272514 - RNA, 19 nt, Artificial Sequence
  Synthetic
gguuuacaagugagagucc

SEQ ID NO: 272515 - RNA, 20 nt, Artificial Sequence
  Synthetic
ugguuuacaagugagagucc

SEQ ID NO: 272516 - RNA, 21 nt, Artificial Sequence
  Synthetic
gugguuuacaagugagagucc

SEQ ID NO: 272517 - RNA, 22 nt, Artificial Sequence
  Synthetic
agugguuuacaagugagagucc

SEQ ID NO: 272518 - RNA, 23 nt, Artificial Sequence
  Synthetic
uagugguuuacaagugagagucc

SEQ ID NO: 272519 - RNA, 24 nt, Artificial Sequence
  Synthetic
uuagugguuuacaagugagagucc

SEQ ID NO: 272520 - RNA, 18 nt, Artificial Sequence
  Synthetic
uuuuugaacaccgagucc

SEQ ID NO: 272521 - RNA, 19 nt, Artificial Sequence
  Synthetic
auuuuugaacaccgagucc

SEQ ID NO: 272522 - RNA, 20 nt, Artificial Sequence
  Synthetic
uauuuuugaacaccgagucc

SEQ ID NO: 272523 - RNA, 21 nt, Artificial Sequence
  Synthetic
uuauuuuugaacaccgagucc

SEQ ID NO: 272524 - RNA, 22 nt, Artificial Sequence
  Synthetic
uuuauuuuugaacaccgagucc

SEQ ID NO: 272525 - RNA, 23 nt, Artificial Sequence
  Synthetic
cuuuauuuuugaacaccgagucc

SEQ ID NO: 272526 - RNA, 24 nt, Artificial Sequence
  Synthetic
ucuuuauuuuugaacaccgagucc

SEQ ID NO: 272527 - RNA, 18 nt, Artificial Sequence
  Synthetic
uuugagacaagcgagucc

SEQ ID NO: 272528 - RNA, 19 nt, Artificial Sequence
  Synthetic
guuugagacaagcgagucc

SEQ ID NO: 272529 - RNA, 20 nt, Artificial Sequence
  Synthetic
aguuugagacaagcgagucc

SEQ ID NO: 272530 - RNA, 21 nt, Artificial Sequence
  Synthetic
aaguuugagacaagcgagucc

SEQ ID NO: 272531 - RNA, 22 nt, Artificial Sequence
  Synthetic
aaaguuugagacaagcgagucc

SEQ ID NO: 272532 - RNA, 23 nt, Artificial Sequence
  Synthetic
aaaaguuugagacaagcgagucc

SEQ ID NO: 272533 - RNA, 24 nt, Artificial Sequence
  Synthetic
caaaaguuugagacaagcgagucc

SEQ ID NO: 272534 - RNA, 18 nt, Artificial Sequence
  Synthetic
ggggggaaaaaguagucc

SEQ ID NO: 272535 - RNA, 19 nt, Artificial Sequence
  Synthetic
gggggggaaaaaguagucc

SEQ ID NO: 272536 - RNA, 20 nt, Artificial Sequence
  Synthetic
ugggggggaaaaaguagucc

SEQ ID NO: 272537 - RNA, 21 nt, Artificial Sequence
  Synthetic
uugggggggaaaaaguagucc

SEQ ID NO: 272538 - RNA, 22 nt, Artificial Sequence
  Synthetic
auugggggggaaaaaguagucc

SEQ ID NO: 272539 - RNA, 23 nt, Artificial Sequence
  Synthetic
aauugggggggaaaaaguagucc

SEQ ID NO: 272540 - RNA, 24 nt, Artificial Sequence
  Synthetic
uaauugggggggaaaaaguagucc

SEQ ID NO: 272541 - RNA, 18 nt, Artificial Sequence
  Synthetic
aauuguuaaacuuagucc

SEQ ID NO: 272542 - RNA, 19 nt, Artificial Sequence
  Synthetic
uaauuguuaaacuuagucc

SEQ ID NO: 272543 - RNA, 20 nt, Artificial Sequence
  Synthetic
auaauuguuaaacuuagucc

SEQ ID NO: 272544 - RNA, 21 nt, Artificial Sequence
  Synthetic
aauaauuguuaaacuuagucc

SEQ ID NO: 272545 - RNA, 22 nt, Artificial Sequence
  Synthetic
caauaauuguuaaacuuagucc

SEQ ID NO: 272546 - RNA, 23 nt, Artificial Sequence
  Synthetic
acaauaauuguuaaacuuagucc

SEQ ID NO: 272547 - RNA, 24 nt, Artificial Sequence
  Synthetic
aacaauaauuguuaaacuuagucc

SEQ ID NO: 272548 - RNA, 18 nt, Artificial Sequence
  Synthetic
uuuaacauuuuuuagucc

SEQ ID NO: 272549 - RNA, 19 nt, Artificial Sequence
  Synthetic
auuuaacauuuuuuagucc

SEQ ID NO: 272550 - RNA, 20 nt, Artificial Sequence
  Synthetic
uauuuaacauuuuuuagucc

SEQ ID NO: 272551 - RNA, 21 nt, Artificial Sequence
  Synthetic
auauuuaacauuuuuuagucc

SEQ ID NO: 272552 - RNA, 22 nt, Artificial Sequence
  Synthetic
aauauuuaacauuuuuuagucc

SEQ ID NO: 272553 - RNA, 23 nt, Artificial Sequence
  Synthetic
aaauauuuaacauuuuuuagucc

SEQ ID NO: 272554 - RNA, 24 nt, Artificial Sequence
  Synthetic
gaaauauuuaacauuuuuuagucc

SEQ ID NO: 272555 - RNA, 18 nt, Artificial Sequence
  Synthetic
acugcuuugaaugcgucc

SEQ ID NO: 272556 - RNA, 19 nt, Artificial Sequence
  Synthetic
cacugcuuugaaugcgucc

SEQ ID NO: 272557 - RNA, 20 nt, Artificial Sequence
  Synthetic
acacugcuuugaaugcgucc

SEQ ID NO: 272558 - RNA, 21 nt, Artificial Sequence
  Synthetic
cacacugcuuugaaugcgucc

SEQ ID NO: 272559 - RNA, 22 nt, Artificial Sequence
  Synthetic
acacacugcuuugaaugcgucc

SEQ ID NO: 272560 - RNA, 23 nt, Artificial Sequence
  Synthetic
uacacacugcuuugaaugcgucc

SEQ ID NO: 272561 - RNA, 24 nt, Artificial Sequence
  Synthetic
cuacacacugcuuugaaugcgucc

SEQ ID NO: 272562 - RNA, 18 nt, Artificial Sequence
  Synthetic
caaucggauguaaggucc

SEQ ID NO: 272563 - RNA, 19 nt, Artificial Sequence
  Synthetic
ccaaucggauguaaggucc

SEQ ID NO: 272564 - RNA, 20 nt, Artificial Sequence
  Synthetic
cccaaucggauguaaggucc

SEQ ID NO: 272565 - RNA, 21 nt, Artificial Sequence
  Synthetic
ucccaaucggauguaaggucc

SEQ ID NO: 272566 - RNA, 22 nt, Artificial Sequence
  Synthetic
cucccaaucggauguaaggucc

SEQ ID NO: 272567 - RNA, 23 nt, Artificial Sequence
  Synthetic
ccucccaaucggauguaaggucc

SEQ ID NO: 272568 - RNA, 24 nt, Artificial Sequence
  Synthetic
uccucccaaucggauguaaggucc

SEQ ID NO: 272569 - RNA, 18 nt, Artificial Sequence
  Synthetic
acaaaaaaacccaggucc

SEQ ID NO: 272570 - RNA, 19 nt, Artificial Sequence
  Synthetic
aacaaaaaaacccaggucc

SEQ ID NO: 272571 - RNA, 20 nt, Artificial Sequence
  Synthetic
caacaaaaaaacccaggucc

SEQ ID NO: 272572 - RNA, 21 nt, Artificial Sequence
  Synthetic
ccaacaaaaaaacccaggucc

SEQ ID NO: 272573 - RNA, 22 nt, Artificial Sequence
  Synthetic
uccaacaaaaaaacccaggucc

SEQ ID NO: 272574 - RNA, 23 nt, Artificial Sequence
  Synthetic
uuccaacaaaaaaacccaggucc

SEQ ID NO: 272575 - RNA, 24 nt, Artificial Sequence
  Synthetic
uuuccaacaaaaaaacccaggucc

SEQ ID NO: 272576 - RNA, 18 nt, Artificial Sequence
  Synthetic
ucacaaggcagcaggucc

SEQ ID NO: 272577 - RNA, 19 nt, Artificial Sequence
  Synthetic
cucacaaggcagcaggucc

SEQ ID NO: 272578 - RNA, 20 nt, Artificial Sequence
  Synthetic
ccucacaaggcagcaggucc

SEQ ID NO: 272579 - RNA, 21 nt, Artificial Sequence
  Synthetic
accucacaaggcagcaggucc

SEQ ID NO: 272580 - RNA, 22 nt, Artificial Sequence
  Synthetic
aaccucacaaggcagcaggucc

SEQ ID NO: 272581 - RNA, 23 nt, Artificial Sequence
  Synthetic
uaaccucacaaggcagcaggucc

SEQ ID NO: 272582 - RNA, 24 nt, Artificial Sequence
  Synthetic
guaaccucacaaggcagcaggucc

SEQ ID NO: 272583 - RNA, 18 nt, Artificial Sequence
  Synthetic
gucauuuuuauuaggucc

SEQ ID NO: 272584 - RNA, 19 nt, Artificial Sequence
  Synthetic
agucauuuuuauuaggucc

SEQ ID NO: 272585 - RNA, 20 nt, Artificial Sequence
  Synthetic
aagucauuuuuauuaggucc

SEQ ID NO: 272586 - RNA, 21 nt, Artificial Sequence
  Synthetic
uaagucauuuuuauuaggucc

SEQ ID NO: 272587 - RNA, 22 nt, Artificial Sequence
  Synthetic
auaagucauuuuuauuaggucc

SEQ ID NO: 272588 - RNA, 23 nt, Artificial Sequence
  Synthetic
cauaagucauuuuuauuaggucc

SEQ ID NO: 272589 - RNA, 24 nt, Artificial Sequence
  Synthetic
gcauaagucauuuuuauuaggucc

SEQ ID NO: 272590 - RNA, 18 nt, Artificial Sequence
  Synthetic
gccugcacuagacggucc

SEQ ID NO: 272591 - RNA, 19 nt, Artificial Sequence
  Synthetic
agccugcacuagacggucc

SEQ ID NO: 272592 - RNA, 20 nt, Artificial Sequence
  Synthetic
aagccugcacuagacggucc

SEQ ID NO: 272593 - RNA, 21 nt, Artificial Sequence
  Synthetic
caagccugcacuagacggucc

SEQ ID NO: 272594 - RNA, 22 nt, Artificial Sequence
  Synthetic
ccaagccugcacuagacggucc

SEQ ID NO: 272595 - RNA, 23 nt, Artificial Sequence
  Synthetic
accaagccugcacuagacggucc

SEQ ID NO: 272596 - RNA, 24 nt, Artificial Sequence
  Synthetic
caccaagccugcacuagacggucc

SEQ ID NO: 272597 - RNA, 18 nt, Artificial Sequence
  Synthetic
cauccuccaacccggucc

SEQ ID NO: 272598 - RNA, 19 nt, Artificial Sequence
  Synthetic
ccauccuccaacccggucc

SEQ ID NO: 272599 - RNA, 20 nt, Artificial Sequence
  Synthetic
accauccuccaacccggucc

SEQ ID NO: 272600 - RNA, 21 nt, Artificial Sequence
  Synthetic
aaccauccuccaacccggucc

SEQ ID NO: 272601 - RNA, 22 nt, Artificial Sequence
  Synthetic
aaaccauccuccaacccggucc

SEQ ID NO: 272602 - RNA, 23 nt, Artificial Sequence
  Synthetic
gaaaccauccuccaacccggucc

SEQ ID NO: 272603 - RNA, 24 nt, Artificial Sequence
  Synthetic
ggaaaccauccuccaacccggucc

SEQ ID NO: 272604 - RNA, 18 nt, Artificial Sequence
  Synthetic
acguguugugcugggucc

SEQ ID NO: 272605 - RNA, 19 nt, Artificial Sequence
  Synthetic
uacguguugugcugggucc

SEQ ID NO: 272606 - RNA, 20 nt, Artificial Sequence
  Synthetic
uuacguguugugcugggucc

SEQ ID NO: 272607 - RNA, 21 nt, Artificial Sequence
  Synthetic
auuacguguugugcugggucc

SEQ ID NO: 272608 - RNA, 22 nt, Artificial Sequence
  Synthetic
uauuacguguugugcugggucc

SEQ ID NO: 272609 - RNA, 23 nt, Artificial Sequence
  Synthetic
uuauuacguguugugcugggucc

SEQ ID NO: 272610 - RNA, 24 nt, Artificial Sequence
  Synthetic
uuuauuacguguugugcugggucc

SEQ ID NO: 272611 - RNA, 18 nt, Artificial Sequence
  Synthetic
cuguaauccaaauggucc

SEQ ID NO: 272612 - RNA, 19 nt, Artificial Sequence
  Synthetic
gcuguaauccaaauggucc

SEQ ID NO: 272613 - RNA, 20 nt, Artificial Sequence
  Synthetic
ggcuguaauccaaauggucc

SEQ ID NO: 272614 - RNA, 21 nt, Artificial Sequence
  Synthetic
aggcuguaauccaaauggucc

SEQ ID NO: 272615 - RNA, 22 nt, Artificial Sequence
  Synthetic
aaggcuguaauccaaauggucc

SEQ ID NO: 272616 - RNA, 23 nt, Artificial Sequence
  Synthetic
aaaggcuguaauccaaauggucc

SEQ ID NO: 272617 - RNA, 24 nt, Artificial Sequence
  Synthetic
gaaaggcuguaauccaaauggucc

SEQ ID NO: 272618 - RNA, 18 nt, Artificial Sequence
  Synthetic
aaaccagaacaauggucc

SEQ ID NO: 272619 - RNA, 19 nt, Artificial Sequence
  Synthetic
uaaaccagaacaauggucc

SEQ ID NO: 272620 - RNA, 20 nt, Artificial Sequence
  Synthetic
cuaaaccagaacaauggucc

SEQ ID NO: 272621 - RNA, 21 nt, Artificial Sequence
  Synthetic
acuaaaccagaacaauggucc

SEQ ID NO: 272622 - RNA, 22 nt, Artificial Sequence
  Synthetic
aacuaaaccagaacaauggucc

SEQ ID NO: 272623 - RNA, 23 nt, Artificial Sequence
  Synthetic
aaacuaaaccagaacaauggucc

SEQ ID NO: 272624 - RNA, 24 nt, Artificial Sequence
  Synthetic
uaaacuaaaccagaacaauggucc

SEQ ID NO: 272625 - RNA, 18 nt, Artificial Sequence
  Synthetic
gucagcaaacuauggucc

SEQ ID NO: 272626 - RNA, 19 nt, Artificial Sequence
  Synthetic
agucagcaaacuauggucc

SEQ ID NO: 272627 - RNA, 20 nt, Artificial Sequence
  Synthetic
gagucagcaaacuauggucc

SEQ ID NO: 272628 - RNA, 21 nt, Artificial Sequence
  Synthetic
agagucagcaaacuauggucc

SEQ ID NO: 272629 - RNA, 22 nt, Artificial Sequence
  Synthetic
aagagucagcaaacuauggucc

SEQ ID NO: 272630 - RNA, 23 nt, Artificial Sequence
  Synthetic
caagagucagcaaacuauggucc

SEQ ID NO: 272631 - RNA, 24 nt, Artificial Sequence
  Synthetic
gcaagagucagcaaacuauggucc

SEQ ID NO: 272632 - RNA, 18 nt, Artificial Sequence
  Synthetic
gggggggggaccuggucc

SEQ ID NO: 272633 - RNA, 19 nt, Artificial Sequence
  Synthetic
ugggggggggaccuggucc

SEQ ID NO: 272634 - RNA, 20 nt, Artificial Sequence
  Synthetic
uugggggggggaccuggucc

SEQ ID NO: 272635 - RNA, 21 nt, Artificial Sequence
  Synthetic
guugggggggggaccuggucc

SEQ ID NO: 272636 - RNA, 22 nt, Artificial Sequence
  Synthetic
gguugggggggggaccuggucc

SEQ ID NO: 272637 - RNA, 23 nt, Artificial Sequence
  Synthetic
ggguugggggggggaccuggucc

SEQ ID NO: 272638 - RNA, 24 nt, Artificial Sequence
  Synthetic
gggguugggggggggaccuggucc

SEQ ID NO: 272639 - RNA, 18 nt, Artificial Sequence
  Synthetic
caaucuggggccuggucc

SEQ ID NO: 272640 - RNA, 19 nt, Artificial Sequence
  Synthetic
acaaucuggggccuggucc

SEQ ID NO: 272641 - RNA, 20 nt, Artificial Sequence
  Synthetic
aacaaucuggggccuggucc

SEQ ID NO: 272642 - RNA, 21 nt, Artificial Sequence
  Synthetic
uaacaaucuggggccuggucc

SEQ ID NO: 272643 - RNA, 22 nt, Artificial Sequence
  Synthetic
auaacaaucuggggccuggucc

SEQ ID NO: 272644 - RNA, 23 nt, Artificial Sequence
  Synthetic
gauaacaaucuggggccuggucc

SEQ ID NO: 272645 - RNA, 24 nt, Artificial Sequence
  Synthetic
ugauaacaaucuggggccuggucc

SEQ ID NO: 272646 - RNA, 18 nt, Artificial Sequence
  Synthetic
ugcuggugcugcuggucc

SEQ ID NO: 272647 - RNA, 19 nt, Artificial Sequence
  Synthetic
uugcuggugcugcuggucc

SEQ ID NO: 272648 - RNA, 20 nt, Artificial Sequence
  Synthetic
guugcuggugcugcuggucc

SEQ ID NO: 272649 - RNA, 21 nt, Artificial Sequence
  Synthetic
cguugcuggugcugcuggucc

SEQ ID NO: 272650 - RNA, 22 nt, Artificial Sequence
  Synthetic
acguugcuggugcugcuggucc

SEQ ID NO: 272651 - RNA, 23 nt, Artificial Sequence
  Synthetic
gacguugcuggugcugcuggucc

SEQ ID NO: 272652 - RNA, 24 nt, Artificial Sequence
  Synthetic
agacguugcuggugcugcuggucc

SEQ ID NO: 272653 - RNA, 18 nt, Artificial Sequence
  Synthetic
aauacaacaaucuggucc

SEQ ID NO: 272654 - RNA, 19 nt, Artificial Sequence
  Synthetic
aaauacaacaaucuggucc

SEQ ID NO: 272655 - RNA, 20 nt, Artificial Sequence
  Synthetic
caaauacaacaaucuggucc

SEQ ID NO: 272656 - RNA, 21 nt, Artificial Sequence
  Synthetic
ucaaauacaacaaucuggucc

SEQ ID NO: 272657 - RNA, 22 nt, Artificial Sequence
  Synthetic
uucaaauacaacaaucuggucc

SEQ ID NO: 272658 - RNA, 23 nt, Artificial Sequence
  Synthetic
auucaaauacaacaaucuggucc

SEQ ID NO: 272659 - RNA, 24 nt, Artificial Sequence
  Synthetic
gauucaaauacaacaaucuggucc

SEQ ID NO: 272660 - RNA, 18 nt, Artificial Sequence
  Synthetic
auuguuauuuucuggucc

SEQ ID NO: 272661 - RNA, 19 nt, Artificial Sequence
  Synthetic
gauuguuauuuucuggucc

SEQ ID NO: 272662 - RNA, 20 nt, Artificial Sequence
  Synthetic
agauuguuauuuucuggucc

SEQ ID NO: 272663 - RNA, 21 nt, Artificial Sequence
  Synthetic
uagauuguuauuuucuggucc

SEQ ID NO: 272664 - RNA, 22 nt, Artificial Sequence
  Synthetic
uuagauuguuauuuucuggucc

SEQ ID NO: 272665 - RNA, 23 nt, Artificial Sequence
  Synthetic
uuuagauuguuauuuucuggucc

SEQ ID NO: 272666 - RNA, 24 nt, Artificial Sequence
  Synthetic
uuuuagauuguuauuuucuggucc

SEQ ID NO: 272667 - RNA, 18 nt, Artificial Sequence
  Synthetic
ccaaauauguauuggucc

SEQ ID NO: 272668 - RNA, 19 nt, Artificial Sequence
  Synthetic
accaaauauguauuggucc

SEQ ID NO: 272669 - RNA, 20 nt, Artificial Sequence
  Synthetic
aaccaaauauguauuggucc

SEQ ID NO: 272670 - RNA, 21 nt, Artificial Sequence
  Synthetic
uaaccaaauauguauuggucc

SEQ ID NO: 272671 - RNA, 22 nt, Artificial Sequence
  Synthetic
auaaccaaauauguauuggucc

SEQ ID NO: 272672 - RNA, 23 nt, Artificial Sequence
  Synthetic
uauaaccaaauauguauuggucc

SEQ ID NO: 272673 - RNA, 24 nt, Artificial Sequence
  Synthetic
auauaaccaaauauguauuggucc

SEQ ID NO: 272674 - RNA, 18 nt, Artificial Sequence
  Synthetic
guaaagaagacaaugucc

SEQ ID NO: 272675 - RNA, 19 nt, Artificial Sequence
  Synthetic
gguaaagaagacaaugucc

SEQ ID NO: 272676 - RNA, 20 nt, Artificial Sequence
  Synthetic
agguaaagaagacaaugucc

SEQ ID NO: 272677 - RNA, 21 nt, Artificial Sequence
  Synthetic
aagguaaagaagacaaugucc

SEQ ID NO: 272678 - RNA, 22 nt, Artificial Sequence
  Synthetic
aaagguaaagaagacaaugucc

SEQ ID NO: 272679 - RNA, 23 nt, Artificial Sequence
  Synthetic
caaagguaaagaagacaaugucc

SEQ ID NO: 272680 - RNA, 24 nt, Artificial Sequence
  Synthetic
ucaaagguaaagaagacaaugucc

SEQ ID NO: 272681 - RNA, 18 nt, Artificial Sequence
  Synthetic
aaaucauucuagaugucc

SEQ ID NO: 272682 - RNA, 19 nt, Artificial Sequence
  Synthetic
aaaaucauucuagaugucc

SEQ ID NO: 272683 - RNA, 20 nt, Artificial Sequence
  Synthetic
aaaaaucauucuagaugucc

SEQ ID NO: 272684 - RNA, 21 nt, Artificial Sequence
  Synthetic
gaaaaaucauucuagaugucc

SEQ ID NO: 272685 - RNA, 22 nt, Artificial Sequence
  Synthetic
agaaaaaucauucuagaugucc

SEQ ID NO: 272686 - RNA, 23 nt, Artificial Sequence
  Synthetic
aagaaaaaucauucuagaugucc

SEQ ID NO: 272687 - RNA, 24 nt, Artificial Sequence
  Synthetic
uaagaaaaaucauucuagaugucc

SEQ ID NO: 272688 - RNA, 18 nt, Artificial Sequence
  Synthetic
uuaauccauuguaugucc

SEQ ID NO: 272689 - RNA, 19 nt, Artificial Sequence
  Synthetic
auuaauccauuguaugucc

SEQ ID NO: 272690 - RNA, 20 nt, Artificial Sequence
  Synthetic
cauuaauccauuguaugucc

SEQ ID NO: 272691 - RNA, 21 nt, Artificial Sequence
  Synthetic
ucauuaauccauuguaugucc

SEQ ID NO: 272692 - RNA, 22 nt, Artificial Sequence
  Synthetic
uucauuaauccauuguaugucc

SEQ ID NO: 272693 - RNA, 23 nt, Artificial Sequence
  Synthetic
cuucauuaauccauuguaugucc

SEQ ID NO: 272694 - RNA, 24 nt, Artificial Sequence
  Synthetic
ucuucauuaauccauuguaugucc

SEQ ID NO: 272695 - RNA, 18 nt, Artificial Sequence
  Synthetic
uauaccagcacacugucc

SEQ ID NO: 272696 - RNA, 19 nt, Artificial Sequence
  Synthetic
cuauaccagcacacugucc

SEQ ID NO: 272697 - RNA, 20 nt, Artificial Sequence
  Synthetic
ucuauaccagcacacugucc

SEQ ID NO: 272698 - RNA, 21 nt, Artificial Sequence
  Synthetic
aucuauaccagcacacugucc

SEQ ID NO: 272699 - RNA, 22 nt, Artificial Sequence
  Synthetic
uaucuauaccagcacacugucc

SEQ ID NO: 272700 - RNA, 23 nt, Artificial Sequence
  Synthetic
auaucuauaccagcacacugucc

SEQ ID NO: 272701 - RNA, 24 nt, Artificial Sequence
  Synthetic
uauaucuauaccagcacacugucc

SEQ ID NO: 272702 - RNA, 18 nt, Artificial Sequence
  Synthetic
aacaacaaaguacugucc

SEQ ID NO: 272703 - RNA, 19 nt, Artificial Sequence
  Synthetic
aaacaacaaaguacugucc

SEQ ID NO: 272704 - RNA, 20 nt, Artificial Sequence
  Synthetic
aaaacaacaaaguacugucc

SEQ ID NO: 272705 - RNA, 21 nt, Artificial Sequence
  Synthetic
caaaacaacaaaguacugucc

SEQ ID NO: 272706 - RNA, 22 nt, Artificial Sequence
  Synthetic
ucaaaacaacaaaguacugucc

SEQ ID NO: 272707 - RNA, 23 nt, Artificial Sequence
  Synthetic
aucaaaacaacaaaguacugucc

SEQ ID NO: 272708 - RNA, 24 nt, Artificial Sequence
  Synthetic
aaucaaaacaacaaaguacugucc

SEQ ID NO: 272709 - RNA, 18 nt, Artificial Sequence
  Synthetic
ggaccaaaaaugcugucc

SEQ ID NO: 272710 - RNA, 19 nt, Artificial Sequence
  Synthetic
aggaccaaaaaugcugucc

SEQ ID NO: 272711 - RNA, 20 nt, Artificial Sequence
  Synthetic
caggaccaaaaaugcugucc

SEQ ID NO: 272712 - RNA, 21 nt, Artificial Sequence
  Synthetic
gcaggaccaaaaaugcugucc

SEQ ID NO: 272713 - RNA, 22 nt, Artificial Sequence
  Synthetic
ggcaggaccaaaaaugcugucc

SEQ ID NO: 272714 - RNA, 23 nt, Artificial Sequence
  Synthetic
aggcaggaccaaaaaugcugucc

SEQ ID NO: 272715 - RNA, 24 nt, Artificial Sequence
  Synthetic
aaggcaggaccaaaaaugcugucc

SEQ ID NO: 272716 - RNA, 18 nt, Artificial Sequence
  Synthetic
uacacuaucucucugucc

SEQ ID NO: 272717 - RNA, 19 nt, Artificial Sequence
  Synthetic
uuacacuaucucucugucc

SEQ ID NO: 272718 - RNA, 20 nt, Artificial Sequence
  Synthetic
uuuacacuaucucucugucc

SEQ ID NO: 272719 - RNA, 21 nt, Artificial Sequence
  Synthetic
cuuuacacuaucucucugucc

SEQ ID NO: 272720 - RNA, 22 nt, Artificial Sequence
  Synthetic
gcuuuacacuaucucucugucc

SEQ ID NO: 272721 - RNA, 23 nt, Artificial Sequence
  Synthetic
ugcuuuacacuaucucucugucc

SEQ ID NO: 272722 - RNA, 24 nt, Artificial Sequence
  Synthetic
gugcuuuacacuaucucucugucc

SEQ ID NO: 272723 - RNA, 18 nt, Artificial Sequence
  Synthetic
acccugcucccagugucc

SEQ ID NO: 272724 - RNA, 19 nt, Artificial Sequence
  Synthetic
gacccugcucccagugucc

SEQ ID NO: 272725 - RNA, 20 nt, Artificial Sequence
  Synthetic
agacccugcucccagugucc

SEQ ID NO: 272726 - RNA, 21 nt, Artificial Sequence
  Synthetic
cagacccugcucccagugucc

SEQ ID NO: 272727 - RNA, 22 nt, Artificial Sequence
  Synthetic
acagacccugcucccagugucc

SEQ ID NO: 272728 - RNA, 23 nt, Artificial Sequence
  Synthetic
aacagacccugcucccagugucc

SEQ ID NO: 272729 - RNA, 24 nt, Artificial Sequence
  Synthetic
aaacagacccugcucccagugucc

SEQ ID NO: 272730 - RNA, 18 nt, Artificial Sequence
  Synthetic
auguaacuuuacgugucc

SEQ ID NO: 272731 - RNA, 19 nt, Artificial Sequence
  Synthetic
aauguaacuuuacgugucc

SEQ ID NO: 272732 - RNA, 20 nt, Artificial Sequence
  Synthetic
gaauguaacuuuacgugucc

SEQ ID NO: 272733 - RNA, 21 nt, Artificial Sequence
  Synthetic
agaauguaacuuuacgugucc

SEQ ID NO: 272734 - RNA, 22 nt, Artificial Sequence
  Synthetic
gagaauguaacuuuacgugucc

SEQ ID NO: 272735 - RNA, 23 nt, Artificial Sequence
  Synthetic
ggagaauguaacuuuacgugucc

SEQ ID NO: 272736 - RNA, 24 nt, Artificial Sequence
  Synthetic
gggagaauguaacuuuacgugucc

SEQ ID NO: 272737 - RNA, 18 nt, Artificial Sequence
  Synthetic
agaaaacucuuggugucc

SEQ ID NO: 272738 - RNA, 19 nt, Artificial Sequence
  Synthetic
uagaaaacucuuggugucc

SEQ ID NO: 272739 - RNA, 20 nt, Artificial Sequence
  Synthetic
auagaaaacucuuggugucc

SEQ ID NO: 272740 - RNA, 21 nt, Artificial Sequence
  Synthetic
cauagaaaacucuuggugucc

SEQ ID NO: 272741 - RNA, 22 nt, Artificial Sequence
  Synthetic
ucauagaaaacucuuggugucc

SEQ ID NO: 272742 - RNA, 23 nt, Artificial Sequence
  Synthetic
uucauagaaaacucuuggugucc

SEQ ID NO: 272743 - RNA, 24 nt, Artificial Sequence
  Synthetic
auucauagaaaacucuuggugucc

SEQ ID NO: 272744 - RNA, 18 nt, Artificial Sequence
  Synthetic
auccacugagcugugucc

SEQ ID NO: 272745 - RNA, 19 nt, Artificial Sequence
  Synthetic
uauccacugagcugugucc

SEQ ID NO: 272746 - RNA, 20 nt, Artificial Sequence
  Synthetic
cuauccacugagcugugucc

SEQ ID NO: 272747 - RNA, 21 nt, Artificial Sequence
  Synthetic
acuauccacugagcugugucc

SEQ ID NO: 272748 - RNA, 22 nt, Artificial Sequence
  Synthetic
cacuauccacugagcugugucc

SEQ ID NO: 272749 - RNA, 23 nt, Artificial Sequence
  Synthetic
ucacuauccacugagcugugucc

SEQ ID NO: 272750 - RNA, 24 nt, Artificial Sequence
  Synthetic
gucacuauccacugagcugugucc

SEQ ID NO: 272751 - RNA, 18 nt, Artificial Sequence
  Synthetic
cccagauacucugugucc

SEQ ID NO: 272752 - RNA, 19 nt, Artificial Sequence
  Synthetic
ucccagauacucugugucc

SEQ ID NO: 272753 - RNA, 20 nt, Artificial Sequence
  Synthetic
gucccagauacucugugucc

SEQ ID NO: 272754 - RNA, 21 nt, Artificial Sequence
  Synthetic
agucccagauacucugugucc

SEQ ID NO: 272755 - RNA, 22 nt, Artificial Sequence
  Synthetic
gagucccagauacucugugucc

SEQ ID NO: 272756 - RNA, 23 nt, Artificial Sequence
  Synthetic
ugagucccagauacucugugucc

SEQ ID NO: 272757 - RNA, 24 nt, Artificial Sequence
  Synthetic
uugagucccagauacucugugucc

SEQ ID NO: 272758 - RNA, 18 nt, Artificial Sequence
  Synthetic
uauaugacuauugugucc

SEQ ID NO: 272759 - RNA, 19 nt, Artificial Sequence
  Synthetic
guauaugacuauugugucc

SEQ ID NO: 272760 - RNA, 20 nt, Artificial Sequence
  Synthetic
uguauaugacuauugugucc

SEQ ID NO: 272761 - RNA, 21 nt, Artificial Sequence
  Synthetic
auguauaugacuauugugucc

SEQ ID NO: 272762 - RNA, 22 nt, Artificial Sequence
  Synthetic
cauguauaugacuauugugucc

SEQ ID NO: 272763 - RNA, 23 nt, Artificial Sequence
  Synthetic
acauguauaugacuauugugucc

SEQ ID NO: 272764 - RNA, 24 nt, Artificial Sequence
  Synthetic
gacauguauaugacuauugugucc

SEQ ID NO: 272765 - RNA, 18 nt, Artificial Sequence
  Synthetic
cuugcuagauuugugucc

SEQ ID NO: 272766 - RNA, 19 nt, Artificial Sequence
  Synthetic
gcuugcuagauuugugucc

SEQ ID NO: 272767 - RNA, 20 nt, Artificial Sequence
  Synthetic
ugcuugcuagauuugugucc

SEQ ID NO: 272768 - RNA, 21 nt, Artificial Sequence
  Synthetic
uugcuugcuagauuugugucc

SEQ ID NO: 272769 - RNA, 22 nt, Artificial Sequence
  Synthetic
guugcuugcuagauuugugucc

SEQ ID NO: 272770 - RNA, 23 nt, Artificial Sequence
  Synthetic
uguugcuugcuagauuugugucc

SEQ ID NO: 272771 - RNA, 24 nt, Artificial Sequence
  Synthetic
uuguugcuugcuagauuugugucc

SEQ ID NO: 272772 - RNA, 18 nt, Artificial Sequence
  Synthetic
uuguuacaagaauugucc

SEQ ID NO: 272773 - RNA, 19 nt, Artificial Sequence
  Synthetic
uuuguuacaagaauugucc

SEQ ID NO: 272774 - RNA, 20 nt, Artificial Sequence
  Synthetic
auuuguuacaagaauugucc

SEQ ID NO: 272775 - RNA, 21 nt, Artificial Sequence
  Synthetic
uauuuguuacaagaauugucc

SEQ ID NO: 272776 - RNA, 22 nt, Artificial Sequence
  Synthetic
uuauuuguuacaagaauugucc

SEQ ID NO: 272777 - RNA, 23 nt, Artificial Sequence
  Synthetic
uuuauuuguuacaagaauugucc

SEQ ID NO: 272778 - RNA, 24 nt, Artificial Sequence
  Synthetic
uuuuauuuguuacaagaauugucc

SEQ ID NO: 272779 - RNA, 18 nt, Artificial Sequence
  Synthetic
ugccuauuauaauugucc

SEQ ID NO: 272780 - RNA, 19 nt, Artificial Sequence
  Synthetic
augccuauuauaauugucc

SEQ ID NO: 272781 - RNA, 20 nt, Artificial Sequence
  Synthetic
aaugccuauuauaauugucc

SEQ ID NO: 272782 - RNA, 21 nt, Artificial Sequence
  Synthetic
caaugccuauuauaauugucc

SEQ ID NO: 272783 - RNA, 22 nt, Artificial Sequence
  Synthetic
acaaugccuauuauaauugucc

SEQ ID NO: 272784 - RNA, 23 nt, Artificial Sequence
  Synthetic
uacaaugccuauuauaauugucc

SEQ ID NO: 272785 - RNA, 24 nt, Artificial Sequence
  Synthetic
uuacaaugccuauuauaauugucc

SEQ ID NO: 272786 - RNA, 18 nt, Artificial Sequence
  Synthetic
ugaguggguggauugucc

SEQ ID NO: 272787 - RNA, 19 nt, Artificial Sequence
  Synthetic
gugaguggguggauugucc

SEQ ID NO: 272788 - RNA, 20 nt, Artificial Sequence
  Synthetic
ggugaguggguggauugucc

SEQ ID NO: 272789 - RNA, 21 nt, Artificial Sequence
  Synthetic
aggugaguggguggauugucc

SEQ ID NO: 272790 - RNA, 22 nt, Artificial Sequence
  Synthetic
gaggugaguggguggauugucc

SEQ ID NO: 272791 - RNA, 23 nt, Artificial Sequence
  Synthetic
agaggugaguggguggauugucc

SEQ ID NO: 272792 - RNA, 24 nt, Artificial Sequence
  Synthetic
aagaggugaguggguggauugucc

SEQ ID NO: 272793 - RNA, 18 nt, Artificial Sequence
  Synthetic
cuaaacccacucuugucc

SEQ ID NO: 272794 - RNA, 19 nt, Artificial Sequence
  Synthetic
ccuaaacccacucuugucc

SEQ ID NO: 272795 - RNA, 20 nt, Artificial Sequence
  Synthetic
uccuaaacccacucuugucc

SEQ ID NO: 272796 - RNA, 21 nt, Artificial Sequence
  Synthetic
cuccuaaacccacucuugucc

SEQ ID NO: 272797 - RNA, 22 nt, Artificial Sequence
  Synthetic
ucuccuaaacccacucuugucc

SEQ ID NO: 272798 - RNA, 23 nt, Artificial Sequence
  Synthetic
aucuccuaaacccacucuugucc

SEQ ID NO: 272799 - RNA, 24 nt, Artificial Sequence
  Synthetic
uaucuccuaaacccacucuugucc

SEQ ID NO: 272800 - RNA, 18 nt, Artificial Sequence
  Synthetic
cugagucugugguugucc

SEQ ID NO: 272801 - RNA, 19 nt, Artificial Sequence
  Synthetic
ccugagucugugguugucc

SEQ ID NO: 272802 - RNA, 20 nt, Artificial Sequence
  Synthetic
uccugagucugugguugucc

SEQ ID NO: 272803 - RNA, 21 nt, Artificial Sequence
  Synthetic
cuccugagucugugguugucc

SEQ ID NO: 272804 - RNA, 22 nt, Artificial Sequence
  Synthetic
gcuccugagucugugguugucc

SEQ ID NO: 272805 - RNA, 23 nt, Artificial Sequence
  Synthetic
ugcuccugagucugugguugucc

SEQ ID NO: 272806 - RNA, 24 nt, Artificial Sequence
  Synthetic
uugcuccugagucugugguugucc

SEQ ID NO: 272807 - RNA, 18 nt, Artificial Sequence
  Synthetic
gauuggagaguguugucc

SEQ ID NO: 272808 - RNA, 19 nt, Artificial Sequence
  Synthetic
ugauuggagaguguugucc

SEQ ID NO: 272809 - RNA, 20 nt, Artificial Sequence
  Synthetic
uugauuggagaguguugucc

SEQ ID NO: 272810 - RNA, 21 nt, Artificial Sequence
  Synthetic
cuugauuggagaguguugucc

SEQ ID NO: 272811 - RNA, 22 nt, Artificial Sequence
  Synthetic
ucuugauuggagaguguugucc

SEQ ID NO: 272812 - RNA, 23 nt, Artificial Sequence
  Synthetic
cucuugauuggagaguguugucc

SEQ ID NO: 272813 - RNA, 24 nt, Artificial Sequence
  Synthetic
ucucuugauuggagaguguugucc

SEQ ID NO: 272814 - RNA, 18 nt, Artificial Sequence
  Synthetic
gccaucacauuguugucc

SEQ ID NO: 272815 - RNA, 19 nt, Artificial Sequence
  Synthetic
ggccaucacauuguugucc

SEQ ID NO: 272816 - RNA, 20 nt, Artificial Sequence
  Synthetic
uggccaucacauuguugucc

SEQ ID NO: 272817 - RNA, 21 nt, Artificial Sequence
  Synthetic
auggccaucacauuguugucc

SEQ ID NO: 272818 - RNA, 22 nt, Artificial Sequence
  Synthetic
aauggccaucacauuguugucc

SEQ ID NO: 272819 - RNA, 23 nt, Artificial Sequence
  Synthetic
caauggccaucacauuguugucc

SEQ ID NO: 272820 - RNA, 24 nt, Artificial Sequence
  Synthetic
gcaauggccaucacauuguugucc

SEQ ID NO: 272821 - RNA, 18 nt, Artificial Sequence
  Synthetic
gaaaugacuccuuugucc

SEQ ID NO: 272822 - RNA, 19 nt, Artificial Sequence
  Synthetic
ugaaaugacuccuuugucc

SEQ ID NO: 272823 - RNA, 20 nt, Artificial Sequence
  Synthetic
cugaaaugacuccuuugucc

SEQ ID NO: 272824 - RNA, 21 nt, Artificial Sequence
  Synthetic
gcugaaaugacuccuuugucc

SEQ ID NO: 272825 - RNA, 22 nt, Artificial Sequence
  Synthetic
agcugaaaugacuccuuugucc

SEQ ID NO: 272826 - RNA, 23 nt, Artificial Sequence
  Synthetic
gagcugaaaugacuccuuugucc

SEQ ID NO: 272827 - RNA, 24 nt, Artificial Sequence
  Synthetic
agagcugaaaugacuccuuugucc

SEQ ID NO: 272828 - RNA, 18 nt, Artificial Sequence
  Synthetic
acuuugguuuuuuugucc

SEQ ID NO: 272829 - RNA, 19 nt, Artificial Sequence
  Synthetic
uacuuugguuuuuuugucc

SEQ ID NO: 272830 - RNA, 20 nt, Artificial Sequence
  Synthetic
uuacuuugguuuuuuugucc

SEQ ID NO: 272831 - RNA, 21 nt, Artificial Sequence
  Synthetic
cuuacuuugguuuuuuugucc

SEQ ID NO: 272832 - RNA, 22 nt, Artificial Sequence
  Synthetic
gcuuacuuugguuuuuuugucc

SEQ ID NO: 272833 - RNA, 23 nt, Artificial Sequence
  Synthetic
ggcuuacuuugguuuuuuugucc

SEQ ID NO: 272834 - RNA, 24 nt, Artificial Sequence
  Synthetic
aggcuuacuuugguuuuuuugucc

SEQ ID NO: 272835 - RNA, 18 nt, Artificial Sequence
  Synthetic
acccaauacgaaaauucc

SEQ ID NO: 272836 - RNA, 19 nt, Artificial Sequence
  Synthetic
uacccaauacgaaaauucc

SEQ ID NO: 272837 - RNA, 20 nt, Artificial Sequence
  Synthetic
cuacccaauacgaaaauucc

SEQ ID NO: 272838 - RNA, 21 nt, Artificial Sequence
  Synthetic
ucuacccaauacgaaaauucc

SEQ ID NO: 272839 - RNA, 22 nt, Artificial Sequence
  Synthetic
uucuacccaauacgaaaauucc

SEQ ID NO: 272840 - RNA, 23 nt, Artificial Sequence
  Synthetic
uuucuacccaauacgaaaauucc

SEQ ID NO: 272841 - RNA, 24 nt, Artificial Sequence
  Synthetic
auuucuacccaauacgaaaauucc

SEQ ID NO: 272842 - RNA, 18 nt, Artificial Sequence
  Synthetic
ugaguuguuccaaauucc

SEQ ID NO: 272843 - RNA, 19 nt, Artificial Sequence
  Synthetic
gugaguuguuccaaauucc

SEQ ID NO: 272844 - RNA, 20 nt, Artificial Sequence
  Synthetic
agugaguuguuccaaauucc

SEQ ID NO: 272845 - RNA, 21 nt, Artificial Sequence
  Synthetic
cagugaguuguuccaaauucc

SEQ ID NO: 272846 - RNA, 22 nt, Artificial Sequence
  Synthetic
ccagugaguuguuccaaauucc

SEQ ID NO: 272847 - RNA, 23 nt, Artificial Sequence
  Synthetic
cccagugaguuguuccaaauucc

SEQ ID NO: 272848 - RNA, 24 nt, Artificial Sequence
  Synthetic
ucccagugaguuguuccaaauucc

SEQ ID NO: 272849 - RNA, 18 nt, Artificial Sequence
  Synthetic
aacuacaaugcaaauucc

SEQ ID NO: 272850 - RNA, 19 nt, Artificial Sequence
  Synthetic
uaacuacaaugcaaauucc

SEQ ID NO: 272851 - RNA, 20 nt, Artificial Sequence
  Synthetic
guaacuacaaugcaaauucc

SEQ ID NO: 272852 - RNA, 21 nt, Artificial Sequence
  Synthetic
uguaacuacaaugcaaauucc

SEQ ID NO: 272853 - RNA, 22 nt, Artificial Sequence
  Synthetic
uuguaacuacaaugcaaauucc

SEQ ID NO: 272854 - RNA, 23 nt, Artificial Sequence
  Synthetic
guuguaacuacaaugcaaauucc

SEQ ID NO: 272855 - RNA, 24 nt, Artificial Sequence
  Synthetic
gguuguaacuacaaugcaaauucc

SEQ ID NO: 272856 - RNA, 18 nt, Artificial Sequence
  Synthetic
gcauuucuaucaaauucc

SEQ ID NO: 272857 - RNA, 19 nt, Artificial Sequence
  Synthetic
ugcauuucuaucaaauucc

SEQ ID NO: 272858 - RNA, 20 nt, Artificial Sequence
  Synthetic
uugcauuucuaucaaauucc

SEQ ID NO: 272859 - RNA, 21 nt, Artificial Sequence
  Synthetic
uuugcauuucuaucaaauucc

SEQ ID NO: 272860 - RNA, 22 nt, Artificial Sequence
  Synthetic
auuugcauuucuaucaaauucc

SEQ ID NO: 272861 - RNA, 23 nt, Artificial Sequence
  Synthetic
aauuugcauuucuaucaaauucc

SEQ ID NO: 272862 - RNA, 24 nt, Artificial Sequence
  Synthetic
uaauuugcauuucuaucaaauucc

SEQ ID NO: 272863 - RNA, 18 nt, Artificial Sequence
  Synthetic
guaccaggcagaaauucc

SEQ ID NO: 272864 - RNA, 19 nt, Artificial Sequence
  Synthetic
gguaccaggcagaaauucc

SEQ ID NO: 272865 - RNA, 20 nt, Artificial Sequence
  Synthetic
ugguaccaggcagaaauucc

SEQ ID NO: 272866 - RNA, 21 nt, Artificial Sequence
  Synthetic
gugguaccaggcagaaauucc

SEQ ID NO: 272867 - RNA, 22 nt, Artificial Sequence
  Synthetic
ugugguaccaggcagaaauucc

SEQ ID NO: 272868 - RNA, 23 nt, Artificial Sequence
  Synthetic
gugugguaccaggcagaaauucc

SEQ ID NO: 272869 - RNA, 24 nt, Artificial Sequence
  Synthetic
agugugguaccaggcagaaauucc

SEQ ID NO: 272870 - RNA, 18 nt, Artificial Sequence
  Synthetic
aucuacaaaauaaauucc

SEQ ID NO: 272871 - RNA, 19 nt, Artificial Sequence
  Synthetic
aaucuacaaaauaaauucc

SEQ ID NO: 272872 - RNA, 20 nt, Artificial Sequence
  Synthetic
aaaucuacaaaauaaauucc

SEQ ID NO: 272873 - RNA, 21 nt, Artificial Sequence
  Synthetic
caaaucuacaaaauaaauucc

SEQ ID NO: 272874 - RNA, 22 nt, Artificial Sequence
  Synthetic
acaaaucuacaaaauaaauucc

SEQ ID NO: 272875 - RNA, 23 nt, Artificial Sequence
  Synthetic
aacaaaucuacaaaauaaauucc

SEQ ID NO: 272876 - RNA, 24 nt, Artificial Sequence
  Synthetic
aaacaaaucuacaaaauaaauucc

SEQ ID NO: 272877 - RNA, 18 nt, Artificial Sequence
  Synthetic
guugccuucauaaauucc

SEQ ID NO: 272878 - RNA, 19 nt, Artificial Sequence
  Synthetic
uguugccuucauaaauucc

SEQ ID NO: 272879 - RNA, 20 nt, Artificial Sequence
  Synthetic
auguugccuucauaaauucc

SEQ ID NO: 272880 - RNA, 21 nt, Artificial Sequence
  Synthetic
uauguugccuucauaaauucc

SEQ ID NO: 272881 - RNA, 22 nt, Artificial Sequence
  Synthetic
uuauguugccuucauaaauucc

SEQ ID NO: 272882 - RNA, 23 nt, Artificial Sequence
  Synthetic
uuuauguugccuucauaaauucc

SEQ ID NO: 272883 - RNA, 24 nt, Artificial Sequence
  Synthetic
uuuuauguugccuucauaaauucc

SEQ ID NO: 272884 - RNA, 18 nt, Artificial Sequence
  Synthetic
uaucacaauauaaauucc

SEQ ID NO: 272885 - RNA, 19 nt, Artificial Sequence
  Synthetic
auaucacaauauaaauucc

SEQ ID NO: 272886 - RNA, 20 nt, Artificial Sequence
  Synthetic
uauaucacaauauaaauucc

SEQ ID NO: 272887 - RNA, 21 nt, Artificial Sequence
  Synthetic
cuauaucacaauauaaauucc

SEQ ID NO: 272888 - RNA, 22 nt, Artificial Sequence
  Synthetic
ucuauaucacaauauaaauucc

SEQ ID NO: 272889 - RNA, 23 nt, Artificial Sequence
  Synthetic
uucuauaucacaauauaaauucc

SEQ ID NO: 272890 - RNA, 24 nt, Artificial Sequence
  Synthetic
uuucuauaucacaauauaaauucc

SEQ ID NO: 272891 - RNA, 18 nt, Artificial Sequence
  Synthetic
cugaaaccauacaauucc

SEQ ID NO: 272892 - RNA, 19 nt, Artificial Sequence
  Synthetic
ucugaaaccauacaauucc

SEQ ID NO: 272893 - RNA, 20 nt, Artificial Sequence
  Synthetic
uucugaaaccauacaauucc

SEQ ID NO: 272894 - RNA, 21 nt, Artificial Sequence
  Synthetic
uuucugaaaccauacaauucc

SEQ ID NO: 272895 - RNA, 22 nt, Artificial Sequence
  Synthetic
auuucugaaaccauacaauucc

SEQ ID NO: 272896 - RNA, 23 nt, Artificial Sequence
  Synthetic
uauuucugaaaccauacaauucc

SEQ ID NO: 272897 - RNA, 24 nt, Artificial Sequence
  Synthetic
uuauuucugaaaccauacaauucc

SEQ ID NO: 272898 - RNA, 18 nt, Artificial Sequence
  Synthetic
ugauucuuguacaauucc

SEQ ID NO: 272899 - RNA, 19 nt, Artificial Sequence
  Synthetic
augauucuuguacaauucc

SEQ ID NO: 272900 - RNA, 20 nt, Artificial Sequence
  Synthetic
caugauucuuguacaauucc

SEQ ID NO: 272901 - RNA, 21 nt, Artificial Sequence
  Synthetic
ccaugauucuuguacaauucc

SEQ ID NO: 272902 - RNA, 22 nt, Artificial Sequence
  Synthetic
cccaugauucuuguacaauucc

SEQ ID NO: 272903 - RNA, 23 nt, Artificial Sequence
  Synthetic
ucccaugauucuuguacaauucc

SEQ ID NO: 272904 - RNA, 24 nt, Artificial Sequence
  Synthetic
uucccaugauucuuguacaauucc

SEQ ID NO: 272905 - RNA, 18 nt, Artificial Sequence
  Synthetic
aaaggagucagcaauucc

SEQ ID NO: 272906 - RNA, 19 nt, Artificial Sequence
  Synthetic
aaaaggagucagcaauucc

SEQ ID NO: 272907 - RNA, 20 nt, Artificial Sequence
  Synthetic
gaaaaggagucagcaauucc

SEQ ID NO: 272908 - RNA, 21 nt, Artificial Sequence
  Synthetic
ggaaaaggagucagcaauucc

SEQ ID NO: 272909 - RNA, 22 nt, Artificial Sequence
  Synthetic
gggaaaaggagucagcaauucc

SEQ ID NO: 272910 - RNA, 23 nt, Artificial Sequence
  Synthetic
ugggaaaaggagucagcaauucc

SEQ ID NO: 272911 - RNA, 24 nt, Artificial Sequence
  Synthetic
cugggaaaaggagucagcaauucc

SEQ ID NO: 272912 - RNA, 18 nt, Artificial Sequence
  Synthetic
auaggaauaugcaauucc

SEQ ID NO: 272913 - RNA, 19 nt, Artificial Sequence
  Synthetic
uauaggaauaugcaauucc

SEQ ID NO: 272914 - RNA, 20 nt, Artificial Sequence
  Synthetic
guauaggaauaugcaauucc

SEQ ID NO: 272915 - RNA, 21 nt, Artificial Sequence
  Synthetic
aguauaggaauaugcaauucc

SEQ ID NO: 272916 - RNA, 22 nt, Artificial Sequence
  Synthetic
aaguauaggaauaugcaauucc

SEQ ID NO: 272917 - RNA, 23 nt, Artificial Sequence
  Synthetic
gaaguauaggaauaugcaauucc

SEQ ID NO: 272918 - RNA, 24 nt, Artificial Sequence
  Synthetic
cgaaguauaggaauaugcaauucc

SEQ ID NO: 272919 - RNA, 18 nt, Artificial Sequence
  Synthetic
guuaggcuucucaauucc

SEQ ID NO: 272920 - RNA, 19 nt, Artificial Sequence
  Synthetic
aguuaggcuucucaauucc

SEQ ID NO: 272921 - RNA, 20 nt, Artificial Sequence
  Synthetic
uaguuaggcuucucaauucc

SEQ ID NO: 272922 - RNA, 21 nt, Artificial Sequence
  Synthetic
uuaguuaggcuucucaauucc

SEQ ID NO: 272923 - RNA, 22 nt, Artificial Sequence
  Synthetic
cuuaguuaggcuucucaauucc

SEQ ID NO: 272924 - RNA, 23 nt, Artificial Sequence
  Synthetic
acuuaguuaggcuucucaauucc

SEQ ID NO: 272925 - RNA, 24 nt, Artificial Sequence
  Synthetic
gacuuaguuaggcuucucaauucc

SEQ ID NO: 272926 - RNA, 18 nt, Artificial Sequence
  Synthetic
uucuugaaugagaauucc

SEQ ID NO: 272927 - RNA, 19 nt, Artificial Sequence
  Synthetic
uuucuugaaugagaauucc

SEQ ID NO: 272928 - RNA, 20 nt, Artificial Sequence
  Synthetic
guuucuugaaugagaauucc

SEQ ID NO: 272929 - RNA, 21 nt, Artificial Sequence
  Synthetic
aguuucuugaaugagaauucc

SEQ ID NO: 272930 - RNA, 22 nt, Artificial Sequence
  Synthetic
caguuucuugaaugagaauucc

SEQ ID NO: 272931 - RNA, 23 nt, Artificial Sequence
  Synthetic
acaguuucuugaaugagaauucc

SEQ ID NO: 272932 - RNA, 24 nt, Artificial Sequence
  Synthetic
aacaguuucuugaaugagaauucc

SEQ ID NO: 272933 - RNA, 18 nt, Artificial Sequence
  Synthetic
cuugugcugaauaauucc

SEQ ID NO: 272934 - RNA, 19 nt, Artificial Sequence
  Synthetic
acuugugcugaauaauucc

SEQ ID NO: 272935 - RNA, 20 nt, Artificial Sequence
  Synthetic
aacuugugcugaauaauucc

SEQ ID NO: 272936 - RNA, 21 nt, Artificial Sequence
  Synthetic
aaacuugugcugaauaauucc

SEQ ID NO: 272937 - RNA, 22 nt, Artificial Sequence
  Synthetic
uaaacuugugcugaauaauucc

SEQ ID NO: 272938 - RNA, 23 nt, Artificial Sequence
  Synthetic
uuaaacuugugcugaauaauucc

SEQ ID NO: 272939 - RNA, 24 nt, Artificial Sequence
  Synthetic
uuuaaacuugugcugaauaauucc

SEQ ID NO: 272940 - RNA, 18 nt, Artificial Sequence
  Synthetic
uaugaaguaacuaauucc

SEQ ID NO: 272941 - RNA, 19 nt, Artificial Sequence
  Synthetic
uuaugaaguaacuaauucc

SEQ ID NO: 272942 - RNA, 20 nt, Artificial Sequence
  Synthetic
cuuaugaaguaacuaauucc

SEQ ID NO: 272943 - RNA, 21 nt, Artificial Sequence
  Synthetic
ucuuaugaaguaacuaauucc

SEQ ID NO: 272944 - RNA, 22 nt, Artificial Sequence
  Synthetic
gucuuaugaaguaacuaauucc

SEQ ID NO: 272945 - RNA, 23 nt, Artificial Sequence
  Synthetic
ugucuuaugaaguaacuaauucc

SEQ ID NO: 272946 - RNA, 24 nt, Artificial Sequence
  Synthetic
uugucuuaugaaguaacuaauucc

SEQ ID NO: 272947 - RNA, 18 nt, Artificial Sequence
  Synthetic
cucuucucaucuaauucc

SEQ ID NO: 272948 - RNA, 19 nt, Artificial Sequence
  Synthetic
ccucuucucaucuaauucc

SEQ ID NO: 272949 - RNA, 20 nt, Artificial Sequence
  Synthetic
accucuucucaucuaauucc

SEQ ID NO: 272950 - RNA, 21 nt, Artificial Sequence
  Synthetic
caccucuucucaucuaauucc

SEQ ID NO: 272951 - RNA, 22 nt, Artificial Sequence
  Synthetic
ucaccucuucucaucuaauucc

SEQ ID NO: 272952 - RNA, 23 nt, Artificial Sequence
  Synthetic
aucaccucuucucaucuaauucc

SEQ ID NO: 272953 - RNA, 24 nt, Artificial Sequence
  Synthetic
caucaccucuucucaucuaauucc

SEQ ID NO: 272954 - RNA, 18 nt, Artificial Sequence
  Synthetic
gaacuagggcuuaauucc

SEQ ID NO: 272955 - RNA, 19 nt, Artificial Sequence
  Synthetic
agaacuagggcuuaauucc

SEQ ID NO: 272956 - RNA, 20 nt, Artificial Sequence
  Synthetic
gagaacuagggcuuaauucc

SEQ ID NO: 272957 - RNA, 21 nt, Artificial Sequence
  Synthetic
ugagaacuagggcuuaauucc

SEQ ID NO: 272958 - RNA, 22 nt, Artificial Sequence
  Synthetic
gugagaacuagggcuuaauucc

SEQ ID NO: 272959 - RNA, 23 nt, Artificial Sequence
  Synthetic
ugugagaacuagggcuuaauucc

SEQ ID NO: 272960 - RNA, 24 nt, Artificial Sequence
  Synthetic
cugugagaacuagggcuuaauucc

SEQ ID NO: 272961 - RNA, 18 nt, Artificial Sequence
  Synthetic
uucuaauuaacacauucc

SEQ ID NO: 272962 - RNA, 19 nt, Artificial Sequence
  Synthetic
cuucuaauuaacacauucc

SEQ ID NO: 272963 - RNA, 20 nt, Artificial Sequence
  Synthetic
ucuucuaauuaacacauucc

SEQ ID NO: 272964 - RNA, 21 nt, Artificial Sequence
  Synthetic
aucuucuaauuaacacauucc

SEQ ID NO: 272965 - RNA, 22 nt, Artificial Sequence
  Synthetic
uaucuucuaauuaacacauucc

SEQ ID NO: 272966 - RNA, 23 nt, Artificial Sequence
  Synthetic
uuaucuucuaauuaacacauucc

SEQ ID NO: 272967 - RNA, 24 nt, Artificial Sequence
  Synthetic
cuuaucuucuaauuaacacauucc

SEQ ID NO: 272968 - RNA, 18 nt, Artificial Sequence
  Synthetic
ucaugacauccacauucc

SEQ ID NO: 272969 - RNA, 19 nt, Artificial Sequence
  Synthetic
cucaugacauccacauucc

SEQ ID NO: 272970 - RNA, 20 nt, Artificial Sequence
  Synthetic
ucucaugacauccacauucc

SEQ ID NO: 272971 - RNA, 21 nt, Artificial Sequence
  Synthetic
cucucaugacauccacauucc

SEQ ID NO: 272972 - RNA, 22 nt, Artificial Sequence
  Synthetic
gcucucaugacauccacauucc

SEQ ID NO: 272973 - RNA, 23 nt, Artificial Sequence
  Synthetic
agcucucaugacauccacauucc

SEQ ID NO: 272974 - RNA, 24 nt, Artificial Sequence
  Synthetic
gagcucucaugacauccacauucc

SEQ ID NO: 272975 - RNA, 18 nt, Artificial Sequence
  Synthetic
agucuuagaguacauucc

SEQ ID NO: 272976 - RNA, 19 nt, Artificial Sequence
  Synthetic
aagucuuagaguacauucc

SEQ ID NO: 272977 - RNA, 20 nt, Artificial Sequence
  Synthetic
aaagucuuagaguacauucc

SEQ ID NO: 272978 - RNA, 21 nt, Artificial Sequence
  Synthetic
aaaagucuuagaguacauucc

SEQ ID NO: 272979 - RNA, 22 nt, Artificial Sequence
  Synthetic
aaaaagucuuagaguacauucc

SEQ ID NO: 272980 - RNA, 23 nt, Artificial Sequence
  Synthetic
caaaaagucuuagaguacauucc

SEQ ID NO: 272981 - RNA, 24 nt, Artificial Sequence
  Synthetic
gcaaaaagucuuagaguacauucc

SEQ ID NO: 272982 - RNA, 18 nt, Artificial Sequence
  Synthetic
ucuaagcaucaccauucc

SEQ ID NO: 272983 - RNA, 19 nt, Artificial Sequence
  Synthetic
uucuaagcaucaccauucc

SEQ ID NO: 272984 - RNA, 20 nt, Artificial Sequence
  Synthetic
uuucuaagcaucaccauucc

SEQ ID NO: 272985 - RNA, 21 nt, Artificial Sequence
  Synthetic
cuuucuaagcaucaccauucc

SEQ ID NO: 272986 - RNA, 22 nt, Artificial Sequence
  Synthetic
ccuuucuaagcaucaccauucc

SEQ ID NO: 272987 - RNA, 23 nt, Artificial Sequence
  Synthetic
accuuucuaagcaucaccauucc

SEQ ID NO: 272988 - RNA, 24 nt, Artificial Sequence
  Synthetic
aaccuuucuaagcaucaccauucc

SEQ ID NO: 272989 - RNA, 18 nt, Artificial Sequence
  Synthetic
gaaaucuagcuccauucc

SEQ ID NO: 272990 - RNA, 19 nt, Artificial Sequence
  Synthetic
ugaaaucuagcuccauucc

SEQ ID NO: 272991 - RNA, 20 nt, Artificial Sequence
  Synthetic
cugaaaucuagcuccauucc

SEQ ID NO: 272992 - RNA, 21 nt, Artificial Sequence
  Synthetic
gcugaaaucuagcuccauucc

SEQ ID NO: 272993 - RNA, 22 nt, Artificial Sequence
  Synthetic
ggcugaaaucuagcuccauucc

SEQ ID NO: 272994 - RNA, 23 nt, Artificial Sequence
  Synthetic
uggcugaaaucuagcuccauucc

SEQ ID NO: 272995 - RNA, 24 nt, Artificial Sequence
  Synthetic
auggcugaaaucuagcuccauucc

SEQ ID NO: 272996 - RNA, 18 nt, Artificial Sequence
  Synthetic
aguacaugaaggcauucc

SEQ ID NO: 272997 - RNA, 19 nt, Artificial Sequence
  Synthetic
gaguacaugaaggcauucc

SEQ ID NO: 272998 - RNA, 20 nt, Artificial Sequence
  Synthetic
ggaguacaugaaggcauucc

SEQ ID NO: 272999 - RNA, 21 nt, Artificial Sequence
  Synthetic
gggaguacaugaaggcauucc

SEQ ID NO: 273000 - RNA, 22 nt, Artificial Sequence
  Synthetic
ugggaguacaugaaggcauucc

SEQ ID NO: 273001 - RNA, 23 nt, Artificial Sequence
  Synthetic
cugggaguacaugaaggcauucc

SEQ ID NO: 273002 - RNA, 24 nt, Artificial Sequence
  Synthetic
ccugggaguacaugaaggcauucc

SEQ ID NO: 273003 - RNA, 18 nt, Artificial Sequence
  Synthetic
gcaagucaaaaagauucc

SEQ ID NO: 273004 - RNA, 19 nt, Artificial Sequence
  Synthetic
agcaagucaaaaagauucc

SEQ ID NO: 273005 - RNA, 20 nt, Artificial Sequence
  Synthetic
cagcaagucaaaaagauucc

SEQ ID NO: 273006 - RNA, 21 nt, Artificial Sequence
  Synthetic
gcagcaagucaaaaagauucc

SEQ ID NO: 273007 - RNA, 22 nt, Artificial Sequence
  Synthetic
ggcagcaagucaaaaagauucc

SEQ ID NO: 273008 - RNA, 23 nt, Artificial Sequence
  Synthetic
gggcagcaagucaaaaagauucc

SEQ ID NO: 273009 - RNA, 24 nt, Artificial Sequence
  Synthetic
agggcagcaagucaaaaagauucc

SEQ ID NO: 273010 - RNA, 18 nt, Artificial Sequence
  Synthetic
uacacacacauagauucc

SEQ ID NO: 273011 - RNA, 19 nt, Artificial Sequence
  Synthetic
guacacacacauagauucc

SEQ ID NO: 273012 - RNA, 20 nt, Artificial Sequence
  Synthetic
cguacacacacauagauucc

SEQ ID NO: 273013 - RNA, 21 nt, Artificial Sequence
  Synthetic
acguacacacacauagauucc

SEQ ID NO: 273014 - RNA, 22 nt, Artificial Sequence
  Synthetic
aacguacacacacauagauucc

SEQ ID NO: 273015 - RNA, 23 nt, Artificial Sequence
  Synthetic
caacguacacacacauagauucc

SEQ ID NO: 273016 - RNA, 24 nt, Artificial Sequence
  Synthetic
ucaacguacacacacauagauucc

SEQ ID NO: 273017 - RNA, 18 nt, Artificial Sequence
  Synthetic
uggaauacucucgauucc

SEQ ID NO: 273018 - RNA, 19 nt, Artificial Sequence
  Synthetic
uuggaauacucucgauucc

SEQ ID NO: 273019 - RNA, 20 nt, Artificial Sequence
  Synthetic
uuuggaauacucucgauucc

SEQ ID NO: 273020 - RNA, 21 nt, Artificial Sequence
  Synthetic
auuuggaauacucucgauucc

SEQ ID NO: 273021 - RNA, 22 nt, Artificial Sequence
  Synthetic
uauuuggaauacucucgauucc

SEQ ID NO: 273022 - RNA, 23 nt, Artificial Sequence
  Synthetic
guauuuggaauacucucgauucc

SEQ ID NO: 273023 - RNA, 24 nt, Artificial Sequence
  Synthetic
aguauuuggaauacucucgauucc

SEQ ID NO: 273024 - RNA, 18 nt, Artificial Sequence
  Synthetic
cugaggcaggaggauucc

SEQ ID NO: 273025 - RNA, 19 nt, Artificial Sequence
  Synthetic
gcugaggcaggaggauucc

SEQ ID NO: 273026 - RNA, 20 nt, Artificial Sequence
  Synthetic
ggcugaggcaggaggauucc

SEQ ID NO: 273027 - RNA, 21 nt, Artificial Sequence
  Synthetic
aggcugaggcaggaggauucc

SEQ ID NO: 273028 - RNA, 22 nt, Artificial Sequence
  Synthetic
gaggcugaggcaggaggauucc

SEQ ID NO: 273029 - RNA, 23 nt, Artificial Sequence
  Synthetic
ggaggcugaggcaggaggauucc

SEQ ID NO: 273030 - RNA, 24 nt, Artificial Sequence
  Synthetic
uggaggcugaggcaggaggauucc

SEQ ID NO: 273031 - RNA, 18 nt, Artificial Sequence
  Synthetic
uauuacuguaaugauucc

SEQ ID NO: 273032 - RNA, 19 nt, Artificial Sequence
  Synthetic
uuauuacuguaaugauucc

SEQ ID NO: 273033 - RNA, 20 nt, Artificial Sequence
  Synthetic
uuuauuacuguaaugauucc

SEQ ID NO: 273034 - RNA, 21 nt, Artificial Sequence
  Synthetic
guuuauuacuguaaugauucc

SEQ ID NO: 273035 - RNA, 22 nt, Artificial Sequence
  Synthetic
uguuuauuacuguaaugauucc

SEQ ID NO: 273036 - RNA, 23 nt, Artificial Sequence
  Synthetic
uuguuuauuacuguaaugauucc

SEQ ID NO: 273037 - RNA, 24 nt, Artificial Sequence
  Synthetic
uuuguuuauuacuguaaugauucc

SEQ ID NO: 273038 - RNA, 18 nt, Artificial Sequence
  Synthetic
ucuaccacagaugauucc

SEQ ID NO: 273039 - RNA, 19 nt, Artificial Sequence
  Synthetic
cucuaccacagaugauucc

SEQ ID NO: 273040 - RNA, 20 nt, Artificial Sequence
  Synthetic
ucucuaccacagaugauucc

SEQ ID NO: 273041 - RNA, 21 nt, Artificial Sequence
  Synthetic
uucucuaccacagaugauucc

SEQ ID NO: 273042 - RNA, 22 nt, Artificial Sequence
  Synthetic
cuucucuaccacagaugauucc

SEQ ID NO: 273043 - RNA, 23 nt, Artificial Sequence
  Synthetic
gcuucucuaccacagaugauucc

SEQ ID NO: 273044 - RNA, 24 nt, Artificial Sequence
  Synthetic
ugcuucucuaccacagaugauucc

SEQ ID NO: 273045 - RNA, 18 nt, Artificial Sequence
  Synthetic
uacagguuuggugauucc

SEQ ID NO: 273046 - RNA, 19 nt, Artificial Sequence
  Synthetic
guacagguuuggugauucc

SEQ ID NO: 273047 - RNA, 20 nt, Artificial Sequence
  Synthetic
gguacagguuuggugauucc

SEQ ID NO: 273048 - RNA, 21 nt, Artificial Sequence
  Synthetic
agguacagguuuggugauucc

SEQ ID NO: 273049 - RNA, 22 nt, Artificial Sequence
  Synthetic
uagguacagguuuggugauucc

SEQ ID NO: 273050 - RNA, 23 nt, Artificial Sequence
  Synthetic
uuagguacagguuuggugauucc

SEQ ID NO: 273051 - RNA, 24 nt, Artificial Sequence
  Synthetic
guuagguacagguuuggugauucc

SEQ ID NO: 273052 - RNA, 18 nt, Artificial Sequence
  Synthetic
ggucuugaauuugauucc

SEQ ID NO: 273053 - RNA, 19 nt, Artificial Sequence
  Synthetic
uggucuugaauuugauucc

SEQ ID NO: 273054 - RNA, 20 nt, Artificial Sequence
  Synthetic
uuggucuugaauuugauucc

SEQ ID NO: 273055 - RNA, 21 nt, Artificial Sequence
  Synthetic
cuuggucuugaauuugauucc

SEQ ID NO: 273056 - RNA, 22 nt, Artificial Sequence
  Synthetic
ccuuggucuugaauuugauucc

SEQ ID NO: 273057 - RNA, 23 nt, Artificial Sequence
  Synthetic
accuuggucuugaauuugauucc

SEQ ID NO: 273058 - RNA, 24 nt, Artificial Sequence
  Synthetic
gaccuuggucuugaauuugauucc

SEQ ID NO: 273059 - RNA, 18 nt, Artificial Sequence
  Synthetic
cuuuuaaaguaauauucc

SEQ ID NO: 273060 - RNA, 19 nt, Artificial Sequence
  Synthetic
acuuuuaaaguaauauucc

SEQ ID NO: 273061 - RNA, 20 nt, Artificial Sequence
  Synthetic
uacuuuuaaaguaauauucc

SEQ ID NO: 273062 - RNA, 21 nt, Artificial Sequence
  Synthetic
uuacuuuuaaaguaauauucc

SEQ ID NO: 273063 - RNA, 22 nt, Artificial Sequence
  Synthetic
cuuacuuuuaaaguaauauucc

SEQ ID NO: 273064 - RNA, 23 nt, Artificial Sequence
  Synthetic
acuuacuuuuaaaguaauauucc

SEQ ID NO: 273065 - RNA, 24 nt, Artificial Sequence
  Synthetic
cacuuacuuuuaaaguaauauucc

SEQ ID NO: 273066 - RNA, 18 nt, Artificial Sequence
  Synthetic
gaaucaaauccauauucc

SEQ ID NO: 273067 - RNA, 19 nt, Artificial Sequence
  Synthetic
agaaucaaauccauauucc

SEQ ID NO: 273068 - RNA, 20 nt, Artificial Sequence
  Synthetic
gagaaucaaauccauauucc

SEQ ID NO: 273069 - RNA, 21 nt, Artificial Sequence
  Synthetic
agagaaucaaauccauauucc

SEQ ID NO: 273070 - RNA, 22 nt, Artificial Sequence
  Synthetic
cagagaaucaaauccauauucc

SEQ ID NO: 273071 - RNA, 23 nt, Artificial Sequence
  Synthetic
gcagagaaucaaauccauauucc

SEQ ID NO: 273072 - RNA, 24 nt, Artificial Sequence
  Synthetic
agcagagaaucaaauccauauucc

SEQ ID NO: 273073 - RNA, 18 nt, Artificial Sequence
  Synthetic
ugcauauguucauauucc

SEQ ID NO: 273074 - RNA, 19 nt, Artificial Sequence
  Synthetic
augcauauguucauauucc

SEQ ID NO: 273075 - RNA, 20 nt, Artificial Sequence
  Synthetic
aaugcauauguucauauucc

SEQ ID NO: 273076 - RNA, 21 nt, Artificial Sequence
  Synthetic
aaaugcauauguucauauucc

SEQ ID NO: 273077 - RNA, 22 nt, Artificial Sequence
  Synthetic
gaaaugcauauguucauauucc

SEQ ID NO: 273078 - RNA, 23 nt, Artificial Sequence
  Synthetic
agaaaugcauauguucauauucc

SEQ ID NO: 273079 - RNA, 24 nt, Artificial Sequence
  Synthetic
cagaaaugcauauguucauauucc

SEQ ID NO: 273080 - RNA, 18 nt, Artificial Sequence
  Synthetic
uguuuuaaaguauauucc

SEQ ID NO: 273081 - RNA, 19 nt, Artificial Sequence
  Synthetic
auguuuuaaaguauauucc

SEQ ID NO: 273082 - RNA, 20 nt, Artificial Sequence
  Synthetic
uauguuuuaaaguauauucc

SEQ ID NO: 273083 - RNA, 21 nt, Artificial Sequence
  Synthetic
uuauguuuuaaaguauauucc

SEQ ID NO: 273084 - RNA, 22 nt, Artificial Sequence
  Synthetic
uuuauguuuuaaaguauauucc

SEQ ID NO: 273085 - RNA, 23 nt, Artificial Sequence
  Synthetic
cuuuauguuuuaaaguauauucc

SEQ ID NO: 273086 - RNA, 24 nt, Artificial Sequence
  Synthetic
ucuuuauguuuuaaaguauauucc

SEQ ID NO: 273087 - RNA, 18 nt, Artificial Sequence
  Synthetic
cuugggccucccuauucc

SEQ ID NO: 273088 - RNA, 19 nt, Artificial Sequence
  Synthetic
ccuugggccucccuauucc

SEQ ID NO: 273089 - RNA, 20 nt, Artificial Sequence
  Synthetic
uccuugggccucccuauucc

SEQ ID NO: 273090 - RNA, 21 nt, Artificial Sequence
  Synthetic
cuccuugggccucccuauucc

SEQ ID NO: 273091 - RNA, 22 nt, Artificial Sequence
  Synthetic
ucuccuugggccucccuauucc

SEQ ID NO: 273092 - RNA, 23 nt, Artificial Sequence
  Synthetic
cucuccuugggccucccuauucc

SEQ ID NO: 273093 - RNA, 24 nt, Artificial Sequence
  Synthetic
ccucuccuugggccucccuauucc

SEQ ID NO: 273094 - RNA, 18 nt, Artificial Sequence
  Synthetic
auugaucuauauuauucc

SEQ ID NO: 273095 - RNA, 19 nt, Artificial Sequence
  Synthetic
cauugaucuauauuauucc

SEQ ID NO: 273096 - RNA, 20 nt, Artificial Sequence
  Synthetic
acauugaucuauauuauucc

SEQ ID NO: 273097 - RNA, 21 nt, Artificial Sequence
  Synthetic
aacauugaucuauauuauucc

SEQ ID NO: 273098 - RNA, 22 nt, Artificial Sequence
  Synthetic
aaacauugaucuauauuauucc

SEQ ID NO: 273099 - RNA, 23 nt, Artificial Sequence
  Synthetic
gaaacauugaucuauauuauucc

SEQ ID NO: 273100 - RNA, 24 nt, Artificial Sequence
  Synthetic
agaaacauugaucuauauuauucc

SEQ ID NO: 273101 - RNA, 18 nt, Artificial Sequence
  Synthetic
ugugacaaguauuauucc

SEQ ID NO: 273102 - RNA, 19 nt, Artificial Sequence
  Synthetic
gugugacaaguauuauucc

SEQ ID NO: 273103 - RNA, 20 nt, Artificial Sequence
  Synthetic
ugugugacaaguauuauucc

SEQ ID NO: 273104 - RNA, 21 nt, Artificial Sequence
  Synthetic
cugugugacaaguauuauucc

SEQ ID NO: 273105 - RNA, 22 nt, Artificial Sequence
  Synthetic
acugugugacaaguauuauucc

SEQ ID NO: 273106 - RNA, 23 nt, Artificial Sequence
  Synthetic
uacugugugacaaguauuauucc

SEQ ID NO: 273107 - RNA, 24 nt, Artificial Sequence
  Synthetic
cuacugugugacaaguauuauucc

SEQ ID NO: 273108 - RNA, 18 nt, Artificial Sequence
  Synthetic
aaaggccaauuuuauucc

SEQ ID NO: 273109 - RNA, 19 nt, Artificial Sequence
  Synthetic
aaaaggccaauuuuauucc

SEQ ID NO: 273110 - RNA, 20 nt, Artificial Sequence
  Synthetic
aaaaaggccaauuuuauucc

SEQ ID NO: 273111 - RNA, 21 nt, Artificial Sequence
  Synthetic
caaaaaggccaauuuuauucc

SEQ ID NO: 273112 - RNA, 22 nt, Artificial Sequence
  Synthetic
ucaaaaaggccaauuuuauucc

SEQ ID NO: 273113 - RNA, 23 nt, Artificial Sequence
  Synthetic
uucaaaaaggccaauuuuauucc

SEQ ID NO: 273114 - RNA, 24 nt, Artificial Sequence
  Synthetic
cuucaaaaaggccaauuuuauucc

SEQ ID NO: 273115 - RNA, 18 nt, Artificial Sequence
  Synthetic
uggacaagcaaaacuucc

SEQ ID NO: 273116 - RNA, 19 nt, Artificial Sequence
  Synthetic
auggacaagcaaaacuucc

SEQ ID NO: 273117 - RNA, 20 nt, Artificial Sequence
  Synthetic
aauggacaagcaaaacuucc

SEQ ID NO: 273118 - RNA, 21 nt, Artificial Sequence
  Synthetic
caauggacaagcaaaacuucc

SEQ ID NO: 273119 - RNA, 22 nt, Artificial Sequence
  Synthetic
acaauggacaagcaaaacuucc

SEQ ID NO: 273120 - RNA, 23 nt, Artificial Sequence
  Synthetic
aacaauggacaagcaaaacuucc

SEQ ID NO: 273121 - RNA, 24 nt, Artificial Sequence
  Synthetic
gaacaauggacaagcaaaacuucc

SEQ ID NO: 273122 - RNA, 18 nt, Artificial Sequence
  Synthetic
uuguuuugacaaacuucc

SEQ ID NO: 273123 - RNA, 19 nt, Artificial Sequence
  Synthetic
uuuguuuugacaaacuucc

SEQ ID NO: 273124 - RNA, 20 nt, Artificial Sequence
  Synthetic
uuuuguuuugacaaacuucc

SEQ ID NO: 273125 - RNA, 21 nt, Artificial Sequence
  Synthetic
guuuuguuuugacaaacuucc

SEQ ID NO: 273126 - RNA, 22 nt, Artificial Sequence
  Synthetic
gguuuuguuuugacaaacuucc

SEQ ID NO: 273127 - RNA, 23 nt, Artificial Sequence
  Synthetic
ggguuuuguuuugacaaacuucc

SEQ ID NO: 273128 - RNA, 24 nt, Artificial Sequence
  Synthetic
uggguuuuguuuugacaaacuucc

SEQ ID NO: 273129 - RNA, 18 nt, Artificial Sequence
  Synthetic
ggaaaauuugaaacuucc

SEQ ID NO: 273130 - RNA, 19 nt, Artificial Sequence
  Synthetic
gggaaaauuugaaacuucc

SEQ ID NO: 273131 - RNA, 20 nt, Artificial Sequence
  Synthetic
ugggaaaauuugaaacuucc

SEQ ID NO: 273132 - RNA, 21 nt, Artificial Sequence
  Synthetic
gugggaaaauuugaaacuucc

SEQ ID NO: 273133 - RNA, 22 nt, Artificial Sequence
  Synthetic
ugugggaaaauuugaaacuucc

SEQ ID NO: 273134 - RNA, 23 nt, Artificial Sequence
  Synthetic
augugggaaaauuugaaacuucc

SEQ ID NO: 273135 - RNA, 24 nt, Artificial Sequence
  Synthetic
aaugugggaaaauuugaaacuucc

SEQ ID NO: 273136 - RNA, 18 nt, Artificial Sequence
  Synthetic
agauuuaucucaacuucc

SEQ ID NO: 273137 - RNA, 19 nt, Artificial Sequence
  Synthetic
cagauuuaucucaacuucc

SEQ ID NO: 273138 - RNA, 20 nt, Artificial Sequence
  Synthetic
acagauuuaucucaacuucc

SEQ ID NO: 273139 - RNA, 21 nt, Artificial Sequence
  Synthetic
aacagauuuaucucaacuucc

SEQ ID NO: 273140 - RNA, 22 nt, Artificial Sequence
  Synthetic
aaacagauuuaucucaacuucc

SEQ ID NO: 273141 - RNA, 23 nt, Artificial Sequence
  Synthetic
aaaacagauuuaucucaacuucc

SEQ ID NO: 273142 - RNA, 24 nt, Artificial Sequence
  Synthetic
aaaaacagauuuaucucaacuucc

SEQ ID NO: 273143 - RNA, 18 nt, Artificial Sequence
  Synthetic
cugcuauaaagaacuucc

SEQ ID NO: 273144 - RNA, 19 nt, Artificial Sequence
  Synthetic
acugcuauaaagaacuucc

SEQ ID NO: 273145 - RNA, 20 nt, Artificial Sequence
  Synthetic
cacugcuauaaagaacuucc

SEQ ID NO: 273146 - RNA, 21 nt, Artificial Sequence
  Synthetic
acacugcuauaaagaacuucc

SEQ ID NO: 273147 - RNA, 22 nt, Artificial Sequence
  Synthetic
cacacugcuauaaagaacuucc

SEQ ID NO: 273148 - RNA, 23 nt, Artificial Sequence
  Synthetic
ucacacugcuauaaagaacuucc

SEQ ID NO: 273149 - RNA, 24 nt, Artificial Sequence
  Synthetic
uucacacugcuauaaagaacuucc

SEQ ID NO: 273150 - RNA, 18 nt, Artificial Sequence
  Synthetic
cuacuucaaauaacuucc

SEQ ID NO: 273151 - RNA, 19 nt, Artificial Sequence
  Synthetic
acuacuucaaauaacuucc

SEQ ID NO: 273152 - RNA, 20 nt, Artificial Sequence
  Synthetic
gacuacuucaaauaacuucc

SEQ ID NO: 273153 - RNA, 21 nt, Artificial Sequence
  Synthetic
ugacuacuucaaauaacuucc

SEQ ID NO: 273154 - RNA, 22 nt, Artificial Sequence
  Synthetic
uugacuacuucaaauaacuucc

SEQ ID NO: 273155 - RNA, 23 nt, Artificial Sequence
  Synthetic
cuugacuacuucaaauaacuucc

SEQ ID NO: 273156 - RNA, 24 nt, Artificial Sequence
  Synthetic
ucuugacuacuucaaauaacuucc

SEQ ID NO: 273157 - RNA, 18 nt, Artificial Sequence
  Synthetic
acacuugucugcacuucc

SEQ ID NO: 273158 - RNA, 19 nt, Artificial Sequence
  Synthetic
aacacuugucugcacuucc

SEQ ID NO: 273159 - RNA, 20 nt, Artificial Sequence
  Synthetic
aaacacuugucugcacuucc

SEQ ID NO: 273160 - RNA, 21 nt, Artificial Sequence
  Synthetic
aaaacacuugucugcacuucc

SEQ ID NO: 273161 - RNA, 22 nt, Artificial Sequence
  Synthetic
caaaacacuugucugcacuucc

SEQ ID NO: 273162 - RNA, 23 nt, Artificial Sequence
  Synthetic
acaaaacacuugucugcacuucc

SEQ ID NO: 273163 - RNA, 24 nt, Artificial Sequence
  Synthetic
aacaaaacacuugucugcacuucc

SEQ ID NO: 273164 - RNA, 18 nt, Artificial Sequence
  Synthetic
gcuggaggauucacuucc

SEQ ID NO: 273165 - RNA, 19 nt, Artificial Sequence
  Synthetic
ugcuggaggauucacuucc

SEQ ID NO: 273166 - RNA, 20 nt, Artificial Sequence
  Synthetic
augcuggaggauucacuucc

SEQ ID NO: 273167 - RNA, 21 nt, Artificial Sequence
  Synthetic
gaugcuggaggauucacuucc

SEQ ID NO: 273168 - RNA, 22 nt, Artificial Sequence
  Synthetic
ugaugcuggaggauucacuucc

SEQ ID NO: 273169 - RNA, 23 nt, Artificial Sequence
  Synthetic
cugaugcuggaggauucacuucc

SEQ ID NO: 273170 - RNA, 24 nt, Artificial Sequence
  Synthetic
ccugaugcuggaggauucacuucc

SEQ ID NO: 273171 - RNA, 18 nt, Artificial Sequence
  Synthetic
aaugaagagaauacuucc

SEQ ID NO: 273172 - RNA, 19 nt, Artificial Sequence
  Synthetic
uaaugaagagaauacuucc

SEQ ID NO: 273173 - RNA, 20 nt, Artificial Sequence
  Synthetic
cuaaugaagagaauacuucc

SEQ ID NO: 273174 - RNA, 21 nt, Artificial Sequence
  Synthetic
ucuaaugaagagaauacuucc

SEQ ID NO: 273175 - RNA, 22 nt, Artificial Sequence
  Synthetic
uucuaaugaagagaauacuucc

SEQ ID NO: 273176 - RNA, 23 nt, Artificial Sequence
  Synthetic
uuucuaaugaagagaauacuucc

SEQ ID NO: 273177 - RNA, 24 nt, Artificial Sequence
  Synthetic
auuucuaaugaagagaauacuucc

SEQ ID NO: 273178 - RNA, 18 nt, Artificial Sequence
  Synthetic
aggagaaugguuacuucc

SEQ ID NO: 273179 - RNA, 19 nt, Artificial Sequence
  Synthetic
caggagaaugguuacuucc

SEQ ID NO: 273180 - RNA, 20 nt, Artificial Sequence
  Synthetic
ucaggagaaugguuacuucc

SEQ ID NO: 273181 - RNA, 21 nt, Artificial Sequence
  Synthetic
uucaggagaaugguuacuucc

SEQ ID NO: 273182 - RNA, 22 nt, Artificial Sequence
  Synthetic
auucaggagaaugguuacuucc

SEQ ID NO: 273183 - RNA, 23 nt, Artificial Sequence
  Synthetic
aauucaggagaaugguuacuucc

SEQ ID NO: 273184 - RNA, 24 nt, Artificial Sequence
  Synthetic
aaauucaggagaaugguuacuucc

SEQ ID NO: 273185 - RNA, 18 nt, Artificial Sequence
  Synthetic
uccucuauggcaccuucc

SEQ ID NO: 273186 - RNA, 19 nt, Artificial Sequence
  Synthetic
uuccucuauggcaccuucc

SEQ ID NO: 273187 - RNA, 20 nt, Artificial Sequence
  Synthetic
guuccucuauggcaccuucc

SEQ ID NO: 273188 - RNA, 21 nt, Artificial Sequence
  Synthetic
uguuccucuauggcaccuucc

SEQ ID NO: 273189 - RNA, 22 nt, Artificial Sequence
  Synthetic
cuguuccucuauggcaccuucc

SEQ ID NO: 273190 - RNA, 23 nt, Artificial Sequence
  Synthetic
gcuguuccucuauggcaccuucc

SEQ ID NO: 273191 - RNA, 24 nt, Artificial Sequence
  Synthetic
ugcuguuccucuauggcaccuucc

SEQ ID NO: 273192 - RNA, 18 nt, Artificial Sequence
  Synthetic
gucucucccuggccuucc

SEQ ID NO: 273193 - RNA, 19 nt, Artificial Sequence
  Synthetic
agucucucccuggccuucc

SEQ ID NO: 273194 - RNA, 20 nt, Artificial Sequence
  Synthetic
cagucucucccuggccuucc

SEQ ID NO: 273195 - RNA, 21 nt, Artificial Sequence
  Synthetic
gcagucucucccuggccuucc

SEQ ID NO: 273196 - RNA, 22 nt, Artificial Sequence
  Synthetic
ggcagucucucccuggccuucc

SEQ ID NO: 273197 - RNA, 23 nt, Artificial Sequence
  Synthetic
gggcagucucucccuggccuucc

SEQ ID NO: 273198 - RNA, 24 nt, Artificial Sequence
  Synthetic
ggggcagucucucccuggccuucc

SEQ ID NO: 273199 - RNA, 18 nt, Artificial Sequence
  Synthetic
cuuuauuuguggccuucc

SEQ ID NO: 273200 - RNA, 19 nt, Artificial Sequence
  Synthetic
acuuuauuuguggccuucc

SEQ ID NO: 273201 - RNA, 20 nt, Artificial Sequence
  Synthetic
uacuuuauuuguggccuucc

SEQ ID NO: 273202 - RNA, 21 nt, Artificial Sequence
  Synthetic
guacuuuauuuguggccuucc

SEQ ID NO: 273203 - RNA, 22 nt, Artificial Sequence
  Synthetic
uguacuuuauuuguggccuucc

SEQ ID NO: 273204 - RNA, 23 nt, Artificial Sequence
  Synthetic
auguacuuuauuuguggccuucc

SEQ ID NO: 273205 - RNA, 24 nt, Artificial Sequence
  Synthetic
aauguacuuuauuuguggccuucc

SEQ ID NO: 273206 - RNA, 18 nt, Artificial Sequence
  Synthetic
uauacauagcugccuucc

SEQ ID NO: 273207 - RNA, 19 nt, Artificial Sequence
  Synthetic
auauacauagcugccuucc

SEQ ID NO: 273208 - RNA, 20 nt, Artificial Sequence
  Synthetic
uauauacauagcugccuucc

SEQ ID NO: 273209 - RNA, 21 nt, Artificial Sequence
  Synthetic
auauauacauagcugccuucc

SEQ ID NO: 273210 - RNA, 22 nt, Artificial Sequence
  Synthetic
uauauauacauagcugccuucc

SEQ ID NO: 273211 - RNA, 23 nt, Artificial Sequence
  Synthetic
uuauauauacauagcugccuucc

SEQ ID NO: 273212 - RNA, 24 nt, Artificial Sequence
  Synthetic
uuuauauauacauagcugccuucc

SEQ ID NO: 273213 - RNA, 18 nt, Artificial Sequence
  Synthetic
aaauuggaagcuccuucc

SEQ ID NO: 273214 - RNA, 19 nt, Artificial Sequence
  Synthetic
gaaauuggaagcuccuucc

SEQ ID NO: 273215 - RNA, 20 nt, Artificial Sequence
  Synthetic
ugaaauuggaagcuccuucc

SEQ ID NO: 273216 - RNA, 21 nt, Artificial Sequence
  Synthetic
uugaaauuggaagcuccuucc

SEQ ID NO: 273217 - RNA, 22 nt, Artificial Sequence
  Synthetic
cuugaaauuggaagcuccuucc

SEQ ID NO: 273218 - RNA, 23 nt, Artificial Sequence
  Synthetic
gcuugaaauuggaagcuccuucc

SEQ ID NO: 273219 - RNA, 24 nt, Artificial Sequence
  Synthetic
ugcuugaaauuggaagcuccuucc

SEQ ID NO: 273220 - RNA, 18 nt, Artificial Sequence
  Synthetic
ucgggcuuaauuccuucc

SEQ ID NO: 273221 - RNA, 19 nt, Artificial Sequence
  Synthetic
uucgggcuuaauuccuucc

SEQ ID NO: 273222 - RNA, 20 nt, Artificial Sequence
  Synthetic
auucgggcuuaauuccuucc

SEQ ID NO: 273223 - RNA, 21 nt, Artificial Sequence
  Synthetic
cauucgggcuuaauuccuucc

SEQ ID NO: 273224 - RNA, 22 nt, Artificial Sequence
  Synthetic
ccauucgggcuuaauuccuucc

SEQ ID NO: 273225 - RNA, 23 nt, Artificial Sequence
  Synthetic
accauucgggcuuaauuccuucc

SEQ ID NO: 273226 - RNA, 24 nt, Artificial Sequence
  Synthetic
aaccauucgggcuuaauuccuucc

SEQ ID NO: 273227 - RNA, 18 nt, Artificial Sequence
  Synthetic
uuaaccacuauuccuucc

SEQ ID NO: 273228 - RNA, 19 nt, Artificial Sequence
  Synthetic
uuuaaccacuauuccuucc

SEQ ID NO: 273229 - RNA, 20 nt, Artificial Sequence
  Synthetic
uuuuaaccacuauuccuucc

SEQ ID NO: 273230 - RNA, 21 nt, Artificial Sequence
  Synthetic
uuuuuaaccacuauuccuucc

SEQ ID NO: 273231 - RNA, 22 nt, Artificial Sequence
  Synthetic
auuuuuaaccacuauuccuucc

SEQ ID NO: 273232 - RNA, 23 nt, Artificial Sequence
  Synthetic
uauuuuuaaccacuauuccuucc

SEQ ID NO: 273233 - RNA, 24 nt, Artificial Sequence
  Synthetic
auauuuuuaaccacuauuccuucc

SEQ ID NO: 273234 - RNA, 18 nt, Artificial Sequence
  Synthetic
cuucaguuaaaagcuucc

SEQ ID NO: 273235 - RNA, 19 nt, Artificial Sequence
  Synthetic
acuucaguuaaaagcuucc

SEQ ID NO: 273236 - RNA, 20 nt, Artificial Sequence
  Synthetic
cacuucaguuaaaagcuucc

SEQ ID NO: 273237 - RNA, 21 nt, Artificial Sequence
  Synthetic
acacuucaguuaaaagcuucc

SEQ ID NO: 273238 - RNA, 22 nt, Artificial Sequence
  Synthetic
uacacuucaguuaaaagcuucc

SEQ ID NO: 273239 - RNA, 23 nt, Artificial Sequence
  Synthetic
uuacacuucaguuaaaagcuucc

SEQ ID NO: 273240 - RNA, 24 nt, Artificial Sequence
  Synthetic
auuacacuucaguuaaaagcuucc

SEQ ID NO: 273241 - RNA, 18 nt, Artificial Sequence
  Synthetic
gcaacucacccagcuucc

SEQ ID NO: 273242 - RNA, 19 nt, Artificial Sequence
  Synthetic
ggcaacucacccagcuucc

SEQ ID NO: 273243 - RNA, 20 nt, Artificial Sequence
  Synthetic
uggcaacucacccagcuucc

SEQ ID NO: 273244 - RNA, 21 nt, Artificial Sequence
  Synthetic
uuggcaacucacccagcuucc

SEQ ID NO: 273245 - RNA, 22 nt, Artificial Sequence
  Synthetic
uuuggcaacucacccagcuucc

SEQ ID NO: 273246 - RNA, 23 nt, Artificial Sequence
  Synthetic
uuuuggcaacucacccagcuucc

SEQ ID NO: 273247 - RNA, 24 nt, Artificial Sequence
  Synthetic
auuuuggcaacucacccagcuucc

SEQ ID NO: 273248 - RNA, 18 nt, Artificial Sequence
  Synthetic
cauucugugagggcuucc

SEQ ID NO: 273249 - RNA, 19 nt, Artificial Sequence
  Synthetic
gcauucugugagggcuucc

SEQ ID NO: 273250 - RNA, 20 nt, Artificial Sequence
  Synthetic
ugcauucugugagggcuucc

SEQ ID NO: 273251 - RNA, 21 nt, Artificial Sequence
  Synthetic
uugcauucugugagggcuucc

SEQ ID NO: 273252 - RNA, 22 nt, Artificial Sequence
  Synthetic
auugcauucugugagggcuucc

SEQ ID NO: 273253 - RNA, 23 nt, Artificial Sequence
  Synthetic
aauugcauucugugagggcuucc

SEQ ID NO: 273254 - RNA, 24 nt, Artificial Sequence
  Synthetic
uaauugcauucugugagggcuucc

SEQ ID NO: 273255 - RNA, 18 nt, Artificial Sequence
  Synthetic
guucugggucuggcuucc

SEQ ID NO: 273256 - RNA, 19 nt, Artificial Sequence
  Synthetic
uguucugggucuggcuucc

SEQ ID NO: 273257 - RNA, 20 nt, Artificial Sequence
  Synthetic
uuguucugggucuggcuucc

SEQ ID NO: 273258 - RNA, 21 nt, Artificial Sequence
  Synthetic
uuuguucugggucuggcuucc

SEQ ID NO: 273259 - RNA, 22 nt, Artificial Sequence
  Synthetic
auuuguucugggucuggcuucc

SEQ ID NO: 273260 - RNA, 23 nt, Artificial Sequence
  Synthetic
cauuuguucugggucuggcuucc

SEQ ID NO: 273261 - RNA, 24 nt, Artificial Sequence
  Synthetic
ucauuuguucugggucuggcuucc

SEQ ID NO: 273262 - RNA, 18 nt, Artificial Sequence
  Synthetic
gcugcaaauuuggcuucc

SEQ ID NO: 273263 - RNA, 19 nt, Artificial Sequence
  Synthetic
agcugcaaauuuggcuucc

SEQ ID NO: 273264 - RNA, 20 nt, Artificial Sequence
  Synthetic
cagcugcaaauuuggcuucc

SEQ ID NO: 273265 - RNA, 21 nt, Artificial Sequence
  Synthetic
gcagcugcaaauuuggcuucc

SEQ ID NO: 273266 - RNA, 22 nt, Artificial Sequence
  Synthetic
ggcagcugcaaauuuggcuucc

SEQ ID NO: 273267 - RNA, 23 nt, Artificial Sequence
  Synthetic
uggcagcugcaaauuuggcuucc

SEQ ID NO: 273268 - RNA, 24 nt, Artificial Sequence
  Synthetic
guggcagcugcaaauuuggcuucc

SEQ ID NO: 273269 - RNA, 18 nt, Artificial Sequence
  Synthetic
gcuuaguggaaugcuucc

SEQ ID NO: 273270 - RNA, 19 nt, Artificial Sequence
  Synthetic
ggcuuaguggaaugcuucc

SEQ ID NO: 273271 - RNA, 20 nt, Artificial Sequence
  Synthetic
gggcuuaguggaaugcuucc

SEQ ID NO: 273272 - RNA, 21 nt, Artificial Sequence
  Synthetic
agggcuuaguggaaugcuucc

SEQ ID NO: 273273 - RNA, 22 nt, Artificial Sequence
  Synthetic
gagggcuuaguggaaugcuucc

SEQ ID NO: 273274 - RNA, 23 nt, Artificial Sequence
  Synthetic
ugagggcuuaguggaaugcuucc

SEQ ID NO: 273275 - RNA, 24 nt, Artificial Sequence
  Synthetic
augagggcuuaguggaaugcuucc

SEQ ID NO: 273276 - RNA, 18 nt, Artificial Sequence
  Synthetic
uuuggguaagcugcuucc

SEQ ID NO: 273277 - RNA, 19 nt, Artificial Sequence
  Synthetic
cuuuggguaagcugcuucc

SEQ ID NO: 273278 - RNA, 20 nt, Artificial Sequence
  Synthetic
ucuuuggguaagcugcuucc

SEQ ID NO: 273279 - RNA, 21 nt, Artificial Sequence
  Synthetic
gucuuuggguaagcugcuucc

SEQ ID NO: 273280 - RNA, 22 nt, Artificial Sequence
  Synthetic
ggucuuuggguaagcugcuucc

SEQ ID NO: 273281 - RNA, 23 nt, Artificial Sequence
  Synthetic
aggucuuuggguaagcugcuucc

SEQ ID NO: 273282 - RNA, 24 nt, Artificial Sequence
  Synthetic
uaggucuuuggguaagcugcuucc

SEQ ID NO: 273283 - RNA, 18 nt, Artificial Sequence
  Synthetic
uuuuucauucuugcuucc

SEQ ID NO: 273284 - RNA, 19 nt, Artificial Sequence
  Synthetic
guuuuucauucuugcuucc

SEQ ID NO: 273285 - RNA, 20 nt, Artificial Sequence
  Synthetic
gguuuuucauucuugcuucc

SEQ ID NO: 273286 - RNA, 21 nt, Artificial Sequence
  Synthetic
ugguuuuucauucuugcuucc

SEQ ID NO: 273287 - RNA, 22 nt, Artificial Sequence
  Synthetic
uugguuuuucauucuugcuucc

SEQ ID NO: 273288 - RNA, 23 nt, Artificial Sequence
  Synthetic
uuugguuuuucauucuugcuucc

SEQ ID NO: 273289 - RNA, 24 nt, Artificial Sequence
  Synthetic
uuuugguuuuucauucuugcuucc

SEQ ID NO: 273290 - RNA, 18 nt, Artificial Sequence
  Synthetic
uauuuaaaagcaucuucc

SEQ ID NO: 273291 - RNA, 19 nt, Artificial Sequence
  Synthetic
cuauuuaaaagcaucuucc

SEQ ID NO: 273292 - RNA, 20 nt, Artificial Sequence
  Synthetic
ucuauuuaaaagcaucuucc

SEQ ID NO: 273293 - RNA, 21 nt, Artificial Sequence
  Synthetic
uucuauuuaaaagcaucuucc

SEQ ID NO: 273294 - RNA, 22 nt, Artificial Sequence
  Synthetic
uuucuauuuaaaagcaucuucc

SEQ ID NO: 273295 - RNA, 23 nt, Artificial Sequence
  Synthetic
uuuucuauuuaaaagcaucuucc

SEQ ID NO: 273296 - RNA, 24 nt, Artificial Sequence
  Synthetic
uuuuucuauuuaaaagcaucuucc

SEQ ID NO: 273297 - RNA, 18 nt, Artificial Sequence
  Synthetic
gaccuuaauucaucuucc

SEQ ID NO: 273298 - RNA, 19 nt, Artificial Sequence
  Synthetic
agaccuuaauucaucuucc

SEQ ID NO: 273299 - RNA, 20 nt, Artificial Sequence
  Synthetic
aagaccuuaauucaucuucc

SEQ ID NO: 273300 - RNA, 21 nt, Artificial Sequence
  Synthetic
gaagaccuuaauucaucuucc

SEQ ID NO: 273301 - RNA, 22 nt, Artificial Sequence
  Synthetic
ugaagaccuuaauucaucuucc

SEQ ID NO: 273302 - RNA, 23 nt, Artificial Sequence
  Synthetic
augaagaccuuaauucaucuucc

SEQ ID NO: 273303 - RNA, 24 nt, Artificial Sequence
  Synthetic
gaugaagaccuuaauucaucuucc

SEQ ID NO: 273304 - RNA, 18 nt, Artificial Sequence
  Synthetic
ugaauaaacagcucuucc

SEQ ID NO: 273305 - RNA, 19 nt, Artificial Sequence
  Synthetic
augaauaaacagcucuucc

SEQ ID NO: 273306 - RNA, 20 nt, Artificial Sequence
  Synthetic
gaugaauaaacagcucuucc

SEQ ID NO: 273307 - RNA, 21 nt, Artificial Sequence
  Synthetic
ugaugaauaaacagcucuucc

SEQ ID NO: 273308 - RNA, 22 nt, Artificial Sequence
  Synthetic
augaugaauaaacagcucuucc

SEQ ID NO: 273309 - RNA, 23 nt, Artificial Sequence
  Synthetic
caugaugaauaaacagcucuucc

SEQ ID NO: 273310 - RNA, 24 nt, Artificial Sequence
  Synthetic
ccaugaugaauaaacagcucuucc

SEQ ID NO: 273311 - RNA, 18 nt, Artificial Sequence
  Synthetic
gcuagcuaucucucuucc

SEQ ID NO: 273312 - RNA, 19 nt, Artificial Sequence
  Synthetic
ugcuagcuaucucucuucc

SEQ ID NO: 273313 - RNA, 20 nt, Artificial Sequence
  Synthetic
augcuagcuaucucucuucc

SEQ ID NO: 273314 - RNA, 21 nt, Artificial Sequence
  Synthetic
aaugcuagcuaucucucuucc

SEQ ID NO: 273315 - RNA, 22 nt, Artificial Sequence
  Synthetic
caaugcuagcuaucucucuucc

SEQ ID NO: 273316 - RNA, 23 nt, Artificial Sequence
  Synthetic
ucaaugcuagcuaucucucuucc

SEQ ID NO: 273317 - RNA, 24 nt, Artificial Sequence
  Synthetic
cucaaugcuagcuaucucucuucc

SEQ ID NO: 273318 - RNA, 18 nt, Artificial Sequence
  Synthetic
gacccgcuagcgucuucc

SEQ ID NO: 273319 - RNA, 19 nt, Artificial Sequence
  Synthetic
agacccgcuagcgucuucc

SEQ ID NO: 273320 - RNA, 20 nt, Artificial Sequence
  Synthetic
gagacccgcuagcgucuucc

SEQ ID NO: 273321 - RNA, 21 nt, Artificial Sequence
  Synthetic
ugagacccgcuagcgucuucc

SEQ ID NO: 273322 - RNA, 22 nt, Artificial Sequence
  Synthetic
gugagacccgcuagcgucuucc

SEQ ID NO: 273323 - RNA, 23 nt, Artificial Sequence
  Synthetic
agugagacccgcuagcgucuucc

SEQ ID NO: 273324 - RNA, 24 nt, Artificial Sequence
  Synthetic
cagugagacccgcuagcgucuucc

SEQ ID NO: 273325 - RNA, 18 nt, Artificial Sequence
  Synthetic
gccuuggaucugucuucc

SEQ ID NO: 273326 - RNA, 19 nt, Artificial Sequence
  Synthetic
agccuuggaucugucuucc

SEQ ID NO: 273327 - RNA, 20 nt, Artificial Sequence
  Synthetic
cagccuuggaucugucuucc

SEQ ID NO: 273328 - RNA, 21 nt, Artificial Sequence
  Synthetic
acagccuuggaucugucuucc

SEQ ID NO: 273329 - RNA, 22 nt, Artificial Sequence
  Synthetic
aacagccuuggaucugucuucc

SEQ ID NO: 273330 - RNA, 23 nt, Artificial Sequence
  Synthetic
caacagccuuggaucugucuucc

SEQ ID NO: 273331 - RNA, 24 nt, Artificial Sequence
  Synthetic
acaacagccuuggaucugucuucc

SEQ ID NO: 273332 - RNA, 18 nt, Artificial Sequence
  Synthetic
ucuugugguuugucuucc

SEQ ID NO: 273333 - RNA, 19 nt, Artificial Sequence
  Synthetic
cucuugugguuugucuucc

SEQ ID NO: 273334 - RNA, 20 nt, Artificial Sequence
  Synthetic
acucuugugguuugucuucc

SEQ ID NO: 273335 - RNA, 21 nt, Artificial Sequence
  Synthetic
uacucuugugguuugucuucc

SEQ ID NO: 273336 - RNA, 22 nt, Artificial Sequence
  Synthetic
uuacucuugugguuugucuucc

SEQ ID NO: 273337 - RNA, 23 nt, Artificial Sequence
  Synthetic
auuacucuugugguuugucuucc

SEQ ID NO: 273338 - RNA, 24 nt, Artificial Sequence
  Synthetic
aauuacucuugugguuugucuucc

SEQ ID NO: 273339 - RNA, 18 nt, Artificial Sequence
  Synthetic
caucuuugccauucuucc

SEQ ID NO: 273340 - RNA, 19 nt, Artificial Sequence
  Synthetic
acaucuuugccauucuucc

SEQ ID NO: 273341 - RNA, 20 nt, Artificial Sequence
  Synthetic
cacaucuuugccauucuucc

SEQ ID NO: 273342 - RNA, 21 nt, Artificial Sequence
  Synthetic
ccacaucuuugccauucuucc

SEQ ID NO: 273343 - RNA, 22 nt, Artificial Sequence
  Synthetic
accacaucuuugccauucuucc

SEQ ID NO: 273344 - RNA, 23 nt, Artificial Sequence
  Synthetic
caccacaucuuugccauucuucc

SEQ ID NO: 273345 - RNA, 24 nt, Artificial Sequence
  Synthetic
ucaccacaucuuugccauucuucc

SEQ ID NO: 273346 - RNA, 18 nt, Artificial Sequence
  Synthetic
aucuguauugauucuucc

SEQ ID NO: 273347 - RNA, 19 nt, Artificial Sequence
  Synthetic
uaucuguauugauucuucc

SEQ ID NO: 273348 - RNA, 20 nt, Artificial Sequence
  Synthetic
cuaucuguauugauucuucc

SEQ ID NO: 273349 - RNA, 21 nt, Artificial Sequence
  Synthetic
acuaucuguauugauucuucc

SEQ ID NO: 273350 - RNA, 22 nt, Artificial Sequence
  Synthetic
gacuaucuguauugauucuucc

SEQ ID NO: 273351 - RNA, 23 nt, Artificial Sequence
  Synthetic
ggacuaucuguauugauucuucc

SEQ ID NO: 273352 - RNA, 24 nt, Artificial Sequence
  Synthetic
gggacuaucuguauugauucuucc

SEQ ID NO: 273353 - RNA, 18 nt, Artificial Sequence
  Synthetic
aaucuugucacuucuucc

SEQ ID NO: 273354 - RNA, 19 nt, Artificial Sequence
  Synthetic
gaaucuugucacuucuucc

SEQ ID NO: 273355 - RNA, 20 nt, Artificial Sequence
  Synthetic
ugaaucuugucacuucuucc

SEQ ID NO: 273356 - RNA, 21 nt, Artificial Sequence
  Synthetic
augaaucuugucacuucuucc

SEQ ID NO: 273357 - RNA, 22 nt, Artificial Sequence
  Synthetic
uaugaaucuugucacuucuucc

SEQ ID NO: 273358 - RNA, 23 nt, Artificial Sequence
  Synthetic
uuaugaaucuugucacuucuucc

SEQ ID NO: 273359 - RNA, 24 nt, Artificial Sequence
  Synthetic
auuaugaaucuugucacuucuucc

SEQ ID NO: 273360 - RNA, 18 nt, Artificial Sequence
  Synthetic
gaauuuaaauuuucuucc

SEQ ID NO: 273361 - RNA, 19 nt, Artificial Sequence
  Synthetic
agaauuuaaauuuucuucc

SEQ ID NO: 273362 - RNA, 20 nt, Artificial Sequence
  Synthetic
aagaauuuaaauuuucuucc

SEQ ID NO: 273363 - RNA, 21 nt, Artificial Sequence
  Synthetic
gaagaauuuaaauuuucuucc

SEQ ID NO: 273364 - RNA, 22 nt, Artificial Sequence
  Synthetic
agaagaauuuaaauuuucuucc

SEQ ID NO: 273365 - RNA, 23 nt, Artificial Sequence
  Synthetic
uagaagaauuuaaauuuucuucc

SEQ ID NO: 273366 - RNA, 24 nt, Artificial Sequence
  Synthetic
uuagaagaauuuaaauuuucuucc

SEQ ID NO: 273367 - RNA, 18 nt, Artificial Sequence
  Synthetic
uucaaauuuuuuucuucc

SEQ ID NO: 273368 - RNA, 19 nt, Artificial Sequence
  Synthetic
cuucaaauuuuuuucuucc

SEQ ID NO: 273369 - RNA, 20 nt, Artificial Sequence
  Synthetic
ucuucaaauuuuuuucuucc

SEQ ID NO: 273370 - RNA, 21 nt, Artificial Sequence
  Synthetic
uucuucaaauuuuuuucuucc

SEQ ID NO: 273371 - RNA, 22 nt, Artificial Sequence
  Synthetic
uuucuucaaauuuuuuucuucc

SEQ ID NO: 273372 - RNA, 23 nt, Artificial Sequence
  Synthetic
cuuucuucaaauuuuuuucuucc

SEQ ID NO: 273373 - RNA, 24 nt, Artificial Sequence
  Synthetic
ucuuucuucaaauuuuuuucuucc

SEQ ID NO: 273374 - RNA, 18 nt, Artificial Sequence
  Synthetic
auucguaaagcaaguucc

SEQ ID NO: 273375 - RNA, 19 nt, Artificial Sequence
  Synthetic
gauucguaaagcaaguucc

SEQ ID NO: 273376 - RNA, 20 nt, Artificial Sequence
  Synthetic
agauucguaaagcaaguucc

SEQ ID NO: 273377 - RNA, 21 nt, Artificial Sequence
  Synthetic
cagauucguaaagcaaguucc

SEQ ID NO: 273378 - RNA, 22 nt, Artificial Sequence
  Synthetic
ccagauucguaaagcaaguucc

SEQ ID NO: 273379 - RNA, 23 nt, Artificial Sequence
  Synthetic
cccagauucguaaagcaaguucc

SEQ ID NO: 273380 - RNA, 24 nt, Artificial Sequence
  Synthetic
acccagauucguaaagcaaguucc

SEQ ID NO: 273381 - RNA, 18 nt, Artificial Sequence
  Synthetic
aaacaguuuggaaguucc

SEQ ID NO: 273382 - RNA, 19 nt, Artificial Sequence
  Synthetic
aaaacaguuuggaaguucc

SEQ ID NO: 273383 - RNA, 20 nt, Artificial Sequence
  Synthetic
gaaaacaguuuggaaguucc

SEQ ID NO: 273384 - RNA, 21 nt, Artificial Sequence
  Synthetic
ugaaaacaguuuggaaguucc

SEQ ID NO: 273385 - RNA, 22 nt, Artificial Sequence
  Synthetic
uugaaaacaguuuggaaguucc

SEQ ID NO: 273386 - RNA, 23 nt, Artificial Sequence
  Synthetic
uuugaaaacaguuuggaaguucc

SEQ ID NO: 273387 - RNA, 24 nt, Artificial Sequence
  Synthetic
cuuugaaaacaguuuggaaguucc

SEQ ID NO: 273388 - RNA, 18 nt, Artificial Sequence
  Synthetic
ugcuagauuauaaguucc

SEQ ID NO: 273389 - RNA, 19 nt, Artificial Sequence
  Synthetic
uugcuagauuauaaguucc

SEQ ID NO: 273390 - RNA, 20 nt, Artificial Sequence
  Synthetic
uuugcuagauuauaaguucc

SEQ ID NO: 273391 - RNA, 21 nt, Artificial Sequence
  Synthetic
guuugcuagauuauaaguucc

SEQ ID NO: 273392 - RNA, 22 nt, Artificial Sequence
  Synthetic
uguuugcuagauuauaaguucc

SEQ ID NO: 273393 - RNA, 23 nt, Artificial Sequence
  Synthetic
uuguuugcuagauuauaaguucc

SEQ ID NO: 273394 - RNA, 24 nt, Artificial Sequence
  Synthetic
uuuguuugcuagauuauaaguucc

SEQ ID NO: 273395 - RNA, 18 nt, Artificial Sequence
  Synthetic
uuucuuuauguaaguucc

SEQ ID NO: 273396 - RNA, 19 nt, Artificial Sequence
  Synthetic
uuuucuuuauguaaguucc

SEQ ID NO: 273397 - RNA, 20 nt, Artificial Sequence
  Synthetic
guuuucuuuauguaaguucc

SEQ ID NO: 273398 - RNA, 21 nt, Artificial Sequence
  Synthetic
uguuuucuuuauguaaguucc

SEQ ID NO: 273399 - RNA, 22 nt, Artificial Sequence
  Synthetic
auguuuucuuuauguaaguucc

SEQ ID NO: 273400 - RNA, 23 nt, Artificial Sequence
  Synthetic
aauguuuucuuuauguaaguucc

SEQ ID NO: 273401 - RNA, 24 nt, Artificial Sequence
  Synthetic
gaauguuuucuuuauguaaguucc

SEQ ID NO: 273402 - RNA, 18 nt, Artificial Sequence
  Synthetic
aguaacucauucaguucc

SEQ ID NO: 273403 - RNA, 19 nt, Artificial Sequence
  Synthetic
caguaacucauucaguucc

SEQ ID NO: 273404 - RNA, 20 nt, Artificial Sequence
  Synthetic
acaguaacucauucaguucc

SEQ ID NO: 273405 - RNA, 21 nt, Artificial Sequence
  Synthetic
aacaguaacucauucaguucc

SEQ ID NO: 273406 - RNA, 22 nt, Artificial Sequence
  Synthetic
aaacaguaacucauucaguucc

SEQ ID NO: 273407 - RNA, 23 nt, Artificial Sequence
  Synthetic
gaaacaguaacucauucaguucc

SEQ ID NO: 273408 - RNA, 24 nt, Artificial Sequence
  Synthetic
ugaaacaguaacucauucaguucc

SEQ ID NO: 273409 - RNA, 18 nt, Artificial Sequence
  Synthetic
ccaaggucccagaguucc

SEQ ID NO: 273410 - RNA, 19 nt, Artificial Sequence
  Synthetic
accaaggucccagaguucc

SEQ ID NO: 273411 - RNA, 20 nt, Artificial Sequence
  Synthetic
uaccaaggucccagaguucc

SEQ ID NO: 273412 - RNA, 21 nt, Artificial Sequence
  Synthetic
uuaccaaggucccagaguucc

SEQ ID NO: 273413 - RNA, 22 nt, Artificial Sequence
  Synthetic
uuuaccaaggucccagaguucc

SEQ ID NO: 273414 - RNA, 23 nt, Artificial Sequence
  Synthetic
cuuuaccaaggucccagaguucc

SEQ ID NO: 273415 - RNA, 24 nt, Artificial Sequence
  Synthetic
gcuuuaccaaggucccagaguucc

SEQ ID NO: 273416 - RNA, 18 nt, Artificial Sequence
  Synthetic
caguuuugcaauaguucc

SEQ ID NO: 273417 - RNA, 19 nt, Artificial Sequence
  Synthetic
ccaguuuugcaauaguucc

SEQ ID NO: 273418 - RNA, 20 nt, Artificial Sequence
  Synthetic
accaguuuugcaauaguucc

SEQ ID NO: 273419 - RNA, 21 nt, Artificial Sequence
  Synthetic
uaccaguuuugcaauaguucc

SEQ ID NO: 273420 - RNA, 22 nt, Artificial Sequence
  Synthetic
auaccaguuuugcaauaguucc

SEQ ID NO: 273421 - RNA, 23 nt, Artificial Sequence
  Synthetic
uauaccaguuuugcaauaguucc

SEQ ID NO: 273422 - RNA, 24 nt, Artificial Sequence
  Synthetic
uuauaccaguuuugcaauaguucc

SEQ ID NO: 273423 - RNA, 18 nt, Artificial Sequence
  Synthetic
auauagucugauaguucc

SEQ ID NO: 273424 - RNA, 19 nt, Artificial Sequence
  Synthetic
cauauagucugauaguucc

SEQ ID NO: 273425 - RNA, 20 nt, Artificial Sequence
  Synthetic
gcauauagucugauaguucc

SEQ ID NO: 273426 - RNA, 21 nt, Artificial Sequence
  Synthetic
ggcauauagucugauaguucc

SEQ ID NO: 273427 - RNA, 22 nt, Artificial Sequence
  Synthetic
gggcauauagucugauaguucc

SEQ ID NO: 273428 - RNA, 23 nt, Artificial Sequence
  Synthetic
ugggcauauagucugauaguucc

SEQ ID NO: 273429 - RNA, 24 nt, Artificial Sequence
  Synthetic
uugggcauauagucugauaguucc

SEQ ID NO: 273430 - RNA, 18 nt, Artificial Sequence
  Synthetic
ucuuguuucucuaguucc

SEQ ID NO: 273431 - RNA, 19 nt, Artificial Sequence
  Synthetic
uucuuguuucucuaguucc

SEQ ID NO: 273432 - RNA, 20 nt, Artificial Sequence
  Synthetic
guucuuguuucucuaguucc

SEQ ID NO: 273433 - RNA, 21 nt, Artificial Sequence
  Synthetic
uguucuuguuucucuaguucc

SEQ ID NO: 273434 - RNA, 22 nt, Artificial Sequence
  Synthetic
uuguucuuguuucucuaguucc

SEQ ID NO: 273435 - RNA, 23 nt, Artificial Sequence
  Synthetic
uuuguucuuguuucucuaguucc

SEQ ID NO: 273436 - RNA, 24 nt, Artificial Sequence
  Synthetic
guuuguucuuguuucucuaguucc

SEQ ID NO: 273437 - RNA, 18 nt, Artificial Sequence
  Synthetic
ucugggaaauguaguucc

SEQ ID NO: 273438 - RNA, 19 nt, Artificial Sequence
  Synthetic
gucugggaaauguaguucc

SEQ ID NO: 273439 - RNA, 20 nt, Artificial Sequence
  Synthetic
agucugggaaauguaguucc

SEQ ID NO: 273440 - RNA, 21 nt, Artificial Sequence
  Synthetic
gagucugggaaauguaguucc

SEQ ID NO: 273441 - RNA, 22 nt, Artificial Sequence
  Synthetic
ugagucugggaaauguaguucc

SEQ ID NO: 273442 - RNA, 23 nt, Artificial Sequence
  Synthetic
augagucugggaaauguaguucc

SEQ ID NO: 273443 - RNA, 24 nt, Artificial Sequence
  Synthetic
uaugagucugggaaauguaguucc

SEQ ID NO: 273444 - RNA, 18 nt, Artificial Sequence
  Synthetic
cuaagaaggaagcguucc

SEQ ID NO: 273445 - RNA, 19 nt, Artificial Sequence
  Synthetic
ccuaagaaggaagcguucc

SEQ ID NO: 273446 - RNA, 20 nt, Artificial Sequence
  Synthetic
gccuaagaaggaagcguucc

SEQ ID NO: 273447 - RNA, 21 nt, Artificial Sequence
  Synthetic
agccuaagaaggaagcguucc

SEQ ID NO: 273448 - RNA, 22 nt, Artificial Sequence
  Synthetic
uagccuaagaaggaagcguucc

SEQ ID NO: 273449 - RNA, 23 nt, Artificial Sequence
  Synthetic
guagccuaagaaggaagcguucc

SEQ ID NO: 273450 - RNA, 24 nt, Artificial Sequence
  Synthetic
gguagccuaagaaggaagcguucc

SEQ ID NO: 273451 - RNA, 18 nt, Artificial Sequence
  Synthetic
aggaaucuauugcguucc

SEQ ID NO: 273452 - RNA, 19 nt, Artificial Sequence
  Synthetic
caggaaucuauugcguucc

SEQ ID NO: 273453 - RNA, 20 nt, Artificial Sequence
  Synthetic
gcaggaaucuauugcguucc

SEQ ID NO: 273454 - RNA, 21 nt, Artificial Sequence
  Synthetic
ggcaggaaucuauugcguucc

SEQ ID NO: 273455 - RNA, 22 nt, Artificial Sequence
  Synthetic
gggcaggaaucuauugcguucc

SEQ ID NO: 273456 - RNA, 23 nt, Artificial Sequence
  Synthetic
agggcaggaaucuauugcguucc

SEQ ID NO: 273457 - RNA, 24 nt, Artificial Sequence
  Synthetic
uagggcaggaaucuauugcguucc

SEQ ID NO: 273458 - RNA, 18 nt, Artificial Sequence
  Synthetic
gacgagaaaacagguucc

SEQ ID NO: 273459 - RNA, 19 nt, Artificial Sequence
  Synthetic
agacgagaaaacagguucc

SEQ ID NO: 273460 - RNA, 20 nt, Artificial Sequence
  Synthetic
uagacgagaaaacagguucc

SEQ ID NO: 273461 - RNA, 21 nt, Artificial Sequence
  Synthetic
auagacgagaaaacagguucc

SEQ ID NO: 273462 - RNA, 22 nt, Artificial Sequence
  Synthetic
uauagacgagaaaacagguucc

SEQ ID NO: 273463 - RNA, 23 nt, Artificial Sequence
  Synthetic
uuauagacgagaaaacagguucc

SEQ ID NO: 273464 - RNA, 24 nt, Artificial Sequence
  Synthetic
uuuauagacgagaaaacagguucc

SEQ ID NO: 273465 - RNA, 18 nt, Artificial Sequence
  Synthetic
cauuuuaagucagguucc

SEQ ID NO: 273466 - RNA, 19 nt, Artificial Sequence
  Synthetic
gcauuuuaagucagguucc

SEQ ID NO: 273467 - RNA, 20 nt, Artificial Sequence
  Synthetic
ggcauuuuaagucagguucc

SEQ ID NO: 273468 - RNA, 21 nt, Artificial Sequence
  Synthetic
uggcauuuuaagucagguucc

SEQ ID NO: 273469 - RNA, 22 nt, Artificial Sequence
  Synthetic
auggcauuuuaagucagguucc

SEQ ID NO: 273470 - RNA, 23 nt, Artificial Sequence
  Synthetic
aauggcauuuuaagucagguucc

SEQ ID NO: 273471 - RNA, 24 nt, Artificial Sequence
  Synthetic
aaauggcauuuuaagucagguucc

SEQ ID NO: 273472 - RNA, 18 nt, Artificial Sequence
  Synthetic
uuuauccuccuugguucc

SEQ ID NO: 273473 - RNA, 19 nt, Artificial Sequence
  Synthetic
cuuuauccuccuugguucc

SEQ ID NO: 273474 - RNA, 20 nt, Artificial Sequence
  Synthetic
acuuuauccuccuugguucc

SEQ ID NO: 273475 - RNA, 21 nt, Artificial Sequence
  Synthetic
aacuuuauccuccuugguucc

SEQ ID NO: 273476 - RNA, 22 nt, Artificial Sequence
  Synthetic
aaacuuuauccuccuugguucc

SEQ ID NO: 273477 - RNA, 23 nt, Artificial Sequence
  Synthetic
aaaacuuuauccuccuugguucc

SEQ ID NO: 273478 - RNA, 24 nt, Artificial Sequence
  Synthetic
caaaacuuuauccuccuugguucc

SEQ ID NO: 273479 - RNA, 18 nt, Artificial Sequence
  Synthetic
auaguuuuccuugguucc

SEQ ID NO: 273480 - RNA, 19 nt, Artificial Sequence
  Synthetic
uauaguuuuccuugguucc

SEQ ID NO: 273481 - RNA, 20 nt, Artificial Sequence
  Synthetic
auauaguuuuccuugguucc

SEQ ID NO: 273482 - RNA, 21 nt, Artificial Sequence
  Synthetic
aauauaguuuuccuugguucc

SEQ ID NO: 273483 - RNA, 22 nt, Artificial Sequence
  Synthetic
gaauauaguuuuccuugguucc

SEQ ID NO: 273484 - RNA, 23 nt, Artificial Sequence
  Synthetic
ugaauauaguuuuccuugguucc

SEQ ID NO: 273485 - RNA, 24 nt, Artificial Sequence
  Synthetic
uugaauauaguuuuccuugguucc

SEQ ID NO: 273486 - RNA, 18 nt, Artificial Sequence
  Synthetic
uaacuaaaaacauguucc

SEQ ID NO: 273487 - RNA, 19 nt, Artificial Sequence
  Synthetic
guaacuaaaaacauguucc

SEQ ID NO: 273488 - RNA, 20 nt, Artificial Sequence
  Synthetic
gguaacuaaaaacauguucc

SEQ ID NO: 273489 - RNA, 21 nt, Artificial Sequence
  Synthetic
ugguaacuaaaaacauguucc

SEQ ID NO: 273490 - RNA, 22 nt, Artificial Sequence
  Synthetic
uugguaacuaaaaacauguucc

SEQ ID NO: 273491 - RNA, 23 nt, Artificial Sequence
  Synthetic
uuugguaacuaaaaacauguucc

SEQ ID NO: 273492 - RNA, 24 nt, Artificial Sequence
  Synthetic
uuuugguaacuaaaaacauguucc

SEQ ID NO: 273493 - RNA, 18 nt, Artificial Sequence
  Synthetic
auucaacuuauauguucc

SEQ ID NO: 273494 - RNA, 19 nt, Artificial Sequence
  Synthetic
aauucaacuuauauguucc

SEQ ID NO: 273495 - RNA, 20 nt, Artificial Sequence
  Synthetic
gaauucaacuuauauguucc

SEQ ID NO: 273496 - RNA, 21 nt, Artificial Sequence
  Synthetic
agaauucaacuuauauguucc

SEQ ID NO: 273497 - RNA, 22 nt, Artificial Sequence
  Synthetic
gagaauucaacuuauauguucc

SEQ ID NO: 273498 - RNA, 23 nt, Artificial Sequence
  Synthetic
agagaauucaacuuauauguucc

SEQ ID NO: 273499 - RNA, 24 nt, Artificial Sequence
  Synthetic
uagagaauucaacuuauauguucc

SEQ ID NO: 273500 - RNA, 18 nt, Artificial Sequence
  Synthetic
cacaccagacacuguucc

SEQ ID NO: 273501 - RNA, 19 nt, Artificial Sequence
  Synthetic
acacaccagacacuguucc

SEQ ID NO: 273502 - RNA, 20 nt, Artificial Sequence
  Synthetic
cacacaccagacacuguucc

SEQ ID NO: 273503 - RNA, 21 nt, Artificial Sequence
  Synthetic
ccacacaccagacacuguucc

SEQ ID NO: 273504 - RNA, 22 nt, Artificial Sequence
  Synthetic
gccacacaccagacacuguucc

SEQ ID NO: 273505 - RNA, 23 nt, Artificial Sequence
  Synthetic
ggccacacaccagacacuguucc

SEQ ID NO: 273506 - RNA, 24 nt, Artificial Sequence
  Synthetic
aggccacacaccagacacuguucc

SEQ ID NO: 273507 - RNA, 18 nt, Artificial Sequence
  Synthetic
auugaguggcacuguucc

SEQ ID NO: 273508 - RNA, 19 nt, Artificial Sequence
  Synthetic
cauugaguggcacuguucc

SEQ ID NO: 273509 - RNA, 20 nt, Artificial Sequence
  Synthetic
ccauugaguggcacuguucc

SEQ ID NO: 273510 - RNA, 21 nt, Artificial Sequence
  Synthetic
accauugaguggcacuguucc

SEQ ID NO: 273511 - RNA, 22 nt, Artificial Sequence
  Synthetic
aaccauugaguggcacuguucc

SEQ ID NO: 273512 - RNA, 23 nt, Artificial Sequence
  Synthetic
gaaccauugaguggcacuguucc

SEQ ID NO: 273513 - RNA, 24 nt, Artificial Sequence
  Synthetic
ugaaccauugaguggcacuguucc

SEQ ID NO: 273514 - RNA, 18 nt, Artificial Sequence
  Synthetic
augugaauaugcuguucc

SEQ ID NO: 273515 - RNA, 19 nt, Artificial Sequence
  Synthetic
gaugugaauaugcuguucc

SEQ ID NO: 273516 - RNA, 20 nt, Artificial Sequence
  Synthetic
agaugugaauaugcuguucc

SEQ ID NO: 273517 - RNA, 21 nt, Artificial Sequence
  Synthetic
gagaugugaauaugcuguucc

SEQ ID NO: 273518 - RNA, 22 nt, Artificial Sequence
  Synthetic
agagaugugaauaugcuguucc

SEQ ID NO: 273519 - RNA, 23 nt, Artificial Sequence
  Synthetic
cagagaugugaauaugcuguucc

SEQ ID NO: 273520 - RNA, 24 nt, Artificial Sequence
  Synthetic
ccagagaugugaauaugcuguucc

SEQ ID NO: 273521 - RNA, 18 nt, Artificial Sequence
  Synthetic
ugcccaaaaucguguucc

SEQ ID NO: 273522 - RNA, 19 nt, Artificial Sequence
  Synthetic
uugcccaaaaucguguucc

SEQ ID NO: 273523 - RNA, 20 nt, Artificial Sequence
  Synthetic
uuugcccaaaaucguguucc

SEQ ID NO: 273524 - RNA, 21 nt, Artificial Sequence
  Synthetic
uuuugcccaaaaucguguucc

SEQ ID NO: 273525 - RNA, 22 nt, Artificial Sequence
  Synthetic
auuuugcccaaaaucguguucc

SEQ ID NO: 273526 - RNA, 23 nt, Artificial Sequence
  Synthetic
uauuuugcccaaaaucguguucc

SEQ ID NO: 273527 - RNA, 24 nt, Artificial Sequence
  Synthetic
cuauuuugcccaaaaucguguucc

SEQ ID NO: 273528 - RNA, 18 nt, Artificial Sequence
  Synthetic
ggaauuaugugguguucc

SEQ ID NO: 273529 - RNA, 19 nt, Artificial Sequence
  Synthetic
aggaauuaugugguguucc

SEQ ID NO: 273530 - RNA, 20 nt, Artificial Sequence
  Synthetic
uaggaauuaugugguguucc

SEQ ID NO: 273531 - RNA, 21 nt, Artificial Sequence
  Synthetic
cuaggaauuaugugguguucc

SEQ ID NO: 273532 - RNA, 22 nt, Artificial Sequence
  Synthetic
gcuaggaauuaugugguguucc

SEQ ID NO: 273533 - RNA, 23 nt, Artificial Sequence
  Synthetic
ggcuaggaauuaugugguguucc

SEQ ID NO: 273534 - RNA, 24 nt, Artificial Sequence
  Synthetic
gggcuaggaauuaugugguguucc

SEQ ID NO: 273535 - RNA, 18 nt, Artificial Sequence
  Synthetic
uucccaacucuguguucc

SEQ ID NO: 273536 - RNA, 19 nt, Artificial Sequence
  Synthetic
uuucccaacucuguguucc

SEQ ID NO: 273537 - RNA, 20 nt, Artificial Sequence
  Synthetic
uuuucccaacucuguguucc

SEQ ID NO: 273538 - RNA, 21 nt, Artificial Sequence
  Synthetic
auuuucccaacucuguguucc

SEQ ID NO: 273539 - RNA, 22 nt, Artificial Sequence
  Synthetic
cauuuucccaacucuguguucc

SEQ ID NO: 273540 - RNA, 23 nt, Artificial Sequence
  Synthetic
acauuuucccaacucuguguucc

SEQ ID NO: 273541 - RNA, 24 nt, Artificial Sequence
  Synthetic
uacauuuucccaacucuguguucc

SEQ ID NO: 273542 - RNA, 18 nt, Artificial Sequence
  Synthetic
ucuugaugucauuguucc

SEQ ID NO: 273543 - RNA, 19 nt, Artificial Sequence
  Synthetic
uucuugaugucauuguucc

SEQ ID NO: 273544 - RNA, 20 nt, Artificial Sequence
  Synthetic
cuucuugaugucauuguucc

SEQ ID NO: 273545 - RNA, 21 nt, Artificial Sequence
  Synthetic
gcuucuugaugucauuguucc

SEQ ID NO: 273546 - RNA, 22 nt, Artificial Sequence
  Synthetic
ggcuucuugaugucauuguucc

SEQ ID NO: 273547 - RNA, 23 nt, Artificial Sequence
  Synthetic
aggcuucuugaugucauuguucc

SEQ ID NO: 273548 - RNA, 24 nt, Artificial Sequence
  Synthetic
aaggcuucuugaugucauuguucc

SEQ ID NO: 273549 - RNA, 18 nt, Artificial Sequence
  Synthetic
uuuuugaugucuuguucc

SEQ ID NO: 273550 - RNA, 19 nt, Artificial Sequence
  Synthetic
guuuuugaugucuuguucc

SEQ ID NO: 273551 - RNA, 20 nt, Artificial Sequence
  Synthetic
uguuuuugaugucuuguucc

SEQ ID NO: 273552 - RNA, 21 nt, Artificial Sequence
  Synthetic
uuguuuuugaugucuuguucc

SEQ ID NO: 273553 - RNA, 22 nt, Artificial Sequence
  Synthetic
uuuguuuuugaugucuuguucc

SEQ ID NO: 273554 - RNA, 23 nt, Artificial Sequence
  Synthetic
auuuguuuuugaugucuuguucc

SEQ ID NO: 273555 - RNA, 24 nt, Artificial Sequence
  Synthetic
aauuuguuuuugaugucuuguucc

SEQ ID NO: 273556 - RNA, 18 nt, Artificial Sequence
  Synthetic
ggaagaguaaguuguucc

SEQ ID NO: 273557 - RNA, 19 nt, Artificial Sequence
  Synthetic
aggaagaguaaguuguucc

SEQ ID NO: 273558 - RNA, 20 nt, Artificial Sequence
  Synthetic
aaggaagaguaaguuguucc

SEQ ID NO: 273559 - RNA, 21 nt, Artificial Sequence
  Synthetic
uaaggaagaguaaguuguucc

SEQ ID NO: 273560 - RNA, 22 nt, Artificial Sequence
  Synthetic
uuaaggaagaguaaguuguucc

SEQ ID NO: 273561 - RNA, 23 nt, Artificial Sequence
  Synthetic
uuuaaggaagaguaaguuguucc

SEQ ID NO: 273562 - RNA, 24 nt, Artificial Sequence
  Synthetic
uuuuaaggaagaguaaguuguucc

SEQ ID NO: 273563 - RNA, 18 nt, Artificial Sequence
  Synthetic
cuccacgaaaaaauuucc

SEQ ID NO: 273564 - RNA, 19 nt, Artificial Sequence
  Synthetic
acuccacgaaaaaauuucc

SEQ ID NO: 273565 - RNA, 20 nt, Artificial Sequence
  Synthetic
cacuccacgaaaaaauuucc

SEQ ID NO: 273566 - RNA, 21 nt, Artificial Sequence
  Synthetic
ccacuccacgaaaaaauuucc

SEQ ID NO: 273567 - RNA, 22 nt, Artificial Sequence
  Synthetic
cccacuccacgaaaaaauuucc

SEQ ID NO: 273568 - RNA, 23 nt, Artificial Sequence
  Synthetic
acccacuccacgaaaaaauuucc

SEQ ID NO: 273569 - RNA, 24 nt, Artificial Sequence
  Synthetic
uacccacuccacgaaaaaauuucc

SEQ ID NO: 273570 - RNA, 18 nt, Artificial Sequence
  Synthetic
gauauagcuaaaauuucc

SEQ ID NO: 273571 - RNA, 19 nt, Artificial Sequence
  Synthetic
ggauauagcuaaaauuucc

SEQ ID NO: 273572 - RNA, 20 nt, Artificial Sequence
  Synthetic
uggauauagcuaaaauuucc

SEQ ID NO: 273573 - RNA, 21 nt, Artificial Sequence
  Synthetic
cuggauauagcuaaaauuucc

SEQ ID NO: 273574 - RNA, 22 nt, Artificial Sequence
  Synthetic
gcuggauauagcuaaaauuucc

SEQ ID NO: 273575 - RNA, 23 nt, Artificial Sequence
  Synthetic
ugcuggauauagcuaaaauuucc

SEQ ID NO: 273576 - RNA, 24 nt, Artificial Sequence
  Synthetic
gugcuggauauagcuaaaauuucc

SEQ ID NO: 273577 - RNA, 18 nt, Artificial Sequence
  Synthetic
agaagaaguaaaauuucc

SEQ ID NO: 273578 - RNA, 19 nt, Artificial Sequence
  Synthetic
uagaagaaguaaaauuucc

SEQ ID NO: 273579 - RNA, 20 nt, Artificial Sequence
  Synthetic
auagaagaaguaaaauuucc

SEQ ID NO: 273580 - RNA, 21 nt, Artificial Sequence
  Synthetic
cauagaagaaguaaaauuucc

SEQ ID NO: 273581 - RNA, 22 nt, Artificial Sequence
  Synthetic
ucauagaagaaguaaaauuucc

SEQ ID NO: 273582 - RNA, 23 nt, Artificial Sequence
  Synthetic
cucauagaagaaguaaaauuucc

SEQ ID NO: 273583 - RNA, 24 nt, Artificial Sequence
  Synthetic
ccucauagaagaaguaaaauuucc

SEQ ID NO: 273584 - RNA, 18 nt, Artificial Sequence
  Synthetic
acaugcuuucaaauuucc

SEQ ID NO: 273585 - RNA, 19 nt, Artificial Sequence
  Synthetic
uacaugcuuucaaauuucc

SEQ ID NO: 273586 - RNA, 20 nt, Artificial Sequence
  Synthetic
uuacaugcuuucaaauuucc

SEQ ID NO: 273587 - RNA, 21 nt, Artificial Sequence
  Synthetic
cuuacaugcuuucaaauuucc

SEQ ID NO: 273588 - RNA, 22 nt, Artificial Sequence
  Synthetic
ucuuacaugcuuucaaauuucc

SEQ ID NO: 273589 - RNA, 23 nt, Artificial Sequence
  Synthetic
uucuuacaugcuuucaaauuucc

SEQ ID NO: 273590 - RNA, 24 nt, Artificial Sequence
  Synthetic
auucuuacaugcuuucaaauuucc

SEQ ID NO: 273591 - RNA, 18 nt, Artificial Sequence
  Synthetic
uuaggcaaauaaauuucc

SEQ ID NO: 273592 - RNA, 19 nt, Artificial Sequence
  Synthetic
auuaggcaaauaaauuucc

SEQ ID NO: 273593 - RNA, 20 nt, Artificial Sequence
  Synthetic
gauuaggcaaauaaauuucc

SEQ ID NO: 273594 - RNA, 21 nt, Artificial Sequence
  Synthetic
ggauuaggcaaauaaauuucc

SEQ ID NO: 273595 - RNA, 22 nt, Artificial Sequence
  Synthetic
aggauuaggcaaauaaauuucc

SEQ ID NO: 273596 - RNA, 23 nt, Artificial Sequence
  Synthetic
uaggauuaggcaaauaaauuucc

SEQ ID NO: 273597 - RNA, 24 nt, Artificial Sequence
  Synthetic
uuaggauuaggcaaauaaauuucc

SEQ ID NO: 273598 - RNA, 18 nt, Artificial Sequence
  Synthetic
uugaaucuauaaauuucc

SEQ ID NO: 273599 - RNA, 19 nt, Artificial Sequence
  Synthetic
auugaaucuauaaauuucc

SEQ ID NO: 273600 - RNA, 20 nt, Artificial Sequence
  Synthetic
cauugaaucuauaaauuucc

SEQ ID NO: 273601 - RNA, 21 nt, Artificial Sequence
  Synthetic
gcauugaaucuauaaauuucc

SEQ ID NO: 273602 - RNA, 22 nt, Artificial Sequence
  Synthetic
ggcauugaaucuauaaauuucc

SEQ ID NO: 273603 - RNA, 23 nt, Artificial Sequence
  Synthetic
uggcauugaaucuauaaauuucc

SEQ ID NO: 273604 - RNA, 24 nt, Artificial Sequence
  Synthetic
auggcauugaaucuauaaauuucc

SEQ ID NO: 273605 - RNA, 18 nt, Artificial Sequence
  Synthetic
auggccauaacaauuucc

SEQ ID NO: 273606 - RNA, 19 nt, Artificial Sequence
  Synthetic
cauggccauaacaauuucc

SEQ ID NO: 273607 - RNA, 20 nt, Artificial Sequence
  Synthetic
ucauggccauaacaauuucc

SEQ ID NO: 273608 - RNA, 21 nt, Artificial Sequence
  Synthetic
uucauggccauaacaauuucc

SEQ ID NO: 273609 - RNA, 22 nt, Artificial Sequence
  Synthetic
cuucauggccauaacaauuucc

SEQ ID NO: 273610 - RNA, 23 nt, Artificial Sequence
  Synthetic
ucuucauggccauaacaauuucc

SEQ ID NO: 273611 - RNA, 24 nt, Artificial Sequence
  Synthetic
uucuucauggccauaacaauuucc

SEQ ID NO: 273612 - RNA, 18 nt, Artificial Sequence
  Synthetic
cagcugaaggcaauuucc

SEQ ID NO: 273613 - RNA, 19 nt, Artificial Sequence
  Synthetic
acagcugaaggcaauuucc

SEQ ID NO: 273614 - RNA, 20 nt, Artificial Sequence
  Synthetic
uacagcugaaggcaauuucc

SEQ ID NO: 273615 - RNA, 21 nt, Artificial Sequence
  Synthetic
cuacagcugaaggcaauuucc

SEQ ID NO: 273616 - RNA, 22 nt, Artificial Sequence
  Synthetic
ccuacagcugaaggcaauuucc

SEQ ID NO: 273617 - RNA, 23 nt, Artificial Sequence
  Synthetic
accuacagcugaaggcaauuucc

SEQ ID NO: 273618 - RNA, 24 nt, Artificial Sequence
  Synthetic
uaccuacagcugaaggcaauuucc

SEQ ID NO: 273619 - RNA, 18 nt, Artificial Sequence
  Synthetic
aauccuucaugaauuucc

SEQ ID NO: 273620 - RNA, 19 nt, Artificial Sequence
  Synthetic
uaauccuucaugaauuucc

SEQ ID NO: 273621 - RNA, 20 nt, Artificial Sequence
  Synthetic
uuaauccuucaugaauuucc

SEQ ID NO: 273622 - RNA, 21 nt, Artificial Sequence
  Synthetic
uuuaauccuucaugaauuucc

SEQ ID NO: 273623 - RNA, 22 nt, Artificial Sequence
  Synthetic
uuuuaauccuucaugaauuucc

SEQ ID NO: 273624 - RNA, 23 nt, Artificial Sequence
  Synthetic
guuuuaauccuucaugaauuucc

SEQ ID NO: 273625 - RNA, 24 nt, Artificial Sequence
  Synthetic
uguuuuaauccuucaugaauuucc

SEQ ID NO: 273626 - RNA, 18 nt, Artificial Sequence
  Synthetic
aaaauugagugaauuucc

SEQ ID NO: 273627 - RNA, 19 nt, Artificial Sequence
  Synthetic
aaaaauugagugaauuucc

SEQ ID NO: 273628 - RNA, 20 nt, Artificial Sequence
  Synthetic
gaaaaauugagugaauuucc

SEQ ID NO: 273629 - RNA, 21 nt, Artificial Sequence
  Synthetic
ugaaaaauugagugaauuucc

SEQ ID NO: 273630 - RNA, 22 nt, Artificial Sequence
  Synthetic
augaaaaauugagugaauuucc

SEQ ID NO: 273631 - RNA, 23 nt, Artificial Sequence
  Synthetic
aaugaaaaauugagugaauuucc

SEQ ID NO: 273632 - RNA, 24 nt, Artificial Sequence
  Synthetic
aaaugaaaaauugagugaauuucc

SEQ ID NO: 273633 - RNA, 18 nt, Artificial Sequence
  Synthetic
guacuugucagcauuucc

SEQ ID NO: 273634 - RNA, 19 nt, Artificial Sequence
  Synthetic
cguacuugucagcauuucc

SEQ ID NO: 273635 - RNA, 20 nt, Artificial Sequence
  Synthetic
ccguacuugucagcauuucc

SEQ ID NO: 273636 - RNA, 21 nt, Artificial Sequence
  Synthetic
uccguacuugucagcauuucc

SEQ ID NO: 273637 - RNA, 22 nt, Artificial Sequence
  Synthetic
guccguacuugucagcauuucc

SEQ ID NO: 273638 - RNA, 23 nt, Artificial Sequence
  Synthetic
aguccguacuugucagcauuucc

SEQ ID NO: 273639 - RNA, 24 nt, Artificial Sequence
  Synthetic
caguccguacuugucagcauuucc

SEQ ID NO: 273640 - RNA, 18 nt, Artificial Sequence
  Synthetic
aaaacuucuggcauuucc

SEQ ID NO: 273641 - RNA, 19 nt, Artificial Sequence
  Synthetic
gaaaacuucuggcauuucc

SEQ ID NO: 273642 - RNA, 20 nt, Artificial Sequence
  Synthetic
ugaaaacuucuggcauuucc

SEQ ID NO: 273643 - RNA, 21 nt, Artificial Sequence
  Synthetic
augaaaacuucuggcauuucc

SEQ ID NO: 273644 - RNA, 22 nt, Artificial Sequence
  Synthetic
caugaaaacuucuggcauuucc

SEQ ID NO: 273645 - RNA, 23 nt, Artificial Sequence
  Synthetic
ccaugaaaacuucuggcauuucc

SEQ ID NO: 273646 - RNA, 24 nt, Artificial Sequence
  Synthetic
gccaugaaaacuucuggcauuucc

SEQ ID NO: 273647 - RNA, 18 nt, Artificial Sequence
  Synthetic
agguauuguggcauuucc

SEQ ID NO: 273648 - RNA, 19 nt, Artificial Sequence
  Synthetic
gagguauuguggcauuucc

SEQ ID NO: 273649 - RNA, 20 nt, Artificial Sequence
  Synthetic
ggagguauuguggcauuucc

SEQ ID NO: 273650 - RNA, 21 nt, Artificial Sequence
  Synthetic
aggagguauuguggcauuucc

SEQ ID NO: 273651 - RNA, 22 nt, Artificial Sequence
  Synthetic
aaggagguauuguggcauuucc

SEQ ID NO: 273652 - RNA, 23 nt, Artificial Sequence
  Synthetic
uaaggagguauuguggcauuucc

SEQ ID NO: 273653 - RNA, 24 nt, Artificial Sequence
  Synthetic
auaaggagguauuguggcauuucc

SEQ ID NO: 273654 - RNA, 18 nt, Artificial Sequence
  Synthetic
auuauuuuauucauuucc

SEQ ID NO: 273655 - RNA, 19 nt, Artificial Sequence
  Synthetic
gauuauuuuauucauuucc

SEQ ID NO: 273656 - RNA, 20 nt, Artificial Sequence
  Synthetic
agauuauuuuauucauuucc

SEQ ID NO: 273657 - RNA, 21 nt, Artificial Sequence
  Synthetic
gagauuauuuuauucauuucc

SEQ ID NO: 273658 - RNA, 22 nt, Artificial Sequence
  Synthetic
ugagauuauuuuauucauuucc

SEQ ID NO: 273659 - RNA, 23 nt, Artificial Sequence
  Synthetic
gugagauuauuuuauucauuucc

SEQ ID NO: 273660 - RNA, 24 nt, Artificial Sequence
  Synthetic
agugagauuauuuuauucauuucc

SEQ ID NO: 273661 - RNA, 18 nt, Artificial Sequence
  Synthetic
uucaugaaggagauuucc

SEQ ID NO: 273662 - RNA, 19 nt, Artificial Sequence
  Synthetic
uuucaugaaggagauuucc

SEQ ID NO: 273663 - RNA, 20 nt, Artificial Sequence
  Synthetic
auuucaugaaggagauuucc

SEQ ID NO: 273664 - RNA, 21 nt, Artificial Sequence
  Synthetic
cauuucaugaaggagauuucc

SEQ ID NO: 273665 - RNA, 22 nt, Artificial Sequence
  Synthetic
acauuucaugaaggagauuucc

SEQ ID NO: 273666 - RNA, 23 nt, Artificial Sequence
  Synthetic
gacauuucaugaaggagauuucc

SEQ ID NO: 273667 - RNA, 24 nt, Artificial Sequence
  Synthetic
agacauuucaugaaggagauuucc

SEQ ID NO: 273668 - RNA, 18 nt, Artificial Sequence
  Synthetic
ucccauaucuagauuucc

SEQ ID NO: 273669 - RNA, 19 nt, Artificial Sequence
  Synthetic
aucccauaucuagauuucc

SEQ ID NO: 273670 - RNA, 20 nt, Artificial Sequence
  Synthetic
aaucccauaucuagauuucc

SEQ ID NO: 273671 - RNA, 21 nt, Artificial Sequence
  Synthetic
caaucccauaucuagauuucc

SEQ ID NO: 273672 - RNA, 22 nt, Artificial Sequence
  Synthetic
ccaaucccauaucuagauuucc

SEQ ID NO: 273673 - RNA, 23 nt, Artificial Sequence
  Synthetic
cccaaucccauaucuagauuucc

SEQ ID NO: 273674 - RNA, 24 nt, Artificial Sequence
  Synthetic
acccaaucccauaucuagauuucc

SEQ ID NO: 273675 - RNA, 18 nt, Artificial Sequence
  Synthetic
gagacacuucugauuucc

SEQ ID NO: 273676 - RNA, 19 nt, Artificial Sequence
  Synthetic
agagacacuucugauuucc

SEQ ID NO: 273677 - RNA, 20 nt, Artificial Sequence
  Synthetic
gagagacacuucugauuucc

SEQ ID NO: 273678 - RNA, 21 nt, Artificial Sequence
  Synthetic
ugagagacacuucugauuucc

SEQ ID NO: 273679 - RNA, 22 nt, Artificial Sequence
  Synthetic
gugagagacacuucugauuucc

SEQ ID NO: 273680 - RNA, 23 nt, Artificial Sequence
  Synthetic
agugagagacacuucugauuucc

SEQ ID NO: 273681 - RNA, 24 nt, Artificial Sequence
  Synthetic
gagugagagacacuucugauuucc

SEQ ID NO: 273682 - RNA, 18 nt, Artificial Sequence
  Synthetic
uaauuggaaaauauuucc

SEQ ID NO: 273683 - RNA, 19 nt, Artificial Sequence
  Synthetic
auaauuggaaaauauuucc

SEQ ID NO: 273684 - RNA, 20 nt, Artificial Sequence
  Synthetic
uauaauuggaaaauauuucc

SEQ ID NO: 273685 - RNA, 21 nt, Artificial Sequence
  Synthetic
auauaauuggaaaauauuucc

SEQ ID NO: 273686 - RNA, 22 nt, Artificial Sequence
  Synthetic
cauauaauuggaaaauauuucc

SEQ ID NO: 273687 - RNA, 23 nt, Artificial Sequence
  Synthetic
gcauauaauuggaaaauauuucc

SEQ ID NO: 273688 - RNA, 24 nt, Artificial Sequence
  Synthetic
agcauauaauuggaaaauauuucc

SEQ ID NO: 273689 - RNA, 18 nt, Artificial Sequence
  Synthetic
ucuuugaggaguauuucc

SEQ ID NO: 273690 - RNA, 19 nt, Artificial Sequence
  Synthetic
gucuuugaggaguauuucc

SEQ ID NO: 273691 - RNA, 20 nt, Artificial Sequence
  Synthetic
ugucuuugaggaguauuucc

SEQ ID NO: 273692 - RNA, 21 nt, Artificial Sequence
  Synthetic
augucuuugaggaguauuucc

SEQ ID NO: 273693 - RNA, 22 nt, Artificial Sequence
  Synthetic
gaugucuuugaggaguauuucc

SEQ ID NO: 273694 - RNA, 23 nt, Artificial Sequence
  Synthetic
agaugucuuugaggaguauuucc

SEQ ID NO: 273695 - RNA, 24 nt, Artificial Sequence
  Synthetic
gagaugucuuugaggaguauuucc

SEQ ID NO: 273696 - RNA, 18 nt, Artificial Sequence
  Synthetic
auagaaggugguauuucc

SEQ ID NO: 273697 - RNA, 19 nt, Artificial Sequence
  Synthetic
uauagaaggugguauuucc

SEQ ID NO: 273698 - RNA, 20 nt, Artificial Sequence
  Synthetic
cuauagaaggugguauuucc

SEQ ID NO: 273699 - RNA, 21 nt, Artificial Sequence
  Synthetic
acuauagaaggugguauuucc

SEQ ID NO: 273700 - RNA, 22 nt, Artificial Sequence
  Synthetic
gacuauagaaggugguauuucc

SEQ ID NO: 273701 - RNA, 23 nt, Artificial Sequence
  Synthetic
agacuauagaaggugguauuucc

SEQ ID NO: 273702 - RNA, 24 nt, Artificial Sequence
  Synthetic
gagacuauagaaggugguauuucc

SEQ ID NO: 273703 - RNA, 18 nt, Artificial Sequence
  Synthetic
acaaugacuauuauuucc

SEQ ID NO: 273704 - RNA, 19 nt, Artificial Sequence
  Synthetic
uacaaugacuauuauuucc

SEQ ID NO: 273705 - RNA, 20 nt, Artificial Sequence
  Synthetic
auacaaugacuauuauuucc

SEQ ID NO: 273706 - RNA, 21 nt, Artificial Sequence
  Synthetic
aauacaaugacuauuauuucc

SEQ ID NO: 273707 - RNA, 22 nt, Artificial Sequence
  Synthetic
uaauacaaugacuauuauuucc

SEQ ID NO: 273708 - RNA, 23 nt, Artificial Sequence
  Synthetic
auaauacaaugacuauuauuucc

SEQ ID NO: 273709 - RNA, 24 nt, Artificial Sequence
  Synthetic
gauaauacaaugacuauuauuucc

SEQ ID NO: 273710 - RNA, 18 nt, Artificial Sequence
  Synthetic
ggguccucucuuauuucc

SEQ ID NO: 273711 - RNA, 19 nt, Artificial Sequence
  Synthetic
uggguccucucuuauuucc

SEQ ID NO: 273712 - RNA, 20 nt, Artificial Sequence
  Synthetic
uuggguccucucuuauuucc

SEQ ID NO: 273713 - RNA, 21 nt, Artificial Sequence
  Synthetic
uuuggguccucucuuauuucc

SEQ ID NO: 273714 - RNA, 22 nt, Artificial Sequence
  Synthetic
guuuggguccucucuuauuucc

SEQ ID NO: 273715 - RNA, 23 nt, Artificial Sequence
  Synthetic
uguuuggguccucucuuauuucc

SEQ ID NO: 273716 - RNA, 24 nt, Artificial Sequence
  Synthetic
uuguuuggguccucucuuauuucc

SEQ ID NO: 273717 - RNA, 18 nt, Artificial Sequence
  Synthetic
acaacaugauuuauuucc

SEQ ID NO: 273718 - RNA, 19 nt, Artificial Sequence
  Synthetic
aacaacaugauuuauuucc

SEQ ID NO: 273719 - RNA, 20 nt, Artificial Sequence
  Synthetic
uaacaacaugauuuauuucc

SEQ ID NO: 273720 - RNA, 21 nt, Artificial Sequence
  Synthetic
auaacaacaugauuuauuucc

SEQ ID NO: 273721 - RNA, 22 nt, Artificial Sequence
  Synthetic
aauaacaacaugauuuauuucc

SEQ ID NO: 273722 - RNA, 23 nt, Artificial Sequence
  Synthetic
caauaacaacaugauuuauuucc

SEQ ID NO: 273723 - RNA, 24 nt, Artificial Sequence
  Synthetic
ccaauaacaacaugauuuauuucc

SEQ ID NO: 273724 - RNA, 18 nt, Artificial Sequence
  Synthetic
caaacaugguuuauuucc

SEQ ID NO: 273725 - RNA, 19 nt, Artificial Sequence
  Synthetic
gcaaacaugguuuauuucc

SEQ ID NO: 273726 - RNA, 20 nt, Artificial Sequence
  Synthetic
agcaaacaugguuuauuucc

SEQ ID NO: 273727 - RNA, 21 nt, Artificial Sequence
  Synthetic
aagcaaacaugguuuauuucc

SEQ ID NO: 273728 - RNA, 22 nt, Artificial Sequence
  Synthetic
aaagcaaacaugguuuauuucc

SEQ ID NO: 273729 - RNA, 23 nt, Artificial Sequence
  Synthetic
caaagcaaacaugguuuauuucc

SEQ ID NO: 273730 - RNA, 24 nt, Artificial Sequence
  Synthetic
acaaagcaaacaugguuuauuucc

SEQ ID NO: 273731 - RNA, 18 nt, Artificial Sequence
  Synthetic
guauccucuuuuauuucc

SEQ ID NO: 273732 - RNA, 19 nt, Artificial Sequence
  Synthetic
uguauccucuuuuauuucc

SEQ ID NO: 273733 - RNA, 20 nt, Artificial Sequence
  Synthetic
uuguauccucuuuuauuucc

SEQ ID NO: 273734 - RNA, 18 nt, Artificial Sequence
  Synthetic
guguccucuuuuauuucc

SEQ ID NO: 273735 - RNA, 19 nt, Artificial Sequence
  Synthetic
uguguccucuuuuauuucc

SEQ ID NO: 273736 - RNA, 20 nt, Artificial Sequence
  Synthetic
uuguguccucuuuuauuucc

SEQ ID NO: 273737 - RNA, 21 nt, Artificial Sequence
  Synthetic
uuuguguccucuuuuauuucc

SEQ ID NO: 273738 - RNA, 22 nt, Artificial Sequence
  Synthetic
guuuguguccucuuuuauuucc

SEQ ID NO: 273739 - RNA, 23 nt, Artificial Sequence
  Synthetic
uguuuguguccucuuuuauuucc

SEQ ID NO: 273740 - RNA, 24 nt, Artificial Sequence
  Synthetic
uuguuuguguccucuuuuauuucc

SEQ ID NO: 273741 - RNA, 18 nt, Artificial Sequence
  Synthetic
agaguuaaguaacuuucc

SEQ ID NO: 273742 - RNA, 19 nt, Artificial Sequence
  Synthetic
gagaguuaaguaacuuucc

SEQ ID NO: 273743 - RNA, 20 nt, Artificial Sequence
  Synthetic
agagaguuaaguaacuuucc

SEQ ID NO: 273744 - RNA, 21 nt, Artificial Sequence
  Synthetic
cagagaguuaaguaacuuucc

SEQ ID NO: 273745 - RNA, 22 nt, Artificial Sequence
  Synthetic
ccagagaguuaaguaacuuucc

SEQ ID NO: 273746 - RNA, 23 nt, Artificial Sequence
  Synthetic
uccagagaguuaaguaacuuucc

SEQ ID NO: 273747 - RNA, 24 nt, Artificial Sequence
  Synthetic
uuccagagaguuaaguaacuuucc

SEQ ID NO: 273748 - RNA, 18 nt, Artificial Sequence
  Synthetic
ucacaagguuuacuuucc

SEQ ID NO: 273749 - RNA, 19 nt, Artificial Sequence
  Synthetic
aucacaagguuuacuuucc

SEQ ID NO: 273750 - RNA, 20 nt, Artificial Sequence
  Synthetic
uaucacaagguuuacuuucc

SEQ ID NO: 273751 - RNA, 21 nt, Artificial Sequence
  Synthetic
cuaucacaagguuuacuuucc

SEQ ID NO: 273752 - RNA, 22 nt, Artificial Sequence
  Synthetic
ucuaucacaagguuuacuuucc

SEQ ID NO: 273753 - RNA, 23 nt, Artificial Sequence
  Synthetic
uucuaucacaagguuuacuuucc

SEQ ID NO: 273754 - RNA, 24 nt, Artificial Sequence
  Synthetic
auucuaucacaagguuuacuuucc

SEQ ID NO: 273755 - RNA, 18 nt, Artificial Sequence
  Synthetic
cauaaacuccaccuuucc

SEQ ID NO: 273756 - RNA, 19 nt, Artificial Sequence
  Synthetic
acauaaacuccaccuuucc

SEQ ID NO: 273757 - RNA, 20 nt, Artificial Sequence
  Synthetic
aacauaaacuccaccuuucc

SEQ ID NO: 273758 - RNA, 21 nt, Artificial Sequence
  Synthetic
gaacauaaacuccaccuuucc

SEQ ID NO: 273759 - RNA, 22 nt, Artificial Sequence
  Synthetic
agaacauaaacuccaccuuucc

SEQ ID NO: 273760 - RNA, 23 nt, Artificial Sequence
  Synthetic
gagaacauaaacuccaccuuucc

SEQ ID NO: 273761 - RNA, 24 nt, Artificial Sequence
  Synthetic
ugagaacauaaacuccaccuuucc

SEQ ID NO: 273762 - RNA, 18 nt, Artificial Sequence
  Synthetic
uacauacaugaccuuucc

SEQ ID NO: 273763 - RNA, 19 nt, Artificial Sequence
  Synthetic
auacauacaugaccuuucc

SEQ ID NO: 273764 - RNA, 20 nt, Artificial Sequence
  Synthetic
uauacauacaugaccuuucc

SEQ ID NO: 273765 - RNA, 21 nt, Artificial Sequence
  Synthetic
guauacauacaugaccuuucc

SEQ ID NO: 273766 - RNA, 22 nt, Artificial Sequence
  Synthetic
uguauacauacaugaccuuucc

SEQ ID NO: 273767 - RNA, 23 nt, Artificial Sequence
  Synthetic
auguauacauacaugaccuuucc

SEQ ID NO: 273768 - RNA, 24 nt, Artificial Sequence
  Synthetic
uauguauacauacaugaccuuucc

SEQ ID NO: 273769 - RNA, 18 nt, Artificial Sequence
  Synthetic
accccaguacuccuuucc

SEQ ID NO: 273770 - RNA, 19 nt, Artificial Sequence
  Synthetic
uaccccaguacuccuuucc

SEQ ID NO: 273771 - RNA, 20 nt, Artificial Sequence
  Synthetic
auaccccaguacuccuuucc

SEQ ID NO: 273772 - RNA, 21 nt, Artificial Sequence
  Synthetic
aauaccccaguacuccuuucc

SEQ ID NO: 273773 - RNA, 22 nt, Artificial Sequence
  Synthetic
caauaccccaguacuccuuucc

SEQ ID NO: 273774 - RNA, 23 nt, Artificial Sequence
  Synthetic
acaauaccccaguacuccuuucc

SEQ ID NO: 273775 - RNA, 24 nt, Artificial Sequence
  Synthetic
cacaauaccccaguacuccuuucc

SEQ ID NO: 273776 - RNA, 18 nt, Artificial Sequence
  Synthetic
uuaaaaauccagcuuucc

SEQ ID NO: 273777 - RNA, 19 nt, Artificial Sequence
  Synthetic
auuaaaaauccagcuuucc

SEQ ID NO: 273778 - RNA, 20 nt, Artificial Sequence
  Synthetic
cauuaaaaauccagcuuucc

SEQ ID NO: 273779 - RNA, 21 nt, Artificial Sequence
  Synthetic
ucauuaaaaauccagcuuucc

SEQ ID NO: 273780 - RNA, 22 nt, Artificial Sequence
  Synthetic
uucauuaaaaauccagcuuucc

SEQ ID NO: 273781 - RNA, 23 nt, Artificial Sequence
  Synthetic
auucauuaaaaauccagcuuucc

SEQ ID NO: 273782 - RNA, 24 nt, Artificial Sequence
  Synthetic
gauucauuaaaaauccagcuuucc

SEQ ID NO: 273783 - RNA, 18 nt, Artificial Sequence
  Synthetic
ugucuuuugcagcuuucc

SEQ ID NO: 273784 - RNA, 19 nt, Artificial Sequence
  Synthetic
augucuuuugcagcuuucc

SEQ ID NO: 273785 - RNA, 20 nt, Artificial Sequence
  Synthetic
gaugucuuuugcagcuuucc

SEQ ID NO: 273786 - RNA, 21 nt, Artificial Sequence
  Synthetic
agaugucuuuugcagcuuucc

SEQ ID NO: 273787 - RNA, 22 nt, Artificial Sequence
  Synthetic
gagaugucuuuugcagcuuucc

SEQ ID NO: 273788 - RNA, 23 nt, Artificial Sequence
  Synthetic
ugagaugucuuuugcagcuuucc

SEQ ID NO: 273789 - RNA, 24 nt, Artificial Sequence
  Synthetic
uugagaugucuuuugcagcuuucc

SEQ ID NO: 273790 - RNA, 18 nt, Artificial Sequence
  Synthetic
gcccuaccuccgcuuucc

SEQ ID NO: 273791 - RNA, 19 nt, Artificial Sequence
  Synthetic
agcccuaccuccgcuuucc

SEQ ID NO: 273792 - RNA, 20 nt, Artificial Sequence
  Synthetic
gagcccuaccuccgcuuucc

SEQ ID NO: 273793 - RNA, 21 nt, Artificial Sequence
  Synthetic
agagcccuaccuccgcuuucc

SEQ ID NO: 273794 - RNA, 22 nt, Artificial Sequence
  Synthetic
uagagcccuaccuccgcuuucc

SEQ ID NO: 273795 - RNA, 23 nt, Artificial Sequence
  Synthetic
cuagagcccuaccuccgcuuucc

SEQ ID NO: 273796 - RNA, 24 nt, Artificial Sequence
  Synthetic
ccuagagcccuaccuccgcuuucc

SEQ ID NO: 273797 - RNA, 18 nt, Artificial Sequence
  Synthetic
uaaauuagaaggcuuucc

SEQ ID NO: 273798 - RNA, 19 nt, Artificial Sequence
  Synthetic
cuaaauuagaaggcuuucc

SEQ ID NO: 273799 - RNA, 20 nt, Artificial Sequence
  Synthetic
acuaaauuagaaggcuuucc

SEQ ID NO: 273800 - RNA, 21 nt, Artificial Sequence
  Synthetic
aacuaaauuagaaggcuuucc

SEQ ID NO: 273801 - RNA, 22 nt, Artificial Sequence
  Synthetic
aaacuaaauuagaaggcuuucc

SEQ ID NO: 273802 - RNA, 23 nt, Artificial Sequence
  Synthetic
uaaacuaaauuagaaggcuuucc

SEQ ID NO: 273803 - RNA, 24 nt, Artificial Sequence
  Synthetic
guaaacuaaauuagaaggcuuucc

SEQ ID NO: 273804 - RNA, 18 nt, Artificial Sequence
  Synthetic
uuugcuuaagugcuuucc

SEQ ID NO: 273805 - RNA, 19 nt, Artificial Sequence
  Synthetic
uuuugcuuaagugcuuucc

SEQ ID NO: 273806 - RNA, 20 nt, Artificial Sequence
  Synthetic
cuuuugcuuaagugcuuucc

SEQ ID NO: 273807 - RNA, 21 nt, Artificial Sequence
  Synthetic
ccuuuugcuuaagugcuuucc

SEQ ID NO: 273808 - RNA, 22 nt, Artificial Sequence
  Synthetic
gccuuuugcuuaagugcuuucc

SEQ ID NO: 273809 - RNA, 23 nt, Artificial Sequence
  Synthetic
agccuuuugcuuaagugcuuucc

SEQ ID NO: 273810 - RNA, 24 nt, Artificial Sequence
  Synthetic
uagccuuuugcuuaagugcuuucc

SEQ ID NO: 273811 - RNA, 18 nt, Artificial Sequence
  Synthetic
ucagaaggaagucuuucc

SEQ ID NO: 273812 - RNA, 19 nt, Artificial Sequence
  Synthetic
aucagaaggaagucuuucc

SEQ ID NO: 273813 - RNA, 20 nt, Artificial Sequence
  Synthetic
caucagaaggaagucuuucc

SEQ ID NO: 273814 - RNA, 21 nt, Artificial Sequence
  Synthetic
ucaucagaaggaagucuuucc

SEQ ID NO: 273815 - RNA, 22 nt, Artificial Sequence
  Synthetic
cucaucagaaggaagucuuucc

SEQ ID NO: 273816 - RNA, 23 nt, Artificial Sequence
  Synthetic
acucaucagaaggaagucuuucc

SEQ ID NO: 273817 - RNA, 24 nt, Artificial Sequence
  Synthetic
cacucaucagaaggaagucuuucc

SEQ ID NO: 273818 - RNA, 18 nt, Artificial Sequence
  Synthetic
caauuucuagaaguuucc

SEQ ID NO: 273819 - RNA, 19 nt, Artificial Sequence
  Synthetic
acaauuucuagaaguuucc

SEQ ID NO: 273820 - RNA, 20 nt, Artificial Sequence
  Synthetic
aacaauuucuagaaguuucc

SEQ ID NO: 273821 - RNA, 21 nt, Artificial Sequence
  Synthetic
gaacaauuucuagaaguuucc

SEQ ID NO: 273822 - RNA, 22 nt, Artificial Sequence
  Synthetic
agaacaauuucuagaaguuucc

SEQ ID NO: 273823 - RNA, 23 nt, Artificial Sequence
  Synthetic
uagaacaauuucuagaaguuucc

SEQ ID NO: 273824 - RNA, 24 nt, Artificial Sequence
  Synthetic
auagaacaauuucuagaaguuucc

SEQ ID NO: 273825 - RNA, 18 nt, Artificial Sequence
  Synthetic
uugugucagugaguuucc

SEQ ID NO: 273826 - RNA, 19 nt, Artificial Sequence
  Synthetic
guugugucagugaguuucc

SEQ ID NO: 273827 - RNA, 20 nt, Artificial Sequence
  Synthetic
uguugugucagugaguuucc

SEQ ID NO: 273828 - RNA, 21 nt, Artificial Sequence
  Synthetic
guguugugucagugaguuucc

SEQ ID NO: 273829 - RNA, 22 nt, Artificial Sequence
  Synthetic
uguguugugucagugaguuucc

SEQ ID NO: 273830 - RNA, 23 nt, Artificial Sequence
  Synthetic
guguguugugucagugaguuucc

SEQ ID NO: 273831 - RNA, 24 nt, Artificial Sequence
  Synthetic
uguguguugugucagugaguuucc

SEQ ID NO: 273832 - RNA, 18 nt, Artificial Sequence
  Synthetic
uauacucaaaugguuucc

SEQ ID NO: 273833 - RNA, 19 nt, Artificial Sequence
  Synthetic
uuauacucaaaugguuucc

SEQ ID NO: 273834 - RNA, 20 nt, Artificial Sequence
  Synthetic
uuuauacucaaaugguuucc

SEQ ID NO: 273835 - RNA, 21 nt, Artificial Sequence
  Synthetic
uuuuauacucaaaugguuucc

SEQ ID NO: 273836 - RNA, 22 nt, Artificial Sequence
  Synthetic
auuuuauacucaaaugguuucc

SEQ ID NO: 273837 - RNA, 23 nt, Artificial Sequence
  Synthetic
uauuuuauacucaaaugguuucc

SEQ ID NO: 273838 - RNA, 24 nt, Artificial Sequence
  Synthetic
guauuuuauacucaaaugguuucc

SEQ ID NO: 273839 - RNA, 18 nt, Artificial Sequence
  Synthetic
cccuuuauugugguuucc

SEQ ID NO: 273840 - RNA, 19 nt, Artificial Sequence
  Synthetic
acccuuuauugugguuucc

SEQ ID NO: 273841 - RNA, 20 nt, Artificial Sequence
  Synthetic
aacccuuuauugugguuucc

SEQ ID NO: 273842 - RNA, 21 nt, Artificial Sequence
  Synthetic
aaacccuuuauugugguuucc

SEQ ID NO: 273843 - RNA, 22 nt, Artificial Sequence
  Synthetic
caaacccuuuauugugguuucc

SEQ ID NO: 273844 - RNA, 23 nt, Artificial Sequence
  Synthetic
ccaaacccuuuauugugguuucc

SEQ ID NO: 273845 - RNA, 24 nt, Artificial Sequence
  Synthetic
cccaaacccuuuauugugguuucc

SEQ ID NO: 273846 - RNA, 18 nt, Artificial Sequence
  Synthetic
cguucugcacauguuucc

SEQ ID NO: 273847 - RNA, 19 nt, Artificial Sequence
  Synthetic
acguucugcacauguuucc

SEQ ID NO: 273848 - RNA, 20 nt, Artificial Sequence
  Synthetic
cacguucugcacauguuucc

SEQ ID NO: 273849 - RNA, 21 nt, Artificial Sequence
  Synthetic
gcacguucugcacauguuucc

SEQ ID NO: 273850 - RNA, 22 nt, Artificial Sequence
  Synthetic
ugcacguucugcacauguuucc

SEQ ID NO: 273851 - RNA, 23 nt, Artificial Sequence
  Synthetic
cugcacguucugcacauguuucc

SEQ ID NO: 273852 - RNA, 24 nt, Artificial Sequence
  Synthetic
ucugcacguucugcacauguuucc

SEQ ID NO: 273853 - RNA, 18 nt, Artificial Sequence
  Synthetic
uuucauuggcauguuucc

SEQ ID NO: 273854 - RNA, 19 nt, Artificial Sequence
  Synthetic
uuuucauuggcauguuucc

SEQ ID NO: 273855 - RNA, 20 nt, Artificial Sequence
  Synthetic
uuuuucauuggcauguuucc

SEQ ID NO: 273856 - RNA, 21 nt, Artificial Sequence
  Synthetic
uuuuuucauuggcauguuucc

SEQ ID NO: 273857 - RNA, 22 nt, Artificial Sequence
  Synthetic
auuuuuucauuggcauguuucc

SEQ ID NO: 273858 - RNA, 23 nt, Artificial Sequence
  Synthetic
gauuuuuucauuggcauguuucc

SEQ ID NO: 273859 - RNA, 24 nt, Artificial Sequence
  Synthetic
ugauuuuuucauuggcauguuucc

SEQ ID NO: 273860 - RNA, 18 nt, Artificial Sequence
  Synthetic
ugaucuugaacuguuucc

SEQ ID NO: 273861 - RNA, 19 nt, Artificial Sequence
  Synthetic
uugaucuugaacuguuucc

SEQ ID NO: 273862 - RNA, 20 nt, Artificial Sequence
  Synthetic
uuugaucuugaacuguuucc

SEQ ID NO: 273863 - RNA, 21 nt, Artificial Sequence
  Synthetic
cuuugaucuugaacuguuucc

SEQ ID NO: 273864 - RNA, 22 nt, Artificial Sequence
  Synthetic
ccuuugaucuugaacuguuucc

SEQ ID NO: 273865 - RNA, 23 nt, Artificial Sequence
  Synthetic
uccuuugaucuugaacuguuucc

SEQ ID NO: 273866 - RNA, 24 nt, Artificial Sequence
  Synthetic
uuccuuugaucuugaacuguuucc

SEQ ID NO: 273867 - RNA, 18 nt, Artificial Sequence
  Synthetic
cuuaaaguuaguguuucc

SEQ ID NO: 273868 - RNA, 19 nt, Artificial Sequence
  Synthetic
ucuuaaaguuaguguuucc

SEQ ID NO: 273869 - RNA, 20 nt, Artificial Sequence
  Synthetic
aucuuaaaguuaguguuucc

SEQ ID NO: 273870 - RNA, 21 nt, Artificial Sequence
  Synthetic
caucuuaaaguuaguguuucc

SEQ ID NO: 273871 - RNA, 22 nt, Artificial Sequence
  Synthetic
ucaucuuaaaguuaguguuucc

SEQ ID NO: 273872 - RNA, 23 nt, Artificial Sequence
  Synthetic
uucaucuuaaaguuaguguuucc

SEQ ID NO: 273873 - RNA, 24 nt, Artificial Sequence
  Synthetic
auucaucuuaaaguuaguguuucc

SEQ ID NO: 273874 - RNA, 18 nt, Artificial Sequence
  Synthetic
aaaaguaaaacauuuucc

SEQ ID NO: 273875 - RNA, 19 nt, Artificial Sequence
  Synthetic
aaaaaguaaaacauuuucc

SEQ ID NO: 273876 - RNA, 20 nt, Artificial Sequence
  Synthetic
gaaaaaguaaaacauuuucc

SEQ ID NO: 273877 - RNA, 21 nt, Artificial Sequence
  Synthetic
ugaaaaaguaaaacauuuucc

SEQ ID NO: 273878 - RNA, 22 nt, Artificial Sequence
  Synthetic
augaaaaaguaaaacauuuucc

SEQ ID NO: 273879 - RNA, 23 nt, Artificial Sequence
  Synthetic
aaugaaaaaguaaaacauuuucc

SEQ ID NO: 273880 - RNA, 24 nt, Artificial Sequence
  Synthetic
aaaugaaaaaguaaaacauuuucc

SEQ ID NO: 273881 - RNA, 18 nt, Artificial Sequence
  Synthetic
aaugucccuucauuuucc

SEQ ID NO: 273882 - RNA, 19 nt, Artificial Sequence
  Synthetic
caaugucccuucauuuucc

SEQ ID NO: 273883 - RNA, 20 nt, Artificial Sequence
  Synthetic
ccaaugucccuucauuuucc

SEQ ID NO: 273884 - RNA, 21 nt, Artificial Sequence
  Synthetic
uccaaugucccuucauuuucc

SEQ ID NO: 273885 - RNA, 22 nt, Artificial Sequence
  Synthetic
cuccaaugucccuucauuuucc

SEQ ID NO: 273886 - RNA, 23 nt, Artificial Sequence
  Synthetic
ucuccaaugucccuucauuuucc

SEQ ID NO: 273887 - RNA, 24 nt, Artificial Sequence
  Synthetic
aucuccaaugucccuucauuuucc

SEQ ID NO: 273888 - RNA, 18 nt, Artificial Sequence
  Synthetic
guauaguuaugauuuucc

SEQ ID NO: 273889 - RNA, 19 nt, Artificial Sequence
  Synthetic
uguauaguuaugauuuucc

SEQ ID NO: 273890 - RNA, 20 nt, Artificial Sequence
  Synthetic
auguauaguuaugauuuucc

SEQ ID NO: 273891 - RNA, 21 nt, Artificial Sequence
  Synthetic
gauguauaguuaugauuuucc

SEQ ID NO: 273892 - RNA, 22 nt, Artificial Sequence
  Synthetic
ggauguauaguuaugauuuucc

SEQ ID NO: 273893 - RNA, 23 nt, Artificial Sequence
  Synthetic
uggauguauaguuaugauuuucc

SEQ ID NO: 273894 - RNA, 24 nt, Artificial Sequence
  Synthetic
cuggauguauaguuaugauuuucc

SEQ ID NO: 273895 - RNA, 18 nt, Artificial Sequence
  Synthetic
uguguacacauauuuucc

SEQ ID NO: 273896 - RNA, 19 nt, Artificial Sequence
  Synthetic
auguguacacauauuuucc

SEQ ID NO: 273897 - RNA, 20 nt, Artificial Sequence
  Synthetic
uauguguacacauauuuucc

SEQ ID NO: 273898 - RNA, 21 nt, Artificial Sequence
  Synthetic
auauguguacacauauuuucc

SEQ ID NO: 273899 - RNA, 22 nt, Artificial Sequence
  Synthetic
aauauguguacacauauuuucc

SEQ ID NO: 273900 - RNA, 23 nt, Artificial Sequence
  Synthetic
gaauauguguacacauauuuucc

SEQ ID NO: 273901 - RNA, 24 nt, Artificial Sequence
  Synthetic
ugaauauguguacacauauuuucc

SEQ ID NO: 273902 - RNA, 18 nt, Artificial Sequence
  Synthetic
ugcuaaauguacuuuucc

SEQ ID NO: 273903 - RNA, 19 nt, Artificial Sequence
  Synthetic
gugcuaaauguacuuuucc

SEQ ID NO: 273904 - RNA, 20 nt, Artificial Sequence
  Synthetic
ugugcuaaauguacuuuucc

SEQ ID NO: 273905 - RNA, 21 nt, Artificial Sequence
  Synthetic
cugugcuaaauguacuuuucc

SEQ ID NO: 273906 - RNA, 22 nt, Artificial Sequence
  Synthetic
acugugcuaaauguacuuuucc

SEQ ID NO: 273907 - RNA, 23 nt, Artificial Sequence
  Synthetic
aacugugcuaaauguacuuuucc

SEQ ID NO: 273908 - RNA, 24 nt, Artificial Sequence
  Synthetic
aaacugugcuaaauguacuuuucc

SEQ ID NO: 273909 - RNA, 18 nt, Artificial Sequence
  Synthetic
auaacguuuuucuuuucc

SEQ ID NO: 273910 - RNA, 19 nt, Artificial Sequence
  Synthetic
aauaacguuuuucuuuucc

SEQ ID NO: 273911 - RNA, 20 nt, Artificial Sequence
  Synthetic
uaauaacguuuuucuuuucc

SEQ ID NO: 273912 - RNA, 21 nt, Artificial Sequence
  Synthetic
cuaauaacguuuuucuuuucc

SEQ ID NO: 273913 - RNA, 22 nt, Artificial Sequence
  Synthetic
gcuaauaacguuuuucuuuucc

SEQ ID NO: 273914 - RNA, 23 nt, Artificial Sequence
  Synthetic
ugcuaauaacguuuuucuuuucc

SEQ ID NO: 273915 - RNA, 24 nt, Artificial Sequence
  Synthetic
cugcuaauaacguuuuucuuuucc

SEQ ID NO: 273916 - RNA, 18 nt, Artificial Sequence
  Synthetic
uucucagggcaguuuucc

SEQ ID NO: 273917 - RNA, 19 nt, Artificial Sequence
  Synthetic
auucucagggcaguuuucc

SEQ ID NO: 273918 - RNA, 20 nt, Artificial Sequence
  Synthetic
uauucucagggcaguuuucc

SEQ ID NO: 273919 - RNA, 21 nt, Artificial Sequence
  Synthetic
guauucucagggcaguuuucc

SEQ ID NO: 273920 - RNA, 22 nt, Artificial Sequence
  Synthetic
gguauucucagggcaguuuucc

SEQ ID NO: 273921 - RNA, 23 nt, Artificial Sequence
  Synthetic
ugguauucucagggcaguuuucc

SEQ ID NO: 273922 - RNA, 24 nt, Artificial Sequence
  Synthetic
augguauucucagggcaguuuucc

SEQ ID NO: 273923 - RNA, 18 nt, Artificial Sequence
  Synthetic
ccuauguaucaguuuucc

SEQ ID NO: 273924 - RNA, 19 nt, Artificial Sequence
  Synthetic
uccuauguaucaguuuucc

SEQ ID NO: 273925 - RNA, 20 nt, Artificial Sequence
  Synthetic
cuccuauguaucaguuuucc

SEQ ID NO: 273926 - RNA, 21 nt, Artificial Sequence
  Synthetic
gcuccuauguaucaguuuucc

SEQ ID NO: 273927 - RNA, 22 nt, Artificial Sequence
  Synthetic
ugcuccuauguaucaguuuucc

SEQ ID NO: 273928 - RNA, 23 nt, Artificial Sequence
  Synthetic
augcuccuauguaucaguuuucc

SEQ ID NO: 273929 - RNA, 24 nt, Artificial Sequence
  Synthetic
aaugcuccuauguaucaguuuucc

SEQ ID NO: 273930 - RNA, 18 nt, Artificial Sequence
  Synthetic
auggcaucuuaguuuucc

SEQ ID NO: 273931 - RNA, 19 nt, Artificial Sequence
  Synthetic
gauggcaucuuaguuuucc

SEQ ID NO: 273932 - RNA, 20 nt, Artificial Sequence
  Synthetic
agauggcaucuuaguuuucc

SEQ ID NO: 273933 - RNA, 21 nt, Artificial Sequence
  Synthetic
uagauggcaucuuaguuuucc

SEQ ID NO: 273934 - RNA, 22 nt, Artificial Sequence
  Synthetic
auagauggcaucuuaguuuucc

SEQ ID NO: 273935 - RNA, 23 nt, Artificial Sequence
  Synthetic
uauagauggcaucuuaguuuucc

SEQ ID NO: 273936 - RNA, 24 nt, Artificial Sequence
  Synthetic
guauagauggcaucuuaguuuucc

SEQ ID NO: 273937 - RNA, 18 nt, Artificial Sequence
  Synthetic
uucuuuucuauguuuucc

SEQ ID NO: 273938 - RNA, 19 nt, Artificial Sequence
  Synthetic
cuucuuuucuauguuuucc

SEQ ID NO: 273939 - RNA, 20 nt, Artificial Sequence
  Synthetic
gcuucuuuucuauguuuucc

SEQ ID NO: 273940 - RNA, 21 nt, Artificial Sequence
  Synthetic
ugcuucuuuucuauguuuucc

SEQ ID NO: 273941 - RNA, 22 nt, Artificial Sequence
  Synthetic
uugcuucuuuucuauguuuucc

SEQ ID NO: 273942 - RNA, 23 nt, Artificial Sequence
  Synthetic
auugcuucuuuucuauguuuucc

SEQ ID NO: 273943 - RNA, 24 nt, Artificial Sequence
  Synthetic
uauugcuucuuuucuauguuuucc

SEQ ID NO: 273944 - RNA, 18 nt, Artificial Sequence
  Synthetic
caccuguuauauuuuucc

SEQ ID NO: 273945 - RNA, 19 nt, Artificial Sequence
  Synthetic
acaccuguuauauuuuucc

SEQ ID NO: 273946 - RNA, 20 nt, Artificial Sequence
  Synthetic
cacaccuguuauauuuuucc

SEQ ID NO: 273947 - RNA, 21 nt, Artificial Sequence
  Synthetic
ucacaccuguuauauuuuucc

SEQ ID NO: 273948 - RNA, 22 nt, Artificial Sequence
  Synthetic
cucacaccuguuauauuuuucc

SEQ ID NO: 273949 - RNA, 23 nt, Artificial Sequence
  Synthetic
acucacaccuguuauauuuuucc

SEQ ID NO: 273950 - RNA, 24 nt, Artificial Sequence
  Synthetic
uacucacaccuguuauauuuuucc

SEQ ID NO: 273951 - RNA, 18 nt, Artificial Sequence
  Synthetic
uguauccuguauuuuucc

SEQ ID NO: 273952 - RNA, 19 nt, Artificial Sequence
  Synthetic
uuguauccuguauuuuucc

SEQ ID NO: 273953 - RNA, 20 nt, Artificial Sequence
  Synthetic
cuuguauccuguauuuuucc

SEQ ID NO: 273954 - RNA, 21 nt, Artificial Sequence
  Synthetic
acuuguauccuguauuuuucc

SEQ ID NO: 273955 - RNA, 22 nt, Artificial Sequence
  Synthetic
uacuuguauccuguauuuuucc

SEQ ID NO: 273956 - RNA, 23 nt, Artificial Sequence
  Synthetic
guacuuguauccuguauuuuucc

SEQ ID NO: 273957 - RNA, 24 nt, Artificial Sequence
  Synthetic
aguacuuguauccuguauuuuucc

SEQ ID NO: 273958 - RNA, 18 nt, Artificial Sequence
  Synthetic
cgaaucuucccuuuuucc

SEQ ID NO: 273959 - RNA, 19 nt, Artificial Sequence
  Synthetic
ucgaaucuucccuuuuucc

SEQ ID NO: 273960 - RNA, 20 nt, Artificial Sequence
  Synthetic
uucgaaucuucccuuuuucc

SEQ ID NO: 273961 - RNA, 21 nt, Artificial Sequence
  Synthetic
uuucgaaucuucccuuuuucc

SEQ ID NO: 273962 - RNA, 22 nt, Artificial Sequence
  Synthetic
uuuucgaaucuucccuuuuucc

SEQ ID NO: 273963 - RNA, 23 nt, Artificial Sequence
  Synthetic
auuuucgaaucuucccuuuuucc

SEQ ID NO: 273964 - RNA, 24 nt, Artificial Sequence
  Synthetic
cauuuucgaaucuucccuuuuucc

SEQ ID NO: 273965 - RNA, 18 nt, Artificial Sequence
  Synthetic
uaccuaucuccuuuuucc

SEQ ID NO: 273966 - RNA, 19 nt, Artificial Sequence
  Synthetic
uuaccuaucuccuuuuucc

SEQ ID NO: 273967 - RNA, 20 nt, Artificial Sequence
  Synthetic
cuuaccuaucuccuuuuucc

SEQ ID NO: 273968 - RNA, 21 nt, Artificial Sequence
  Synthetic
acuuaccuaucuccuuuuucc

SEQ ID NO: 273969 - RNA, 22 nt, Artificial Sequence
  Synthetic
cacuuaccuaucuccuuuuucc

SEQ ID NO: 273970 - RNA, 23 nt, Artificial Sequence
  Synthetic
ccacuuaccuaucuccuuuuucc

SEQ ID NO: 273971 - RNA, 24 nt, Artificial Sequence
  Synthetic
uccacuuaccuaucuccuuuuucc

SEQ ID NO: 273972 - RNA, 18 nt, Artificial Sequence
  Synthetic
uccgguucauguuuuucc

SEQ ID NO: 273973 - RNA, 19 nt, Artificial Sequence
  Synthetic
cuccgguucauguuuuucc

SEQ ID NO: 273974 - RNA, 20 nt, Artificial Sequence
  Synthetic
gcuccgguucauguuuuucc

SEQ ID NO: 273975 - RNA, 21 nt, Artificial Sequence
  Synthetic
ugcuccgguucauguuuuucc

SEQ ID NO: 273976 - RNA, 22 nt, Artificial Sequence
  Synthetic
uugcuccgguucauguuuuucc

SEQ ID NO: 273977 - RNA, 23 nt, Artificial Sequence
  Synthetic
uuugcuccgguucauguuuuucc

SEQ ID NO: 273978 - RNA, 24 nt, Artificial Sequence
  Synthetic
uuuugcuccgguucauguuuuucc

SEQ ID NO: 273979 - RNA, 18 nt, Artificial Sequence
  Synthetic
ucagacaauuguuuuucc

SEQ ID NO: 273980 - RNA, 19 nt, Artificial Sequence
  Synthetic
uucagacaauuguuuuucc

SEQ ID NO: 273981 - RNA, 20 nt, Artificial Sequence
  Synthetic
uuucagacaauuguuuuucc

SEQ ID NO: 273982 - RNA, 21 nt, Artificial Sequence
  Synthetic
uuuucagacaauuguuuuucc

SEQ ID NO: 273983 - RNA, 22 nt, Artificial Sequence
  Synthetic
auuuucagacaauuguuuuucc

SEQ ID NO: 273984 - RNA, 23 nt, Artificial Sequence
  Synthetic
aauuuucagacaauuguuuuucc

SEQ ID NO: 273985 - RNA, 24 nt, Artificial Sequence
  Synthetic
caauuuucagacaauuguuuuucc

SEQ ID NO: 273986 - RNA, 18 nt, Artificial Sequence
  Synthetic
aaacauucauuuuuuucc

SEQ ID NO: 273987 - RNA, 19 nt, Artificial Sequence
  Synthetic
aaaacauucauuuuuuucc

SEQ ID NO: 273988 - RNA, 20 nt, Artificial Sequence
  Synthetic
aaaaacauucauuuuuuucc

SEQ ID NO: 273989 - RNA, 21 nt, Artificial Sequence
  Synthetic
caaaaacauucauuuuuuucc

SEQ ID NO: 273990 - RNA, 22 nt, Artificial Sequence
  Synthetic
ucaaaaacauucauuuuuuucc

SEQ ID NO: 273991 - RNA, 23 nt, Artificial Sequence
  Synthetic
cucaaaaacauucauuuuuuucc

SEQ ID NO: 273992 - RNA, 24 nt, Artificial Sequence
  Synthetic
ucucaaaaacauucauuuuuuucc

SEQ ID NO: 273993 - RNA, 18 nt, Artificial Sequence
  Synthetic
ccuuuuugauuuuuuucc

SEQ ID NO: 273994 - RNA, 19 nt, Artificial Sequence
  Synthetic
cccuuuuugauuuuuuucc

SEQ ID NO: 273995 - RNA, 20 nt, Artificial Sequence
  Synthetic
ccccuuuuugauuuuuuucc

SEQ ID NO: 273996 - RNA, 21 nt, Artificial Sequence
  Synthetic
accccuuuuugauuuuuuucc

SEQ ID NO: 273997 - RNA, 22 nt, Artificial Sequence
  Synthetic
uaccccuuuuugauuuuuuucc

SEQ ID NO: 273998 - RNA, 23 nt, Artificial Sequence
  Synthetic
auaccccuuuuugauuuuuuucc

SEQ ID NO: 273999 - RNA, 24 nt, Artificial Sequence
  Synthetic
aauaccccuuuuugauuuuuuucc

SEQ ID NO: 274000 - RNA, 18 nt, Artificial Sequence
  Synthetic
aaaaaaaacuuuuuuucc

SEQ ID NO: 274001 - RNA, 19 nt, Artificial Sequence
  Synthetic
gaaaaaaaacuuuuuuucc

SEQ ID NO: 274002 - RNA, 20 nt, Artificial Sequence
  Synthetic
agaaaaaaaacuuuuuuucc

SEQ ID NO: 274003 - RNA, 21 nt, Artificial Sequence
  Synthetic
aagaaaaaaaacuuuuuuucc

SEQ ID NO: 274004 - RNA, 22 nt, Artificial Sequence
  Synthetic
caagaaaaaaaacuuuuuuucc

SEQ ID NO: 274005 - RNA, 23 nt, Artificial Sequence
  Synthetic
ccaagaaaaaaaacuuuuuuucc

SEQ ID NO: 274006 - RNA, 24 nt, Artificial Sequence
  Synthetic
gccaagaaaaaaaacuuuuuuucc

SEQ ID NO: 274007 - RNA, 18 nt, Artificial Sequence
  Synthetic
uugggacuguuuuuuucc

SEQ ID NO: 274008 - RNA, 19 nt, Artificial Sequence
  Synthetic
cuugggacuguuuuuuucc

SEQ ID NO: 274009 - RNA, 20 nt, Artificial Sequence
  Synthetic
ccuugggacuguuuuuuucc

SEQ ID NO: 274010 - RNA, 21 nt, Artificial Sequence
  Synthetic
uccuugggacuguuuuuuucc

SEQ ID NO: 274011 - RNA, 22 nt, Artificial Sequence
  Synthetic
cuccuugggacuguuuuuuucc

SEQ ID NO: 274012 - RNA, 23 nt, Artificial Sequence
  Synthetic
acuccuugggacuguuuuuuucc

SEQ ID NO: 274013 - RNA, 24 nt, Artificial Sequence
  Synthetic
aacuccuugggacuguuuuuuucc

SEQ ID NO: 274014 - RNA, 18 nt, Artificial Sequence
  Synthetic
guuuuuucuuuuuuuucc

SEQ ID NO: 274015 - RNA, 19 nt, Artificial Sequence
  Synthetic
aguuuuuucuuuuuuuucc

SEQ ID NO: 274016 - RNA, 20 nt, Artificial Sequence
  Synthetic
caguuuuuucuuuuuuuucc

SEQ ID NO: 274017 - RNA, 21 nt, Artificial Sequence
  Synthetic
ccaguuuuuucuuuuuuuucc

SEQ ID NO: 274018 - RNA, 22 nt, Artificial Sequence
  Synthetic
uccaguuuuuucuuuuuuuucc

SEQ ID NO: 274019 - RNA, 23 nt, Artificial Sequence
  Synthetic
auccaguuuuuucuuuuuuuucc

SEQ ID NO: 274020 - RNA, 24 nt, Artificial Sequence
  Synthetic
aauccaguuuuuucuuuuuuuucc

SEQ ID NO: 274021 - RNA, 18 nt, Artificial Sequence
  Synthetic
aaaaaaaaaaaaaaaagc

SEQ ID NO: 274022 - RNA, 19 nt, Artificial Sequence
  Synthetic
aaaaaaaaaaaaaaaaagc

SEQ ID NO: 274023 - RNA, 20 nt, Artificial Sequence
  Synthetic
aaaaaaaaaaaaaaaaaagc

SEQ ID NO: 274024 - RNA, 21 nt, Artificial Sequence
  Synthetic
caaaaaaaaaaaaaaaaaagc

SEQ ID NO: 274025 - RNA, 22 nt, Artificial Sequence
  Synthetic
gcaaaaaaaaaaaaaaaaaagc

SEQ ID NO: 274026 - RNA, 23 nt, Artificial Sequence
  Synthetic
ggcaaaaaaaaaaaaaaaaaagc

SEQ ID NO: 274027 - RNA, 24 nt, Artificial Sequence
  Synthetic
aggcaaaaaaaaaaaaaaaaaagc

SEQ ID NO: 274028 - RNA, 18 nt, Artificial Sequence
  Synthetic
gaaaagcaaacaaaaagc

SEQ ID NO: 274029 - RNA, 19 nt, Artificial Sequence
  Synthetic
ugaaaagcaaacaaaaagc

SEQ ID NO: 274030 - RNA, 20 nt, Artificial Sequence
  Synthetic
uugaaaagcaaacaaaaagc

SEQ ID NO: 274031 - RNA, 21 nt, Artificial Sequence
  Synthetic
uuugaaaagcaaacaaaaagc

SEQ ID NO: 274032 - RNA, 22 nt, Artificial Sequence
  Synthetic
guuugaaaagcaaacaaaaagc

SEQ ID NO: 274033 - RNA, 23 nt, Artificial Sequence
  Synthetic
uguuugaaaagcaaacaaaaagc

SEQ ID NO: 274034 - RNA, 24 nt, Artificial Sequence
  Synthetic
uuguuugaaaagcaaacaaaaagc

SEQ ID NO: 274035 - RNA, 18 nt, Artificial Sequence
  Synthetic
aaaaccagcacaaaaagc

SEQ ID NO: 274036 - RNA, 19 nt, Artificial Sequence
  Synthetic
aaaaaccagcacaaaaagc

SEQ ID NO: 274037 - RNA, 20 nt, Artificial Sequence
  Synthetic
gaaaaaccagcacaaaaagc

SEQ ID NO: 274038 - RNA, 21 nt, Artificial Sequence
  Synthetic
ggaaaaaccagcacaaaaagc

SEQ ID NO: 274039 - RNA, 22 nt, Artificial Sequence
  Synthetic
aggaaaaaccagcacaaaaagc

SEQ ID NO: 274040 - RNA, 23 nt, Artificial Sequence
  Synthetic
gaggaaaaaccagcacaaaaagc

SEQ ID NO: 274041 - RNA, 24 nt, Artificial Sequence
  Synthetic
ugaggaaaaaccagcacaaaaagc

SEQ ID NO: 274042 - RNA, 18 nt, Artificial Sequence
  Synthetic
acccucaagccaaaaagc

SEQ ID NO: 274043 - RNA, 19 nt, Artificial Sequence
  Synthetic
cacccucaagccaaaaagc

SEQ ID NO: 274044 - RNA, 20 nt, Artificial Sequence
  Synthetic
ccacccucaagccaaaaagc

SEQ ID NO: 274045 - RNA, 21 nt, Artificial Sequence
  Synthetic
cccacccucaagccaaaaagc

SEQ ID NO: 274046 - RNA, 22 nt, Artificial Sequence
  Synthetic
ccccacccucaagccaaaaagc

SEQ ID NO: 274047 - RNA, 23 nt, Artificial Sequence
  Synthetic
accccacccucaagccaaaaagc

SEQ ID NO: 274048 - RNA, 24 nt, Artificial Sequence
  Synthetic
aaccccacccucaagccaaaaagc

SEQ ID NO: 274049 - RNA, 18 nt, Artificial Sequence
  Synthetic
uaaaaauauugaaaaagc

SEQ ID NO: 274050 - RNA, 19 nt, Artificial Sequence
  Synthetic
auaaaaauauugaaaaagc

SEQ ID NO: 274051 - RNA, 20 nt, Artificial Sequence
  Synthetic
uauaaaaauauugaaaaagc

SEQ ID NO: 274052 - RNA, 21 nt, Artificial Sequence
  Synthetic
uuauaaaaauauugaaaaagc

SEQ ID NO: 274053 - RNA, 22 nt, Artificial Sequence
  Synthetic
guuauaaaaauauugaaaaagc

SEQ ID NO: 274054 - RNA, 23 nt, Artificial Sequence
  Synthetic
aguuauaaaaauauugaaaaagc

SEQ ID NO: 274055 - RNA, 24 nt, Artificial Sequence
  Synthetic
caguuauaaaaauauugaaaaagc

SEQ ID NO: 274056 - RNA, 18 nt, Artificial Sequence
  Synthetic
agaggcagaauaaaaagc

SEQ ID NO: 274057 - RNA, 19 nt, Artificial Sequence
  Synthetic
uagaggcagaauaaaaagc

SEQ ID NO: 274058 - RNA, 20 nt, Artificial Sequence
  Synthetic
uuagaggcagaauaaaaagc

SEQ ID NO: 274059 - RNA, 21 nt, Artificial Sequence
  Synthetic
guuagaggcagaauaaaaagc

SEQ ID NO: 274060 - RNA, 22 nt, Artificial Sequence
  Synthetic
aguuagaggcagaauaaaaagc

SEQ ID NO: 274061 - RNA, 23 nt, Artificial Sequence
  Synthetic
uaguuagaggcagaauaaaaagc

SEQ ID NO: 274062 - RNA, 24 nt, Artificial Sequence
  Synthetic
cuaguuagaggcagaauaaaaagc

SEQ ID NO: 274063 - RNA, 18 nt, Artificial Sequence
  Synthetic
uuaugggugauaaaaagc

SEQ ID NO: 274064 - RNA, 19 nt, Artificial Sequence
  Synthetic
cuuaugggugauaaaaagc

SEQ ID NO: 274065 - RNA, 20 nt, Artificial Sequence
  Synthetic
acuuaugggugauaaaaagc

SEQ ID NO: 274066 - RNA, 21 nt, Artificial Sequence
  Synthetic
aacuuaugggugauaaaaagc

SEQ ID NO: 274067 - RNA, 22 nt, Artificial Sequence
  Synthetic
aaacuuaugggugauaaaaagc

SEQ ID NO: 274068 - RNA, 23 nt, Artificial Sequence
  Synthetic
caaacuuaugggugauaaaaagc

SEQ ID NO: 274069 - RNA, 24 nt, Artificial Sequence
  Synthetic
ucaaacuuaugggugauaaaaagc

SEQ ID NO: 274070 - RNA, 18 nt, Artificial Sequence
  Synthetic
uaaccaauggacaaaagc

SEQ ID NO: 274071 - RNA, 19 nt, Artificial Sequence
  Synthetic
uuaaccaauggacaaaagc

SEQ ID NO: 274072 - RNA, 20 nt, Artificial Sequence
  Synthetic
cuuaaccaauggacaaaagc

SEQ ID NO: 274073 - RNA, 21 nt, Artificial Sequence
  Synthetic
acuuaaccaauggacaaaagc

SEQ ID NO: 274074 - RNA, 22 nt, Artificial Sequence
  Synthetic
cacuuaaccaauggacaaaagc

SEQ ID NO: 274075 - RNA, 23 nt, Artificial Sequence
  Synthetic
gcacuuaaccaauggacaaaagc

SEQ ID NO: 274076 - RNA, 24 nt, Artificial Sequence
  Synthetic
agcacuuaaccaauggacaaaagc

SEQ ID NO: 274077 - RNA, 18 nt, Artificial Sequence
  Synthetic
ccuuugugaaccaaaagc

SEQ ID NO: 274078 - RNA, 19 nt, Artificial Sequence
  Synthetic
uccuuugugaaccaaaagc

SEQ ID NO: 274079 - RNA, 20 nt, Artificial Sequence
  Synthetic
uuccuuugugaaccaaaagc

SEQ ID NO: 274080 - RNA, 21 nt, Artificial Sequence
  Synthetic
auuccuuugugaaccaaaagc

SEQ ID NO: 274081 - RNA, 22 nt, Artificial Sequence
  Synthetic
cauuccuuugugaaccaaaagc

SEQ ID NO: 274082 - RNA, 23 nt, Artificial Sequence
  Synthetic
gcauuccuuugugaaccaaaagc

SEQ ID NO: 274083 - RNA, 24 nt, Artificial Sequence
  Synthetic
agcauuccuuugugaaccaaaagc

SEQ ID NO: 274084 - RNA, 18 nt, Artificial Sequence
  Synthetic
gucuaaaacaccaaaagc

SEQ ID NO: 274085 - RNA, 19 nt, Artificial Sequence
  Synthetic
ugucuaaaacaccaaaagc

SEQ ID NO: 274086 - RNA, 20 nt, Artificial Sequence
  Synthetic
augucuaaaacaccaaaagc

SEQ ID NO: 274087 - RNA, 21 nt, Artificial Sequence
  Synthetic
caugucuaaaacaccaaaagc

SEQ ID NO: 274088 - RNA, 22 nt, Artificial Sequence
  Synthetic
ucaugucuaaaacaccaaaagc

SEQ ID NO: 274089 - RNA, 23 nt, Artificial Sequence
  Synthetic
uucaugucuaaaacaccaaaagc

SEQ ID NO: 274090 - RNA, 24 nt, Artificial Sequence
  Synthetic
cuucaugucuaaaacaccaaaagc

SEQ ID NO: 274091 - RNA, 18 nt, Artificial Sequence
  Synthetic
guauaaauagccaaaagc

SEQ ID NO: 274092 - RNA, 19 nt, Artificial Sequence
  Synthetic
aguauaaauagccaaaagc

SEQ ID NO: 274093 - RNA, 20 nt, Artificial Sequence
  Synthetic
caguauaaauagccaaaagc

SEQ ID NO: 274094 - RNA, 21 nt, Artificial Sequence
  Synthetic
gcaguauaaauagccaaaagc

SEQ ID NO: 274095 - RNA, 22 nt, Artificial Sequence
  Synthetic
agcaguauaaauagccaaaagc

SEQ ID NO: 274096 - RNA, 23 nt, Artificial Sequence
  Synthetic
aagcaguauaaauagccaaaagc

SEQ ID NO: 274097 - RNA, 24 nt, Artificial Sequence
  Synthetic
aaagcaguauaaauagccaaaagc

SEQ ID NO: 274098 - RNA, 18 nt, Artificial Sequence
  Synthetic
uacugaaugggcaaaagc

SEQ ID NO: 274099 - RNA, 19 nt, Artificial Sequence
  Synthetic
auacugaaugggcaaaagc

SEQ ID NO: 274100 - RNA, 20 nt, Artificial Sequence
  Synthetic
cauacugaaugggcaaaagc

SEQ ID NO: 274101 - RNA, 21 nt, Artificial Sequence
  Synthetic
ucauacugaaugggcaaaagc

SEQ ID NO: 274102 - RNA, 22 nt, Artificial Sequence
  Synthetic
aucauacugaaugggcaaaagc

SEQ ID NO: 274103 - RNA, 23 nt, Artificial Sequence
  Synthetic
uaucauacugaaugggcaaaagc

SEQ ID NO: 274104 - RNA, 24 nt, Artificial Sequence
  Synthetic
uuaucauacugaaugggcaaaagc

SEQ ID NO: 274105 - RNA, 18 nt, Artificial Sequence
  Synthetic
aaacacuuaaucaaaagc

SEQ ID NO: 274106 - RNA, 19 nt, Artificial Sequence
  Synthetic
aaaacacuuaaucaaaagc

SEQ ID NO: 274107 - RNA, 20 nt, Artificial Sequence
  Synthetic
uaaaacacuuaaucaaaagc

SEQ ID NO: 274108 - RNA, 21 nt, Artificial Sequence
  Synthetic
auaaaacacuuaaucaaaagc

SEQ ID NO: 274109 - RNA, 22 nt, Artificial Sequence
  Synthetic
aauaaaacacuuaaucaaaagc

SEQ ID NO: 274110 - RNA, 23 nt, Artificial Sequence
  Synthetic
aaauaaaacacuuaaucaaaagc

SEQ ID NO: 274111 - RNA, 24 nt, Artificial Sequence
  Synthetic
aaaauaaaacacuuaaucaaaagc

SEQ ID NO: 274112 - RNA, 18 nt, Artificial Sequence
  Synthetic
ucacuagccgucaaaagc

SEQ ID NO: 274113 - RNA, 19 nt, Artificial Sequence
  Synthetic
uucacuagccgucaaaagc

SEQ ID NO: 274114 - RNA, 20 nt, Artificial Sequence
  Synthetic
uuucacuagccgucaaaagc

SEQ ID NO: 274115 - RNA, 21 nt, Artificial Sequence
  Synthetic
uuuucacuagccgucaaaagc

SEQ ID NO: 274116 - RNA, 22 nt, Artificial Sequence
  Synthetic
auuuucacuagccgucaaaagc

SEQ ID NO: 274117 - RNA, 23 nt, Artificial Sequence
  Synthetic
uauuuucacuagccgucaaaagc

SEQ ID NO: 274118 - RNA, 24 nt, Artificial Sequence
  Synthetic
uuauuuucacuagccgucaaaagc

SEQ ID NO: 274119 - RNA, 18 nt, Artificial Sequence
  Synthetic
aucagaacuuucaaaagc

SEQ ID NO: 274120 - RNA, 19 nt, Artificial Sequence
  Synthetic
uaucagaacuuucaaaagc

SEQ ID NO: 274121 - RNA, 20 nt, Artificial Sequence
  Synthetic
auaucagaacuuucaaaagc

SEQ ID NO: 274122 - RNA, 21 nt, Artificial Sequence
  Synthetic
aauaucagaacuuucaaaagc

SEQ ID NO: 274123 - RNA, 22 nt, Artificial Sequence
  Synthetic
aaauaucagaacuuucaaaagc

SEQ ID NO: 274124 - RNA, 23 nt, Artificial Sequence
  Synthetic
uaaauaucagaacuuucaaaagc

SEQ ID NO: 274125 - RNA, 24 nt, Artificial Sequence
  Synthetic
cuaaauaucagaacuuucaaaagc

SEQ ID NO: 274126 - RNA, 18 nt, Artificial Sequence
  Synthetic
agcaacuaaaagaaaagc

SEQ ID NO: 274127 - RNA, 19 nt, Artificial Sequence
  Synthetic
cagcaacuaaaagaaaagc

SEQ ID NO: 274128 - RNA, 20 nt, Artificial Sequence
  Synthetic
gcagcaacuaaaagaaaagc

SEQ ID NO: 274129 - RNA, 21 nt, Artificial Sequence
  Synthetic
agcagcaacuaaaagaaaagc

SEQ ID NO: 274130 - RNA, 22 nt, Artificial Sequence
  Synthetic
gagcagcaacuaaaagaaaagc

SEQ ID NO: 274131 - RNA, 23 nt, Artificial Sequence
  Synthetic
agagcagcaacuaaaagaaaagc

SEQ ID NO: 274132 - RNA, 24 nt, Artificial Sequence
  Synthetic
aagagcagcaacuaaaagaaaagc

SEQ ID NO: 274133 - RNA, 18 nt, Artificial Sequence
  Synthetic
ugacaguggaagaaaagc

SEQ ID NO: 274134 - RNA, 19 nt, Artificial Sequence
  Synthetic
cugacaguggaagaaaagc

SEQ ID NO: 274135 - RNA, 20 nt, Artificial Sequence
  Synthetic
ucugacaguggaagaaaagc

SEQ ID NO: 274136 - RNA, 21 nt, Artificial Sequence
  Synthetic
cucugacaguggaagaaaagc

SEQ ID NO: 274137 - RNA, 22 nt, Artificial Sequence
  Synthetic
ucucugacaguggaagaaaagc

SEQ ID NO: 274138 - RNA, 23 nt, Artificial Sequence
  Synthetic
cucucugacaguggaagaaaagc

SEQ ID NO: 274139 - RNA, 24 nt, Artificial Sequence
  Synthetic
gcucucugacaguggaagaaaagc

SEQ ID NO: 274140 - RNA, 18 nt, Artificial Sequence
  Synthetic
gucagguaacagaaaagc

SEQ ID NO: 274141 - RNA, 19 nt, Artificial Sequence
  Synthetic
agucagguaacagaaaagc

SEQ ID NO: 274142 - RNA, 20 nt, Artificial Sequence
  Synthetic
uagucagguaacagaaaagc

SEQ ID NO: 274143 - RNA, 21 nt, Artificial Sequence
  Synthetic
guagucagguaacagaaaagc

SEQ ID NO: 274144 - RNA, 22 nt, Artificial Sequence
  Synthetic
gguagucagguaacagaaaagc

SEQ ID NO: 274145 - RNA, 23 nt, Artificial Sequence
  Synthetic
ggguagucagguaacagaaaagc

SEQ ID NO: 274146 - RNA, 24 nt, Artificial Sequence
  Synthetic
uggguagucagguaacagaaaagc

SEQ ID NO: 274147 - RNA, 18 nt, Artificial Sequence
  Synthetic
gugugaagguugaaaagc

SEQ ID NO: 274148 - RNA, 19 nt, Artificial Sequence
  Synthetic
agugugaagguugaaaagc

SEQ ID NO: 274149 - RNA, 20 nt, Artificial Sequence
  Synthetic
aagugugaagguugaaaagc

SEQ ID NO: 274150 - RNA, 21 nt, Artificial Sequence
  Synthetic
gaagugugaagguugaaaagc

SEQ ID NO: 274151 - RNA, 22 nt, Artificial Sequence
  Synthetic
ggaagugugaagguugaaaagc

SEQ ID NO: 274152 - RNA, 23 nt, Artificial Sequence
  Synthetic
cggaagugugaagguugaaaagc

SEQ ID NO: 274153 - RNA, 24 nt, Artificial Sequence
  Synthetic
ucggaagugugaagguugaaaagc

SEQ ID NO: 274154 - RNA, 18 nt, Artificial Sequence
  Synthetic
aucuguguuuugaaaagc

SEQ ID NO: 274155 - RNA, 19 nt, Artificial Sequence
  Synthetic
caucuguguuuugaaaagc

SEQ ID NO: 274156 - RNA, 20 nt, Artificial Sequence
  Synthetic
acaucuguguuuugaaaagc

SEQ ID NO: 274157 - RNA, 21 nt, Artificial Sequence
  Synthetic
gacaucuguguuuugaaaagc

SEQ ID NO: 274158 - RNA, 22 nt, Artificial Sequence
  Synthetic
agacaucuguguuuugaaaagc

SEQ ID NO: 274159 - RNA, 23 nt, Artificial Sequence
  Synthetic
aagacaucuguguuuugaaaagc

SEQ ID NO: 274160 - RNA, 24 nt, Artificial Sequence
  Synthetic
aaagacaucuguguuuugaaaagc

SEQ ID NO: 274161 - RNA, 18 nt, Artificial Sequence
  Synthetic
aaaagacauacuaaaagc

SEQ ID NO: 274162 - RNA, 19 nt, Artificial Sequence
  Synthetic
caaaagacauacuaaaagc

SEQ ID NO: 274163 - RNA, 20 nt, Artificial Sequence
  Synthetic
ccaaaagacauacuaaaagc

SEQ ID NO: 274164 - RNA, 21 nt, Artificial Sequence
  Synthetic
cccaaaagacauacuaaaagc

SEQ ID NO: 274165 - RNA, 22 nt, Artificial Sequence
  Synthetic
ucccaaaagacauacuaaaagc

SEQ ID NO: 274166 - RNA, 23 nt, Artificial Sequence
  Synthetic
cucccaaaagacauacuaaaagc

SEQ ID NO: 274167 - RNA, 24 nt, Artificial Sequence
  Synthetic
gcucccaaaagacauacuaaaagc

SEQ ID NO: 274168 - RNA, 18 nt, Artificial Sequence
  Synthetic
gugugugugccuaaaagc

SEQ ID NO: 274169 - RNA, 19 nt, Artificial Sequence
  Synthetic
ugugugugugccuaaaagc

SEQ ID NO: 274170 - RNA, 20 nt, Artificial Sequence
  Synthetic
gugugugugugccuaaaagc

SEQ ID NO: 274171 - RNA, 21 nt, Artificial Sequence
  Synthetic
agugugugugugccuaaaagc

SEQ ID NO: 274172 - RNA, 22 nt, Artificial Sequence
  Synthetic
gagugugugugugccuaaaagc

SEQ ID NO: 274173 - RNA, 23 nt, Artificial Sequence
  Synthetic
ugagugugugugugccuaaaagc

SEQ ID NO: 274174 - RNA, 24 nt, Artificial Sequence
  Synthetic
cugagugugugugugccuaaaagc

SEQ ID NO: 274175 - RNA, 18 nt, Artificial Sequence
  Synthetic
caggcaggcucuaaaagc

SEQ ID NO: 274176 - RNA, 19 nt, Artificial Sequence
  Synthetic
gcaggcaggcucuaaaagc

SEQ ID NO: 274177 - RNA, 20 nt, Artificial Sequence
  Synthetic
ugcaggcaggcucuaaaagc

SEQ ID NO: 274178 - RNA, 21 nt, Artificial Sequence
  Synthetic
augcaggcaggcucuaaaagc

SEQ ID NO: 274179 - RNA, 22 nt, Artificial Sequence
  Synthetic
aaugcaggcaggcucuaaaagc

SEQ ID NO: 274180 - RNA, 23 nt, Artificial Sequence
  Synthetic
aaaugcaggcaggcucuaaaagc

SEQ ID NO: 274181 - RNA, 24 nt, Artificial Sequence
  Synthetic
gaaaugcaggcaggcucuaaaagc

SEQ ID NO: 274182 - RNA, 18 nt, Artificial Sequence
  Synthetic
auuuucauuauuaaaagc

SEQ ID NO: 274183 - RNA, 19 nt, Artificial Sequence
  Synthetic
aauuuucauuauuaaaagc

SEQ ID NO: 274184 - RNA, 20 nt, Artificial Sequence
  Synthetic
aaauuuucauuauuaaaagc

SEQ ID NO: 274185 - RNA, 21 nt, Artificial Sequence
  Synthetic
gaaauuuucauuauuaaaagc

SEQ ID NO: 274186 - RNA, 22 nt, Artificial Sequence
  Synthetic
ugaaauuuucauuauuaaaagc

SEQ ID NO: 274187 - RNA, 23 nt, Artificial Sequence
  Synthetic
augaaauuuucauuauuaaaagc

SEQ ID NO: 274188 - RNA, 24 nt, Artificial Sequence
  Synthetic
aaugaaauuuucauuauuaaaagc

SEQ ID NO: 274189 - RNA, 18 nt, Artificial Sequence
  Synthetic
acguggcuaaaacaaagc

SEQ ID NO: 274190 - RNA, 19 nt, Artificial Sequence
  Synthetic
uacguggcuaaaacaaagc

SEQ ID NO: 274191 - RNA, 20 nt, Artificial Sequence
  Synthetic
cuacguggcuaaaacaaagc

SEQ ID NO: 274192 - RNA, 21 nt, Artificial Sequence
  Synthetic
ucuacguggcuaaaacaaagc

SEQ ID NO: 274193 - RNA, 22 nt, Artificial Sequence
  Synthetic
gucuacguggcuaaaacaaagc

SEQ ID NO: 274194 - RNA, 23 nt, Artificial Sequence
  Synthetic
ugucuacguggcuaaaacaaagc

SEQ ID NO: 274195 - RNA, 24 nt, Artificial Sequence
  Synthetic
uugucuacguggcuaaaacaaagc

SEQ ID NO: 274196 - RNA, 18 nt, Artificial Sequence
  Synthetic
uauaaauaucaacaaagc

SEQ ID NO: 274197 - RNA, 19 nt, Artificial Sequence
  Synthetic
uuauaaauaucaacaaagc

SEQ ID NO: 274198 - RNA, 20 nt, Artificial Sequence
  Synthetic
cuuauaaauaucaacaaagc

SEQ ID NO: 274199 - RNA, 21 nt, Artificial Sequence
  Synthetic
ccuuauaaauaucaacaaagc

SEQ ID NO: 274200 - RNA, 22 nt, Artificial Sequence
  Synthetic
accuuauaaauaucaacaaagc

SEQ ID NO: 274201 - RNA, 23 nt, Artificial Sequence
  Synthetic
gaccuuauaaauaucaacaaagc

SEQ ID NO: 274202 - RNA, 24 nt, Artificial Sequence
  Synthetic
agaccuuauaaauaucaacaaagc

SEQ ID NO: 274203 - RNA, 18 nt, Artificial Sequence
  Synthetic
acauucauucaacaaagc

SEQ ID NO: 274204 - RNA, 19 nt, Artificial Sequence
  Synthetic
cacauucauucaacaaagc

SEQ ID NO: 274205 - RNA, 20 nt, Artificial Sequence
  Synthetic
ccacauucauucaacaaagc

SEQ ID NO: 274206 - RNA, 21 nt, Artificial Sequence
  Synthetic
cccacauucauucaacaaagc

SEQ ID NO: 274207 - RNA, 22 nt, Artificial Sequence
  Synthetic
acccacauucauucaacaaagc

SEQ ID NO: 274208 - RNA, 23 nt, Artificial Sequence
  Synthetic
uacccacauucauucaacaaagc

SEQ ID NO: 274209 - RNA, 24 nt, Artificial Sequence
  Synthetic
uuacccacauucauucaacaaagc

SEQ ID NO: 274210 - RNA, 18 nt, Artificial Sequence
  Synthetic
aagcaaaaagaacaaagc

SEQ ID NO: 274211 - RNA, 19 nt, Artificial Sequence
  Synthetic
uaagcaaaaagaacaaagc

SEQ ID NO: 274212 - RNA, 20 nt, Artificial Sequence
  Synthetic
cuaagcaaaaagaacaaagc

SEQ ID NO: 274213 - RNA, 21 nt, Artificial Sequence
  Synthetic
ccuaagcaaaaagaacaaagc

SEQ ID NO: 274214 - RNA, 22 nt, Artificial Sequence
  Synthetic
uccuaagcaaaaagaacaaagc

SEQ ID NO: 274215 - RNA, 23 nt, Artificial Sequence
  Synthetic
auccuaagcaaaaagaacaaagc

SEQ ID NO: 274216 - RNA, 24 nt, Artificial Sequence
  Synthetic
aauccuaagcaaaaagaacaaagc

SEQ ID NO: 274217 - RNA, 18 nt, Artificial Sequence
  Synthetic
aagccaaaagaacaaagc

SEQ ID NO: 274218 - RNA, 19 nt, Artificial Sequence
  Synthetic
uaagccaaaagaacaaagc

SEQ ID NO: 274219 - RNA, 20 nt, Artificial Sequence
  Synthetic
cuaagccaaaagaacaaagc

SEQ ID NO: 274220 - RNA, 18 nt, Artificial Sequence
  Synthetic
gagccaaaagaacaaagc

SEQ ID NO: 274221 - RNA, 19 nt, Artificial Sequence
  Synthetic
ugagccaaaagaacaaagc

SEQ ID NO: 274222 - RNA, 20 nt, Artificial Sequence
  Synthetic
cugagccaaaagaacaaagc

SEQ ID NO: 274223 - RNA, 21 nt, Artificial Sequence
  Synthetic
ccugagccaaaagaacaaagc

SEQ ID NO: 274224 - RNA, 22 nt, Artificial Sequence
  Synthetic
uccugagccaaaagaacaaagc

SEQ ID NO: 274225 - RNA, 23 nt, Artificial Sequence
  Synthetic
auccugagccaaaagaacaaagc

SEQ ID NO: 274226 - RNA, 24 nt, Artificial Sequence
  Synthetic
aauccugagccaaaagaacaaagc

SEQ ID NO: 274227 - RNA, 18 nt, Artificial Sequence
  Synthetic
ccauacggcccacaaagc

SEQ ID NO: 274228 - RNA, 19 nt, Artificial Sequence
  Synthetic
accauacggcccacaaagc

SEQ ID NO: 274229 - RNA, 20 nt, Artificial Sequence
  Synthetic
aaccauacggcccacaaagc

SEQ ID NO: 274230 - RNA, 21 nt, Artificial Sequence
  Synthetic
aaaccauacggcccacaaagc

SEQ ID NO: 274231 - RNA, 22 nt, Artificial Sequence
  Synthetic
aaaaccauacggcccacaaagc

SEQ ID NO: 274232 - RNA, 23 nt, Artificial Sequence
  Synthetic
aaaaaccauacggcccacaaagc

SEQ ID NO: 274233 - RNA, 24 nt, Artificial Sequence
  Synthetic
caaaaaccauacggcccacaaagc

SEQ ID NO: 274234 - RNA, 18 nt, Artificial Sequence
  Synthetic
aaaucaaugccacaaagc

SEQ ID NO: 274235 - RNA, 19 nt, Artificial Sequence
  Synthetic
caaaucaaugccacaaagc

SEQ ID NO: 274236 - RNA, 20 nt, Artificial Sequence
  Synthetic
ucaaaucaaugccacaaagc

SEQ ID NO: 274237 - RNA, 21 nt, Artificial Sequence
  Synthetic
aucaaaucaaugccacaaagc

SEQ ID NO: 274238 - RNA, 22 nt, Artificial Sequence
  Synthetic
uaucaaaucaaugccacaaagc

SEQ ID NO: 274239 - RNA, 23 nt, Artificial Sequence
  Synthetic
uuaucaaaucaaugccacaaagc

SEQ ID NO: 274240 - RNA, 24 nt, Artificial Sequence
  Synthetic
cuuaucaaaucaaugccacaaagc

SEQ ID NO: 274241 - RNA, 18 nt, Artificial Sequence
  Synthetic
uauuuugaccuacaaagc

SEQ ID NO: 274242 - RNA, 19 nt, Artificial Sequence
  Synthetic
guauuuugaccuacaaagc

SEQ ID NO: 274243 - RNA, 20 nt, Artificial Sequence
  Synthetic
aguauuuugaccuacaaagc

SEQ ID NO: 274244 - RNA, 21 nt, Artificial Sequence
  Synthetic
aaguauuuugaccuacaaagc

SEQ ID NO: 274245 - RNA, 22 nt, Artificial Sequence
  Synthetic
aaaguauuuugaccuacaaagc

SEQ ID NO: 274246 - RNA, 23 nt, Artificial Sequence
  Synthetic
uaaaguauuuugaccuacaaagc

SEQ ID NO: 274247 - RNA, 24 nt, Artificial Sequence
  Synthetic
auaaaguauuuugaccuacaaagc

SEQ ID NO: 274248 - RNA, 18 nt, Artificial Sequence
  Synthetic
cguggcaguugccaaagc

SEQ ID NO: 274249 - RNA, 19 nt, Artificial Sequence
  Synthetic
acguggcaguugccaaagc

SEQ ID NO: 274250 - RNA, 20 nt, Artificial Sequence
  Synthetic
cacguggcaguugccaaagc

SEQ ID NO: 274251 - RNA, 21 nt, Artificial Sequence
  Synthetic
ccacguggcaguugccaaagc

SEQ ID NO: 274252 - RNA, 22 nt, Artificial Sequence
  Synthetic
accacguggcaguugccaaagc

SEQ ID NO: 274253 - RNA, 23 nt, Artificial Sequence
  Synthetic
caccacguggcaguugccaaagc

SEQ ID NO: 274254 - RNA, 24 nt, Artificial Sequence
  Synthetic
acaccacguggcaguugccaaagc

SEQ ID NO: 274255 - RNA, 18 nt, Artificial Sequence
  Synthetic
uauauguaauaucaaagc

SEQ ID NO: 274256 - RNA, 19 nt, Artificial Sequence
  Synthetic
uuauauguaauaucaaagc

SEQ ID NO: 274257 - RNA, 20 nt, Artificial Sequence
  Synthetic
auuauauguaauaucaaagc

SEQ ID NO: 274258 - RNA, 21 nt, Artificial Sequence
  Synthetic
aauuauauguaauaucaaagc

SEQ ID NO: 274259 - RNA, 22 nt, Artificial Sequence
  Synthetic
uaauuauauguaauaucaaagc

SEQ ID NO: 274260 - RNA, 23 nt, Artificial Sequence
  Synthetic
auaauuauauguaauaucaaagc

SEQ ID NO: 274261 - RNA, 24 nt, Artificial Sequence
  Synthetic
cauaauuauauguaauaucaaagc

SEQ ID NO: 274262 - RNA, 18 nt, Artificial Sequence
  Synthetic
uuaauaugauaucaaagc

SEQ ID NO: 274263 - RNA, 19 nt, Artificial Sequence
  Synthetic
auuaauaugauaucaaagc

SEQ ID NO: 274264 - RNA, 20 nt, Artificial Sequence
  Synthetic
cauuaauaugauaucaaagc

SEQ ID NO: 274265 - RNA, 21 nt, Artificial Sequence
  Synthetic
acauuaauaugauaucaaagc

SEQ ID NO: 274266 - RNA, 22 nt, Artificial Sequence
  Synthetic
uacauuaauaugauaucaaagc

SEQ ID NO: 274267 - RNA, 23 nt, Artificial Sequence
  Synthetic
guacauuaauaugauaucaaagc

SEQ ID NO: 274268 - RNA, 24 nt, Artificial Sequence
  Synthetic
aguacauuaauaugauaucaaagc

SEQ ID NO: 274269 - RNA, 18 nt, Artificial Sequence
  Synthetic
caugacauaaaagaaagc

SEQ ID NO: 274270 - RNA, 19 nt, Artificial Sequence
  Synthetic
ccaugacauaaaagaaagc

SEQ ID NO: 274271 - RNA, 20 nt, Artificial Sequence
  Synthetic
uccaugacauaaaagaaagc

SEQ ID NO: 274272 - RNA, 21 nt, Artificial Sequence
  Synthetic
uuccaugacauaaaagaaagc

SEQ ID NO: 274273 - RNA, 22 nt, Artificial Sequence
  Synthetic
cuuccaugacauaaaagaaagc

SEQ ID NO: 274274 - RNA, 23 nt, Artificial Sequence
  Synthetic
ucuuccaugacauaaaagaaagc

SEQ ID NO: 274275 - RNA, 24 nt, Artificial Sequence
  Synthetic
aucuuccaugacauaaaagaaagc

SEQ ID NO: 274276 - RNA, 18 nt, Artificial Sequence
  Synthetic
ucaauaaaagaagaaagc

SEQ ID NO: 274277 - RNA, 19 nt, Artificial Sequence
  Synthetic
uucaauaaaagaagaaagc

SEQ ID NO: 274278 - RNA, 20 nt, Artificial Sequence
  Synthetic
cuucaauaaaagaagaaagc

SEQ ID NO: 274279 - RNA, 21 nt, Artificial Sequence
  Synthetic
ucuucaauaaaagaagaaagc

SEQ ID NO: 274280 - RNA, 22 nt, Artificial Sequence
  Synthetic
aucuucaauaaaagaagaaagc

SEQ ID NO: 274281 - RNA, 23 nt, Artificial Sequence
  Synthetic
caucuucaauaaaagaagaaagc

SEQ ID NO: 274282 - RNA, 24 nt, Artificial Sequence
  Synthetic
ccaucuucaauaaaagaagaaagc

SEQ ID NO: 274283 - RNA, 18 nt, Artificial Sequence
  Synthetic
ucgagguaugaagaaagc

SEQ ID NO: 274284 - RNA, 19 nt, Artificial Sequence
  Synthetic
aucgagguaugaagaaagc

SEQ ID NO: 274285 - RNA, 20 nt, Artificial Sequence
  Synthetic
caucgagguaugaagaaagc

SEQ ID NO: 274286 - RNA, 21 nt, Artificial Sequence
  Synthetic
ccaucgagguaugaagaaagc

SEQ ID NO: 274287 - RNA, 22 nt, Artificial Sequence
  Synthetic
accaucgagguaugaagaaagc

SEQ ID NO: 274288 - RNA, 23 nt, Artificial Sequence
  Synthetic
aaccaucgagguaugaagaaagc

SEQ ID NO: 274289 - RNA, 24 nt, Artificial Sequence
  Synthetic
aaaccaucgagguaugaagaaagc

SEQ ID NO: 274290 - RNA, 18 nt, Artificial Sequence
  Synthetic
gaaugaggaagagaaagc

SEQ ID NO: 274291 - RNA, 19 nt, Artificial Sequence
  Synthetic
agaaugaggaagagaaagc

SEQ ID NO: 274292 - RNA, 20 nt, Artificial Sequence
  Synthetic
cagaaugaggaagagaaagc

SEQ ID NO: 274293 - RNA, 21 nt, Artificial Sequence
  Synthetic
ucagaaugaggaagagaaagc

SEQ ID NO: 274294 - RNA, 22 nt, Artificial Sequence
  Synthetic
uucagaaugaggaagagaaagc

SEQ ID NO: 274295 - RNA, 23 nt, Artificial Sequence
  Synthetic
uuucagaaugaggaagagaaagc

SEQ ID NO: 274296 - RNA, 24 nt, Artificial Sequence
  Synthetic
guuucagaaugaggaagagaaagc

SEQ ID NO: 274297 - RNA, 18 nt, Artificial Sequence
  Synthetic
auccccacaggagaaagc

SEQ ID NO: 274298 - RNA, 19 nt, Artificial Sequence
  Synthetic
aauccccacaggagaaagc

SEQ ID NO: 274299 - RNA, 20 nt, Artificial Sequence
  Synthetic
aaauccccacaggagaaagc

SEQ ID NO: 274300 - RNA, 21 nt, Artificial Sequence
  Synthetic
aaaauccccacaggagaaagc

SEQ ID NO: 274301 - RNA, 22 nt, Artificial Sequence
  Synthetic
uaaaauccccacaggagaaagc

SEQ ID NO: 274302 - RNA, 23 nt, Artificial Sequence
  Synthetic
uuaaaauccccacaggagaaagc

SEQ ID NO: 274303 - RNA, 24 nt, Artificial Sequence
  Synthetic
auuaaaauccccacaggagaaagc

SEQ ID NO: 274304 - RNA, 18 nt, Artificial Sequence
  Synthetic
aauuaaaaguacgaaagc

SEQ ID NO: 274305 - RNA, 19 nt, Artificial Sequence
  Synthetic
uaauuaaaaguacgaaagc

SEQ ID NO: 274306 - RNA, 20 nt, Artificial Sequence
  Synthetic
guaauuaaaaguacgaaagc

SEQ ID NO: 274307 - RNA, 21 nt, Artificial Sequence
  Synthetic
gguaauuaaaaguacgaaagc

SEQ ID NO: 274308 - RNA, 22 nt, Artificial Sequence
  Synthetic
ugguaauuaaaaguacgaaagc

SEQ ID NO: 274309 - RNA, 23 nt, Artificial Sequence
  Synthetic
cugguaauuaaaaguacgaaagc

SEQ ID NO: 274310 - RNA, 24 nt, Artificial Sequence
  Synthetic
ccugguaauuaaaaguacgaaagc

SEQ ID NO: 274311 - RNA, 18 nt, Artificial Sequence
  Synthetic
gaugcaaacaaggaaagc

SEQ ID NO: 274312 - RNA, 19 nt, Artificial Sequence
  Synthetic
ugaugcaaacaaggaaagc

SEQ ID NO: 274313 - RNA, 20 nt, Artificial Sequence
  Synthetic
gugaugcaaacaaggaaagc

SEQ ID NO: 274314 - RNA, 21 nt, Artificial Sequence
  Synthetic
ggugaugcaaacaaggaaagc

SEQ ID NO: 274315 - RNA, 22 nt, Artificial Sequence
  Synthetic
uggugaugcaaacaaggaaagc

SEQ ID NO: 274316 - RNA, 23 nt, Artificial Sequence
  Synthetic
guggugaugcaaacaaggaaagc

SEQ ID NO: 274317 - RNA, 24 nt, Artificial Sequence
  Synthetic
uguggugaugcaaacaaggaaagc

SEQ ID NO: 274318 - RNA, 18 nt, Artificial Sequence
  Synthetic
gaagagaggaaggaaagc

SEQ ID NO: 274319 - RNA, 19 nt, Artificial Sequence
  Synthetic
ggaagagaggaaggaaagc

SEQ ID NO: 274320 - RNA, 20 nt, Artificial Sequence
  Synthetic
aggaagagaggaaggaaagc

SEQ ID NO: 274321 - RNA, 21 nt, Artificial Sequence
  Synthetic
aaggaagagaggaaggaaagc

SEQ ID NO: 274322 - RNA, 22 nt, Artificial Sequence
  Synthetic
gaaggaagagaggaaggaaagc

SEQ ID NO: 274323 - RNA, 23 nt, Artificial Sequence
  Synthetic
agaaggaagagaggaaggaaagc

SEQ ID NO: 274324 - RNA, 24 nt, Artificial Sequence
  Synthetic
aagaaggaagagaggaaggaaagc

SEQ ID NO: 274325 - RNA, 18 nt, Artificial Sequence
  Synthetic
uggaaucaauaggaaagc

SEQ ID NO: 274326 - RNA, 19 nt, Artificial Sequence
  Synthetic
auggaaucaauaggaaagc

SEQ ID NO: 274327 - RNA, 20 nt, Artificial Sequence
  Synthetic
cauggaaucaauaggaaagc

SEQ ID NO: 274328 - RNA, 21 nt, Artificial Sequence
  Synthetic
ucauggaaucaauaggaaagc

SEQ ID NO: 274329 - RNA, 22 nt, Artificial Sequence
  Synthetic
cucauggaaucaauaggaaagc

SEQ ID NO: 274330 - RNA, 23 nt, Artificial Sequence
  Synthetic
ccucauggaaucaauaggaaagc

SEQ ID NO: 274331 - RNA, 24 nt, Artificial Sequence
  Synthetic
accucauggaaucaauaggaaagc

SEQ ID NO: 274332 - RNA, 18 nt, Artificial Sequence
  Synthetic
ccaagacacugggaaagc

SEQ ID NO: 274333 - RNA, 19 nt, Artificial Sequence
  Synthetic
accaagacacugggaaagc

SEQ ID NO: 274334 - RNA, 20 nt, Artificial Sequence
  Synthetic
aaccaagacacugggaaagc

SEQ ID NO: 274335 - RNA, 21 nt, Artificial Sequence
  Synthetic
caaccaagacacugggaaagc

SEQ ID NO: 274336 - RNA, 22 nt, Artificial Sequence
  Synthetic
ucaaccaagacacugggaaagc

SEQ ID NO: 274337 - RNA, 23 nt, Artificial Sequence
  Synthetic
aucaaccaagacacugggaaagc

SEQ ID NO: 274338 - RNA, 24 nt, Artificial Sequence
  Synthetic
uaucaaccaagacacugggaaagc

SEQ ID NO: 274339 - RNA, 18 nt, Artificial Sequence
  Synthetic
auugugucauuggaaagc

SEQ ID NO: 274340 - RNA, 19 nt, Artificial Sequence
  Synthetic
aauugugucauuggaaagc

SEQ ID NO: 274341 - RNA, 20 nt, Artificial Sequence
  Synthetic
uaauugugucauuggaaagc

SEQ ID NO: 274342 - RNA, 21 nt, Artificial Sequence
  Synthetic
uuaauugugucauuggaaagc

SEQ ID NO: 274343 - RNA, 22 nt, Artificial Sequence
  Synthetic
uuuaauugugucauuggaaagc

SEQ ID NO: 274344 - RNA, 23 nt, Artificial Sequence
  Synthetic
uuuuaauugugucauuggaaagc

SEQ ID NO: 274345 - RNA, 24 nt, Artificial Sequence
  Synthetic
guuuuaauugugucauuggaaagc

SEQ ID NO: 274346 - RNA, 18 nt, Artificial Sequence
  Synthetic
aaaaugaagaaugaaagc

SEQ ID NO: 274347 - RNA, 19 nt, Artificial Sequence
  Synthetic
caaaaugaagaaugaaagc

SEQ ID NO: 274348 - RNA, 20 nt, Artificial Sequence
  Synthetic
ccaaaaugaagaaugaaagc

SEQ ID NO: 274349 - RNA, 21 nt, Artificial Sequence
  Synthetic
cccaaaaugaagaaugaaagc

SEQ ID NO: 274350 - RNA, 22 nt, Artificial Sequence
  Synthetic
ucccaaaaugaagaaugaaagc

SEQ ID NO: 274351 - RNA, 23 nt, Artificial Sequence
  Synthetic
gucccaaaaugaagaaugaaagc

SEQ ID NO: 274352 - RNA, 24 nt, Artificial Sequence
  Synthetic
agucccaaaaugaagaaugaaagc

SEQ ID NO: 274353 - RNA, 18 nt, Artificial Sequence
  Synthetic
aguaucucauaugaaagc

SEQ ID NO: 274354 - RNA, 19 nt, Artificial Sequence
  Synthetic
aaguaucucauaugaaagc

SEQ ID NO: 274355 - RNA, 20 nt, Artificial Sequence
  Synthetic
aaaguaucucauaugaaagc

SEQ ID NO: 274356 - RNA, 21 nt, Artificial Sequence
  Synthetic
uaaaguaucucauaugaaagc

SEQ ID NO: 274357 - RNA, 22 nt, Artificial Sequence
  Synthetic
uuaaaguaucucauaugaaagc

SEQ ID NO: 274358 - RNA, 23 nt, Artificial Sequence
  Synthetic
cuuaaaguaucucauaugaaagc

SEQ ID NO: 274359 - RNA, 24 nt, Artificial Sequence
  Synthetic
ccuuaaaguaucucauaugaaagc

SEQ ID NO: 274360 - RNA, 18 nt, Artificial Sequence
  Synthetic
aguaacuauagugaaagc

SEQ ID NO: 274361 - RNA, 19 nt, Artificial Sequence
  Synthetic
aaguaacuauagugaaagc

SEQ ID NO: 274362 - RNA, 20 nt, Artificial Sequence
  Synthetic
uaaguaacuauagugaaagc

SEQ ID NO: 274363 - RNA, 21 nt, Artificial Sequence
  Synthetic
auaaguaacuauagugaaagc

SEQ ID NO: 274364 - RNA, 22 nt, Artificial Sequence
  Synthetic
cauaaguaacuauagugaaagc

SEQ ID NO: 274365 - RNA, 23 nt, Artificial Sequence
  Synthetic
ccauaaguaacuauagugaaagc

SEQ ID NO: 274366 - RNA, 24 nt, Artificial Sequence
  Synthetic
cccauaaguaacuauagugaaagc

SEQ ID NO: 274367 - RNA, 18 nt, Artificial Sequence
  Synthetic
agcuuugccuuugaaagc

SEQ ID NO: 274368 - RNA, 19 nt, Artificial Sequence
  Synthetic
gagcuuugccuuugaaagc

SEQ ID NO: 274369 - RNA, 20 nt, Artificial Sequence
  Synthetic
agagcuuugccuuugaaagc

SEQ ID NO: 274370 - RNA, 21 nt, Artificial Sequence
  Synthetic
cagagcuuugccuuugaaagc

SEQ ID NO: 274371 - RNA, 22 nt, Artificial Sequence
  Synthetic
ucagagcuuugccuuugaaagc

SEQ ID NO: 274372 - RNA, 23 nt, Artificial Sequence
  Synthetic
aucagagcuuugccuuugaaagc

SEQ ID NO: 274373 - RNA, 24 nt, Artificial Sequence
  Synthetic
aaucagagcuuugccuuugaaagc

SEQ ID NO: 274374 - RNA, 18 nt, Artificial Sequence
  Synthetic
aacuuaaugaaauaaagc

SEQ ID NO: 274375 - RNA, 19 nt, Artificial Sequence
  Synthetic
caacuuaaugaaauaaagc

SEQ ID NO: 274376 - RNA, 20 nt, Artificial Sequence
  Synthetic
ucaacuuaaugaaauaaagc

SEQ ID NO: 274377 - RNA, 21 nt, Artificial Sequence
  Synthetic
aucaacuuaaugaaauaaagc

SEQ ID NO: 274378 - RNA, 22 nt, Artificial Sequence
  Synthetic
gaucaacuuaaugaaauaaagc

SEQ ID NO: 274379 - RNA, 23 nt, Artificial Sequence
  Synthetic
agaucaacuuaaugaaauaaagc

SEQ ID NO: 274380 - RNA, 24 nt, Artificial Sequence
  Synthetic
aagaucaacuuaaugaaauaaagc

SEQ ID NO: 274381 - RNA, 18 nt, Artificial Sequence
  Synthetic
gagaaaauuaaauaaagc

SEQ ID NO: 274382 - RNA, 19 nt, Artificial Sequence
  Synthetic
ggagaaaauuaaauaaagc

SEQ ID NO: 274383 - RNA, 20 nt, Artificial Sequence
  Synthetic
aggagaaaauuaaauaaagc

SEQ ID NO: 274384 - RNA, 21 nt, Artificial Sequence
  Synthetic
aaggagaaaauuaaauaaagc

SEQ ID NO: 274385 - RNA, 22 nt, Artificial Sequence
  Synthetic
aaaggagaaaauuaaauaaagc

SEQ ID NO: 274386 - RNA, 23 nt, Artificial Sequence
  Synthetic
aaaaggagaaaauuaaauaaagc

SEQ ID NO: 274387 - RNA, 24 nt, Artificial Sequence
  Synthetic
aaaaaggagaaaauuaaauaaagc

SEQ ID NO: 274388 - RNA, 18 nt, Artificial Sequence
  Synthetic
cagacacuacaauaaagc

SEQ ID NO: 274389 - RNA, 19 nt, Artificial Sequence
  Synthetic
ccagacacuacaauaaagc

SEQ ID NO: 274390 - RNA, 20 nt, Artificial Sequence
  Synthetic
uccagacacuacaauaaagc

SEQ ID NO: 274391 - RNA, 21 nt, Artificial Sequence
  Synthetic
uuccagacacuacaauaaagc

SEQ ID NO: 274392 - RNA, 22 nt, Artificial Sequence
  Synthetic
guuccagacacuacaauaaagc

SEQ ID NO: 274393 - RNA, 23 nt, Artificial Sequence
  Synthetic
aguuccagacacuacaauaaagc

SEQ ID NO: 274394 - RNA, 24 nt, Artificial Sequence
  Synthetic
aaguuccagacacuacaauaaagc

SEQ ID NO: 274395 - RNA, 18 nt, Artificial Sequence
  Synthetic
aagggacauggauaaagc

SEQ ID NO: 274396 - RNA, 19 nt, Artificial Sequence
  Synthetic
gaagggacauggauaaagc

SEQ ID NO: 274397 - RNA, 20 nt, Artificial Sequence
  Synthetic
ugaagggacauggauaaagc

SEQ ID NO: 274398 - RNA, 21 nt, Artificial Sequence
  Synthetic
uugaagggacauggauaaagc

SEQ ID NO: 274399 - RNA, 22 nt, Artificial Sequence
  Synthetic
uuugaagggacauggauaaagc

SEQ ID NO: 274400 - RNA, 23 nt, Artificial Sequence
  Synthetic
cuuugaagggacauggauaaagc

SEQ ID NO: 274401 - RNA, 24 nt, Artificial Sequence
  Synthetic
ccuuugaagggacauggauaaagc

SEQ ID NO: 274402 - RNA, 18 nt, Artificial Sequence
  Synthetic
caugauaacauauaaagc

SEQ ID NO: 274403 - RNA, 19 nt, Artificial Sequence
  Synthetic
ccaugauaacauauaaagc

SEQ ID NO: 274404 - RNA, 20 nt, Artificial Sequence
  Synthetic
uccaugauaacauauaaagc

SEQ ID NO: 274405 - RNA, 21 nt, Artificial Sequence
  Synthetic
guccaugauaacauauaaagc

SEQ ID NO: 274406 - RNA, 22 nt, Artificial Sequence
  Synthetic
aguccaugauaacauauaaagc

SEQ ID NO: 274407 - RNA, 23 nt, Artificial Sequence
  Synthetic
gaguccaugauaacauauaaagc

SEQ ID NO: 274408 - RNA, 24 nt, Artificial Sequence
  Synthetic
agaguccaugauaacauauaaagc

SEQ ID NO: 274409 - RNA, 18 nt, Artificial Sequence
  Synthetic
acuauuguuuuauaaagc

SEQ ID NO: 274410 - RNA, 19 nt, Artificial Sequence
  Synthetic
uacuauuguuuuauaaagc

SEQ ID NO: 274411 - RNA, 20 nt, Artificial Sequence
  Synthetic
guacuauuguuuuauaaagc

SEQ ID NO: 274412 - RNA, 21 nt, Artificial Sequence
  Synthetic
aguacuauuguuuuauaaagc

SEQ ID NO: 274413 - RNA, 22 nt, Artificial Sequence
  Synthetic
uaguacuauuguuuuauaaagc

SEQ ID NO: 274414 - RNA, 23 nt, Artificial Sequence
  Synthetic
cuaguacuauuguuuuauaaagc

SEQ ID NO: 274415 - RNA, 24 nt, Artificial Sequence
  Synthetic
ucuaguacuauuguuuuauaaagc

SEQ ID NO: 274416 - RNA, 18 nt, Artificial Sequence
  Synthetic
ugaauuaaccacuaaagc

SEQ ID NO: 274417 - RNA, 19 nt, Artificial Sequence
  Synthetic
uugaauuaaccacuaaagc

SEQ ID NO: 274418 - RNA, 20 nt, Artificial Sequence
  Synthetic
uuugaauuaaccacuaaagc

SEQ ID NO: 274419 - RNA, 21 nt, Artificial Sequence
  Synthetic
cuuugaauuaaccacuaaagc

SEQ ID NO: 274420 - RNA, 22 nt, Artificial Sequence
  Synthetic
ucuuugaauuaaccacuaaagc

SEQ ID NO: 274421 - RNA, 23 nt, Artificial Sequence
  Synthetic
aucuuugaauuaaccacuaaagc

SEQ ID NO: 274422 - RNA, 24 nt, Artificial Sequence
  Synthetic
caucuuugaauuaaccacuaaagc

SEQ ID NO: 274423 - RNA, 18 nt, Artificial Sequence
  Synthetic
cugccugauagcuaaagc

SEQ ID NO: 274424 - RNA, 19 nt, Artificial Sequence
  Synthetic
ccugccugauagcuaaagc

SEQ ID NO: 274425 - RNA, 20 nt, Artificial Sequence
  Synthetic
uccugccugauagcuaaagc

SEQ ID NO: 274426 - RNA, 21 nt, Artificial Sequence
  Synthetic
cuccugccugauagcuaaagc

SEQ ID NO: 274427 - RNA, 22 nt, Artificial Sequence
  Synthetic
acuccugccugauagcuaaagc

SEQ ID NO: 274428 - RNA, 23 nt, Artificial Sequence
  Synthetic
aacuccugccugauagcuaaagc

SEQ ID NO: 274429 - RNA, 24 nt, Artificial Sequence
  Synthetic
gaacuccugccugauagcuaaagc

SEQ ID NO: 274430 - RNA, 18 nt, Artificial Sequence
  Synthetic
acugugggaggcuaaagc

SEQ ID NO: 274431 - RNA, 19 nt, Artificial Sequence
  Synthetic
aacugugggaggcuaaagc

SEQ ID NO: 274432 - RNA, 20 nt, Artificial Sequence
  Synthetic
gaacugugggaggcuaaagc

SEQ ID NO: 274433 - RNA, 21 nt, Artificial Sequence
  Synthetic
agaacugugggaggcuaaagc

SEQ ID NO: 274434 - RNA, 22 nt, Artificial Sequence
  Synthetic
cagaacugugggaggcuaaagc

SEQ ID NO: 274435 - RNA, 23 nt, Artificial Sequence
  Synthetic
ccagaacugugggaggcuaaagc

SEQ ID NO: 274436 - RNA, 24 nt, Artificial Sequence
  Synthetic
cccagaacugugggaggcuaaagc

SEQ ID NO: 274437 - RNA, 18 nt, Artificial Sequence
  Synthetic
cagggauggggcuaaagc

SEQ ID NO: 274438 - RNA, 19 nt, Artificial Sequence
  Synthetic
gcagggauggggcuaaagc

SEQ ID NO: 274439 - RNA, 20 nt, Artificial Sequence
  Synthetic
agcagggauggggcuaaagc

SEQ ID NO: 274440 - RNA, 21 nt, Artificial Sequence
  Synthetic
uagcagggauggggcuaaagc

SEQ ID NO: 274441 - RNA, 22 nt, Artificial Sequence
  Synthetic
cuagcagggauggggcuaaagc

SEQ ID NO: 274442 - RNA, 23 nt, Artificial Sequence
  Synthetic
ucuagcagggauggggcuaaagc

SEQ ID NO: 274443 - RNA, 24 nt, Artificial Sequence
  Synthetic
uucuagcagggauggggcuaaagc

SEQ ID NO: 274444 - RNA, 18 nt, Artificial Sequence
  Synthetic
uucccacaaaguuaaagc

SEQ ID NO: 274445 - RNA, 19 nt, Artificial Sequence
  Synthetic
cuucccacaaaguuaaagc

SEQ ID NO: 274446 - RNA, 20 nt, Artificial Sequence
  Synthetic
ucuucccacaaaguuaaagc

SEQ ID NO: 274447 - RNA, 21 nt, Artificial Sequence
  Synthetic
aucuucccacaaaguuaaagc
